United States Patent Application Publication US 2007/0048756 A1 - sequence listing, part 14

SEQ ID NO: 472002 - DNA, 33 bp, Homo sapien
tttgattccaatcccagtaattcatcctatctg

SEQ ID NO: 472003 - DNA, 33 bp, Homo sapien
aaccaccatggtccaaacagggatccttctcat

SEQ ID NO: 472004 - DNA, 33 bp, Homo sapien
aaccaccatggtccaaccagggatccttctcat

SEQ ID NO: 472005 - DNA, 33 bp, Homo sapien
ataactaaatacaaaaccatgccaggtctctca

SEQ ID NO: 472006 - DNA, 33 bp, Homo sapien
ataactaaatacaaaatcatgccaggtctctca

SEQ ID NO: 472007 - DNA, 33 bp, Homo sapien
ctctccctttgtctcacattgtctgtctaccaa

SEQ ID NO: 472008 - DNA, 33 bp, Homo sapien
ctctccctttgtctcatattgtctgtctaccaa

SEQ ID NO: 472009 - DNA, 33 bp, Homo sapien
tatcaaaacaacttgacgcaatagtttcaggtc

SEQ ID NO: 472010 - DNA, 33 bp, Homo sapien
tatcaaaacaacttgaggcaatagtttcaggtc

SEQ ID NO: 472011 - DNA, 33 bp, Homo sapien
tgttgcagctgtgatacggcaaaggacaggcta

SEQ ID NO: 472012 - DNA, 33 bp, Homo sapien
tgttgcagctgtgatatggcaaaggacaggcta

SEQ ID NO: 472013 - DNA, 33 bp, Homo sapien
tcctggtagagatgaaacttgtgagggctgtgg

SEQ ID NO: 472014 - DNA, 33 bp, Homo sapien
tcctggtagagatgaaccttgtgagggctgtgg

SEQ ID NO: 472015 - DNA, 33 bp, Homo sapien
caatgagcaaaattccaaggctgacatttaaga

SEQ ID NO: 472016 - DNA, 33 bp, Homo sapien
caatgagcaaaattcccaggctgacatttaaga

SEQ ID NO: 472017 - DNA, 33 bp, Homo sapien
gtggtttttgtactaacgtgaaagttttcctca

SEQ ID NO: 472018 - DNA, 33 bp, Homo sapien
gtggtttttgtactaatgtgaaagttttcctca

SEQ ID NO: 472019 - DNA, 33 bp, Homo sapien
ccatggattttacctacatggaaagggtcagaa

SEQ ID NO: 472020 - DNA, 33 bp, Homo sapien
ccatggattttacctatatggaaagggtcagaa

SEQ ID NO: 472021 - DNA, 33 bp, Homo sapien
gaaacaggaatagagaaggctaagtttaaagct

SEQ ID NO: 472022 - DNA, 33 bp, Homo sapien
gaaacaggaatagagagggctaagtttaaagct

SEQ ID NO: 472023 - DNA, 33 bp, Homo sapien
ttcccactggatcaccaagaaaacttcactcct

SEQ ID NO: 472024 - DNA, 33 bp, Homo sapien
ttcccactggatcaccgagaaaacttcactcct

SEQ ID NO: 472025 - DNA, 33 bp, Homo sapien
ttctgttcaaatctgccccaggcatgtacaaat

SEQ ID NO: 472026 - DNA, 33 bp, Homo sapien
ttctgttcaaatctgctccaggcatgtacaaat

SEQ ID NO: 472027 - DNA, 33 bp, Homo sapien
gtgtgtgtgattcgtgcataagctacagaagtc

SEQ ID NO: 472028 - DNA, 33 bp, Homo sapien
gtgtgtgtgattcgtgtataagctacagaagtc

SEQ ID NO: 472029 - DNA, 33 bp, Homo sapien
agacagttcgcaaaaaaagctagtaactgaaag

SEQ ID NO: 472030 - DNA, 33 bp, Homo sapien
agacagttcgcaaaaatagctagtaactgaaag

SEQ ID NO: 472031 - DNA, 33 bp, Homo sapien
aatgaacggagaaccactgaataaatgaatgaa

SEQ ID NO: 472032 - DNA, 33 bp, Homo sapien
aatgaacggagaaccattgaataaatgaatgaa

SEQ ID NO: 472033 - DNA, 33 bp, Homo sapien
ttttctgaaagttccaaagaagacccctggaaa

SEQ ID NO: 472034 - DNA, 33 bp, Homo sapien
ttttctgaaagttccagagaagacccctggaaa

SEQ ID NO: 472035 - DNA, 33 bp, Homo sapien
accactcccagtccaacagtaaatttttttttt

SEQ ID NO: 472036 - DNA, 33 bp, Homo sapien
accactcccagtccaagagtaaatttttttttt

SEQ ID NO: 472037 - DNA, 33 bp, Homo sapien
cccagaaccatttccaagttgtttctaccagga

SEQ ID NO: 472038 - DNA, 33 bp, Homo sapien
cccagaaccatttccaggttgtttctaccagga

SEQ ID NO: 472039 - DNA, 33 bp, Homo sapien
ttgcccatggtattaacgctcattggtcaagtc

SEQ ID NO: 472040 - DNA, 33 bp, Homo sapien
ttgcccatggtattaaggctcattggtcaagtc

SEQ ID NO: 472041 - DNA, 33 bp, Homo sapien
agagcacagctaaaaaaggcagagaaaggattt

SEQ ID NO: 472042 - DNA, 33 bp, Homo sapien
agagcacagctaaaaagggcagagaaaggattt

SEQ ID NO: 472043 - DNA, 33 bp, Homo sapien
ttagatatgtctggcaagtagtaggcttttata

SEQ ID NO: 472044 - DNA, 33 bp, Homo sapien
ttagatatgtctggcacgtagtaggcttttata

SEQ ID NO: 472045 - DNA, 33 bp, Homo sapien
tttggctttagcttcaactctctgataaacttt

SEQ ID NO: 472046 - DNA, 33 bp, Homo sapien
tttggctttagcttcagctctctgataaacttt

SEQ ID NO: 472047 - DNA, 33 bp, Homo sapien
gcttctccttgtgtcaatagggggtttaggctt

SEQ ID NO: 472048 - DNA, 33 bp, Homo sapien
gcttctccttgtgtcagtagggggtttaggctt

SEQ ID NO: 472049 - DNA, 33 bp, Homo sapien
gaggatgattgctccactcgttcaaccaaataa

SEQ ID NO: 472050 - DNA, 33 bp, Homo sapien
gaggatgattgctccattcgttcaaccaaataa

SEQ ID NO: 472051 - DNA, 33 bp, Homo sapien
taagaggaatttgacaaacatgtacctttctgc

SEQ ID NO: 472052 - DNA, 33 bp, Homo sapien
taagaggaatttgacacacatgtacctttctgc

SEQ ID NO: 472053 - DNA, 33 bp, Homo sapien
ggagtgaaagctgtaacaaagctacctgacatg

SEQ ID NO: 472054 - DNA, 33 bp, Homo sapien
ggagtgaaagctgtaagaaagctacctgacatg

SEQ ID NO: 472055 - DNA, 33 bp, Homo sapien
acatagcagacctcaactaattcattttagcac

SEQ ID NO: 472056 - DNA, 33 bp, Homo sapien
acatagcagacctcaattaattcattttagcac

SEQ ID NO: 472057 - DNA, 33 bp, Homo sapien
ggatgcttccagagaaagaaacatagcctaaga

SEQ ID NO: 472058 - DNA, 33 bp, Homo sapien
ggatgcttccagagaatgaaacatagcctaaga

SEQ ID NO: 472059 - DNA, 33 bp, Homo sapien
acttctctccagaaccaaccaaaagaaaagaga

SEQ ID NO: 472060 - DNA, 33 bp, Homo sapien
acttctctccagaaccgaccaaaagaaaagaga

SEQ ID NO: 472061 - DNA, 33 bp, Homo sapien
tgttgtaccttgtcacaaaaaaattacattgca

SEQ ID NO: 472062 - DNA, 33 bp, Homo sapien
tgttgtaccttgtcacgaaaaaattacattgca

SEQ ID NO: 472063 - DNA, 33 bp, Homo sapien
aggtggaacctcacatcaagaaaaaaatgggga

SEQ ID NO: 472064 - DNA, 33 bp, Homo sapien
aggtggaacctcacatgaagaaaaaaatgggga

SEQ ID NO: 472065 - DNA, 33 bp, Homo sapien
agagagagccttgatcacagttgcaatttggaa

SEQ ID NO: 472066 - DNA, 33 bp, Homo sapien
agagagagccttgatcgcagttgcaatttggaa

SEQ ID NO: 472067 - DNA, 33 bp, Homo sapien
tttcaagtaagtacaaaaatggcccgagagagt

SEQ ID NO: 472068 - DNA, 33 bp, Homo sapien
tttcaagtaagtacaagaatggcccgagagagt

SEQ ID NO: 472069 - DNA, 33 bp, Homo sapien
agtgaccacctgttgacagacacctagtcctaa

SEQ ID NO: 472070 - DNA, 33 bp, Homo sapien
agtgaccacctgttgatagacacctagtcctaa

SEQ ID NO: 472071 - DNA, 33 bp, Homo sapien
attcaaatatcgtaaagaacttatgtacaggat

SEQ ID NO: 472072 - DNA, 33 bp, Homo sapien
attcaaatatcgtaaataacttatgtacaggat

SEQ ID NO: 472073 - DNA, 33 bp, Homo sapien
ttgtcaggacttgaacaagtttgaggactttag

SEQ ID NO: 472074 - DNA, 33 bp, Homo sapien
ttgtcaggacttgaacgagtttgaggactttag

SEQ ID NO: 472075 - DNA, 33 bp, Homo sapien
ttccccatctataccgcacaaatcattctcatt

SEQ ID NO: 472076 - DNA, 33 bp, Homo sapien
ttccccatctataccgtacaaatcattctcatt

SEQ ID NO: 472077 - DNA, 33 bp, Homo sapien
cagagaactgatgaccacttaacaggaatgtca

SEQ ID NO: 472078 - DNA, 33 bp, Homo sapien
cagagaactgatgaccgcttaacaggaatgtca

SEQ ID NO: 472079 - DNA, 33 bp, Homo sapien
agtaataactggaacacggcatgagcctctcag

SEQ ID NO: 472080 - DNA, 33 bp, Homo sapien
agtaataactggaacatggcatgagcctctcag

SEQ ID NO: 472081 - DNA, 33 bp, Homo sapien
aagaattcttcccctaaagcaatctgtaagaaa

SEQ ID NO: 472082 - DNA, 33 bp, Homo sapien
aagaattcttcccctagagcaatctgtaagaaa

SEQ ID NO: 472083 - DNA, 33 bp, Homo sapien
ataaagttaaaacatcacacatcttcaatggaa

SEQ ID NO: 472084 - DNA, 33 bp, Homo sapien
ataaagttaaaacatcgcacatcttcaatggaa

SEQ ID NO: 472085 - DNA, 33 bp, Homo sapien
cctctaggctgtgagcaattcagcttcaggaac

SEQ ID NO: 472086 - DNA, 33 bp, Homo sapien
cctctaggctgtgagcgattcagcttcaggaac

SEQ ID NO: 472087 - DNA, 33 bp, Homo sapien
tcaccctcaaggactcactctctactaagcagg

SEQ ID NO: 472088 - DNA, 33 bp, Homo sapien
tcaccctcaaggactcgctctctactaagcagg

SEQ ID NO: 472089 - DNA, 33 bp, Homo sapien
ttttttttcatttctaccacatccaagacaaat

SEQ ID NO: 472090 - DNA, 33 bp, Homo sapien
ttttttttcatttctatcacatccaagacaaat

SEQ ID NO: 472091 - DNA, 33 bp, Homo sapien
tgggctatgataataacggaccctaggatatat

SEQ ID NO: 472092 - DNA, 33 bp, Homo sapien
tgggctatgataataatggaccctaggatatat

SEQ ID NO: 472093 - DNA, 33 bp, Homo sapien
ctgtgactctcgggaaacttgttagaagagaat

SEQ ID NO: 472094 - DNA, 33 bp, Homo sapien
ctgtgactctcgggaaccttgttagaagagaat

SEQ ID NO: 472095 - DNA, 33 bp, Homo sapien
tctctgtgaaaactaccgcaatatggttcaagc

SEQ ID NO: 472096 - DNA, 33 bp, Homo sapien
tctctgtgaaaactacggcaatatggttcaagc

SEQ ID NO: 472097 - DNA, 33 bp, Homo sapien
tgcacgatgatgttcactatggaattttttatg

SEQ ID NO: 472098 - DNA, 33 bp, Homo sapien
tgcacgatgatgttcattatggaattttttatg

SEQ ID NO: 472099 - DNA, 33 bp, Homo sapien
aggggcttcggaaccacgaagagagcttttccc

SEQ ID NO: 472100 - DNA, 33 bp, Homo sapien
aggggcttcggaaccatgaagagagcttttccc

SEQ ID NO: 472101 - DNA, 33 bp, Homo sapien
acttacacatttgtagacactgttacagcggca

SEQ ID NO: 472102 - DNA, 33 bp, Homo sapien
acttacacatttgtaggcactgttacagcggca

SEQ ID NO: 472103 - DNA, 33 bp, Homo sapien
gccagttccaactgaaaggaaggatctgagaag

SEQ ID NO: 472104 - DNA, 33 bp, Homo sapien
gccagttccaactgaacggaaggatctgagaag

SEQ ID NO: 472105 - DNA, 33 bp, Homo sapien
gctagaaggtgtactacacattttatatgcatg

SEQ ID NO: 472106 - DNA, 33 bp, Homo sapien
gctagaaggtgtactagacattttatatgcatg

SEQ ID NO: 472107 - DNA, 33 bp, Homo sapien
ttacagtagaaagacacaatccctgcaaggtta

SEQ ID NO: 472108 - DNA, 33 bp, Homo sapien
ttacagtagaaagacagaatccctgcaaggtta

SEQ ID NO: 472109 - DNA, 33 bp, Homo sapien
acccctctgagagtcaaggtctgcatttgcaag

SEQ ID NO: 472110 - DNA, 33 bp, Homo sapien
acccctctgagagtcagggtctgcatttgcaag

SEQ ID NO: 472111 - DNA, 33 bp, Homo sapien
atagaaacagtaaaaaattaattcagtctttct

SEQ ID NO: 472112 - DNA, 33 bp, Homo sapien
atagaaacagtaaaaagttaattcagtctttct

SEQ ID NO: 472113 - DNA, 33 bp, Homo sapien
ggtgcaggagcaacaaagtgtgaaaagtacaca

SEQ ID NO: 472114 - DNA, 33 bp, Homo sapien
ggtgcaggagcaacaatgtgtgaaaagtacaca

SEQ ID NO: 472115 - DNA, 33 bp, Homo sapien
cttctgtgtcgtgatgccaggtgggtttgcaga

SEQ ID NO: 472116 - DNA, 33 bp, Homo sapien
cttctgtgtcgtgatgtcaggtgggtttgcaga

SEQ ID NO: 472117 - DNA, 33 bp, Homo sapien
cgaccaccttgtgttccctaagacagcaaacat

SEQ ID NO: 472118 - DNA, 33 bp, Homo sapien
cgaccaccttgtgttctctaagacagcaaacat

SEQ ID NO: 472119 - DNA, 33 bp, Homo sapien
accaagctcgtggcaacctgccagttccaaact

SEQ ID NO: 472120 - DNA, 33 bp, Homo sapien
accaagctcgtggcaatctgccagttccaaact

SEQ ID NO: 472121 - DNA, 33 bp, Homo sapien
ctaacctacacatcaccggcagattaaattcac

SEQ ID NO: 472122 - DNA, 33 bp, Homo sapien
ctaacctacacatcactggcagattaaattcac

SEQ ID NO: 472123 - DNA, 33 bp, Homo sapien
aaatcttccgccactccacccggcagctgtcca

SEQ ID NO: 472124 - DNA, 33 bp, Homo sapien
aaatcttccgccactctacccggcagctgtcca

SEQ ID NO: 472125 - DNA, 33 bp, Homo sapien
gctattaaatattgtccatgttgaaagcaaata

SEQ ID NO: 472126 - DNA, 33 bp, Homo sapien
gctattaaatattgtctatgttgaaagcaaata

SEQ ID NO: 472127 - DNA, 33 bp, Homo sapien
ttgccatcctcagagcaagaaatgcaaagagat

SEQ ID NO: 472128 - DNA, 33 bp, Homo sapien
ttgccatcctcagagccagaaatgcaaagagat

SEQ ID NO: 472129 - DNA, 33 bp, Homo sapien
tggtcattactgcccaatgcttagctccaagcc

SEQ ID NO: 472130 - DNA, 33 bp, Homo sapien
tggtcattactgcccagtgcttagctccaagcc

SEQ ID NO: 472131 - DNA, 33 bp, Homo sapien
cctcctcacagattacagagatgacccagtgac

SEQ ID NO: 472132 - DNA, 33 bp, Homo sapien
cctcctcacagattacggagatgacccagtgac

SEQ ID NO: 472133 - DNA, 33 bp, Homo sapien
aatcaatccagggagccattgttgaccaccaac

SEQ ID NO: 472134 - DNA, 33 bp, Homo sapien
aatcaatccagggagctattgttgaccaccaac

SEQ ID NO: 472135 - DNA, 33 bp, Homo sapien
ggctgctgtcagacgacggagacaagtgcccac

SEQ ID NO: 472136 - DNA, 33 bp, Homo sapien
ggctgctgtcagacgatggagacaagtgcccac

SEQ ID NO: 472137 - DNA, 33 bp, Homo sapien
atcaaaaagaagcctacggcacgtccatgtgga

SEQ ID NO: 472138 - DNA, 33 bp, Homo sapien
atcaaaaagaagcctagggcacgtccatgtgga

SEQ ID NO: 472139 - DNA, 33 bp, Homo sapien
gaggggattgttgaccgccatgacaaagcaatg

SEQ ID NO: 472140 - DNA, 33 bp, Homo sapien
gaggggattgttgacctccatgacaaagcaatg

SEQ ID NO: 472141 - DNA, 33 bp, Homo sapien
tgctgaaatgatggaaagagagtgtgtgaagag

SEQ ID NO: 472142 - DNA, 33 bp, Homo sapien
tgctgaaatgatggaaggagagtgtgtgaagag

SEQ ID NO: 472143 - DNA, 33 bp, Homo sapien
gtgagaatgaaagctacgtaaagtgggcagttg

SEQ ID NO: 472144 - DNA, 33 bp, Homo sapien
gtgagaatgaaagctatgtaaagtgggcagttg

SEQ ID NO: 472145 - DNA, 33 bp, Homo sapien
aaagcgggcatgagaaaaatcctacacaaaatg

SEQ ID NO: 472146 - DNA, 33 bp, Homo sapien
aaagcgggcatgagaagaatcctacacaaaatg

SEQ ID NO: 472147 - DNA, 33 bp, Homo sapien
aagtgctgcttggaaacgatgcttaaaagatgc

SEQ ID NO: 472148 - DNA, 33 bp, Homo sapien
aagtgctgcttggaaatgatgcttaaaagatgc

SEQ ID NO: 472149 - DNA, 33 bp, Homo sapien
tgctctatattgtcacgctgggcttgagaactg

SEQ ID NO: 472150 - DNA, 33 bp, Homo sapien
tgctctatattgtcactctgggcttgagaactg

SEQ ID NO: 472151 - DNA, 33 bp, Homo sapien
tggcatgtagtgcacaagtcaacaaatagtcag

SEQ ID NO: 472152 - DNA, 33 bp, Homo sapien
tggcatgtagtgcacaggtcaacaaatagtcag

SEQ ID NO: 472153 - DNA, 33 bp, Homo sapien
ctgagcagaggcctagcaacattaggtgactca

SEQ ID NO: 472154 - DNA, 33 bp, Homo sapien
ctgagcagaggcctagtaacattaggtgactca

SEQ ID NO: 472155 - DNA, 33 bp, Homo sapien
gctgctctccttttaacaatctggaaggtgctt

SEQ ID NO: 472156 - DNA, 33 bp, Homo sapien
gctgctctccttttaagaatctggaaggtgctt

SEQ ID NO: 472157 - DNA, 33 bp, Homo sapien
tctgtgcagcttgaccaactacattttctgttt

SEQ ID NO: 472158 - DNA, 33 bp, Homo sapien
tctgtgcagcttgaccgactacattttctgttt

SEQ ID NO: 472159 - DNA, 33 bp, Homo sapien
tccccacaagcaacttcaaatggtttgtctatg

SEQ ID NO: 472160 - DNA, 33 bp, Homo sapien
tccccacaagcaactttaaatggtttgtctatg

SEQ ID NO: 472161 - DNA, 33 bp, Homo sapien
acattaaaatgcacacactcttcaaatcggcaa

SEQ ID NO: 472162 - DNA, 33 bp, Homo sapien
acattaaaatgcacacgctcttcaaatcggcaa

SEQ ID NO: 472163 - DNA, 33 bp, Homo sapien
tgtgtttcatgtaatagagggagatgtgaacta

SEQ ID NO: 472164 - DNA, 33 bp, Homo sapien
tgtgtttcatgtaatatagggagatgtgaacta

SEQ ID NO: 472165 - DNA, 33 bp, Homo sapien
tgaatcatgattttgaaggttacacaggcgttt

SEQ ID NO: 472166 - DNA, 33 bp, Homo sapien
tgaatcatgattttgagggttacacaggcgttt

SEQ ID NO: 472167 - DNA, 33 bp, Homo sapien
ggcatatgtgtgagaaaaccaccaagagacaga

SEQ ID NO: 472168 - DNA, 33 bp, Homo sapien
ggcatatgtgtgagaagaccaccaagagacaga

SEQ ID NO: 472169 - DNA, 33 bp, Homo sapien
ctaactggggcataagaaaggagctgtgtaacg

SEQ ID NO: 472170 - DNA, 33 bp, Homo sapien
ctaactggggcataagtaaggagctgtgtaacg

SEQ ID NO: 472171 - DNA, 33 bp, Homo sapien
aaacagccctacagaaccattcccagagccccc

SEQ ID NO: 472172 - DNA, 33 bp, Homo sapien
aaacagccctacagaatcattcccagagccccc

SEQ ID NO: 472173 - DNA, 33 bp, Homo sapien
tatacagaatcatcaaatccttttcaattatca

SEQ ID NO: 472174 - DNA, 33 bp, Homo sapien
tatacagaatcatcaagtccttttcaattatca

SEQ ID NO: 472175 - DNA, 33 bp, Homo sapien
ctcggcggtcacttccacgcagggcagaccccg

SEQ ID NO: 472176 - DNA, 33 bp, Homo sapien
ctcggcggtcacttccgcgcagggcagaccccg

SEQ ID NO: 472177 - DNA, 33 bp, Homo sapien
aaatggatgagaacaacatataataactgtatt

SEQ ID NO: 472178 - DNA, 33 bp, Homo sapien
aaatggatgagaacaatatataataactgtatt

SEQ ID NO: 472179 - DNA, 33 bp, Homo sapien
aaatcagtcgataaacaaaatattaaaatcact

SEQ ID NO: 472180 - DNA, 33 bp, Homo sapien
aaatcagtcgataaacgaaatattaaaatcact

SEQ ID NO: 472181 - DNA, 33 bp, Homo sapien
ccccagatgctttccacgtgcacctgtcaatca

SEQ ID NO: 472182 - DNA, 33 bp, Homo sapien
ccccagatgctttccatgtgcacctgtcaatca

SEQ ID NO: 472183 - DNA, 33 bp, Homo sapien
aggtaattagaccttccctggcaataccattta

SEQ ID NO: 472184 - DNA, 33 bp, Homo sapien
aggtaattagaccttctctggcaataccattta

SEQ ID NO: 472185 - DNA, 33 bp, Homo sapien
catgcaacatcatataactgcagaaaacaagcc

SEQ ID NO: 472186 - DNA, 33 bp, Homo sapien
catgcaacatcatatatctgcagaaaacaagcc

SEQ ID NO: 472187 - DNA, 33 bp, Homo sapien
ttgacatcctgaagaacaagcatactatatctt

SEQ ID NO: 472188 - DNA, 33 bp, Homo sapien
ttgacatcctgaagaagaagcatactatatctt

SEQ ID NO: 472189 - DNA, 33 bp, Homo sapien
gagcccaacctatgacaagctccgatcccttct

SEQ ID NO: 472190 - DNA, 33 bp, Homo sapien
gagcccaacctatgacgagctccgatcccttct

SEQ ID NO: 472191 - DNA, 33 bp, Homo sapien
gggcgaatgggaaataaagttggaaaagtcact

SEQ ID NO: 472192 - DNA, 33 bp, Homo sapien
gggcgaatgggaaatacagttggaaaagtcact

SEQ ID NO: 472193 - DNA, 33 bp, Homo sapien
tatattactttctcaactgagagtgaagccatg

SEQ ID NO: 472194 - DNA, 33 bp, Homo sapien
tatattactttctcaagtgagagtgaagccatg

SEQ ID NO: 472195 - DNA, 33 bp, Homo sapien
gatgtcaggcaccaaacaaactcagcagatgtt

SEQ ID NO: 472196 - DNA, 33 bp, Homo sapien
gatgtcaggcaccaaataaactcagcagatgtt

SEQ ID NO: 472197 - DNA, 33 bp, Homo sapien
ctgtagtgatgtgttcaataaaaagtggccagc

SEQ ID NO: 472198 - DNA, 33 bp, Homo sapien
ctgtagtgatgtgttcgataaaaagtggccagc

SEQ ID NO: 472199 - DNA, 33 bp, Homo sapien
tctttattaggctttcaacatttaagaaaactg

SEQ ID NO: 472200 - DNA, 33 bp, Homo sapien
tctttattaggctttcgacatttaagaaaactg

SEQ ID NO: 472201 - DNA, 33 bp, Homo sapien
catctatttaagaataacatcgcttcgccttat

SEQ ID NO: 472202 - DNA, 33 bp, Homo sapien
catctatttaagaatagcatcgcttcgccttat

SEQ ID NO: 472203 - DNA, 33 bp, Homo sapien
cacctctttgaacctaagtctattttgtagaaa

SEQ ID NO: 472204 - DNA, 33 bp, Homo sapien
cacctctttgaacctatgtctattttgtagaaa

SEQ ID NO: 472205 - DNA, 33 bp, Homo sapien
aagaaatctattaaagcacaaagcactgctgtc

SEQ ID NO: 472206 - DNA, 33 bp, Homo sapien
aagaaatctattaaagtacaaagcactgctgtc

SEQ ID NO: 472207 - DNA, 33 bp, Homo sapien
atcaaaaggtgttgcaaggcctacagcaggaac

SEQ ID NO: 472208 - DNA, 33 bp, Homo sapien
atcaaaaggtgttgcagggcctacagcaggaac

SEQ ID NO: 472209 - DNA, 33 bp, Homo sapien
gataagcaaaggccaccccttaggaaagcactc

SEQ ID NO: 472210 - DNA, 33 bp, Homo sapien
gataagcaaaggccactccttaggaaagcactc

SEQ ID NO: 472211 - DNA, 33 bp, Homo sapien
tctgaggttaaagaagaatgcttttctgaaaat

SEQ ID NO: 472212 - DNA, 33 bp, Homo sapien
tctgaggttaaagaaggatgcttttctgaaaat

SEQ ID NO: 472213 - DNA, 33 bp, Homo sapien
agaaataatacagagcaatttctggtgcacttt

SEQ ID NO: 472214 - DNA, 33 bp, Homo sapien
agaaataatacagagcgatttctggtgcacttt

SEQ ID NO: 472215 - DNA, 33 bp, Homo sapien
tttgttagatttatgacgtagttgtttcttcaa

SEQ ID NO: 472216 - DNA, 33 bp, Homo sapien
tttgttagatttatgatgtagttgtttcttcaa

SEQ ID NO: 472217 - DNA, 33 bp, Homo sapien
gggcactggtagaggaaatagaataactgggga

SEQ ID NO: 472218 - DNA, 33 bp, Homo sapien
gggcactggtagaggagatagaataactgggga

SEQ ID NO: 472219 - DNA, 33 bp, Homo sapien
atttaaagcaaggaacacattgttcataaagag

SEQ ID NO: 472220 - DNA, 33 bp, Homo sapien
atttaaagcaaggaacccattgttcataaagag

SEQ ID NO: 472221 - DNA, 33 bp, Homo sapien
agaaggtgaaactgaccgaggtcgagaatttaa

SEQ ID NO: 472222 - DNA, 33 bp, Homo sapien
agaaggtgaaactgactgaggtcgagaatttaa

SEQ ID NO: 472223 - DNA, 33 bp, Homo sapien
gctctattgccggtacagggcatagaagttaga

SEQ ID NO: 472224 - DNA, 33 bp, Homo sapien
gctctattgccggtacggggcatagaagttaga

SEQ ID NO: 472225 - DNA, 33 bp, Homo sapien
gaattagacagcttcaagccttcatcaaaagtg

SEQ ID NO: 472226 - DNA, 33 bp, Homo sapien
gaattagacagcttcaggccttcatcaaaagtg

SEQ ID NO: 472227 - DNA, 33 bp, Homo sapien
agtgaatttctagccacgtttacagaagaatcc

SEQ ID NO: 472228 - DNA, 33 bp, Homo sapien
agtgaatttctagccatgtttacagaagaatcc

SEQ ID NO: 472229 - DNA, 33 bp, Homo sapien
tagaaattcactaagacgaaatactgcctttta

SEQ ID NO: 472230 - DNA, 33 bp, Homo sapien
tagaaattcactaagatgaaatactgcctttta

SEQ ID NO: 472231 - DNA, 33 bp, Homo sapien
ttcttatccatatgacccctttgtgacttcaca

SEQ ID NO: 472232 - DNA, 33 bp, Homo sapien
ttcttatccatatgactcctttgtgacttcaca

SEQ ID NO: 472233 - DNA, 33 bp, Homo sapien
atacttaagtgctgatcaccatgtctttacagg

SEQ ID NO: 472234 - DNA, 33 bp, Homo sapien
atacttaagtgctgattaccatgtctttacagg

SEQ ID NO: 472235 - DNA, 33 bp, Homo sapien
gtctctaaaatgaagaaatgagaagacagtggt

SEQ ID NO: 472236 - DNA, 33 bp, Homo sapien
gtctctaaaatgaagagatgagaagacagtggt

SEQ ID NO: 472237 - DNA, 33 bp, Homo sapien
tgttaagccacttggcaccgttgatatggggaa

SEQ ID NO: 472238 - DNA, 33 bp, Homo sapien
tgttaagccacttggcgccgttgatatggggaa

SEQ ID NO: 472239 - DNA, 33 bp, Homo sapien
caaaaacagtagctcacgaccgcaagatgtctc

SEQ ID NO: 472240 - DNA, 33 bp, Homo sapien
caaaaacagtagctcatgaccgcaagatgtctc

SEQ ID NO: 472241 - DNA, 33 bp, Homo sapien
gtcaggattcacatacaggcgcgctcctaaact

SEQ ID NO: 472242 - DNA, 33 bp, Homo sapien
gtcaggattcacatacgggcgcgctcctaaact

SEQ ID NO: 472243 - DNA, 33 bp, Homo sapien
gcaagtccactagaatgagggaccatatctcaa

SEQ ID NO: 472244 - DNA, 33 bp, Homo sapien
gcaagtccactagaattagggaccatatctcaa

SEQ ID NO: 472245 - DNA, 33 bp, Homo sapien
gtttgtccaaaccatgaaaattctaaggacagc

SEQ ID NO: 472246 - DNA, 33 bp, Homo sapien
gtttgtccaaaccatgcaaattctaaggacagc

SEQ ID NO: 472247 - DNA, 33 bp, Homo sapien
aaattctaaggacagcagataatacggtttggt

SEQ ID NO: 472248 - DNA, 33 bp, Homo sapien
aaattctaaggacagccgataatacggtttggt

SEQ ID NO: 472249 - DNA, 33 bp, Homo sapien
ttcacttggaagaaaacgtaagcaaaagtagcc

SEQ ID NO: 472250 - DNA, 33 bp, Homo sapien
ttcacttggaagaaaatgtaagcaaaagtagcc

SEQ ID NO: 472251 - DNA, 33 bp, Homo sapien
tgtttttcttgaagtcacagtctcgctttgttc

SEQ ID NO: 472252 - DNA, 33 bp, Homo sapien
tgtttttcttgaagtcgcagtctcgctttgttc

SEQ ID NO: 472253 - DNA, 33 bp, Homo sapien
tactgcaaccaaaacaacaacagactgaatgca

SEQ ID NO: 472254 - DNA, 33 bp, Homo sapien
tactgcaaccaaaacagcaacagactgaatgca

SEQ ID NO: 472255 - DNA, 33 bp, Homo sapien
ttacaattagggagtaggaaactcatcacgtaa

SEQ ID NO: 472256 - DNA, 33 bp, Homo sapien
ttacaattagggagtatgaaactcatcacgtaa

SEQ ID NO: 472257 - DNA, 33 bp, Homo sapien
ccactttttatgctcaaaatgttttcagacatt

SEQ ID NO: 472258 - DNA, 33 bp, Homo sapien
ccactttttatgctcacaatgttttcagacatt

SEQ ID NO: 472259 - DNA, 33 bp, Homo sapien
gggcaaggggcagatgcactacactactagcat

SEQ ID NO: 472260 - DNA, 33 bp, Homo sapien
gggcaaggggcagatgtactacactactagcat

SEQ ID NO: 472261 - DNA, 33 bp, Homo sapien
aggttattgaactgcaactttgttattgagaac

SEQ ID NO: 472262 - DNA, 33 bp, Homo sapien
aggttattgaactgcacctttgttattgagaac

SEQ ID NO: 472263 - DNA, 33 bp, Homo sapien
cttaaagtacctttcacgttcattctgctgttt

SEQ ID NO: 472264 - DNA, 33 bp, Homo sapien
cttaaagtacctttcatgttcattctgctgttt

SEQ ID NO: 472265 - DNA, 33 bp, Homo sapien
ggcttaactctgctcaataataagctggaaatc

SEQ ID NO: 472266 - DNA, 33 bp, Homo sapien
ggcttaactctgctcattaataagctggaaatc

SEQ ID NO: 472267 - DNA, 33 bp, Homo sapien
ttctttgaaccagacactgccttatgaattaga

SEQ ID NO: 472268 - DNA, 33 bp, Homo sapien
ttctttgaaccagacattgccttatgaattaga

SEQ ID NO: 472269 - DNA, 33 bp, Homo sapien
atggcacttaagcagaatacaactacatttaga

SEQ ID NO: 472270 - DNA, 33 bp, Homo sapien
atggcacttaagcagactacaactacatttaga

SEQ ID NO: 472271 - DNA, 33 bp, Homo sapien
agtttacagtaggccaatagatttctcagaaat

SEQ ID NO: 472272 - DNA, 33 bp, Homo sapien
agtttacagtaggccagtagatttctcagaaat

SEQ ID NO: 472273 - DNA, 33 bp, Homo sapien
ctctaaatcccctgaaatagtatgcttaatatt

SEQ ID NO: 472274 - DNA, 33 bp, Homo sapien
ctctaaatcccctgaagtagtatgcttaatatt

SEQ ID NO: 472275 - DNA, 33 bp, Homo sapien
gaaaggtgggtcagcacgatgtcccaaagagga

SEQ ID NO: 472276 - DNA, 33 bp, Homo sapien
gaaaggtgggtcagcaggatgtcccaaagagga

SEQ ID NO: 472277 - DNA, 33 bp, Homo sapien
gtttaacatcatatccacttggtgctgtcgttg

SEQ ID NO: 472278 - DNA, 33 bp, Homo sapien
gtttaacatcatatccgcttggtgctgtcgttg

SEQ ID NO: 472279 - DNA, 33 bp, Homo sapien
gtaagcgagactctgcactataggtacagggac

SEQ ID NO: 472280 - DNA, 33 bp, Homo sapien
gtaagcgagactctgcgctataggtacagggac

SEQ ID NO: 472281 - DNA, 33 bp, Homo sapien
gcattttctaaccagccacctatattccaaatg

SEQ ID NO: 472282 - DNA, 33 bp, Homo sapien
gcattttctaaccagctacctatattccaaatg

SEQ ID NO: 472283 - DNA, 33 bp, Homo sapien
ctgaccagtaggaggacaagtaagagtttcctt

SEQ ID NO: 472284 - DNA, 33 bp, Homo sapien
ctgaccagtaggaggataagtaagagtttcctt

SEQ ID NO: 472285 - DNA, 33 bp, Homo sapien
ggaaaagatgtgagagcaaaagattcttcaaga

SEQ ID NO: 472286 - DNA, 33 bp, Homo sapien
ggaaaagatgtgagagtaaaagattcttcaaga

SEQ ID NO: 472287 - DNA, 33 bp, Homo sapien
attaaagaagttagcccagtgtaatggcatgcg

SEQ ID NO: 472288 - DNA, 33 bp, Homo sapien
attaaagaagttagccgagtgtaatggcatgcg

SEQ ID NO: 472289 - DNA, 33 bp, Homo sapien
gtatgtctctagaaataaatgaggatcaacaca

SEQ ID NO: 472290 - DNA, 33 bp, Homo sapien
gtatgtctctagaaatgaatgaggatcaacaca

SEQ ID NO: 472291 - DNA, 33 bp, Homo sapien
tgtaatcacattgtaaatcaaggcacatcttca

SEQ ID NO: 472292 - DNA, 33 bp, Homo sapien
tgtaatcacattgtaagtcaaggcacatcttca

SEQ ID NO: 472293 - DNA, 33 bp, Homo sapien
tagtcaaactaaactgaatgtgttaggaaggta

SEQ ID NO: 472294 - DNA, 33 bp, Homo sapien
tagtcaaactaaactgtatgtgttaggaaggta

SEQ ID NO: 472295 - DNA, 33 bp, Homo sapien
atatattggaagaccacagtttattattcttaa

SEQ ID NO: 472296 - DNA, 33 bp, Homo sapien
atatattggaagaccagagtttattattcttaa

SEQ ID NO: 472297 - DNA, 33 bp, Homo sapien
ctacgttcaaatttagaccttgccacttactag

SEQ ID NO: 472298 - DNA, 33 bp, Homo sapien
ctacgttcaaatttaggccttgccacttactag

SEQ ID NO: 472299 - DNA, 33 bp, Homo sapien
atctatacctgtgaacaaaatgatcaactctgt

SEQ ID NO: 472300 - DNA, 33 bp, Homo sapien
atctatacctgtgaacgaaatgatcaactctgt

SEQ ID NO: 472301 - DNA, 33 bp, Homo sapien
gaggataatcttaaccagactttgaatagtcaa

SEQ ID NO: 472302 - DNA, 33 bp, Homo sapien
gaggataatcttaaccggactttgaatagtcaa

SEQ ID NO: 472303 - DNA, 33 bp, Homo sapien
ttattttctgcatgacaaagaatctttaatttt

SEQ ID NO: 472304 - DNA, 33 bp, Homo sapien
ttattttctgcatgacgaagaatctttaatttt

SEQ ID NO: 472305 - DNA, 33 bp, Homo sapien
tctaagtctgtacaaaaaagctagatttgctac

SEQ ID NO: 472306 - DNA, 33 bp, Homo sapien
tctaagtctgtacaaagaagctagatttgctac

SEQ ID NO: 472307 - DNA, 33 bp, Homo sapien
agaaacacactgattccccattcattgactgat

SEQ ID NO: 472308 - DNA, 33 bp, Homo sapien
agaaacacactgattcgccattcattgactgat

SEQ ID NO: 472309 - DNA, 33 bp, Homo sapien
taatatcagctttgaacctgttgccttcccaaa

SEQ ID NO: 472310 - DNA, 33 bp, Homo sapien
taatatcagctttgaatctgttgccttcccaaa

SEQ ID NO: 472311 - DNA, 33 bp, Homo sapien
aacatccatgaatccacgaaaacaactaaatca

SEQ ID NO: 472312 - DNA, 33 bp, Homo sapien
aacatccatgaatccatgaaaacaactaaatca

SEQ ID NO: 472313 - DNA, 33 bp, Homo sapien
taaaacgttctggcaaataaagaataaaaataa

SEQ ID NO: 472314 - DNA, 33 bp, Homo sapien
taaaacgttctggcaagtaaagaataaaaataa

SEQ ID NO: 472315 - DNA, 33 bp, Homo sapien
cctttacagttttgcagcataaacagaaacatg

SEQ ID NO: 472316 - DNA, 33 bp, Homo sapien
cctttacagttttgcatcataaacagaaacatg

SEQ ID NO: 472317 - DNA, 33 bp, Homo sapien
ttataacagttacaaactcagaacaggtggcta

SEQ ID NO: 472318 - DNA, 33 bp, Homo sapien
ttataacagttacaaattcagaacaggtggcta

SEQ ID NO: 472319 - DNA, 33 bp, Homo sapien
tctgaatctctactcaacatatctcttcataaa

SEQ ID NO: 472320 - DNA, 33 bp, Homo sapien
tctgaatctctactcagcatatctcttcataaa

SEQ ID NO: 472321 - DNA, 33 bp, Homo sapien
agttgaatccttcaggacctcggtaaacacaga

SEQ ID NO: 472322 - DNA, 33 bp, Homo sapien
agttgaatccttcaggtcctcggtaaacacaga

SEQ ID NO: 472323 - DNA, 33 bp, Homo sapien
tgtaggtcagtaagcaccgagaatatattataa

SEQ ID NO: 472324 - DNA, 33 bp, Homo sapien
tgtaggtcagtaagcagcgagaatatattataa

SEQ ID NO: 472325 - DNA, 33 bp, Homo sapien
aagtaaacagaatttccagggcttgtacattac

SEQ ID NO: 472326 - DNA, 33 bp, Homo sapien
aagtaaacagaatttctagggcttgtacattac

SEQ ID NO: 472327 - DNA, 33 bp, Homo sapien
actagggtcatttcaaagtgtttcatatcagag

SEQ ID NO: 472328 - DNA, 33 bp, Homo sapien
actagggtcatttcaaggtgtttcatatcagag

SEQ ID NO: 472329 - DNA, 33 bp, Homo sapien
acagaaagatgagagacaaaaggtgcaaagctc

SEQ ID NO: 472330 - DNA, 33 bp, Homo sapien
acagaaagatgagagataaaaggtgcaaagctc

SEQ ID NO: 472331 - DNA, 33 bp, Homo sapien
acctacatgcctttcccgagcttatcttctcaa

SEQ ID NO: 472332 - DNA, 33 bp, Homo sapien
acctacatgcctttcctgagcttatcttctcaa

SEQ ID NO: 472333 - DNA, 33 bp, Homo sapien
tctgtgtatcctagtacgttatacatccagtgt

SEQ ID NO: 472334 - DNA, 33 bp, Homo sapien
tctgtgtatcctagtatgttatacatccagtgt

SEQ ID NO: 472335 - DNA, 33 bp, Homo sapien
tcatgtgtgatctgtacggtaattcccaggtat

SEQ ID NO: 472336 - DNA, 33 bp, Homo sapien
tcatgtgtgatctgtatggtaattcccaggtat

SEQ ID NO: 472337 - DNA, 33 bp, Homo sapien
tctctgtttgactttcacaagagtcttgaccta

SEQ ID NO: 472338 - DNA, 33 bp, Homo sapien
tctctgtttgactttcgcaagagtcttgaccta

SEQ ID NO: 472339 - DNA, 33 bp, Homo sapien
tacctagtttttcacacctttctggacacatag

SEQ ID NO: 472340 - DNA, 33 bp, Homo sapien
tacctagtttttcacatctttctggacacatag

SEQ ID NO: 472341 - DNA, 33 bp, Homo sapien
actggccagaagtgagaagaaataaagttccac

SEQ ID NO: 472342 - DNA, 33 bp, Homo sapien
actggccagaagtgaggagaaataaagttccac

SEQ ID NO: 472343 - DNA, 33 bp, Homo sapien
gttttgtccgttttaaacagtgtgaccccacct

SEQ ID NO: 472344 - DNA, 33 bp, Homo sapien
gttttgtccgttttaatcagtgtgaccccacct

SEQ ID NO: 472345 - DNA, 33 bp, Homo sapien
taaagaagaagaatcaataaggcttgaagatca

SEQ ID NO: 472346 - DNA, 33 bp, Homo sapien
taaagaagaagaatcagtaaggcttgaagatca

SEQ ID NO: 472347 - DNA, 33 bp, Homo sapien
gaagggagacgacaaccaaatgaaatttattgc

SEQ ID NO: 472348 - DNA, 33 bp, Homo sapien
gaagggagacgacaactaaatgaaatttattgc

SEQ ID NO: 472349 - DNA, 33 bp, Homo sapien
tctaacatattaaccactgaaaggccagtcttt

SEQ ID NO: 472350 - DNA, 33 bp, Homo sapien
tctaacatattaaccattgaaaggccagtcttt

SEQ ID NO: 472351 - DNA, 33 bp, Homo sapien
atttgtcataactcaccagctggtataatcaag

SEQ ID NO: 472352 - DNA, 33 bp, Homo sapien
atttgtcataactcactagctggtataatcaag

SEQ ID NO: 472353 - DNA, 33 bp, Homo sapien
gagtttttagtgtgtacggttaatgtggcagca

SEQ ID NO: 472354 - DNA, 33 bp, Homo sapien
gagtttttagtgtgtatggttaatgtggcagca

SEQ ID NO: 472355 - DNA, 33 bp, Homo sapien
ttctctctaggtggtacgaggacaaattttttt

SEQ ID NO: 472356 - DNA, 33 bp, Homo sapien
ttctctctaggtggtatgaggacaaattttttt

SEQ ID NO: 472357 - DNA, 33 bp, Homo sapien
tgaataccctggcttaccaaatctgtaatttga

SEQ ID NO: 472358 - DNA, 33 bp, Homo sapien
tgaataccctggcttatcaaatctgtaatttga

SEQ ID NO: 472359 - DNA, 33 bp, Homo sapien
tgtggtgtttcagatacatctggtcagagatac

SEQ ID NO: 472360 - DNA, 33 bp, Homo sapien
tgtggtgtttcagatagatctggtcagagatac

SEQ ID NO: 472361 - DNA, 33 bp, Homo sapien
cgcgggacaataggagaaaagtgagcatagcag

SEQ ID NO: 472362 - DNA, 33 bp, Homo sapien
cgcgggacaataggagtaaagtgagcatagcag

SEQ ID NO: 472363 - DNA, 33 bp, Homo sapien
cagctagaacagtctccgaaggaagcaaagggc

SEQ ID NO: 472364 - DNA, 33 bp, Homo sapien
cagctagaacagtctctgaaggaagcaaagggc

SEQ ID NO: 472365 - DNA, 33 bp, Homo sapien
caaagaactccattcccgctactttgagcatca

SEQ ID NO: 472366 - DNA, 33 bp, Homo sapien
caaagaactccattcctgctactttgagcatca

SEQ ID NO: 472367 - DNA, 33 bp, Homo sapien
tttaaagaaaaagcacaggatcaagacctgagg

SEQ ID NO: 472368 - DNA, 33 bp, Homo sapien
tttaaagaaaaagcacgggatcaagacctgagg

SEQ ID NO: 472369 - DNA, 33 bp, Homo sapien
caggctccaaacttacaagagtgtcaggctgtg

SEQ ID NO: 472370 - DNA, 33 bp, Homo sapien
caggctccaaacttacgagagtgtcaggctgtg

SEQ ID NO: 472371 - DNA, 33 bp, Homo sapien
tctaatgttagagagaacttgttttgaataata

SEQ ID NO: 472372 - DNA, 33 bp, Homo sapien
tctaatgttagagagaccttgttttgaataata

SEQ ID NO: 472373 - DNA, 33 bp, Homo sapien
caagtttctctcatgactaaaaaaactggccag

SEQ ID NO: 472374 - DNA, 33 bp, Homo sapien
caagtttctctcatgattaaaaaaactggccag

SEQ ID NO: 472375 - DNA, 33 bp, Homo sapien
atcatttagctcctccaggaagtctcttgggca

SEQ ID NO: 472376 - DNA, 33 bp, Homo sapien
atcatttagctcctccgggaagtctcttgggca

SEQ ID NO: 472377 - DNA, 33 bp, Homo sapien
ataacaattttgcaaacagcttcagcttgcagt

SEQ ID NO: 472378 - DNA, 33 bp, Homo sapien
ataacaattttgcaaagagcttcagcttgcagt

SEQ ID NO: 472379 - DNA, 33 bp, Homo sapien
aaagggctccagagaagagttatctaaacacat

SEQ ID NO: 472380 - DNA, 33 bp, Homo sapien
aaagggctccagagaatagttatctaaacacat

SEQ ID NO: 472381 - DNA, 33 bp, Homo sapien
gcacaaaaatcaattcacactagcattttacat

SEQ ID NO: 472382 - DNA, 33 bp, Homo sapien
gcacaaaaatcaattcccactagcattttacat

SEQ ID NO: 472383 - DNA, 33 bp, Homo sapien
gtaaaactgagttagagaaaagctttgcatatt

SEQ ID NO: 472384 - DNA, 33 bp, Homo sapien
gtaaaactgagttagataaaagctttgcatatt

SEQ ID NO: 472385 - DNA, 33 bp, Homo sapien
gtctatcttaactacaacatcaaaacaccatga

SEQ ID NO: 472386 - DNA, 33 bp, Homo sapien
gtctatcttaactacagcatcaaaacaccatga

SEQ ID NO: 472387 - DNA, 33 bp, Homo sapien
atgtttctcatttcaacgactggccaactggca

SEQ ID NO: 472388 - DNA, 33 bp, Homo sapien
atgtttctcatttcaatgactggccaactggca

SEQ ID NO: 472389 - DNA, 33 bp, Homo sapien
catctacatattcttccacattaggataattca

SEQ ID NO: 472390 - DNA, 33 bp, Homo sapien
catctacatattcttctacattaggataattca

SEQ ID NO: 472391 - DNA, 33 bp, Homo sapien
tattgctgaagtgcgggaaagtcacgaaagaga

SEQ ID NO: 472392 - DNA, 33 bp, Homo sapien
tattgctgaagtgcggtaaagtcacgaaagaga

SEQ ID NO: 472393 - DNA, 33 bp, Homo sapien
tgcgtctagtgctttacgcatcttatctcttaa

SEQ ID NO: 472394 - DNA, 33 bp, Homo sapien
tgcgtctagtgctttatgcatcttatctcttaa

SEQ ID NO: 472395 - DNA, 33 bp, Homo sapien
atgaacaaggtgattacaaagatcccctccatt

SEQ ID NO: 472396 - DNA, 33 bp, Homo sapien
atgaacaaggtgattagaaagatcccctccatt

SEQ ID NO: 472397 - DNA, 33 bp, Homo sapien
cagaaagagtggaatccatcagaaaaaagtaga

SEQ ID NO: 472398 - DNA, 33 bp, Homo sapien
cagaaagagtggaatctatcagaaaaaagtaga

SEQ ID NO: 472399 - DNA, 33 bp, Homo sapien
aacccaagtgcatgtcaatatgtcctgaaaggc

SEQ ID NO: 472400 - DNA, 33 bp, Homo sapien
aacccaagtgcatgtcgatatgtcctgaaaggc

SEQ ID NO: 472401 - DNA, 33 bp, Homo sapien
cctccttggaggcttacggggctctgtataagt

SEQ ID NO: 472402 - DNA, 33 bp, Homo sapien
cctccttggaggcttatggggctctgtataagt

SEQ ID NO: 472403 - DNA, 33 bp, Homo sapien
tcatatttgccacctaaagggcattttcaggtc

SEQ ID NO: 472404 - DNA, 33 bp, Homo sapien
tcatatttgccacctagagggcattttcaggtc

SEQ ID NO: 472405 - DNA, 33 bp, Homo sapien
ggcagagcagtggagcagaaagaacatgagctc

SEQ ID NO: 472406 - DNA, 33 bp, Homo sapien
ggcagagcagtggagccgaaagaacatgagctc

SEQ ID NO: 472407 - DNA, 33 bp, Homo sapien
agctgaaagaaaacaacctcctcagcagattta

SEQ ID NO: 472408 - DNA, 33 bp, Homo sapien
agctgaaagaaaacaagctcctcagcagattta

SEQ ID NO: 472409 - DNA, 33 bp, Homo sapien
ctacccaaaatagcgaagagctgaaagaaaaca

SEQ ID NO: 472410 - DNA, 33 bp, Homo sapien
ctacccaaaatagcgacgagctgaaagaaaaca

SEQ ID NO: 472411 - DNA, 33 bp, Homo sapien
ccaagaataactccaggacttttttgactaatt

SEQ ID NO: 472412 - DNA, 33 bp, Homo sapien
ccaagaataactccagtacttttttgactaatt

SEQ ID NO: 472413 - DNA, 33 bp, Homo sapien
cttatttccctgtttgaattttgattacagcag

SEQ ID NO: 472414 - DNA, 33 bp, Homo sapien
cttatttccctgtttggattttgattacagcag

SEQ ID NO: 472415 - DNA, 33 bp, Homo sapien
cagacagctgcaattcccattcttaggcaaaga

SEQ ID NO: 472416 - DNA, 33 bp, Homo sapien
cagacagctgcaattcgcattcttaggcaaaga

SEQ ID NO: 472417 - DNA, 33 bp, Homo sapien
taaaaggttatagcaacgaaggctctataatac

SEQ ID NO: 472418 - DNA, 33 bp, Homo sapien
taaaaggttatagcaatgaaggctctataatac

SEQ ID NO: 472419 - DNA, 33 bp, Homo sapien
cagccactccggcccacgaaatgtaagcacggg

SEQ ID NO: 472420 - DNA, 33 bp, Homo sapien
cagccactccggcccaggaaatgtaagcacggg

SEQ ID NO: 472421 - DNA, 33 bp, Homo sapien
ttaacagtggaagcagcctctcgcatacatttt

SEQ ID NO: 472422 - DNA, 33 bp, Homo sapien
ttaacagtggaagcaggctctcgcatacatttt

SEQ ID NO: 472423 - DNA, 33 bp, Homo sapien
tacaaaggtggctgaaacatagctgggtttgaa

SEQ ID NO: 472424 - DNA, 33 bp, Homo sapien
tacaaaggtggctgaatcatagctgggtttgaa

SEQ ID NO: 472425 - DNA, 33 bp, Homo sapien
cacagctttcaacagaagattacttagaataac

SEQ ID NO: 472426 - DNA, 33 bp, Homo sapien
cacagctttcaacagaggattacttagaataac

SEQ ID NO: 472427 - DNA, 33 bp, Homo sapien
gagggatggaaggtataaagccagtagagaatg

SEQ ID NO: 472428 - DNA, 33 bp, Homo sapien
gagggatggaaggtatgaagccagtagagaatg

SEQ ID NO: 472429 - DNA, 33 bp, Homo sapien
gtgtttctgtggcaaacacatcaaggtatatat

SEQ ID NO: 472430 - DNA, 33 bp, Homo sapien
gtgtttctgtggcaaatacatcaaggtatatat

SEQ ID NO: 472431 - DNA, 33 bp, Homo sapien
gagagtaaaaagcaacagtccacaaaatctata

SEQ ID NO: 472432 - DNA, 33 bp, Homo sapien
gagagtaaaaagcaacggtccacaaaatctata

SEQ ID NO: 472433 - DNA, 33 bp, Homo sapien
actacttgaccaatagaaactggtagcttccaa

SEQ ID NO: 472434 - DNA, 33 bp, Homo sapien
actacttgaccaatagtaactggtagcttccaa

SEQ ID NO: 472435 - DNA, 33 bp, Homo sapien
tttgttactttaattgaaccactttgtaattat

SEQ ID NO: 472436 - DNA, 33 bp, Homo sapien
tttgttactttaattgtaccactttgtaattat

SEQ ID NO: 472437 - DNA, 33 bp, Homo sapien
gtggagtttgagaggcccagatgatgatgatga

SEQ ID NO: 472438 - DNA, 33 bp, Homo sapien
gtggagtttgagaggcgcagatgatgatgatga

SEQ ID NO: 472439 - DNA, 33 bp, Homo sapien
aagactcaggcttacaagaagatatggaggaac

SEQ ID NO: 472440 - DNA, 33 bp, Homo sapien
aagactcaggcttacaggaagatatggaggaac

SEQ ID NO: 472441 - DNA, 33 bp, Homo sapien
atgactgtaaaatcaacgaagcgtatattgaca

SEQ ID NO: 472442 - DNA, 33 bp, Homo sapien
atgactgtaaaatcaatgaagcgtatattgaca

SEQ ID NO: 472443 - DNA, 33 bp, Homo sapien
tggagaatggcccagagtatgaggtactggtat

SEQ ID NO: 472444 - DNA, 33 bp, Homo sapien
tggagaatggcccagattatgaggtactggtat

SEQ ID NO: 472445 - DNA, 33 bp, Homo sapien
atgtacctattgtttccatttatctggaagacc

SEQ ID NO: 472446 - DNA, 33 bp, Homo sapien
atgtacctattgtttctatttatctggaagacc

SEQ ID NO: 472447 - DNA, 33 bp, Homo sapien
gactttattagaaggacgtcaggagcctcacat

SEQ ID NO: 472448 - DNA, 33 bp, Homo sapien
gactttattagaaggatgtcaggagcctcacat

SEQ ID NO: 472449 - DNA, 33 bp, Homo sapien
gctattcactgcatagccaaagccctggccccc

SEQ ID NO: 472450 - DNA, 33 bp, Homo sapien
gctattcactgcatagtcaaagccctggccccc

SEQ ID NO: 472451 - DNA, 33 bp, Homo sapien
atagatctacccagctcacgaccacccgaggcc

SEQ ID NO: 472452 - DNA, 33 bp, Homo sapien
atagatctacccagctgacgaccacccgaggcc

SEQ ID NO: 472453 - DNA, 33 bp, Homo sapien
atggtaatgttcttgagaatggcaaaggaatga

SEQ ID NO: 472454 - DNA, 33 bp, Homo sapien
atggtaatgttcttgataatggcaaaggaatga

SEQ ID NO: 472455 - DNA, 33 bp, Homo sapien
agatggtatgtcacacagggaaaagaaggagag

SEQ ID NO: 472456 - DNA, 33 bp, Homo sapien
agatggtatgtcacacggggaaaagaaggagag

SEQ ID NO: 472457 - DNA, 33 bp, Homo sapien
cagaggaggcttacccaaccctgatgctcagca

SEQ ID NO: 472458 - DNA, 33 bp, Homo sapien
cagaggaggcttacccgaccctgatgctcagca

SEQ ID NO: 472459 - DNA, 33 bp, Homo sapien
tggcatacgtgtgtccccctagataagctctgc

SEQ ID NO: 472460 - DNA, 33 bp, Homo sapien
tggcatacgtgtgtcctcctagataagctctgc

SEQ ID NO: 472461 - DNA, 33 bp, Homo sapien
tagcctgaggggcatcacttggatttcagtctc

SEQ ID NO: 472462 - DNA, 33 bp, Homo sapien
tagcctgaggggcatcgcttggatttcagtctc

SEQ ID NO: 472463 - DNA, 33 bp, Homo sapien
gttgatataaaccacgaagctatatgtgtttta

SEQ ID NO: 472464 - DNA, 33 bp, Homo sapien
gttgatataaaccacgcagctatatgtgtttta

SEQ ID NO: 472465 - DNA, 33 bp, Homo sapien
tgccatttgctgtacacgaaagtttcagctaca

SEQ ID NO: 472466 - DNA, 33 bp, Homo sapien
tgccatttgctgtacatgaaagtttcagctaca

SEQ ID NO: 472467 - DNA, 33 bp, Homo sapien
aaagatgtcacaaaaccgttccagaacttgggt

SEQ ID NO: 472468 - DNA, 33 bp, Homo sapien
aaagatgtcacaaaactgttccagaacttgggt

SEQ ID NO: 472469 - DNA, 33 bp, Homo sapien
ttaccctcaaataagccgcatttcctgaaagcc

SEQ ID NO: 472470 - DNA, 33 bp, Homo sapien
ttaccctcaaataagctgcatttcctgaaagcc

SEQ ID NO: 472471 - DNA, 33 bp, Homo sapien
cttctgcttacataccccttgatgatgggaggc

SEQ ID NO: 472472 - DNA, 33 bp, Homo sapien
cttctgcttacataccgcttgatgatgggaggc

SEQ ID NO: 472473 - DNA, 33 bp, Homo sapien
aacaaatcagaggagcaaggaagatgggagctg

SEQ ID NO: 472474 - DNA, 33 bp, Homo sapien
aacaaatcagaggagcgaggaagatgggagctg

SEQ ID NO: 472475 - DNA, 33 bp, Homo sapien
gaggtagggatcatgaaagatgaagctggagat

SEQ ID NO: 472476 - DNA, 33 bp, Homo sapien
gaggtagggatcatgacagatgaagctggagat

SEQ ID NO: 472477 - DNA, 33 bp, Homo sapien
ctttccccttagcacccagttctgcctggtttc

SEQ ID NO: 472478 - DNA, 33 bp, Homo sapien
ctttccccttagcacctagttctgcctggtttc

SEQ ID NO: 472479 - DNA, 33 bp, Homo sapien
ttgctaaagatgccaacggactggccatttccc

SEQ ID NO: 472480 - DNA, 33 bp, Homo sapien
ttgctaaagatgccaatggactggccatttccc

SEQ ID NO: 472481 - DNA, 33 bp, Homo sapien
gactggacagggagaacatgaatgcctctgcca

SEQ ID NO: 472482 - DNA, 33 bp, Homo sapien
gactggacagggagaatatgaatgcctctgcca

SEQ ID NO: 472483 - DNA, 33 bp, Homo sapien
ggcagttgaagctgacaggtagagcccaggata

SEQ ID NO: 472484 - DNA, 33 bp, Homo sapien
ggcagttgaagctgacgggtagagcccaggata

SEQ ID NO: 472485 - DNA, 33 bp, Homo sapien
gccgtgagcctggagaagcgttctggtcttagg

SEQ ID NO: 472486 - DNA, 33 bp, Homo sapien
gccgtgagcctggagaggcgttctggtcttagg

SEQ ID NO: 472487 - DNA, 33 bp, Homo sapien
cttgcccaggctcatgccacgggtcagaagcag

SEQ ID NO: 472488 - DNA, 33 bp, Homo sapien
cttgcccaggctcatgtcacgggtcagaagcag

SEQ ID NO: 472489 - DNA, 33 bp, Homo sapien
cagtgacagagaaacaacacacatttgccagat

SEQ ID NO: 472490 - DNA, 33 bp, Homo sapien
cagtgacagagaaacaccacacatttgccagat

SEQ ID NO: 472491 - DNA, 33 bp, Homo sapien
cctggggcaatgtggaaccatagagggctatgg

SEQ ID NO: 472492 - DNA, 33 bp, Homo sapien
cctggggcaatgtggagccatagagggctatgg

SEQ ID NO: 472493 - DNA, 33 bp, Homo sapien
cccgcctgtgaccaaaagtgtactcatctcaac

SEQ ID NO: 472494 - DNA, 33 bp, Homo sapien
cccgcctgtgaccaaaggtgtactcatctcaac

SEQ ID NO: 472495 - DNA, 33 bp, Homo sapien
actttgcatttaacaccgagaaagaatctcctc

SEQ ID NO: 472496 - DNA, 33 bp, Homo sapien
actttgcatttaacactgagaaagaatctcctc

SEQ ID NO: 472497 - DNA, 33 bp, Homo sapien
gtccctgaagctactaaagatcactctgttcag

SEQ ID NO: 472498 - DNA, 33 bp, Homo sapien
gtccctgaagctactagagatcactctgttcag

SEQ ID NO: 472499 - DNA, 33 bp, Homo sapien
taaagtacttagaacagtgtctgacccacagga

SEQ ID NO: 472500 - DNA, 33 bp, Homo sapien
taaagtacttagaacattgtctgacccacagga

SEQ ID NO: 472501 - DNA, 33 bp, Homo sapien
tctgggtcactttcaacttagaggcacgtgaag

SEQ ID NO: 472502 - DNA, 33 bp, Homo sapien
tctgggtcactttcaatttagaggcacgtgaag

SEQ ID NO: 472503 - DNA, 33 bp, Homo sapien
tcatccagatgttccccgctggctgcagccagg

SEQ ID NO: 472504 - DNA, 33 bp, Homo sapien
tcatccagatgttccctgctggctgcagccagg

SEQ ID NO: 472505 - DNA, 33 bp, Homo sapien
cgtaagtagtggctgccaggaaaagcctctgaa

SEQ ID NO: 472506 - DNA, 33 bp, Homo sapien
cgtaagtagtggctgctaggaaaagcctctgaa

SEQ ID NO: 472507 - DNA, 33 bp, Homo sapien
ctgacataatcggttcccaaaacctttatgaca

SEQ ID NO: 472508 - DNA, 33 bp, Homo sapien
ctgacataatcggttctcaaaacctttatgaca

SEQ ID NO: 472509 - DNA, 33 bp, Homo sapien
gcagactcccttcagacacggaaggcaagattc

SEQ ID NO: 472510 - DNA, 33 bp, Homo sapien
gcagactcccttcagatacggaaggcaagattc

SEQ ID NO: 472511 - DNA, 33 bp, Homo sapien
tttaataatatgattccagtctctccccatccc

SEQ ID NO: 472512 - DNA, 33 bp, Homo sapien
tttaataatatgattctagtctctccccatccc

SEQ ID NO: 472513 - DNA, 33 bp, Homo sapien
ttctgtgtccacacaacgtcagaatcactccct

SEQ ID NO: 472514 - DNA, 33 bp, Homo sapien
ttctgtgtccacacaatgtcagaatcactccct

SEQ ID NO: 472515 - DNA, 33 bp, Homo sapien
ggaagtggctcaaacacatgtgctaacttaggt

SEQ ID NO: 472516 - DNA, 33 bp, Homo sapien
ggaagtggctcaaacatatgtgctaacttaggt

SEQ ID NO: 472517 - DNA, 33 bp, Homo sapien
tcttatttgtccccaaaagcctattctaggagg

SEQ ID NO: 472518 - DNA, 33 bp, Homo sapien
tcttatttgtccccaacagcctattctaggagg

SEQ ID NO: 472519 - DNA, 33 bp, Homo sapien
cttggtcccctgtcagactctaacccactccct

SEQ ID NO: 472520 - DNA, 33 bp, Homo sapien
cttggtcccctgtcagcctctaacccactccct

SEQ ID NO: 472521 - DNA, 33 bp, Homo sapien
agaggccaagcaaggaaataggaaacagggcca

SEQ ID NO: 472522 - DNA, 33 bp, Homo sapien
agaggccaagcaaggacataggaaacagggcca

SEQ ID NO: 472523 - DNA, 33 bp, Homo sapien
atacacctatttcaggacaatgagaccaggtgg

SEQ ID NO: 472524 - DNA, 33 bp, Homo sapien
atacacctatttcagggcaatgagaccaggtgg

SEQ ID NO: 472525 - DNA, 33 bp, Homo sapien
ggagttataatatcaaaatacccggactggagg

SEQ ID NO: 472526 - DNA, 33 bp, Homo sapien
ggagttataatatcaagatacccggactggagg

SEQ ID NO: 472527 - DNA, 33 bp, Homo sapien
cctcacctgctacagaagcaaaaacagaagctc

SEQ ID NO: 472528 - DNA, 33 bp, Homo sapien
cctcacctgctacagaggcaaaaacagaagctc

SEQ ID NO: 472529 - DNA, 33 bp, Homo sapien
aacctttgccaattccaagcattgacaaggatg

SEQ ID NO: 472530 - DNA, 33 bp, Homo sapien
aacctttgccaattccgagcattgacaaggatg

SEQ ID NO: 472531 - DNA, 33 bp, Homo sapien
agattattggatcttacgataactgtatgttta

SEQ ID NO: 472532 - DNA, 33 bp, Homo sapien
agattattggatcttatgataactgtatgttta

SEQ ID NO: 472533 - DNA, 33 bp, Homo sapien
ggctacacaggccaacaactttaaacctagata

SEQ ID NO: 472534 - DNA, 33 bp, Homo sapien
ggctacacaggccaacgactttaaacctagata

SEQ ID NO: 472535 - DNA, 33 bp, Homo sapien
tgcctagctctggacacggtatcccactgggca

SEQ ID NO: 472536 - DNA, 33 bp, Homo sapien
tgcctagctctggacatggtatcccactgggca

SEQ ID NO: 472537 - DNA, 33 bp, Homo sapien
agcagctaaacctctacgtatttcataatttat

SEQ ID NO: 472538 - DNA, 33 bp, Homo sapien
agcagctaaacctctatgtatttcataatttat

SEQ ID NO: 472539 - DNA, 33 bp, Homo sapien
ttgaggctttcatgagcccgaaggttggaataa

SEQ ID NO: 472540 - DNA, 33 bp, Homo sapien
ttgaggctttcatgagtccgaaggttggaataa

SEQ ID NO: 472541 - DNA, 33 bp, Homo sapien
ggagcacacgaacacgaaggatagaggccctaa

SEQ ID NO: 472542 - DNA, 33 bp, Homo sapien
ggagcacacgaacacgcaggatagaggccctaa

SEQ ID NO: 472543 - DNA, 33 bp, Homo sapien
gcttgatcactacccactacatacgtgtaacaa

SEQ ID NO: 472544 - DNA, 33 bp, Homo sapien
gcttgatcactacccattacatacgtgtaacaa

SEQ ID NO: 472545 - DNA, 33 bp, Homo sapien
ttacgttcctgccaacagtgttcaatagttccc

SEQ ID NO: 472546 - DNA, 33 bp, Homo sapien
ttacgttcctgccaacggtgttcaatagttccc

SEQ ID NO: 472547 - DNA, 33 bp, Homo sapien
tttcatatggtggtaactgcctctctaccatca

SEQ ID NO: 472548 - DNA, 33 bp, Homo sapien
tttcatatggtggtaattgcctctctaccatca

SEQ ID NO: 472549 - DNA, 33 bp, Homo sapien
gctttatgcatttttacgtcgtgaatgaaaatg

SEQ ID NO: 472550 - DNA, 33 bp, Homo sapien
gctttatgcatttttatgtcgtgaatgaaaatg

SEQ ID NO: 472551 - DNA, 33 bp, Homo sapien
ttctttaaaagcgctacgagctagaaaaaagtg

SEQ ID NO: 472552 - DNA, 33 bp, Homo sapien
ttctttaaaagcgctaggagctagaaaaaagtg

SEQ ID NO: 472553 - DNA, 33 bp, Homo sapien
gttcattggccactcacgtaatttctctttaaa

SEQ ID NO: 472554 - DNA, 33 bp, Homo sapien
gttcattggccactcatgtaatttctctttaaa

SEQ ID NO: 472555 - DNA, 33 bp, Homo sapien
ctccaatgaggttgaaaatccatatataacttt

SEQ ID NO: 472556 - DNA, 33 bp, Homo sapien
ctccaatgaggttgaagatccatatataacttt

SEQ ID NO: 472557 - DNA, 33 bp, Homo sapien
gaaaaaaaaagacttgaagtgcatagatagtat

SEQ ID NO: 472558 - DNA, 33 bp, Homo sapien
gaaaaaaaaagacttgcagtgcatagatagtat

SEQ ID NO: 472559 - DNA, 33 bp, Homo sapien
attgaaggtcattccccaggtcattgaacctgg

SEQ ID NO: 472560 - DNA, 33 bp, Homo sapien
attgaaggtcattcccgaggtcattgaacctgg

SEQ ID NO: 472561 - DNA, 33 bp, Homo sapien
gaaagtaggaaaaaaaagtatgcttatatacat

SEQ ID NO: 472562 - DNA, 33 bp, Homo sapien
gaaagtaggaaaaaaatgtatgcttatatacat

SEQ ID NO: 472563 - DNA, 33 bp, Homo sapien
gcagcaataataaagacgatgataacaacccgt

SEQ ID NO: 472564 - DNA, 33 bp, Homo sapien
gcagcaataataaagatgatgataacaacccgt

SEQ ID NO: 472565 - DNA, 33 bp, Homo sapien
gcccctctcctttagcaccctatctgcaggcac

SEQ ID NO: 472566 - DNA, 33 bp, Homo sapien
gcccctctcctttagcgccctatctgcaggcac

SEQ ID NO: 472567 - DNA, 33 bp, Homo sapien
ctagtctgcagccccaatactcaaagggtggtc

SEQ ID NO: 472568 - DNA, 33 bp, Homo sapien
ctagtctgcagccccagtactcaaagggtggtc

SEQ ID NO: 472569 - DNA, 33 bp, Homo sapien
ttgcttccttccacacccagtctcgggctcacc

SEQ ID NO: 472570 - DNA, 33 bp, Homo sapien
ttgcttccttccacactcagtctcgggctcacc

SEQ ID NO: 472571 - DNA, 33 bp, Homo sapien
gtcacagtgagaatcgccaccgacaggcagcat

SEQ ID NO: 472572 - DNA, 33 bp, Homo sapien
gtcacagtgagaatcgtcaccgacaggcagcat

SEQ ID NO: 472573 - DNA, 33 bp, Homo sapien
caaatggggaattaaaacgaacactttgagcct

SEQ ID NO: 472574 - DNA, 33 bp, Homo sapien
caaatggggaattaaagcgaacactttgagcct

SEQ ID NO: 472575 - DNA, 33 bp, Homo sapien
ccctgtggcttctttacatatttctcaaatgga

SEQ ID NO: 472576 - DNA, 33 bp, Homo sapien
ccctgtggcttctttatatatttctcaaatgga

SEQ ID NO: 472577 - DNA, 33 bp, Homo sapien
ttaccaatagcacccaagttcattctcaaaagt

SEQ ID NO: 472578 - DNA, 33 bp, Homo sapien
ttaccaatagcacccatgttcattctcaaaagt

SEQ ID NO: 472579 - DNA, 33 bp, Homo sapien
tcattcctagaaaaagaaggagatttctcagaa

SEQ ID NO: 472580 - DNA, 33 bp, Homo sapien
tcattcctagaaaaaggaggagatttctcagaa

SEQ ID NO: 472581 - DNA, 33 bp, Homo sapien
tctttaaccaagaggcagaatattcatgatcat

SEQ ID NO: 472582 - DNA, 33 bp, Homo sapien
tctttaaccaagaggcggaatattcatgatcat

SEQ ID NO: 472583 - DNA, 33 bp, Homo sapien
taaataatgacaaccaatgaaaagacttgactg

SEQ ID NO: 472584 - DNA, 33 bp, Homo sapien
taaataatgacaaccagtgaaaagacttgactg

SEQ ID NO: 472585 - DNA, 33 bp, Homo sapien
actctgtctcacccaggacttttcgaagttctc

SEQ ID NO: 472586 - DNA, 33 bp, Homo sapien
actctgtctcacccagtacttttcgaagttctc

SEQ ID NO: 472587 - DNA, 33 bp, Homo sapien
ccgtctggctttggacaatctatcttggaccag

SEQ ID NO: 472588 - DNA, 33 bp, Homo sapien
ccgtctggctttggactatctatcttggaccag

SEQ ID NO: 472589 - DNA, 33 bp, Homo sapien
aacaacaacaaataccccaagcacttattatgt

SEQ ID NO: 472590 - DNA, 33 bp, Homo sapien
aacaacaacaaatacctcaagcacttattatgt

SEQ ID NO: 472591 - DNA, 33 bp, Homo sapien
tgatagatcccaggcacgtaagggaacagaaat

SEQ ID NO: 472592 - DNA, 33 bp, Homo sapien
tgatagatcccaggcatgtaagggaacagaaat

SEQ ID NO: 472593 - DNA, 33 bp, Homo sapien
ttgaactctgatgcacaaactggaagatcaaca

SEQ ID NO: 472594 - DNA, 33 bp, Homo sapien
ttgaactctgatgcaccaactggaagatcaaca

SEQ ID NO: 472595 - DNA, 33 bp, Homo sapien
tgagccttcatcagacaacagatctactggcac

SEQ ID NO: 472596 - DNA, 33 bp, Homo sapien
tgagccttcatcagactacagatctactggcac

SEQ ID NO: 472597 - DNA, 33 bp, Homo sapien
tcttcaaatcttagcacggtggatctggaaagg

SEQ ID NO: 472598 - DNA, 33 bp, Homo sapien
tcttcaaatcttagcatggtggatctggaaagg

SEQ ID NO: 472599 - DNA, 33 bp, Homo sapien
tgagaggcatttcttcactcggtaatgaggagg

SEQ ID NO: 472600 - DNA, 33 bp, Homo sapien
tgagaggcatttcttcgctcggtaatgaggagg

SEQ ID NO: 472601 - DNA, 33 bp, Homo sapien
atcctaacgagaataacgcaaggcttagcctgt

SEQ ID NO: 472602 - DNA, 33 bp, Homo sapien
atcctaacgagaataaggcaaggcttagcctgt

SEQ ID NO: 472603 - DNA, 33 bp, Homo sapien
tttctactcataaggaacttttagtcacgtaaa

SEQ ID NO: 472604 - DNA, 33 bp, Homo sapien
tttctactcataaggagcttttagtcacgtaaa

SEQ ID NO: 472605 - DNA, 33 bp, Homo sapien
aagaatctctgctttaacggaagacctgtttcg

SEQ ID NO: 472606 - DNA, 33 bp, Homo sapien
aagaatctctgctttagcggaagacctgtttcg

SEQ ID NO: 472607 - DNA, 33 bp, Homo sapien
aagtggggctccacagacgtttgcttccttctt

SEQ ID NO: 472608 - DNA, 33 bp, Homo sapien
aagtggggctccacaggcgtttgcttccttctt

SEQ ID NO: 472609 - DNA, 33 bp, Homo sapien
tgtgtaccttattgcccgacacattatagacac

SEQ ID NO: 472610 - DNA, 33 bp, Homo sapien
tgtgtaccttattgcctgacacattatagacac

SEQ ID NO: 472611 - DNA, 33 bp, Homo sapien
tcaacttcacagaacacaactaccatgaacaat

SEQ ID NO: 472612 - DNA, 33 bp, Homo sapien
tcaacttcacagaacataactaccatgaacaat

SEQ ID NO: 472613 - DNA, 33 bp, Homo sapien
gtatggtgattactgaagacacagtgaccaaca

SEQ ID NO: 472614 - DNA, 33 bp, Homo sapien
gtatggtgattactgaggacacagtgaccaaca

SEQ ID NO: 472615 - DNA, 33 bp, Homo sapien
tgataatcccactatacgttccagaaaatctgt

SEQ ID NO: 472616 - DNA, 33 bp, Homo sapien
tgataatcccactatatgttccagaaaatctgt

SEQ ID NO: 472617 - DNA, 33 bp, Homo sapien
cagaaaatctgttgcaaagaaataatcaggacc

SEQ ID NO: 472618 - DNA, 33 bp, Homo sapien
cagaaaatctgttgcacagaaataatcaggacc

SEQ ID NO: 472619 - DNA, 33 bp, Homo sapien
ggtgtagatggttgtcaaagtcatagaaaagga

SEQ ID NO: 472620 - DNA, 33 bp, Homo sapien
ggtgtagatggttgtcgaagtcatagaaaagga

SEQ ID NO: 472621 - DNA, 33 bp, Homo sapien
atgtgtacaccagtcaaagtggggagaaaaaac

SEQ ID NO: 472622 - DNA, 33 bp, Homo sapien
atgtgtacaccagtcagagtggggagaaaaaac

SEQ ID NO: 472623 - DNA, 33 bp, Homo sapien
gccagggtggttataacgtcaggttctgtttat

SEQ ID NO: 472624 - DNA, 33 bp, Homo sapien
gccagggtggttataatgtcaggttctgtttat

SEQ ID NO: 472625 - DNA, 33 bp, Homo sapien
cctcaagtctactcaactcgtgtgatggttaac

SEQ ID NO: 472626 - DNA, 33 bp, Homo sapien
cctcaagtctactcaagtcgtgtgatggttaac

SEQ ID NO: 472627 - DNA, 33 bp, Homo sapien
tggccaaagcaaattacgtgacaaagccaggta

SEQ ID NO: 472628 - DNA, 33 bp, Homo sapien
tggccaaagcaaattatgtgacaaagccaggta

SEQ ID NO: 472629 - DNA, 33 bp, Homo sapien
tcatacatttgttaaacaatgatgctaacccct

SEQ ID NO: 472630 - DNA, 33 bp, Homo sapien
tcatacatttgttaaataatgatgctaacccct

SEQ ID NO: 472631 - DNA, 33 bp, Homo sapien
tcactgccctcgactccgaattatccaagttca

SEQ ID NO: 472632 - DNA, 33 bp, Homo sapien
tcactgccctcgactctgaattatccaagttca

SEQ ID NO: 472633 - DNA, 33 bp, Homo sapien
gtggataaagcttggaaacgttgtagaagaaaa

SEQ ID NO: 472634 - DNA, 33 bp, Homo sapien
gtggataaagcttggagacgttgtagaagaaaa

SEQ ID NO: 472635 - DNA, 33 bp, Homo sapien
cagcacatataaagaaactttgggccgggcatg

SEQ ID NO: 472636 - DNA, 33 bp, Homo sapien
cagcacatataaagaacctttgggccgggcatg

SEQ ID NO: 472637 - DNA, 33 bp, Homo sapien
tccagacagtgtaggaaacctgctcacaccaca

SEQ ID NO: 472638 - DNA, 33 bp, Homo sapien
tccagacagtgtaggagacctgctcacaccaca

SEQ ID NO: 472639 - DNA, 33 bp, Homo sapien
accagacttacagataagttcgagaaataaacc

SEQ ID NO: 472640 - DNA, 33 bp, Homo sapien
accagacttacagataggttcgagaaataaacc

SEQ ID NO: 472641 - DNA, 33 bp, Homo sapien
agttacccccaagctaaggaagctgaattatca

SEQ ID NO: 472642 - DNA, 33 bp, Homo sapien
agttacccccaagctagggaagctgaattatca

SEQ ID NO: 472643 - DNA, 33 bp, Homo sapien
ataatgtaaaagcaaacatcaagcctggaacat

SEQ ID NO: 472644 - DNA, 33 bp, Homo sapien
ataatgtaaaagcaaagatcaagcctggaacat

SEQ ID NO: 472645 - DNA, 33 bp, Homo sapien
tagtaaattcataggacacgtttgttggaaccg

SEQ ID NO: 472646 - DNA, 33 bp, Homo sapien
tagtaaattcataggagacgtttgttggaaccg

SEQ ID NO: 472647 - DNA, 33 bp, Homo sapien
ctctgtgaaatggggccgataaactctacctta

SEQ ID NO: 472648 - DNA, 33 bp, Homo sapien
ctctgtgaaatggggctgataaactctacctta

SEQ ID NO: 472649 - DNA, 33 bp, Homo sapien
agctgtttcttctctcaataaagcctgtgggca

SEQ ID NO: 472650 - DNA, 33 bp, Homo sapien
agctgtttcttctctcgataaagcctgtgggca

SEQ ID NO: 472651 - DNA, 33 bp, Homo sapien
aagtggagaaccaacagggatacacacggcttt

SEQ ID NO: 472652 - DNA, 33 bp, Homo sapien
aagtggagaaccaacatggatacacacggcttt

SEQ ID NO: 472653 - DNA, 33 bp, Homo sapien
aaagtcagtggtttaaagcatttagacaactat

SEQ ID NO: 472654 - DNA, 33 bp, Homo sapien
aaagtcagtggtttaaggcatttagacaactat

SEQ ID NO: 472655 - DNA, 33 bp, Homo sapien
gtggctctttgttccccgagaaatggagaaaca

SEQ ID NO: 472656 - DNA, 33 bp, Homo sapien
gtggctctttgttccctgagaaatggagaaaca

SEQ ID NO: 472657 - DNA, 33 bp, Homo sapien
gttctataaaggcaccaaaaacactgaattagc

SEQ ID NO: 472658 - DNA, 33 bp, Homo sapien
gttctataaaggcaccgaaaacactgaattagc

SEQ ID NO: 472659 - DNA, 33 bp, Homo sapien
tacaccctacaagtaactgaatttgaggacttg

SEQ ID NO: 472660 - DNA, 33 bp, Homo sapien
tacaccctacaagtaattgaatttgaggacttg

SEQ ID NO: 472661 - DNA, 33 bp, Homo sapien
ggatttgtttttatagaattccattttccattg

SEQ ID NO: 472662 - DNA, 33 bp, Homo sapien
ggatttgtttttataggattccattttccattg

SEQ ID NO: 472663 - DNA, 33 bp, Homo sapien
cacagactaagtagtaccttatacagtgtttat

SEQ ID NO: 472664 - DNA, 33 bp, Homo sapien
cacagactaagtagtatcttatacagtgtttat

SEQ ID NO: 472665 - DNA, 33 bp, Homo sapien
aggaaataactcatgacgcttgggtttgaagct

SEQ ID NO: 472666 - DNA, 33 bp, Homo sapien
aggaaataactcatgatgcttgggtttgaagct

SEQ ID NO: 472667 - DNA, 33 bp, Homo sapien
tctccactagtgactacaccctcatggcccatg

SEQ ID NO: 472668 - DNA, 33 bp, Homo sapien
tctccactagtgactataccctcatggcccatg

SEQ ID NO: 472669 - DNA, 33 bp, Homo sapien
acagcaagagccttggcaggtgtttgtgttaaa

SEQ ID NO: 472670 - DNA, 33 bp, Homo sapien
acagcaagagccttggtaggtgtttgtgttaaa

SEQ ID NO: 472671 - DNA, 33 bp, Homo sapien
ggctatgaagatacaaaaagagacacactccat

SEQ ID NO: 472672 - DNA, 33 bp, Homo sapien
ggctatgaagatacaagaagagacacactccat

SEQ ID NO: 472673 - DNA, 33 bp, Homo sapien
gatagtcactaaaggaagatgtgtccttcaata

SEQ ID NO: 472674 - DNA, 33 bp, Homo sapien
gatagtcactaaaggaggatgtgtccttcaata

SEQ ID NO: 472675 - DNA, 33 bp, Homo sapien
tacttacaagctctacaaccatttacttaacat

SEQ ID NO: 472676 - DNA, 33 bp, Homo sapien
tacttacaagctctacgaccatttacttaacat

SEQ ID NO: 472677 - DNA, 33 bp, Homo sapien
aaaaagcagtcattatcaacttttactaactgt

SEQ ID NO: 472678 - DNA, 33 bp, Homo sapien
aaaaagcagtcattattaacttttactaactgt

SEQ ID NO: 472679 - DNA, 33 bp, Homo sapien
aggagaaacacaggataaggttcccatgagcct

SEQ ID NO: 472680 - DNA, 33 bp, Homo sapien
aggagaaacacaggattaggttcccatgagcct

SEQ ID NO: 472681 - DNA, 33 bp, Homo sapien
agaaaagttcaacctcactaagtatcaaaatat

SEQ ID NO: 472682 - DNA, 33 bp, Homo sapien
agaaaagttcaacctcgctaagtatcaaaatat

SEQ ID NO: 472683 - DNA, 33 bp, Homo sapien
ggctgcctcctttatccaacaatattttgaatt

SEQ ID NO: 472684 - DNA, 33 bp, Homo sapien
ggctgcctcctttatcgaacaatattttgaatt

SEQ ID NO: 472685 - DNA, 33 bp, Homo sapien
aaagagtagagatagcacttaataaaagcaaca

SEQ ID NO: 472686 - DNA, 33 bp, Homo sapien
aaagagtagagatagcgcttaataaaagcaaca

SEQ ID NO: 472687 - DNA, 33 bp, Homo sapien
ataggccaagagacacaaagaatgggcctaaag

SEQ ID NO: 472688 - DNA, 33 bp, Homo sapien
ataggccaagagacaccaagaatgggcctaaag

SEQ ID NO: 472689 - DNA, 33 bp, Homo sapien
aaaatttgcctcaaaaaaatgaatgatttgagt

SEQ ID NO: 472690 - DNA, 33 bp, Homo sapien
aaaatttgcctcaaaagaatgaatgatttgagt

SEQ ID NO: 472691 - DNA, 33 bp, Homo sapien
attcttgtataatcaacgtgatggcaatactca

SEQ ID NO: 472692 - DNA, 33 bp, Homo sapien
attcttgtataatcaatgtgatggcaatactca

SEQ ID NO: 472693 - DNA, 33 bp, Homo sapien
atagcaaggcagcccactgagcaggtgagtctg

SEQ ID NO: 472694 - DNA, 33 bp, Homo sapien
atagcaaggcagcccattgagcaggtgagtctg

SEQ ID NO: 472695 - DNA, 33 bp, Homo sapien
tattgtctatggaggggatggtgataatgcttt

SEQ ID NO: 472696 - DNA, 33 bp, Homo sapien
tattgtctatggagggtatggtgataatgcttt

SEQ ID NO: 472697 - DNA, 33 bp, Homo sapien
tgattcttggttcctcccttcctccagaaacta

SEQ ID NO: 472698 - DNA, 33 bp, Homo sapien
tgattcttggttcctctcttcctccagaaacta

SEQ ID NO: 472699 - DNA, 33 bp, Homo sapien
gggaatgtttgctgtaagaactctgacctggca

SEQ ID NO: 472700 - DNA, 33 bp, Homo sapien
gggaatgtttgctgtaggaactctgacctggca

SEQ ID NO: 472701 - DNA, 33 bp, Homo sapien
tggaagataaaagacaatcagttgctgaagaac

SEQ ID NO: 472702 - DNA, 33 bp, Homo sapien
tggaagataaaagacactcagttgctgaagaac

SEQ ID NO: 472703 - DNA, 33 bp, Homo sapien
atgggtcaatatgatccctgtaaagcatagact

SEQ ID NO: 472704 - DNA, 33 bp, Homo sapien
atgggtcaatatgatcgctgtaaagcatagact

SEQ ID NO: 472705 - DNA, 33 bp, Homo sapien
tgcaaatgatcctaccggcggattctccagtag

SEQ ID NO: 472706 - DNA, 33 bp, Homo sapien
tgcaaatgatcctacctgcggattctccagtag

SEQ ID NO: 472707 - DNA, 33 bp, Homo sapien
gagagtgtttatcccaaagaaaagaccacttag

SEQ ID NO: 472708 - DNA, 33 bp, Homo sapien
gagagtgtttatcccagagaaaagaccacttag

SEQ ID NO: 472709 - DNA, 33 bp, Homo sapien
ctatattatctctcaccgaaacttctcctgtag

SEQ ID NO: 472710 - DNA, 33 bp, Homo sapien
ctatattatctctcactgaaacttctcctgtag

SEQ ID NO: 472711 - DNA, 33 bp, Homo sapien
gtcaagcaaatacagacgtcacatggtctatga

SEQ ID NO: 472712 - DNA, 33 bp, Homo sapien
gtcaagcaaatacagatgtcacatggtctatga

SEQ ID NO: 472713 - DNA, 33 bp, Homo sapien
acccacagcttgtccccaaacggaaggcatttt

SEQ ID NO: 472714 - DNA, 33 bp, Homo sapien
acccacagcttgtccctaaacggaaggcatttt

SEQ ID NO: 472715 - DNA, 33 bp, Homo sapien
ctatctcattgccttgaaccaggctttgggatc

SEQ ID NO: 472716 - DNA, 33 bp, Homo sapien
ctatctcattgccttgcaccaggctttgggatc

SEQ ID NO: 472717 - DNA, 33 bp, Homo sapien
atgcaatactgagaaactgctagtgtgtgtata

SEQ ID NO: 472718 - DNA, 33 bp, Homo sapien
atgcaatactgagaaagtgctagtgtgtgtata

SEQ ID NO: 472719 - DNA, 33 bp, Homo sapien
actgtcggtgcctaatcaatgttagtccatacg

SEQ ID NO: 472720 - DNA, 33 bp, Homo sapien
actgtcggtgcctaattaatgttagtccatacg

SEQ ID NO: 472721 - DNA, 33 bp, Homo sapien
aacctaagtttcctaacgtcaaatccagattca

SEQ ID NO: 472722 - DNA, 33 bp, Homo sapien
aacctaagtttcctaatgtcaaatccagattca

SEQ ID NO: 472723 - DNA, 33 bp, Homo sapien
aaaaagattctcagctaaagtactctaagtggg

SEQ ID NO: 472724 - DNA, 33 bp, Homo sapien
aaaaagattctcagctgaagtactctaagtggg

SEQ ID NO: 472725 - DNA, 33 bp, Homo sapien
acaatggtgttacataaagaggcaataacactt

SEQ ID NO: 472726 - DNA, 33 bp, Homo sapien
acaatggtgttacatagagaggcaataacactt

SEQ ID NO: 472727 - DNA, 33 bp, Homo sapien
gccaataagcgtatggcccagataattgagacc

SEQ ID NO: 472728 - DNA, 33 bp, Homo sapien
gccaataagcgtatggtccagataattgagacc

SEQ ID NO: 472729 - DNA, 33 bp, Homo sapien
aatatttgtgaaaaacggcaaagaaagctagac

SEQ ID NO: 472730 - DNA, 33 bp, Homo sapien
aatatttgtgaaaaactgcaaagaaagctagac

SEQ ID NO: 472731 - DNA, 33 bp, Homo sapien
taacccattagagaaaagactcgtgccaggctt

SEQ ID NO: 472732 - DNA, 33 bp, Homo sapien
taacccattagagaaaggactcgtgccaggctt

SEQ ID NO: 472733 - DNA, 33 bp, Homo sapien
ttctcttaacctctgaataaccaattgcctgtt

SEQ ID NO: 472734 - DNA, 33 bp, Homo sapien
ttctcttaacctctgagtaaccaattgcctgtt

SEQ ID NO: 472735 - DNA, 33 bp, Homo sapien
aaaagaaacaacttccacttttcctgtagaaat

SEQ ID NO: 472736 - DNA, 33 bp, Homo sapien
aaaagaaacaacttccgcttttcctgtagaaat

SEQ ID NO: 472737 - DNA, 33 bp, Homo sapien
cagtacgtgcacatgaagtgtccatctcatggt

SEQ ID NO: 472738 - DNA, 33 bp, Homo sapien
cagtacgtgcacatgacgtgtccatctcatggt

SEQ ID NO: 472739 - DNA, 33 bp, Homo sapien
aactagctacttcaaaaataccaggatcacagg

SEQ ID NO: 472740 - DNA, 33 bp, Homo sapien
aactagctacttcaaacataccaggatcacagg

SEQ ID NO: 472741 - DNA, 33 bp, Homo sapien
gtgcagacactcttaacgattcagaagaaattc

SEQ ID NO: 472742 - DNA, 33 bp, Homo sapien
gtgcagacactcttaatgattcagaagaaattc

SEQ ID NO: 472743 - DNA, 33 bp, Homo sapien
cactccagaacccagccgcaagatgcctgacag

SEQ ID NO: 472744 - DNA, 33 bp, Homo sapien
cactccagaacccagctgcaagatgcctgacag

SEQ ID NO: 472745 - DNA, 33 bp, Homo sapien
catacacggtagaagagaatattttcaaaacat

SEQ ID NO: 472746 - DNA, 33 bp, Homo sapien
catacacggtagaagataatattttcaaaacat

SEQ ID NO: 472747 - DNA, 33 bp, Homo sapien
tcattgattgtatttgaagacctatcttaatat

SEQ ID NO: 472748 - DNA, 33 bp, Homo sapien
tcattgattgtatttgcagacctatcttaatat

SEQ ID NO: 472749 - DNA, 33 bp, Homo sapien
cagattcacttccatacaacactcagaatgata

SEQ ID NO: 472750 - DNA, 33 bp, Homo sapien
cagattcacttccatataacactcagaatgata

SEQ ID NO: 472751 - DNA, 33 bp, Homo sapien
gagagcgtctaatatgaatggtggtagggagta

SEQ ID NO: 472752 - DNA, 33 bp, Homo sapien
gagagcgtctaatatggatggtggtagggagta

SEQ ID NO: 472753 - DNA, 33 bp, Homo sapien
acaaaacattgttcacaacttaaagactatctg

SEQ ID NO: 472754 - DNA, 33 bp, Homo sapien
acaaaacattgttcacgacttaaagactatctg

SEQ ID NO: 472755 - DNA, 33 bp, Homo sapien
agggccaccaggtagaagaaaaagtgtgtgcga

SEQ ID NO: 472756 - DNA, 33 bp, Homo sapien
agggccaccaggtagacgaaaaagtgtgtgcga

SEQ ID NO: 472757 - DNA, 33 bp, Homo sapien
acacccggctgaaatacctcctgaaagaaatga

SEQ ID NO: 472758 - DNA, 33 bp, Homo sapien
acacccggctgaaatagctcctgaaagaaatga

SEQ ID NO: 472759 - DNA, 33 bp, Homo sapien
cagcttgggtcagctcaaagactggactaataa

SEQ ID NO: 472760 - DNA, 33 bp, Homo sapien
cagcttgggtcagctctaagactggactaataa

SEQ ID NO: 472761 - DNA, 33 bp, Homo sapien
tgggggccgttggaaaggtatacaaagggtgcc

SEQ ID NO: 472762 - DNA, 33 bp, Homo sapien
tgggggccgttggaaatgtatacaaagggtgcc

SEQ ID NO: 472763 - DNA, 33 bp, Homo sapien
tgatgggggctaggaagtcgacctttcatccca

SEQ ID NO: 472764 - DNA, 33 bp, Homo sapien
tgatgggggctaggaattcgacctttcatccca

SEQ ID NO: 472765 - DNA, 33 bp, Homo sapien
ttggtatgcacaccaacatcatcaatttttaca

SEQ ID NO: 472766 - DNA, 33 bp, Homo sapien
ttggtatgcacaccaatatcatcaatttttaca

SEQ ID NO: 472767 - DNA, 33 bp, Homo sapien
gaatcatttttattcaatatttttggagcatca

SEQ ID NO: 472768 - DNA, 33 bp, Homo sapien
gaatcatttttattcagtatttttggagcatca

SEQ ID NO: 472769 - DNA, 33 bp, Homo sapien
gggtaaaagtctcctccaaagtcactcacatta

SEQ ID NO: 472770 - DNA, 33 bp, Homo sapien
gggtaaaagtctcctctaaagtcactcacatta

SEQ ID NO: 472771 - DNA, 33 bp, Homo sapien
tggttttggataataacagttgctgcctccaac

SEQ ID NO: 472772 - DNA, 33 bp, Homo sapien
tggttttggataataatagttgctgcctccaac

SEQ ID NO: 472773 - DNA, 33 bp, Homo sapien
ttggtgttgttgatgacggctatgttgttgtta

SEQ ID NO: 472774 - DNA, 33 bp, Homo sapien
ttggtgttgttgatgatggctatgttgttgtta

SEQ ID NO: 472775 - DNA, 33 bp, Homo sapien
tgaagcttgccgaatccacaatgcaggctttta

SEQ ID NO: 472776 - DNA, 33 bp, Homo sapien
tgaagcttgccgaatctacaatgcaggctttta

SEQ ID NO: 472777 - DNA, 33 bp, Homo sapien
agtcgtatggcaaagacgcagggaaaaatatcc

SEQ ID NO: 472778 - DNA, 33 bp, Homo sapien
agtcgtatggcaaagatgcagggaaaaatatcc

SEQ ID NO: 472779 - DNA, 33 bp, Homo sapien
tagatgattaaaagaaactcttaagtggcctct

SEQ ID NO: 472780 - DNA, 33 bp, Homo sapien
tagatgattaaaagaacctcttaagtggcctct

SEQ ID NO: 472781 - DNA, 33 bp, Homo sapien
ttaaagcacaaaacacacctatcaataactatc

SEQ ID NO: 472782 - DNA, 33 bp, Homo sapien
ttaaagcacaaaacacgcctatcaataactatc

SEQ ID NO: 472783 - DNA, 33 bp, Homo sapien
agaagtttaagggtccaagaatataaagaagca

SEQ ID NO: 472784 - DNA, 33 bp, Homo sapien
agaagtttaagggtccgagaatataaagaagca

SEQ ID NO: 472785 - DNA, 33 bp, Homo sapien
tatatttccgtatggcaagaaaaatttgttcat

SEQ ID NO: 472786 - DNA, 33 bp, Homo sapien
tatatttccgtatggcgagaaaaatttgttcat

SEQ ID NO: 472787 - DNA, 33 bp, Homo sapien
agggcctactgtttgcactatggctcagccaac

SEQ ID NO: 472788 - DNA, 33 bp, Homo sapien
agggcctactgtttgcgctatggctcagccaac

SEQ ID NO: 472789 - DNA, 33 bp, Homo sapien
aagttgagatctgtgaataattaaactggagaa

SEQ ID NO: 472790 - DNA, 33 bp, Homo sapien
aagttgagatctgtgagtaattaaactggagaa

SEQ ID NO: 472791 - DNA, 33 bp, Homo sapien
aacaacacagaaatgacgtaaaaccagcaaggt

SEQ ID NO: 472792 - DNA, 33 bp, Homo sapien
aacaacacagaaatgatgtaaaaccagcaaggt

SEQ ID NO: 472793 - DNA, 33 bp, Homo sapien
tagaatgtagctagcaacttctaccttgtggat

SEQ ID NO: 472794 - DNA, 33 bp, Homo sapien
tagaatgtagctagcagcttctaccttgtggat

SEQ ID NO: 472795 - DNA, 33 bp, Homo sapien
aatgaactgaggaagcaatggctgaataacttg

SEQ ID NO: 472796 - DNA, 33 bp, Homo sapien
aatgaactgaggaagcgatggctgaataacttg

SEQ ID NO: 472797 - DNA, 33 bp, Homo sapien
tttactgtgagcctaaacctgtatgaatggtca

SEQ ID NO: 472798 - DNA, 33 bp, Homo sapien
tttactgtgagcctaatcctgtatgaatggtca

SEQ ID NO: 472799 - DNA, 33 bp, Homo sapien
aggaaaagggctcaaacctcctgtttacctgtt

SEQ ID NO: 472800 - DNA, 33 bp, Homo sapien
aggaaaagggctcaaatctcctgtttacctgtt

SEQ ID NO: 472801 - DNA, 33 bp, Homo sapien
tcctgcttctctcctgcaggattgtagtgaagc

SEQ ID NO: 472802 - DNA, 33 bp, Homo sapien
tcctgcttctctcctgtaggattgtagtgaagc

SEQ ID NO: 472803 - DNA, 33 bp, Homo sapien
aattttacgcttgaaacagaagcacgatgtcac

SEQ ID NO: 472804 - DNA, 33 bp, Homo sapien
aattttacgcttgaaatagaagcacgatgtcac

SEQ ID NO: 472805 - DNA, 33 bp, Homo sapien
agtcaggtcatttctaaccatcaaagcctgtgg

SEQ ID NO: 472806 - DNA, 33 bp, Homo sapien
agtcaggtcatttctagccatcaaagcctgtgg

SEQ ID NO: 472807 - DNA, 33 bp, Homo sapien
ctttttgctgccataaacaacagtgtgatgaac

SEQ ID NO: 472808 - DNA, 33 bp, Homo sapien
ctttttgctgccataagcaacagtgtgatgaac

SEQ ID NO: 472809 - DNA, 33 bp, Homo sapien
tattgtctcttagttccaaatacccactttttg

SEQ ID NO: 472810 - DNA, 33 bp, Homo sapien
tattgtctcttagttcgaaatacccactttttg

SEQ ID NO: 472811 - DNA, 33 bp, Homo sapien
ttaggttgtgctggaaatgaaacaggcctgcct

SEQ ID NO: 472812 - DNA, 33 bp, Homo sapien
ttaggttgtgctggaagtgaaacaggcctgcct

SEQ ID NO: 472813 - DNA, 33 bp, Homo sapien
agaaattagagtgaaaatactgactttcctttg

SEQ ID NO: 472814 - DNA, 33 bp, Homo sapien
agaaattagagtgaaattactgactttcctttg

SEQ ID NO: 472815 - DNA, 33 bp, Homo sapien
cctgcagaacattgaaagaaacccatggcagcc

SEQ ID NO: 472816 - DNA, 33 bp, Homo sapien
cctgcagaacattgaaggaaacccatggcagcc

SEQ ID NO: 472817 - DNA, 33 bp, Homo sapien
gttatctactttcttcaatatggattagccact

SEQ ID NO: 472818 - DNA, 33 bp, Homo sapien
gttatctactttcttcgatatggattagccact

SEQ ID NO: 472819 - DNA, 33 bp, Homo sapien
aatgaacactcatgccaatgtgtctttatgata

SEQ ID NO: 472820 - DNA, 33 bp, Homo sapien
aatgaacactcatgcccatgtgtctttatgata

SEQ ID NO: 472821 - DNA, 33 bp, Homo sapien
actgatttaaaaggcacgttttcataggggaat

SEQ ID NO: 472822 - DNA, 33 bp, Homo sapien
actgatttaaaaggcatgttttcataggggaat

SEQ ID NO: 472823 - DNA, 33 bp, Homo sapien
ctgagatgaaatattcaaagcaagatcctaccg

SEQ ID NO: 472824 - DNA, 33 bp, Homo sapien
ctgagatgaaatattcgaagcaagatcctaccg

SEQ ID NO: 472825 - DNA, 33 bp, Homo sapien
ttaatcagcattcactcagctcctagtcttctg

SEQ ID NO: 472826 - DNA, 33 bp, Homo sapien
ttaatcagcattcacttagctcctagtcttctg

SEQ ID NO: 472827 - DNA, 33 bp, Homo sapien
aactctcatttaatgacccatttctgttttgca

SEQ ID NO: 472828 - DNA, 33 bp, Homo sapien
aactctcatttaatgatccatttctgttttgca

SEQ ID NO: 472829 - DNA, 33 bp, Homo sapien
accatctatgagaaacaaaccttctccagacac

SEQ ID NO: 472830 - DNA, 33 bp, Homo sapien
accatctatgagaaacgaaccttctccagacac

SEQ ID NO: 472831 - DNA, 33 bp, Homo sapien
taatttgcctaataggaaatgtgacttataatg

SEQ ID NO: 472832 - DNA, 33 bp, Homo sapien
taatttgcctaatagggaatgtgacttataatg

SEQ ID NO: 472833 - DNA, 33 bp, Homo sapien
tttggctcgagtgggcgaggtggtagttacaag

SEQ ID NO: 472834 - DNA, 33 bp, Homo sapien
tttggctcgagtgggctaggtggtagttacaag

SEQ ID NO: 472835 - DNA, 33 bp, Homo sapien
tgccttttggagttcaactagctctgaaaattg

SEQ ID NO: 472836 - DNA, 33 bp, Homo sapien
tgccttttggagttcatctagctctgaaaattg

SEQ ID NO: 472837 - DNA, 33 bp, Homo sapien
cctttattgctgagaaacatcttaagtttggac

SEQ ID NO: 472838 - DNA, 33 bp, Homo sapien
cctttattgctgagaaccatcttaagtttggac

SEQ ID NO: 472839 - DNA, 33 bp, Homo sapien
gaccttgggttccatacagatttcttagatact

SEQ ID NO: 472840 - DNA, 33 bp, Homo sapien
gaccttgggttccatagagatttcttagatact

SEQ ID NO: 472841 - DNA, 33 bp, Homo sapien
ccagaatccagaatccagaagagaaggccccct

SEQ ID NO: 472842 - DNA, 33 bp, Homo sapien
ccagaatccagaatccggaagagaaggccccct

SEQ ID NO: 472843 - DNA, 33 bp, Homo sapien
gaagattaatagaatacggtccacagggatgcc

SEQ ID NO: 472844 - DNA, 33 bp, Homo sapien
gaagattaatagaatatggtccacagggatgcc

SEQ ID NO: 472845 - DNA, 33 bp, Homo sapien
cacagtcttgcctttacactatgttgattattc

SEQ ID NO: 472846 - DNA, 33 bp, Homo sapien
cacagtcttgcctttatactatgttgattattc

SEQ ID NO: 472847 - DNA, 33 bp, Homo sapien
actgttttcttactctcaaatgtggtggtctta

SEQ ID NO: 472848 - DNA, 33 bp, Homo sapien
actgttttcttactctgaaatgtggtggtctta

SEQ ID NO: 472849 - DNA, 33 bp, Homo sapien
tggcaagttcagtctgcagtaagagttacacta

SEQ ID NO: 472850 - DNA, 33 bp, Homo sapien
tggcaagttcagtctgtagtaagagttacacta

SEQ ID NO: 472851 - DNA, 33 bp, Homo sapien
tataaactgggccaaacaaagcaaggccaccct

SEQ ID NO: 472852 - DNA, 33 bp, Homo sapien
tataaactgggccaaagaaagcaaggccaccct

SEQ ID NO: 472853 - DNA, 33 bp, Homo sapien
ccaggagttaggcccactgagtgaattacatat

SEQ ID NO: 472854 - DNA, 33 bp, Homo sapien
ccaggagttaggcccagtgagtgaattacatat

SEQ ID NO: 472855 - DNA, 33 bp, Homo sapien
gagtagaaatgtttaacatggtagaaaataaag

SEQ ID NO: 472856 - DNA, 33 bp, Homo sapien
gagtagaaatgtttaagatggtagaaaataaag

SEQ ID NO: 472857 - DNA, 33 bp, Homo sapien
taagatgataggcttccactacagaaagtgaac

SEQ ID NO: 472858 - DNA, 33 bp, Homo sapien
taagatgataggcttctactacagaaagtgaac

SEQ ID NO: 472859 - DNA, 33 bp, Homo sapien
atgctatgtcacctggaaatcaggtctctgtct

SEQ ID NO: 472860 - DNA, 33 bp, Homo sapien
atgctatgtcacctggtaatcaggtctctgtct

SEQ ID NO: 472861 - DNA, 33 bp, Homo sapien
tgtcattgaataataacccatatctgagacctg

SEQ ID NO: 472862 - DNA, 33 bp, Homo sapien
tgtcattgaataataatccatatctgagacctg

SEQ ID NO: 472863 - DNA, 33 bp, Homo sapien
gagtcctttaacaacacctataacgataaaaaa

SEQ ID NO: 472864 - DNA, 33 bp, Homo sapien
gagtcctttaacaacatctataacgataaaaaa

SEQ ID NO: 472865 - DNA, 33 bp, Homo sapien
ggagtataaaacatgaacattgtacataggtag

SEQ ID NO: 472866 - DNA, 33 bp, Homo sapien
ggagtataaaacatgagcattgtacataggtag

SEQ ID NO: 472867 - DNA, 33 bp, Homo sapien
caggtaatgaactcaacccatagtcaaataata

SEQ ID NO: 472868 - DNA, 33 bp, Homo sapien
caggtaatgaactcaatccatagtcaaataata

SEQ ID NO: 472869 - DNA, 33 bp, Homo sapien
atagtgtcttgtaatgcagtatctcccaactct

SEQ ID NO: 472870 - DNA, 33 bp, Homo sapien
atagtgtcttgtaatgtagtatctcccaactct

SEQ ID NO: 472871 - DNA, 33 bp, Homo sapien
catatgactccagacaagcaagttatttgttgg

SEQ ID NO: 472872 - DNA, 33 bp, Homo sapien
catatgactccagacaggcaagttatttgttgg

SEQ ID NO: 472873 - DNA, 33 bp, Homo sapien
ataaacactgaaaaaaagtacagcaaaatggat

SEQ ID NO: 472874 - DNA, 33 bp, Homo sapien
ataaacactgaaaaaacgtacagcaaaatggat

SEQ ID NO: 472875 - DNA, 33 bp, Homo sapien
ggaccccatcccttcacgagtgcttacacaact

SEQ ID NO: 472876 - DNA, 33 bp, Homo sapien
ggaccccatcccttcatgagtgcttacacaact

SEQ ID NO: 472877 - DNA, 33 bp, Homo sapien
agttcagttttctaaaatagactattacctcat

SEQ ID NO: 472878 - DNA, 33 bp, Homo sapien
agttcagttttctaaagtagactattacctcat

SEQ ID NO: 472879 - DNA, 33 bp, Homo sapien
gcacaaagtttatctccgaatttctgtgtaagc

SEQ ID NO: 472880 - DNA, 33 bp, Homo sapien
gcacaaagtttatctctgaatttctgtgtaagc

SEQ ID NO: 472881 - DNA, 33 bp, Homo sapien
ctggggagcaactcagacctcatgttggaatca

SEQ ID NO: 472882 - DNA, 33 bp, Homo sapien
ctggggagcaactcagtcctcatgttggaatca

SEQ ID NO: 472883 - DNA, 33 bp, Homo sapien
tgaacatccagtaccacgaagtgcagagatctt

SEQ ID NO: 472884 - DNA, 33 bp, Homo sapien
tgaacatccagtaccatgaagtgcagagatctt

SEQ ID NO: 472885 - DNA, 33 bp, Homo sapien
tgtctgctgtaagcgcccttggatgaaacttca

SEQ ID NO: 472886 - DNA, 33 bp, Homo sapien
tgtctgctgtaagcgctcttggatgaaacttca

SEQ ID NO: 472887 - DNA, 33 bp, Homo sapien
tccactagtcacaatggattttttaaggagagc

SEQ ID NO: 472888 - DNA, 33 bp, Homo sapien
tccactagtcacaatgtattttttaaggagagc

SEQ ID NO: 472889 - DNA, 33 bp, Homo sapien
tcacaaaaaatacagaaccaatccagagcagcg

SEQ ID NO: 472890 - DNA, 33 bp, Homo sapien
tcacaaaaaatacagacccaatccagagcagcg

SEQ ID NO: 472891 - DNA, 33 bp, Homo sapien
gctttgtaccgctctcaaaatgagcaaagatga

SEQ ID NO: 472892 - DNA, 33 bp, Homo sapien
gctttgtaccgctctcgaaatgagcaaagatga

SEQ ID NO: 472893 - DNA, 33 bp, Homo sapien
tctccttttgaaggaaagtgtcatctgttccta

SEQ ID NO: 472894 - DNA, 33 bp, Homo sapien
tctccttttgaaggaaggtgtcatctgttccta

SEQ ID NO: 472895 - DNA, 33 bp, Homo sapien
ccctgaacatgggtgcactcaccttaatggcca

SEQ ID NO: 472896 - DNA, 33 bp, Homo sapien
ccctgaacatgggtgcgctcaccttaatggcca

SEQ ID NO: 472897 - DNA, 33 bp, Homo sapien
gaaaagtcatgggatacctctggtcttagagca

SEQ ID NO: 472898 - DNA, 33 bp, Homo sapien
gaaaagtcatgggatagctctggtcttagagca

SEQ ID NO: 472899 - DNA, 33 bp, Homo sapien
tgtggggaaagcagtcacctggtaagagttttt

SEQ ID NO: 472900 - DNA, 33 bp, Homo sapien
tgtggggaaagcagtcgcctggtaagagttttt

SEQ ID NO: 472901 - DNA, 33 bp, Homo sapien
atgctacaggtttacaatgcaaggatgaggtag

SEQ ID NO: 472902 - DNA, 33 bp, Homo sapien
atgctacaggtttacagtgcaaggatgaggtag

SEQ ID NO: 472903 - DNA, 33 bp, Homo sapien
acctcacttttcaagacgcttcaactcctatta

SEQ ID NO: 472904 - DNA, 33 bp, Homo sapien
acctcacttttcaagatgcttcaactcctatta

SEQ ID NO: 472905 - DNA, 33 bp, Homo sapien
aaaaggattgtctttaaaaagtggctttgaatg

SEQ ID NO: 472906 - DNA, 33 bp, Homo sapien
aaaaggattgtctttacaaagtggctttgaatg

SEQ ID NO: 472907 - DNA, 33 bp, Homo sapien
ctgaccataaaccatccgactcacaaagccctt

SEQ ID NO: 472908 - DNA, 33 bp, Homo sapien
ctgaccataaaccatctgactcacaaagccctt

SEQ ID NO: 472909 - DNA, 33 bp, Homo sapien
tgtaaccagcttgtccagagttctgagtaagcc

SEQ ID NO: 472910 - DNA, 33 bp, Homo sapien
tgtaaccagcttgtccggagttctgagtaagcc

SEQ ID NO: 472911 - DNA, 33 bp, Homo sapien
aggccgaatttaaaggccacttcagccatggac

SEQ ID NO: 472912 - DNA, 33 bp, Homo sapien
aggccgaatttaaaggtcacttcagccatggac

SEQ ID NO: 472913 - DNA, 33 bp, Homo sapien
ataataaaaacgaagcggatatgcaccttatat

SEQ ID NO: 472914 - DNA, 33 bp, Homo sapien
ataataaaaacgaagctgatatgcaccttatat

SEQ ID NO: 472915 - DNA, 33 bp, Homo sapien
taaaatgtctattacagatcagatactgcacta

SEQ ID NO: 472916 - DNA, 33 bp, Homo sapien
taaaatgtctattacatatcagatactgcacta

SEQ ID NO: 472917 - DNA, 33 bp, Homo sapien
tctctgagatagataaaaccacctgggacactt

SEQ ID NO: 472918 - DNA, 33 bp, Homo sapien
tctctgagatagataagaccacctgggacactt

SEQ ID NO: 472919 - DNA, 33 bp, Homo sapien
aatggactttgggtgacctaaactgagccagta

SEQ ID NO: 472920 - DNA, 33 bp, Homo sapien
aatggactttgggtgagctaaactgagccagta

SEQ ID NO: 472921 - DNA, 33 bp, Homo sapien
tttaattgcagttttacgatggatcaagcataa

SEQ ID NO: 472922 - DNA, 33 bp, Homo sapien
tttaattgcagttttatgatggatcaagcataa

SEQ ID NO: 472923 - DNA, 33 bp, Homo sapien
ctagatagaaatattaataagatcatgaatgtg

SEQ ID NO: 472924 - DNA, 33 bp, Homo sapien
ctagatagaaatattactaagatcatgaatgtg

SEQ ID NO: 472925 - DNA, 33 bp, Homo sapien
caatgaagtaatgacacctatatgggagccttt

SEQ ID NO: 472926 - DNA, 33 bp, Homo sapien
caatgaagtaatgacatctatatgggagccttt

SEQ ID NO: 472927 - DNA, 33 bp, Homo sapien
tacagggttaaaaggcaaacacaataggctgca

SEQ ID NO: 472928 - DNA, 33 bp, Homo sapien
tacagggttaaaaggcgaacacaataggctgca

SEQ ID NO: 472929 - DNA, 33 bp, Homo sapien
ataactgtgctgaaaactgataaggggttgatc

SEQ ID NO: 472930 - DNA, 33 bp, Homo sapien
ataactgtgctgaaaattgataaggggttgatc

SEQ ID NO: 472931 - DNA, 33 bp, Homo sapien
taaaaagagaagagcccgaaatgacttggcact

SEQ ID NO: 472932 - DNA, 33 bp, Homo sapien
taaaaagagaagagcctgaaatgacttggcact

SEQ ID NO: 472933 - DNA, 33 bp, Homo sapien
ttcacaatagcaataaaaattacagagtaccta

SEQ ID NO: 472934 - DNA, 33 bp, Homo sapien
ttcacaatagcaataagaattacagagtaccta

SEQ ID NO: 472935 - DNA, 33 bp, Homo sapien
atattaaaactgaagaactctctcaaggcatta

SEQ ID NO: 472936 - DNA, 33 bp, Homo sapien
atattaaaactgaagacctctctcaaggcatta

SEQ ID NO: 472937 - DNA, 33 bp, Homo sapien
ccctcagtcacacagactcaaggctttgggttc

SEQ ID NO: 472938 - DNA, 33 bp, Homo sapien
ccctcagtcacacagattcaaggctttgggttc

SEQ ID NO: 472939 - DNA, 33 bp, Homo sapien
agtcattggcattaaactgactaactcattttt

SEQ ID NO: 472940 - DNA, 33 bp, Homo sapien
agtcattggcattaaattgactaactcattttt

SEQ ID NO: 472941 - DNA, 33 bp, Homo sapien
aagagggaaactgaccagcacttttgataagac

SEQ ID NO: 472942 - DNA, 33 bp, Homo sapien
aagagggaaactgaccggcacttttgataagac

SEQ ID NO: 472943 - DNA, 33 bp, Homo sapien
cttttgccattgctgacgataccacatggcagt

SEQ ID NO: 472944 - DNA, 33 bp, Homo sapien
cttttgccattgctgatgataccacatggcagt

SEQ ID NO: 472945 - DNA, 33 bp, Homo sapien
cactcaggattcccacaaaaacgaactccactg

SEQ ID NO: 472946 - DNA, 33 bp, Homo sapien
cactcaggattcccaccaaaacgaactccactg

SEQ ID NO: 472947 - DNA, 33 bp, Homo sapien
ttcttgggtaatactacatgggatttaattcca

SEQ ID NO: 472948 - DNA, 33 bp, Homo sapien
ttcttgggtaatactatatgggatttaattcca

SEQ ID NO: 472949 - DNA, 33 bp, Homo sapien
attacaaggatcacacaaattaaaatgggtaaa

SEQ ID NO: 472950 - DNA, 33 bp, Homo sapien
attacaaggatcacacgaattaaaatgggtaaa

SEQ ID NO: 472951 - DNA, 33 bp, Homo sapien
acttgtcctcttgagcggcattagaaggagtac

SEQ ID NO: 472952 - DNA, 33 bp, Homo sapien
acttgtcctcttgagctgcattagaaggagtac

SEQ ID NO: 472953 - DNA, 33 bp, Homo sapien
ggacttattctggcacacaatagttaaacacag

SEQ ID NO: 472954 - DNA, 33 bp, Homo sapien
ggacttattctggcacgcaatagttaaacacag

SEQ ID NO: 472955 - DNA, 33 bp, Homo sapien
atcctgcaggcatttacagcccataggcacttg

SEQ ID NO: 472956 - DNA, 33 bp, Homo sapien
atcctgcaggcatttatagcccataggcacttg

SEQ ID NO: 472957 - DNA, 33 bp, Homo sapien
caggcctttgtcccagactcgctttgcactgag

SEQ ID NO: 472958 - DNA, 33 bp, Homo sapien
caggcctttgtcccaggctcgctttgcactgag

SEQ ID NO: 472959 - DNA, 33 bp, Homo sapien
tattatgaacatacatcaccgggggccagaaga

SEQ ID NO: 472960 - DNA, 33 bp, Homo sapien
tattatgaacatacattaccgggggccagaaga

SEQ ID NO: 472961 - DNA, 33 bp, Homo sapien
tcttgagtatggcttacggagatgtctcagttg

SEQ ID NO: 472962 - DNA, 33 bp, Homo sapien
tcttgagtatggcttatggagatgtctcagttg

SEQ ID NO: 472963 - DNA, 33 bp, Homo sapien
gggaactgtccacccacgctgctggcgccctcc

SEQ ID NO: 472964 - DNA, 33 bp, Homo sapien
gggaactgtccacccatgctgctggcgccctcc

SEQ ID NO: 472965 - DNA, 33 bp, Homo sapien
tagtgtgattgggaccaagacattatggagaaa

SEQ ID NO: 472966 - DNA, 33 bp, Homo sapien
tagtgtgattgggaccgagacattatggagaaa

SEQ ID NO: 472967 - DNA, 33 bp, Homo sapien
aggcccctgtggaagacaaaacaacttgagaaa

SEQ ID NO: 472968 - DNA, 33 bp, Homo sapien
aggcccctgtggaagagaaaacaacttgagaaa

SEQ ID NO: 472969 - DNA, 33 bp, Homo sapien
ctttaataaatactcaatagatgttggaattta

SEQ ID NO: 472970 - DNA, 33 bp, Homo sapien
ctttaataaatactcagtagatgttggaattta

SEQ ID NO: 472971 - DNA, 33 bp, Homo sapien
actaaaatttgtgagcaagcgattcctaaatca

SEQ ID NO: 472972 - DNA, 33 bp, Homo sapien
actaaaatttgtgagcgagcgattcctaaatca

SEQ ID NO: 472973 - DNA, 33 bp, Homo sapien
atagtagactgggatccatttcaggccatggat

SEQ ID NO: 472974 - DNA, 33 bp, Homo sapien
atagtagactgggatctatttcaggccatggat

SEQ ID NO: 472975 - DNA, 33 bp, Homo sapien
tctacattacgaaaccgatctccacaaaatagt

SEQ ID NO: 472976 - DNA, 33 bp, Homo sapien
tctacattacgaaacctatctccacaaaatagt

SEQ ID NO: 472977 - DNA, 33 bp, Homo sapien
acaacaatgaatcatcaagatcccagtggtgcc

SEQ ID NO: 472978 - DNA, 33 bp, Homo sapien
acaacaatgaatcatccagatcccagtggtgcc

SEQ ID NO: 472979 - DNA, 33 bp, Homo sapien
ccaagaggagttacaacatgagaaatggcatgg

SEQ ID NO: 472980 - DNA, 33 bp, Homo sapien
ccaagaggagttacaatatgagaaatggcatgg

SEQ ID NO: 472981 - DNA, 33 bp, Homo sapien
ttcaaaattttgtgcccattacaaagccccaca

SEQ ID NO: 472982 - DNA, 33 bp, Homo sapien
ttcaaaattttgtgccgattacaaagccccaca

SEQ ID NO: 472983 - DNA, 33 bp, Homo sapien
ccaagttatagttcctaaaatagttacatgacc

SEQ ID NO: 472984 - DNA, 33 bp, Homo sapien
ccaagttatagttcctcaaatagttacatgacc

SEQ ID NO: 472985 - DNA, 33 bp, Homo sapien
cacacatgtttcttcaatagtgagcacctgttc

SEQ ID NO: 472986 - DNA, 33 bp, Homo sapien
cacacatgtttcttcagtagtgagcacctgttc

SEQ ID NO: 472987 - DNA, 33 bp, Homo sapien
caataggaactattacagaaaaccagatccaac

SEQ ID NO: 472988 - DNA, 33 bp, Homo sapien
caataggaactattacggaaaaccagatccaac

SEQ ID NO: 472989 - DNA, 33 bp, Homo sapien
tgaaccaaggcttactaacttgtccggtggtag

SEQ ID NO: 472990 - DNA, 33 bp, Homo sapien
tgaaccaaggcttactcacttgtccggtggtag

SEQ ID NO: 472991 - DNA, 33 bp, Homo sapien
ctcttcgaggtgtaaccatggtaatgagatcag

SEQ ID NO: 472992 - DNA, 33 bp, Homo sapien
ctcttcgaggtgtaactatggtaatgagatcag

SEQ ID NO: 472993 - DNA, 33 bp, Homo sapien
ggcagctctgtggcaaaccccgttccactgctc

SEQ ID NO: 472994 - DNA, 33 bp, Homo sapien
ggcagctctgtggcaagccccgttccactgctc

SEQ ID NO: 472995 - DNA, 33 bp, Homo sapien
atgactttctaatggcgcacccttgtcacaata

SEQ ID NO: 472996 - DNA, 33 bp, Homo sapien
atgactttctaatggctcacccttgtcacaata

SEQ ID NO: 472997 - DNA, 33 bp, Homo sapien
atatggaatgattagaacagctgcattttcttg

SEQ ID NO: 472998 - DNA, 33 bp, Homo sapien
atatggaatgattagagcagctgcattttcttg

SEQ ID NO: 472999 - DNA, 33 bp, Homo sapien
tccaggatgtataaacagcttctaaatgtgcat

SEQ ID NO: 473000 - DNA, 33 bp, Homo sapien
tccaggatgtataaacggcttctaaatgtgcat

SEQ ID NO: 473001 - DNA, 33 bp, Homo sapien
cttctttctttggtaaatccttcctttcctggt

SEQ ID NO: 473002 - DNA, 33 bp, Homo sapien
cttctttctttggtaagtccttcctttcctggt

SEQ ID NO: 473003 - DNA, 33 bp, Homo sapien
tagagcttgaaacaccggacatacttaacatta

SEQ ID NO: 473004 - DNA, 33 bp, Homo sapien
tagagcttgaaacacctgacatacttaacatta

SEQ ID NO: 473005 - DNA, 33 bp, Homo sapien
ttggagtttttcagatcagggcaactcagcaat

SEQ ID NO: 473006 - DNA, 33 bp, Homo sapien
ttggagtttttcagattagggcaactcagcaat

SEQ ID NO: 473007 - DNA, 33 bp, Homo sapien
ataaagtttggttgaaaagagagccctcattac

SEQ ID NO: 473008 - DNA, 33 bp, Homo sapien
ataaagtttggttgaagagagagccctcattac

SEQ ID NO: 473009 - DNA, 33 bp, Homo sapien
taagtgattaaagggccacaaaaatagatatgg

SEQ ID NO: 473010 - DNA, 33 bp, Homo sapien
taagtgattaaagggctacaaaaatagatatgg

SEQ ID NO: 473011 - DNA, 33 bp, Homo sapien
tttgtaaggcatataactgacaaaaagtagagt

SEQ ID NO: 473012 - DNA, 33 bp, Homo sapien
tttgtaaggcatataagtgacaaaaagtagagt

SEQ ID NO: 473013 - DNA, 33 bp, Homo sapien
atattcaaggtatacacgatgatttgatgtata

SEQ ID NO: 473014 - DNA, 33 bp, Homo sapien
atattcaaggtatacatgatgatttgatgtata

SEQ ID NO: 473015 - DNA, 33 bp, Homo sapien
tcaagggtgaccaagccctgtgctggtatgaga

SEQ ID NO: 473016 - DNA, 33 bp, Homo sapien
tcaagggtgaccaagcgctgtgctggtatgaga

SEQ ID NO: 473017 - DNA, 33 bp, Homo sapien
ttgttgaccatgtcccagcttgaaatgacctgg

SEQ ID NO: 473018 - DNA, 33 bp, Homo sapien
ttgttgaccatgtccccgcttgaaatgacctgg

SEQ ID NO: 473019 - DNA, 33 bp, Homo sapien
cacgaatgcagtgataaatgaagaatgattgtt

SEQ ID NO: 473020 - DNA, 33 bp, Homo sapien
cacgaatgcagtgatagatgaagaatgattgtt

SEQ ID NO: 473021 - DNA, 33 bp, Homo sapien
atgtctccgatgattgaaggctaagtgacatga

SEQ ID NO: 473022 - DNA, 33 bp, Homo sapien
atgtctccgatgattggaggctaagtgacatga

SEQ ID NO: 473023 - DNA, 33 bp, Homo sapien
tgctcatttcaccaggacattgatatctgcttg

SEQ ID NO: 473024 - DNA, 33 bp, Homo sapien
tgctcatttcaccagggcattgatatctgcttg

SEQ ID NO: 473025 - DNA, 33 bp, Homo sapien
aactgccaaagctttaagagagcccaaatgcca

SEQ ID NO: 473026 - DNA, 33 bp, Homo sapien
aactgccaaagctttaggagagcccaaatgcca

SEQ ID NO: 473027 - DNA, 33 bp, Homo sapien
aattatagtaaaagatgagtggaaactggctgc

SEQ ID NO: 473028 - DNA, 33 bp, Homo sapien
aattatagtaaaagattagtggaaactggctgc

SEQ ID NO: 473029 - DNA, 33 bp, Homo sapien
gaaaaggaaaatggaacgcatatagcagatctc

SEQ ID NO: 473030 - DNA, 33 bp, Homo sapien
gaaaaggaaaatggaatgcatatagcagatctc

SEQ ID NO: 473031 - DNA, 33 bp, Homo sapien
tcctgtagaaaatttcaaaagtccataatataa

SEQ ID NO: 473032 - DNA, 33 bp, Homo sapien
tcctgtagaaaatttcgaaagtccataatataa

SEQ ID NO: 473033 - DNA, 33 bp, Homo sapien
aagaaatagccattgaacttcaaggattaatca

SEQ ID NO: 473034 - DNA, 33 bp, Homo sapien
aagaaatagccattgaccttcaaggattaatca

SEQ ID NO: 473035 - DNA, 33 bp, Homo sapien
cttaagatggattacccgaagtttgagattgta

SEQ ID NO: 473036 - DNA, 33 bp, Homo sapien
cttaagatggattacctgaagtttgagattgta

SEQ ID NO: 473037 - DNA, 33 bp, Homo sapien
ataacttgatgcaatacactccgtgctgtggag

SEQ ID NO: 473038 - DNA, 33 bp, Homo sapien
ataacttgatgcaatatactccgtgctgtggag

SEQ ID NO: 473039 - DNA, 33 bp, Homo sapien
atttcaaaataaagtcaatgcagatgcaattag

SEQ ID NO: 473040 - DNA, 33 bp, Homo sapien
atttcaaaataaagtcgatgcagatgcaattag

SEQ ID NO: 473041 - DNA, 33 bp, Homo sapien
ggaaagcacaaagactaaataaaagcagcaacc

SEQ ID NO: 473042 - DNA, 33 bp, Homo sapien
ggaaagcacaaagactgaataaaagcagcaacc

SEQ ID NO: 473043 - DNA, 33 bp, Homo sapien
tgccttctaatgtgctcacatctcatactctgt

SEQ ID NO: 473044 - DNA, 33 bp, Homo sapien
tgccttctaatgtgcttacatctcatactctgt

SEQ ID NO: 473045 - DNA, 33 bp, Homo sapien
tgtgatagaaccaacaacatcaactatggttta

SEQ ID NO: 473046 - DNA, 33 bp, Homo sapien
tgtgatagaaccaacagcatcaactatggttta

SEQ ID NO: 473047 - DNA, 33 bp, Homo sapien
gatgacagatgtaaggaccacagatcggagtta

SEQ ID NO: 473048 - DNA, 33 bp, Homo sapien
gatgacagatgtaagggccacagatcggagtta

SEQ ID NO: 473049 - DNA, 33 bp, Homo sapien
agtccatgagggaatacgcgtgactaggccccc

SEQ ID NO: 473050 - DNA, 33 bp, Homo sapien
agtccatgagggaatatgcgtgactaggccccc

SEQ ID NO: 473051 - DNA, 33 bp, Homo sapien
ttaatactctctgcaaaaatctgtcctcatgcc

SEQ ID NO: 473052 - DNA, 33 bp, Homo sapien
ttaatactctctgcaataatctgtcctcatgcc

SEQ ID NO: 473053 - DNA, 33 bp, Homo sapien
tgttgctgaaaaaagacacggtacaaacaagtc

SEQ ID NO: 473054 - DNA, 33 bp, Homo sapien
tgttgctgaaaaaagatacggtacaaacaagtc

SEQ ID NO: 473055 - DNA, 33 bp, Homo sapien
gcctgtgacacataaacgctaccaatatcctag

SEQ ID NO: 473056 - DNA, 33 bp, Homo sapien
gcctgtgacacataaatgctaccaatatcctag

SEQ ID NO: 473057 - DNA, 33 bp, Homo sapien
agtcattgtggcacataatccaggttgacaagc

SEQ ID NO: 473058 - DNA, 33 bp, Homo sapien
agtcattgtggcacatcatccaggttgacaagc

SEQ ID NO: 473059 - DNA, 33 bp, Homo sapien
cagagtagacagtatacatttggtgttaggttg

SEQ ID NO: 473060 - DNA, 33 bp, Homo sapien
cagagtagacagtatagatttggtgttaggttg

SEQ ID NO: 473061 - DNA, 33 bp, Homo sapien
ttagtgccaaagattagagagacaagaagtaaa

SEQ ID NO: 473062 - DNA, 33 bp, Homo sapien
ttagtgccaaagattatagagacaagaagtaaa

SEQ ID NO: 473063 - DNA, 33 bp, Homo sapien
tgatcaccctgatgaacggtgatatatcaaggg

SEQ ID NO: 473064 - DNA, 33 bp, Homo sapien
tgatcaccctgatgaatggtgatatatcaaggg

SEQ ID NO: 473065 - DNA, 33 bp, Homo sapien
acaatgtggttctcatcaactgggttaggacct

SEQ ID NO: 473066 - DNA, 33 bp, Homo sapien
acaatgtggttctcatgaactgggttaggacct

SEQ ID NO: 473067 - DNA, 33 bp, Homo sapien
ggctgaatttcacacaatatttgccacttctac

SEQ ID NO: 473068 - DNA, 33 bp, Homo sapien
ggctgaatttcacacagtatttgccacttctac

SEQ ID NO: 473069 - DNA, 33 bp, Homo sapien
ggtcccgaagattcaacgaagaaaaaggtactc

SEQ ID NO: 473070 - DNA, 33 bp, Homo sapien
ggtcccgaagattcaatgaagaaaaaggtactc

SEQ ID NO: 473071 - DNA, 33 bp, Homo sapien
agacagtgtaatacaacggaaagagcacaaagt

SEQ ID NO: 473072 - DNA, 33 bp, Homo sapien
agacagtgtaatacaatggaaagagcacaaagt

SEQ ID NO: 473073 - DNA, 33 bp, Homo sapien
agatttacagtttataacacacttttctgcggg

SEQ ID NO: 473074 - DNA, 33 bp, Homo sapien
agatttacagtttatagcacacttttctgcggg

SEQ ID NO: 473075 - DNA, 33 bp, Homo sapien
tttagaaattcttactaaaatggtggcaatggc

SEQ ID NO: 473076 - DNA, 33 bp, Homo sapien
tttagaaattcttactgaaatggtggcaatggc

SEQ ID NO: 473077 - DNA, 33 bp, Homo sapien
aacagcccaactctaaaaacgtaaggagaatag

SEQ ID NO: 473078 - DNA, 33 bp, Homo sapien
aacagcccaactctaagaacgtaaggagaatag

SEQ ID NO: 473079 - DNA, 33 bp, Homo sapien
cactgggtggagaatacggttgtctagacgttt

SEQ ID NO: 473080 - DNA, 33 bp, Homo sapien
cactgggtggagaatatggttgtctagacgttt

SEQ ID NO: 473081 - DNA, 33 bp, Homo sapien
cattgcttttctggacaattctacacagtacca

SEQ ID NO: 473082 - DNA, 33 bp, Homo sapien
cattgcttttctggaccattctacacagtacca

SEQ ID NO: 473083 - DNA, 33 bp, Homo sapien
aatatgtttgtttccacagataccggattaaat

SEQ ID NO: 473084 - DNA, 33 bp, Homo sapien
aatatgtttgtttccatagataccggattaaat

SEQ ID NO: 473085 - DNA, 33 bp, Homo sapien
caaaaattaagtgaaactgaggatttgttaatt

SEQ ID NO: 473086 - DNA, 33 bp, Homo sapien
caaaaattaagtgaaattgaggatttgttaatt

SEQ ID NO: 473087 - DNA, 33 bp, Homo sapien
ttattactcaggctaagttaccataacagaaat

SEQ ID NO: 473088 - DNA, 33 bp, Homo sapien
ttattactcaggctaatttaccataacagaaat

SEQ ID NO: 473089 - DNA, 33 bp, Homo sapien
cttgccaaactcaggccattggtcaaactgtag

SEQ ID NO: 473090 - DNA, 33 bp, Homo sapien
cttgccaaactcaggctattggtcaaactgtag

SEQ ID NO: 473091 - DNA, 33 bp, Homo sapien
ctgtctacaatagcccaaaaagatgtttaaaca

SEQ ID NO: 473092 - DNA, 33 bp, Homo sapien
ctgtctacaatagcccgaaaagatgtttaaaca

SEQ ID NO: 473093 - DNA, 33 bp, Homo sapien
ataccccagagatggaagacaatgtataaacac

SEQ ID NO: 473094 - DNA, 33 bp, Homo sapien
ataccccagagatggacgacaatgtataaacac

SEQ ID NO: 473095 - DNA, 33 bp, Homo sapien
aggtcataatatagaacagtgagcttggaacaa

SEQ ID NO: 473096 - DNA, 33 bp, Homo sapien
aggtcataatatagaatagtgagcttggaacaa

SEQ ID NO: 473097 - DNA, 33 bp, Homo sapien
atgaggctggttctgaaagtgctaaaataagtt

SEQ ID NO: 473098 - DNA, 33 bp, Homo sapien
atgaggctggttctgagagtgctaaaataagtt

SEQ ID NO: 473099 - DNA, 33 bp, Homo sapien
tagaagagttgagtaacgttttaaactaaccag

SEQ ID NO: 473100 - DNA, 33 bp, Homo sapien
tagaagagttgagtaatgttttaaactaaccag

SEQ ID NO: 473101 - DNA, 33 bp, Homo sapien
ttaaaaggtgctagtaaagactaaactcaaaat

SEQ ID NO: 473102 - DNA, 33 bp, Homo sapien
ttaaaaggtgctagtagagactaaactcaaaat

SEQ ID NO: 473103 - DNA, 33 bp, Homo sapien
aagtggaactcagtgaccttgcatagtggagtg

SEQ ID NO: 473104 - DNA, 33 bp, Homo sapien
aagtggaactcagtgatcttgcatagtggagtg

SEQ ID NO: 473105 - DNA, 33 bp, Homo sapien
gactgaatcttttgtccatctaattggtaagaa

SEQ ID NO: 473106 - DNA, 33 bp, Homo sapien
gactgaatcttttgtcgatctaattggtaagaa

SEQ ID NO: 473107 - DNA, 33 bp, Homo sapien
ccctctttttagcagcacaggttgggctcagtc

SEQ ID NO: 473108 - DNA, 33 bp, Homo sapien
ccctctttttagcagcgcaggttgggctcagtc

SEQ ID NO: 473109 - DNA, 33 bp, Homo sapien
agaatcttgtatccatcactggccaaagaagta

SEQ ID NO: 473110 - DNA, 33 bp, Homo sapien
agaatcttgtatccattactggccaaagaagta

SEQ ID NO: 473111 - DNA, 33 bp, Homo sapien
tcaccttctctcctcactccaaagtcttcagtg

SEQ ID NO: 473112 - DNA, 33 bp, Homo sapien
tcaccttctctcctcattccaaagtcttcagtg

SEQ ID NO: 473113 - DNA, 33 bp, Homo sapien
ctcaatgctatcctgcaaaggcacccaggaggg

SEQ ID NO: 473114 - DNA, 33 bp, Homo sapien
ctcaatgctatcctgcgaaggcacccaggaggg

SEQ ID NO: 473115 - DNA, 33 bp, Homo sapien
caaatgatacttaccgccagtgaaatgaatctt

SEQ ID NO: 473116 - DNA, 33 bp, Homo sapien
caaatgatacttaccgtcagtgaaatgaatctt

SEQ ID NO: 473117 - DNA, 33 bp, Homo sapien
ttttacaagagctttccaggtggacaagtctgg

SEQ ID NO: 473118 - DNA, 33 bp, Homo sapien
ttttacaagagctttctaggtggacaagtctgg

SEQ ID NO: 473119 - DNA, 33 bp, Homo sapien
atgtgggcaaagtaaacggaaagtcttctggaa

SEQ ID NO: 473120 - DNA, 33 bp, Homo sapien
atgtgggcaaagtaaatggaaagtcttctggaa

SEQ ID NO: 473121 - DNA, 33 bp, Homo sapien
gatgcagcagactttaccattgactctgacttc

SEQ ID NO: 473122 - DNA, 33 bp, Homo sapien
gatgcagcagactttagcattgactctgacttc

SEQ ID NO: 473123 - DNA, 33 bp, Homo sapien
tgaaaggtcattgcaactgacttttagactgag

SEQ ID NO: 473124 - DNA, 33 bp, Homo sapien
tgaaaggtcattgcaattgacttttagactgag

SEQ ID NO: 473125 - DNA, 33 bp, Homo sapien
tcagaacaaagtccagaagaacctctactaggc

SEQ ID NO: 473126 - DNA, 33 bp, Homo sapien
tcagaacaaagtccaggagaacctctactaggc

SEQ ID NO: 473127 - DNA, 33 bp, Homo sapien
gaattctgttcaagtcaaaaagtgagaatattg

SEQ ID NO: 473128 - DNA, 33 bp, Homo sapien
gaattctgttcaagtcgaaaagtgagaatattg

SEQ ID NO: 473129 - DNA, 33 bp, Homo sapien
cttaactgaacatttaactatctcttctggaag

SEQ ID NO: 473130 - DNA, 33 bp, Homo sapien
cttaactgaacatttagctatctcttctggaag

SEQ ID NO: 473131 - DNA, 33 bp, Homo sapien
caacaaatgctctctacatggtgacttctcaaa

SEQ ID NO: 473132 - DNA, 33 bp, Homo sapien
caacaaatgctctctatatggtgacttctcaaa

SEQ ID NO: 473133 - DNA, 33 bp, Homo sapien
ccagtcttacaaagcactctttcctgataaatg

SEQ ID NO: 473134 - DNA, 33 bp, Homo sapien
ccagtcttacaaagcattctttcctgataaatg

SEQ ID NO: 473135 - DNA, 33 bp, Homo sapien
tttgttttgagttgacacataattgccagtgtg

SEQ ID NO: 473136 - DNA, 33 bp, Homo sapien
tttgttttgagttgacgcataattgccagtgtg

SEQ ID NO: 473137 - DNA, 33 bp, Homo sapien
tcttccacctccagaacagtatcagtctcatta

SEQ ID NO: 473138 - DNA, 33 bp, Homo sapien
tcttccacctccagaatagtatcagtctcatta

SEQ ID NO: 473139 - DNA, 33 bp, Homo sapien
gaattattcatcaccacgtcctgaaaggagcaa

SEQ ID NO: 473140 - DNA, 33 bp, Homo sapien
gaattattcatcaccatgtcctgaaaggagcaa

SEQ ID NO: 473141 - DNA, 33 bp, Homo sapien
ttactgagttagatgacgctgtttcaagttaaa

SEQ ID NO: 473142 - DNA, 33 bp, Homo sapien
ttactgagttagatgatgctgtttcaagttaaa

SEQ ID NO: 473143 - DNA, 33 bp, Homo sapien
acaactctgtaagacacgaattaccatctgcct

SEQ ID NO: 473144 - DNA, 33 bp, Homo sapien
acaactctgtaagacaggaattaccatctgcct

SEQ ID NO: 473145 - DNA, 33 bp, Homo sapien
tgccattttattgtgaatagttctatagatatc

SEQ ID NO: 473146 - DNA, 33 bp, Homo sapien
tgccattttattgtgactagttctatagatatc

SEQ ID NO: 473147 - DNA, 33 bp, Homo sapien
ctgttgtagggatgaggcataatttatataaag

SEQ ID NO: 473148 - DNA, 33 bp, Homo sapien
ctgttgtagggatgagtcataatttatataaag

SEQ ID NO: 473149 - DNA, 33 bp, Homo sapien
gcaggatagtaacgtgaacatgattttatataa

SEQ ID NO: 473150 - DNA, 33 bp, Homo sapien
gcaggatagtaacgtggacatgattttatataa

SEQ ID NO: 473151 - DNA, 33 bp, Homo sapien
ctggaagaacacaaacagcaataggccttctaa

SEQ ID NO: 473152 - DNA, 33 bp, Homo sapien
ctggaagaacacaaacggcaataggccttctaa

SEQ ID NO: 473153 - DNA, 33 bp, Homo sapien
tggaggtccagagagaatacagtttacttccta

SEQ ID NO: 473154 - DNA, 33 bp, Homo sapien
tggaggtccagagagagtacagtttacttccta

SEQ ID NO: 473155 - DNA, 33 bp, Homo sapien
ataaataaaaagatgacgccctagacagttata

SEQ ID NO: 473156 - DNA, 33 bp, Homo sapien
ataaataaaaagatgatgccctagacagttata

SEQ ID NO: 473157 - DNA, 33 bp, Homo sapien
catgtaacctgggcaccatgtcacattatgttg

SEQ ID NO: 473158 - DNA, 33 bp, Homo sapien
catgtaacctgggcactatgtcacattatgttg

SEQ ID NO: 473159 - DNA, 33 bp, Homo sapien
tacacatgaaatcttacgataaaattagcctca

SEQ ID NO: 473160 - DNA, 33 bp, Homo sapien
tacacatgaaatcttatgataaaattagcctca

SEQ ID NO: 473161 - DNA, 33 bp, Homo sapien
tttctgtcagtaagaaatgttttatctattatg

SEQ ID NO: 473162 - DNA, 33 bp, Homo sapien
tttctgtcagtaagaattgttttatctattatg

SEQ ID NO: 473163 - DNA, 33 bp, Homo sapien
ttcacaattggaagtaagaatcagtttgattgt

SEQ ID NO: 473164 - DNA, 33 bp, Homo sapien
ttcacaattggaagtacgaatcagtttgattgt

SEQ ID NO: 473165 - DNA, 33 bp, Homo sapien
tcttactccctacacaccctttaagaccctgcg

SEQ ID NO: 473166 - DNA, 33 bp, Homo sapien
tcttactccctacacatcctttaagaccctgcg

SEQ ID NO: 473167 - DNA, 33 bp, Homo sapien
ctactttgtaactaagaacactcttaatggtag

SEQ ID NO: 473168 - DNA, 33 bp, Homo sapien
ctactttgtaactaaggacactcttaatggtag

SEQ ID NO: 473169 - DNA, 33 bp, Homo sapien
tcaccactgatgtaataaaaagtcatggactgc

SEQ ID NO: 473170 - DNA, 33 bp, Homo sapien
tcaccactgatgtaatcaaaagtcatggactgc

SEQ ID NO: 473171 - DNA, 33 bp, Homo sapien
tcttgttagctttgcacagatgggcctactgga

SEQ ID NO: 473172 - DNA, 33 bp, Homo sapien
tcttgttagctttgcatagatgggcctactgga

SEQ ID NO: 473173 - DNA, 33 bp, Homo sapien
ggaggaagccaagttacaatggatgtaaaccca

SEQ ID NO: 473174 - DNA, 33 bp, Homo sapien
ggaggaagccaagttagaatggatgtaaaccca

SEQ ID NO: 473175 - DNA, 33 bp, Homo sapien
ctaatacagcatgaaaacctttactctgataca

SEQ ID NO: 473176 - DNA, 33 bp, Homo sapien
ctaatacagcatgaaaccctttactctgataca

SEQ ID NO: 473177 - DNA, 33 bp, Homo sapien
ttctggacttggcagcaacttcccagtagccat

SEQ ID NO: 473178 - DNA, 33 bp, Homo sapien
ttctggacttggcagccacttcccagtagccat

SEQ ID NO: 473179 - DNA, 33 bp, Homo sapien
tgagtggttcggtggacgctatgaactatgctt

SEQ ID NO: 473180 - DNA, 33 bp, Homo sapien
tgagtggttcggtggatgctatgaactatgctt

SEQ ID NO: 473181 - DNA, 33 bp, Homo sapien
caaatccttctgtcacagatgttagaaggaacc

SEQ ID NO: 473182 - DNA, 33 bp, Homo sapien
caaatccttctgtcacggatgttagaaggaacc

SEQ ID NO: 473183 - DNA, 33 bp, Homo sapien
gcttggacatgttaaacttagggcatttattag

SEQ ID NO: 473184 - DNA, 33 bp, Homo sapien
gcttggacatgttaaatttagggcatttattag

SEQ ID NO: 473185 - DNA, 33 bp, Homo sapien
gtgtaagatgatgtaaaaacataatttagacat

SEQ ID NO: 473186 - DNA, 33 bp, Homo sapien
gtgtaagatgatgtaagaacataatttagacat

SEQ ID NO: 473187 - DNA, 33 bp, Homo sapien
gagacgtaagaaccaactgaaggagccctcaat

SEQ ID NO: 473188 - DNA, 33 bp, Homo sapien
gagacgtaagaaccaagtgaaggagccctcaat

SEQ ID NO: 473189 - DNA, 33 bp, Homo sapien
tcttgtagcgccagaaagtaacaaaatgctcaa

SEQ ID NO: 473190 - DNA, 33 bp, Homo sapien
tcttgtagcgccagaaggtaacaaaatgctcaa

SEQ ID NO: 473191 - DNA, 33 bp, Homo sapien
tcctgaaatcctctgaccttctacataatgttt

SEQ ID NO: 473192 - DNA, 33 bp, Homo sapien
tcctgaaatcctctgatcttctacataatgttt

SEQ ID NO: 473193 - DNA, 33 bp, Homo sapien
cactgcaagagtatcacgcaaaagagtttcatg

SEQ ID NO: 473194 - DNA, 33 bp, Homo sapien
cactgcaagagtatcatgcaaaagagtttcatg

SEQ ID NO: 473195 - DNA, 33 bp, Homo sapien
attttggctcaagaaaacctctagcaaagtaag

SEQ ID NO: 473196 - DNA, 33 bp, Homo sapien
attttggctcaagaaatcctctagcaaagtaag

SEQ ID NO: 473197 - DNA, 33 bp, Homo sapien
tttggaagatgccataggcaatgtaaaagagag

SEQ ID NO: 473198 - DNA, 33 bp, Homo sapien
tttggaagatgccatatgcaatgtaaaagagag

SEQ ID NO: 473199 - DNA, 33 bp, Homo sapien
atcaagtatctccctcaatggctgtgtgttacc

SEQ ID NO: 473200 - DNA, 33 bp, Homo sapien
atcaagtatctccctctatggctgtgtgttacc

SEQ ID NO: 473201 - DNA, 33 bp, Homo sapien
ttgaagtgagcagttacaattatttgtggtact

SEQ ID NO: 473202 - DNA, 33 bp, Homo sapien
ttgaagtgagcagttataattatttgtggtact

SEQ ID NO: 473203 - DNA, 33 bp, Homo sapien
ttgaattgtgtggaaactaaggcttgggaaggc

SEQ ID NO: 473204 - DNA, 33 bp, Homo sapien
ttgaattgtgtggaaagtaaggcttgggaaggc

SEQ ID NO: 473205 - DNA, 33 bp, Homo sapien
cttctgtatctatatcaattaactcttctctct

SEQ ID NO: 473206 - DNA, 33 bp, Homo sapien
cttctgtatctatatcgattaactcttctctct

SEQ ID NO: 473207 - DNA, 33 bp, Homo sapien
cttgggatactaatgacggtaagaaagacaaaa

SEQ ID NO: 473208 - DNA, 33 bp, Homo sapien
cttgggatactaatgatggtaagaaagacaaaa

SEQ ID NO: 473209 - DNA, 33 bp, Homo sapien
taaggaacagaatctacgacaatgaggaaaatc

SEQ ID NO: 473210 - DNA, 33 bp, Homo sapien
taaggaacagaatctatgacaatgaggaaaatc

SEQ ID NO: 473211 - DNA, 33 bp, Homo sapien
caaattagagtgtatacgacataacttggtatc

SEQ ID NO: 473212 - DNA, 33 bp, Homo sapien
caaattagagtgtatatgacataacttggtatc

SEQ ID NO: 473213 - DNA, 33 bp, Homo sapien
cagactgcagataagtaaacattaattggggct

SEQ ID NO: 473214 - DNA, 33 bp, Homo sapien
cagactgcagataagtcaacattaattggggct

SEQ ID NO: 473215 - DNA, 33 bp, Homo sapien
cagaagtggacactgacgaagctagtagctaga

SEQ ID NO: 473216 - DNA, 33 bp, Homo sapien
cagaagtggacactgatgaagctagtagctaga

SEQ ID NO: 473217 - DNA, 33 bp, Homo sapien
tggtacacgtcagaagaatgctaggaatgagtc

SEQ ID NO: 473218 - DNA, 33 bp, Homo sapien
tggtacacgtcagaagcatgctaggaatgagtc

SEQ ID NO: 473219 - DNA, 33 bp, Homo sapien
cctttctatttctccacggttgcctctctccat

SEQ ID NO: 473220 - DNA, 33 bp, Homo sapien
cctttctatttctccatggttgcctctctccat

SEQ ID NO: 473221 - DNA, 33 bp, Homo sapien
atcataaataatgtaactgtaatacgcacagag

SEQ ID NO: 473222 - DNA, 33 bp, Homo sapien
atcataaataatgtaattgtaatacgcacagag

SEQ ID NO: 473223 - DNA, 33 bp, Homo sapien
ccacttattgagaaaaagtagttatgacaaatg

SEQ ID NO: 473224 - DNA, 33 bp, Homo sapien
ccacttattgagaaaatgtagttatgacaaatg

SEQ ID NO: 473225 - DNA, 33 bp, Homo sapien
tccagagaaaggcaagacattaatatgtgagcc

SEQ ID NO: 473226 - DNA, 33 bp, Homo sapien
tccagagaaaggcaagtcattaatatgtgagcc

SEQ ID NO: 473227 - DNA, 33 bp, Homo sapien
ctgtaatcaaaaggctcaacccatttgtgggct

SEQ ID NO: 473228 - DNA, 33 bp, Homo sapien
ctgtaatcaaaaggctgaacccatttgtgggct

SEQ ID NO: 473229 - DNA, 33 bp, Homo sapien
taataaacctccacagaattgctgaaacattaa

SEQ ID NO: 473230 - DNA, 33 bp, Homo sapien
taataaacctccacagtattgctgaaacattaa

SEQ ID NO: 473231 - DNA, 33 bp, Homo sapien
aaatatcttatttacaacctcataggaactccc

SEQ ID NO: 473232 - DNA, 33 bp, Homo sapien
aaatatcttatttacaccctcataggaactccc

SEQ ID NO: 473233 - DNA, 33 bp, Homo sapien
tccctttgtcagatcacacattgcaatggagaa

SEQ ID NO: 473234 - DNA, 33 bp, Homo sapien
tccctttgtcagatcatacattgcaatggagaa

SEQ ID NO: 473235 - DNA, 33 bp, Homo sapien
tgcttattctctgtcccaaatactccaaagatt

SEQ ID NO: 473236 - DNA, 33 bp, Homo sapien
tgcttattctctgtcctaaatactccaaagatt

SEQ ID NO: 473237 - DNA, 33 bp, Homo sapien
taaaataatgtccccacgtcctcactgaaatgt

SEQ ID NO: 473238 - DNA, 33 bp, Homo sapien
taaaataatgtccccatgtcctcactgaaatgt

SEQ ID NO: 473239 - DNA, 33 bp, Homo sapien
aatgtgtgagtcaccacgatatttcaataatca

SEQ ID NO: 473240 - DNA, 33 bp, Homo sapien
aatgtgtgagtcaccatgatatttcaataatca

SEQ ID NO: 473241 - DNA, 33 bp, Homo sapien
gtagtacaagtgttaaagaaccctagcaagtat

SEQ ID NO: 473242 - DNA, 33 bp, Homo sapien
gtagtacaagtgttaaggaaccctagcaagtat

SEQ ID NO: 473243 - DNA, 33 bp, Homo sapien
gatatacagaacaagaacagaactatgtctctc

SEQ ID NO: 473244 - DNA, 33 bp, Homo sapien
gatatacagaacaagagcagaactatgtctctc

SEQ ID NO: 473245 - DNA, 33 bp, Homo sapien
gagaggcattgcagtacaaggagtcagagtgct

SEQ ID NO: 473246 - DNA, 33 bp, Homo sapien
gagaggcattgcagtagaaggagtcagagtgct

SEQ ID NO: 473247 - DNA, 33 bp, Homo sapien
tacctgtaagtgtcaaaaaaaaattctgtcaac

SEQ ID NO: 473248 - DNA, 33 bp, Homo sapien
tacctgtaagtgtcaagaaaaaattctgtcaac

SEQ ID NO: 473249 - DNA, 33 bp, Homo sapien
cagatgccaggccagaataagttgacagaattt

SEQ ID NO: 473250 - DNA, 33 bp, Homo sapien
cagatgccaggccagagtaagttgacagaattt

SEQ ID NO: 473251 - DNA, 33 bp, Homo sapien
tgggagagtgagcataatagaaggaaaaaaaaa

SEQ ID NO: 473252 - DNA, 33 bp, Homo sapien
tgggagagtgagcatagtagaaggaaaaaaaaa

SEQ ID NO: 473253 - DNA, 33 bp, Homo sapien
atgaccccgtactttccagtcctagctgattgg

SEQ ID NO: 473254 - DNA, 33 bp, Homo sapien
atgaccccgtactttctagtcctagctgattgg

SEQ ID NO: 473255 - DNA, 33 bp, Homo sapien
tcttacaacaggacaccaggtttccatgcaatc

SEQ ID NO: 473256 - DNA, 33 bp, Homo sapien
tcttacaacaggacactaggtttccatgcaatc

SEQ ID NO: 473257 - DNA, 33 bp, Homo sapien
tgttaaattgcacatacaagtttaatgcacttt

SEQ ID NO: 473258 - DNA, 33 bp, Homo sapien
tgttaaattgcacatataagtttaatgcacttt

SEQ ID NO: 473259 - DNA, 33 bp, Homo sapien
accctaatcctgggcaagttaatgtgaattaat

SEQ ID NO: 473260 - DNA, 33 bp, Homo sapien
accctaatcctgggcacgttaatgtgaattaat

SEQ ID NO: 473261 - DNA, 33 bp, Homo sapien
agcatctggctagattaaactcagaaccctaat

SEQ ID NO: 473262 - DNA, 33 bp, Homo sapien
agcatctggctagattgaactcagaaccctaat

SEQ ID NO: 473263 - DNA, 33 bp, Homo sapien
cacacatcccttctgacatagctgagctatatc

SEQ ID NO: 473264 - DNA, 33 bp, Homo sapien
cacacatcccttctgatatagctgagctatatc

SEQ ID NO: 473265 - DNA, 33 bp, Homo sapien
tgtgggccatttgggaacgtaaccgacaattat

SEQ ID NO: 473266 - DNA, 33 bp, Homo sapien
tgtgggccatttgggaccgtaaccgacaattat

SEQ ID NO: 473267 - DNA, 33 bp, Homo sapien
acagagccaggttgtaagcctaaactaaggtga

SEQ ID NO: 473268 - DNA, 33 bp, Homo sapien
acagagccaggttgtaggcctaaactaaggtga

SEQ ID NO: 473269 - DNA, 33 bp, Homo sapien
gattactcacaaaccaatgcctcaaatccaagt

SEQ ID NO: 473270 - DNA, 33 bp, Homo sapien
gattactcacaaaccagtgcctcaaatccaagt

SEQ ID NO: 473271 - DNA, 33 bp, Homo sapien
ctgcttgcctgaatctcagaatactattgctac

SEQ ID NO: 473272 - DNA, 33 bp, Homo sapien
ctgcttgcctgaatctgagaatactattgctac

SEQ ID NO: 473273 - DNA, 33 bp, Homo sapien
aaattaatacttagcaacttaaaattttacctt

SEQ ID NO: 473274 - DNA, 33 bp, Homo sapien
aaattaatacttagcagcttaaaattttacctt

SEQ ID NO: 473275 - DNA, 33 bp, Homo sapien
gtttagaatagatgggcactttggctctatgtt

SEQ ID NO: 473276 - DNA, 33 bp, Homo sapien
gtttagaatagatgggtactttggctctatgtt

SEQ ID NO: 473277 - DNA, 33 bp, Homo sapien
tgtgttagttatcttccctccctttattgacct

SEQ ID NO: 473278 - DNA, 33 bp, Homo sapien
tgtgttagttatcttctctccctttattgacct

SEQ ID NO: 473279 - DNA, 33 bp, Homo sapien
tgctcttagtgacacaaaataccaaagtattta

SEQ ID NO: 473280 - DNA, 33 bp, Homo sapien
tgctcttagtgacacagaataccaaagtattta

SEQ ID NO: 473281 - DNA, 33 bp, Homo sapien
agtgagtcatcctaaaatctggattaccttgct

SEQ ID NO: 473282 - DNA, 33 bp, Homo sapien
agtgagtcatcctaaagtctggattaccttgct

SEQ ID NO: 473283 - DNA, 33 bp, Homo sapien
agatctttacaaaaacactaacagaattcagaa

SEQ ID NO: 473284 - DNA, 33 bp, Homo sapien
agatctttacaaaaacgctaacagaattcagaa

SEQ ID NO: 473285 - DNA, 33 bp, Homo sapien
aggtgacttcaagtacaggacaaagtgggaaca

SEQ ID NO: 473286 - DNA, 33 bp, Homo sapien
aggtgacttcaagtacgggacaaagtgggaaca

SEQ ID NO: 473287 - DNA, 33 bp, Homo sapien
tgtttattagatatccaagtggagaggttgttg

SEQ ID NO: 473288 - DNA, 33 bp, Homo sapien
tgtttattagatatccgagtggagaggttgttg

SEQ ID NO: 473289 - DNA, 33 bp, Homo sapien
aatacaaatgctgtgaccttgaaaagcttattc

SEQ ID NO: 473290 - DNA, 33 bp, Homo sapien
aatacaaatgctgtgatcttgaaaagcttattc

SEQ ID NO: 473291 - DNA, 33 bp, Homo sapien
ctgtagtttcatatcaacttccacaagctaatc

SEQ ID NO: 473292 - DNA, 33 bp, Homo sapien
ctgtagtttcatatcagcttccacaagctaatc

SEQ ID NO: 473293 - DNA, 33 bp, Homo sapien
ctgaattctggttgtgaagattgtagtacagta

SEQ ID NO: 473294 - DNA, 33 bp, Homo sapien
ctgaattctggttgtgtagattgtagtacagta

SEQ ID NO: 473295 - DNA, 33 bp, Homo sapien
ataatgaagatggacactgtcagtttagattaa

SEQ ID NO: 473296 - DNA, 33 bp, Homo sapien
ataatgaagatggacattgtcagtttagattaa

SEQ ID NO: 473297 - DNA, 33 bp, Homo sapien
ataatctgtgaaaagtaaaaagaccttgaatga

SEQ ID NO: 473298 - DNA, 33 bp, Homo sapien
ataatctgtgaaaagtgaaaagaccttgaatga

SEQ ID NO: 473299 - DNA, 33 bp, Homo sapien
gaccaggtggacttaactgaatcagcagttcct

SEQ ID NO: 473300 - DNA, 33 bp, Homo sapien
gaccaggtggacttaattgaatcagcagttcct

SEQ ID NO: 473301 - DNA, 33 bp, Homo sapien
atcattcatgtcattgcatcctagtatgtttgt

SEQ ID NO: 473302 - DNA, 33 bp, Homo sapien
atcattcatgtcattgtatcctagtatgtttgt

SEQ ID NO: 473303 - DNA, 33 bp, Homo sapien
ggttattgtatggcataaaacaagaggctgtct

SEQ ID NO: 473304 - DNA, 33 bp, Homo sapien
ggttattgtatggcatgaaacaagaggctgtct

SEQ ID NO: 473305 - DNA, 33 bp, Homo sapien
tcacttcttctttacaaccgttttatgaagtag

SEQ ID NO: 473306 - DNA, 33 bp, Homo sapien
tcacttcttctttacagccgttttatgaagtag

SEQ ID NO: 473307 - DNA, 33 bp, Homo sapien
aggttaatggggagacacaatatggtttcatcc

SEQ ID NO: 473308 - DNA, 33 bp, Homo sapien
aggttaatggggagactcaatatggtttcatcc

SEQ ID NO: 473309 - DNA, 33 bp, Homo sapien
gggatataaacagaaaacatgtaccaatcttaa

SEQ ID NO: 473310 - DNA, 33 bp, Homo sapien
gggatataaacagaaagcatgtaccaatcttaa

SEQ ID NO: 473311 - DNA, 33 bp, Homo sapien
ggtaggaaatggatgacagatgagcgaaactca

SEQ ID NO: 473312 - DNA, 33 bp, Homo sapien
ggtaggaaatggatgagagatgagcgaaactca

SEQ ID NO: 473313 - DNA, 33 bp, Homo sapien
ggcttttgtgcaacaacattgacccatataaac

SEQ ID NO: 473314 - DNA, 33 bp, Homo sapien
ggcttttgtgcaacaatattgacccatataaac

SEQ ID NO: 473315 - DNA, 33 bp, Homo sapien
ctggagattgtcttcaacattaaaattgaatac

SEQ ID NO: 473316 - DNA, 33 bp, Homo sapien
ctggagattgtcttcatcattaaaattgaatac

SEQ ID NO: 473317 - DNA, 33 bp, Homo sapien
gggtggtctcttacacacacaggaaatattgtc

SEQ ID NO: 473318 - DNA, 33 bp, Homo sapien
gggtggtctcttacacgcacaggaaatattgtc

SEQ ID NO: 473319 - DNA, 33 bp, Homo sapien
aaatacttgaactgtaacaacactaagatatta

SEQ ID NO: 473320 - DNA, 33 bp, Homo sapien
aaatacttgaactgtagcaacactaagatatta

SEQ ID NO: 473321 - DNA, 33 bp, Homo sapien
aaaatcatataaaaagaaaagcagggaagtgat

SEQ ID NO: 473322 - DNA, 33 bp, Homo sapien
aaaatcatataaaaaggaaagcagggaagtgat

SEQ ID NO: 473323 - DNA, 33 bp, Homo sapien
agctcactaatcaacaaaataagtagtgtgcat

SEQ ID NO: 473324 - DNA, 33 bp, Homo sapien
agctcactaatcaacagaataagtagtgtgcat

SEQ ID NO: 473325 - DNA, 33 bp, Homo sapien
tggttgagaatagagagagttccaaggcatgga

SEQ ID NO: 473326 - DNA, 33 bp, Homo sapien
tggttgagaatagagatagttccaaggcatgga

SEQ ID NO: 473327 - DNA, 33 bp, Homo sapien
atctgctgcagagaataactaacgggacagcac

SEQ ID NO: 473328 - DNA, 33 bp, Homo sapien
atctgctgcagagaattactaacgggacagcac

SEQ ID NO: 473329 - DNA, 33 bp, Homo sapien
catagctcttggctacagactccttttagacgc

SEQ ID NO: 473330 - DNA, 33 bp, Homo sapien
catagctcttggctacggactccttttagacgc

SEQ ID NO: 473331 - DNA, 33 bp, Homo sapien
ttttctgcatagacaactaatccacaaactgcc

SEQ ID NO: 473332 - DNA, 33 bp, Homo sapien
ttttctgcatagacaattaatccacaaactgcc

SEQ ID NO: 473333 - DNA, 33 bp, Homo sapien
ataaatgtcccagtgactcaagggatgaagata

SEQ ID NO: 473334 - DNA, 33 bp, Homo sapien
ataaatgtcccagtgattcaagggatgaagata

SEQ ID NO: 473335 - DNA, 33 bp, Homo sapien
agctgcggccttgggaactcaaagaacaggaag

SEQ ID NO: 473336 - DNA, 33 bp, Homo sapien
agctgcggccttgggagctcaaagaacaggaag

SEQ ID NO: 473337 - DNA, 33 bp, Homo sapien
aggtgaaataccttcaatctgaaataaagaagc

SEQ ID NO: 473338 - DNA, 33 bp, Homo sapien
aggtgaaataccttcagtctgaaataaagaagc

SEQ ID NO: 473339 - DNA, 33 bp, Homo sapien
ttctccttcatattaaataggatgctttctctt

SEQ ID NO: 473340 - DNA, 33 bp, Homo sapien
ttctccttcatattaagtaggatgctttctctt

SEQ ID NO: 473341 - DNA, 33 bp, Homo sapien
ttattctggataacacactttaaatgtttcatt

SEQ ID NO: 473342 - DNA, 33 bp, Homo sapien
ttattctggataacactctttaaatgtttcatt

SEQ ID NO: 473343 - DNA, 33 bp, Homo sapien
gtgttatccagaataaagagctacagagattct

SEQ ID NO: 473344 - DNA, 33 bp, Homo sapien
gtgttatccagaataatgagctacagagattct

SEQ ID NO: 473345 - DNA, 33 bp, Homo sapien
cttctccttcctaccaacttatgtgacactgtg

SEQ ID NO: 473346 - DNA, 33 bp, Homo sapien
cttctccttcctaccagcttatgtgacactgtg

SEQ ID NO: 473347 - DNA, 33 bp, Homo sapien
tttctgaaaactaccaccaggatcagaaaatgc

SEQ ID NO: 473348 - DNA, 33 bp, Homo sapien
tttctgaaaactaccagcaggatcagaaaatgc

SEQ ID NO: 473349 - DNA, 33 bp, Homo sapien
gtgctgagccctcttcactcatcattacgccca

SEQ ID NO: 473350 - DNA, 33 bp, Homo sapien
gtgctgagccctcttcgctcatcattacgccca

SEQ ID NO: 473351 - DNA, 33 bp, Homo sapien
catcacacagtgaggaacaacactaaggaggca

SEQ ID NO: 473352 - DNA, 33 bp, Homo sapien
catcacacagtgaggagcaacactaaggaggca

SEQ ID NO: 473353 - DNA, 33 bp, Homo sapien
agaaagcagcagtacccggggaaagaatatggg

SEQ ID NO: 473354 - DNA, 33 bp, Homo sapien
agaaagcagcagtacctggggaaagaatatggg

SEQ ID NO: 473355 - DNA, 33 bp, Homo sapien
tgttatagattgtacccgcattcaacaattcct

SEQ ID NO: 473356 - DNA, 33 bp, Homo sapien
tgttatagattgtacctgcattcaacaattcct

SEQ ID NO: 473357 - DNA, 33 bp, Homo sapien
aagtctgcatctgaaacggcccttcttggttgt

SEQ ID NO: 473358 - DNA, 33 bp, Homo sapien
aagtctgcatctgaaatggcccttcttggttgt

SEQ ID NO: 473359 - DNA, 33 bp, Homo sapien
ccagagtggtgcacaaaggaaaagcacggaatg

SEQ ID NO: 473360 - DNA, 33 bp, Homo sapien
ccagagtggtgcacaagggaaaagcacggaatg

SEQ ID NO: 473361 - DNA, 33 bp, Homo sapien
ccactagctatatgtggcaaattacacttaatt

SEQ ID NO: 473362 - DNA, 33 bp, Homo sapien
ccactagctatatgtgtcaaattacacttaatt

SEQ ID NO: 473363 - DNA, 33 bp, Homo sapien
attctattcacttgtaagactatcttgtcaggg

SEQ ID NO: 473364 - DNA, 33 bp, Homo sapien
attctattcacttgtaggactatcttgtcaggg

SEQ ID NO: 473365 - DNA, 33 bp, Homo sapien
gtgaatcatttgagaagtcatggcccacaaaaa

SEQ ID NO: 473366 - DNA, 33 bp, Homo sapien
gtgaatcatttgagaattcatggcccacaaaaa

SEQ ID NO: 473367 - DNA, 33 bp, Homo sapien
ttagtgaaatattgtacgtttggagacgccatt

SEQ ID NO: 473368 - DNA, 33 bp, Homo sapien
ttagtgaaatattgtatgtttggagacgccatt

SEQ ID NO: 473369 - DNA, 33 bp, Homo sapien
ccttgtcctaaccagaacagatggattccaatt

SEQ ID NO: 473370 - DNA, 33 bp, Homo sapien
ccttgtcctaaccagagcagatggattccaatt

SEQ ID NO: 473371 - DNA, 33 bp, Homo sapien
gttctagaaagaagatcaactgacatgattaga

SEQ ID NO: 473372 - DNA, 33 bp, Homo sapien
gttctagaaagaagattaactgacatgattaga

SEQ ID NO: 473373 - DNA, 33 bp, Homo sapien
gtaagcctaaatgactgaaatgagtcctatgta

SEQ ID NO: 473374 - DNA, 33 bp, Homo sapien
gtaagcctaaatgacttaaatgagtcctatgta

SEQ ID NO: 473375 - DNA, 33 bp, Homo sapien
tcattttgggggagaactgacataatttctata

SEQ ID NO: 473376 - DNA, 33 bp, Homo sapien
tcattttgggggagaattgacataatttctata

SEQ ID NO: 473377 - DNA, 33 bp, Homo sapien
tggcaaaaagtacacaagtcatgttaaaggtat

SEQ ID NO: 473378 - DNA, 33 bp, Homo sapien
tggcaaaaagtacacaggtcatgttaaaggtat

SEQ ID NO: 473379 - DNA, 33 bp, Homo sapien
gtataaacagtcttgggatcttgattttgtttc

SEQ ID NO: 473380 - DNA, 33 bp, Homo sapien
gtataaacagtcttggtatcttgattttgtttc

SEQ ID NO: 473381 - DNA, 33 bp, Homo sapien
tagagactgacagaataaataccatttcttgct

SEQ ID NO: 473382 - DNA, 33 bp, Homo sapien
tagagactgacagaatgaataccatttcttgct

SEQ ID NO: 473383 - DNA, 33 bp, Homo sapien
tctggttggattagcaatacttcttggctgtga

SEQ ID NO: 473384 - DNA, 33 bp, Homo sapien
tctggttggattagcagtacttcttggctgtga

SEQ ID NO: 473385 - DNA, 33 bp, Homo sapien
tcttgggaatagaggtaaaatgacggattgtaa

SEQ ID NO: 473386 - DNA, 33 bp, Homo sapien
tcttgggaatagaggtgaaatgacggattgtaa

SEQ ID NO: 473387 - DNA, 33 bp, Homo sapien
aagaaaaaaaaatgcaatacggcttggaacatg

SEQ ID NO: 473388 - DNA, 33 bp, Homo sapien
aagaaaaaaaaatgcagtacggcttggaacatg

SEQ ID NO: 473389 - DNA, 33 bp, Homo sapien
catgcataaaaagtagaatgtaattactagcaa

SEQ ID NO: 473390 - DNA, 33 bp, Homo sapien
catgcataaaaagtaggatgtaattactagcaa

SEQ ID NO: 473391 - DNA, 33 bp, Homo sapien
catgataggcaactcaatgaagtagagaacaat

SEQ ID NO: 473392 - DNA, 33 bp, Homo sapien
catgataggcaactcagtgaagtagagaacaat

SEQ ID NO: 473393 - DNA, 33 bp, Homo sapien
atgtgactaatctagacatggggaaagattata

SEQ ID NO: 473394 - DNA, 33 bp, Homo sapien
atgtgactaatctagatatggggaaagattata

SEQ ID NO: 473395 - DNA, 33 bp, Homo sapien
gtttctaaaattaatacagttgaattactggat

SEQ ID NO: 473396 - DNA, 33 bp, Homo sapien
gtttctaaaattaatagagttgaattactggat

SEQ ID NO: 473397 - DNA, 33 bp, Homo sapien
attttaaacctcctctaagaccaatcagagtga

SEQ ID NO: 473398 - DNA, 33 bp, Homo sapien
attttaaacctcctctcagaccaatcagagtga

SEQ ID NO: 473399 - DNA, 33 bp, Homo sapien
taatgtgaaaatattacaacccacttcacagat

SEQ ID NO: 473400 - DNA, 33 bp, Homo sapien
taatgtgaaaatattataacccacttcacagat

SEQ ID NO: 473401 - DNA, 33 bp, Homo sapien
aagtaacaaagaaaaaactggtgacagcaaaca

SEQ ID NO: 473402 - DNA, 33 bp, Homo sapien
aagtaacaaagaaaaagctggtgacagcaaaca

SEQ ID NO: 473403 - DNA, 33 bp, Homo sapien
ctataaggaccacctggatcttcactgaccact

SEQ ID NO: 473404 - DNA, 33 bp, Homo sapien
ctataaggaccacctgtatcttcactgaccact

SEQ ID NO: 473405 - DNA, 33 bp, Homo sapien
aatgagataaagcacccggcacattgaaatatt

SEQ ID NO: 473406 - DNA, 33 bp, Homo sapien
aatgagataaagcacctggcacattgaaatatt

SEQ ID NO: 473407 - DNA, 33 bp, Homo sapien
gttgtgcgccttttcacgcccaccgcacggtgt

SEQ ID NO: 473408 - DNA, 33 bp, Homo sapien
gttgtgcgccttttcatgcccaccgcacggtgt

SEQ ID NO: 473409 - DNA, 33 bp, Homo sapien
ttaccagcctgagaagaagaaaagtgcaacatt

SEQ ID NO: 473410 - DNA, 33 bp, Homo sapien
ttaccagcctgagaaggagaaaagtgcaacatt

SEQ ID NO: 473411 - DNA, 33 bp, Homo sapien
ccctggcacctgaatacaaacctctttctcttt

SEQ ID NO: 473412 - DNA, 33 bp, Homo sapien
ccctggcacctgaatataaacctctttctcttt

SEQ ID NO: 473413 - DNA, 33 bp, Homo sapien
gggacatggctgccccaaaatggattcttttta

SEQ ID NO: 473414 - DNA, 33 bp, Homo sapien
gggacatggctgcccccaaatggattcttttta

SEQ ID NO: 473415 - DNA, 33 bp, Homo sapien
cgtgtgtgttgggggaaggtgtttgagtgttct

SEQ ID NO: 473416 - DNA, 33 bp, Homo sapien
cgtgtgtgttgggggacggtgtttgagtgttct

SEQ ID NO: 473417 - DNA, 33 bp, Homo sapien
aggaatgatgatagaaatctaaacctacttaat

SEQ ID NO: 473418 - DNA, 33 bp, Homo sapien
aggaatgatgatagaagtctaaacctacttaat

SEQ ID NO: 473419 - DNA, 33 bp, Homo sapien
gaaaaccactgaggacaggagattgatgtccca

SEQ ID NO: 473420 - DNA, 33 bp, Homo sapien
gaaaaccactgaggaccggagattgatgtccca

SEQ ID NO: 473421 - DNA, 33 bp, Homo sapien
gtgctcctagttctccagccttcagatcttgac

SEQ ID NO: 473422 - DNA, 33 bp, Homo sapien
gtgctcctagttctccggccttcagatcttgac

SEQ ID NO: 473423 - DNA, 33 bp, Homo sapien
tcatgctcctttaaaaccctgtctcatgagaaa

SEQ ID NO: 473424 - DNA, 33 bp, Homo sapien
tcatgctcctttaaaagcctgtctcatgagaaa

SEQ ID NO: 473425 - DNA, 33 bp, Homo sapien
aatgtcatagcaacacaatatataagattccta

SEQ ID NO: 473426 - DNA, 33 bp, Homo sapien
aatgtcatagcaacacgatatataagattccta

SEQ ID NO: 473427 - DNA, 33 bp, Homo sapien
tcttttttaatggaacaagagtagtggcgtacc

SEQ ID NO: 473428 - DNA, 33 bp, Homo sapien
tcttttttaatggaaccagagtagtggcgtacc

SEQ ID NO: 473429 - DNA, 33 bp, Homo sapien
ggctttgattccctaacgtgtccaacacagaaa

SEQ ID NO: 473430 - DNA, 33 bp, Homo sapien
ggctttgattccctaatgtgtccaacacagaaa

SEQ ID NO: 473431 - DNA, 33 bp, Homo sapien
aaaagtataacagaaaacagaggttctagcaag

SEQ ID NO: 473432 - DNA, 33 bp, Homo sapien
aaaagtataacagaaagcagaggttctagcaag

SEQ ID NO: 473433 - DNA, 33 bp, Homo sapien
ataaatgtagaagtaccgaccagagtaggcata

SEQ ID NO: 473434 - DNA, 33 bp, Homo sapien
ataaatgtagaagtactgaccagagtaggcata

SEQ ID NO: 473435 - DNA, 33 bp, Homo sapien
tgcagagctcagaaaaaaagacatgaagaaaag

SEQ ID NO: 473436 - DNA, 33 bp, Homo sapien
tgcagagctcagaaaagaagacatgaagaaaag

SEQ ID NO: 473437 - DNA, 33 bp, Homo sapien
ctttgccaggctctcactcttctctctccggct

SEQ ID NO: 473438 - DNA, 33 bp, Homo sapien
ctttgccaggctctcattcttctctctccggct

SEQ ID NO: 473439 - DNA, 33 bp, Homo sapien
cgtaggctttgtcagcactccaataataatcta

SEQ ID NO: 473440 - DNA, 33 bp, Homo sapien
cgtaggctttgtcagcgctccaataataatcta

SEQ ID NO: 473441 - DNA, 33 bp, Homo sapien
atggcaagacaatttcaatcaagattcctcttg

SEQ ID NO: 473442 - DNA, 33 bp, Homo sapien
atggcaagacaatttctatcaagattcctcttg

SEQ ID NO: 473443 - DNA, 33 bp, Homo sapien
ccatgagaactgagagcagtttaagactgtacc

SEQ ID NO: 473444 - DNA, 33 bp, Homo sapien
ccatgagaactgagagtagtttaagactgtacc

SEQ ID NO: 473445 - DNA, 33 bp, Homo sapien
aaatctctgaaattaccgctaaagaacttatcc

SEQ ID NO: 473446 - DNA, 33 bp, Homo sapien
aaatctctgaaattactgctaaagaacttatcc

SEQ ID NO: 473447 - DNA, 33 bp, Homo sapien
gtaactgaaaaatgaccgacaaatttaagcaaa

SEQ ID NO: 473448 - DNA, 33 bp, Homo sapien
gtaactgaaaaatgactgacaaatttaagcaaa

SEQ ID NO: 473449 - DNA, 33 bp, Homo sapien
caaaccatgcccaccacgtgccccaggtttgca

SEQ ID NO: 473450 - DNA, 33 bp, Homo sapien
caaaccatgcccaccatgtgccccaggtttgca

SEQ ID NO: 473451 - DNA, 33 bp, Homo sapien
cacacacatctatacacaagttagctgtttgtt

SEQ ID NO: 473452 - DNA, 33 bp, Homo sapien
cacacacatctatacataagttagctgtttgtt

SEQ ID NO: 473453 - DNA, 33 bp, Homo sapien
gagaagggttcaaaaactctttctggatgagca

SEQ ID NO: 473454 - DNA, 33 bp, Homo sapien
gagaagggttcaaaaagtctttctggatgagca

SEQ ID NO: 473455 - DNA, 33 bp, Homo sapien
gatataaaaataataccacagggcagttagagt

SEQ ID NO: 473456 - DNA, 33 bp, Homo sapien
gatataaaaataatactacagggcagttagagt

SEQ ID NO: 473457 - DNA, 33 bp, Homo sapien
ctgctcattatgactagacccctcactcccaac

SEQ ID NO: 473458 - DNA, 33 bp, Homo sapien
ctgctcattatgactatacccctcactcccaac

SEQ ID NO: 473459 - DNA, 33 bp, Homo sapien
atccaaagcattggtccacactgctatttacaa

SEQ ID NO: 473460 - DNA, 33 bp, Homo sapien
atccaaagcattggtctacactgctatttacaa

SEQ ID NO: 473461 - DNA, 33 bp, Homo sapien
gtcagatgacattggccgatgagaagagcagag

SEQ ID NO: 473462 - DNA, 33 bp, Homo sapien
gtcagatgacattggctgatgagaagagcagag

SEQ ID NO: 473463 - DNA, 33 bp, Homo sapien
atttgagtctcatcagcaaagtgcccagagtgt

SEQ ID NO: 473464 - DNA, 33 bp, Homo sapien
atttgagtctcatcagtaaagtgcccagagtgt

SEQ ID NO: 473465 - DNA, 33 bp, Homo sapien
aggaggatgagaatgaacgttacagtgtagtga

SEQ ID NO: 473466 - DNA, 33 bp, Homo sapien
aggaggatgagaatgagcgttacagtgtagtga

SEQ ID NO: 473467 - DNA, 33 bp, Homo sapien
ctaacatgaacacaaaaggaacctagttacaat

SEQ ID NO: 473468 - DNA, 33 bp, Homo sapien
ctaacatgaacacaaatggaacctagttacaat

SEQ ID NO: 473469 - DNA, 33 bp, Homo sapien
ctcagaatttgcccaacgttgtccaccttttat

SEQ ID NO: 473470 - DNA, 33 bp, Homo sapien
ctcagaatttgcccaatgttgtccaccttttat

SEQ ID NO: 473471 - DNA, 33 bp, Homo sapien
gaaagccgccaatgacagcagcgtgaaagctgc

SEQ ID NO: 473472 - DNA, 33 bp, Homo sapien
gaaagccgccaatgactgcagcgtgaaagctgc

SEQ ID NO: 473473 - DNA, 33 bp, Homo sapien
tcaacaagttttccaaatactaccagaagcaaa

SEQ ID NO: 473474 - DNA, 33 bp, Homo sapien
tcaacaagttttccaagtactaccagaagcaaa

SEQ ID NO: 473475 - DNA, 33 bp, Homo sapien
tgcacagcggatgcacaccttcattaccagtct

SEQ ID NO: 473476 - DNA, 33 bp, Homo sapien
tgcacagcggatgcacgccttcattaccagtct

SEQ ID NO: 473477 - DNA, 33 bp, Homo sapien
tctcttatcctttcccaacattaggttaacaca

SEQ ID NO: 473478 - DNA, 33 bp, Homo sapien
tctcttatcctttcccgacattaggttaacaca

SEQ ID NO: 473479 - DNA, 33 bp, Homo sapien
gatgcagaaattaccaactctacggctattgga

SEQ ID NO: 473480 - DNA, 33 bp, Homo sapien
gatgcagaaattaccatctctacggctattgga

SEQ ID NO: 473481 - DNA, 33 bp, Homo sapien
tagttttgaggcacagcaatagaatttgggatc

SEQ ID NO: 473482 - DNA, 33 bp, Homo sapien
tagttttgaggcacagtaatagaatttgggatc

SEQ ID NO: 473483 - DNA, 33 bp, Homo sapien
actattattacataagcagtcttcagttacttc

SEQ ID NO: 473484 - DNA, 33 bp, Homo sapien
actattattacataaggagtcttcagttacttc

SEQ ID NO: 473485 - DNA, 33 bp, Homo sapien
ggctgattaatgttaccggagaagctgtaacta

SEQ ID NO: 473486 - DNA, 33 bp, Homo sapien
ggctgattaatgttactggagaagctgtaacta

SEQ ID NO: 473487 - DNA, 33 bp, Homo sapien
aaagtttaagccaccaagtgattttaaagcaaa

SEQ ID NO: 473488 - DNA, 33 bp, Homo sapien
aaagtttaagccaccaggtgattttaaagcaaa

SEQ ID NO: 473489 - DNA, 33 bp, Homo sapien
taaaaaccaaagctgaaagtcaagaaccagatt

SEQ ID NO: 473490 - DNA, 33 bp, Homo sapien
taaaaaccaaagctgagagtcaagaaccagatt

SEQ ID NO: 473491 - DNA, 33 bp, Homo sapien
aagagggaaaaggtctaaacaagcaacctgtca

SEQ ID NO: 473492 - DNA, 33 bp, Homo sapien
aagagggaaaaggtctgaacaagcaacctgtca

SEQ ID NO: 473493 - DNA, 33 bp, Homo sapien
gttattactgagacccggctttgtggtaagaac

SEQ ID NO: 473494 - DNA, 33 bp, Homo sapien
gttattactgagaccctgctttgtggtaagaac

SEQ ID NO: 473495 - DNA, 33 bp, Homo sapien
ggggaagcagtcagcaaaaaaatgcctatattc

SEQ ID NO: 473496 - DNA, 33 bp, Homo sapien
ggggaagcagtcagcacaaaaatgcctatattc

SEQ ID NO: 473497 - DNA, 33 bp, Homo sapien
caaacttgaaacacccaagcacagtcttctgca

SEQ ID NO: 473498 - DNA, 33 bp, Homo sapien
caaacttgaaacacccgagcacagtcttctgca

SEQ ID NO: 473499 - DNA, 33 bp, Homo sapien
gcaagtagatgaccaacggacttagggcatgct

SEQ ID NO: 473500 - DNA, 33 bp, Homo sapien
gcaagtagatgaccaatggacttagggcatgct

SEQ ID NO: 473501 - DNA, 33 bp, Homo sapien
aaacagtgcaggtgaaactacatggaatgtccc

SEQ ID NO: 473502 - DNA, 33 bp, Homo sapien
aaacagtgcaggtgaagctacatggaatgtccc

SEQ ID NO: 473503 - DNA, 33 bp, Homo sapien
atgctactaaaggaaaactattctcattggcag

SEQ ID NO: 473504 - DNA, 33 bp, Homo sapien
atgctactaaaggaaatctattctcattggcag

SEQ ID NO: 473505 - DNA, 33 bp, Homo sapien
tagaaggaagaaatcaaaggaaggatgtaatgg

SEQ ID NO: 473506 - DNA, 33 bp, Homo sapien
tagaaggaagaaatcagaggaaggatgtaatgg

SEQ ID NO: 473507 - DNA, 33 bp, Homo sapien
tgtttgaggcccatccaatttgctttattagct

SEQ ID NO: 473508 - DNA, 33 bp, Homo sapien
tgtttgaggcccatccgatttgctttattagct

SEQ ID NO: 473509 - DNA, 33 bp, Homo sapien
cctctcaagctctacaatgctttcctatgcata

SEQ ID NO: 473510 - DNA, 33 bp, Homo sapien
cctctcaagctctacagtgctttcctatgcata

SEQ ID NO: 473511 - DNA, 33 bp, Homo sapien
gagccaagaccttttccccatcacacaaccaca

SEQ ID NO: 473512 - DNA, 33 bp, Homo sapien
gagccaagaccttttctccatcacacaaccaca

SEQ ID NO: 473513 - DNA, 33 bp, Homo sapien
agccacctgaggacaactcattgacgcagagcc

SEQ ID NO: 473514 - DNA, 33 bp, Homo sapien
agccacctgaggacaattcattgacgcagagcc

SEQ ID NO: 473515 - DNA, 33 bp, Homo sapien
ggggttttcttggaatcaatgtatttgctttct

SEQ ID NO: 473516 - DNA, 33 bp, Homo sapien
ggggttttcttggaatgaatgtatttgctttct

SEQ ID NO: 473517 - DNA, 33 bp, Homo sapien
atttccatatcagtcaaatcaagcatgggatac

SEQ ID NO: 473518 - DNA, 33 bp, Homo sapien
atttccatatcagtcagatcaagcatgggatac

SEQ ID NO: 473519 - DNA, 33 bp, Homo sapien
gagcagatatttgagacggtgactgtttcccac

SEQ ID NO: 473520 - DNA, 33 bp, Homo sapien
gagcagatatttgagatggtgactgtttcccac

SEQ ID NO: 473521 - DNA, 33 bp, Homo sapien
gaatctccaatctaccccacaagtgcttacacc

SEQ ID NO: 473522 - DNA, 33 bp, Homo sapien
gaatctccaatctacctcacaagtgcttacacc

SEQ ID NO: 473523 - DNA, 33 bp, Homo sapien
ccaagtggtggttatacgttgccacgtggttac

SEQ ID NO: 473524 - DNA, 33 bp, Homo sapien
ccaagtggtggttataggttgccacgtggttac

SEQ ID NO: 473525 - DNA, 33 bp, Homo sapien
aaaaactaggaaagtaagcaagacaaatccgaa

SEQ ID NO: 473526 - DNA, 33 bp, Homo sapien
aaaaactaggaaagtaggcaagacaaatccgaa

SEQ ID NO: 473527 - DNA, 33 bp, Homo sapien
tttttctgtccaactccattattagctccctgt

SEQ ID NO: 473528 - DNA, 33 bp, Homo sapien
tttttctgtccaactcgattattagctccctgt

SEQ ID NO: 473529 - DNA, 33 bp, Homo sapien
caagaggaaagcagggacagagaaactggagta

SEQ ID NO: 473530 - DNA, 33 bp, Homo sapien
caagaggaaagcaggggcagagaaactggagta

SEQ ID NO: 473531 - DNA, 33 bp, Homo sapien
tcacctaagcctcacactgagagaagttcttcc

SEQ ID NO: 473532 - DNA, 33 bp, Homo sapien
tcacctaagcctcacattgagagaagttcttcc

SEQ ID NO: 473533 - DNA, 33 bp, Homo sapien
agaatggctaaagagacaacccagatgctaggg

SEQ ID NO: 473534 - DNA, 33 bp, Homo sapien
agaatggctaaagagataacccagatgctaggg

SEQ ID NO: 473535 - DNA, 33 bp, Homo sapien
gctgtaagacaatatgaaaagttccaaaacaca

SEQ ID NO: 473536 - DNA, 33 bp, Homo sapien
gctgtaagacaatatggaaagttccaaaacaca

SEQ ID NO: 473537 - DNA, 33 bp, Homo sapien
cacccaacatttttaactgtagtccatgagtcc

SEQ ID NO: 473538 - DNA, 33 bp, Homo sapien
cacccaacatttttaagtgtagtccatgagtcc

SEQ ID NO: 473539 - DNA, 33 bp, Homo sapien
accgaataaaactcccaatttgattctgaacca

SEQ ID NO: 473540 - DNA, 33 bp, Homo sapien
accgaataaaactccctatttgattctgaacca

SEQ ID NO: 473541 - DNA, 33 bp, Homo sapien
attctgtcaatttgacactgaaaatgcctctcc

SEQ ID NO: 473542 - DNA, 33 bp, Homo sapien
attctgtcaatttgacgctgaaaatgcctctcc

SEQ ID NO: 473543 - DNA, 33 bp, Homo sapien
gttaattagccctgggaatgacctaacataata

SEQ ID NO: 473544 - DNA, 33 bp, Homo sapien
gttaattagccctggggatgacctaacataata

SEQ ID NO: 473545 - DNA, 33 bp, Homo sapien
cttttgagatgatcaaatgatgtaaatcccctg

SEQ ID NO: 473546 - DNA, 33 bp, Homo sapien
cttttgagatgatcaactgatgtaaatcccctg

SEQ ID NO: 473547 - DNA, 33 bp, Homo sapien
tccataatggtaagtcaacatctaagtctcagt

SEQ ID NO: 473548 - DNA, 33 bp, Homo sapien
tccataatggtaagtccacatctaagtctcagt

SEQ ID NO: 473549 - DNA, 33 bp, Homo sapien
ggtctcacgtaacttaaaattatggacaaaggc

SEQ ID NO: 473550 - DNA, 33 bp, Homo sapien
ggtctcacgtaacttacaattatggacaaaggc

SEQ ID NO: 473551 - DNA, 33 bp, Homo sapien
cttggaagtgattctccttcacttttgctgtat

SEQ ID NO: 473552 - DNA, 33 bp, Homo sapien
cttggaagtgattctctttcacttttgctgtat

SEQ ID NO: 473553 - DNA, 33 bp, Homo sapien
ataaaactgaaaaatcaaaatgacatcaacaat

SEQ ID NO: 473554 - DNA, 33 bp, Homo sapien
ataaaactgaaaaatccaaatgacatcaacaat

SEQ ID NO: 473555 - DNA, 33 bp, Homo sapien
taatcatttacaaataacttctgtagacagaga

SEQ ID NO: 473556 - DNA, 33 bp, Homo sapien
taatcatttacaaataccttctgtagacagaga

SEQ ID NO: 473557 - DNA, 33 bp, Homo sapien
tcatgaaaaccctttcaaaaatagctattgaga

SEQ ID NO: 473558 - DNA, 33 bp, Homo sapien
tcatgaaaaccctttccaaaatagctattgaga

SEQ ID NO: 473559 - DNA, 33 bp, Homo sapien
atctgtatgcagagatcaattttgtgtcccctt

SEQ ID NO: 473560 - DNA, 33 bp, Homo sapien
atctgtatgcagagatgaattttgtgtcccctt

SEQ ID NO: 473561 - DNA, 33 bp, Homo sapien
acttctcccatcaaaaggtggaatctaattcct

SEQ ID NO: 473562 - DNA, 33 bp, Homo sapien
acttctcccatcaaaatgtggaatctaattcct

SEQ ID NO: 473563 - DNA, 33 bp, Homo sapien
taaggtaatctcaaaaatgttaagctgattaac

SEQ ID NO: 473564 - DNA, 33 bp, Homo sapien
taaggtaatctcaaaactgttaagctgattaac

SEQ ID NO: 473565 - DNA, 33 bp, Homo sapien
gtcaatgaaatatagaacatttaaccaccagtc

SEQ ID NO: 473566 - DNA, 33 bp, Homo sapien
gtcaatgaaatatagaccatttaaccaccagtc

SEQ ID NO: 473567 - DNA, 33 bp, Homo sapien
tatagatgtgtacaaacgattttatggagatat

SEQ ID NO: 473568 - DNA, 33 bp, Homo sapien
tatagatgtgtacaaatgattttatggagatat

SEQ ID NO: 473569 - DNA, 33 bp, Homo sapien
atatggaaccctccacaaagcatatgaattatt

SEQ ID NO: 473570 - DNA, 33 bp, Homo sapien
atatggaaccctccacgaagcatatgaattatt

SEQ ID NO: 473571 - DNA, 33 bp, Homo sapien
agctaactgcgtcacaagatcgcttcctgagat

SEQ ID NO: 473572 - DNA, 33 bp, Homo sapien
agctaactgcgtcacaggatcgcttcctgagat

SEQ ID NO: 473573 - DNA, 33 bp, Homo sapien
ggatttaatgaaaaaccgattgaggaattactg

SEQ ID NO: 473574 - DNA, 33 bp, Homo sapien
ggatttaatgaaaaactgattgaggaattactg

SEQ ID NO: 473575 - DNA, 33 bp, Homo sapien
gggaaatggccggagacggatgaagcgattctc

SEQ ID NO: 473576 - DNA, 33 bp, Homo sapien
gggaaatggccggagatggatgaagcgattctc

SEQ ID NO: 473577 - DNA, 33 bp, Homo sapien
tagcaaggcatgaatacacttcgaggcttcgtt

SEQ ID NO: 473578 - DNA, 33 bp, Homo sapien
tagcaaggcatgaatatacttcgaggcttcgtt

SEQ ID NO: 473579 - DNA, 33 bp, Homo sapien
aatatggaaatagataccaaacaacatcaatgt

SEQ ID NO: 473580 - DNA, 33 bp, Homo sapien
aatatggaaatagatatcaaacaacatcaatgt

SEQ ID NO: 473581 - DNA, 33 bp, Homo sapien
tttcctgaaggctgaaagatagctgcgagagac

SEQ ID NO: 473582 - DNA, 33 bp, Homo sapien
tttcctgaaggctgaaggatagctgcgagagac

SEQ ID NO: 473583 - DNA, 33 bp, Homo sapien
gagaggtgatgccacactcagaattgggtccat

SEQ ID NO: 473584 - DNA, 33 bp, Homo sapien
gagaggtgatgccacagtcagaattgggtccat

SEQ ID NO: 473585 - DNA, 33 bp, Homo sapien
attctcagctagcagcaaaaagtagctaacagt

SEQ ID NO: 473586 - DNA, 33 bp, Homo sapien
attctcagctagcagcgaaaagtagctaacagt

SEQ ID NO: 473587 - DNA, 33 bp, Homo sapien
cactaggcttgaggtacagatatgtcttcgtat

SEQ ID NO: 473588 - DNA, 33 bp, Homo sapien
cactaggcttgaggtatagatatgtcttcgtat

SEQ ID NO: 473589 - DNA, 33 bp, Homo sapien
atcttctgatcttatccgacactagcatgtgtg

SEQ ID NO: 473590 - DNA, 33 bp, Homo sapien
atcttctgatcttatctgacactagcatgtgtg

SEQ ID NO: 473591 - DNA, 33 bp, Homo sapien
tcttcaacattttataacatctccttattggtg

SEQ ID NO: 473592 - DNA, 33 bp, Homo sapien
tcttcaacattttatagcatctccttattggtg

SEQ ID NO: 473593 - DNA, 33 bp, Homo sapien
aaagaaggaaaagctgaatatataggagacaat

SEQ ID NO: 473594 - DNA, 33 bp, Homo sapien
aaagaaggaaaagctggatatataggagacaat

SEQ ID NO: 473595 - DNA, 33 bp, Homo sapien
gaaattgagaagaaccaaatgccacttccttga

SEQ ID NO: 473596 - DNA, 33 bp, Homo sapien
gaaattgagaagaaccgaatgccacttccttga

SEQ ID NO: 473597 - DNA, 33 bp, Homo sapien
aactcacgcaaaggccaatttaaacagatctaa

SEQ ID NO: 473598 - DNA, 33 bp, Homo sapien
aactcacgcaaaggccgatttaaacagatctaa

SEQ ID NO: 473599 - DNA, 33 bp, Homo sapien
acagaaggccagtgaaatgatgagtcactaaca

SEQ ID NO: 473600 - DNA, 33 bp, Homo sapien
acagaaggccagtgaattgatgagtcactaaca

SEQ ID NO: 473601 - DNA, 33 bp, Homo sapien
ttgctgggacccattcactgagtttctgatttg

SEQ ID NO: 473602 - DNA, 33 bp, Homo sapien
ttgctgggacccattcgctgagtttctgatttg

SEQ ID NO: 473603 - DNA, 33 bp, Homo sapien
tgtttcatctcttgacccttccttttcagcctc

SEQ ID NO: 473604 - DNA, 33 bp, Homo sapien
tgtttcatctcttgactcttccttttcagcctc

SEQ ID NO: 473605 - DNA, 33 bp, Homo sapien
ctgcttcttaattcaccgaggaaaaagaagcaa

SEQ ID NO: 473606 - DNA, 33 bp, Homo sapien
ctgcttcttaattcactgaggaaaaagaagcaa

SEQ ID NO: 473607 - DNA, 33 bp, Homo sapien
aatgaggactaatgtacggccacaggagagagt

SEQ ID NO: 473608 - DNA, 33 bp, Homo sapien
aatgaggactaatgtatggccacaggagagagt

SEQ ID NO: 473609 - DNA, 33 bp, Homo sapien
cattgctcttgtttcccccttaagtcatcccca

SEQ ID NO: 473610 - DNA, 33 bp, Homo sapien
cattgctcttgtttcctccttaagtcatcccca

SEQ ID NO: 473611 - DNA, 33 bp, Homo sapien
aacacctgctgctcctaagaagacactcagaca

SEQ ID NO: 473612 - DNA, 33 bp, Homo sapien
aacacctgctgctccttagaagacactcagaca

SEQ ID NO: 473613 - DNA, 33 bp, Homo sapien
tttaaattcagacttccctgactcaaccgttca

SEQ ID NO: 473614 - DNA, 33 bp, Homo sapien
tttaaattcagacttcgctgactcaaccgttca

SEQ ID NO: 473615 - DNA, 33 bp, Homo sapien
aagcttttcagaagcaataatatctgtcctgag

SEQ ID NO: 473616 - DNA, 33 bp, Homo sapien
aagcttttcagaagcagtaatatctgtcctgag

SEQ ID NO: 473617 - DNA, 33 bp, Homo sapien
tgagatatttcaaatacgtcagccatgtgtaga

SEQ ID NO: 473618 - DNA, 33 bp, Homo sapien
tgagatatttcaaatatgtcagccatgtgtaga

SEQ ID NO: 473619 - DNA, 33 bp, Homo sapien
aagagaaaggaaaaaaacacagatctacctcag

SEQ ID NO: 473620 - DNA, 33 bp, Homo sapien
aagagaaaggaaaaaaccacagatctacctcag

SEQ ID NO: 473621 - DNA, 33 bp, Homo sapien
gttacttttacttccactgagtccataaagggg

SEQ ID NO: 473622 - DNA, 33 bp, Homo sapien
gttacttttacttccattgagtccataaagggg

SEQ ID NO: 473623 - DNA, 33 bp, Homo sapien
agttcctgcaacttacaaatgctacctttttgg

SEQ ID NO: 473624 - DNA, 33 bp, Homo sapien
agttcctgcaacttacgaatgctacctttttgg

SEQ ID NO: 473625 - DNA, 33 bp, Homo sapien
taaaagctgatgctgacatggagtaagagaaag

SEQ ID NO: 473626 - DNA, 33 bp, Homo sapien
taaaagctgatgctgatatggagtaagagaaag

SEQ ID NO: 473627 - DNA, 33 bp, Homo sapien
ggtaactatggaagaagaacaatggagtgagag

SEQ ID NO: 473628 - DNA, 33 bp, Homo sapien
ggtaactatggaagaataacaatggagtgagag

SEQ ID NO: 473629 - DNA, 33 bp, Homo sapien
cattcatttccaatacaccttaaacactcaccc

SEQ ID NO: 473630 - DNA, 33 bp, Homo sapien
cattcatttccaatactccttaaacactcaccc

SEQ ID NO: 473631 - DNA, 33 bp, Homo sapien
cttctattttaatgcccctagatttcagttttc

SEQ ID NO: 473632 - DNA, 33 bp, Homo sapien
cttctattttaatgcctctagatttcagttttc

SEQ ID NO: 473633 - DNA, 33 bp, Homo sapien
ggcagctccatgaatccccaataattaccctca

SEQ ID NO: 473634 - DNA, 33 bp, Homo sapien
ggcagctccatgaatctccaataattaccctca

SEQ ID NO: 473635 - DNA, 33 bp, Homo sapien
gaatgaaacaagaacaataagaaccttcatctc

SEQ ID NO: 473636 - DNA, 33 bp, Homo sapien
gaatgaaacaagaacagtaagaaccttcatctc

SEQ ID NO: 473637 - DNA, 33 bp, Homo sapien
ggaaagtggcattaccccatcaggtgcaagccg

SEQ ID NO: 473638 - DNA, 33 bp, Homo sapien
ggaaagtggcattacctcatcaggtgcaagccg

SEQ ID NO: 473639 - DNA, 33 bp, Homo sapien
tattgagagtctgacccatagaaacacccttcc

SEQ ID NO: 473640 - DNA, 33 bp, Homo sapien
tattgagagtctgaccgatagaaacacccttcc

SEQ ID NO: 473641 - DNA, 33 bp, Homo sapien
atcaagtcatggcataacaaccactgtggatta

SEQ ID NO: 473642 - DNA, 33 bp, Homo sapien
atcaagtcatggcatagcaaccactgtggatta

SEQ ID NO: 473643 - DNA, 33 bp, Homo sapien
ttgaatcgagatttgacagtgacgaaaggtttc

SEQ ID NO: 473644 - DNA, 33 bp, Homo sapien
ttgaatcgagatttgatagtgacgaaaggtttc

SEQ ID NO: 473645 - DNA, 33 bp, Homo sapien
agaatcagttcaatgactaagatgaaatacata

SEQ ID NO: 473646 - DNA, 33 bp, Homo sapien
agaatcagttcaatgagtaagatgaaatacata

SEQ ID NO: 473647 - DNA, 33 bp, Homo sapien
aaacattgcctagcaaattgaatttagatggtt

SEQ ID NO: 473648 - DNA, 33 bp, Homo sapien
aaacattgcctagcaatttgaatttagatggtt

SEQ ID NO: 473649 - DNA, 33 bp, Homo sapien
agcatggggaaaataacagatctctggcattct

SEQ ID NO: 473650 - DNA, 33 bp, Homo sapien
agcatggggaaaataatagatctctggcattct

SEQ ID NO: 473651 - DNA, 33 bp, Homo sapien
ctgaattgtagggctaagtcatattcctgatgg

SEQ ID NO: 473652 - DNA, 33 bp, Homo sapien
ctgaattgtagggctatgtcatattcctgatgg

SEQ ID NO: 473653 - DNA, 33 bp, Homo sapien
aaaatagggctacagaaacactgagaacacgag

SEQ ID NO: 473654 - DNA, 33 bp, Homo sapien
aaaatagggctacagagacactgagaacacgag

SEQ ID NO: 473655 - DNA, 33 bp, Homo sapien
ccctatttttgcatcaaggctatggcaggatgt

SEQ ID NO: 473656 - DNA, 33 bp, Homo sapien
ccctatttttgcatcagggctatggcaggatgt

SEQ ID NO: 473657 - DNA, 33 bp, Homo sapien
cagatgtgatcgatgacgactactcattaatct

SEQ ID NO: 473658 - DNA, 33 bp, Homo sapien
cagatgtgatcgatgatgactactcattaatct

SEQ ID NO: 473659 - DNA, 33 bp, Homo sapien
ggcataatacaaaacactgttgagtagtaatat

SEQ ID NO: 473660 - DNA, 33 bp, Homo sapien
ggcataatacaaaacagtgttgagtagtaatat

SEQ ID NO: 473661 - DNA, 33 bp, Homo sapien
ttctctacatttagtaccttccagttttgattt

SEQ ID NO: 473662 - DNA, 33 bp, Homo sapien
ttctctacatttagtatcttccagttttgattt

SEQ ID NO: 473663 - DNA, 33 bp, Homo sapien
tttaaactacaaagcacggcacagatattagtt

SEQ ID NO: 473664 - DNA, 33 bp, Homo sapien
tttaaactacaaagcatggcacagatattagtt

SEQ ID NO: 473665 - DNA, 33 bp, Homo sapien
gagtggagagactagaagtgatctgaaatccct

SEQ ID NO: 473666 - DNA, 33 bp, Homo sapien
gagtggagagactagatgtgatctgaaatccct

SEQ ID NO: 473667 - DNA, 33 bp, Homo sapien
cagatactcccaaaacaagttcttggtgataca

SEQ ID NO: 473668 - DNA, 33 bp, Homo sapien
cagatactcccaaaaccagttcttggtgataca

SEQ ID NO: 473669 - DNA, 33 bp, Homo sapien
ttcttcaaaggcttcacataaattaagacataa

SEQ ID NO: 473670 - DNA, 33 bp, Homo sapien
ttcttcaaaggcttcagataaattaagacataa

SEQ ID NO: 473671 - DNA, 33 bp, Homo sapien
gactggagtggcaccaagtcagaaccaggacct

SEQ ID NO: 473672 - DNA, 33 bp, Homo sapien
gactggagtggcaccacgtcagaaccaggacct

SEQ ID NO: 473673 - DNA, 33 bp, Homo sapien
ttgcatagacaaaagactcatcatgctggcatc

SEQ ID NO: 473674 - DNA, 33 bp, Homo sapien
ttgcatagacaaaagagtcatcatgctggcatc

SEQ ID NO: 473675 - DNA, 33 bp, Homo sapien
ctttccttatctgtaacaaaaggattgtcatac

SEQ ID NO: 473676 - DNA, 33 bp, Homo sapien
ctttccttatctgtaataaaaggattgtcatac

SEQ ID NO: 473677 - DNA, 33 bp, Homo sapien
tattatacaatactgaaatgaaagcctatagta

SEQ ID NO: 473678 - DNA, 33 bp, Homo sapien
tattatacaatactgacatgaaagcctatagta

SEQ ID NO: 473679 - DNA, 33 bp, Homo sapien
aagtacaactagttgaagataagaataaatagc

SEQ ID NO: 473680 - DNA, 33 bp, Homo sapien
aagtacaactagttgatgataagaataaatagc

SEQ ID NO: 473681 - DNA, 33 bp, Homo sapien
ataaaactttccttccacatgttttcaacttta

SEQ ID NO: 473682 - DNA, 33 bp, Homo sapien
ataaaactttccttccgcatgttttcaacttta

SEQ ID NO: 473683 - DNA, 33 bp, Homo sapien
tgtaggtaagcaataaacaaaaccattaattca

SEQ ID NO: 473684 - DNA, 33 bp, Homo sapien
tgtaggtaagcaataaccaaaaccattaattca

SEQ ID NO: 473685 - DNA, 33 bp, Homo sapien
aaagccggtctactgagatggaagaggctgtaa

SEQ ID NO: 473686 - DNA, 33 bp, Homo sapien
aaagccggtctactgatatggaagaggctgtaa

SEQ ID NO: 473687 - DNA, 33 bp, Homo sapien
tagagaggaaactcaacgttagttaagtctaaa

SEQ ID NO: 473688 - DNA, 33 bp, Homo sapien
tagagaggaaactcaatgttagttaagtctaaa

SEQ ID NO: 473689 - DNA, 33 bp, Homo sapien
ggaactcaggattcaaccttaactcttcctcta

SEQ ID NO: 473690 - DNA, 33 bp, Homo sapien
ggaactcaggattcaatcttaactcttcctcta

SEQ ID NO: 473691 - DNA, 33 bp, Homo sapien
attactgttagtatccaagcaggcaaaaaagaa

SEQ ID NO: 473692 - DNA, 33 bp, Homo sapien
attactgttagtatccgagcaggcaaaaaagaa

SEQ ID NO: 473693 - DNA, 33 bp, Homo sapien
tttcaagtcaggaaaagttcaaaaagacatgga

SEQ ID NO: 473694 - DNA, 33 bp, Homo sapien
tttcaagtcaggaaaatttcaaaaagacatgga

SEQ ID NO: 473695 - DNA, 33 bp, Homo sapien
gtcttataaaatgtcactaataaacacactgtc

SEQ ID NO: 473696 - DNA, 33 bp, Homo sapien
gtcttataaaatgtcagtaataaacacactgtc

SEQ ID NO: 473697 - DNA, 33 bp, Homo sapien
ttctaggttttcagaacggcataagagtagaat

SEQ ID NO: 473698 - DNA, 33 bp, Homo sapien
ttctaggttttcagaatggcataagagtagaat

SEQ ID NO: 473699 - DNA, 33 bp, Homo sapien
ccttaaaagtaggcaacgacatttattctactc

SEQ ID NO: 473700 - DNA, 33 bp, Homo sapien
ccttaaaagtaggcaatgacatttattctactc

SEQ ID NO: 473701 - DNA, 33 bp, Homo sapien
agtacaaagaatacagaatttgaaattaaatga

SEQ ID NO: 473702 - DNA, 33 bp, Homo sapien
agtacaaagaatacaggatttgaaattaaatga

SEQ ID NO: 473703 - DNA, 33 bp, Homo sapien
gtgagagtcaactacacgatatgtaggaatgaa

SEQ ID NO: 473704 - DNA, 33 bp, Homo sapien
gtgagagtcaactacaggatatgtaggaatgaa

SEQ ID NO: 473705 - DNA, 33 bp, Homo sapien
tgcttcatacagagaaagttattcaagcggcag

SEQ ID NO: 473706 - DNA, 33 bp, Homo sapien
tgcttcatacagagaacgttattcaagcggcag

SEQ ID NO: 473707 - DNA, 33 bp, Homo sapien
acttcttggctagtgaaaagaatattcaaaggc

SEQ ID NO: 473708 - DNA, 33 bp, Homo sapien
acttcttggctagtgagaagaatattcaaaggc

SEQ ID NO: 473709 - DNA, 33 bp, Homo sapien
tttctctgatataaaaatgcagtttatgcccct

SEQ ID NO: 473710 - DNA, 33 bp, Homo sapien
tttctctgatataaaattgcagtttatgcccct

SEQ ID NO: 473711 - DNA, 33 bp, Homo sapien
ctgaatatttccactgcactatgcttctgagat

SEQ ID NO: 473712 - DNA, 33 bp, Homo sapien
ctgaatatttccactgtactatgcttctgagat

SEQ ID NO: 473713 - DNA, 33 bp, Homo sapien
ataatgtgtacagataaatagtattcaaataca

SEQ ID NO: 473714 - DNA, 33 bp, Homo sapien
ataatgtgtacagatagatagtattcaaataca

SEQ ID NO: 473715 - DNA, 33 bp, Homo sapien
tttccattacctaacagaaggtctagtatatag

SEQ ID NO: 473716 - DNA, 33 bp, Homo sapien
tttccattacctaacataaggtctagtatatag

SEQ ID NO: 473717 - DNA, 33 bp, Homo sapien
tagccaatgacactaacactcataatgattatc

SEQ ID NO: 473718 - DNA, 33 bp, Homo sapien
tagccaatgacactaatactcataatgattatc

SEQ ID NO: 473719 - DNA, 33 bp, Homo sapien
taaacaccactacttagactgcctggcagggtc

SEQ ID NO: 473720 - DNA, 33 bp, Homo sapien
taaacaccactacttatactgcctggcagggtc

SEQ ID NO: 473721 - DNA, 33 bp, Homo sapien
ttcttcatgaacactcaaccttaacttttctct

SEQ ID NO: 473722 - DNA, 33 bp, Homo sapien
ttcttcatgaacactcgaccttaacttttctct

SEQ ID NO: 473723 - DNA, 33 bp, Homo sapien
atctgtgactgtggtacattacttcattgaact

SEQ ID NO: 473724 - DNA, 33 bp, Homo sapien
atctgtgactgtggtatattacttcattgaact

SEQ ID NO: 473725 - DNA, 33 bp, Homo sapien
tttgtatctggtcaataactgaattattttgtt

SEQ ID NO: 473726 - DNA, 33 bp, Homo sapien
tttgtatctggtcaattactgaattattttgtt

SEQ ID NO: 473727 - DNA, 33 bp, Homo sapien
catgaaacacatcagagaattatttccattagt

SEQ ID NO: 473728 - DNA, 33 bp, Homo sapien
catgaaacacatcagataattatttccattagt

SEQ ID NO: 473729 - DNA, 33 bp, Homo sapien
ttttttctagtgcctgccaaaaagttgggtttc

SEQ ID NO: 473730 - DNA, 33 bp, Homo sapien
ttttttctagtgcctgtcaaaaagttgggtttc

SEQ ID NO: 473731 - DNA, 33 bp, Homo sapien
cctattgacaactctacggcagcagtgcttgca

SEQ ID NO: 473732 - DNA, 33 bp, Homo sapien
cctattgacaactctatggcagcagtgcttgca

SEQ ID NO: 473733 - DNA, 33 bp, Homo sapien
gaaataacactggcctaaaaataaatttaaggt

SEQ ID NO: 473734 - DNA, 33 bp, Homo sapien
gaaataacactggcctgaaaataaatttaaggt

SEQ ID NO: 473735 - DNA, 33 bp, Homo sapien
ctttaccacacatttccctgaagatctccaatt

SEQ ID NO: 473736 - DNA, 33 bp, Homo sapien
ctttaccacacatttctctgaagatctccaatt

SEQ ID NO: 473737 - DNA, 33 bp, Homo sapien
tatatgtttacatgcacaaatgtgagcttagta

SEQ ID NO: 473738 - DNA, 33 bp, Homo sapien
tatatgtttacatgcataaatgtgagcttagta

SEQ ID NO: 473739 - DNA, 33 bp, Homo sapien
gtctccctattatgaccggaaaaggttacaggc

SEQ ID NO: 473740 - DNA, 33 bp, Homo sapien
gtctccctattatgacgggaaaaggttacaggc

SEQ ID NO: 473741 - DNA, 33 bp, Homo sapien
agcaatgcatggatctaacctatataatgctgc

SEQ ID NO: 473742 - DNA, 33 bp, Homo sapien
agcaatgcatggatctgacctatataatgctgc

SEQ ID NO: 473743 - DNA, 33 bp, Homo sapien
taaccgaccagtagccaactcagattcctgtca

SEQ ID NO: 473744 - DNA, 33 bp, Homo sapien
taaccgaccagtagccgactcagattcctgtca

SEQ ID NO: 473745 - DNA, 33 bp, Homo sapien
ctccttaaaagttggaaagctcttgatgtataa

SEQ ID NO: 473746 - DNA, 33 bp, Homo sapien
ctccttaaaagttggacagctcttgatgtataa

SEQ ID NO: 473747 - DNA, 33 bp, Homo sapien
gggcagtgattttcaaagtgtaagcagcagcat

SEQ ID NO: 473748 - DNA, 33 bp, Homo sapien
gggcagtgattttcaacgtgtaagcagcagcat

SEQ ID NO: 473749 - DNA, 33 bp, Homo sapien
agaggaccaggtttcacagtttaagccttgatc

SEQ ID NO: 473750 - DNA, 33 bp, Homo sapien
agaggaccaggtttcatagtttaagccttgatc

SEQ ID NO: 473751 - DNA, 33 bp, Homo sapien
atacattcatccaacaaacattaaccgagagcc

SEQ ID NO: 473752 - DNA, 33 bp, Homo sapien
atacattcatccaacagacattaaccgagagcc

SEQ ID NO: 473753 - DNA, 33 bp, Homo sapien
gcaggagttaggagtacaggagggctgtgttat

SEQ ID NO: 473754 - DNA, 33 bp, Homo sapien
gcaggagttaggagtataggagggctgtgttat

SEQ ID NO: 473755 - DNA, 33 bp, Homo sapien
tgtacttcttgagacccgaaaaatttgtgttac

SEQ ID NO: 473756 - DNA, 33 bp, Homo sapien
tgtacttcttgagacctgaaaaatttgtgttac

SEQ ID NO: 473757 - DNA, 33 bp, Homo sapien
ggttagcagtaatgcacgagaaaaggatcatga

SEQ ID NO: 473758 - DNA, 33 bp, Homo sapien
ggttagcagtaatgcatgagaaaaggatcatga

SEQ ID NO: 473759 - DNA, 33 bp, Homo sapien
tctacagacctctgaaactcatgatccttttct

SEQ ID NO: 473760 - DNA, 33 bp, Homo sapien
tctacagacctctgaagctcatgatccttttct

SEQ ID NO: 473761 - DNA, 33 bp, Homo sapien
atttttgtaaaaggaggaaaggagaagcctagg

SEQ ID NO: 473762 - DNA, 33 bp, Homo sapien
atttttgtaaaaggagtaaaggagaagcctagg

SEQ ID NO: 473763 - DNA, 33 bp, Homo sapien
ccagacagcagggggaataattatttaaaaggc

SEQ ID NO: 473764 - DNA, 33 bp, Homo sapien
ccagacagcagggggagtaattatttaaaaggc

SEQ ID NO: 473765 - DNA, 33 bp, Homo sapien
ggggcaatgagtgagaagctcttggtagggttc

SEQ ID NO: 473766 - DNA, 33 bp, Homo sapien
ggggcaatgagtgagaggctcttggtagggttc

SEQ ID NO: 473767 - DNA, 33 bp, Homo sapien
acctgtgttctgtagcacactctttacctctta

SEQ ID NO: 473768 - DNA, 33 bp, Homo sapien
acctgtgttctgtagcgcactctttacctctta

SEQ ID NO: 473769 - DNA, 33 bp, Homo sapien
tgcagttctctgacgactactgatgttaagcat

SEQ ID NO: 473770 - DNA, 33 bp, Homo sapien
tgcagttctctgacgattactgatgttaagcat

SEQ ID NO: 473771 - DNA, 33 bp, Homo sapien
cagcctacaagccttgaactatgacacaccagc

SEQ ID NO: 473772 - DNA, 33 bp, Homo sapien
cagcctacaagccttggactatgacacaccagc

SEQ ID NO: 473773 - DNA, 33 bp, Homo sapien
atgaacaacaattgaagttagtagcaactaagt

SEQ ID NO: 473774 - DNA, 33 bp, Homo sapien
atgaacaacaattgaatttagtagcaactaagt

SEQ ID NO: 473775 - DNA, 33 bp, Homo sapien
aactaagtgattctcacagaagttaaagtggcc

SEQ ID NO: 473776 - DNA, 33 bp, Homo sapien
aactaagtgattctcatagaagttaaagtggcc

SEQ ID NO: 473777 - DNA, 33 bp, Homo sapien
ttcagaacaattggacaatgaatttctgttgtt

SEQ ID NO: 473778 - DNA, 33 bp, Homo sapien
ttcagaacaattggacgatgaatttctgttgtt

SEQ ID NO: 473779 - DNA, 33 bp, Homo sapien
tgtaccaatctaatacaatgttgtccttatgag

SEQ ID NO: 473780 - DNA, 33 bp, Homo sapien
tgtaccaatctaatacgatgttgtccttatgag

SEQ ID NO: 473781 - DNA, 33 bp, Homo sapien
tcgaaccttcagattcccataatttttcatggc

SEQ ID NO: 473782 - DNA, 33 bp, Homo sapien
tcgaaccttcagattctcataatttttcatggc

SEQ ID NO: 473783 - DNA, 33 bp, Homo sapien
aagttggttttcagcacggtaagatcccctttc

SEQ ID NO: 473784 - DNA, 33 bp, Homo sapien
aagttggttttcagcatggtaagatcccctttc

SEQ ID NO: 473785 - DNA, 33 bp, Homo sapien
ttttctgaggataaggaaacacctcacttttta

SEQ ID NO: 473786 - DNA, 33 bp, Homo sapien
ttttctgaggataagggaacacctcacttttta

SEQ ID NO: 473787 - DNA, 33 bp, Homo sapien
taacacgcaggagcatcagtccttttgatccaa

SEQ ID NO: 473788 - DNA, 33 bp, Homo sapien
taacacgcaggagcattagtccttttgatccaa

SEQ ID NO: 473789 - DNA, 33 bp, Homo sapien
ggacttgaagtttaagaacaaggctgcaaactc

SEQ ID NO: 473790 - DNA, 33 bp, Homo sapien
ggacttgaagtttaaggacaaggctgcaaactc

SEQ ID NO: 473791 - DNA, 33 bp, Homo sapien
tctttagctggatgtcaccataaatcctgaaat

SEQ ID NO: 473792 - DNA, 33 bp, Homo sapien
tctttagctggatgtcgccataaatcctgaaat

SEQ ID NO: 473793 - DNA, 33 bp, Homo sapien
gcatctgctttggggaagtatggcacagtggaa

SEQ ID NO: 473794 - DNA, 33 bp, Homo sapien
gcatctgctttggggacgtatggcacagtggaa

SEQ ID NO: 473795 - DNA, 33 bp, Homo sapien
accccatgcttatatcagaagtagctgagaagg

SEQ ID NO: 473796 - DNA, 33 bp, Homo sapien
accccatgcttatatcggaagtagctgagaagg

SEQ ID NO: 473797 - DNA, 33 bp, Homo sapien
tttaaaaattcattgacagtagcagtctatatc

SEQ ID NO: 473798 - DNA, 33 bp, Homo sapien
tttaaaaattcattgatagtagcagtctatatc

SEQ ID NO: 473799 - DNA, 33 bp, Homo sapien
gtggggaaaaggtgagcctataaaccattatcc

SEQ ID NO: 473800 - DNA, 33 bp, Homo sapien
gtggggaaaaggtgagtctataaaccattatcc

SEQ ID NO: 473801 - DNA, 33 bp, Homo sapien
ttgtctttcacaaaaccatcttcaatttcctat

SEQ ID NO: 473802 - DNA, 33 bp, Homo sapien
ttgtctttcacaaaacgatcttcaatttcctat

SEQ ID NO: 473803 - DNA, 33 bp, Homo sapien
agattctaaatacttacgctggacctactgtaa

SEQ ID NO: 473804 - DNA, 33 bp, Homo sapien
agattctaaatacttatgctggacctactgtaa

SEQ ID NO: 473805 - DNA, 33 bp, Homo sapien
ccttaactaatgaccaagtatagaaaggtcact

SEQ ID NO: 473806 - DNA, 33 bp, Homo sapien
ccttaactaatgaccacgtatagaaaggtcact

SEQ ID NO: 473807 - DNA, 33 bp, Homo sapien
cccacttacaagtgagaaaatgtagtgtttggt

SEQ ID NO: 473808 - DNA, 33 bp, Homo sapien
cccacttacaagtgagtaaatgtagtgtttggt

SEQ ID NO: 473809 - DNA, 33 bp, Homo sapien
ctttgtaattaaactaacattcacacacaagta

SEQ ID NO: 473810 - DNA, 33 bp, Homo sapien
ctttgtaattaaactatcattcacacacaagta

SEQ ID NO: 473811 - DNA, 33 bp, Homo sapien
tgactctgtttggccacaaaacatcaatataga

SEQ ID NO: 473812 - DNA, 33 bp, Homo sapien
tgactctgtttggccagaaaacatcaatataga

SEQ ID NO: 473813 - DNA, 33 bp, Homo sapien
ctctttgccaaacttaaagcccagcactggttt

SEQ ID NO: 473814 - DNA, 33 bp, Homo sapien
ctctttgccaaacttagagcccagcactggttt

SEQ ID NO: 473815 - DNA, 33 bp, Homo sapien
ttcatttgcttctgtaactctgaaggtattttt

SEQ ID NO: 473816 - DNA, 33 bp, Homo sapien
ttcatttgcttctgtagctctgaaggtattttt

SEQ ID NO: 473817 - DNA, 33 bp, Homo sapien
ccagctctaacatccaaagtggctaaagtacat

SEQ ID NO: 473818 - DNA, 33 bp, Homo sapien
ccagctctaacatccagagtggctaaagtacat

SEQ ID NO: 473819 - DNA, 33 bp, Homo sapien
caaagaccattgatgactaactatccctgtggc

SEQ ID NO: 473820 - DNA, 33 bp, Homo sapien
caaagaccattgatgattaactatccctgtggc

SEQ ID NO: 473821 - DNA, 33 bp, Homo sapien
atcacattatattaccaaaagagccccaataag

SEQ ID NO: 473822 - DNA, 33 bp, Homo sapien
atcacattatattaccgaaagagccccaataag

SEQ ID NO: 473823 - DNA, 33 bp, Homo sapien
cccccaatcacctgagccaaaaaagacagaggc

SEQ ID NO: 473824 - DNA, 33 bp, Homo sapien
cccccaatcacctgagtcaaaaaagacagaggc

SEQ ID NO: 473825 - DNA, 33 bp, Homo sapien
tgcaattgagaagtgacacttatgtttaagatt

SEQ ID NO: 473826 - DNA, 33 bp, Homo sapien
tgcaattgagaagtgatacttatgtttaagatt

SEQ ID NO: 473827 - DNA, 33 bp, Homo sapien
ttctctacaaatcaacaaattctcttttgcctt

SEQ ID NO: 473828 - DNA, 33 bp, Homo sapien
ttctctacaaatcaaccaattctcttttgcctt

SEQ ID NO: 473829 - DNA, 33 bp, Homo sapien
tacataaatctttttacgtagactaggctaaag

SEQ ID NO: 473830 - DNA, 33 bp, Homo sapien
tacataaatctttttatgtagactaggctaaag

SEQ ID NO: 473831 - DNA, 33 bp, Homo sapien
agactatttgcaaagacggttttaaagcatatg

SEQ ID NO: 473832 - DNA, 33 bp, Homo sapien
agactatttgcaaagatggttttaaagcatatg

SEQ ID NO: 473833 - DNA, 33 bp, Homo sapien
aaagcatcatttaaacagcttaaagtcgttata

SEQ ID NO: 473834 - DNA, 33 bp, Homo sapien
aaagcatcatttaaacggcttaaagtcgttata

SEQ ID NO: 473835 - DNA, 33 bp, Homo sapien
taagaaaatagccatcgccactgactatctgtg

SEQ ID NO: 473836 - DNA, 33 bp, Homo sapien
taagaaaatagccatctccactgactatctgtg

SEQ ID NO: 473837 - DNA, 33 bp, Homo sapien
attgcaagaagcaaaactttccttgagcttaat

SEQ ID NO: 473838 - DNA, 33 bp, Homo sapien
attgcaagaagcaaaattttccttgagcttaat

SEQ ID NO: 473839 - DNA, 33 bp, Homo sapien
cctctggaacctgatgaagccaccactccaagt

SEQ ID NO: 473840 - DNA, 33 bp, Homo sapien
cctctggaacctgatggagccaccactccaagt

SEQ ID NO: 473841 - DNA, 33 bp, Homo sapien
agtgccttgctgttccccacagagaatctgaat

SEQ ID NO: 473842 - DNA, 33 bp, Homo sapien
agtgccttgctgttcctcacagagaatctgaat

SEQ ID NO: 473843 - DNA, 33 bp, Homo sapien
cagcttaggggatccacgctataaataactgtg

SEQ ID NO: 473844 - DNA, 33 bp, Homo sapien
cagcttaggggatccaggctataaataactgtg

SEQ ID NO: 473845 - DNA, 33 bp, Homo sapien
ttcttactccgtgctaagccccacattgagtgt

SEQ ID NO: 473846 - DNA, 33 bp, Homo sapien
ttcttactccgtgctaggccccacattgagtgt

SEQ ID NO: 473847 - DNA, 33 bp, Homo sapien
agcttgcttatataaactgtacatgcaaagatt

SEQ ID NO: 473848 - DNA, 33 bp, Homo sapien
agcttgcttatataaattgtacatgcaaagatt

SEQ ID NO: 473849 - DNA, 33 bp, Homo sapien
aagccacctaaggtgaaaactgttaagctccaa

SEQ ID NO: 473850 - DNA, 33 bp, Homo sapien
aagccacctaaggtgataactgttaagctccaa

SEQ ID NO: 473851 - DNA, 33 bp, Homo sapien
tgtgggaagtcagtaaaagagtagaggctagaa

SEQ ID NO: 473852 - DNA, 33 bp, Homo sapien
tgtgggaagtcagtaagagagtagaggctagaa

SEQ ID NO: 473853 - DNA, 33 bp, Homo sapien
tatctgaaatcagtgccaactgtgccattcata

SEQ ID NO: 473854 - DNA, 33 bp, Homo sapien
tatctgaaatcagtgctaactgtgccattcata

SEQ ID NO: 473855 - DNA, 33 bp, Homo sapien
tactcacagtctagcaaatgtagataaacatac

SEQ ID NO: 473856 - DNA, 33 bp, Homo sapien
tactcacagtctagcagatgtagataaacatac

SEQ ID NO: 473857 - DNA, 33 bp, Homo sapien
ataagtttcaggggtaccaatgtaacatataga

SEQ ID NO: 473858 - DNA, 33 bp, Homo sapien
ataagtttcaggggtatcaatgtaacatataga

SEQ ID NO: 473859 - DNA, 33 bp, Homo sapien
tttacacctgatacacaaaaaactgctcaaaat

SEQ ID NO: 473860 - DNA, 33 bp, Homo sapien
tttacacctgatacacgaaaaactgctcaaaat

SEQ ID NO: 473861 - DNA, 33 bp, Homo sapien
aaatctcctgcttaagaatgggcctaatgcaga

SEQ ID NO: 473862 - DNA, 33 bp, Homo sapien
aaatctcctgcttaaggatgggcctaatgcaga

SEQ ID NO: 473863 - DNA, 33 bp, Homo sapien
tatgcatttgagaatacggttgaaactgtgccc

SEQ ID NO: 473864 - DNA, 33 bp, Homo sapien
tatgcatttgagaatatggttgaaactgtgccc

SEQ ID NO: 473865 - DNA, 33 bp, Homo sapien
attcaaaaagattagacagcttgtttaaggata

SEQ ID NO: 473866 - DNA, 33 bp, Homo sapien
attcaaaaagattagatagcttgtttaaggata

SEQ ID NO: 473867 - DNA, 33 bp, Homo sapien
ctaactttgggagaataagagactatcaaggat

SEQ ID NO: 473868 - DNA, 33 bp, Homo sapien
ctaactttgggagaatgagagactatcaaggat

SEQ ID NO: 473869 - DNA, 33 bp, Homo sapien
tcaaccaagtcaagaaaaacatgcaatggggaa

SEQ ID NO: 473870 - DNA, 33 bp, Homo sapien
tcaaccaagtcaagaagaacatgcaatggggaa

SEQ ID NO: 473871 - DNA, 33 bp, Homo sapien
cctcagtgaactgtgacctccttaagaagaggg

SEQ ID NO: 473872 - DNA, 33 bp, Homo sapien
cctcagtgaactgtgatctccttaagaagaggg

SEQ ID NO: 473873 - DNA, 33 bp, Homo sapien
tggaaaagtacatggaatatcagctcaccaatg

SEQ ID NO: 473874 - DNA, 33 bp, Homo sapien
tggaaaagtacatggagtatcagctcaccaatg

SEQ ID NO: 473875 - DNA, 33 bp, Homo sapien
ttcttttctgtagaaacggaagtgtatttcatg

SEQ ID NO: 473876 - DNA, 33 bp, Homo sapien
ttcttttctgtagaaatggaagtgtatttcatg

SEQ ID NO: 473877 - DNA, 33 bp, Homo sapien
agaagtcatcagcgaagaaaaaagttttctttg

SEQ ID NO: 473878 - DNA, 33 bp, Homo sapien
agaagtcatcagcgaataaaaaagttttctttg

SEQ ID NO: 473879 - DNA, 33 bp, Homo sapien
ttccccatgcctgtgacagctttcctgaaagac

SEQ ID NO: 473880 - DNA, 33 bp, Homo sapien
ttccccatgcctgtgatagctttcctgaaagac

SEQ ID NO: 473881 - DNA, 33 bp, Homo sapien
actcctctaccactgacagatggcagaacagca

SEQ ID NO: 473882 - DNA, 33 bp, Homo sapien
actcctctaccactgatagatggcagaacagca

SEQ ID NO: 473883 - DNA, 33 bp, Homo sapien
atgctaagatcctaccacctgcttcacacatca

SEQ ID NO: 473884 - DNA, 33 bp, Homo sapien
atgctaagatcctaccgcctgcttcacacatca

SEQ ID NO: 473885 - DNA, 33 bp, Homo sapien
ccgaaaatgtcagaaaatgaggagagaagaaaa

SEQ ID NO: 473886 - DNA, 33 bp, Homo sapien
ccgaaaatgtcagaaagtgaggagagaagaaaa

SEQ ID NO: 473887 - DNA, 33 bp, Homo sapien
aggtagaaacctatgcaacctttaatcaaaaca

SEQ ID NO: 473888 - DNA, 33 bp, Homo sapien
aggtagaaacctatgcgacctttaatcaaaaca

SEQ ID NO: 473889 - DNA, 33 bp, Homo sapien
acactgccaggacaatcagttccatcaagcagg

SEQ ID NO: 473890 - DNA, 33 bp, Homo sapien
acactgccaggacaatgagttccatcaagcagg

SEQ ID NO: 473891 - DNA, 33 bp, Homo sapien
gcagacccttctcaacccttttcctataggtaa

SEQ ID NO: 473892 - DNA, 33 bp, Homo sapien
gcagacccttctcaacgcttttcctataggtaa

SEQ ID NO: 473893 - DNA, 33 bp, Homo sapien
caaaactatctgagcccaaagtctgtgtcatta

SEQ ID NO: 473894 - DNA, 33 bp, Homo sapien
caaaactatctgagcctaaagtctgtgtcatta

SEQ ID NO: 473895 - DNA, 33 bp, Homo sapien
ctgtaaagtggagctactaatactttttatttt

SEQ ID NO: 473896 - DNA, 33 bp, Homo sapien
ctgtaaagtggagctagtaatactttttatttt

SEQ ID NO: 473897 - DNA, 33 bp, Homo sapien
aaccgagcaatgcatgaactcttaaaaggacac

SEQ ID NO: 473898 - DNA, 33 bp, Homo sapien
aaccgagcaatgcatggactcttaaaaggacac

SEQ ID NO: 473899 - DNA, 33 bp, Homo sapien
tttgttttactgttgaggctttaaaatgtgttt

SEQ ID NO: 473900 - DNA, 33 bp, Homo sapien
tttgttttactgttgatgctttaaaatgtgttt

SEQ ID NO: 473901 - DNA, 33 bp, Homo sapien
gcaagctgcaatcacacatgacaacaataagga

SEQ ID NO: 473902 - DNA, 33 bp, Homo sapien
gcaagctgcaatcacatatgacaacaataagga

SEQ ID NO: 473903 - DNA, 33 bp, Homo sapien
acttgtggagcctaaaaagcagctggatgcagg

SEQ ID NO: 473904 - DNA, 33 bp, Homo sapien
acttgtggagcctaaagagcagctggatgcagg

SEQ ID NO: 473905 - DNA, 33 bp, Homo sapien
aatagaaggtatccagacacctttggctgtgag

SEQ ID NO: 473906 - DNA, 33 bp, Homo sapien
aatagaaggtatccaggcacctttggctgtgag

SEQ ID NO: 473907 - DNA, 33 bp, Homo sapien
taagtgtgtcagaatacggacaaatgtgaatta

SEQ ID NO: 473908 - DNA, 33 bp, Homo sapien
taagtgtgtcagaatatggacaaatgtgaatta

SEQ ID NO: 473909 - DNA, 33 bp, Homo sapien
ggcagaagtagtgtcacgccaatctctgtcccc

SEQ ID NO: 473910 - DNA, 33 bp, Homo sapien
ggcagaagtagtgtcaggccaatctctgtcccc

SEQ ID NO: 473911 - DNA, 33 bp, Homo sapien
tgatttaaaatatcaacgtagtttgtcagacat

SEQ ID NO: 473912 - DNA, 33 bp, Homo sapien
tgatttaaaatatcaatgtagtttgtcagacat

SEQ ID NO: 473913 - DNA, 33 bp, Homo sapien
gactggaaagtaattcaccaaatgtccattata

SEQ ID NO: 473914 - DNA, 33 bp, Homo sapien
gactggaaagtaattcgccaaatgtccattata

SEQ ID NO: 473915 - DNA, 33 bp, Homo sapien
tgcgtctgtagagaaaatctgcattggtaaaat

SEQ ID NO: 473916 - DNA, 33 bp, Homo sapien
tgcgtctgtagagaaagtctgcattggtaaaat

SEQ ID NO: 473917 - DNA, 33 bp, Homo sapien
attttgtctacttcaagtagtttttattggagt

SEQ ID NO: 473918 - DNA, 33 bp, Homo sapien
attttgtctacttcaattagtttttattggagt

SEQ ID NO: 473919 - DNA, 33 bp, Homo sapien
gtcgcagatacacaagacgctatggataagaat

SEQ ID NO: 473920 - DNA, 33 bp, Homo sapien
gtcgcagatacacaaggcgctatggataagaat

SEQ ID NO: 473921 - DNA, 33 bp, Homo sapien
agtgaaaatgtcaaggccagaatataaccttta

SEQ ID NO: 473922 - DNA, 33 bp, Homo sapien
agtgaaaatgtcaagggcagaatataaccttta

SEQ ID NO: 473923 - DNA, 33 bp, Homo sapien
agggtcgtgctcctatcagacttgaatgcctct

SEQ ID NO: 473924 - DNA, 33 bp, Homo sapien
agggtcgtgctcctatgagacttgaatgcctct

SEQ ID NO: 473925 - DNA, 33 bp, Homo sapien
gcacctgatgagaagcaagaactccccacctgt

SEQ ID NO: 473926 - DNA, 33 bp, Homo sapien
gcacctgatgagaagcgagaactccccacctgt

SEQ ID NO: 473927 - DNA, 33 bp, Homo sapien
gaaatggagcagcatacgtggcataatcaatct

SEQ ID NO: 473928 - DNA, 33 bp, Homo sapien
gaaatggagcagcatatgtggcataatcaatct

SEQ ID NO: 473929 - DNA, 33 bp, Homo sapien
atcaaaatcagggcctcactcaggatattcact

SEQ ID NO: 473930 - DNA, 33 bp, Homo sapien
atcaaaatcagggccttactcaggatattcact

SEQ ID NO: 473931 - DNA, 33 bp, Homo sapien
tggccaaggtgattcaaaagttaacctgaaaac

SEQ ID NO: 473932 - DNA, 33 bp, Homo sapien
tggccaaggtgattcagaagttaacctgaaaac

SEQ ID NO: 473933 - DNA, 33 bp, Homo sapien
ggtttgggtgtagcccacttttatacatgttag

SEQ ID NO: 473934 - DNA, 33 bp, Homo sapien
ggtttgggtgtagcccgcttttatacatgttag

SEQ ID NO: 473935 - DNA, 33 bp, Homo sapien
gagacaatctcataaaactgccaatactatgat

SEQ ID NO: 473936 - DNA, 33 bp, Homo sapien
gagacaatctcataaagctgccaatactatgat

SEQ ID NO: 473937 - DNA, 33 bp, Homo sapien
ggcttcctcactactacgttggggataaataaa

SEQ ID NO: 473938 - DNA, 33 bp, Homo sapien
ggcttcctcactactatgttggggataaataaa

SEQ ID NO: 473939 - DNA, 33 bp, Homo sapien
tgctgcctgttcctgtaaagatatcacccataa

SEQ ID NO: 473940 - DNA, 33 bp, Homo sapien
tgctgcctgttcctgtgaagatatcacccataa

SEQ ID NO: 473941 - DNA, 33 bp, Homo sapien
ctgagatttgcagtccagagctccctctttcca

SEQ ID NO: 473942 - DNA, 33 bp, Homo sapien
ctgagatttgcagtccggagctccctctttcca

SEQ ID NO: 473943 - DNA, 33 bp, Homo sapien
atgttgtcattcaggaaaaaaaaaatacacaat

SEQ ID NO: 473944 - DNA, 33 bp, Homo sapien
atgttgtcattcaggagaaaaaaaatacacaat

SEQ ID NO: 473945 - DNA, 33 bp, Homo sapien
aaagaaaacaatagagaagaacttgatacttac

SEQ ID NO: 473946 - DNA, 33 bp, Homo sapien
aaagaaaacaatagaggagaacttgatacttac

SEQ ID NO: 473947 - DNA, 33 bp, Homo sapien
gggccttgggatttagccacttatcaccaccaa

SEQ ID NO: 473948 - DNA, 33 bp, Homo sapien
gggccttgggatttagtcacttatcaccaccaa

SEQ ID NO: 473949 - DNA, 33 bp, Homo sapien
ttgcagcaaagactacaacactctctggggaac

SEQ ID NO: 473950 - DNA, 33 bp, Homo sapien
ttgcagcaaagactacgacactctctggggaac

SEQ ID NO: 473951 - DNA, 33 bp, Homo sapien
tgctgcaatgacaagaataagaaatacctggag

SEQ ID NO: 473952 - DNA, 33 bp, Homo sapien
tgctgcaatgacaagagtaagaaatacctggag

SEQ ID NO: 473953 - DNA, 33 bp, Homo sapien
agcttttacaacagccaaacatttaaatcaaaa

SEQ ID NO: 473954 - DNA, 33 bp, Homo sapien
agcttttacaacagccgaacatttaaatcaaaa

SEQ ID NO: 473955 - DNA, 33 bp, Homo sapien
tgctaaaatgaagtaaacagttgtcaaggataa

SEQ ID NO: 473956 - DNA, 33 bp, Homo sapien
tgctaaaatgaagtaagcagttgtcaaggataa

SEQ ID NO: 473957 - DNA, 33 bp, Homo sapien
agtaatcagcccaaagccccacattctggtttc

SEQ ID NO: 473958 - DNA, 33 bp, Homo sapien
agtaatcagcccaaaggcccacattctggtttc

SEQ ID NO: 473959 - DNA, 33 bp, Homo sapien
atggtgtccagcttgaagtctggaaggaggcac

SEQ ID NO: 473960 - DNA, 33 bp, Homo sapien
atggtgtccagcttgaggtctggaaggaggcac

SEQ ID NO: 473961 - DNA, 33 bp, Homo sapien
tgaaactgccatagaaagaaggtgtaattcagt

SEQ ID NO: 473962 - DNA, 33 bp, Homo sapien
tgaaactgccatagaaggaaggtgtaattcagt

SEQ ID NO: 473963 - DNA, 33 bp, Homo sapien
gagaaggtcagtaacactcaacggtcaagacca

SEQ ID NO: 473964 - DNA, 33 bp, Homo sapien
gagaaggtcagtaacattcaacggtcaagacca

SEQ ID NO: 473965 - DNA, 33 bp, Homo sapien
ccaagtctgtatgttacgagcaagagaaaatat

SEQ ID NO: 473966 - DNA, 33 bp, Homo sapien
ccaagtctgtatgttatgagcaagagaaaatat

SEQ ID NO: 473967 - DNA, 33 bp, Homo sapien
gcgatgggttataatcaattttgaccaattatg

SEQ ID NO: 473968 - DNA, 33 bp, Homo sapien
gcgatgggttataatcgattttgaccaattatg

SEQ ID NO: 473969 - DNA, 33 bp, Homo sapien
actgtggaaagtagtagagaatttcttcgagaa

SEQ ID NO: 473970 - DNA, 33 bp, Homo sapien
actgtggaaagtagtatagaatttcttcgagaa

SEQ ID NO: 473971 - DNA, 33 bp, Homo sapien
atcctgcccctgatacaagaaaactatcaactt

SEQ ID NO: 473972 - DNA, 33 bp, Homo sapien
atcctgcccctgatacgagaaaactatcaactt

SEQ ID NO: 473973 - DNA, 33 bp, Homo sapien
agggcaaataatatgacacaaggtgccagaaaa

SEQ ID NO: 473974 - DNA, 33 bp, Homo sapien
agggcaaataatatgatacaaggtgccagaaaa

SEQ ID NO: 473975 - DNA, 33 bp, Homo sapien
atactctgttcaactacgaggtttttttaatca

SEQ ID NO: 473976 - DNA, 33 bp, Homo sapien
atactctgttcaactatgaggtttttttaatca

SEQ ID NO: 473977 - DNA, 33 bp, Homo sapien
ctttgaagtccagggacgagaaactacacagat

SEQ ID NO: 473978 - DNA, 33 bp, Homo sapien
ctttgaagtccagggatgagaaactacacagat

SEQ ID NO: 473979 - DNA, 33 bp, Homo sapien
aatggctctgggtcacaaaaaccacaggaaaga

SEQ ID NO: 473980 - DNA, 33 bp, Homo sapien
aatggctctgggtcaccaaaaccacaggaaaga

SEQ ID NO: 473981 - DNA, 33 bp, Homo sapien
taaggaaaatgttttaagaccaatatcaggaga

SEQ ID NO: 473982 - DNA, 33 bp, Homo sapien
taaggaaaatgttttaggaccaatatcaggaga

SEQ ID NO: 473983 - DNA, 33 bp, Homo sapien
gaattcggggagatggaagatttgttctcttcc

SEQ ID NO: 473984 - DNA, 33 bp, Homo sapien
gaattcggggagatgggagatttgttctcttcc

SEQ ID NO: 473985 - DNA, 33 bp, Homo sapien
ggagactttatcagccaagttatagaggaagga

SEQ ID NO: 473986 - DNA, 33 bp, Homo sapien
ggagactttatcagccgagttatagaggaagga

SEQ ID NO: 473987 - DNA, 33 bp, Homo sapien
acagattagtaccttcaaataatacacatgtgt

SEQ ID NO: 473988 - DNA, 33 bp, Homo sapien
acagattagtaccttcgaataatacacatgtgt

SEQ ID NO: 473989 - DNA, 33 bp, Homo sapien
cttataacaactgtcagctttatctcaagaact

SEQ ID NO: 473990 - DNA, 33 bp, Homo sapien
cttataacaactgtcatctttatctcaagaact

SEQ ID NO: 473991 - DNA, 33 bp, Homo sapien
agagcacagggagacacatattctagacaggcc

SEQ ID NO: 473992 - DNA, 33 bp, Homo sapien
agagcacagggagacagatattctagacaggcc

SEQ ID NO: 473993 - DNA, 33 bp, Homo sapien
gtgcaccctcagcaataataactcagttgttca

SEQ ID NO: 473994 - DNA, 33 bp, Homo sapien
gtgcaccctcagcaattataactcagttgttca

SEQ ID NO: 473995 - DNA, 33 bp, Homo sapien
tttcttctaggcacacaagtcttcacaactctt

SEQ ID NO: 473996 - DNA, 33 bp, Homo sapien
tttcttctaggcacaccagtcttcacaactctt

SEQ ID NO: 473997 - DNA, 33 bp, Homo sapien
ctgccagcatatgataataaaatgtgaacatta

SEQ ID NO: 473998 - DNA, 33 bp, Homo sapien
ctgccagcatatgatagtaaaatgtgaacatta

SEQ ID NO: 473999 - DNA, 33 bp, Homo sapien
atgtaagtgtgttgaacgaacaaaggccacggt

SEQ ID NO: 474000 - DNA, 33 bp, Homo sapien
atgtaagtgtgttgaatgaacaaaggccacggt

SEQ ID NO: 474001 - DNA, 33 bp, Homo sapien
tcgggcctggcacatgaagaaggttcaatgtaa

SEQ ID NO: 474002 - DNA, 33 bp, Homo sapien
tcgggcctggcacatggagaaggttcaatgtaa

SEQ ID NO: 474003 - DNA, 33 bp, Homo sapien
aatatatggcaaatacagtacacaaattcagat

SEQ ID NO: 474004 - DNA, 33 bp, Homo sapien
aatatatggcaaataccgtacacaaattcagat

SEQ ID NO: 474005 - DNA, 33 bp, Homo sapien
tcccaggcagatcagaaagtttttacatacatt

SEQ ID NO: 474006 - DNA, 33 bp, Homo sapien
tcccaggcagatcagagagtttttacatacatt

SEQ ID NO: 474007 - DNA, 33 bp, Homo sapien
agataaatacgtgctgaacctcaaaatgataaa

SEQ ID NO: 474008 - DNA, 33 bp, Homo sapien
agataaatacgtgctggacctcaaaatgataaa

SEQ ID NO: 474009 - DNA, 33 bp, Homo sapien
gtcaattcctctcaaacttgtcaattgttttaa

SEQ ID NO: 474010 - DNA, 33 bp, Homo sapien
gtcaattcctctcaaagttgtcaattgttttaa

SEQ ID NO: 474011 - DNA, 33 bp, Homo sapien
catttttagattctacagaggtattgtaccaga

SEQ ID NO: 474012 - DNA, 33 bp, Homo sapien
catttttagattctacggaggtattgtaccaga

SEQ ID NO: 474013 - DNA, 33 bp, Homo sapien
aactcaacagagacaaaaccataagactcagtc

SEQ ID NO: 474014 - DNA, 33 bp, Homo sapien
aactcaacagagacaacaccataagactcagtc

SEQ ID NO: 474015 - DNA, 33 bp, Homo sapien
ttttcctcattcaagacatactgagcttttatc

SEQ ID NO: 474016 - DNA, 33 bp, Homo sapien
ttttcctcattcaagatatactgagcttttatc

SEQ ID NO: 474017 - DNA, 33 bp, Homo sapien
ttttggagcctatcaacgggattcctcaataca

SEQ ID NO: 474018 - DNA, 33 bp, Homo sapien
ttttggagcctatcaatgggattcctcaataca

SEQ ID NO: 474019 - DNA, 33 bp, Homo sapien
tttgctactattttcccaggttgacttagacaa

SEQ ID NO: 474020 - DNA, 33 bp, Homo sapien
tttgctactattttcctaggttgacttagacaa

SEQ ID NO: 474021 - DNA, 33 bp, Homo sapien
gatgtaattcttgtaaaccttgtgtcataattt

SEQ ID NO: 474022 - DNA, 33 bp, Homo sapien
gatgtaattcttgtaacccttgtgtcataattt

SEQ ID NO: 474023 - DNA, 33 bp, Homo sapien
ctccgactttactacaatggtcccgtatgactt

SEQ ID NO: 474024 - DNA, 33 bp, Homo sapien
ctccgactttactacagtggtcccgtatgactt

SEQ ID NO: 474025 - DNA, 33 bp, Homo sapien
tagcatcgtcaaattcgatagcaaagtcatacg

SEQ ID NO: 474026 - DNA, 33 bp, Homo sapien
tagcatcgtcaaattctatagcaaagtcatacg

SEQ ID NO: 474027 - DNA, 33 bp, Homo sapien
ccccccttgccttagcacacctcctaactcctt

SEQ ID NO: 474028 - DNA, 33 bp, Homo sapien
ccccccttgccttagcgcacctcctaactcctt

SEQ ID NO: 474029 - DNA, 33 bp, Homo sapien
ggattccttgtaattaactcaacacaatagcac

SEQ ID NO: 474030 - DNA, 33 bp, Homo sapien
ggattccttgtaattacctcaacacaatagcac

SEQ ID NO: 474031 - DNA, 33 bp, Homo sapien
attctactgcttaacacaggcctggaatacagt

SEQ ID NO: 474032 - DNA, 33 bp, Homo sapien
attctactgcttaacataggcctggaatacagt

SEQ ID NO: 474033 - DNA, 33 bp, Homo sapien
tcaagcttgccctaaaatggtttgctatgacat

SEQ ID NO: 474034 - DNA, 33 bp, Homo sapien
tcaagcttgccctaaagtggtttgctatgacat

SEQ ID NO: 474035 - DNA, 33 bp, Homo sapien
tgaagtaagattgtcactaagatggataaataa

SEQ ID NO: 474036 - DNA, 33 bp, Homo sapien
tgaagtaagattgtcattaagatggataaataa

SEQ ID NO: 474037 - DNA, 33 bp, Homo sapien
acacaatttatcttcacgcaaaatcacatacct

SEQ ID NO: 474038 - DNA, 33 bp, Homo sapien
acacaatttatcttcatgcaaaatcacatacct

SEQ ID NO: 474039 - DNA, 33 bp, Homo sapien
ctcccatgagttacaactacgtgaattacaggc

SEQ ID NO: 474040 - DNA, 33 bp, Homo sapien
ctcccatgagttacaagtacgtgaattacaggc

SEQ ID NO: 474041 - DNA, 33 bp, Homo sapien
catgaagcaccatgctaaatcaatgggatcaat

SEQ ID NO: 474042 - DNA, 33 bp, Homo sapien
catgaagcaccatgctgaatcaatgggatcaat

SEQ ID NO: 474043 - DNA, 33 bp, Homo sapien
aaagcaaatttgctagacccttgcttacattat

SEQ ID NO: 474044 - DNA, 33 bp, Homo sapien
aaagcaaatttgctaggcccttgcttacattat

SEQ ID NO: 474045 - DNA, 33 bp, Homo sapien
aataaatccaataggcaaaaggaaaattgcaat

SEQ ID NO: 474046 - DNA, 33 bp, Homo sapien
aataaatccaataggcgaaaggaaaattgcaat

SEQ ID NO: 474047 - DNA, 33 bp, Homo sapien
aaacactagagagtcaagtctgccaacgttggg

SEQ ID NO: 474048 - DNA, 33 bp, Homo sapien
aaacactagagagtcatgtctgccaacgttggg

SEQ ID NO: 474049 - DNA, 33 bp, Homo sapien
tctccagtcttcataacatatcgtgagaaactt

SEQ ID NO: 474050 - DNA, 33 bp, Homo sapien
tctccagtcttcataatatatcgtgagaaactt

SEQ ID NO: 474051 - DNA, 33 bp, Homo sapien
ttgtatcagacaccaaagacatatatgccttca

SEQ ID NO: 474052 - DNA, 33 bp, Homo sapien
ttgtatcagacaccaatgacatatatgccttca

SEQ ID NO: 474053 - DNA, 33 bp, Homo sapien
atgcataccataaaaccattcaagaaatattaa

SEQ ID NO: 474054 - DNA, 33 bp, Homo sapien
atgcataccataaaactattcaagaaatattaa

SEQ ID NO: 474055 - DNA, 33 bp, Homo sapien
tcacttcattttaagacagtcactaacctccac

SEQ ID NO: 474056 - DNA, 33 bp, Homo sapien
tcacttcattttaagatagtcactaacctccac

SEQ ID NO: 474057 - DNA, 33 bp, Homo sapien
tatctttgtcccagcaagtctacttctagaaac

SEQ ID NO: 474058 - DNA, 33 bp, Homo sapien
tatctttgtcccagcatgtctacttctagaaac

SEQ ID NO: 474059 - DNA, 33 bp, Homo sapien
gtgcctcaaaagagaacgaatgattatccactt

SEQ ID NO: 474060 - DNA, 33 bp, Homo sapien
gtgcctcaaaagagaaggaatgattatccactt

SEQ ID NO: 474061 - DNA, 33 bp, Homo sapien
tccaactctaatacaactgctgtaagccccagg

SEQ ID NO: 474062 - DNA, 33 bp, Homo sapien
tccaactctaatacaattgctgtaagccccagg

SEQ ID NO: 474063 - DNA, 33 bp, Homo sapien
atatgccatgttgaacaccctcaatgccagggt

SEQ ID NO: 474064 - DNA, 33 bp, Homo sapien
atatgccatgttgaactccctcaatgccagggt

SEQ ID NO: 474065 - DNA, 33 bp, Homo sapien
aagttactctgtaggccccctaatcaacttggc

SEQ ID NO: 474066 - DNA, 33 bp, Homo sapien
aagttactctgtaggctccctaatcaacttggc

SEQ ID NO: 474067 - DNA, 33 bp, Homo sapien
agattttttttcaaccgctttatagccgctgct

SEQ ID NO: 474068 - DNA, 33 bp, Homo sapien
agattttttttcaacctctttatagccgctgct

SEQ ID NO: 474069 - DNA, 33 bp, Homo sapien
tccctgtgactgtctaggtggacattctgggca

SEQ ID NO: 474070 - DNA, 33 bp, Homo sapien
tccctgtgactgtctatgtggacattctgggca

SEQ ID NO: 474071 - DNA, 33 bp, Homo sapien
gttaagctggagtaacccgagtatggcagggcc

SEQ ID NO: 474072 - DNA, 33 bp, Homo sapien
gttaagctggagtaactcgagtatggcagggcc

SEQ ID NO: 474073 - DNA, 33 bp, Homo sapien
ccttgaggtcctctcaacttgtggggaaatttt

SEQ ID NO: 474074 - DNA, 33 bp, Homo sapien
ccttgaggtcctctcagcttgtggggaaatttt

SEQ ID NO: 474075 - DNA, 33 bp, Homo sapien
ctaaatgcagtaagaactacaaaacaaaaagaa

SEQ ID NO: 474076 - DNA, 33 bp, Homo sapien
ctaaatgcagtaagaagtacaaaacaaaaagaa

SEQ ID NO: 474077 - DNA, 33 bp, Homo sapien
gttttagctagattcaagaaagaacgtccaaca

SEQ ID NO: 474078 - DNA, 33 bp, Homo sapien
gttttagctagattcaggaaagaacgtccaaca

SEQ ID NO: 474079 - DNA, 33 bp, Homo sapien
aacatgtcagatatgccgcagatggctgagata

SEQ ID NO: 474080 - DNA, 33 bp, Homo sapien
aacatgtcagatatgctgcagatggctgagata

SEQ ID NO: 474081 - DNA, 33 bp, Homo sapien
ttggtcattggttggacatcagattagggagat

SEQ ID NO: 474082 - DNA, 33 bp, Homo sapien
ttggtcattggttggatatcagattagggagat

SEQ ID NO: 474083 - DNA, 33 bp, Homo sapien
tcacattgtggttaccagggcctgatgattaat

SEQ ID NO: 474084 - DNA, 33 bp, Homo sapien
tcacattgtggttaccggggcctgatgattaat

SEQ ID NO: 474085 - DNA, 33 bp, Homo sapien
gaaggggtgttgagcccgattgggtaataacag

SEQ ID NO: 474086 - DNA, 33 bp, Homo sapien
gaaggggtgttgagcctgattgggtaataacag

SEQ ID NO: 474087 - DNA, 33 bp, Homo sapien
ggatgtgtcttctttcgcaatatttgtttccat

SEQ ID NO: 474088 - DNA, 33 bp, Homo sapien
ggatgtgtcttctttctcaatatttgtttccat

SEQ ID NO: 474089 - DNA, 33 bp, Homo sapien
atttgaatgccatctgcatgccagacatcatgc

SEQ ID NO: 474090 - DNA, 33 bp, Homo sapien
atttgaatgccatctgtatgccagacatcatgc

SEQ ID NO: 474091 - DNA, 33 bp, Homo sapien
atgtctagttatctagcagctaggtaaacaatg

SEQ ID NO: 474092 - DNA, 33 bp, Homo sapien
atgtctagttatctagtagctaggtaaacaatg

SEQ ID NO: 474093 - DNA, 33 bp, Homo sapien
ttgtcaaagctgaacaaagtggctcacatgtat

SEQ ID NO: 474094 - DNA, 33 bp, Homo sapien
ttgtcaaagctgaacagagtggctcacatgtat

SEQ ID NO: 474095 - DNA, 33 bp, Homo sapien
acaaattcaggtaggaaggaataaagagcttgt

SEQ ID NO: 474096 - DNA, 33 bp, Homo sapien
acaaattcaggtaggagggaataaagagcttgt

SEQ ID NO: 474097 - DNA, 33 bp, Homo sapien
ttggcatctcatgatcaactagattttttaaaa

SEQ ID NO: 474098 - DNA, 33 bp, Homo sapien
ttggcatctcatgatccactagattttttaaaa

SEQ ID NO: 474099 - DNA, 33 bp, Homo sapien
tgtgaaataatcataaaaatcaagataattttc

SEQ ID NO: 474100 - DNA, 33 bp, Homo sapien
tgtgaaataatcataacaatcaagataattttc

SEQ ID NO: 474101 - DNA, 33 bp, Homo sapien
attggaaaacaaaacaatccctgagatattaat

SEQ ID NO: 474102 - DNA, 33 bp, Homo sapien
attggaaaacaaaacattccctgagatattaat

SEQ ID NO: 474103 - DNA, 33 bp, Homo sapien
gctgcttgtatgatttcaaagcctgtatggaga

SEQ ID NO: 474104 - DNA, 33 bp, Homo sapien
gctgcttgtatgattttaaagcctgtatggaga

SEQ ID NO: 474105 - DNA, 33 bp, Homo sapien
taaactttcatgcataaaatgttagaccccaag

SEQ ID NO: 474106 - DNA, 33 bp, Homo sapien
taaactttcatgcatataatgttagaccccaag

SEQ ID NO: 474107 - DNA, 33 bp, Homo sapien
caagaaccccgacttagaagcctgtggtgccat

SEQ ID NO: 474108 - DNA, 33 bp, Homo sapien
caagaaccccgacttataagcctgtggtgccat

SEQ ID NO: 474109 - DNA, 33 bp, Homo sapien
ctttctgagtgaaagagtaggaactgcgggctc

SEQ ID NO: 474110 - DNA, 33 bp, Homo sapien
ctttctgagtgaaagattaggaactgcgggctc

SEQ ID NO: 474111 - DNA, 33 bp, Homo sapien
tattcccagatttacgccaaaactgatcgaagt

SEQ ID NO: 474112 - DNA, 33 bp, Homo sapien
tattcccagatttacgtcaaaactgatcgaagt

SEQ ID NO: 474113 - DNA, 33 bp, Homo sapien
cttccttgtctaatggaaaaccgccacagcagg

SEQ ID NO: 474114 - DNA, 33 bp, Homo sapien
cttccttgtctaatgggaaaccgccacagcagg

SEQ ID NO: 474115 - DNA, 33 bp, Homo sapien
catttggaaaacaaatcagtgctctgtgcacat

SEQ ID NO: 474116 - DNA, 33 bp, Homo sapien
catttggaaaacaaatgagtgctctgtgcacat

SEQ ID NO: 474117 - DNA, 33 bp, Homo sapien
agcagttgcacttgaagctgtccagggttttgt

SEQ ID NO: 474118 - DNA, 33 bp, Homo sapien
agcagttgcacttgaatctgtccagggttttgt

SEQ ID NO: 474119 - DNA, 33 bp, Homo sapien
tgaatattacatttgcccaagtccattttttaa

SEQ ID NO: 474120 - DNA, 33 bp, Homo sapien
tgaatattacatttgctcaagtccattttttaa

SEQ ID NO: 474121 - DNA, 33 bp, Homo sapien
cagctgttgtgctaaacctgtctcagtgcctaa

SEQ ID NO: 474122 - DNA, 33 bp, Homo sapien
cagctgttgtgctaaatctgtctcagtgcctaa

SEQ ID NO: 474123 - DNA, 33 bp, Homo sapien
atgctccctggccacaccattactattggctgt

SEQ ID NO: 474124 - DNA, 33 bp, Homo sapien
atgctccctggccacagcattactattggctgt

SEQ ID NO: 474125 - DNA, 33 bp, Homo sapien
ccgagcaattattcacaaacttcatttatgaaa

SEQ ID NO: 474126 - DNA, 33 bp, Homo sapien
ccgagcaattattcacgaacttcatttatgaaa

SEQ ID NO: 474127 - DNA, 33 bp, Homo sapien
catgggccatcctgtaacttctctggtaagaag

SEQ ID NO: 474128 - DNA, 33 bp, Homo sapien
catgggccatcctgtagcttctctggtaagaag

SEQ ID NO: 474129 - DNA, 33 bp, Homo sapien
gccactaaattgtttacgtatgcacaaactgat

SEQ ID NO: 474130 - DNA, 33 bp, Homo sapien
gccactaaattgtttaggtatgcacaaactgat

SEQ ID NO: 474131 - DNA, 33 bp, Homo sapien
aagaggtccataagcccgagagaaggattcaca

SEQ ID NO: 474132 - DNA, 33 bp, Homo sapien
aagaggtccataagcctgagagaaggattcaca

SEQ ID NO: 474133 - DNA, 33 bp, Homo sapien
aattatgaacttaaaaagaaactgctcttgtac

SEQ ID NO: 474134 - DNA, 33 bp, Homo sapien
aattatgaacttaaaaggaaactgctcttgtac

SEQ ID NO: 474135 - DNA, 33 bp, Homo sapien
gttgcattccccgtgaccatccttaatctagtt

SEQ ID NO: 474136 - DNA, 33 bp, Homo sapien
gttgcattccccgtgagcatccttaatctagtt

SEQ ID NO: 474137 - DNA, 33 bp, Homo sapien
gaagcaagcaacagaacatgcagaaaagaggaa

SEQ ID NO: 474138 - DNA, 33 bp, Homo sapien
gaagcaagcaacagaatatgcagaaaagaggaa

SEQ ID NO: 474139 - DNA, 33 bp, Homo sapien
tggtaggtgtagaacgcagagtcatttggtgtg

SEQ ID NO: 474140 - DNA, 33 bp, Homo sapien
tggtaggtgtagaacggagagtcatttggtgtg

SEQ ID NO: 474141 - DNA, 33 bp, Homo sapien
ttattaatattttaaccggtaaagcacaggaag

SEQ ID NO: 474142 - DNA, 33 bp, Homo sapien
ttattaatattttaactggtaaagcacaggaag

SEQ ID NO: 474143 - DNA, 33 bp, Homo sapien
atatagagctaggtaaatcataagaatttagtg

SEQ ID NO: 474144 - DNA, 33 bp, Homo sapien
atatagagctaggtaactcataagaatttagtg

SEQ ID NO: 474145 - DNA, 33 bp, Homo sapien
ttgactcagctcaccactgatttcactttacat

SEQ ID NO: 474146 - DNA, 33 bp, Homo sapien
ttgactcagctcaccattgatttcactttacat

SEQ ID NO: 474147 - DNA, 33 bp, Homo sapien
atactcacataagcaaagaactagagacctagg

SEQ ID NO: 474148 - DNA, 33 bp, Homo sapien
atactcacataagcaaggaactagagacctagg

SEQ ID NO: 474149 - DNA, 33 bp, Homo sapien
gatggcagtcttccaaagagttactggtttccc

SEQ ID NO: 474150 - DNA, 33 bp, Homo sapien
gatggcagtcttccaaggagttactggtttccc

SEQ ID NO: 474151 - DNA, 33 bp, Homo sapien
tcaaaaagtgggcaaacgacacaaatagacatt

SEQ ID NO: 474152 - DNA, 33 bp, Homo sapien
tcaaaaagtgggcaaaggacacaaatagacatt

SEQ ID NO: 474153 - DNA, 33 bp, Homo sapien
agagtgaaactgagtgaaagtcatgtaatgttt

SEQ ID NO: 474154 - DNA, 33 bp, Homo sapien
agagtgaaactgagtgcaagtcatgtaatgttt

SEQ ID NO: 474155 - DNA, 33 bp, Homo sapien
cacataaagttcaaaacaggtgatacagactgg

SEQ ID NO: 474156 - DNA, 33 bp, Homo sapien
cacataaagttcaaaataggtgatacagactgg

SEQ ID NO: 474157 - DNA, 33 bp, Homo sapien
tgaatgggtataaatacgtggtttgatagaaga

SEQ ID NO: 474158 - DNA, 33 bp, Homo sapien
tgaatgggtataaatatgtggtttgatagaaga

SEQ ID NO: 474159 - DNA, 33 bp, Homo sapien
ttgagccctccatctacaaaacacgtcaattaa

SEQ ID NO: 474160 - DNA, 33 bp, Homo sapien
ttgagccctccatctataaaacacgtcaattaa

SEQ ID NO: 474161 - DNA, 33 bp, Homo sapien
ctttatgcagtgtacaaatttcatgtctgaaca

SEQ ID NO: 474162 - DNA, 33 bp, Homo sapien
ctttatgcagtgtacagatttcatgtctgaaca

SEQ ID NO: 474163 - DNA, 33 bp, Homo sapien
tgcactggagggtcctcagaaaacaaaatacac

SEQ ID NO: 474164 - DNA, 33 bp, Homo sapien
tgcactggagggtccttagaaaacaaaatacac

SEQ ID NO: 474165 - DNA, 33 bp, Homo sapien
tgaaaacaactgtgcaagtacctattcagtccc

SEQ ID NO: 474166 - DNA, 33 bp, Homo sapien
tgaaaacaactgtgcacgtacctattcagtccc

SEQ ID NO: 474167 - DNA, 33 bp, Homo sapien
caaattgctatgacccaaaaaataccaatggtc

SEQ ID NO: 474168 - DNA, 33 bp, Homo sapien
caaattgctatgaccccaaaaataccaatggtc

SEQ ID NO: 474169 - DNA, 33 bp, Homo sapien
atgcccaagatcatcacagatatgtcaggaaag

SEQ ID NO: 474170 - DNA, 33 bp, Homo sapien
atgcccaagatcatcatagatatgtcaggaaag

SEQ ID NO: 474171 - DNA, 33 bp, Homo sapien
tgaggctcactctgagcagctaattggcctact

SEQ ID NO: 474172 - DNA, 33 bp, Homo sapien
tgaggctcactctgaggagctaattggcctact

SEQ ID NO: 474173 - DNA, 33 bp, Homo sapien
tcttttcactacagacccataaatcacacatat

SEQ ID NO: 474174 - DNA, 33 bp, Homo sapien
tcttttcactacagactcataaatcacacatat

SEQ ID NO: 474175 - DNA, 33 bp, Homo sapien
aggtctgaaccaggaaccttttctctatattta

SEQ ID NO: 474176 - DNA, 33 bp, Homo sapien
aggtctgaaccaggaatcttttctctatattta

SEQ ID NO: 474177 - DNA, 33 bp, Homo sapien
tggtacattgaccttacatttgtgacttaatta

SEQ ID NO: 474178 - DNA, 33 bp, Homo sapien
tggtacattgaccttatatttgtgacttaatta

SEQ ID NO: 474179 - DNA, 33 bp, Homo sapien
gttgatctctagaaaagcactcaccaaagcaag

SEQ ID NO: 474180 - DNA, 33 bp, Homo sapien
gttgatctctagaaaatcactcaccaaagcaag

SEQ ID NO: 474181 - DNA, 33 bp, Homo sapien
caaacattcatcaaaacgctgctcttcatgtag

SEQ ID NO: 474182 - DNA, 33 bp, Homo sapien
caaacattcatcaaaaggctgctcttcatgtag

SEQ ID NO: 474183 - DNA, 33 bp, Homo sapien
gctcacagctgtcctccagtcatcctctttcat

SEQ ID NO: 474184 - DNA, 33 bp, Homo sapien
gctcacagctgtcctctagtcatcctctttcat

SEQ ID NO: 474185 - DNA, 33 bp, Homo sapien
ccagccctagtgttccaaatggcttcctggacc

SEQ ID NO: 474186 - DNA, 33 bp, Homo sapien
ccagccctagtgttccgaatggcttcctggacc

SEQ ID NO: 474187 - DNA, 33 bp, Homo sapien
ctcatttgtgaaagaacaaacaacatgagaagg

SEQ ID NO: 474188 - DNA, 33 bp, Homo sapien
ctcatttgtgaaagaagaaacaacatgagaagg

SEQ ID NO: 474189 - DNA, 33 bp, Homo sapien
atattcgacttttgcaactttaatgagaccaga

SEQ ID NO: 474190 - DNA, 33 bp, Homo sapien
atattcgacttttgcacctttaatgagaccaga

SEQ ID NO: 474191 - DNA, 33 bp, Homo sapien
ccctctcacttgcacactcataggctttccttg

SEQ ID NO: 474192 - DNA, 33 bp, Homo sapien
ccctctcacttgcacagtcataggctttccttg

SEQ ID NO: 474193 - DNA, 33 bp, Homo sapien
taaatgccacttaaagaagttacagatgctgaa

SEQ ID NO: 474194 - DNA, 33 bp, Homo sapien
taaatgccacttaaaggagttacagatgctgaa

SEQ ID NO: 474195 - DNA, 33 bp, Homo sapien
ccaatgatctctccaacgataaggtcatggaga

SEQ ID NO: 474196 - DNA, 33 bp, Homo sapien
ccaatgatctctccaatgataaggtcatggaga

SEQ ID NO: 474197 - DNA, 33 bp, Homo sapien
cgcacctgtggtctcgcaggtggtcttgcctcc

SEQ ID NO: 474198 - DNA, 33 bp, Homo sapien
cgcacctgtggtctcgtaggtggtcttgcctcc

SEQ ID NO: 474199 - DNA, 33 bp, Homo sapien
tgggataccgcagcaccgaacggccggagggat

SEQ ID NO: 474200 - DNA, 33 bp, Homo sapien
tgggataccgcagcactgaacggccggagggat

SEQ ID NO: 474201 - DNA, 33 bp, Homo sapien
cgcttggatggattgacaagggaaggacgcagg

SEQ ID NO: 474202 - DNA, 33 bp, Homo sapien
cgcttggatggattgagaagggaaggacgcagg

SEQ ID NO: 474203 - DNA, 33 bp, Homo sapien
ttgctcttcagtgtagaagctttatgaaaacat

SEQ ID NO: 474204 - DNA, 33 bp, Homo sapien
ttgctcttcagtgtagcagctttatgaaaacat

SEQ ID NO: 474205 - DNA, 33 bp, Homo sapien
taggtttcaatcagtgcatctgttagcagtgct

SEQ ID NO: 474206 - DNA, 33 bp, Homo sapien
taggtttcaatcagtgtatctgttagcagtgct

SEQ ID NO: 474207 - DNA, 33 bp, Homo sapien
tatttacaatgagtgagattgaacaattttcat

SEQ ID NO: 474208 - DNA, 33 bp, Homo sapien
tatttacaatgagtgatattgaacaattttcat

SEQ ID NO: 474209 - DNA, 33 bp, Homo sapien
ttttcccatggccttcaaaggtatccttttctt

SEQ ID NO: 474210 - DNA, 33 bp, Homo sapien
ttttcccatggccttcgaaggtatccttttctt

SEQ ID NO: 474211 - DNA, 33 bp, Homo sapien
ctaacctctcaaggctcacactggggtccatcc

SEQ ID NO: 474212 - DNA, 33 bp, Homo sapien
ctaacctctcaaggcttacactggggtccatcc

SEQ ID NO: 474213 - DNA, 33 bp, Homo sapien
gaatgcagaaggaaaacagaacatcgataaggt

SEQ ID NO: 474214 - DNA, 33 bp, Homo sapien
gaatgcagaaggaaaatagaacatcgataaggt

SEQ ID NO: 474215 - DNA, 33 bp, Homo sapien
catcgataaggtggtaaatgtaaggtgtctgat

SEQ ID NO: 474216 - DNA, 33 bp, Homo sapien
catcgataaggtggtagatgtaaggtgtctgat

SEQ ID NO: 474217 - DNA, 33 bp, Homo sapien
tctcttcttttctgcaagtagctctctgtcctt

SEQ ID NO: 474218 - DNA, 33 bp, Homo sapien
tctcttcttttctgcaggtagctctctgtcctt

SEQ ID NO: 474219 - DNA, 33 bp, Homo sapien
caatgtaaatccgtcaaattagtttggttgctt

SEQ ID NO: 474220 - DNA, 33 bp, Homo sapien
caatgtaaatccgtcagattagtttggttgctt

SEQ ID NO: 474221 - DNA, 33 bp, Homo sapien
ctgttaacacaaataactcagaagaatcaaaca

SEQ ID NO: 474222 - DNA, 33 bp, Homo sapien
ctgttaacacaaataattcagaagaatcaaaca

SEQ ID NO: 474223 - DNA, 33 bp, Homo sapien
atctcagagaagctcacagtacaaatcatgtac

SEQ ID NO: 474224 - DNA, 33 bp, Homo sapien
atctcagagaagctcatagtacaaatcatgtac

SEQ ID NO: 474225 - DNA, 33 bp, Homo sapien
taatataggttttaaccactgacatagggccag

SEQ ID NO: 474226 - DNA, 33 bp, Homo sapien
taatataggttttaactactgacatagggccag

SEQ ID NO: 474227 - DNA, 33 bp, Homo sapien
cctggtttcttagggacgtactggaagatacat

SEQ ID NO: 474228 - DNA, 33 bp, Homo sapien
cctggtttcttagggatgtactggaagatacat

SEQ ID NO: 474229 - DNA, 33 bp, Homo sapien
aataagtcctttctaaagctttgcaactggatt

SEQ ID NO: 474230 - DNA, 33 bp, Homo sapien
aataagtcctttctaaggctttgcaactggatt

SEQ ID NO: 474231 - DNA, 33 bp, Homo sapien
gatgatacccacatgacaacattgacaatgtta

SEQ ID NO: 474232 - DNA, 33 bp, Homo sapien
gatgatacccacatgagaacattgacaatgtta

SEQ ID NO: 474233 - DNA, 33 bp, Homo sapien
gtgttaaacaggatacagagtgaaggcacaatg

SEQ ID NO: 474234 - DNA, 33 bp, Homo sapien
gtgttaaacaggatacggagtgaaggcacaatg

SEQ ID NO: 474235 - DNA, 33 bp, Homo sapien
tcagtaatagctctaaactttgaagccaaaaca

SEQ ID NO: 474236 - DNA, 33 bp, Homo sapien
tcagtaatagctctaagctttgaagccaaaaca

SEQ ID NO: 474237 - DNA, 33 bp, Homo sapien
gaatggtgactggtaaacaatcagattctttct

SEQ ID NO: 474238 - DNA, 33 bp, Homo sapien
gaatggtgactggtaaccaatcagattctttct

SEQ ID NO: 474239 - DNA, 33 bp, Homo sapien
atctcatgctttttatgacctacattttgcatg

SEQ ID NO: 474240 - DNA, 33 bp, Homo sapien
atctcatgctttttattacctacattttgcatg

SEQ ID NO: 474241 - DNA, 33 bp, Homo sapien
tcatctgaaagagatgcaccagagaggaggaga

SEQ ID NO: 474242 - DNA, 33 bp, Homo sapien
tcatctgaaagagatggaccagagaggaggaga

SEQ ID NO: 474243 - DNA, 33 bp, Homo sapien
acaatcaggcaaagaaaggggaggactaaccca

SEQ ID NO: 474244 - DNA, 33 bp, Homo sapien
acaatcaggcaaagaagggggaggactaaccca

SEQ ID NO: 474245 - DNA, 33 bp, Homo sapien
taatccatgtggtaaactctgacttacatttct

SEQ ID NO: 474246 - DNA, 33 bp, Homo sapien
taatccatgtggtaaattctgacttacatttct

SEQ ID NO: 474247 - DNA, 33 bp, Homo sapien
tcttatagccacaatgaattatttgtttttatt

SEQ ID NO: 474248 - DNA, 33 bp, Homo sapien
tcttatagccacaatggattatttgtttttatt

SEQ ID NO: 474249 - DNA, 33 bp, Homo sapien
aaattgaaaaagctcaccacctctttcttagtg

SEQ ID NO: 474250 - DNA, 33 bp, Homo sapien
aaattgaaaaagctcatcacctctttcttagtg

SEQ ID NO: 474251 - DNA, 33 bp, Homo sapien
ttgtcatagtttttcacagtacttctccagttg

SEQ ID NO: 474252 - DNA, 33 bp, Homo sapien
ttgtcatagtttttcagagtacttctccagttg

SEQ ID NO: 474253 - DNA, 33 bp, Homo sapien
tttggatgccctctcacaatccctttcttctta

SEQ ID NO: 474254 - DNA, 33 bp, Homo sapien
tttggatgccctctcataatccctttcttctta

SEQ ID NO: 474255 - DNA, 33 bp, Homo sapien
atggatgtgtaatttaaccaacttggaactgtg

SEQ ID NO: 474256 - DNA, 33 bp, Homo sapien
atggatgtgtaatttagccaacttggaactgtg

SEQ ID NO: 474257 - DNA, 33 bp, Homo sapien
ccgggcttttcatttcaaggactgagtaggaag

SEQ ID NO: 474258 - DNA, 33 bp, Homo sapien
ccgggcttttcatttcgaggactgagtaggaag

SEQ ID NO: 474259 - DNA, 33 bp, Homo sapien
ccatgatcattaagaacttatacctgtaatccc

SEQ ID NO: 474260 - DNA, 33 bp, Homo sapien
ccatgatcattaagaatttatacctgtaatccc

SEQ ID NO: 474261 - DNA, 33 bp, Homo sapien
tgtctaagagtcataaagcctttgatctaaatg

SEQ ID NO: 474262 - DNA, 33 bp, Homo sapien
tgtctaagagtcataatgcctttgatctaaatg

SEQ ID NO: 474263 - DNA, 33 bp, Homo sapien
attaacaagcccagggcataaggcgagaagagc

SEQ ID NO: 474264 - DNA, 33 bp, Homo sapien
attaacaagcccaggggataaggcgagaagagc

SEQ ID NO: 474265 - DNA, 33 bp, Homo sapien
atggcaaaggcagatacatgaccagatatttat

SEQ ID NO: 474266 - DNA, 33 bp, Homo sapien
atggcaaaggcagatatatgaccagatatttat

SEQ ID NO: 474267 - DNA, 33 bp, Homo sapien
gaactgcactatcaaccaacttcagcaaattga

SEQ ID NO: 474268 - DNA, 33 bp, Homo sapien
gaactgcactatcaactaacttcagcaaattga

SEQ ID NO: 474269 - DNA, 33 bp, Homo sapien
gatatccttcacaggcggactaatcacacaaag

SEQ ID NO: 474270 - DNA, 33 bp, Homo sapien
gatatccttcacaggctgactaatcacacaaag

SEQ ID NO: 474271 - DNA, 33 bp, Homo sapien
gtgcaggtaccataagaaattagagaactcaag

SEQ ID NO: 474272 - DNA, 33 bp, Homo sapien
gtgcaggtaccataaggaattagagaactcaag

SEQ ID NO: 474273 - DNA, 33 bp, Homo sapien
tgcctgtgatcttagaataagccgtttgggata

SEQ ID NO: 474274 - DNA, 33 bp, Homo sapien
tgcctgtgatcttagagtaagccgtttgggata

SEQ ID NO: 474275 - DNA, 33 bp, Homo sapien
ttgataatcacaaatcagaatcagatctcttgc

SEQ ID NO: 474276 - DNA, 33 bp, Homo sapien
ttgataatcacaaatcggaatcagatctcttgc

SEQ ID NO: 474277 - DNA, 33 bp, Homo sapien
tcaaatataacaggaaagtctgtaactttggtt

SEQ ID NO: 474278 - DNA, 33 bp, Homo sapien
tcaaatataacaggaaggtctgtaactttggtt

SEQ ID NO: 474279 - DNA, 33 bp, Homo sapien
ttcctgttatatttgacgttgctgttatgcttt

SEQ ID NO: 474280 - DNA, 33 bp, Homo sapien
ttcctgttatatttgatgttgctgttatgcttt

SEQ ID NO: 474281 - DNA, 33 bp, Homo sapien
ttggttatttgtagaccgaaactcctcctgctg

SEQ ID NO: 474282 - DNA, 33 bp, Homo sapien
ttggttatttgtagactgaaactcctcctgctg

SEQ ID NO: 474283 - DNA, 33 bp, Homo sapien
gggtaatataactcccaggaatctatacattta

SEQ ID NO: 474284 - DNA, 33 bp, Homo sapien
gggtaatataactccccggaatctatacattta

SEQ ID NO: 474285 - DNA, 33 bp, Homo sapien
tgggatcacgctgtcacgaaagggattaagatc

SEQ ID NO: 474286 - DNA, 33 bp, Homo sapien
tgggatcacgctgtcatgaaagggattaagatc

SEQ ID NO: 474287 - DNA, 33 bp, Homo sapien
gaacaaagcaccagaaatggctaaaactgaagg

SEQ ID NO: 474288 - DNA, 33 bp, Homo sapien
gaacaaagcaccagaagtggctaaaactgaagg

SEQ ID NO: 474289 - DNA, 33 bp, Homo sapien
tgtgtgtgtcatgtcaaggcagcgatagagatt

SEQ ID NO: 474290 - DNA, 33 bp, Homo sapien
tgtgtgtgtcatgtcagggcagcgatagagatt

SEQ ID NO: 474291 - DNA, 33 bp, Homo sapien
acagtctgatgaatataagtagagaccatcatt

SEQ ID NO: 474292 - DNA, 33 bp, Homo sapien
acagtctgatgaatatgagtagagaccatcatt

SEQ ID NO: 474293 - DNA, 33 bp, Homo sapien
gcttaagcacatgaaccccaaagtaggactggc

SEQ ID NO: 474294 - DNA, 33 bp, Homo sapien
gcttaagcacatgaactccaaagtaggactggc

SEQ ID NO: 474295 - DNA, 33 bp, Homo sapien
acatagcaaggactcaataattgctgttaaata

SEQ ID NO: 474296 - DNA, 33 bp, Homo sapien
acatagcaaggactcagtaattgctgttaaata

SEQ ID NO: 474297 - DNA, 33 bp, Homo sapien
agagcacagaccttggacaatttatttaattct

SEQ ID NO: 474298 - DNA, 33 bp, Homo sapien
agagcacagaccttgggcaatttatttaattct

SEQ ID NO: 474299 - DNA, 33 bp, Homo sapien
tgtctgtcatttaacacagtgcttgatgcatag

SEQ ID NO: 474300 - DNA, 33 bp, Homo sapien
tgtctgtcatttaacatagtgcttgatgcatag

SEQ ID NO: 474301 - DNA, 33 bp, Homo sapien
ttctgctgtttgcttcccatgtttcagatcttc

SEQ ID NO: 474302 - DNA, 33 bp, Homo sapien
ttctgctgtttgcttctcatgtttcagatcttc

SEQ ID NO: 474303 - DNA, 33 bp, Homo sapien
cttgctgttccaggtaccaacagaaaacaagtc

SEQ ID NO: 474304 - DNA, 33 bp, Homo sapien
cttgctgttccaggtagcaacagaaaacaagtc

SEQ ID NO: 474305 - DNA, 33 bp, Homo sapien
gttaataattatcaaaagctctatattgtgtaa

SEQ ID NO: 474306 - DNA, 33 bp, Homo sapien
gttaataattatcaaaggctctatattgtgtaa

SEQ ID NO: 474307 - DNA, 33 bp, Homo sapien
tgttatgaaatcaaaccgagacagacatctgtt

SEQ ID NO: 474308 - DNA, 33 bp, Homo sapien
tgttatgaaatcaaactgagacagacatctgtt

SEQ ID NO: 474309 - DNA, 33 bp, Homo sapien
cgtgtatggctccttagaataaccagttgatga

SEQ ID NO: 474310 - DNA, 33 bp, Homo sapien
cgtgtatggctccttataataaccagttgatga

SEQ ID NO: 474311 - DNA, 33 bp, Homo sapien
aacttgaagagtttgaaccatgataaggaccta

SEQ ID NO: 474312 - DNA, 33 bp, Homo sapien
aacttgaagagtttgatccatgataaggaccta

SEQ ID NO: 474313 - DNA, 33 bp, Homo sapien
agactaaagaaaattcaaattcaaacgctgtta

SEQ ID NO: 474314 - DNA, 33 bp, Homo sapien
agactaaagaaaattccaattcaaacgctgtta

SEQ ID NO: 474315 - DNA, 33 bp, Homo sapien
atctttttacaaggtcaattaaagctatgaaca

SEQ ID NO: 474316 - DNA, 33 bp, Homo sapien
atctttttacaaggtcgattaaagctatgaaca

SEQ ID NO: 474317 - DNA, 33 bp, Homo sapien
gaaattgcagaactggacattttaccaacctga

SEQ ID NO: 474318 - DNA, 33 bp, Homo sapien
gaaattgcagaactggccattttaccaacctga

SEQ ID NO: 474319 - DNA, 33 bp, Homo sapien
ctgtgtttggggccaaaagaaggaagaaatagg

SEQ ID NO: 474320 - DNA, 33 bp, Homo sapien
ctgtgtttggggccaagagaaggaagaaatagg

SEQ ID NO: 474321 - DNA, 33 bp, Homo sapien
aaatactgaactgaaaaaagcctggaaagagat

SEQ ID NO: 474322 - DNA, 33 bp, Homo sapien
aaatactgaactgaaagaagcctggaaagagat

SEQ ID NO: 474323 - DNA, 33 bp, Homo sapien
actgttcctgatcctcacttccttggttcaatc

SEQ ID NO: 474324 - DNA, 33 bp, Homo sapien
actgttcctgatcctctcttccttggttcaatc

SEQ ID NO: 474325 - DNA, 33 bp, Homo sapien
cagagcacaaagcacagagtagatctttaataa

SEQ ID NO: 474326 - DNA, 33 bp, Homo sapien
cagagcacaaagcacatagtagatctttaataa

SEQ ID NO: 474327 - DNA, 33 bp, Homo sapien
caaagttctccttaaaagcttcagccatacatg

SEQ ID NO: 474328 - DNA, 33 bp, Homo sapien
caaagttctccttaaacgcttcagccatacatg

SEQ ID NO: 474329 - DNA, 33 bp, Homo sapien
ttggatccttagcttacaaagattactctagaa

SEQ ID NO: 474330 - DNA, 33 bp, Homo sapien
ttggatccttagcttagaaagattactctagaa

SEQ ID NO: 474331 - DNA, 33 bp, Homo sapien
attgtgaaatgatctccacaatcaagctaatta

SEQ ID NO: 474332 - DNA, 33 bp, Homo sapien
attgtgaaatgatctctacaatcaagctaatta

SEQ ID NO: 474333 - DNA, 33 bp, Homo sapien
catcagagggcaaagaagtaggtacaaatttgc

SEQ ID NO: 474334 - DNA, 33 bp, Homo sapien
catcagagggcaaagatgtaggtacaaatttgc

SEQ ID NO: 474335 - DNA, 33 bp, Homo sapien
tagtagaatctcatgaagataagaatgccttta

SEQ ID NO: 474336 - DNA, 33 bp, Homo sapien
tagtagaatctcatgacgataagaatgccttta

SEQ ID NO: 474337 - DNA, 33 bp, Homo sapien
acagtggggctcaaaaaggaaatcaagacacag

SEQ ID NO: 474338 - DNA, 33 bp, Homo sapien
acagtggggctcaaaagggaaatcaagacacag

SEQ ID NO: 474339 - DNA, 33 bp, Homo sapien
gaaggtgtgaagggtaaagatggtattaacatg

SEQ ID NO: 474340 - DNA, 33 bp, Homo sapien
gaaggtgtgaagggtatagatggtattaacatg

SEQ ID NO: 474341 - DNA, 33 bp, Homo sapien
ggagctcatcaactccacaatatggtacctgac

SEQ ID NO: 474342 - DNA, 33 bp, Homo sapien
ggagctcatcaactccgcaatatggtacctgac

SEQ ID NO: 474343 - DNA, 33 bp, Homo sapien
gagcactgtttgtggaaatgtcttcagagtcag

SEQ ID NO: 474344 - DNA, 33 bp, Homo sapien
gagcactgtttgtggagatgtcttcagagtcag

SEQ ID NO: 474345 - DNA, 33 bp, Homo sapien
tgctcacagctggagggaactaggccacaactc

SEQ ID NO: 474346 - DNA, 33 bp, Homo sapien
tgctcacagctggaggtaactaggccacaactc

SEQ ID NO: 474347 - DNA, 33 bp, Homo sapien
ttaaaagcaagctgtaaaggagcatcatgacaa

SEQ ID NO: 474348 - DNA, 33 bp, Homo sapien
ttaaaagcaagctgtacaggagcatcatgacaa

SEQ ID NO: 474349 - DNA, 33 bp, Homo sapien
aggacagaaaaccacagagcctatcatgtcaca

SEQ ID NO: 474350 - DNA, 33 bp, Homo sapien
aggacagaaaaccacatagcctatcatgtcaca

SEQ ID NO: 474351 - DNA, 33 bp, Homo sapien
acctggcttccgagtccacagattttacaactt

SEQ ID NO: 474352 - DNA, 33 bp, Homo sapien
acctggcttccgagtctacagattttacaactt

SEQ ID NO: 474353 - DNA, 33 bp, Homo sapien
tcctgggcggtatacacagcaaaaacataagaa

SEQ ID NO: 474354 - DNA, 33 bp, Homo sapien
tcctgggcggtatacatagcaaaaacataagaa

SEQ ID NO: 474355 - DNA, 33 bp, Homo sapien
gtacatggacagggacaaaaagaaatttctttc

SEQ ID NO: 474356 - DNA, 33 bp, Homo sapien
gtacatggacagggacgaaaagaaatttctttc

SEQ ID NO: 474357 - DNA, 33 bp, Homo sapien
ctacctgaagcttgagacatttacacagggagc

SEQ ID NO: 474358 - DNA, 33 bp, Homo sapien
ctacctgaagcttgaggcatttacacagggagc

SEQ ID NO: 474359 - DNA, 33 bp, Homo sapien
gtggcctccagaaagcaatttcctctgcggctt

SEQ ID NO: 474360 - DNA, 33 bp, Homo sapien
gtggcctccagaaagcgatttcctctgcggctt

SEQ ID NO: 474361 - DNA, 33 bp, Homo sapien
tggctttacttctaccacatgataccctttaaa

SEQ ID NO: 474362 - DNA, 33 bp, Homo sapien
tggctttacttctaccgcatgataccctttaaa

SEQ ID NO: 474363 - DNA, 33 bp, Homo sapien
ctagaaggaaaaataacagctctgaaaacttta

SEQ ID NO: 474364 - DNA, 33 bp, Homo sapien
ctagaaggaaaaataagagctctgaaaacttta

SEQ ID NO: 474365 - DNA, 33 bp, Homo sapien
gtgtgccctggagaaacagtctatctgtataaa

SEQ ID NO: 474366 - DNA, 33 bp, Homo sapien
gtgtgccctggagaaagagtctatctgtataaa

SEQ ID NO: 474367 - DNA, 33 bp, Homo sapien
gggaaagcctctagtaaagctgctaggatatga

SEQ ID NO: 474368 - DNA, 33 bp, Homo sapien
gggaaagcctctagtatagctgctaggatatga

SEQ ID NO: 474369 - DNA, 33 bp, Homo sapien
gggggcttatgaaggacgtcttcagtggcacat

SEQ ID NO: 474370 - DNA, 33 bp, Homo sapien
gggggcttatgaaggatgtcttcagtggcacat

SEQ ID NO: 474371 - DNA, 33 bp, Homo sapien
ctcagctatttacttccatgtgggaaaaatggg

SEQ ID NO: 474372 - DNA, 33 bp, Homo sapien
ctcagctatttacttctatgtgggaaaaatggg

SEQ ID NO: 474373 - DNA, 33 bp, Homo sapien
ctgacctctggatcataaagtgtggatcattgg

SEQ ID NO: 474374 - DNA, 33 bp, Homo sapien
ctgacctctggatcattaagtgtggatcattgg

SEQ ID NO: 474375 - DNA, 33 bp, Homo sapien
cctttttgcaagaccaaagttccttgagggcaa

SEQ ID NO: 474376 - DNA, 33 bp, Homo sapien
cctttttgcaagaccagagttccttgagggcaa

SEQ ID NO: 474377 - DNA, 33 bp, Homo sapien
tgcacagtcaagacaacgggagctctaaggaga

SEQ ID NO: 474378 - DNA, 33 bp, Homo sapien
tgcacagtcaagacaatgggagctctaaggaga

SEQ ID NO: 474379 - DNA, 33 bp, Homo sapien
aagggttggagtcttacacctgcagatttccca

SEQ ID NO: 474380 - DNA, 33 bp, Homo sapien
aagggttggagtcttatacctgcagatttccca

SEQ ID NO: 474381 - DNA, 33 bp, Homo sapien
tcttagatgtaaatgaagaacaaagtattggaa

SEQ ID NO: 474382 - DNA, 33 bp, Homo sapien
tcttagatgtaaatgaggaacaaagtattggaa

SEQ ID NO: 474383 - DNA, 33 bp, Homo sapien
atgcatcaaggggtccactatgataataaccac

SEQ ID NO: 474384 - DNA, 33 bp, Homo sapien
atgcatcaaggggtccgctatgataataaccac

SEQ ID NO: 474385 - DNA, 33 bp, Homo sapien
ttttgcacagagaaaaacgctttagtagttttc

SEQ ID NO: 474386 - DNA, 33 bp, Homo sapien
ttttgcacagagaaaagcgctttagtagttttc

SEQ ID NO: 474387 - DNA, 33 bp, Homo sapien
gctatcgagcaagaagaatttactctgccttat

SEQ ID NO: 474388 - DNA, 33 bp, Homo sapien
gctatcgagcaagaaggatttactctgccttat

SEQ ID NO: 474389 - DNA, 33 bp, Homo sapien
cacaacagtgtctttgaagctatcgagcaagaa

SEQ ID NO: 474390 - DNA, 33 bp, Homo sapien
cacaacagtgtctttgcagctatcgagcaagaa

SEQ ID NO: 474391 - DNA, 33 bp, Homo sapien
tatcacaaatcccccacataattttatgagaaa

SEQ ID NO: 474392 - DNA, 33 bp, Homo sapien
tatcacaaatcccccagataattttatgagaaa

SEQ ID NO: 474393 - DNA, 33 bp, Homo sapien
tcccctgatcttgtcacggaaaggcatgcatca

SEQ ID NO: 474394 - DNA, 33 bp, Homo sapien
tcccctgatcttgtcatggaaaggcatgcatca

SEQ ID NO: 474395 - DNA, 33 bp, Homo sapien
tggtaagaaaatgtgaaaggtttgacatcaatt

SEQ ID NO: 474396 - DNA, 33 bp, Homo sapien
tggtaagaaaatgtgagaggtttgacatcaatt

SEQ ID NO: 474397 - DNA, 33 bp, Homo sapien
aagggctcagttaccgaagttgagattaagtaa

SEQ ID NO: 474398 - DNA, 33 bp, Homo sapien
aagggctcagttaccggagttgagattaagtaa

SEQ ID NO: 474399 - DNA, 33 bp, Homo sapien
agtttattttggtggacaattggctgtattcgg

SEQ ID NO: 474400 - DNA, 33 bp, Homo sapien
agtttattttggtggataattggctgtattcgg

SEQ ID NO: 474401 - DNA, 33 bp, Homo sapien
ggcactgactagacacacttcagaagcagagag

SEQ ID NO: 474402 - DNA, 33 bp, Homo sapien
ggcactgactagacacgcttcagaagcagagag

SEQ ID NO: 474403 - DNA, 33 bp, Homo sapien
gatcacagaaggttaaataattcacaaacaaga

SEQ ID NO: 474404 - DNA, 33 bp, Homo sapien
gatcacagaaggttaactaattcacaaacaaga

SEQ ID NO: 474405 - DNA, 33 bp, Homo sapien
tcggatgggcaggatacggagcgtcataaatga

SEQ ID NO: 474406 - DNA, 33 bp, Homo sapien
tcggatgggcaggatatggagcgtcataaatga

SEQ ID NO: 474407 - DNA, 33 bp, Homo sapien
tgtgtgcattaaattcactccatgcagaactgt

SEQ ID NO: 474408 - DNA, 33 bp, Homo sapien
tgtgtgcattaaattcgctccatgcagaactgt

SEQ ID NO: 474409 - DNA, 33 bp, Homo sapien
agtccatttcttagcaagcaattagagttaatc

SEQ ID NO: 474410 - DNA, 33 bp, Homo sapien
agtccatttcttagcaggcaattagagttaatc

SEQ ID NO: 474411 - DNA, 33 bp, Homo sapien
aggattccagggcaaaaaatgtctttggggatg

SEQ ID NO: 474412 - DNA, 33 bp, Homo sapien
aggattccagggcaaacaatgtctttggggatg

SEQ ID NO: 474413 - DNA, 33 bp, Homo sapien
cacacagagtaaggacaagtactatttcagaaa

SEQ ID NO: 474414 - DNA, 33 bp, Homo sapien
cacacagagtaaggacgagtactatttcagaaa

SEQ ID NO: 474415 - DNA, 33 bp, Homo sapien
attagagacagtcttgcaaagctcctggcatag

SEQ ID NO: 474416 - DNA, 33 bp, Homo sapien
attagagacagtcttgtaaagctcctggcatag

SEQ ID NO: 474417 - DNA, 33 bp, Homo sapien
ttaggaatggaagtataaaaagtgcacaaggtc

SEQ ID NO: 474418 - DNA, 33 bp, Homo sapien
ttaggaatggaagtatcaaaagtgcacaaggtc

SEQ ID NO: 474419 - DNA, 33 bp, Homo sapien
tacactgccttcttcccagtgcagtgactgacc

SEQ ID NO: 474420 - DNA, 33 bp, Homo sapien
tacactgccttcttcctagtgcagtgactgacc

SEQ ID NO: 474421 - DNA, 33 bp, Homo sapien
ccacgcgctctttttgaaatgtgaccttgccag

SEQ ID NO: 474422 - DNA, 33 bp, Homo sapien
ccacgcgctctttttgcaatgtgaccttgccag

SEQ ID NO: 474423 - DNA, 33 bp, Homo sapien
taggatgtgagaccacaaagtcctgggcctggc

SEQ ID NO: 474424 - DNA, 33 bp, Homo sapien
taggatgtgagaccaccaagtcctgggcctggc

SEQ ID NO: 474425 - DNA, 33 bp, Homo sapien
aggagcacagctgccaaagaaagtgtcaaacca

SEQ ID NO: 474426 - DNA, 33 bp, Homo sapien
aggagcacagctgccagagaaagtgtcaaacca

SEQ ID NO: 474427 - DNA, 33 bp, Homo sapien
tgtgtgtagctgatctgagaactgatcaaagga

SEQ ID NO: 474428 - DNA, 33 bp, Homo sapien
tgtgtgtagctgatcttagaactgatcaaagga

SEQ ID NO: 474429 - DNA, 33 bp, Homo sapien
cctgcttcagtcctgcccatcaataccctcagt

SEQ ID NO: 474430 - DNA, 33 bp, Homo sapien
cctgcttcagtcctgcgcatcaataccctcagt

SEQ ID NO: 474431 - DNA, 33 bp, Homo sapien
aagactttaaattgtacatgaaggagtttagcc

SEQ ID NO: 474432 - DNA, 33 bp, Homo sapien
aagactttaaattgtagatgaaggagtttagcc

SEQ ID NO: 474433 - DNA, 33 bp, Homo sapien
caactggggggctagcacatcctcttcctcttc

SEQ ID NO: 474434 - DNA, 33 bp, Homo sapien
caactggggggctagcgcatcctcttcctcttc

SEQ ID NO: 474435 - DNA, 33 bp, Homo sapien
tcttcctcttccaaggccagggcccacttcaca

SEQ ID NO: 474436 - DNA, 33 bp, Homo sapien
tcttcctcttccaaggtcagggcccacttcaca

SEQ ID NO: 474437 - DNA, 33 bp, Homo sapien
cccattcagtgaacaaccagtaattgagctcct

SEQ ID NO: 474438 - DNA, 33 bp, Homo sapien
cccattcagtgaacaatcagtaattgagctcct

SEQ ID NO: 474439 - DNA, 33 bp, Homo sapien
atatttctgattcacaccacaagatataaacat

SEQ ID NO: 474440 - DNA, 33 bp, Homo sapien
atatttctgattcacagcacaagatataaacat

SEQ ID NO: 474441 - DNA, 33 bp, Homo sapien
gcccggggagctcctcaaatccagagatgacca

SEQ ID NO: 474442 - DNA, 33 bp, Homo sapien
gcccggggagctcctcgaatccagagatgacca

SEQ ID NO: 474443 - DNA, 33 bp, Homo sapien
caaaacaaataaaaacgcagggacacaatgtgt

SEQ ID NO: 474444 - DNA, 33 bp, Homo sapien
caaaacaaataaaaactcagggacacaatgtgt

SEQ ID NO: 474445 - DNA, 33 bp, Homo sapien
tgcacctgaattcagcaatcagctgcggggtag

SEQ ID NO: 474446 - DNA, 33 bp, Homo sapien
tgcacctgaattcagcgatcagctgcggggtag

SEQ ID NO: 474447 - DNA, 33 bp, Homo sapien
tgcctggtcagaggacaactgtgctgctttggc

SEQ ID NO: 474448 - DNA, 33 bp, Homo sapien
tgcctggtcagaggactactgtgctgctttggc

SEQ ID NO: 474449 - DNA, 33 bp, Homo sapien
ggctccgcagtgttcaccatttccagtcgagca

SEQ ID NO: 474450 - DNA, 33 bp, Homo sapien
ggctccgcagtgttcagcatttccagtcgagca

SEQ ID NO: 474451 - DNA, 33 bp, Homo sapien
ctaccacaactgagaagatgaacgttgaatttt

SEQ ID NO: 474452 - DNA, 33 bp, Homo sapien
ctaccacaactgagaatatgaacgttgaatttt

SEQ ID NO: 474453 - DNA, 33 bp, Homo sapien
tcactcagcattgaacagagacctaaaggtggt

SEQ ID NO: 474454 - DNA, 33 bp, Homo sapien
tcactcagcattgaacggagacctaaaggtggt

SEQ ID NO: 474455 - DNA, 33 bp, Homo sapien
cagtagattcagtagacggagcccaagtatttg

SEQ ID NO: 474456 - DNA, 33 bp, Homo sapien
cagtagattcagtagatggagcccaagtatttg

SEQ ID NO: 474457 - DNA, 33 bp, Homo sapien
agctatgattttaaacacagatcagcctgatgt

SEQ ID NO: 474458 - DNA, 33 bp, Homo sapien
agctatgattttaaacccagatcagcctgatgt

SEQ ID NO: 474459 - DNA, 33 bp, Homo sapien
caataattcaatcagccctattgatgaatcgcc

SEQ ID NO: 474460 - DNA, 33 bp, Homo sapien
caataattcaatcagctctattgatgaatcgcc

SEQ ID NO: 474461 - DNA, 33 bp, Homo sapien
atgaatcgcctaagtgccactggcttagccttc

SEQ ID NO: 474462 - DNA, 33 bp, Homo sapien
atgaatcgcctaagtgtcactggcttagccttc

SEQ ID NO: 474463 - DNA, 33 bp, Homo sapien
aaccccattttctagacgcccaaattctgaagt

SEQ ID NO: 474464 - DNA, 33 bp, Homo sapien
aaccccattttctagatgcccaaattctgaagt

SEQ ID NO: 474465 - DNA, 33 bp, Homo sapien
aagagtggacattttcactcactaaaggcatct

SEQ ID NO: 474466 - DNA, 33 bp, Homo sapien
aagagtggacattttcgctcactaaaggcatct

SEQ ID NO: 474467 - DNA, 33 bp, Homo sapien
tgactaaaacatggcccctatcttcaaatggct

SEQ ID NO: 474468 - DNA, 33 bp, Homo sapien
tgactaaaacatggcctctatcttcaaatggct

SEQ ID NO: 474469 - DNA, 33 bp, Homo sapien
aacaagggaactcagaaatgcagagggatgaaa

SEQ ID NO: 474470 - DNA, 33 bp, Homo sapien
aacaagggaactcagacatgcagagggatgaaa

SEQ ID NO: 474471 - DNA, 33 bp, Homo sapien
ctctcaccatttacaacgtcccactctcttaga

SEQ ID NO: 474472 - DNA, 33 bp, Homo sapien
ctctcaccatttacaatgtcccactctcttaga

SEQ ID NO: 474473 - DNA, 33 bp, Homo sapien
tagcagatcggaagaactgtcctatgcccagcc

SEQ ID NO: 474474 - DNA, 33 bp, Homo sapien
tagcagatcggaagaattgtcctatgcccagcc

SEQ ID NO: 474475 - DNA, 33 bp, Homo sapien
tgtgtgttttcctctccgagaaaggtcacggga

SEQ ID NO: 474476 - DNA, 33 bp, Homo sapien
tgtgtgttttcctctctgagaaaggtcacggga

SEQ ID NO: 474477 - DNA, 33 bp, Homo sapien
ctggaatgttcttgctaaatttaattgcctgga

SEQ ID NO: 474478 - DNA, 33 bp, Homo sapien
ctggaatgttcttgcttaatttaattgcctgga

SEQ ID NO: 474479 - DNA, 33 bp, Homo sapien
agtggaacaacctgaacgaactggaatgttctt

SEQ ID NO: 474480 - DNA, 33 bp, Homo sapien
agtggaacaacctgaatgaactggaatgttctt

SEQ ID NO: 474481 - DNA, 33 bp, Homo sapien
tggtagtatggtaaaacatgattaattaagacc

SEQ ID NO: 474482 - DNA, 33 bp, Homo sapien
tggtagtatggtaaaagatgattaattaagacc

SEQ ID NO: 474483 - DNA, 33 bp, Homo sapien
gcccatcaatttcacaaagcaaaaaccaattta

SEQ ID NO: 474484 - DNA, 33 bp, Homo sapien
gcccatcaatttcacacagcaaaaaccaattta

SEQ ID NO: 474485 - DNA, 33 bp, Homo sapien
caagcagacctgatgacgttcacagggatcaga

SEQ ID NO: 474486 - DNA, 33 bp, Homo sapien
caagcagacctgatgatgttcacagggatcaga

SEQ ID NO: 474487 - DNA, 33 bp, Homo sapien
cctgttaagcccagtcaccttttcagataagat

SEQ ID NO: 474488 - DNA, 33 bp, Homo sapien
cctgttaagcccagtcgccttttcagataagat

SEQ ID NO: 474489 - DNA, 33 bp, Homo sapien
ttaaatagctgccacaaattagacctactactt

SEQ ID NO: 474490 - DNA, 33 bp, Homo sapien
ttaaatagctgccacatattagacctactactt

SEQ ID NO: 474491 - DNA, 33 bp, Homo sapien
atctagaagggaaagacgtcacaggtgaataca

SEQ ID NO: 474492 - DNA, 33 bp, Homo sapien
atctagaagggaaagatgtcacaggtgaataca

SEQ ID NO: 474493 - DNA, 33 bp, Homo sapien
acccagacctctagtaaaatttatcctatactc

SEQ ID NO: 474494 - DNA, 33 bp, Homo sapien
acccagacctctagtataatttatcctatactc

SEQ ID NO: 474495 - DNA, 33 bp, Homo sapien
cagatgtttatgccttaaaaatgcctacaactt

SEQ ID NO: 474496 - DNA, 33 bp, Homo sapien
cagatgtttatgccttcaaaatgcctacaactt

SEQ ID NO: 474497 - DNA, 33 bp, Homo sapien
gatcaggggaattggaaatggagaggatggttg

SEQ ID NO: 474498 - DNA, 33 bp, Homo sapien
gatcaggggaattggacatggagaggatggttg

SEQ ID NO: 474499 - DNA, 33 bp, Homo sapien
ccattgccttctggaacaagttcaaacctgatc

SEQ ID NO: 474500 - DNA, 33 bp, Homo sapien
ccattgccttctggaataagttcaaacctgatc

SEQ ID NO: 474501 - DNA, 33 bp, Homo sapien
gggcacagcttgaagaaagattacagaggaagg

SEQ ID NO: 474502 - DNA, 33 bp, Homo sapien
gggcacagcttgaagagagattacagaggaagg

SEQ ID NO: 474503 - DNA, 33 bp, Homo sapien
gttacattgcctgctccatcacttcctcacaag

SEQ ID NO: 474504 - DNA, 33 bp, Homo sapien
gttacattgcctgctctatcacttcctcacaag

SEQ ID NO: 474505 - DNA, 33 bp, Homo sapien
caggccattggtttccaaggacaaatgagtggg

SEQ ID NO: 474506 - DNA, 33 bp, Homo sapien
caggccattggtttccgaggacaaatgagtggg

SEQ ID NO: 474507 - DNA, 33 bp, Homo sapien
ttgggagtgtgcatagaccattatgtgtttggt

SEQ ID NO: 474508 - DNA, 33 bp, Homo sapien
ttgggagtgtgcataggccattatgtgtttggt

SEQ ID NO: 474509 - DNA, 33 bp, Homo sapien
tgaagggataagtggaagacactgctggccaag

SEQ ID NO: 474510 - DNA, 33 bp, Homo sapien
tgaagggataagtggatgacactgctggccaag

SEQ ID NO: 474511 - DNA, 33 bp, Homo sapien
catgttaaacacctcacatatattgtctcattt

SEQ ID NO: 474512 - DNA, 33 bp, Homo sapien
catgttaaacacctcatatatattgtctcattt

SEQ ID NO: 474513 - DNA, 33 bp, Homo sapien
cattacctgcaagtagcagcatccttatcatgt

SEQ ID NO: 474514 - DNA, 33 bp, Homo sapien
cattacctgcaagtagtagcatccttatcatgt

SEQ ID NO: 474515 - DNA, 33 bp, Homo sapien
tcaccaacaatccctgcatgatggcaggaagtc

SEQ ID NO: 474516 - DNA, 33 bp, Homo sapien
tcaccaacaatccctgtatgatggcaggaagtc

SEQ ID NO: 474517 - DNA, 33 bp, Homo sapien
aatgaaaacacaacacaacatgaaacaaaaaag

SEQ ID NO: 474518 - DNA, 33 bp, Homo sapien
aatgaaaacacaacacgacatgaaacaaaaaag

SEQ ID NO: 474519 - DNA, 33 bp, Homo sapien
ctttatggtttacaaaatacttccattttatct

SEQ ID NO: 474520 - DNA, 33 bp, Homo sapien
ctttatggtttacaaagtacttccattttatct

SEQ ID NO: 474521 - DNA, 33 bp, Homo sapien
cttccacactaaactggcaaggactatctcata

SEQ ID NO: 474522 - DNA, 33 bp, Homo sapien
cttccacactaaactgtcaaggactatctcata

SEQ ID NO: 474523 - DNA, 33 bp, Homo sapien
gaataagcaaatatataaagaaaggacactgca

SEQ ID NO: 474524 - DNA, 33 bp, Homo sapien
gaataagcaaatatatgaagaaaggacactgca

SEQ ID NO: 474525 - DNA, 33 bp, Homo sapien
ataccaggctgcacccaattctatgttctgacc

SEQ ID NO: 474526 - DNA, 33 bp, Homo sapien
ataccaggctgcaccccattctatgttctgacc

SEQ ID NO: 474527 - DNA, 33 bp, Homo sapien
cttccaggtaagaaatcataaaggtagaacaga

SEQ ID NO: 474528 - DNA, 33 bp, Homo sapien
cttccaggtaagaaatgataaaggtagaacaga

SEQ ID NO: 474529 - DNA, 33 bp, Homo sapien
ctgggggaagacaccacgtagatgaggcaaact

SEQ ID NO: 474530 - DNA, 33 bp, Homo sapien
ctgggggaagacaccatgtagatgaggcaaact

SEQ ID NO: 474531 - DNA, 33 bp, Homo sapien
gcttactgaaaaagagaaacatgactcagtcct

SEQ ID NO: 474532 - DNA, 33 bp, Homo sapien
gcttactgaaaaagaggaacatgactcagtcct

SEQ ID NO: 474533 - DNA, 33 bp, Homo sapien
tctcagttgagcaagaagcccagggatagagtg

SEQ ID NO: 474534 - DNA, 33 bp, Homo sapien
tctcagttgagcaagaggcccagggatagagtg

SEQ ID NO: 474535 - DNA, 33 bp, Homo sapien
ttcttttcaagcagccaaattcactccctgata

SEQ ID NO: 474536 - DNA, 33 bp, Homo sapien
ttcttttcaagcagccgaattcactccctgata

SEQ ID NO: 474537 - DNA, 33 bp, Homo sapien
ctacacgctgtcaacacgacttacctctcacga

SEQ ID NO: 474538 - DNA, 33 bp, Homo sapien
ctacacgctgtcaacatgacttacctctcacga

SEQ ID NO: 474539 - DNA, 33 bp, Homo sapien
tagagagaacatttacccaagtactaaatcatc

SEQ ID NO: 474540 - DNA, 33 bp, Homo sapien
tagagagaacatttactcaagtactaaatcatc

SEQ ID NO: 474541 - DNA, 33 bp, Homo sapien
ccttggatgcagaaagaataaaacaagcaagaa

SEQ ID NO: 474542 - DNA, 33 bp, Homo sapien
ccttggatgcagaaaggataaaacaagcaagaa

SEQ ID NO: 474543 - DNA, 33 bp, Homo sapien
gtaaaggatggtagtaactctcaaagacgtttt

SEQ ID NO: 474544 - DNA, 33 bp, Homo sapien
gtaaaggatggtagtagctctcaaagacgtttt

SEQ ID NO: 474545 - DNA, 33 bp, Homo sapien
aatatctattacttaaaccacttcaaaatatgt

SEQ ID NO: 474546 - DNA, 33 bp, Homo sapien
aatatctattacttaagccacttcaaaatatgt

SEQ ID NO: 474547 - DNA, 33 bp, Homo sapien
tgaacctaccaactaacgagaggtagagctggg

SEQ ID NO: 474548 - DNA, 33 bp, Homo sapien
tgaacctaccaactaatgagaggtagagctggg

SEQ ID NO: 474549 - DNA, 33 bp, Homo sapien
gcccaagagggttgagaacaaagtatgacccag

SEQ ID NO: 474550 - DNA, 33 bp, Homo sapien
gcccaagagggttgaggacaaagtatgacccag

SEQ ID NO: 474551 - DNA, 33 bp, Homo sapien
ctgccgattgaaagaacgaatgatccctgtagg

SEQ ID NO: 474552 - DNA, 33 bp, Homo sapien
ctgccgattgaaagaatgaatgatccctgtagg

SEQ ID NO: 474553 - DNA, 33 bp, Homo sapien
gggacctctgatcatcaagaaaaaagaaactta

SEQ ID NO: 474554 - DNA, 33 bp, Homo sapien
gggacctctgatcatcgagaaaaaagaaactta

SEQ ID NO: 474555 - DNA, 33 bp, Homo sapien
agaaaacacaggaagacggagacagacagacca

SEQ ID NO: 474556 - DNA, 33 bp, Homo sapien
agaaaacacaggaagatggagacagacagacca

SEQ ID NO: 474557 - DNA, 33 bp, Homo sapien
cctctatgctcgtgccaatggccaggcctccag

SEQ ID NO: 474558 - DNA, 33 bp, Homo sapien
cctctatgctcgtgccgatggccaggcctccag

SEQ ID NO: 474559 - DNA, 33 bp, Homo sapien
tgggactaaatcaaaaagcatagcccagtccag

SEQ ID NO: 474560 - DNA, 33 bp, Homo sapien
tgggactaaatcaaaaggcatagcccagtccag

SEQ ID NO: 474561 - DNA, 33 bp, Homo sapien
ttctgttaggctgatccagcatctttggccaca

SEQ ID NO: 474562 - DNA, 33 bp, Homo sapien
ttctgttaggctgatctagcatctttggccaca

SEQ ID NO: 474563 - DNA, 33 bp, Homo sapien
gggctggagcctataaagtaagcctaaaaacca

SEQ ID NO: 474564 - DNA, 33 bp, Homo sapien
gggctggagcctataatgtaagcctaaaaacca

SEQ ID NO: 474565 - DNA, 33 bp, Homo sapien
acaattaatttgggacccagtcagaaataatga

SEQ ID NO: 474566 - DNA, 33 bp, Homo sapien
acaattaatttgggactcagtcagaaataatga

SEQ ID NO: 474567 - DNA, 33 bp, Homo sapien
ctctcagggtactaaacggcagccttagctccc

SEQ ID NO: 474568 - DNA, 33 bp, Homo sapien
ctctcagggtactaaatggcagccttagctccc

SEQ ID NO: 474569 - DNA, 33 bp, Homo sapien
tatgagctgatgagagaccatatttcctgagtt

SEQ ID NO: 474570 - DNA, 33 bp, Homo sapien
tatgagctgatgagaggccatatttcctgagtt

SEQ ID NO: 474571 - DNA, 33 bp, Homo sapien
tctgatcctgaaagaacggtggtatcaagactg

SEQ ID NO: 474572 - DNA, 33 bp, Homo sapien
tctgatcctgaaagaatggtggtatcaagactg

SEQ ID NO: 474573 - DNA, 33 bp, Homo sapien
cccgtgtcgttgaaacactagttgttgacaatg

SEQ ID NO: 474574 - DNA, 33 bp, Homo sapien
cccgtgtcgttgaaacgctagttgttgacaatg

SEQ ID NO: 474575 - DNA, 33 bp, Homo sapien
aggacatcacaatatacggcaatttgattcttc

SEQ ID NO: 474576 - DNA, 33 bp, Homo sapien
aggacatcacaatatatggcaatttgattcttc

SEQ ID NO: 474577 - DNA, 33 bp, Homo sapien
atggcaaaagtcccaacctctttcaagcatgga

SEQ ID NO: 474578 - DNA, 33 bp, Homo sapien
atggcaaaagtcccaagctctttcaagcatgga

SEQ ID NO: 474579 - DNA, 33 bp, Homo sapien
ctcctgcttcctgaacactatatttattattgt

SEQ ID NO: 474580 - DNA, 33 bp, Homo sapien
ctcctgcttcctgaacgctatatttattattgt

SEQ ID NO: 474581 - DNA, 33 bp, Homo sapien
aaagggctcaagggccaaggtccaaacattcct

SEQ ID NO: 474582 - DNA, 33 bp, Homo sapien
aaagggctcaagggccgaggtccaaacattcct

SEQ ID NO: 474583 - DNA, 33 bp, Homo sapien
tgggaggggagacgtaagatcgaggtttggatc

SEQ ID NO: 474584 - DNA, 33 bp, Homo sapien
tgggaggggagacgtaggatcgaggtttggatc

SEQ ID NO: 474585 - DNA, 33 bp, Homo sapien
ggaaaacagcctgatcaagctgattcacactaa

SEQ ID NO: 474586 - DNA, 33 bp, Homo sapien
ggaaaacagcctgatcgagctgattcacactaa

SEQ ID NO: 474587 - DNA, 33 bp, Homo sapien
taggatccacccagataatccaggatgaactct

SEQ ID NO: 474588 - DNA, 33 bp, Homo sapien
taggatccacccagatgatccaggatgaactct

SEQ ID NO: 474589 - DNA, 33 bp, Homo sapien
atctccttgattgcacagtcaaccccgctcctg

SEQ ID NO: 474590 - DNA, 33 bp, Homo sapien
atctccttgattgcacggtcaaccccgctcctg

SEQ ID NO: 474591 - DNA, 33 bp, Homo sapien
agctctgagcacagaggactattaggttgatgc

SEQ ID NO: 474592 - DNA, 33 bp, Homo sapien
agctctgagcacagagtactattaggttgatgc

SEQ ID NO: 474593 - DNA, 33 bp, Homo sapien
gctcataaagataaaaacagacttaagctattt

SEQ ID NO: 474594 - DNA, 33 bp, Homo sapien
gctcataaagataaaagcagacttaagctattt

SEQ ID NO: 474595 - DNA, 33 bp, Homo sapien
agggaaggcagttggcaaagtgcctcatccaca

SEQ ID NO: 474596 - DNA, 33 bp, Homo sapien
agggaaggcagttggcgaagtgcctcatccaca

SEQ ID NO: 474597 - DNA, 33 bp, Homo sapien
tataggttctcactgtaacaggtgccaatggcc

SEQ ID NO: 474598 - DNA, 33 bp, Homo sapien
tataggttctcactgtcacaggtgccaatggcc

SEQ ID NO: 474599 - DNA, 33 bp, Homo sapien
accagtgaggtctgaaaagggataaatgcatgg

SEQ ID NO: 474600 - DNA, 33 bp, Homo sapien
accagtgaggtctgaagagggataaatgcatgg

SEQ ID NO: 474601 - DNA, 33 bp, Homo sapien
ggtgaaactcaatgaacgactcatcttaagaga

SEQ ID NO: 474602 - DNA, 33 bp, Homo sapien
ggtgaaactcaatgaatgactcatcttaagaga

SEQ ID NO: 474603 - DNA, 33 bp, Homo sapien
tacacttggaccctgacgggcattgtggtggcc

SEQ ID NO: 474604 - DNA, 33 bp, Homo sapien
tacacttggaccctgatgggcattgtggtggcc

SEQ ID NO: 474605 - DNA, 33 bp, Homo sapien
atcaccctgttgaaacgggtctgagtgccagac

SEQ ID NO: 474606 - DNA, 33 bp, Homo sapien
atcaccctgttgaaactggtctgagtgccagac

SEQ ID NO: 474607 - DNA, 33 bp, Homo sapien
agcccctctgtattgcaagtatcctgctttgtc

SEQ ID NO: 474608 - DNA, 33 bp, Homo sapien
agcccctctgtattgcgagtatcctgctttgtc

SEQ ID NO: 474609 - DNA, 33 bp, Homo sapien
ctgagtgcctcttttccctctaggcaattttga

SEQ ID NO: 474610 - DNA, 33 bp, Homo sapien
ctgagtgcctcttttctctctaggcaattttga

SEQ ID NO: 474611 - DNA, 33 bp, Homo sapien
tcacaatgtgaatcaacttcattctcaaatttt

SEQ ID NO: 474612 - DNA, 33 bp, Homo sapien
tcacaatgtgaatcaatttcattctcaaatttt

SEQ ID NO: 474613 - DNA, 33 bp, Homo sapien
ttttcagaagtgaggcaatggcattttaagaca

SEQ ID NO: 474614 - DNA, 33 bp, Homo sapien
ttttcagaagtgaggcgatggcattttaagaca

SEQ ID NO: 474615 - DNA, 33 bp, Homo sapien
tttcattatcttttccagaatgtcctttcacta

SEQ ID NO: 474616 - DNA, 33 bp, Homo sapien
tttcattatcttttcccgaatgtcctttcacta

SEQ ID NO: 474617 - DNA, 33 bp, Homo sapien
taactgagaaattacaatatcctgtgataagcg

SEQ ID NO: 474618 - DNA, 33 bp, Homo sapien
taactgagaaattacagtatcctgtgataagcg

SEQ ID NO: 474619 - DNA, 33 bp, Homo sapien
tactacattagtgacacgacatctctaatgccg

SEQ ID NO: 474620 - DNA, 33 bp, Homo sapien
tactacattagtgacatgacatctctaatgccg

SEQ ID NO: 474621 - DNA, 33 bp, Homo sapien
caaaaggttctgcccaagaaatgacatttaaga

SEQ ID NO: 474622 - DNA, 33 bp, Homo sapien
caaaaggttctgcccatgaaatgacatttaaga

SEQ ID NO: 474623 - DNA, 33 bp, Homo sapien
gtgatttcaacctactaaattgtctgtagcatt

SEQ ID NO: 474624 - DNA, 33 bp, Homo sapien
gtgatttcaacctactgaattgtctgtagcatt

SEQ ID NO: 474625 - DNA, 33 bp, Homo sapien
gaaataagctgatttacctatcatttcactttt

SEQ ID NO: 474626 - DNA, 33 bp, Homo sapien
gaaataagctgatttatctatcatttcactttt

SEQ ID NO: 474627 - DNA, 33 bp, Homo sapien
agaaggaaaagattgccactcaccacttgttac

SEQ ID NO: 474628 - DNA, 33 bp, Homo sapien
agaaggaaaagattgctactcaccacttgttac

SEQ ID NO: 474629 - DNA, 33 bp, Homo sapien
tgatctgtgggactcaggctttatttttttatc

SEQ ID NO: 474630 - DNA, 33 bp, Homo sapien
tgatctgtgggactcatgctttatttttttatc

SEQ ID NO: 474631 - DNA, 33 bp, Homo sapien
aggaaaaaagatggtaaaatcatgcacctgcaa

SEQ ID NO: 474632 - DNA, 33 bp, Homo sapien
aggaaaaaagatggtagaatcatgcacctgcaa

SEQ ID NO: 474633 - DNA, 33 bp, Homo sapien
cttctgcactgccctaataggaattttccatga

SEQ ID NO: 474634 - DNA, 33 bp, Homo sapien
cttctgcactgccctagtaggaattttccatga

SEQ ID NO: 474635 - DNA, 33 bp, Homo sapien
ttggcagaccataaatcactgtgcaaatattat

SEQ ID NO: 474636 - DNA, 33 bp, Homo sapien
ttggcagaccataaattactgtgcaaatattat

SEQ ID NO: 474637 - DNA, 33 bp, Homo sapien
tcctaagaacaactccaagttcataggtcagtt

SEQ ID NO: 474638 - DNA, 33 bp, Homo sapien
tcctaagaacaactccgagttcataggtcagtt

SEQ ID NO: 474639 - DNA, 33 bp, Homo sapien
gcgatagtgtttttccaaaggccagaaagatgg

SEQ ID NO: 474640 - DNA, 33 bp, Homo sapien
gcgatagtgtttttccgaaggccagaaagatgg

SEQ ID NO: 474641 - DNA, 33 bp, Homo sapien
cataagagcaaccagcaaatgttttctgaataa

SEQ ID NO: 474642 - DNA, 33 bp, Homo sapien
cataagagcaaccagcgaatgttttctgaataa

SEQ ID NO: 474643 - DNA, 33 bp, Homo sapien
ctgaataaatgaatgacgaatttggtggtgtgg

SEQ ID NO: 474644 - DNA, 33 bp, Homo sapien
ctgaataaatgaatgatgaatttggtggtgtgg

SEQ ID NO: 474645 - DNA, 33 bp, Homo sapien
agtgcactattcccgacatgagacccgcaagaa

SEQ ID NO: 474646 - DNA, 33 bp, Homo sapien
agtgcactattcccgagatgagacccgcaagaa

SEQ ID NO: 474647 - DNA, 33 bp, Homo sapien
cacattgctcagaaaaaccccttgtgcccgctt

SEQ ID NO: 474648 - DNA, 33 bp, Homo sapien
cacattgctcagaaaagccccttgtgcccgctt

SEQ ID NO: 474649 - DNA, 33 bp, Homo sapien
ggtcagctcagagaaacgatcccacaccttcct

SEQ ID NO: 474650 - DNA, 33 bp, Homo sapien
ggtcagctcagagaaatgatcccacaccttcct

SEQ ID NO: 474651 - DNA, 33 bp, Homo sapien
agtcacaggtaagacacgagagaaaaaaaggaa

SEQ ID NO: 474652 - DNA, 33 bp, Homo sapien
agtcacaggtaagacaggagagaaaaaaaggaa

SEQ ID NO: 474653 - DNA, 33 bp, Homo sapien
caccaagatcataagaacatggaaaatttgaaa

SEQ ID NO: 474654 - DNA, 33 bp, Homo sapien
caccaagatcataagagcatggaaaatttgaaa

SEQ ID NO: 474655 - DNA, 33 bp, Homo sapien
ttgttcatccgaagaacctgcattgaggtttca

SEQ ID NO: 474656 - DNA, 33 bp, Homo sapien
ttgttcatccgaagaatctgcattgaggtttca

SEQ ID NO: 474657 - DNA, 33 bp, Homo sapien
cgtttcactttgctaagtgcccattacaatttc

SEQ ID NO: 474658 - DNA, 33 bp, Homo sapien
cgtttcactttgctaattgcccattacaatttc

SEQ ID NO: 474659 - DNA, 33 bp, Homo sapien
ttaactcctttcctaacatgcccgtagctattg

SEQ ID NO: 474660 - DNA, 33 bp, Homo sapien
ttaactcctttcctaatatgcccgtagctattg

SEQ ID NO: 474661 - DNA, 33 bp, Homo sapien
aggacagtagcatgcacctggagcattcagagg

SEQ ID NO: 474662 - DNA, 33 bp, Homo sapien
aggacagtagcatgcatctggagcattcagagg

SEQ ID NO: 474663 - DNA, 33 bp, Homo sapien
gggatcttacttaccactgatagcactttggtt

SEQ ID NO: 474664 - DNA, 33 bp, Homo sapien
gggatcttacttaccattgatagcactttggtt

SEQ ID NO: 474665 - DNA, 33 bp, Homo sapien
gttagagcctacattcactattcgtcacctttt

SEQ ID NO: 474666 - DNA, 33 bp, Homo sapien
gttagagcctacattcgctattcgtcacctttt

SEQ ID NO: 474667 - DNA, 33 bp, Homo sapien
tgctggtcttgcttagaagtctctcatgcaggt

SEQ ID NO: 474668 - DNA, 33 bp, Homo sapien
tgctggtcttgcttaggagtctctcatgcaggt

SEQ ID NO: 474669 - DNA, 33 bp, Homo sapien
ggtccagttggacagacgtggaacttggcagtg

SEQ ID NO: 474670 - DNA, 33 bp, Homo sapien
ggtccagttggacagatgtggaacttggcagtg

SEQ ID NO: 474671 - DNA, 33 bp, Homo sapien
agggtgcccattaacaccatcagaattttgtat

SEQ ID NO: 474672 - DNA, 33 bp, Homo sapien
agggtgcccattaacagcatcagaattttgtat

SEQ ID NO: 474673 - DNA, 33 bp, Homo sapien
ggctgcactcattgcaaggctgactagctccag

SEQ ID NO: 474674 - DNA, 33 bp, Homo sapien
ggctgcactcattgcagggctgactagctccag

SEQ ID NO: 474675 - DNA, 33 bp, Homo sapien
tcactcaatctccagcaactctgaaccacctgt

SEQ ID NO: 474676 - DNA, 33 bp, Homo sapien
tcactcaatctccagccactctgaaccacctgt

SEQ ID NO: 474677 - DNA, 33 bp, Homo sapien
gctctgatcgtaaaaccgtggacgctgagcaaa

SEQ ID NO: 474678 - DNA, 33 bp, Homo sapien
gctctgatcgtaaaactgtggacgctgagcaaa

SEQ ID NO: 474679 - DNA, 33 bp, Homo sapien
gtgcctgtcagggttaccagggtgctctgggaa

SEQ ID NO: 474680 - DNA, 33 bp, Homo sapien
gtgcctgtcagggttatcagggtgctctgggaa

SEQ ID NO: 474681 - DNA, 33 bp, Homo sapien
tttgataagctctgccaaatggaaatagccacc

SEQ ID NO: 474682 - DNA, 33 bp, Homo sapien
tttgataagctctgccgaatggaaatagccacc

SEQ ID NO: 474683 - DNA, 33 bp, Homo sapien
acacatggtactgtgcaagaaacaatggaaatc

SEQ ID NO: 474684 - DNA, 33 bp, Homo sapien
acacatggtactgtgcgagaaacaatggaaatc

SEQ ID NO: 474685 - DNA, 33 bp, Homo sapien
ctcctggccaggactaactgttaatagacacag

SEQ ID NO: 474686 - DNA, 33 bp, Homo sapien
ctcctggccaggactagctgttaatagacacag

SEQ ID NO: 474687 - DNA, 33 bp, Homo sapien
tcagtccatcagataacgtctgagagcagtcag

SEQ ID NO: 474688 - DNA, 33 bp, Homo sapien
tcagtccatcagataatgtctgagagcagtcag

SEQ ID NO: 474689 - DNA, 33 bp, Homo sapien
ggtgacagacagaagacgtaggctatgaaagtc

SEQ ID NO: 474690 - DNA, 33 bp, Homo sapien
ggtgacagacagaagatgtaggctatgaaagtc

SEQ ID NO: 474691 - DNA, 33 bp, Homo sapien
gtccttttcttctgcagcctcttcatgtggctc

SEQ ID NO: 474692 - DNA, 33 bp, Homo sapien
gtccttttcttctgcatcctcttcatgtggctc

SEQ ID NO: 474693 - DNA, 33 bp, Homo sapien
ttaaattggttctgtacagggcaaaagaagagc

SEQ ID NO: 474694 - DNA, 33 bp, Homo sapien
ttaaattggttctgtagagggcaaaagaagagc

SEQ ID NO: 474695 - DNA, 33 bp, Homo sapien
ctttcccctgcaaaaaaaaatcaggccaggttg

SEQ ID NO: 474696 - DNA, 33 bp, Homo sapien
ctttcccctgcaaaaagaaatcaggccaggttg

SEQ ID NO: 474697 - DNA, 33 bp, Homo sapien
cattcaaattcaggtaacttagagggacagcta

SEQ ID NO: 474698 - DNA, 33 bp, Homo sapien
cattcaaattcaggtaccttagagggacagcta

SEQ ID NO: 474699 - DNA, 33 bp, Homo sapien
ccaaatgaacaaaaaaaccatatccaggttgcc

SEQ ID NO: 474700 - DNA, 33 bp, Homo sapien
ccaaatgaacaaaaaagccatatccaggttgcc

SEQ ID NO: 474701 - DNA, 33 bp, Homo sapien
gacaggagcagcagccaatgactggcagagaag

SEQ ID NO: 474702 - DNA, 33 bp, Homo sapien
gacaggagcagcagccgatgactggcagagaag

SEQ ID NO: 474703 - DNA, 33 bp, Homo sapien
tgagtccgctgccagacagcacagtgcccagga

SEQ ID NO: 474704 - DNA, 33 bp, Homo sapien
tgagtccgctgccagatagcacagtgcccagga

SEQ ID NO: 474705 - DNA, 33 bp, Homo sapien
ggtcctcggtctcccacgtcttccccgcagaat

SEQ ID NO: 474706 - DNA, 33 bp, Homo sapien
ggtcctcggtctcccatgtcttccccgcagaat

SEQ ID NO: 474707 - DNA, 33 bp, Homo sapien
tccacaaagtggggcaatgatatatattgtaaa

SEQ ID NO: 474708 - DNA, 33 bp, Homo sapien
tccacaaagtggggcagtgatatatattgtaaa

SEQ ID NO: 474709 - DNA, 33 bp, Homo sapien
ccagcaagtcacttacaagtcaaaccaggtcga

SEQ ID NO: 474710 - DNA, 33 bp, Homo sapien
ccagcaagtcacttaccagtcaaaccaggtcga

SEQ ID NO: 474711 - DNA, 33 bp, Homo sapien
tcccaataatcgcccccatctcaaaattcttaa

SEQ ID NO: 474712 - DNA, 33 bp, Homo sapien
tcccaataatcgcccctatctcaaaattcttaa

SEQ ID NO: 474713 - DNA, 33 bp, Homo sapien
tgtagttaaagaacaaaggagaatgcgtagtgt

SEQ ID NO: 474714 - DNA, 33 bp, Homo sapien
tgtagttaaagaacaagggagaatgcgtagtgt

SEQ ID NO: 474715 - DNA, 33 bp, Homo sapien
aaaaacttcttaaaggaccagacacagttggga

SEQ ID NO: 474716 - DNA, 33 bp, Homo sapien
aaaaacttcttaaagggccagacacagttggga

SEQ ID NO: 474717 - DNA, 33 bp, Homo sapien
ttctggtactttatccaaccgactgcatattcc

SEQ ID NO: 474718 - DNA, 33 bp, Homo sapien
ttctggtactttatccgaccgactgcatattcc

SEQ ID NO: 474719 - DNA, 33 bp, Homo sapien
ggaagtacaaatcttccaagtcaaatgagagtt

SEQ ID NO: 474720 - DNA, 33 bp, Homo sapien
ggaagtacaaatcttctaagtcaaatgagagtt

SEQ ID NO: 474721 - DNA, 33 bp, Homo sapien
tgcaacgccaacccaaacatcctttaatcttgt

SEQ ID NO: 474722 - DNA, 33 bp, Homo sapien
tgcaacgccaacccaagcatcctttaatcttgt

SEQ ID NO: 474723 - DNA, 33 bp, Homo sapien
caacagttttatcatacagatgaatcctccaga

SEQ ID NO: 474724 - DNA, 33 bp, Homo sapien
caacagttttatcatagagatgaatcctccaga

SEQ ID NO: 474725 - DNA, 33 bp, Homo sapien
agatgctattaataatcatgccatgagaagata

SEQ ID NO: 474726 - DNA, 33 bp, Homo sapien
agatgctattaataattatgccatgagaagata

SEQ ID NO: 474727 - DNA, 33 bp, Homo sapien
ttgttttcttgacatacagtacctttacaggta

SEQ ID NO: 474728 - DNA, 33 bp, Homo sapien
ttgttttcttgacatagagtacctttacaggta

SEQ ID NO: 474729 - DNA, 33 bp, Homo sapien
tgggaagcaaggctagcattagtgaggaggcag

SEQ ID NO: 474730 - DNA, 33 bp, Homo sapien
tgggaagcaaggctagtattagtgaggaggcag

SEQ ID NO: 474731 - DNA, 33 bp, Homo sapien
gctgagatctgcccacagaaaacttcagagctg

SEQ ID NO: 474732 - DNA, 33 bp, Homo sapien
gctgagatctgcccacggaaaacttcagagctg

SEQ ID NO: 474733 - DNA, 33 bp, Homo sapien
tggacccacagaactccaagattttccaggctc

SEQ ID NO: 474734 - DNA, 33 bp, Homo sapien
tggacccacagaactctaagattttccaggctc

SEQ ID NO: 474735 - DNA, 33 bp, Homo sapien
gaagcttagcatttggcccaaaacaggactttc

SEQ ID NO: 474736 - DNA, 33 bp, Homo sapien
gaagcttagcatttggtccaaaacaggactttc

SEQ ID NO: 474737 - DNA, 33 bp, Homo sapien
tgggaagattgaataacgaagtgagactcggtc

SEQ ID NO: 474738 - DNA, 33 bp, Homo sapien
tgggaagattgaataatgaagtgagactcggtc

SEQ ID NO: 474739 - DNA, 33 bp, Homo sapien
ttaaatagaaaatggacgatattctggattttt

SEQ ID NO: 474740 - DNA, 33 bp, Homo sapien
ttaaatagaaaatggatgatattctggattttt

SEQ ID NO: 474741 - DNA, 33 bp, Homo sapien
ttgagagatttccttaacgtatctggtggcagt

SEQ ID NO: 474742 - DNA, 33 bp, Homo sapien
ttgagagatttccttagcgtatctggtggcagt

SEQ ID NO: 474743 - DNA, 33 bp, Homo sapien
ctaggaagtctgattcactgcaaaatccaagat

SEQ ID NO: 474744 - DNA, 33 bp, Homo sapien
ctaggaagtctgattcgctgcaaaatccaagat

SEQ ID NO: 474745 - DNA, 33 bp, Homo sapien
gcacagacccagtataagcccccagcgattgga

SEQ ID NO: 474746 - DNA, 33 bp, Homo sapien
gcacagacccagtatacgcccccagcgattgga

SEQ ID NO: 474747 - DNA, 33 bp, Homo sapien
tgcccctgatgtttctaaaatacctgtatgttt

SEQ ID NO: 474748 - DNA, 33 bp, Homo sapien
tgcccctgatgtttctgaaatacctgtatgttt

SEQ ID NO: 474749 - DNA, 33 bp, Homo sapien
taaacaacagactaagaacatcataaaagagga

SEQ ID NO: 474750 - DNA, 33 bp, Homo sapien
taaacaacagactaaggacatcataaaagagga

SEQ ID NO: 474751 - DNA, 33 bp, Homo sapien
ctggagccgagactgaatagccaatggacagca

SEQ ID NO: 474752 - DNA, 33 bp, Homo sapien
ctggagccgagactgagtagccaatggacagca

SEQ ID NO: 474753 - DNA, 33 bp, Homo sapien
tttgttttcttataaaatgaatgacacataaga

SEQ ID NO: 474754 - DNA, 33 bp, Homo sapien
tttgttttcttataaactgaatgacacataaga

SEQ ID NO: 474755 - DNA, 33 bp, Homo sapien
tgcctgttttccaatcccatccggtcaattctc

SEQ ID NO: 474756 - DNA, 33 bp, Homo sapien
tgcctgttttccaatctcatccggtcaattctc

SEQ ID NO: 474757 - DNA, 33 bp, Homo sapien
atcagaaccctccaaactgtcactgtttccaac

SEQ ID NO: 474758 - DNA, 33 bp, Homo sapien
atcagaaccctccaaattgtcactgtttccaac

SEQ ID NO: 474759 - DNA, 33 bp, Homo sapien
atgttatgaagttagaagagatactgcgtgcat

SEQ ID NO: 474760 - DNA, 33 bp, Homo sapien
atgttatgaagttagatgagatactgcgtgcat

SEQ ID NO: 474761 - DNA, 33 bp, Homo sapien
tgtggtcttagaaagcagaccttacacagtggc

SEQ ID NO: 474762 - DNA, 33 bp, Homo sapien
tgtggtcttagaaagccgaccttacacagtggc

SEQ ID NO: 474763 - DNA, 33 bp, Homo sapien
aaagaaaaaatgttacaagaagcaagttactca

SEQ ID NO: 474764 - DNA, 33 bp, Homo sapien
aaagaaaaaatgttacgagaagcaagttactca

SEQ ID NO: 474765 - DNA, 33 bp, Homo sapien
accacttcttttggaaactgaatggtggtccct

SEQ ID NO: 474766 - DNA, 33 bp, Homo sapien
accacttcttttggaacctgaatggtggtccct

SEQ ID NO: 474767 - DNA, 33 bp, Homo sapien
caaaatctttttgaaagtctgcatctgtgagtt

SEQ ID NO: 474768 - DNA, 33 bp, Homo sapien
caaaatctttttgaaattctgcatctgtgagtt

SEQ ID NO: 474769 - DNA, 33 bp, Homo sapien
tcatcaagaagccctgaaaaccaactcttcagg

SEQ ID NO: 474770 - DNA, 33 bp, Homo sapien
tcatcaagaagccctggaaaccaactcttcagg

SEQ ID NO: 474771 - DNA, 33 bp, Homo sapien
acctggttcacttcccaccagttccaactctca

SEQ ID NO: 474772 - DNA, 33 bp, Homo sapien
acctggttcacttcccgccagttccaactctca

SEQ ID NO: 474773 - DNA, 33 bp, Homo sapien
agtctccttagctgtacaaaacactggtgggga

SEQ ID NO: 474774 - DNA, 33 bp, Homo sapien
agtctccttagctgtagaaaacactggtgggga

SEQ ID NO: 474775 - DNA, 33 bp, Homo sapien
tcaaaagcagatgaaccgagaggcagagcccat

SEQ ID NO: 474776 - DNA, 33 bp, Homo sapien
tcaaaagcagatgaacggagaggcagagcccat

SEQ ID NO: 474777 - DNA, 33 bp, Homo sapien
aatggtcattgcagaacggtactttcacttttt

SEQ ID NO: 474778 - DNA, 33 bp, Homo sapien
aatggtcattgcagaatggtactttcacttttt

SEQ ID NO: 474779 - DNA, 33 bp, Homo sapien
cccactcattcttccccgacaggtgacccactg

SEQ ID NO: 474780 - DNA, 33 bp, Homo sapien
cccactcattcttccctgacaggtgacccactg

SEQ ID NO: 474781 - DNA, 33 bp, Homo sapien
tagctttccatccctaaggaatactggcaattc

SEQ ID NO: 474782 - DNA, 33 bp, Homo sapien
tagctttccatccctagggaatactggcaattc

SEQ ID NO: 474783 - DNA, 33 bp, Homo sapien
caccctccttccatcacgtcacaagctgtaaga

SEQ ID NO: 474784 - DNA, 33 bp, Homo sapien
caccctccttccatcatgtcacaagctgtaaga

SEQ ID NO: 474785 - DNA, 33 bp, Homo sapien
taatgagaagagctaaatcctcccaggagccgc

SEQ ID NO: 474786 - DNA, 33 bp, Homo sapien
taatgagaagagctaagtcctcccaggagccgc

SEQ ID NO: 474787 - DNA, 33 bp, Homo sapien
ggtcaccctcgggacacgatggctttcagcgtg

SEQ ID NO: 474788 - DNA, 33 bp, Homo sapien
ggtcaccctcgggacatgatggctttcagcgtg

SEQ ID NO: 474789 - DNA, 33 bp, Homo sapien
gaacaattcgtgttcactcaatgatgtctgttt

SEQ ID NO: 474790 - DNA, 33 bp, Homo sapien
gaacaattcgtgttcattcaatgatgtctgttt

SEQ ID NO: 474791 - DNA, 33 bp, Homo sapien
aaagcttttacttcaacccacaagtagcttctg

SEQ ID NO: 474792 - DNA, 33 bp, Homo sapien
aaagcttttacttcaatccacaagtagcttctg

SEQ ID NO: 474793 - DNA, 33 bp, Homo sapien
ttaggcctccaggaaaccttgtattgcaggctt

SEQ ID NO: 474794 - DNA, 33 bp, Homo sapien
ttaggcctccaggaaatcttgtattgcaggctt

SEQ ID NO: 474795 - DNA, 33 bp, Homo sapien
accatagttctgaatacgcttagatctttattt

SEQ ID NO: 474796 - DNA, 33 bp, Homo sapien
accatagttctgaatatgcttagatctttattt

SEQ ID NO: 474797 - DNA, 33 bp, Homo sapien
cttattcacagcataaaaatcgcaagtggtgca

SEQ ID NO: 474798 - DNA, 33 bp, Homo sapien
cttattcacagcataacaatcgcaagtggtgca

SEQ ID NO: 474799 - DNA, 33 bp, Homo sapien
tgctaaggatttagagactcagggtgcttcatt

SEQ ID NO: 474800 - DNA, 33 bp, Homo sapien
tgctaaggatttagaggctcagggtgcttcatt

SEQ ID NO: 474801 - DNA, 33 bp, Homo sapien
ctgttggggacagagacgaaccagacacagtgc

SEQ ID NO: 474802 - DNA, 33 bp, Homo sapien
ctgttggggacagagaggaaccagacacagtgc

SEQ ID NO: 474803 - DNA, 33 bp, Homo sapien
gtttttctttctctcacacacagctcaacacaa

SEQ ID NO: 474804 - DNA, 33 bp, Homo sapien
gtttttctttctctcatacacagctcaacacaa

SEQ ID NO: 474805 - DNA, 33 bp, Homo sapien
ctctgcttaaaacctgacagggcttccatctca

SEQ ID NO: 474806 - DNA, 33 bp, Homo sapien
ctctgcttaaaacctggcagggcttccatctca

SEQ ID NO: 474807 - DNA, 33 bp, Homo sapien
cctcttctcatggaaacgtttgaaaagagagtt

SEQ ID NO: 474808 - DNA, 33 bp, Homo sapien
cctcttctcatggaaatgtttgaaaagagagtt

SEQ ID NO: 474809 - DNA, 33 bp, Homo sapien
gaaacacagtctttgccgatataattaagctga

SEQ ID NO: 474810 - DNA, 33 bp, Homo sapien
gaaacacagtctttgctgatataattaagctga

SEQ ID NO: 474811 - DNA, 33 bp, Homo sapien
caaagggtagtaagtccctcttgcagcatccct

SEQ ID NO: 474812 - DNA, 33 bp, Homo sapien
caaagggtagtaagtctctcttgcagcatccct

SEQ ID NO: 474813 - DNA, 33 bp, Homo sapien
ttccagggttctgttacactgatcagatcaatg

SEQ ID NO: 474814 - DNA, 33 bp, Homo sapien
ttccagggttctgttatactgatcagatcaatg

SEQ ID NO: 474815 - DNA, 33 bp, Homo sapien
tgtgaggatgacctaacgtaaggcacataaagt

SEQ ID NO: 474816 - DNA, 33 bp, Homo sapien
tgtgaggatgacctaatgtaaggcacataaagt

SEQ ID NO: 474817 - DNA, 33 bp, Homo sapien
aactctacaagcataactgaatccctacaatgc

SEQ ID NO: 474818 - DNA, 33 bp, Homo sapien
aactctacaagcataattgaatccctacaatgc

SEQ ID NO: 474819 - DNA, 33 bp, Homo sapien
tttcttggtatgagataaaagcatgtatattat

SEQ ID NO: 474820 - DNA, 33 bp, Homo sapien
tttcttggtatgagattaaagcatgtatattat

SEQ ID NO: 474821 - DNA, 33 bp, Homo sapien
gataaatttagacaaaatcagagctatgaggac

SEQ ID NO: 474822 - DNA, 33 bp, Homo sapien
gataaatttagacaaagtcagagctatgaggac

SEQ ID NO: 474823 - DNA, 33 bp, Homo sapien
aggtcggtggtagaaccaggaaggcccatgtca

SEQ ID NO: 474824 - DNA, 33 bp, Homo sapien
aggtcggtggtagaactaggaaggcccatgtca

SEQ ID NO: 474825 - DNA, 33 bp, Homo sapien
gaagctttctgaggcccggcattactctcccca

SEQ ID NO: 474826 - DNA, 33 bp, Homo sapien
gaagctttctgaggcctggcattactctcccca

SEQ ID NO: 474827 - DNA, 33 bp, Homo sapien
gtatattttctttgaagaaatgcctatgtaaat

SEQ ID NO: 474828 - DNA, 33 bp, Homo sapien
gtatattttctttgaataaatgcctatgtaaat

SEQ ID NO: 474829 - DNA, 33 bp, Homo sapien
ggaacatttgattatacgcgaattatatctcaa

SEQ ID NO: 474830 - DNA, 33 bp, Homo sapien
ggaacatttgattatatgcgaattatatctcaa

SEQ ID NO: 474831 - DNA, 33 bp, Homo sapien
ttgtgcccttttgcagacactgttagttccaac

SEQ ID NO: 474832 - DNA, 33 bp, Homo sapien
ttgtgcccttttgcagtcactgttagttccaac

SEQ ID NO: 474833 - DNA, 33 bp, Homo sapien
catgaatttgaagggacgcaattcgacccagta

SEQ ID NO: 474834 - DNA, 33 bp, Homo sapien
catgaatttgaagggatgcaattcgacccagta

SEQ ID NO: 474835 - DNA, 33 bp, Homo sapien
tctcagaatggccaaactgcctgtcctcaggag

SEQ ID NO: 474836 - DNA, 33 bp, Homo sapien
tctcagaatggccaaagtgcctgtcctcaggag

SEQ ID NO: 474837 - DNA, 33 bp, Homo sapien
tgccttagacttctcccgacccccagagcgctg

SEQ ID NO: 474838 - DNA, 33 bp, Homo sapien
tgccttagacttctcctgacccccagagcgctg

SEQ ID NO: 474839 - DNA, 33 bp, Homo sapien
gtccagaccctgaggacgacgaaggcctcgggg

SEQ ID NO: 474840 - DNA, 33 bp, Homo sapien
gtccagaccctgaggatgacgaaggcctcgggg

SEQ ID NO: 474841 - DNA, 33 bp, Homo sapien
cactgccagtggggcacgattctctcaggcttc

SEQ ID NO: 474842 - DNA, 33 bp, Homo sapien
cactgccagtggggcatgattctctcaggcttc

SEQ ID NO: 474843 - DNA, 33 bp, Homo sapien
caaggtgaggatttcccacaagtgtccaggtgg

SEQ ID NO: 474844 - DNA, 33 bp, Homo sapien
caaggtgaggatttcctacaagtgtccaggtgg

SEQ ID NO: 474845 - DNA, 33 bp, Homo sapien
gccatctgaggaacaaaggaagcgagagagaac

SEQ ID NO: 474846 - DNA, 33 bp, Homo sapien
gccatctgaggaacaagggaagcgagagagaac

SEQ ID NO: 474847 - DNA, 33 bp, Homo sapien
cctcttgtgtgctgtcaagaccaggtgcaggcg

SEQ ID NO: 474848 - DNA, 33 bp, Homo sapien
cctcttgtgtgctgtccagaccaggtgcaggcg

SEQ ID NO: 474849 - DNA, 33 bp, Homo sapien
gctcctcaaaaaagtcaaaagcctcttcatcat

SEQ ID NO: 474850 - DNA, 33 bp, Homo sapien
gctcctcaaaaaagtcgaaagcctcttcatcat

SEQ ID NO: 474851 - DNA, 33 bp, Homo sapien
tctgaagaccacacttcaagaagcgctcatcta

SEQ ID NO: 474852 - DNA, 33 bp, Homo sapien
tctgaagaccacactttaagaagcgctcatcta

SEQ ID NO: 474853 - DNA, 33 bp, Homo sapien
caatttcatgtcataaacatcttacatttaaac

SEQ ID NO: 474854 - DNA, 33 bp, Homo sapien
caatttcatgtcataagcatcttacatttaaac

SEQ ID NO: 474855 - DNA, 33 bp, Homo sapien
gctccagtccttaacacgcctggccgatagcag

SEQ ID NO: 474856 - DNA, 33 bp, Homo sapien
gctccagtccttaacatgcctggccgatagcag

SEQ ID NO: 474857 - DNA, 33 bp, Homo sapien
gaatcataattgagtcactttaggtcttttagc

SEQ ID NO: 474858 - DNA, 33 bp, Homo sapien
gaatcataattgagtcgctttaggtcttttagc

SEQ ID NO: 474859 - DNA, 33 bp, Homo sapien
tttcagacggcaaaaaaatgcatcaggcagtgg

SEQ ID NO: 474860 - DNA, 33 bp, Homo sapien
tttcagacggcaaaaatatgcatcaggcagtgg

SEQ ID NO: 474861 - DNA, 33 bp, Homo sapien
agggcaaatgaggacccgattgacagaagaagt

SEQ ID NO: 474862 - DNA, 33 bp, Homo sapien
agggcaaatgaggacctgattgacagaagaagt

SEQ ID NO: 474863 - DNA, 33 bp, Homo sapien
agtgataaaaagccacaatattaggctgcaagt

SEQ ID NO: 474864 - DNA, 33 bp, Homo sapien
agtgataaaaagccacgatattaggctgcaagt

SEQ ID NO: 474865 - DNA, 33 bp, Homo sapien
gatgagactgatcttacgaaaacaatggccttc

SEQ ID NO: 474866 - DNA, 33 bp, Homo sapien
gatgagactgatcttatgaaaacaatggccttc

SEQ ID NO: 474867 - DNA, 33 bp, Homo sapien
gaaaagcgtcactgtacgcaccgctgttgcttt

SEQ ID NO: 474868 - DNA, 33 bp, Homo sapien
gaaaagcgtcactgtatgcaccgctgttgcttt

SEQ ID NO: 474869 - DNA, 33 bp, Homo sapien
aaacacaaatgcttcccgcccgtgaaccctgct

SEQ ID NO: 474870 - DNA, 33 bp, Homo sapien
aaacacaaatgcttccggcccgtgaaccctgct

SEQ ID NO: 474871 - DNA, 33 bp, Homo sapien
actgtcaccctgttacccccatgcttagaccct

SEQ ID NO: 474872 - DNA, 33 bp, Homo sapien
actgtcaccctgttactcccatgcttagaccct

SEQ ID NO: 474873 - DNA, 33 bp, Homo sapien
ggaaatgatggaaaagaaaactatggtttggca

SEQ ID NO: 474874 - DNA, 33 bp, Homo sapien
ggaaatgatggaaaaggaaactatggtttggca

SEQ ID NO: 474875 - DNA, 33 bp, Homo sapien
ggcaaaggattgcaacagacatttctaaatatc

SEQ ID NO: 474876 - DNA, 33 bp, Homo sapien
ggcaaaggattgcaacggacatttctaaatatc

SEQ ID NO: 474877 - DNA, 33 bp, Homo sapien
aattcagcagtgtttccatcaggtcctggactt

SEQ ID NO: 474878 - DNA, 33 bp, Homo sapien
aattcagcagtgtttctatcaggtcctggactt

SEQ ID NO: 474879 - DNA, 33 bp, Homo sapien
aaactatgttgactacaaaacatttctccaaat

SEQ ID NO: 474880 - DNA, 33 bp, Homo sapien
aaactatgttgactacgaaacatttctccaaat

SEQ ID NO: 474881 - DNA, 33 bp, Homo sapien
taatgtacatttttagccagtcggaaaaattaa

SEQ ID NO: 474882 - DNA, 33 bp, Homo sapien
taatgtacatttttagtcagtcggaaaaattaa

SEQ ID NO: 474883 - DNA, 33 bp, Homo sapien
aagggcactaacttaaatctgcacaacaaactt

SEQ ID NO: 474884 - DNA, 33 bp, Homo sapien
aagggcactaacttaagtctgcacaacaaactt

SEQ ID NO: 474885 - DNA, 33 bp, Homo sapien
ccagagaaatgagtaaatctcaaagaggtggct

SEQ ID NO: 474886 - DNA, 33 bp, Homo sapien
ccagagaaatgagtaagtctcaaagaggtggct

SEQ ID NO: 474887 - DNA, 33 bp, Homo sapien
actatatgcggaagaagtgtttctcactgtgct

SEQ ID NO: 474888 - DNA, 33 bp, Homo sapien
actatatgcggaagaattgtttctcactgtgct

SEQ ID NO: 474889 - DNA, 33 bp, Homo sapien
ataaatcatgtattacagctaattaacatacat

SEQ ID NO: 474890 - DNA, 33 bp, Homo sapien
ataaatcatgtattacggctaattaacatacat

SEQ ID NO: 474891 - DNA, 33 bp, Homo sapien
tctgtgcataataacacagagtttcctttgtct

SEQ ID NO: 474892 - DNA, 33 bp, Homo sapien
tctgtgcataataacatagagtttcctttgtct

SEQ ID NO: 474893 - DNA, 33 bp, Homo sapien
cagtaccttaggacaaccttggacagcaaataa

SEQ ID NO: 474894 - DNA, 33 bp, Homo sapien
cagtaccttaggacaatcttggacagcaaataa

SEQ ID NO: 474895 - DNA, 33 bp, Homo sapien
aaattaaaccaccaaaactgaataaggacaaaa

SEQ ID NO: 474896 - DNA, 33 bp, Homo sapien
aaattaaaccaccaaagctgaataaggacaaaa

SEQ ID NO: 474897 - DNA, 33 bp, Homo sapien
taacaaggaggtttaaatggtgaagtatgaagt

SEQ ID NO: 474898 - DNA, 33 bp, Homo sapien
taacaaggaggtttaagtggtgaagtatgaagt

SEQ ID NO: 474899 - DNA, 33 bp, Homo sapien
tttggccacataacaaagatactttctatacaa

SEQ ID NO: 474900 - DNA, 33 bp, Homo sapien
tttggccacataacaatgatactttctatacaa

SEQ ID NO: 474901 - DNA, 33 bp, Homo sapien
tcaactgaaaatcaataaggaaaacattgaaaa

SEQ ID NO: 474902 - DNA, 33 bp, Homo sapien
tcaactgaaaatcaatcaggaaaacattgaaaa

SEQ ID NO: 474903 - DNA, 33 bp, Homo sapien
cccaactataattatgaatgtctctgtttttcc

SEQ ID NO: 474904 - DNA, 33 bp, Homo sapien
cccaactataattatggatgtctctgtttttcc

SEQ ID NO: 474905 - DNA, 33 bp, Homo sapien
gccttggctctcccaaacaacacttcgataaag

SEQ ID NO: 474906 - DNA, 33 bp, Homo sapien
gccttggctctcccaagcaacacttcgataaag

SEQ ID NO: 474907 - DNA, 33 bp, Homo sapien
gtgagaggttgtcccaaacagagtaggttcagt

SEQ ID NO: 474908 - DNA, 33 bp, Homo sapien
gtgagaggttgtcccacacagagtaggttcagt

SEQ ID NO: 474909 - DNA, 33 bp, Homo sapien
cacaatcagaccaccaagacatgctttaccaca

SEQ ID NO: 474910 - DNA, 33 bp, Homo sapien
cacaatcagaccaccatgacatgctttaccaca

SEQ ID NO: 474911 - DNA, 33 bp, Homo sapien
tcagttttttcagcttcaactctgcgcctattt

SEQ ID NO: 474912 - DNA, 33 bp, Homo sapien
tcagttttttcagctttaactctgcgcctattt

SEQ ID NO: 474913 - DNA, 33 bp, Homo sapien
catgagaggctgaaaccgatctgcttcatagga

SEQ ID NO: 474914 - DNA, 33 bp, Homo sapien
catgagaggctgaaactgatctgcttcatagga

SEQ ID NO: 474915 - DNA, 33 bp, Homo sapien
gatgatgaaacagactcagagctccaggttacc

SEQ ID NO: 474916 - DNA, 33 bp, Homo sapien
gatgatgaaacagactgagagctccaggttacc

SEQ ID NO: 474917 - DNA, 33 bp, Homo sapien
tgcgtttcctccaacaatgaaattccaagtttt

SEQ ID NO: 474918 - DNA, 33 bp, Homo sapien
tgcgtttcctccaacagtgaaattccaagtttt

SEQ ID NO: 474919 - DNA, 33 bp, Homo sapien
atggcctaaagatcccggaggaatactcagtct

SEQ ID NO: 474920 - DNA, 33 bp, Homo sapien
atggcctaaagatccctgaggaatactcagtct

SEQ ID NO: 474921 - DNA, 33 bp, Homo sapien
gaggtcactataaacccggactttaaagctttg

SEQ ID NO: 474922 - DNA, 33 bp, Homo sapien
gaggtcactataaacctggactttaaagctttg

SEQ ID NO: 474923 - DNA, 33 bp, Homo sapien
gatgaattagtaaactcaagaaacaaatgcaac

SEQ ID NO: 474924 - DNA, 33 bp, Homo sapien
gatgaattagtaaactgaagaaacaaatgcaac

SEQ ID NO: 474925 - DNA, 33 bp, Homo sapien
tatgtggccccttctacctggaaaaacaaagaa

SEQ ID NO: 474926 - DNA, 33 bp, Homo sapien
tatgtggccccttctatctggaaaaacaaagaa

SEQ ID NO: 474927 - DNA, 33 bp, Homo sapien
tggatttgaagactgacatgtgtaaatgcattg

SEQ ID NO: 474928 - DNA, 33 bp, Homo sapien
tggatttgaagactgatatgtgtaaatgcattg

SEQ ID NO: 474929 - DNA, 33 bp, Homo sapien
ttaaactgcatttaccaacttggttcttgtctg

SEQ ID NO: 474930 - DNA, 33 bp, Homo sapien
ttaaactgcatttaccgacttggttcttgtctg

SEQ ID NO: 474931 - DNA, 33 bp, Homo sapien
tatggacctggttttaacaatgctagtgagttg

SEQ ID NO: 474932 - DNA, 33 bp, Homo sapien
tatggacctggttttagcaatgctagtgagttg

SEQ ID NO: 474933 - DNA, 33 bp, Homo sapien
actgtgtttcccaataaagtcacattctgagga

SEQ ID NO: 474934 - DNA, 33 bp, Homo sapien
actgtgtttcccaatagagtcacattctgagga

SEQ ID NO: 474935 - DNA, 33 bp, Homo sapien
acaagaaagaagtagaatatatgtgtgcaaaac

SEQ ID NO: 474936 - DNA, 33 bp, Homo sapien
acaagaaagaagtagagtatatgtgtgcaaaac

SEQ ID NO: 474937 - DNA, 33 bp, Homo sapien
atcacagcaaaacttaccctatcctgactgata

SEQ ID NO: 474938 - DNA, 33 bp, Homo sapien
atcacagcaaaacttatcctatcctgactgata

SEQ ID NO: 474939 - DNA, 33 bp, Homo sapien
caggaagaatgaagtacgtagacaactggaggg

SEQ ID NO: 474940 - DNA, 33 bp, Homo sapien
caggaagaatgaagtatgtagacaactggaggg

SEQ ID NO: 474941 - DNA, 33 bp, Homo sapien
tgagaagctccttagacgggaagttggttgcat

SEQ ID NO: 474942 - DNA, 33 bp, Homo sapien
tgagaagctccttagaggggaagttggttgcat

SEQ ID NO: 474943 - DNA, 33 bp, Homo sapien
gatcctcaactaactacgggcaaaatagatggc

SEQ ID NO: 474944 - DNA, 33 bp, Homo sapien
gatcctcaactaactatgggcaaaatagatggc

SEQ ID NO: 474945 - DNA, 33 bp, Homo sapien
gtaaagacctgagaaagccctaaactctctctg

SEQ ID NO: 474946 - DNA, 33 bp, Homo sapien
gtaaagacctgagaaatccctaaactctctctg

SEQ ID NO: 474947 - DNA, 33 bp, Homo sapien
gacagcagcttagtcacgtacattcacagccgg

SEQ ID NO: 474948 - DNA, 33 bp, Homo sapien
gacagcagcttagtcatgtacattcacagccgg

SEQ ID NO: 474949 - DNA, 33 bp, Homo sapien
accagccaacctgcatgatctacccaggcgacg

SEQ ID NO: 474950 - DNA, 33 bp, Homo sapien
accagccaacctgcattatctacccaggcgacg

SEQ ID NO: 474951 - DNA, 33 bp, Homo sapien
gtgatttaccctcataacttcaagaacacatct

SEQ ID NO: 474952 - DNA, 33 bp, Homo sapien
gtgatttaccctcataccttcaagaacacatct

SEQ ID NO: 474953 - DNA, 33 bp, Homo sapien
gtatcctttgagaccaacacgtgcatcagcaca

SEQ ID NO: 474954 - DNA, 33 bp, Homo sapien
gtatcctttgagaccagcacgtgcatcagcaca

SEQ ID NO: 474955 - DNA, 33 bp, Homo sapien
ctttgcatgaaacaacaaccatattttaattat

SEQ ID NO: 474956 - DNA, 33 bp, Homo sapien
ctttgcatgaaacaaccaccatattttaattat

SEQ ID NO: 474957 - DNA, 33 bp, Homo sapien
ccagggaatcaatggacgaaacaggaccattgc

SEQ ID NO: 474958 - DNA, 33 bp, Homo sapien
ccagggaatcaatggatgaaacaggaccattgc

SEQ ID NO: 474959 - DNA, 33 bp, Homo sapien
ggatccaggaggttacccagataggtgtgggcc

SEQ ID NO: 474960 - DNA, 33 bp, Homo sapien
ggatccaggaggttactcagataggtgtgggcc

SEQ ID NO: 474961 - DNA, 33 bp, Homo sapien
gtggccccaaaatcaaaagacactgaagaacca

SEQ ID NO: 474962 - DNA, 33 bp, Homo sapien
gtggccccaaaatcaagagacactgaagaacca

SEQ ID NO: 474963 - DNA, 33 bp, Homo sapien
tgtggaatccattcccaactaattcagtctcac

SEQ ID NO: 474964 - DNA, 33 bp, Homo sapien
tgtggaatccattccccactaattcagtctcac

SEQ ID NO: 474965 - DNA, 33 bp, Homo sapien
ctcttgtatctcccataacagagaagaacctta

SEQ ID NO: 474966 - DNA, 33 bp, Homo sapien
ctcttgtatctcccatcacagagaagaacctta

SEQ ID NO: 474967 - DNA, 33 bp, Homo sapien
gggctacagttgcagacgggagatgagagaaca

SEQ ID NO: 474968 - DNA, 33 bp, Homo sapien
gggctacagttgcagatgggagatgagagaaca

SEQ ID NO: 474969 - DNA, 33 bp, Homo sapien
tcattcccttgctccccgcatgttattttatga

SEQ ID NO: 474970 - DNA, 33 bp, Homo sapien
tcattcccttgctccctgcatgttattttatga

SEQ ID NO: 474971 - DNA, 33 bp, Homo sapien
taatgatacaggattcactttccttgaaaactt

SEQ ID NO: 474972 - DNA, 33 bp, Homo sapien
taatgatacaggattcgctttccttgaaaactt

SEQ ID NO: 474973 - DNA, 33 bp, Homo sapien
aaaatatgaggttcaaatggaaaaaattgtcac

SEQ ID NO: 474974 - DNA, 33 bp, Homo sapien
aaaatatgaggttcaagtggaaaaaattgtcac

SEQ ID NO: 474975 - DNA, 33 bp, Homo sapien
aaaagagaggtaaaaaatgcaagctttgccaac

SEQ ID NO: 474976 - DNA, 33 bp, Homo sapien
aaaagagaggtaaaaattgcaagctttgccaac

SEQ ID NO: 474977 - DNA, 33 bp, Homo sapien
tctaattgccttctcaacctttccacttgatgt

SEQ ID NO: 474978 - DNA, 33 bp, Homo sapien
tctaattgccttctcaccctttccacttgatgt

SEQ ID NO: 474979 - DNA, 33 bp, Homo sapien
aagtgttctggactcacgatatgttttgaagtt

SEQ ID NO: 474980 - DNA, 33 bp, Homo sapien
aagtgttctggactcatgatatgttttgaagtt

SEQ ID NO: 474981 - DNA, 33 bp, Homo sapien
tggtcccagaactatcaaaagcttagtgcatac

SEQ ID NO: 474982 - DNA, 33 bp, Homo sapien
tggtcccagaactatcgaaagcttagtgcatac

SEQ ID NO: 474983 - DNA, 33 bp, Homo sapien
ttcaagagtctttgcacgtttccaactgctctc

SEQ ID NO: 474984 - DNA, 33 bp, Homo sapien
ttcaagagtctttgcatgtttccaactgctctc

SEQ ID NO: 474985 - DNA, 33 bp, Homo sapien
tcaaaccaaccagtgaagtctgacattccacta

SEQ ID NO: 474986 - DNA, 33 bp, Homo sapien
tcaaaccaaccagtgaggtctgacattccacta

SEQ ID NO: 474987 - DNA, 33 bp, Homo sapien
cccaggaaatgggaaaatgccctttgcaacacc

SEQ ID NO: 474988 - DNA, 33 bp, Homo sapien
cccaggaaatgggaaactgccctttgcaacacc

SEQ ID NO: 474989 - DNA, 33 bp, Homo sapien
tggatctgtaatgaaacaatgaacaactctgca

SEQ ID NO: 474990 - DNA, 33 bp, Homo sapien
tggatctgtaatgaaagaatgaacaactctgca

SEQ ID NO: 474991 - DNA, 33 bp, Homo sapien
agggcctctttttcaccaacggagaacatacaa

SEQ ID NO: 474992 - DNA, 33 bp, Homo sapien
agggcctctttttcactaacggagaacatacaa

SEQ ID NO: 474993 - DNA, 33 bp, Homo sapien
tctgggagcacagtacaaaaaaccacttacagc

SEQ ID NO: 474994 - DNA, 33 bp, Homo sapien
tctgggagcacagtacgaaaaaccacttacagc

SEQ ID NO: 474995 - DNA, 33 bp, Homo sapien
atgcctttagcagttaaaacactgtggcccaca

SEQ ID NO: 474996 - DNA, 33 bp, Homo sapien
atgcctttagcagttagaacactgtggcccaca

SEQ ID NO: 474997 - DNA, 33 bp, Homo sapien
ccaaattccgagagaccctagaagatacacgag

SEQ ID NO: 474998 - DNA, 33 bp, Homo sapien
ccaaattccgagagactctagaagatacacgag

SEQ ID NO: 474999 - DNA, 33 bp, Homo sapien
ttcccttattattccaaatgcactgctttccct

SEQ ID NO: 475000 - DNA, 33 bp, Homo sapien
ttcccttattattccagatgcactgctttccct

SEQ ID NO: 475001 - DNA, 33 bp, Homo sapien
tgagtacccactaagcagcaggcctattctaag

SEQ ID NO: 475002 - DNA, 33 bp, Homo sapien
tgagtacccactaagcggcaggcctattctaag

SEQ ID NO: 475003 - DNA, 33 bp, Homo sapien
ggttgtttcataggaggacatcaaatacagcac

SEQ ID NO: 475004 - DNA, 33 bp, Homo sapien
ggttgtttcataggagtacatcaaatacagcac

SEQ ID NO: 475005 - DNA, 33 bp, Homo sapien
cccatcttccacactaaagtcagagtatttctt

SEQ ID NO: 475006 - DNA, 33 bp, Homo sapien
cccatcttccacactagagtcagagtatttctt

SEQ ID NO: 475007 - DNA, 33 bp, Homo sapien
taatatataccacgtacgttgagtgagacacac

SEQ ID NO: 475008 - DNA, 33 bp, Homo sapien
taatatataccacgtatgttgagtgagacacac

SEQ ID NO: 475009 - DNA, 33 bp, Homo sapien
tagggtcaatgaaatcaagacattttggtagtg

SEQ ID NO: 475010 - DNA, 33 bp, Homo sapien
tagggtcaatgaaatccagacattttggtagtg

SEQ ID NO: 475011 - DNA, 33 bp, Homo sapien
cagtcgcttatctcccagagaagcatcatcaag

SEQ ID NO: 475012 - DNA, 33 bp, Homo sapien
cagtcgcttatctcccggagaagcatcatcaag

SEQ ID NO: 475013 - DNA, 33 bp, Homo sapien
tctgtcaactttgctacgttcaaaaacttttat

SEQ ID NO: 475014 - DNA, 33 bp, Homo sapien
tctgtcaactttgctatgttcaaaaacttttat

SEQ ID NO: 475015 - DNA, 33 bp, Homo sapien
agttattcatgttcaccgagacaggctggggct

SEQ ID NO: 475016 - DNA, 33 bp, Homo sapien
agttattcatgttcactgagacaggctggggct

SEQ ID NO: 475017 - DNA, 33 bp, Homo sapien
cctctggcctttgaagaagtcccaagacctgtg

SEQ ID NO: 475018 - DNA, 33 bp, Homo sapien
cctctggcctttgaaggagtcccaagacctgtg

SEQ ID NO: 475019 - DNA, 33 bp, Homo sapien
gagtccttgtgcagaaaagaacagaaggtggtt

SEQ ID NO: 475020 - DNA, 33 bp, Homo sapien
gagtccttgtgcagaagagaacagaaggtggtt

SEQ ID NO: 475021 - DNA, 33 bp, Homo sapien
acggtatcctatggagaaagaagatgcaaccac

SEQ ID NO: 475022 - DNA, 33 bp, Homo sapien
acggtatcctatggaggaagaagatgcaaccac

SEQ ID NO: 475023 - DNA, 33 bp, Homo sapien
gccagtcctttcttgccaaaataggctgtgagg

SEQ ID NO: 475024 - DNA, 33 bp, Homo sapien
gccagtcctttcttgctaaaataggctgtgagg

SEQ ID NO: 475025 - DNA, 33 bp, Homo sapien
cctctctcagctgaaagctacagacccacactg

SEQ ID NO: 475026 - DNA, 33 bp, Homo sapien
cctctctcagctgaaatctacagacccacactg

SEQ ID NO: 475027 - DNA, 33 bp, Homo sapien
ctcagcaaaaacataaaggagaagtcaaatcta

SEQ ID NO: 475028 - DNA, 33 bp, Homo sapien
ctcagcaaaaacataatggagaagtcaaatcta

SEQ ID NO: 475029 - DNA, 33 bp, Homo sapien
cgtgttcaagctaaaaaagcattagagatagta

SEQ ID NO: 475030 - DNA, 33 bp, Homo sapien
cgtgttcaagctaaaagagcattagagatagta

SEQ ID NO: 475031 - DNA, 33 bp, Homo sapien
tgcccaagaaatagaaaccttcactcattttac

SEQ ID NO: 475032 - DNA, 33 bp, Homo sapien
tgcccaagaaatagaacccttcactcattttac

SEQ ID NO: 475033 - DNA, 33 bp, Homo sapien
ccacctcagtactgacaattcctggctttccct

SEQ ID NO: 475034 - DNA, 33 bp, Homo sapien
ccacctcagtactgaccattcctggctttccct

SEQ ID NO: 475035 - DNA, 33 bp, Homo sapien
agcacaggtatttccgcatgtttatgcttttcc

SEQ ID NO: 475036 - DNA, 33 bp, Homo sapien
agcacaggtatttccgtatgtttatgcttttcc

SEQ ID NO: 475037 - DNA, 33 bp, Homo sapien
aaaggaagcatcagtacctagccctgcataaat

SEQ ID NO: 475038 - DNA, 33 bp, Homo sapien
aaaggaagcatcagtatctagccctgcataaat

SEQ ID NO: 475039 - DNA, 33 bp, Homo sapien
tcacattttctttacccgcattcatctgtcaag

SEQ ID NO: 475040 - DNA, 33 bp, Homo sapien
tcacattttctttacctgcattcatctgtcaag

SEQ ID NO: 475041 - DNA, 33 bp, Homo sapien
caaaaagtttgaaaaacgcagaggagacagcat

SEQ ID NO: 475042 - DNA, 33 bp, Homo sapien
caaaaagtttgaaaaatgcagaggagacagcat

SEQ ID NO: 475043 - DNA, 33 bp, Homo sapien
tcttcatactctatgcaccattcattaatgggt

SEQ ID NO: 475044 - DNA, 33 bp, Homo sapien
tcttcatactctatgcgccattcattaatgggt

SEQ ID NO: 475045 - DNA, 33 bp, Homo sapien
cattcattcattagacaattactcagtcctgtt

SEQ ID NO: 475046 - DNA, 33 bp, Homo sapien
cattcattcattagacgattactcagtcctgtt

SEQ ID NO: 475047 - DNA, 33 bp, Homo sapien
gtaaaacacaaaactacgaaacttccaaaagaa

SEQ ID NO: 475048 - DNA, 33 bp, Homo sapien
gtaaaacacaaaactatgaaacttccaaaagaa

SEQ ID NO: 475049 - DNA, 33 bp, Homo sapien
attctccatattactaaggcaactgaaatcaga

SEQ ID NO: 475050 - DNA, 33 bp, Homo sapien
attctccatattactacggcaactgaaatcaga

SEQ ID NO: 475051 - DNA, 33 bp, Homo sapien
gatattagggatactaagcaattgtcacctact

SEQ ID NO: 475052 - DNA, 33 bp, Homo sapien
gatattagggatactaggcaattgtcacctact

SEQ ID NO: 475053 - DNA, 33 bp, Homo sapien
atgaacagatttgtccgcattaaaatgtaaaac

SEQ ID NO: 475054 - DNA, 33 bp, Homo sapien
atgaacagatttgtcctcattaaaatgtaaaac

SEQ ID NO: 475055 - DNA, 33 bp, Homo sapien
acaatacatgagccctcagaaactgtaatcaat

SEQ ID NO: 475056 - DNA, 33 bp, Homo sapien
acaatacatgagcccttagaaactgtaatcaat

SEQ ID NO: 475057 - DNA, 33 bp, Homo sapien
gcccttgctacctctacggattagagagaggga

SEQ ID NO: 475058 - DNA, 33 bp, Homo sapien
gcccttgctacctctatggattagagagaggga

SEQ ID NO: 475059 - DNA, 33 bp, Homo sapien
aatccaatggcaaatcaccagttaggtaagcag

SEQ ID NO: 475060 - DNA, 33 bp, Homo sapien
aatccaatggcaaatcgccagttaggtaagcag

SEQ ID NO: 475061 - DNA, 33 bp, Homo sapien
gtacattttctaggttccacattcgtctcccat

SEQ ID NO: 475062 - DNA, 33 bp, Homo sapien
gtacattttctaggttgcacattcgtctcccat

SEQ ID NO: 475063 - DNA, 33 bp, Homo sapien
caagcacatcataggacaagaaggtagacagga

SEQ ID NO: 475064 - DNA, 33 bp, Homo sapien
caagcacatcataggagaagaaggtagacagga

SEQ ID NO: 475065 - DNA, 33 bp, Homo sapien
gggaaggggaatgccaaagcaaaggacataaac

SEQ ID NO: 475066 - DNA, 33 bp, Homo sapien
gggaaggggaatgccagagcaaaggacataaac

SEQ ID NO: 475067 - DNA, 33 bp, Homo sapien
ttgtccctagagagcacagtgttttgcacacag

SEQ ID NO: 475068 - DNA, 33 bp, Homo sapien
ttgtccctagagagcatagtgttttgcacacag

SEQ ID NO: 475069 - DNA, 33 bp, Homo sapien
aacatggatgattctcaaagtaattatgctgaa

SEQ ID NO: 475070 - DNA, 33 bp, Homo sapien
aacatggatgattctcgaagtaattatgctgaa

SEQ ID NO: 475071 - DNA, 33 bp, Homo sapien
tatagaataactgcaaaggtcacagacttcaga

SEQ ID NO: 475072 - DNA, 33 bp, Homo sapien
tatagaataactgcaacggtcacagacttcaga

SEQ ID NO: 475073 - DNA, 33 bp, Homo sapien
attctagatttctttcaaagatgacttccagtt

SEQ ID NO: 475074 - DNA, 33 bp, Homo sapien
attctagatttctttcgaagatgacttccagtt

SEQ ID NO: 475075 - DNA, 33 bp, Homo sapien
aattataactcaacaaagtaggaactgaaacaa

SEQ ID NO: 475076 - DNA, 33 bp, Homo sapien
aattataactcaacaaggtaggaactgaaacaa

SEQ ID NO: 475077 - DNA, 33 bp, Homo sapien
agatctttaaggaatcactgcactctcttccac

SEQ ID NO: 475078 - DNA, 33 bp, Homo sapien
agatctttaaggaatcgctgcactctcttccac

SEQ ID NO: 475079 - DNA, 33 bp, Homo sapien
aataattctcctgtgcaaatattatgactagtt

SEQ ID NO: 475080 - DNA, 33 bp, Homo sapien
aataattctcctgtgccaatattatgactagtt

SEQ ID NO: 475081 - DNA, 33 bp, Homo sapien
tgctggagacagtaataactatccttaacagaa

SEQ ID NO: 475082 - DNA, 33 bp, Homo sapien
tgctggagacagtaatgactatccttaacagaa

SEQ ID NO: 475083 - DNA, 33 bp, Homo sapien
aatatgtcaccctgaactcattctatgctggag

SEQ ID NO: 475084 - DNA, 33 bp, Homo sapien
aatatgtcaccctgaattcattctatgctggag

SEQ ID NO: 475085 - DNA, 33 bp, Homo sapien
atggaccatttgtacacagactaatattatgag

SEQ ID NO: 475086 - DNA, 33 bp, Homo sapien
atggaccatttgtacatagactaatattatgag

SEQ ID NO: 475087 - DNA, 33 bp, Homo sapien
ttgctgggcctgacacgccaaacagcaaggcag

SEQ ID NO: 475088 - DNA, 33 bp, Homo sapien
ttgctgggcctgacactccaaacagcaaggcag

SEQ ID NO: 475089 - DNA, 33 bp, Homo sapien
gatgagtagtcaccaacagaaaagttactgaaa

SEQ ID NO: 475090 - DNA, 33 bp, Homo sapien
gatgagtagtcaccaatagaaaagttactgaaa

SEQ ID NO: 475091 - DNA, 33 bp, Homo sapien
actcataagttatagaatcagctctagatatta

SEQ ID NO: 475092 - DNA, 33 bp, Homo sapien
actcataagttatagagtcagctctagatatta

SEQ ID NO: 475093 - DNA, 33 bp, Homo sapien
aaggccggaaggataaaggtggtgacatgatca

SEQ ID NO: 475094 - DNA, 33 bp, Homo sapien
aaggccggaaggataatggtggtgacatgatca

SEQ ID NO: 475095 - DNA, 33 bp, Homo sapien
gcccagaagcttgtagccctagtagagtgataa

SEQ ID NO: 475096 - DNA, 33 bp, Homo sapien
gcccagaagcttgtagtcctagtagagtgataa

SEQ ID NO: 475097 - DNA, 33 bp, Homo sapien
tttcccttggctctaaaattccatcactcagca

SEQ ID NO: 475098 - DNA, 33 bp, Homo sapien
tttcccttggctctaacattccatcactcagca

SEQ ID NO: 475099 - DNA, 33 bp, Homo sapien
aagtttaaaatgcccacatggattaacagaatc

SEQ ID NO: 475100 - DNA, 33 bp, Homo sapien
aagtttaaaatgcccatatggattaacagaatc

SEQ ID NO: 475101 - DNA, 33 bp, Homo sapien
ctactgaccactaaagaaacaatactcaacgca

SEQ ID NO: 475102 - DNA, 33 bp, Homo sapien
ctactgaccactaaaggaacaatactcaacgca

SEQ ID NO: 475103 - DNA, 33 bp, Homo sapien
ttgttgagaaaggcaacctgaaatgggacttgg

SEQ ID NO: 475104 - DNA, 33 bp, Homo sapien
ttgttgagaaaggcaatctgaaatgggacttgg

SEQ ID NO: 475105 - DNA, 33 bp, Homo sapien
gttccttcttaatcacaatcattgtacctgcag

SEQ ID NO: 475106 - DNA, 33 bp, Homo sapien
gttccttcttaatcacgatcattgtacctgcag

SEQ ID NO: 475107 - DNA, 33 bp, Homo sapien
actacacggataaatacacgagattgagtttat

SEQ ID NO: 475108 - DNA, 33 bp, Homo sapien
actacacggataaatatacgagattgagtttat

SEQ ID NO: 475109 - DNA, 33 bp, Homo sapien
gaaagaacgctggaaacggtaactacacggata

SEQ ID NO: 475110 - DNA, 33 bp, Homo sapien
gaaagaacgctggaaatggtaactacacggata

SEQ ID NO: 475111 - DNA, 33 bp, Homo sapien
ttccaggtattttcaaacaacagagttgaggcc

SEQ ID NO: 475112 - DNA, 33 bp, Homo sapien
ttccaggtattttcaagcaacagagttgaggcc

SEQ ID NO: 475113 - DNA, 33 bp, Homo sapien
gctttggtttcctcaactacaagatggagatta

SEQ ID NO: 475114 - DNA, 33 bp, Homo sapien
gctttggtttcctcaattacaagatggagatta

SEQ ID NO: 475115 - DNA, 33 bp, Homo sapien
taagcagcatcatttacaatggaaaatagcctc

SEQ ID NO: 475116 - DNA, 33 bp, Homo sapien
taagcagcatcatttataatggaaaatagcctc

SEQ ID NO: 475117 - DNA, 33 bp, Homo sapien
ctttgaaaaacaacatcaagaaaacaaagtggc

SEQ ID NO: 475118 - DNA, 33 bp, Homo sapien
ctttgaaaaacaacatgaagaaaacaaagtggc

SEQ ID NO: 475119 - DNA, 33 bp, Homo sapien
tgttttagttctatcaataatgtcattggtcgt

SEQ ID NO: 475120 - DNA, 33 bp, Homo sapien
tgttttagttctatcagtaatgtcattggtcgt

SEQ ID NO: 475121 - DNA, 33 bp, Homo sapien
tgttcaagcgtgcaagaatttatgcaaaaggtg

SEQ ID NO: 475122 - DNA, 33 bp, Homo sapien
tgttcaagcgtgcaaggatttatgcaaaaggtg

SEQ ID NO: 475123 - DNA, 33 bp, Homo sapien
gtctcaagtaccccaacgatgtaggcctcccat

SEQ ID NO: 475124 - DNA, 33 bp, Homo sapien
gtctcaagtaccccaatgatgtaggcctcccat

SEQ ID NO: 475125 - DNA, 33 bp, Homo sapien
tctagtaaaatagtgcaaaataaactttgtgtt

SEQ ID NO: 475126 - DNA, 33 bp, Homo sapien
tctagtaaaatagtgctaaataaactttgtgtt

SEQ ID NO: 475127 - DNA, 33 bp, Homo sapien
cactctggtccacatacgaggcaatctctgtca

SEQ ID NO: 475128 - DNA, 33 bp, Homo sapien
cactctggtccacatatgaggcaatctctgtca

SEQ ID NO: 475129 - DNA, 33 bp, Homo sapien
aaagaattctgtttcccgactacttgaatgcat

SEQ ID NO: 475130 - DNA, 33 bp, Homo sapien
aaagaattctgtttcctgactacttgaatgcat

SEQ ID NO: 475131 - DNA, 33 bp, Homo sapien
atttcagattacagaagtctcctttgttagact

SEQ ID NO: 475132 - DNA, 33 bp, Homo sapien
atttcagattacagaattctcctttgttagact

SEQ ID NO: 475133 - DNA, 33 bp, Homo sapien
aggaaaatgctggatgaagagagtctccagcat

SEQ ID NO: 475134 - DNA, 33 bp, Homo sapien
aggaaaatgctggatggagagagtctccagcat

SEQ ID NO: 475135 - DNA, 33 bp, Homo sapien
tccttcctggtaggaaatgtccctgtgaaaatg

SEQ ID NO: 475136 - DNA, 33 bp, Homo sapien
tccttcctggtaggaactgtccctgtgaaaatg

SEQ ID NO: 475137 - DNA, 33 bp, Homo sapien
gacttagttgatcttcactcttggcaaagccac

SEQ ID NO: 475138 - DNA, 33 bp, Homo sapien
gacttagttgatcttcgctcttggcaaagccac

SEQ ID NO: 475139 - DNA, 33 bp, Homo sapien
tatgtatctgctcaacactcaggcaagaaacca

SEQ ID NO: 475140 - DNA, 33 bp, Homo sapien
tatgtatctgctcaacgctcaggcaagaaacca

SEQ ID NO: 475141 - DNA, 33 bp, Homo sapien
aagatgatcaccgaaagaacttgttaaagtcaa

SEQ ID NO: 475142 - DNA, 33 bp, Homo sapien
aagatgatcaccgaaataacttgttaaagtcaa

SEQ ID NO: 475143 - DNA, 33 bp, Homo sapien
cagaactgcaaatgaagctattcctgatgcctc

SEQ ID NO: 475144 - DNA, 33 bp, Homo sapien
cagaactgcaaatgaatctattcctgatgcctc

SEQ ID NO: 475145 - DNA, 33 bp, Homo sapien
catgcatggcagcatacgtagtcaacagagccc

SEQ ID NO: 475146 - DNA, 33 bp, Homo sapien
catgcatggcagcatatgtagtcaacagagccc

SEQ ID NO: 475147 - DNA, 33 bp, Homo sapien
aaggtctgctccccagaaactgtttagccatgg

SEQ ID NO: 475148 - DNA, 33 bp, Homo sapien
aaggtctgctccccaggaactgtttagccatgg

SEQ ID NO: 475149 - DNA, 33 bp, Homo sapien
cttccttccattccaggacaccatcttatctct

SEQ ID NO: 475150 - DNA, 33 bp, Homo sapien
cttccttccattccagtacaccatcttatctct

SEQ ID NO: 475151 - DNA, 33 bp, Homo sapien
gcttgagaataaagaaagttcctactcagacct

SEQ ID NO: 475152 - DNA, 33 bp, Homo sapien
gcttgagaataaagaaggttcctactcagacct

SEQ ID NO: 475153 - DNA, 33 bp, Homo sapien
tcctaccatctttcaaagtcttaaatcaaatat

SEQ ID NO: 475154 - DNA, 33 bp, Homo sapien
tcctaccatctttcaaggtcttaaatcaaatat

SEQ ID NO: 475155 - DNA, 33 bp, Homo sapien
tgaggcaagaagggtcagaattgagggtggaga

SEQ ID NO: 475156 - DNA, 33 bp, Homo sapien
tgaggcaagaagggtcggaattgagggtggaga

SEQ ID NO: 475157 - DNA, 33 bp, Homo sapien
tttaggttacctaacaacataccattgccctgg

SEQ ID NO: 475158 - DNA, 33 bp, Homo sapien
tttaggttacctaacatcataccattgccctgg

SEQ ID NO: 475159 - DNA, 33 bp, Homo sapien
gcaataagacagagtcactgacttggaaaggaa

SEQ ID NO: 475160 - DNA, 33 bp, Homo sapien
gcaataagacagagtccctgacttggaaaggaa

SEQ ID NO: 475161 - DNA, 33 bp, Homo sapien
attttccccaaccctacgtcataacaccactgg

SEQ ID NO: 475162 - DNA, 33 bp, Homo sapien
attttccccaaccctatgtcataacaccactgg

SEQ ID NO: 475163 - DNA, 33 bp, Homo sapien
aattaaagagccagcagctcagaagtgttcaag

SEQ ID NO: 475164 - DNA, 33 bp, Homo sapien
aattaaagagccagcatctcagaagtgttcaag

SEQ ID NO: 475165 - DNA, 33 bp, Homo sapien
ctgcgttcttttagggcattccagagatggttc

SEQ ID NO: 475166 - DNA, 33 bp, Homo sapien
ctgcgttcttttagggtattccagagatggttc

SEQ ID NO: 475167 - DNA, 33 bp, Homo sapien
ggttctgtgtgcagaacgttgactgtgggaggt

SEQ ID NO: 475168 - DNA, 33 bp, Homo sapien
ggttctgtgtgcagaaggttgactgtgggaggt

SEQ ID NO: 475169 - DNA, 33 bp, Homo sapien
tcacagcagaaggatgaaaacccatagggcatc

SEQ ID NO: 475170 - DNA, 33 bp, Homo sapien
tcacagcagaaggatgcaaacccatagggcatc

SEQ ID NO: 475171 - DNA, 33 bp, Homo sapien
attgttgaataagtgaaatgtttgttgaacaaa

SEQ ID NO: 475172 - DNA, 33 bp, Homo sapien
attgttgaataagtgacatgtttgttgaacaaa

SEQ ID NO: 475173 - DNA, 33 bp, Homo sapien
tccccacattatgtgcaatagactttggtgagg

SEQ ID NO: 475174 - DNA, 33 bp, Homo sapien
tccccacattatgtgcgatagactttggtgagg

SEQ ID NO: 475175 - DNA, 33 bp, Homo sapien
ctgagtatgctcttcaaaggtaaatcaactgtt

SEQ ID NO: 475176 - DNA, 33 bp, Homo sapien
ctgagtatgctcttcagaggtaaatcaactgtt

SEQ ID NO: 475177 - DNA, 33 bp, Homo sapien
cctccaagcagaactccagtggtttaaagcccc

SEQ ID NO: 475178 - DNA, 33 bp, Homo sapien
cctccaagcagaactctagtggtttaaagcccc

SEQ ID NO: 475179 - DNA, 33 bp, Homo sapien
atgagtaggttgcacaaattttcttccattctg

SEQ ID NO: 475180 - DNA, 33 bp, Homo sapien
atgagtaggttgcacagattttcttccattctg

SEQ ID NO: 475181 - DNA, 33 bp, Homo sapien
ccaatgcactagaatacatggcagagtaaacat

SEQ ID NO: 475182 - DNA, 33 bp, Homo sapien
ccaatgcactagaatatatggcagagtaaacat

SEQ ID NO: 475183 - DNA, 33 bp, Homo sapien
tggccccgaatgattacggtggaggcagcattt

SEQ ID NO: 475184 - DNA, 33 bp, Homo sapien
tggccccgaatgattatggtggaggcagcattt

SEQ ID NO: 475185 - DNA, 33 bp, Homo sapien
attcctacaataaatcacctattacgtagaact

SEQ ID NO: 475186 - DNA, 33 bp, Homo sapien
attcctacaataaatctcctattacgtagaact

SEQ ID NO: 475187 - DNA, 33 bp, Homo sapien
cattcctagtattccacaagagaaagttttgat

SEQ ID NO: 475188 - DNA, 33 bp, Homo sapien
cattcctagtattccataagagaaagttttgat

SEQ ID NO: 475189 - DNA, 33 bp, Homo sapien
aggataaggaatgaaacggctaaggaagaaacg

SEQ ID NO: 475190 - DNA, 33 bp, Homo sapien
aggataaggaatgaaatggctaaggaagaaacg

SEQ ID NO: 475191 - DNA, 33 bp, Homo sapien
tatgtgatactatgtacgatggagaatgaattt

SEQ ID NO: 475192 - DNA, 33 bp, Homo sapien
tatgtgatactatgtaggatggagaatgaattt

SEQ ID NO: 475193 - DNA, 33 bp, Homo sapien
tatcaaagattacgaaactggtaaatggagaag

SEQ ID NO: 475194 - DNA, 33 bp, Homo sapien
tatcaaagattacgaagctggtaaatggagaag

SEQ ID NO: 475195 - DNA, 33 bp, Homo sapien
tgtagaattgacagtagtaatagagcggggttt

SEQ ID NO: 475196 - DNA, 33 bp, Homo sapien
tgtagaattgacagtattaatagagcggggttt

SEQ ID NO: 475197 - DNA, 33 bp, Homo sapien
gacccaaattcttatccaagcacaggtgacaga

SEQ ID NO: 475198 - DNA, 33 bp, Homo sapien
gacccaaattcttatctaagcacaggtgacaga

SEQ ID NO: 475199 - DNA, 33 bp, Homo sapien
taaagaggtgctcagtaaatgatgaaacatgtc

SEQ ID NO: 475200 - DNA, 33 bp, Homo sapien
taaagaggtgctcagtgaatgatgaaacatgtc

SEQ ID NO: 475201 - DNA, 33 bp, Homo sapien
gtttccttacagtgaaatggcaactgataaatg

SEQ ID NO: 475202 - DNA, 33 bp, Homo sapien
gtttccttacagtgaagtggcaactgataaatg

SEQ ID NO: 475203 - DNA, 33 bp, Homo sapien
tttatagaggatagaacggtataaaaaaaatca

SEQ ID NO: 475204 - DNA, 33 bp, Homo sapien
tttatagaggatagaatggtataaaaaaaatca

SEQ ID NO: 475205 - DNA, 33 bp, Homo sapien
gtgtaatgacccaaatcatggcctgtcagatga

SEQ ID NO: 475206 - DNA, 33 bp, Homo sapien
gtgtaatgacccaaattatggcctgtcagatga

SEQ ID NO: 475207 - DNA, 33 bp, Homo sapien
aggtgctctatcaacacgttttaatcagtcaag

SEQ ID NO: 475208 - DNA, 33 bp, Homo sapien
aggtgctctatcaacatgttttaatcagtcaag

SEQ ID NO: 475209 - DNA, 33 bp, Homo sapien
ccgcagctataaccaacgaaatgaaaaggtaag

SEQ ID NO: 475210 - DNA, 33 bp, Homo sapien
ccgcagctataaccaatgaaatgaaaaggtaag

SEQ ID NO: 475211 - DNA, 33 bp, Homo sapien
tatcattacaatccacaaataaaacctcccatt

SEQ ID NO: 475212 - DNA, 33 bp, Homo sapien
tatcattacaatccactaataaaacctcccatt

SEQ ID NO: 475213 - DNA, 33 bp, Homo sapien
atcacagtttttaacactgatgaatccacagat

SEQ ID NO: 475214 - DNA, 33 bp, Homo sapien
atcacagtttttaacattgatgaatccacagat

SEQ ID NO: 475215 - DNA, 33 bp, Homo sapien
gcatagacgtcagctaaaagaaatcctcgggct

SEQ ID NO: 475216 - DNA, 33 bp, Homo sapien
gcatagacgtcagctagaagaaatcctcgggct

SEQ ID NO: 475217 - DNA, 33 bp, Homo sapien
tgcagagaaaacctcacggcctcagcatcagca

SEQ ID NO: 475218 - DNA, 33 bp, Homo sapien
tgcagagaaaacctcagggcctcagcatcagca

SEQ ID NO: 475219 - DNA, 33 bp, Homo sapien
cgctggtcaaagagaacctcctagaaaaactct

SEQ ID NO: 475220 - DNA, 33 bp, Homo sapien
cgctggtcaaagagaagctcctagaaaaactct

SEQ ID NO: 475221 - DNA, 33 bp, Homo sapien
attatttcccaatgcacgtttcttgtttttttg

SEQ ID NO: 475222 - DNA, 33 bp, Homo sapien
attatttcccaatgcaggtttcttgtttttttg

SEQ ID NO: 475223 - DNA, 33 bp, Homo sapien
ctatagcaggaaagaaaacacagtccttgcctc

SEQ ID NO: 475224 - DNA, 33 bp, Homo sapien
ctatagcaggaaagaagacacagtccttgcctc

SEQ ID NO: 475225 - DNA, 33 bp, Homo sapien
gatcattctaacaggaataattaacagagacat

SEQ ID NO: 475226 - DNA, 33 bp, Homo sapien
gatcattctaacaggagtaattaacagagacat

SEQ ID NO: 475227 - DNA, 33 bp, Homo sapien
tatagttcagtgaatcaaagtgctctctgactc

SEQ ID NO: 475228 - DNA, 33 bp, Homo sapien
tatagttcagtgaatcgaagtgctctctgactc

SEQ ID NO: 475229 - DNA, 33 bp, Homo sapien
tgtgacaaagatgaaacgaactgtgtctttgga

SEQ ID NO: 475230 - DNA, 33 bp, Homo sapien
tgtgacaaagatgaaatgaactgtgtctttgga

SEQ ID NO: 475231 - DNA, 33 bp, Homo sapien
ggagtaccagagaacacgaagcattcaatacat

SEQ ID NO: 475232 - DNA, 33 bp, Homo sapien
ggagtaccagagaacaggaagcattcaatacat

SEQ ID NO: 475233 - DNA, 33 bp, Homo sapien
atcctagctgcaacacagaattaactgaggcat

SEQ ID NO: 475234 - DNA, 33 bp, Homo sapien
atcctagctgcaacacggaattaactgaggcat

SEQ ID NO: 475235 - DNA, 33 bp, Homo sapien
cgttttaacaacactcggaatgacatgccttct

SEQ ID NO: 475236 - DNA, 33 bp, Homo sapien
cgttttaacaacactctgaatgacatgccttct

SEQ ID NO: 475237 - DNA, 33 bp, Homo sapien
cattctgttgtcaatcactggactgccagttac

SEQ ID NO: 475238 - DNA, 33 bp, Homo sapien
cattctgttgtcaatccctggactgccagttac

SEQ ID NO: 475239 - DNA, 33 bp, Homo sapien
cgttcaattccacctacctgttcttgtccagtc

SEQ ID NO: 475240 - DNA, 33 bp, Homo sapien
cgttcaattccacctatctgttcttgtccagtc

SEQ ID NO: 475241 - DNA, 33 bp, Homo sapien
ctttgcacttggataaactctctttaaaataaa

SEQ ID NO: 475242 - DNA, 33 bp, Homo sapien
ctttgcacttggataagctctctttaaaataaa

SEQ ID NO: 475243 - DNA, 33 bp, Homo sapien
tggccactctgtgtaacgctggacacttggaca

SEQ ID NO: 475244 - DNA, 33 bp, Homo sapien
tggccactctgtgtaatgctggacacttggaca

SEQ ID NO: 475245 - DNA, 33 bp, Homo sapien
catgctgttgacagctaagctatccttgtttca

SEQ ID NO: 475246 - DNA, 33 bp, Homo sapien
catgctgttgacagctgagctatccttgtttca

SEQ ID NO: 475247 - DNA, 33 bp, Homo sapien
agttggttagaaagaaatctaggcaagagatgt

SEQ ID NO: 475248 - DNA, 33 bp, Homo sapien
agttggttagaaagaagtctaggcaagagatgt

SEQ ID NO: 475249 - DNA, 33 bp, Homo sapien
gggaattattgaaaaacacagtggaatgattaa

SEQ ID NO: 475250 - DNA, 33 bp, Homo sapien
gggaattattgaaaaagacagtggaatgattaa

SEQ ID NO: 475251 - DNA, 33 bp, Homo sapien
aaaatataagtacaaccgaatgaattattataa

SEQ ID NO: 475252 - DNA, 33 bp, Homo sapien
aaaatataagtacaactgaatgaattattataa

SEQ ID NO: 475253 - DNA, 33 bp, Homo sapien
aattcccttatgccaaattaccttccttctcaa

SEQ ID NO: 475254 - DNA, 33 bp, Homo sapien
aattcccttatgccaagttaccttccttctcaa

SEQ ID NO: 475255 - DNA, 33 bp, Homo sapien
tttcttccttctttccagatcaagctaatcttt

SEQ ID NO: 475256 - DNA, 33 bp, Homo sapien
tttcttccttctttccggatcaagctaatcttt

SEQ ID NO: 475257 - DNA, 33 bp, Homo sapien
cttaagttcaggaaagcactgaaaggagagtaa

SEQ ID NO: 475258 - DNA, 33 bp, Homo sapien
cttaagttcaggaaagtactgaaaggagagtaa

SEQ ID NO: 475259 - DNA, 33 bp, Homo sapien
cctacctcaaacaaaacgcagaaagtattattt

SEQ ID NO: 475260 - DNA, 33 bp, Homo sapien
cctacctcaaacaaaatgcagaaagtattattt

SEQ ID NO: 475261 - DNA, 33 bp, Homo sapien
gattgttcctttaaaaatgattcccctgggata

SEQ ID NO: 475262 - DNA, 33 bp, Homo sapien
gattgttcctttaaaagtgattcccctgggata

SEQ ID NO: 475263 - DNA, 33 bp, Homo sapien
acaatatagggcctccaaagataattccttatg

SEQ ID NO: 475264 - DNA, 33 bp, Homo sapien
acaatatagggcctccgaagataattccttatg

SEQ ID NO: 475265 - DNA, 33 bp, Homo sapien
cagagcaagggaaggaagtagagaactgcatga

SEQ ID NO: 475266 - DNA, 33 bp, Homo sapien
cagagcaagggaaggacgtagagaactgcatga

SEQ ID NO: 475267 - DNA, 33 bp, Homo sapien
aataaaagacactgaagaaagataggcctttta

SEQ ID NO: 475268 - DNA, 33 bp, Homo sapien
aataaaagacactgaataaagataggcctttta

SEQ ID NO: 475269 - DNA, 33 bp, Homo sapien
tttacagagtagagaactaaggttgaggaaagt

SEQ ID NO: 475270 - DNA, 33 bp, Homo sapien
tttacagagtagagaattaaggttgaggaaagt

SEQ ID NO: 475271 - DNA, 33 bp, Homo sapien
attcatatgcattcaaaagcaattaaactctca

SEQ ID NO: 475272 - DNA, 33 bp, Homo sapien
attcatatgcattcaagagcaattaaactctca

SEQ ID NO: 475273 - DNA, 33 bp, Homo sapien
tgtctaatcatggaaacagcaatgtgtcctagc

SEQ ID NO: 475274 - DNA, 33 bp, Homo sapien
tgtctaatcatggaaatagcaatgtgtcctagc

SEQ ID NO: 475275 - DNA, 33 bp, Homo sapien
gtaattgtgatagatcaaattgaaactgtacaa

SEQ ID NO: 475276 - DNA, 33 bp, Homo sapien
gtaattgtgatagatcgaattgaaactgtacaa

SEQ ID NO: 475277 - DNA, 33 bp, Homo sapien
cataggtaatatttctcacaatctgccaaatga

SEQ ID NO: 475278 - DNA, 33 bp, Homo sapien
cataggtaatatttcttacaatctgccaaatga

SEQ ID NO: 475279 - DNA, 33 bp, Homo sapien
cagaattcatagacggccaagactttgaagcgt

SEQ ID NO: 475280 - DNA, 33 bp, Homo sapien
cagaattcatagacggtcaagactttgaagcgt

SEQ ID NO: 475281 - DNA, 33 bp, Homo sapien
cttatgagcattattgaaatcctctttagaaaa

SEQ ID NO: 475282 - DNA, 33 bp, Homo sapien
cttatgagcattattggaatcctctttagaaaa

SEQ ID NO: 475283 - DNA, 33 bp, Homo sapien
actatctcatttactaagtggaaaaatacctat

SEQ ID NO: 475284 - DNA, 33 bp, Homo sapien
actatctcatttactatgtggaaaaatacctat

SEQ ID NO: 475285 - DNA, 33 bp, Homo sapien
ctcatcatatgacaaccgactgtacaggacctc

SEQ ID NO: 475286 - DNA, 33 bp, Homo sapien
ctcatcatatgacaactgactgtacaggacctc

SEQ ID NO: 475287 - DNA, 33 bp, Homo sapien
acattagtaatataaacagcagactaacatgct

SEQ ID NO: 475288 - DNA, 33 bp, Homo sapien
acattagtaatataaagagcagactaacatgct

SEQ ID NO: 475289 - DNA, 33 bp, Homo sapien
tgcactccaaaagaccaaagccgagacatggta

SEQ ID NO: 475290 - DNA, 33 bp, Homo sapien
tgcactccaaaagaccgaagccgagacatggta

SEQ ID NO: 475291 - DNA, 33 bp, Homo sapien
ccactgttcctctaaactggtattgcagaggtt

SEQ ID NO: 475292 - DNA, 33 bp, Homo sapien
ccactgttcctctaaattggtattgcagaggtt

SEQ ID NO: 475293 - DNA, 33 bp, Homo sapien
agtactaccagattaccgccatcgtctcttaag

SEQ ID NO: 475294 - DNA, 33 bp, Homo sapien
agtactaccagattactgccatcgtctcttaag

SEQ ID NO: 475295 - DNA, 33 bp, Homo sapien
aactcattctgcctcaccgtcattgcattatac

SEQ ID NO: 475296 - DNA, 33 bp, Homo sapien
aactcattctgcctcatcgtcattgcattatac

SEQ ID NO: 475297 - DNA, 33 bp, Homo sapien
agcaaaggaaggagcaataagagctttggctct

SEQ ID NO: 475298 - DNA, 33 bp, Homo sapien
agcaaaggaaggagcagtaagagctttggctct

SEQ ID NO: 475299 - DNA, 33 bp, Homo sapien
tgagtattttcttgcaaaccacagagtgagtat

SEQ ID NO: 475300 - DNA, 33 bp, Homo sapien
tgagtattttcttgcataccacagagtgagtat

SEQ ID NO: 475301 - DNA, 33 bp, Homo sapien
gctaccaacgttatatcaattgccttacaaaat

SEQ ID NO: 475302 - DNA, 33 bp, Homo sapien
gctaccaacgttatatgaattgccttacaaaat

SEQ ID NO: 475303 - DNA, 33 bp, Homo sapien
agcttccacttatgacagaaggtgaggtagggg

SEQ ID NO: 475304 - DNA, 33 bp, Homo sapien
agcttccacttatgacggaaggtgaggtagggg

SEQ ID NO: 475305 - DNA, 33 bp, Homo sapien
gaataataaaagcagacgagcatctttctcctc

SEQ ID NO: 475306 - DNA, 33 bp, Homo sapien
gaataataaaagcagatgagcatctttctcctc

SEQ ID NO: 475307 - DNA, 33 bp, Homo sapien
acaacagcatccctaacattggaatctctctct

SEQ ID NO: 475308 - DNA, 33 bp, Homo sapien
acaacagcatccctaatattggaatctctctct

SEQ ID NO: 475309 - DNA, 33 bp, Homo sapien
tttaatacacggcttcactataagatattatgt

SEQ ID NO: 475310 - DNA, 33 bp, Homo sapien
tttaatacacggcttctctataagatattatgt

SEQ ID NO: 475311 - DNA, 33 bp, Homo sapien
cattcatctagcaaaaatatattgggctgacca

SEQ ID NO: 475312 - DNA, 33 bp, Homo sapien
cattcatctagcaaaagtatattgggctgacca

SEQ ID NO: 475313 - DNA, 33 bp, Homo sapien
ttttttatacttctagaacacatagtctatcca

SEQ ID NO: 475314 - DNA, 33 bp, Homo sapien
ttttttatacttctaggacacatagtctatcca

SEQ ID NO: 475315 - DNA, 33 bp, Homo sapien
atttggaaactgagaaatcttctgtgcttccaa

SEQ ID NO: 475316 - DNA, 33 bp, Homo sapien
atttggaaactgagaagtcttctgtgcttccaa

SEQ ID NO: 475317 - DNA, 33 bp, Homo sapien
acaatcaatctttatacccaaggatgctgcaca

SEQ ID NO: 475318 - DNA, 33 bp, Homo sapien
acaatcaatctttatatccaaggatgctgcaca

SEQ ID NO: 475319 - DNA, 33 bp, Homo sapien
gaagaaattcatattcaatttaagtcacatagg

SEQ ID NO: 475320 - DNA, 33 bp, Homo sapien
gaagaaattcatattcgatttaagtcacatagg

SEQ ID NO: 475321 - DNA, 33 bp, Homo sapien
ggtgttgatggaaaccaaagagcagaggcaatt

SEQ ID NO: 475322 - DNA, 33 bp, Homo sapien
ggtgttgatggaaaccgaagagcagaggcaatt

SEQ ID NO: 475323 - DNA, 33 bp, Homo sapien
ctctattcttccccaccgtctctaaaatcttca

SEQ ID NO: 475324 - DNA, 33 bp, Homo sapien
ctctattcttccccactgtctctaaaatcttca

SEQ ID NO: 475325 - DNA, 33 bp, Homo sapien
atctttttagagacaaaaaagtcatcaagctta

SEQ ID NO: 475326 - DNA, 33 bp, Homo sapien
atctttttagagacaagaaagtcatcaagctta

SEQ ID NO: 475327 - DNA, 33 bp, Homo sapien
gaaaacgttctagactcagcatagttttttggt

SEQ ID NO: 475328 - DNA, 33 bp, Homo sapien
gaaaacgttctagacttagcatagttttttggt

SEQ ID NO: 475329 - DNA, 33 bp, Homo sapien
attcatagaatccttgaaagatatttttggcca

SEQ ID NO: 475330 - DNA, 33 bp, Homo sapien
attcatagaatccttggaagatatttttggcca

SEQ ID NO: 475331 - DNA, 33 bp, Homo sapien
ttttagaacattaatcaaaggataaggcctaaa

SEQ ID NO: 475332 - DNA, 33 bp, Homo sapien
ttttagaacattaatcgaaggataaggcctaaa

SEQ ID NO: 475333 - DNA, 33 bp, Homo sapien
taattggactggtagaatatgccccagatggtt

SEQ ID NO: 475334 - DNA, 33 bp, Homo sapien
taattggactggtagagtatgccccagatggtt

SEQ ID NO: 475335 - DNA, 33 bp, Homo sapien
tagttattgctctgttcaaatggagaaaagaac

SEQ ID NO: 475336 - DNA, 33 bp, Homo sapien
tagttattgctctgttgaaatggagaaaagaac

SEQ ID NO: 475337 - DNA, 33 bp, Homo sapien
gggaattggcccatgacacctgatgacttattt

SEQ ID NO: 475338 - DNA, 33 bp, Homo sapien
gggaattggcccatgatacctgatgacttattt

SEQ ID NO: 475339 - DNA, 33 bp, Homo sapien
ctctttcggcctgcaaaaatttcccattttaat

SEQ ID NO: 475340 - DNA, 33 bp, Homo sapien
ctctttcggcctgcaacaatttcccattttaat

SEQ ID NO: 475341 - DNA, 33 bp, Homo sapien
accaatgctaaaacccaagtctcatgaaatccc

SEQ ID NO: 475342 - DNA, 33 bp, Homo sapien
accaatgctaaaacccgagtctcatgaaatccc

SEQ ID NO: 475343 - DNA, 33 bp, Homo sapien
cattaattcaaaacaacacttgacatcctagtc

SEQ ID NO: 475344 - DNA, 33 bp, Homo sapien
cattaattcaaaacaatacttgacatcctagtc

SEQ ID NO: 475345 - DNA, 33 bp, Homo sapien
cttggtgctgggcagtaacggtggaagtagcca

SEQ ID NO: 475346 - DNA, 33 bp, Homo sapien
cttggtgctgggcagtgacggtggaagtagcca

SEQ ID NO: 475347 - DNA, 33 bp, Homo sapien
ggaaccatattcattacctaacttagtgcaaac

SEQ ID NO: 475348 - DNA, 33 bp, Homo sapien
ggaaccatattcattatctaacttagtgcaaac

SEQ ID NO: 475349 - DNA, 33 bp, Homo sapien
tgcaaggcacattctcccaactagctatgtagg

SEQ ID NO: 475350 - DNA, 33 bp, Homo sapien
tgcaaggcacattctcgcaactagctatgtagg

SEQ ID NO: 475351 - DNA, 33 bp, Homo sapien
cacaagggccaggcaaaggttagcagcttatag

SEQ ID NO: 475352 - DNA, 33 bp, Homo sapien
cacaagggccaggcaagggttagcagcttatag

SEQ ID NO: 475353 - DNA, 33 bp, Homo sapien
caaaatttggtaaataccttgagcagaatagca

SEQ ID NO: 475354 - DNA, 33 bp, Homo sapien
caaaatttggtaaatatcttgagcagaatagca

SEQ ID NO: 475355 - DNA, 33 bp, Homo sapien
taataagagccatttacgataaacccacaacca

SEQ ID NO: 475356 - DNA, 33 bp, Homo sapien
taataagagccatttatgataaacccacaacca

SEQ ID NO: 475357 - DNA, 33 bp, Homo sapien
caaaaagtagagagtcaatagagaaagaacaaa

SEQ ID NO: 475358 - DNA, 33 bp, Homo sapien
caaaaagtagagagtcgatagagaaagaacaaa

SEQ ID NO: 475359 - DNA, 33 bp, Homo sapien
ctgtagctcttgaggcaatgaaacagcgctgag

SEQ ID NO: 475360 - DNA, 33 bp, Homo sapien
ctgtagctcttgaggcgatgaaacagcgctgag

SEQ ID NO: 475361 - DNA, 33 bp, Homo sapien
cagtgcaacatagtaaaaggaatttgaaaaaga

SEQ ID NO: 475362 - DNA, 33 bp, Homo sapien
cagtgcaacatagtaataggaatttgaaaaaga

SEQ ID NO: 475363 - DNA, 33 bp, Homo sapien
ttttacagatagaagacgtatactaagaaagat

SEQ ID NO: 475364 - DNA, 33 bp, Homo sapien
ttttacagatagaagatgtatactaagaaagat

SEQ ID NO: 475365 - DNA, 33 bp, Homo sapien
actttgtttttttgaaatacactgtaccttctt

SEQ ID NO: 475366 - DNA, 33 bp, Homo sapien
actttgtttttttgaactacactgtaccttctt

SEQ ID NO: 475367 - DNA, 33 bp, Homo sapien
aggagaccatctttcccctaccctgatacacat

SEQ ID NO: 475368 - DNA, 33 bp, Homo sapien
aggagaccatctttcctctaccctgatacacat

SEQ ID NO: 475369 - DNA, 33 bp, Homo sapien
ggcagataaagtccctcagctcatagtgtccag

SEQ ID NO: 475370 - DNA, 33 bp, Homo sapien
ggcagataaagtccctgagctcatagtgtccag

SEQ ID NO: 475371 - DNA, 33 bp, Homo sapien
aagtagagccaattaactataggaatatgagaa

SEQ ID NO: 475372 - DNA, 33 bp, Homo sapien
aagtagagccaattaattataggaatatgagaa

SEQ ID NO: 475373 - DNA, 33 bp, Homo sapien
catggtggttttgagaaaatttaagcacattgc

SEQ ID NO: 475374 - DNA, 33 bp, Homo sapien
catggtggttttgagataatttaagcacattgc

SEQ ID NO: 475375 - DNA, 33 bp, Homo sapien
attccactttcctacaccctaagggacactttc

SEQ ID NO: 475376 - DNA, 33 bp, Homo sapien
attccactttcctacatcctaagggacactttc

SEQ ID NO: 475377 - DNA, 33 bp, Homo sapien
tattcttgacataagccctcctgaggcaggaag

SEQ ID NO: 475378 - DNA, 33 bp, Homo sapien
tattcttgacataagctctcctgaggcaggaag

SEQ ID NO: 475379 - DNA, 33 bp, Homo sapien
tcatttgcttttaggacactatgtcacccacta

SEQ ID NO: 475380 - DNA, 33 bp, Homo sapien
tcatttgcttttaggatactatgtcacccacta

SEQ ID NO: 475381 - DNA, 33 bp, Homo sapien
ttggtgcactgtactcacccaaaaaaggtatga

SEQ ID NO: 475382 - DNA, 33 bp, Homo sapien
ttggtgcactgtactcgcccaaaaaaggtatga

SEQ ID NO: 475383 - DNA, 33 bp, Homo sapien
taatggaacagaattcagaatacatcaatatgt

SEQ ID NO: 475384 - DNA, 33 bp, Homo sapien
taatggaacagaattcggaatacatcaatatgt

SEQ ID NO: 475385 - DNA, 33 bp, Homo sapien
ttgagttatatcacacactctgaagcaccacaa

SEQ ID NO: 475386 - DNA, 33 bp, Homo sapien
ttgagttatatcacacgctctgaagcaccacaa

SEQ ID NO: 475387 - DNA, 33 bp, Homo sapien
tcactgccttaagtgccattccaaaattcagca

SEQ ID NO: 475388 - DNA, 33 bp, Homo sapien
tcactgccttaagtgctattccaaaattcagca

SEQ ID NO: 475389 - DNA, 33 bp, Homo sapien
caaaatagctggccagaatttttattgtgatta

SEQ ID NO: 475390 - DNA, 33 bp, Homo sapien
caaaatagctggccaggatttttattgtgatta

SEQ ID NO: 475391 - DNA, 33 bp, Homo sapien
catctcaccctgcgttaaaatgacttacatcca

SEQ ID NO: 475392 - DNA, 33 bp, Homo sapien
catctcaccctgcgttgaaatgacttacatcca

SEQ ID NO: 475393 - DNA, 33 bp, Homo sapien
tatttgtgtcattttcgatttgtatcagcagtg

SEQ ID NO: 475394 - DNA, 33 bp, Homo sapien
tatttgtgtcattttctatttgtatcagcagtg

SEQ ID NO: 475395 - DNA, 33 bp, Homo sapien
tgtgtaaatagcagtgccaaagtttctcgaaat

SEQ ID NO: 475396 - DNA, 33 bp, Homo sapien
tgtgtaaatagcagtgtcaaagtttctcgaaat

SEQ ID NO: 475397 - DNA, 33 bp, Homo sapien
tagtttgaatctccacaaaaataatgaacaatg

SEQ ID NO: 475398 - DNA, 33 bp, Homo sapien
tagtttgaatctccaccaaaataatgaacaatg

SEQ ID NO: 475399 - DNA, 33 bp, Homo sapien
ttctccagagtggttacatcactgtatgtttcc

SEQ ID NO: 475400 - DNA, 33 bp, Homo sapien
ttctccagagtggttatatcactgtatgtttcc

SEQ ID NO: 475401 - DNA, 33 bp, Homo sapien
ttagaaagtcaaagcaatcttttctctagtgat

SEQ ID NO: 475402 - DNA, 33 bp, Homo sapien
ttagaaagtcaaagcagtcttttctctagtgat

SEQ ID NO: 475403 - DNA, 33 bp, Homo sapien
aaaaggagagatcaaaaagttgagaaaacctat

SEQ ID NO: 475404 - DNA, 33 bp, Homo sapien
aaaaggagagatcaaacagttgagaaaacctat

SEQ ID NO: 475405 - DNA, 33 bp, Homo sapien
tgtataaatgaatctcaatggaagtgcaccaaa

SEQ ID NO: 475406 - DNA, 33 bp, Homo sapien
tgtataaatgaatctccatggaagtgcaccaaa

SEQ ID NO: 475407 - DNA, 33 bp, Homo sapien
cttccaacaattcctgaaacaattcctttaact

SEQ ID NO: 475408 - DNA, 33 bp, Homo sapien
cttccaacaattcctggaacaattcctttaact

SEQ ID NO: 475409 - DNA, 33 bp, Homo sapien
ttctaaatatcactaaccaaaaggcaagaaact

SEQ ID NO: 475410 - DNA, 33 bp, Homo sapien
ttctaaatatcactaatcaaaaggcaagaaact

SEQ ID NO: 475411 - DNA, 33 bp, Homo sapien
gaccaatccaagaacaaggcagcaaattgtgct

SEQ ID NO: 475412 - DNA, 33 bp, Homo sapien
gaccaatccaagaacatggcagcaaattgtgct

SEQ ID NO: 475413 - DNA, 33 bp, Homo sapien
attggtctctgttactaaaaaggagaaattcag

SEQ ID NO: 475414 - DNA, 33 bp, Homo sapien
attggtctctgttactgaaaaggagaaattcag

SEQ ID NO: 475415 - DNA, 33 bp, Homo sapien
gttttgggtatgggctaacttctacccacaaag

SEQ ID NO: 475416 - DNA, 33 bp, Homo sapien
gttttgggtatgggcttacttctacccacaaag

SEQ ID NO: 475417 - DNA, 33 bp, Homo sapien
ctgaaagaaagagacacgagacaataacttgca

SEQ ID NO: 475418 - DNA, 33 bp, Homo sapien
ctgaaagaaagagacatgagacaataacttgca

SEQ ID NO: 475419 - DNA, 33 bp, Homo sapien
gttctgttcacgagtacattgtttttgttttgt

SEQ ID NO: 475420 - DNA, 33 bp, Homo sapien
gttctgttcacgagtatattgtttttgttttgt

SEQ ID NO: 475421 - DNA, 33 bp, Homo sapien
ctgccatcctgatttaagctgtgtaagtagatt

SEQ ID NO: 475422 - DNA, 33 bp, Homo sapien
ctgccatcctgatttaggctgtgtaagtagatt

SEQ ID NO: 475423 - DNA, 33 bp, Homo sapien
cactgggtgacaggtacatcttagcttgttctc

SEQ ID NO: 475424 - DNA, 33 bp, Homo sapien
cactgggtgacaggtatatcttagcttgttctc

SEQ ID NO: 475425 - DNA, 33 bp, Homo sapien
ccacctcccaataaaacgtgattgctgtgttca

SEQ ID NO: 475426 - DNA, 33 bp, Homo sapien
ccacctcccaataaaatgtgattgctgtgttca

SEQ ID NO: 475427 - DNA, 33 bp, Homo sapien
caaacacacacagagaactttcccaaatcttct

SEQ ID NO: 475428 - DNA, 33 bp, Homo sapien
caaacacacacagagagctttcccaaatcttct

SEQ ID NO: 475429 - DNA, 33 bp, Homo sapien
ttaatcaatctggtcacgttttgagtttgttct

SEQ ID NO: 475430 - DNA, 33 bp, Homo sapien
ttaatcaatctggtcatgttttgagtttgttct

SEQ ID NO: 475431 - DNA, 33 bp, Homo sapien
agttggaaaataggaaatgttttgaacaatccg

SEQ ID NO: 475432 - DNA, 33 bp, Homo sapien
agttggaaaataggaactgttttgaacaatccg

SEQ ID NO: 475433 - DNA, 33 bp, Homo sapien
ccaagatatcttccacaagcttctttaaaatta

SEQ ID NO: 475434 - DNA, 33 bp, Homo sapien
ccaagatatcttccacgagcttctttaaaatta

SEQ ID NO: 475435 - DNA, 33 bp, Homo sapien
acataaaaattcaatcggaggataagcttctgt

SEQ ID NO: 475436 - DNA, 33 bp, Homo sapien
acataaaaattcaatctgaggataagcttctgt

SEQ ID NO: 475437 - DNA, 33 bp, Homo sapien
acaaatgtccacctgaagaaggagacatagaaa

SEQ ID NO: 475438 - DNA, 33 bp, Homo sapien
acaaatgtccacctgaggaaggagacatagaaa

SEQ ID NO: 475439 - DNA, 33 bp, Homo sapien
agatgaagagctatctcaaaactgagctgcctc

SEQ ID NO: 475440 - DNA, 33 bp, Homo sapien
agatgaagagctatctgaaaactgagctgcctc

SEQ ID NO: 475441 - DNA, 33 bp, Homo sapien
aataagatgtaaatgccaagaaattttcttgtc

SEQ ID NO: 475442 - DNA, 33 bp, Homo sapien
aataagatgtaaatgctaagaaattttcttgtc

SEQ ID NO: 475443 - DNA, 33 bp, Homo sapien
gaaaaggctgactttgaaaattacctccagaag

SEQ ID NO: 475444 - DNA, 33 bp, Homo sapien
gaaaaggctgactttggaaattacctccagaag

SEQ ID NO: 475445 - DNA, 33 bp, Homo sapien
aattgggtaaaactataaaagtcatcatataca

SEQ ID NO: 475446 - DNA, 33 bp, Homo sapien
aattgggtaaaactattaaagtcatcatataca

SEQ ID NO: 475447 - DNA, 33 bp, Homo sapien
gatatttatcagcatgaaccaggatccttcctt

SEQ ID NO: 475448 - DNA, 33 bp, Homo sapien
gatatttatcagcatggaccaggatccttcctt

SEQ ID NO: 475449 - DNA, 33 bp, Homo sapien
gcttgagtgagttggcaaaatgattccccactt

SEQ ID NO: 475450 - DNA, 33 bp, Homo sapien
gcttgagtgagttggcgaaatgattccccactt

SEQ ID NO: 475451 - DNA, 33 bp, Homo sapien
atatctttagagacaagttcaaggataataagt

SEQ ID NO: 475452 - DNA, 33 bp, Homo sapien
atatctttagagacaatttcaaggataataagt

SEQ ID NO: 475453 - DNA, 33 bp, Homo sapien
ttatattaactgcacacacctgtctacctttgc

SEQ ID NO: 475454 - DNA, 33 bp, Homo sapien
ttatattaactgcacatacctgtctacctttgc

SEQ ID NO: 475455 - DNA, 33 bp, Homo sapien
ctgtcattttaatgggaagttttgagcacatgc

SEQ ID NO: 475456 - DNA, 33 bp, Homo sapien
ctgtcattttaatgggtagttttgagcacatgc

SEQ ID NO: 475457 - DNA, 33 bp, Homo sapien
ctgtgaagcagtccacaaagaatgctcagagtc

SEQ ID NO: 475458 - DNA, 33 bp, Homo sapien
ctgtgaagcagtccacgaagaatgctcagagtc

SEQ ID NO: 475459 - DNA, 33 bp, Homo sapien
ctcggtaccaaagtggacactgcaatatcctgc

SEQ ID NO: 475460 - DNA, 33 bp, Homo sapien
ctcggtaccaaagtgggcactgcaatatcctgc

SEQ ID NO: 475461 - DNA, 33 bp, Homo sapien
ataaacaggacatggaactgaggcatttagatg

SEQ ID NO: 475462 - DNA, 33 bp, Homo sapien
ataaacaggacatggacctgaggcatttagatg

SEQ ID NO: 475463 - DNA, 33 bp, Homo sapien
tccactgtgaaatattaaaactcagctgtgatg

SEQ ID NO: 475464 - DNA, 33 bp, Homo sapien
tccactgtgaaatattgaaactcagctgtgatg

SEQ ID NO: 475465 - DNA, 33 bp, Homo sapien
aaactatccaatcaacacaaataattgtaagtt

SEQ ID NO: 475466 - DNA, 33 bp, Homo sapien
aaactatccaatcaacccaaataattgtaagtt

SEQ ID NO: 475467 - DNA, 33 bp, Homo sapien
tggttgaattttttgcgcctaatatcctctttt

SEQ ID NO: 475468 - DNA, 33 bp, Homo sapien
tggttgaattttttgctcctaatatcctctttt

SEQ ID NO: 475469 - DNA, 33 bp, Homo sapien
ctttccctaataagtgaatatggcaataattcc

SEQ ID NO: 475470 - DNA, 33 bp, Homo sapien
ctttccctaataagtggatatggcaataattcc

SEQ ID NO: 475471 - DNA, 33 bp, Homo sapien
aagatcaattctaatacagttacattgacttct

SEQ ID NO: 475472 - DNA, 33 bp, Homo sapien
aagatcaattctaatatagttacattgacttct

SEQ ID NO: 475473 - DNA, 33 bp, Homo sapien
gacagggctttcttacactctgttcatgtactg

SEQ ID NO: 475474 - DNA, 33 bp, Homo sapien
gacagggctttcttacgctctgttcatgtactg

SEQ ID NO: 475475 - DNA, 33 bp, Homo sapien
ccagacactttgtgaaatatttgaatgtagcaa

SEQ ID NO: 475476 - DNA, 33 bp, Homo sapien
ccagacactttgtgaagtatttgaatgtagcaa

SEQ ID NO: 475477 - DNA, 33 bp, Homo sapien
tatcagctctatgataaatgggctatagtctat

SEQ ID NO: 475478 - DNA, 33 bp, Homo sapien
tatcagctctatgatagatgggctatagtctat

SEQ ID NO: 475479 - DNA, 33 bp, Homo sapien
aaagtcatgaataagaagattgggacggtggta

SEQ ID NO: 475480 - DNA, 33 bp, Homo sapien
aaagtcatgaataagacgattgggacggtggta

SEQ ID NO: 475481 - DNA, 33 bp, Homo sapien
caatgtgttggaaaggaagacaaataaagccaa

SEQ ID NO: 475482 - DNA, 33 bp, Homo sapien
caatgtgttggaaagggagacaaataaagccaa

SEQ ID NO: 475483 - DNA, 33 bp, Homo sapien
aaagctgcagcagttagaagaaaataaagaaat

SEQ ID NO: 475484 - DNA, 33 bp, Homo sapien
aaagctgcagcagttataagaaaataaagaaat

SEQ ID NO: 475485 - DNA, 33 bp, Homo sapien
ctttttctgagaagtcactgctttttctaacaa

SEQ ID NO: 475486 - DNA, 33 bp, Homo sapien
ctttttctgagaagtctctgctttttctaacaa

SEQ ID NO: 475487 - DNA, 33 bp, Homo sapien
aactaatagatggttccatgacagtttcaacat

SEQ ID NO: 475488 - DNA, 33 bp, Homo sapien
aactaatagatggttcgatgacagtttcaacat

SEQ ID NO: 475489 - DNA, 33 bp, Homo sapien
ggtacgaagggtacaaagtttcagacaaacagg

SEQ ID NO: 475490 - DNA, 33 bp, Homo sapien
ggtacgaagggtacaaggtttcagacaaacagg

SEQ ID NO: 475491 - DNA, 33 bp, Homo sapien
tatgctgccattaaaagtcatgagaccatgtcc

SEQ ID NO: 475492 - DNA, 33 bp, Homo sapien
tatgctgccattaaaattcatgagaccatgtcc

SEQ ID NO: 475493 - DNA, 33 bp, Homo sapien; identical to SEQ ID NO: 475491

SEQ ID NO: 475494 - DNA, 33 bp, Homo sapien; identical to SEQ ID NO: 475492

SEQ ID NO: 475495 - DNA, 33 bp, Homo sapien
tgatggaaatcaataaaaagcaggttgcaaaaa

SEQ ID NO: 475496 - DNA, 33 bp, Homo sapien
tgatggaaatcaataacaagcaggttgcaaaaa

SEQ ID NO: 475497 - DNA, 33 bp, Homo sapien
agactcagtaatcctacgttttggaaaattttt

SEQ ID NO: 475498 - DNA, 33 bp, Homo sapien
agactcagtaatcctatgttttggaaaattttt

SEQ ID NO: 475499 - DNA, 33 bp, Homo sapien
cccaaagggaaactccaaaaatgtagaaaagaa

SEQ ID NO: 475500 - DNA, 33 bp, Homo sapien
cccaaagggaaactccgaaaatgtagaaaagaa

SEQ ID NO: 475501 - DNA, 33 bp, Homo sapien
cacaggatagaaagttgaaagtcactatgcatc

SEQ ID NO: 475502 - DNA, 33 bp, Homo sapien
cacaggatagaaagtttaaagtcactatgcatc

SEQ ID NO: 475503 - DNA, 33 bp, Homo sapien
tttcagcctcttcacaatagtttctttttaatc

SEQ ID NO: 475504 - DNA, 33 bp, Homo sapien
tttcagcctcttcacagtagtttctttttaatc

SEQ ID NO: 475505 - DNA, 33 bp, Homo sapien
cctcttgcattaaggactccaaagaatttaggg

SEQ ID NO: 475506 - DNA, 33 bp, Homo sapien
cctcttgcattaaggagtccaaagaatttaggg

SEQ ID NO: 475507 - DNA, 33 bp, Homo sapien
tgaactatccaaagcaatgctggccattaccaa

SEQ ID NO: 475508 - DNA, 33 bp, Homo sapien
tgaactatccaaagcattgctggccattaccaa

SEQ ID NO: 475509 - DNA, 33 bp, Homo sapien
cagaaatgaggctgaaaacattgtcaacaagat

SEQ ID NO: 475510 - DNA, 33 bp, Homo sapien
cagaaatgaggctgaacacattgtcaacaagat

SEQ ID NO: 475511 - DNA, 33 bp, Homo sapien
ggatactgacttcaccaatagtaggcaacttac

SEQ ID NO: 475512 - DNA, 33 bp, Homo sapien
ggatactgacttcaccgatagtaggcaacttac

SEQ ID NO: 475513 - DNA, 33 bp, Homo sapien
ttcattttcttaaccaagactctatacggagga

SEQ ID NO: 475514 - DNA, 33 bp, Homo sapien
ttcattttcttaaccaggactctatacggagga

SEQ ID NO: 475515 - DNA, 33 bp, Homo sapien
ttttggctggtgtgaaaatgttgaaggaaggtt

SEQ ID NO: 475516 - DNA, 33 bp, Homo sapien
ttttggctggtgtgaagatgttgaaggaaggtt

SEQ ID NO: 475517 - DNA, 33 bp, Homo sapien
ataggagtgggataaggattaaaatattttaaa

SEQ ID NO: 475518 - DNA, 33 bp, Homo sapien
ataggagtgggataagtattaaaatattttaaa

SEQ ID NO: 475519 - DNA, 33 bp, Homo sapien
cataacacttctgaaaatatagccaaatgtgat

SEQ ID NO: 475520 - DNA, 33 bp, Homo sapien
cataacacttctgaaagtatagccaaatgtgat

SEQ ID NO: 475521 - DNA, 33 bp, Homo sapien
cttgtttgcagtgagacataaactctattacct

SEQ ID NO: 475522 - DNA, 33 bp, Homo sapien
cttgtttgcagtgagatataaactctattacct

SEQ ID NO: 475523 - DNA, 33 bp, Homo sapien
acatgagagcagagcaaatgggctacttctagc

SEQ ID NO: 475524 - DNA, 33 bp, Homo sapien
acatgagagcagagcacatgggctacttctagc

SEQ ID NO: 475525 - DNA, 33 bp, Homo sapien
aaagatggagaagggaaagtagagtagaacaaa

SEQ ID NO: 475526 - DNA, 33 bp, Homo sapien
aaagatggagaagggagagtagagtagaacaaa

SEQ ID NO: 475527 - DNA, 33 bp, Homo sapien
atgcactgtgagaaaacgaatcatatgagtaag

SEQ ID NO: 475528 - DNA, 33 bp, Homo sapien
atgcactgtgagaaaatgaatcatatgagtaag

SEQ ID NO: 475529 - DNA, 33 bp, Homo sapien
ataatgttctagaaaacagtttgcacaaatatg

SEQ ID NO: 475530 - DNA, 33 bp, Homo sapien
ataatgttctagaaaagagtttgcacaaatatg

SEQ ID NO: 475531 - DNA, 33 bp, Homo sapien
gtaagacagttctcaaagcaagtcttctgactc

SEQ ID NO: 475532 - DNA, 33 bp, Homo sapien
gtaagacagttctcaatgcaagtcttctgactc

SEQ ID NO: 475533 - DNA, 33 bp, Homo sapien
gtaaattctaatgacaatgaaatctggatagga

SEQ ID NO: 475534 - DNA, 33 bp, Homo sapien
gtaaattctaatgacagtgaaatctggatagga

SEQ ID NO: 475535 - DNA, 33 bp, Homo sapien
ttgggcttctttttcccgcctctaagcaataca

SEQ ID NO: 475536 - DNA, 33 bp, Homo sapien
ttgggcttctttttcctgcctctaagcaataca

SEQ ID NO: 475537 - DNA, 33 bp, Homo sapien
gaaaagtaaccttatcaataatcagtgaaagga

SEQ ID NO: 475538 - DNA, 33 bp, Homo sapien
gaaaagtaaccttatcgataatcagtgaaagga

SEQ ID NO: 475539 - DNA, 33 bp, Homo sapien
gcatgttaagcggaacagagacaattataaaga

SEQ ID NO: 475540 - DNA, 33 bp, Homo sapien
gcatgttaagcggaacggagacaattataaaga

SEQ ID NO: 475541 - DNA, 33 bp, Homo sapien
cagaatacagccatacactattacaaaatgtca

SEQ ID NO: 475542 - DNA, 33 bp, Homo sapien
cagaatacagccatacgctattacaaaatgtca

SEQ ID NO: 475543 - DNA, 33 bp, Homo sapien
aaacacagaatacatcacaaagcccatccttga

SEQ ID NO: 475544 - DNA, 33 bp, Homo sapien
aaacacagaatacatcgcaaagcccatccttga

SEQ ID NO: 475545 - DNA, 33 bp, Homo sapien
ctatgcgaataaagagaaagtataagtgtgaaa

SEQ ID NO: 475546 - DNA, 33 bp, Homo sapien
ctatgcgaataaagaggaagtataagtgtgaaa

SEQ ID NO: 475547 - DNA, 33 bp, Homo sapien
tgtctgccaaattaacaagcatagtctgcactg

SEQ ID NO: 475548 - DNA, 33 bp, Homo sapien
tgtctgccaaattaacgagcatagtctgcactg

SEQ ID NO: 475549 - DNA, 33 bp, Homo sapien
tgctccctttactcagaataaagacttgctggc

SEQ ID NO: 475550 - DNA, 33 bp, Homo sapien
tgctccctttactcaggataaagacttgctggc

SEQ ID NO: 475551 - DNA, 33 bp, Homo sapien
tctatcttgttcaagaatctgcacccatctact

SEQ ID NO: 475552 - DNA, 33 bp, Homo sapien
tctatcttgttcaagagtctgcacccatctact

SEQ ID NO: 475553 - DNA, 33 bp, Homo sapien
ctagaggttgagagaccagtgaggaggttgaga

SEQ ID NO: 475554 - DNA, 33 bp, Homo sapien
ctagaggttgagagacgagtgaggaggttgaga

SEQ ID NO: 475555 - DNA, 33 bp, Homo sapien
cagacagctgagagataacgcagagttagttat

SEQ ID NO: 475556 - DNA, 33 bp, Homo sapien
cagacagctgagagatgacgcagagttagttat

SEQ ID NO: 475557 - DNA, 33 bp, Homo sapien
tcttatatttctcaaaggtaacctcatgcctct

SEQ ID NO: 475558 - DNA, 33 bp, Homo sapien
tcttatatttctcaaatgtaacctcatgcctct

SEQ ID NO: 475559 - DNA, 33 bp, Homo sapien
cacactttattcacacacaaatttctagctgga

SEQ ID NO: 475560 - DNA, 33 bp, Homo sapien
cacactttattcacacgcaaatttctagctgga

SEQ ID NO: 475561 - DNA, 33 bp, Homo sapien
ttttgctaaggaataacgtgaggcttacacaga

SEQ ID NO: 475562 - DNA, 33 bp, Homo sapien
ttttgctaaggaataatgtgaggcttacacaga

SEQ ID NO: 475563 - DNA, 33 bp, Homo sapien
agaagattcaactatacgtttcctgaaatccct

SEQ ID NO: 475564 - DNA, 33 bp, Homo sapien
agaagattcaactatatgtttcctgaaatccct

SEQ ID NO: 475565 - DNA, 33 bp, Homo sapien
ttcttgcacgttcctggattactgcacttgcag

SEQ ID NO: 475566 - DNA, 33 bp, Homo sapien
ttcttgcacgttcctgtattactgcacttgcag

SEQ ID NO: 475567 - DNA, 33 bp, Homo sapien
cctaccatacatagaacgcctactgtaggattg

SEQ ID NO: 475568 - DNA, 33 bp, Homo sapien
cctaccatacatagaatgcctactgtaggattg

SEQ ID NO: 475569 - DNA, 33 bp, Homo sapien
ttgtatgtgatttaaactcaaatgctatagggt

SEQ ID NO: 475570 - DNA, 33 bp, Homo sapien
ttgtatgtgatttaaattcaaatgctatagggt

SEQ ID NO: 475571 - DNA, 33 bp, Homo sapien
gggatgcaatcataaccctaaaatttcaggctc

SEQ ID NO: 475572 - DNA, 33 bp, Homo sapien
gggatgcaatcataacgctaaaatttcaggctc

SEQ ID NO: 475573 - DNA, 33 bp, Homo sapien
ctagcaacagaagaaacaagaacaacttccagt

SEQ ID NO: 475574 - DNA, 33 bp, Homo sapien
ctagcaacagaagaaagaagaacaacttccagt

SEQ ID NO: 475575 - DNA, 33 bp, Homo sapien
agatactcttccttcaaaaaggcagatcacaac

SEQ ID NO: 475576 - DNA, 33 bp, Homo sapien
agatactcttccttcataaaggcagatcacaac

SEQ ID NO: 475577 - DNA, 33 bp, Homo sapien
gaaggaatatttggtgaatggtaagaagtggga

SEQ ID NO: 475578 - DNA, 33 bp, Homo sapien
gaaggaatatttggtggatggtaagaagtggga

SEQ ID NO: 475579 - DNA, 33 bp, Homo sapien
ctcactatatttctaaaacctggttcaatacag

SEQ ID NO: 475580 - DNA, 33 bp, Homo sapien
ctcactatatttctaagacctggttcaatacag

SEQ ID NO: 475581 - DNA, 33 bp, Homo sapien
tggtcattaagtttcaatagctgagttttagag

SEQ ID NO: 475582 - DNA, 33 bp, Homo sapien
tggtcattaagtttcagtagctgagttttagag

SEQ ID NO: 475583 - DNA, 33 bp, Homo sapien
ctcttctcagtctggacgtaggagttggcatta

SEQ ID NO: 475584 - DNA, 33 bp, Homo sapien
ctcttctcagtctggatgtaggagttggcatta

SEQ ID NO: 475585 - DNA, 33 bp, Homo sapien
tagctttcttctcccaaattacagccaaagttc

SEQ ID NO: 475586 - DNA, 33 bp, Homo sapien
tagctttcttctcccacattacagccaaagttc

SEQ ID NO: 475587 - DNA, 33 bp, Homo sapien
gcaagttttgattttaaattgatgtgtgtgatt

SEQ ID NO: 475588 - DNA, 33 bp, Homo sapien
gcaagttttgattttatattgatgtgtgtgatt

SEQ ID NO: 475589 - DNA, 33 bp, Homo sapien
agaatttctctctgtcactctgggattgtgctt

SEQ ID NO: 475590 - DNA, 33 bp, Homo sapien
agaatttctctctgtcgctctgggattgtgctt

SEQ ID NO: 475591 - DNA, 33 bp, Homo sapien
gataatatgtaagcaaatgaacatggttgtatt

SEQ ID NO: 475592 - DNA, 33 bp, Homo sapien
gataatatgtaagcaagtgaacatggttgtatt

SEQ ID NO: 475593 - DNA, 33 bp, Homo sapien
cacaaaagagacctgaaggagtaattaaatttc

SEQ ID NO: 475594 - DNA, 33 bp, Homo sapien
cacaaaagagacctgagggagtaattaaatttc

SEQ ID NO: 475595 - DNA, 33 bp, Homo sapien
ttgatgacagcgacaccgaataagaatggccag

SEQ ID NO: 475596 - DNA, 33 bp, Homo sapien
ttgatgacagcgacactgaataagaatggccag

SEQ ID NO: 475597 - DNA, 33 bp, Homo sapien
ttctcagagtcagcaccatcctatttttaaaca

SEQ ID NO: 475598 - DNA, 33 bp, Homo sapien
ttctcagagtcagcactatcctatttttaaaca

SEQ ID NO: 475599 - DNA, 33 bp, Homo sapien
agccccaggttaaagacactcaaaaggcatgaa

SEQ ID NO: 475600 - DNA, 33 bp, Homo sapien
agccccaggttaaagatactcaaaaggcatgaa

SEQ ID NO: 475601 - DNA, 33 bp, Homo sapien
tgctacaaatttatcaaaaggaccttgtgtgat

SEQ ID NO: 475602 - DNA, 33 bp, Homo sapien
tgctacaaatttatcagaaggaccttgtgtgat

SEQ ID NO: 475603 - DNA, 33 bp, Homo sapien
gctcagcagagctcaaagtcaatcaatcaaacc

SEQ ID NO: 475604 - DNA, 33 bp, Homo sapien
gctcagcagagctcaacgtcaatcaatcaaacc

SEQ ID NO: 475605 - DNA, 33 bp, Homo sapien
atatagactattcccaacgtcacttagtgttct

SEQ ID NO: 475606 - DNA, 33 bp, Homo sapien
atatagactattcccagcgtcacttagtgttct

SEQ ID NO: 475607 - DNA, 33 bp, Homo sapien
gtaagcactaaccccaatatgtacctatgcaca

SEQ ID NO: 475608 - DNA, 33 bp, Homo sapien
gtaagcactaaccccagtatgtacctatgcaca

SEQ ID NO: 475609 - DNA, 33 bp, Homo sapien
atagtcaaaggcatccaattatatattcatgaa

SEQ ID NO: 475610 - DNA, 33 bp, Homo sapien
atagtcaaaggcatcccattatatattcatgaa

SEQ ID NO: 475611 - DNA, 33 bp, Homo sapien
acaaaataaatggagccaacaatgtgccatacg

SEQ ID NO: 475612 - DNA, 33 bp, Homo sapien
acaaaataaatggagcgaacaatgtgccatacg

SEQ ID NO: 475613 - DNA, 33 bp, Homo sapien
tttgtggtctacaatacaaaaaattagggctcc

SEQ ID NO: 475614 - DNA, 33 bp, Homo sapien
tttgtggtctacaatagaaaaaattagggctcc

SEQ ID NO: 475615 - DNA, 33 bp, Homo sapien
agatgcattcaaagagaactcaagtgcactaat

SEQ ID NO: 475616 - DNA, 33 bp, Homo sapien
agatgcattcaaagaggactcaagtgcactaat

SEQ ID NO: 475617 - DNA, 33 bp, Homo sapien
ataatgaaaagtctagcaaattgctgtgagaaa

SEQ ID NO: 475618 - DNA, 33 bp, Homo sapien
ataatgaaaagtctagtaaattgctgtgagaaa

SEQ ID NO: 475619 - DNA, 33 bp, Homo sapien
agacatttaagcaagaacaatggtacaggaagg

SEQ ID NO: 475620 - DNA, 33 bp, Homo sapien
agacatttaagcaagagcaatggtacaggaagg

SEQ ID NO: 475621 - DNA, 33 bp, Homo sapien
gttaaaacttgactcaaaatctctcctcttccc

SEQ ID NO: 475622 - DNA, 33 bp, Homo sapien
gttaaaacttgactcataatctctcctcttccc

SEQ ID NO: 475623 - DNA, 33 bp, Homo sapien
tacatttctttacttaccgaagatcaaagctta

SEQ ID NO: 475624 - DNA, 33 bp, Homo sapien
tacatttctttacttagcgaagatcaaagctta

SEQ ID NO: 475625 - DNA, 33 bp, Homo sapien
ccctcatatcttattgcactgcatacttgtaca

SEQ ID NO: 475626 - DNA, 33 bp, Homo sapien
ccctcatatcttattgtactgcatacttgtaca

SEQ ID NO: 475627 - DNA, 33 bp, Homo sapien
tcatttccttaggtgccaagatcctcaagggtg

SEQ ID NO: 475628 - DNA, 33 bp, Homo sapien
tcatttccttaggtgcgaagatcctcaagggtg

SEQ ID NO: 475629 - DNA, 33 bp, Homo sapien
caacctgtcttgggcccgaatgcagttttggtc

SEQ ID NO: 475630 - DNA, 33 bp, Homo sapien
caacctgtcttgggccggaatgcagttttggtc

SEQ ID NO: 475631 - DNA, 33 bp, Homo sapien
gtaaaaaatctgaaagcattaaccatttgcaaa

SEQ ID NO: 475632 - DNA, 33 bp, Homo sapien
gtaaaaaatctgaaagtattaaccatttgcaaa

SEQ ID NO: 475633 - DNA, 33 bp, Homo sapien
ttactgtcagccatcacgagaggggctgtcctt

SEQ ID NO: 475634 - DNA, 33 bp, Homo sapien
ttactgtcagccatcatgagaggggctgtcctt

SEQ ID NO: 475635 - DNA, 33 bp, Homo sapien
gggagggatcagattacggaaggcccagtaagc

SEQ ID NO: 475636 - DNA, 33 bp, Homo sapien
gggagggatcagattatggaaggcccagtaagc

SEQ ID NO: 475637 - DNA, 33 bp, Homo sapien
aaaacctggtgataaacactgagaaccaaaatt

SEQ ID NO: 475638 - DNA, 33 bp, Homo sapien
aaaacctggtgataaatactgagaaccaaaatt

SEQ ID NO: 475639 - DNA, 33 bp, Homo sapien
taggtgccagagcaagccagcctcgtggtagca

SEQ ID NO: 475640 - DNA, 33 bp, Homo sapien
taggtgccagagcaagtcagcctcgtggtagca

SEQ ID NO: 475641 - DNA, 33 bp, Homo sapien
acaattgcctcacatagtagaacacccagagct

SEQ ID NO: 475642 - DNA, 33 bp, Homo sapien
acaattgcctcacatattagaacacccagagct

SEQ ID NO: 475643 - DNA, 33 bp, Homo sapien
cttcctgagccacttgaagtccctgagcagatg

SEQ ID NO: 475644 - DNA, 33 bp, Homo sapien
cttcctgagccacttggagtccctgagcagatg

SEQ ID NO: 475645 - DNA, 33 bp, Homo sapien
tatctcatctctactgaattctacattgggaaa

SEQ ID NO: 475646 - DNA, 33 bp, Homo sapien
tatctcatctctactggattctacattgggaaa

SEQ ID NO: 475647 - DNA, 33 bp, Homo sapien
accagaaaaagaccacaacttagaaataaagct

SEQ ID NO: 475648 - DNA, 33 bp, Homo sapien
accagaaaaagaccacgacttagaaataaagct

SEQ ID NO: 475649 - DNA, 33 bp, Homo sapien
cgcacccaagaatgggaatatacattgaaacgg

SEQ ID NO: 475650 - DNA, 33 bp, Homo sapien
cgcacccaagaatgggcatatacattgaaacgg

SEQ ID NO: 475651 - DNA, 33 bp, Homo sapien
tacattgaaacggggaagaaagcctctggccat

SEQ ID NO: 475652 - DNA, 33 bp, Homo sapien
tacattgaaacggggaggaaagcctctggccat

SEQ ID NO: 475653 - DNA, 33 bp, Homo sapien
ctgttgtcaccctgtccaatgtgggttggcagc

SEQ ID NO: 475654 - DNA, 33 bp, Homo sapien
ctgttgtcaccctgtctaatgtgggttggcagc

SEQ ID NO: 475655 - DNA, 33 bp, Homo sapien
atgtaaaagaagcaacaatggggtaattgtaaa

SEQ ID NO: 475656 - DNA, 33 bp, Homo sapien
atgtaaaagaagcaaccatggggtaattgtaaa

SEQ ID NO: 475657 - DNA, 33 bp, Homo sapien
gttcagttcacaacagaccctcactcctaagga

SEQ ID NO: 475658 - DNA, 33 bp, Homo sapien
gttcagttcacaacagcccctcactcctaagga

SEQ ID NO: 475659 - DNA, 33 bp, Homo sapien
cattctgggtaagtgacaacccctgcgcgagtc

SEQ ID NO: 475660 - DNA, 33 bp, Homo sapien
cattctgggtaagtgataacccctgcgcgagtc

SEQ ID NO: 475661 - DNA, 33 bp, Homo sapien
agtttcctaaaaataacgtcctgtccaaagtgg

SEQ ID NO: 475662 - DNA, 33 bp, Homo sapien
agtttcctaaaaataatgtcctgtccaaagtgg

SEQ ID NO: 475663 - DNA, 33 bp, Homo sapien
tttttaaataactgtacaacttcattctgatta

SEQ ID NO: 475664 - DNA, 33 bp, Homo sapien
tttttaaataactgtataacttcattctgatta

SEQ ID NO: 475665 - DNA, 33 bp, Homo sapien
tgggaaataactgacaaaagatagatttaaaca

SEQ ID NO: 475666 - DNA, 33 bp, Homo sapien
tgggaaataactgacagaagatagatttaaaca

SEQ ID NO: 475667 - DNA, 33 bp, Homo sapien
tgttcatcccattgtacagctctagctcacctg

SEQ ID NO: 475668 - DNA, 33 bp, Homo sapien
tgttcatcccattgtatagctctagctcacctg

SEQ ID NO: 475669 - DNA, 33 bp, Homo sapien
cctagggtgaacttaaacaacagcaacctctga

SEQ ID NO: 475670 - DNA, 33 bp, Homo sapien
cctagggtgaacttaagcaacagcaacctctga

SEQ ID NO: 475671 - DNA, 33 bp, Homo sapien
tctaaatttcctagcaggtgttctcaaaagaaa

SEQ ID NO: 475672 - DNA, 33 bp, Homo sapien
tctaaatttcctagcatgtgttctcaaaagaaa

SEQ ID NO: 475673 - DNA, 33 bp, Homo sapien
atgcaatgagatgagaacctgtgaagctgcgac

SEQ ID NO: 475674 - DNA, 33 bp, Homo sapien
atgcaatgagatgagagcctgtgaagctgcgac

SEQ ID NO: 475675 - DNA, 33 bp, Homo sapien
cgaaccaactcaagtacgagccagaggttgtgt

SEQ ID NO: 475676 - DNA, 33 bp, Homo sapien
cgaaccaactcaagtaggagccagaggttgtgt

SEQ ID NO: 475677 - DNA, 33 bp, Homo sapien
cccattttttctttgcaagatccataagaccct

SEQ ID NO: 475678 - DNA, 33 bp, Homo sapien
cccattttttctttgcgagatccataagaccct

SEQ ID NO: 475679 - DNA, 33 bp, Homo sapien
tgtatattctaccagaaggattatctatgacat

SEQ ID NO: 475680 - DNA, 33 bp, Homo sapien
tgtatattctaccagacggattatctatgacat

SEQ ID NO: 475681 - DNA, 33 bp, Homo sapien
tcaacagtgctaatgcccagtacctcaggacat

SEQ ID NO: 475682 - DNA, 33 bp, Homo sapien
tcaacagtgctaatgcgcagtacctcaggacat

SEQ ID NO: 475683 - DNA, 33 bp, Homo sapien
tgagtacaaatagtgccgattactagttttaca

SEQ ID NO: 475684 - DNA, 33 bp, Homo sapien
tgagtacaaatagtgctgattactagttttaca

SEQ ID NO: 475685 - DNA, 33 bp, Homo sapien
gcaacagtgaatttgacgttcttttattatagg

SEQ ID NO: 475686 - DNA, 33 bp, Homo sapien
gcaacagtgaatttgatgttcttttattatagg

SEQ ID NO: 475687 - DNA, 33 bp, Homo sapien
acatttaatggtacacactgctgcaagtataaa

SEQ ID NO: 475688 - DNA, 33 bp, Homo sapien
acatttaatggtacacgctgctgcaagtataaa

SEQ ID NO: 475689 - DNA, 33 bp, Homo sapien
ctctggacccatcttacatttcgtatccttata

SEQ ID NO: 475690 - DNA, 33 bp, Homo sapien
ctctggacccatcttatatttcgtatccttata

SEQ ID NO: 475691 - DNA, 33 bp, Homo sapien
atccactaaacacataaagctttggcctcagtt

SEQ ID NO: 475692 - DNA, 33 bp, Homo sapien
atccactaaacacatagagctttggcctcagtt

SEQ ID NO: 475693 - DNA, 33 bp, Homo sapien
gctggggcaacttcaccctcattccctgaaagg

SEQ ID NO: 475694 - DNA, 33 bp, Homo sapien
gctggggcaacttcactctcattccctgaaagg

SEQ ID NO: 475695 - DNA, 33 bp, Homo sapien
caagaggtggcacacacatctaggggtggctgt

SEQ ID NO: 475696 - DNA, 33 bp, Homo sapien
caagaggtggcacacagatctaggggtggctgt

SEQ ID NO: 475697 - DNA, 33 bp, Homo sapien
cagccattcccatgcagatcgggaggtctgtgc

SEQ ID NO: 475698 - DNA, 33 bp, Homo sapien
cagccattcccatgcatatcgggaggtctgtgc

SEQ ID NO: 475699 - DNA, 33 bp, Homo sapien
atattctcagatagctgaaatacctagctcaat

SEQ ID NO: 475700 - DNA, 33 bp, Homo sapien
atattctcagatagcttaaatacctagctcaat

SEQ ID NO: 475701 - DNA, 33 bp, Homo sapien
tgctgatgttgctccaaggactacaaactgcat

SEQ ID NO: 475702 - DNA, 33 bp, Homo sapien
tgctgatgttgctccagggactacaaactgcat

SEQ ID NO: 475703 - DNA, 33 bp, Homo sapien
ttgtgcttaatgaccactgatgggtcgtgatgg

SEQ ID NO: 475704 - DNA, 33 bp, Homo sapien
ttgtgcttaatgaccattgatgggtcgtgatgg

SEQ ID NO: 475705 - DNA, 33 bp, Homo sapien
atctcaaagacataaccacgctcccatgttcat

SEQ ID NO: 475706 - DNA, 33 bp, Homo sapien
atctcaaagacataactacgctcccatgttcat

SEQ ID NO: 475707 - DNA, 33 bp, Homo sapien
ggtatagtagatctccagaaactgtaccctttg

SEQ ID NO: 475708 - DNA, 33 bp, Homo sapien
ggtatagtagatctccggaaactgtaccctttg

SEQ ID NO: 475709 - DNA, 33 bp, Homo sapien
taaccaagtgccaatacggtggaaattgtgagt

SEQ ID NO: 475710 - DNA, 33 bp, Homo sapien
taaccaagtgccaatatggtggaaattgtgagt

SEQ ID NO: 475711 - DNA, 33 bp, Homo sapien
aagtgctaataaaacaacacgcatgaaagtgct

SEQ ID NO: 475712 - DNA, 33 bp, Homo sapien
aagtgctaataaaacagcacgcatgaaagtgct

SEQ ID NO: 475713 - DNA, 33 bp, Homo sapien
gctcttttctctgggaaatatttgttggtgttt

SEQ ID NO: 475714 - DNA, 33 bp, Homo sapien
gctcttttctctgggagatatttgttggtgttt

SEQ ID NO: 475715 - DNA, 33 bp, Homo sapien
aaagagcaatacagtccccaaagaaaaaataag

SEQ ID NO: 475716 - DNA, 33 bp, Homo sapien
aaagagcaatacagtctccaaagaaaaaataag

SEQ ID NO: 475717 - DNA, 33 bp, Homo sapien
aactgaaatgaatcccaattactgacctgtggg

SEQ ID NO: 475718 - DNA, 33 bp, Homo sapien
aactgaaatgaatcccgattactgacctgtggg

SEQ ID NO: 475719 - DNA, 33 bp, Homo sapien
gttgaaatcattgagactagaggccggagatgg

SEQ ID NO: 475720 - DNA, 33 bp, Homo sapien
gttgaaatcattgagattagaggccggagatgg

SEQ ID NO: 475721 - DNA, 33 bp, Homo sapien
gccaggctgtacccaaaacatttatcacgtgtc

SEQ ID NO: 475722 - DNA, 33 bp, Homo sapien
gccaggctgtacccaacacatttatcacgtgtc

SEQ ID NO: 475723 - DNA, 33 bp, Homo sapien
ggggattccctttgcacgacgtcttctgagcag

SEQ ID NO: 475724 - DNA, 33 bp, Homo sapien
ggggattccctttgcatgacgtcttctgagcag

SEQ ID NO: 475725 - DNA, 33 bp, Homo sapien
gtctggtcttcaaataccctgcaaaaggagcgg

SEQ ID NO: 475726 - DNA, 33 bp, Homo sapien
gtctggtcttcaaatatcctgcaaaaggagcgg

SEQ ID NO: 475727 - DNA, 33 bp, Homo sapien
gagtgcttcagcagataaataaaagcaataaat

SEQ ID NO: 475728 - DNA, 33 bp, Homo sapien
gagtgcttcagcagatcaataaaagcaataaat

SEQ ID NO: 475729 - DNA, 33 bp, Homo sapien
cctcagcacctccacaacctgttggaaagccgg

SEQ ID NO: 475730 - DNA, 33 bp, Homo sapien
cctcagcacctccacagcctgttggaaagccgg

SEQ ID NO: 475731 - DNA, 33 bp, Homo sapien
ctgcttgaaaaagacaagatacccactgggaaa

SEQ ID NO: 475732 - DNA, 33 bp, Homo sapien
ctgcttgaaaaagacaggatacccactgggaaa

SEQ ID NO: 475733 - DNA, 33 bp, Homo sapien
atattgggtaatggacaacgtaccaggcttggc

SEQ ID NO: 475734 - DNA, 33 bp, Homo sapien
atattgggtaatggacgacgtaccaggcttggc

SEQ ID NO: 475735 - DNA, 33 bp, Homo sapien
ataaacaacaataagaggaaaaggtctagtttc

SEQ ID NO: 475736 - DNA, 33 bp, Homo sapien
ataaacaacaataagatgaaaaggtctagtttc

SEQ ID NO: 475737 - DNA, 33 bp, Homo sapien
tttctaaagtgcatcccgacagaattcctgcac

SEQ ID NO: 475738 - DNA, 33 bp, Homo sapien
tttctaaagtgcatcctgacagaattcctgcac

SEQ ID NO: 475739 - DNA, 33 bp, Homo sapien
tcccattcccgcctaaaccctggctgttcctgg

SEQ ID NO: 475740 - DNA, 33 bp, Homo sapien
tcccattcccgcctaagccctggctgttcctgg

SEQ ID NO: 475741 - DNA, 33 bp, Homo sapien
tcccagagcctgaaaccgtgacaaagaggacat

SEQ ID NO: 475742 - DNA, 33 bp, Homo sapien
tcccagagcctgaaactgtgacaaagaggacat

SEQ ID NO: 475743 - DNA, 33 bp, Homo sapien
gagacatgaagaaagaaggcaaagaaacgaagc

SEQ ID NO: 475744 - DNA, 33 bp, Homo sapien
gagacatgaagaaagagggcaaagaaacgaagc

SEQ ID NO: 475745 - DNA, 33 bp, Homo sapien
ccagcagagttgagaacagagaagccttttctg

SEQ ID NO: 475746 - DNA, 33 bp, Homo sapien
ccagcagagttgagaatagagaagccttttctg

SEQ ID NO: 475747 - DNA, 33 bp, Homo sapien
attcctttgcattaagcattgacctcaaagact

SEQ ID NO: 475748 - DNA, 33 bp, Homo sapien
attcctttgcattaagtattgacctcaaagact

SEQ ID NO: 475749 - DNA, 33 bp, Homo sapien
caaagtaaagagtagacccagaatgtaaaccca

SEQ ID NO: 475750 - DNA, 33 bp, Homo sapien
caaagtaaagagtagagccagaatgtaaaccca

SEQ ID NO: 475751 - DNA, 33 bp, Homo sapien
acctgaggacttcaacgctaagattccctggtc

SEQ ID NO: 475752 - DNA, 33 bp, Homo sapien
acctgaggacttcaactctaagattccctggtc

SEQ ID NO: 475753 - DNA, 33 bp, Homo sapien
gctaggcctgggacaaagatttggagaaggaga

SEQ ID NO: 475754 - DNA, 33 bp, Homo sapien
gctaggcctgggacaaggatttggagaaggaga

SEQ ID NO: 475755 - DNA, 33 bp, Homo sapien
aaagccctgacttcaccgctatgtgattaatgc

SEQ ID NO: 475756 - DNA, 33 bp, Homo sapien
aaagccctgacttcactgctatgtgattaatgc

SEQ ID NO: 475757 - DNA, 33 bp, Homo sapien
agtgtctggcacatgacaaagtgctatgtaagt

SEQ ID NO: 475758 - DNA, 33 bp, Homo sapien
agtgtctggcacatgataaagtgctatgtaagt

SEQ ID NO: 475759 - DNA, 33 bp, Homo sapien
ttaagcacaggcccaacaaatctgttcttgtat

SEQ ID NO: 475760 - DNA, 33 bp, Homo sapien
ttaagcacaggcccaataaatctgttcttgtat

SEQ ID NO: 475761 - DNA, 33 bp, Homo sapien
tgagggaaaaggagcaactgaacctctccccac

SEQ ID NO: 475762 - DNA, 33 bp, Homo sapien
tgagggaaaaggagcagctgaacctctccccac

SEQ ID NO: 475763 - DNA, 33 bp, Homo sapien
agactagaatggccgacgaacacaaattcttgg

SEQ ID NO: 475764 - DNA, 33 bp, Homo sapien
agactagaatggccgaggaacacaaattcttgg

SEQ ID NO: 475765 - DNA, 33 bp, Homo sapien
gtaagaaaggggcatcaaaatgtttctatgtat

SEQ ID NO: 475766 - DNA, 33 bp, Homo sapien
gtaagaaaggggcatccaaatgtttctatgtat

SEQ ID NO: 475767 - DNA, 33 bp, Homo sapien
tgcttgtattctactaacatgatgtgatccaat

SEQ ID NO: 475768 - DNA, 33 bp, Homo sapien
tgcttgtattctactatcatgatgtgatccaat

SEQ ID NO: 475769 - DNA, 33 bp, Homo sapien
ttttccgggtacaaaaagcagaatagcatggct

SEQ ID NO: 475770 - DNA, 33 bp, Homo sapien
ttttccgggtacaaaaggcagaatagcatggct

SEQ ID NO: 475771 - DNA, 33 bp, Homo sapien
aatatgaaacaaaaacaatctacaattgagtga

SEQ ID NO: 475772 - DNA, 33 bp, Homo sapien
aatatgaaacaaaaaccatctacaattgagtga

SEQ ID NO: 475773 - DNA, 33 bp, Homo sapien
catagtgaattattgcaacttcattttatcagc

SEQ ID NO: 475774 - DNA, 33 bp, Homo sapien
catagtgaattattgctacttcattttatcagc

SEQ ID NO: 475775 - DNA, 33 bp, Homo sapien
acgaatgatgataataacaacctcagagagttg

SEQ ID NO: 475776 - DNA, 33 bp, Homo sapien
acgaatgatgataataccaacctcagagagttg

SEQ ID NO: 475777 - DNA, 33 bp, Homo sapien
ccagaccctgtatccaacaaaggccagagaata

SEQ ID NO: 475778 - DNA, 33 bp, Homo sapien
ccagaccctgtatccagcaaaggccagagaata

SEQ ID NO: 475779 - DNA, 33 bp, Homo sapien
gattctgtaggcttcacgtcagagtcaaactgc

SEQ ID NO: 475780 - DNA, 33 bp, Homo sapien
gattctgtaggcttcatgtcagagtcaaactgc

SEQ ID NO: 475781 - DNA, 33 bp, Homo sapien
acacagattagactcaactgtgaccatactcca

SEQ ID NO: 475782 - DNA, 33 bp, Homo sapien
acacagattagactcagctgtgaccatactcca

SEQ ID NO: 475783 - DNA, 33 bp, Homo sapien
gaaaagatggactcacacaacaaaacaattcag

SEQ ID NO: 475784 - DNA, 33 bp, Homo sapien
gaaaagatggactcacgcaacaaaacaattcag

SEQ ID NO: 475785 - DNA, 33 bp, Homo sapien
cagtattttgaatccactgatacacaggtgaaa

SEQ ID NO: 475786 - DNA, 33 bp, Homo sapien
cagtattttgaatccattgatacacaggtgaaa

SEQ ID NO: 475787 - DNA, 33 bp, Homo sapien
atgcatactgaggataaggcatttcttttggaa

SEQ ID NO: 475788 - DNA, 33 bp, Homo sapien
atgcatactgaggatagggcatttcttttggaa

SEQ ID NO: 475789 - DNA, 33 bp, Homo sapien
atcccgcagctcttgaaccatcattatgatcca

SEQ ID NO: 475790 - DNA, 33 bp, Homo sapien
atcccgcagctcttgacccatcattatgatcca

SEQ ID NO: 475791 - DNA, 33 bp, Homo sapien
gggagagtcttgatgacaccttcaaaacattta

SEQ ID NO: 475792 - DNA, 33 bp, Homo sapien
gggagagtcttgatgataccttcaaaacattta

SEQ ID NO: 475793 - DNA, 33 bp, Homo sapien
acagaaaaaaatcagcaaaactcaaagaggcag

SEQ ID NO: 475794 - DNA, 33 bp, Homo sapien
acagaaaaaaatcagcgaaactcaaagaggcag

SEQ ID NO: 475795 - DNA, 33 bp, Homo sapien
gatgaaggtgctattaagagatgggaatgggtg

SEQ ID NO: 475796 - DNA, 33 bp, Homo sapien
gatgaaggtgctattaggagatgggaatgggtg

SEQ ID NO: 475797 - DNA, 33 bp, Homo sapien
ggaccctgactgcttgaagtgaggaactctgga

SEQ ID NO: 475798 - DNA, 33 bp, Homo sapien
ggaccctgactgcttggagtgaggaactctgga

SEQ ID NO: 475799 - DNA, 33 bp, Homo sapien
acacactatgtctacaaaatgggagaatctctt

SEQ ID NO: 475800 - DNA, 33 bp, Homo sapien
acacactatgtctacacaatgggagaatctctt

SEQ ID NO: 475801 - DNA, 33 bp, Homo sapien
gtctccattgtattcaatctgacttttgcactc

SEQ ID NO: 475802 - DNA, 33 bp, Homo sapien
gtctccattgtattcagtctgacttttgcactc

SEQ ID NO: 475803 - DNA, 33 bp, Homo sapien
gaaatcttacagggtcaacatgatagaaacctg

SEQ ID NO: 475804 - DNA, 33 bp, Homo sapien
gaaatcttacagggtcgacatgatagaaacctg

SEQ ID NO: 475805 - DNA, 33 bp, Homo sapien
tcactgaaattcttgaaaaagactgcttagtgc

SEQ ID NO: 475806 - DNA, 33 bp, Homo sapien
tcactgaaattcttgagaaagactgcttagtgc

SEQ ID NO: 475807 - DNA, 33 bp, Homo sapien
ttgccttgatcaatacagcaggtagcagagtga

SEQ ID NO: 475808 - DNA, 33 bp, Homo sapien
ttgccttgatcaatacggcaggtagcagagtga

SEQ ID NO: 475809 - DNA, 33 bp, Homo sapien
gaatttttgcagatgcagatctcagtgaggaaa

SEQ ID NO: 475810 - DNA, 33 bp, Homo sapien
gaatttttgcagatgcggatctcagtgaggaaa

SEQ ID NO: 475811 - DNA, 33 bp, Homo sapien
cagtgaggaaaacccaactggtgaaaacagtca

SEQ ID NO: 475812 - DNA, 33 bp, Homo sapien
cagtgaggaaaacccatctggtgaaaacagtca

SEQ ID NO: 475813 - DNA, 33 bp, Homo sapien
gggactggtatgaatacgaaacacattttcaga

SEQ ID NO: 475814 - DNA, 33 bp, Homo sapien
gggactggtatgaatatgaaacacattttcaga

SEQ ID NO: 475815 - DNA, 33 bp, Homo sapien
acagggttccagacaacgtgtgaaagccccagt

SEQ ID NO: 475816 - DNA, 33 bp, Homo sapien
acagggttccagacaatgtgtgaaagccccagt

SEQ ID NO: 475817 - DNA, 33 bp, Homo sapien
aactagcgtctcgcaactataatcgattttgct

SEQ ID NO: 475818 - DNA, 33 bp, Homo sapien
aactagcgtctcgcaattataatcgattttgct

SEQ ID NO: 475819 - DNA, 33 bp, Homo sapien
gccacttctgcatctggcaactccagaacccat

SEQ ID NO: 475820 - DNA, 33 bp, Homo sapien
gccacttctgcatctgtcaactccagaacccat

SEQ ID NO: 475821 - DNA, 33 bp, Homo sapien
cagagctgtgagtccaagccaaagtccttagta

SEQ ID NO: 475822 - DNA, 33 bp, Homo sapien
cagagctgtgagtccaggccaaagtccttagta

SEQ ID NO: 475823 - DNA, 33 bp, Homo sapien
ctcactcattactggacggattgaatttaaagg

SEQ ID NO: 475824 - DNA, 33 bp, Homo sapien
ctcactcattactggatggattgaatttaaagg

SEQ ID NO: 475825 - DNA, 33 bp, Homo sapien
accattcaaacgcccaatgagggaacagcagcc

SEQ ID NO: 475826 - DNA, 33 bp, Homo sapien
accattcaaacgcccagtgagggaacagcagcc

SEQ ID NO: 475827 - DNA, 33 bp, Homo sapien
tttagtatatcatcacagcataccgatatgatg

SEQ ID NO: 475828 - DNA, 33 bp, Homo sapien
tttagtatatcatcacggcataccgatatgatg

SEQ ID NO: 475829 - DNA, 33 bp, Homo sapien
tgcattttgctcaaaccgtccttgcaataaatg

SEQ ID NO: 475830 - DNA, 33 bp, Homo sapien
tgcattttgctcaaactgtccttgcaataaatg

SEQ ID NO: 475831 - DNA, 33 bp, Homo sapien
caatatagcaaacacactgtgagcatttattgc

SEQ ID NO: 475832 - DNA, 33 bp, Homo sapien
caatatagcaaacacagtgtgagcatttattgc

SEQ ID NO: 475833 - DNA, 33 bp, Homo sapien
tctcatttttaaaatcccatcaattgcaatcct

SEQ ID NO: 475834 - DNA, 33 bp, Homo sapien
tctcatttttaaaatctcatcaattgcaatcct

SEQ ID NO: 475835 - DNA, 33 bp, Homo sapien
acgtagggctattcaaaaaggggtcctcatccg

SEQ ID NO: 475836 - DNA, 33 bp, Homo sapien
acgtagggctattcaagaaggggtcctcatccg

SEQ ID NO: 475837 - DNA, 33 bp, Homo sapien
tatctaaatagctacacgtatctcattgcagtg

SEQ ID NO: 475838 - DNA, 33 bp, Homo sapien
tatctaaatagctacatgtatctcattgcagtg

SEQ ID NO: 475839 - DNA, 33 bp, Homo sapien
ttggttctgtaactcacccagatgcatcataag

SEQ ID NO: 475840 - DNA, 33 bp, Homo sapien
ttggttctgtaactcatccagatgcatcataag

SEQ ID NO: 475841 - DNA, 33 bp, Homo sapien
ctctatcaataagaaacatgtcatcctgtttat

SEQ ID NO: 475842 - DNA, 33 bp, Homo sapien
ctctatcaataagaaatatgtcatcctgtttat

SEQ ID NO: 475843 - DNA, 33 bp, Homo sapien
tagctttcccatttccacaagctggcccagacc

SEQ ID NO: 475844 - DNA, 33 bp, Homo sapien
tagctttcccatttccgcaagctggcccagacc

SEQ ID NO: 475845 - DNA, 33 bp, Homo sapien
gtgagtgagaggcaccaacttggaaggaccgtg

SEQ ID NO: 475846 - DNA, 33 bp, Homo sapien
gtgagtgagaggcaccgacttggaaggaccgtg

SEQ ID NO: 475847 - DNA, 33 bp, Homo sapien
aagcaagctgtgaggactattgccaggaagggc

SEQ ID NO: 475848 - DNA, 33 bp, Homo sapien
aagcaagctgtgaggagtattgccaggaagggc

SEQ ID NO: 475849 - DNA, 33 bp, Homo sapien
cgcaacacattctaccacagctacactgggtca

SEQ ID NO: 475850 - DNA, 33 bp, Homo sapien
cgcaacacattctaccgcagctacactgggtca

SEQ ID NO: 475851 - DNA, 33 bp, Homo sapien
tcttcattttttattccctgttctccaaacctc

SEQ ID NO: 475852 - DNA, 33 bp, Homo sapien
tcttcattttttattctctgttctccaaacctc

SEQ ID NO: 475853 - DNA, 33 bp, Homo sapien
gtctggctacccatcacgtgtttatttcattac

SEQ ID NO: 475854 - DNA, 33 bp, Homo sapien
gtctggctacccatcatgtgtttatttcattac

SEQ ID NO: 475855 - DNA, 33 bp, Homo sapien
gatgctgtaagagaaccgccttctcagcaagac

SEQ ID NO: 475856 - DNA, 33 bp, Homo sapien
gatgctgtaagagaactgccttctcagcaagac

SEQ ID NO: 475857 - DNA, 33 bp, Homo sapien
gttattaacgtttgaaagttagcactgggatat

SEQ ID NO: 475858 - DNA, 33 bp, Homo sapien
gttattaacgtttgaatgttagcactgggatat

SEQ ID NO: 475859 - DNA, 33 bp, Homo sapien
ggagccagaagaaaataaacctaaatgggccat

SEQ ID NO: 475860 - DNA, 33 bp, Homo sapien
ggagccagaagaaaatcaacctaaatgggccat

SEQ ID NO: 475861 - DNA, 33 bp, Homo sapien
catcccccaaaggctcaatgtagagggaagtga

SEQ ID NO: 475862 - DNA, 33 bp, Homo sapien
catcccccaaaggctcgatgtagagggaagtga

SEQ ID NO: 475863 - DNA, 33 bp, Homo sapien
atttcctgtttggtaaccacttatagttctttc

SEQ ID NO: 475864 - DNA, 33 bp, Homo sapien
atttcctgtttggtaatcacttatagttctttc

SEQ ID NO: 475865 - DNA, 33 bp, Homo sapien
ccagttccagattgacagtaaccatctcctgtg

SEQ ID NO: 475866 - DNA, 33 bp, Homo sapien
ccagttccagattgaccgtaaccatctcctgtg

SEQ ID NO: 475867 - DNA, 33 bp, Homo sapien
caccatgataccccaaacgatcgagactatcct

SEQ ID NO: 475868 - DNA, 33 bp, Homo sapien
caccatgataccccaagcgatcgagactatcct

SEQ ID NO: 475869 - DNA, 33 bp, Homo sapien
tggatataagaggctaaagcgctgagaggaggc

SEQ ID NO: 475870 - DNA, 33 bp, Homo sapien
tggatataagaggctagagcgctgagaggaggc

SEQ ID NO: 475871 - DNA, 33 bp, Homo sapien
aacagcctgcttgagaaaggaatcacagacctg

SEQ ID NO: 475872 - DNA, 33 bp, Homo sapien
aacagcctgcttgagagaggaatcacagacctg

SEQ ID NO: 475873 - DNA, 33 bp, Homo sapien
caaagctggactcacactgggatgaagtggctg

SEQ ID NO: 475874 - DNA, 33 bp, Homo sapien
caaagctggactcacattgggatgaagtggctg

SEQ ID NO: 475875 - DNA, 33 bp, Homo sapien
actcaaaagcacgtcacgaactgcaaagggcca

SEQ ID NO: 475876 - DNA, 33 bp, Homo sapien
actcaaaagcacgtcatgaactgcaaagggcca

SEQ ID NO: 475877 - DNA, 33 bp, Homo sapien
tgtgaacttctcagtccgacccaatgagtcatt

SEQ ID NO: 475878 - DNA, 33 bp, Homo sapien
tgtgaacttctcagtctgacccaatgagtcatt

SEQ ID NO: 475879 - DNA, 33 bp, Homo sapien
caccagtaggtactgaataaaggcctcctgtgt

SEQ ID NO: 475880 - DNA, 33 bp, Homo sapien
caccagtaggtactgagtaaaggcctcctgtgt

SEQ ID NO: 475881 - DNA, 33 bp, Homo sapien
agactctgccatgagaagccatagtgcaatgtc

SEQ ID NO: 475882 - DNA, 33 bp, Homo sapien
agactctgccatgagaggccatagtgcaatgtc

SEQ ID NO: 475883 - DNA, 33 bp, Homo sapien
tggggcaagaagggccaaagtcaaaattttgga

SEQ ID NO: 475884 - DNA, 33 bp, Homo sapien
tggggcaagaagggccgaagtcaaaattttgga

SEQ ID NO: 475885 - DNA, 33 bp, Homo sapien
aaccattttacatgtacggtgaggatgctaatg

SEQ ID NO: 475886 - DNA, 33 bp, Homo sapien
aaccattttacatgtatggtgaggatgctaatg

SEQ ID NO: 475887 - DNA, 33 bp, Homo sapien
ccatgagctggataaccgaatactcatctaaag

SEQ ID NO: 475888 - DNA, 33 bp, Homo sapien
ccatgagctggataactgaatactcatctaaag

SEQ ID NO: 475889 - DNA, 33 bp, Homo sapien
atctttttacattatcactgacaactctgttac

SEQ ID NO: 475890 - DNA, 33 bp, Homo sapien
atctttttacattatccctgacaactctgttac

SEQ ID NO: 475891 - DNA, 33 bp, Homo sapien
gctaatatgaaatgtaactggcctccccctgtt

SEQ ID NO: 475892 - DNA, 33 bp, Homo sapien
gctaatatgaaatgtagctggcctccccctgtt

SEQ ID NO: 475893 - DNA, 33 bp, Homo sapien
aaatgaatggaagtgaaactcaaagggacttgc

SEQ ID NO: 475894 - DNA, 33 bp, Homo sapien
aaatgaatggaagtgagactcaaagggacttgc

SEQ ID NO: 475895 - DNA, 33 bp, Homo sapien
ttagtgctctctgttccatgactgatctccagt

SEQ ID NO: 475896 - DNA, 33 bp, Homo sapien
ttagtgctctctgttctatgactgatctccagt

SEQ ID NO: 475897 - DNA, 33 bp, Homo sapien
tccataaccgagagaccgaggagaagaaaatgt

SEQ ID NO: 475898 - DNA, 33 bp, Homo sapien
tccataaccgagagactgaggagaagaaaatgt

SEQ ID NO: 475899 - DNA, 33 bp, Homo sapien
ggtaaaaatgtttgcccggagaaggtgtcagat

SEQ ID NO: 475900 - DNA, 33 bp, Homo sapien
ggtaaaaatgtttgcctggagaaggtgtcagat

SEQ ID NO: 475901 - DNA, 33 bp, Homo sapien
cccctctctactgtgacggagagacaaatcaat

SEQ ID NO: 475902 - DNA, 33 bp, Homo sapien
cccctctctactgtgatggagagacaaatcaat

SEQ ID NO: 475903 - DNA, 33 bp, Homo sapien
catggcccaagggctcactatcgacagcgatgt

SEQ ID NO: 475904 - DNA, 33 bp, Homo sapien
catggcccaagggctcgctatcgacagcgatgt

SEQ ID NO: 475905 - DNA, 33 bp, Homo sapien
catagacaagatgccaaggcctgtatgctttag

SEQ ID NO: 475906 - DNA, 33 bp, Homo sapien
catagacaagatgccagggcctgtatgctttag

SEQ ID NO: 475907 - DNA, 33 bp, Homo sapien
ggtcacagcagagagaaccaagtcactggaaag

SEQ ID NO: 475908 - DNA, 33 bp, Homo sapien
ggtcacagcagagagagccaagtcactggaaag

SEQ ID NO: 475909 - DNA, 33 bp, Homo sapien
aggattgcctgatgcaagttctcgaggtaactg

SEQ ID NO: 475910 - DNA, 33 bp, Homo sapien
aggattgcctgatgcaggttctcgaggtaactg

SEQ ID NO: 475911 - DNA, 33 bp, Homo sapien
ttgactcctggcttcacaaactctcacaacggc

SEQ ID NO: 475912 - DNA, 33 bp, Homo sapien
ttgactcctggcttcagaaactctcacaacggc

SEQ ID NO: 475913 - DNA, 33 bp, Homo sapien
aggcttcatgggggaaatgaattttgaacttgg

SEQ ID NO: 475914 - DNA, 33 bp, Homo sapien
aggcttcatgggggaagtgaattttgaacttgg

SEQ ID NO: 475915 - DNA, 33 bp, Homo sapien
gatgggataaatgaagccatccggaagtgatgt

SEQ ID NO: 475916 - DNA, 33 bp, Homo sapien
gatgggataaatgaagtcatccggaagtgatgt

SEQ ID NO: 475917 - DNA, 33 bp, Homo sapien
tatactccaggcatggaaactacttcacattcc

SEQ ID NO: 475918 - DNA, 33 bp, Homo sapien
tatactccaggcatgggaactacttcacattcc

SEQ ID NO: 475919 - DNA, 33 bp, Homo sapien
gtgtgtgtgtgtggtcaaggtaggatggaaggg

SEQ ID NO: 475920 - DNA, 33 bp, Homo sapien
gtgtgtgtgtgtggtcgaggtaggatggaaggg

SEQ ID NO: 475921 - DNA, 33 bp, Homo sapien
gcctcacctttccaccagatgaaatagagaact

SEQ ID NO: 475922 - DNA, 33 bp, Homo sapien
gcctcacctttccaccggatgaaatagagaact

SEQ ID NO: 475923 - DNA, 33 bp, Homo sapien
tcgtcttcagggagaaagacacactgctgctgt

SEQ ID NO: 475924 - DNA, 33 bp, Homo sapien
tcgtcttcagggagaaggacacactgctgctgt

SEQ ID NO: 475925 - DNA, 33 bp, Homo sapien
caccccccgctagaacacagaagcttccagaag

SEQ ID NO: 475926 - DNA, 33 bp, Homo sapien
caccccccgctagaacgcagaagcttccagaag

SEQ ID NO: 475927 - DNA, 33 bp, Homo sapien
gacacagccacttgccacagagtgactcagctc

SEQ ID NO: 475928 - DNA, 33 bp, Homo sapien
gacacagccacttgccgcagagtgactcagctc

SEQ ID NO: 475929 - DNA, 33 bp, Homo sapien
gaaggcccattttcccacagtgatgttgcgagg

SEQ ID NO: 475930 - DNA, 33 bp, Homo sapien
gaaggcccattttcccccagtgatgttgcgagg

SEQ ID NO: 475931 - DNA, 33 bp, Homo sapien
aagcatagtaaagtgactatggagtgccaggaa

SEQ ID NO: 475932 - DNA, 33 bp, Homo sapien
aagcatagtaaagtgattatggagtgccaggaa

SEQ ID NO: 475933 - DNA, 33 bp, Homo sapien
catctgtaaaatggaaaggctggaccaaatgct

SEQ ID NO: 475934 - DNA, 33 bp, Homo sapien
catctgtaaaatggaagggctggaccaaatgct

SEQ ID NO: 475935 - DNA, 33 bp, Homo sapien
tccaggctgcacagcacggagaaaggagtatct

SEQ ID NO: 475936 - DNA, 33 bp, Homo sapien
tccaggctgcacagcagggagaaaggagtatct

SEQ ID NO: 475937 - DNA, 33 bp, Homo sapien
gtgtcaccaaagtaacagtccattattcaaact

SEQ ID NO: 475938 - DNA, 33 bp, Homo sapien
gtgtcaccaaagtaacggtccattattcaaact

SEQ ID NO: 475939 - DNA, 33 bp, Homo sapien
tgaggtggaggccatacggtggtagattctgcc

SEQ ID NO: 475940 - DNA, 33 bp, Homo sapien
tgaggtggaggccatatggtggtagattctgcc

SEQ ID NO: 475941 - DNA, 33 bp, Homo sapien
caccctgagaaatggaaggcagcggccctgact

SEQ ID NO: 475942 - DNA, 33 bp, Homo sapien
caccctgagaaatggacggcagcggccctgact

SEQ ID NO: 475943 - DNA, 33 bp, Homo sapien
aagttaccagtgagcccgaattttcttctaaaa

SEQ ID NO: 475944 - DNA, 33 bp, Homo sapien
aagttaccagtgagcctgaattttcttctaaaa

SEQ ID NO: 475945 - DNA, 33 bp, Homo sapien
ggaggaggttaaagcaatccgtgccctgagtga

SEQ ID NO: 475946 - DNA, 33 bp, Homo sapien
ggaggaggttaaagcagtccgtgccctgagtga

SEQ ID NO: 475947 - DNA, 33 bp, Homo sapien
ttataatcctgttccccagagataaccatttta

SEQ ID NO: 475948 - DNA, 33 bp, Homo sapien
ttataatcctgttcccgagagataaccatttta

SEQ ID NO: 475949 - DNA, 33 bp, Homo sapien
cgatggtcaccaaagcaccacccagttcaggat

SEQ ID NO: 475950 - DNA, 33 bp, Homo sapien
cgatggtcaccaaagcgccacccagttcaggat

SEQ ID NO: 475951 - DNA, 33 bp, Homo sapien
agcacatggtgaaacaaaagagtgttgcaacgc

SEQ ID NO: 475952 - DNA, 33 bp, Homo sapien
agcacatggtgaaacagaagagtgttgcaacgc

SEQ ID NO: 475953 - DNA, 33 bp, Homo sapien
agatgctcactaagtcaagtaaatgagttgctc

SEQ ID NO: 475954 - DNA, 33 bp, Homo sapien
agatgctcactaagtcgagtaaatgagttgctc

SEQ ID NO: 475955 - DNA, 33 bp, Homo sapien
caatttccagctttaactcacctcttctttgaa

SEQ ID NO: 475956 - DNA, 33 bp, Homo sapien
caatttccagctttaagtcacctcttctttgaa

SEQ ID NO: 475957 - DNA, 33 bp, Homo sapien
caaacaccactagaagactcactacaacattaa

SEQ ID NO: 475958 - DNA, 33 bp, Homo sapien
caaacaccactagaagcctcactacaacattaa

SEQ ID NO: 475959 - DNA, 33 bp, Homo sapien
aggagaaaaaagaatgcagccttttagcagggg

SEQ ID NO: 475960 - DNA, 33 bp, Homo sapien
aggagaaaaaagaatggagccttttagcagggg

SEQ ID NO: 475961 - DNA, 33 bp, Homo sapien
aaaggaggagacagaaccacaagtgtaggagca

SEQ ID NO: 475962 - DNA, 33 bp, Homo sapien
aaaggaggagacagaatcacaagtgtaggagca

SEQ ID NO: 475963 - DNA, 33 bp, Homo sapien
aggagcagggagtgtcacctacacaaaaccaca

SEQ ID NO: 475964 - DNA, 33 bp, Homo sapien
aggagcagggagtgtcgcctacacaaaaccaca

SEQ ID NO: 475965 - DNA, 33 bp, Homo sapien
ttagagcccacggaaacgccatgttctctgctt

SEQ ID NO: 475966 - DNA, 33 bp, Homo sapien
ttagagcccacggaaatgccatgttctctgctt

SEQ ID NO: 475967 - DNA, 33 bp, Homo sapien
gcttcaatggcctacaaaatagcttatctttag

SEQ ID NO: 475968 - DNA, 33 bp, Homo sapien
gcttcaatggcctacagaatagcttatctttag

SEQ ID NO: 475969 - DNA, 33 bp, Homo sapien
aacacattctgggtcaaatatttaggatggata

SEQ ID NO: 475970 - DNA, 33 bp, Homo sapien
aacacattctgggtcacatatttaggatggata

SEQ ID NO: 475971 - DNA, 33 bp, Homo sapien
aggagcaccgggtagaaagtattcaaggagaca

SEQ ID NO: 475972 - DNA, 33 bp, Homo sapien
aggagcaccgggtagagagtattcaaggagaca

SEQ ID NO: 475973 - DNA, 33 bp, Homo sapien
ccttttctgtgtgtgaaaaaagcaccaaaatct

SEQ ID NO: 475974 - DNA, 33 bp, Homo sapien
ccttttctgtgtgtgataaaagcaccaaaatct

SEQ ID NO: 475975 - DNA, 33 bp, Homo sapien
gatttactgctgctcaaatctcagacttcttga

SEQ ID NO: 475976 - DNA, 33 bp, Homo sapien
gatttactgctgctcatatctcagacttcttga

SEQ ID NO: 475977 - DNA, 33 bp, Homo sapien
ggccaaactgtttgaccgcctggaattcttcac

SEQ ID NO: 475978 - DNA, 33 bp, Homo sapien
ggccaaactgtttgactgcctggaattcttcac

SEQ ID NO: 475979 - DNA, 33 bp, Homo sapien
ggcctgaggatgctgaaggagctcatgactgcc

SEQ ID NO: 475980 - DNA, 33 bp, Homo sapien
ggcctgaggatgctgagggagctcatgactgcc

SEQ ID NO: 475981 - DNA, 33 bp, Homo sapien
catccacatctctttccattacaccaaacccag

SEQ ID NO: 475982 - DNA, 33 bp, Homo sapien
catccacatctctttctattacaccaaacccag

SEQ ID NO: 475983 - DNA, 33 bp, Homo sapien
accagtgactgaaaggcaactcaggacaaatgc

SEQ ID NO: 475984 - DNA, 33 bp, Homo sapien
accagtgactgaaagggaactcaggacaaatgc

SEQ ID NO: 475985 - DNA, 33 bp, Homo sapien
agccgacagagcccgacagcaaccagtgactga

SEQ ID NO: 475986 - DNA, 33 bp, Homo sapien
agccgacagagcccgagagcaaccagtgactga

SEQ ID NO: 475987 - DNA, 33 bp, Homo sapien
cctggctaccctctgaacactctgttgcctcag

SEQ ID NO: 475988 - DNA, 33 bp, Homo sapien
cctggctaccctctgatcactctgttgcctcag

SEQ ID NO: 475989 - DNA, 33 bp, Homo sapien
tgagataactgaaatcaattcctttcaacatcc

SEQ ID NO: 475990 - DNA, 33 bp, Homo sapien
tgagataactgaaatcgattcctttcaacatcc

SEQ ID NO: 475991 - DNA, 33 bp, Homo sapien
gccccgactaatgcaaccttaatttcccagggg

SEQ ID NO: 475992 - DNA, 33 bp, Homo sapien
gccccgactaatgcaatcttaatttcccagggg

SEQ ID NO: 475993 - DNA, 33 bp, Homo sapien
cagcctcaggtggggaacacagctttctctgga

SEQ ID NO: 475994 - DNA, 33 bp, Homo sapien
cagcctcaggtggggaccacagctttctctgga

SEQ ID NO: 475995 - DNA, 33 bp, Homo sapien
tctcccttgatgaccaactctggtcctactgcc

SEQ ID NO: 475996 - DNA, 33 bp, Homo sapien
tctcccttgatgaccagctctggtcctactgcc

SEQ ID NO: 475997 - DNA, 33 bp, Homo sapien
accagagttgtcattacgaataaccaatgtggc

SEQ ID NO: 475998 - DNA, 33 bp, Homo sapien
accagagttgtcattatgaataaccaatgtggc

SEQ ID NO: 475999 - DNA, 33 bp, Homo sapien
gagacgcaccagcctaagatctggcgagttagc

SEQ ID NO: 476000 - DNA, 33 bp, Homo sapien
gagacgcaccagcctacgatctggcgagttagc

SEQ ID NO: 476001 - DNA, 33 bp, Homo sapien
gaccagtctcgtctaacgtacctcatccattcc

SEQ ID NO: 476002 - DNA, 33 bp, Homo sapien
gaccagtctcgtctaatgtacctcatccattcc

SEQ ID NO: 476003 - DNA, 33 bp, Homo sapien
ccatgcccgcgccttacagttctggtgaatgaa

SEQ ID NO: 476004 - DNA, 33 bp, Homo sapien
ccatgcccgcgccttatagttctggtgaatgaa

SEQ ID NO: 476005 - DNA, 33 bp, Homo sapien
accctcagttcccttcactcgtcatggcaaccc

SEQ ID NO: 476006 - DNA, 33 bp, Homo sapien
accctcagttcccttcgctcgtcatggcaaccc

SEQ ID NO: 476007 - DNA, 33 bp, Homo sapien
tccttgtgcccagaaacaggacatactgtggtg

SEQ ID NO: 476008 - DNA, 33 bp, Homo sapien
tccttgtgcccagaaagaggacatactgtggtg

SEQ ID NO: 476009 - DNA, 33 bp, Homo sapien
aggacaggcctgaatgaagaatatctgcatgtc

SEQ ID NO: 476010 - DNA, 33 bp, Homo sapien
aggacaggcctgaatggagaatatctgcatgtc

SEQ ID NO: 476011 - DNA, 33 bp, Homo sapien
tggagtgcaatatcgcgatctcagctcactgca

SEQ ID NO: 476012 - DNA, 33 bp, Homo sapien
tggagtgcaatatcgctatctcagctcactgca

SEQ ID NO: 476013 - DNA, 33 bp, Homo sapien
tgcaaagtctgcagtaagaacaggctttataga

SEQ ID NO: 476014 - DNA, 33 bp, Homo sapien
tgcaaagtctgcagtaggaacaggctttataga

SEQ ID NO: 476015 - DNA, 33 bp, Homo sapien
tgtgaccagatgacccaagaatgtctctccccc

SEQ ID NO: 476016 - DNA, 33 bp, Homo sapien
tgtgaccagatgacccgagaatgtctctccccc

SEQ ID NO: 476017 - DNA, 33 bp, Homo sapien
gcttgatcctgtcaccactccagggttagtggg

SEQ ID NO: 476018 - DNA, 33 bp, Homo sapien
gcttgatcctgtcaccgctccagggttagtggg

SEQ ID NO: 476019 - DNA, 33 bp, Homo sapien
attccctcaatgaaatcaagctaactgtgtagg

SEQ ID NO: 476020 - DNA, 33 bp, Homo sapien
attccctcaatgaaattaagctaactgtgtagg

SEQ ID NO: 476021 - DNA, 33 bp, Homo sapien
attcagagaagcaacagatagcaggatccctgt

SEQ ID NO: 476022 - DNA, 33 bp, Homo sapien
attcagagaagcaacatatagcaggatccctgt

SEQ ID NO: 476023 - DNA, 33 bp, Homo sapien
cactggtaacctctaacctaccttttgtctcca

SEQ ID NO: 476024 - DNA, 33 bp, Homo sapien
cactggtaacctctaatctaccttttgtctcca

SEQ ID NO: 476025 - DNA, 33 bp, Homo sapien
tgatctgttattattaccatcgtcttcattgtg

SEQ ID NO: 476026 - DNA, 33 bp, Homo sapien
tgatctgttattattatcatcgtcttcattgtg

SEQ ID NO: 476027 - DNA, 33 bp, Homo sapien
tcgctttactgaaaaacagctgtgcacttttga

SEQ ID NO: 476028 - DNA, 33 bp, Homo sapien
tcgctttactgaaaaatagctgtgcacttttga

SEQ ID NO: 476029 - DNA, 33 bp, Homo sapien
ggctgcggcaacaaacaaccacacagtgggtgg

SEQ ID NO: 476030 - DNA, 33 bp, Homo sapien
ggctgcggcaacaaacgaccacacagtgggtgg

SEQ ID NO: 476031 - DNA, 33 bp, Homo sapien
tggaggaaaaaaattacgcatgctattgagtgc

SEQ ID NO: 476032 - DNA, 33 bp, Homo sapien
tggaggaaaaaaattatgcatgctattgagtgc

SEQ ID NO: 476033 - DNA, 33 bp, Homo sapien
tgagtagcacctgagagccaacctcatacactt

SEQ ID NO: 476034 - DNA, 33 bp, Homo sapien
tgagtagcacctgagatccaacctcatacactt

SEQ ID NO: 476035 - DNA, 33 bp, Homo sapien
gtgcaaggcccgggaacgttctggaatcaatca

SEQ ID NO: 476036 - DNA, 33 bp, Homo sapien
gtgcaaggcccgggaatgttctggaatcaatca

SEQ ID NO: 476037 - DNA, 33 bp, Homo sapien
cagtgagtcacaggaaaggcgccttgcaatcac

SEQ ID NO: 476038 - DNA, 33 bp, Homo sapien
cagtgagtcacaggaagggcgccttgcaatcac

SEQ ID NO: 476039 - DNA, 33 bp, Homo sapien
acaacctggcaaatccaagtctgatttcccggc

SEQ ID NO: 476040 - DNA, 33 bp, Homo sapien
acaacctggcaaatccgagtctgatttcccggc

SEQ ID NO: 476041 - DNA, 33 bp, Homo sapien
ttgcaggccctcttggaatcaccaggcagagaa

SEQ ID NO: 476042 - DNA, 33 bp, Homo sapien
ttgcaggccctcttgggatcaccaggcagagaa

SEQ ID NO: 476043 - DNA, 33 bp, Homo sapien
agtaatttagcagcaaattgatagagaaaggta

SEQ ID NO: 476044 - DNA, 33 bp, Homo sapien
agtaatttagcagcaagttgatagagaaaggta

SEQ ID NO: 476045 - DNA, 33 bp, Homo sapien
gtgttgggcgagggacccaaaaatgtgcccctt

SEQ ID NO: 476046 - DNA, 33 bp, Homo sapien
gtgttgggcgagggactcaaaaatgtgcccctt

SEQ ID NO: 476047 - DNA, 33 bp, Homo sapien
gtggtcagaggtgcccacaacaaatgcacttct

SEQ ID NO: 476048 - DNA, 33 bp, Homo sapien
gtggtcagaggtgcccgcaacaaatgcacttct

SEQ ID NO: 476049 - DNA, 33 bp, Homo sapien
gcagggaagaaggcagaattgagcaagcttccc

SEQ ID NO: 476050 - DNA, 33 bp, Homo sapien
gcagggaagaaggcagtattgagcaagcttccc

SEQ ID NO: 476051 - DNA, 33 bp, Homo sapien
tctacgaacaaacagccatcggggctcagagga

SEQ ID NO: 476052 - DNA, 33 bp, Homo sapien
tctacgaacaaacagctatcggggctcagagga

SEQ ID NO: 476053 - DNA, 33 bp, Homo sapien
gaatgaaaatgtaaccagcagatgacgtttctt

SEQ ID NO: 476054 - DNA, 33 bp, Homo sapien
gaatgaaaatgtaaccggcagatgacgtttctt

SEQ ID NO: 476055 - DNA, 33 bp, Homo sapien
agaaggaagtttgaaacagatggacttctgtcc

SEQ ID NO: 476056 - DNA, 33 bp, Homo sapien
agaaggaagtttgaaatagatggacttctgtcc

SEQ ID NO: 476057 - DNA, 33 bp, Homo sapien
tgagcagctgaggccactggagatctttggttt

SEQ ID NO: 476058 - DNA, 33 bp, Homo sapien
tgagcagctgaggccagtggagatctttggttt

SEQ ID NO: 476059 - DNA, 33 bp, Homo sapien
ttccctttaccatgtgcatgtcctccctggtca

SEQ ID NO: 476060 - DNA, 33 bp, Homo sapien
ttccctttaccatgtgtatgtcctccctggtca

SEQ ID NO: 476061 - DNA, 33 bp, Homo sapien
atgtatcatctttgcacggaattggctccttca

SEQ ID NO: 476062 - DNA, 33 bp, Homo sapien
atgtatcatctttgcatggaattggctccttca

SEQ ID NO: 476063 - DNA, 33 bp, Homo sapien
tgggcgatagtaagacagtagggttaaatccta

SEQ ID NO: 476064 - DNA, 33 bp, Homo sapien
tgggcgatagtaagacggtagggttaaatccta

SEQ ID NO: 476065 - DNA, 33 bp, Homo sapien
aggtttcatgagcacaaaggaatttaggctttg

SEQ ID NO: 476066 - DNA, 33 bp, Homo sapien
aggtttcatgagcacataggaatttaggctttg

SEQ ID NO: 476067 - DNA, 33 bp, Homo sapien
agggtctctactccaacagaggtaccaagtctc

SEQ ID NO: 476068 - DNA, 33 bp, Homo sapien
agggtctctactccaatagaggtaccaagtctc

SEQ ID NO: 476069 - DNA, 33 bp, Homo sapien
ctggccaggtcactggaatgtttgaggtcttgc

SEQ ID NO: 476070 - DNA, 33 bp, Homo sapien
ctggccaggtcactgggatgtttgaggtcttgc

SEQ ID NO: 476071 - DNA, 33 bp, Homo sapien
ccattagctgaaatgaaagagtgtcagggctag

SEQ ID NO: 476072 - DNA, 33 bp, Homo sapien
ccattagctgaaatgagagagtgtcagggctag

SEQ ID NO: 476073 - DNA, 33 bp, Homo sapien
gatctttcgtctcctacccatggttagtcactc

SEQ ID NO: 476074 - DNA, 33 bp, Homo sapien
gatctttcgtctcctagccatggttagtcactc

SEQ ID NO: 476075 - DNA, 33 bp, Homo sapien
aaaattccagttctaacgttgggcatcaacttc

SEQ ID NO: 476076 - DNA, 33 bp, Homo sapien
aaaattccagttctaatgttgggcatcaacttc

SEQ ID NO: 476077 - DNA, 33 bp, Homo sapien
aagggttctgtcaaccaaaacaacgcttttaga

SEQ ID NO: 476078 - DNA, 33 bp, Homo sapien
aagggttctgtcaaccgaaacaacgcttttaga

SEQ ID NO: 476079 - DNA, 33 bp, Homo sapien
taaagggtgaagatgaagccctatgccttttag

SEQ ID NO: 476080 - DNA, 33 bp, Homo sapien
taaagggtgaagatgaggccctatgccttttag

SEQ ID NO: 476081 - DNA, 33 bp, Homo sapien
ctcaggattttgtgcaataattggaaggaccgc

SEQ ID NO: 476082 - DNA, 33 bp, Homo sapien
ctcaggattttgtgcagtaattggaaggaccgc

SEQ ID NO: 476083 - DNA, 33 bp, Homo sapien
aacaacaaaccagaccaagcagaatttctgaac

SEQ ID NO: 476084 - DNA, 33 bp, Homo sapien
aacaacaaaccagacccagcagaatttctgaac

SEQ ID NO: 476085 - DNA, 33 bp, Homo sapien
tcataatcaagtggccaaatatcaagacagaaa

SEQ ID NO: 476086 - DNA, 33 bp, Homo sapien
tcataatcaagtggccgaatatcaagacagaaa

SEQ ID NO: 476087 - DNA, 33 bp, Homo sapien
atgttggccctttaaactcaatacttacttagc

SEQ ID NO: 476088 - DNA, 33 bp, Homo sapien
atgttggccctttaaattcaatacttacttagc

SEQ ID NO: 476089 - DNA, 33 bp, Homo sapien
tgagacttgcaaaaaacccttttaccagaaact

SEQ ID NO: 476090 - DNA, 33 bp, Homo sapien
tgagacttgcaaaaaatccttttaccagaaact

SEQ ID NO: 476091 - DNA, 33 bp, Homo sapien
ctccactccttgtacactatgcaggatgttctc

SEQ ID NO: 476092 - DNA, 33 bp, Homo sapien
ctccactccttgtacagtatgcaggatgttctc

SEQ ID NO: 476093 - DNA, 33 bp, Homo sapien
gctatgggaaaagagcagcactttgttttgtac

SEQ ID NO: 476094 - DNA, 33 bp, Homo sapien
gctatgggaaaagagcggcactttgttttgtac

SEQ ID NO: 476095 - DNA, 33 bp, Homo sapien
tgaaaccatggagctactaaatgtttggtatta

SEQ ID NO: 476096 - DNA, 33 bp, Homo sapien
tgaaaccatggagctattaaatgtttggtatta

SEQ ID NO: 476097 - DNA, 33 bp, Homo sapien
cattaaacaactcaaactgattattctaaagtc

SEQ ID NO: 476098 - DNA, 33 bp, Homo sapien
cattaaacaactcaaattgattattctaaagtc

SEQ ID NO: 476099 - DNA, 33 bp, Homo sapien
aataaagcaaaacaccactgtaaaatatgctgc

SEQ ID NO: 476100 - DNA, 33 bp, Homo sapien
aataaagcaaaacaccgctgtaaaatatgctgc

SEQ ID NO: 476101 - DNA, 33 bp, Homo sapien
atgaatggattagttacatcatcaaagggcttg

SEQ ID NO: 476102 - DNA, 33 bp, Homo sapien
atgaatggattagttatatcatcaaagggcttg

SEQ ID NO: 476103 - DNA, 33 bp, Homo sapien
ccctctgtctgccaaacttaagaaatcaggtat

SEQ ID NO: 476104 - DNA, 33 bp, Homo sapien
ccctctgtctgccaaatttaagaaatcaggtat

SEQ ID NO: 476105 - DNA, 33 bp, Homo sapien
ttgttctaaaaagactaaaaatacagctactaa

SEQ ID NO: 476106 - DNA, 33 bp, Homo sapien
ttgttctaaaaagactgaaaatacagctactaa

SEQ ID NO: 476107 - DNA, 33 bp, Homo sapien
ttgtccaaaggtgtaacgataatgtaaatctaa

SEQ ID NO: 476108 - DNA, 33 bp, Homo sapien
ttgtccaaaggtgtaatgataatgtaaatctaa

SEQ ID NO: 476109 - DNA, 33 bp, Homo sapien
caagataatcagataaagaaaaattacctgtgg

SEQ ID NO: 476110 - DNA, 33 bp, Homo sapien
caagataatcagataaggaaaaattacctgtgg

SEQ ID NO: 476111 - DNA, 33 bp, Homo sapien
agattaggtaatttgccaggctgaagtcatcac

SEQ ID NO: 476112 - DNA, 33 bp, Homo sapien
agattaggtaatttgctaggctgaagtcatcac

SEQ ID NO: 476113 - DNA, 33 bp, Homo sapien
aagaaatctcatagtcacaaagattaagttaac

SEQ ID NO: 476114 - DNA, 33 bp, Homo sapien
aagaaatctcatagtctcaaagattaagttaac

SEQ ID NO: 476115 - DNA, 33 bp, Homo sapien
agaagcacaaatataacacactacagcctcaaa

SEQ ID NO: 476116 - DNA, 33 bp, Homo sapien
agaagcacaaatataatacactacagcctcaaa

SEQ ID NO: 476117 - DNA, 33 bp, Homo sapien
gacactgaaaaaatacaaattcaatctttttat

SEQ ID NO: 476118 - DNA, 33 bp, Homo sapien
gacactgaaaaaatacgaattcaatctttttat

SEQ ID NO: 476119 - DNA, 33 bp, Homo sapien
gcagtcaggcggtccaatgactacgtcttgaat

SEQ ID NO: 476120 - DNA, 33 bp, Homo sapien
gcagtcaggcggtccagtgactacgtcttgaat

SEQ ID NO: 476121 - DNA, 33 bp, Homo sapien
tagaagttttgcagcaaaaagccttggacctca

SEQ ID NO: 476122 - DNA, 33 bp, Homo sapien
tagaagttttgcagcagaaagccttggacctca

SEQ ID NO: 476123 - DNA, 33 bp, Homo sapien
acccaaacttatgcaagactcaacctcagctct

SEQ ID NO: 476124 - DNA, 33 bp, Homo sapien
acccaaacttatgcaatactcaacctcagctct

SEQ ID NO: 476125 - DNA, 33 bp, Homo sapien
ggtaaagaactacagaagaaacaagatatacaa

SEQ ID NO: 476126 - DNA, 33 bp, Homo sapien
ggtaaagaactacagatgaaacaagatatacaa

SEQ ID NO: 476127 - DNA, 33 bp, Homo sapien
catatcacagtttaccaaacatcttctcaaata

SEQ ID NO: 476128 - DNA, 33 bp, Homo sapien
catatcacagtttaccgaacatcttctcaaata

SEQ ID NO: 476129 - DNA, 33 bp, Homo sapien
catgatacctcttacacagaaatagttacaccc

SEQ ID NO: 476130 - DNA, 33 bp, Homo sapien
catgatacctcttacatagaaatagttacaccc

SEQ ID NO: 476131 - DNA, 33 bp, Homo sapien
aacaatacctcggaaaggaaggttttatgacct

SEQ ID NO: 476132 - DNA, 33 bp, Homo sapien
aacaatacctcggaaatgaaggttttatgacct

SEQ ID NO: 476133 - DNA, 33 bp, Homo sapien
ccacatgccagtgatacgcggctgtggaagttg

SEQ ID NO: 476134 - DNA, 33 bp, Homo sapien
ccacatgccagtgatatgcggctgtggaagttg

SEQ ID NO: 476135 - DNA, 33 bp, Homo sapien
tcaagcaaatggctgacgtctcagacttgtgag

SEQ ID NO: 476136 - DNA, 33 bp, Homo sapien
tcaagcaaatggctgatgtctcagacttgtgag

SEQ ID NO: 476137 - DNA, 33 bp, Homo sapien
ctggttaatggttcagcagtttctcaagctaaa

SEQ ID NO: 476138 - DNA, 33 bp, Homo sapien
ctggttaatggttcaggagtttctcaagctaaa

SEQ ID NO: 476139 - DNA, 33 bp, Homo sapien
ggctctgcaggtaaacggggaaatgaaccattt

SEQ ID NO: 476140 - DNA, 33 bp, Homo sapien
ggctctgcaggtaaactgggaaatgaaccattt

SEQ ID NO: 476141 - DNA, 33 bp, Homo sapien
aatgggtagaggtcccactcagttcaggctctg

SEQ ID NO: 476142 - DNA, 33 bp, Homo sapien
aatgggtagaggtccctctcagttcaggctctg

SEQ ID NO: 476143 - DNA, 33 bp, Homo sapien
ggctagtaacaaggcccgaagtagaatcttgtc

SEQ ID NO: 476144 - DNA, 33 bp, Homo sapien
ggctagtaacaaggcctgaagtagaatcttgtc

SEQ ID NO: 476145 - DNA, 33 bp, Homo sapien
gttatttgctgaataaacatctctttctttctt

SEQ ID NO: 476146 - DNA, 33 bp, Homo sapien
gttatttgctgaataagcatctctttctttctt

SEQ ID NO: 476147 - DNA, 33 bp, Homo sapien
gactattgctaaacataatgcatctttttttcc

SEQ ID NO: 476148 - DNA, 33 bp, Homo sapien
gactattgctaaacatgatgcatctttttttcc

SEQ ID NO: 476149 - DNA, 33 bp, Homo sapien
actggaacactgctagcattctgtcttgacttc

SEQ ID NO: 476150 - DNA, 33 bp, Homo sapien
actggaacactgctaggattctgtcttgacttc

SEQ ID NO: 476151 - DNA, 33 bp, Homo sapien
cctcagtgtaagttgccaccagaagatacagat

SEQ ID NO: 476152 - DNA, 33 bp, Homo sapien
cctcagtgtaagttgctaccagaagatacagat

SEQ ID NO: 476153 - DNA, 33 bp, Homo sapien
gtgagctacaggacaacttcaagcaggttattg

SEQ ID NO: 476154 - DNA, 33 bp, Homo sapien
gtgagctacaggacaatttcaagcaggttattg

SEQ ID NO: 476155 - DNA, 33 bp, Homo sapien
attagacattacagaaagttagtgaacttaaaa

SEQ ID NO: 476156 - DNA, 33 bp, Homo sapien
attagacattacagaaggttagtgaacttaaaa

SEQ ID NO: 476157 - DNA, 33 bp, Homo sapien
ccgtaaggaataacaaccatagtacaacctggg

SEQ ID NO: 476158 - DNA, 33 bp, Homo sapien
ccgtaaggaataacaatcatagtacaacctggg

SEQ ID NO: 476159 - DNA, 33 bp, Homo sapien
tgaaaaactagcctgacgagcatgagaaagata

SEQ ID NO: 476160 - DNA, 33 bp, Homo sapien
tgaaaaactagcctgatgagcatgagaaagata

SEQ ID NO: 476161 - DNA, 33 bp, Homo sapien
aacctggtatgtgttcaaatcatctgaggatct

SEQ ID NO: 476162 - DNA, 33 bp, Homo sapien
aacctggtatgtgttcgaatcatctgaggatct

SEQ ID NO: 476163 - DNA, 33 bp, Homo sapien
tgtcatctgtttctacggtacatcactaaggtc

SEQ ID NO: 476164 - DNA, 33 bp, Homo sapien
tgtcatctgtttctactgtacatcactaaggtc

SEQ ID NO: 476165 - DNA, 33 bp, Homo sapien
tatgtgaagaccattacaatcctgaagtataca

SEQ ID NO: 476166 - DNA, 33 bp, Homo sapien
tatgtgaagaccattataatcctgaagtataca

SEQ ID NO: 476167 - DNA, 33 bp, Homo sapien
cccctggatgcttttacgattttctcattgtct

SEQ ID NO: 476168 - DNA, 33 bp, Homo sapien
cccctggatgcttttatgattttctcattgtct

SEQ ID NO: 476169 - DNA, 33 bp, Homo sapien
ctgtttcttgtctgcacagatgagcttttcagg

SEQ ID NO: 476170 - DNA, 33 bp, Homo sapien
ctgtttcttgtctgcatagatgagcttttcagg

SEQ ID NO: 476171 - DNA, 33 bp, Homo sapien
gtcagagctgcagtgccgagcctgaggccaccg

SEQ ID NO: 476172 - DNA, 33 bp, Homo sapien
gtcagagctgcagtgctgagcctgaggccaccg

SEQ ID NO: 476173 - DNA, 33 bp, Homo sapien
tgtgtcaaatgaaccacgagctctggataagaa

SEQ ID NO: 476174 - DNA, 33 bp, Homo sapien
tgtgtcaaatgaaccatgagctctggataagaa

SEQ ID NO: 476175 - DNA, 33 bp, Homo sapien
cctcagggctgctctagggagtcgtcgttcttt

SEQ ID NO: 476176 - DNA, 33 bp, Homo sapien
cctcagggctgctctatggagtcgtcgttcttt

SEQ ID NO: 476177 - DNA, 33 bp, Homo sapien
ccacggatgatacctggcacgaggggttctagc

SEQ ID NO: 476178 - DNA, 33 bp, Homo sapien
ccacggatgatacctgtcacgaggggttctagc

SEQ ID NO: 476179 - DNA, 33 bp, Homo sapien
taccagtgacctctacgctgatgacagctatcc

SEQ ID NO: 476180 - DNA, 33 bp, Homo sapien
taccagtgacctctactctgatgacagctatcc

SEQ ID NO: 476181 - DNA, 33 bp, Homo sapien
cacttagcaatgtttacgggctaagaaggaaat

SEQ ID NO: 476182 - DNA, 33 bp, Homo sapien
cacttagcaatgtttatgggctaagaaggaaat

SEQ ID NO: 476183 - DNA, 33 bp, Homo sapien
gatggttgcagagccaaaatttcattatttttt

SEQ ID NO: 476184 - DNA, 33 bp, Homo sapien
gatggttgcagagccagaatttcattatttttt

SEQ ID NO: 476185 - DNA, 33 bp, Homo sapien
aatcatgaaaatagcaaaataatctctttctca

SEQ ID NO: 476186 - DNA, 33 bp, Homo sapien
aatcatgaaaatagcacaataatctctttctca

SEQ ID NO: 476187 - DNA, 33 bp, Homo sapien
ttcctttcactatccaacccttaactgctgatc

SEQ ID NO: 476188 - DNA, 33 bp, Homo sapien
ttcctttcactatccagcccttaactgctgatc

SEQ ID NO: 476189 - DNA, 33 bp, Homo sapien
accacctgcttgacaactctatgtggacatccc

SEQ ID NO: 476190 - DNA, 33 bp, Homo sapien
accacctgcttgacaattctatgtggacatccc

SEQ ID NO: 476191 - DNA, 33 bp, Homo sapien
ggatgggataatggtgccaccaactgcagtgaa

SEQ ID NO: 476192 - DNA, 33 bp, Homo sapien
ggatgggataatggtgtcaccaactgcagtgaa

SEQ ID NO: 476193 - DNA, 33 bp, Homo sapien
ctggagatagatggaacatgagtgtcggtggaa

SEQ ID NO: 476194 - DNA, 33 bp, Homo sapien
ctggagatagatggaatatgagtgtcggtggaa

SEQ ID NO: 476195 - DNA, 33 bp, Homo sapien
ctgggaatacaaacaacacaagacaatccattc

SEQ ID NO: 476196 - DNA, 33 bp, Homo sapien
ctgggaatacaaacaagacaagacaatccattc

SEQ ID NO: 476197 - DNA, 33 bp, Homo sapien
agccagtttcacttaacaatgtctttaatgaaa

SEQ ID NO: 476198 - DNA, 33 bp, Homo sapien
agccagtttcacttaataatgtctttaatgaaa

SEQ ID NO: 476199 - DNA, 33 bp, Homo sapien
tttagtatgcagcacaaatgttttaggcacact

SEQ ID NO: 476200 - DNA, 33 bp, Homo sapien
tttagtatgcagcacagatgttttaggcacact

SEQ ID NO: 476201 - DNA, 33 bp, Homo sapien
taatgttatcacatcacgcacgggtaaaagatc

SEQ ID NO: 476202 - DNA, 33 bp, Homo sapien
taatgttatcacatcatgcacgggtaaaagatc

SEQ ID NO: 476203 - DNA, 33 bp, Homo sapien
gcttggaaaagtgtcccggaaagttacagagga

SEQ ID NO: 476204 - DNA, 33 bp, Homo sapien
gcttggaaaagtgtcctggaaagttacagagga

SEQ ID NO: 476205 - DNA, 33 bp, Homo sapien
tagattcctaggccaggagttttcgttgcactt

SEQ ID NO: 476206 - DNA, 33 bp, Homo sapien
tagattcctaggccagtagttttcgttgcactt

SEQ ID NO: 476207 - DNA, 33 bp, Homo sapien
gggaagtggaaataacaactgaatgttttctct

SEQ ID NO: 476208 - DNA, 33 bp, Homo sapien
gggaagtggaaataacgactgaatgttttctct

SEQ ID NO: 476209 - DNA, 33 bp, Homo sapien
gtgctaaactctgcctaacttttattgttgtct

SEQ ID NO: 476210 - DNA, 33 bp, Homo sapien
gtgctaaactctgcctgacttttattgttgtct

SEQ ID NO: 476211 - DNA, 33 bp, Homo sapien
tggaagtagcaggttacagagcatgaacattct

SEQ ID NO: 476212 - DNA, 33 bp, Homo sapien
tggaagtagcaggttagagagcatgaacattct

SEQ ID NO: 476213 - DNA, 33 bp, Homo sapien
tgatagcataataccaataagatgcggtttaga

SEQ ID NO: 476214 - DNA, 33 bp, Homo sapien
tgatagcataataccagtaagatgcggtttaga

SEQ ID NO: 476215 - DNA, 33 bp, Homo sapien
ttctgtataatcttgccaatatttggtatgaac

SEQ ID NO: 476216 - DNA, 33 bp, Homo sapien
ttctgtataatcttgctaatatttggtatgaac

SEQ ID NO: 476217 - DNA, 33 bp, Homo sapien
tctcaggttggcaataaataaaataattgttca

SEQ ID NO: 476218 - DNA, 33 bp, Homo sapien
tctcaggttggcaatacataaaataattgttca

SEQ ID NO: 476219 - DNA, 33 bp, Homo sapien
gatatatgaaaaatgcggagttccctaatgatc

SEQ ID NO: 476220 - DNA, 33 bp, Homo sapien
gatatatgaaaaatgctgagttccctaatgatc

SEQ ID NO: 476221 - DNA, 33 bp, Homo sapien
taaacataggttaccaagttaagtcagcaattc

SEQ ID NO: 476222 - DNA, 33 bp, Homo sapien
taaacataggttaccatgttaagtcagcaattc

SEQ ID NO: 476223 - DNA, 33 bp, Homo sapien
tataaggaatgagaagcagtaaagggttcttgg

SEQ ID NO: 476224 - DNA, 33 bp, Homo sapien
tataaggaatgagaaggagtaaagggttcttgg

SEQ ID NO: 476225 - DNA, 33 bp, Homo sapien
attttccttgctcctcaactgcatccagatcct

SEQ ID NO: 476226 - DNA, 33 bp, Homo sapien
attttccttgctcctcgactgcatccagatcct

SEQ ID NO: 476227 - DNA, 33 bp, Homo sapien
ttctttcctgaggatccgagtttcctatgataa

SEQ ID NO: 476228 - DNA, 33 bp, Homo sapien
ttctttcctgaggatctgagtttcctatgataa

SEQ ID NO: 476229 - DNA, 33 bp, Homo sapien
gaatatttgctacgaacgtcaagatctgtgcct

SEQ ID NO: 476230 - DNA, 33 bp, Homo sapien
gaatatttgctacgaatgtcaagatctgtgcct

SEQ ID NO: 476231 - DNA, 33 bp, Homo sapien
tgctgcagacagcaacaatgaaataagcagaca

SEQ ID NO: 476232 - DNA, 33 bp, Homo sapien
tgctgcagacagcaacgatgaaataagcagaca

SEQ ID NO: 476233 - DNA, 33 bp, Homo sapien
ttgggcaaaattctcaccacaagtataaaacta

SEQ ID NO: 476234 - DNA, 33 bp, Homo sapien
ttgggcaaaattctcatcacaagtataaaacta

SEQ ID NO: 476235 - DNA, 33 bp, Homo sapien
caacttcttcaccaaactcccaccagattttat

SEQ ID NO: 476236 - DNA, 33 bp, Homo sapien
caacttcttcaccaaattcccaccagattttat

SEQ ID NO: 476237 - DNA, 33 bp, Homo sapien
atagctgcacagatagaagttcctggagagtgg

SEQ ID NO: 476238 - DNA, 33 bp, Homo sapien
atagctgcacagatagtagttcctggagagtgg

SEQ ID NO: 476239 - DNA, 33 bp, Homo sapien
ttgtcaacactcaatactatcagattttatttt

SEQ ID NO: 476240 - DNA, 33 bp, Homo sapien
ttgtcaacactcaatattatcagattttatttt

SEQ ID NO: 476241 - DNA, 33 bp, Homo sapien
ggtaaaagttcctaacagacagcatctagctgg

SEQ ID NO: 476242 - DNA, 33 bp, Homo sapien
ggtaaaagttcctaaccgacagcatctagctgg

SEQ ID NO: 476243 - DNA, 33 bp, Homo sapien
atatggaacattctccacatccaagaagactcc

SEQ ID NO: 476244 - DNA, 33 bp, Homo sapien
atatggaacattctccgcatccaagaagactcc

SEQ ID NO: 476245 - DNA, 33 bp, Homo sapien
aatatgtcctcagagacagttatttatctttga

SEQ ID NO: 476246 - DNA, 33 bp, Homo sapien
aatatgtcctcagagagagttatttatctttga

SEQ ID NO: 476247 - DNA, 33 bp, Homo sapien
atcatgattatgaccactattttttgtgtgaca

SEQ ID NO: 476248 - DNA, 33 bp, Homo sapien
atcatgattatgaccattattttttgtgtgaca

SEQ ID NO: 476249 - DNA, 33 bp, Homo sapien
tttatgccatctgtctcaaattcaagggtgctt

SEQ ID NO: 476250 - DNA, 33 bp, Homo sapien
tttatgccatctgtctgaaattcaagggtgctt

SEQ ID NO: 476251 - DNA, 33 bp, Homo sapien
gaaatgaagcaaccaacattggtacctagttgc

SEQ ID NO: 476252 - DNA, 33 bp, Homo sapien
gaaatgaagcaaccaagattggtacctagttgc

SEQ ID NO: 476253 - DNA, 33 bp, Homo sapien
agtccctgggtgaacaatgatgtcttggtttta

SEQ ID NO: 476254 - DNA, 33 bp, Homo sapien
agtccctgggtgaacagtgatgtcttggtttta

SEQ ID NO: 476255 - DNA, 33 bp, Homo sapien
ctgcgtaatgacacaacgtaatgaacttttatc

SEQ ID NO: 476256 - DNA, 33 bp, Homo sapien
ctgcgtaatgacacaatgtaatgaacttttatc

SEQ ID NO: 476257 - DNA, 33 bp, Homo sapien
aactaacttgatcaaactggacatttacagaac

SEQ ID NO: 476258 - DNA, 33 bp, Homo sapien
aactaacttgatcaaattggacatttacagaac

SEQ ID NO: 476259 - DNA, 33 bp, Homo sapien
ttattaatcaatagaacaagaagacagaaaata

SEQ ID NO: 476260 - DNA, 33 bp, Homo sapien
ttattaatcaatagaagaagaagacagaaaata

SEQ ID NO: 476261 - DNA, 33 bp, Homo sapien
gctgggtgggtgccaacgagcacgggtgagaga

SEQ ID NO: 476262 - DNA, 33 bp, Homo sapien
gctgggtgggtgccaatgagcacgggtgagaga

SEQ ID NO: 476263 - DNA, 33 bp, Homo sapien
gtgttctctaggccaacagaagagtagatgcat

SEQ ID NO: 476264 - DNA, 33 bp, Homo sapien
gtgttctctaggccaatagaagagtagatgcat

SEQ ID NO: 476265 - DNA, 33 bp, Homo sapien
tgaatgttcttatacacagcatcttgtccagat

SEQ ID NO: 476266 - DNA, 33 bp, Homo sapien
tgaatgttcttatacatagcatcttgtccagat

SEQ ID NO: 476267 - DNA, 33 bp, Homo sapien
aaccaattaggatgaaaacatggttagaataat

SEQ ID NO: 476268 - DNA, 33 bp, Homo sapien
aaccaattaggatgaagacatggttagaataat

SEQ ID NO: 476269 - DNA, 33 bp, Homo sapien
cttagtctatttttggaagagctgctttattac

SEQ ID NO: 476270 - DNA, 33 bp, Homo sapien
cttagtctatttttggcagagctgctttattac

SEQ ID NO: 476271 - DNA, 33 bp, Homo sapien
atatttcagttataaaactcaaggagatggtac

SEQ ID NO: 476272 - DNA, 33 bp, Homo sapien
atatttcagttataaacctcaaggagatggtac

SEQ ID NO: 476273 - DNA, 33 bp, Homo sapien
tgaggggaagatcatacgtattttcttggaaat

SEQ ID NO: 476274 - DNA, 33 bp, Homo sapien
tgaggggaagatcatatgtattttcttggaaat

SEQ ID NO: 476275 - DNA, 33 bp, Homo sapien
atcctgaggcaatagaatacttatctccctagc

SEQ ID NO: 476276 - DNA, 33 bp, Homo sapien
atcctgaggcaatagagtacttatctccctagc

SEQ ID NO: 476277 - DNA, 33 bp, Homo sapien
agaatctctgagctcaactttccagatcaaaac

SEQ ID NO: 476278 - DNA, 33 bp, Homo sapien
agaatctctgagctcagctttccagatcaaaac

SEQ ID NO: 476279 - DNA, 33 bp, Homo sapien
agatattcacggttcaacattcaaaaaagtttt

SEQ ID NO: 476280 - DNA, 33 bp, Homo sapien
agatattcacggttcagcattcaaaaaagtttt

SEQ ID NO: 476281 - DNA, 33 bp, Homo sapien
gtgtcctattactgagccaaataaactatcttg

SEQ ID NO: 476282 - DNA, 33 bp, Homo sapien
gtgtcctattactgagtcaaataaactatcttg

SEQ ID NO: 476283 - DNA, 33 bp, Homo sapien
atggtattgcaacttccaggttagcctttttta

SEQ ID NO: 476284 - DNA, 33 bp, Homo sapien
atggtattgcaacttctaggttagcctttttta

SEQ ID NO: 476285 - DNA, 33 bp, Homo sapien
cagagatggcatggtaacctaacagagtaaagt

SEQ ID NO: 476286 - DNA, 33 bp, Homo sapien
cagagatggcatggtagcctaacagagtaaagt

SEQ ID NO: 476287 - DNA, 33 bp, Homo sapien
taacagtgcctgattaaatcaagaaattgaggt

SEQ ID NO: 476288 - DNA, 33 bp, Homo sapien
taacagtgcctgattacatcaagaaattgaggt

SEQ ID NO: 476289 - DNA, 33 bp, Homo sapien
gttgctctttttaaaaatctcaaccaatacaga

SEQ ID NO: 476290 - DNA, 33 bp, Homo sapien
gttgctctttttaaaagtctcaaccaatacaga

SEQ ID NO: 476291 - DNA, 33 bp, Homo sapien
tagctgacaaaagatacgatttttccactccag

SEQ ID NO: 476292 - DNA, 33 bp, Homo sapien
tagctgacaaaagatatgatttttccactccag

SEQ ID NO: 476293 - DNA, 33 bp, Homo sapien
gacacataaacaaatagggtatacttagcaatc

SEQ ID NO: 476294 - DNA, 33 bp, Homo sapien
gacacataaacaaatatggtatacttagcaatc

SEQ ID NO: 476295 - DNA, 33 bp, Homo sapien
acaataccagagaggacagcactacacagagaa

SEQ ID NO: 476296 - DNA, 33 bp, Homo sapien
acaataccagagaggatagcactacacagagaa

SEQ ID NO: 476297 - DNA, 33 bp, Homo sapien
gtctaaccaaatcttccatttgagcaatgatcc

SEQ ID NO: 476298 - DNA, 33 bp, Homo sapien
gtctaaccaaatcttctatttgagcaatgatcc

SEQ ID NO: 476299 - DNA, 33 bp, Homo sapien
aagtactaacgtagaaccctttggatttaggca

SEQ ID NO: 476300 - DNA, 33 bp, Homo sapien
aagtactaacgtagaagcctttggatttaggca

SEQ ID NO: 476301 - DNA, 33 bp, Homo sapien
agatatcaatattcccaaagtttctgagataag

SEQ ID NO: 476302 - DNA, 33 bp, Homo sapien
agatatcaatattcccgaagtttctgagataag

SEQ ID NO: 476303 - DNA, 33 bp, Homo sapien
taactgctttattcacaaatctctatttatcca

SEQ ID NO: 476304 - DNA, 33 bp, Homo sapien
taactgctttattcaccaatctctatttatcca

SEQ ID NO: 476305 - DNA, 33 bp, Homo sapien
aaggtctggcacatgaagaactgttaagatgag

SEQ ID NO: 476306 - DNA, 33 bp, Homo sapien
aaggtctggcacatgacgaactgttaagatgag

SEQ ID NO: 476307 - DNA, 33 bp, Homo sapien
actctgtacaatcttacgataaaagcttgaaga

SEQ ID NO: 476308 - DNA, 33 bp, Homo sapien
actctgtacaatcttaggataaaagcttgaaga

SEQ ID NO: 476309 - DNA, 33 bp, Homo sapien
gtgttttaagaccagaacttgggaccagggctc

SEQ ID NO: 476310 - DNA, 33 bp, Homo sapien
gtgttttaagaccagagcttgggaccagggctc

SEQ ID NO: 476311 - DNA, 33 bp, Homo sapien
cagtgagttaagaaaactttactgcccggggga

SEQ ID NO: 476312 - DNA, 33 bp, Homo sapien
cagtgagttaagaaaattttactgcccggggga

SEQ ID NO: 476313 - DNA, 33 bp, Homo sapien
gctcaggaatgagaagccaaagtaatcccagta

SEQ ID NO: 476314 - DNA, 33 bp, Homo sapien
gctcaggaatgagaaggcaaagtaatcccagta

SEQ ID NO: 476315 - DNA, 33 bp, Homo sapien
tgccgttcctctaaaacgcatccatcaggatcg

SEQ ID NO: 476316 - DNA, 33 bp, Homo sapien
tgccgttcctctaaaatgcatccatcaggatcg

SEQ ID NO: 476317 - DNA, 33 bp, Homo sapien
ctctgtctggtggtcagatggtgcctgtgtgtg

SEQ ID NO: 476318 - DNA, 33 bp, Homo sapien
ctctgtctggtggtcatatggtgcctgtgtgtg

SEQ ID NO: 476319 - DNA, 33 bp, Homo sapien
attagaaacactttatcaggctgtcatgggtta

SEQ ID NO: 476320 - DNA, 33 bp, Homo sapien
attagaaacactttattaggctgtcatgggtta

SEQ ID NO: 476321 - DNA, 33 bp, Homo sapien
tttccaggagaccttacggcgggaccaggagtg

SEQ ID NO: 476322 - DNA, 33 bp, Homo sapien
tttccaggagaccttatggcgggaccaggagtg

SEQ ID NO: 476323 - DNA, 33 bp, Homo sapien
gaaatggaaagtataaaaagatccagtagcacc

SEQ ID NO: 476324 - DNA, 33 bp, Homo sapien
gaaatggaaagtataagaagatccagtagcacc

SEQ ID NO: 476325 - DNA, 33 bp, Homo sapien
aagtaaataaaatgcaagtgacacataaataaa

SEQ ID NO: 476326 - DNA, 33 bp, Homo sapien
aagtaaataaaatgcacgtgacacataaataaa

SEQ ID NO: 476327 - DNA, 33 bp, Homo sapien
attaagagtagacaaacgagccaagcgtgatgg

SEQ ID NO: 476328 - DNA, 33 bp, Homo sapien
attaagagtagacaaatgagccaagcgtgatgg

SEQ ID NO: 476329 - DNA, 33 bp, Homo sapien
aatcctttcacaatgaagaaaaagagctagttg

SEQ ID NO: 476330 - DNA, 33 bp, Homo sapien
aatcctttcacaatgaggaaaaagagctagttg

SEQ ID NO: 476331 - DNA, 33 bp, Homo sapien
tccactgaataatctgaaagttccacttggatg

SEQ ID NO: 476332 - DNA, 33 bp, Homo sapien
tccactgaataatctgcaagttccacttggatg

SEQ ID NO: 476333 - DNA, 33 bp, Homo sapien
cattttgctgtgaacactggactcctcgtgttt

SEQ ID NO: 476334 - DNA, 33 bp, Homo sapien
cattttgctgtgaacattggactcctcgtgttt

SEQ ID NO: 476335 - DNA, 33 bp, Homo sapien
tggtgaatataaaccaactttttcttgtgtagt

SEQ ID NO: 476336 - DNA, 33 bp, Homo sapien
tggtgaatataaaccacctttttcttgtgtagt

SEQ ID NO: 476337 - DNA, 33 bp, Homo sapien
tcttgagagtttctcccgctacctgcaaatctt

SEQ ID NO: 476338 - DNA, 33 bp, Homo sapien
tcttgagagtttctcctgctacctgcaaatctt

SEQ ID NO: 476339 - DNA, 33 bp, Homo sapien
gaggaaggattcaaaaagaaaggaagaaggcat

SEQ ID NO: 476340 - DNA, 33 bp, Homo sapien
gaggaaggattcaaaacgaaaggaagaaggcat

SEQ ID NO: 476341 - DNA, 33 bp, Homo sapien
aaattatctgcgtataccggtgggtgcctgtaa

SEQ ID NO: 476342 - DNA, 33 bp, Homo sapien
aaattatctgcgtatagcggtgggtgcctgtaa

SEQ ID NO: 476343 - DNA, 33 bp, Homo sapien; identical to SEQ ID NO: 476341

SEQ ID NO: 476344 - DNA, 33 bp, Homo sapien; identical to SEQ ID NO: 476342

SEQ ID NO: 476345 - DNA, 33 bp, Homo sapien
ggtattaatgggcttcaaaatagaaaaactgtt

SEQ ID NO: 476346 - DNA, 33 bp, Homo sapien
ggtattaatgggcttcgaaatagaaaaactgtt

SEQ ID NO: 476347 - DNA, 33 bp, Homo sapien
aatcctgactaatattcaagatatgcattctac

SEQ ID NO: 476348 - DNA, 33 bp, Homo sapien
aatcctgactaatattgaagatatgcattctac

SEQ ID NO: 476349 - DNA, 33 bp, Homo sapien
tttttctcaggtaggaactctctgctgagtggc

SEQ ID NO: 476350 - DNA, 33 bp, Homo sapien
tttttctcaggtaggatctctctgctgagtggc

SEQ ID NO: 476351 - DNA, 33 bp, Homo sapien
tgcacagttatcatgaaagcccccaaaaggcac

SEQ ID NO: 476352 - DNA, 33 bp, Homo sapien
tgcacagttatcatgagagcccccaaaaggcac

SEQ ID NO: 476353 - DNA, 33 bp, Homo sapien
acggttctccaaatacaccaccctactccacac

SEQ ID NO: 476354 - DNA, 33 bp, Homo sapien
acggttctccaaatacgccaccctactccacac

SEQ ID NO: 476355 - DNA, 33 bp, Homo sapien
tgactctttaaaaccacgtgaatatcttagcat

SEQ ID NO: 476356 - DNA, 33 bp, Homo sapien
tgactctttaaaaccatgtgaatatcttagcat

SEQ ID NO: 476357 - DNA, 33 bp, Homo sapien
atgaggaaacaactagacaaatccagaatgtgg

SEQ ID NO: 476358 - DNA, 33 bp, Homo sapien
atgaggaaacaactaggcaaatccagaatgtgg

SEQ ID NO: 476359 - DNA, 33 bp, Homo sapien
cctgggtacttataaacgacagaaatgtacttc

SEQ ID NO: 476360 - DNA, 33 bp, Homo sapien
cctgggtacttataaatgacagaaatgtacttc

SEQ ID NO: 476361 - DNA, 33 bp, Homo sapien
ataggtcacagggaagacaaggaccgcgtgttt

SEQ ID NO: 476362 - DNA, 33 bp, Homo sapien
ataggtcacagggaaggcaaggaccgcgtgttt

SEQ ID NO: 476363 - DNA, 33 bp, Homo sapien
cgtttttggcgcttcacagatggatagatggac

SEQ ID NO: 476364 - DNA, 33 bp, Homo sapien
cgtttttggcgcttcatagatggatagatggac

SEQ ID NO: 476365 - DNA, 33 bp, Homo sapien
gtccaaatagcacttacccttcctgtatcaggg

SEQ ID NO: 476366 - DNA, 33 bp, Homo sapien
gtccaaatagcacttatccttcctgtatcaggg

SEQ ID NO: 476367 - DNA, 33 bp, Homo sapien
ctactatgttgtactcactcttttttgttttgt

SEQ ID NO: 476368 - DNA, 33 bp, Homo sapien
ctactatgttgtactcgctcttttttgttttgt

SEQ ID NO: 476369 - DNA, 33 bp, Homo sapien
cagtgagagaagccaacggtggaggtaactatt

SEQ ID NO: 476370 - DNA, 33 bp, Homo sapien
cagtgagagaagccaatggtggaggtaactatt

SEQ ID NO: 476371 - DNA, 33 bp, Homo sapien
cactggtgatcgaacacatttcctccctgactc

SEQ ID NO: 476372 - DNA, 33 bp, Homo sapien
cactggtgatcgaacatatttcctccctgactc

SEQ ID NO: 476373 - DNA, 33 bp, Homo sapien
gtcccaagtttccatacgaactagagactgaat

SEQ ID NO: 476374 - DNA, 33 bp, Homo sapien
gtcccaagtttccatatgaactagagactgaat

SEQ ID NO: 476375 - DNA, 33 bp, Homo sapien
agtgcaccctggtaaaggtggtcctctgctatg

SEQ ID NO: 476376 - DNA, 33 bp, Homo sapien
agtgcaccctggtaaatgtggtcctctgctatg

SEQ ID NO: 476377 - DNA, 33 bp, Homo sapien
tgtgtgtgaataaacaacatgacttctagatct

SEQ ID NO: 476378 - DNA, 33 bp, Homo sapien
tgtgtgtgaataaacagcatgacttctagatct

SEQ ID NO: 476379 - DNA, 33 bp, Homo sapien
tgatagagtagaagaaaacagccttattgaagt

SEQ ID NO: 476380 - DNA, 33 bp, Homo sapien
tgatagagtagaagaagacagccttattgaagt

SEQ ID NO: 476381 - DNA, 33 bp, Homo sapien
ccatgttttctgctgcagaatccacaatattag

SEQ ID NO: 476382 - DNA, 33 bp, Homo sapien
ccatgttttctgctgcggaatccacaatattag

SEQ ID NO: 476383 - DNA, 33 bp, Homo sapien
atttctttcttctgtacctacttttttggcaat

SEQ ID NO: 476384 - DNA, 33 bp, Homo sapien
atttctttcttctgtatctacttttttggcaat

SEQ ID NO: 476385 - DNA, 33 bp, Homo sapien
ggcggtaccaagggaacgggtctcactcggaaa

SEQ ID NO: 476386 - DNA, 33 bp, Homo sapien
ggcggtaccaagggaatgggtctcactcggaaa

SEQ ID NO: 476387 - DNA, 33 bp, Homo sapien
gattgcttttctgctcaatcacactgtcctccc

SEQ ID NO: 476388 - DNA, 33 bp, Homo sapien
gattgcttttctgctcgatcacactgtcctccc

SEQ ID NO: 476389 - DNA, 33 bp, Homo sapien
cacacacacctggaataagaatgggaaaaactg

SEQ ID NO: 476390 - DNA, 33 bp, Homo sapien
cacacacacctggaatgagaatgggaaaaactg

SEQ ID NO: 476391 - DNA, 33 bp, Homo sapien
ggcaggagaagacggaactggtcttgaactaca

SEQ ID NO: 476392 - DNA, 33 bp, Homo sapien
ggcaggagaagacggagctggtcttgaactaca

SEQ ID NO: 476393 - DNA, 33 bp, Homo sapien
tatgattttgttagagaagagctatcagatatg

SEQ ID NO: 476394 - DNA, 33 bp, Homo sapien
tatgattttgttagagcagagctatcagatatg

SEQ ID NO: 476395 - DNA, 33 bp, Homo sapien
catgctgtagctgacaaaacacctaccctgggc

SEQ ID NO: 476396 - DNA, 33 bp, Homo sapien
catgctgtagctgacagaacacctaccctgggc

SEQ ID NO: 476397 - DNA, 33 bp, Homo sapien
aatgaatggccaaaatcaatgttcactggtttg

SEQ ID NO: 476398 - DNA, 33 bp, Homo sapien
aatgaatggccaaaattaatgttcactggtttg

SEQ ID NO: 476399 - DNA, 33 bp, Homo sapien
ccctggttctcagcccaattaccttttcctccc

SEQ ID NO: 476400 - DNA, 33 bp, Homo sapien
ccctggttctcagcccgattaccttttcctccc

SEQ ID NO: 476401 - DNA, 33 bp, Homo sapien
tctctgtcctgaagctaaaagtggacaagtgct

SEQ ID NO: 476402 - DNA, 33 bp, Homo sapien
tctctgtcctgaagctgaaagtggacaagtgct

SEQ ID NO: 476403 - DNA, 33 bp, Homo sapien
cgagtagaatggtgaacgaacatctgttcacgc

SEQ ID NO: 476404 - DNA, 33 bp, Homo sapien
cgagtagaatggtgaatgaacatctgttcacgc

SEQ ID NO: 476405 - DNA, 33 bp, Homo sapien
actccatccccgtctacgaaatgaagtttcccg

SEQ ID NO: 476406 - DNA, 33 bp, Homo sapien
actccatccccgtctatgaaatgaagtttcccg

SEQ ID NO: 476407 - DNA, 33 bp, Homo sapien
gcattagaacctgagacccccagatgtttctgc

SEQ ID NO: 476408 - DNA, 33 bp, Homo sapien
gcattagaacctgagatccccagatgtttctgc

SEQ ID NO: 476409 - DNA, 33 bp, Homo sapien
aggtgaatggataagaagcagatcggcagaaag

SEQ ID NO: 476410 - DNA, 33 bp, Homo sapien
aggtgaatggataagaggcagatcggcagaaag

SEQ ID NO: 476411 - DNA, 33 bp, Homo sapien
ggttcacacaggttgaagcattattaaaaatat

SEQ ID NO: 476412 - DNA, 33 bp, Homo sapien
ggttcacacaggttgaggcattattaaaaatat

SEQ ID NO: 476413 - DNA, 33 bp, Homo sapien
ccttacctcagtgatgaaaaacctactttatgc

SEQ ID NO: 476414 - DNA, 33 bp, Homo sapien
ccttacctcagtgatggaaaacctactttatgc

SEQ ID NO: 476415 - DNA, 33 bp, Homo sapien
attacaactctgtggaacgttaacaatggaaaa

SEQ ID NO: 476416 - DNA, 33 bp, Homo sapien
attacaactctgtggagcgttaacaatggaaaa

SEQ ID NO: 476417 - DNA, 33 bp, Homo sapien
tacttgaatagatcaccggcagggtacaatggg

SEQ ID NO: 476418 - DNA, 33 bp, Homo sapien
tacttgaatagatcactggcagggtacaatggg

SEQ ID NO: 476419 - DNA, 33 bp, Homo sapien
cctcactatttttgtgcatttctccatttgatc

SEQ ID NO: 476420 - DNA, 33 bp, Homo sapien
cctcactatttttgtggatttctccatttgatc

SEQ ID NO: 476421 - DNA, 33 bp, Homo sapien
ggtttgtttttaacacactgtccaaagccttta

SEQ ID NO: 476422 - DNA, 33 bp, Homo sapien
ggtttgtttttaacacgctgtccaaagccttta

SEQ ID NO: 476423 - DNA, 33 bp, Homo sapien
ttagcagcttcagaataatcattgtattatgct

SEQ ID NO: 476424 - DNA, 33 bp, Homo sapien
ttagcagcttcagaatgatcattgtattatgct

SEQ ID NO: 476425 - DNA, 33 bp, Homo sapien
ccccctttcatggtccactaagtaacaggtgcc

SEQ ID NO: 476426 - DNA, 33 bp, Homo sapien
ccccctttcatggtccgctaagtaacaggtgcc

SEQ ID NO: 476427 - DNA, 33 bp, Homo sapien
cacactcctgcaatgcaccaaaaatcacacagg

SEQ ID NO: 476428 - DNA, 33 bp, Homo sapien
cacactcctgcaatgcgccaaaaatcacacagg

SEQ ID NO: 476429 - DNA, 33 bp, Homo sapien
cctagagctgcgaatgcaaacccatcctcaagg

SEQ ID NO: 476430 - DNA, 33 bp, Homo sapien
cctagagctgcgaatgtaaacccatcctcaagg

SEQ ID NO: 476431 - DNA, 33 bp, Homo sapien
atttttgtcgggcttaagaggcctatgggatca

SEQ ID NO: 476432 - DNA, 33 bp, Homo sapien
atttttgtcgggcttaggaggcctatgggatca

SEQ ID NO: 476433 - DNA, 33 bp, Homo sapien
gattgtggtaacaagcaaaggaagaagtaggga

SEQ ID NO: 476434 - DNA, 33 bp, Homo sapien
gattgtggtaacaagcgaaggaagaagtaggga

SEQ ID NO: 476435 - DNA, 33 bp, Homo sapien
aagggaaggactgtgcaagcaactccctagccc

SEQ ID NO: 476436 - DNA, 33 bp, Homo sapien
aagggaaggactgtgcgagcaactccctagccc

SEQ ID NO: 476437 - DNA, 33 bp, Homo sapien
ttataaggatgcttcacgtatgtgcctttagaa

SEQ ID NO: 476438 - DNA, 33 bp, Homo sapien
ttataaggatgcttcatgtatgtgcctttagaa

SEQ ID NO: 476439 - DNA, 33 bp, Homo sapien
tgcaaaaggtcaggtacggcaaataagtgagga

SEQ ID NO: 476440 - DNA, 33 bp, Homo sapien
tgcaaaaggtcaggtagggcaaataagtgagga

SEQ ID NO: 476441 - DNA, 33 bp, Homo sapien
ggcagcattcgtctacaccccattcagggcagc

SEQ ID NO: 476442 - DNA, 33 bp, Homo sapien
ggcagcattcgtctacgccccattcagggcagc

SEQ ID NO: 476443 - DNA, 33 bp, Homo sapien
gacacaggggtgcactaaaaaaatctattgagc

SEQ ID NO: 476444 - DNA, 33 bp, Homo sapien
gacacaggggtgcactcaaaaaatctattgagc

SEQ ID NO: 476445 - DNA, 33 bp, Homo sapien
tttacatgcccttccacgcagcacaaacattac

SEQ ID NO: 476446 - DNA, 33 bp, Homo sapien
tttacatgcccttccatgcagcacaaacattac

SEQ ID NO: 476447 - DNA, 33 bp, Homo sapien
aggcatggcttacccacctcgatgtcttcctac

SEQ ID NO: 476448 - DNA, 33 bp, Homo sapien
aggcatggcttacccatctcgatgtcttcctac

SEQ ID NO: 476449 - DNA, 33 bp, Homo sapien
ttttaggtgatggacacgattttgagggactgc

SEQ ID NO: 476450 - DNA, 33 bp, Homo sapien
ttttaggtgatggacatgattttgagggactgc

SEQ ID NO: 476451 - DNA, 33 bp, Homo sapien
gcctgtcctacctgtccacgagctccccctctt

SEQ ID NO: 476452 - DNA, 33 bp, Homo sapien
gcctgtcctacctgtcgacgagctccccctctt

SEQ ID NO: 476453 - DNA, 33 bp, Homo sapien
ctgtgcacggggaacactgaagaacgctgccac

SEQ ID NO: 476454 - DNA, 33 bp, Homo sapien
ctgtgcacggggaacattgaagaacgctgccac

SEQ ID NO: 476455 - DNA, 33 bp, Homo sapien
aatattctggaagttacactttccaatgctttc

SEQ ID NO: 476456 - DNA, 33 bp, Homo sapien
aatattctggaagttatactttccaatgctttc

SEQ ID NO: 476457 - DNA, 33 bp, Homo sapien
acctgaggtcactctacaaaggagcagcgtcag

SEQ ID NO: 476458 - DNA, 33 bp, Homo sapien
acctgaggtcactctagaaaggagcagcgtcag

SEQ ID NO: 476459 - DNA, 33 bp, Homo sapien
tgggtactaacttcacaactctgcctatgttga

SEQ ID NO: 476460 - DNA, 33 bp, Homo sapien
tgggtactaacttcacgactctgcctatgttga

SEQ ID NO: 476461 - DNA, 33 bp, Homo sapien
agggaaagagaacgaaagggatgagaagagagg

SEQ ID NO: 476462 - DNA, 33 bp, Homo sapien
agggaaagagaacgaaggggatgagaagagagg

SEQ ID NO: 476463 - DNA, 33 bp, Homo sapien
tcaacaaacgagtaacaggagaagcaaggaagc

SEQ ID NO: 476464 - DNA, 33 bp, Homo sapien
tcaacaaacgagtaacgggagaagcaaggaagc

SEQ ID NO: 476465 - DNA, 33 bp, Homo sapien
tggcctgaggaccgcacatcagagtcataggac

SEQ ID NO: 476466 - DNA, 33 bp, Homo sapien
tggcctgaggaccgcatatcagagtcataggac

SEQ ID NO: 476467 - DNA, 33 bp, Homo sapien
cccaaagctacttttcccttgtatcctcggact

SEQ ID NO: 476468 - DNA, 33 bp, Homo sapien
cccaaagctacttttctcttgtatcctcggact

SEQ ID NO: 476469 - DNA, 33 bp, Homo sapien
ttctgggtatgcaagactaagttcctgaacata

SEQ ID NO: 476470 - DNA, 33 bp, Homo sapien
ttctgggtatgcaagagtaagttcctgaacata

SEQ ID NO: 476471 - DNA, 33 bp, Homo sapien
ttctatttaaattggaacaattcatgcagccag

SEQ ID NO: 476472 - DNA, 33 bp, Homo sapien
ttctatttaaattggagcaattcatgcagccag

SEQ ID NO: 476473 - DNA, 33 bp, Homo sapien
gagtggaacggagtaaataaagtattctggctg

SEQ ID NO: 476474 - DNA, 33 bp, Homo sapien
gagtggaacggagtaagtaaagtattctggctg

SEQ ID NO: 476475 - DNA, 33 bp, Homo sapien
agccaccacctactcaggttcattggctaccat

SEQ ID NO: 476476 - DNA, 33 bp, Homo sapien
agccaccacctactcatgttcattggctaccat

SEQ ID NO: 476477 - DNA, 33 bp, Homo sapien
ccttacaatgaaaccacctgtgtaacaacccga

SEQ ID NO: 476478 - DNA, 33 bp, Homo sapien
ccttacaatgaaaccatctgtgtaacaacccga

SEQ ID NO: 476479 - DNA, 33 bp, Homo sapien
ccctgccctgtgcttgaatgtcaattgtcagga

SEQ ID NO: 476480 - DNA, 33 bp, Homo sapien
ccctgccctgtgcttggatgtcaattgtcagga

SEQ ID NO: 476481 - DNA, 33 bp, Homo sapien
tggcctccggatatcacgctctcctagtttttc

SEQ ID NO: 476482 - DNA, 33 bp, Homo sapien
tggcctccggatatcatgctctcctagtttttc

SEQ ID NO: 476483 - DNA, 33 bp, Homo sapien
ttaagaccaaggacaacagagatgttgggggaa

SEQ ID NO: 476484 - DNA, 33 bp, Homo sapien
ttaagaccaaggacaatagagatgttgggggaa

SEQ ID NO: 476485 - DNA, 33 bp, Homo sapien
tgtctactatctttcacggctgcactttcagga

SEQ ID NO: 476486 - DNA, 33 bp, Homo sapien
tgtctactatctttcatggctgcactttcagga

SEQ ID NO: 476487 - DNA, 33 bp, Homo sapien
cattactctctccagtaacaaataattcataat

SEQ ID NO: 476488 - DNA, 33 bp, Homo sapien
cattactctctccagtgacaaataattcataat

SEQ ID NO: 476489 - DNA, 33 bp, Homo sapien
tagatgctaggccctaaaagaaatctcaactct

SEQ ID NO: 476490 - DNA, 33 bp, Homo sapien
tagatgctaggccctagaagaaatctcaactct

SEQ ID NO: 476491 - DNA, 33 bp, Homo sapien
gaggtgataagatacacgaacattggatgtact

SEQ ID NO: 476492 - DNA, 33 bp, Homo sapien
gaggtgataagatacatgaacattggatgtact

SEQ ID NO: 476493 - DNA, 33 bp, Homo sapien
gagatctttttctctacagcagtaatgcccata

SEQ ID NO: 476494 - DNA, 33 bp, Homo sapien
gagatctttttctctatagcagtaatgcccata

SEQ ID NO: 476495 - DNA, 33 bp, Homo sapien
aatgatattgatgtaacgaaacttgatttgtat

SEQ ID NO: 476496 - DNA, 33 bp, Homo sapien
aatgatattgatgtaatgaaacttgatttgtat

SEQ ID NO: 476497 - DNA, 33 bp, Homo sapien
tagtaaacatgagggaggaactgcagaaatgaa

SEQ ID NO: 476498 - DNA, 33 bp, Homo sapien
tagtaaacatgagggatgaactgcagaaatgaa

SEQ ID NO: 476499 - DNA, 33 bp, Homo sapien
tttggagccaatatacaaagtttctgaagaaat

SEQ ID NO: 476500 - DNA, 33 bp, Homo sapien
tttggagccaatatacgaagtttctgaagaaat

SEQ ID NO: 476501 - DNA, 33 bp, Homo sapien
catgggatgtgagagaataaataaccacctgaa

SEQ ID NO: 476502 - DNA, 33 bp, Homo sapien
catgggatgtgagagagtaaataaccacctgaa

SEQ ID NO: 476503 - DNA, 33 bp, Homo sapien
gtcagacagcttaaacaaggacactgactgata

SEQ ID NO: 476504 - DNA, 33 bp, Homo sapien
gtcagacagcttaaacgaggacactgactgata

SEQ ID NO: 476505 - DNA, 33 bp, Homo sapien
ttagtataaacacagccgacaatctcaaagaaa

SEQ ID NO: 476506 - DNA, 33 bp, Homo sapien
ttagtataaacacagctgacaatctcaaagaaa

SEQ ID NO: 476507 - DNA, 33 bp, Homo sapien
ggttttccagagacaacgtgacgaagccacaat

SEQ ID NO: 476508 - DNA, 33 bp, Homo sapien
ggttttccagagacaatgtgacgaagccacaat

SEQ ID NO: 476509 - DNA, 33 bp, Homo sapien
ttctcctgtccattcagtacctcacttcgaaat

SEQ ID NO: 476510 - DNA, 33 bp, Homo sapien
ttctcctgtccattcattacctcacttcgaaat

SEQ ID NO: 476511 - DNA, 33 bp, Homo sapien
gggaagaacctgatccccttttcttcccacctc

SEQ ID NO: 476512 - DNA, 33 bp, Homo sapien
gggaagaacctgatcctcttttcttcccacctc

SEQ ID NO: 476513 - DNA, 33 bp, Homo sapien
aggcagacatatgggaagttttagaatctgatt

SEQ ID NO: 476514 - DNA, 33 bp, Homo sapien
aggcagacatatgggaggttttagaatctgatt

SEQ ID NO: 476515 - DNA, 33 bp, Homo sapien
tcatcagattgatgaaaaagcagtaataaaaaa

SEQ ID NO: 476516 - DNA, 33 bp, Homo sapien
tcatcagattgatgaagaagcagtaataaaaaa

SEQ ID NO: 476517 - DNA, 33 bp, Homo sapien
actattgctctttttaaaagtaggtgagaagac

SEQ ID NO: 476518 - DNA, 33 bp, Homo sapien
actattgctctttttagaagtaggtgagaagac

SEQ ID NO: 476519 - DNA, 33 bp, Homo sapien
ttgtatataccatttaagtttaatgtcatattt

SEQ ID NO: 476520 - DNA, 33 bp, Homo sapien
ttgtatataccatttacgtttaatgtcatattt

SEQ ID NO: 476521 - DNA, 33 bp, Homo sapien
tagtggacatccaaaaactctgccagcactacc

SEQ ID NO: 476522 - DNA, 33 bp, Homo sapien
tagtggacatccaaaacctctgccagcactacc

SEQ ID NO: 476523 - DNA, 33 bp, Homo sapien
attcccttatggtttaggattgtctagtccaca

SEQ ID NO: 476524 - DNA, 33 bp, Homo sapien
attcccttatggtttatgattgtctagtccaca

SEQ ID NO: 476525 - DNA, 33 bp, Homo sapien
gtggctgagcaaatgcagaggaaatggggactc

SEQ ID NO: 476526 - DNA, 33 bp, Homo sapien
gtggctgagcaaatgcggaggaaatggggactc

SEQ ID NO: 476527 - DNA, 33 bp, Homo sapien
ctgagaagccctaccccgggagagcagagagat

SEQ ID NO: 476528 - DNA, 33 bp, Homo sapien
ctgagaagccctaccctgggagagcagagagat

SEQ ID NO: 476529 - DNA, 33 bp, Homo sapien
cctgtttacaggtgagaaaatagaaatgatggg

SEQ ID NO: 476530 - DNA, 33 bp, Homo sapien
cctgtttacaggtgaggaaatagaaatgatggg

SEQ ID NO: 476531 - DNA, 33 bp, Homo sapien
tttcccaatcctttgcccacgactgtgatgtcc

SEQ ID NO: 476532 - DNA, 33 bp, Homo sapien
tttcccaatcctttgctcacgactgtgatgtcc

SEQ ID NO: 476533 - DNA, 33 bp, Homo sapien
aattctgttctcattacatcagtctggaatatg

SEQ ID NO: 476534 - DNA, 33 bp, Homo sapien
aattctgttctcattagatcagtctggaatatg

SEQ ID NO: 476535 - DNA, 33 bp, Homo sapien
ggtagcactgagattacagacagaatcaattaa

SEQ ID NO: 476536 - DNA, 33 bp, Homo sapien
ggtagcactgagattatagacagaatcaattaa

SEQ ID NO: 476537 - DNA, 33 bp, Homo sapien
tcagtgtagtcactaaaaggaattataagacag

SEQ ID NO: 476538 - DNA, 33 bp, Homo sapien
tcagtgtagtcactaacaggaattataagacag

SEQ ID NO: 476539 - DNA, 33 bp, Homo sapien
aaagatcatataccaccaactgtctagcacttt

SEQ ID NO: 476540 - DNA, 33 bp, Homo sapien
aaagatcatataccactaactgtctagcacttt

SEQ ID NO: 476541 - DNA, 33 bp, Homo sapien
tgaatacctcctgtcaataaggacaaactaaaa

SEQ ID NO: 476542 - DNA, 33 bp, Homo sapien
tgaatacctcctgtcagtaaggacaaactaaaa

SEQ ID NO: 476543 - DNA, 33 bp, Homo sapien
tagggcagtaaactagaattagtggatccacag

SEQ ID NO: 476544 - DNA, 33 bp, Homo sapien
tagggcagtaaactaggattagtggatccacag

SEQ ID NO: 476545 - DNA, 33 bp, Homo sapien
acagctggcctgcactaaaaaaaatgtctagtc

SEQ ID NO: 476546 - DNA, 33 bp, Homo sapien
acagctggcctgcactcaaaaaaatgtctagtc

SEQ ID NO: 476547 - DNA, 33 bp, Homo sapien
ttatagaaatgtaggacggactagtataaggaa

SEQ ID NO: 476548 - DNA, 33 bp, Homo sapien
ttatagaaatgtaggatggactagtataaggaa

SEQ ID NO: 476549 - DNA, 33 bp, Homo sapien
ttcattcctcggacctcaatacatgactttgag

SEQ ID NO: 476550 - DNA, 33 bp, Homo sapien
ttcattcctcggaccttaatacatgactttgag

SEQ ID NO: 476551 - DNA, 33 bp, Homo sapien
tttgaagccatgggagaatgaaaatgtccaagg

SEQ ID NO: 476552 - DNA, 33 bp, Homo sapien
tttgaagccatgggaggatgaaaatgtccaagg

SEQ ID NO: 476553 - DNA, 33 bp, Homo sapien
tgatttgagcgagagacaaatagtgtagtgttt

SEQ ID NO: 476554 - DNA, 33 bp, Homo sapien
tgatttgagcgagagataaatagtgtagtgttt

SEQ ID NO: 476555 - DNA, 33 bp, Homo sapien
catggatcaaacagcccatttcagcaattgata

SEQ ID NO: 476556 - DNA, 33 bp, Homo sapien
catggatcaaacagcctatttcagcaattgata

SEQ ID NO: 476557 - DNA, 33 bp, Homo sapien
tacagattctgtaagccatcttgtttttcttgt

SEQ ID NO: 476558 - DNA, 33 bp, Homo sapien
tacagattctgtaagcgatcttgtttttcttgt

SEQ ID NO: 476559 - DNA, 33 bp, Homo sapien
caatgtcgttaacatagcttttaaaactaacaa

SEQ ID NO: 476560 - DNA, 33 bp, Homo sapien
caatgtcgttaacatatcttttaaaactaacaa

SEQ ID NO: 476561 - DNA, 33 bp, Homo sapien
caaccagcgagtttgaaaatagatgtgaaagtg

SEQ ID NO: 476562 - DNA, 33 bp, Homo sapien
caaccagcgagtttgagaatagatgtgaaagtg

SEQ ID NO: 476563 - DNA, 33 bp, Homo sapien
ctcagctcaccttgaaaaaaagcaggaaggaaa

SEQ ID NO: 476564 - DNA, 33 bp, Homo sapien
ctcagctcaccttgaagaaaagcaggaaggaaa

SEQ ID NO: 476565 - DNA, 33 bp, Homo sapien
tcaatgcttatcttcacctttccgccctatttc

SEQ ID NO: 476566 - DNA, 33 bp, Homo sapien
tcaatgcttatcttcatctttccgccctatttc

SEQ ID NO: 476567 - DNA, 33 bp, Homo sapien
cagggatgagaaggaacacaagacactgctctc

SEQ ID NO: 476568 - DNA, 33 bp, Homo sapien
cagggatgagaaggaatacaagacactgctctc

SEQ ID NO: 476569 - DNA, 33 bp, Homo sapien
ctctcagggttatgggaaattggatattaactg

SEQ ID NO: 476570 - DNA, 33 bp, Homo sapien
ctctcagggttatggggaattggatattaactg

SEQ ID NO: 476571 - DNA, 33 bp, Homo sapien
ctcatatggagagtaaagacagacagcttgggc

SEQ ID NO: 476572 - DNA, 33 bp, Homo sapien
ctcatatggagagtaaggacagacagcttgggc

SEQ ID NO: 476573 - DNA, 33 bp, Homo sapien
cacatcttgtaagcaacgcgattccaatctccc

SEQ ID NO: 476574 - DNA, 33 bp, Homo sapien
cacatcttgtaagcaatgcgattccaatctccc

SEQ ID NO: 476575 - DNA, 33 bp, Homo sapien
gtgcctcacagagaacgggaacaaggatgtgag

SEQ ID NO: 476576 - DNA, 33 bp, Homo sapien
gtgcctcacagagaactggaacaaggatgtgag

SEQ ID NO: 476577 - DNA, 33 bp, Homo sapien
tgaacatttggcagaacagagattcccactcac

SEQ ID NO: 476578 - DNA, 33 bp, Homo sapien
tgaacatttggcagaagagagattcccactcac

SEQ ID NO: 476579 - DNA, 33 bp, Homo sapien
actgcagataagtctccacattttgtactgata

SEQ ID NO: 476580 - DNA, 33 bp, Homo sapien
actgcagataagtctctacattttgtactgata

SEQ ID NO: 476581 - DNA, 33 bp, Homo sapien
aactggcctttttggaaatttggctattatctc

SEQ ID NO: 476582 - DNA, 33 bp, Homo sapien
aactggcctttttggatatttggctattatctc

SEQ ID NO: 476583 - DNA, 33 bp, Homo sapien
ccactcttgattctgggcattcacaccagagtc

SEQ ID NO: 476584 - DNA, 33 bp, Homo sapien
ccactcttgattctggtcattcacaccagagtc

SEQ ID NO: 476585 - DNA, 33 bp, Homo sapien
ggagttcaacccccaacttatgtggcatcatac

SEQ ID NO: 476586 - DNA, 33 bp, Homo sapien
ggagttcaacccccaatttatgtggcatcatac

SEQ ID NO: 476587 - DNA, 33 bp, Homo sapien
agcattgctaattatacgaaagaaacaaatcaa

SEQ ID NO: 476588 - DNA, 33 bp, Homo sapien
agcattgctaattatatgaaagaaacaaatcaa

SEQ ID NO: 476589 - DNA, 33 bp, Homo sapien
caggcgtgaaccaccacgatcagttacttttct

SEQ ID NO: 476590 - DNA, 33 bp, Homo sapien
caggcgtgaaccaccatgatcagttacttttct

SEQ ID NO: 476591 - DNA, 33 bp, Homo sapien
aaaactgtgtggtgccaactatgaaggactctg

SEQ ID NO: 476592 - DNA, 33 bp, Homo sapien
aaaactgtgtggtgcctactatgaaggactctg

SEQ ID NO: 476593 - DNA, 33 bp, Homo sapien
taagttaacgtgtccaatagacatttgtatgtt

SEQ ID NO: 476594 - DNA, 33 bp, Homo sapien
taagttaacgtgtccagtagacatttgtatgtt

SEQ ID NO: 476595 - DNA, 33 bp, Homo sapien
cactttgggaggcacacgtgggcaaatcaattg

SEQ ID NO: 476596 - DNA, 33 bp, Homo sapien
cactttgggaggcacaggtgggcaaatcaattg

SEQ ID NO: 476597 - DNA, 33 bp, Homo sapien
gacagagttctgatcacagttaatttggtttgt

SEQ ID NO: 476598 - DNA, 33 bp, Homo sapien
gacagagttctgatcatagttaatttggtttgt

SEQ ID NO: 476599 - DNA, 33 bp, Homo sapien
atgaatacataatagaagcatcccattgtatgg

SEQ ID NO: 476600 - DNA, 33 bp, Homo sapien
atgaatacataatagaggcatcccattgtatgg

SEQ ID NO: 476601 - DNA, 33 bp, Homo sapien
gcatgaatcaagacaacggaaccaagctggact

SEQ ID NO: 476602 - DNA, 33 bp, Homo sapien
gcatgaatcaagacaatggaaccaagctggact

SEQ ID NO: 476603 - DNA, 33 bp, Homo sapien
caaacttgctagctcccacccccactccgtgag

SEQ ID NO: 476604 - DNA, 33 bp, Homo sapien
caaacttgctagctcctacccccactccgtgag

SEQ ID NO: 476605 - DNA, 33 bp, Homo sapien
ataccattttcaagtgcagactgagtatgtatc

SEQ ID NO: 476606 - DNA, 33 bp, Homo sapien
ataccattttcaagtgtagactgagtatgtatc

SEQ ID NO: 476607 - DNA, 33 bp, Homo sapien
ccagacatgatatagcacgcttgtggtcctagg

SEQ ID NO: 476608 - DNA, 33 bp, Homo sapien
ccagacatgatatagcgcgcttgtggtcctagg

SEQ ID NO: 476609 - DNA, 33 bp, Homo sapien
ccagttccttatagcacaagtccccaaccccgg

SEQ ID NO: 476610 - DNA, 33 bp, Homo sapien
ccagttccttatagcagaagtccccaaccccgg

SEQ ID NO: 476611 - DNA, 33 bp, Homo sapien
gccatggataaaatcaagattcaacaggaatat

SEQ ID NO: 476612 - DNA, 33 bp, Homo sapien
gccatggataaaatcacgattcaacaggaatat

SEQ ID NO: 476613 - DNA, 33 bp, Homo sapien
gatctcggcttactaaaacctatctcaggttca

SEQ ID NO: 476614 - DNA, 33 bp, Homo sapien
gatctcggcttactaatacctatctcaggttca

SEQ ID NO: 476615 - DNA, 33 bp, Homo sapien
atctaatgtaatgaaactcaaaatcaaaagcag

SEQ ID NO: 476616 - DNA, 33 bp, Homo sapien
atctaatgtaatgaaagtcaaaatcaaaagcag

SEQ ID NO: 476617 - DNA, 33 bp, Homo sapien
acttcttcctgatttacattctggcctacactg

SEQ ID NO: 476618 - DNA, 33 bp, Homo sapien
acttcttcctgatttatattctggcctacactg

SEQ ID NO: 476619 - DNA, 33 bp, Homo sapien
ctggaaggaagaacacagccattccggagggtc

SEQ ID NO: 476620 - DNA, 33 bp, Homo sapien
ctggaaggaagaacacggccattccggagggtc

SEQ ID NO: 476621 - DNA, 33 bp, Homo sapien
accaccgtccatcctgaagacaacccaggggaa

SEQ ID NO: 476622 - DNA, 33 bp, Homo sapien
accaccgtccatcctggagacaacccaggggaa

SEQ ID NO: 476623 - DNA, 33 bp, Homo sapien
gagtaaataacatgaacactagaatggcaaaac

SEQ ID NO: 476624 - DNA, 33 bp, Homo sapien
gagtaaataacatgaatactagaatggcaaaac

SEQ ID NO: 476625 - DNA, 33 bp, Homo sapien
tctaatttggataacaatgctgtaaacttgggc

SEQ ID NO: 476626 - DNA, 33 bp, Homo sapien
tctaatttggataacagtgctgtaaacttgggc

SEQ ID NO: 476627 - DNA, 33 bp, Homo sapien
caaagtatacttccgtcaaccatgcatgaacta

SEQ ID NO: 476628 - DNA, 33 bp, Homo sapien
caaagtatacttccgtgaaccatgcatgaacta

SEQ ID NO: 476629 - DNA, 33 bp, Homo sapien
tctgttgtatagtagcaacctaatatccccttg

SEQ ID NO: 476630 - DNA, 33 bp, Homo sapien
tctgttgtatagtagcgacctaatatccccttg

SEQ ID NO: 476631 - DNA, 33 bp, Homo sapien
atctggcaaccttagcaccggggcttggatgag

SEQ ID NO: 476632 - DNA, 33 bp, Homo sapien
atctggcaaccttagcgccggggcttggatgag

SEQ ID NO: 476633 - DNA, 33 bp, Homo sapien
ccggccgatgctaagaacccagctgagttacga

SEQ ID NO: 476634 - DNA, 33 bp, Homo sapien
ccggccgatgctaagagcccagctgagttacga

SEQ ID NO: 476635 - DNA, 33 bp, Homo sapien
ggtggccggccgaaaaaaatctcagagggcgaa

SEQ ID NO: 476636 - DNA, 33 bp, Homo sapien
ggtggccggccgaaaacaatctcagagggcgaa

SEQ ID NO: 476637 - DNA, 33 bp, Homo sapien
caacagagactcccgacgataaccagtggatta

SEQ ID NO: 476638 - DNA, 33 bp, Homo sapien
caacagagactcccgatgataaccagtggatta

SEQ ID NO: 476639 - DNA, 33 bp, Homo sapien
cactgtgtacatactacctgggtaaggaatagc

SEQ ID NO: 476640 - DNA, 33 bp, Homo sapien
cactgtgtacatactatctgggtaaggaatagc

SEQ ID NO: 476641 - DNA, 33 bp, Homo sapien
gggagagttgacaataataataactgccctgca

SEQ ID NO: 476642 - DNA, 33 bp, Homo sapien
gggagagttgacaatactaataactgccctgca

SEQ ID NO: 476643 - DNA, 33 bp, Homo sapien
tgatcctgactgctctaaccaggctgctcattc

SEQ ID NO: 476644 - DNA, 33 bp, Homo sapien
tgatcctgactgctctgaccaggctgctcattc

SEQ ID NO: 476645 - DNA, 33 bp, Homo sapien
gaggcgacggccacacgcatgtctgtgcattca

SEQ ID NO: 476646 - DNA, 33 bp, Homo sapien
gaggcgacggccacactcatgtctgtgcattca

SEQ ID NO: 476647 - DNA, 33 bp, Homo sapien
atgtattcccaggcataaacggtgtgtaatatc

SEQ ID NO: 476648 - DNA, 33 bp, Homo sapien
atgtattcccaggcatgaacggtgtgtaatatc

SEQ ID NO: 476649 - DNA, 33 bp, Homo sapien
ggctgacaccacgtacacttgtgacctgcagag

SEQ ID NO: 476650 - DNA, 33 bp, Homo sapien
ggctgacaccacgtacgcttgtgacctgcagag

SEQ ID NO: 476651 - DNA, 33 bp, Homo sapien
attgatatagatacgaatatggataagacgtga

SEQ ID NO: 476652 - DNA, 33 bp, Homo sapien
attgatatagatacgagtatggataagacgtga

SEQ ID NO: 476653 - DNA, 33 bp, Homo sapien
atgaacactgaaggaacaaggaactccgaggac

SEQ ID NO: 476654 - DNA, 33 bp, Homo sapien
atgaacactgaaggaagaaggaactccgaggac

SEQ ID NO: 476655 - DNA, 33 bp, Homo sapien
gagctggagctggagaagtcctccgtattccac

SEQ ID NO: 476656 - DNA, 33 bp, Homo sapien
gagctggagctggagaggtcctccgtattccac

SEQ ID NO: 476657 - DNA, 33 bp, Homo sapien
catctctcatcttaacaactttgagttcatgac

SEQ ID NO: 476658 - DNA, 33 bp, Homo sapien
catctctcatcttaaccactttgagttcatgac

SEQ ID NO: 476659 - DNA, 33 bp, Homo sapien
ctgatgttcatttgcactcttgatctttagttc

SEQ ID NO: 476660 - DNA, 33 bp, Homo sapien
ctgatgttcatttgcagtcttgatctttagttc

SEQ ID NO: 476661 - DNA, 33 bp, Homo sapien
ggaggtttggaagtaacagatagtttatgatga

SEQ ID NO: 476662 - DNA, 33 bp, Homo sapien
ggaggtttggaagtaagagatagtttatgatga

SEQ ID NO: 476663 - DNA, 33 bp, Homo sapien
ctcagtgtcaggcataacatttgggctgcaaaa

SEQ ID NO: 476664 - DNA, 33 bp, Homo sapien
ctcagtgtcaggcatagcatttgggctgcaaaa

SEQ ID NO: 476665 - DNA, 33 bp, Homo sapien
tttagccttccactcactactgtgtctcataca

SEQ ID NO: 476666 - DNA, 33 bp, Homo sapien
tttagccttccactcattactgtgtctcataca

SEQ ID NO: 476667 - DNA, 33 bp, Homo sapien
aattccccaaagataccgaggggcgactgtata

SEQ ID NO: 476668 - DNA, 33 bp, Homo sapien
aattccccaaagatactgaggggcgactgtata

SEQ ID NO: 476669 - DNA, 33 bp, Homo sapien
tgtccagagcatcatacgttcaagtttcagaga

SEQ ID NO: 476670 - DNA, 33 bp, Homo sapien
tgtccagagcatcatatgttcaagtttcagaga

SEQ ID NO: 476671 - DNA, 33 bp, Homo sapien
ccttccaattctgggaacctggcctttctaagc

SEQ ID NO: 476672 - DNA, 33 bp, Homo sapien
ccttccaattctgggatcctggcctttctaagc

SEQ ID NO: 476673 - DNA, 33 bp, Homo sapien
gcttccaatttcaacacagcattaaggtaccct

SEQ ID NO: 476674 - DNA, 33 bp, Homo sapien
gcttccaatttcaacagagcattaaggtaccct

SEQ ID NO: 476675 - DNA, 33 bp, Homo sapien
ggctagcaatgggaaacactgatacagataatg

SEQ ID NO: 476676 - DNA, 33 bp, Homo sapien
ggctagcaatgggaaatactgatacagataatg

SEQ ID NO: 476677 - DNA, 33 bp, Homo sapien
acaagtaactggaatgaacatacagatacatct

SEQ ID NO: 476678 - DNA, 33 bp, Homo sapien
acaagtaactggaatggacatacagatacatct

SEQ ID NO: 476679 - DNA, 33 bp, Homo sapien
cccacgggctaatgggacagaaccctgttaaat

SEQ ID NO: 476680 - DNA, 33 bp, Homo sapien
cccacgggctaatgggtcagaaccctgttaaat

SEQ ID NO: 476681 - DNA, 33 bp, Homo sapien
ctcagtacacaaaaaaaaatattgccacccagg

SEQ ID NO: 476682 - DNA, 33 bp, Homo sapien
ctcagtacacaaaaaacaatattgccacccagg

SEQ ID NO: 476683 - DNA, 33 bp, Homo sapien
tgggggaatcattacaatatatatttgccgttg

SEQ ID NO: 476684 - DNA, 33 bp, Homo sapien
tgggggaatcattacagtatatatttgccgttg

SEQ ID NO: 476685 - DNA, 33 bp, Homo sapien
tctggaactttatctcaccaccgcccctttagt

SEQ ID NO: 476686 - DNA, 33 bp, Homo sapien
tctggaactttatctcgccaccgcccctttagt

SEQ ID NO: 476687 - DNA, 33 bp, Homo sapien
gctcttcactacttaagtcctaagtgaaaggaa

SEQ ID NO: 476688 - DNA, 33 bp, Homo sapien
gctcttcactacttaattcctaagtgaaaggaa

SEQ ID NO: 476689 - DNA, 33 bp, Homo sapien
tgctcctcatttcacaaaaaggacaatcacaac

SEQ ID NO: 476690 - DNA, 33 bp, Homo sapien
tgctcctcatttcacacaaaggacaatcacaac

SEQ ID NO: 476691 - DNA, 33 bp, Homo sapien
agagtctattctgtcacgaaagcttgaaagttg

SEQ ID NO: 476692 - DNA, 33 bp, Homo sapien
agagtctattctgtcatgaaagcttgaaagttg

SEQ ID NO: 476693 - DNA, 33 bp, Homo sapien
gctctgaggtcccttccagctctgatgttctgt

SEQ ID NO: 476694 - DNA, 33 bp, Homo sapien
gctctgaggtcccttctagctctgatgttctgt

SEQ ID NO: 476695 - DNA, 33 bp, Homo sapien
ggagcaaggctaggatcagacacttgtgttcac

SEQ ID NO: 476696 - DNA, 33 bp, Homo sapien
ggagcaaggctaggattagacacttgtgttcac

SEQ ID NO: 476697 - DNA, 33 bp, Homo sapien
gctaagctcactgtccaagcaggcctcaccctc

SEQ ID NO: 476698 - DNA, 33 bp, Homo sapien
gctaagctcactgtcccagcaggcctcaccctc

SEQ ID NO: 476699 - DNA, 33 bp, Homo sapien
ttcttcccattttgcacatgagataaatgaggc

SEQ ID NO: 476700 - DNA, 33 bp, Homo sapien
ttcttcccattttgcagatgagataaatgaggc

SEQ ID NO: 476701 - DNA, 33 bp, Homo sapien
gaaatgctgctgcctacattactgttttgtgag

SEQ ID NO: 476702 - DNA, 33 bp, Homo sapien
gaaatgctgctgcctatattactgttttgtgag

SEQ ID NO: 476703 - DNA, 33 bp, Homo sapien
tggtcaagtctttaacacaggtgtgcaccacgg

SEQ ID NO: 476704 - DNA, 33 bp, Homo sapien
tggtcaagtctttaacgcaggtgtgcaccacgg

SEQ ID NO: 476705 - DNA, 33 bp, Homo sapien
tcagtaacactcacccaaaggaagacacaaaca

SEQ ID NO: 476706 - DNA, 33 bp, Homo sapien
tcagtaacactcacccgaaggaagacacaaaca

SEQ ID NO: 476707 - DNA, 33 bp, Homo sapien
ggcaaccatgaaggagacgagccaagagggcag

SEQ ID NO: 476708 - DNA, 33 bp, Homo sapien
ggcaaccatgaaggagccgagccaagagggcag

SEQ ID NO: 476709 - DNA, 33 bp, Homo sapien
cacataaaggacacagcagagtgcacacaacat

SEQ ID NO: 476710 - DNA, 33 bp, Homo sapien
cacataaaggacacagtagagtgcacacaacat

SEQ ID NO: 476711 - DNA, 33 bp, Homo sapien
ctggaactaggcatcaaagataaagctctaccc

SEQ ID NO: 476712 - DNA, 33 bp, Homo sapien
ctggaactaggcatcagagataaagctctaccc

SEQ ID NO: 476713 - DNA, 33 bp, Homo sapien
gagataaacagaatcgacattacttccagcaat

SEQ ID NO: 476714 - DNA, 33 bp, Homo sapien
gagataaacagaatcgtcattacttccagcaat

SEQ ID NO: 476715 - DNA, 33 bp, Homo sapien
ctaactgacattcaacacactttcaaagacacc

SEQ ID NO: 476716 - DNA, 33 bp, Homo sapien
ctaactgacattcaacgcactttcaaagacacc

SEQ ID NO: 476717 - DNA, 33 bp, Homo sapien
gttgtgctacaagaaaactgtttgtctgtcacc

SEQ ID NO: 476718 - DNA, 33 bp, Homo sapien
gttgtgctacaagaaacctgtttgtctgtcacc

SEQ ID NO: 476719 - DNA, 33 bp, Homo sapien
ttgtaaaaatagtgcaagtggaatgagctgtcc

SEQ ID NO: 476720 - DNA, 33 bp, Homo sapien
ttgtaaaaatagtgcacgtggaatgagctgtcc

SEQ ID NO: 476721 - DNA, 33 bp, Homo sapien
agtgtcctgccacctacggatcacaggaagctg

SEQ ID NO: 476722 - DNA, 33 bp, Homo sapien
agtgtcctgccacctatggatcacaggaagctg

SEQ ID NO: 476723 - DNA, 33 bp, Homo sapien
tcccatttgttccagaaaggacatggggcttgg

SEQ ID NO: 476724 - DNA, 33 bp, Homo sapien
tcccatttgttccagacaggacatggggcttgg

SEQ ID NO: 476725 - DNA, 33 bp, Homo sapien
tccaatgccagagaccaccattttcccataaca

SEQ ID NO: 476726 - DNA, 33 bp, Homo sapien
tccaatgccagagaccgccattttcccataaca

SEQ ID NO: 476727 - DNA, 33 bp, Homo sapien
ttcccattcataacaacgggtagcggagatggg

SEQ ID NO: 476728 - DNA, 33 bp, Homo sapien
ttcccattcataacaatgggtagcggagatggg

SEQ ID NO: 476729 - DNA, 33 bp, Homo sapien
ctagaggcacctgacacatgttctaacaaagaa

SEQ ID NO: 476730 - DNA, 33 bp, Homo sapien
ctagaggcacctgacagatgttctaacaaagaa

SEQ ID NO: 476731 - DNA, 33 bp, Homo sapien
gttaaccaaagcattgcaccgcctctcccctgc

SEQ ID NO: 476732 - DNA, 33 bp, Homo sapien
gttaaccaaagcattgtaccgcctctcccctgc

SEQ ID NO: 476733 - DNA, 33 bp, Homo sapien
atgaatcacgacaaaacggactgctttggagtg

SEQ ID NO: 476734 - DNA, 33 bp, Homo sapien
atgaatcacgacaaaatggactgctttggagtg

SEQ ID NO: 476735 - DNA, 33 bp, Homo sapien
tgtagacattctaacaatagaccacgggcacga

SEQ ID NO: 476736 - DNA, 33 bp, Homo sapien
tgtagacattctaacagtagaccacgggcacga

SEQ ID NO: 476737 - DNA, 33 bp, Homo sapien
tgaaagttacagcttccattaggtgtttttggt

SEQ ID NO: 476738 - DNA, 33 bp, Homo sapien
tgaaagttacagcttctattaggtgtttttggt

SEQ ID NO: 476739 - DNA, 33 bp, Homo sapien
ataaatgatttaacaacgtcttccatgccctca

SEQ ID NO: 476740 - DNA, 33 bp, Homo sapien
ataaatgatttaacaatgtcttccatgccctca

SEQ ID NO: 476741 - DNA, 33 bp, Homo sapien
aaggctgacaggaagacggacaaccatgacagt

SEQ ID NO: 476742 - DNA, 33 bp, Homo sapien
aaggctgacaggaagatggacaaccatgacagt

SEQ ID NO: 476743 - DNA, 33 bp, Homo sapien
gaaacagtaatggtacagagaagggaggataaa

SEQ ID NO: 476744 - DNA, 33 bp, Homo sapien
gaaacagtaatggtacggagaagggaggataaa

SEQ ID NO: 476745 - DNA, 33 bp, Homo sapien
cctggggatttagagacggtgaatattctcaaa

SEQ ID NO: 476746 - DNA, 33 bp, Homo sapien
cctggggatttagagatggtgaatattctcaaa

SEQ ID NO: 476747 - DNA, 33 bp, Homo sapien
agatggagtatgaataacagagtctgtgcttaa

SEQ ID NO: 476748 - DNA, 33 bp, Homo sapien
agatggagtatgaatagcagagtctgtgcttaa

SEQ ID NO: 476749 - DNA, 33 bp, Homo sapien
gcagccccaggactcaataagatgagaggaggc

SEQ ID NO: 476750 - DNA, 33 bp, Homo sapien
gcagccccaggactcagtaagatgagaggaggc

SEQ ID NO: 476751 - DNA, 33 bp, Homo sapien
tgatatggatggcacaagatcccaatcagacga

SEQ ID NO: 476752 - DNA, 33 bp, Homo sapien
tgatatggatggcacaggatcccaatcagacga

SEQ ID NO: 476753 - DNA, 33 bp, Homo sapien
tatctgttgaatggaagtgacaaatggtggcac

SEQ ID NO: 476754 - DNA, 33 bp, Homo sapien
tatctgttgaatggaattgacaaatggtggcac

SEQ ID NO: 476755 - DNA, 33 bp, Homo sapien
tacccatcctttgaggcccatcttgaatgccct

SEQ ID NO: 476756 - DNA, 33 bp, Homo sapien
tacccatcctttgaggtccatcttgaatgccct

SEQ ID NO: 476757 - DNA, 33 bp, Homo sapien
tatgtgtatattcagacgagatcgggcgcgctc

SEQ ID NO: 476758 - DNA, 33 bp, Homo sapien
tatgtgtatattcagatgagatcgggcgcgctc

SEQ ID NO: 476759 - DNA, 33 bp, Homo sapien
ctcctcaccaacagaacgggcgctgcctggaat

SEQ ID NO: 476760 - DNA, 33 bp, Homo sapien
ctcctcaccaacagaatgggcgctgcctggaat

SEQ ID NO: 476761 - DNA, 33 bp, Homo sapien
gctccacagagcttacaaatttctaccaggtaa

SEQ ID NO: 476762 - DNA, 33 bp, Homo sapien
gctccacagagcttacgaatttctaccaggtaa

SEQ ID NO: 476763 - DNA, 33 bp, Homo sapien
agctcctttcggattcacttctggggatgctga

SEQ ID NO: 476764 - DNA, 33 bp, Homo sapien
agctcctttcggattcgcttctggggatgctga

SEQ ID NO: 476765 - DNA, 33 bp, Homo sapien
tatttccctccacttgaatataaattccacaag

SEQ ID NO: 476766 - DNA, 33 bp, Homo sapien
tatttccctccacttgcatataaattccacaag

SEQ ID NO: 476767 - DNA, 33 bp, Homo sapien
ctgggacagagtagacactcaatggctgttgtt

SEQ ID NO: 476768 - DNA, 33 bp, Homo sapien
ctgggacagagtagacgctcaatggctgttgtt

SEQ ID NO: 476769 - DNA, 33 bp, Homo sapien
tggcgctttattgcaacaaaggcagttaggggt

SEQ ID NO: 476770 - DNA, 33 bp, Homo sapien
tggcgctttattgcaagaaaggcagttaggggt

SEQ ID NO: 476771 - DNA, 33 bp, Homo sapien
tcttagacgttaaagcacagaggaatcttgcta

SEQ ID NO: 476772 - DNA, 33 bp, Homo sapien
tcttagacgttaaagcgcagaggaatcttgcta

SEQ ID NO: 476773 - DNA, 33 bp, Homo sapien
cccacacatatatggccacctgatttatgacaa

SEQ ID NO: 476774 - DNA, 33 bp, Homo sapien
cccacacatatatggctacctgatttatgacaa

SEQ ID NO: 476775 - DNA, 33 bp, Homo sapien
tgcctcctgggaaaaccgttcatgtgtctgagg

SEQ ID NO: 476776 - DNA, 33 bp, Homo sapien
tgcctcctgggaaaactgttcatgtgtctgagg

SEQ ID NO: 476777 - DNA, 33 bp, Homo sapien
atcttcccgagaagatgaagagatatgcagaag

SEQ ID NO: 476778 - DNA, 33 bp, Homo sapien
atcttcccgagaagattaagagatatgcagaag

SEQ ID NO: 476779 - DNA, 33 bp, Homo sapien
gaatccgagaccagggaagtggtttgtcaagaa

SEQ ID NO: 476780 - DNA, 33 bp, Homo sapien
gaatccgagaccaggggagtggtttgtcaagaa

SEQ ID NO: 476781 - DNA, 33 bp, Homo sapien
aatctgctgcttttcactaacaagccagggaga

SEQ ID NO: 476782 - DNA, 33 bp, Homo sapien
aatctgctgcttttcattaacaagccagggaga

SEQ ID NO: 476783 - DNA, 33 bp, Homo sapien
acaagtgagaaaagcaccttaaaggaaaaagga

SEQ ID NO: 476784 - DNA, 33 bp, Homo sapien
acaagtgagaaaagcatcttaaaggaaaaagga

SEQ ID NO: 476785 - DNA, 33 bp, Homo sapien
aagtattcaagagaccaataggtagaagtaacc

SEQ ID NO: 476786 - DNA, 33 bp, Homo sapien
aagtattcaagagaccgataggtagaagtaacc

SEQ ID NO: 476787 - DNA, 33 bp, Homo sapien
gaggtggtgtggggtacggagtatttgtaactt

SEQ ID NO: 476788 - DNA, 33 bp, Homo sapien
gaggtggtgtggggtatggagtatttgtaactt

SEQ ID NO: 476789 - DNA, 33 bp, Homo sapien
ttgttgtgaggattgacgaatacagggaataat

SEQ ID NO: 476790 - DNA, 33 bp, Homo sapien
ttgttgtgaggattgatgaatacagggaataat

SEQ ID NO: 476791 - DNA, 33 bp, Homo sapien
tgagtttccagcaaacaagcaggctgaaaagct

SEQ ID NO: 476792 - DNA, 33 bp, Homo sapien
tgagtttccagcaaacgagcaggctgaaaagct

SEQ ID NO: 476793 - DNA, 33 bp, Homo sapien
gagacaggcagttgcacgtaagccatagcaagg

SEQ ID NO: 476794 - DNA, 33 bp, Homo sapien
gagacaggcagttgcatgtaagccatagcaagg

SEQ ID NO: 476795 - DNA, 33 bp, Homo sapien
aatgccaagtagaaacaatcaggtgaaggagag

SEQ ID NO: 476796 - DNA, 33 bp, Homo sapien
aatgccaagtagaaacgatcaggtgaaggagag

SEQ ID NO: 476797 - DNA, 33 bp, Homo sapien
aagtggatttcttgtaagtggtatatagttgga

SEQ ID NO: 476798 - DNA, 33 bp, Homo sapien
aagtggatttcttgtaggtggtatatagttgga

SEQ ID NO: 476799 - DNA, 33 bp, Homo sapien
cataacgccctatatccaccataacagtattat

SEQ ID NO: 476800 - DNA, 33 bp, Homo sapien
cataacgccctatatctaccataacagtattat

SEQ ID NO: 476801 - DNA, 33 bp, Homo sapien
aggtaaacaggcctaccgtacaatccagcaatt

SEQ ID NO: 476802 - DNA, 33 bp, Homo sapien
aggtaaacaggcctactgtacaatccagcaatt

SEQ ID NO: 476803 - DNA, 33 bp, Homo sapien
ggccacgtgagtttcccgagtccacccaactag

SEQ ID NO: 476804 - DNA, 33 bp, Homo sapien
ggccacgtgagtttcctgagtccacccaactag

SEQ ID NO: 476805 - DNA, 33 bp, Homo sapien
tactttgcaccttagagctgctccacatgtttc

SEQ ID NO: 476806 - DNA, 33 bp, Homo sapien
tactttgcaccttagatctgctccacatgtttc

SEQ ID NO: 476807 - DNA, 33 bp, Homo sapien
gtgggatcatctgctacgacacctcgttgaaaa

SEQ ID NO: 476808 - DNA, 33 bp, Homo sapien
gtgggatcatctgctatgacacctcgttgaaaa

SEQ ID NO: 476809 - DNA, 33 bp, Homo sapien
aacttcaccaagtcataaagactgagaatcatg

SEQ ID NO: 476810 - DNA, 33 bp, Homo sapien
aacttcaccaagtcatgaagactgagaatcatg

SEQ ID NO: 476811 - DNA, 33 bp, Homo sapien
ctcctgaagtcctcacgcattgttcaaacctac

SEQ ID NO: 476812 - DNA, 33 bp, Homo sapien
ctcctgaagtcctcactcattgttcaaacctac

SEQ ID NO: 476813 - DNA, 33 bp, Homo sapien
cccatgactctggttccagcaactgctgctacg

SEQ ID NO: 476814 - DNA, 33 bp, Homo sapien
cccatgactctggttctagcaactgctgctacg

SEQ ID NO: 476815 - DNA, 33 bp, Homo sapien
gtgtaaatgtgtaagactcgggccagccagatg

SEQ ID NO: 476816 - DNA, 33 bp, Homo sapien
gtgtaaatgtgtaagattcgggccagccagatg

SEQ ID NO: 476817 - DNA, 33 bp, Homo sapien
gtcctaagcatgttaaatctatgaactcaatca

SEQ ID NO: 476818 - DNA, 33 bp, Homo sapien
gtcctaagcatgttaagtctatgaactcaatca

SEQ ID NO: 476819 - DNA, 33 bp, Homo sapien
gacccctggggggaagaagtctaccctgcttgt

SEQ ID NO: 476820 - DNA, 33 bp, Homo sapien
gacccctggggggaaggagtctaccctgcttgt

SEQ ID NO: 476821 - DNA, 33 bp, Homo sapien
gtgtgcaaagcctctacggtttgttttttccta

SEQ ID NO: 476822 - DNA, 33 bp, Homo sapien
gtgtgcaaagcctctatggtttgttttttccta

SEQ ID NO: 476823 - DNA, 33 bp, Homo sapien
aagttgaccagaagcactgatggcctccccgct

SEQ ID NO: 476824 - DNA, 33 bp, Homo sapien
aagttgaccagaagcattgatggcctccccgct

SEQ ID NO: 476825 - DNA, 33 bp, Homo sapien
atatgtgtccagcttcaagtgacactagcgaca

SEQ ID NO: 476826 - DNA, 33 bp, Homo sapien
atatgtgtccagcttcgagtgacactagcgaca

SEQ ID NO: 476827 - DNA, 33 bp, Homo sapien
aaagcgttttcactaaacccaccacgaaagttt

SEQ ID NO: 476828 - DNA, 33 bp, Homo sapien
aaagcgttttcactaagcccaccacgaaagttt

SEQ ID NO: 476829 - DNA, 33 bp, Homo sapien
catggaggcgccataacgtatttaactactctt

SEQ ID NO: 476830 - DNA, 33 bp, Homo sapien
catggaggcgccataatgtatttaactactctt

SEQ ID NO: 476831 - DNA, 33 bp, Homo sapien
atctatacagttaacacattcatatcctttctc

SEQ ID NO: 476832 - DNA, 33 bp, Homo sapien
atctatacagttaacatattcatatcctttctc

SEQ ID NO: 476833 - DNA, 33 bp, Homo sapien
cttacagtcagaccaacagcacattatcatact

SEQ ID NO: 476834 - DNA, 33 bp, Homo sapien
cttacagtcagaccaagagcacattatcatact

SEQ ID NO: 476835 - DNA, 33 bp, Homo sapien
cttttatctaacattgcacaaaagggcacaaac

SEQ ID NO: 476836 - DNA, 33 bp, Homo sapien
cttttatctaacattgtacaaaagggcacaaac

SEQ ID NO: 476837 - DNA, 33 bp, Homo sapien
tgggctcttccaatacaatgttgctattttatt

SEQ ID NO: 476838 - DNA, 33 bp, Homo sapien
tgggctcttccaataccatgttgctattttatt

SEQ ID NO: 476839 - DNA, 33 bp, Homo sapien
ctctttcactgaatgaaatgaattgcatcttta

SEQ ID NO: 476840 - DNA, 33 bp, Homo sapien
ctctttcactgaatgagatgaattgcatcttta

SEQ ID NO: 476841 - DNA, 33 bp, Homo sapien
gatttcccacttactaagacatcggtcatattg

SEQ ID NO: 476842 - DNA, 33 bp, Homo sapien
gatttcccacttactaggacatcggtcatattg

SEQ ID NO: 476843 - DNA, 33 bp, Homo sapien
ttaacaaggagcgaaggcaattaagtaagagaa

SEQ ID NO: 476844 - DNA, 33 bp, Homo sapien
ttaacaaggagcgaagtcaattaagtaagagaa

SEQ ID NO: 476845 - DNA, 33 bp, Homo sapien
tattatactcattccaataggtgtgcagtgata

SEQ ID NO: 476846 - DNA, 33 bp, Homo sapien
tattatactcattccagtaggtgtgcagtgata

SEQ ID NO: 476847 - DNA, 33 bp, Homo sapien
gaaactgcctgtctaactccatgctgttattga

SEQ ID NO: 476848 - DNA, 33 bp, Homo sapien
gaaactgcctgtctaattccatgctgttattga

SEQ ID NO: 476849 - DNA, 33 bp, Homo sapien
tgaaaaaagtaaagataaggcacaacaatatga

SEQ ID NO: 476850 - DNA, 33 bp, Homo sapien
tgaaaaaagtaaagatgaggcacaacaatatga

SEQ ID NO: 476851 - DNA, 33 bp, Homo sapien
ttaatttctgtcataacggccaacatcaggtgc

SEQ ID NO: 476852 - DNA, 33 bp, Homo sapien
ttaatttctgtcataatggccaacatcaggtgc

SEQ ID NO: 476853 - DNA, 33 bp, Homo sapien
ttgtactaggaaaaaactagacatgacctatca

SEQ ID NO: 476854 - DNA, 33 bp, Homo sapien
ttgtactaggaaaaaattagacatgacctatca

SEQ ID NO: 476855 - DNA, 33 bp, Homo sapien
tcctttgctaaaaagacagattagtaagtatga

SEQ ID NO: 476856 - DNA, 33 bp, Homo sapien
tcctttgctaaaaagagagattagtaagtatga

SEQ ID NO: 476857 - DNA, 33 bp, Homo sapien
ggccctgaaatccagacgcgatcagcctagtgg

SEQ ID NO: 476858 - DNA, 33 bp, Homo sapien
ggccctgaaatccagatgcgatcagcctagtgg

SEQ ID NO: 476859 - DNA, 33 bp, Homo sapien
acatatacatacatcaagaagccatcacaatat

SEQ ID NO: 476860 - DNA, 33 bp, Homo sapien
acatatacatacatcatgaagccatcacaatat

SEQ ID NO: 476861 - DNA, 33 bp, Homo sapien
aaactgaacatagataacacataccatgtataa

SEQ ID NO: 476862 - DNA, 33 bp, Homo sapien
aaactgaacatagataccacataccatgtataa

SEQ ID NO: 476863 - DNA, 33 bp, Homo sapien
gaaatcagggcttcctaaacagatgtgttcttt

SEQ ID NO: 476864 - DNA, 33 bp, Homo sapien
gaaatcagggcttcctgaacagatgtgttcttt

SEQ ID NO: 476865 - DNA, 33 bp, Homo sapien
tatttgaaccacgatacagaaaatgttaatttg

SEQ ID NO: 476866 - DNA, 33 bp, Homo sapien
tatttgaaccacgatatagaaaatgttaatttg

SEQ ID NO: 476867 - DNA, 33 bp, Homo sapien
ccaacctgaaatgttgcagaaagtgtcaagtca

SEQ ID NO: 476868 - DNA, 33 bp, Homo sapien
ccaacctgaaatgttgtagaaagtgtcaagtca

SEQ ID NO: 476869 - DNA, 33 bp, Homo sapien
agtgggcagttaataaggtcggctctgaatcag

SEQ ID NO: 476870 - DNA, 33 bp, Homo sapien
agtgggcagttaataatgtcggctctgaatcag

SEQ ID NO: 476871 - DNA, 33 bp, Homo sapien
ttataagaaagatgagaaaaaaaatctatcttc

SEQ ID NO: 476872 - DNA, 33 bp, Homo sapien
ttataagaaagatgaggaaaaaaatctatcttc

SEQ ID NO: 476873 - DNA, 33 bp, Homo sapien
tgatgcgacgtgaggaaaacggcaccttgcttt

SEQ ID NO: 476874 - DNA, 33 bp, Homo sapien
tgatgcgacgtgaggagaacggcaccttgcttt

SEQ ID NO: 476875 - DNA, 33 bp, Homo sapien
acataaccaactttgtaaagcctttgaataaca

SEQ ID NO: 476876 - DNA, 33 bp, Homo sapien
acataaccaactttgtgaagcctttgaataaca

SEQ ID NO: 476877 - DNA, 33 bp, Homo sapien
gtatctcagaggaaacacgactcaaggagtaaa

SEQ ID NO: 476878 - DNA, 33 bp, Homo sapien
gtatctcagaggaaacgcgactcaaggagtaaa

SEQ ID NO: 476879 - DNA, 33 bp, Homo sapien
gaagctagtgtggaaactgagaacttgcaaagg

SEQ ID NO: 476880 - DNA, 33 bp, Homo sapien
gaagctagtgtggaaattgagaacttgcaaagg

SEQ ID NO: 476881 - DNA, 33 bp, Homo sapien
tctaaactctagccccacaactcacagagttaa

SEQ ID NO: 476882 - DNA, 33 bp, Homo sapien
tctaaactctagccccgcaactcacagagttaa

SEQ ID NO: 476883 - DNA, 33 bp, Homo sapien
acacgtaaacaaatgacgatagtgtaaggtgtg

SEQ ID NO: 476884 - DNA, 33 bp, Homo sapien
acacgtaaacaaatgatgatagtgtaaggtgtg

SEQ ID NO: 476885 - DNA, 33 bp, Homo sapien
atgagaatccaacccaaggtcttaatgtggtac

SEQ ID NO: 476886 - DNA, 33 bp, Homo sapien
atgagaatccaacccagggtcttaatgtggtac

SEQ ID NO: 476887 - DNA, 33 bp, Homo sapien
cacacctctgattttccaaatattgctagaatg

SEQ ID NO: 476888 - DNA, 33 bp, Homo sapien
cacacctctgattttctaaatattgctagaatg

SEQ ID NO: 476889 - DNA, 33 bp, Homo sapien
tgctacaaaactaaaaatgagatggctaagtga

SEQ ID NO: 476890 - DNA, 33 bp, Homo sapien
tgctacaaaactaaaactgagatggctaagtga

SEQ ID NO: 476891 - DNA, 33 bp, Homo sapien
cacgagccatacacataatgatgtccaaaaagc

SEQ ID NO: 476892 - DNA, 33 bp, Homo sapien
cacgagccatacacatgatgatgtccaaaaagc

SEQ ID NO: 476893 - DNA, 33 bp, Homo sapien
tccccatatagtcccactgcgcaggtctggggc

SEQ ID NO: 476894 - DNA, 33 bp, Homo sapien
tccccatatagtcccagtgcgcaggtctggggc

SEQ ID NO: 476895 - DNA, 33 bp, Homo sapien
catgacattcttaggactcccacctgggtgctc

SEQ ID NO: 476896 - DNA, 33 bp, Homo sapien
catgacattcttaggattcccacctgggtgctc

SEQ ID NO: 476897 - DNA, 33 bp, Homo sapien
attaagtcacatggtcacatacttgctatctct

SEQ ID NO: 476898 - DNA, 33 bp, Homo sapien
attaagtcacatggtcgcatacttgctatctct

SEQ ID NO: 476899 - DNA, 33 bp, Homo sapien
cacaatctacctctctgaatttcggtcccattt

SEQ ID NO: 476900 - DNA, 33 bp, Homo sapien
cacaatctacctctcttaatttcggtcccattt

SEQ ID NO: 476901 - DNA, 33 bp, Homo sapien
agcatgacagaagagaagaaggaattgaggcct

SEQ ID NO: 476902 - DNA, 33 bp, Homo sapien
agcatgacagaagagaggaaggaattgaggcct

SEQ ID NO: 476903 - DNA, 33 bp, Homo sapien
ccgagcagggagagaacggtgcaggagttggac

SEQ ID NO: 476904 - DNA, 33 bp, Homo sapien
ccgagcagggagagaatggtgcaggagttggac

SEQ ID NO: 476905 - DNA, 33 bp, Homo sapien
tctctagaaagaaaaaccgtcagatgcttgatg

SEQ ID NO: 476906 - DNA, 33 bp, Homo sapien
tctctagaaagaaaaatcgtcagatgcttgatg

SEQ ID NO: 476907 - DNA, 33 bp, Homo sapien
ctccaatctactaccaagtcctatcaattctgc

SEQ ID NO: 476908 - DNA, 33 bp, Homo sapien
ctccaatctactaccaggtcctatcaattctgc

SEQ ID NO: 476909 - DNA, 33 bp, Homo sapien
agaggcggctcatgtaccagtgctgccacggga

SEQ ID NO: 476910 - DNA, 33 bp, Homo sapien
agaggcggctcatgtagcagtgctgccacggga

SEQ ID NO: 476911 - DNA, 33 bp, Homo sapien
aaacccacaccttccagacacggacgtagccat

SEQ ID NO: 476912 - DNA, 33 bp, Homo sapien
aaacccacaccttccatacacggacgtagccat

SEQ ID NO: 476913 - DNA, 33 bp, Homo sapien
agaatctcctcctcgaagctctgggaccttctt

SEQ ID NO: 476914 - DNA, 33 bp, Homo sapien
agaatctcctcctcgaggctctgggaccttctt

SEQ ID NO: 476915 - DNA, 33 bp, Homo sapien
gatcagcctttcactgaatatacaatttacatg

SEQ ID NO: 476916 - DNA, 33 bp, Homo sapien
gatcagcctttcactgcatatacaatttacatg

SEQ ID NO: 476917 - DNA, 33 bp, Homo sapien
agaaacagagcaggaaagagaacactcagggtt

SEQ ID NO: 476918 - DNA, 33 bp, Homo sapien
agaaacagagcaggaaggagaacactcagggtt

SEQ ID NO: 476919 - DNA, 33 bp, Homo sapien
gtgggggaggccaaaaatttaaagtggtcacga

SEQ ID NO: 476920 - DNA, 33 bp, Homo sapien
gtgggggaggccaaaattttaaagtggtcacga

SEQ ID NO: 476921 - DNA, 33 bp, Homo sapien
aagagaattctgaaaagacaatgcaggaataag

SEQ ID NO: 476922 - DNA, 33 bp, Homo sapien
aagagaattctgaaaatacaatgcaggaataag

SEQ ID NO: 476923 - DNA, 33 bp, Homo sapien
tttttcactctctcaacggtatcttgtgatgaa

SEQ ID NO: 476924 - DNA, 33 bp, Homo sapien
tttttcactctctcaatggtatcttgtgatgaa

SEQ ID NO: 476925 - DNA, 33 bp, Homo sapien
tggagcagtggcttgaaaacttttttgactgag

SEQ ID NO: 476926 - DNA, 33 bp, Homo sapien
tggagcagtggcttgacaacttttttgactgag

SEQ ID NO: 476927 - DNA, 33 bp, Homo sapien
gatgggatgggaatgaggtcaacagggtcacag

SEQ ID NO: 476928 - DNA, 33 bp, Homo sapien
gatgggatgggaatgatgtcaacagggtcacag

SEQ ID NO: 476929 - DNA, 33 bp, Homo sapien
gagaaggaaaagaagacataagctgagaatata

SEQ ID NO: 476930 - DNA, 33 bp, Homo sapien
gagaaggaaaagaagagataagctgagaatata

SEQ ID NO: 476931 - DNA, 33 bp, Homo sapien
agagtgttgcagtcaggcattcacaggacatag

SEQ ID NO: 476932 - DNA, 33 bp, Homo sapien
agagtgttgcagtcagtcattcacaggacatag

SEQ ID NO: 476933 - DNA, 33 bp, Homo sapien
aattctccatacatcacgcaaatagaattttat

SEQ ID NO: 476934 - DNA, 33 bp, Homo sapien
aattctccatacatcatgcaaatagaattttat

SEQ ID NO: 476935 - DNA, 33 bp, Homo sapien
cttcgggattctgggagccaccactctatccgt

SEQ ID NO: 476936 - DNA, 33 bp, Homo sapien
cttcgggattctgggatccaccactctatccgt

SEQ ID NO: 476937 - DNA, 33 bp, Homo sapien
tcctttaccaaactaacctgactctgctttggc

SEQ ID NO: 476938 - DNA, 33 bp, Homo sapien
tcctttaccaaactaagctgactctgctttggc

SEQ ID NO: 476939 - DNA, 33 bp, Homo sapien
tgaccctagtttccagcctctttccactaattt

SEQ ID NO: 476940 - DNA, 33 bp, Homo sapien
tgaccctagtttccagtctctttccactaattt

SEQ ID NO: 476941 - DNA, 33 bp, Homo sapien
aggggaaacctcactgcaggaagaaactcagtt

SEQ ID NO: 476942 - DNA, 33 bp, Homo sapien
aggggaaacctcactgtaggaagaaactcagtt

SEQ ID NO: 476943 - DNA, 33 bp, Homo sapien
ttaacctttgtcagtcatcacctttgtcaactc

SEQ ID NO: 476944 - DNA, 33 bp, Homo sapien
ttaacctttgtcagtcgtcacctttgtcaactc

SEQ ID NO: 476945 - DNA, 33 bp, Homo sapien
gtttaaccaaagaacaatagtcacctgtaatct

SEQ ID NO: 476946 - DNA, 33 bp, Homo sapien
gtttaaccaaagaacagtagtcacctgtaatct

SEQ ID NO: 476947 - DNA, 33 bp, Homo sapien
aaacctagagaaaagacggttcctctcattagt

SEQ ID NO: 476948 - DNA, 33 bp, Homo sapien
aaacctagagaaaagatggttcctctcattagt

SEQ ID NO: 476949 - DNA, 33 bp, Homo sapien
atggtgaacagataaacgtcaggccaatgcaaa

SEQ ID NO: 476950 - DNA, 33 bp, Homo sapien
atggtgaacagataaatgtcaggccaatgcaaa

SEQ ID NO: 476951 - DNA, 33 bp, Homo sapien
atcagttctctgtgccaggaatcagactttttg

SEQ ID NO: 476952 - DNA, 33 bp, Homo sapien
atcagttctctgtgcccggaatcagactttttg

SEQ ID NO: 476953 - DNA, 33 bp, Homo sapien
aggtcatgcaggctgtcaataaagggcccggcc

SEQ ID NO: 476954 - DNA, 33 bp, Homo sapien
aggtcatgcaggctgtgaataaagggcccggcc

SEQ ID NO: 476955 - DNA, 33 bp, Homo sapien
gtaagggtttggagaagttcatgcatcccagtt

SEQ ID NO: 476956 - DNA, 33 bp, Homo sapien
gtaagggtttggagaatttcatgcatcccagtt

SEQ ID NO: 476957 - DNA, 33 bp, Homo sapien
gaacagaacctaatcccaactggctggaagatt

SEQ ID NO: 476958 - DNA, 33 bp, Homo sapien
gaacagaacctaatcctaactggctggaagatt

SEQ ID NO: 476959 - DNA, 33 bp, Homo sapien
ctgtatcaagccactaccccttgatctctccaa

SEQ ID NO: 476960 - DNA, 33 bp, Homo sapien
ctgtatcaagccactatcccttgatctctccaa

SEQ ID NO: 476961 - DNA, 33 bp, Homo sapien
gtatttcgctgttacccgaagcccacccggtag

SEQ ID NO: 476962 - DNA, 33 bp, Homo sapien
gtatttcgctgttacctgaagcccacccggtag

SEQ ID NO: 476963 - DNA, 33 bp, Homo sapien
ggaatctgaactaccactcctaatgcctctggt

SEQ ID NO: 476964 - DNA, 33 bp, Homo sapien
ggaatctgaactaccattcctaatgcctctggt

SEQ ID NO: 476965 - DNA, 33 bp, Homo sapien
ggaactgaagtttaataatgttgacctcctact

SEQ ID NO: 476966 - DNA, 33 bp, Homo sapien
ggaactgaagtttaatgatgttgacctcctact

SEQ ID NO: 476967 - DNA, 33 bp, Homo sapien
ccagtccttggatctacacctgccaatctccat

SEQ ID NO: 476968 - DNA, 33 bp, Homo sapien
ccagtccttggatctagacctgccaatctccat

SEQ ID NO: 476969 - DNA, 33 bp, Homo sapien
gtattctccatccgggccacatcctcacctcta

SEQ ID NO: 476970 - DNA, 33 bp, Homo sapien
gtattctccatccgggtcacatcctcacctcta

SEQ ID NO: 476971 - DNA, 33 bp, Homo sapien
tgtattgatcagcaaacatgtgtcagtcatggt

SEQ ID NO: 476972 - DNA, 33 bp, Homo sapien
tgtattgatcagcaaatatgtgtcagtcatggt

SEQ ID NO: 476973 - DNA, 33 bp, Homo sapien
agaatgcattatagcaaaaagaaggcctcatgg

SEQ ID NO: 476974 - DNA, 33 bp, Homo sapien
agaatgcattatagcagaaagaaggcctcatgg

SEQ ID NO: 476975 - DNA, 33 bp, Homo sapien
aagaagttgtgtacctaacataggaaacccaga

SEQ ID NO: 476976 - DNA, 33 bp, Homo sapien
aagaagttgtgtacctcacataggaaacccaga

SEQ ID NO: 476977 - DNA, 33 bp, Homo sapien
ggattgacaaaattgaacaatctctagcaagat

SEQ ID NO: 476978 - DNA, 33 bp, Homo sapien
ggattgacaaaattgaccaatctctagcaagat

SEQ ID NO: 476979 - DNA, 33 bp, Homo sapien
gaaaagattgacaagtcaacagaggtcacactg

SEQ ID NO: 476980 - DNA, 33 bp, Homo sapien
gaaaagattgacaagttaacagaggtcacactg

SEQ ID NO: 476981 - DNA, 33 bp, Homo sapien
atttcatatcttccaactgtgatcctgaagtca

SEQ ID NO: 476982 - DNA, 33 bp, Homo sapien
atttcatatcttccaagtgtgatcctgaagtca

SEQ ID NO: 476983 - DNA, 33 bp, Homo sapien
atacagaattgggaatcatcagctataaaaaat

SEQ ID NO: 476984 - DNA, 33 bp, Homo sapien
atacagaattgggaattatcagctataaaaaat

SEQ ID NO: 476985 - DNA, 33 bp, Homo sapien
ttatctatacgctgtcaaaaatataaaccaggc

SEQ ID NO: 476986 - DNA, 33 bp, Homo sapien
ttatctatacgctgtcgaaaatataaaccaggc

SEQ ID NO: 476987 - DNA, 33 bp, Homo sapien
tgtaaggtgattctacaaagttttaggcccacc

SEQ ID NO: 476988 - DNA, 33 bp, Homo sapien
tgtaaggtgattctacgaagttttaggcccacc

SEQ ID NO: 476989 - DNA, 33 bp, Homo sapien
gccaactataggctccgcttgccctgtacaaaa

SEQ ID NO: 476990 - DNA, 33 bp, Homo sapien
gccaactataggctcctcttgccctgtacaaaa

SEQ ID NO: 476991 - DNA, 33 bp, Homo sapien
tagactgtatatttcccagttatcccccttccc

SEQ ID NO: 476992 - DNA, 33 bp, Homo sapien
tagactgtatatttcctagttatcccccttccc

SEQ ID NO: 476993 - DNA, 33 bp, Homo sapien
gatcctcataaataaaccaagcaatctgctgat

SEQ ID NO: 476994 - DNA, 33 bp, Homo sapien
gatcctcataaataaatcaagcaatctgctgat

SEQ ID NO: 476995 - DNA, 33 bp, Homo sapien
tttgacaagagataacaacttgacattgacaga

SEQ ID NO: 476996 - DNA, 33 bp, Homo sapien
tttgacaagagataacgacttgacattgacaga

SEQ ID NO: 476997 - DNA, 33 bp, Homo sapien
ggatgctcaatctgtacagtctaggcactgtgc

SEQ ID NO: 476998 - DNA, 33 bp, Homo sapien
ggatgctcaatctgtatagtctaggcactgtgc

SEQ ID NO: 476999 - DNA, 33 bp, Homo sapien
cagaggcttaaggccacatgtccaaacttgtct

SEQ ID NO: 477000 - DNA, 33 bp, Homo sapien
cagaggcttaaggccagatgtccaaacttgtct

SEQ ID NO: 477001 - DNA, 33 bp, Homo sapien
ttactctttgttctacacttggctacacatata

SEQ ID NO: 477002 - DNA, 33 bp, Homo sapien
ttactctttgttctacccttggctacacatata

SEQ ID NO: 477003 - DNA, 33 bp, Homo sapien
agaaagagaagctaaggacataatcatccagtt

SEQ ID NO: 477004 - DNA, 33 bp, Homo sapien
agaaagagaagctaagtacataatcatccagtt

SEQ ID NO: 477005 - DNA, 33 bp, Homo sapien
tcatgtagttccctggaaaggccaagcttggga

SEQ ID NO: 477006 - DNA, 33 bp, Homo sapien
tcatgtagttccctgggaaggccaagcttggga

SEQ ID NO: 477007 - DNA, 33 bp, Homo sapien
agcattgaaatacttgaaggaacctttgctgct

SEQ ID NO: 477008 - DNA, 33 bp, Homo sapien
agcattgaaatacttgcaggaacctttgctgct

SEQ ID NO: 477009 - DNA, 33 bp, Homo sapien
ctctagccctactaaaacagaattaaggtagga

SEQ ID NO: 477010 - DNA, 33 bp, Homo sapien
ctctagccctactaaaccagaattaaggtagga

SEQ ID NO: 477011 - DNA, 33 bp, Homo sapien
ttttggattagggaaacgcaacctgtacccagt

SEQ ID NO: 477012 - DNA, 33 bp, Homo sapien
ttttggattagggaaaggcaacctgtacccagt

SEQ ID NO: 477013 - DNA, 33 bp, Homo sapien
agtcaagtactttccaatcaatcattcttggaa

SEQ ID NO: 477014 - DNA, 33 bp, Homo sapien
agtcaagtactttccagtcaatcattcttggaa

SEQ ID NO: 477015 - DNA, 33 bp, Homo sapien
tattgccagtgaaaagacagtgaatttaccatt

SEQ ID NO: 477016 - DNA, 33 bp, Homo sapien
tattgccagtgaaaaggcagtgaatttaccatt

SEQ ID NO: 477017 - DNA, 33 bp, Homo sapien
agtcttggaactcccacgatgctctgagaataa

SEQ ID NO: 477018 - DNA, 33 bp, Homo sapien
agtcttggaactcccatgatgctctgagaataa

SEQ ID NO: 477019 - DNA, 33 bp, Homo sapien
tacatccacttccataccccacttctactacca

SEQ ID NO: 477020 - DNA, 33 bp, Homo sapien
tacatccacttccatatcccacttctactacca

SEQ ID NO: 477021 - DNA, 33 bp, Homo sapien
ctgtcatttggaggctaagattcagataacata

SEQ ID NO: 477022 - DNA, 33 bp, Homo sapien
ctgtcatttggaggctgagattcagataacata

SEQ ID NO: 477023 - DNA, 33 bp, Homo sapien
aactggaagagctacacggaaggtgatggagga

SEQ ID NO: 477024 - DNA, 33 bp, Homo sapien
aactggaagagctacatggaaggtgatggagga

SEQ ID NO: 477025 - DNA, 33 bp, Homo sapien
atctagcagtcagattcaactttcagcccacca

SEQ ID NO: 477026 - DNA, 33 bp, Homo sapien
atctagcagtcagattgaactttcagcccacca

SEQ ID NO: 477027 - DNA, 33 bp, Homo sapien
aggagtataacatagcgcttgacactagaatct

SEQ ID NO: 477028 - DNA, 33 bp, Homo sapien
aggagtataacatagctcttgacactagaatct

SEQ ID NO: 477029 - DNA, 33 bp, Homo sapien
acctaaaaactgtttcaaaatggccaggtattc

SEQ ID NO: 477030 - DNA, 33 bp, Homo sapien
acctaaaaactgtttcgaaatggccaggtattc

SEQ ID NO: 477031 - DNA, 33 bp, Homo sapien
tgtggcaaactgggacaccctgtcacttaaggg

SEQ ID NO: 477032 - DNA, 33 bp, Homo sapien
tgtggcaaactgggacgccctgtcacttaaggg

SEQ ID NO: 477033 - DNA, 33 bp, Homo sapien
atagtttgaaaatccaatgcaaatattcaagtc

SEQ ID NO: 477034 - DNA, 33 bp, Homo sapien
atagtttgaaaatccagtgcaaatattcaagtc

SEQ ID NO: 477035 - DNA, 33 bp, Homo sapien
cttatgtgagacaaagactcagtttcagctttg

SEQ ID NO: 477036 - DNA, 33 bp, Homo sapien
cttatgtgagacaaaggctcagtttcagctttg

SEQ ID NO: 477037 - DNA, 33 bp, Homo sapien
atgactccacttatacaaaacacctgaagtagt

SEQ ID NO: 477038 - DNA, 33 bp, Homo sapien
atgactccacttatacgaaacacctgaagtagt

SEQ ID NO: 477039 - DNA, 33 bp, Homo sapien
atacactgattaagtacgcctggggtgagacct

SEQ ID NO: 477040 - DNA, 33 bp, Homo sapien
atacactgattaagtatgcctggggtgagacct

SEQ ID NO: 477041 - DNA, 33 bp, Homo sapien
aaaaagaaactgtgtacgcattagcagtcctca

SEQ ID NO: 477042 - DNA, 33 bp, Homo sapien
aaaaagaaactgtgtatgcattagcagtcctca

SEQ ID NO: 477043 - DNA, 33 bp, Homo sapien
ttcttttcttgcctaacgttaggaaaaccaaat

SEQ ID NO: 477044 - DNA, 33 bp, Homo sapien
ttcttttcttgcctaatgttaggaaaaccaaat

SEQ ID NO: 477045 - DNA, 33 bp, Homo sapien
ctctgtattgttctccacatatatttgaaattt

SEQ ID NO: 477046 - DNA, 33 bp, Homo sapien
ctctgtattgttctccgcatatatttgaaattt

SEQ ID NO: 477047 - DNA, 33 bp, Homo sapien
ctttctctgcttaccaagtcctgaactgctgct

SEQ ID NO: 477048 - DNA, 33 bp, Homo sapien
ctttctctgcttaccacgtcctgaactgctgct

SEQ ID NO: 477049 - DNA, 33 bp, Homo sapien
gagtagaattattgggccaaaggataaggagag

SEQ ID NO: 477050 - DNA, 33 bp, Homo sapien
gagtagaattattgggtcaaaggataaggagag

SEQ ID NO: 477051 - DNA, 33 bp, Homo sapien
tggggaaccatagctgcagggaaaccgtgatgc

SEQ ID NO: 477052 - DNA, 33 bp, Homo sapien
tggggaaccatagctgtagggaaaccgtgatgc

SEQ ID NO: 477053 - DNA, 33 bp, Homo sapien
taccaaaatctaggaccagctggaaggtgggtg

SEQ ID NO: 477054 - DNA, 33 bp, Homo sapien
taccaaaatctaggactagctggaaggtgggtg

SEQ ID NO: 477055 - DNA, 33 bp, Homo sapien
gcacttgttgcattaacgatatgatttctatac

SEQ ID NO: 477056 - DNA, 33 bp, Homo sapien
gcacttgttgcattaatgatatgatttctatac

SEQ ID NO: 477057 - DNA, 33 bp, Homo sapien
cagtcggttcagtggaataaccaaggattttta

SEQ ID NO: 477058 - DNA, 33 bp, Homo sapien
cagtcggttcagtggagtaaccaaggattttta

SEQ ID NO: 477059 - DNA, 33 bp, Homo sapien
tgatcacatatcactacagccacaatctcctgg

SEQ ID NO: 477060 - DNA, 33 bp, Homo sapien
tgatcacatatcactagagccacaatctcctgg

SEQ ID NO: 477061 - DNA, 33 bp, Homo sapien
ggaaactccacactccagattctttctctaaaa

SEQ ID NO: 477062 - DNA, 33 bp, Homo sapien
ggaaactccacactccggattctttctctaaaa

SEQ ID NO: 477063 - DNA, 33 bp, Homo sapien
aagagatagtcaagaacaaggaaagtgacataa

SEQ ID NO: 477064 - DNA, 33 bp, Homo sapien
aagagatagtcaagaataaggaaagtgacataa

SEQ ID NO: 477065 - DNA, 33 bp, Homo sapien
tgtcttttgtctgtcacgccaccccttcttttc

SEQ ID NO: 477066 - DNA, 33 bp, Homo sapien
tgtcttttgtctgtcatgccaccccttcttttc

SEQ ID NO: 477067 - DNA, 33 bp, Homo sapien
cctttgggttcactacaacaactgccaacagtc

SEQ ID NO: 477068 - DNA, 33 bp, Homo sapien
cctttgggttcactaccacaactgccaacagtc

SEQ ID NO: 477069 - DNA, 33 bp, Homo sapien
ttcctgtgataacatccctagacacttttgtgg

SEQ ID NO: 477070 - DNA, 33 bp, Homo sapien
ttcctgtgataacatctctagacacttttgtgg

SEQ ID NO: 477071 - DNA, 33 bp, Homo sapien
taaactgaaataggaaagaactagaagttaaga

SEQ ID NO: 477072 - DNA, 33 bp, Homo sapien
taaactgaaataggaaggaactagaagttaaga

SEQ ID NO: 477073 - DNA, 33 bp, Homo sapien
ggacagtgacagttccacatggataaactgaaa

SEQ ID NO: 477074 - DNA, 33 bp, Homo sapien
ggacagtgacagttccgcatggataaactgaaa

SEQ ID NO: 477075 - DNA, 33 bp, Homo sapien
gaattttgtgatttcccgaacacatcttgtatt

SEQ ID NO: 477076 - DNA, 33 bp, Homo sapien
gaattttgtgatttcctgaacacatcttgtatt

SEQ ID NO: 477077 - DNA, 33 bp, Homo sapien
tgataaaccgctcttacgaaacagggctccacc

SEQ ID NO: 477078 - DNA, 33 bp, Homo sapien
tgataaaccgctcttatgaaacagggctccacc

SEQ ID NO: 477079 - DNA, 33 bp, Homo sapien
aaaaatgagcagaaaacgcaacttgtaaaaggc

SEQ ID NO: 477080 - DNA, 33 bp, Homo sapien
aaaaatgagcagaaaatgcaacttgtaaaaggc

SEQ ID NO: 477081 - DNA, 33 bp, Homo sapien
gttatggttaagattcaagacaagtaatttaac

SEQ ID NO: 477082 - DNA, 33 bp, Homo sapien
gttatggttaagattcgagacaagtaatttaac

SEQ ID NO: 477083 - DNA, 33 bp, Homo sapien
ggctggcgctcttccccagtctcacggtctttc

SEQ ID NO: 477084 - DNA, 33 bp, Homo sapien
ggctggcgctcttccctagtctcacggtctttc

SEQ ID NO: 477085 - DNA, 33 bp, Homo sapien
gttgtctcatatatgccaggagtgtaaaaataa

SEQ ID NO: 477086 - DNA, 33 bp, Homo sapien
gttgtctcatatatgctaggagtgtaaaaataa

SEQ ID NO: 477087 - DNA, 33 bp, Homo sapien
gaagcccgttggtacaagcaactcaaaacaaga

SEQ ID NO: 477088 - DNA, 33 bp, Homo sapien
gaagcccgttggtacaggcaactcaaaacaaga

SEQ ID NO: 477089 - DNA, 33 bp, Homo sapien
ccacgtggagttagagaagtgcgtcctggcctg

SEQ ID NO: 477090 - DNA, 33 bp, Homo sapien
ccacgtggagttagaggagtgcgtcctggcctg

SEQ ID NO: 477091 - DNA, 33 bp, Homo sapien
aaagctatatccagtcgcaatctatttccaagt

SEQ ID NO: 477092 - DNA, 33 bp, Homo sapien
aaagctatatccagtctcaatctatttccaagt

SEQ ID NO: 477093 - DNA, 33 bp, Homo sapien
aggctgtttaaggaagcagtcaatagggctttt

SEQ ID NO: 477094 - DNA, 33 bp, Homo sapien
aggctgtttaaggaagtagtcaatagggctttt

SEQ ID NO: 477095 - DNA, 33 bp, Homo sapien
atttctcaaatgtataactgagtacttcatatt

SEQ ID NO: 477096 - DNA, 33 bp, Homo sapien
atttctcaaatgtatacctgagtacttcatatt

SEQ ID NO: 477097 - DNA, 33 bp, Homo sapien
gccctggaccaccacacaagttcgttttctgtt

SEQ ID NO: 477098 - DNA, 33 bp, Homo sapien
gccctggaccaccacagaagttcgttttctgtt

SEQ ID NO: 477099 - DNA, 33 bp, Homo sapien
tttcccctcaagtaccaatgttcaaaatgttta

SEQ ID NO: 477100 - DNA, 33 bp, Homo sapien
tttcccctcaagtaccgatgttcaaaatgttta

SEQ ID NO: 477101 - DNA, 33 bp, Homo sapien
cctccaatttgtaagacgacaatcctagcagat

SEQ ID NO: 477102 - DNA, 33 bp, Homo sapien
cctccaatttgtaagatgacaatcctagcagat

SEQ ID NO: 477103 - DNA, 33 bp, Homo sapien
agataatggccgataacctgtagaactagagtg

SEQ ID NO: 477104 - DNA, 33 bp, Homo sapien
agataatggccgataagctgtagaactagagtg

SEQ ID NO: 477105 - DNA, 33 bp, Homo sapien
aatgaagagtataaaaatatgtttcagtaatac

SEQ ID NO: 477106 - DNA, 33 bp, Homo sapien
aatgaagagtataaaagtatgtttcagtaatac

SEQ ID NO: 477107 - DNA, 33 bp, Homo sapien
cagcaggacaattgcaaacactaagatgaatgc

SEQ ID NO: 477108 - DNA, 33 bp, Homo sapien
cagcaggacaattgcagacactaagatgaatgc

SEQ ID NO: 477109 - DNA, 33 bp, Homo sapien
taagtatcttaaggtcaactctgagttatatac

SEQ ID NO: 477110 - DNA, 33 bp, Homo sapien
taagtatcttaaggtcgactctgagttatatac

SEQ ID NO: 477111 - DNA, 33 bp, Homo sapien
agttcctgagctaagcaaggtagactttcatct

SEQ ID NO: 477112 - DNA, 33 bp, Homo sapien
agttcctgagctaagcgaggtagactttcatct

SEQ ID NO: 477113 - DNA, 33 bp, Homo sapien
ttatataaagatgtgaactgtatccaaaaaagt

SEQ ID NO: 477114 - DNA, 33 bp, Homo sapien
ttatataaagatgtgatctgtatccaaaaaagt

SEQ ID NO: 477115 - DNA, 33 bp, Homo sapien
ggagaccagggacctaaaaagacagtccaggca

SEQ ID NO: 477116 - DNA, 33 bp, Homo sapien
ggagaccagggacctataaagacagtccaggca

SEQ ID NO: 477117 - DNA, 33 bp, Homo sapien
gagtgttctggattgactatttacagacagttt

SEQ ID NO: 477118 - DNA, 33 bp, Homo sapien
gagtgttctggattgattatttacagacagttt

SEQ ID NO: 477119 - DNA, 33 bp, Homo sapien
gttcacccagatggcaagactattccttcagtc

SEQ ID NO: 477120 - DNA, 33 bp, Homo sapien
gttcacccagatggcatgactattccttcagtc

SEQ ID NO: 477121 - DNA, 33 bp, Homo sapien
agaaccaaatttaaacaagttctcaaatgtcca

SEQ ID NO: 477122 - DNA, 33 bp, Homo sapien
agaaccaaatttaaaccagttctcaaatgtcca

SEQ ID NO: 477123 - DNA, 33 bp, Homo sapien
agttaatgtgtacagaatatgttccagagcctt

SEQ ID NO: 477124 - DNA, 33 bp, Homo sapien
agttaatgtgtacagattatgttccagagcctt

SEQ ID NO: 477125 - DNA, 33 bp, Homo sapien
ttttaatattttaggcagaagattttcatatat

SEQ ID NO: 477126 - DNA, 33 bp, Homo sapien
ttttaatattttaggctgaagattttcatatat

SEQ ID NO: 477127 - DNA, 33 bp, Homo sapien
tcaacttctttattcaatccctagtcttttaac

SEQ ID NO: 477128 - DNA, 33 bp, Homo sapien
tcaacttctttattcagtccctagtcttttaac

SEQ ID NO: 477129 - DNA, 33 bp, Homo sapien
ggaaaagattcaataaaccatttgatatttgta

SEQ ID NO: 477130 - DNA, 33 bp, Homo sapien
ggaaaagattcaataacccatttgatatttgta

SEQ ID NO: 477131 - DNA, 33 bp, Homo sapien
agatccgatttccaccactcaattcatgctgga

SEQ ID NO: 477132 - DNA, 33 bp, Homo sapien
agatccgatttccaccgctcaattcatgctgga

SEQ ID NO: 477133 - DNA, 33 bp, Homo sapien
ttcagggacacttgtgaaccgaatggtaggggc

SEQ ID NO: 477134 - DNA, 33 bp, Homo sapien
ttcagggacacttgtgcaccgaatggtaggggc

SEQ ID NO: 477135 - DNA, 33 bp, Homo sapien
tgcagtaagggagcaacataaataatttctaaa

SEQ ID NO: 477136 - DNA, 33 bp, Homo sapien
tgcagtaagggagcaagataaataatttctaaa

SEQ ID NO: 477137 - DNA, 33 bp, Homo sapien
acgtgccattaggatacgcagtgtcacaggaac

SEQ ID NO: 477138 - DNA, 33 bp, Homo sapien
acgtgccattaggataggcagtgtcacaggaac

SEQ ID NO: 477139 - DNA, 33 bp, Homo sapien
aagcttgcctttaaaacgtgctcccttctgtgt

SEQ ID NO: 477140 - DNA, 33 bp, Homo sapien
aagcttgcctttaaaatgtgctcccttctgtgt

SEQ ID NO: 477141 - DNA, 33 bp, Homo sapien
tacagagccctgataaaacatttacacactgct

SEQ ID NO: 477142 - DNA, 33 bp, Homo sapien
tacagagccctgataagacatttacacactgct

SEQ ID NO: 477143 - DNA, 33 bp, Homo sapien
tgatgtcacgcccgagaacaggaggtttggggc

SEQ ID NO: 477144 - DNA, 33 bp, Homo sapien
tgatgtcacgcccgaggacaggaggtttggggc

SEQ ID NO: 477145 - DNA, 33 bp, Homo sapien
catggggctgaggtgcacacaaggtctggttct

SEQ ID NO: 477146 - DNA, 33 bp, Homo sapien
catggggctgaggtgcgcacaaggtctggttct

SEQ ID NO: 477147 - DNA, 33 bp, Homo sapien
cagtcccaggccaccacatagtcccaagtctga

SEQ ID NO: 477148 - DNA, 33 bp, Homo sapien
cagtcccaggccaccagatagtcccaagtctga

SEQ ID NO: 477149 - DNA, 33 bp, Homo sapien
gttactggggctttcacgaaagagcaatggaca

SEQ ID NO: 477150 - DNA, 33 bp, Homo sapien
gttactggggctttcaggaaagagcaatggaca

SEQ ID NO: 477151 - DNA, 33 bp, Homo sapien
tgaacttccattgtacagacaagaacactgagg

SEQ ID NO: 477152 - DNA, 33 bp, Homo sapien
tgaacttccattgtacggacaagaacactgagg

SEQ ID NO: 477153 - DNA, 33 bp, Homo sapien
tccttcctactggccacgctatgctgcccctga

SEQ ID NO: 477154 - DNA, 33 bp, Homo sapien
tccttcctactggccatgctatgctgcccctga

SEQ ID NO: 477155 - DNA, 33 bp, Homo sapien
acatctgctttattccagatgccacagcacagg

SEQ ID NO: 477156 - DNA, 33 bp, Homo sapien
acatctgctttattccggatgccacagcacagg

SEQ ID NO: 477157 - DNA, 33 bp, Homo sapien
cactctggaaagtagcaaatttgtttggaaaac

SEQ ID NO: 477158 - DNA, 33 bp, Homo sapien
cactctggaaagtagccaatttgtttggaaaac

SEQ ID NO: 477159 - DNA, 33 bp, Homo sapien
tatcttacacagcacaatgaatggtattatccc

SEQ ID NO: 477160 - DNA, 33 bp, Homo sapien
tatcttacacagcacagtgaatggtattatccc

SEQ ID NO: 477161 - DNA, 33 bp, Homo sapien
cctgaccttgcccttcaaacactgactgtgctc

SEQ ID NO: 477162 - DNA, 33 bp, Homo sapien
cctgaccttgcccttcgaacactgactgtgctc

SEQ ID NO: 477163 - DNA, 33 bp, Homo sapien
atatgaaaagaggtgaagggctcaagtcagagg

SEQ ID NO: 477164 - DNA, 33 bp, Homo sapien
atatgaaaagaggtgacgggctcaagtcagagg

SEQ ID NO: 477165 - DNA, 33 bp, Homo sapien
atagtcagtctatcaacgccttttattgagtgc

SEQ ID NO: 477166 - DNA, 33 bp, Homo sapien
atagtcagtctatcaatgccttttattgagtgc

SEQ ID NO: 477167 - DNA, 33 bp, Homo sapien
agtaattacaggttcacgagtgtctcacagaga

SEQ ID NO: 477168 - DNA, 33 bp, Homo sapien
agtaattacaggttcatgagtgtctcacagaga

SEQ ID NO: 477169 - DNA, 33 bp, Homo sapien
atggatgatacttgatcacatttaatgctgatg

SEQ ID NO: 477170 - DNA, 33 bp, Homo sapien
atggatgatacttgattacatttaatgctgatg

SEQ ID NO: 477171 - DNA, 33 bp, Homo sapien
tattataaagtgagaaaagcaagctgtaggaca

SEQ ID NO: 477172 - DNA, 33 bp, Homo sapien
tattataaagtgagaagagcaagctgtaggaca

SEQ ID NO: 477173 - DNA, 33 bp, Homo sapien
ctcaagaattgccagggatgttactttggaagg

SEQ ID NO: 477174 - DNA, 33 bp, Homo sapien
ctcaagaattgccaggtatgttactttggaagg

SEQ ID NO: 477175 - DNA, 33 bp, Homo sapien
cccatctccaaattggaaaccatgaatcccacc

SEQ ID NO: 477176 - DNA, 33 bp, Homo sapien
cccatctccaaattgggaaccatgaatcccacc

SEQ ID NO: 477177 - DNA, 33 bp, Homo sapien
atagttgcctgtgatacgacactagcagcttac

SEQ ID NO: 477178 - DNA, 33 bp, Homo sapien
atagttgcctgtgataggacactagcagcttac

SEQ ID NO: 477179 - DNA, 33 bp, Homo sapien
gttgttgctgctcgggacaaagcaacctcttcc

SEQ ID NO: 477180 - DNA, 33 bp, Homo sapien
gttgttgctgctcgggccaaagcaacctcttcc

SEQ ID NO: 477181 - DNA, 33 bp, Homo sapien
cgacctgaaggccctgaagtgtgaacaaaagca

SEQ ID NO: 477182 - DNA, 33 bp, Homo sapien
cgacctgaaggccctggagtgtgaacaaaagca

SEQ ID NO: 477183 - DNA, 33 bp, Homo sapien
atgtaatgtgtccaaacaaaacttctcgcagtt

SEQ ID NO: 477184 - DNA, 33 bp, Homo sapien
atgtaatgtgtccaaagaaaacttctcgcagtt

SEQ ID NO: 477185 - DNA, 33 bp, Homo sapien
gagctccgggtgcatacatccaactggctagtg

SEQ ID NO: 477186 - DNA, 33 bp, Homo sapien
gagctccgggtgcatatatccaactggctagtg

SEQ ID NO: 477187 - DNA, 33 bp, Homo sapien
aagacagagtgaccaaaggtatcaaatgctgtt

SEQ ID NO: 477188 - DNA, 33 bp, Homo sapien
aagacagagtgaccaacggtatcaaatgctgtt

SEQ ID NO: 477189 - DNA, 33 bp, Homo sapien
accagaaacacaccccaatgacaggcactcctg

SEQ ID NO: 477190 - DNA, 33 bp, Homo sapien
accagaaacacacccccatgacaggcactcctg

SEQ ID NO: 477191 - DNA, 33 bp, Homo sapien
ctagtgaaccaatcaaagactgtcaaatgtttt

SEQ ID NO: 477192 - DNA, 33 bp, Homo sapien
ctagtgaaccaatcaaggactgtcaaatgtttt

SEQ ID NO: 477193 - DNA, 33 bp, Homo sapien
gctggagtgaagcaacacgatcatagctcactg

SEQ ID NO: 477194 - DNA, 33 bp, Homo sapien
gctggagtgaagcaacccgatcatagctcactg

SEQ ID NO: 477195 - DNA, 33 bp, Homo sapien
ctcacagaagtaaaagaaaccttggattacgac

SEQ ID NO: 477196 - DNA, 33 bp, Homo sapien
ctcacagaagtaaaaggaaccttggattacgac

SEQ ID NO: 477197 - DNA, 33 bp, Homo sapien
gctaagatagtaggaacagaaaggcccagcccc

SEQ ID NO: 477198 - DNA, 33 bp, Homo sapien
gctaagatagtaggaagagaaaggcccagcccc

SEQ ID NO: 477199 - DNA, 33 bp, Homo sapien
catgcaaaccagggaaactagcagagcttctga

SEQ ID NO: 477200 - DNA, 33 bp, Homo sapien
catgcaaaccagggaacctagcagagcttctga

SEQ ID NO: 477201 - DNA, 33 bp, Homo sapien
atcagaacacagaggaacataaaagcaggagga

SEQ ID NO: 477202 - DNA, 33 bp, Homo sapien
atcagaacacagaggagcataaaagcaggagga

SEQ ID NO: 477203 - DNA, 33 bp, Homo sapien
acctgcagcttgggaacacttcagcagaaacat

SEQ ID NO: 477204 - DNA, 33 bp, Homo sapien
acctgcagcttgggaagacttcagcagaaacat

SEQ ID NO: 477205 - DNA, 33 bp, Homo sapien
tgttttggcttataaaactgaaatatcattaac

SEQ ID NO: 477206 - DNA, 33 bp, Homo sapien
tgttttggcttataaagctgaaatatcattaac

SEQ ID NO: 477207 - DNA, 33 bp, Homo sapien
ttccttcaggatctgacaggttggatgccaagt

SEQ ID NO: 477208 - DNA, 33 bp, Homo sapien
ttccttcaggatctgataggttggatgccaagt

SEQ ID NO: 477209 - DNA, 33 bp, Homo sapien
ttttttcttcatctggaactggtgtttcatgtc

SEQ ID NO: 477210 - DNA, 33 bp, Homo sapien
ttttttcttcatctgggactggtgtttcatgtc

SEQ ID NO: 477211 - DNA, 33 bp, Homo sapien
aatccccaggtgaaaaagcaaaagtgttatctg

SEQ ID NO: 477212 - DNA, 33 bp, Homo sapien
aatccccaggtgaaaacgcaaaagtgttatctg

SEQ ID NO: 477213 - DNA, 33 bp, Homo sapien
atctgccataaggcacacattcagcaaacaaag

SEQ ID NO: 477214 - DNA, 33 bp, Homo sapien
atctgccataaggcacgcattcagcaaacaaag

SEQ ID NO: 477215 - DNA, 33 bp, Homo sapien
agaggaagggttagacaaggaggcaggaggctg

SEQ ID NO: 477216 - DNA, 33 bp, Homo sapien
agaggaagggttagacgaggaggcaggaggctg

SEQ ID NO: 477217 - DNA, 33 bp, Homo sapien
ctgtggagagaacaaacgaggcacgtaaatttc

SEQ ID NO: 477218 - DNA, 33 bp, Homo sapien
ctgtggagagaacaaatgaggcacgtaaatttc

SEQ ID NO: 477219 - DNA, 33 bp, Homo sapien
ggagagcctctggcacaacatcaaccagaataa

SEQ ID NO: 477220 - DNA, 33 bp, Homo sapien
ggagagcctctggcacgacatcaaccagaataa

SEQ ID NO: 477221 - DNA, 33 bp, Homo sapien
gaaatcactctggcacggaggagagcctctggc

SEQ ID NO: 477222 - DNA, 33 bp, Homo sapien
gaaatcactctggcactgaggagagcctctggc

SEQ ID NO: 477223 - DNA, 33 bp, Homo sapien
gacagcccagaggaacaagagtcaaaagggact

SEQ ID NO: 477224 - DNA, 33 bp, Homo sapien
gacagcccagaggaacgagagtcaaaagggact

SEQ ID NO: 477225 - DNA, 33 bp, Homo sapien
ttcttgaggcaagtcacacggtctttcggggtg

SEQ ID NO: 477226 - DNA, 33 bp, Homo sapien
ttcttgaggcaagtcatacggtctttcggggtg

SEQ ID NO: 477227 - DNA, 33 bp, Homo sapien
atggaggtctgctactaaccgctgatgttcagt

SEQ ID NO: 477228 - DNA, 33 bp, Homo sapien
atggaggtctgctactgaccgctgatgttcagt

SEQ ID NO: 477229 - DNA, 33 bp, Homo sapien
gttgcggaggcagctcggaagatgaactgtggg

SEQ ID NO: 477230 - DNA, 33 bp, Homo sapien
gttgcggaggcagctctgaagatgaactgtggg

SEQ ID NO: 477231 - DNA, 33 bp, Homo sapien
agtgatgtgctttatccactgacttacggggcc

SEQ ID NO: 477232 - DNA, 33 bp, Homo sapien
agtgatgtgctttatctactgacttacggggcc

SEQ ID NO: 477233 - DNA, 33 bp, Homo sapien
agtccctaaaatcagacggcaaataggttgggc

SEQ ID NO: 477234 - DNA, 33 bp, Homo sapien
agtccctaaaatcagatggcaaataggttgggc

SEQ ID NO: 477235 - DNA, 33 bp, Homo sapien
atatatgtgtgcaaaacatatagagcagcggtc

SEQ ID NO: 477236 - DNA, 33 bp, Homo sapien
atatatgtgtgcaaaatatatagagcagcggtc

SEQ ID NO: 477237 - DNA, 33 bp, Homo sapien
cttaagtcccttccaacgctactggttactcgg

SEQ ID NO: 477238 - DNA, 33 bp, Homo sapien
cttaagtcccttccaatgctactggttactcgg

SEQ ID NO: 477239 - DNA, 33 bp, Homo sapien
tctgcagcgatgggaaaattcagccattgctct

SEQ ID NO: 477240 - DNA, 33 bp, Homo sapien
tctgcagcgatgggaagattcagccattgctct

SEQ ID NO: 477241 - DNA, 33 bp, Homo sapien
atgaattccccaaaggaaggttatggtaatgtt

SEQ ID NO: 477242 - DNA, 33 bp, Homo sapien
atgaattccccaaaggcaggttatggtaatgtt

SEQ ID NO: 477243 - DNA, 33 bp, Homo sapien
ctccccactactatccaggacattttctggtgg

SEQ ID NO: 477244 - DNA, 33 bp, Homo sapien
ctccccactactatccgggacattttctggtgg

SEQ ID NO: 477245 - DNA, 33 bp, Homo sapien
attccaaggagaaatacccatatgaggcagggg

SEQ ID NO: 477246 - DNA, 33 bp, Homo sapien
attccaaggagaaatatccatatgaggcagggg

SEQ ID NO: 477247 - DNA, 33 bp, Homo sapien
aagggaggcagagctaaagggctagaggtcaag

SEQ ID NO: 477248 - DNA, 33 bp, Homo sapien
aagggaggcagagctagagggctagaggtcaag

SEQ ID NO: 477249 - DNA, 33 bp, Homo sapien
cctctaggctcattcacgttacctcagatgaca

SEQ ID NO: 477250 - DNA, 33 bp, Homo sapien
cctctaggctcattcatgttacctcagatgaca

SEQ ID NO: 477251 - DNA, 33 bp, Homo sapien
aacaggcttggcttacaaagaaagagcttgagg

SEQ ID NO: 477252 - DNA, 33 bp, Homo sapien
aacaggcttggcttacgaagaaagagcttgagg

SEQ ID NO: 477253 - DNA, 33 bp, Homo sapien
cttgagaatggaatgacctttgtactggtaaca

SEQ ID NO: 477254 - DNA, 33 bp, Homo sapien
cttgagaatggaatgagctttgtactggtaaca

SEQ ID NO: 477255 - DNA, 33 bp, Homo sapien
aggctgcaccacaaccacaaagtcctcacgctg

SEQ ID NO: 477256 - DNA, 33 bp, Homo sapien
aggctgcaccacaaccgcaaagtcctcacgctg

SEQ ID NO: 477257 - DNA, 33 bp, Homo sapien
accttattggtcctgacagattaattccaaagg

SEQ ID NO: 477258 - DNA, 33 bp, Homo sapien
accttattggtcctgatagattaattccaaagg

SEQ ID NO: 477259 - DNA, 33 bp, Homo sapien
gccaccagcaactgaacggtttccgcacagcac

SEQ ID NO: 477260 - DNA, 33 bp, Homo sapien
gccaccagcaactgaatggtttccgcacagcac

SEQ ID NO: 477261 - DNA, 33 bp, Homo sapien
gttggcagagacactacgggcctgaaactgtga

SEQ ID NO: 477262 - DNA, 33 bp, Homo sapien
gttggcagagacactatgggcctgaaactgtga

SEQ ID NO: 477263 - DNA, 33 bp, Homo sapien
tgtggtttaagaaaaaatcaagcagagtgatgt

SEQ ID NO: 477264 - DNA, 33 bp, Homo sapien
tgtggtttaagaaaaagtcaagcagagtgatgt

SEQ ID NO: 477265 - DNA, 33 bp, Homo sapien
atgtactaaacgccgcaaattgttccatttaaa

SEQ ID NO: 477266 - DNA, 33 bp, Homo sapien
atgtactaaacgccgcgaattgttccatttaaa

SEQ ID NO: 477267 - DNA, 33 bp, Homo sapien
tggctgagtggctgacagaaggaatggagatgt

SEQ ID NO: 477268 - DNA, 33 bp, Homo sapien
tggctgagtggctgacggaaggaatggagatgt

SEQ ID NO: 477269 - DNA, 33 bp, Homo sapien
ctcggctcaaaggtaccatcctatcaccactgc

SEQ ID NO: 477270 - DNA, 33 bp, Homo sapien
ctcggctcaaaggtactatcctatcaccactgc

SEQ ID NO: 477271 - DNA, 33 bp, Homo sapien
ttcaccattcactccacagctctgtgccgaggc

SEQ ID NO: 477272 - DNA, 33 bp, Homo sapien
ttcaccattcactccatagctctgtgccgaggc

SEQ ID NO: 477273 - DNA, 33 bp, Homo sapien
ctggtgacgagactgcagagggaggatgtggca

SEQ ID NO: 477274 - DNA, 33 bp, Homo sapien
ctggtgacgagactgcggagggaggatgtggca

SEQ ID NO: 477275 - DNA, 33 bp, Homo sapien
aagccttaatcaagtgcacagtgcttgtatcat

SEQ ID NO: 477276 - DNA, 33 bp, Homo sapien
aagccttaatcaagtggacagtgcttgtatcat

SEQ ID NO: 477277 - DNA, 33 bp, Homo sapien
gttgcttcaaagataccgagaaaacgtggcttt

SEQ ID NO: 477278 - DNA, 33 bp, Homo sapien
gttgcttcaaagatactgagaaaacgtggcttt

SEQ ID NO: 477279 - DNA, 33 bp, Homo sapien
atttgttcatggcttccagtacctcagggctaa

SEQ ID NO: 477280 - DNA, 33 bp, Homo sapien
atttgttcatggcttctagtacctcagggctaa

SEQ ID NO: 477281 - DNA, 33 bp, Homo sapien
aggtccttgccttggacaaccggcacgacggca

SEQ ID NO: 477282 - DNA, 33 bp, Homo sapien
aggtccttgccttggataaccggcacgacggca

SEQ ID NO: 477283 - DNA, 33 bp, Homo sapien
aaatggtggaagctacagcagcgagtccatcct

SEQ ID NO: 477284 - DNA, 33 bp, Homo sapien
aaatggtggaagctacggcagcgagtccatcct

SEQ ID NO: 477285 - DNA, 33 bp, Homo sapien
ggtgatcatgtgagtgcatgagaaatacaggaa

SEQ ID NO: 477286 - DNA, 33 bp, Homo sapien
ggtgatcatgtgagtggatgagaaatacaggaa

SEQ ID NO: 477287 - DNA, 33 bp, Homo sapien
tcttatcatcttgtacaactgaaactctgtacc

SEQ ID NO: 477288 - DNA, 33 bp, Homo sapien
tcttatcatcttgtacgactgaaactctgtacc

SEQ ID NO: 477289 - DNA, 33 bp, Homo sapien
ccctgcgtttgatttcaagttttaaggccggca

SEQ ID NO: 477290 - DNA, 33 bp, Homo sapien
ccctgcgtttgatttcgagttttaaggccggca

SEQ ID NO: 477291 - DNA, 33 bp, Homo sapien
acccagaagtccagaacgtagaagtatcaataa

SEQ ID NO: 477292 - DNA, 33 bp, Homo sapien
acccagaagtccagaatgtagaagtatcaataa

SEQ ID NO: 477293 - DNA, 33 bp, Homo sapien
ttacaaatgtaaaaaccgagactcaaaatacac

SEQ ID NO: 477294 - DNA, 33 bp, Homo sapien
ttacaaatgtaaaaactgagactcaaaatacac

SEQ ID NO: 477295 - DNA, 33 bp, Homo sapien
ggcaagggaagcagaaaatccagtttgacacaa

SEQ ID NO: 477296 - DNA, 33 bp, Homo sapien
ggcaagggaagcagaagatccagtttgacacaa

SEQ ID NO: 477297 - DNA, 33 bp, Homo sapien
gaggccgggagtgtgacactagctggactcacc

SEQ ID NO: 477298 - DNA, 33 bp, Homo sapien
gaggccgggagtgtgatactagctggactcacc

SEQ ID NO: 477299 - DNA, 33 bp, Homo sapien
ctagttaaaaccgactcaggcatgtccttcagg

SEQ ID NO: 477300 - DNA, 33 bp, Homo sapien
ctagttaaaaccgactgaggcatgtccttcagg

SEQ ID NO: 477301 - DNA, 33 bp, Homo sapien
gcctcttattgacctgacaaaggaatcagcaat

SEQ ID NO: 477302 - DNA, 33 bp, Homo sapien
gcctcttattgacctggcaaaggaatcagcaat

SEQ ID NO: 477303 - DNA, 33 bp, Homo sapien
tgtagcagtatggatacgaatgtttagcttcat

SEQ ID NO: 477304 - DNA, 33 bp, Homo sapien
tgtagcagtatggatatgaatgtttagcttcat

SEQ ID NO: 477305 - DNA, 33 bp, Homo sapien
tccgctacatgaaaaacacagaggcatggcaag

SEQ ID NO: 477306 - DNA, 33 bp, Homo sapien
tccgctacatgaaaaatacagaggcatggcaag

SEQ ID NO: 477307 - DNA, 33 bp, Homo sapien
gattttttggctaataaaatgattactcttaaa

SEQ ID NO: 477308 - DNA, 33 bp, Homo sapien
gattttttggctaatacaatgattactcttaaa

SEQ ID NO: 477309 - DNA, 33 bp, Homo sapien
ccactctggaatattacgcagtcattgaaaacg

SEQ ID NO: 477310 - DNA, 33 bp, Homo sapien
ccactctggaatattatgcagtcattgaaaacg

SEQ ID NO: 477311 - DNA, 33 bp, Homo sapien
ttccagatctgcataccaaatcgcctgttggta

SEQ ID NO: 477312 - DNA, 33 bp, Homo sapien
ttccagatctgcatacgaaatcgcctgttggta

SEQ ID NO: 477313 - DNA, 33 bp, Homo sapien
tggagtgtaatggcaaagtgtaagctcactgca

SEQ ID NO: 477314 - DNA, 33 bp, Homo sapien
tggagtgtaatggcaaggtgtaagctcactgca

SEQ ID NO: 477315 - DNA, 33 bp, Homo sapien
ttgtaagctttatgacacctgggctggtccatg

SEQ ID NO: 477316 - DNA, 33 bp, Homo sapien
ttgtaagctttatgacgcctgggctggtccatg

SEQ ID NO: 477317 - DNA, 33 bp, Homo sapien
actgcaaacctggataacatgttactgtactaa

SEQ ID NO: 477318 - DNA, 33 bp, Homo sapien
actgcaaacctggatagcatgttactgtactaa

SEQ ID NO: 477319 - DNA, 33 bp, Homo sapien
gtaagcagaagtaatacgagcatttttagagac

SEQ ID NO: 477320 - DNA, 33 bp, Homo sapien
gtaagcagaagtaatatgagcatttttagagac

SEQ ID NO: 477321 - DNA, 33 bp, Homo sapien
taaaatccatattttcaagtctgggcacaatgg

SEQ ID NO: 477322 - DNA, 33 bp, Homo sapien
taaaatccatattttcgagtctgggcacaatgg

SEQ ID NO: 477323 - DNA, 33 bp, Homo sapien
ttagagggtttttgtacgttatgtagctgagca

SEQ ID NO: 477324 - DNA, 33 bp, Homo sapien
ttagagggtttttgtatgttatgtagctgagca

SEQ ID NO: 477325 - DNA, 33 bp, Homo sapien
gttacttcaggtaaacactaaatgcttccttgt

SEQ ID NO: 477326 - DNA, 33 bp, Homo sapien
gttacttcaggtaaacgctaaatgcttccttgt

SEQ ID NO: 477327 - DNA, 33 bp, Homo sapien
atgtctgtacgttccactccacaatatgtttat

SEQ ID NO: 477328 - DNA, 33 bp, Homo sapien
atgtctgtacgttccattccacaatatgtttat

SEQ ID NO: 477329 - DNA, 33 bp, Homo sapien
acttaacaattataaacaacgagaaccgatata

SEQ ID NO: 477330 - DNA, 33 bp, Homo sapien
acttaacaattataaataacgagaaccgatata

SEQ ID NO: 477331 - DNA, 33 bp, Homo sapien
tccagtccccaatctaacttatgaaaactcagc

SEQ ID NO: 477332 - DNA, 33 bp, Homo sapien
tccagtccccaatctaccttatgaaaactcagc

SEQ ID NO: 477333 - DNA, 33 bp, Homo sapien
ttaacattgtttactacagacgtttcttgaaga

SEQ ID NO: 477334 - DNA, 33 bp, Homo sapien
ttaacattgtttactagagacgtttcttgaaga

SEQ ID NO: 477335 - DNA, 33 bp, Homo sapien
tgtaggttagcattgaagaacgtctgggagcaa

SEQ ID NO: 477336 - DNA, 33 bp, Homo sapien
tgtaggttagcattgaggaacgtctgggagcaa

SEQ ID NO: 477337 - DNA, 33 bp, Homo sapien
tgtacctactgaggaacgtttcaaagcataatt

SEQ ID NO: 477338 - DNA, 33 bp, Homo sapien
tgtacctactgaggaaggtttcaaagcataatt

SEQ ID NO: 477339 - DNA, 33 bp, Homo sapien
tttaaaggatattttacggataactggagaaag

SEQ ID NO: 477340 - DNA, 33 bp, Homo sapien
tttaaaggatattttatggataactggagaaag

SEQ ID NO: 477341 - DNA, 33 bp, Homo sapien
caagtgttggttaccaataaaggactgaaatta

SEQ ID NO: 477342 - DNA, 33 bp, Homo sapien
caagtgttggttaccagtaaaggactgaaatta

SEQ ID NO: 477343 - DNA, 33 bp, Homo sapien
gttgtagaatgtcctacattgtggatttgtcca

SEQ ID NO: 477344 - DNA, 33 bp, Homo sapien
gttgtagaatgtcctatattgtggatttgtcca

SEQ ID NO: 477345 - DNA, 33 bp, Homo sapien
ccttttctcactatgcaccacatggaccgcctc

SEQ ID NO: 477346 - DNA, 33 bp, Homo sapien
ccttttctcactatgcgccacatggaccgcctc

SEQ ID NO: 477347 - DNA, 33 bp, Homo sapien
tatcccaaatatcagaagccaaccaattctttc

SEQ ID NO: 477348 - DNA, 33 bp, Homo sapien
tatcccaaatatcagaggccaaccaattctttc

SEQ ID NO: 477349 - DNA, 33 bp, Homo sapien
gtcgcaaataaatacaacatgcaaacacaattt

SEQ ID NO: 477350 - DNA, 33 bp, Homo sapien
gtcgcaaataaatacagcatgcaaacacaattt

SEQ ID NO: 477351 - DNA, 33 bp, Homo sapien
ggttccatcaattttaggctccataagcagtgt

SEQ ID NO: 477352 - DNA, 33 bp, Homo sapien
ggttccatcaattttatgctccataagcagtgt

SEQ ID NO: 477353 - DNA, 33 bp, Homo sapien
aggctggagtgtagtaacgcaaactcggctcac

SEQ ID NO: 477354 - DNA, 33 bp, Homo sapien
aggctggagtgtagtagcgcaaactcggctcac

SEQ ID NO: 477355 - DNA, 33 bp, Homo sapien
gtgttacctgcaataaaggaggatggataacac

SEQ ID NO: 477356 - DNA, 33 bp, Homo sapien
gtgttacctgcaataagggaggatggataacac

SEQ ID NO: 477357 - DNA, 33 bp, Homo sapien
catgcagtgtgaggaaaaattataaagtgaatg

SEQ ID NO: 477358 - DNA, 33 bp, Homo sapien
catgcagtgtgaggaataattataaagtgaatg

SEQ ID NO: 477359 - DNA, 33 bp, Homo sapien
gtgtataagttacatacgctttgttactaggac

SEQ ID NO: 477360 - DNA, 33 bp, Homo sapien
gtgtataagttacatatgctttgttactaggac

SEQ ID NO: 477361 - DNA, 33 bp, Homo sapien
caatgttgttttagacaatgactgtacatattt

SEQ ID NO: 477362 - DNA, 33 bp, Homo sapien
caatgttgttttagacgatgactgtacatattt

SEQ ID NO: 477363 - DNA, 33 bp, Homo sapien
gcttcttggcccaaagactttcaaaagggacat

SEQ ID NO: 477364 - DNA, 33 bp, Homo sapien
gcttcttggcccaaaggctttcaaaagggacat

SEQ ID NO: 477365 - DNA, 33 bp, Homo sapien
cacgcggtaagagctccaagtcaaaccttcctt

SEQ ID NO: 477366 - DNA, 33 bp, Homo sapien
cacgcggtaagagctctaagtcaaaccttcctt

SEQ ID NO: 477367 - DNA, 33 bp, Homo sapien
tttccctcttggtttgcacttccgcttccttct

SEQ ID NO: 477368 - DNA, 33 bp, Homo sapien
tttccctcttggtttgtacttccgcttccttct

SEQ ID NO: 477369 - DNA, 33 bp, Homo sapien
agagtgagctgcacctgagaagcatgtccagaa

SEQ ID NO: 477370 - DNA, 33 bp, Homo sapien
agagtgagctgcaccttagaagcatgtccagaa

SEQ ID NO: 477371 - DNA, 33 bp, Homo sapien
gctttgggaaatactaccactgccctggagttg

SEQ ID NO: 477372 - DNA, 33 bp, Homo sapien
gctttgggaaatactatcactgccctggagttg

SEQ ID NO: 477373 - DNA, 33 bp, Homo sapien
tttccctgtcattaaaaacccacactaaaagca

SEQ ID NO: 477374 - DNA, 33 bp, Homo sapien
tttccctgtcattaaacacccacactaaaagca

SEQ ID NO: 477375 - DNA, 33 bp, Homo sapien
gctgggagacctttaggaattgcaccatagcat

SEQ ID NO: 477376 - DNA, 33 bp, Homo sapien
gctgggagacctttagtaattgcaccatagcat

SEQ ID NO: 477377 - DNA, 33 bp, Homo sapien
gaatggcacctctttcaaagggcctctgtgtcc

SEQ ID NO: 477378 - DNA, 33 bp, Homo sapien
gaatggcacctctttctaagggcctctgtgtcc

SEQ ID NO: 477379 - DNA, 33 bp, Homo sapien
ttttttcgttgcatggaagagttacacaacact

SEQ ID NO: 477380 - DNA, 33 bp, Homo sapien
ttttttcgttgcatggcagagttacacaacact

SEQ ID NO: 477381 - DNA, 33 bp, Homo sapien
agtaaaaatgattgcacagcaactaacaagacg

SEQ ID NO: 477382 - DNA, 33 bp, Homo sapien
agtaaaaatgattgcagagcaactaacaagacg

SEQ ID NO: 477383 - DNA, 33 bp, Homo sapien
gagcttctaggtatgaaatcttgcttctggaac

SEQ ID NO: 477384 - DNA, 33 bp, Homo sapien
gagcttctaggtatgacatcttgcttctggaac

SEQ ID NO: 477385 - DNA, 33 bp, Homo sapien
tgcttctggaacgttaagggaaatgttggtgca

SEQ ID NO: 477386 - DNA, 33 bp, Homo sapien
tgcttctggaacgttaggggaaatgttggtgca

SEQ ID NO: 477387 - DNA, 33 bp, Homo sapien
gctccaggctggagacaactgttgaatgctgtg

SEQ ID NO: 477388 - DNA, 33 bp, Homo sapien
gctccaggctggagacgactgttgaatgctgtg

SEQ ID NO: 477389 - DNA, 33 bp, Homo sapien
gcacatctgagctcccaaccttcccttggaaca

SEQ ID NO: 477390 - DNA, 33 bp, Homo sapien
gcacatctgagctcccgaccttcccttggaaca

SEQ ID NO: 477391 - DNA, 33 bp, Homo sapien
taggataatgcggccacagctgaaggcctgagc

SEQ ID NO: 477392 - DNA, 33 bp, Homo sapien
taggataatgcggccatagctgaaggcctgagc

SEQ ID NO: 477393 - DNA, 33 bp, Homo sapien
agggctgtggccacatcaaaaccacatcaaggg

SEQ ID NO: 477394 - DNA, 33 bp, Homo sapien
agggctgtggccacattaaaaccacatcaaggg

SEQ ID NO: 477395 - DNA, 33 bp, Homo sapien
tagcttagaagatatgcaagctctggaaaactt

SEQ ID NO: 477396 - DNA, 33 bp, Homo sapien
tagcttagaagatatgtaagctctggaaaactt

SEQ ID NO: 477397 - DNA, 33 bp, Homo sapien
agtgcttgttaaagtacagatccctgggttgta

SEQ ID NO: 477398 - DNA, 33 bp, Homo sapien
agtgcttgttaaagtatagatccctgggttgta

SEQ ID NO: 477399 - DNA, 33 bp, Homo sapien
gtactgcagacctaccaaatcagagccttgatc

SEQ ID NO: 477400 - DNA, 33 bp, Homo sapien
gtactgcagacctaccgaatcagagccttgatc

SEQ ID NO: 477401 - DNA, 33 bp, Homo sapien
tctggtcagttttgccccctagagaccaggtct

SEQ ID NO: 477402 - DNA, 33 bp, Homo sapien
tctggtcagttttgcctcctagagaccaggtct

SEQ ID NO: 477403 - DNA, 33 bp, Homo sapien
gcatcatgggcatctccacagctgatggcagga

SEQ ID NO: 477404 - DNA, 33 bp, Homo sapien
gcatcatgggcatctctacagctgatggcagga

SEQ ID NO: 477405 - DNA, 33 bp, Homo sapien
tattacattccattgcccgtaactattgcgtca

SEQ ID NO: 477406 - DNA, 33 bp, Homo sapien
tattacattccattgctcgtaactattgcgtca

SEQ ID NO: 477407 - DNA, 33 bp, Homo sapien
ctggtttggcatcccacgtaagcctgacctcac

SEQ ID NO: 477408 - DNA, 33 bp, Homo sapien
ctggtttggcatcccatgtaagcctgacctcac

SEQ ID NO: 477409 - DNA, 33 bp, Homo sapien
cctatgcccattttgacagattctctgcctgat

SEQ ID NO: 477410 - DNA, 33 bp, Homo sapien
cctatgcccattttgagagattctctgcctgat

SEQ ID NO: 477411 - DNA, 33 bp, Homo sapien
aagcccttccatcttgcaacatgaacatcttca

SEQ ID NO: 477412 - DNA, 33 bp, Homo sapien
aagcccttccatcttggaacatgaacatcttca

SEQ ID NO: 477413 - DNA, 33 bp, Homo sapien
tcccaggtggtgtccacgacccagagcgaaact

SEQ ID NO: 477414 - DNA, 33 bp, Homo sapien
tcccaggtggtgtccatgacccagagcgaaact

SEQ ID NO: 477415 - DNA, 33 bp, Homo sapien
ctgagactgaaatcttcaaaaaccctggcccat

SEQ ID NO: 477416 - DNA, 33 bp, Homo sapien
ctgagactgaaatcttgaaaaaccctggcccat

SEQ ID NO: 477417 - DNA, 33 bp, Homo sapien
cttacagtccagatagaccgtatcaaatgaaag

SEQ ID NO: 477418 - DNA, 33 bp, Homo sapien
cttacagtccagatagtccgtatcaaatgaaag

SEQ ID NO: 477419 - DNA, 33 bp, Homo sapien
agttgtcataagctataagagacaacataggtc

SEQ ID NO: 477420 - DNA, 33 bp, Homo sapien
agttgtcataagctatgagagacaacataggtc

SEQ ID NO: 477421 - DNA, 33 bp, Homo sapien
tatggcaacctattaacctgcttctggcctaaa

SEQ ID NO: 477422 - DNA, 33 bp, Homo sapien
tatggcaacctattaatctgcttctggcctaaa

SEQ ID NO: 477423 - DNA, 33 bp, Homo sapien
agaatatgaaatccaacctaactttcctcatcc

SEQ ID NO: 477424 - DNA, 33 bp, Homo sapien
agaatatgaaatccaatctaactttcctcatcc

SEQ ID NO: 477425 - DNA, 33 bp, Homo sapien
aacatggcccactgaacataggtttaactccaa

SEQ ID NO: 477426 - DNA, 33 bp, Homo sapien
aacatggcccactgaatataggtttaactccaa

SEQ ID NO: 477427 - DNA, 33 bp, Homo sapien
ttggttttgttcaaccaacttctgtttaaaatt

SEQ ID NO: 477428 - DNA, 33 bp, Homo sapien
ttggttttgttcaaccgacttctgtttaaaatt

SEQ ID NO: 477429 - DNA, 33 bp, Homo sapien
ttgtatagtagcataacagttttggataaagta

SEQ ID NO: 477430 - DNA, 33 bp, Homo sapien
ttgtatagtagcataagagttttggataaagta

SEQ ID NO: 477431 - DNA, 33 bp, Homo sapien
taaaaacattgcaaaactcacgctgaaggaagc

SEQ ID NO: 477432 - DNA, 33 bp, Homo sapien
taaaaacattgcaaaagtcacgctgaaggaagc

SEQ ID NO: 477433 - DNA, 33 bp, Homo sapien
agactgtgctgtgatacgaaaacatttttatgg

SEQ ID NO: 477434 - DNA, 33 bp, Homo sapien
agactgtgctgtgatatgaaaacatttttatgg

SEQ ID NO: 477435 - DNA, 33 bp, Homo sapien
agtgctgtaaaaattaactgagaaaaaggatat

SEQ ID NO: 477436 - DNA, 33 bp, Homo sapien
agtgctgtaaaaattagctgagaaaaaggatat

SEQ ID NO: 477437 - DNA, 33 bp, Homo sapien
ggccttgcaagactagaccacagaacaggtaaa

SEQ ID NO: 477438 - DNA, 33 bp, Homo sapien
ggccttgcaagactaggccacagaacaggtaaa

SEQ ID NO: 477439 - DNA, 33 bp, Homo sapien
gaatgctaaaccatccaagatgatataatcatc

SEQ ID NO: 477440 - DNA, 33 bp, Homo sapien
gaatgctaaaccatccgagatgatataatcatc

SEQ ID NO: 477441 - DNA, 33 bp, Homo sapien
tctttcacctaacaccagctgaaatgaacattg

SEQ ID NO: 477442 - DNA, 33 bp, Homo sapien
tctttcacctaacaccggctgaaatgaacattg

SEQ ID NO: 477443 - DNA, 33 bp, Homo sapien
actatgaccacaaaaccacaggaatcaccttcc

SEQ ID NO: 477444 - DNA, 33 bp, Homo sapien
actatgaccacaaaactacaggaatcaccttcc

SEQ ID NO: 477445 - DNA, 33 bp, Homo sapien
cctcagggagatcatgaactatgtgaaagcaca

SEQ ID NO: 477446 - DNA, 33 bp, Homo sapien
cctcagggagatcatgcactatgtgaaagcaca

SEQ ID NO: 477447 - DNA, 33 bp, Homo sapien
tcgaatattgctccagccacatggctacaattc

SEQ ID NO: 477448 - DNA, 33 bp, Homo sapien
tcgaatattgctccaggcacatggctacaattc

SEQ ID NO: 477449 - DNA, 33 bp, Homo sapien
tacttggatcacatgaggaagggagagaaaacg

SEQ ID NO: 477450 - DNA, 33 bp, Homo sapien
tacttggatcacatgatgaagggagagaaaacg

SEQ ID NO: 477451 - DNA, 33 bp, Homo sapien
ccttcggagttgcacaaggtccacggatccaga

SEQ ID NO: 477452 - DNA, 33 bp, Homo sapien
ccttcggagttgcacagggtccacggatccaga

SEQ ID NO: 477453 - DNA, 33 bp, Homo sapien
ttaataatttcccctacggcaggacccggatgt

SEQ ID NO: 477454 - DNA, 33 bp, Homo sapien
ttaataatttcccctatggcaggacccggatgt

SEQ ID NO: 477455 - DNA, 33 bp, Homo sapien
atgttttaatgagtcacaggtagttatttttta

SEQ ID NO: 477456 - DNA, 33 bp, Homo sapien
atgttttaatgagtcagaggtagttatttttta

SEQ ID NO: 477457 - DNA, 33 bp, Homo sapien
ttttcctaagagcataacctctatcacacctgg

SEQ ID NO: 477458 - DNA, 33 bp, Homo sapien
ttttcctaagagcataccctctatcacacctgg

SEQ ID NO: 477459 - DNA, 33 bp, Homo sapien
ctcatacaccaagatcccatacagttctctgat

SEQ ID NO: 477460 - DNA, 33 bp, Homo sapien
ctcatacaccaagatctcatacagttctctgat

SEQ ID NO: 477461 - DNA, 33 bp, Homo sapien
accaagttcttaattacgttgtccatcggttcc

SEQ ID NO: 477462 - DNA, 33 bp, Homo sapien
accaagttcttaattaggttgtccatcggttcc

SEQ ID NO: 477463 - DNA, 33 bp, Homo sapien
gagggtacaagaataacgggttcaggtaggaga

SEQ ID NO: 477464 - DNA, 33 bp, Homo sapien
gagggtacaagaataatgggttcaggtaggaga

SEQ ID NO: 477465 - DNA, 33 bp, Homo sapien
cagtacatagaatacaccaagagttgggagagt

SEQ ID NO: 477466 - DNA, 33 bp, Homo sapien
cagtacatagaatacatcaagagttgggagagt

SEQ ID NO: 477467 - DNA, 33 bp, Homo sapien
ccaacccccttcaggcactctctcttccatttt

SEQ ID NO: 477468 - DNA, 33 bp, Homo sapien
ccaacccccttcaggcgctctctcttccatttt

SEQ ID NO: 477469 - DNA, 33 bp, Homo sapien
gagcccgggtcagctcaatgggccactgaagtg

SEQ ID NO: 477470 - DNA, 33 bp, Homo sapien
gagcccgggtcagctcgatgggccactgaagtg

SEQ ID NO: 477471 - DNA, 33 bp, Homo sapien
ttagccactgggtgacccatctcagtatctaag

SEQ ID NO: 477472 - DNA, 33 bp, Homo sapien
ttagccactgggtgacgcatctcagtatctaag

SEQ ID NO: 477473 - DNA, 33 bp, Homo sapien
atgagacctggttgttcaaaagtgtacagcgct

SEQ ID NO: 477474 - DNA, 33 bp, Homo sapien
atgagacctggttgtttaaaagtgtacagcgct

SEQ ID NO: 477475 - DNA, 33 bp, Homo sapien
ccccacctgatcttgaagtcaaatatctgcccc

SEQ ID NO: 477476 - DNA, 33 bp, Homo sapien
ccccacctgatcttgaggtcaaatatctgcccc

SEQ ID NO: 477477 - DNA, 33 bp, Homo sapien
ctgcagattttattagaagaaatgcccatgaga

SEQ ID NO: 477478 - DNA, 33 bp, Homo sapien
ctgcagattttattaggagaaatgcccatgaga

SEQ ID NO: 477479 - DNA, 33 bp, Homo sapien
tcatgaaaagatctctaaattggtgtctgggga

SEQ ID NO: 477480 - DNA, 33 bp, Homo sapien
tcatgaaaagatctctgaattggtgtctgggga

SEQ ID NO: 477481 - DNA, 33 bp, Homo sapien
aaactgcatcttgtatgaactgctgcaaacaaa

SEQ ID NO: 477482 - DNA, 33 bp, Homo sapien
aaactgcatcttgtattaactgctgcaaacaaa

SEQ ID NO: 477483 - DNA, 33 bp, Homo sapien
tgctcgaaggctgcagaacgggtatgggggtca

SEQ ID NO: 477484 - DNA, 33 bp, Homo sapien
tgctcgaaggctgcaggacgggtatgggggtca

SEQ ID NO: 477485 - DNA, 33 bp, Homo sapien
gcctcggtgctgcaaacgtcactggagatcctc

SEQ ID NO: 477486 - DNA, 33 bp, Homo sapien
gcctcggtgctgcaaatgtcactggagatcctc

SEQ ID NO: 477487 - DNA, 33 bp, Homo sapien
ctctccacggctgagccctcctccctcattaat

SEQ ID NO: 477488 - DNA, 33 bp, Homo sapien
ctctccacggctgagctctcctccctcattaat

SEQ ID NO: 477489 - DNA, 33 bp, Homo sapien
ataaatattggttaaagaaattggctctaacta

SEQ ID NO: 477490 - DNA, 33 bp, Homo sapien
ataaatattggttaaataaattggctctaacta

SEQ ID NO: 477491 - DNA, 33 bp, Homo sapien
tttcagtgatttcagacggatgggcctagagag

SEQ ID NO: 477492 - DNA, 33 bp, Homo sapien
tttcagtgatttcagatggatgggcctagagag

SEQ ID NO: 477493 - DNA, 33 bp, Homo sapien
tctgggaaatgctgcactcaaatagcccagttt

SEQ ID NO: 477494 - DNA, 33 bp, Homo sapien
tctgggaaatgctgcagtcaaatagcccagttt

SEQ ID NO: 477495 - DNA, 33 bp, Homo sapien
ataagtgctaacatgaaaaaagagagcaataat

SEQ ID NO: 477496 - DNA, 33 bp, Homo sapien
ataagtgctaacatgataaaagagagcaataat

SEQ ID NO: 477497 - DNA, 33 bp, Homo sapien
atttgagctttcagagaatagtaattgtgaata

SEQ ID NO: 477498 - DNA, 33 bp, Homo sapien
atttgagctttcagaggatagtaattgtgaata

SEQ ID NO: 477499 - DNA, 33 bp, Homo sapien
gtctgcggataggagaaatttaatctagtgcat

SEQ ID NO: 477500 - DNA, 33 bp, Homo sapien
gtctgcggataggagagatttaatctagtgcat

SEQ ID NO: 477501 - DNA, 33 bp, Homo sapien
cgtctgctcatctgtcagaagtgttacaattcc

SEQ ID NO: 477502 - DNA, 33 bp, Homo sapien
cgtctgctcatctgtcggaagtgttacaattcc

SEQ ID NO: 477503 - DNA, 33 bp, Homo sapien
agtagtcacttctaggaccactgaattaacatc

SEQ ID NO: 477504 - DNA, 33 bp, Homo sapien
agtagtcacttctagggccactgaattaacatc

SEQ ID NO: 477505 - DNA, 33 bp, Homo sapien
agctttgggtgttgcaaggatgttgtggaaggc

SEQ ID NO: 477506 - DNA, 33 bp, Homo sapien
agctttgggtgttgcacggatgttgtggaaggc

SEQ ID NO: 477507 - DNA, 33 bp, Homo sapien
caaaatgaaatagaaaaaacagagtagcccaaa

SEQ ID NO: 477508 - DNA, 33 bp, Homo sapien
caaaatgaaatagaaacaacagagtagcccaaa

SEQ ID NO: 477509 - DNA, 33 bp, Homo sapien
gcccaaccccttccaaccatgcgtaagagacaa

SEQ ID NO: 477510 - DNA, 33 bp, Homo sapien
gcccaaccccttccaatcatgcgtaagagacaa

SEQ ID NO: 477511 - DNA, 33 bp, Homo sapien
atggaaggctagcagactcagctggccctttcc

SEQ ID NO: 477512 - DNA, 33 bp, Homo sapien
atggaaggctagcagagtcagctggccctttcc

SEQ ID NO: 477513 - DNA, 33 bp, Homo sapien
gaaaacaccaagagaaagaagtcatacccatcc

SEQ ID NO: 477514 - DNA, 33 bp, Homo sapien
gaaaacaccaagagaaggaagtcatacccatcc

SEQ ID NO: 477515 - DNA, 33 bp, Homo sapien
ctattgaatgattccactgatagaaaatgtcta

SEQ ID NO: 477516 - DNA, 33 bp, Homo sapien
ctattgaatgattccattgatagaaaatgtcta

SEQ ID NO: 477517 - DNA, 33 bp, Homo sapien
tctccagcaaggagacagtaagcggtgccagaa

SEQ ID NO: 477518 - DNA, 33 bp, Homo sapien
tctccagcaaggagacggtaagcggtgccagaa

SEQ ID NO: 477519 - DNA, 33 bp, Homo sapien
tctccagagtcagctacggcctcaggtctggag

SEQ ID NO: 477520 - DNA, 33 bp, Homo sapien
tctccagagtcagctatggcctcaggtctggag

SEQ ID NO: 477521 - DNA, 33 bp, Homo sapien
ctcctgttgatccttacagcagtgaactttatt

SEQ ID NO: 477522 - DNA, 33 bp, Homo sapien
ctcctgttgatccttatagcagtgaactttatt

SEQ ID NO: 477523 - DNA, 33 bp, Homo sapien
ggcagtaagcactcaacaaacgctagctctaat

SEQ ID NO: 477524 - DNA, 33 bp, Homo sapien
ggcagtaagcactcaataaacgctagctctaat

SEQ ID NO: 477525 - DNA, 33 bp, Homo sapien
cagaaatgtgaattaaacagaatttttttaggg

SEQ ID NO: 477526 - DNA, 33 bp, Homo sapien
cagaaatgtgaattaagcagaatttttttaggg

SEQ ID NO: 477527 - DNA, 33 bp, Homo sapien
atgtgggatgctgtcaataacaacactctccct

SEQ ID NO: 477528 - DNA, 33 bp, Homo sapien
atgtgggatgctgtcagtaacaacactctccct

SEQ ID NO: 477529 - DNA, 33 bp, Homo sapien
acatgctctgaggttgaaagctgccctcccaga

SEQ ID NO: 477530 - DNA, 33 bp, Homo sapien
acatgctctgaggttggaagctgccctcccaga

SEQ ID NO: 477531 - DNA, 33 bp, Homo sapien
ctacccccagtgtctggaggaaaaataaaattg

SEQ ID NO: 477532 - DNA, 33 bp, Homo sapien
ctacccccagtgtctgtaggaaaaataaaattg

SEQ ID NO: 477533 - DNA, 33 bp, Homo sapien
ggatacttgaacttcactgaaagcctcttggtg

SEQ ID NO: 477534 - DNA, 33 bp, Homo sapien
ggatacttgaacttcattgaaagcctcttggtg

SEQ ID NO: 477535 - DNA, 33 bp, Homo sapien
ggtacctttactctgacgaaactgccagtttac

SEQ ID NO: 477536 - DNA, 33 bp, Homo sapien
ggtacctttactctgatgaaactgccagtttac

SEQ ID NO: 477537 - DNA, 33 bp, Homo sapien
ctttcttgcatacaaaaccttcactaataaggt

SEQ ID NO: 477538 - DNA, 33 bp, Homo sapien
ctttcttgcatacaaacccttcactaataaggt

SEQ ID NO: 477539 - DNA, 33 bp, Homo sapien
cagggactcagaagtaaatcagtccctgggggc

SEQ ID NO: 477540 - DNA, 33 bp, Homo sapien
cagggactcagaagtagatcagtccctgggggc

SEQ ID NO: 477541 - DNA, 33 bp, Homo sapien
caacagtctccaataacaactttcttgctcccc

SEQ ID NO: 477542 - DNA, 33 bp, Homo sapien
caacagtctccaataagaactttcttgctcccc

SEQ ID NO: 477543 - DNA, 33 bp, Homo sapien
tgacccatagaatgtaagaaagtgccaaggagc

SEQ ID NO: 477544 - DNA, 33 bp, Homo sapien
tgacccatagaatgtaggaaagtgccaaggagc

SEQ ID NO: 477545 - DNA, 33 bp, Homo sapien
caactgttcagagctacgaacaaataggagaat

SEQ ID NO: 477546 - DNA, 33 bp, Homo sapien
caactgttcagagctaggaacaaataggagaat

SEQ ID NO: 477547 - DNA, 33 bp, Homo sapien
ctgcttatatcctgagaaagaacatctgcctgg

SEQ ID NO: 477548 - DNA, 33 bp, Homo sapien
ctgcttatatcctgaggaagaacatctgcctgg

SEQ ID NO: 477549 - DNA, 33 bp, Homo sapien
actctgtaagctttgacacacaggggattctca

SEQ ID NO: 477550 - DNA, 33 bp, Homo sapien
actctgtaagctttgatacacaggggattctca

SEQ ID NO: 477551 - DNA, 33 bp, Homo sapien
attacaggtgtctggacggttgtcattagagac

SEQ ID NO: 477552 - DNA, 33 bp, Homo sapien
attacaggtgtctggatggttgtcattagagac

SEQ ID NO: 477553 - DNA, 33 bp, Homo sapien
agtgttagccactcaacagtaaataatgaggca

SEQ ID NO: 477554 - DNA, 33 bp, Homo sapien
agtgttagccactcaatagtaaataatgaggca

SEQ ID NO: 477555 - DNA, 33 bp, Homo sapien
cagaatcatcactaaaatcagataagaagataa

SEQ ID NO: 477556 - DNA, 33 bp, Homo sapien
cagaatcatcactaaagtcagataagaagataa

SEQ ID NO: 477557 - DNA, 33 bp, Homo sapien
tcatttctcctgacagccctggagaggatactg

SEQ ID NO: 477558 - DNA, 33 bp, Homo sapien
tcatttctcctgacagtcctggagaggatactg

SEQ ID NO: 477559 - DNA, 33 bp, Homo sapien
tcacttccggaacccaaattaagaaagtagcct

SEQ ID NO: 477560 - DNA, 33 bp, Homo sapien
tcacttccggaacccagattaagaaagtagcct

SEQ ID NO: 477561 - DNA, 33 bp, Homo sapien
tgctggccatatagaccctctgtgatcccacat

SEQ ID NO: 477562 - DNA, 33 bp, Homo sapien
tgctggccatatagactctctgtgatcccacat

SEQ ID NO: 477563 - DNA, 33 bp, Homo sapien
tctcagtaaatctatacggagactgactttgtc

SEQ ID NO: 477564 - DNA, 33 bp, Homo sapien
tctcagtaaatctatatggagactgactttgtc

SEQ ID NO: 477565 - DNA, 33 bp, Homo sapien
ggtttgctgtgtcttactaaaacctttcccatc

SEQ ID NO: 477566 - DNA, 33 bp, Homo sapien
ggtttgctgtgtcttattaaaacctttcccatc

SEQ ID NO: 477567 - DNA, 33 bp, Homo sapien
cccttcaaccagtcccaatagacctcacataga

SEQ ID NO: 477568 - DNA, 33 bp, Homo sapien
cccttcaaccagtcccgatagacctcacataga

SEQ ID NO: 477569 - DNA, 33 bp, Homo sapien
catggagttaactgaactatacctggcccacat

SEQ ID NO: 477570 - DNA, 33 bp, Homo sapien
catggagttaactgaattatacctggcccacat

SEQ ID NO: 477571 - DNA, 33 bp, Homo sapien
caattatctgggaaaagagaggtccagagaggg

SEQ ID NO: 477572 - DNA, 33 bp, Homo sapien
caattatctgggaaaatagaggtccagagaggg

SEQ ID NO: 477573 - DNA, 33 bp, Homo sapien
tcatctgtgaatgcacaacacaaatggaagagg

SEQ ID NO: 477574 - DNA, 33 bp, Homo sapien
tcatctgtgaatgcaccacacaaatggaagagg

SEQ ID NO: 477575 - DNA, 33 bp, Homo sapien
ctctggttctcaggtcactttctacgagggtaa

SEQ ID NO: 477576 - DNA, 33 bp, Homo sapien
ctctggttctcaggtcgctttctacgagggtaa

SEQ ID NO: 477577 - DNA, 33 bp, Homo sapien
tgacctaaaaggcagcacttctgacagttcagt

SEQ ID NO: 477578 - DNA, 33 bp, Homo sapien
tgacctaaaaggcagctcttctgacagttcagt

SEQ ID NO: 477579 - DNA, 33 bp, Homo sapien
agggcccagatggcacacttgattttctttatt

SEQ ID NO: 477580 - DNA, 33 bp, Homo sapien
agggcccagatggcacgcttgattttctttatt

SEQ ID NO: 477581 - DNA, 33 bp, Homo sapien
gaaaagttattaaaaacacatcgaggaacccag

SEQ ID NO: 477582 - DNA, 33 bp, Homo sapien
gaaaagttattaaaaatacatcgaggaacccag

SEQ ID NO: 477583 - DNA, 33 bp, Homo sapien
ccaagataagctggaacgttcaatatgatttta

SEQ ID NO: 477584 - DNA, 33 bp, Homo sapien
ccaagataagctggaatgttcaatatgatttta

SEQ ID NO: 477585 - DNA, 33 bp, Homo sapien
gggctccagtgtagccaatccaaccatttcagc

SEQ ID NO: 477586 - DNA, 33 bp, Homo sapien
gggctccagtgtagccgatccaaccatttcagc

SEQ ID NO: 477587 - DNA, 33 bp, Homo sapien
aaaggaagaaagtcgaaaagtgagaatgaatta

SEQ ID NO: 477588 - DNA, 33 bp, Homo sapien
aaaggaagaaagtcgagaagtgagaatgaatta

SEQ ID NO: 477589 - DNA, 33 bp, Homo sapien
tttatttatgatcacacggaataaataaatgat

SEQ ID NO: 477590 - DNA, 33 bp, Homo sapien
tttatttatgatcacagggaataaataaatgat

SEQ ID NO: 477591 - DNA, 33 bp, Homo sapien
aatcgttttgtagatacgaaatgctggctaaga

SEQ ID NO: 477592 - DNA, 33 bp, Homo sapien
aatcgttttgtagatatgaaatgctggctaaga

SEQ ID NO: 477593 - DNA, 33 bp, Homo sapien
tagatgtttgcacctgaaggatgtgtagcaatg

SEQ ID NO: 477594 - DNA, 33 bp, Homo sapien
tagatgtttgcacctgcaggatgtgtagcaatg

SEQ ID NO: 477595 - DNA, 33 bp, Homo sapien
tctctggacatcatcagtcctcacagatgtcaa

SEQ ID NO: 477596 - DNA, 33 bp, Homo sapien
tctctggacatcatcattcctcacagatgtcaa

SEQ ID NO: 477597 - DNA, 33 bp, Homo sapien
gaattagcttcagtgacctgaattaactacaga

SEQ ID NO: 477598 - DNA, 33 bp, Homo sapien
gaattagcttcagtgatctgaattaactacaga

SEQ ID NO: 477599 - DNA, 33 bp, Homo sapien
acaaaagccacataaactagataaccagccaag

SEQ ID NO: 477600 - DNA, 33 bp, Homo sapien
acaaaagccacataaattagataaccagccaag

SEQ ID NO: 477601 - DNA, 33 bp, Homo sapien
tgcatattccagtccagattctgaagatgcaga

SEQ ID NO: 477602 - DNA, 33 bp, Homo sapien
tgcatattccagtccatattctgaagatgcaga

SEQ ID NO: 477603 - DNA, 33 bp, Homo sapien
tagagctgtccataacagaattctctgaactac

SEQ ID NO: 477604 - DNA, 33 bp, Homo sapien
tagagctgtccataacggaattctctgaactac

SEQ ID NO: 477605 - DNA, 33 bp, Homo sapien
gggggaccccaaaaaggcctggctgttggattc

SEQ ID NO: 477606 - DNA, 33 bp, Homo sapien
gggggaccccaaaaagtcctggctgttggattc

SEQ ID NO: 477607 - DNA, 33 bp, Homo sapien
gctcaaatgccctagacggagacaatgatcaaa

SEQ ID NO: 477608 - DNA, 33 bp, Homo sapien
gctcaaatgccctagatggagacaatgatcaaa

SEQ ID NO: 477609 - DNA, 33 bp, Homo sapien
ctgattacttaaccaaactctctgaacttcaac

SEQ ID NO: 477610 - DNA, 33 bp, Homo sapien
ctgattacttaaccaagctctctgaacttcaac

SEQ ID NO: 477611 - DNA, 33 bp, Homo sapien
caataataacattaaacgcaaatggactaaaca

SEQ ID NO: 477612 - DNA, 33 bp, Homo sapien
caataataacattaaatgcaaatggactaaaca

SEQ ID NO: 477613 - DNA, 33 bp, Homo sapien
aagaggtcaaatctacaaccagtcccaggattt

SEQ ID NO: 477614 - DNA, 33 bp, Homo sapien
aagaggtcaaatctaccaccagtcccaggattt

SEQ ID NO: 477615 - DNA, 33 bp, Homo sapien
cagattgctcttgttacgcccaatttgcaaaag

SEQ ID NO: 477616 - DNA, 33 bp, Homo sapien
cagattgctcttgttatgcccaatttgcaaaag

SEQ ID NO: 477617 - DNA, 33 bp, Homo sapien
actaaataaacattccaatggcaatcacgttgc

SEQ ID NO: 477618 - DNA, 33 bp, Homo sapien
actaaataaacattccgatggcaatcacgttgc

SEQ ID NO: 477619 - DNA, 33 bp, Homo sapien
gcaaatgaacagatgaagattgaacaaaggagg

SEQ ID NO: 477620 - DNA, 33 bp, Homo sapien
gcaaatgaacagatgaggattgaacaaaggagg

SEQ ID NO: 477621 - DNA, 33 bp, Homo sapien
tgcagtaggagtggaacgaacacagcaagatgt

SEQ ID NO: 477622 - DNA, 33 bp, Homo sapien
tgcagtaggagtggaaggaacacagcaagatgt

SEQ ID NO: 477623 - DNA, 33 bp, Homo sapien
cttgcatttcttctcaatatggtacaggcatac

SEQ ID NO: 477624 - DNA, 33 bp, Homo sapien
cttgcatttcttctcagtatggtacaggcatac

SEQ ID NO: 477625 - DNA, 33 bp, Homo sapien
catataatcgtaaaaacctacaccataaatccg

SEQ ID NO: 477626 - DNA, 33 bp, Homo sapien
catataatcgtaaaaatctacaccataaatccg

SEQ ID NO: 477627 - DNA, 33 bp, Homo sapien
tatgtcttggaaatagccaaccctaatgaggtc

SEQ ID NO: 477628 - DNA, 33 bp, Homo sapien
tatgtcttggaaatagtcaaccctaatgaggtc

SEQ ID NO: 477629 - DNA, 33 bp, Homo sapien
ccagtctcacaatagccaagacatcctttcttt

SEQ ID NO: 477630 - DNA, 33 bp, Homo sapien
ccagtctcacaatagcgaagacatcctttcttt

SEQ ID NO: 477631 - DNA, 33 bp, Homo sapien
gaggacgcttgaacacacaggcctgaaactcat

SEQ ID NO: 477632 - DNA, 33 bp, Homo sapien
gaggacgcttgaacacgcaggcctgaaactcat

SEQ ID NO: 477633 - DNA, 33 bp, Homo sapien
ggagatttgcaaagccacatgcttgagatttat

SEQ ID NO: 477634 - DNA, 33 bp, Homo sapien
ggagatttgcaaagccgcatgcttgagatttat

SEQ ID NO: 477635 - DNA, 33 bp, Homo sapien
caaatctcctttaggaaaaattgtagcaataaa

SEQ ID NO: 477636 - DNA, 33 bp, Homo sapien
caaatctcctttaggataaattgtagcaataaa

SEQ ID NO: 477637 - DNA, 33 bp, Homo sapien
ataccagacacataacccaaagttgtttgttct

SEQ ID NO: 477638 - DNA, 33 bp, Homo sapien
ataccagacacataactcaaagttgtttgttct

SEQ ID NO: 477639 - DNA, 33 bp, Homo sapien
ctgtttagtatttagcggaaagaacaaaatgcc

SEQ ID NO: 477640 - DNA, 33 bp, Homo sapien
ctgtttagtatttagctgaaagaacaaaatgcc

SEQ ID NO: 477641 - DNA, 33 bp, Homo sapien
gaggccactgtttttcacaagttgcagtcctag

SEQ ID NO: 477642 - DNA, 33 bp, Homo sapien
gaggccactgtttttcgcaagttgcagtcctag

SEQ ID NO: 477643 - DNA, 33 bp, Homo sapien
acaagaaagccaatagcaggcaatgctcacaca

SEQ ID NO: 477644 - DNA, 33 bp, Homo sapien
acaagaaagccaatagtaggcaatgctcacaca

SEQ ID NO: 477645 - DNA, 33 bp, Homo sapien
tctcagtgcatccccaatggctagctccatgtc

SEQ ID NO: 477646 - DNA, 33 bp, Homo sapien
tctcagtgcatccccagtggctagctccatgtc

SEQ ID NO: 477647 - DNA, 33 bp, Homo sapien
agtggtaatattggcaaagatccttgaacaaat

SEQ ID NO: 477648 - DNA, 33 bp, Homo sapien
agtggtaatattggcatagatccttgaacaaat

SEQ ID NO: 477649 - DNA, 33 bp, Homo sapien
gtattaagtggatttacacttacttgagcgtca

SEQ ID NO: 477650 - DNA, 33 bp, Homo sapien
gtattaagtggatttatacttacttgagcgtca

SEQ ID NO: 477651 - DNA, 33 bp, Homo sapien
acacatcagagagtcacgtatcgtgttttctcc

SEQ ID NO: 477652 - DNA, 33 bp, Homo sapien
acacatcagagagtcatgtatcgtgttttctcc

SEQ ID NO: 477653 - DNA, 33 bp, Homo sapien
tgttccataacaaaaccagtccttgttaggatg

SEQ ID NO: 477654 - DNA, 33 bp, Homo sapien
tgttccataacaaaacgagtccttgttaggatg

SEQ ID NO: 477655 - DNA, 33 bp, Homo sapien
tttttttctgagaccaatgggaagccatgcaaa

SEQ ID NO: 477656 - DNA, 33 bp, Homo sapien
tttttttctgagaccagtgggaagccatgcaaa

SEQ ID NO: 477657 - DNA, 33 bp, Homo sapien
ccatgcaaaggttttacagtgaggtggcctgct

SEQ ID NO: 477658 - DNA, 33 bp, Homo sapien
ccatgcaaaggttttatagtgaggtggcctgct

SEQ ID NO: 477659 - DNA, 33 bp, Homo sapien
aaaaaactcaacatctcaaaactgaagtttgta

SEQ ID NO: 477660 - DNA, 33 bp, Homo sapien
aaaaaactcaacatctgaaaactgaagtttgta

SEQ ID NO: 477661 - DNA, 33 bp, Homo sapien
tgtattcttaggtaaaatgaggcaagatgaggg

SEQ ID NO: 477662 - DNA, 33 bp, Homo sapien
tgtattcttaggtaaactgaggcaagatgaggg

SEQ ID NO: 477663 - DNA, 33 bp, Homo sapien
attatcatacaaattacggggaatgaaggaagg

SEQ ID NO: 477664 - DNA, 33 bp, Homo sapien
attatcatacaaattatggggaatgaaggaagg

SEQ ID NO: 477665 - DNA, 33 bp, Homo sapien
ttacatcacatcacccacctgggcttcatgttc

SEQ ID NO: 477666 - DNA, 33 bp, Homo sapien
ttacatcacatcacccgcctgggcttcatgttc

SEQ ID NO: 477667 - DNA, 33 bp, Homo sapien
cgaaaggaaacaagacacgaggtggccttctgg

SEQ ID NO: 477668 - DNA, 33 bp, Homo sapien
cgaaaggaaacaagactcgaggtggccttctgg

SEQ ID NO: 477669 - DNA, 33 bp, Homo sapien
taatgtagattatttacgacagttgtagatcac

SEQ ID NO: 477670 - DNA, 33 bp, Homo sapien
taatgtagattatttatgacagttgtagatcac

SEQ ID NO: 477671 - DNA, 33 bp, Homo sapien
gctcaaggtaggtatgaaataaaaatcagttcc

SEQ ID NO: 477672 - DNA, 33 bp, Homo sapien
gctcaaggtaggtatgtaataaaaatcagttcc

SEQ ID NO: 477673 - DNA, 33 bp, Homo sapien
tcaaaggaattccagactaagacacctgtcaac

SEQ ID NO: 477674 - DNA, 33 bp, Homo sapien
tcaaaggaattccagattaagacacctgtcaac

SEQ ID NO: 477675 - DNA, 33 bp, Homo sapien
aatagagaactatcaacggaggaacaaattctg

SEQ ID NO: 477676 - DNA, 33 bp, Homo sapien
aatagagaactatcaatggaggaacaaattctg

SEQ ID NO: 477677 - DNA, 33 bp, Homo sapien
agccagatatggaatgcagcatttttaagtctc

SEQ ID NO: 477678 - DNA, 33 bp, Homo sapien
agccagatatggaatgtagcatttttaagtctc

SEQ ID NO: 477679 - DNA, 33 bp, Homo sapien
ccatgatagaaatctaagaaggtgtttcagtca

SEQ ID NO: 477680 - DNA, 33 bp, Homo sapien
ccatgatagaaatctacgaaggtgtttcagtca

SEQ ID NO: 477681 - DNA, 33 bp, Homo sapien
ttcaatgtgcatttcacattaataacgaacaat

SEQ ID NO: 477682 - DNA, 33 bp, Homo sapien
ttcaatgtgcatttcagattaataacgaacaat

SEQ ID NO: 477683 - DNA, 33 bp, Homo sapien
ttttgaacattatgacgagtggctacagagggt

SEQ ID NO: 477684 - DNA, 33 bp, Homo sapien
ttttgaacattatgactagtggctacagagggt

SEQ ID NO: 477685 - DNA, 33 bp, Homo sapien
aagaccagcaggaggaagaagcagaattaattt

SEQ ID NO: 477686 - DNA, 33 bp, Homo sapien
aagaccagcaggaggaggaagcagaattaattt

SEQ ID NO: 477687 - DNA, 33 bp, Homo sapien
tgagctttttctatgcactaggcattgagtgta

SEQ ID NO: 477688 - DNA, 33 bp, Homo sapien
tgagctttttctatgcgctaggcattgagtgta

SEQ ID NO: 477689 - DNA, 33 bp, Homo sapien
cttggaggtacttacaatctatttcttgaccta

SEQ ID NO: 477690 - DNA, 33 bp, Homo sapien
cttggaggtacttacagtctatttcttgaccta

SEQ ID NO: 477691 - DNA, 33 bp, Homo sapien
caaaacaaaaggtatacataggtcctaagtgcc

SEQ ID NO: 477692 - DNA, 33 bp, Homo sapien
caaaacaaaaggtatagataggtcctaagtgcc

SEQ ID NO: 477693 - DNA, 33 bp, Homo sapien
gcatctctacatactacaggattgtcctcaatc

SEQ ID NO: 477694 - DNA, 33 bp, Homo sapien
gcatctctacatactataggattgtcctcaatc

SEQ ID NO: 477695 - DNA, 33 bp, Homo sapien
gagtaggactgattaaataggtaggagaagcag

SEQ ID NO: 477696 - DNA, 33 bp, Homo sapien
gagtaggactgattaagtaggtaggagaagcag

SEQ ID NO: 477697 - DNA, 33 bp, Homo sapien
tggctatacaacagtagcccggtgattggagga

SEQ ID NO: 477698 - DNA, 33 bp, Homo sapien
tggctatacaacagtatcccggtgattggagga

SEQ ID NO: 477699 - DNA, 33 bp, Homo sapien
gtaaggatgcagaatggcactggaagggctcac

SEQ ID NO: 477700 - DNA, 33 bp, Homo sapien
gtaaggatgcagaatgtcactggaagggctcac

SEQ ID NO: 477701 - DNA, 33 bp, Homo sapien
gtgacatcagcagagagaccctcaagtgccaca

SEQ ID NO: 477702 - DNA, 33 bp, Homo sapien
gtgacatcagcagagataccctcaagtgccaca

SEQ ID NO: 477703 - DNA, 33 bp, Homo sapien
gacctctgatccaaatcagtggctggcacagag

SEQ ID NO: 477704 - DNA, 33 bp, Homo sapien
gacctctgatccaaattagtggctggcacagag

SEQ ID NO: 477705 - DNA, 33 bp, Homo sapien
ctgacggtgttccagtaaaattttggtggacac

SEQ ID NO: 477706 - DNA, 33 bp, Homo sapien
ctgacggtgttccagtgaaattttggtggacac

SEQ ID NO: 477707 - DNA, 33 bp, Homo sapien
aaggctctttctaaaccgaaacgtacatgaggg

SEQ ID NO: 477708 - DNA, 33 bp, Homo sapien
aaggctctttctaaactgaaacgtacatgaggg

SEQ ID NO: 477709 - DNA, 33 bp, Homo sapien
taaatgagtgttgaaactgttcctatttcccag

SEQ ID NO: 477710 - DNA, 33 bp, Homo sapien
taaatgagtgttgaaagtgttcctatttcccag

SEQ ID NO: 477711 - DNA, 33 bp, Homo sapien
tgttctctttttagaaatactctctgtaccggg

SEQ ID NO: 477712 - DNA, 33 bp, Homo sapien
tgttctctttttagaagtactctctgtaccggg

SEQ ID NO: 477713 - DNA, 33 bp, Homo sapien
aacaccatacctcttccactgtttatgccccaa

SEQ ID NO: 477714 - DNA, 33 bp, Homo sapien
aacaccatacctcttctactgtttatgccccaa

SEQ ID NO: 477715 - DNA, 33 bp, Homo sapien
taatccagataggccaatgagcttcggcctctg

SEQ ID NO: 477716 - DNA, 33 bp, Homo sapien
taatccagataggccagtgagcttcggcctctg

SEQ ID NO: 477717 - DNA, 33 bp, Homo sapien
gtgaaaggaactaaccacagagcctttcacagg

SEQ ID NO: 477718 - DNA, 33 bp, Homo sapien
gtgaaaggaactaaccgcagagcctttcacagg

SEQ ID NO: 477719 - DNA, 33 bp, Homo sapien
ctgggaggatccttcacagcagggattgggtct

SEQ ID NO: 477720 - DNA, 33 bp, Homo sapien
ctgggaggatccttcatagcagggattgggtct

SEQ ID NO: 477721 - DNA, 33 bp, Homo sapien
gacacagaccttctgaagcataaaacacagccc

SEQ ID NO: 477722 - DNA, 33 bp, Homo sapien
gacacagaccttctgaggcataaaacacagccc

SEQ ID NO: 477723 - DNA, 33 bp, Homo sapien
tagtcactggactatacgctctgaaatgcagtt

SEQ ID NO: 477724 - DNA, 33 bp, Homo sapien
tagtcactggactatatgctctgaaatgcagtt

SEQ ID NO: 477725 - DNA, 33 bp, Homo sapien
aacaccctgacttacacgggctttgtggacagg

SEQ ID NO: 477726 - DNA, 33 bp, Homo sapien
aacaccctgacttacatgggctttgtggacagg

SEQ ID NO: 477727 - DNA, 33 bp, Homo sapien
atttgggaattgcagaaggaatgagtcctactt

SEQ ID NO: 477728 - DNA, 33 bp, Homo sapien
atttgggaattgcagagggaatgagtcctactt

SEQ ID NO: 477729 - DNA, 33 bp, Homo sapien
gggcactgtgtccacactggtggccgtggaatg

SEQ ID NO: 477730 - DNA, 33 bp, Homo sapien
gggcactgtgtccacattggtggccgtggaatg

SEQ ID NO: 477731 - DNA, 33 bp, Homo sapien
caggtgaagcataaagacctcagtggatgtctg

SEQ ID NO: 477732 - DNA, 33 bp, Homo sapien
caggtgaagcataaaggcctcagtggatgtctg

SEQ ID NO: 477733 - DNA, 33 bp, Homo sapien
atatcaaagtccctaccctcatgaccacatctc

SEQ ID NO: 477734 - DNA, 33 bp, Homo sapien
atatcaaagtccctactctcatgaccacatctc

SEQ ID NO: 477735 - DNA, 33 bp, Homo sapien
agagagcataataaaacattcacatacagattt

SEQ ID NO: 477736 - DNA, 33 bp, Homo sapien
agagagcataataaaatattcacatacagattt

SEQ ID NO: 477737 - DNA, 33 bp, Homo sapien
ccaactgacaggaccactgcctattaaccagga

SEQ ID NO: 477738 - DNA, 33 bp, Homo sapien
ccaactgacaggaccattgcctattaaccagga

SEQ ID NO: 477739 - DNA, 33 bp, Homo sapien
gcagaggaatatgacaatgaacagacatacaat

SEQ ID NO: 477740 - DNA, 33 bp, Homo sapien
gcagaggaatatgacagtgaacagacatacaat

SEQ ID NO: 477741 - DNA, 33 bp, Homo sapien
gaggcagtagtctacccgacaaacagattccat

SEQ ID NO: 477742 - DNA, 33 bp, Homo sapien
gaggcagtagtctacctgacaaacagattccat

SEQ ID NO: 477743 - DNA, 33 bp, Homo sapien
acaacagtcgtggatgaataggaaggtgcccaa

SEQ ID NO: 477744 - DNA, 33 bp, Homo sapien
acaacagtcgtggatgcataggaaggtgcccaa

SEQ ID NO: 477745 - DNA, 33 bp, Homo sapien
atgtggtgttgggggaagaatatacacatagat

SEQ ID NO: 477746 - DNA, 33 bp, Homo sapien
atgtggtgttgggggaggaatatacacatagat

SEQ ID NO: 477747 - DNA, 33 bp, Homo sapien
taaaaaatgacaacacaaaatactgataaggat

SEQ ID NO: 477748 - DNA, 33 bp, Homo sapien
taaaaaatgacaacaccaaatactgataaggat

SEQ ID NO: 477749 - DNA, 33 bp, Homo sapien
attctgtacatgcctacacatgagaagctggac

SEQ ID NO: 477750 - DNA, 33 bp, Homo sapien
attctgtacatgcctatacatgagaagctggac

SEQ ID NO: 477751 - DNA, 33 bp, Homo sapien
tgaccattgggtcttacatgaaagaagccaagt

SEQ ID NO: 477752 - DNA, 33 bp, Homo sapien
tgaccattgggtcttatatgaaagaagccaagt

SEQ ID NO: 477753 - DNA, 33 bp, Homo sapien
ccatcagtgaacccaaccaacatcaatccctgc

SEQ ID NO: 477754 - DNA, 33 bp, Homo sapien
ccatcagtgaacccaatcaacatcaatccctgc

SEQ ID NO: 477755 - DNA, 33 bp, Homo sapien
gggagaagaagagacagattagagatgcagagc

SEQ ID NO: 477756 - DNA, 33 bp, Homo sapien
gggagaagaagagacatattagagatgcagagc

SEQ ID NO: 477757 - DNA, 33 bp, Homo sapien
aggagtggccactaaaaatgaaagattgcaggc

SEQ ID NO: 477758 - DNA, 33 bp, Homo sapien
aggagtggccactaaacatgaaagattgcaggc

SEQ ID NO: 477759 - DNA, 33 bp, Homo sapien
tagtactctaggcttacaacaaaacacagctgc

SEQ ID NO: 477760 - DNA, 33 bp, Homo sapien
tagtactctaggcttataacaaaacacagctgc

SEQ ID NO: 477761 - DNA, 33 bp, Homo sapien
aattcctagcataatgacaaaagaaagtagtgg

SEQ ID NO: 477762 - DNA, 33 bp, Homo sapien
aattcctagcataatgtcaaaagaaagtagtgg

SEQ ID NO: 477763 - DNA, 33 bp, Homo sapien
cgcaaattaaaacaaaggtcggtggtgaggtgg

SEQ ID NO: 477764 - DNA, 33 bp, Homo sapien
cgcaaattaaaacaaatgtcggtggtgaggtgg

SEQ ID NO: 477765 - DNA, 33 bp, Homo sapien
aaagtcatgatttcaacggaagacgatccaacc

SEQ ID NO: 477766 - DNA, 33 bp, Homo sapien
aaagtcatgatttcaatggaagacgatccaacc

SEQ ID NO: 477767 - DNA, 33 bp, Homo sapien
agaagagtatgaggaaagggtagccacaagaag

SEQ ID NO: 477768 - DNA, 33 bp, Homo sapien
agaagagtatgaggaaggggtagccacaagaag

SEQ ID NO: 477769 - DNA, 33 bp, Homo sapien
ccatgaactatccttacgtcttatgtatttatg

SEQ ID NO: 477770 - DNA, 33 bp, Homo sapien
ccatgaactatccttatgtcttatgtatttatg

SEQ ID NO: 477771 - DNA, 33 bp, Homo sapien
agttcctcatctgttaagtaagatcttagacta

SEQ ID NO: 477772 - DNA, 33 bp, Homo sapien
agttcctcatctgttaggtaagatcttagacta

SEQ ID NO: 477773 - DNA, 33 bp, Homo sapien
agtgaaaagaaaggaacattgttctgcccatga

SEQ ID NO: 477774 - DNA, 33 bp, Homo sapien
agtgaaaagaaaggaatattgttctgcccatga

SEQ ID NO: 477775 - DNA, 33 bp, Homo sapien
gtgagactcagagtcaactcagccacttatttg

SEQ ID NO: 477776 - DNA, 33 bp, Homo sapien
gtgagactcagagtcagctcagccacttatttg

SEQ ID NO: 477777 - DNA, 33 bp, Homo sapien
tgtgggtgcaaaggagcctatatcctgagagaa

SEQ ID NO: 477778 - DNA, 33 bp, Homo sapien
tgtgggtgcaaaggaggctatatcctgagagaa

SEQ ID NO: 477779 - DNA, 33 bp, Homo sapien
actagggagcctaacaagtcaggtcttgggtaa

SEQ ID NO: 477780 - DNA, 33 bp, Homo sapien
actagggagcctaacaggtcaggtcttgggtaa

SEQ ID NO: 477781 - DNA, 33 bp, Homo sapien
aatcttcagccctaaactgagattctgaagctg

SEQ ID NO: 477782 - DNA, 33 bp, Homo sapien
aatcttcagccctaaattgagattctgaagctg

SEQ ID NO: 477783 - DNA, 33 bp, Homo sapien
caatcaaacctacagaacactcagcctgcctct

SEQ ID NO: 477784 - DNA, 33 bp, Homo sapien
caatcaaacctacagaccactcagcctgcctct

SEQ ID NO: 477785 - DNA, 33 bp, Homo sapien
ccggggccatgtaccaagccgagacactcaagg

SEQ ID NO: 477786 - DNA, 33 bp, Homo sapien
ccggggccatgtaccaggccgagacactcaagg

SEQ ID NO: 477787 - DNA, 33 bp, Homo sapien
gtaaaagaccacatagccccttcctatctgagt

SEQ ID NO: 477788 - DNA, 33 bp, Homo sapien
gtaaaagaccacatagtcccttcctatctgagt

SEQ ID NO: 477789 - DNA, 33 bp, Homo sapien
agataactggagacagaaaagcatttttagcag

SEQ ID NO: 477790 - DNA, 33 bp, Homo sapien
agataactggagacaggaaagcatttttagcag

SEQ ID NO: 477791 - DNA, 33 bp, Homo sapien
gtttttaaagtcttacaaagagggctacaatgt

SEQ ID NO: 477792 - DNA, 33 bp, Homo sapien
gtttttaaagtcttacgaagagggctacaatgt

SEQ ID NO: 477793 - DNA, 33 bp, Homo sapien
aaagaaataagtaaaacgtgtacaggcaaggta

SEQ ID NO: 477794 - DNA, 33 bp, Homo sapien
aaagaaataagtaaaatgtgtacaggcaaggta

SEQ ID NO: 477795 - DNA, 33 bp, Homo sapien
tatttatttggccacactaagctttgctttgtg

SEQ ID NO: 477796 - DNA, 33 bp, Homo sapien
tatttatttggccacattaagctttgctttgtg

SEQ ID NO: 477797 - DNA, 33 bp, Homo sapien
aatttagtctgaaaaacagagatgtgatttcag

SEQ ID NO: 477798 - DNA, 33 bp, Homo sapien
aatttagtctgaaaaagagagatgtgatttcag

SEQ ID NO: 477799 - DNA, 33 bp, Homo sapien
gccaaagtcctataacaaaggccatgtgacagc

SEQ ID NO: 477800 - DNA, 33 bp, Homo sapien
gccaaagtcctataacgaaggccatgtgacagc

SEQ ID NO: 477801 - DNA, 33 bp, Homo sapien
actaggataggatgtacgactgcagacctctga

SEQ ID NO: 477802 - DNA, 33 bp, Homo sapien
actaggataggatgtatgactgcagacctctga

SEQ ID NO: 477803 - DNA, 33 bp, Homo sapien
ctagcacatcagcctaactctggaaatgagttc

SEQ ID NO: 477804 - DNA, 33 bp, Homo sapien
ctagcacatcagcctatctctggaaatgagttc

SEQ ID NO: 477805 - DNA, 33 bp, Homo sapien
cagcatcgggacaggacgagctgctggcaacag

SEQ ID NO: 477806 - DNA, 33 bp, Homo sapien
cagcatcgggacaggatgagctgctggcaacag

SEQ ID NO: 477807 - DNA, 33 bp, Homo sapien
aaataacagctgcaacagccagcaatgaatagg

SEQ ID NO: 477808 - DNA, 33 bp, Homo sapien
aaataacagctgcaacggccagcaatgaatagg

SEQ ID NO: 477809 - DNA, 33 bp, Homo sapien
aggttcagagaagatacgtaacttgccctaagc

SEQ ID NO: 477810 - DNA, 33 bp, Homo sapien
aggttcagagaagatatgtaacttgccctaagc

SEQ ID NO: 477811 - DNA, 33 bp, Homo sapien
cattgagatcttccccaaatttatcaagacagg

SEQ ID NO: 477812 - DNA, 33 bp, Homo sapien
cattgagatcttcccccaatttatcaagacagg

SEQ ID NO: 477813 - DNA, 33 bp, Homo sapien
tcagataagaaagccacgtcctcaaatccaggc

SEQ ID NO: 477814 - DNA, 33 bp, Homo sapien
tcagataagaaagccaggtcctcaaatccaggc

SEQ ID NO: 477815 - DNA, 33 bp, Homo sapien
ttggaacactgctgtaaaatatttggtattcct

SEQ ID NO: 477816 - DNA, 33 bp, Homo sapien
ttggaacactgctgtagaatatttggtattcct

SEQ ID NO: 477817 - DNA, 33 bp, Homo sapien
gtctcaggagatgccggacgccagcatggatgt

SEQ ID NO: 477818 - DNA, 33 bp, Homo sapien
gtctcaggagatgccgtacgccagcatggatgt

SEQ ID NO: 477819 - DNA, 33 bp, Homo sapien
gaagacttgaagctaacgttttccatcctgggc

SEQ ID NO: 477820 - DNA, 33 bp, Homo sapien
gaagacttgaagctaatgttttccatcctgggc

SEQ ID NO: 477821 - DNA, 33 bp, Homo sapien
agaaagaaaagtgttccaggcatagggtgccat

SEQ ID NO: 477822 - DNA, 33 bp, Homo sapien
agaaagaaaagtgttctaggcatagggtgccat

SEQ ID NO: 477823 - DNA, 33 bp, Homo sapien
ttgcagttgacaaagccgaggcatggaaaggtt

SEQ ID NO: 477824 - DNA, 33 bp, Homo sapien
ttgcagttgacaaagctgaggcatggaaaggtt

SEQ ID NO: 477825 - DNA, 33 bp, Homo sapien
gatatacttatatgaaaaaatgacttgcttttt

SEQ ID NO: 477826 - DNA, 33 bp, Homo sapien
gatatacttatatgaacaaatgacttgcttttt

SEQ ID NO: 477827 - DNA, 33 bp, Homo sapien
tgcccctttcctatcaactttgagggtagtgct

SEQ ID NO: 477828 - DNA, 33 bp, Homo sapien
tgcccctttcctatcagctttgagggtagtgct

SEQ ID NO: 477829 - DNA, 33 bp, Homo sapien
cctcagacaaatcataactaagtgtggagcact

SEQ ID NO: 477830 - DNA, 33 bp, Homo sapien
cctcagacaaatcatatctaagtgtggagcact

SEQ ID NO: 477831 - DNA, 33 bp, Homo sapien
gaagaagagaagtgaacgtcagagaaggtgaag

SEQ ID NO: 477832 - DNA, 33 bp, Homo sapien
gaagaagagaagtgaatgtcagagaaggtgaag

SEQ ID NO: 477833 - DNA, 33 bp, Homo sapien
agctcagtgcttgaacagcctatatctcattgt

SEQ ID NO: 477834 - DNA, 33 bp, Homo sapien
agctcagtgcttgaaccgcctatatctcattgt

SEQ ID NO: 477835 - DNA, 33 bp, Homo sapien
aggcaaagggaacaaacgtattacttcactgac

SEQ ID NO: 477836 - DNA, 33 bp, Homo sapien
aggcaaagggaacaaatgtattacttcactgac

SEQ ID NO: 477837 - DNA, 33 bp, Homo sapien
cttacacacgactgccacttggtggaatcctgg

SEQ ID NO: 477838 - DNA, 33 bp, Homo sapien
cttacacacgactgccgcttggtggaatcctgg

SEQ ID NO: 477839 - DNA, 33 bp, Homo sapien
cactcatcagccaacacgagtggcactctctaa

SEQ ID NO: 477840 - DNA, 33 bp, Homo sapien
cactcatcagccaacatgagtggcactctctaa

SEQ ID NO: 477841 - DNA, 33 bp, Homo sapien
cagaggctttagttaaatggaataagatggttt

SEQ ID NO: 477842 - DNA, 33 bp, Homo sapien
cagaggctttagttaagtggaataagatggttt

SEQ ID NO: 477843 - DNA, 33 bp, Homo sapien
tgcaatgacctagactcagacccaggcagccac

SEQ ID NO: 477844 - DNA, 33 bp, Homo sapien
tgcaatgacctagactgagacccaggcagccac

SEQ ID NO: 477845 - DNA, 33 bp, Homo sapien
ttttcttcctttaagccgcacttaggtaaggac

SEQ ID NO: 477846 - DNA, 33 bp, Homo sapien
ttttcttcctttaagctgcacttaggtaaggac

SEQ ID NO: 477847 - DNA, 33 bp, Homo sapien
gataagcttgacattacgatgacccaatgtaaa

SEQ ID NO: 477848 - DNA, 33 bp, Homo sapien
gataagcttgacattatgatgacccaatgtaaa

SEQ ID NO: 477849 - DNA, 33 bp, Homo sapien
tgctcaattcacatggaatacgttacacagctt

SEQ ID NO: 477850 - DNA, 33 bp, Homo sapien
tgctcaattcacatgggatacgttacacagctt

SEQ ID NO: 477851 - DNA, 33 bp, Homo sapien
aagattagttaagggactcaggtcacaaaacca

SEQ ID NO: 477852 - DNA, 33 bp, Homo sapien
aagattagttaagggattcaggtcacaaaacca

SEQ ID NO: 477853 - DNA, 33 bp, Homo sapien
tgcatgctatggcctaaccctgttgtctttctt

SEQ ID NO: 477854 - DNA, 33 bp, Homo sapien
tgcatgctatggcctagccctgttgtctttctt

SEQ ID NO: 477855 - DNA, 33 bp, Homo sapien
gggcagagatgagcaaaggatttctctgtattc

SEQ ID NO: 477856 - DNA, 33 bp, Homo sapien
gggcagagatgagcaagggatttctctgtattc

SEQ ID NO: 477857 - DNA, 33 bp, Homo sapien
gtttaatatatatattcaaagacttccccaata

SEQ ID NO: 477858 - DNA, 33 bp, Homo sapien
gtttaatatatatattgaaagacttccccaata

SEQ ID NO: 477859 - DNA, 33 bp, Homo sapien
taaaattacaatagcacgttattgacagaaaag

SEQ ID NO: 477860 - DNA, 33 bp, Homo sapien
taaaattacaatagcatgttattgacagaaaag

SEQ ID NO: 477861 - DNA, 33 bp, Homo sapien
ctagaccaagcagctcaccttattcatcttcct

SEQ ID NO: 477862 - DNA, 33 bp, Homo sapien
ctagaccaagcagctcgccttattcatcttcct

SEQ ID NO: 477863 - DNA, 33 bp, Homo sapien
gcaggcagatatggccagaacagagtaataata

SEQ ID NO: 477864 - DNA, 33 bp, Homo sapien
gcaggcagatatggccggaacagagtaataata

SEQ ID NO: 477865 - DNA, 33 bp, Homo sapien
taaccccttcagactcaaaaaacagactagcag

SEQ ID NO: 477866 - DNA, 33 bp, Homo sapien
taaccccttcagactccaaaaacagactagcag

SEQ ID NO: 477867 - DNA, 33 bp, Homo sapien
agagagagagagagagaaagctctggtcttttc

SEQ ID NO: 477868 - DNA, 33 bp, Homo sapien
agagagagagagagagcaagctctggtcttttc

SEQ ID NO: 477869 - DNA, 33 bp, Homo sapien
aggaagcagccatcaccggtggacactgtatca

SEQ ID NO: 477870 - DNA, 33 bp, Homo sapien
aggaagcagccatcactggtggacactgtatca

SEQ ID NO: 477871 - DNA, 33 bp, Homo sapien
catgatcttcttgccacgtcaggtgacctgctc

SEQ ID NO: 477872 - DNA, 33 bp, Homo sapien
catgatcttcttgccatgtcaggtgacctgctc

SEQ ID NO: 477873 - DNA, 33 bp, Homo sapien
caatgtcatttctcaacatgccaggaagagaga

SEQ ID NO: 477874 - DNA, 33 bp, Homo sapien
caatgtcatttctcaatatgccaggaagagaga

SEQ ID NO: 477875 - DNA, 33 bp, Homo sapien
aacttccaaactttagacaaaacagcttacaag

SEQ ID NO: 477876 - DNA, 33 bp, Homo sapien
aacttccaaactttaggcaaaacagcttacaag

SEQ ID NO: 477877 - DNA, 33 bp, Homo sapien
taagaaacaaagaggacgtgcccacttatgaaa

SEQ ID NO: 477878 - DNA, 33 bp, Homo sapien
taagaaacaaagaggatgtgcccacttatgaaa

SEQ ID NO: 477879 - DNA, 33 bp, Homo sapien
caaggccgaaacttcaaggacctgaatctgtca

SEQ ID NO: 477880 - DNA, 33 bp, Homo sapien
caaggccgaaacttcatggacctgaatctgtca

SEQ ID NO: 477881 - DNA, 33 bp, Homo sapien
tggctggcagacctcaatagctggagttagcac

SEQ ID NO: 477882 - DNA, 33 bp, Homo sapien
tggctggcagacctcagtagctggagttagcac

SEQ ID NO: 477883 - DNA, 33 bp, Homo sapien
cctagtttttaccccactgaatctgagttagtt

SEQ ID NO: 477884 - DNA, 33 bp, Homo sapien
cctagtttttaccccattgaatctgagttagtt

SEQ ID NO: 477885 - DNA, 33 bp, Homo sapien
accgagttccagagaaattaacttacccagtca

SEQ ID NO: 477886 - DNA, 33 bp, Homo sapien
accgagttccagagaagttaacttacccagtca

SEQ ID NO: 477887 - DNA, 33 bp, Homo sapien
gcaagacatccttaaactgtgcatgcctaatca

SEQ ID NO: 477888 - DNA, 33 bp, Homo sapien
gcaagacatccttaaagtgtgcatgcctaatca

SEQ ID NO: 477889 - DNA, 33 bp, Homo sapien
tgttacgggctgagtcacgttcattcatctgtt

SEQ ID NO: 477890 - DNA, 33 bp, Homo sapien
tgttacgggctgagtcgcgttcattcatctgtt

SEQ ID NO: 477891 - DNA, 33 bp, Homo sapien
gaagaatacacaccaaactattaacacaggtta

SEQ ID NO: 477892 - DNA, 33 bp, Homo sapien
gaagaatacacaccaagctattaacacaggtta

SEQ ID NO: 477893 - DNA, 33 bp, Homo sapien
tccacttggcaatgaagggtgatgctgaaaata

SEQ ID NO: 477894 - DNA, 33 bp, Homo sapien
tccacttggcaatgaatggtgatgctgaaaata

SEQ ID NO: 477895 - DNA, 33 bp, Homo sapien
ggttactgtgaattcagaaataggatcggcatt

SEQ ID NO: 477896 - DNA, 33 bp, Homo sapien
ggttactgtgaattcataaataggatcggcatt

SEQ ID NO: 477897 - DNA, 33 bp, Homo sapien
agacagcatatgtcctcagagaaaggagagacc

SEQ ID NO: 477898 - DNA, 33 bp, Homo sapien
agacagcatatgtccttagagaaaggagagacc

SEQ ID NO: 477899 - DNA, 33 bp, Homo sapien
aactcagtgaatatggcaagaaatgagggagta

SEQ ID NO: 477900 - DNA, 33 bp, Homo sapien
aactcagtgaatatgggaagaaatgagggagta

SEQ ID NO: 477901 - DNA, 33 bp, Homo sapien
gttacaaaagattaggcagtaaaaagcacatcc

SEQ ID NO: 477902 - DNA, 33 bp, Homo sapien
gttacaaaagattaggtagtaaaaagcacatcc

SEQ ID NO: 477903 - DNA, 33 bp, Homo sapien
ttataataccaaagcactattcacctgcttcac

SEQ ID NO: 477904 - DNA, 33 bp, Homo sapien
ttataataccaaagcattattcacctgcttcac

SEQ ID NO: 477905 - DNA, 33 bp, Homo sapien
tcctaacagaggtatacggtggagttttccaaa

SEQ ID NO: 477906 - DNA, 33 bp, Homo sapien
tcctaacagaggtatatggtggagttttccaaa

SEQ ID NO: 477907 - DNA, 33 bp, Homo sapien
tacctaatagttctagaaagagcctgataattt

SEQ ID NO: 477908 - DNA, 33 bp, Homo sapien
tacctaatagttctaggaagagcctgataattt

SEQ ID NO: 477909 - DNA, 33 bp, Homo sapien
tatctcaccattctaaagggtctcatctgatga

SEQ ID NO: 477910 - DNA, 33 bp, Homo sapien
tatctcaccattctaaggggtctcatctgatga

SEQ ID NO: 477911 - DNA, 33 bp, Homo sapien
gcttaagttcaggcaaactacttcactttccct

SEQ ID NO: 477912 - DNA, 33 bp, Homo sapien
gcttaagttcaggcaagctacttcactttccct

SEQ ID NO: 477913 - DNA, 33 bp, Homo sapien
ctgggacctcaaggcaaattaacagagtgatag

SEQ ID NO: 477914 - DNA, 33 bp, Homo sapien
ctgggacctcaaggcatattaacagagtgatag

SEQ ID NO: 477915 - DNA, 33 bp, Homo sapien
ccagagcagtgggtgacaacatcgcagcctgca

SEQ ID NO: 477916 - DNA, 33 bp, Homo sapien
ccagagcagtgggtgagaacatcgcagcctgca

SEQ ID NO: 477917 - DNA, 33 bp, Homo sapien
caagtcactgggtaaacatagctattttaataa

SEQ ID NO: 477918 - DNA, 33 bp, Homo sapien
caagtcactgggtaaagatagctattttaataa

SEQ ID NO: 477919 - DNA, 33 bp, Homo sapien
tcattcaggtgaggaacagcaactacatggggt

SEQ ID NO: 477920 - DNA, 33 bp, Homo sapien
tcattcaggtgaggaagagcaactacatggggt

SEQ ID NO: 477921 - DNA, 33 bp, Homo sapien
gcctgagagtggtttaacacagccttaatgcca

SEQ ID NO: 477922 - DNA, 33 bp, Homo sapien
gcctgagagtggtttagcacagccttaatgcca

SEQ ID NO: 477923 - DNA, 33 bp, Homo sapien
ggccataaattgctcacgggcttcagtacatga

SEQ ID NO: 477924 - DNA, 33 bp, Homo sapien
ggccataaattgctcatgggcttcagtacatga

SEQ ID NO: 477925 - DNA, 33 bp, Homo sapien
tcagctatatcacaagaagaaattctggttgct

SEQ ID NO: 477926 - DNA, 33 bp, Homo sapien
tcagctatatcacaaggagaaattctggttgct

SEQ ID NO: 477927 - DNA, 33 bp, Homo sapien
agtcttttcagtccctcacatcaaggctgttct

SEQ ID NO: 477928 - DNA, 33 bp, Homo sapien
agtcttttcagtcccttacatcaaggctgttct

SEQ ID NO: 477929 - DNA, 33 bp, Homo sapien
atttctagattctcaaatgtattccagtgatgt

SEQ ID NO: 477930 - DNA, 33 bp, Homo sapien
atttctagattctcaattgtattccagtgatgt

SEQ ID NO: 477931 - DNA, 33 bp, Homo sapien
ataatgggctactctacggttgctctgggggag

SEQ ID NO: 477932 - DNA, 33 bp, Homo sapien
ataatgggctactctatggttgctctgggggag

SEQ ID NO: 477933 - DNA, 33 bp, Homo sapien
gattgttaagggacagacattgatctctagtga

SEQ ID NO: 477934 - DNA, 33 bp, Homo sapien
gattgttaagggacagccattgatctctagtga

SEQ ID NO: 477935 - DNA, 33 bp, Homo sapien
gaatggccagtctccaatcatacacagaacagg

SEQ ID NO: 477936 - DNA, 33 bp, Homo sapien
gaatggccagtctccagtcatacacagaacagg

SEQ ID NO: 477937 - DNA, 33 bp, Homo sapien
atcacaataccttgtgaagttggtgacttatat

SEQ ID NO: 477938 - DNA, 33 bp, Homo sapien
atcacaataccttgtgtagttggtgacttatat

SEQ ID NO: 477939 - DNA, 33 bp, Homo sapien
tgcaagacacagaaccgatgaactgatatcagt

SEQ ID NO: 477940 - DNA, 33 bp, Homo sapien
tgcaagacacagaacctatgaactgatatcagt

SEQ ID NO: 477941 - DNA, 33 bp, Homo sapien
aagctcagtacagagagagaggggctccatttg

SEQ ID NO: 477942 - DNA, 33 bp, Homo sapien
aagctcagtacagagatagaggggctccatttg

SEQ ID NO: 477943 - DNA, 33 bp, Homo sapien
tgaggaatcagaggctaagagattctagcgcct

SEQ ID NO: 477944 - DNA, 33 bp, Homo sapien
tgaggaatcagaggcttagagattctagcgcct

SEQ ID NO: 477945 - DNA, 33 bp, Homo sapien
taatgactgatgatcaacgctatgatggaggga

SEQ ID NO: 477946 - DNA, 33 bp, Homo sapien
taatgactgatgatcagcgctatgatggaggga

SEQ ID NO: 477947 - DNA, 33 bp, Homo sapien
atttagttttgtgacaatatctacataaaatcc

SEQ ID NO: 477948 - DNA, 33 bp, Homo sapien
atttagttttgtgacagtatctacataaaatcc

SEQ ID NO: 477949 - DNA, 33 bp, Homo sapien
ggaggagccccttgcaactgtctctgaactaag

SEQ ID NO: 477950 - DNA, 33 bp, Homo sapien
ggaggagccccttgcagctgtctctgaactaag

SEQ ID NO: 477951 - DNA, 33 bp, Homo sapien
attcccacagcctcaggatgtcttctgttatgg

SEQ ID NO: 477952 - DNA, 33 bp, Homo sapien
attcccacagcctcagtatgtcttctgttatgg

SEQ ID NO: 477953 - DNA, 33 bp, Homo sapien; identical to SEQ ID NO: 477951

SEQ ID NO: 477954 - DNA, 33 bp, Homo sapien; identical to SEQ ID NO: 477952

SEQ ID NO: 477955 - DNA, 33 bp, Homo sapien
gtatgtctttgaagaccagtatttgtgcagtca

SEQ ID NO: 477956 - DNA, 33 bp, Homo sapien
gtatgtctttgaagactagtatttgtgcagtca

SEQ ID NO: 477957 - DNA, 33 bp, Homo sapien
tagatgatcgttattcactgtcaagttataata

SEQ ID NO: 477958 - DNA, 33 bp, Homo sapien
tagatgatcgttattcgctgtcaagttataata

SEQ ID NO: 477959 - DNA, 33 bp, Homo sapien
cccgatcttgaacttcactgtactgcaggttaa

SEQ ID NO: 477960 - DNA, 33 bp, Homo sapien
cccgatcttgaacttcgctgtactgcaggttaa

SEQ ID NO: 477961 - DNA, 33 bp, Homo sapien; identical to SEQ ID NO: 477959

SEQ ID NO: 477962 - DNA, 33 bp, Homo sapien; identical to SEQ ID NO: 477960

SEQ ID NO: 477963 - DNA, 33 bp, Homo sapien
gggggcacactgcaaaaggcctgacctgccatg

SEQ ID NO: 477964 - DNA, 33 bp, Homo sapien
gggggcacactgcaaagggcctgacctgccatg

SEQ ID NO: 477965 - DNA, 33 bp, Homo sapien
gctgctggcagaactaagactcaaatccaggtc

SEQ ID NO: 477966 - DNA, 33 bp, Homo sapien
gctgctggcagaactaggactcaaatccaggtc

SEQ ID NO: 477967 - DNA, 33 bp, Homo sapien
cctatcctcaccataacccttttgtttggtagg

SEQ ID NO: 477968 - DNA, 33 bp, Homo sapien
cctatcctcaccataatccttttgtttggtagg

SEQ ID NO: 477969 - DNA, 33 bp, Homo sapien
agtcttaaggtctttcaatctgtatcttcttca

SEQ ID NO: 477970 - DNA, 33 bp, Homo sapien
agtcttaaggtctttcgatctgtatcttcttca

SEQ ID NO: 477971 - DNA, 33 bp, Homo sapien
ccatgctaatatacatcgcttggagtttgttag

SEQ ID NO: 477972 - DNA, 33 bp, Homo sapien
ccatgctaatatacatggcttggagtttgttag

SEQ ID NO: 477973 - DNA, 33 bp, Homo sapien
tcttgtttcacacttcccttcaatgcgccccag

SEQ ID NO: 477974 - DNA, 33 bp, Homo sapien
tcttgtttcacacttctcttcaatgcgccccag

SEQ ID NO: 477975 - DNA, 33 bp, Homo sapien
atgctaatagtgcataactcacagttaggttaa

SEQ ID NO: 477976 - DNA, 33 bp, Homo sapien
atgctaatagtgcatacctcacagttaggttaa

SEQ ID NO: 477977 - DNA, 33 bp, Homo sapien
tggctaaatgttgcttaaacatcatcaactgtt

SEQ ID NO: 477978 - DNA, 33 bp, Homo sapien
tggctaaatgttgcttgaacatcatcaactgtt

SEQ ID NO: 477979 - DNA, 33 bp, Homo sapien
tggattaaaaatgtacacaggtcagcgattact

SEQ ID NO: 477980 - DNA, 33 bp, Homo sapien
tggattaaaaatgtacgcaggtcagcgattact

SEQ ID NO: 477981 - DNA, 33 bp, Homo sapien
tggcctgggctgtctacgtgttgcaaagcacct

SEQ ID NO: 477982 - DNA, 33 bp, Homo sapien
tggcctgggctgtctatgtgttgcaaagcacct

SEQ ID NO: 477983 - DNA, 33 bp, Homo sapien
tcaagggagcttcaagacttcgtagcaggaaga

SEQ ID NO: 477984 - DNA, 33 bp, Homo sapien
tcaagggagcttcaaggcttcgtagcaggaaga

SEQ ID NO: 477985 - DNA, 33 bp, Homo sapien
agaatgggctcaatgaatataaatttttcctac

SEQ ID NO: 477986 - DNA, 33 bp, Homo sapien
agaatgggctcaatgagtataaatttttcctac

SEQ ID NO: 477987 - DNA, 33 bp, Homo sapien
ttgttcattcttgaggaacgtgggtgctcttag

SEQ ID NO: 477988 - DNA, 33 bp, Homo sapien
ttgttcattcttgagggacgtgggtgctcttag

SEQ ID NO: 477989 - DNA, 33 bp, Homo sapien
ggggattatacaaggacatgaataccaagtggt

SEQ ID NO: 477990 - DNA, 33 bp, Homo sapien
ggggattatacaaggatatgaataccaagtggt

SEQ ID NO: 477991 - DNA, 33 bp, Homo sapien
tgctgagcatgagaagactggtgcgttggtatt

SEQ ID NO: 477992 - DNA, 33 bp, Homo sapien
tgctgagcatgagaaggctggtgcgttggtatt

SEQ ID NO: 477993 - DNA, 33 bp, Homo sapien
aaggaccggttgctagaaagtgcccacagggag

SEQ ID NO: 477994 - DNA, 33 bp, Homo sapien
aaggaccggttgctaggaagtgcccacagggag

SEQ ID NO: 477995 - DNA, 33 bp, Homo sapien
ctcttcattccttccccgaatttagagagtctt

SEQ ID NO: 477996 - DNA, 33 bp, Homo sapien
ctcttcattccttccctgaatttagagagtctt

SEQ ID NO: 477997 - DNA, 33 bp, Homo sapien
gaaaataaagcacataactcctcccttccaact

SEQ ID NO: 477998 - DNA, 33 bp, Homo sapien
gaaaataaagcacatagctcctcccttccaact

SEQ ID NO: 477999 - DNA, 33 bp, Homo sapien
gttactttggggagcactaattctggagggctg

SEQ ID NO: 478000 - DNA, 33 bp, Homo sapien
gttactttggggagcagtaattctggagggctg

SEQ ID NO: 478001 - DNA, 33 bp, Homo sapien
gatgcttgttatgaacaggaacttttggggctt

SEQ ID NO: 478002 - DNA, 33 bp, Homo sapien
gatgcttgttatgaacgggaacttttggggctt

SEQ ID NO: 478003 - DNA, 33 bp, Homo sapien
gtgaacatatgccccacgagccagaagccagcc

SEQ ID NO: 478004 - DNA, 33 bp, Homo sapien
gtgaacatatgccccaggagccagaagccagcc

SEQ ID NO: 478005 - DNA, 33 bp, Homo sapien
agtcagccctggccccaatatgtgtgaatatga

SEQ ID NO: 478006 - DNA, 33 bp, Homo sapien
agtcagccctggcccccatatgtgtgaatatga

SEQ ID NO: 478007 - DNA, 33 bp, Homo sapien
ctaaacctttattaacgcctatctttggtcaac

SEQ ID NO: 478008 - DNA, 33 bp, Homo sapien
ctaaacctttattaactcctatctttggtcaac

SEQ ID NO: 478009 - DNA, 33 bp, Homo sapien
gacagatgtagaatccaataaattagaatatag

SEQ ID NO: 478010 - DNA, 33 bp, Homo sapien
gacagatgtagaatccgataaattagaatatag

SEQ ID NO: 478011 - DNA, 33 bp, Homo sapien
gtgtggttggatatataacaaagactatggaag

SEQ ID NO: 478012 - DNA, 33 bp, Homo sapien
gtgtggttggatatatgacaaagactatggaag

SEQ ID NO: 478013 - DNA, 33 bp, Homo sapien
atgtcatttctcagaacttccccatacgattat

SEQ ID NO: 478014 - DNA, 33 bp, Homo sapien
atgtcatttctcagaatttccccatacgattat

SEQ ID NO: 478015 - DNA, 33 bp, Homo sapien
aaacgcagtgtgttataaactttgtaaatgtcg

SEQ ID NO: 478016 - DNA, 33 bp, Homo sapien
aaacgcagtgtgttattaactttgtaaatgtcg

SEQ ID NO: 478017 - DNA, 33 bp, Homo sapien
aagataacttggggccacatcatacaaagactt

SEQ ID NO: 478018 - DNA, 33 bp, Homo sapien
aagataacttggggccgcatcatacaaagactt

SEQ ID NO: 478019 - DNA, 33 bp, Homo sapien
atcaggcactagagaagcaatatggagaaaaac

SEQ ID NO: 478020 - DNA, 33 bp, Homo sapien
atcaggcactagagaatcaatatggagaaaaac

SEQ ID NO: 478021 - DNA, 33 bp, Homo sapien
ccctcttccctatgacgactgaattcctctctc

SEQ ID NO: 478022 - DNA, 33 bp, Homo sapien
ccctcttccctatgactactgaattcctctctc

SEQ ID NO: 478023 - DNA, 33 bp, Homo sapien
gctctgctccctggcaccaaatgtgaagaatga

SEQ ID NO: 478024 - DNA, 33 bp, Homo sapien
gctctgctccctggcatcaaatgtgaagaatga

SEQ ID NO: 478025 - DNA, 33 bp, Homo sapien
aacagtatcctctgaagaaaatgttggcaactc

SEQ ID NO: 478026 - DNA, 33 bp, Homo sapien
aacagtatcctctgaataaaatgttggcaactc

SEQ ID NO: 478027 - DNA, 33 bp, Homo sapien
caggctatgccctggaataaatgacttgtcaag

SEQ ID NO: 478028 - DNA, 33 bp, Homo sapien
caggctatgccctggagtaaatgacttgtcaag

SEQ ID NO: 478029 - DNA, 33 bp, Homo sapien
gatttccactcttcaccgactgtatcagcccag

SEQ ID NO: 478030 - DNA, 33 bp, Homo sapien
gatttccactcttcactgactgtatcagcccag

SEQ ID NO: 478031 - DNA, 33 bp, Homo sapien
tctcaaccaactgaagaaaaaggaagacctgag

SEQ ID NO: 478032 - DNA, 33 bp, Homo sapien
tctcaaccaactgaaggaaaaggaagacctgag

SEQ ID NO: 478033 - DNA, 33 bp, Homo sapien
agacgataaggagaaggagaagatttaagcaag

SEQ ID NO: 478034 - DNA, 33 bp, Homo sapien
agacgataaggagaagtagaagatttaagcaag

SEQ ID NO: 478035 - DNA, 33 bp, Homo sapien
atctagataaaggagacagagtagttattgcct

SEQ ID NO: 478036 - DNA, 33 bp, Homo sapien
atctagataaaggagatagagtagttattgcct

SEQ ID NO: 478037 - DNA, 33 bp, Homo sapien
gtctgattttgtcttaagatgcgatttaaatta

SEQ ID NO: 478038 - DNA, 33 bp, Homo sapien
gtctgattttgtcttacgatgcgatttaaatta

SEQ ID NO: 478039 - DNA, 33 bp, Homo sapien
tcaaacacatccaaaaagtccataatgaaaaac

SEQ ID NO: 478040 - DNA, 33 bp, Homo sapien
tcaaacacatccaaaaggtccataatgaaaaac

SEQ ID NO: 478041 - DNA, 33 bp, Homo sapien
gagatgaaaatgtgaacgtcaatcaacctagaa

SEQ ID NO: 478042 - DNA, 33 bp, Homo sapien
gagatgaaaatgtgaatgtcaatcaacctagaa

SEQ ID NO: 478043 - DNA, 33 bp, Homo sapien
ccaccatctagttctgaagacttagtcaagatt

SEQ ID NO: 478044 - DNA, 33 bp, Homo sapien
ccaccatctagttctggagacttagtcaagatt

SEQ ID NO: 478045 - DNA, 33 bp, Homo sapien
agatgtgctaaaattgcatcagaaagtgaagaa

SEQ ID NO: 478046 - DNA, 33 bp, Homo sapien
agatgtgctaaaattgtatcagaaagtgaagaa

SEQ ID NO: 478047 - DNA, 33 bp, Homo sapien
gaaaagtaaacatgacagctatgaaactattat

SEQ ID NO: 478048 - DNA, 33 bp, Homo sapien
gaaaagtaaacatgacggctatgaaactattat

SEQ ID NO: 478049 - DNA, 33 bp, Homo sapien
tctgcagttactctcactaagaagtatgttaac

SEQ ID NO: 478050 - DNA, 33 bp, Homo sapien
tctgcagttactctcattaagaagtatgttaac

SEQ ID NO: 478051 - DNA, 33 bp, Homo sapien
taaatttggagttcaagctgttaaaggataact

SEQ ID NO: 478052 - DNA, 33 bp, Homo sapien
taaatttggagttcaatctgttaaaggataact

SEQ ID NO: 478053 - DNA, 33 bp, Homo sapien
tccaaaaattgctcttgaaactcccaacagcta

SEQ ID NO: 478054 - DNA, 33 bp, Homo sapien
tccaaaaattgctctttaaactcccaacagcta

SEQ ID NO: 478055 - DNA, 33 bp, Homo sapien
ttcagatatatgaagcaagacaaaaacctcaag

SEQ ID NO: 478056 - DNA, 33 bp, Homo sapien
ttcagatatatgaagctagacaaaaacctcaag

SEQ ID NO: 478057 - DNA, 33 bp, Homo sapien
aaaagaaagatcgtaacagattcagattccttt

SEQ ID NO: 478058 - DNA, 33 bp, Homo sapien
aaaagaaagatcgtaatagattcagattccttt

SEQ ID NO: 478059 - DNA, 33 bp, Homo sapien
cagcttcatggttctaccttccatataaaccag

SEQ ID NO: 478060 - DNA, 33 bp, Homo sapien
cagcttcatggttctagcttccatataaaccag

SEQ ID NO: 478061 - DNA, 33 bp, Homo sapien
agtcgtcagccaataaatattgaacattcactg

SEQ ID NO: 478062 - DNA, 33 bp, Homo sapien
agtcgtcagccaataagtattgaacattcactg

SEQ ID NO: 478063 - DNA, 33 bp, Homo sapien
tcttaggcacaggaacaagcgttgattcactaa

SEQ ID NO: 478064 - DNA, 33 bp, Homo sapien
tcttaggcacaggaacgagcgttgattcactaa

SEQ ID NO: 478065 - DNA, 33 bp, Homo sapien
gaccgaagatgtattccatattttctccaaaca

SEQ ID NO: 478066 - DNA, 33 bp, Homo sapien
gaccgaagatgtattctatattttctccaaaca

SEQ ID NO: 478067 - DNA, 33 bp, Homo sapien
tcagggagagatgaagcctaaggggtgctcagg

SEQ ID NO: 478068 - DNA, 33 bp, Homo sapien
tcagggagagatgaagtctaaggggtgctcagg

SEQ ID NO: 478069 - DNA, 33 bp, Homo sapien
acatgtacaaattaaacgcataccatctttttt

SEQ ID NO: 478070 - DNA, 33 bp, Homo sapien
acatgtacaaattaaatgcataccatctttttt

SEQ ID NO: 478071 - DNA, 33 bp, Homo sapien
aaaggtctaccatctacgtgagcaagacatgta

SEQ ID NO: 478072 - DNA, 33 bp, Homo sapien
aaaggtctaccatctatgtgagcaagacatgta

SEQ ID NO: 478073 - DNA, 33 bp, Homo sapien
gactggttgtatttagcatttcaaatgttttac

SEQ ID NO: 478074 - DNA, 33 bp, Homo sapien
gactggttgtatttagtatttcaaatgttttac

SEQ ID NO: 478075 - DNA, 33 bp, Homo sapien
aattttaacattgtaacagaatctgaagaatgt

SEQ ID NO: 478076 - DNA, 33 bp, Homo sapien
aattttaacattgtaatagaatctgaagaatgt

SEQ ID NO: 478077 - DNA, 33 bp, Homo sapien
ttaggactttctacaacagcaatacccaataga

SEQ ID NO: 478078 - DNA, 33 bp, Homo sapien
ttaggactttctacaatagcaatacccaataga

SEQ ID NO: 478079 - DNA, 33 bp, Homo sapien
aatgccacagtttttaactcatgaaataaaatg

SEQ ID NO: 478080 - DNA, 33 bp, Homo sapien
aatgccacagtttttagctcatgaaataaaatg

SEQ ID NO: 478081 - DNA, 33 bp, Homo sapien
ttctttatggactagaataatgggggctatcaa

SEQ ID NO: 478082 - DNA, 33 bp, Homo sapien
ttctttatggactagagtaatgggggctatcaa

SEQ ID NO: 478083 - DNA, 33 bp, Homo sapien
aggataaagtaagaaaccgtgagagaggataaa

SEQ ID NO: 478084 - DNA, 33 bp, Homo sapien
aggataaagtaagaaatcgtgagagaggataaa

SEQ ID NO: 478085 - DNA, 33 bp, Homo sapien
gggcttaacccaggagaattcttggctttaccc

SEQ ID NO: 478086 - DNA, 33 bp, Homo sapien
gggcttaacccaggaggattcttggctttaccc

SEQ ID NO: 478087 - DNA, 33 bp, Homo sapien
agctgtattttctaaactgatctgctctccaag

SEQ ID NO: 478088 - DNA, 33 bp, Homo sapien
agctgtattttctaaattgatctgctctccaag

SEQ ID NO: 478089 - DNA, 33 bp, Homo sapien
ttccaaaccaaaggctcacctctactcacagca

SEQ ID NO: 478090 - DNA, 33 bp, Homo sapien
ttccaaaccaaaggcttacctctactcacagca

SEQ ID NO: 478091 - DNA, 33 bp, Homo sapien
cctctttgaaattcagactcttatattgtttct

SEQ ID NO: 478092 - DNA, 33 bp, Homo sapien
cctctttgaaattcaggctcttatattgtttct

SEQ ID NO: 478093 - DNA, 33 bp, Homo sapien
atttgcacatatcctaggcacatccttctgtat

SEQ ID NO: 478094 - DNA, 33 bp, Homo sapien
atttgcacatatcctatgcacatccttctgtat

SEQ ID NO: 478095 - DNA, 33 bp, Homo sapien
gaaccacttaaaataacgtgtgaataacctacc

SEQ ID NO: 478096 - DNA, 33 bp, Homo sapien
gaaccacttaaaataatgtgtgaataacctacc

SEQ ID NO: 478097 - DNA, 33 bp, Homo sapien
acttaagcattaaagcaattccatttttttcct

SEQ ID NO: 478098 - DNA, 33 bp, Homo sapien
acttaagcattaaagcgattccatttttttcct

SEQ ID NO: 478099 - DNA, 33 bp, Homo sapien
atgaatcagtcaatgtcaagtactttatcagca

SEQ ID NO: 478100 - DNA, 33 bp, Homo sapien
atgaatcagtcaatgtgaagtactttatcagca

SEQ ID NO: 478101 - DNA, 33 bp, Homo sapien
tttaagattgctatgcacatttttttttcaaat

SEQ ID NO: 478102 - DNA, 33 bp, Homo sapien
tttaagattgctatgcgcatttttttttcaaat

SEQ ID NO: 478103 - DNA, 33 bp, Homo sapien
tatttagatttcaggtcaagttataaagagttt

SEQ ID NO: 478104 - DNA, 33 bp, Homo sapien
tatttagatttcaggtgaagttataaagagttt

SEQ ID NO: 478105 - DNA, 33 bp, Homo sapien
cttgaagaagggcaaacctattcctgcttgtag

SEQ ID NO: 478106 - DNA, 33 bp, Homo sapien
cttgaagaagggcaaagctattcctgcttgtag

SEQ ID NO: 478107 - DNA, 33 bp, Homo sapien
ttctgatgacagcagacgttagaacccgcaatc

SEQ ID NO: 478108 - DNA, 33 bp, Homo sapien
ttctgatgacagcagatgttagaacccgcaatc

SEQ ID NO: 478109 - DNA, 33 bp, Homo sapien
ttcagaaatttggcctcaactgctgggagagat

SEQ ID NO: 478110 - DNA, 33 bp, Homo sapien
ttcagaaatttggcctgaactgctgggagagat

SEQ ID NO: 478111 - DNA, 33 bp, Homo sapien
agcgtcccacaaacaaaactactgacactatat

SEQ ID NO: 478112 - DNA, 33 bp, Homo sapien
agcgtcccacaaacaagactactgacactatat

SEQ ID NO: 478113 - DNA, 33 bp, Homo sapien
tatatatcatgcactcagaccttttcatacagc

SEQ ID NO: 478114 - DNA, 33 bp, Homo sapien
tatatatcatgcactctgaccttttcatacagc

SEQ ID NO: 478115 - DNA, 33 bp, Homo sapien
cttcttatacagtggaaagaacatgagcactgg

SEQ ID NO: 478116 - DNA, 33 bp, Homo sapien
cttcttatacagtggagagaacatgagcactgg

SEQ ID NO: 478117 - DNA, 33 bp, Homo sapien
aacagcatccttatggaaaatataatgaacttt

SEQ ID NO: 478118 - DNA, 33 bp, Homo sapien
aacagcatccttatgggaaatataatgaacttt

SEQ ID NO: 478119 - DNA, 33 bp, Homo sapien
cagactaagggaaattaaagagcttactgagat

SEQ ID NO: 478120 - DNA, 33 bp, Homo sapien
cagactaagggaaattgaagagcttactgagat

SEQ ID NO: 478121 - DNA, 33 bp, Homo sapien
actttgtagatgccttaaaaaatatccaataaa

SEQ ID NO: 478122 - DNA, 33 bp, Homo sapien
actttgtagatgcctttaaaaatatccaataaa

SEQ ID NO: 478123 - DNA, 33 bp, Homo sapien
aatgaattcccattcaaaactgatacaaagaga

SEQ ID NO: 478124 - DNA, 33 bp, Homo sapien
aatgaattcccattcacaactgatacaaagaga

SEQ ID NO: 478125 - DNA, 33 bp, Homo sapien
atgagaggaaacaggcacccttgtgcattgcca

SEQ ID NO: 478126 - DNA, 33 bp, Homo sapien
atgagaggaaacaggcgcccttgtgcattgcca

SEQ ID NO: 478127 - DNA, 33 bp, Homo sapien
gttgattaggaaacaaatacttctacagtaata

SEQ ID NO: 478128 - DNA, 33 bp, Homo sapien
gttgattaggaaacaagtacttctacagtaata

SEQ ID NO: 478129 - DNA, 33 bp, Homo sapien
cctcaaatccaagcaactgggacacagaatgga

SEQ ID NO: 478130 - DNA, 33 bp, Homo sapien
cctcaaatccaagcaattgggacacagaatgga

SEQ ID NO: 478131 - DNA, 33 bp, Homo sapien
aaccgttcacttaccactgcaattcaacagcaa

SEQ ID NO: 478132 - DNA, 33 bp, Homo sapien
aaccgttcacttaccattgcaattcaacagcaa

SEQ ID NO: 478133 - DNA, 33 bp, Homo sapien
gtataaaattgctacaaacatttttgtattaat

SEQ ID NO: 478134 - DNA, 33 bp, Homo sapien
gtataaaattgctacagacatttttgtattaat

SEQ ID NO: 478135 - DNA, 33 bp, Homo sapien
ggaaggatatatacctaaaggaaatcagttggt

SEQ ID NO: 478136 - DNA, 33 bp, Homo sapien
ggaaggatatatacctgaaggaaatcagttggt

SEQ ID NO: 478137 - DNA, 33 bp, Homo sapien
accagtccccagtaacagatatagggttgccat

SEQ ID NO: 478138 - DNA, 33 bp, Homo sapien
accagtccccagtaacggatatagggttgccat

SEQ ID NO: 478139 - DNA, 33 bp, Homo sapien
ttattcatgtttaagtaacagaagcttacaggc

SEQ ID NO: 478140 - DNA, 33 bp, Homo sapien
ttattcatgtttaagttacagaagcttacaggc

SEQ ID NO: 478141 - DNA, 33 bp, Homo sapien
ctgtcatctgtctatacgggctttagaaaacgg

SEQ ID NO: 478142 - DNA, 33 bp, Homo sapien
ctgtcatctgtctatatgggctttagaaaacgg

SEQ ID NO: 478143 - DNA, 33 bp, Homo sapien
cagaaggtcttgataggatatgagaaatcagtt

SEQ ID NO: 478144 - DNA, 33 bp, Homo sapien
cagaaggtcttgatagtatatgagaaatcagtt

SEQ ID NO: 478145 - DNA, 33 bp, Homo sapien
ctttacttgcttataacatagatgacattttaa

SEQ ID NO: 478146 - DNA, 33 bp, Homo sapien
ctttacttgcttataatatagatgacattttaa

SEQ ID NO: 478147 - DNA, 33 bp, Homo sapien
ttgaccaatatttgtacagtctgctatcttctc

SEQ ID NO: 478148 - DNA, 33 bp, Homo sapien
ttgaccaatatttgtatagtctgctatcttctc

SEQ ID NO: 478149 - DNA, 33 bp, Homo sapien
caactttgaatctaagcctgttgatgtaggcat

SEQ ID NO: 478150 - DNA, 33 bp, Homo sapien
caactttgaatctaagtctgttgatgtaggcat

SEQ ID NO: 478151 - DNA, 33 bp, Homo sapien
attcagagactccgcaccaacaagccgtgtgcc

SEQ ID NO: 478152 - DNA, 33 bp, Homo sapien
attcagagactccgcagcaacaagccgtgtgcc

SEQ ID NO: 478153 - DNA, 33 bp, Homo sapien
attctggtcactgcccccagagagtaatctttg

SEQ ID NO: 478154 - DNA, 33 bp, Homo sapien
attctggtcactgcccgcagagagtaatctttg

SEQ ID NO: 478155 - DNA, 33 bp, Homo sapien
gggaaatccactttcacgtccaccggtatccaa

SEQ ID NO: 478156 - DNA, 33 bp, Homo sapien
gggaaatccactttcatgtccaccggtatccaa

SEQ ID NO: 478157 - DNA, 33 bp, Homo sapien
cccaagttatttcaccccgatcactccctgcta

SEQ ID NO: 478158 - DNA, 33 bp, Homo sapien
cccaagttatttcacctcgatcactccctgcta

SEQ ID NO: 478159 - DNA, 33 bp, Homo sapien
ttttaaaggaacactcagaacattctgtcattc

SEQ ID NO: 478160 - DNA, 33 bp, Homo sapien
ttttaaaggaacactcggaacattctgtcattc

SEQ ID NO: 478161 - DNA, 33 bp, Homo sapien
tcagtgcccattcctgaaccagtcaattgccca

SEQ ID NO: 478162 - DNA, 33 bp, Homo sapien
tcagtgcccattcctggaccagtcaattgccca

SEQ ID NO: 478163 - DNA, 33 bp, Homo sapien
caatctccagaaaccactatgaaatgacaaatg

SEQ ID NO: 478164 - DNA, 33 bp, Homo sapien
caatctccagaaaccattatgaaatgacaaatg

SEQ ID NO: 478165 - DNA, 33 bp, Homo sapien
cagcaaggtggatataaatggtaacagggagca

SEQ ID NO: 478166 - DNA, 33 bp, Homo sapien
cagcaaggtggatatacatggtaacagggagca

SEQ ID NO: 478167 - DNA, 33 bp, Homo sapien
ttctcctcctcggaataatctcatgcttcctca

SEQ ID NO: 478168 - DNA, 33 bp, Homo sapien
ttctcctcctcggaatgatctcatgcttcctca

SEQ ID NO: 478169 - DNA, 33 bp, Homo sapien
ggagcaagaccttcaaagaggccatagggtaag

SEQ ID NO: 478170 - DNA, 33 bp, Homo sapien
ggagcaagaccttcaaggaggccatagggtaag

SEQ ID NO: 478171 - DNA, 33 bp, Homo sapien
ctcttctaagtccagaaaaaggctgcccaggag

SEQ ID NO: 478172 - DNA, 33 bp, Homo sapien
ctcttctaagtccagataaaggctgcccaggag

SEQ ID NO: 478173 - DNA, 33 bp, Homo sapien
gtttgagcttcattgaccatatggcagaatggc

SEQ ID NO: 478174 - DNA, 33 bp, Homo sapien
gtttgagcttcattgatcatatggcagaatggc

SEQ ID NO: 478175 - DNA, 33 bp, Homo sapien
agtctagtgtggatacaaccattaaatatccac

SEQ ID NO: 478176 - DNA, 33 bp, Homo sapien
agtctagtgtggatacgaccattaaatatccac

SEQ ID NO: 478177 - DNA, 33 bp, Homo sapien
tggattcaatgccaaagatccgacaatgagcaa

SEQ ID NO: 478178 - DNA, 33 bp, Homo sapien
tggattcaatgccaaatatccgacaatgagcaa

SEQ ID NO: 478179 - DNA, 33 bp, Homo sapien
aaaactttgctctcctgacaatggcattcgtcc

SEQ ID NO: 478180 - DNA, 33 bp, Homo sapien
aaaactttgctctccttacaatggcattcgtcc

SEQ ID NO: 478181 - DNA, 33 bp, Homo sapien
ggggcaattcagagtcccataagacctcatggc

SEQ ID NO: 478182 - DNA, 33 bp, Homo sapien
ggggcaattcagagtctcataagacctcatggc

SEQ ID NO: 478183 - DNA, 33 bp, Homo sapien
taactgcagtaaacacacagatttctatgtgaa

SEQ ID NO: 478184 - DNA, 33 bp, Homo sapien
taactgcagtaaacacgcagatttctatgtgaa

SEQ ID NO: 478185 - DNA, 33 bp, Homo sapien
acctaaacacagctcaactcctgactagtttgc

SEQ ID NO: 478186 - DNA, 33 bp, Homo sapien
acctaaacacagctcatctcctgactagtttgc

SEQ ID NO: 478187 - DNA, 33 bp, Homo sapien
aaagattacctaacaaataagctccaagactct

SEQ ID NO: 478188 - DNA, 33 bp, Homo sapien
aaagattacctaacaagtaagctccaagactct

SEQ ID NO: 478189 - DNA, 33 bp, Homo sapien
tatcctctcagaaataccttgtgcaattacaag

SEQ ID NO: 478190 - DNA, 33 bp, Homo sapien
tatcctctcagaaatatcttgtgcaattacaag

SEQ ID NO: 478191 - DNA, 33 bp, Homo sapien
gttggagccactggaacttcatcacccattaag

SEQ ID NO: 478192 - DNA, 33 bp, Homo sapien
gttggagccactggaatttcatcacccattaag

SEQ ID NO: 478193 - DNA, 33 bp, Homo sapien
aaagccctgtgagggaagaaattgccctgtatc

SEQ ID NO: 478194 - DNA, 33 bp, Homo sapien
aaagccctgtgagggaggaaattgccctgtatc

SEQ ID NO: 478195 - DNA, 33 bp, Homo sapien
acacccatgccaggagcaagggcagtgctcggc

SEQ ID NO: 478196 - DNA, 33 bp, Homo sapien
acacccatgccaggagtaagggcagtgctcggc

SEQ ID NO: 478197 - DNA, 33 bp, Homo sapien
gggcaacgtaggctgaatacatcccaaagtgct

SEQ ID NO: 478198 - DNA, 33 bp, Homo sapien
gggcaacgtaggctgagtacatcccaaagtgct

SEQ ID NO: 478199 - DNA, 33 bp, Homo sapien
tgcctgcaatgtgacaacaaggcatacactttg

SEQ ID NO: 478200 - DNA, 33 bp, Homo sapien
tgcctgcaatgtgacagcaaggcatacactttg

SEQ ID NO: 478201 - DNA, 33 bp, Homo sapien
accttccctgtgcaaccgagaactgtgtggggg

SEQ ID NO: 478202 - DNA, 33 bp, Homo sapien
accttccctgtgcaactgagaactgtgtggggg

SEQ ID NO: 478203 - DNA, 33 bp, Homo sapien
ccaagcacttctgttcacgtcatctcctttgac

SEQ ID NO: 478204 - DNA, 33 bp, Homo sapien
ccaagcacttctgttcgcgtcatctcctttgac

SEQ ID NO: 478205 - DNA, 33 bp, Homo sapien
agtgtagggctctccaaagagtttgcgtagggt

SEQ ID NO: 478206 - DNA, 33 bp, Homo sapien
agtgtagggctctccagagagtttgcgtagggt

SEQ ID NO: 478207 - DNA, 33 bp, Homo sapien
gggttcaaaatgctgaatcaatgactgaagaaa

SEQ ID NO: 478208 - DNA, 33 bp, Homo sapien
gggttcaaaatgctgagtcaatgactgaagaaa

SEQ ID NO: 478209 - DNA, 33 bp, Homo sapien
tatgaaagaagaggaaatctcacccctgccctc

SEQ ID NO: 478210 - DNA, 33 bp, Homo sapien
tatgaaagaagaggaactctcacccctgccctc

SEQ ID NO: 478211 - DNA, 33 bp, Homo sapien
tagagtcctgcgtgcacaagtgtagagggaatg

SEQ ID NO: 478212 - DNA, 33 bp, Homo sapien
tagagtcctgcgtgcataagtgtagagggaatg

SEQ ID NO: 478213 - DNA, 33 bp, Homo sapien
gttgattcattcaacaatacttaccctgagggg

SEQ ID NO: 478214 - DNA, 33 bp, Homo sapien
gttgattcattcaacagtacttaccctgagggg

SEQ ID NO: 478215 - DNA, 33 bp, Homo sapien
gattttatactgggggaatccagcaggttgaca

SEQ ID NO: 478216 - DNA, 33 bp, Homo sapien
gattttatactgggggcatccagcaggttgaca

SEQ ID NO: 478217 - DNA, 33 bp, Homo sapien
atgcttcttggaaggacagctcacaacgtcgat

SEQ ID NO: 478218 - DNA, 33 bp, Homo sapien
atgcttcttggaaggagagctcacaacgtcgat

SEQ ID NO: 478219 - DNA, 33 bp, Homo sapien
tcagaaatgctttggacgagacgtattttgcat

SEQ ID NO: 478220 - DNA, 33 bp, Homo sapien
tcagaaatgctttggatgagacgtattttgcat

SEQ ID NO: 478221 - DNA, 33 bp, Homo sapien
ctgtagcattcatgcagtccaagtctaaatgtg

SEQ ID NO: 478222 - DNA, 33 bp, Homo sapien
ctgtagcattcatgcattccaagtctaaatgtg

SEQ ID NO: 478223 - DNA, 33 bp, Homo sapien
cgtgctgcgaggactgaagaagatggtgcatta

SEQ ID NO: 478224 - DNA, 33 bp, Homo sapien
cgtgctgcgaggactggagaagatggtgcatta

SEQ ID NO: 478225 - DNA, 33 bp, Homo sapien
agccagtgatcgagcaactgctatgtgctgcag

SEQ ID NO: 478226 - DNA, 33 bp, Homo sapien
agccagtgatcgagcacctgctatgtgctgcag

SEQ ID NO: 478227 - DNA, 33 bp, Homo sapien
gctcgatcactggctcccttttctttttccatt

SEQ ID NO: 478228 - DNA, 33 bp, Homo sapien
gctcgatcactggctctcttttctttttccatt

SEQ ID NO: 478229 - DNA, 33 bp, Homo sapien
ggctcaaggacagacaagtatgactatttccac

SEQ ID NO: 478230 - DNA, 33 bp, Homo sapien
ggctcaaggacagacaggtatgactatttccac

SEQ ID NO: 478231 - DNA, 33 bp, Homo sapien
gttggaaatcttgacacgacatcctgttaaaaa

SEQ ID NO: 478232 - DNA, 33 bp, Homo sapien
gttggaaatcttgacatgacatcctgttaaaaa

SEQ ID NO: 478233 - DNA, 33 bp, Homo sapien
cctctgaggaatgtacacgtcatgctctaagat

SEQ ID NO: 478234 - DNA, 33 bp, Homo sapien
cctctgaggaatgtacccgtcatgctctaagat

SEQ ID NO: 478235 - DNA, 33 bp, Homo sapien
tttccctgaacatttacgaaggtggaaaatagc

SEQ ID NO: 478236 - DNA, 33 bp, Homo sapien
tttccctgaacatttatgaaggtggaaaatagc

SEQ ID NO: 478237 - DNA, 33 bp, Homo sapien
caccccacatttccaagagagtcccatagtgac

SEQ ID NO: 478238 - DNA, 33 bp, Homo sapien
caccccacatttccaatagagtcccatagtgac

SEQ ID NO: 478239 - DNA, 33 bp, Homo sapien
ctgactgctgagggtcaccactttgcaccagaa

SEQ ID NO: 478240 - DNA, 33 bp, Homo sapien
ctgactgctgagggtcgccactttgcaccagaa

SEQ ID NO: 478241 - DNA, 33 bp, Homo sapien
cataataaaaaatgccaatttcatttatcttcc

SEQ ID NO: 478242 - DNA, 33 bp, Homo sapien
cataataaaaaatgccgatttcatttatcttcc

SEQ ID NO: 478243 - DNA, 33 bp, Homo sapien
ggccatggctacacctaagaatgggccagccac

SEQ ID NO: 478244 - DNA, 33 bp, Homo sapien
ggccatggctacacctgagaatgggccagccac

SEQ ID NO: 478245 - DNA, 33 bp, Homo sapien
aatggtacaataaaaaccagcagtgcttgcact

SEQ ID NO: 478246 - DNA, 33 bp, Homo sapien
aatggtacaataaaaagcagcagtgcttgcact

SEQ ID NO: 478247 - DNA, 33 bp, Homo sapien
agggtgacaaaggggaactcgggagtccaagtg

SEQ ID NO: 478248 - DNA, 33 bp, Homo sapien
agggtgacaaaggggagctcgggagtccaagtg

SEQ ID NO: 478249 - DNA, 33 bp, Homo sapien
tgggacaccgatcaaaacatgaaacaatggaac

SEQ ID NO: 478250 - DNA, 33 bp, Homo sapien
tgggacaccgatcaaaccatgaaacaatggaac

SEQ ID NO: 478251 - DNA, 33 bp, Homo sapien
gagaccaagttccaaaatctagggcacataatt

SEQ ID NO: 478252 - DNA, 33 bp, Homo sapien
gagaccaagttccaaactctagggcacataatt

SEQ ID NO: 478253 - DNA, 33 bp, Homo sapien
acattattagacctcaagtgttgtgggaaatac

SEQ ID NO: 478254 - DNA, 33 bp, Homo sapien
acattattagacctcaggtgttgtgggaaatac

SEQ ID NO: 478255 - DNA, 33 bp, Homo sapien
ccatgcactggtgaacacagcttcagctccttt

SEQ ID NO: 478256 - DNA, 33 bp, Homo sapien
ccatgcactggtgaacgcagcttcagctccttt

SEQ ID NO: 478257 - DNA, 33 bp, Homo sapien
tggtggcagcttgccacatcctccttagctgaa

SEQ ID NO: 478258 - DNA, 33 bp, Homo sapien
tggtggcagcttgccatatcctccttagctgaa

SEQ ID NO: 478259 - DNA, 33 bp, Homo sapien
gcagggcaagctcacaaaggatatggaactgag

SEQ ID NO: 478260 - DNA, 33 bp, Homo sapien
gcagggcaagctcacagaggatatggaactgag

SEQ ID NO: 478261 - DNA, 33 bp, Homo sapien
aaatcttgcagaaggaaatgatgactttgaccc

SEQ ID NO: 478262 - DNA, 33 bp, Homo sapien
aaatcttgcagaaggacatgatgactttgaccc

SEQ ID NO: 478263 - DNA, 33 bp, Homo sapien
ttgttcactcctccgcactctcatcggactttg

SEQ ID NO: 478264 - DNA, 33 bp, Homo sapien
ttgttcactcctccgcgctctcatcggactttg

SEQ ID NO: 478265 - DNA, 33 bp, Homo sapien
gggaaacttagttgaccagaaggatataggtct

SEQ ID NO: 478266 - DNA, 33 bp, Homo sapien
gggaaacttagttgactagaaggatataggtct

SEQ ID NO: 478267 - DNA, 33 bp, Homo sapien
gatttcaccaggcgaacttcaagtacaggacct

SEQ ID NO: 478268 - DNA, 33 bp, Homo sapien
gatttcaccaggcgaagttcaagtacaggacct

SEQ ID NO: 478269 - DNA, 33 bp, Homo sapien
gagggtggtgcttacccacagagtcctgcccca

SEQ ID NO: 478270 - DNA, 33 bp, Homo sapien
gagggtggtgcttaccgacagagtcctgcccca

SEQ ID NO: 478271 - DNA, 33 bp, Homo sapien
caaagtgaatgatgtcactttgggatacaaagg

SEQ ID NO: 478272 - DNA, 33 bp, Homo sapien
caaagtgaatgatgtcgctttgggatacaaagg

SEQ ID NO: 478273 - DNA, 33 bp, Homo sapien
ttaggaaagttcaccacgttcttcagcctttat

SEQ ID NO: 478274 - DNA, 33 bp, Homo sapien
ttaggaaagttcaccatgttcttcagcctttat

SEQ ID NO: 478275 - DNA, 33 bp, Homo sapien
agacagacctgttgtgcaatcctactctaatat

SEQ ID NO: 478276 - DNA, 33 bp, Homo sapien
agacagacctgttgtggaatcctactctaatat

SEQ ID NO: 478277 - DNA, 33 bp, Homo sapien
ttcctcatgtgtaaaaaggaacaataatacaaa

SEQ ID NO: 478278 - DNA, 33 bp, Homo sapien
ttcctcatgtgtaaaatggaacaataatacaaa

SEQ ID NO: 478279 - DNA, 33 bp, Homo sapien
tgggggatttagcaaaacagattcccttcccag

SEQ ID NO: 478280 - DNA, 33 bp, Homo sapien
tgggggatttagcaaagcagattcccttcccag

SEQ ID NO: 478281 - DNA, 33 bp, Homo sapien
caccttgcgaccaaaacgtgctcttcaggaaag

SEQ ID NO: 478282 - DNA, 33 bp, Homo sapien
caccttgcgaccaaaatgtgctcttcaggaaag

SEQ ID NO: 478283 - DNA, 33 bp, Homo sapien
tctcagccctgattagacacaaagtaggatgcc

SEQ ID NO: 478284 - DNA, 33 bp, Homo sapien
tctcagccctgattaggcacaaagtaggatgcc

SEQ ID NO: 478285 - DNA, 33 bp, Homo sapien
catgaaatgaaatgaaagaaacctctctcgtgt

SEQ ID NO: 478286 - DNA, 33 bp, Homo sapien
catgaaatgaaatgaaggaaacctctctcgtgt

SEQ ID NO: 478287 - DNA, 33 bp, Homo sapien
gaaagaaagaaaactacgtagacctggaacagg

SEQ ID NO: 478288 - DNA, 33 bp, Homo sapien
gaaagaaagaaaactatgtagacctggaacagg

SEQ ID NO: 478289 - DNA, 33 bp, Homo sapien
taccatgctttaggaaacacttgaccaaaagat

SEQ ID NO: 478290 - DNA, 33 bp, Homo sapien
taccatgctttaggaagcacttgaccaaaagat

SEQ ID NO: 478291 - DNA, 33 bp, Homo sapien
agaaatgcacacattaagccaagcactgtggct

SEQ ID NO: 478292 - DNA, 33 bp, Homo sapien
agaaatgcacacattaggccaagcactgtggct

SEQ ID NO: 478293 - DNA, 33 bp, Homo sapien
gtgagtgacttgctgcaaaagtttataccagat

SEQ ID NO: 478294 - DNA, 33 bp, Homo sapien
gtgagtgacttgctgctaaagtttataccagat

SEQ ID NO: 478295 - DNA, 33 bp, Homo sapien
aacccagagttgtcaacttcattcctataacta

SEQ ID NO: 478296 - DNA, 33 bp, Homo sapien
aacccagagttgtcaatttcattcctataacta

SEQ ID NO: 478297 - DNA, 33 bp, Homo sapien
atcaatgtgtcccttacggtgaacacagccctc

SEQ ID NO: 478298 - DNA, 33 bp, Homo sapien
atcaatgtgtcccttatggtgaacacagccctc

SEQ ID NO: 478299 - DNA, 33 bp, Homo sapien
ttcagtagctctggaaactgggtttttttgatg

SEQ ID NO: 478300 - DNA, 33 bp, Homo sapien
ttcagtagctctggaagctgggtttttttgatg

SEQ ID NO: 478301 - DNA, 33 bp, Homo sapien
tactcagagataatgactatttttcgtcttcct

SEQ ID NO: 478302 - DNA, 33 bp, Homo sapien
tactcagagataatgattatttttcgtcttcct

SEQ ID NO: 478303 - DNA, 33 bp, Homo sapien
gcttgcaagagatgtcaactcagtgctcacgtt

SEQ ID NO: 478304 - DNA, 33 bp, Homo sapien
gcttgcaagagatgtcgactcagtgctcacgtt

SEQ ID NO: 478305 - DNA, 33 bp, Homo sapien
gtttctagtctcaagacagaatctggttctggt

SEQ ID NO: 478306 - DNA, 33 bp, Homo sapien
gtttctagtctcaagatagaatctggttctggt

SEQ ID NO: 478307 - DNA, 33 bp, Homo sapien
tggggacaggtacagaccagaatgttcagagtt

SEQ ID NO: 478308 - DNA, 33 bp, Homo sapien
tggggacaggtacagatcagaatgttcagagtt

SEQ ID NO: 478309 - DNA, 33 bp, Homo sapien
tgctatctggctagaaccaatcttggagacaag

SEQ ID NO: 478310 - DNA, 33 bp, Homo sapien
tgctatctggctagaatcaatcttggagacaag

SEQ ID NO: 478311 - DNA, 33 bp, Homo sapien
caaggggttcagaccacgtttgctttcactcct

SEQ ID NO: 478312 - DNA, 33 bp, Homo sapien
caaggggttcagaccatgtttgctttcactcct

SEQ ID NO: 478313 - DNA, 33 bp, Homo sapien
cttcccctttcttcaccgctgaactgtgtctct

SEQ ID NO: 478314 - DNA, 33 bp, Homo sapien
cttcccctttcttcactgctgaactgtgtctct

SEQ ID NO: 478315 - DNA, 33 bp, Homo sapien
agcatagaaaggactccgagagaatattccagc

SEQ ID NO: 478316 - DNA, 33 bp, Homo sapien
agcatagaaaggactctgagagaatattccagc

SEQ ID NO: 478317 - DNA, 33 bp, Homo sapien
acaagatgaagtcttccaatacgtgaacatggt

SEQ ID NO: 478318 - DNA, 33 bp, Homo sapien
acaagatgaagtcttctaatacgtgaacatggt

SEQ ID NO: 478319 - DNA, 33 bp, Homo sapien
atcaatttggactatgaaaccccacagaaacag

SEQ ID NO: 478320 - DNA, 33 bp, Homo sapien
atcaatttggactatggaaccccacagaaacag

SEQ ID NO: 478321 - DNA, 33 bp, Homo sapien
taagtatttcagagacacttcatgacttacaca

SEQ ID NO: 478322 - DNA, 33 bp, Homo sapien
taagtatttcagagacgcttcatgacttacaca

SEQ ID NO: 478323 - DNA, 33 bp, Homo sapien
tttctatttagcttaactcatcagcgataactt

SEQ ID NO: 478324 - DNA, 33 bp, Homo sapien
tttctatttagcttaagtcatcagcgataactt

SEQ ID NO: 478325 - DNA, 33 bp, Homo sapien
ctgtgacacacaaaaggcttatgcccctggtct

SEQ ID NO: 478326 - DNA, 33 bp, Homo sapien
ctgtgacacacaaaagtcttatgcccctggtct

SEQ ID NO: 478327 - DNA, 33 bp, Homo sapien
aaagatttgcgtcctaccttacttgtacctcca

SEQ ID NO: 478328 - DNA, 33 bp, Homo sapien
aaagatttgcgtcctatcttacttgtacctcca

SEQ ID NO: 478329 - DNA, 33 bp, Homo sapien
tcgctgctatcccagaggttgcttgagaacaag

SEQ ID NO: 478330 - DNA, 33 bp, Homo sapien
tcgctgctatcccagatgttgcttgagaacaag

SEQ ID NO: 478331 - DNA, 33 bp, Homo sapien
ttgctggtaagacaaacaagagagtgaatgaac

SEQ ID NO: 478332 - DNA, 33 bp, Homo sapien
ttgctggtaagacaaagaagagagtgaatgaac

SEQ ID NO: 478333 - DNA, 33 bp, Homo sapien
aaagagtaataacagaacttgctttctagccca

SEQ ID NO: 478334 - DNA, 33 bp, Homo sapien
aaagagtaataacagagcttgctttctagccca

SEQ ID NO: 478335 - DNA, 33 bp, Homo sapien
acttccctacgtgtaactgagtcccatcagaca

SEQ ID NO: 478336 - DNA, 33 bp, Homo sapien
acttccctacgtgtaattgagtcccatcagaca

SEQ ID NO: 478337 - DNA, 33 bp, Homo sapien
tcgagaagggccagtacattttccagttaccta

SEQ ID NO: 478338 - DNA, 33 bp, Homo sapien
tcgagaagggccagtatattttccagttaccta

SEQ ID NO: 478339 - DNA, 33 bp, Homo sapien
tcgatggctccaagaaactggtgacttaggctt

SEQ ID NO: 478340 - DNA, 33 bp, Homo sapien
tcgatggctccaagaagctggtgacttaggctt

SEQ ID NO: 478341 - DNA, 33 bp, Homo sapien
ttcattaagtgcccaaagaaagcaaggctccct

SEQ ID NO: 478342 - DNA, 33 bp, Homo sapien
ttcattaagtgcccaaggaaagcaaggctccct

SEQ ID NO: 478343 - DNA, 33 bp, Homo sapien
tgttgcttctacttgcggtcacttatactgtgc

SEQ ID NO: 478344 - DNA, 33 bp, Homo sapien
tgttgcttctacttgctgtcacttatactgtgc

SEQ ID NO: 478345 - DNA, 33 bp, Homo sapien
atgataataaaaaaccagatgccatggggaggt

SEQ ID NO: 478346 - DNA, 33 bp, Homo sapien
atgataataaaaaaccggatgccatggggaggt

SEQ ID NO: 478347 - DNA, 33 bp, Homo sapien
ccatgacgtgccagacaacttagctgagagagc

SEQ ID NO: 478348 - DNA, 33 bp, Homo sapien
ccatgacgtgccagacgacttagctgagagagc

SEQ ID NO: 478349 - DNA, 33 bp, Homo sapien
tcccaaccaggcaataactcttgacaagaaaat

SEQ ID NO: 478350 - DNA, 33 bp, Homo sapien
tcccaaccaggcaatagctcttgacaagaaaat

SEQ ID NO: 478351 - DNA, 33 bp, Homo sapien
gatatactgaaaataaatgtggtatttcttgca

SEQ ID NO: 478352 - DNA, 33 bp, Homo sapien
gatatactgaaaataagtgtggtatttcttgca

SEQ ID NO: 478353 - DNA, 33 bp, Homo sapien
gctgccatgactctccaccattgctcatgctat

SEQ ID NO: 478354 - DNA, 33 bp, Homo sapien
gctgccatgactctccgccattgctcatgctat

SEQ ID NO: 478355 - DNA, 33 bp, Homo sapien
ccaagagcttttctccgctcattctttcttcct

SEQ ID NO: 478356 - DNA, 33 bp, Homo sapien
ccaagagcttttctcctctcattctttcttcct

SEQ ID NO: 478357 - DNA, 33 bp, Homo sapien
ctttgaagattatccacactcactgcctctgaa

SEQ ID NO: 478358 - DNA, 33 bp, Homo sapien
ctttgaagattatccagactcactgcctctgaa

SEQ ID NO: 478359 - DNA, 33 bp, Homo sapien
ccatcctcgctcaacaaagaattatccacgttc

SEQ ID NO: 478360 - DNA, 33 bp, Homo sapien
ccatcctcgctcaacagagaattatccacgttc

SEQ ID NO: 478361 - DNA, 33 bp, Homo sapien
aagtgctctatccatgaacggtgagggttgtta

SEQ ID NO: 478362 - DNA, 33 bp, Homo sapien
aagtgctctatccatgtacggtgagggttgtta

SEQ ID NO: 478363 - DNA, 33 bp, Homo sapien
ctctctctctctgttacctcctttttaaaaaca

SEQ ID NO: 478364 - DNA, 33 bp, Homo sapien
ctctctctctctgttatctcctttttaaaaaca

SEQ ID NO: 478365 - DNA, 33 bp, Homo sapien
tgagatttgcacctccaaaaaattaacacacag

SEQ ID NO: 478366 - DNA, 33 bp, Homo sapien
tgagatttgcacctccgaaaaattaacacacag

SEQ ID NO: 478367 - DNA, 33 bp, Homo sapien
ggtgtgggatgggagcaaatgactttgaaacga

SEQ ID NO: 478368 - DNA, 33 bp, Homo sapien
ggtgtgggatgggagcgaatgactttgaaacga

SEQ ID NO: 478369 - DNA, 33 bp, Homo sapien
ttcctatccagttaccagatttgattaaagagc

SEQ ID NO: 478370 - DNA, 33 bp, Homo sapien
ttcctatccagttaccggatttgattaaagagc

SEQ ID NO: 478371 - DNA, 33 bp, Homo sapien
cagtgcagtcgacaccactccgggaggaaaggc

SEQ ID NO: 478372 - DNA, 33 bp, Homo sapien
cagtgcagtcgacaccgctccgggaggaaaggc

SEQ ID NO: 478373 - DNA, 33 bp, Homo sapien
acggggctgagtccaaatgtgaccagaagcatt

SEQ ID NO: 478374 - DNA, 33 bp, Homo sapien
acggggctgagtccaagtgtgaccagaagcatt

SEQ ID NO: 478375 - DNA, 33 bp, Homo sapien
cacatccaagctcaggaatgacagcacctatga

SEQ ID NO: 478376 - DNA, 33 bp, Homo sapien
cacatccaagctcagggatgacagcacctatga

SEQ ID NO: 478377 - DNA, 33 bp, Homo sapien
gctgtcattaagatcacagtggagttaggagaa

SEQ ID NO: 478378 - DNA, 33 bp, Homo sapien
gctgtcattaagatcatagtggagttaggagaa

SEQ ID NO: 478379 - DNA, 33 bp, Homo sapien
atcttgtgttttctcactaggaaatttaaatat

SEQ ID NO: 478380 - DNA, 33 bp, Homo sapien
atcttgtgttttctcagtaggaaatttaaatat

SEQ ID NO: 478381 - DNA, 33 bp, Homo sapien
catctcggagccaagacagactcaaacaagagc

SEQ ID NO: 478382 - DNA, 33 bp, Homo sapien
catctcggagccaagagagactcaaacaagagc

SEQ ID NO: 478383 - DNA, 33 bp, Homo sapien
tcaacaaacttttccagaaagggctagattgta

SEQ ID NO: 478384 - DNA, 33 bp, Homo sapien
tcaacaaacttttccataaagggctagattgta

SEQ ID NO: 478385 - DNA, 33 bp, Homo sapien
tttcagcatactcataagtcgtgtttaacattg

SEQ ID NO: 478386 - DNA, 33 bp, Homo sapien
tttcagcatactcatatgtcgtgtttaacattg

SEQ ID NO: 478387 - DNA, 33 bp, Homo sapien
ttcctgtaactgtgcccctttccttacattgtc

SEQ ID NO: 478388 - DNA, 33 bp, Homo sapien
ttcctgtaactgtgcctctttccttacattgtc

SEQ ID NO: 478389 - DNA, 33 bp, Homo sapien
atgctatgaagaaaaaacagctgaataagggga

SEQ ID NO: 478390 - DNA, 33 bp, Homo sapien
atgctatgaagaaaaagcagctgaataagggga

SEQ ID NO: 478391 - DNA, 33 bp, Homo sapien
gcatttgtcaccaccagagaggttatatatatc

SEQ ID NO: 478392 - DNA, 33 bp, Homo sapien
gcatttgtcaccaccatagaggttatatatatc

SEQ ID NO: 478393 - DNA, 33 bp, Homo sapien
ttctgtatctgtacacccataccctgttggttc

SEQ ID NO: 478394 - DNA, 33 bp, Homo sapien
ttctgtatctgtacacgcataccctgttggttc

SEQ ID NO: 478395 - DNA, 33 bp, Homo sapien
acattatgaagagtaacctgcttgatgaaaagt

SEQ ID NO: 478396 - DNA, 33 bp, Homo sapien
acattatgaagagtaatctgcttgatgaaaagt

SEQ ID NO: 478397 - DNA, 33 bp, Homo sapien
cttctgaaagtgcccaacattccacaggggtct

SEQ ID NO: 478398 - DNA, 33 bp, Homo sapien
cttctgaaagtgcccagcattccacaggggtct

SEQ ID NO: 478399 - DNA, 33 bp, Homo sapien
ggcagccacatgaagagatttgcttctaaagag

SEQ ID NO: 478400 - DNA, 33 bp, Homo sapien
ggcagccacatgaagatatttgcttctaaagag

SEQ ID NO: 478401 - DNA, 33 bp, Homo sapien
aggtatgatgagaaaccaggaaacacaggccct

SEQ ID NO: 478402 - DNA, 33 bp, Homo sapien
aggtatgatgagaaactaggaaacacaggccct

SEQ ID NO: 478403 - DNA, 33 bp, Homo sapien
ggttgaggatccactcactcaagataccgccca

SEQ ID NO: 478404 - DNA, 33 bp, Homo sapien
ggttgaggatccactcgctcaagataccgccca

SEQ ID NO: 478405 - DNA, 33 bp, Homo sapien
ggggtgtctgtcagtcacttttcaatgacttga

SEQ ID NO: 478406 - DNA, 33 bp, Homo sapien
ggggtgtctgtcagtcccttttcaatgacttga

SEQ ID NO: 478407 - DNA, 33 bp, Homo sapien
aggtacagtggaaccacagatacaacagtgatg

SEQ ID NO: 478408 - DNA, 33 bp, Homo sapien
aggtacagtggaaccatagatacaacagtgatg

SEQ ID NO: 478409 - DNA, 33 bp, Homo sapien
aggcacagtgaaggaccagcgacatatttttag

SEQ ID NO: 478410 - DNA, 33 bp, Homo sapien
aggcacagtgaaggactagcgacatatttttag

SEQ ID NO: 478411 - DNA, 33 bp, Homo sapien
tgccaaattatatttcccctactctttcaatgg

SEQ ID NO: 478412 - DNA, 33 bp, Homo sapien
tgccaaattatatttctcctactctttcaatgg

SEQ ID NO: 478413 - DNA, 33 bp, Homo sapien
ggcagagggtgcactcactcaggaaagcagggt

SEQ ID NO: 478414 - DNA, 33 bp, Homo sapien
ggcagagggtgcactcgctcaggaaagcagggt

SEQ ID NO: 478415 - DNA, 33 bp, Homo sapien
ctctcggtccaggccaactttgatgcatttctt

SEQ ID NO: 478416 - DNA, 33 bp, Homo sapien
ctctcggtccaggccagctttgatgcatttctt

SEQ ID NO: 478417 - DNA, 33 bp, Homo sapien
ggattcatggcaataacgaagataaatatcaag

SEQ ID NO: 478418 - DNA, 33 bp, Homo sapien
ggattcatggcaataatgaagataaatatcaag

SEQ ID NO: 478419 - DNA, 33 bp, Homo sapien
tgagcagcctaatgcaagtcatttaacctccct

SEQ ID NO: 478420 - DNA, 33 bp, Homo sapien
tgagcagcctaatgcacgtcatttaacctccct

SEQ ID NO: 478421 - DNA, 33 bp, Homo sapien
tgtggaaaataactgagcatcagttcaagaaag

SEQ ID NO: 478422 - DNA, 33 bp, Homo sapien
tgtggaaaataactgatcatcagttcaagaaag

SEQ ID NO: 478423 - DNA, 33 bp, Homo sapien
gtcccactcgagttgacattgcaaatgctatag

SEQ ID NO: 478424 - DNA, 33 bp, Homo sapien
gtcccactcgagttgagattgcaaatgctatag

SEQ ID NO: 478425 - DNA, 33 bp, Homo sapien
tgaaagaattcttgaaacagtgaagaaaacgga

SEQ ID NO: 478426 - DNA, 33 bp, Homo sapien
tgaaagaattcttgaagcagtgaagaaaacgga

SEQ ID NO: 478427 - DNA, 33 bp, Homo sapien
ctgtgaatcagagagcaaaccctcaccacacac

SEQ ID NO: 478428 - DNA, 33 bp, Homo sapien
ctgtgaatcagagagcgaaccctcaccacacac

SEQ ID NO: 478429 - DNA, 33 bp, Homo sapien
gatgatttaggaggtaaggcctctggtaggtga

SEQ ID NO: 478430 - DNA, 33 bp, Homo sapien
gatgatttaggaggtagggcctctggtaggtga

SEQ ID NO: 478431 - DNA, 33 bp, Homo sapien
ctcagacatgtgtcacaggaagaatggtcaata

SEQ ID NO: 478432 - DNA, 33 bp, Homo sapien
ctcagacatgtgtcacgggaagaatggtcaata

SEQ ID NO: 478433 - DNA, 33 bp, Homo sapien
ttcaattatccaaacacctgtcatgaagaaagg

SEQ ID NO: 478434 - DNA, 33 bp, Homo sapien
ttcaattatccaaacagctgtcatgaagaaagg

SEQ ID NO: 478435 - DNA, 33 bp, Homo sapien
cagctcagacagctgaagatgattttttatatt

SEQ ID NO: 478436 - DNA, 33 bp, Homo sapien
cagctcagacagctgaggatgattttttatatt

SEQ ID NO: 478437 - DNA, 33 bp, Homo sapien
actgcctctcaaggggacatggcctctcctcta

SEQ ID NO: 478438 - DNA, 33 bp, Homo sapien
actgcctctcaagggggcatggcctctcctcta

SEQ ID NO: 478439 - DNA, 33 bp, Homo sapien
taacttgaatctatcacgccactctgttgtgaa

SEQ ID NO: 478440 - DNA, 33 bp, Homo sapien
taacttgaatctatcatgccactctgttgtgaa

SEQ ID NO: 478441 - DNA, 33 bp, Homo sapien
gccactctgttgtgaaaaataatgaatagcacc

SEQ ID NO: 478442 - DNA, 33 bp, Homo sapien
gccactctgttgtgaagaataatgaatagcacc

SEQ ID NO: 478443 - DNA, 33 bp, Homo sapien
gagcctctagaaggaacgcacccttgctgacac

SEQ ID NO: 478444 - DNA, 33 bp, Homo sapien
gagcctctagaaggaatgcacccttgctgacac

SEQ ID NO: 478445 - DNA, 33 bp, Homo sapien
cagtggaactccagtaacaatgagtgcatggtg

SEQ ID NO: 478446 - DNA, 33 bp, Homo sapien
cagtggaactccagtagcaatgagtgcatggtg

SEQ ID NO: 478447 - DNA, 33 bp, Homo sapien
tcttaactccttcgtccgaaagcagtggaactc

SEQ ID NO: 478448 - DNA, 33 bp, Homo sapien
tcttaactccttcgtctgaaagcagtggaactc

SEQ ID NO: 478449 - DNA, 33 bp, Homo sapien
tctttccaggacattcaaaggcatatttctatg

SEQ ID NO: 478450 - DNA, 33 bp, Homo sapien
tctttccaggacattcgaaggcatatttctatg

SEQ ID NO: 478451 - DNA, 33 bp, Homo sapien
acacagaattagaagacactactatgtgcaact

SEQ ID NO: 478452 - DNA, 33 bp, Homo sapien
acacagaattagaagagactactatgtgcaact

SEQ ID NO: 478453 - DNA, 33 bp, Homo sapien
tagagtcttgtcacccacattatctggcagaag

SEQ ID NO: 478454 - DNA, 33 bp, Homo sapien
tagagtcttgtcacccgcattatctggcagaag

SEQ ID NO: 478455 - DNA, 33 bp, Homo sapien
ctaaagagtatgaaacaggatccaattgtaatt

SEQ ID NO: 478456 - DNA, 33 bp, Homo sapien
ctaaagagtatgaaacgggatccaattgtaatt

SEQ ID NO: 478457 - DNA, 33 bp, Homo sapien
ccccacaggtaatttccctaagagcagctacac

SEQ ID NO: 478458 - DNA, 33 bp, Homo sapien
ccccacaggtaatttctctaagagcagctacac

SEQ ID NO: 478459 - DNA, 33 bp, Homo sapien
attttttaacttttccgcagtctggcccactcc

SEQ ID NO: 478460 - DNA, 33 bp, Homo sapien
attttttaacttttcctcagtctggcccactcc

SEQ ID NO: 478461 - DNA, 33 bp, Homo sapien
tcttcttctaataagcagccctgtggaataaca

SEQ ID NO: 478462 - DNA, 33 bp, Homo sapien
tcttcttctaataagccgccctgtggaataaca

SEQ ID NO: 478463 - DNA, 33 bp, Homo sapien
tgcagaaacaagaagcgagtgttctacaagcca

SEQ ID NO: 478464 - DNA, 33 bp, Homo sapien
tgcagaaacaagaagctagtgttctacaagcca

SEQ ID NO: 478465 - DNA, 33 bp, Homo sapien
gtacatctgggatgaaatctacctagagttata

SEQ ID NO: 478466 - DNA, 33 bp, Homo sapien
gtacatctgggatgaagtctacctagagttata

SEQ ID NO: 478467 - DNA, 33 bp, Homo sapien
gtgactttagaagatacccaacgtcaccttaat

SEQ ID NO: 478468 - DNA, 33 bp, Homo sapien
gtgactttagaagatatccaacgtcaccttaat

SEQ ID NO: 478469 - DNA, 33 bp, Homo sapien
cagttgactctgttcaagttctccactgtaaat

SEQ ID NO: 478470 - DNA, 33 bp, Homo sapien
cagttgactctgttcaggttctccactgtaaat

SEQ ID NO: 478471 - DNA, 33 bp, Homo sapien
caggatctatagtggcaaggaaaatggagagga

SEQ ID NO: 478472 - DNA, 33 bp, Homo sapien
caggatctatagtggcgaggaaaatggagagga

SEQ ID NO: 478473 - DNA, 33 bp, Homo sapien
tccatgtaattctaaacagttcccattttattg

SEQ ID NO: 478474 - DNA, 33 bp, Homo sapien
tccatgtaattctaaagagttcccattttattg

SEQ ID NO: 478475 - DNA, 33 bp, Homo sapien
agcttggataagatgacaaaggaagtcacagtg

SEQ ID NO: 478476 - DNA, 33 bp, Homo sapien
agcttggataagatgagaaaggaagtcacagtg

SEQ ID NO: 478477 - DNA, 33 bp, Homo sapien
ggcattctctatttctcacacttgactcaggga

SEQ ID NO: 478478 - DNA, 33 bp, Homo sapien
ggcattctctatttctgacacttgactcaggga

SEQ ID NO: 478479 - DNA, 33 bp, Homo sapien
ctagaccaggcaatcgcatgagaaataagggac

SEQ ID NO: 478480 - DNA, 33 bp, Homo sapien
ctagaccaggcaatcgtatgagaaataagggac

SEQ ID NO: 478481 - DNA, 33 bp, Homo sapien
tctcccaagaccaactcaatgtggctctgtaga

SEQ ID NO: 478482 - DNA, 33 bp, Homo sapien
tctcccaagaccaactgaatgtggctctgtaga

SEQ ID NO: 478483 - DNA, 33 bp, Homo sapien
atgtgttcaaatgaaaacagtgatctatggatc

SEQ ID NO: 478484 - DNA, 33 bp, Homo sapien
atgtgttcaaatgaaaccagtgatctatggatc

SEQ ID NO: 478485 - DNA, 33 bp, Homo sapien
actaccctacagctgagatagagtgaccaggaa

SEQ ID NO: 478486 - DNA, 33 bp, Homo sapien
actaccctacagctgatatagagtgaccaggaa

SEQ ID NO: 478487 - DNA, 33 bp, Homo sapien
cacacattgaagcccgccatgatgccaatcagc

SEQ ID NO: 478488 - DNA, 33 bp, Homo sapien
cacacattgaagcccggcatgatgccaatcagc

SEQ ID NO: 478489 - DNA, 33 bp, Homo sapien
aagaatgcagtctagaacgcaacctttctccac

SEQ ID NO: 478490 - DNA, 33 bp, Homo sapien
aagaatgcagtctagagcgcaacctttctccac

SEQ ID NO: 478491 - DNA, 33 bp, Homo sapien
tagaagtgaactgacactaacagtgagaaggca

SEQ ID NO: 478492 - DNA, 33 bp, Homo sapien
tagaagtgaactgacagtaacagtgagaaggca

SEQ ID NO: 478493 - DNA, 33 bp, Homo sapien
gaaactctgctgggaaataggttgtgacctaga

SEQ ID NO: 478494 - DNA, 33 bp, Homo sapien
gaaactctgctgggaattaggttgtgacctaga

SEQ ID NO: 478495 - DNA, 33 bp, Homo sapien
ggtttagccagagggaccatatcatccattagg

SEQ ID NO: 478496 - DNA, 33 bp, Homo sapien
ggtttagccagagggagcatatcatccattagg

SEQ ID NO: 478497 - DNA, 33 bp, Homo sapien
ggttgattatatttcaagttgatttatacttcc

SEQ ID NO: 478498 - DNA, 33 bp, Homo sapien
ggttgattatatttcaggttgatttatacttcc

SEQ ID NO: 478499 - DNA, 33 bp, Homo sapien
catatgtatgacaagcacttatttagcttccga

SEQ ID NO: 478500 - DNA, 33 bp, Homo sapien
catatgtatgacaagcgcttatttagcttccga

SEQ ID NO: 478501 - DNA, 33 bp, Homo sapien
ggctcatgtcatcttacgtagaggtggcccttg

SEQ ID NO: 478502 - DNA, 33 bp, Homo sapien
ggctcatgtcatcttaggtagaggtggcccttg

SEQ ID NO: 478503 - DNA, 33 bp, Homo sapien
ctgggaagagtgagaacggaagacagtagagag

SEQ ID NO: 478504 - DNA, 33 bp, Homo sapien
ctgggaagagtgagaatggaagacagtagagag

SEQ ID NO: 478505 - DNA, 33 bp, Homo sapien
gtttctctcacaggaacactgaacactctcaaa

SEQ ID NO: 478506 - DNA, 33 bp, Homo sapien
gtttctctcacaggaatactgaacactctcaaa

SEQ ID NO: 478507 - DNA, 33 bp, Homo sapien
ccaggattgacaccctaaggcccactgggacag

SEQ ID NO: 478508 - DNA, 33 bp, Homo sapien
ccaggattgacaccctgaggcccactgggacag

SEQ ID NO: 478509 - DNA, 33 bp, Homo sapien
aggctccaggtgagaaagaccagatacaatttc

SEQ ID NO: 478510 - DNA, 33 bp, Homo sapien
aggctccaggtgagaaggaccagatacaatttc

SEQ ID NO: 478511 - DNA, 33 bp, Homo sapien
cggccacatggctgaccgggggagatgttccag

SEQ ID NO: 478512 - DNA, 33 bp, Homo sapien
cggccacatggctgactgggggagatgttccag

SEQ ID NO: 478513 - DNA, 33 bp, Homo sapien
cagctgaattaaggcaaagctaactagtcattt

SEQ ID NO: 478514 - DNA, 33 bp, Homo sapien
cagctgaattaaggcatagctaactagtcattt

SEQ ID NO: 478515 - DNA, 33 bp, Homo sapien
gcttaaatagagtgtcacaggccacaagttagc

SEQ ID NO: 478516 - DNA, 33 bp, Homo sapien
gcttaaatagagtgtcgcaggccacaagttagc

SEQ ID NO: 478517 - DNA, 33 bp, Homo sapien
tgaaagcgaaactccccaagactggaccgtaag

SEQ ID NO: 478518 - DNA, 33 bp, Homo sapien
tgaaagcgaaactccctaagactggaccgtaag

SEQ ID NO: 478519 - DNA, 33 bp, Homo sapien
aagattccatgtattcaataaagtcttttggct

SEQ ID NO: 478520 - DNA, 33 bp, Homo sapien
aagattccatgtattctataaagtcttttggct

SEQ ID NO: 478521 - DNA, 33 bp, Homo sapien
aggtatagtgaatattaaaatgatgagctttta

SEQ ID NO: 478522 - DNA, 33 bp, Homo sapien
aggtatagtgaatattcaaatgatgagctttta

SEQ ID NO: 478523 - DNA, 33 bp, Homo sapien
tattgaccttatttcacagatcgggaaatggag

SEQ ID NO: 478524 - DNA, 33 bp, Homo sapien
tattgaccttatttcatagatcgggaaatggag

SEQ ID NO: 478525 - DNA, 33 bp, Homo sapien
atatatcttaggcgcagtatctgaaagccctaa

SEQ ID NO: 478526 - DNA, 33 bp, Homo sapien
atatatcttaggcgcattatctgaaagccctaa

SEQ ID NO: 478527 - DNA, 33 bp, Homo sapien
cattcttaaatagctcaagccccattagccttc

SEQ ID NO: 478528 - DNA, 33 bp, Homo sapien
cattcttaaatagctcgagccccattagccttc

SEQ ID NO: 478529 - DNA, 33 bp, Homo sapien
tatttttccaaatcaaagcagtagttcatcatg

SEQ ID NO: 478530 - DNA, 33 bp, Homo sapien
tatttttccaaatcaaggcagtagttcatcatg

SEQ ID NO: 478531 - DNA, 33 bp, Homo sapien
caatatttcactcttacagtgtggtcaccgtcc

SEQ ID NO: 478532 - DNA, 33 bp, Homo sapien
caatatttcactcttatagtgtggtcaccgtcc

SEQ ID NO: 478533 - DNA, 33 bp, Homo sapien
ttcaaaaccaggatccaacaaggagaagagaag

SEQ ID NO: 478534 - DNA, 33 bp, Homo sapien
ttcaaaaccaggatccgacaaggagaagagaag

SEQ ID NO: 478535 - DNA, 33 bp, Homo sapien
aaggggacaacacacaatagattcaggataggg

SEQ ID NO: 478536 - DNA, 33 bp, Homo sapien
aaggggacaacacacagtagattcaggataggg

SEQ ID NO: 478537 - DNA, 33 bp, Homo sapien
ggaatttttttcataactgtggttcaagacaaa

SEQ ID NO: 478538 - DNA, 33 bp, Homo sapien
ggaatttttttcataattgtggttcaagacaaa

SEQ ID NO: 478539 - DNA, 33 bp, Homo sapien
acaactaagcgaagagaacttgccctagtggac

SEQ ID NO: 478540 - DNA, 33 bp, Homo sapien
acaactaagcgaagaggacttgccctagtggac

SEQ ID NO: 478541 - DNA, 33 bp, Homo sapien
acaacagtaacatagcaatggcaacaactaagc

SEQ ID NO: 478542 - DNA, 33 bp, Homo sapien
acaacagtaacatagcgatggcaacaactaagc

SEQ ID NO: 478543 - DNA, 33 bp, Homo sapien
tagactagcaataaaaagtcatgaaagataata

SEQ ID NO: 478544 - DNA, 33 bp, Homo sapien
tagactagcaataaaaggtcatgaaagataata

SEQ ID NO: 478545 - DNA, 33 bp, Homo sapien
cacagagtaataaaataaacagtaaattggctt

SEQ ID NO: 478546 - DNA, 33 bp, Homo sapien
cacagagtaataaaatgaacagtaaattggctt

SEQ ID NO: 478547 - DNA, 33 bp, Homo sapien
atttaatccccagaacaccctgtgagataggtt

SEQ ID NO: 478548 - DNA, 33 bp, Homo sapien
atttaatccccagaactccctgtgagataggtt

SEQ ID NO: 478549 - DNA, 33 bp, Homo sapien
cgctggtcaggctacactggccttgcaggtgca

SEQ ID NO: 478550 - DNA, 33 bp, Homo sapien
cgctggtcaggctacattggccttgcaggtgca

SEQ ID NO: 478551 - DNA, 33 bp, Homo sapien
ctgcttataaaatcacagaaagagttcccagaa

SEQ ID NO: 478552 - DNA, 33 bp, Homo sapien
ctgcttataaaatcacggaaagagttcccagaa

SEQ ID NO: 478553 - DNA, 33 bp, Homo sapien
cctcaaccataaaactaaggcccagagattact

SEQ ID NO: 478554 - DNA, 33 bp, Homo sapien
cctcaaccataaaactgaggcccagagattact

SEQ ID NO: 478555 - DNA, 33 bp, Homo sapien
tatggcagaatacaacgcagacactgaagggct

SEQ ID NO: 478556 - DNA, 33 bp, Homo sapien
tatggcagaatacaactcagacactgaagggct

SEQ ID NO: 478557 - DNA, 33 bp, Homo sapien
tgccaatgtgctagaaaaggcatgcttcaggga

SEQ ID NO: 478558 - DNA, 33 bp, Homo sapien
tgccaatgtgctagaagaggcatgcttcaggga

SEQ ID NO: 478559 - DNA, 33 bp, Homo sapien
cataacattggtgaaacctgacttcagtccagg

SEQ ID NO: 478560 - DNA, 33 bp, Homo sapien
cataacattggtgaaatctgacttcagtccagg

SEQ ID NO: 478561 - DNA, 33 bp, Homo sapien
gtggcctgtgagaaagaaaacctggactgaagt

SEQ ID NO: 478562 - DNA, 33 bp, Homo sapien
gtggcctgtgagaaaggaaacctggactgaagt

SEQ ID NO: 478563 - DNA, 33 bp, Homo sapien
cagctggctgatctgaagaactaagaggctgta

SEQ ID NO: 478564 - DNA, 33 bp, Homo sapien
cagctggctgatctgaggaactaagaggctgta

SEQ ID NO: 478565 - DNA, 33 bp, Homo sapien
tcctgttagactcatacccatgaccagagtcag

SEQ ID NO: 478566 - DNA, 33 bp, Homo sapien
tcctgttagactcatatccatgaccagagtcag

SEQ ID NO: 478567 - DNA, 33 bp, Homo sapien
attccacctatctagaaaataagcttcttaggg

SEQ ID NO: 478568 - DNA, 33 bp, Homo sapien
attccacctatctagataataagcttcttaggg

SEQ ID NO: 478569 - DNA, 33 bp, Homo sapien
tgattgttcattaatgccaacaagtatttattg

SEQ ID NO: 478570 - DNA, 33 bp, Homo sapien
tgattgttcattaatgtcaacaagtatttattg

SEQ ID NO: 478571 - DNA, 33 bp, Homo sapien
aacactgctggtgataagagtcggagagcagtg

SEQ ID NO: 478572 - DNA, 33 bp, Homo sapien
aacactgctggtgataggagtcggagagcagtg

SEQ ID NO: 478573 - DNA, 33 bp, Homo sapien
accaggccaagcagtcacaagttcaagagccca

SEQ ID NO: 478574 - DNA, 33 bp, Homo sapien
accaggccaagcagtcgcaagttcaagagccca

SEQ ID NO: 478575 - DNA, 33 bp, Homo sapien
gcgtaaggtatagccaaatttaccactgtgccc

SEQ ID NO: 478576 - DNA, 33 bp, Homo sapien
gcgtaaggtatagccagatttaccactgtgccc

SEQ ID NO: 478577 - DNA, 33 bp, Homo sapien
gaggaaaagacctttaaggtgaccaactgtcct

SEQ ID NO: 478578 - DNA, 33 bp, Homo sapien
gaggaaaagacctttacggtgaccaactgtcct

SEQ ID NO: 478579 - DNA, 33 bp, Homo sapien
cccagtgactcaggtcaaaaggctgacagctct

SEQ ID NO: 478580 - DNA, 33 bp, Homo sapien
cccagtgactcaggtcgaaaggctgacagctct

SEQ ID NO: 478581 - DNA, 33 bp, Homo sapien
ttgtgctatgattacaactctgtgaaatcagct

SEQ ID NO: 478582 - DNA, 33 bp, Homo sapien
ttgtgctatgattacagctctgtgaaatcagct

SEQ ID NO: 478583 - DNA, 33 bp, Homo sapien
gataaccaaagaggaaaggaatggaaagtctga

SEQ ID NO: 478584 - DNA, 33 bp, Homo sapien
gataaccaaagaggaagggaatggaaagtctga

SEQ ID NO: 478585 - DNA, 33 bp, Homo sapien
ttgtgtggcaagggtacgctgatcggatttctc

SEQ ID NO: 478586 - DNA, 33 bp, Homo sapien
ttgtgtggcaagggtatgctgatcggatttctc

SEQ ID NO: 478587 - DNA, 33 bp, Homo sapien
aaataagtctttctgcactgtaccattcacatt

SEQ ID NO: 478588 - DNA, 33 bp, Homo sapien
aaataagtctttctgccctgtaccattcacatt

SEQ ID NO: 478589 - DNA, 33 bp, Homo sapien
gtgtgcagacacttgaaggaacagggctcagac

SEQ ID NO: 478590 - DNA, 33 bp, Homo sapien
gtgtgcagacacttgagggaacagggctcagac

SEQ ID NO: 478591 - DNA, 33 bp, Homo sapien
gattgatatttcatcacagtaagcgtgttcatt

SEQ ID NO: 478592 - DNA, 33 bp, Homo sapien
gattgatatttcatcatagtaagcgtgttcatt

SEQ ID NO: 478593 - DNA, 33 bp, Homo sapien
catcatttggaggaaactaactggttagcaccc

SEQ ID NO: 478594 - DNA, 33 bp, Homo sapien
catcatttggaggaaagtaactggttagcaccc

SEQ ID NO: 478595 - DNA, 33 bp, Homo sapien
agattcatccccagaaactcccaaaaggaacac

SEQ ID NO: 478596 - DNA, 33 bp, Homo sapien
agattcatccccagaacctcccaaaaggaacac

SEQ ID NO: 478597 - DNA, 33 bp, Homo sapien
ttcccaaatgtagatcaccaacagagttcataa

SEQ ID NO: 478598 - DNA, 33 bp, Homo sapien
ttcccaaatgtagatccccaacagagttcataa

SEQ ID NO: 478599 - DNA, 33 bp, Homo sapien
ggtgataaaatgggaaacttcaactgtacttgt

SEQ ID NO: 478600 - DNA, 33 bp, Homo sapien
ggtgataaaatgggaagcttcaactgtacttgt

SEQ ID NO: 478601 - DNA, 33 bp, Homo sapien
cacactactacagaacaaccacgggaccattgt

SEQ ID NO: 478602 - DNA, 33 bp, Homo sapien
cacactactacagaaccaccacgggaccattgt

SEQ ID NO: 478603 - DNA, 33 bp, Homo sapien
ctattttacagatgaaaagattgaggtcagagg

SEQ ID NO: 478604 - DNA, 33 bp, Homo sapien
ctattttacagatgaacagattgaggtcagagg

SEQ ID NO: 478605 - DNA, 33 bp, Homo sapien
gatctcagtgtaaacactcgtttagtttttaaa

SEQ ID NO: 478606 - DNA, 33 bp, Homo sapien
gatctcagtgtaaacattcgtttagtttttaaa

SEQ ID NO: 478607 - DNA, 33 bp, Homo sapien
ggcaggcgttctattacgttttggagatatggt

SEQ ID NO: 478608 - DNA, 33 bp, Homo sapien
ggcaggcgttctattaggttttggagatatggt

SEQ ID NO: 478609 - DNA, 33 bp, Homo sapien
tgtgtgggcctgtctagcatggcagttacccta

SEQ ID NO: 478610 - DNA, 33 bp, Homo sapien
tgtgtgggcctgtctatcatggcagttacccta

SEQ ID NO: 478611 - DNA, 33 bp, Homo sapien
ctcaatccccattctacgttgtgctcacactca

SEQ ID NO: 478612 - DNA, 33 bp, Homo sapien
ctcaatccccattctatgttgtgctcacactca

SEQ ID NO: 478613 - DNA, 33 bp, Homo sapien
tcttctatatatgtgcaaatccttttcttccct

SEQ ID NO: 478614 - DNA, 33 bp, Homo sapien
tcttctatatatgtgctaatccttttcttccct

SEQ ID NO: 478615 - DNA, 33 bp, Homo sapien
aacagtcccgacaacaatgttctatcatctgac

SEQ ID NO: 478616 - DNA, 33 bp, Homo sapien
aacagtcccgacaacagtgttctatcatctgac

SEQ ID NO: 478617 - DNA, 33 bp, Homo sapien
tcagaaaaggaactgtaaagcttattccaaact

SEQ ID NO: 478618 - DNA, 33 bp, Homo sapien
tcagaaaaggaactgtgaagcttattccaaact

SEQ ID NO: 478619 - DNA, 33 bp, Homo sapien
tcacagaaaaagaaaacgtagtctcattcctac

SEQ ID NO: 478620 - DNA, 33 bp, Homo sapien
tcacagaaaaagaaaatgtagtctcattcctac

SEQ ID NO: 478621 - DNA, 33 bp, Homo sapien
taaacagatagtctcaccaaagacatagaagat

SEQ ID NO: 478622 - DNA, 33 bp, Homo sapien
taaacagatagtctcagcaaagacatagaagat

SEQ ID NO: 478623 - DNA, 33 bp, Homo sapien
tgtctgccccaaataaaagagctgaaaaagata

SEQ ID NO: 478624 - DNA, 33 bp, Homo sapien
tgtctgccccaaataacagagctgaaaaagata

SEQ ID NO: 478625 - DNA, 33 bp, Homo sapien
ccgacagtgttagaagcctgtgagccttcaaca

SEQ ID NO: 478626 - DNA, 33 bp, Homo sapien
ccgacagtgttagaagtctgtgagccttcaaca

SEQ ID NO: 478627 - DNA, 33 bp, Homo sapien
ctgtgccagaccacaacggaacaggcgatgtta

SEQ ID NO: 478628 - DNA, 33 bp, Homo sapien
ctgtgccagaccacaatggaacaggcgatgtta

SEQ ID NO: 478629 - DNA, 33 bp, Homo sapien
cctatggcctcggtcaagtcatatcctgcctca

SEQ ID NO: 478630 - DNA, 33 bp, Homo sapien
cctatggcctcggtcaggtcatatcctgcctca

SEQ ID NO: 478631 - DNA, 33 bp, Homo sapien
agtgctcttggccaccaatgtatatctcccctg

SEQ ID NO: 478632 - DNA, 33 bp, Homo sapien
agtgctcttggccaccgatgtatatctcccctg

SEQ ID NO: 478633 - DNA, 33 bp, Homo sapien
ttgtgctgcctcaggaggttcaagccagagagt

SEQ ID NO: 478634 - DNA, 33 bp, Homo sapien
ttgtgctgcctcaggatgttcaagccagagagt

SEQ ID NO: 478635 - DNA, 33 bp, Homo sapien
ggaacaggaaggtgcacaagtgatagcaagggt

SEQ ID NO: 478636 - DNA, 33 bp, Homo sapien
ggaacaggaaggtgcataagtgatagcaagggt

SEQ ID NO: 478637 - DNA, 33 bp, Homo sapien
gcttcacattcagtgacgcaactttggtggcct

SEQ ID NO: 478638 - DNA, 33 bp, Homo sapien
gcttcacattcagtgatgcaactttggtggcct

SEQ ID NO: 478639 - DNA, 33 bp, Homo sapien
tgaaggcaaggaaccacgtccaattgagctttg

SEQ ID NO: 478640 - DNA, 33 bp, Homo sapien
tgaaggcaaggaaccatgtccaattgagctttg

SEQ ID NO: 478641 - DNA, 33 bp, Homo sapien
acgaagccctcaaatcaaactgccagtattttc

SEQ ID NO: 478642 - DNA, 33 bp, Homo sapien
acgaagccctcaaatcgaactgccagtattttc

SEQ ID NO: 478643 - DNA, 33 bp, Homo sapien
gcttatagagggaatacgtttcttggagtgctt

SEQ ID NO: 478644 - DNA, 33 bp, Homo sapien
gcttatagagggaataggtttcttggagtgctt

SEQ ID NO: 478645 - DNA, 33 bp, Homo sapien
tgttctctgaatttccagactctgtggtttaaa

SEQ ID NO: 478646 - DNA, 33 bp, Homo sapien
tgttctctgaatttcctgactctgtggtttaaa

SEQ ID NO: 478647 - DNA, 33 bp, Homo sapien
agtcactaggaaacaaggtaaggcctacagaat

SEQ ID NO: 478648 - DNA, 33 bp, Homo sapien
agtcactaggaaacaatgtaaggcctacagaat

SEQ ID NO: 478649 - DNA, 33 bp, Homo sapien
ttataaaaaacataagcatgatgcagacagatt

SEQ ID NO: 478650 - DNA, 33 bp, Homo sapien
ttataaaaaacataaggatgatgcagacagatt

SEQ ID NO: 478651 - DNA, 33 bp, Homo sapien
cattacttatgaatcacggtgttattaaagctc

SEQ ID NO: 478652 - DNA, 33 bp, Homo sapien
cattacttatgaatcatggtgttattaaagctc

SEQ ID NO: 478653 - DNA, 33 bp, Homo sapien
tatgtagggtatttgaagctcttagcacaatgc

SEQ ID NO: 478654 - DNA, 33 bp, Homo sapien
tatgtagggtatttgaggctcttagcacaatgc

SEQ ID NO: 478655 - DNA, 33 bp, Homo sapien
ctgtgtgcaactatataataacaaaaggggcaa

SEQ ID NO: 478656 - DNA, 33 bp, Homo sapien
ctgtgtgcaactatatgataacaaaaggggcaa

SEQ ID NO: 478657 - DNA, 33 bp, Homo sapien
atagctgctttttctcacagtagtcaaaaatgg

SEQ ID NO: 478658 - DNA, 33 bp, Homo sapien
atagctgctttttctcccagtagtcaaaaatgg

SEQ ID NO: 478659 - DNA, 33 bp, Homo sapien
agaaaagaactgatacactcacaacatttttca

SEQ ID NO: 478660 - DNA, 33 bp, Homo sapien
agaaaagaactgatactctcacaacatttttca

SEQ ID NO: 478661 - DNA, 33 bp, Homo sapien
catactttttattcaacgccaaacataaaggaa

SEQ ID NO: 478662 - DNA, 33 bp, Homo sapien
catactttttattcaatgccaaacataaaggaa

SEQ ID NO: 478663 - DNA, 33 bp, Homo sapien
atttggatattgccaccagtttccaaaaacatg

SEQ ID NO: 478664 - DNA, 33 bp, Homo sapien
atttggatattgccactagtttccaaaaacatg

SEQ ID NO: 478665 - DNA, 33 bp, Homo sapien
ggtcttctgataatcccagttttctacattaaa

SEQ ID NO: 478666 - DNA, 33 bp, Homo sapien
ggtcttctgataatcctagttttctacattaaa

SEQ ID NO: 478667 - DNA, 33 bp, Homo sapien
ctgtgctgggcttagaatcagtgaacattggac

SEQ ID NO: 478668 - DNA, 33 bp, Homo sapien
ctgtgctgggcttagagtcagtgaacattggac

SEQ ID NO: 478669 - DNA, 33 bp, Homo sapien
tgaatgctttaatcaaatcataatcagatggta

SEQ ID NO: 478670 - DNA, 33 bp, Homo sapien
tgaatgctttaatcaattcataatcagatggta

SEQ ID NO: 478671 - DNA, 33 bp, Homo sapien
cagggtgctgtactccagatttctaggtcacag

SEQ ID NO: 478672 - DNA, 33 bp, Homo sapien
cagggtgctgtactccggatttctaggtcacag

SEQ ID NO: 478673 - DNA, 33 bp, Homo sapien
gtagttactgttctgaaggattttaaaagtcac

SEQ ID NO: 478674 - DNA, 33 bp, Homo sapien
gtagttactgttctgagggattttaaaagtcac

SEQ ID NO: 478675 - DNA, 33 bp, Homo sapien
acaatagatttcatgacaccatacagcattagg

SEQ ID NO: 478676 - DNA, 33 bp, Homo sapien
acaatagatttcatgataccatacagcattagg

SEQ ID NO: 478677 - DNA, 33 bp, Homo sapien
tcttaaagctctgaaacgatcttctttggctcc

SEQ ID NO: 478678 - DNA, 33 bp, Homo sapien
tcttaaagctctgaaatgatcttctttggctcc

SEQ ID NO: 478679 - DNA, 33 bp, Homo sapien
aggccattagtcaggcagaacatcaaaggacat

SEQ ID NO: 478680 - DNA, 33 bp, Homo sapien
aggccattagtcaggcggaacatcaaaggacat

SEQ ID NO: 478681 - DNA, 33 bp, Homo sapien
tctagattcattcatcccccagtccttccttga

SEQ ID NO: 478682 - DNA, 33 bp, Homo sapien
tctagattcattcatctcccagtccttccttga

SEQ ID NO: 478683 - DNA, 33 bp, Homo sapien
ctggcaccacagattcctataaacaccaaagga

SEQ ID NO: 478684 - DNA, 33 bp, Homo sapien
ctggcaccacagattcttataaacaccaaagga

SEQ ID NO: 478685 - DNA, 33 bp, Homo sapien
aggggagacaagtcaacggcaaatcctgtgata

SEQ ID NO: 478686 - DNA, 33 bp, Homo sapien
aggggagacaagtcaatggcaaatcctgtgata

SEQ ID NO: 478687 - DNA, 33 bp, Homo sapien
gcacatcctctggctcaatacatcacaaacaag

SEQ ID NO: 478688 - DNA, 33 bp, Homo sapien
gcacatcctctggctctatacatcacaaacaag

SEQ ID NO: 478689 - DNA, 33 bp, Homo sapien
tcagcaaacttctgtcaatattttttcattgcc

SEQ ID NO: 478690 - DNA, 33 bp, Homo sapien
tcagcaaacttctgtctatattttttcattgcc

SEQ ID NO: 478691 - DNA, 33 bp, Homo sapien
gaataatacaacaaacaataggaaaatatctag

SEQ ID NO: 478692 - DNA, 33 bp, Homo sapien
gaataatacaacaaacgataggaaaatatctag

SEQ ID NO: 478693 - DNA, 33 bp, Homo sapien
gcaggagcaagatacacacggcaaggtgccaca

SEQ ID NO: 478694 - DNA, 33 bp, Homo sapien
gcaggagcaagatacatacggcaaggtgccaca

SEQ ID NO: 478695 - DNA, 33 bp, Homo sapien
ataaatgtgatagctgcactattatggtgaact

SEQ ID NO: 478696 - DNA, 33 bp, Homo sapien
ataaatgtgatagctgtactattatggtgaact

SEQ ID NO: 478697 - DNA, 33 bp, Homo sapien
tttcaaatgtctagtacataatggattctcaat

SEQ ID NO: 478698 - DNA, 33 bp, Homo sapien
tttcaaatgtctagtatataatggattctcaat

SEQ ID NO: 478699 - DNA, 33 bp, Homo sapien
tagattcaaaattgcccgattctaatttatatt

SEQ ID NO: 478700 - DNA, 33 bp, Homo sapien
tagattcaaaattgccggattctaatttatatt

SEQ ID NO: 478701 - DNA, 33 bp, Homo sapien
gtccttaagtcacttacataaccaccctatggt

SEQ ID NO: 478702 - DNA, 33 bp, Homo sapien
gtccttaagtcacttatataaccaccctatggt

SEQ ID NO: 478703 - DNA, 33 bp, Homo sapien
cttcttgtctgacctaaagtgggagaaaatctg

SEQ ID NO: 478704 - DNA, 33 bp, Homo sapien
cttcttgtctgacctagagtgggagaaaatctg

SEQ ID NO: 478705 - DNA, 33 bp, Homo sapien
ggtctgaattagtagaaatgtaggatagttatt

SEQ ID NO: 478706 - DNA, 33 bp, Homo sapien
ggtctgaattagtagagatgtaggatagttatt

SEQ ID NO: 478707 - DNA, 33 bp, Homo sapien
aatgataaacaccaaaatcaggaagtggttacc

SEQ ID NO: 478708 - DNA, 33 bp, Homo sapien
aatgataaacaccaaactcaggaagtggttacc

SEQ ID NO: 478709 - DNA, 33 bp, Homo sapien
ttgagtgcagttgcagaagcatgttgtcagata

SEQ ID NO: 478710 - DNA, 33 bp, Homo sapien
ttgagtgcagttgcagtagcatgttgtcagata

SEQ ID NO: 478711 - DNA, 33 bp, Homo sapien
agtgacagggccaggactcaaatctgactttct

SEQ ID NO: 478712 - DNA, 33 bp, Homo sapien
agtgacagggccaggattcaaatctgactttct

SEQ ID NO: 478713 - DNA, 33 bp, Homo sapien
tatatattttgaagcactgagaaagaggaagaa

SEQ ID NO: 478714 - DNA, 33 bp, Homo sapien
tatatattttgaagcagtgagaaagaggaagaa

SEQ ID NO: 478715 - DNA, 33 bp, Homo sapien
tgagaacatgtaccagaatcttcataggggtgg

SEQ ID NO: 478716 - DNA, 33 bp, Homo sapien
tgagaacatgtaccaggatcttcataggggtgg

SEQ ID NO: 478717 - DNA, 33 bp, Homo sapien
ttgtaaatgttttataccagtaacatacctaga

SEQ ID NO: 478718 - DNA, 33 bp, Homo sapien
ttgtaaatgttttatagcagtaacatacctaga

SEQ ID NO: 478719 - DNA, 33 bp, Homo sapien
tgttaatagtgaaataactgtgacccagaagtg

SEQ ID NO: 478720 - DNA, 33 bp, Homo sapien
tgttaatagtgaaatatctgtgacccagaagtg

SEQ ID NO: 478721 - DNA, 33 bp, Homo sapien
tcagcatttgttgcaccgaaatccagaggtgag

SEQ ID NO: 478722 - DNA, 33 bp, Homo sapien
tcagcatttgttgcactgaaatccagaggtgag

SEQ ID NO: 478723 - DNA, 33 bp, Homo sapien
agggaaaacaaaaggacgcaacataacacataa

SEQ ID NO: 478724 - DNA, 33 bp, Homo sapien
agggaaaacaaaaggatgcaacataacacataa

SEQ ID NO: 478725 - DNA, 33 bp, Homo sapien
aaaacagagcaaagaactgtaagataaaacagt

SEQ ID NO: 478726 - DNA, 33 bp, Homo sapien
aaaacagagcaaagaagtgtaagataaaacagt

SEQ ID NO: 478727 - DNA, 33 bp, Homo sapien
cctctgggccaggcacgctacaaagctctggga

SEQ ID NO: 478728 - DNA, 33 bp, Homo sapien
cctctgggccaggcactctacaaagctctggga

SEQ ID NO: 478729 - DNA, 33 bp, Homo sapien
agaaacagaacaattacagggacatcatctttc

SEQ ID NO: 478730 - DNA, 33 bp, Homo sapien
agaaacagaacaattatagggacatcatctttc

SEQ ID NO: 478731 - DNA, 33 bp, Homo sapien
tgatgcaagaaaaacaatgatgtaagaaacaga

SEQ ID NO: 478732 - DNA, 33 bp, Homo sapien
tgatgcaagaaaaacagtgatgtaagaaacaga

SEQ ID NO: 478733 - DNA, 33 bp, Homo sapien
cagggaacagagatgacagataaagagaagttt

SEQ ID NO: 478734 - DNA, 33 bp, Homo sapien
cagggaacagagatgagagataaagagaagttt

SEQ ID NO: 478735 - DNA, 33 bp, Homo sapien
tatcatattccagaggcagtaatggaaggactt

SEQ ID NO: 478736 - DNA, 33 bp, Homo sapien
tatcatattccagaggtagtaatggaaggactt

SEQ ID NO: 478737 - DNA, 33 bp, Homo sapien
aatacagcctacactaccttgactactggggaa

SEQ ID NO: 478738 - DNA, 33 bp, Homo sapien
aatacagcctacactatcttgactactggggaa

SEQ ID NO: 478739 - DNA, 33 bp, Homo sapien
gcatgaccctaattcacatttagttgagatcaa

SEQ ID NO: 478740 - DNA, 33 bp, Homo sapien
gcatgaccctaattcatatttagttgagatcaa

SEQ ID NO: 478741 - DNA, 33 bp, Homo sapien
ttttatcaccatcataaggtcttgagtttcgaa

SEQ ID NO: 478742 - DNA, 33 bp, Homo sapien
ttttatcaccatcatagggtcttgagtttcgaa

SEQ ID NO: 478743 - DNA, 33 bp, Homo sapien
ttagggataattgtcagcatagtaggccttcac

SEQ ID NO: 478744 - DNA, 33 bp, Homo sapien
ttagggataattgtcatcatagtaggccttcac

SEQ ID NO: 478745 - DNA, 33 bp, Homo sapien
caaagctgaaaggaaccaggtggactacttagt

SEQ ID NO: 478746 - DNA, 33 bp, Homo sapien
caaagctgaaaggaacgaggtggactacttagt

SEQ ID NO: 478747 - DNA, 33 bp, Homo sapien
ggggatgttagtatcacaatctgggaaactgcc

SEQ ID NO: 478748 - DNA, 33 bp, Homo sapien
ggggatgttagtatcataatctgggaaactgcc

SEQ ID NO: 478749 - DNA, 33 bp, Homo sapien
atctaattgtgcaaaaatatacagtgaatgaga

SEQ ID NO: 478750 - DNA, 33 bp, Homo sapien
atctaattgtgcaaaagtatacagtgaatgaga

SEQ ID NO: 478751 - DNA, 33 bp, Homo sapien
actcttcactgtacccaggagactctttctaag

SEQ ID NO: 478752 - DNA, 33 bp, Homo sapien
actcttcactgtaccccggagactctttctaag

SEQ ID NO: 478753 - DNA, 33 bp, Homo sapien
attgtgtaattataccaacttgtctattctgtg

SEQ ID NO: 478754 - DNA, 33 bp, Homo sapien
attgtgtaattatacccacttgtctattctgtg

SEQ ID NO: 478755 - DNA, 33 bp, Homo sapien
ctgttttaaaagactgcatttcagtatgcatcc

SEQ ID NO: 478756 - DNA, 33 bp, Homo sapien
ctgttttaaaagactgtatttcagtatgcatcc

SEQ ID NO: 478757 - DNA, 33 bp, Homo sapien
taaagaaattaaggtacgtgacattttccttag

SEQ ID NO: 478758 - DNA, 33 bp, Homo sapien
taaagaaattaaggtatgtgacattttccttag

SEQ ID NO: 478759 - DNA, 33 bp, Homo sapien
aagcagaaaagtaaaaattagaagcattattta

SEQ ID NO: 478760 - DNA, 33 bp, Homo sapien
aagcagaaaagtaaaatttagaagcattattta

SEQ ID NO: 478761 - DNA, 33 bp, Homo sapien
agggaagtaccaaacaatagaaccacgctctaa

SEQ ID NO: 478762 - DNA, 33 bp, Homo sapien
agggaagtaccaaacagtagaaccacgctctaa

SEQ ID NO: 478763 - DNA, 33 bp, Homo sapien
ttgtctccgttttgtacataatgatactgaagg

SEQ ID NO: 478764 - DNA, 33 bp, Homo sapien
ttgtctccgttttgtagataatgatactgaagg

SEQ ID NO: 478765 - DNA, 33 bp, Homo sapien
ttaaagtgctctgatgaaagactcccaggtttg

SEQ ID NO: 478766 - DNA, 33 bp, Homo sapien
ttaaagtgctctgatggaagactcccaggtttg

SEQ ID NO: 478767 - DNA, 33 bp, Homo sapien
tttaatctaatcaaacagaagatgtggctgttt

SEQ ID NO: 478768 - DNA, 33 bp, Homo sapien
tttaatctaatcaaacggaagatgtggctgttt

SEQ ID NO: 478769 - DNA, 33 bp, Homo sapien
tatatttcccatcaccaattatacagatacaaa

SEQ ID NO: 478770 - DNA, 33 bp, Homo sapien
tatatttcccatcacccattatacagatacaaa

SEQ ID NO: 478771 - DNA, 33 bp, Homo sapien
ttgtcttgtagtcttgaatatgtaacaattctg

SEQ ID NO: 478772 - DNA, 33 bp, Homo sapien
ttgtcttgtagtcttgcatatgtaacaattctg

SEQ ID NO: 478773 - DNA, 33 bp, Homo sapien
gatgaagctcttcatgacaaaaatagaatgaaa

SEQ ID NO: 478774 - DNA, 33 bp, Homo sapien
gatgaagctcttcatggcaaaaatagaatgaaa

SEQ ID NO: 478775 - DNA, 33 bp, Homo sapien
cccaggaagctgtgacactttcaacctcactgc

SEQ ID NO: 478776 - DNA, 33 bp, Homo sapien
cccaggaagctgtgacgctttcaacctcactgc

SEQ ID NO: 478777 - DNA, 33 bp, Homo sapien
gtctgttttgctgcacaagttctggatacaatt

SEQ ID NO: 478778 - DNA, 33 bp, Homo sapien
gtctgttttgctgcacgagttctggatacaatt

SEQ ID NO: 478779 - DNA, 33 bp, Homo sapien
ttttaacagctccataaaatagcgagcaagaat

SEQ ID NO: 478780 - DNA, 33 bp, Homo sapien
ttttaacagctccatacaatagcgagcaagaat

SEQ ID NO: 478781 - DNA, 33 bp, Homo sapien
ctggtgttaataagcacaaaagtcataccaggg

SEQ ID NO: 478782 - DNA, 33 bp, Homo sapien
ctggtgttaataagcagaaaagtcataccaggg

SEQ ID NO: 478783 - DNA, 33 bp, Homo sapien
tgttcctagaagttggcatcatattggacagca

SEQ ID NO: 478784 - DNA, 33 bp, Homo sapien
tgttcctagaagttggtatcatattggacagca

SEQ ID NO: 478785 - DNA, 33 bp, Homo sapien
ttttcgttctatgaaacataggcaaaggatttt

SEQ ID NO: 478786 - DNA, 33 bp, Homo sapien
ttttcgttctatgaaatataggcaaaggatttt

SEQ ID NO: 478787 - DNA, 33 bp, Homo sapien
tatttgctcactccgaagatattatttgagctg

SEQ ID NO: 478788 - DNA, 33 bp, Homo sapien
tatttgctcactccgaggatattatttgagctg

SEQ ID NO: 478789 - DNA, 33 bp, Homo sapien
ctgtaggtatggattacatagaaacatagcttt

SEQ ID NO: 478790 - DNA, 33 bp, Homo sapien
ctgtaggtatggattagatagaaacatagcttt

SEQ ID NO: 478791 - DNA, 33 bp, Homo sapien
cttgacatctttttaacccatggtctcctggtc

SEQ ID NO: 478792 - DNA, 33 bp, Homo sapien
cttgacatctttttaagccatggtctcctggtc

SEQ ID NO: 478793 - DNA, 33 bp, Homo sapien
tagttgttgacaatggaaattaaagtccagtaa

SEQ ID NO: 478794 - DNA, 33 bp, Homo sapien
tagttgttgacaatgggaattaaagtccagtaa

SEQ ID NO: 478795 - DNA, 33 bp, Homo sapien
ggtctttatgctaagtaaaagtcttttgtgaga

SEQ ID NO: 478796 - DNA, 33 bp, Homo sapien
ggtctttatgctaagtcaaagtcttttgtgaga

SEQ ID NO: 478797 - DNA, 33 bp, Homo sapien
aacttggatgacagacaatattgaggtaatgac

SEQ ID NO: 478798 - DNA, 33 bp, Homo sapien
aacttggatgacagacgatattgaggtaatgac

SEQ ID NO: 478799 - DNA, 33 bp, Homo sapien
gtgctttaagcgaatacattttacttcatccca

SEQ ID NO: 478800 - DNA, 33 bp, Homo sapien
gtgctttaagcgaatatattttacttcatccca

SEQ ID NO: 478801 - DNA, 33 bp, Homo sapien
atcttaacatccttacacagcattttccaaatt

SEQ ID NO: 478802 - DNA, 33 bp, Homo sapien
atcttaacatccttacgcagcattttccaaatt

SEQ ID NO: 478803 - DNA, 33 bp, Homo sapien
taaatactctgttataataaaatccactggtct

SEQ ID NO: 478804 - DNA, 33 bp, Homo sapien
taaatactctgttatagtaaaatccactggtct

SEQ ID NO: 478805 - DNA, 33 bp, Homo sapien
aggcttctcctaaattcaaagttctctatttta

SEQ ID NO: 478806 - DNA, 33 bp, Homo sapien
aggcttctcctaaattgaaagttctctatttta

SEQ ID NO: 478807 - DNA, 33 bp, Homo sapien
aatcatttgaccactgaatagctccagctttga

SEQ ID NO: 478808 - DNA, 33 bp, Homo sapien
aatcatttgaccactggatagctccagctttga

SEQ ID NO: 478809 - DNA, 33 bp, Homo sapien
agaagggcatgtgaaaatcagattctgctatat

SEQ ID NO: 478810 - DNA, 33 bp, Homo sapien
agaagggcatgtgaaattcagattctgctatat

SEQ ID NO: 478811 - DNA, 33 bp, Homo sapien
ttccaaagatgactaacagacaaacttactaca

SEQ ID NO: 478812 - DNA, 33 bp, Homo sapien
ttccaaagatgactaatagacaaacttactaca

SEQ ID NO: 478813 - DNA, 33 bp, Homo sapien
agcacagagagaagtacgcttgtcctatcttgc

SEQ ID NO: 478814 - DNA, 33 bp, Homo sapien
agcacagagagaagtatgcttgtcctatcttgc

SEQ ID NO: 478815 - DNA, 33 bp, Homo sapien
attatgataaacttaaaatagtggtggctctga

SEQ ID NO: 478816 - DNA, 33 bp, Homo sapien
attatgataaacttaacatagtggtggctctga

SEQ ID NO: 478817 - DNA, 33 bp, Homo sapien
gaggtggaagtaagccaagtatccatcaacaga

SEQ ID NO: 478818 - DNA, 33 bp, Homo sapien
gaggtggaagtaagccgagtatccatcaacaga

SEQ ID NO: 478819 - DNA, 33 bp, Homo sapien
tcctgtatccccctcaatacctcaatggtttac

SEQ ID NO: 478820 - DNA, 33 bp, Homo sapien
tcctgtatccccctcagtacctcaatggtttac

SEQ ID NO: 478821 - DNA, 33 bp, Homo sapien
tgaggtcaagttataaaaagccctgaataccag

SEQ ID NO: 478822 - DNA, 33 bp, Homo sapien
tgaggtcaagttataagaagccctgaataccag

SEQ ID NO: 478823 - DNA, 33 bp, Homo sapien
gcagccaataacctttaaaagctgactgtctag

SEQ ID NO: 478824 - DNA, 33 bp, Homo sapien
gcagccaataacctttcaaagctgactgtctag

SEQ ID NO: 478825 - DNA, 33 bp, Homo sapien
gcaagcttccattgataagggatggcagagtgc

SEQ ID NO: 478826 - DNA, 33 bp, Homo sapien
gcaagcttccattgatgagggatggcagagtgc

SEQ ID NO: 478827 - DNA, 33 bp, Homo sapien
ctgatgcattggaagacaatagtaaggagttca

SEQ ID NO: 478828 - DNA, 33 bp, Homo sapien
ctgatgcattggaagataatagtaaggagttca

SEQ ID NO: 478829 - DNA, 33 bp, Homo sapien
atttatgtcctgttgactagttttgttgactga

SEQ ID NO: 478830 - DNA, 33 bp, Homo sapien
atttatgtcctgttgattagttttgttgactga

SEQ ID NO: 478831 - DNA, 33 bp, Homo sapien
agcgatgtctaaatgaagagtgttggatttgaa

SEQ ID NO: 478832 - DNA, 33 bp, Homo sapien
agcgatgtctaaatgaggagtgttggatttgaa

SEQ ID NO: 478833 - DNA, 33 bp, Homo sapien
tagggccaggctgaataagtttacacaccaagt

SEQ ID NO: 478834 - DNA, 33 bp, Homo sapien
tagggccaggctgaattagtttacacaccaagt

SEQ ID NO: 478835 - DNA, 33 bp, Homo sapien
ttctgttttgaaccataaggaaacatggaagta

SEQ ID NO: 478836 - DNA, 33 bp, Homo sapien
ttctgttttgaaccatgaggaaacatggaagta

SEQ ID NO: 478837 - DNA, 33 bp, Homo sapien
aatatctgtcaagatcaaagcataaaacaaatt

SEQ ID NO: 478838 - DNA, 33 bp, Homo sapien
aatatctgtcaagatcgaagcataaaacaaatt

SEQ ID NO: 478839 - DNA, 33 bp, Homo sapien
ttgccttagggtaaaaccaccttatagttgtaa

SEQ ID NO: 478840 - DNA, 33 bp, Homo sapien
ttgccttagggtaaaagcaccttatagttgtaa

SEQ ID NO: 478841 - DNA, 33 bp, Homo sapien
ctacagagcccaaaggaaatgccataggatatt

SEQ ID NO: 478842 - DNA, 33 bp, Homo sapien
ctacagagcccaaagggaatgccataggatatt

SEQ ID NO: 478843 - DNA, 33 bp, Homo sapien
cctgtaagaaatctcacgaaggggtggtcttga

SEQ ID NO: 478844 - DNA, 33 bp, Homo sapien
cctgtaagaaatctcatgaaggggtggtcttga

SEQ ID NO: 478845 - DNA, 33 bp, Homo sapien
gcacacacccctgtgaatatctttttaccccat

SEQ ID NO: 478846 - DNA, 33 bp, Homo sapien
gcacacacccctgtgagtatctttttaccccat

SEQ ID NO: 478847 - DNA, 33 bp, Homo sapien
ttcggaggagaaaggaagagcttacgtgcaaat

SEQ ID NO: 478848 - DNA, 33 bp, Homo sapien
ttcggaggagaaaggaggagcttacgtgcaaat

SEQ ID NO: 478849 - DNA, 33 bp, Homo sapien
acgttgccctactctcgcaatgccccgtgaggt

SEQ ID NO: 478850 - DNA, 33 bp, Homo sapien
acgttgccctactctctcaatgccccgtgaggt

SEQ ID NO: 478851 - DNA, 33 bp, Homo sapien
agtccatcggtaccacccatcacagcctccgaa

SEQ ID NO: 478852 - DNA, 33 bp, Homo sapien
agtccatcggtaccacgcatcacagcctccgaa

SEQ ID NO: 478853 - DNA, 33 bp, Homo sapien
tgagtttctatcatgggcagtgtaggcattgaa

SEQ ID NO: 478854 - DNA, 33 bp, Homo sapien
tgagtttctatcatggtcagtgtaggcattgaa

SEQ ID NO: 478855 - DNA, 33 bp, Homo sapien
ctaagaagcagacgtacctactttgtttctaat

SEQ ID NO: 478856 - DNA, 33 bp, Homo sapien
ctaagaagcagacgtatctactttgtttctaat

SEQ ID NO: 478857 - DNA, 33 bp, Homo sapien
cctgggctgtcaagtcaatatttgcagaaggcc

SEQ ID NO: 478858 - DNA, 33 bp, Homo sapien
cctgggctgtcaagtcgatatttgcagaaggcc

SEQ ID NO: 478859 - DNA, 33 bp, Homo sapien
ggggttacaaagggacaacagatcttgctcctg

SEQ ID NO: 478860 - DNA, 33 bp, Homo sapien
ggggttacaaagggacgacagatcttgctcctg

SEQ ID NO: 478861 - DNA, 33 bp, Homo sapien
tgaaaaattaagcttcacagaataatataaaaa

SEQ ID NO: 478862 - DNA, 33 bp, Homo sapien
tgaaaaattaagcttcgcagaataatataaaaa

SEQ ID NO: 478863 - DNA, 33 bp, Homo sapien
agctgggatatctgaacgcgcccactgagttgc

SEQ ID NO: 478864 - DNA, 33 bp, Homo sapien
agctgggatatctgaatgcgcccactgagttgc

SEQ ID NO: 478865 - DNA, 33 bp, Homo sapien
gctaaatgtttaacaaaatccacatacagttta

SEQ ID NO: 478866 - DNA, 33 bp, Homo sapien
gctaaatgtttaacaagatccacatacagttta

SEQ ID NO: 478867 - DNA, 33 bp, Homo sapien
gtttcaaaccagccaacgtggagacaatcttca

SEQ ID NO: 478868 - DNA, 33 bp, Homo sapien
gtttcaaaccagccaatgtggagacaatcttca

SEQ ID NO: 478869 - DNA, 33 bp, Homo sapien
cagttacttgcaactaaaagcatcctcactgat

SEQ ID NO: 478870 - DNA, 33 bp, Homo sapien
cagttacttgcaactacaagcatcctcactgat

SEQ ID NO: 478871 - DNA, 33 bp, Homo sapien
tgtataggcaggcttgcataactctttgaaaga

SEQ ID NO: 478872 - DNA, 33 bp, Homo sapien
tgtataggcaggcttgtataactctttgaaaga

SEQ ID NO: 478873 - DNA, 33 bp, Homo sapien
tacacatcactgaagacattcttgttatgttat

SEQ ID NO: 478874 - DNA, 33 bp, Homo sapien
tacacatcactgaagatattcttgttatgttat

SEQ ID NO: 478875 - DNA, 33 bp, Homo sapien
aaagactctctttcccaggatgcttgtggggat

SEQ ID NO: 478876 - DNA, 33 bp, Homo sapien
aaagactctctttcccgggatgcttgtggggat

SEQ ID NO: 478877 - DNA, 33 bp, Homo sapien
ttgttcctgagcaccaaaagctgcaactaccct

SEQ ID NO: 478878 - DNA, 33 bp, Homo sapien
ttgttcctgagcaccagaagctgcaactaccct

SEQ ID NO: 478879 - DNA, 33 bp, Homo sapien
acagccacggaaggaaccactgtaggcttttag

SEQ ID NO: 478880 - DNA, 33 bp, Homo sapien
acagccacggaaggaatcactgtaggcttttag

SEQ ID NO: 478881 - DNA, 33 bp, Homo sapien
tgttttctctgcttcaaatccttattttggttg

SEQ ID NO: 478882 - DNA, 33 bp, Homo sapien
tgttttctctgcttcagatccttattttggttg

SEQ ID NO: 478883 - DNA, 33 bp, Homo sapien
gtgatcatccatttacccgcctgatagctatcg

SEQ ID NO: 478884 - DNA, 33 bp, Homo sapien
gtgatcatccatttactcgcctgatagctatcg

SEQ ID NO: 478885 - DNA, 33 bp, Homo sapien
attacgcttgtcagctaaaagatagttaatttt

SEQ ID NO: 478886 - DNA, 33 bp, Homo sapien
attacgcttgtcagctgaaagatagttaatttt

SEQ ID NO: 478887 - DNA, 33 bp, Homo sapien
ggtatccaactgtaaactgaaacatttttccta

SEQ ID NO: 478888 - DNA, 33 bp, Homo sapien
ggtatccaactgtaaattgaaacatttttccta

SEQ ID NO: 478889 - DNA, 33 bp, Homo sapien
ataaaactatatctacaaaaaccgagagtgtgc

SEQ ID NO: 478890 - DNA, 33 bp, Homo sapien
ataaaactatatctacgaaaaccgagagtgtgc

SEQ ID NO: 478891 - DNA, 33 bp, Homo sapien
tgtttccttcaggattaaagacattttcaacaa

SEQ ID NO: 478892 - DNA, 33 bp, Homo sapien
tgtttccttcaggattgaagacattttcaacaa

SEQ ID NO: 478893 - DNA, 33 bp, Homo sapien
tttttcgcatcaattgcacatgacctatataaa

SEQ ID NO: 478894 - DNA, 33 bp, Homo sapien
tttttcgcatcaattggacatgacctatataaa

SEQ ID NO: 478895 - DNA, 33 bp, Homo sapien
actaaagatttagtgaaccttaaattgcaaatc

SEQ ID NO: 478896 - DNA, 33 bp, Homo sapien
actaaagatttagtgagccttaaattgcaaatc

SEQ ID NO: 478897 - DNA, 33 bp, Homo sapien
caagtttggcaagcacaatgccaagccaagagg

SEQ ID NO: 478898 - DNA, 33 bp, Homo sapien
caagtttggcaagcacgatgccaagccaagagg

SEQ ID NO: 478899 - DNA, 33 bp, Homo sapien
tgttatggttcctaaacgtggattttaactagt

SEQ ID NO: 478900 - DNA, 33 bp, Homo sapien
tgttatggttcctaaatgtggattttaactagt

SEQ ID NO: 478901 - DNA, 33 bp, Homo sapien
cagcactggatgtccaagaagcccagggcagta

SEQ ID NO: 478902 - DNA, 33 bp, Homo sapien
cagcactggatgtccaggaagcccagggcagta

SEQ ID NO: 478903 - DNA, 33 bp, Homo sapien
aagccaatccagataactgaggactgtcaggac

SEQ ID NO: 478904 - DNA, 33 bp, Homo sapien
aagccaatccagataattgaggactgtcaggac

SEQ ID NO: 478905 - DNA, 33 bp, Homo sapien
cagtccagaagtccaacgtcaaggtgttgatag

SEQ ID NO: 478906 - DNA, 33 bp, Homo sapien
cagtccagaagtccaatgtcaaggtgttgatag

SEQ ID NO: 478907 - DNA, 33 bp, Homo sapien
gctggaaatttgcaaaattgttgctgcatcagt

SEQ ID NO: 478908 - DNA, 33 bp, Homo sapien
gctggaaatttgcaaagttgttgctgcatcagt

SEQ ID NO: 478909 - DNA, 33 bp, Homo sapien
ctgctgtaataggtgacataagatagggttgga

SEQ ID NO: 478910 - DNA, 33 bp, Homo sapien
ctgctgtaataggtgatataagatagggttgga

SEQ ID NO: 478911 - DNA, 33 bp, Homo sapien
aaagacaagagcattacgtaacggacacaaaag

SEQ ID NO: 478912 - DNA, 33 bp, Homo sapien
aaagacaagagcattatgtaacggacacaaaag

SEQ ID NO: 478913 - DNA, 33 bp, Homo sapien
aagagggaaacaaactcaacactgatcctacaa

SEQ ID NO: 478914 - DNA, 33 bp, Homo sapien
aagagggaaacaaactgaacactgatcctacaa

SEQ ID NO: 478915 - DNA, 33 bp, Homo sapien
gttctgagaaatagaaaaaaaaagaggtctaag

SEQ ID NO: 478916 - DNA, 33 bp, Homo sapien
gttctgagaaatagaataaaaaagaggtctaag

SEQ ID NO: 478917 - DNA, 33 bp, Homo sapien
caatagtgtgtaatgacccaaaaagtatgatta

SEQ ID NO: 478918 - DNA, 33 bp, Homo sapien
caatagtgtgtaatgagccaaaaagtatgatta

SEQ ID NO: 478919 - DNA, 33 bp, Homo sapien
atccttttctttcagacacaactttaatgatta

SEQ ID NO: 478920 - DNA, 33 bp, Homo sapien
atccttttctttcagagacaactttaatgatta

SEQ ID NO: 478921 - DNA, 33 bp, Homo sapien
agtcaagctctgtaatcaatggtccctgaataa

SEQ ID NO: 478922 - DNA, 33 bp, Homo sapien
agtcaagctctgtaatgaatggtccctgaataa

SEQ ID NO: 478923 - DNA, 33 bp, Homo sapien
tgacgagggcactacaataatcacttggatctg

SEQ ID NO: 478924 - DNA, 33 bp, Homo sapien
tgacgagggcactacagtaatcacttggatctg

SEQ ID NO: 478925 - DNA, 33 bp, Homo sapien
tagcagatctttctaacaagtgtcctacagagg

SEQ ID NO: 478926 - DNA, 33 bp, Homo sapien
tagcagatctttctaagaagtgtcctacagagg

SEQ ID NO: 478927 - DNA, 33 bp, Homo sapien
tcacaaagaaacctacaacactttctcataaat

SEQ ID NO: 478928 - DNA, 33 bp, Homo sapien
tcacaaagaaacctacgacactttctcataaat

SEQ ID NO: 478929 - DNA, 33 bp, Homo sapien
acagaacccacctcaacgtcaggcaaccagtac

SEQ ID NO: 478930 - DNA, 33 bp, Homo sapien
acagaacccacctcaatgtcaggcaaccagtac

SEQ ID NO: 478931 - DNA, 33 bp, Homo sapien
agagtccactgaagccagacagtcaaaaccaag

SEQ ID NO: 478932 - DNA, 33 bp, Homo sapien
agagtccactgaagccggacagtcaaaaccaag

SEQ ID NO: 478933 - DNA, 33 bp, Homo sapien
gtggaaaagcggaaaaatggatgcacaaggctg

SEQ ID NO: 478934 - DNA, 33 bp, Homo sapien
gtggaaaagcggaaaagtggatgcacaaggctg

SEQ ID NO: 478935 - DNA, 33 bp, Homo sapien
gtatggtgcccaggccagcagtatcatccggga

SEQ ID NO: 478936 - DNA, 33 bp, Homo sapien
gtatggtgcccaggccggcagtatcatccggga

SEQ ID NO: 478937 - DNA, 33 bp, Homo sapien
gctttcctatggcccacaagttaaggataactt

SEQ ID NO: 478938 - DNA, 33 bp, Homo sapien
gctttcctatggcccagaagttaaggataactt

SEQ ID NO: 478939 - DNA, 33 bp, Homo sapien
tgtaaagtaatttacaagcaacattattcatct

SEQ ID NO: 478940 - DNA, 33 bp, Homo sapien
tgtaaagtaatttacaggcaacattattcatct

SEQ ID NO: 478941 - DNA, 33 bp, Homo sapien
aagaaacacattaaccaatcacagtattttgat

SEQ ID NO: 478942 - DNA, 33 bp, Homo sapien
aagaaacacattaacccatcacagtattttgat

SEQ ID NO: 478943 - DNA, 33 bp, Homo sapien
attataccttagtcaagctgggataaaaagagc

SEQ ID NO: 478944 - DNA, 33 bp, Homo sapien
attataccttagtcaatctgggataaaaagagc

SEQ ID NO: 478945 - DNA, 33 bp, Homo sapien
ggttgccagggaaaacgaaaatggactttgatc

SEQ ID NO: 478946 - DNA, 33 bp, Homo sapien
ggttgccagggaaaactaaaatggactttgatc

SEQ ID NO: 478947 - DNA, 33 bp, Homo sapien
gacagtgtagttttagaatatatactcaatcag

SEQ ID NO: 478948 - DNA, 33 bp, Homo sapien
gacagtgtagttttagcatatatactcaatcag

SEQ ID NO: 478949 - DNA, 33 bp, Homo sapien
ttcttaatgcctttcacactaagatgcacacat

SEQ ID NO: 478950 - DNA, 33 bp, Homo sapien
ttcttaatgcctttcagactaagatgcacacat

SEQ ID NO: 478951 - DNA, 33 bp, Homo sapien
tgggctggcaagtctaagcattctcttggcaca

SEQ ID NO: 478952 - DNA, 33 bp, Homo sapien
tgggctggcaagtctaggcattctcttggcaca

SEQ ID NO: 478953 - DNA, 33 bp, Homo sapien
aagaagaatccccagacgacccgtgatgaacat

SEQ ID NO: 478954 - DNA, 33 bp, Homo sapien
aagaagaatccccagatgacccgtgatgaacat

SEQ ID NO: 478955 - DNA, 33 bp, Homo sapien
tgaagtctccataaaaagccgaagaggactggg

SEQ ID NO: 478956 - DNA, 33 bp, Homo sapien
tgaagtctccataaaaggccgaagaggactggg

SEQ ID NO: 478957 - DNA, 33 bp, Homo sapien
acaaggaaggtcctcgaatttgttcacggtcag

SEQ ID NO: 478958 - DNA, 33 bp, Homo sapien
acaaggaaggtcctcgcatttgttcacggtcag

SEQ ID NO: 478959 - DNA, 33 bp, Homo sapien
aggactatgggagttacgagccagaaaccatgg

SEQ ID NO: 478960 - DNA, 33 bp, Homo sapien
aggactatgggagttatgagccagaaaccatgg

SEQ ID NO: 478961 - DNA, 33 bp, Homo sapien
gaattactaagggggacacaaagctttctccat

SEQ ID NO: 478962 - DNA, 33 bp, Homo sapien
gaattactaagggggatacaaagctttctccat

SEQ ID NO: 478963 - DNA, 33 bp, Homo sapien
tcattagtgccttttacatcaaattgagaagga

SEQ ID NO: 478964 - DNA, 33 bp, Homo sapien
tcattagtgccttttagatcaaattgagaagga

SEQ ID NO: 478965 - DNA, 33 bp, Homo sapien
acccagaggcatagcaatcctagatggttctta

SEQ ID NO: 478966 - DNA, 33 bp, Homo sapien
acccagaggcatagcattcctagatggttctta

SEQ ID NO: 478967 - DNA, 33 bp, Homo sapien
tttaatgatgaagcaactaagccaaagatgggt

SEQ ID NO: 478968 - DNA, 33 bp, Homo sapien
tttaatgatgaagcaattaagccaaagatgggt

SEQ ID NO: 478969 - DNA, 33 bp, Homo sapien
attggaacaattcaagcattttgaaacattctc

SEQ ID NO: 478970 - DNA, 33 bp, Homo sapien
attggaacaattcaaggattttgaaacattctc

SEQ ID NO: 478971 - DNA, 33 bp, Homo sapien
attctgtagcccataaataaagcagtgattttg

SEQ ID NO: 478972 - DNA, 33 bp, Homo sapien
attctgtagcccataactaaagcagtgattttg

SEQ ID NO: 478973 - DNA, 33 bp, Homo sapien
ccactgatacaatagcactttacaaattcagag

SEQ ID NO: 478974 - DNA, 33 bp, Homo sapien
ccactgatacaatagcgctttacaaattcagag

SEQ ID NO: 478975 - DNA, 33 bp, Homo sapien
tggataaaggcagatacagtaagtgtagatgag

SEQ ID NO: 478976 - DNA, 33 bp, Homo sapien
tggataaaggcagatatagtaagtgtagatgag

SEQ ID NO: 478977 - DNA, 33 bp, Homo sapien
taatgttgaaaatgacggcattggagtaagtcc

SEQ ID NO: 478978 - DNA, 33 bp, Homo sapien
taatgttgaaaatgactgcattggagtaagtcc

SEQ ID NO: 478979 - DNA, 33 bp, Homo sapien
tataaccatactgcaactacctcttaggaaaga

SEQ ID NO: 478980 - DNA, 33 bp, Homo sapien
tataaccatactgcaattacctcttaggaaaga

SEQ ID NO: 478981 - DNA, 33 bp, Homo sapien
ttgtttaaccaacaccccttaatggctacaggt

SEQ ID NO: 478982 - DNA, 33 bp, Homo sapien
ttgtttaaccaacaccgcttaatggctacaggt

SEQ ID NO: 478983 - DNA, 33 bp, Homo sapien
tttgactgacgaataaaggcaaaaatataaatc

SEQ ID NO: 478984 - DNA, 33 bp, Homo sapien
tttgactgacgaataatggcaaaaatataaatc

SEQ ID NO: 478985 - DNA, 33 bp, Homo sapien
ctgcattgtggttgccagaaaacccataccaaa

SEQ ID NO: 478986 - DNA, 33 bp, Homo sapien
ctgcattgtggttgccggaaaacccataccaaa

SEQ ID NO: 478987 - DNA, 33 bp, Homo sapien
ataaaaaaattactgacgtatagttgtacactc

SEQ ID NO: 478988 - DNA, 33 bp, Homo sapien
ataaaaaaattactgatgtatagttgtacactc

SEQ ID NO: 478989 - DNA, 33 bp, Homo sapien
acattgtgttacagaccccaaggaattttgaaa

SEQ ID NO: 478990 - DNA, 33 bp, Homo sapien
acattgtgttacagactccaaggaattttgaaa

SEQ ID NO: 478991 - DNA, 33 bp, Homo sapien
atggtatcctcaaataccgtcaaaatgcttaac

SEQ ID NO: 478992 - DNA, 33 bp, Homo sapien
atggtatcctcaaatatcgtcaaaatgcttaac

SEQ ID NO: 478993 - DNA, 33 bp, Homo sapien
caccattagcataaaaatgttcagagttgttat

SEQ ID NO: 478994 - DNA, 33 bp, Homo sapien
caccattagcataaaagtgttcagagttgttat

SEQ ID NO: 478995 - DNA, 33 bp, Homo sapien
aaattataaaaatcagaaatttggcattcaaac

SEQ ID NO: 478996 - DNA, 33 bp, Homo sapien
aaattataaaaatcaggaatttggcattcaaac

SEQ ID NO: 478997 - DNA, 33 bp, Homo sapien
ttcagttaacatttacaaattgcttagtatgca

SEQ ID NO: 478998 - DNA, 33 bp, Homo sapien
ttcagttaacatttacgaattgcttagtatgca

SEQ ID NO: 478999 - DNA, 33 bp, Homo sapien
ataaagctccaaagaacatcctccacaagcaca

SEQ ID NO: 479000 - DNA, 33 bp, Homo sapien
ataaagctccaaagaatatcctccacaagcaca

SEQ ID NO: 479001 - DNA, 33 bp, Homo sapien
tgcagacaagctaagcacagtagaggaatggct

SEQ ID NO: 479002 - DNA, 33 bp, Homo sapien
tgcagacaagctaagcgcagtagaggaatggct

SEQ ID NO: 479003 - DNA, 33 bp, Homo sapien
atttgtaaagcctagaggagtgttcagattaca

SEQ ID NO: 479004 - DNA, 33 bp, Homo sapien
atttgtaaagcctagatgagtgttcagattaca

SEQ ID NO: 479005 - DNA, 33 bp, Homo sapien
tcctaatgattcctaaacctcaaggctctgtcc

SEQ ID NO: 479006 - DNA, 33 bp, Homo sapien
tcctaatgattcctaaccctcaaggctctgtcc

SEQ ID NO: 479007 - DNA, 33 bp, Homo sapien
ttgatctagttttataccttgcataacctaagg

SEQ ID NO: 479008 - DNA, 33 bp, Homo sapien
ttgatctagttttatatcttgcataacctaagg

SEQ ID NO: 479009 - DNA, 33 bp, Homo sapien
catcaacaaaccaacagggtggtgagataccat

SEQ ID NO: 479010 - DNA, 33 bp, Homo sapien
catcaacaaaccaacatggtggtgagataccat

SEQ ID NO: 479011 - DNA, 33 bp, Homo sapien
ttctgccaacttttcaccttgctgtattcttcc

SEQ ID NO: 479012 - DNA, 33 bp, Homo sapien
ttctgccaacttttcatcttgctgtattcttcc

SEQ ID NO: 479013 - DNA, 33 bp, Homo sapien
tttccagcagcttgaacaatattataataaaag

SEQ ID NO: 479014 - DNA, 33 bp, Homo sapien
tttccagcagcttgaagaatattataataaaag

SEQ ID NO: 479015 - DNA, 33 bp, Homo sapien
ctcagaggctaagtaacgatcaaccaacaaaac

SEQ ID NO: 479016 - DNA, 33 bp, Homo sapien
ctcagaggctaagtaatgatcaaccaacaaaac

SEQ ID NO: 479017 - DNA, 33 bp, Homo sapien
atttcctagacactaactctctatggcctagaa

SEQ ID NO: 479018 - DNA, 33 bp, Homo sapien
atttcctagacactaattctctatggcctagaa

SEQ ID NO: 479019 - DNA, 33 bp, Homo sapien
ctgctggtgaacttcaaaattgaagaatgcttg

SEQ ID NO: 479020 - DNA, 33 bp, Homo sapien
ctgctggtgaacttcacaattgaagaatgcttg

SEQ ID NO: 479021 - DNA, 33 bp, Homo sapien
tgcctgtgcccttaagaattgtgatggctggct

SEQ ID NO: 479022 - DNA, 33 bp, Homo sapien
tgcctgtgcccttaagtattgtgatggctggct

SEQ ID NO: 479023 - DNA, 33 bp, Homo sapien
tagagggcccctgcgcaaaagtcaatctggcag

SEQ ID NO: 479024 - DNA, 33 bp, Homo sapien
tagagggcccctgcgcgaaagtcaatctggcag

SEQ ID NO: 479025 - DNA, 33 bp, Homo sapien
tcaagaaagatcagcaaagacaggggtaagatc

SEQ ID NO: 479026 - DNA, 33 bp, Homo sapien
tcaagaaagatcagcagagacaggggtaagatc

SEQ ID NO: 479027 - DNA, 33 bp, Homo sapien
ccaatgaagaaacacagacttgcttctcttaaa

SEQ ID NO: 479028 - DNA, 33 bp, Homo sapien
ccaatgaagaaacacatacttgcttctcttaaa

SEQ ID NO: 479029 - DNA, 33 bp, Homo sapien
ggaaccactatcaacccaagtccctgaaatatg

SEQ ID NO: 479030 - DNA, 33 bp, Homo sapien
ggaaccactatcaaccgaagtccctgaaatatg

SEQ ID NO: 479031 - DNA, 33 bp, Homo sapien
ggagaaaataggcagcacagattctatcttttc

SEQ ID NO: 479032 - DNA, 33 bp, Homo sapien
ggagaaaataggcagcgcagattctatcttttc

SEQ ID NO: 479033 - DNA, 33 bp, Homo sapien
tcctgagaagagttacagctcttaaatggctcg

SEQ ID NO: 479034 - DNA, 33 bp, Homo sapien
tcctgagaagagttacggctcttaaatggctcg

SEQ ID NO: 479035 - DNA, 33 bp, Homo sapien
gatacatacattacccagcaatctgtaattttt

SEQ ID NO: 479036 - DNA, 33 bp, Homo sapien
gatacatacattaccctgcaatctgtaattttt

SEQ ID NO: 479037 - DNA, 33 bp, Homo sapien
cagactccataagaaacgaccctacgagacaaa

SEQ ID NO: 479038 - DNA, 33 bp, Homo sapien
cagactccataagaaatgaccctacgagacaaa

SEQ ID NO: 479039 - DNA, 33 bp, Homo sapien
tagagaggcctgagaaggaattctgactgtagg

SEQ ID NO: 479040 - DNA, 33 bp, Homo sapien
tagagaggcctgagaatgaattctgactgtagg

SEQ ID NO: 479041 - DNA, 33 bp, Homo sapien
tggaatataaacataacatacatacgcatttaa

SEQ ID NO: 479042 - DNA, 33 bp, Homo sapien
tggaatataaacataagatacatacgcatttaa

SEQ ID NO: 479043 - DNA, 33 bp, Homo sapien
gtctgaaaatggcacactctagaatgatctata

SEQ ID NO: 479044 - DNA, 33 bp, Homo sapien
gtctgaaaatggcacagtctagaatgatctata

SEQ ID NO: 479045 - DNA, 33 bp, Homo sapien
tactacctggttaataaaagcccagccctctta

SEQ ID NO: 479046 - DNA, 33 bp, Homo sapien
tactacctggttaatagaagcccagccctctta

SEQ ID NO: 479047 - DNA, 33 bp, Homo sapien
acttctttctcaattggaagagtctggaaaata

SEQ ID NO: 479048 - DNA, 33 bp, Homo sapien
acttctttctcaattgtaagagtctggaaaata

SEQ ID NO: 479049 - DNA, 33 bp, Homo sapien
taggataattttaagaacaactgtgtattagtt

SEQ ID NO: 479050 - DNA, 33 bp, Homo sapien
taggataattttaagagcaactgtgtattagtt

SEQ ID NO: 479051 - DNA, 33 bp, Homo sapien
tggtagtcacagggaaatagcaggaggggactg

SEQ ID NO: 479052 - DNA, 33 bp, Homo sapien
tggtagtcacagggaagtagcaggaggggactg

SEQ ID NO: 479053 - DNA, 33 bp, Homo sapien
acccaagtatagtaccaaatcataaccatacag

SEQ ID NO: 479054 - DNA, 33 bp, Homo sapien
acccaagtatagtaccgaatcataaccatacag

SEQ ID NO: 479055 - DNA, 33 bp, Homo sapien
gtcttatgtctgtagcaaagagcaaaaaaatta

SEQ ID NO: 479056 - DNA, 33 bp, Homo sapien
gtcttatgtctgtagccaagagcaaaaaaatta

SEQ ID NO: 479057 - DNA, 33 bp, Homo sapien
taaatcttgtctgctacggtgtaagttacagct

SEQ ID NO: 479058 - DNA, 33 bp, Homo sapien
taaatcttgtctgctatggtgtaagttacagct

SEQ ID NO: 479059 - DNA, 33 bp, Homo sapien
aacaccaaagggattaagtggatttttcctctg

SEQ ID NO: 479060 - DNA, 33 bp, Homo sapien
aacaccaaagggattaggtggatttttcctctg

SEQ ID NO: 479061 - DNA, 33 bp, Homo sapien
tccatgatccattaccactctcaccttctggct

SEQ ID NO: 479062 - DNA, 33 bp, Homo sapien
tccatgatccattaccgctctcaccttctggct

SEQ ID NO: 479063 - DNA, 33 bp, Homo sapien
atttcaccatcgtaaagatataatcactaaaca

SEQ ID NO: 479064 - DNA, 33 bp, Homo sapien
atttcaccatcgtaaatatataatcactaaaca

SEQ ID NO: 479065 - DNA, 33 bp, Homo sapien
tcatgaaaagcttgataagtagtcactaaccca

SEQ ID NO: 479066 - DNA, 33 bp, Homo sapien
tcatgaaaagcttgatgagtagtcactaaccca

SEQ ID NO: 479067 - DNA, 33 bp, Homo sapien
ttttactgcagaatagacagtgtgttattagcg

SEQ ID NO: 479068 - DNA, 33 bp, Homo sapien
ttttactgcagaataggcagtgtgttattagcg

SEQ ID NO: 479069 - DNA, 33 bp, Homo sapien
atctgtacaggatatagagaagaagccagtctt

SEQ ID NO: 479070 - DNA, 33 bp, Homo sapien
atctgtacaggatatatagaagaagccagtctt

SEQ ID NO: 479071 - DNA, 33 bp, Homo sapien
aacacaaaactcaacaatgctatctgctcttcg

SEQ ID NO: 479072 - DNA, 33 bp, Homo sapien
aacacaaaactcaacagtgctatctgctcttcg

SEQ ID NO: 479073 - DNA, 33 bp, Homo sapien
gcctggcctcactacagtggtttcaaaaagaac

SEQ ID NO: 479074 - DNA, 33 bp, Homo sapien
gcctggcctcactacattggtttcaaaaagaac

SEQ ID NO: 479075 - DNA, 33 bp, Homo sapien
acaattggggcaaaaaattcatcaatatatcct

SEQ ID NO: 479076 - DNA, 33 bp, Homo sapien
acaattggggcaaaaatttcatcaatatatcct

SEQ ID NO: 479077 - DNA, 33 bp, Homo sapien
ctctagaatcctcaagacattgttactgctgct

SEQ ID NO: 479078 - DNA, 33 bp, Homo sapien
ctctagaatcctcaagccattgttactgctgct

SEQ ID NO: 479079 - DNA, 33 bp, Homo sapien
caaactgttctatctacggtgattggcttgaca

SEQ ID NO: 479080 - DNA, 33 bp, Homo sapien
caaactgttctatctatggtgattggcttgaca

SEQ ID NO: 479081 - DNA, 33 bp, Homo sapien
tgactgctgaataccaaaggagaaagtgataag

SEQ ID NO: 479082 - DNA, 33 bp, Homo sapien
tgactgctgaataccagaggagaaagtgataag

SEQ ID NO: 479083 - DNA, 33 bp, Homo sapien
gtcacaagtgacagaccggtggtaaaagtgaaa

SEQ ID NO: 479084 - DNA, 33 bp, Homo sapien
gtcacaagtgacagactggtggtaaaagtgaaa

SEQ ID NO: 479085 - DNA, 33 bp, Homo sapien
tgttacttaggtggacaatgaatgcagagaaag

SEQ ID NO: 479086 - DNA, 33 bp, Homo sapien
tgttacttaggtggacgatgaatgcagagaaag

SEQ ID NO: 479087 - DNA, 33 bp, Homo sapien
attaataatgaagaacaagtttgctaaaagctt

SEQ ID NO: 479088 - DNA, 33 bp, Homo sapien
attaataatgaagaacgagtttgctaaaagctt

SEQ ID NO: 479089 - DNA, 33 bp, Homo sapien
ctggaaaataggaataaatgtgacagagaacga

SEQ ID NO: 479090 - DNA, 33 bp, Homo sapien
ctggaaaataggaatatatgtgacagagaacga

SEQ ID NO: 479091 - DNA, 33 bp, Homo sapien
atatcctgttggaaacaatcctaaaaatcacat

SEQ ID NO: 479092 - DNA, 33 bp, Homo sapien
atatcctgttggaaaccatcctaaaaatcacat

SEQ ID NO: 479093 - DNA, 33 bp, Homo sapien
gataggaataatttctcaaaggttataatgatt

SEQ ID NO: 479094 - DNA, 33 bp, Homo sapien
gataggaataatttctgaaaggttataatgatt

SEQ ID NO: 479095 - DNA, 33 bp, Homo sapien
tacattacatcgccaagaggtggcattctccca

SEQ ID NO: 479096 - DNA, 33 bp, Homo sapien
tacattacatcgccaataggtggcattctccca

SEQ ID NO: 479097 - DNA, 33 bp, Homo sapien
tcttgcttccgtgctaacgggatcccaggtgtt

SEQ ID NO: 479098 - DNA, 33 bp, Homo sapien
tcttgcttccgtgctaccgggatcccaggtgtt

SEQ ID NO: 479099 - DNA, 33 bp, Homo sapien
cctgctctttaaataccactctgaagcaacaat

SEQ ID NO: 479100 - DNA, 33 bp, Homo sapien
cctgctctttaaatactactctgaagcaacaat

SEQ ID NO: 479101 - DNA, 33 bp, Homo sapien
cacatcttcagatacaaaagagaagacatggtg

SEQ ID NO: 479102 - DNA, 33 bp, Homo sapien
cacatcttcagatacagaagagaagacatggtg

SEQ ID NO: 479103 - DNA, 33 bp, Homo sapien
gtcaagaatctttttccaggttcggctatttcc

SEQ ID NO: 479104 - DNA, 33 bp, Homo sapien
gtcaagaatctttttcgaggttcggctatttcc

SEQ ID NO: 479105 - DNA, 33 bp, Homo sapien
cagagatggtaaggacaggaattccaaaggagc

SEQ ID NO: 479106 - DNA, 33 bp, Homo sapien
cagagatggtaaggacgggaattccaaaggagc

SEQ ID NO: 479107 - DNA, 33 bp, Homo sapien
gatctcaaaaaagtcaccttcgtcttgtctgtg

SEQ ID NO: 479108 - DNA, 33 bp, Homo sapien
gatctcaaaaaagtcatcttcgtcttgtctgtg

SEQ ID NO: 479109 - DNA, 33 bp, Homo sapien
tctcgtcattgcttcaatcacagacaagacgaa

SEQ ID NO: 479110 - DNA, 33 bp, Homo sapien
tctcgtcattgcttcagtcacagacaagacgaa

SEQ ID NO: 479111 - DNA, 33 bp, Homo sapien
ttccacctctcttccactgaattttacatatga

SEQ ID NO: 479112 - DNA, 33 bp, Homo sapien
ttccacctctcttccattgaattttacatatga

SEQ ID NO: 479113 - DNA, 33 bp, Homo sapien
ctgaaaaagttgagatcactaaaggttgaggga

SEQ ID NO: 479114 - DNA, 33 bp, Homo sapien
ctgaaaaagttgagatgactaaaggttgaggga

SEQ ID NO: 479115 - DNA, 33 bp, Homo sapien
agtcttaaggagaagaggaagtaattggaattg

SEQ ID NO: 479116 - DNA, 33 bp, Homo sapien
agtcttaaggagaagatgaagtaattggaattg

SEQ ID NO: 479117 - DNA, 33 bp, Homo sapien
ctcaggccagaccccacatttgatgtgatatgc

SEQ ID NO: 479118 - DNA, 33 bp, Homo sapien
ctcaggccagaccccatatttgatgtgatatgc

SEQ ID NO: 479119 - DNA, 33 bp, Homo sapien
ttccttgaagtgtagccacatcactccagtctt

SEQ ID NO: 479120 - DNA, 33 bp, Homo sapien
ttccttgaagtgtagcgacatcactccagtctt

SEQ ID NO: 479121 - DNA, 33 bp, Homo sapien
tccttgtgacttcccactgctgaactattcctt

SEQ ID NO: 479122 - DNA, 33 bp, Homo sapien
tccttgtgacttcccagtgctgaactattcctt

SEQ ID NO: 479123 - DNA, 33 bp, Homo sapien
ataacagaataacaggaaccgcttggcatgcta

SEQ ID NO: 479124 - DNA, 33 bp, Homo sapien
ataacagaataacaggtaccgcttggcatgcta

SEQ ID NO: 479125 - DNA, 33 bp, Homo sapien
ggagccaaattaatgacgtagataatgagtgcc

SEQ ID NO: 479126 - DNA, 33 bp, Homo sapien
ggagccaaattaatgatgtagataatgagtgcc

SEQ ID NO: 479127 - DNA, 33 bp, Homo sapien
tctatgtctgggcaacagggagttattcagagg

SEQ ID NO: 479128 - DNA, 33 bp, Homo sapien
tctatgtctgggcaacggggagttattcagagg

SEQ ID NO: 479129 - DNA, 33 bp, Homo sapien
taagttgtaggcactaataggagcataatgtct

SEQ ID NO: 479130 - DNA, 33 bp, Homo sapien
taagttgtaggcactattaggagcataatgtct

SEQ ID NO: 479131 - DNA, 33 bp, Homo sapien
taaccacagaggcaaaaagtagttgaataaatt

SEQ ID NO: 479132 - DNA, 33 bp, Homo sapien
taaccacagaggcaaatagtagttgaataaatt

SEQ ID NO: 479133 - DNA, 33 bp, Homo sapien
tataatatagcaaaacccagtgaattgtatggt

SEQ ID NO: 479134 - DNA, 33 bp, Homo sapien
tataatatagcaaaacgcagtgaattgtatggt

SEQ ID NO: 479135 - DNA, 33 bp, Homo sapien
tctcaattgcaatgacaaaaggttggttgagaa

SEQ ID NO: 479136 - DNA, 33 bp, Homo sapien
tctcaattgcaatgacgaaaggttggttgagaa

SEQ ID NO: 479137 - DNA, 33 bp, Homo sapien
gtgcaggaatctagaaaaaaccatgtttgatga

SEQ ID NO: 479138 - DNA, 33 bp, Homo sapien
gtgcaggaatctagaataaaccatgtttgatga

SEQ ID NO: 479139 - DNA, 33 bp, Homo sapien
aaatcagaacatatgacgggcggtaagagtgca

SEQ ID NO: 479140 - DNA, 33 bp, Homo sapien
aaatcagaacatatgaggggcggtaagagtgca

SEQ ID NO: 479141 - DNA, 33 bp, Homo sapien
aaaatgttcggttgccgctggtcttccttattt

SEQ ID NO: 479142 - DNA, 33 bp, Homo sapien
aaaatgttcggttgcctctggtcttccttattt

SEQ ID NO: 479143 - DNA, 33 bp, Homo sapien
tgagtaccgcaccaaccaatgttctctgatgga

SEQ ID NO: 479144 - DNA, 33 bp, Homo sapien
tgagtaccgcaccaacgaatgttctctgatgga

SEQ ID NO: 479145 - DNA, 33 bp, Homo sapien
tatgccgttgatttgccaaagtattataagtgt

SEQ ID NO: 479146 - DNA, 33 bp, Homo sapien
tatgccgttgatttgctaaagtattataagtgt

SEQ ID NO: 479147 - DNA, 33 bp, Homo sapien
atcagttttaacacagacatagtgagagacagt

SEQ ID NO: 479148 - DNA, 33 bp, Homo sapien
atcagttttaacacaggcatagtgagagacagt

SEQ ID NO: 479149 - DNA, 33 bp, Homo sapien
caacaaaactctatgaaaagggaagccattctg

SEQ ID NO: 479150 - DNA, 33 bp, Homo sapien
caacaaaactctatgacaagggaagccattctg

SEQ ID NO: 479151 - DNA, 33 bp, Homo sapien
ttctggatgacctttaaacttcaccctgtcact

SEQ ID NO: 479152 - DNA, 33 bp, Homo sapien
ttctggatgacctttatacttcaccctgtcact

SEQ ID NO: 479153 - DNA, 33 bp, Homo sapien
cattagttcaaaatcaacctactgcctcatata

SEQ ID NO: 479154 - DNA, 33 bp, Homo sapien
cattagttcaaaatcagcctactgcctcatata

SEQ ID NO: 479155 - DNA, 33 bp, Homo sapien
gattctatagaagctcactatgatggaatattt

SEQ ID NO: 479156 - DNA, 33 bp, Homo sapien
gattctatagaagctcgctatgatggaatattt

SEQ ID NO: 479157 - DNA, 33 bp, Homo sapien
atgatggcagagaaaaatagtcatataaagata

SEQ ID NO: 479158 - DNA, 33 bp, Homo sapien
atgatggcagagaaaagtagtcatataaagata

SEQ ID NO: 479159 - DNA, 33 bp, Homo sapien
atggataccattctgacgtttatcgagaggaga

SEQ ID NO: 479160 - DNA, 33 bp, Homo sapien
atggataccattctgaggtttatcgagaggaga

SEQ ID NO: 479161 - DNA, 33 bp, Homo sapien
gatgaatttcttagaacgtatccccgtcgttat

SEQ ID NO: 479162 - DNA, 33 bp, Homo sapien
gatgaatttcttagaatgtatccccgtcgttat

SEQ ID NO: 479163 - DNA, 33 bp, Homo sapien
tcagttattaggtaaccggtgcaattaggccac

SEQ ID NO: 479164 - DNA, 33 bp, Homo sapien
tcagttattaggtaactggtgcaattaggccac

SEQ ID NO: 479165 - DNA, 33 bp, Homo sapien
actgtgctctgctggaaaagtgcccttaattca

SEQ ID NO: 479166 - DNA, 33 bp, Homo sapien
actgtgctctgctggagaagtgcccttaattca

SEQ ID NO: 479167 - DNA, 33 bp, Homo sapien
tgatagaaagctcttacgtattttttgacatcc

SEQ ID NO: 479168 - DNA, 33 bp, Homo sapien
tgatagaaagctcttatgtattttttgacatcc

SEQ ID NO: 479169 - DNA, 33 bp, Homo sapien
gacacccactactacacatcacagctttggtgg

SEQ ID NO: 479170 - DNA, 33 bp, Homo sapien
gacacccactactacatatcacagctttggtgg

SEQ ID NO: 479171 - DNA, 33 bp, Homo sapien
aatgtgaaataaaagaaattgtgttgttacgaa

SEQ ID NO: 479172 - DNA, 33 bp, Homo sapien
aatgtgaaataaaagagattgtgttgttacgaa

SEQ ID NO: 479173 - DNA, 33 bp, Homo sapien
cagagactctgaattacaatagagcctttgtaa

SEQ ID NO: 479174 - DNA, 33 bp, Homo sapien
cagagactctgaattataatagagcctttgtaa

SEQ ID NO: 479175 - DNA, 33 bp, Homo sapien
aacatctagaactcaacaacccagtctgattac

SEQ ID NO: 479176 - DNA, 33 bp, Homo sapien
aacatctagaactcaagaacccagtctgattac

SEQ ID NO: 479177 - DNA, 33 bp, Homo sapien
gcccatattataaaaaagttgtgcagaaagtag

SEQ ID NO: 479178 - DNA, 33 bp, Homo sapien
gcccatattataaaaacgttgtgcagaaagtag

SEQ ID NO: 479179 - DNA, 33 bp, Homo sapien
tcttctttcccagtcacgattctacttcctctc

SEQ ID NO: 479180 - DNA, 33 bp, Homo sapien
tcttctttcccagtcatgattctacttcctctc

SEQ ID NO: 479181 - DNA, 33 bp, Homo sapien
ctgcttacaaagaagacacatcgtattcacctt

SEQ ID NO: 479182 - DNA, 33 bp, Homo sapien
ctgcttacaaagaagagacatcgtattcacctt

SEQ ID NO: 479183 - DNA, 33 bp, Homo sapien
gtaagaatgcagaaaaatctgtggagaaagaaa

SEQ ID NO: 479184 - DNA, 33 bp, Homo sapien
gtaagaatgcagaaaagtctgtggagaaagaaa

SEQ ID NO: 479185 - DNA, 33 bp, Homo sapien
aacagaattgtgcaaaatcagaaaacattacct

SEQ ID NO: 479186 - DNA, 33 bp, Homo sapien
aacagaattgtgcaaagtcagaaaacattacct

SEQ ID NO: 479187 - DNA, 33 bp, Homo sapien
gtactgttttccaaacaatgttccacagaagta

SEQ ID NO: 479188 - DNA, 33 bp, Homo sapien
gtactgttttccaaacgatgttccacagaagta

SEQ ID NO: 479189 - DNA, 33 bp, Homo sapien
cccccaggcttgagaacttaagatccctttctt

SEQ ID NO: 479190 - DNA, 33 bp, Homo sapien
cccccaggcttgagaatttaagatccctttctt

SEQ ID NO: 479191 - DNA, 33 bp, Homo sapien
ttcttcctccgttcacaaatacgctcaggactt

SEQ ID NO: 479192 - DNA, 33 bp, Homo sapien
ttcttcctccgttcacgaatacgctcaggactt

SEQ ID NO: 479193 - DNA, 33 bp, Homo sapien
tgacacaggtgagctcaatcttgcttctttgtc

SEQ ID NO: 479194 - DNA, 33 bp, Homo sapien
tgacacaggtgagctctatcttgcttctttgtc

SEQ ID NO: 479195 - DNA, 33 bp, Homo sapien
cctcacctggaataccacatttcccattttatt

SEQ ID NO: 479196 - DNA, 33 bp, Homo sapien
cctcacctggaataccccatttcccattttatt

SEQ ID NO: 479197 - DNA, 33 bp, Homo sapien
ttattatatttagcgacggcagtggcaggtgtc

SEQ ID NO: 479198 - DNA, 33 bp, Homo sapien
ttattatatttagcgatggcagtggcaggtgtc

SEQ ID NO: 479199 - DNA, 33 bp, Homo sapien
tgccttcctgaggttccgaaaattctcttagat

SEQ ID NO: 479200 - DNA, 33 bp, Homo sapien
tgccttcctgaggttctgaaaattctcttagat

SEQ ID NO: 479201 - DNA, 33 bp, Homo sapien
gctaattaatgaaggaagtatgctcttatatga

SEQ ID NO: 479202 - DNA, 33 bp, Homo sapien
gctaattaatgaaggacgtatgctcttatatga

SEQ ID NO: 479203 - DNA, 33 bp, Homo sapien
atttatatacgggtgaaatgaaagcttttttgc

SEQ ID NO: 479204 - DNA, 33 bp, Homo sapien
atttatatacgggtgagatgaaagcttttttgc

SEQ ID NO: 479205 - DNA, 33 bp, Homo sapien
gtctcacaaaaaaagcaaagtctgagtttacag

SEQ ID NO: 479206 - DNA, 33 bp, Homo sapien
gtctcacaaaaaaagcgaagtctgagtttacag

SEQ ID NO: 479207 - DNA, 33 bp, Homo sapien
ttaattcaagttttgacggttaacatttagcag

SEQ ID NO: 479208 - DNA, 33 bp, Homo sapien
ttaattcaagttttgatggttaacatttagcag

SEQ ID NO: 479209 - DNA, 33 bp, Homo sapien
ttaaatggaatatataaactttagcccccaaat

SEQ ID NO: 479210 - DNA, 33 bp, Homo sapien
ttaaatggaatatatacactttagcccccaaat

SEQ ID NO: 479211 - DNA, 33 bp, Homo sapien
tggaaattggcagaaactggaaagattgcaggg

SEQ ID NO: 479212 - DNA, 33 bp, Homo sapien
tggaaattggcagaaattggaaagattgcaggg

SEQ ID NO: 479213 - DNA, 33 bp, Homo sapien
aatgaggattcacctacacttttttagatttac

SEQ ID NO: 479214 - DNA, 33 bp, Homo sapien
aatgaggattcacctagacttttttagatttac

SEQ ID NO: 479215 - DNA, 33 bp, Homo sapien
tcattagaattgttggaaaaatagaatagcctt

SEQ ID NO: 479216 - DNA, 33 bp, Homo sapien
tcattagaattgttggcaaaatagaatagcctt

SEQ ID NO: 479217 - DNA, 33 bp, Homo sapien
ctgtttaagtctccggaatagctgggcctacag

SEQ ID NO: 479218 - DNA, 33 bp, Homo sapien
ctgtttaagtctccgggatagctgggcctacag

SEQ ID NO: 479219 - DNA, 33 bp, Homo sapien
aataacacatttctcaaaagaaaagcatcttct

SEQ ID NO: 479220 - DNA, 33 bp, Homo sapien
aataacacatttctcagaagaaaagcatcttct

SEQ ID NO: 479221 - DNA, 33 bp, Homo sapien
taattttttatcatggaaaagaggtaggtataa

SEQ ID NO: 479222 - DNA, 33 bp, Homo sapien
taattttttatcatggcaaagaggtaggtataa

SEQ ID NO: 479223 - DNA, 33 bp, Homo sapien
ccctctctaattcctccccctatgtagctacat

SEQ ID NO: 479224 - DNA, 33 bp, Homo sapien
ccctctctaattcctctccctatgtagctacat

SEQ ID NO: 479225 - DNA, 33 bp, Homo sapien
gactggaaaagactacaaaaagcagaacaggga

SEQ ID NO: 479226 - DNA, 33 bp, Homo sapien
gactggaaaagactaccaaaagcagaacaggga

SEQ ID NO: 479227 - DNA, 33 bp, Homo sapien
tcctatgttcacttaacctggcatatctctact

SEQ ID NO: 479228 - DNA, 33 bp, Homo sapien
tcctatgttcacttaatctggcatatctctact

SEQ ID NO: 479229 - DNA, 33 bp, Homo sapien
caatcaacagcatggaagcaaattttaaaaaat

SEQ ID NO: 479230 - DNA, 33 bp, Homo sapien
caatcaacagcatggatgcaaattttaaaaaat

SEQ ID NO: 479231 - DNA, 33 bp, Homo sapien
cctgtaagaccaagcacgaagcaagatctgaac

SEQ ID NO: 479232 - DNA, 33 bp, Homo sapien
cctgtaagaccaagcaggaagcaagatctgaac

SEQ ID NO: 479233 - DNA, 33 bp, Homo sapien
tcagctagagcaactacacttttatccacctct

SEQ ID NO: 479234 - DNA, 33 bp, Homo sapien
tcagctagagcaactatacttttatccacctct

SEQ ID NO: 479235 - DNA, 33 bp, Homo sapien
tagtagcactttcctgacaccaccatctcattt

SEQ ID NO: 479236 - DNA, 33 bp, Homo sapien
tagtagcactttcctggcaccaccatctcattt

SEQ ID NO: 479237 - DNA, 33 bp, Homo sapien
tgccagaaaggcctaacagtgtgaaacgaaaat

SEQ ID NO: 479238 - DNA, 33 bp, Homo sapien
tgccagaaaggcctaatagtgtgaaacgaaaat

SEQ ID NO: 479239 - DNA, 33 bp, Homo sapien
tgtcaggactaaaggcaatcctattagagtcag

SEQ ID NO: 479240 - DNA, 33 bp, Homo sapien
tgtcaggactaaaggcgatcctattagagtcag

SEQ ID NO: 479241 - DNA, 33 bp, Homo sapien
taggcaagtagataaacagtgtctgctacagtc

SEQ ID NO: 479242 - DNA, 33 bp, Homo sapien
taggcaagtagataaatagtgtctgctacagtc

SEQ ID NO: 479243 - DNA, 33 bp, Homo sapien
ctatacctctttggtcacacttgtttgtaattt

SEQ ID NO: 479244 - DNA, 33 bp, Homo sapien
ctatacctctttggtcccacttgtttgtaattt

SEQ ID NO: 479245 - DNA, 33 bp, Homo sapien
tcatagaaatctttgccgaggttcatagttaaa

SEQ ID NO: 479246 - DNA, 33 bp, Homo sapien
tcatagaaatctttgctgaggttcatagttaaa

SEQ ID NO: 479247 - DNA, 33 bp, Homo sapien
atcagtgactttttcacagaaaccttgcaagcc

SEQ ID NO: 479248 - DNA, 33 bp, Homo sapien
atcagtgactttttcatagaaaccttgcaagcc

SEQ ID NO: 479249 - DNA, 33 bp, Homo sapien
ctatcgtccctctacactgagattttagtttgc

SEQ ID NO: 479250 - DNA, 33 bp, Homo sapien
ctatcgtccctctacattgagattttagtttgc

SEQ ID NO: 479251 - DNA, 33 bp, Homo sapien
agtttgatgttgcctacctatatcttatcacat

SEQ ID NO: 479252 - DNA, 33 bp, Homo sapien
agtttgatgttgcctatctatatcttatcacat

SEQ ID NO: 479253 - DNA, 33 bp, Homo sapien
ccaaatgttgaaaaaaaagaatgagtactactt

SEQ ID NO: 479254 - DNA, 33 bp, Homo sapien
ccaaatgttgaaaaaagagaatgagtactactt

SEQ ID NO: 479255 - DNA, 33 bp, Homo sapien
attggtgttactgggccaaatcaaggtgttaac

SEQ ID NO: 479256 - DNA, 33 bp, Homo sapien
attggtgttactgggctaaatcaaggtgttaac

SEQ ID NO: 479257 - DNA, 33 bp, Homo sapien
agggacacccatcttccaaggcttgccatgctt

SEQ ID NO: 479258 - DNA, 33 bp, Homo sapien
agggacacccatcttctaaggcttgccatgctt

SEQ ID NO: 479259 - DNA, 33 bp, Homo sapien
tcaactttctcctgaacgtagatgctctttgtt

SEQ ID NO: 479260 - DNA, 33 bp, Homo sapien
tcaactttctcctgaatgtagatgctctttgtt

SEQ ID NO: 479261 - DNA, 33 bp, Homo sapien
attcaaaccttaatcaagcaagagcctagacta

SEQ ID NO: 479262 - DNA, 33 bp, Homo sapien
attcaaaccttaatcaggcaagagcctagacta

SEQ ID NO: 479263 - DNA, 33 bp, Homo sapien
agtttccagcagaatagagagaatggaggggag

SEQ ID NO: 479264 - DNA, 33 bp, Homo sapien
agtttccagcagaatatagagaatggaggggag

SEQ ID NO: 479265 - DNA, 33 bp, Homo sapien
gagtgtaagccaattaaaaccataaactaatat

SEQ ID NO: 479266 - DNA, 33 bp, Homo sapien
gagtgtaagccaattagaaccataaactaatat

SEQ ID NO: 479267 - DNA, 33 bp, Homo sapien
agatgtacattcatcacgaagatcctagaatgc

SEQ ID NO: 479268 - DNA, 33 bp, Homo sapien
agatgtacattcatcatgaagatcctagaatgc

SEQ ID NO: 479269 - DNA, 33 bp, Homo sapien
ttgaaggatcttataacgctgaaattcacaaca

SEQ ID NO: 479270 - DNA, 33 bp, Homo sapien
ttgaaggatcttataaggctgaaattcacaaca

SEQ ID NO: 479271 - DNA, 33 bp, Homo sapien
gttttcttgttctttcacttaactaaaagctcc

SEQ ID NO: 479272 - DNA, 33 bp, Homo sapien
gttttcttgttctttcgcttaactaaaagctcc

SEQ ID NO: 479273 - DNA, 33 bp, Homo sapien
ggagaagagtctttaacgatatccacccagaca

SEQ ID NO: 479274 - DNA, 33 bp, Homo sapien
ggagaagagtctttaatgatatccacccagaca

SEQ ID NO: 479275 - DNA, 33 bp, Homo sapien
ttgtgacaatgcaaggaaaaaaaatggatgtct

SEQ ID NO: 479276 - DNA, 33 bp, Homo sapien
ttgtgacaatgcaagggaaaaaaatggatgtct

SEQ ID NO: 479277 - DNA, 33 bp, Homo sapien
aaggattttatgagaaatggtattagctcccac

SEQ ID NO: 479278 - DNA, 33 bp, Homo sapien
aaggattttatgagaactggtattagctcccac

SEQ ID NO: 479279 - DNA, 33 bp, Homo sapien
cactctctataactgaagcaaggaaaatagaac

SEQ ID NO: 479280 - DNA, 33 bp, Homo sapien
cactctctataactgaggcaaggaaaatagaac

SEQ ID NO: 479281 - DNA, 33 bp, Homo sapien
gaggcaactgctcccacacatggtttggactgt

SEQ ID NO: 479282 - DNA, 33 bp, Homo sapien
gaggcaactgctcccatacatggtttggactgt

SEQ ID NO: 479283 - DNA, 33 bp, Homo sapien
tttgttgcttttgtaccactgaggctgttgctc

SEQ ID NO: 479284 - DNA, 33 bp, Homo sapien
tttgttgcttttgtactactgaggctgttgctc

SEQ ID NO: 479285 - DNA, 33 bp, Homo sapien
tgctcttctgagtctagccattcagcagagcta

SEQ ID NO: 479286 - DNA, 33 bp, Homo sapien
tgctcttctgagtctatccattcagcagagcta

SEQ ID NO: 479287 - DNA, 33 bp, Homo sapien
gcagatcaccagcaaccctaataaaagctagag

SEQ ID NO: 479288 - DNA, 33 bp, Homo sapien
gcagatcaccagcaactctaataaaagctagag

SEQ ID NO: 479289 - DNA, 33 bp, Homo sapien
aagtctggacgatgtagaaagtgaggaatccag

SEQ ID NO: 479290 - DNA, 33 bp, Homo sapien
aagtctggacgatgtataaagtgaggaatccag

SEQ ID NO: 479291 - DNA, 33 bp, Homo sapien
gatggaattgaaaaagcattcagagatttatat

SEQ ID NO: 479292 - DNA, 33 bp, Homo sapien
gatggaattgaaaaagtattcagagatttatat

SEQ ID NO: 479293 - DNA, 33 bp, Homo sapien
tgttctcacagatcagaccttttgctcctttct

SEQ ID NO: 479294 - DNA, 33 bp, Homo sapien
tgttctcacagatcagcccttttgctcctttct

SEQ ID NO: 479295 - DNA, 33 bp, Homo sapien
caatgttgcagcagtacgaggaccaagagaatt

SEQ ID NO: 479296 - DNA, 33 bp, Homo sapien
caatgttgcagcagtatgaggaccaagagaatt

SEQ ID NO: 479297 - DNA, 33 bp, Homo sapien
gctttggtgtggcaaaagaagaaatgataccag

SEQ ID NO: 479298 - DNA, 33 bp, Homo sapien
gctttggtgtggcaaacgaagaaatgataccag

SEQ ID NO: 479299 - DNA, 33 bp, Homo sapien
tttgtgacttcccttcaagacctcctgccattc

SEQ ID NO: 479300 - DNA, 33 bp, Homo sapien
tttgtgacttcccttccagacctcctgccattc

SEQ ID NO: 479301 - DNA, 33 bp, Homo sapien
tcaaggtaaatatgtacaagattgctttagtaa

SEQ ID NO: 479302 - DNA, 33 bp, Homo sapien
tcaaggtaaatatgtagaagattgctttagtaa

SEQ ID NO: 479303 - DNA, 33 bp, Homo sapien
atagcctggcctcactcaacccataaccaggag

SEQ ID NO: 479304 - DNA, 33 bp, Homo sapien
atagcctggcctcactgaacccataaccaggag

SEQ ID NO: 479305 - DNA, 33 bp, Homo sapien
tatccagaggccaaaaattaagtggaaacagga

SEQ ID NO: 479306 - DNA, 33 bp, Homo sapien
tatccagaggccaaaacttaagtggaaacagga

SEQ ID NO: 479307 - DNA, 33 bp, Homo sapien
aactctcagagggaagactcaacttgctctgga

SEQ ID NO: 479308 - DNA, 33 bp, Homo sapien
aactctcagagggaagcctcaacttgctctgga

SEQ ID NO: 479309 - DNA, 33 bp, Homo sapien
gcatagtaaggacataagtaaagaaggcattca

SEQ ID NO: 479310 - DNA, 33 bp, Homo sapien
gcatagtaaggacatacgtaaagaaggcattca

SEQ ID NO: 479311 - DNA, 33 bp, Homo sapien
tagatagcaatgaacacgtttaaagcttagatc

SEQ ID NO: 479312 - DNA, 33 bp, Homo sapien
tagatagcaatgaacatgtttaaagcttagatc

SEQ ID NO: 479313 - DNA, 33 bp, Homo sapien
atcttctgcaaatttaataaaacacaggttaaa

SEQ ID NO: 479314 - DNA, 33 bp, Homo sapien
atcttctgcaaatttagtaaaacacaggttaaa

SEQ ID NO: 479315 - DNA, 33 bp, Homo sapien
aaatacatttaaaagcaatccaagaatagtcgt

SEQ ID NO: 479316 - DNA, 33 bp, Homo sapien
aaatacatttaaaagctatccaagaatagtcgt

SEQ ID NO: 479317 - DNA, 33 bp, Homo sapien
cttgataccatagtgtcacaaatttgagggcag

SEQ ID NO: 479318 - DNA, 33 bp, Homo sapien
cttgataccatagtgttacaaatttgagggcag

SEQ ID NO: 479319 - DNA, 33 bp, Homo sapien
agaataaatgaaagccagattccccaacttggg

SEQ ID NO: 479320 - DNA, 33 bp, Homo sapien
agaataaatgaaagccggattccccaacttggg

SEQ ID NO: 479321 - DNA, 33 bp, Homo sapien
ctacagagatgtccaacaggtttcggctcatca

SEQ ID NO: 479322 - DNA, 33 bp, Homo sapien
ctacagagatgtccaataggtttcggctcatca

SEQ ID NO: 479323 - DNA, 33 bp, Homo sapien
ctgtaagatgaagataatactgttgattttcag

SEQ ID NO: 479324 - DNA, 33 bp, Homo sapien
ctgtaagatgaagatactactgttgattttcag

SEQ ID NO: 479325 - DNA, 33 bp, Homo sapien
gtggtccagggcttaaaacattacccatgctgc

SEQ ID NO: 479326 - DNA, 33 bp, Homo sapien
gtggtccagggcttaacacattacccatgctgc

SEQ ID NO: 479327 - DNA, 33 bp, Homo sapien
ctcaaataaaaaactaagcatgatcataaagca

SEQ ID NO: 479328 - DNA, 33 bp, Homo sapien
ctcaaataaaaaactatgcatgatcataaagca

SEQ ID NO: 479329 - DNA, 33 bp, Homo sapien
gtccaatgtaaaaccaaagctaaagtgaagaag

SEQ ID NO: 479330 - DNA, 33 bp, Homo sapien
gtccaatgtaaaaccagagctaaagtgaagaag

SEQ ID NO: 479331 - DNA, 33 bp, Homo sapien
ggcaggcttcagtgtaacaagacagagtgagca

SEQ ID NO: 479332 - DNA, 33 bp, Homo sapien
ggcaggcttcagtgtaccaagacagagtgagca

SEQ ID NO: 479333 - DNA, 33 bp, Homo sapien
ctcattcttttgcgaactgctctttctcagcat

SEQ ID NO: 479334 - DNA, 33 bp, Homo sapien
ctcattcttttgcgaattgctctttctcagcat

SEQ ID NO: 479335 - DNA, 33 bp, Homo sapien
agtctcatgagattgagggttttatcaggggtt

SEQ ID NO: 479336 - DNA, 33 bp, Homo sapien
agtctcatgagattgatggttttatcaggggtt

SEQ ID NO: 479337 - DNA, 33 bp, Homo sapien
tttctgatttcctgaacgctggttaactcttga

SEQ ID NO: 479338 - DNA, 33 bp, Homo sapien
tttctgatttcctgaatgctggttaactcttga

SEQ ID NO: 479339 - DNA, 33 bp, Homo sapien
ttgatttttgattcaccgtctttaggatcttgt

SEQ ID NO: 479340 - DNA, 33 bp, Homo sapien
ttgatttttgattcacggtctttaggatcttgt

SEQ ID NO: 479341 - DNA, 33 bp, Homo sapien
tatttttctcatctcaatcggaagaaatgtttt

SEQ ID NO: 479342 - DNA, 33 bp, Homo sapien
tatttttctcatctcagtcggaagaaatgtttt

SEQ ID NO: 479343 - DNA, 33 bp, Homo sapien
ttaccagcagtgaataagattataggttttcca

SEQ ID NO: 479344 - DNA, 33 bp, Homo sapien
ttaccagcagtgaataggattataggttttcca

SEQ ID NO: 479345 - DNA, 33 bp, Homo sapien
ggaatcaataccaccacgtgataccattatgca

SEQ ID NO: 479346 - DNA, 33 bp, Homo sapien
ggaatcaataccaccatgtgataccattatgca

SEQ ID NO: 479347 - DNA, 33 bp, Homo sapien
ggaatgttaggtgctgcaatatggaagaccttt

SEQ ID NO: 479348 - DNA, 33 bp, Homo sapien
ggaatgttaggtgctgtaatatggaagaccttt

SEQ ID NO: 479349 - DNA, 33 bp, Homo sapien
tccagagaattgaaagccatattgactgcttca

SEQ ID NO: 479350 - DNA, 33 bp, Homo sapien
tccagagaattgaaaggcatattgactgcttca

SEQ ID NO: 479351 - DNA, 33 bp, Homo sapien
ataaaacttgattgaacattgttaacctcaaaa

SEQ ID NO: 479352 - DNA, 33 bp, Homo sapien
ataaaacttgattgaatattgttaacctcaaaa

SEQ ID NO: 479353 - DNA, 33 bp, Homo sapien
gctagccgattgacgaagcattgggctgaataa

SEQ ID NO: 479354 - DNA, 33 bp, Homo sapien
gctagccgattgacgaggcattgggctgaataa

SEQ ID NO: 479355 - DNA, 33 bp, Homo sapien
ttatcctttgaatagaataatccacacagtctc

SEQ ID NO: 479356 - DNA, 33 bp, Homo sapien
ttatcctttgaatagagtaatccacacagtctc

SEQ ID NO: 479357 - DNA, 33 bp, Homo sapien
cccacaaccgggcgaaatcactggcagtcccca

SEQ ID NO: 479358 - DNA, 33 bp, Homo sapien
cccacaaccgggcgaattcactggcagtcccca

SEQ ID NO: 479359 - DNA, 33 bp, Homo sapien
tccctctgattctcctcaacgtcagagatgtgg

SEQ ID NO: 479360 - DNA, 33 bp, Homo sapien
tccctctgattctcctgaacgtcagagatgtgg

SEQ ID NO: 479361 - DNA, 33 bp, Homo sapien
tctgaagggctttatgcagatctctgttcctgc

SEQ ID NO: 479362 - DNA, 33 bp, Homo sapien
tctgaagggctttatgtagatctctgttcctgc

SEQ ID NO: 479363 - DNA, 33 bp, Homo sapien
agtggaattgggaaaacgaaggcaaatggaaat

SEQ ID NO: 479364 - DNA, 33 bp, Homo sapien
agtggaattgggaaaatgaaggcaaatggaaat

SEQ ID NO: 479365 - DNA, 33 bp, Homo sapien
acttagctgattcagacagccatgaaataaaca

SEQ ID NO: 479366 - DNA, 33 bp, Homo sapien
acttagctgattcagagagccatgaaataaaca

SEQ ID NO: 479367 - DNA, 33 bp, Homo sapien
ttctttttggcactacagctcatataatttttc

SEQ ID NO: 479368 - DNA, 33 bp, Homo sapien
ttctttttggcactaccgctcatataatttttc

SEQ ID NO: 479369 - DNA, 33 bp, Homo sapien
tcctttgtaattccaacaagttctacagacact

SEQ ID NO: 479370 - DNA, 33 bp, Homo sapien
tcctttgtaattccaataagttctacagacact

SEQ ID NO: 479371 - DNA, 33 bp, Homo sapien
aaaaagccacttacagcaaaagctgacaattga

SEQ ID NO: 479372 - DNA, 33 bp, Homo sapien
aaaaagccacttacaggaaaagctgacaattga

SEQ ID NO: 479373 - DNA, 33 bp, Homo sapien
tatcaaaaaactgaaactcataagatcactaca

SEQ ID NO: 479374 - DNA, 33 bp, Homo sapien
tatcaaaaaactgaaattcataagatcactaca

SEQ ID NO: 479375 - DNA, 33 bp, Homo sapien
gaaagggaaactatggaaaggaggttgcccttt

SEQ ID NO: 479376 - DNA, 33 bp, Homo sapien
gaaagggaaactatgggaaggaggttgcccttt

SEQ ID NO: 479377 - DNA, 33 bp, Homo sapien
cttcaaattctgctaaatggaagaaattaaatt

SEQ ID NO: 479378 - DNA, 33 bp, Homo sapien
cttcaaattctgctaactggaagaaattaaatt

SEQ ID NO: 479379 - DNA, 33 bp, Homo sapien
agaggaggagtgcccacaggtggaggcagcaca

SEQ ID NO: 479380 - DNA, 33 bp, Homo sapien
agaggaggagtgcccataggtggaggcagcaca

SEQ ID NO: 479381 - DNA, 33 bp, Homo sapien
tggtggaagcagggaacgtaataaatatatata

SEQ ID NO: 479382 - DNA, 33 bp, Homo sapien
tggtggaagcagggaaggtaataaatatatata

SEQ ID NO: 479383 - DNA, 33 bp, Homo sapien
agtccctactccatcactcatttcctatttctt

SEQ ID NO: 479384 - DNA, 33 bp, Homo sapien
agtccctactccatcattcatttcctatttctt

SEQ ID NO: 479385 - DNA, 33 bp, Homo sapien
gtgcaaacaacccccacatcagccctgaataat

SEQ ID NO: 479386 - DNA, 33 bp, Homo sapien
gtgcaaacaacccccatatcagccctgaataat

SEQ ID NO: 479387 - DNA, 33 bp, Homo sapien
tggggccattttgatgcacatgtaggaattacg

SEQ ID NO: 479388 - DNA, 33 bp, Homo sapien
tggggccattttgatgtacatgtaggaattacg

SEQ ID NO: 479389 - DNA, 33 bp, Homo sapien
gtttgtactccaccaacaggaaatgtctgatgt

SEQ ID NO: 479390 - DNA, 33 bp, Homo sapien
gtttgtactccaccaataggaaatgtctgatgt

SEQ ID NO: 479391 - DNA, 33 bp, Homo sapien
aaatgaaaaaagattacaacatcacttcaaaaa

SEQ ID NO: 479392 - DNA, 33 bp, Homo sapien
aaatgaaaaaagattataacatcacttcaaaaa

SEQ ID NO: 479393 - DNA, 33 bp, Homo sapien
agctctgtaatttaaacgatgattgtgctttta

SEQ ID NO: 479394 - DNA, 33 bp, Homo sapien
agctctgtaatttaaatgatgattgtgctttta

SEQ ID NO: 479395 - DNA, 33 bp, Homo sapien
tggtcaaaggaatgctgaaggtacagatatttt

SEQ ID NO: 479396 - DNA, 33 bp, Homo sapien
tggtcaaaggaatgcttaaggtacagatatttt

SEQ ID NO: 479397 - DNA, 33 bp, Homo sapien
ttatatttcaaatgccaatctttggattattga

SEQ ID NO: 479398 - DNA, 33 bp, Homo sapien
ttatatttcaaatgcctatctttggattattga

SEQ ID NO: 479399 - DNA, 33 bp, Homo sapien
ttttcctatttacccaaaggaacaaagacacaa

SEQ ID NO: 479400 - DNA, 33 bp, Homo sapien
ttttcctatttacccacaggaacaaagacacaa

SEQ ID NO: 479401 - DNA, 33 bp, Homo sapien
aacctaaaggaagtaggcaatatcaacctacag

SEQ ID NO: 479402 - DNA, 33 bp, Homo sapien
aacctaaaggaagtagtcaatatcaacctacag

SEQ ID NO: 479403 - DNA, 33 bp, Homo sapien
atataaacggaagacaggataacctaaaggaag

SEQ ID NO: 479404 - DNA, 33 bp, Homo sapien
atataaacggaagacatgataacctaaaggaag

SEQ ID NO: 479405 - DNA, 33 bp, Homo sapien
taatcatttaggtttccaagcttgaattttttt

SEQ ID NO: 479406 - DNA, 33 bp, Homo sapien
taatcatttaggtttctaagcttgaattttttt

SEQ ID NO: 479407 - DNA, 33 bp, Homo sapien
agattgactcaatggacaggaaactgacagtga

SEQ ID NO: 479408 - DNA, 33 bp, Homo sapien
agattgactcaatggataggaaactgacagtga

SEQ ID NO: 479409 - DNA, 33 bp, Homo sapien
cctcagaaggaataaactgtggcatagcacact

SEQ ID NO: 479410 - DNA, 33 bp, Homo sapien
cctcagaaggaataaattgtggcatagcacact

SEQ ID NO: 479411 - DNA, 33 bp, Homo sapien
tgctccttgaattagacgttaaccatttctaat

SEQ ID NO: 479412 - DNA, 33 bp, Homo sapien
tgctccttgaattagatgttaaccatttctaat

SEQ ID NO: 479413 - DNA, 33 bp, Homo sapien
tgcaagacataaagaccgaaggtaaatgaagtt

SEQ ID NO: 479414 - DNA, 33 bp, Homo sapien
tgcaagacataaagactgaaggtaaatgaagtt

SEQ ID NO: 479415 - DNA, 33 bp, Homo sapien
ttcaacaggccggcagaatgtctccaattataa

SEQ ID NO: 479416 - DNA, 33 bp, Homo sapien
ttcaacaggccggcaggatgtctccaattataa

SEQ ID NO: 479417 - DNA, 33 bp, Homo sapien
ttctctcaccttctcacggactcgcctataatt

SEQ ID NO: 479418 - DNA, 33 bp, Homo sapien
ttctctcaccttctcatggactcgcctataatt

SEQ ID NO: 479419 - DNA, 33 bp, Homo sapien
aagcaattgtttgcacagtaccaaagacaaaca

SEQ ID NO: 479420 - DNA, 33 bp, Homo sapien
aagcaattgtttgcaccgtaccaaagacaaaca

SEQ ID NO: 479421 - DNA, 33 bp, Homo sapien
gacccctttggtgagacaatggtcttgaaagta

SEQ ID NO: 479422 - DNA, 33 bp, Homo sapien
gacccctttggtgagagaatggtcttgaaagta

SEQ ID NO: 479423 - DNA, 33 bp, Homo sapien
ttaaatatataacctaccctgcagattttaatc

SEQ ID NO: 479424 - DNA, 33 bp, Homo sapien
ttaaatatataacctatcctgcagattttaatc

SEQ ID NO: 479425 - DNA, 33 bp, Homo sapien
aattataaaagcgctaaaagttttgttgttgtt

SEQ ID NO: 479426 - DNA, 33 bp, Homo sapien
aattataaaagcgctacaagttttgttgttgtt

SEQ ID NO: 479427 - DNA, 33 bp, Homo sapien
ggtgtggatgtagacacagatacacagatgata

SEQ ID NO: 479428 - DNA, 33 bp, Homo sapien
ggtgtggatgtagacagagatacacagatgata

SEQ ID NO: 479429 - DNA, 33 bp, Homo sapien
aatacagtagaatcaaagcatttccttacttaa

SEQ ID NO: 479430 - DNA, 33 bp, Homo sapien
aatacagtagaatcaaggcatttccttacttaa

SEQ ID NO: 479431 - DNA, 33 bp, Homo sapien
cttccattatctaaagcaaggtatgcatatttg

SEQ ID NO: 479432 - DNA, 33 bp, Homo sapien
cttccattatctaaagtaaggtatgcatatttg

SEQ ID NO: 479433 - DNA, 33 bp, Homo sapien
aaagagaataacaatacataatttcacaaaaac

SEQ ID NO: 479434 - DNA, 33 bp, Homo sapien
aaagagaataacaatagataatttcacaaaaac

SEQ ID NO: 479435 - DNA, 33 bp, Homo sapien
gtaggacattccgaaccatgataaggatttggc

SEQ ID NO: 479436 - DNA, 33 bp, Homo sapien
gtaggacattccgaactatgataaggatttggc

SEQ ID NO: 479437 - DNA, 33 bp, Homo sapien
tcaagtcctacctaaacagcataaacttctgaa

SEQ ID NO: 479438 - DNA, 33 bp, Homo sapien
tcaagtcctacctaaagagcataaacttctgaa

SEQ ID NO: 479439 - DNA, 33 bp, Homo sapien
gtaggaagcactgttcaatggtaatgattatta

SEQ ID NO: 479440 - DNA, 33 bp, Homo sapien
gtaggaagcactgttcgatggtaatgattatta

SEQ ID NO: 479441 - DNA, 33 bp, Homo sapien
caaacagcagattttacgtcagctttttcacat

SEQ ID NO: 479442 - DNA, 33 bp, Homo sapien
caaacagcagattttatgtcagctttttcacat

SEQ ID NO: 479443 - DNA, 33 bp, Homo sapien
gaagcaggctggcccaatgatactaggcttcag

SEQ ID NO: 479444 - DNA, 33 bp, Homo sapien
gaagcaggctggcccagtgatactaggcttcag

SEQ ID NO: 479445 - DNA, 33 bp, Homo sapien
tgctgggatccaggacaatgtcttgtgttcgct

SEQ ID NO: 479446 - DNA, 33 bp, Homo sapien
tgctgggatccaggacgatgtcttgtgttcgct

SEQ ID NO: 479447 - DNA, 33 bp, Homo sapien
gagcaggtgggaaacactgcaagttcatcatga

SEQ ID NO: 479448 - DNA, 33 bp, Homo sapien
gagcaggtgggaaacagtgcaagttcatcatga

SEQ ID NO: 479449 - DNA, 33 bp, Homo sapien
tccaatgcttagggtaacttaatggagtttgca

SEQ ID NO: 479450 - DNA, 33 bp, Homo sapien
tccaatgcttagggtatcttaatggagtttgca

SEQ ID NO: 479451 - DNA, 33 bp, Homo sapien
ccagtaaaatgggtcaaatgtctacataaaggc

SEQ ID NO: 479452 - DNA, 33 bp, Homo sapien
ccagtaaaatgggtcagatgtctacataaaggc

SEQ ID NO: 479453 - DNA, 33 bp, Homo sapien
catacacttgacttaaacctatgataaatacgt

SEQ ID NO: 479454 - DNA, 33 bp, Homo sapien
catacacttgacttaagcctatgataaatacgt

SEQ ID NO: 479455 - DNA, 33 bp, Homo sapien
cacccagataattggtaaaacaatatttctggt

SEQ ID NO: 479456 - DNA, 33 bp, Homo sapien
cacccagataattggttaaacaatatttctggt

SEQ ID NO: 479457 - DNA, 33 bp, Homo sapien
tatctcaatttgctcacaggttgtctaggctgt

SEQ ID NO: 479458 - DNA, 33 bp, Homo sapien
tatctcaatttgctcataggttgtctaggctgt

SEQ ID NO: 479459 - DNA, 33 bp, Homo sapien
tcgtgttcaagtcaggaccccattatctcaatt

SEQ ID NO: 479460 - DNA, 33 bp, Homo sapien
tcgtgttcaagtcagggccccattatctcaatt

SEQ ID NO: 479461 - DNA, 33 bp, Homo sapien
tggggaacttgctagaaaagttatagaccaccc

SEQ ID NO: 479462 - DNA, 33 bp, Homo sapien
tggggaacttgctagagaagttatagaccaccc

SEQ ID NO: 479463 - DNA, 33 bp, Homo sapien
ggaaatgctagccctcacttcatacaggtaaaa

SEQ ID NO: 479464 - DNA, 33 bp, Homo sapien
ggaaatgctagccctcgcttcatacaggtaaaa

SEQ ID NO: 479465 - DNA, 33 bp, Homo sapien
aggagtggctagattgcaaaccatacctgtgtt

SEQ ID NO: 479466 - DNA, 33 bp, Homo sapien
aggagtggctagattgtaaaccatacctgtgtt

SEQ ID NO: 479467 - DNA, 33 bp, Homo sapien
tgtacattgccttgtaggtagcctatagctttt

SEQ ID NO: 479468 - DNA, 33 bp, Homo sapien
tgtacattgccttgtatgtagcctatagctttt

SEQ ID NO: 479469 - DNA, 33 bp, Homo sapien
ttctagaactttattcgactggtggacgatgca

SEQ ID NO: 479470 - DNA, 33 bp, Homo sapien
ttctagaactttattctactggtggacgatgca

SEQ ID NO: 479471 - DNA, 33 bp, Homo sapien
cagacttcttttaggacgtttggctaaggagat

SEQ ID NO: 479472 - DNA, 33 bp, Homo sapien
cagacttcttttaggaggtttggctaaggagat

SEQ ID NO: 479473 - DNA, 33 bp, Homo sapien
ctccagtcctcaatataacattccactctgcag

SEQ ID NO: 479474 - DNA, 33 bp, Homo sapien
ctccagtcctcaatatgacattccactctgcag

SEQ ID NO: 479475 - DNA, 33 bp, Homo sapien
tgcttggaatagtgagaaacacctgtgggcagt

SEQ ID NO: 479476 - DNA, 33 bp, Homo sapien
tgcttggaatagtgaggaacacctgtgggcagt

SEQ ID NO: 479477 - DNA, 33 bp, Homo sapien
atgccatttttcacccacaattcctaaggctct

SEQ ID NO: 479478 - DNA, 33 bp, Homo sapien
atgccatttttcacccgcaattcctaaggctct

SEQ ID NO: 479479 - DNA, 33 bp, Homo sapien
tcttcagaatatgtgaggtaatggatgaggatg

SEQ ID NO: 479480 - DNA, 33 bp, Homo sapien
tcttcagaatatgtgatgtaatggatgaggatg

SEQ ID NO: 479481 - DNA, 33 bp, Homo sapien
gagtgtctaggccaaacgttcatcttctttatt

SEQ ID NO: 479482 - DNA, 33 bp, Homo sapien
gagtgtctaggccaaatgttcatcttctttatt

SEQ ID NO: 479483 - DNA, 33 bp, Homo sapien
gagaagaatcagaacacgagaagatgataaaac

SEQ ID NO: 479484 - DNA, 33 bp, Homo sapien
gagaagaatcagaacaggagaagatgataaaac

SEQ ID NO: 479485 - DNA, 33 bp, Homo sapien
cttcgcaaaagtccaacctcttaatactatcac

SEQ ID NO: 479486 - DNA, 33 bp, Homo sapien
cttcgcaaaagtccaatctcttaatactatcac

SEQ ID NO: 479487 - DNA, 33 bp, Homo sapien
tagtgaactgggaggaaactgacctgccaaatg

SEQ ID NO: 479488 - DNA, 33 bp, Homo sapien
tagtgaactgggaggagactgacctgccaaatg

SEQ ID NO: 479489 - DNA, 33 bp, Homo sapien
agcccaatgcctggaaagaataaacagcaaagt

SEQ ID NO: 479490 - DNA, 33 bp, Homo sapien
agcccaatgcctggaaggaataaacagcaaagt

SEQ ID NO: 479491 - DNA, 33 bp, Homo sapien
ccaaacagaaggactaagataaagagttctctc

SEQ ID NO: 479492 - DNA, 33 bp, Homo sapien
ccaaacagaaggactaggataaagagttctctc

SEQ ID NO: 479493 - DNA, 33 bp, Homo sapien
atgaaaacaggaagacaacttgaggcatgaata

SEQ ID NO: 479494 - DNA, 33 bp, Homo sapien
atgaaaacaggaagacgacttgaggcatgaata

SEQ ID NO: 479495 - DNA, 33 bp, Homo sapien
tttcatcagggcttcaaataaaccaaagcctta

SEQ ID NO: 479496 - DNA, 33 bp, Homo sapien
tttcatcagggcttcacataaaccaaagcctta

SEQ ID NO: 479497 - DNA, 33 bp, Homo sapien
tctaaaattgacagtaaaattagctgataacac

SEQ ID NO: 479498 - DNA, 33 bp, Homo sapien
tctaaaattgacagtacaattagctgataacac

SEQ ID NO: 479499 - DNA, 33 bp, Homo sapien
atgaccctagtgttacaggaagtagaatttcta

SEQ ID NO: 479500 - DNA, 33 bp, Homo sapien
atgaccctagtgttacgggaagtagaatttcta

SEQ ID NO: 479501 - DNA, 33 bp, Homo sapien
attgtctgtattcccaaacaagacagttctata

SEQ ID NO: 479502 - DNA, 33 bp, Homo sapien
attgtctgtattcccacacaagacagttctata

SEQ ID NO: 479503 - DNA, 33 bp, Homo sapien
aggataaagtctcataatagcatctgtttcttg

SEQ ID NO: 479504 - DNA, 33 bp, Homo sapien
aggataaagtctcatagtagcatctgtttcttg

SEQ ID NO: 479505 - DNA, 33 bp, Homo sapien
caaccaagtgtaacacagaagtaggtgtctgtt

SEQ ID NO: 479506 - DNA, 33 bp, Homo sapien
caaccaagtgtaacacggaagtaggtgtctgtt

SEQ ID NO: 479507 - DNA, 33 bp, Homo sapien
ctcatattcagggagagaagattatacagagca

SEQ ID NO: 479508 - DNA, 33 bp, Homo sapien
ctcatattcagggagataagattatacagagca

SEQ ID NO: 479509 - DNA, 33 bp, Homo sapien
tacatataagcaaccactctgaaaaggcaattt

SEQ ID NO: 479510 - DNA, 33 bp, Homo sapien
tacatataagcaaccattctgaaaaggcaattt

SEQ ID NO: 479511 - DNA, 33 bp, Homo sapien
catctgcatttgcaaaataggattcagattctc

SEQ ID NO: 479512 - DNA, 33 bp, Homo sapien
catctgcatttgcaaattaggattcagattctc

SEQ ID NO: 479513 - DNA, 33 bp, Homo sapien
tgaataatagtgttaagaaaaggcagtttgttg

SEQ ID NO: 479514 - DNA, 33 bp, Homo sapien
tgaataatagtgttaataaaaggcagtttgttg

SEQ ID NO: 479515 - DNA, 33 bp, Homo sapien
agaatttttagggcaacgaaactacgctgtata

SEQ ID NO: 479516 - DNA, 33 bp, Homo sapien
agaatttttagggcaatgaaactacgctgtata

SEQ ID NO: 479517 - DNA, 33 bp, Homo sapien
tcataatgctattgccaacttaacagattacaa

SEQ ID NO: 479518 - DNA, 33 bp, Homo sapien
tcataatgctattgcccacttaacagattacaa

SEQ ID NO: 479519 - DNA, 33 bp, Homo sapien
tattactttgtggcaacgttaactttttaaagc

SEQ ID NO: 479520 - DNA, 33 bp, Homo sapien
tattactttgtggcaatgttaactttttaaagc

SEQ ID NO: 479521 - DNA, 33 bp, Homo sapien
ctctccttcaagaacacacattgagaaacacct

SEQ ID NO: 479522 - DNA, 33 bp, Homo sapien
ctctccttcaagaacagacattgagaaacacct

SEQ ID NO: 479523 - DNA, 33 bp, Homo sapien
ttcatcatctctacataaactagggattgcctt

SEQ ID NO: 479524 - DNA, 33 bp, Homo sapien
ttcatcatctctacattaactagggattgcctt

SEQ ID NO: 479525 - DNA, 33 bp, Homo sapien
aactacatgcttgtaacatcgatctaagtatac

SEQ ID NO: 479526 - DNA, 33 bp, Homo sapien
aactacatgcttgtaagatcgatctaagtatac

SEQ ID NO: 479527 - DNA, 33 bp, Homo sapien
aagaaagaaaatgagagaatggatgttggggaa

SEQ ID NO: 479528 - DNA, 33 bp, Homo sapien
aagaaagaaaatgagataatggatgttggggaa

SEQ ID NO: 479529 - DNA, 33 bp, Homo sapien
ccatcacacttgtcaaccacaatttttatcttt

SEQ ID NO: 479530 - DNA, 33 bp, Homo sapien
ccatcacacttgtcaatcacaatttttatcttt

SEQ ID NO: 479531 - DNA, 33 bp, Homo sapien
gctcaaaaatgtcagggatcaatttgttcagta

SEQ ID NO: 479532 - DNA, 33 bp, Homo sapien
gctcaaaaatgtcaggtatcaatttgttcagta

SEQ ID NO: 479533 - DNA, 33 bp, Homo sapien
gctccttaagtactaacgcgaagaggggaataa

SEQ ID NO: 479534 - DNA, 33 bp, Homo sapien
gctccttaagtactaatgcgaagaggggaataa

SEQ ID NO: 479535 - DNA, 33 bp, Homo sapien
taatggaaagaatagcacactgtaccaaactac

SEQ ID NO: 479536 - DNA, 33 bp, Homo sapien
taatggaaagaatagctcactgtaccaaactac

SEQ ID NO: 479537 - DNA, 33 bp, Homo sapien
tagggccttggattctaactcccattagattta

SEQ ID NO: 479538 - DNA, 33 bp, Homo sapien
tagggccttggattcttactcccattagattta

SEQ ID NO: 479539 - DNA, 33 bp, Homo sapien
gcaatttctggatacaagcatcactatacttag

SEQ ID NO: 479540 - DNA, 33 bp, Homo sapien
gcaatttctggatacaggcatcactatacttag

SEQ ID NO: 479541 - DNA, 33 bp, Homo sapien
atttaacatacttacaatgagtaaaaatgtgaa

SEQ ID NO: 479542 - DNA, 33 bp, Homo sapien
atttaacatacttacagtgagtaaaaatgtgaa

SEQ ID NO: 479543 - DNA, 33 bp, Homo sapien
gattaaattagcctaaaagcatgtctctcttcc

SEQ ID NO: 479544 - DNA, 33 bp, Homo sapien
gattaaattagcctaagagcatgtctctcttcc

SEQ ID NO: 479545 - DNA, 33 bp, Homo sapien
agaataattaaccacagctattatatacaactc

SEQ ID NO: 479546 - DNA, 33 bp, Homo sapien
agaataattaaccacatctattatatacaactc

SEQ ID NO: 479547 - DNA, 33 bp, Homo sapien
tagcttatatttcctacgtatcatcaaggtaat

SEQ ID NO: 479548 - DNA, 33 bp, Homo sapien
tagcttatatttcctatgtatcatcaaggtaat

SEQ ID NO: 479549 - DNA, 33 bp, Homo sapien
tatattttgctctaagactgtttctatggaatt

SEQ ID NO: 479550 - DNA, 33 bp, Homo sapien
tatattttgctctaaggctgtttctatggaatt

SEQ ID NO: 479551 - DNA, 33 bp, Homo sapien
actcctttttgccacaatgtcttagacctggga

SEQ ID NO: 479552 - DNA, 33 bp, Homo sapien
actcctttttgccacagtgtcttagacctggga

SEQ ID NO: 479553 - DNA, 33 bp, Homo sapien
tgtggtctccttacgacacatactgcatcgcat

SEQ ID NO: 479554 - DNA, 33 bp, Homo sapien
tgtggtctccttacgatacatactgcatcgcat

SEQ ID NO: 479555 - DNA, 33 bp, Homo sapien
acaagcaaaaaacaaacagcagtcgccctgaag

SEQ ID NO: 479556 - DNA, 33 bp, Homo sapien
acaagcaaaaaacaaagagcagtcgccctgaag

SEQ ID NO: 479557 - DNA, 33 bp, Homo sapien
aagtctaaaatacaacaattgagtgaaaacata

SEQ ID NO: 479558 - DNA, 33 bp, Homo sapien
aagtctaaaatacaacgattgagtgaaaacata

SEQ ID NO: 479559 - DNA, 33 bp, Homo sapien
caaattgtggagtcaactcttcagagaaccaca

SEQ ID NO: 479560 - DNA, 33 bp, Homo sapien
caaattgtggagtcaagtcttcagagaaccaca

SEQ ID NO: 479561 - DNA, 33 bp, Homo sapien
aagacttactccaccaagacaaaattatttaaa

SEQ ID NO: 479562 - DNA, 33 bp, Homo sapien
aagacttactccaccaggacaaaattatttaaa

SEQ ID NO: 479563 - DNA, 33 bp, Homo sapien
gtagtagaatgcctctcaatttgagtttttcat

SEQ ID NO: 479564 - DNA, 33 bp, Homo sapien
gtagtagaatgcctctgaatttgagtttttcat

SEQ ID NO: 479565 - DNA, 33 bp, Homo sapien
tttattgtgggaaggaacttttaactatgtaaa

SEQ ID NO: 479566 - DNA, 33 bp, Homo sapien
tttattgtgggaaggagcttttaactatgtaaa

SEQ ID NO: 479567 - DNA, 33 bp, Homo sapien
cttgaatgaagaaatcaatatggtagagctaaa

SEQ ID NO: 479568 - DNA, 33 bp, Homo sapien
cttgaatgaagaaatccatatggtagagctaaa

SEQ ID NO: 479569 - DNA, 33 bp, Homo sapien
ttcagatagcattcacaggacacgttcaatgtt

SEQ ID NO: 479570 - DNA, 33 bp, Homo sapien
ttcagatagcattcacgggacacgttcaatgtt

SEQ ID NO: 479571 - DNA, 33 bp, Homo sapien
gactccaactcctttccaatagatcagtcatgt

SEQ ID NO: 479572 - DNA, 33 bp, Homo sapien
gactccaactcctttctaatagatcagtcatgt

SEQ ID NO: 479573 - DNA, 33 bp, Homo sapien
acttaaaacacaattaccattcaacccagcaat

SEQ ID NO: 479574 - DNA, 33 bp, Homo sapien
acttaaaacacaattatcattcaacccagcaat

SEQ ID NO: 479575 - DNA, 33 bp, Homo sapien
gtatgtttctattatacacagccactttattaa

SEQ ID NO: 479576 - DNA, 33 bp, Homo sapien
gtatgtttctattatagacagccactttattaa

SEQ ID NO: 479577 - DNA, 33 bp, Homo sapien
aaagcggtcggaaataagttagtcaaaggatac

SEQ ID NO: 479578 - DNA, 33 bp, Homo sapien
aaagcggtcggaaatacgttagtcaaaggatac

SEQ ID NO: 479579 - DNA, 33 bp, Homo sapien
agaggtgcagtggagaagactttagtgttgccc

SEQ ID NO: 479580 - DNA, 33 bp, Homo sapien
agaggtgcagtggagaggactttagtgttgccc

SEQ ID NO: 479581 - DNA, 33 bp, Homo sapien
caaaagaataatcagaataaccatctccaaaaa

SEQ ID NO: 479582 - DNA, 33 bp, Homo sapien
caaaagaataatcagagtaaccatctccaaaaa

SEQ ID NO: 479583 - DNA, 33 bp, Homo sapien
cagatgtctattttaacggtgccaaaggtaagc

SEQ ID NO: 479584 - DNA, 33 bp, Homo sapien
cagatgtctattttaatggtgccaaaggtaagc

SEQ ID NO: 479585 - DNA, 33 bp, Homo sapien
ctacctacttcaaaaggactgtggggcttagat

SEQ ID NO: 479586 - DNA, 33 bp, Homo sapien
ctacctacttcaaaagtactgtggggcttagat

SEQ ID NO: 479587 - DNA, 33 bp, Homo sapien
ggaaaataggctcaggaatgttaataatgtggt

SEQ ID NO: 479588 - DNA, 33 bp, Homo sapien
ggaaaataggctcagggatgttaataatgtggt

SEQ ID NO: 479589 - DNA, 33 bp, Homo sapien
taactcataggcataactgcaaaacaggcctaa

SEQ ID NO: 479590 - DNA, 33 bp, Homo sapien
taactcataggcataattgcaaaacaggcctaa

SEQ ID NO: 479591 - DNA, 33 bp, Homo sapien
gtagttaagttccgaaacattatgtgacctgaa

SEQ ID NO: 479592 - DNA, 33 bp, Homo sapien
gtagttaagttccgaaccattatgtgacctgaa

SEQ ID NO: 479593 - DNA, 33 bp, Homo sapien
gggcagtgagtttggaatacccatagcaggctg

SEQ ID NO: 479594 - DNA, 33 bp, Homo sapien
gggcagtgagtttggattacccatagcaggctg

SEQ ID NO: 479595 - DNA, 33 bp, Homo sapien
aacaatgagatgtcctaaaaatggaagcctaat

SEQ ID NO: 479596 - DNA, 33 bp, Homo sapien
aacaatgagatgtcctgaaaatggaagcctaat

SEQ ID NO: 479597 - DNA, 33 bp, Homo sapien
gttcatcccaaatttcccttattgaccacacct

SEQ ID NO: 479598 - DNA, 33 bp, Homo sapien
gttcatcccaaatttctcttattgaccacacct

SEQ ID NO: 479599 - DNA, 33 bp, Homo sapien
gtgatagcactggcatcagtactcatataccct

SEQ ID NO: 479600 - DNA, 33 bp, Homo sapien
gtgatagcactggcattagtactcatataccct

SEQ ID NO: 479601 - DNA, 33 bp, Homo sapien
aagttagaagtagcccactctctgagcttgaac

SEQ ID NO: 479602 - DNA, 33 bp, Homo sapien
aagttagaagtagccctctctctgagcttgaac

SEQ ID NO: 479603 - DNA, 33 bp, Homo sapien
gtgtgtgttaatttccacctgtgagtctaatat

SEQ ID NO: 479604 - DNA, 33 bp, Homo sapien
gtgtgtgttaatttccccctgtgagtctaatat

SEQ ID NO: 479605 - DNA, 33 bp, Homo sapien
tattttcagatgatcacataatatattttgtcc

SEQ ID NO: 479606 - DNA, 33 bp, Homo sapien
tattttcagatgatcagataatatattttgtcc

SEQ ID NO: 479607 - DNA, 33 bp, Homo sapien
gtaagcacttttaatgcactggggattaaggga

SEQ ID NO: 479608 - DNA, 33 bp, Homo sapien
gtaagcacttttaatgtactggggattaaggga

SEQ ID NO: 479609 - DNA, 33 bp, Homo sapien
aattttggtgacaccacaaacaacttaaatgcc

SEQ ID NO: 479610 - DNA, 33 bp, Homo sapien
aattttggtgacaccataaacaacttaaatgcc

SEQ ID NO: 479611 - DNA, 33 bp, Homo sapien
ctatcctcttttgaaccggcatgttgccctttc

SEQ ID NO: 479612 - DNA, 33 bp, Homo sapien
ctatcctcttttgaactggcatgttgccctttc

SEQ ID NO: 479613 - DNA, 33 bp, Homo sapien
aggatcaagcctgggacaatttccactcaagaa

SEQ ID NO: 479614 - DNA, 33 bp, Homo sapien
aggatcaagcctgggataatttccactcaagaa

SEQ ID NO: 479615 - DNA, 33 bp, Homo sapien
gtcaggtgcaatatcccatgttggttgagtgcc

SEQ ID NO: 479616 - DNA, 33 bp, Homo sapien
gtcaggtgcaatatcctatgttggttgagtgcc

SEQ ID NO: 479617 - DNA, 33 bp, Homo sapien
gcagacagtttaaaaactgaacacattacacat

SEQ ID NO: 479618 - DNA, 33 bp, Homo sapien
gcagacagtttaaaaattgaacacattacacat

SEQ ID NO: 479619 - DNA, 33 bp, Homo sapien
gagcaggcaaaagaagccagtgcatttggccct

SEQ ID NO: 479620 - DNA, 33 bp, Homo sapien
gagcaggcaaaagaaggcagtgcatttggccct

SEQ ID NO: 479621 - DNA, 33 bp, Homo sapien
ctatatgtgttcaataccagatgcaattttttt

SEQ ID NO: 479622 - DNA, 33 bp, Homo sapien
ctatatgtgttcaatagcagatgcaattttttt

SEQ ID NO: 479623 - DNA, 33 bp, Homo sapien
gtggttaattagtaacaccgactggaacaaaat

SEQ ID NO: 479624 - DNA, 33 bp, Homo sapien
gtggttaattagtaacgccgactggaacaaaat

SEQ ID NO: 479625 - DNA, 33 bp, Homo sapien
tcccagtggatttgtacggatactgctttatcg

SEQ ID NO: 479626 - DNA, 33 bp, Homo sapien
tcccagtggatttgtatggatactgctttatcg

SEQ ID NO: 479627 - DNA, 33 bp, Homo sapien
tccaaagtctcctatacgcaatgcagctggcct

SEQ ID NO: 479628 - DNA, 33 bp, Homo sapien
tccaaagtctcctatatgcaatgcagctggcct

SEQ ID NO: 479629 - DNA, 33 bp, Homo sapien
cagtctgttctgcagacattaactttccaattc

SEQ ID NO: 479630 - DNA, 33 bp, Homo sapien
cagtctgttctgcagatattaactttccaattc

SEQ ID NO: 479631 - DNA, 33 bp, Homo sapien
attatgtcattctttcacatacagaatcaagtc

SEQ ID NO: 479632 - DNA, 33 bp, Homo sapien
attatgtcattctttcccatacagaatcaagtc

SEQ ID NO: 479633 - DNA, 33 bp, Homo sapien
cactagtggttctccaaagtcttttgtgagtga

SEQ ID NO: 479634 - DNA, 33 bp, Homo sapien
cactagtggttctccatagtcttttgtgagtga

SEQ ID NO: 479635 - DNA, 33 bp, Homo sapien
atgtgggactgagagagaaagcaatgaaagtct

SEQ ID NO: 479636 - DNA, 33 bp, Homo sapien
atgtgggactgagagataaagcaatgaaagtct

SEQ ID NO: 479637 - DNA, 33 bp, Homo sapien
ctttttctacccccaaatcttatatccactgga

SEQ ID NO: 479638 - DNA, 33 bp, Homo sapien
ctttttctacccccaactcttatatccactgga

SEQ ID NO: 479639 - DNA, 33 bp, Homo sapien
gaaaacttggtgtggcaacagctccatataata

SEQ ID NO: 479640 - DNA, 33 bp, Homo sapien
gaaaacttggtgtggcgacagctccatataata

SEQ ID NO: 479641 - DNA, 33 bp, Homo sapien
atcctagcttttaaaaaggcagtatacactgaa

SEQ ID NO: 479642 - DNA, 33 bp, Homo sapien
atcctagcttttaaaagggcagtatacactgaa

SEQ ID NO: 479643 - DNA, 33 bp, Homo sapien
agcccactgtgagaggaaccttctgaagtcttg

SEQ ID NO: 479644 - DNA, 33 bp, Homo sapien
agcccactgtgagagggaccttctgaagtcttg

SEQ ID NO: 479645 - DNA, 33 bp, Homo sapien
ccttaactgactggccaaattctaatcagatgt

SEQ ID NO: 479646 - DNA, 33 bp, Homo sapien
ccttaactgactggccgaattctaatcagatgt

SEQ ID NO: 479647 - DNA, 33 bp, Homo sapien
ctgactgctgttacatgaaatagacatagttgt

SEQ ID NO: 479648 - DNA, 33 bp, Homo sapien
ctgactgctgttacattaaatagacatagttgt

SEQ ID NO: 479649 - DNA, 33 bp, Homo sapien
agatcagaaacaagataaatatacatgatggaa

SEQ ID NO: 479650 - DNA, 33 bp, Homo sapien
agatcagaaacaagatgaatatacatgatggaa

SEQ ID NO: 479651 - DNA, 33 bp, Homo sapien
cattttacttgttctacaaagtttgatgccatt

SEQ ID NO: 479652 - DNA, 33 bp, Homo sapien
cattttacttgttctataaagtttgatgccatt

SEQ ID NO: 479653 - DNA, 33 bp, Homo sapien
ttttatttgactgagagaaagaccgtaagtacc

SEQ ID NO: 479654 - DNA, 33 bp, Homo sapien
ttttatttgactgagataaagaccgtaagtacc

SEQ ID NO: 479655 - DNA, 33 bp, Homo sapien
ttgagcttctcaatgacaggaagggtctgataa

SEQ ID NO: 479656 - DNA, 33 bp, Homo sapien
ttgagcttctcaatgataggaagggtctgataa

SEQ ID NO: 479657 - DNA, 33 bp, Homo sapien
catcactaagttcacactaaataagatgtcctt

SEQ ID NO: 479658 - DNA, 33 bp, Homo sapien
catcactaagttcacagtaaataagatgtcctt

SEQ ID NO: 479659 - DNA, 33 bp, Homo sapien
aatttaatcacatagtaaccagtctcatgaagc

SEQ ID NO: 479660 - DNA, 33 bp, Homo sapien
aatttaatcacatagttaccagtctcatgaagc

SEQ ID NO: 479661 - DNA, 33 bp, Homo sapien
ggactttgagaagtgacctgttttcattttggt

SEQ ID NO: 479662 - DNA, 33 bp, Homo sapien
ggactttgagaagtgatctgttttcattttggt

SEQ ID NO: 479663 - DNA, 33 bp, Homo sapien
tttagagtgaatccaacataaactccgatgatt

SEQ ID NO: 479664 - DNA, 33 bp, Homo sapien
tttagagtgaatccaatataaactccgatgatt

SEQ ID NO: 479665 - DNA, 33 bp, Homo sapien
ctacgatgagtttcaactgttacatattaaaca

SEQ ID NO: 479666 - DNA, 33 bp, Homo sapien
ctacgatgagtttcaattgttacatattaaaca

SEQ ID NO: 479667 - DNA, 33 bp, Homo sapien
agatataagatcacacactctggaaaataacat

SEQ ID NO: 479668 - DNA, 33 bp, Homo sapien
agatataagatcacacgctctggaaaataacat

SEQ ID NO: 479669 - DNA, 33 bp, Homo sapien
tttcaactctctgcaaagggctaatatatatag

SEQ ID NO: 479670 - DNA, 33 bp, Homo sapien
tttcaactctctgcaaggggctaatatatatag

SEQ ID NO: 479671 - DNA, 33 bp, Homo sapien
gaacggtgctgagttacggtcgaatagtggata

SEQ ID NO: 479672 - DNA, 33 bp, Homo sapien
gaacggtgctgagttatggtcgaatagtggata

SEQ ID NO: 479673 - DNA, 33 bp, Homo sapien
atgatatcatctacataagactgggagacctag

SEQ ID NO: 479674 - DNA, 33 bp, Homo sapien
atgatatcatctacatgagactgggagacctag

SEQ ID NO: 479675 - DNA, 33 bp, Homo sapien
gatatggaagaccctacaagatcagagtggttt

SEQ ID NO: 479676 - DNA, 33 bp, Homo sapien
gatatggaagaccctagaagatcagagtggttt

SEQ ID NO: 479677 - DNA, 33 bp, Homo sapien
gaggtcacgtggcaaacttcctttttcaagact

SEQ ID NO: 479678 - DNA, 33 bp, Homo sapien
gaggtcacgtggcaaatttcctttttcaagact

SEQ ID NO: 479679 - DNA, 33 bp, Homo sapien
atccatttccatccaaagatcaatctggagcct

SEQ ID NO: 479680 - DNA, 33 bp, Homo sapien
atccatttccatccaatgatcaatctggagcct

SEQ ID NO: 479681 - DNA, 33 bp, Homo sapien
aacacatgcctgaagactatgcatttaaggagt

SEQ ID NO: 479682 - DNA, 33 bp, Homo sapien
aacacatgcctgaagagtatgcatttaaggagt

SEQ ID NO: 479683 - DNA, 33 bp, Homo sapien
ccaggctttaatttcaacttggacaagaaacct

SEQ ID NO: 479684 - DNA, 33 bp, Homo sapien
ccaggctttaatttcatcttggacaagaaacct

SEQ ID NO: 479685 - DNA, 33 bp, Homo sapien
ccagaaaaaattgtggacagtctaatttctagt

SEQ ID NO: 479686 - DNA, 33 bp, Homo sapien
ccagaaaaaattgtgggcagtctaatttctagt

SEQ ID NO: 479687 - DNA, 33 bp, Homo sapien
ctaggcttaacaactaccaaaattctttcccaa

SEQ ID NO: 479688 - DNA, 33 bp, Homo sapien
ctaggcttaacaactatcaaaattctttcccaa

SEQ ID NO: 479689 - DNA, 33 bp, Homo sapien
attacatgcaactctacaaccagtgataaagtg

SEQ ID NO: 479690 - DNA, 33 bp, Homo sapien
attacatgcaactctagaaccagtgataaagtg

SEQ ID NO: 479691 - DNA, 33 bp, Homo sapien
tgaaaaataacaaacactggtagggatctggag

SEQ ID NO: 479692 - DNA, 33 bp, Homo sapien
tgaaaaataacaaacattggtagggatctggag

SEQ ID NO: 479693 - DNA, 33 bp, Homo sapien
gtggtttatcataagacagtaataacaccaaca

SEQ ID NO: 479694 - DNA, 33 bp, Homo sapien
gtggtttatcataagagagtaataacaccaaca

SEQ ID NO: 479695 - DNA, 33 bp, Homo sapien
cattaaatgtgaaccacgagactaacagcacaa

SEQ ID NO: 479696 - DNA, 33 bp, Homo sapien
cattaaatgtgaaccatgagactaacagcacaa

SEQ ID NO: 479697 - DNA, 33 bp, Homo sapien
gaaaaaactttatagcacagcaatggtctaatc

SEQ ID NO: 479698 - DNA, 33 bp, Homo sapien
gaaaaaactttatagcgcagcaatggtctaatc

SEQ ID NO: 479699 - DNA, 33 bp, Homo sapien
agacagttaaaaaacaactaattgcaaaaagtt

SEQ ID NO: 479700 - DNA, 33 bp, Homo sapien
agacagttaaaaaacacctaattgcaaaaagtt

SEQ ID NO: 479701 - DNA, 33 bp, Homo sapien
atgttgttgagtatgacgtattaggagtgctgt

SEQ ID NO: 479702 - DNA, 33 bp, Homo sapien
atgttgttgagtatgaggtattaggagtgctgt

SEQ ID NO: 479703 - DNA, 33 bp, Homo sapien
agcttgtggcattttcaaggatatacagcacct

SEQ ID NO: 479704 - DNA, 33 bp, Homo sapien
agcttgtggcattttcgaggatatacagcacct

SEQ ID NO: 479705 - DNA, 33 bp, Homo sapien
gaagacattatgtataaaacaaaactctgcttt

SEQ ID NO: 479706 - DNA, 33 bp, Homo sapien
gaagacattatgtatagaacaaaactctgcttt

SEQ ID NO: 479707 - DNA, 33 bp, Homo sapien
tgtgtgtgattatcagcctagaggtgactgcac

SEQ ID NO: 479708 - DNA, 33 bp, Homo sapien
tgtgtgtgattatcaggctagaggtgactgcac

SEQ ID NO: 479709 - DNA, 33 bp, Homo sapien
gggtcattaaaacgtgattaagtcctgagggca

SEQ ID NO: 479710 - DNA, 33 bp, Homo sapien
gggtcattaaaacgtggttaagtcctgagggca

SEQ ID NO: 479711 - DNA, 33 bp, Homo sapien
ttagaacacattgcagaccagtgtaagtcattt

SEQ ID NO: 479712 - DNA, 33 bp, Homo sapien
ttagaacacattgcagcccagtgtaagtcattt

SEQ ID NO: 479713 - DNA, 33 bp, Homo sapien
tacacagtgaataccacattaacatctgataat

SEQ ID NO: 479714 - DNA, 33 bp, Homo sapien
tacacagtgaataccatattaacatctgataat

SEQ ID NO: 479715 - DNA, 33 bp, Homo sapien
aaaattcaatctaagagaattgccctctaaata

SEQ ID NO: 479716 - DNA, 33 bp, Homo sapien
aaaattcaatctaagataattgccctctaaata

SEQ ID NO: 479717 - DNA, 33 bp, Homo sapien
attcctctactatcaaccattcctattattcta

SEQ ID NO: 479718 - DNA, 33 bp, Homo sapien
attcctctactatcaagcattcctattattcta

SEQ ID NO: 479719 - DNA, 33 bp, Homo sapien
atgtaccagcattagaaaacttgtatgaatggt

SEQ ID NO: 479720 - DNA, 33 bp, Homo sapien
atgtaccagcattagataacttgtatgaatggt

SEQ ID NO: 479721 - DNA, 33 bp, Homo sapien
ttcgtagggatataacagccacagtttcaataa

SEQ ID NO: 479722 - DNA, 33 bp, Homo sapien
ttcgtagggatataaccgccacagtttcaataa

SEQ ID NO: 479723 - DNA, 33 bp, Homo sapien
aatcatgtctaggtgacgaagcctccattaaaa

SEQ ID NO: 479724 - DNA, 33 bp, Homo sapien
aatcatgtctaggtgatgaagcctccattaaaa

SEQ ID NO: 479725 - DNA, 33 bp, Homo sapien
atcatctgagttatcaacaaaatgcctgtgtgt

SEQ ID NO: 479726 - DNA, 33 bp, Homo sapien
atcatctgagttatcagcaaaatgcctgtgtgt

SEQ ID NO: 479727 - DNA, 33 bp, Homo sapien
taatctgagagatgtaaagctaactgcctcctc

SEQ ID NO: 479728 - DNA, 33 bp, Homo sapien
taatctgagagatgtagagctaactgcctcctc

SEQ ID NO: 479729 - DNA, 33 bp, Homo sapien
aatgctttcaaacataaaaaatagttacatgaa

SEQ ID NO: 479730 - DNA, 33 bp, Homo sapien
aatgctttcaaacatacaaaatagttacatgaa

SEQ ID NO: 479731 - DNA, 33 bp, Homo sapien
taaaaagtaccaagcagaaattctggaactgaa

SEQ ID NO: 479732 - DNA, 33 bp, Homo sapien
taaaaagtaccaagcataaattctggaactgaa

SEQ ID NO: 479733 - DNA, 33 bp, Homo sapien
gctgtactgactgcaaatattatgagtccatta

SEQ ID NO: 479734 - DNA, 33 bp, Homo sapien
gctgtactgactgcaagtattatgagtccatta

SEQ ID NO: 479735 - DNA, 33 bp, Homo sapien
atagattacgattaaacacagttgacacatatt

SEQ ID NO: 479736 - DNA, 33 bp, Homo sapien
atagattacgattaaatacagttgacacatatt

SEQ ID NO: 479737 - DNA, 33 bp, Homo sapien
ttactccaaaaatatacctttgaaactatcagt

SEQ ID NO: 479738 - DNA, 33 bp, Homo sapien
ttactccaaaaatatagctttgaaactatcagt

SEQ ID NO: 479739 - DNA, 33 bp, Homo sapien
cctaatccattagaaccggtggccttacaagaa

SEQ ID NO: 479740 - DNA, 33 bp, Homo sapien
cctaatccattagaactggtggccttacaagaa

SEQ ID NO: 479741 - DNA, 33 bp, Homo sapien
gcaatgtaatgaaaaaatgtttagtgtactttt

SEQ ID NO: 479742 - DNA, 33 bp, Homo sapien
gcaatgtaatgaaaaagtgtttagtgtactttt

SEQ ID NO: 479743 - DNA, 33 bp, Homo sapien
agtaatattaataaaactgttctgaactaaagc

SEQ ID NO: 479744 - DNA, 33 bp, Homo sapien
agtaatattaataaaagtgttctgaactaaagc

SEQ ID NO: 479745 - DNA, 33 bp, Homo sapien
gggtcttgcattactacgtccattacagatgta

SEQ ID NO: 479746 - DNA, 33 bp, Homo sapien
gggtcttgcattactatgtccattacagatgta

SEQ ID NO: 479747 - DNA, 33 bp, Homo sapien
actttctgaatgctaaactctatttcagagcct

SEQ ID NO: 479748 - DNA, 33 bp, Homo sapien
actttctgaatgctaatctctatttcagagcct

SEQ ID NO: 479749 - DNA, 33 bp, Homo sapien
aagcaatagttaatacgctaaccttcagcaaaa

SEQ ID NO: 479750 - DNA, 33 bp, Homo sapien
aagcaatagttaatactctaaccttcagcaaaa

SEQ ID NO: 479751 - DNA, 33 bp, Homo sapien
tcatctcccctaacctaacataatcattgctag

SEQ ID NO: 479752 - DNA, 33 bp, Homo sapien
tcatctcccctaacctgacataatcattgctag

SEQ ID NO: 479753 - DNA, 33 bp, Homo sapien
caactaaactgataaactgatctgtggcatgaa

SEQ ID NO: 479754 - DNA, 33 bp, Homo sapien
caactaaactgataaattgatctgtggcatgaa

SEQ ID NO: 479755 - DNA, 33 bp, Homo sapien
gcaaagtgaaaaaatcagagaattgaagctaag

SEQ ID NO: 479756 - DNA, 33 bp, Homo sapien
gcaaagtgaaaaaatcggagaattgaagctaag

SEQ ID NO: 479757 - DNA, 33 bp, Homo sapien
atataggaaataaaatgagctgttaaagattca

SEQ ID NO: 479758 - DNA, 33 bp, Homo sapien
atataggaaataaaattagctgttaaagattca

SEQ ID NO: 479759 - DNA, 33 bp, Homo sapien
tccttcactgacccaaactaggaacctctatgc

SEQ ID NO: 479760 - DNA, 33 bp, Homo sapien
tccttcactgacccaagctaggaacctctatgc

SEQ ID NO: 479761 - DNA, 33 bp, Homo sapien
tcatggatattcacaacgtgtctttcatgggac

SEQ ID NO: 479762 - DNA, 33 bp, Homo sapien
tcatggatattcacaatgtgtctttcatgggac

SEQ ID NO: 479763 - DNA, 33 bp, Homo sapien
aggctgtttgtaaatcccatccacaaactggga

SEQ ID NO: 479764 - DNA, 33 bp, Homo sapien
aggctgtttgtaaatctcatccacaaactggga

SEQ ID NO: 479765 - DNA, 33 bp, Homo sapien
cattattctcagccaggcctcataaagatcctc

SEQ ID NO: 479766 - DNA, 33 bp, Homo sapien
cattattctcagccagtcctcataaagatcctc

SEQ ID NO: 479767 - DNA, 33 bp, Homo sapien
gagtataatttaaggcactgacattgctttaaa

SEQ ID NO: 479768 - DNA, 33 bp, Homo sapien
gagtataatttaaggcgctgacattgctttaaa

SEQ ID NO: 479769 - DNA, 33 bp, Homo sapien
taaacaataacccttcaagtgtatggtttctga

SEQ ID NO: 479770 - DNA, 33 bp, Homo sapien
taaacaataacccttctagtgtatggtttctga

SEQ ID NO: 479771 - DNA, 33 bp, Homo sapien
aattaaatatatgagaacttgggttaagcaatg

SEQ ID NO: 479772 - DNA, 33 bp, Homo sapien
aattaaatatatgagaccttgggttaagcaatg

SEQ ID NO: 479773 - DNA, 33 bp, Homo sapien
ttataaattctgaccaatgaatgtgtaaaagag

SEQ ID NO: 479774 - DNA, 33 bp, Homo sapien
ttataaattctgaccactgaatgtgtaaaagag

SEQ ID NO: 479775 - DNA, 33 bp, Homo sapien
atgggctggggatataaattttggattccagga

SEQ ID NO: 479776 - DNA, 33 bp, Homo sapien
atgggctggggatatacattttggattccagga

SEQ ID NO: 479777 - DNA, 33 bp, Homo sapien
gctgatgtgctgttgaaatatctggtgcctgta

SEQ ID NO: 479778 - DNA, 33 bp, Homo sapien
gctgatgtgctgttgagatatctggtgcctgta

SEQ ID NO: 479779 - DNA, 33 bp, Homo sapien
tcaacagcacatcagccatagaaaggcaagagg

SEQ ID NO: 479780 - DNA, 33 bp, Homo sapien
tcaacagcacatcagcgatagaaaggcaagagg

SEQ ID NO: 479781 - DNA, 33 bp, Homo sapien
aaacttcactcaattgcaatgtttacactcatc

SEQ ID NO: 479782 - DNA, 33 bp, Homo sapien
aaacttcactcaattggaatgtttacactcatc

SEQ ID NO: 479783 - DNA, 33 bp, Homo sapien
cttaagtgtgaataaaattcgatgttgggacat

SEQ ID NO: 479784 - DNA, 33 bp, Homo sapien
cttaagtgtgaataaagttcgatgttgggacat

SEQ ID NO: 479785 - DNA, 33 bp, Homo sapien
agtactgtactaaggacatactgattgattgct

SEQ ID NO: 479786 - DNA, 33 bp, Homo sapien
agtactgtactaaggatatactgattgattgct

SEQ ID NO: 479787 - DNA, 33 bp, Homo sapien
gcctcagatttcttcacgagacagttctttggc

SEQ ID NO: 479788 - DNA, 33 bp, Homo sapien
gcctcagatttcttcatgagacagttctttggc

SEQ ID NO: 479789 - DNA, 33 bp, Homo sapien
gaatggaaagaagtcccgagcaagagcttatgg

SEQ ID NO: 479790 - DNA, 33 bp, Homo sapien
gaatggaaagaagtcctgagcaagagcttatgg

SEQ ID NO: 479791 - DNA, 33 bp, Homo sapien
tgtgtagaactgcaacacacttaacgagtcgtt

SEQ ID NO: 479792 - DNA, 33 bp, Homo sapien
tgtgtagaactgcaacgcacttaacgagtcgtt

SEQ ID NO: 479793 - DNA, 33 bp, Homo sapien
aagcagacttttgttacgttgttctaatgttct

SEQ ID NO: 479794 - DNA, 33 bp, Homo sapien
aagcagacttttgttatgttgttctaatgttct

SEQ ID NO: 479795 - DNA, 33 bp, Homo sapien
tcgtagattccggacactgtatagaagaacact

SEQ ID NO: 479796 - DNA, 33 bp, Homo sapien
tcgtagattccggacattgtatagaagaacact

SEQ ID NO: 479797 - DNA, 33 bp, Homo sapien
aagggtgtccagataacagctaaaacattattt

SEQ ID NO: 479798 - DNA, 33 bp, Homo sapien
aagggtgtccagataatagctaaaacattattt

SEQ ID NO: 479799 - DNA, 33 bp, Homo sapien
aaaaaatagacgttgccaactgtgtcatatgta

SEQ ID NO: 479800 - DNA, 33 bp, Homo sapien
aaaaaatagacgttgctaactgtgtcatatgta

SEQ ID NO: 479801 - DNA, 33 bp, Homo sapien
agaacaactaaagataggaattcccgtagaaaa

SEQ ID NO: 479802 - DNA, 33 bp, Homo sapien
agaacaactaaagatatgaattcccgtagaaaa

SEQ ID NO: 479803 - DNA, 33 bp, Homo sapien
cagtagatgtcactaaccattttctaatatttg

SEQ ID NO: 479804 - DNA, 33 bp, Homo sapien
cagtagatgtcactaagcattttctaatatttg

SEQ ID NO: 479805 - DNA, 33 bp, Homo sapien
ctttcagctcatttaaatatgccaaaagttatg

SEQ ID NO: 479806 - DNA, 33 bp, Homo sapien
ctttcagctcatttaagtatgccaaaagttatg

SEQ ID NO: 479807 - DNA, 33 bp, Homo sapien
ccccagactgtttccacgtagagagcgatatgg

SEQ ID NO: 479808 - DNA, 33 bp, Homo sapien
ccccagactgtttccaggtagagagcgatatgg

SEQ ID NO: 479809 - DNA, 33 bp, Homo sapien
aatgaaaggaattatgcaggatagttgaataaa

SEQ ID NO: 479810 - DNA, 33 bp, Homo sapien
aatgaaaggaattatggaggatagttgaataaa

SEQ ID NO: 479811 - DNA, 33 bp, Homo sapien
cctccaagttgaagatcacatgagctaagcatg

SEQ ID NO: 479812 - DNA, 33 bp, Homo sapien
cctccaagttgaagatgacatgagctaagcatg

SEQ ID NO: 479813 - DNA, 33 bp, Homo sapien
aagatctattctacaaaagagtgactacagtta

SEQ ID NO: 479814 - DNA, 33 bp, Homo sapien
aagatctattctacaacagagtgactacagtta

SEQ ID NO: 479815 - DNA, 33 bp, Homo sapien
agattagttacatgaaaaagcttgttgaaatag

SEQ ID NO: 479816 - DNA, 33 bp, Homo sapien
agattagttacatgaagaagcttgttgaaatag

SEQ ID NO: 479817 - DNA, 33 bp, Homo sapien
tcagctgtgtaagtaacgttagcacttggctca

SEQ ID NO: 479818 - DNA, 33 bp, Homo sapien
tcagctgtgtaagtaatgttagcacttggctca

SEQ ID NO: 479819 - DNA, 33 bp, Homo sapien
cagatgcagaattgaactgtttacacatatttt

SEQ ID NO: 479820 - DNA, 33 bp, Homo sapien
cagatgcagaattgaagtgtttacacatatttt

SEQ ID NO: 479821 - DNA, 33 bp, Homo sapien
tactaacctgatattcacttttatacagccttt

SEQ ID NO: 479822 - DNA, 33 bp, Homo sapien
tactaacctgatattcgcttttatacagccttt

SEQ ID NO: 479823 - DNA, 33 bp, Homo sapien
agggatggaagtcagcagagtgtctgccacggc

SEQ ID NO: 479824 - DNA, 33 bp, Homo sapien
agggatggaagtcagcggagtgtctgccacggc

SEQ ID NO: 479825 - DNA, 33 bp, Homo sapien
agacttgcctaaagcccatattgattaacagct

SEQ ID NO: 479826 - DNA, 33 bp, Homo sapien
agacttgcctaaagcctatattgattaacagct

SEQ ID NO: 479827 - DNA, 33 bp, Homo sapien
gtctgtacaaaattaaagaaagcagaatggagt

SEQ ID NO: 479828 - DNA, 33 bp, Homo sapien
gtctgtacaaaattaaggaaagcagaatggagt

SEQ ID NO: 479829 - DNA, 33 bp, Homo sapien
gggtaattatagcaagcatggccttataaggat

SEQ ID NO: 479830 - DNA, 33 bp, Homo sapien
gggtaattatagcaaggatggccttataaggat

SEQ ID NO: 479831 - DNA, 33 bp, Homo sapien
tccagggatccacataaggaatttgtacttcct

SEQ ID NO: 479832 - DNA, 33 bp, Homo sapien
tccagggatccacatacggaatttgtacttcct

SEQ ID NO: 479833 - DNA, 33 bp, Homo sapien
tgatcaaaacttgactaaacttttgacagttag

SEQ ID NO: 479834 - DNA, 33 bp, Homo sapien
tgatcaaaacttgactcaacttttgacagttag

SEQ ID NO: 479835 - DNA, 33 bp, Homo sapien
agagtgttgctaccccaaaaatatgcaaaagat

SEQ ID NO: 479836 - DNA, 33 bp, Homo sapien
agagtgttgctacccccaaaatatgcaaaagat

SEQ ID NO: 479837 - DNA, 33 bp, Homo sapien
ggcaaacactctgtagcaattttttgaccaccc

SEQ ID NO: 479838 - DNA, 33 bp, Homo sapien
ggcaaacactctgtagtaattttttgaccaccc

SEQ ID NO: 479839 - DNA, 33 bp, Homo sapien
atttactttctcatagaaaaatctgcatacttt

SEQ ID NO: 479840 - DNA, 33 bp, Homo sapien
atttactttctcatagtaaaatctgcatacttt

SEQ ID NO: 479841 - DNA, 33 bp, Homo sapien
tatttgtgtttctgtccctgtattagttggtgt

SEQ ID NO: 479842 - DNA, 33 bp, Homo sapien
tatttgtgtttctgtctctgtattagttggtgt

SEQ ID NO: 479843 - DNA, 33 bp, Homo sapien
aatttttgaataaaaaactccctgaagctttct

SEQ ID NO: 479844 - DNA, 33 bp, Homo sapien
aatttttgaataaaaatctccctgaagctttct

SEQ ID NO: 479845 - DNA, 33 bp, Homo sapien
ttggtgtccagagtaaaaaaaggtttgtcagtt

SEQ ID NO: 479846 - DNA, 33 bp, Homo sapien
ttggtgtccagagtaagaaaaggtttgtcagtt

SEQ ID NO: 479847 - DNA, 33 bp, Homo sapien
ccccaaagttagattgaagtattctgaggcatc

SEQ ID NO: 479848 - DNA, 33 bp, Homo sapien
ccccaaagttagattggagtattctgaggcatc

SEQ ID NO: 479849 - DNA, 33 bp, Homo sapien
atcaagccatatgctccgaaaacgttaatggca

SEQ ID NO: 479850 - DNA, 33 bp, Homo sapien
atcaagccatatgctctgaaaacgttaatggca

SEQ ID NO: 479851 - DNA, 33 bp, Homo sapien
ccttgtagtggaatgacgtataatcctttgcgt

SEQ ID NO: 479852 - DNA, 33 bp, Homo sapien
ccttgtagtggaatgatgtataatcctttgcgt

SEQ ID NO: 479853 - DNA, 33 bp, Homo sapien
ggaaatgaagttttgaaatgtgatacttatcct

SEQ ID NO: 479854 - DNA, 33 bp, Homo sapien
ggaaatgaagttttgagatgtgatacttatcct

SEQ ID NO: 479855 - DNA, 33 bp, Homo sapien
gtaacgtgtagaggtaaaaaccatcttttctgt

SEQ ID NO: 479856 - DNA, 33 bp, Homo sapien
gtaacgtgtagaggtataaaccatcttttctgt

SEQ ID NO: 479857 - DNA, 33 bp, Homo sapien
tcatgtgtatccccaaaatatgtataactatgc

SEQ ID NO: 479858 - DNA, 33 bp, Homo sapien
tcatgtgtatccccaacatatgtataactatgc

SEQ ID NO: 479859 - DNA, 33 bp, Homo sapien
ccaagattacagaaaccgacttagccttgtcct

SEQ ID NO: 479860 - DNA, 33 bp, Homo sapien
ccaagattacagaaactgacttagccttgtcct

SEQ ID NO: 479861 - DNA, 33 bp, Homo sapien
gccttcaaagctaagagggatccgcaactttag

SEQ ID NO: 479862 - DNA, 33 bp, Homo sapien
gccttcaaagctaagatggatccgcaactttag

SEQ ID NO: 479863 - DNA, 33 bp, Homo sapien
aatgcacagaaaaacaaagtcaccttgcaacag

SEQ ID NO: 479864 - DNA, 33 bp, Homo sapien
aatgcacagaaaaacagagtcaccttgcaacag

SEQ ID NO: 479865 - DNA, 33 bp, Homo sapien
caatctccagaagaaacgaagaccaaaagtgtt

SEQ ID NO: 479866 - DNA, 33 bp, Homo sapien
caatctccagaagaaatgaagaccaaaagtgtt

SEQ ID NO: 479867 - DNA, 33 bp, Homo sapien
cagtggtaatatgggccactctgggaaaggtaa

SEQ ID NO: 479868 - DNA, 33 bp, Homo sapien
cagtggtaatatgggcgactctgggaaaggtaa

SEQ ID NO: 479869 - DNA, 33 bp, Homo sapien
aattcaagtaaggtgcaaaatcttataactgga

SEQ ID NO: 479870 - DNA, 33 bp, Homo sapien
aattcaagtaaggtgcgaaatcttataactgga

SEQ ID NO: 479871 - DNA, 33 bp, Homo sapien
cgatccttcccttctaagcagtaacctcatcgg

SEQ ID NO: 479872 - DNA, 33 bp, Homo sapien
cgatccttcccttctacgcagtaacctcatcgg

SEQ ID NO: 479873 - DNA, 33 bp, Homo sapien
actttactaaaatggacatgacaatggtttgtt

SEQ ID NO: 479874 - DNA, 33 bp, Homo sapien
actttactaaaatggagatgacaatggtttgtt

SEQ ID NO: 479875 - DNA, 33 bp, Homo sapien
aaagctctctggagacaataacccaaatgaaca

SEQ ID NO: 479876 - DNA, 33 bp, Homo sapien
aaagctctctggagacgataacccaaatgaaca

SEQ ID NO: 479877 - DNA, 33 bp, Homo sapien
gtgcttaatatatttacaaattctcagggacat

SEQ ID NO: 479878 - DNA, 33 bp, Homo sapien
gtgcttaatatatttagaaattctcagggacat

SEQ ID NO: 479879 - DNA, 33 bp, Homo sapien
cgtttgtttaagatcccgcaactaacctgtact

SEQ ID NO: 479880 - DNA, 33 bp, Homo sapien
cgtttgtttaagatcctgcaactaacctgtact

SEQ ID NO: 479881 - DNA, 33 bp, Homo sapien
tctgcttggtagctcacggagtggttgtagtca

SEQ ID NO: 479882 - DNA, 33 bp, Homo sapien
tctgcttggtagctcatggagtggttgtagtca

SEQ ID NO: 479883 - DNA, 33 bp, Homo sapien
ggaaaactcccttgtacacttgtgaaataataa

SEQ ID NO: 479884 - DNA, 33 bp, Homo sapien
ggaaaactcccttgtatacttgtgaaataataa

SEQ ID NO: 479885 - DNA, 33 bp, Homo sapien
gaccctcgaaaggagccacaccttaagaatctc

SEQ ID NO: 479886 - DNA, 33 bp, Homo sapien
gaccctcgaaaggagcgacaccttaagaatctc

SEQ ID NO: 479887 - DNA, 33 bp, Homo sapien
gttgtatatcaaataaatgtagctttgatttta

SEQ ID NO: 479888 - DNA, 33 bp, Homo sapien
gttgtatatcaaataactgtagctttgatttta

SEQ ID NO: 479889 - DNA, 33 bp, Homo sapien
tttccaaatcagagtcacagataacaggaaata

SEQ ID NO: 479890 - DNA, 33 bp, Homo sapien
tttccaaatcagagtcgcagataacaggaaata

SEQ ID NO: 479891 - DNA, 33 bp, Homo sapien
tagtttttcgaccttacgtaaatcacttaaatt

SEQ ID NO: 479892 - DNA, 33 bp, Homo sapien
tagtttttcgaccttatgtaaatcacttaaatt

SEQ ID NO: 479893 - DNA, 33 bp, Homo sapien
gatgattttttttttacgtggcctagatatacc

SEQ ID NO: 479894 - DNA, 33 bp, Homo sapien
gatgattttttttttatgtggcctagatatacc

SEQ ID NO: 479895 - DNA, 33 bp, Homo sapien
tgataaaagctctagactccaacagagaactaa

SEQ ID NO: 479896 - DNA, 33 bp, Homo sapien
tgataaaagctctagattccaacagagaactaa

SEQ ID NO: 479897 - DNA, 33 bp, Homo sapien
ccaaaactcttaccacagcatgcaaatgtcttc

SEQ ID NO: 479898 - DNA, 33 bp, Homo sapien
ccaaaactcttaccacggcatgcaaatgtcttc

SEQ ID NO: 479899 - DNA, 33 bp, Homo sapien
cattctcctgcaggggaaaaaaggtcgggataa

SEQ ID NO: 479900 - DNA, 33 bp, Homo sapien
cattctcctgcaggggtaaaaaggtcgggataa

SEQ ID NO: 479901 - DNA, 33 bp, Homo sapien
tgcttgtatcaaaacacatcaggtatccgataa

SEQ ID NO: 479902 - DNA, 33 bp, Homo sapien
tgcttgtatcaaaacatatcaggtatccgataa

SEQ ID NO: 479903 - DNA, 33 bp, Homo sapien
gagaaagagctaacagaagtaactaaacaatat

SEQ ID NO: 479904 - DNA, 33 bp, Homo sapien
gagaaagagctaacagcagtaactaaacaatat

SEQ ID NO: 479905 - DNA, 33 bp, Homo sapien
agagcattgcagaaaaatacctttctgaaatgc

SEQ ID NO: 479906 - DNA, 33 bp, Homo sapien
agagcattgcagaaaactacctttctgaaatgc

SEQ ID NO: 479907 - DNA, 33 bp, Homo sapien
tgcccactagtcaaaaagaaccctggaaaggta

SEQ ID NO: 479908 - DNA, 33 bp, Homo sapien
tgcccactagtcaaaatgaaccctggaaaggta

SEQ ID NO: 479909 - DNA, 33 bp, Homo sapien
ccacatcaactgctacaaagggagaaatgcagt

SEQ ID NO: 479910 - DNA, 33 bp, Homo sapien
ccacatcaactgctacgaagggagaaatgcagt

SEQ ID NO: 479911 - DNA, 33 bp, Homo sapien
ttgttatacctagaaacgaatccttgtaaacca

SEQ ID NO: 479912 - DNA, 33 bp, Homo sapien
ttgttatacctagaaatgaatccttgtaaacca

SEQ ID NO: 479913 - DNA, 33 bp, Homo sapien
ttgattgaacactaaactcaacataggtctcca

SEQ ID NO: 479914 - DNA, 33 bp, Homo sapien
ttgattgaacactaaagtcaacataggtctcca

SEQ ID NO: 479915 - DNA, 33 bp, Homo sapien
agatattatatagctgcaaagtaaggaaaaact

SEQ ID NO: 479916 - DNA, 33 bp, Homo sapien
agatattatatagctggaaagtaaggaaaaact

SEQ ID NO: 479917 - DNA, 33 bp, Homo sapien
gaaatacctaggctcaggatcccaatcaaacgt

SEQ ID NO: 479918 - DNA, 33 bp, Homo sapien
gaaatacctaggctcatgatcccaatcaaacgt

SEQ ID NO: 479919 - DNA, 33 bp, Homo sapien
gatagcaactagatcaagtttgaaacatgtttt

SEQ ID NO: 479920 - DNA, 33 bp, Homo sapien
gatagcaactagatcaggtttgaaacatgtttt

SEQ ID NO: 479921 - DNA, 33 bp, Homo sapien
aagatcagaggagagagaagctaatgtgttttt

SEQ ID NO: 479922 - DNA, 33 bp, Homo sapien
aagatcagaggagagataagctaatgtgttttt

SEQ ID NO: 479923 - DNA, 33 bp, Homo sapien
acttgccttacatgataaccagccttacaataa

SEQ ID NO: 479924 - DNA, 33 bp, Homo sapien
acttgccttacatgattaccagccttacaataa

SEQ ID NO: 479925 - DNA, 33 bp, Homo sapien
aaaaaatatataatacaaaaaacgctatgtcta

SEQ ID NO: 479926 - DNA, 33 bp, Homo sapien
aaaaaatatataatacgaaaaacgctatgtcta

SEQ ID NO: 479927 - DNA, 33 bp, Homo sapien
aattactctttcttcaaatccttccttgcaaaa

SEQ ID NO: 479928 - DNA, 33 bp, Homo sapien
aattactctttcttcatatccttccttgcaaaa

SEQ ID NO: 479929 - DNA, 33 bp, Homo sapien
gtgtctagcaggttgtcaaatggcttttaaatt

SEQ ID NO: 479930 - DNA, 33 bp, Homo sapien
gtgtctagcaggttgttaaatggcttttaaatt

SEQ ID NO: 479931 - DNA, 33 bp, Homo sapien
gggaggatgagacagcaagaggcagagattgac

SEQ ID NO: 479932 - DNA, 33 bp, Homo sapien
gggaggatgagacagcgagaggcagagattgac

SEQ ID NO: 479933 - DNA, 33 bp, Homo sapien
tctgtctctcttcaatcaccgactctccactga

SEQ ID NO: 479934 - DNA, 33 bp, Homo sapien
tctgtctctcttcaattaccgactctccactga

SEQ ID NO: 479935 - DNA, 33 bp, Homo sapien
attcactaccgaattgaaaaccacaatgagttc

SEQ ID NO: 479936 - DNA, 33 bp, Homo sapien
attcactaccgaattggaaaccacaatgagttc

SEQ ID NO: 479937 - DNA, 33 bp, Homo sapien
tctttgatgttacccaacgccttaatatgtcaa

SEQ ID NO: 479938 - DNA, 33 bp, Homo sapien
tctttgatgttacccatcgccttaatatgtcaa

SEQ ID NO: 479939 - DNA, 33 bp, Homo sapien
tgacacagtctcaaaaaggattatggctgcaag

SEQ ID NO: 479940 - DNA, 33 bp, Homo sapien
tgacacagtctcaaaagggattatggctgcaag

SEQ ID NO: 479941 - DNA, 33 bp, Homo sapien
agtttgtttttctacacctatactttgcttctt

SEQ ID NO: 479942 - DNA, 33 bp, Homo sapien
agtttgtttttctacagctatactttgcttctt

SEQ ID NO: 479943 - DNA, 33 bp, Homo sapien
gtgatcataatctggacagttcacaagttttgc

SEQ ID NO: 479944 - DNA, 33 bp, Homo sapien
gtgatcataatctggagagttcacaagttttgc

SEQ ID NO: 479945 - DNA, 33 bp, Homo sapien
tgtcaagctatggtaaagtaactataaatctct

SEQ ID NO: 479946 - DNA, 33 bp, Homo sapien
tgtcaagctatggtaaggtaactataaatctct

SEQ ID NO: 479947 - DNA, 33 bp, Homo sapien
aaaagacatgaaaagacggttttcagaagacat

SEQ ID NO: 479948 - DNA, 33 bp, Homo sapien
aaaagacatgaaaagatggttttcagaagacat

SEQ ID NO: 479949 - DNA, 33 bp, Homo sapien
gccatagcaaagtgaccccaattatatgagtaa

SEQ ID NO: 479950 - DNA, 33 bp, Homo sapien
gccatagcaaagtgacgccaattatatgagtaa

SEQ ID NO: 479951 - DNA, 33 bp, Homo sapien
tttgtggcctctgcaaaggaagaagagaatttt

SEQ ID NO: 479952 - DNA, 33 bp, Homo sapien
tttgtggcctctgcaatggaagaagagaatttt

SEQ ID NO: 479953 - DNA, 33 bp, Homo sapien
catgaacaaggcctaaatatagtgtagacaaca

SEQ ID NO: 479954 - DNA, 33 bp, Homo sapien
catgaacaaggcctaagtatagtgtagacaaca

SEQ ID NO: 479955 - DNA, 33 bp, Homo sapien
atcatgctgctacctccataaggaacgctattt

SEQ ID NO: 479956 - DNA, 33 bp, Homo sapien
atcatgctgctacctctataaggaacgctattt

SEQ ID NO: 479957 - DNA, 33 bp, Homo sapien
gtagccttaatttctcccactaaggtgatgaat

SEQ ID NO: 479958 - DNA, 33 bp, Homo sapien
gtagccttaatttctctcactaaggtgatgaat

SEQ ID NO: 479959 - DNA, 33 bp, Homo sapien
caccccctaatgtagaaactcctgcatatcacc

SEQ ID NO: 479960 - DNA, 33 bp, Homo sapien
caccccctaatgtagagactcctgcatatcacc

SEQ ID NO: 479961 - DNA, 33 bp, Homo sapien
atattgctcttcgttacggtagaagttgaagtt

SEQ ID NO: 479962 - DNA, 33 bp, Homo sapien
atattgctcttcgttatggtagaagttgaagtt

SEQ ID NO: 479963 - DNA, 33 bp, Homo sapien
gaagagtcattttgaaaattagtggagataatg

SEQ ID NO: 479964 - DNA, 33 bp, Homo sapien
gaagagtcattttgaagattagtggagataatg

SEQ ID NO: 479965 - DNA, 33 bp, Homo sapien
atataccagaaatatacacatgtcagagccata

SEQ ID NO: 479966 - DNA, 33 bp, Homo sapien
atataccagaaatatatacatgtcagagccata

SEQ ID NO: 479967 - DNA, 33 bp, Homo sapien
acctggctgggtcataacagcacctggcctcag

SEQ ID NO: 479968 - DNA, 33 bp, Homo sapien
acctggctgggtcatagcagcacctggcctcag

SEQ ID NO: 479969 - DNA, 33 bp, Homo sapien
ctggtccagcagtaagcagagtatttgaacaca

SEQ ID NO: 479970 - DNA, 33 bp, Homo sapien
ctggtccagcagtaaggagagtatttgaacaca

SEQ ID NO: 479971 - DNA, 33 bp, Homo sapien
gggagcagagaacacacagcaaaaaatatatat

SEQ ID NO: 479972 - DNA, 33 bp, Homo sapien
gggagcagagaacacatagcaaaaaatatatat

SEQ ID NO: 479973 - DNA, 33 bp, Homo sapien
aagtctgtagtaagcaaaacagtatgttacttc

SEQ ID NO: 479974 - DNA, 33 bp, Homo sapien
aagtctgtagtaagcagaacagtatgttacttc

SEQ ID NO: 479975 - DNA, 33 bp, Homo sapien
aggacactctgtaatggaggacatgaaaatggc

SEQ ID NO: 479976 - DNA, 33 bp, Homo sapien
aggacactctgtaatgtaggacatgaaaatggc

SEQ ID NO: 479977 - DNA, 33 bp, Homo sapien
taagtctttttgtaagcctagaagtagttcttt

SEQ ID NO: 479978 - DNA, 33 bp, Homo sapien
taagtctttttgtaagtctagaagtagttcttt

SEQ ID NO: 479979 - DNA, 33 bp, Homo sapien
ttatcaaaatgaacaaaataactgagttttatg

SEQ ID NO: 479980 - DNA, 33 bp, Homo sapien
ttatcaaaatgaacaagataactgagttttatg

SEQ ID NO: 479981 - DNA, 33 bp, Homo sapien
ttctcacttagcataaaatattgaaagttcaat

SEQ ID NO: 479982 - DNA, 33 bp, Homo sapien
ttctcacttagcataatatattgaaagttcaat

SEQ ID NO: 479983 - DNA, 33 bp, Homo sapien
gtgcagatacctgttgaaacatgattgaacttt

SEQ ID NO: 479984 - DNA, 33 bp, Homo sapien
gtgcagatacctgttgcaacatgattgaacttt

SEQ ID NO: 479985 - DNA, 33 bp, Homo sapien
ccaactattgaatggaataagtaatgtgctata

SEQ ID NO: 479986 - DNA, 33 bp, Homo sapien
ccaactattgaatggagtaagtaatgtgctata

SEQ ID NO: 479987 - DNA, 33 bp, Homo sapien
atggcccattcggacacggaagccttttgcatt

SEQ ID NO: 479988 - DNA, 33 bp, Homo sapien
atggcccattcggacagggaagccttttgcatt

SEQ ID NO: 479989 - DNA, 33 bp, Homo sapien
gagtctgagttcctgaaaatgaataccaagaaa

SEQ ID NO: 479990 - DNA, 33 bp, Homo sapien
gagtctgagttcctgacaatgaataccaagaaa

SEQ ID NO: 479991 - DNA, 33 bp, Homo sapien
aacattcagactgaaacatcctggcttcctctc

SEQ ID NO: 479992 - DNA, 33 bp, Homo sapien
aacattcagactgaaatatcctggcttcctctc

SEQ ID NO: 479993 - DNA, 33 bp, Homo sapien
ccctcaaatggcttctaaagtccagtgggggca

SEQ ID NO: 479994 - DNA, 33 bp, Homo sapien
ccctcaaatggcttctgaagtccagtgggggca

SEQ ID NO: 479995 - DNA, 33 bp, Homo sapien
tctgtccttcaggatacagatactgcccccact

SEQ ID NO: 479996 - DNA, 33 bp, Homo sapien
tctgtccttcaggatatagatactgcccccact

SEQ ID NO: 479997 - DNA, 33 bp, Homo sapien
tgcaatgttcatggcaagaggtgtgaaaaatat

SEQ ID NO: 479998 - DNA, 33 bp, Homo sapien
tgcaatgttcatggcaggaggtgtgaaaaatat

SEQ ID NO: 479999 - DNA, 33 bp, Homo sapien
tgtttcatatttgtaccctcaacacccaaattc

SEQ ID NO: 480000 - DNA, 33 bp, Homo sapien
tgtttcatatttgtactctcaacacccaaattc

SEQ ID NO: 480001 - DNA, 33 bp, Homo sapien
caaagatatagacccacagttgttgtttttttc

SEQ ID NO: 480002 - DNA, 33 bp, Homo sapien
caaagatatagacccatagttgttgtttttttc

SEQ ID NO: 480003 - DNA, 33 bp, Homo sapien
ttgcaaatatccacacacaaaatttttaggttt

SEQ ID NO: 480004 - DNA, 33 bp, Homo sapien
ttgcaaatatccacacgcaaaatttttaggttt

SEQ ID NO: 480005 - DNA, 33 bp, Homo sapien
aagtgaatgaaaaatacgagttcagaacagttg

SEQ ID NO: 480006 - DNA, 33 bp, Homo sapien
aagtgaatgaaaaatatgagttcagaacagttg

SEQ ID NO: 480007 - DNA, 33 bp, Homo sapien
ggctttgtgagaaagacgatatttgtggcactc

SEQ ID NO: 480008 - DNA, 33 bp, Homo sapien
ggctttgtgagaaagatgatatttgtggcactc

SEQ ID NO: 480009 - DNA, 33 bp, Homo sapien
ctataaatcttactgaacctcagttttaccact

SEQ ID NO: 480010 - DNA, 33 bp, Homo sapien
ctataaatcttactgagcctcagttttaccact

SEQ ID NO: 480011 - DNA, 33 bp, Homo sapien
agtggttctcctgctaactaggtcctctttcat

SEQ ID NO: 480012 - DNA, 33 bp, Homo sapien
agtggttctcctgctagctaggtcctctttcat

SEQ ID NO: 480013 - DNA, 33 bp, Homo sapien
cagcagcgtgataacaacctactttgtaagaaa

SEQ ID NO: 480014 - DNA, 33 bp, Homo sapien
cagcagcgtgataacagcctactttgtaagaaa

SEQ ID NO: 480015 - DNA, 33 bp, Homo sapien
actcttttcaaatccaaggtcacttcaatattc

SEQ ID NO: 480016 - DNA, 33 bp, Homo sapien
actcttttcaaatccagggtcacttcaatattc

SEQ ID NO: 480017 - DNA, 33 bp, Homo sapien
atgtaaatatttacagacctccagaagcagcgt

SEQ ID NO: 480018 - DNA, 33 bp, Homo sapien
atgtaaatatttacagccctccagaagcagcgt

SEQ ID NO: 480019 - DNA, 33 bp, Homo sapien
cttattgaattccaaaaaaggtgctaaaaataa

SEQ ID NO: 480020 - DNA, 33 bp, Homo sapien
cttattgaattccaaagaaggtgctaaaaataa

SEQ ID NO: 480021 - DNA, 33 bp, Homo sapien
tgcgtattaccatatcacattaaccattttgac

SEQ ID NO: 480022 - DNA, 33 bp, Homo sapien
tgcgtattaccatatcccattaaccattttgac

SEQ ID NO: 480023 - DNA, 33 bp, Homo sapien
gagctactctacatgaacaacagaagtctagga

SEQ ID NO: 480024 - DNA, 33 bp, Homo sapien
gagctactctacatgatcaacagaagtctagga

SEQ ID NO: 480025 - DNA, 33 bp, Homo sapien
ttcaactggtaacaaactacgacatctgaatct

SEQ ID NO: 480026 - DNA, 33 bp, Homo sapien
ttcaactggtaacaaagtacgacatctgaatct

SEQ ID NO: 480027 - DNA, 33 bp, Homo sapien
aaatccagcgtagaaaattcctttagtattcat

SEQ ID NO: 480028 - DNA, 33 bp, Homo sapien
aaatccagcgtagaaagttcctttagtattcat

SEQ ID NO: 480029 - DNA, 33 bp, Homo sapien
ttttggagacctggaaatctgaaactttatagt

SEQ ID NO: 480030 - DNA, 33 bp, Homo sapien
ttttggagacctggaagtctgaaactttatagt

SEQ ID NO: 480031 - DNA, 33 bp, Homo sapien
aactaataatcttcacaggaagcccaagctctt

SEQ ID NO: 480032 - DNA, 33 bp, Homo sapien
aactaataatcttcacgggaagcccaagctctt

SEQ ID NO: 480033 - DNA, 33 bp, Homo sapien
atcaggaatggaggaacagagagactcagcatc

SEQ ID NO: 480034 - DNA, 33 bp, Homo sapien
atcaggaatggaggaagagagagactcagcatc

SEQ ID NO: 480035 - DNA, 33 bp, Homo sapien
tgtgagtgtgtgaaaacgaacaggatgtttctt

SEQ ID NO: 480036 - DNA, 33 bp, Homo sapien
tgtgagtgtgtgaaaatgaacaggatgtttctt

SEQ ID NO: 480037 - DNA, 33 bp, Homo sapien
ttttaactcgatcctacgaatttatttagagaa

SEQ ID NO: 480038 - DNA, 33 bp, Homo sapien
ttttaactcgatcctatgaatttatttagagaa

SEQ ID NO: 480039 - DNA, 33 bp, Homo sapien
aatgttggaagctggagactgccccaagatagg

SEQ ID NO: 480040 - DNA, 33 bp, Homo sapien
aatgttggaagctggatactgccccaagatagg

SEQ ID NO: 480041 - DNA, 33 bp, Homo sapien
aatttctggtcatctcacagaggaattaagcat

SEQ ID NO: 480042 - DNA, 33 bp, Homo sapien
aatttctggtcatctcgcagaggaattaagcat

SEQ ID NO: 480043 - DNA, 33 bp, Homo sapien
cttcataatagagctaccaattttctgatttgc

SEQ ID NO: 480044 - DNA, 33 bp, Homo sapien
cttcataatagagctatcaattttctgatttgc

SEQ ID NO: 480045 - DNA, 33 bp, Homo sapien
taaaatatgaacatgacaaaacatactctgtca

SEQ ID NO: 480046 - DNA, 33 bp, Homo sapien
taaaatatgaacatgagaaaacatactctgtca

SEQ ID NO: 480047 - DNA, 33 bp, Homo sapien
ctaacagtagcaagaacgacacaacctggtcca

SEQ ID NO: 480048 - DNA, 33 bp, Homo sapien
ctaacagtagcaagaatgacacaacctggtcca

SEQ ID NO: 480049 - DNA, 33 bp, Homo sapien
ctctgtatggccagaaatgagctggagaaaaaa

SEQ ID NO: 480050 - DNA, 33 bp, Homo sapien
ctctgtatggccagaagtgagctggagaaaaaa

SEQ ID NO: 480051 - DNA, 33 bp, Homo sapien
aaaatacttattattacggtggtagtgatattg

SEQ ID NO: 480052 - DNA, 33 bp, Homo sapien
aaaatacttattattatggtggtagtgatattg

SEQ ID NO: 480053 - DNA, 33 bp, Homo sapien
tagtaaatgtggcccacctatatcacagaatat

SEQ ID NO: 480054 - DNA, 33 bp, Homo sapien
tagtaaatgtggcccatctatatcacagaatat

SEQ ID NO: 480055 - DNA, 33 bp, Homo sapien
catgggcaaaccaagacgtgcgtgaatatgttc

SEQ ID NO: 480056 - DNA, 33 bp, Homo sapien
catgggcaaaccaagatgtgcgtgaatatgttc

SEQ ID NO: 480057 - DNA, 33 bp, Homo sapien
ataaattcatgccatactatctaacagacacag

SEQ ID NO: 480058 - DNA, 33 bp, Homo sapien
ataaattcatgccatattatctaacagacacag

SEQ ID NO: 480059 - DNA, 33 bp, Homo sapien
tgcaaacatttgaaaaacttagattgtgacaaa

SEQ ID NO: 480060 - DNA, 33 bp, Homo sapien
tgcaaacatttgaaaaccttagattgtgacaaa

SEQ ID NO: 480061 - DNA, 33 bp, Homo sapien
tttgtaaaagactttacgacacctacagtgctg

SEQ ID NO: 480062 - DNA, 33 bp, Homo sapien
tttgtaaaagactttatgacacctacagtgctg

SEQ ID NO: 480063 - DNA, 33 bp, Homo sapien
gaaaaattaacctaaactatatgttcagaagtg

SEQ ID NO: 480064 - DNA, 33 bp, Homo sapien
gaaaaattaacctaaagtatatgttcagaagtg

SEQ ID NO: 480065 - DNA, 33 bp, Homo sapien
caaacacactttgaataatggaatttctagggt

SEQ ID NO: 480066 - DNA, 33 bp, Homo sapien
caaacacactttgaattatggaatttctagggt

SEQ ID NO: 480067 - DNA, 33 bp, Homo sapien
atgctttagtaatcaccggggtgaatatatctc

SEQ ID NO: 480068 - DNA, 33 bp, Homo sapien
atgctttagtaatcactggggtgaatatatctc

SEQ ID NO: 480069 - DNA, 33 bp, Homo sapien
attgttccttcagctacatgtctttgtcaagga

SEQ ID NO: 480070 - DNA, 33 bp, Homo sapien
attgttccttcagctatatgtctttgtcaagga

SEQ ID NO: 480071 - DNA, 33 bp, Homo sapien
gaccttgcagaagtaagccagctaattaaggca

SEQ ID NO: 480072 - DNA, 33 bp, Homo sapien
gaccttgcagaagtaatccagctaattaaggca

SEQ ID NO: 480073 - DNA, 33 bp, Homo sapien
gagaaagtacaaagtcacacgtcgaagaatatg

SEQ ID NO: 480074 - DNA, 33 bp, Homo sapien
gagaaagtacaaagtcgcacgtcgaagaatatg

SEQ ID NO: 480075 - DNA, 33 bp, Homo sapien
tcagaagtgatggcttaaaaatgtggtgctgct

SEQ ID NO: 480076 - DNA, 33 bp, Homo sapien
tcagaagtgatggcttgaaaatgtggtgctgct

SEQ ID NO: 480077 - DNA, 33 bp, Homo sapien
cagcccaaatgctgacaaatcaacgcgtggata

SEQ ID NO: 480078 - DNA, 33 bp, Homo sapien
cagcccaaatgctgacgaatcaacgcgtggata

SEQ ID NO: 480079 - DNA, 33 bp, Homo sapien
ctgtgacaatgagagaagaacatggccatggtt

SEQ ID NO: 480080 - DNA, 33 bp, Homo sapien
ctgtgacaatgagagaggaacatggccatggtt

SEQ ID NO: 480081 - DNA, 33 bp, Homo sapien
tgacaataaggtaagactacacaactcttaggg

SEQ ID NO: 480082 - DNA, 33 bp, Homo sapien
tgacaataaggtaagattacacaactcttaggg

SEQ ID NO: 480083 - DNA, 33 bp, Homo sapien
attaagtaacattacagccttttgtcttggttt

SEQ ID NO: 480084 - DNA, 33 bp, Homo sapien
attaagtaacattacatccttttgtcttggttt

SEQ ID NO: 480085 - DNA, 33 bp, Homo sapien
ggtctctgaatgagcaacaacatcttaatattt

SEQ ID NO: 480086 - DNA, 33 bp, Homo sapien
ggtctctgaatgagcagcaacatcttaatattt

SEQ ID NO: 480087 - DNA, 33 bp, Homo sapien
tcctatgaaagaggaagtctaaaccatatactg

SEQ ID NO: 480088 - DNA, 33 bp, Homo sapien
tcctatgaaagaggaattctaaaccatatactg

SEQ ID NO: 480089 - DNA, 33 bp, Homo sapien
ttaaatcaggtgcctccctctgtctgacacatt

SEQ ID NO: 480090 - DNA, 33 bp, Homo sapien
ttaaatcaggtgcctctctctgtctgacacatt

SEQ ID NO: 480091 - DNA, 33 bp, Homo sapien
attacttgaacttgagacagagtatttaagaaa

SEQ ID NO: 480092 - DNA, 33 bp, Homo sapien
attacttgaacttgagtcagagtatttaagaaa

SEQ ID NO: 480093 - DNA, 33 bp, Homo sapien
agaaaatgtgacatccagctgtctctaaagaaa

SEQ ID NO: 480094 - DNA, 33 bp, Homo sapien
agaaaatgtgacatccggctgtctctaaagaaa

SEQ ID NO: 480095 - DNA, 33 bp, Homo sapien
atcaagcacttggaacagagtctgaaacatagc

SEQ ID NO: 480096 - DNA, 33 bp, Homo sapien
atcaagcacttggaacggagtctgaaacatagc

SEQ ID NO: 480097 - DNA, 33 bp, Homo sapien
ctactacactctacaacctcatataatctacag

SEQ ID NO: 480098 - DNA, 33 bp, Homo sapien
ctactacactctacaatctcatataatctacag

SEQ ID NO: 480099 - DNA, 33 bp, Homo sapien
cagcccacaagcatacaaaaatatgatcaacat

SEQ ID NO: 480100 - DNA, 33 bp, Homo sapien
cagcccacaagcatacgaaaatatgatcaacat

SEQ ID NO: 480101 - DNA, 33 bp, Homo sapien
taggagaaaaccttgaccagatatttcacatga

SEQ ID NO: 480102 - DNA, 33 bp, Homo sapien
taggagaaaaccttgatcagatatttcacatga

SEQ ID NO: 480103 - DNA, 33 bp, Homo sapien
ctataacagaagacctaaagctgggaaatccat

SEQ ID NO: 480104 - DNA, 33 bp, Homo sapien
ctataacagaagacctgaagctgggaaatccat

SEQ ID NO: 480105 - DNA, 33 bp, Homo sapien
ggaggactagagaaaacagtaagattgacttga

SEQ ID NO: 480106 - DNA, 33 bp, Homo sapien
ggaggactagagaaaatagtaagattgacttga

SEQ ID NO: 480107 - DNA, 33 bp, Homo sapien
agaggaacagtttgacaatccttaatgtgcatt

SEQ ID NO: 480108 - DNA, 33 bp, Homo sapien
agaggaacagtttgacgatccttaatgtgcatt

SEQ ID NO: 480109 - DNA, 33 bp, Homo sapien
acatagttatgaacacactgaacgaatacttat

SEQ ID NO: 480110 - DNA, 33 bp, Homo sapien
acatagttatgaacacgctgaacgaatacttat

SEQ ID NO: 480111 - DNA, 33 bp, Homo sapien
tcctgtctcagataccacttggatcccactgac

SEQ ID NO: 480112 - DNA, 33 bp, Homo sapien
tcctgtctcagataccgcttggatcccactgac

SEQ ID NO: 480113 - DNA, 33 bp, Homo sapien
atcactcactctcccagaaataagaccaacttg

SEQ ID NO: 480114 - DNA, 33 bp, Homo sapien
atcactcactctcccataaataagaccaacttg

SEQ ID NO: 480115 - DNA, 33 bp, Homo sapien
ggcaatggtaataatacggtatagtgtttagtg

SEQ ID NO: 480116 - DNA, 33 bp, Homo sapien
ggcaatggtaataatatggtatagtgtttagtg

SEQ ID NO: 480117 - DNA, 33 bp, Homo sapien
gcatcttgtatcaaatcactggtcaatgcagta

SEQ ID NO: 480118 - DNA, 33 bp, Homo sapien
gcatcttgtatcaaatgactggtcaatgcagta

SEQ ID NO: 480119 - DNA, 33 bp, Homo sapien
ttgacattgtgtaagcagagccatctatctgtg

SEQ ID NO: 480120 - DNA, 33 bp, Homo sapien
ttgacattgtgtaagcggagccatctatctgtg

SEQ ID NO: 480121 - DNA, 33 bp, Homo sapien
atgtggcatatagaataatacaaaaagtgggta

SEQ ID NO: 480122 - DNA, 33 bp, Homo sapien
atgtggcatatagaattatacaaaaagtgggta

SEQ ID NO: 480123 - DNA, 33 bp, Homo sapien
gtaatactagacaacactgatgaggatgaatta

SEQ ID NO: 480124 - DNA, 33 bp, Homo sapien
gtaatactagacaacattgatgaggatgaatta

SEQ ID NO: 480125 - DNA, 33 bp, Homo sapien
tagaaggaaaggagaaatctatctcatgcagtt

SEQ ID NO: 480126 - DNA, 33 bp, Homo sapien
tagaaggaaaggagaactctatctcatgcagtt

SEQ ID NO: 480127 - DNA, 33 bp, Homo sapien
gttatcctcttagcaagcataattagttccacc

SEQ ID NO: 480128 - DNA, 33 bp, Homo sapien
gttatcctcttagcaatcataattagttccacc

SEQ ID NO: 480129 - DNA, 33 bp, Homo sapien
ctacatgaaatgaaccaaaattttgacgtaggg

SEQ ID NO: 480130 - DNA, 33 bp, Homo sapien
ctacatgaaatgaaccgaaattttgacgtaggg

SEQ ID NO: 480131 - DNA, 33 bp, Homo sapien
gatagccaatacaggacgatttaggcctaatta

SEQ ID NO: 480132 - DNA, 33 bp, Homo sapien
gatagccaatacaggatgatttaggcctaatta

SEQ ID NO: 480133 - DNA, 33 bp, Homo sapien
agtgctataaatcgtgaatatctgaccacttca

SEQ ID NO: 480134 - DNA, 33 bp, Homo sapien
agtgctataaatcgtggatatctgaccacttca

SEQ ID NO: 480135 - DNA, 33 bp, Homo sapien
tgaccaaagttgaaatcacaaccatcaaaacct

SEQ ID NO: 480136 - DNA, 33 bp, Homo sapien
tgaccaaagttgaaatgacaaccatcaaaacct

SEQ ID NO: 480137 - DNA, 33 bp, Homo sapien
gcatattacttcagaactgtgcttaacctttct

SEQ ID NO: 480138 - DNA, 33 bp, Homo sapien
gcatattacttcagaattgtgcttaacctttct

SEQ ID NO: 480139 - DNA, 33 bp, Homo sapien
ctattgcaatagactccaggcaaaagataacaa

SEQ ID NO: 480140 - DNA, 33 bp, Homo sapien
ctattgcaatagactctaggcaaaagataacaa

SEQ ID NO: 480141 - DNA, 33 bp, Homo sapien
caaattttctgctataaaagtttcatagactcc

SEQ ID NO: 480142 - DNA, 33 bp, Homo sapien
caaattttctgctatacaagtttcatagactcc

SEQ ID NO: 480143 - DNA, 33 bp, Homo sapien
attactctactataaacacatgcaaacatatgt

SEQ ID NO: 480144 - DNA, 33 bp, Homo sapien
attactctactataaagacatgcaaacatatgt

SEQ ID NO: 480145 - DNA, 33 bp, Homo sapien
acatgcaatgagtaaaaaatgtcactttccaac

SEQ ID NO: 480146 - DNA, 33 bp, Homo sapien
acatgcaatgagtaaagaatgtcactttccaac

SEQ ID NO: 480147 - DNA, 33 bp, Homo sapien
ttgatcctcttcgaaacatgatttataacctgc

SEQ ID NO: 480148 - DNA, 33 bp, Homo sapien
ttgatcctcttcgaaatatgatttataacctgc

SEQ ID NO: 480149 - DNA, 33 bp, Homo sapien
aaaataacaaccttaactgtgattgatagcata

SEQ ID NO: 480150 - DNA, 33 bp, Homo sapien
aaaataacaaccttaattgtgattgatagcata

SEQ ID NO: 480151 - DNA, 33 bp, Homo sapien
ttccctccctgatggaagaactcatttgcataa

SEQ ID NO: 480152 - DNA, 33 bp, Homo sapien
ttccctccctgatggatgaactcatttgcataa

SEQ ID NO: 480153 - DNA, 33 bp, Homo sapien; identical to SEQ ID NO: 480151

SEQ ID NO: 480154 - DNA, 33 bp, Homo sapien; identical to SEQ ID NO: 480152

SEQ ID NO: 480155 - DNA, 33 bp, Homo sapien
ggacttcctgtaagccactgagaaaataatctg

SEQ ID NO: 480156 - DNA, 33 bp, Homo sapien
ggacttcctgtaagcccctgagaaaataatctg

SEQ ID NO: 480157 - DNA, 33 bp, Homo sapien
ggggctaacaacagggaaaaagagggtaagcaa

SEQ ID NO: 480158 - DNA, 33 bp, Homo sapien
ggggctaacaacaggggaaaagagggtaagcaa

SEQ ID NO: 480159 - DNA, 33 bp, Homo sapien
agtgaataaccagaaaatgaattgttggatcat

SEQ ID NO: 480160 - DNA, 33 bp, Homo sapien
agtgaataaccagaaactgaattgttggatcat

SEQ ID NO: 480161 - DNA, 33 bp, Homo sapien
ctctcccaggcactacaactctctactagcaga

SEQ ID NO: 480162 - DNA, 33 bp, Homo sapien
ctctcccaggcactacgactctctactagcaga

SEQ ID NO: 480163 - DNA, 33 bp, Homo sapien
ttttacatatatgacacaaacggtagctcataa

SEQ ID NO: 480164 - DNA, 33 bp, Homo sapien
ttttacatatatgacataaacggtagctcataa

SEQ ID NO: 480165 - DNA, 33 bp, Homo sapien
ttattaaaagccacataagaaatttttcctttc

SEQ ID NO: 480166 - DNA, 33 bp, Homo sapien
ttattaaaagccacatgagaaatttttcctttc

SEQ ID NO: 480167 - DNA, 33 bp, Homo sapien
ggaatacatactgcaaggaattttataagcaaa

SEQ ID NO: 480168 - DNA, 33 bp, Homo sapien
ggaatacatactgcaatgaattttataagcaaa

SEQ ID NO: 480169 - DNA, 33 bp, Homo sapien
tatctcaaaggtgcaactgaagatcatcgtgga

SEQ ID NO: 480170 - DNA, 33 bp, Homo sapien
tatctcaaaggtgcaattgaagatcatcgtgga

SEQ ID NO: 480171 - DNA, 33 bp, Homo sapien
taaaaatggaagtataaatatggctttgaccta

SEQ ID NO: 480172 - DNA, 33 bp, Homo sapien
taaaaatggaagtatagatatggctttgaccta

SEQ ID NO: 480173 - DNA, 33 bp, Homo sapien
tcctacaccctgaggaacaggtacctgagaata

SEQ ID NO: 480174 - DNA, 33 bp, Homo sapien
tcctacaccctgaggagcaggtacctgagaata

SEQ ID NO: 480175 - DNA, 33 bp, Homo sapien
acacgtaaactcgaaacggcagcatagagaagg

SEQ ID NO: 480176 - DNA, 33 bp, Homo sapien
acacgtaaactcgaaatggcagcatagagaagg

SEQ ID NO: 480177 - DNA, 33 bp, Homo sapien
atgcttgcttagatgacgttctgggtatttctt

SEQ ID NO: 480178 - DNA, 33 bp, Homo sapien
atgcttgcttagatgatgttctgggtatttctt

SEQ ID NO: 480179 - DNA, 33 bp, Homo sapien
agcatgaaataagcaactctgcaattctaattg

SEQ ID NO: 480180 - DNA, 33 bp, Homo sapien
agcatgaaataagcaagtctgcaattctaattg

SEQ ID NO: 480181 - DNA, 33 bp, Homo sapien
attcaaaatttaaaacgatctatcatcccacag

SEQ ID NO: 480182 - DNA, 33 bp, Homo sapien
attcaaaatttaaaactatctatcatcccacag

SEQ ID NO: 480183 - DNA, 33 bp, Homo sapien
ttggtacaacagtgaacctggtatcagaatatt

SEQ ID NO: 480184 - DNA, 33 bp, Homo sapien
ttggtacaacagtgaatctggtatcagaatatt

SEQ ID NO: 480185 - DNA, 33 bp, Homo sapien
gatttcaacttagtcaaggtagcctctgtgaat

SEQ ID NO: 480186 - DNA, 33 bp, Homo sapien
gatttcaacttagtcagggtagcctctgtgaat

SEQ ID NO: 480187 - DNA, 33 bp, Homo sapien
gaaagtaacatgagacagtaaagggccatcaaa

SEQ ID NO: 480188 - DNA, 33 bp, Homo sapien
gaaagtaacatgagacggtaaagggccatcaaa

SEQ ID NO: 480189 - DNA, 33 bp, Homo sapien
gtgatggttaaaaaacgcaggacaattaggaga

SEQ ID NO: 480190 - DNA, 33 bp, Homo sapien
gtgatggttaaaaaactcaggacaattaggaga

SEQ ID NO: 480191 - DNA, 33 bp, Homo sapien
cgtggtgagaaaggtcacatatatttcatatac

SEQ ID NO: 480192 - DNA, 33 bp, Homo sapien
cgtggtgagaaaggtctcatatatttcatatac

SEQ ID NO: 480193 - DNA, 33 bp, Homo sapien
aatggtttcagattcacggaaacgtggtgagaa

SEQ ID NO: 480194 - DNA, 33 bp, Homo sapien
aatggtttcagattcatggaaacgtggtgagaa

SEQ ID NO: 480195 - DNA, 33 bp, Homo sapien
tcatgggtagaggagacagtgagatcaaagtta

SEQ ID NO: 480196 - DNA, 33 bp, Homo sapien
tcatgggtagaggagagagtgagatcaaagtta

SEQ ID NO: 480197 - DNA, 33 bp, Homo sapien
acaattctctcaagtaaaggacagccttcctct

SEQ ID NO: 480198 - DNA, 33 bp, Homo sapien
acaattctctcaagtagaggacagccttcctct

SEQ ID NO: 480199 - DNA, 33 bp, Homo sapien
gttttcaactgtgctacggatcctcaggggaag

SEQ ID NO: 480200 - DNA, 33 bp, Homo sapien
gttttcaactgtgctatggatcctcaggggaag

SEQ ID NO: 480201 - DNA, 33 bp, Homo sapien
ctggagcaccagctcaactcctcttctcttttt

SEQ ID NO: 480202 - DNA, 33 bp, Homo sapien
ctggagcaccagctcagctcctcttctcttttt

SEQ ID NO: 480203 - DNA, 33 bp, Homo sapien
ccaaggtcagaagtaacctcagagggtggccag

SEQ ID NO: 480204 - DNA, 33 bp, Homo sapien
ccaaggtcagaagtaatctcagagggtggccag

SEQ ID NO: 480205 - DNA, 33 bp, Homo sapien
cgttggcatgactccagaatctgatgtttctct

SEQ ID NO: 480206 - DNA, 33 bp, Homo sapien
cgttggcatgactccataatctgatgtttctct

SEQ ID NO: 480207 - DNA, 33 bp, Homo sapien
atatggtaagtgaatacggcaattctgcatggg

SEQ ID NO: 480208 - DNA, 33 bp, Homo sapien
atatggtaagtgaatatggcaattctgcatggg

SEQ ID NO: 480209 - DNA, 33 bp, Homo sapien
gtggggacagaggagacgaaaactgcgggagtt

SEQ ID NO: 480210 - DNA, 33 bp, Homo sapien
gtggggacagaggagatgaaaactgcgggagtt

SEQ ID NO: 480211 - DNA, 33 bp, Homo sapien
tctggcctaggggaacacaatctgattcagcaa

SEQ ID NO: 480212 - DNA, 33 bp, Homo sapien
tctggcctaggggaacgcaatctgattcagcaa

SEQ ID NO: 480213 - DNA, 33 bp, Homo sapien
tatctacttatctatcacaccttagttctgttc

SEQ ID NO: 480214 - DNA, 33 bp, Homo sapien
tatctacttatctatcgcaccttagttctgttc

SEQ ID NO: 480215 - DNA, 33 bp, Homo sapien
ttagcaaatacaaagcaagcaggagtttaaaaa

SEQ ID NO: 480216 - DNA, 33 bp, Homo sapien
ttagcaaatacaaagcgagcaggagtttaaaaa

SEQ ID NO: 480217 - DNA, 33 bp, Homo sapien
accactatctaagaaaagatcacctaggggagg

SEQ ID NO: 480218 - DNA, 33 bp, Homo sapien
accactatctaagaaaggatcacctaggggagg

SEQ ID NO: 480219 - DNA, 33 bp, Homo sapien
accgtttgatgtttcaatatccaatccttcctg

SEQ ID NO: 480220 - DNA, 33 bp, Homo sapien
accgtttgatgtttcagtatccaatccttcctg

SEQ ID NO: 480221 - DNA, 33 bp, Homo sapien
gccaactattgtcaagaaatacattaggtgtta

SEQ ID NO: 480222 - DNA, 33 bp, Homo sapien
gccaactattgtcaagcaatacattaggtgtta

SEQ ID NO: 480223 - DNA, 33 bp, Homo sapien
ttagctatagcaaaaacggggttgtagcctaaa

SEQ ID NO: 480224 - DNA, 33 bp, Homo sapien
ttagctatagcaaaaatggggttgtagcctaaa

SEQ ID NO: 480225 - DNA, 33 bp, Homo sapien
aacaattgctaagtgacagatctattcttggtg

SEQ ID NO: 480226 - DNA, 33 bp, Homo sapien
aacaattgctaagtgagagatctattcttggtg

SEQ ID NO: 480227 - DNA, 33 bp, Homo sapien
tatatgtatgcaaaaagattgtgtcgtacccct

SEQ ID NO: 480228 - DNA, 33 bp, Homo sapien
tatatgtatgcaaaaatattgtgtcgtacccct

SEQ ID NO: 480229 - DNA, 33 bp, Homo sapien
tgtgtatggtaagagcacctaaaatctttctta

SEQ ID NO: 480230 - DNA, 33 bp, Homo sapien
tgtgtatggtaagagcgcctaaaatctttctta

SEQ ID NO: 480231 - DNA, 33 bp, Homo sapien
ttttttgctatgtctaacttttgaatgtataaa

SEQ ID NO: 480232 - DNA, 33 bp, Homo sapien
ttttttgctatgtctatcttttgaatgtataaa

SEQ ID NO: 480233 - DNA, 33 bp, Homo sapien
taggttaccaacatgacagttactgataaagaa

SEQ ID NO: 480234 - DNA, 33 bp, Homo sapien
taggttaccaacatgatagttactgataaagaa

SEQ ID NO: 480235 - DNA, 33 bp, Homo sapien
tctgggtgatgcttaccacctctaatatttttc

SEQ ID NO: 480236 - DNA, 33 bp, Homo sapien
tctgggtgatgcttactacctctaatatttttc

SEQ ID NO: 480237 - DNA, 33 bp, Homo sapien
gagatttgcagatccaataggctaaatgaacac

SEQ ID NO: 480238 - DNA, 33 bp, Homo sapien
gagatttgcagatccagtaggctaaatgaacac

SEQ ID NO: 480239 - DNA, 33 bp, Homo sapien
tatggagaacacgtaacagtagaacatctttct

SEQ ID NO: 480240 - DNA, 33 bp, Homo sapien
tatggagaacacgtaagagtagaacatctttct

SEQ ID NO: 480241 - DNA, 33 bp, Homo sapien
gaaattatggatcctcagaaaagaatgagaaac

SEQ ID NO: 480242 - DNA, 33 bp, Homo sapien
gaaattatggatcctcggaaaagaatgagaaac

SEQ ID NO: 480243 - DNA, 33 bp, Homo sapien
ttagtgcaaaatactaagtgtttgtctatttgc

SEQ ID NO: 480244 - DNA, 33 bp, Homo sapien
ttagtgcaaaatactatgtgtttgtctatttgc

SEQ ID NO: 480245 - DNA, 33 bp, Homo sapien
ataaaaatagatacccacatatgaaagttgact

SEQ ID NO: 480246 - DNA, 33 bp, Homo sapien
ataaaaatagatacccgcatatgaaagttgact

SEQ ID NO: 480247 - DNA, 33 bp, Homo sapien
aacaatactgttgctccaacagcaatatttgca

SEQ ID NO: 480248 - DNA, 33 bp, Homo sapien
aacaatactgttgctctaacagcaatatttgca

SEQ ID NO: 480249 - DNA, 33 bp, Homo sapien
gacaaatagtcaaggaagaatcagcattctgtc

SEQ ID NO: 480250 - DNA, 33 bp, Homo sapien
gacaaatagtcaaggaggaatcagcattctgtc

SEQ ID NO: 480251 - DNA, 33 bp, Homo sapien
agaatgattagtggaacagaagaaaattgtcag

SEQ ID NO: 480252 - DNA, 33 bp, Homo sapien
agaatgattagtggaagagaagaaaattgtcag

SEQ ID NO: 480253 - DNA, 33 bp, Homo sapien
ttacttattttggtaaagtcacctaatttggga

SEQ ID NO: 480254 - DNA, 33 bp, Homo sapien
ttacttattttggtaaggtcacctaatttggga

SEQ ID NO: 480255 - DNA, 33 bp, Homo sapien
ggcacgagtcaagatacgtgtttcagaaatgta

SEQ ID NO: 480256 - DNA, 33 bp, Homo sapien
ggcacgagtcaagatatgtgtttcagaaatgta

SEQ ID NO: 480257 - DNA, 33 bp, Homo sapien
ccaataactgataacacagatttcattgtgata

SEQ ID NO: 480258 - DNA, 33 bp, Homo sapien
ccaataactgataacatagatttcattgtgata

SEQ ID NO: 480259 - DNA, 33 bp, Homo sapien
atgtaagatgtgagtaacagagggcacagatgt

SEQ ID NO: 480260 - DNA, 33 bp, Homo sapien
atgtaagatgtgagtagcagagggcacagatgt

SEQ ID NO: 480261 - DNA, 33 bp, Homo sapien
agtatggcacactttacaggagatttaagagag

SEQ ID NO: 480262 - DNA, 33 bp, Homo sapien
agtatggcacactttataggagatttaagagag

SEQ ID NO: 480263 - DNA, 33 bp, Homo sapien
catctggaaaatggtaataataactcagaggag

SEQ ID NO: 480264 - DNA, 33 bp, Homo sapien
catctggaaaatggtagtaataactcagaggag

SEQ ID NO: 480265 - DNA, 33 bp, Homo sapien
gacagtactgaacccaatggccaccaatcaaaa

SEQ ID NO: 480266 - DNA, 33 bp, Homo sapien
gacagtactgaacccagtggccaccaatcaaaa

SEQ ID NO: 480267 - DNA, 33 bp, Homo sapien
atgtcattcacccacaaatgtattgccttttcc

SEQ ID NO: 480268 - DNA, 33 bp, Homo sapien
atgtcattcacccacagatgtattgccttttcc

SEQ ID NO: 480269 - DNA, 33 bp, Homo sapien
taagtgggagattacactgaacacacatggacg

SEQ ID NO: 480270 - DNA, 33 bp, Homo sapien
taagtgggagattacattgaacacacatggacg

SEQ ID NO: 480271 - DNA, 33 bp, Homo sapien
tgtccactgaattatacattttaaagcagagtg

SEQ ID NO: 480272 - DNA, 33 bp, Homo sapien
tgtccactgaattatatattttaaagcagagtg

SEQ ID NO: 480273 - DNA, 33 bp, Homo sapien
ctgaagatacatggaaaaaaattcagtaaatac

SEQ ID NO: 480274 - DNA, 33 bp, Homo sapien
ctgaagatacatggaagaaaattcagtaaatac

SEQ ID NO: 480275 - DNA, 33 bp, Homo sapien
ctgctaggtatataacaaaaagatgagaaatta

SEQ ID NO: 480276 - DNA, 33 bp, Homo sapien
ctgctaggtatataaccaaaagatgagaaatta

SEQ ID NO: 480277 - DNA, 33 bp, Homo sapien
gacctgctatgcttccaaataaactctcttttt

SEQ ID NO: 480278 - DNA, 33 bp, Homo sapien
gacctgctatgcttcccaataaactctcttttt

SEQ ID NO: 480279 - DNA, 33 bp, Homo sapien
aacagcctatccacacggtcattaacctctttt

SEQ ID NO: 480280 - DNA, 33 bp, Homo sapien
aacagcctatccacactgtcattaacctctttt

SEQ ID NO: 480281 - DNA, 33 bp, Homo sapien
aactagaagaagataaagaagtcttggcagttg

SEQ ID NO: 480282 - DNA, 33 bp, Homo sapien
aactagaagaagataaggaagtcttggcagttg

SEQ ID NO: 480283 - DNA, 33 bp, Homo sapien
gaaagagaagttggagaaatactatgctaaaga

SEQ ID NO: 480284 - DNA, 33 bp, Homo sapien
gaaagagaagttggaggaatactatgctaaaga

SEQ ID NO: 480285 - DNA, 33 bp, Homo sapien
gacggagtttgaagaaagataagtgtatcacaa

SEQ ID NO: 480286 - DNA, 33 bp, Homo sapien
gacggagtttgaagaacgataagtgtatcacaa

SEQ ID NO: 480287 - DNA, 33 bp, Homo sapien
caattattgtgtaatacaatcatttgccaacag

SEQ ID NO: 480288 - DNA, 33 bp, Homo sapien
caattattgtgtaatataatcatttgccaacag

SEQ ID NO: 480289 - DNA, 33 bp, Homo sapien
agaaaatgtaacagaaacaactgcaaggtttaa

SEQ ID NO: 480290 - DNA, 33 bp, Homo sapien
agaaaatgtaacagaagcaactgcaaggtttaa

SEQ ID NO: 480291 - DNA, 33 bp, Homo sapien
aatgttcaatattgcactgaacacaattaaaaa

SEQ ID NO: 480292 - DNA, 33 bp, Homo sapien
aatgttcaatattgcagtgaacacaattaaaaa

SEQ ID NO: 480293 - DNA, 33 bp, Homo sapien
tctacagctccagctcccagcgtgagagatgca

SEQ ID NO: 480294 - DNA, 33 bp, Homo sapien
tctacagctccagctcgcagcgtgagagatgca

SEQ ID NO: 480295 - DNA, 33 bp, Homo sapien
ctcaggattctctgttcaaactcatattattgg

SEQ ID NO: 480296 - DNA, 33 bp, Homo sapien
ctcaggattctctgttgaaactcatattattgg

SEQ ID NO: 480297 - DNA, 33 bp, Homo sapien
atagggatgtgagaaacatatgcaaccattcca

SEQ ID NO: 480298 - DNA, 33 bp, Homo sapien
atagggatgtgagaaatatatgcaaccattcca

SEQ ID NO: 480299 - DNA, 33 bp, Homo sapien
aagaaatgcctcactaacatatatgtccttaaa

SEQ ID NO: 480300 - DNA, 33 bp, Homo sapien
aagaaatgcctcactatcatatatgtccttaaa

SEQ ID NO: 480301 - DNA, 33 bp, Homo sapien
accctagcatgtaaaactgcctttcaaagaaat

SEQ ID NO: 480302 - DNA, 33 bp, Homo sapien
accctagcatgtaaaattgcctttcaaagaaat

SEQ ID NO: 480303 - DNA, 33 bp, Homo sapien
ggtcagcccagattcaagtagaagtgtcctacc

SEQ ID NO: 480304 - DNA, 33 bp, Homo sapien
ggtcagcccagattcaggtagaagtgtcctacc

SEQ ID NO: 480305 - DNA, 33 bp, Homo sapien
atgtctgaggatttaaagttggggagataacct

SEQ ID NO: 480306 - DNA, 33 bp, Homo sapien
atgtctgaggatttaacgttggggagataacct

SEQ ID NO: 480307 - DNA, 33 bp, Homo sapien
agttcgtaacattgcactctaaatcctcctgga

SEQ ID NO: 480308 - DNA, 33 bp, Homo sapien
agttcgtaacattgcattctaaatcctcctgga

SEQ ID NO: 480309 - DNA, 33 bp, Homo sapien
tacactcttgaggcgaatatgttccacgtgcga

SEQ ID NO: 480310 - DNA, 33 bp, Homo sapien
tacactcttgaggcgagtatgttccacgtgcga

SEQ ID NO: 480311 - DNA, 33 bp, Homo sapien
tgccttcctggcagccaagcaggctattcagta

SEQ ID NO: 480312 - DNA, 33 bp, Homo sapien
tgccttcctggcagccgagcaggctattcagta

SEQ ID NO: 480313 - DNA, 33 bp, Homo sapien
acctgtgctccaaactcactgagtcatctggat

SEQ ID NO: 480314 - DNA, 33 bp, Homo sapien
acctgtgctccaaacttactgagtcatctggat

SEQ ID NO: 480315 - DNA, 33 bp, Homo sapien
tggttacataatgagcagagttgcacacctgtg

SEQ ID NO: 480316 - DNA, 33 bp, Homo sapien
tggttacataatgagcggagttgcacacctgtg

SEQ ID NO: 480317 - DNA, 33 bp, Homo sapien
cctatatttcttgcaccgtgaaattgtcactgt

SEQ ID NO: 480318 - DNA, 33 bp, Homo sapien
cctatatttcttgcactgtgaaattgtcactgt

SEQ ID NO: 480319 - DNA, 33 bp, Homo sapien
gcttagacctgaacaacgtcactgctgtgtttt

SEQ ID NO: 480320 - DNA, 33 bp, Homo sapien
gcttagacctgaacaatgtcactgctgtgtttt

SEQ ID NO: 480321 - DNA, 33 bp, Homo sapien
aagagagttatccaaaacagaggacattcctgg

SEQ ID NO: 480322 - DNA, 33 bp, Homo sapien
aagagagttatccaaagcagaggacattcctgg

SEQ ID NO: 480323 - DNA, 33 bp, Homo sapien
acccacccagaataagaaaagagctgcaaatat

SEQ ID NO: 480324 - DNA, 33 bp, Homo sapien
acccacccagaataagcaaagagctgcaaatat

SEQ ID NO: 480325 - DNA, 33 bp, Homo sapien
gttgctgtttcagaaaggaaccaagagaattta

SEQ ID NO: 480326 - DNA, 33 bp, Homo sapien
gttgctgtttcagaaatgaaccaagagaattta

SEQ ID NO: 480327 - DNA, 33 bp, Homo sapien
taagagctttcgacagcatcagacaacctctag

SEQ ID NO: 480328 - DNA, 33 bp, Homo sapien
taagagctttcgacaggatcagacaacctctag

SEQ ID NO: 480329 - DNA, 33 bp, Homo sapien
acaacactttccttaccagatacatatcctgta

SEQ ID NO: 480330 - DNA, 33 bp, Homo sapien
acaacactttccttactagatacatatcctgta

SEQ ID NO: 480331 - DNA, 33 bp, Homo sapien
gatttgtacttcaagaaccttatagccacttga

SEQ ID NO: 480332 - DNA, 33 bp, Homo sapien
gatttgtacttcaagacccttatagccacttga

SEQ ID NO: 480333 - DNA, 33 bp, Homo sapien
acataatagggtgttaaggcacttctacttgta

SEQ ID NO: 480334 - DNA, 33 bp, Homo sapien
acataatagggtgttacggcacttctacttgta

SEQ ID NO: 480335 - DNA, 33 bp, Homo sapien
gagataaaagaaaaaaaatggatcaatctagac

SEQ ID NO: 480336 - DNA, 33 bp, Homo sapien
gagataaaagaaaaaagatggatcaatctagac

SEQ ID NO: 480337 - DNA, 33 bp, Homo sapien
tacatcttaatcactacgtagcctctggagaaa

SEQ ID NO: 480338 - DNA, 33 bp, Homo sapien
tacatcttaatcactatgtagcctctggagaaa

SEQ ID NO: 480339 - DNA, 33 bp, Homo sapien
aggaatgttgttgaaaagttgatttattacagt

SEQ ID NO: 480340 - DNA, 33 bp, Homo sapien
aggaatgttgttgaaacgttgatttattacagt

SEQ ID NO: 480341 - DNA, 33 bp, Homo sapien
tcaattgctaacatcaatcacaatcattacaaa

SEQ ID NO: 480342 - DNA, 33 bp, Homo sapien
tcaattgctaacatcagtcacaatcattacaaa

SEQ ID NO: 480343 - DNA, 33 bp, Homo sapien
cttggaatgatgaaagaaactctgaacaattat

SEQ ID NO: 480344 - DNA, 33 bp, Homo sapien
cttggaatgatgaaaggaactctgaacaattat

SEQ ID NO: 480345 - DNA, 33 bp, Homo sapien
tctgacacagcgatacccttgcctttatttttc

SEQ ID NO: 480346 - DNA, 33 bp, Homo sapien
tctgacacagcgatactcttgcctttatttttc

SEQ ID NO: 480347 - DNA, 33 bp, Homo sapien
cagtttactcaagggcactgttaaaaatgctta

SEQ ID NO: 480348 - DNA, 33 bp, Homo sapien
cagtttactcaagggcgctgttaaaaatgctta

SEQ ID NO: 480349 - DNA, 33 bp, Homo sapien
attgggccaaatacccaaaaagacccttcacta

SEQ ID NO: 480350 - DNA, 33 bp, Homo sapien
attgggccaaataccctaaaagacccttcacta

SEQ ID NO: 480351 - DNA, 33 bp, Homo sapien
ttctgctatagtttaactctctgtatgctacag

SEQ ID NO: 480352 - DNA, 33 bp, Homo sapien
ttctgctatagtttaagtctctgtatgctacag

SEQ ID NO: 480353 - DNA, 33 bp, Homo sapien
caaattctgtttctcaaattagtttaggtgata

SEQ ID NO: 480354 - DNA, 33 bp, Homo sapien
caaattctgtttctcagattagtttaggtgata

SEQ ID NO: 480355 - DNA, 33 bp, Homo sapien
attttgtagatcaagcagaatagttcaaactgt

SEQ ID NO: 480356 - DNA, 33 bp, Homo sapien
attttgtagatcaagcggaatagttcaaactgt

SEQ ID NO: 480357 - DNA, 33 bp, Homo sapien
aagtggagtagcacaaacaagaacaaatgaaat

SEQ ID NO: 480358 - DNA, 33 bp, Homo sapien
aagtggagtagcacaatcaagaacaaatgaaat

SEQ ID NO: 480359 - DNA, 33 bp, Homo sapien
aacagtctaacttaaagttgccctttgtgaaaa

SEQ ID NO: 480360 - DNA, 33 bp, Homo sapien
aacagtctaacttaaatttgccctttgtgaaaa

SEQ ID NO: 480361 - DNA, 33 bp, Homo sapien
ttcagtgctgactcacaattttcccctgccttg

SEQ ID NO: 480362 - DNA, 33 bp, Homo sapien
ttcagtgctgactcacgattttcccctgccttg

SEQ ID NO: 480363 - DNA, 33 bp, Homo sapien
agcaactgagaccaaacgggaacactttcttaa

SEQ ID NO: 480364 - DNA, 33 bp, Homo sapien
agcaactgagaccaaatgggaacactttcttaa

SEQ ID NO: 480365 - DNA, 33 bp, Homo sapien
atctacttgatgagacagactatacattcccat

SEQ ID NO: 480366 - DNA, 33 bp, Homo sapien
atctacttgatgagaccgactatacattcccat

SEQ ID NO: 480367 - DNA, 33 bp, Homo sapien
caagctatggtctacacagtgagttagagttaa

SEQ ID NO: 480368 - DNA, 33 bp, Homo sapien
caagctatggtctacagagtgagttagagttaa

SEQ ID NO: 480369 - DNA, 33 bp, Homo sapien
ggcaccagaactttgacacaaactcctagaact

SEQ ID NO: 480370 - DNA, 33 bp, Homo sapien
ggcaccagaactttgagacaaactcctagaact

SEQ ID NO: 480371 - DNA, 33 bp, Homo sapien
catctgccattcttagaaaagttgctaacaggc

SEQ ID NO: 480372 - DNA, 33 bp, Homo sapien
catctgccattcttaggaaagttgctaacaggc

SEQ ID NO: 480373 - DNA, 33 bp, Homo sapien
ctacatataggattgacgtgaaggtaatgcaat

SEQ ID NO: 480374 - DNA, 33 bp, Homo sapien
ctacatataggattgatgtgaaggtaatgcaat

SEQ ID NO: 480375 - DNA, 33 bp, Homo sapien
acagacactaatatccactttcatagtgcctat

SEQ ID NO: 480376 - DNA, 33 bp, Homo sapien
acagacactaatatccgctttcatagtgcctat

SEQ ID NO: 480377 - DNA, 33 bp, Homo sapien
tttcttaacaccttcaaaatcaaagttagaaat

SEQ ID NO: 480378 - DNA, 33 bp, Homo sapien
tttcttaacaccttcagaatcaaagttagaaat

SEQ ID NO: 480379 - DNA, 33 bp, Homo sapien
aagttttaccaagagacgtccaagtggtcactt

SEQ ID NO: 480380 - DNA, 33 bp, Homo sapien
aagttttaccaagagatgtccaagtggtcactt

SEQ ID NO: 480381 - DNA, 33 bp, Homo sapien
aaaggttcttgggatcaaggtgtgtaatatgtg

SEQ ID NO: 480382 - DNA, 33 bp, Homo sapien
aaaggttcttgggatcgaggtgtgtaatatgtg

SEQ ID NO: 480383 - DNA, 33 bp, Homo sapien
actatcaacacacatagatatcctctatattca

SEQ ID NO: 480384 - DNA, 33 bp, Homo sapien
actatcaacacacatatatatcctctatattca

SEQ ID NO: 480385 - DNA, 33 bp, Homo sapien
actccatatgtaaaaactgtcaggatgctaata

SEQ ID NO: 480386 - DNA, 33 bp, Homo sapien
actccatatgtaaaaattgtcaggatgctaata

SEQ ID NO: 480387 - DNA, 33 bp, Homo sapien
tgaaagctactgaaaacgggctattcatgaagt

SEQ ID NO: 480388 - DNA, 33 bp, Homo sapien
tgaaagctactgaaaatgggctattcatgaagt

SEQ ID NO: 480389 - DNA, 33 bp, Homo sapien
ttttgcaaaaatatacagcctgtagcactatag

SEQ ID NO: 480390 - DNA, 33 bp, Homo sapien
ttttgcaaaaatatacggcctgtagcactatag

SEQ ID NO: 480391 - DNA, 33 bp, Homo sapien
ccaaagtaaaagtttccatatttcattgcaatc

SEQ ID NO: 480392 - DNA, 33 bp, Homo sapien
ccaaagtaaaagtttctatatttcattgcaatc

SEQ ID NO: 480393 - DNA, 33 bp, Homo sapien
aaacattgaatttcctcaaaaaccaactttagt

SEQ ID NO: 480394 - DNA, 33 bp, Homo sapien
aaacattgaatttcctgaaaaaccaactttagt

SEQ ID NO: 480395 - DNA, 33 bp, Homo sapien
atatatagatgggaaccgtaataattactgggt

SEQ ID NO: 480396 - DNA, 33 bp, Homo sapien
atatatagatgggaactgtaataattactgggt

SEQ ID NO: 480397 - DNA, 33 bp, Homo sapien
tataaaataggtgaaacagtttcagttctgttg

SEQ ID NO: 480398 - DNA, 33 bp, Homo sapien
tataaaataggtgaaatagtttcagttctgttg

SEQ ID NO: 480399 - DNA, 33 bp, Homo sapien
tgtttaaagtgactgacaacagcttaatatgtc

SEQ ID NO: 480400 - DNA, 33 bp, Homo sapien
tgtttaaagtgactgataacagcttaatatgtc

SEQ ID NO: 480401 - DNA, 33 bp, Homo sapien
tggcacagaaaagctgaaggtgtgctaattaga

SEQ ID NO: 480402 - DNA, 33 bp, Homo sapien
tggcacagaaaagctggaggtgtgctaattaga

SEQ ID NO: 480403 - DNA, 33 bp, Homo sapien
aagtagctgtgaaaatcaggtcagctaacctat

SEQ ID NO: 480404 - DNA, 33 bp, Homo sapien
aagtagctgtgaaaattaggtcagctaacctat

SEQ ID NO: 480405 - DNA, 33 bp, Homo sapien
cccccatgcttctagaactcactcacaaatgat

SEQ ID NO: 480406 - DNA, 33 bp, Homo sapien
cccccatgcttctagacctcactcacaaatgat

SEQ ID NO: 480407 - DNA, 33 bp, Homo sapien
tcaacaggaactctaacatcacacatttaatct

SEQ ID NO: 480408 - DNA, 33 bp, Homo sapien
tcaacaggaactctaagatcacacatttaatct

SEQ ID NO: 480409 - DNA, 33 bp, Homo sapien
cttaaatacttagggcaaaaatcagaacgttca

SEQ ID NO: 480410 - DNA, 33 bp, Homo sapien
cttaaatacttagggcgaaaatcagaacgttca

SEQ ID NO: 480411 - DNA, 33 bp, Homo sapien
tttgtttgttgagacactcattttctctcactg

SEQ ID NO: 480412 - DNA, 33 bp, Homo sapien
tttgtttgttgagacagtcattttctctcactg

SEQ ID NO: 480413 - DNA, 33 bp, Homo sapien
agggcactctacttcacacagtttatggattca

SEQ ID NO: 480414 - DNA, 33 bp, Homo sapien
agggcactctacttcatacagtttatggattca

SEQ ID NO: 480415 - DNA, 33 bp, Homo sapien
taacaaactcctgatacactcattacctagatt

SEQ ID NO: 480416 - DNA, 33 bp, Homo sapien
taacaaactcctgatatactcattacctagatt

SEQ ID NO: 480417 - DNA, 33 bp, Homo sapien
tcctagctctctcaggaacgcattgcaaagcaa

SEQ ID NO: 480418 - DNA, 33 bp, Homo sapien
tcctagctctctcaggtacgcattgcaaagcaa

SEQ ID NO: 480419 - DNA, 33 bp, Homo sapien
tcagttctataaaatcacagctaatatcacaca

SEQ ID NO: 480420 - DNA, 33 bp, Homo sapien
tcagttctataaaatcgcagctaatatcacaca

SEQ ID NO: 480421 - DNA, 33 bp, Homo sapien
tgtccttattaagcccaaaccacagattacttg

SEQ ID NO: 480422 - DNA, 33 bp, Homo sapien
tgtccttattaagcccgaaccacagattacttg

SEQ ID NO: 480423 - DNA, 33 bp, Homo sapien
catttagtaaataaagcaagtcatagcctagtt

SEQ ID NO: 480424 - DNA, 33 bp, Homo sapien
catttagtaaataaaggaagtcatagcctagtt

SEQ ID NO: 480425 - DNA, 33 bp, Homo sapien
ttatcatacctctaaaagaaaggagattgactc

SEQ ID NO: 480426 - DNA, 33 bp, Homo sapien
ttatcatacctctaaatgaaaggagattgactc

SEQ ID NO: 480427 - DNA, 33 bp, Homo sapien
caggagtataaatcacactaacaacaatgtggc

SEQ ID NO: 480428 - DNA, 33 bp, Homo sapien
caggagtataaatcactctaacaacaatgtggc

SEQ ID NO: 480429 - DNA, 33 bp, Homo sapien
ctttgaggttgaggaaatctttgaggaagggag

SEQ ID NO: 480430 - DNA, 33 bp, Homo sapien
ctttgaggttgaggaagtctttgaggaagggag

SEQ ID NO: 480431 - DNA, 33 bp, Homo sapien
gactgagaataagagacacctcaaaaatcaatt

SEQ ID NO: 480432 - DNA, 33 bp, Homo sapien
gactgagaataagagatacctcaaaaatcaatt

SEQ ID NO: 480433 - DNA, 33 bp, Homo sapien
tttaatgatggctggacctaggacaacgtcaat

SEQ ID NO: 480434 - DNA, 33 bp, Homo sapien
tttaatgatggctggatctaggacaacgtcaat

SEQ ID NO: 480435 - DNA, 33 bp, Homo sapien
ctttcaccctgtcaccaatgttagctctaaacc

SEQ ID NO: 480436 - DNA, 33 bp, Homo sapien
ctttcaccctgtcacctatgttagctctaaacc

SEQ ID NO: 480437 - DNA, 33 bp, Homo sapien
acctctgttaatagcaaactggataatttaaac

SEQ ID NO: 480438 - DNA, 33 bp, Homo sapien
acctctgttaatagcagactggataatttaaac

SEQ ID NO: 480439 - DNA, 33 bp, Homo sapien
tataatgtttgaggctaaactaacaccagtaca

SEQ ID NO: 480440 - DNA, 33 bp, Homo sapien
tataatgtttgaggctcaactaacaccagtaca

SEQ ID NO: 480441 - DNA, 33 bp, Homo sapien
aattgagggtctgagtaaaacaaaatggtggag

SEQ ID NO: 480442 - DNA, 33 bp, Homo sapien
aattgagggtctgagtgaaacaaaatggtggag

SEQ ID NO: 480443 - DNA, 33 bp, Homo sapien
ttgacttgaaaatttacacgcagggatgtttat

SEQ ID NO: 480444 - DNA, 33 bp, Homo sapien
ttgacttgaaaatttatacgcagggatgtttat

SEQ ID NO: 480445 - DNA, 33 bp, Homo sapien
attttccaacatcctcgcgaatcccatctgcaa

SEQ ID NO: 480446 - DNA, 33 bp, Homo sapien
attttccaacatcctctcgaatcccatctgcaa

SEQ ID NO: 480447 - DNA, 33 bp, Homo sapien
ctccctaaaactactgaactttagtgctggctt

SEQ ID NO: 480448 - DNA, 33 bp, Homo sapien
ctccctaaaactactggactttagtgctggctt

SEQ ID NO: 480449 - DNA, 33 bp, Homo sapien
aaagcagtctaattgagctgttgacattatctt

SEQ ID NO: 480450 - DNA, 33 bp, Homo sapien
aaagcagtctaattgatctgttgacattatctt

SEQ ID NO: 480451 - DNA, 33 bp, Homo sapien
ttgtcttttagcagcccatccaggataacacac

SEQ ID NO: 480452 - DNA, 33 bp, Homo sapien
ttgtcttttagcagcctatccaggataacacac

SEQ ID NO: 480453 - DNA, 33 bp, Homo sapien
aaggttccctgtagaagtgtccctcagcagttg

SEQ ID NO: 480454 - DNA, 33 bp, Homo sapien
aaggttccctgtagaattgtccctcagcagttg

SEQ ID NO: 480455 - DNA, 33 bp, Homo sapien
atttgcgcgctatgcacgtgaaaaaggtctaat

SEQ ID NO: 480456 - DNA, 33 bp, Homo sapien
atttgcgcgctatgcatgtgaaaaaggtctaat

SEQ ID NO: 480457 - DNA, 33 bp, Homo sapien
taatccatcttgggtcaagctttgtatgtggta

SEQ ID NO: 480458 - DNA, 33 bp, Homo sapien
taatccatcttgggtcgagctttgtatgtggta

SEQ ID NO: 480459 - DNA, 33 bp, Homo sapien
aacatttgctcccttacgacctgtcactcgata

SEQ ID NO: 480460 - DNA, 33 bp, Homo sapien
aacatttgctcccttaggacctgtcactcgata

SEQ ID NO: 480461 - DNA, 33 bp, Homo sapien
gagactggccctacagcaatccagtgaagattc

SEQ ID NO: 480462 - DNA, 33 bp, Homo sapien
gagactggccctacagtaatccagtgaagattc

SEQ ID NO: 480463 - DNA, 33 bp, Homo sapien
cataccagctgtgaaactggaggtcatgaggta

SEQ ID NO: 480464 - DNA, 33 bp, Homo sapien
cataccagctgtgaaattggaggtcatgaggta

SEQ ID NO: 480465 - DNA, 33 bp, Homo sapien
agttataaaaactaaagtatctgtctcaagtat

SEQ ID NO: 480466 - DNA, 33 bp, Homo sapien
agttataaaaactaaattatctgtctcaagtat

SEQ ID NO: 480467 - DNA, 33 bp, Homo sapien
caacaaaatgagttccaacttctcactgtcact

SEQ ID NO: 480468 - DNA, 33 bp, Homo sapien
caacaaaatgagttccgacttctcactgtcact

SEQ ID NO: 480469 - DNA, 33 bp, Homo sapien
aggccctctttctgaactggaaaaagaatgcaa

SEQ ID NO: 480470 - DNA, 33 bp, Homo sapien
aggccctctttctgaattggaaaaagaatgcaa

SEQ ID NO: 480471 - DNA, 33 bp, Homo sapien
cactggcaaagtcacacaggtgcatcatctcag

SEQ ID NO: 480472 - DNA, 33 bp, Homo sapien
cactggcaaagtcacagaggtgcatcatctcag

SEQ ID NO: 480473 - DNA, 33 bp, Homo sapien
ggctcttgagtgtgcactgaggctttatccaca

SEQ ID NO: 480474 - DNA, 33 bp, Homo sapien
ggctcttgagtgtgcattgaggctttatccaca

SEQ ID NO: 480475 - DNA, 33 bp, Homo sapien
aagagataggaagcaaatgattccagactatgg

SEQ ID NO: 480476 - DNA, 33 bp, Homo sapien
aagagataggaagcaagtgattccagactatgg

SEQ ID NO: 480477 - DNA, 33 bp, Homo sapien
attactccatgacaaacgactccaaggtttagg

SEQ ID NO: 480478 - DNA, 33 bp, Homo sapien
attactccatgacaaatgactccaaggtttagg

SEQ ID NO: 480479 - DNA, 33 bp, Homo sapien
tgtaagttgtgtcaggaatgattctaactgatt

SEQ ID NO: 480480 - DNA, 33 bp, Homo sapien
tgtaagttgtgtcaggcatgattctaactgatt

SEQ ID NO: 480481 - DNA, 33 bp, Homo sapien
ttgtttagaaagccccaaattcatgaactagga

SEQ ID NO: 480482 - DNA, 33 bp, Homo sapien
ttgtttagaaagcccctaattcatgaactagga

SEQ ID NO: 480483 - DNA, 33 bp, Homo sapien
ttaccctaaacagagcacagtcttttcatccac

SEQ ID NO: 480484 - DNA, 33 bp, Homo sapien
ttaccctaaacagagcgcagtcttttcatccac

SEQ ID NO: 480485 - DNA, 33 bp, Homo sapien
tgcttaaatttggtcaactgtgaaatgaaggtt

SEQ ID NO: 480486 - DNA, 33 bp, Homo sapien
tgcttaaatttggtcatctgtgaaatgaaggtt

SEQ ID NO: 480487 - DNA, 33 bp, Homo sapien
ctcctcattagccaaccaaatagaatccagaga

SEQ ID NO: 480488 - DNA, 33 bp, Homo sapien
ctcctcattagccaacgaaatagaatccagaga

SEQ ID NO: 480489 - DNA, 33 bp, Homo sapien
taaaatgtttaatgtcacctaataacctatgca

SEQ ID NO: 480490 - DNA, 33 bp, Homo sapien
taaaatgtttaatgtcgcctaataacctatgca

SEQ ID NO: 480491 - DNA, 33 bp, Homo sapien
gaagtgttgagagtcacggaacacagaaataaa

SEQ ID NO: 480492 - DNA, 33 bp, Homo sapien
gaagtgttgagagtcatggaacacagaaataaa

SEQ ID NO: 480493 - DNA, 33 bp, Homo sapien
tactgacaatagctcaggaagttattattacac

SEQ ID NO: 480494 - DNA, 33 bp, Homo sapien
tactgacaatagctcatgaagttattattacac

SEQ ID NO: 480495 - DNA, 33 bp, Homo sapien
caaactaccaacttaaataactgtgcctcaagg

SEQ ID NO: 480496 - DNA, 33 bp, Homo sapien
caaactaccaacttaagtaactgtgcctcaagg

SEQ ID NO: 480497 - DNA, 33 bp, Homo sapien
gtcaatgattgaacacaagttgaacgaacagtt

SEQ ID NO: 480498 - DNA, 33 bp, Homo sapien
gtcaatgattgaacacgagttgaacgaacagtt

SEQ ID NO: 480499 - DNA, 33 bp, Homo sapien
cctggaatcaagctaaaccctcagaaaaggaca

SEQ ID NO: 480500 - DNA, 33 bp, Homo sapien
cctggaatcaagctaacccctcagaaaaggaca

SEQ ID NO: 480501 - DNA, 33 bp, Homo sapien
gacctgcgtcaatatgacaactttcttggaaaa

SEQ ID NO: 480502 - DNA, 33 bp, Homo sapien
gacctgcgtcaatatggcaactttcttggaaaa

SEQ ID NO: 480503 - DNA, 33 bp, Homo sapien
tcctgtgtggagtgacagagtgaagagcagcct

SEQ ID NO: 480504 - DNA, 33 bp, Homo sapien
tcctgtgtggagtgacggagtgaagagcagcct

SEQ ID NO: 480505 - DNA, 33 bp, Homo sapien
cccaagagtcacatttaaaaacatagaaatgtt

SEQ ID NO: 480506 - DNA, 33 bp, Homo sapien
cccaagagtcacatttgaaaacatagaaatgtt

SEQ ID NO: 480507 - DNA, 33 bp, Homo sapien
caaaagggtggaaccaaaaagaacatagcatat

SEQ ID NO: 480508 - DNA, 33 bp, Homo sapien
caaaagggtggaaccagaaagaacatagcatat

SEQ ID NO: 480509 - DNA, 33 bp, Homo sapien
gaacatagcatattcaagtttgtactgctaaag

SEQ ID NO: 480510 - DNA, 33 bp, Homo sapien
gaacatagcatattcaggtttgtactgctaaag

SEQ ID NO: 480511 - DNA, 33 bp, Homo sapien
aaccagcatggcatgaactttttatttctgtat

SEQ ID NO: 480512 - DNA, 33 bp, Homo sapien
aaccagcatggcatgacctttttatttctgtat

SEQ ID NO: 480513 - DNA, 33 bp, Homo sapien
gctagtcactaagctcacattaagcaagtaatc

SEQ ID NO: 480514 - DNA, 33 bp, Homo sapien
gctagtcactaagctcgcattaagcaagtaatc

SEQ ID NO: 480515 - DNA, 33 bp, Homo sapien
tgacaaggtcagtaacaagtaactaatagtgct

SEQ ID NO: 480516 - DNA, 33 bp, Homo sapien
tgacaaggtcagtaactagtaactaatagtgct

SEQ ID NO: 480517 - DNA, 33 bp, Homo sapien
ttctttatcaatcccacctgcacaaacattatg

SEQ ID NO: 480518 - DNA, 33 bp, Homo sapien
ttctttatcaatcccagctgcacaaacattatg

SEQ ID NO: 480519 - DNA, 33 bp, Homo sapien
cctattctgcaagatcaaaaaagattcttcaga

SEQ ID NO: 480520 - DNA, 33 bp, Homo sapien
cctattctgcaagatcgaaaaagattcttcaga

SEQ ID NO: 480521 - DNA, 33 bp, Homo sapien
ttgaggcttgttttgacaccacaaaggctcttc

SEQ ID NO: 480522 - DNA, 33 bp, Homo sapien
ttgaggcttgttttgataccacaaaggctcttc

SEQ ID NO: 480523 - DNA, 33 bp, Homo sapien
gggagttatttaacccaaacagaaaagctatat

SEQ ID NO: 480524 - DNA, 33 bp, Homo sapien
gggagttatttaacccgaacagaaaagctatat

SEQ ID NO: 480525 - DNA, 33 bp, Homo sapien
gttcactaataggatacgatagaacttctcaat

SEQ ID NO: 480526 - DNA, 33 bp, Homo sapien
gttcactaataggatatgatagaacttctcaat

SEQ ID NO: 480527 - DNA, 33 bp, Homo sapien
catggccaatctaaaacgagaaatattgtgaaa

SEQ ID NO: 480528 - DNA, 33 bp, Homo sapien
catggccaatctaaaatgagaaatattgtgaaa

SEQ ID NO: 480529 - DNA, 33 bp, Homo sapien
aaataagtgcctgctacatcataagagcaatga

SEQ ID NO: 480530 - DNA, 33 bp, Homo sapien
aaataagtgcctgctatatcataagagcaatga

SEQ ID NO: 480531 - DNA, 33 bp, Homo sapien
aattattcaccaaatacgactaaggaaagttac

SEQ ID NO: 480532 - DNA, 33 bp, Homo sapien
aattattcaccaaatatgactaaggaaagttac

SEQ ID NO: 480533 - DNA, 33 bp, Homo sapien
gtgaatgaaaggaataaaagtgcttcatgaata

SEQ ID NO: 480534 - DNA, 33 bp, Homo sapien
gtgaatgaaaggaatagaagtgcttcatgaata

SEQ ID NO: 480535 - DNA, 33 bp, Homo sapien
aaggcaaagctatggaaacacaaaaagatcagt

SEQ ID NO: 480536 - DNA, 33 bp, Homo sapien
aaggcaaagctatggagacacaaaaagatcagt

SEQ ID NO: 480537 - DNA, 33 bp, Homo sapien
aaaccgtactggttcacatttttgtcctaaacc

SEQ ID NO: 480538 - DNA, 33 bp, Homo sapien
aaaccgtactggttcatatttttgtcctaaacc

SEQ ID NO: 480539 - DNA, 33 bp, Homo sapien
tgagtaaagctctctaggcatttagtcaacagc

SEQ ID NO: 480540 - DNA, 33 bp, Homo sapien
tgagtaaagctctctatgcatttagtcaacagc

SEQ ID NO: 480541 - DNA, 33 bp, Homo sapien
accagaccatgaataactaatgacgtgttcttt

SEQ ID NO: 480542 - DNA, 33 bp, Homo sapien
accagaccatgaataattaatgacgtgttcttt

SEQ ID NO: 480543 - DNA, 33 bp, Homo sapien
tgcagttacaagcccaacttactcaaggacatt

SEQ ID NO: 480544 - DNA, 33 bp, Homo sapien
tgcagttacaagcccagcttactcaaggacatt

SEQ ID NO: 480545 - DNA, 33 bp, Homo sapien
caaattgttttcatacaacataccagggcaaac

SEQ ID NO: 480546 - DNA, 33 bp, Homo sapien
caaattgttttcatacgacataccagggcaaac

SEQ ID NO: 480547 - DNA, 33 bp, Homo sapien
cactatcccttcaggagctagcaactatcagcg

SEQ ID NO: 480548 - DNA, 33 bp, Homo sapien
cactatcccttcaggatctagcaactatcagcg

SEQ ID NO: 480549 - DNA, 33 bp, Homo sapien
aatcaaattccacctcaaatgctactactctga

SEQ ID NO: 480550 - DNA, 33 bp, Homo sapien
aatcaaattccacctcgaatgctactactctga

SEQ ID NO: 480551 - DNA, 33 bp, Homo sapien
tattgttgaaatcagggagggatgtatgtatct

SEQ ID NO: 480552 - DNA, 33 bp, Homo sapien
tattgttgaaatcaggtagggatgtatgtatct

SEQ ID NO: 480553 - DNA, 33 bp, Homo sapien
tactcaccttgaacttaaaatgaacaacaggta

SEQ ID NO: 480554 - DNA, 33 bp, Homo sapien
tactcaccttgaacttcaaatgaacaacaggta

SEQ ID NO: 480555 - DNA, 33 bp, Homo sapien
gatctagaggtgggtaaagccccatgaaagaca

SEQ ID NO: 480556 - DNA, 33 bp, Homo sapien
gatctagaggtgggtatagccccatgaaagaca

SEQ ID NO: 480557 - DNA, 33 bp, Homo sapien
gacagcacaagacaagcatggtttaagacatac

SEQ ID NO: 480558 - DNA, 33 bp, Homo sapien
gacagcacaagacaaggatggtttaagacatac

SEQ ID NO: 480559 - DNA, 33 bp, Homo sapien
tctgggttcctttccacggtgctaaatgctgta

SEQ ID NO: 480560 - DNA, 33 bp, Homo sapien
tctgggttcctttccagggtgctaaatgctgta

SEQ ID NO: 480561 - DNA, 33 bp, Homo sapien
aagtttattctagaacaatgacctaaaatataa

SEQ ID NO: 480562 - DNA, 33 bp, Homo sapien
aagtttattctagaacgatgacctaaaatataa

SEQ ID NO: 480563 - DNA, 33 bp, Homo sapien
tgctctttcatcactacggtgaaatagcctctc

SEQ ID NO: 480564 - DNA, 33 bp, Homo sapien
tgctctttcatcactatggtgaaatagcctctc

SEQ ID NO: 480565 - DNA, 33 bp, Homo sapien
attcaggtctgtaagacaataaagctgaggtat

SEQ ID NO: 480566 - DNA, 33 bp, Homo sapien
attcaggtctgtaagataataaagctgaggtat

SEQ ID NO: 480567 - DNA, 33 bp, Homo sapien
accccattatttgtcacccagcaggtaccaagc

SEQ ID NO: 480568 - DNA, 33 bp, Homo sapien
accccattatttgtcatccagcaggtaccaagc

SEQ ID NO: 480569 - DNA, 33 bp, Homo sapien
ccttgctcagtacaaaatatttaggctgctctt

SEQ ID NO: 480570 - DNA, 33 bp, Homo sapien
ccttgctcagtacaaagtatttaggctgctctt

SEQ ID NO: 480571 - DNA, 33 bp, Homo sapien
ccaacaatgcatggaacaaagtaggtgctcaaa

SEQ ID NO: 480572 - DNA, 33 bp, Homo sapien
ccaacaatgcatggaataaagtaggtgctcaaa

SEQ ID NO: 480573 - DNA, 33 bp, Homo sapien
ttttattgtctctttacatgttgactaagtaca

SEQ ID NO: 480574 - DNA, 33 bp, Homo sapien
ttttattgtctctttatatgttgactaagtaca

SEQ ID NO: 480575 - DNA, 33 bp, Homo sapien
ttggaacaaaatgtcacgcaggtcattcttaac

SEQ ID NO: 480576 - DNA, 33 bp, Homo sapien
ttggaacaaaatgtcatgcaggtcattcttaac

SEQ ID NO: 480577 - DNA, 33 bp, Homo sapien
tttctggtctttcatacgactttagacctcaaa

SEQ ID NO: 480578 - DNA, 33 bp, Homo sapien
tttctggtctttcatatgactttagacctcaaa

SEQ ID NO: 480579 - DNA, 33 bp, Homo sapien
tcctttcttcttcctacagattcctaaactatg

SEQ ID NO: 480580 - DNA, 33 bp, Homo sapien
tcctttcttcttcctatagattcctaaactatg

SEQ ID NO: 480581 - DNA, 33 bp, Homo sapien
cctttaacacttcacccggtgaacttttccact

SEQ ID NO: 480582 - DNA, 33 bp, Homo sapien
cctttaacacttcacctggtgaacttttccact

SEQ ID NO: 480583 - DNA, 33 bp, Homo sapien
actcctggttggactgaagaagttaaggggctg

SEQ ID NO: 480584 - DNA, 33 bp, Homo sapien
actcctggttggactggagaagttaaggggctg

SEQ ID NO: 480585 - DNA, 33 bp, Homo sapien
acttgggaaatctgaacttatcctggtaattga

SEQ ID NO: 480586 - DNA, 33 bp, Homo sapien
acttgggaaatctgaatttatcctggtaattga

SEQ ID NO: 480587 - DNA, 33 bp, Homo sapien
tttgtcaatcatcagactccacctttcaatttt

SEQ ID NO: 480588 - DNA, 33 bp, Homo sapien
tttgtcaatcatcagagtccacctttcaatttt

SEQ ID NO: 480589 - DNA, 33 bp, Homo sapien
atgagtatcagtttgacggtccttttaatcaat

SEQ ID NO: 480590 - DNA, 33 bp, Homo sapien
atgagtatcagtttgatggtccttttaatcaat

SEQ ID NO: 480591 - DNA, 33 bp, Homo sapien
ttcttagactgcccaaagtaatacattctactg

SEQ ID NO: 480592 - DNA, 33 bp, Homo sapien
ttcttagactgcccaaggtaatacattctactg

SEQ ID NO: 480593 - DNA, 33 bp, Homo sapien
ctaatttttgaggtaaaatcatggaagaaaaat

SEQ ID NO: 480594 - DNA, 33 bp, Homo sapien
ctaatttttgaggtaatatcatggaagaaaaat

SEQ ID NO: 480595 - DNA, 33 bp, Homo sapien
tcacaagtgatgagataaaaattgtcaaccaag

SEQ ID NO: 480596 - DNA, 33 bp, Homo sapien
tcacaagtgatgagatgaaaattgtcaaccaag

SEQ ID NO: 480597 - DNA, 33 bp, Homo sapien
aaattggaagtagagaaaggaagtagaatcaga

SEQ ID NO: 480598 - DNA, 33 bp, Homo sapien
aaattggaagtagagacaggaagtagaatcaga

SEQ ID NO: 480599 - DNA, 33 bp, Homo sapien
tttcatctggccaccgcaagaacaggttagcca

SEQ ID NO: 480600 - DNA, 33 bp, Homo sapien
tttcatctggccaccggaagaacaggttagcca

SEQ ID NO: 480601 - DNA, 33 bp, Homo sapien
aggtaaatggccaccaaccaaagcagcaagtaa

SEQ ID NO: 480602 - DNA, 33 bp, Homo sapien
aggtaaatggccaccacccaaagcagcaagtaa

SEQ ID NO: 480603 - DNA, 33 bp, Homo sapien
gttttcatattgactaaggatgccagaatttgg

SEQ ID NO: 480604 - DNA, 33 bp, Homo sapien
gttttcatattgactacggatgccagaatttgg

SEQ ID NO: 480605 - DNA, 33 bp, Homo sapien
tatctctagtgccttacgttgtcttcatttttt

SEQ ID NO: 480606 - DNA, 33 bp, Homo sapien
tatctctagtgccttatgttgtcttcatttttt

SEQ ID NO: 480607 - DNA, 33 bp, Homo sapien
attgtttcacttataccggttagtagccttgtt

SEQ ID NO: 480608 - DNA, 33 bp, Homo sapien
attgtttcacttatactggttagtagccttgtt

SEQ ID NO: 480609 - DNA, 33 bp, Homo sapien
ttttgtcgttaatgcacacactgttattggaag

SEQ ID NO: 480610 - DNA, 33 bp, Homo sapien
ttttgtcgttaatgcagacactgttattggaag

SEQ ID NO: 480611 - DNA, 33 bp, Homo sapien
ccatataggaacattcaagaagatgataaatgt

SEQ ID NO: 480612 - DNA, 33 bp, Homo sapien
ccatataggaacattcgagaagatgataaatgt

SEQ ID NO: 480613 - DNA, 33 bp, Homo sapien
atactaagattagaagaagagggggaataacta

SEQ ID NO: 480614 - DNA, 33 bp, Homo sapien
atactaagattagaagtagagggggaataacta

SEQ ID NO: 480615 - DNA, 33 bp, Homo sapien
ttccacattcagtgtgcaattgttttttctgta

SEQ ID NO: 480616 - DNA, 33 bp, Homo sapien
ttccacattcagtgtggaattgttttttctgta

SEQ ID NO: 480617 - DNA, 33 bp, Homo sapien
gtaggctattcaattacagagcatctatctacc

SEQ ID NO: 480618 - DNA, 33 bp, Homo sapien
gtaggctattcaattatagagcatctatctacc

SEQ ID NO: 480619 - DNA, 33 bp, Homo sapien
catcttcaatgtgatgcaatgtgaagaaaaata

SEQ ID NO: 480620 - DNA, 33 bp, Homo sapien
catcttcaatgtgatgtaatgtgaagaaaaata

SEQ ID NO: 480621 - DNA, 33 bp, Homo sapien
ctgcatatgcttcttacgactctgatgcatgaa

SEQ ID NO: 480622 - DNA, 33 bp, Homo sapien
ctgcatatgcttcttatgactctgatgcatgaa

SEQ ID NO: 480623 - DNA, 33 bp, Homo sapien
aagtatattagaaagcagaaaagaccctcctaa

SEQ ID NO: 480624 - DNA, 33 bp, Homo sapien
aagtatattagaaagcggaaaagaccctcctaa

SEQ ID NO: 480625 - DNA, 33 bp, Homo sapien
attagtgccataaccacgacatttctatttagc

SEQ ID NO: 480626 - DNA, 33 bp, Homo sapien
attagtgccataaccatgacatttctatttagc

SEQ ID NO: 480627 - DNA, 33 bp, Homo sapien
tccattgttcattccactgctttgaacttccaa

SEQ ID NO: 480628 - DNA, 33 bp, Homo sapien
tccattgttcattccattgctttgaacttccaa

SEQ ID NO: 480629 - DNA, 33 bp, Homo sapien
tgacataaattccaacaattatactactgatcc

SEQ ID NO: 480630 - DNA, 33 bp, Homo sapien
tgacataaattccaacgattatactactgatcc

SEQ ID NO: 480631 - DNA, 33 bp, Homo sapien
tgctagctgatttcacaaagttgttatcctgaa

SEQ ID NO: 480632 - DNA, 33 bp, Homo sapien
tgctagctgatttcacgaagttgttatcctgaa

SEQ ID NO: 480633 - DNA, 33 bp, Homo sapien
agtattgaggttaaaagaaaacttgcgctaata

SEQ ID NO: 480634 - DNA, 33 bp, Homo sapien
agtattgaggttaaaataaaacttgcgctaata

SEQ ID NO: 480635 - DNA, 33 bp, Homo sapien
tgctcaaagattcacaatgctttgattaaattc

SEQ ID NO: 480636 - DNA, 33 bp, Homo sapien
tgctcaaagattcacattgctttgattaaattc

SEQ ID NO: 480637 - DNA, 33 bp, Homo sapien
tttagacttgatcccaacaaacttcttcaacct

SEQ ID NO: 480638 - DNA, 33 bp, Homo sapien
tttagacttgatcccagcaaacttcttcaacct

SEQ ID NO: 480639 - DNA, 33 bp, Homo sapien
cccggcatggaataacacaaagccagtttagac

SEQ ID NO: 480640 - DNA, 33 bp, Homo sapien
cccggcatggaataacgcaaagccagtttagac

SEQ ID NO: 480641 - DNA, 33 bp, Homo sapien
aggtgctttaatgtaaataacacccagcaagga

SEQ ID NO: 480642 - DNA, 33 bp, Homo sapien
aggtgctttaatgtaagtaacacccagcaagga

SEQ ID NO: 480643 - DNA, 33 bp, Homo sapien
aaattgatatcctttgaagctggataaacatgc

SEQ ID NO: 480644 - DNA, 33 bp, Homo sapien
aaattgatatcctttggagctggataaacatgc

SEQ ID NO: 480645 - DNA, 33 bp, Homo sapien
tttctggtaagagcctcaagtgtgcctagagca

SEQ ID NO: 480646 - DNA, 33 bp, Homo sapien
tttctggtaagagccttaagtgtgcctagagca

SEQ ID NO: 480647 - DNA, 33 bp, Homo sapien
atattcagcagtaagaagctgggacattttctt

SEQ ID NO: 480648 - DNA, 33 bp, Homo sapien
atattcagcagtaagaggctgggacattttctt

SEQ ID NO: 480649 - DNA, 33 bp, Homo sapien
atttgaactactggaaaccatgtatatttgtcc

SEQ ID NO: 480650 - DNA, 33 bp, Homo sapien
atttgaactactggaagccatgtatatttgtcc

SEQ ID NO: 480651 - DNA, 33 bp, Homo sapien
cagtacgtaagtgaagcaaaagtctgctcttcc

SEQ ID NO: 480652 - DNA, 33 bp, Homo sapien
cagtacgtaagtgaagtaaaagtctgctcttcc

SEQ ID NO: 480653 - DNA, 33 bp, Homo sapien
atccatcactgccaacccaaagccagaaacaac

SEQ ID NO: 480654 - DNA, 33 bp, Homo sapien
atccatcactgccaacgcaaagccagaaacaac

SEQ ID NO: 480655 - DNA, 33 bp, Homo sapien
gagctgttttaaacctaaagttggtctctatca

SEQ ID NO: 480656 - DNA, 33 bp, Homo sapien
gagctgttttaaacctgaagttggtctctatca

SEQ ID NO: 480657 - DNA, 33 bp, Homo sapien
cgcttgtgaaatcatccattatgcagaggtggc

SEQ ID NO: 480658 - DNA, 33 bp, Homo sapien
cgcttgtgaaatcatctattatgcagaggtggc

SEQ ID NO: 480659 - DNA, 33 bp, Homo sapien
ccagcaaaaccaacctaagccttcaatcatcac

SEQ ID NO: 480660 - DNA, 33 bp, Homo sapien
ccagcaaaaccaacctgagccttcaatcatcac

SEQ ID NO: 480661 - DNA, 33 bp, Homo sapien
cttaccatttaatataacttggaaactaagtac

SEQ ID NO: 480662 - DNA, 33 bp, Homo sapien
cttaccatttaatatagcttggaaactaagtac

SEQ ID NO: 480663 - DNA, 33 bp, Homo sapien
gtaaatacaaagagaaatgttattttgtaggct

SEQ ID NO: 480664 - DNA, 33 bp, Homo sapien
gtaaatacaaagagaagtgttattttgtaggct

SEQ ID NO: 480665 - DNA, 33 bp, Homo sapien
acatatcccaaatcaccgatgaataagtagtaa

SEQ ID NO: 480666 - DNA, 33 bp, Homo sapien
acatatcccaaatcactgatgaataagtagtaa

SEQ ID NO: 480667 - DNA, 33 bp, Homo sapien
aacaactacaacagtgccacgtatgtatctggc

SEQ ID NO: 480668 - DNA, 33 bp, Homo sapien
aacaactacaacagtgtcacgtatgtatctggc

SEQ ID NO: 480669 - DNA, 33 bp, Homo sapien
gtttcttgctacagctcaaagtgtctccatgct

SEQ ID NO: 480670 - DNA, 33 bp, Homo sapien
gtttcttgctacagctgaaagtgtctccatgct

SEQ ID NO: 480671 - DNA, 33 bp, Homo sapien
agttcagagtagaagcactgaaatgattaagta

SEQ ID NO: 480672 - DNA, 33 bp, Homo sapien
agttcagagtagaagcgctgaaatgattaagta

SEQ ID NO: 480673 - DNA, 33 bp, Homo sapien
ttgtagagaatgctgactaccttctggactgaa

SEQ ID NO: 480674 - DNA, 33 bp, Homo sapien
ttgtagagaatgctgagtaccttctggactgaa

SEQ ID NO: 480675 - DNA, 33 bp, Homo sapien
tttcatttttaaaagcccagataacagttgcct

SEQ ID NO: 480676 - DNA, 33 bp, Homo sapien
tttcatttttaaaagcgcagataacagttgcct

SEQ ID NO: 480677 - DNA, 33 bp, Homo sapien
ttcctgccactagaaccgcttcatggagacact

SEQ ID NO: 480678 - DNA, 33 bp, Homo sapien
ttcctgccactagaacggcttcatggagacact

SEQ ID NO: 480679 - DNA, 33 bp, Homo sapien
ataagtacagggaagacagaggctcccagctct

SEQ ID NO: 480680 - DNA, 33 bp, Homo sapien
ataagtacagggaagagagaggctcccagctct

SEQ ID NO: 480681 - DNA, 33 bp, Homo sapien
gcttcatgtctgtctaagtacaggtcttattat

SEQ ID NO: 480682 - DNA, 33 bp, Homo sapien
gcttcatgtctgtctaggtacaggtcttattat

SEQ ID NO: 480683 - DNA, 33 bp, Homo sapien
tgaagccaggacagaccgggctcaggaaagagg

SEQ ID NO: 480684 - DNA, 33 bp, Homo sapien
tgaagccaggacagactgggctcaggaaagagg

SEQ ID NO: 480685 - DNA, 33 bp, Homo sapien
ggttctagtcataaagaaggcttttattattag

SEQ ID NO: 480686 - DNA, 33 bp, Homo sapien
ggttctagtcataaaggaggcttttattattag

SEQ ID NO: 480687 - DNA, 33 bp, Homo sapien
agatgaagtccagccaaaggaaagtagaagctc

SEQ ID NO: 480688 - DNA, 33 bp, Homo sapien
agatgaagtccagccagaggaaagtagaagctc

SEQ ID NO: 480689 - DNA, 33 bp, Homo sapien
agtcagtatgggtttagaagcacctttttctat

SEQ ID NO: 480690 - DNA, 33 bp, Homo sapien
agtcagtatgggtttataagcacctttttctat

SEQ ID NO: 480691 - DNA, 33 bp, Homo sapien
gagccccgcgtttctacgccctgtttgtgtcct

SEQ ID NO: 480692 - DNA, 33 bp, Homo sapien
gagccccgcgtttctatgccctgtttgtgtcct

SEQ ID NO: 480693 - DNA, 33 bp, Homo sapien
gtttttaatgggcagccgaggttgacagtcatt

SEQ ID NO: 480694 - DNA, 33 bp, Homo sapien
gtttttaatgggcagctgaggttgacagtcatt

SEQ ID NO: 480695 - DNA, 33 bp, Homo sapien
aaccatcactttagagcagttcatctcaaactt

SEQ ID NO: 480696 - DNA, 33 bp, Homo sapien
aaccatcactttagagtagttcatctcaaactt

SEQ ID NO: 480697 - DNA, 33 bp, Homo sapien
gtcaaaaacaatttaagatggcatttttgacaa

SEQ ID NO: 480698 - DNA, 33 bp, Homo sapien
gtcaaaaacaatttaatatggcatttttgacaa

SEQ ID NO: 480699 - DNA, 33 bp, Homo sapien
gaatgaagaacgagaacagatttcaaaatagaa

SEQ ID NO: 480700 - DNA, 33 bp, Homo sapien
gaatgaagaacgagaagagatttcaaaatagaa

SEQ ID NO: 480701 - DNA, 33 bp, Homo sapien
aaaactttctaattgacggagtggctgtagttt

SEQ ID NO: 480702 - DNA, 33 bp, Homo sapien
aaaactttctaattgatggagtggctgtagttt

SEQ ID NO: 480703 - DNA, 33 bp, Homo sapien
cccaagatctgcccatgacaccaaaatatgagc

SEQ ID NO: 480704 - DNA, 33 bp, Homo sapien
cccaagatctgcccattacaccaaaatatgagc

SEQ ID NO: 480705 - DNA, 33 bp, Homo sapien
gcaaggagactttggaaatttgtcaagagctag

SEQ ID NO: 480706 - DNA, 33 bp, Homo sapien
gcaaggagactttggacatttgtcaagagctag

SEQ ID NO: 480707 - DNA, 33 bp, Homo sapien
accaagtaatgcaaacagttcagtgatttcttc

SEQ ID NO: 480708 - DNA, 33 bp, Homo sapien
accaagtaatgcaaacggttcagtgatttcttc

SEQ ID NO: 480709 - DNA, 33 bp, Homo sapien
agtgaaacccatgcacagtaagaacatccggag

SEQ ID NO: 480710 - DNA, 33 bp, Homo sapien
agtgaaacccatgcaccgtaagaacatccggag

SEQ ID NO: 480711 - DNA, 33 bp, Homo sapien
gagtttttggaaaagaatcacgtttctgaaaca

SEQ ID NO: 480712 - DNA, 33 bp, Homo sapien
gagtttttggaaaagagtcacgtttctgaaaca

SEQ ID NO: 480713 - DNA, 33 bp, Homo sapien
catattagtcaacatactagctgacagataatc

SEQ ID NO: 480714 - DNA, 33 bp, Homo sapien
catattagtcaacatattagctgacagataatc

SEQ ID NO: 480715 - DNA, 33 bp, Homo sapien
aagaataatttacaaaccacttgctgtataata

SEQ ID NO: 480716 - DNA, 33 bp, Homo sapien
aagaataatttacaaagcacttgctgtataata

SEQ ID NO: 480717 - DNA, 33 bp, Homo sapien
ttataaagggaaggcaaatatgtataagtcatt

SEQ ID NO: 480718 - DNA, 33 bp, Homo sapien
ttataaagggaaggcagatatgtataagtcatt

SEQ ID NO: 480719 - DNA, 33 bp, Homo sapien
tgagataaccactccactgcaagactgcattac

SEQ ID NO: 480720 - DNA, 33 bp, Homo sapien
tgagataaccactccattgcaagactgcattac

SEQ ID NO: 480721 - DNA, 33 bp, Homo sapien
cccccatcatgcctcacagacctcggttcattc

SEQ ID NO: 480722 - DNA, 33 bp, Homo sapien
cccccatcatgcctcagagacctcggttcattc

SEQ ID NO: 480723 - DNA, 33 bp, Homo sapien
caaattactaccttgacgtgagtggctaaaaaa

SEQ ID NO: 480724 - DNA, 33 bp, Homo sapien
caaattactaccttgatgtgagtggctaaaaaa

SEQ ID NO: 480725 - DNA, 33 bp, Homo sapien
gaatccaatagaactgccaccccacatggaaga

SEQ ID NO: 480726 - DNA, 33 bp, Homo sapien
gaatccaatagaactgtcaccccacatggaaga

SEQ ID NO: 480727 - DNA, 33 bp, Homo sapien
cgggaggtgacctggccaaaactgcattgggcc

SEQ ID NO: 480728 - DNA, 33 bp, Homo sapien
cgggaggtgacctggctaaaactgcattgggcc

SEQ ID NO: 480729 - DNA, 33 bp, Homo sapien
aaagcctcataagttcccctttcggcgcttgtc

SEQ ID NO: 480730 - DNA, 33 bp, Homo sapien
aaagcctcataagttctcctttcggcgcttgtc

SEQ ID NO: 480731 - DNA, 33 bp, Homo sapien
aggaattgtgcagctacactataagttccaaaa

SEQ ID NO: 480732 - DNA, 33 bp, Homo sapien
aggaattgtgcagctagactataagttccaaaa

SEQ ID NO: 480733 - DNA, 33 bp, Homo sapien
tgtgttgatgattgcacaactctgagcatacac

SEQ ID NO: 480734 - DNA, 33 bp, Homo sapien
tgtgttgatgattgcagaactctgagcatacac

SEQ ID NO: 480735 - DNA, 33 bp, Homo sapien
ccatcagaaaactcctaaactgattgcagtcac

SEQ ID NO: 480736 - DNA, 33 bp, Homo sapien
ccatcagaaaactcctgaactgattgcagtcac

SEQ ID NO: 480737 - DNA, 33 bp, Homo sapien
aactatcacatttacaagtattttgacaagatg

SEQ ID NO: 480738 - DNA, 33 bp, Homo sapien
aactatcacatttacaggtattttgacaagatg

SEQ ID NO: 480739 - DNA, 33 bp, Homo sapien
tagacacagtcaggcacggggttattgttactg

SEQ ID NO: 480740 - DNA, 33 bp, Homo sapien
tagacacagtcaggcatggggttattgttactg

SEQ ID NO: 480741 - DNA, 33 bp, Homo sapien
tgacacagcagtcccacagaagaggatctgtag

SEQ ID NO: 480742 - DNA, 33 bp, Homo sapien
tgacacagcagtcccagagaagaggatctgtag

SEQ ID NO: 480743 - DNA, 33 bp, Homo sapien
cataatgtctgcttcacgctgttaccagttgcc

SEQ ID NO: 480744 - DNA, 33 bp, Homo sapien
cataatgtctgcttcatgctgttaccagttgcc

SEQ ID NO: 480745 - DNA, 33 bp, Homo sapien
gtacataacagggatcaaaactcagtttatggg

SEQ ID NO: 480746 - DNA, 33 bp, Homo sapien
gtacataacagggatcgaaactcagtttatggg

SEQ ID NO: 480747 - DNA, 33 bp, Homo sapien
tcttatttttctcatcccgtcttctcacaatgg

SEQ ID NO: 480748 - DNA, 33 bp, Homo sapien
tcttatttttctcatctcgtcttctcacaatgg

SEQ ID NO: 480749 - DNA, 33 bp, Homo sapien
tgtttgacttctgggaaagctggatccgttttc

SEQ ID NO: 480750 - DNA, 33 bp, Homo sapien
tgtttgacttctgggagagctggatccgttttc

SEQ ID NO: 480751 - DNA, 33 bp, Homo sapien
gctctgatgtattttgcaatatattttgacttc

SEQ ID NO: 480752 - DNA, 33 bp, Homo sapien
gctctgatgtattttgtaatatattttgacttc

SEQ ID NO: 480753 - DNA, 33 bp, Homo sapien
taaaatagtgacaaataattaaggttaagtggt

SEQ ID NO: 480754 - DNA, 33 bp, Homo sapien
taaaatagtgacaaatgattaaggttaagtggt

SEQ ID NO: 480755 - DNA, 33 bp, Homo sapien
atctgtggtttacagacaaacaaaaagtcccaa

SEQ ID NO: 480756 - DNA, 33 bp, Homo sapien
atctgtggtttacagagaaacaaaaagtcccaa

SEQ ID NO: 480757 - DNA, 33 bp, Homo sapien
tccagtataagaacaacagagaggaagagaatt

SEQ ID NO: 480758 - DNA, 33 bp, Homo sapien
tccagtataagaacaagagagaggaagagaatt

SEQ ID NO: 480759 - DNA, 33 bp, Homo sapien
caccaaattaaccaaaagattctgttactgtga

SEQ ID NO: 480760 - DNA, 33 bp, Homo sapien
caccaaattaaccaaacgattctgttactgtga

SEQ ID NO: 480761 - DNA, 33 bp, Homo sapien
gtgccactcccttagtcaatccctaagttcatc

SEQ ID NO: 480762 - DNA, 33 bp, Homo sapien
gtgccactcccttagttaatccctaagttcatc

SEQ ID NO: 480763 - DNA, 33 bp, Homo sapien
taatatgaggccctcgaacatcaaaagagaagc

SEQ ID NO: 480764 - DNA, 33 bp, Homo sapien
taatatgaggccctcgcacatcaaaagagaagc

SEQ ID NO: 480765 - DNA, 33 bp, Homo sapien
gaggatagcagagaagcaaattagcagccctca

SEQ ID NO: 480766 - DNA, 33 bp, Homo sapien
gaggatagcagagaagtaaattagcagccctca

SEQ ID NO: 480767 - DNA, 33 bp, Homo sapien
caactgaagtcttgctaaaaacagatgcagggg

SEQ ID NO: 480768 - DNA, 33 bp, Homo sapien
caactgaagtcttgctcaaaacagatgcagggg

SEQ ID NO: 480769 - DNA, 33 bp, Homo sapien
attgtaatgatgcaggaatctgagaaaataatg

SEQ ID NO: 480770 - DNA, 33 bp, Homo sapien
attgtaatgatgcagggatctgagaaaataatg

SEQ ID NO: 480771 - DNA, 33 bp, Homo sapien
gtgttggggatgcagaagtgaacaaggcattca

SEQ ID NO: 480772 - DNA, 33 bp, Homo sapien
gtgttggggatgcagacgtgaacaaggcattca

SEQ ID NO: 480773 - DNA, 33 bp, Homo sapien
gggccagtaagttccaaataagaacattaataa

SEQ ID NO: 480774 - DNA, 33 bp, Homo sapien
gggccagtaagttccacataagaacattaataa

SEQ ID NO: 480775 - DNA, 33 bp, Homo sapien
gtggcaccctaagagacatggccttttggtatc

SEQ ID NO: 480776 - DNA, 33 bp, Homo sapien
gtggcaccctaagagatatggccttttggtatc

SEQ ID NO: 480777 - DNA, 33 bp, Homo sapien
tgcagtggggtcattaagcaggtgcgagaaaga

SEQ ID NO: 480778 - DNA, 33 bp, Homo sapien
tgcagtggggtcattaggcaggtgcgagaaaga

SEQ ID NO: 480779 - DNA, 33 bp, Homo sapien
gtgcaatgtggagatgcatttacccaaatgtgt

SEQ ID NO: 480780 - DNA, 33 bp, Homo sapien
gtgcaatgtggagatgtatttacccaaatgtgt

SEQ ID NO: 480781 - DNA, 33 bp, Homo sapien
tcctcatgctcgggccactggctcctgtctgta

SEQ ID NO: 480782 - DNA, 33 bp, Homo sapien
tcctcatgctcgggccgctggctcctgtctgta

SEQ ID NO: 480783 - DNA, 33 bp, Homo sapien
ggtaggttcacaattacagtcctaggttttcag

SEQ ID NO: 480784 - DNA, 33 bp, Homo sapien
ggtaggttcacaattatagtcctaggttttcag

SEQ ID NO: 480785 - DNA, 33 bp, Homo sapien
tatgaatgtagaacccaaggtagtagttatagg

SEQ ID NO: 480786 - DNA, 33 bp, Homo sapien
tatgaatgtagaacccgaggtagtagttatagg

SEQ ID NO: 480787 - DNA, 33 bp, Homo sapien
agtttagcaaaagaacacctagatcaaatgcct

SEQ ID NO: 480788 - DNA, 33 bp, Homo sapien
agtttagcaaaagaacgcctagatcaaatgcct

SEQ ID NO: 480789 - DNA, 33 bp, Homo sapien
atgcaccccctctgggcattaccaatcaatagc

SEQ ID NO: 480790 - DNA, 33 bp, Homo sapien
atgcaccccctctgggtattaccaatcaatagc

SEQ ID NO: 480791 - DNA, 33 bp, Homo sapien
atagttgaatttcagacatattggtgaggttga

SEQ ID NO: 480792 - DNA, 33 bp, Homo sapien
atagttgaatttcagagatattggtgaggttga

SEQ ID NO: 480793 - DNA, 33 bp, Homo sapien
tgaatgtctgatgtaaaagaagcctggctcccc

SEQ ID NO: 480794 - DNA, 33 bp, Homo sapien
tgaatgtctgatgtaacagaagcctggctcccc

SEQ ID NO: 480795 - DNA, 33 bp, Homo sapien
atgctgcaaaaaaggacagaggaaatataaagc

SEQ ID NO: 480796 - DNA, 33 bp, Homo sapien
atgctgcaaaaaaggatagaggaaatataaagc

SEQ ID NO: 480797 - DNA, 33 bp, Homo sapien
ctattctattctattcaccactgtggtttttct

SEQ ID NO: 480798 - DNA, 33 bp, Homo sapien
ctattctattctattcgccactgtggtttttct

SEQ ID NO: 480799 - DNA, 33 bp, Homo sapien
tcattagaccatgaaaatatgtgaaatgttaca

SEQ ID NO: 480800 - DNA, 33 bp, Homo sapien
tcattagaccatgaaagtatgtgaaatgttaca

SEQ ID NO: 480801 - DNA, 33 bp, Homo sapien
ggtaacaattttagataaagtggtatgccaact

SEQ ID NO: 480802 - DNA, 33 bp, Homo sapien
ggtaacaattttagattaagtggtatgccaact

SEQ ID NO: 480803 - DNA, 33 bp, Homo sapien
gtatgtttcactgaagcagtacatcaatttgta

SEQ ID NO: 480804 - DNA, 33 bp, Homo sapien
gtatgtttcactgaaggagtacatcaatttgta

SEQ ID NO: 480805 - DNA, 33 bp, Homo sapien
ttgacacaaattgtaaatcaggcaaaatgcaac

SEQ ID NO: 480806 - DNA, 33 bp, Homo sapien
ttgacacaaattgtaagtcaggcaaaatgcaac

SEQ ID NO: 480807 - DNA, 33 bp, Homo sapien
ttcaagaccaatgaaggctgaagtaagacctaa

SEQ ID NO: 480808 - DNA, 33 bp, Homo sapien
ttcaagaccaatgaagtctgaagtaagacctaa

SEQ ID NO: 480809 - DNA, 33 bp, Homo sapien
aaaggcaaatctgaagcagatgggattatgtta

SEQ ID NO: 480810 - DNA, 33 bp, Homo sapien
aaaggcaaatctgaaggagatgggattatgtta

SEQ ID NO: 480811 - DNA, 33 bp, Homo sapien
cccacaccaatataaacagccttagagtttagt

SEQ ID NO: 480812 - DNA, 33 bp, Homo sapien
cccacaccaatataaatagccttagagtttagt

SEQ ID NO: 480813 - DNA, 33 bp, Homo sapien
attcatagtttcaaagacaggcccattagcagc

SEQ ID NO: 480814 - DNA, 33 bp, Homo sapien
attcatagtttcaaagtcaggcccattagcagc

SEQ ID NO: 480815 - DNA, 33 bp, Homo sapien
agcacccatgagacagcaaggctaaaccccgtg

SEQ ID NO: 480816 - DNA, 33 bp, Homo sapien
agcacccatgagacagtaaggctaaaccccgtg

SEQ ID NO: 480817 - DNA, 33 bp, Homo sapien
ctaaggcagatacaacaaaaaggagaaagagag

SEQ ID NO: 480818 - DNA, 33 bp, Homo sapien
ctaaggcagatacaacgaaaaggagaaagagag

SEQ ID NO: 480819 - DNA, 33 bp, Homo sapien
ttagacctcataaaaactaagtgtgattgggcg

SEQ ID NO: 480820 - DNA, 33 bp, Homo sapien
ttagacctcataaaaagtaagtgtgattgggcg

SEQ ID NO: 480821 - DNA, 33 bp, Homo sapien
cctgaaacttttctaaactatcagtaacaaaga

SEQ ID NO: 480822 - DNA, 33 bp, Homo sapien
cctgaaacttttctaatctatcagtaacaaaga

SEQ ID NO: 480823 - DNA, 33 bp, Homo sapien
gtatctccctgggtgacggtaaggccagacgta

SEQ ID NO: 480824 - DNA, 33 bp, Homo sapien
gtatctccctgggtgatggtaaggccagacgta

SEQ ID NO: 480825 - DNA, 33 bp, Homo sapien
ggtacttctatcctggaacccagcatttgtgtc

SEQ ID NO: 480826 - DNA, 33 bp, Homo sapien
ggtacttctatcctgggacccagcatttgtgtc

SEQ ID NO: 480827 - DNA, 33 bp, Homo sapien
gtttattaactggacacctggttcagggtcact

SEQ ID NO: 480828 - DNA, 33 bp, Homo sapien
gtttattaactggacatctggttcagggtcact

SEQ ID NO: 480829 - DNA, 33 bp, Homo sapien
gaatggaactagctatcacagtatgttaggaaa

SEQ ID NO: 480830 - DNA, 33 bp, Homo sapien
gaatggaactagctattacagtatgttaggaaa

SEQ ID NO: 480831 - DNA, 33 bp, Homo sapien
taataagcaaagtacccgattttttactgatcc

SEQ ID NO: 480832 - DNA, 33 bp, Homo sapien
taataagcaaagtacctgattttttactgatcc

SEQ ID NO: 480833 - DNA, 33 bp, Homo sapien
ttaagccttatttcccaaaggtattctcccaag

SEQ ID NO: 480834 - DNA, 33 bp, Homo sapien
ttaagccttatttcccgaaggtattctcccaag

SEQ ID NO: 480835 - DNA, 33 bp, Homo sapien
ttgcttatttttgccagctttattgaggatcag

SEQ ID NO: 480836 - DNA, 33 bp, Homo sapien
ttgcttatttttgccatctttattgaggatcag

SEQ ID NO: 480837 - DNA, 33 bp, Homo sapien
cattctggccagaacaatatacaccaacaaaag

SEQ ID NO: 480838 - DNA, 33 bp, Homo sapien
cattctggccagaacagtatacaccaacaaaag

SEQ ID NO: 480839 - DNA, 33 bp, Homo sapien
attccagcaaaaggcactgatatcataggagat

SEQ ID NO: 480840 - DNA, 33 bp, Homo sapien
attccagcaaaaggcattgatatcataggagat

SEQ ID NO: 480841 - DNA, 33 bp, Homo sapien
ttgttcaccaagccacggtcagcttaataaccc

SEQ ID NO: 480842 - DNA, 33 bp, Homo sapien
ttgttcaccaagccactgtcagcttaataaccc

SEQ ID NO: 480843 - DNA, 33 bp, Homo sapien
attccacttcccaagacatgacagcagatgtga

SEQ ID NO: 480844 - DNA, 33 bp, Homo sapien
attccacttcccaagagatgacagcagatgtga

SEQ ID NO: 480845 - DNA, 33 bp, Homo sapien
taaatgcccagaaacaccgatcagccaagtcta

SEQ ID NO: 480846 - DNA, 33 bp, Homo sapien
taaatgcccagaaacagcgatcagccaagtcta

SEQ ID NO: 480847 - DNA, 33 bp, Homo sapien
agaaaatattttgtgacggtactcaataacttt

SEQ ID NO: 480848 - DNA, 33 bp, Homo sapien
agaaaatattttgtgatggtactcaataacttt

SEQ ID NO: 480849 - DNA, 33 bp, Homo sapien
tacggtcatcctcccagatggcacatttgggtc

SEQ ID NO: 480850 - DNA, 33 bp, Homo sapien
tacggtcatcctcccatatggcacatttgggtc

SEQ ID NO: 480851 - DNA, 33 bp, Homo sapien
aaccataaccacaggaagaatgtacaagacagt

SEQ ID NO: 480852 - DNA, 33 bp, Homo sapien
aaccataaccacaggaggaatgtacaagacagt

SEQ ID NO: 480853 - DNA, 33 bp, Homo sapien
tgcctctagtttcagacgcttgggagcctgagg

SEQ ID NO: 480854 - DNA, 33 bp, Homo sapien
tgcctctagtttcagatgcttgggagcctgagg

SEQ ID NO: 480855 - DNA, 33 bp, Homo sapien
tgcaggaataaaaatccagatcaatggaatgga

SEQ ID NO: 480856 - DNA, 33 bp, Homo sapien
tgcaggaataaaaatcgagatcaatggaatgga

SEQ ID NO: 480857 - DNA, 33 bp, Homo sapien
attacacatttccacgaaagtttagatacatgg

SEQ ID NO: 480858 - DNA, 33 bp, Homo sapien
attacacatttccacggaagtttagatacatgg

SEQ ID NO: 480859 - DNA, 33 bp, Homo sapien
aaaaatggcctctcaacgcagttcctacctatc

SEQ ID NO: 480860 - DNA, 33 bp, Homo sapien
aaaaatggcctctcaatgcagttcctacctatc

SEQ ID NO: 480861 - DNA, 33 bp, Homo sapien
cctttgtatatactcaaccgttaaaacttctca

SEQ ID NO: 480862 - DNA, 33 bp, Homo sapien
cctttgtatatactcagccgttaaaacttctca

SEQ ID NO: 480863 - DNA, 33 bp, Homo sapien
tgtagcaatttttaccacttgttatgagtaata

SEQ ID NO: 480864 - DNA, 33 bp, Homo sapien
tgtagcaatttttaccgcttgttatgagtaata

SEQ ID NO: 480865 - DNA, 33 bp, Homo sapien
agaatgttgatcttcgcccttactagtattgaa

SEQ ID NO: 480866 - DNA, 33 bp, Homo sapien
agaatgttgatcttcgtccttactagtattgaa

SEQ ID NO: 480867 - DNA, 33 bp, Homo sapien
ttgagtaacctctccaatgcaccatggctaaat

SEQ ID NO: 480868 - DNA, 33 bp, Homo sapien
ttgagtaacctctccagtgcaccatggctaaat

SEQ ID NO: 480869 - DNA, 33 bp, Homo sapien
agtatcgaaatagtgccatgaaaattatggtat

SEQ ID NO: 480870 - DNA, 33 bp, Homo sapien
agtatcgaaatagtgctatgaaaattatggtat

SEQ ID NO: 480871 - DNA, 33 bp, Homo sapien
gttaacttgcccagaccggccgtgtttatacac

SEQ ID NO: 480872 - DNA, 33 bp, Homo sapien
gttaacttgcccagactggccgtgtttatacac

SEQ ID NO: 480873 - DNA, 33 bp, Homo sapien
ccgtgtttatacaccacagtgagtaaatctgca

SEQ ID NO: 480874 - DNA, 33 bp, Homo sapien
ccgtgtttatacaccatagtgagtaaatctgca

SEQ ID NO: 480875 - DNA, 33 bp, Homo sapien
tcactaaatcatgcaacgcaaatcatcaccctg

SEQ ID NO: 480876 - DNA, 33 bp, Homo sapien
tcactaaatcatgcaatgcaaatcatcaccctg

SEQ ID NO: 480877 - DNA, 33 bp, Homo sapien
ttgaatatcatctttacgtttttaaggatcacg

SEQ ID NO: 480878 - DNA, 33 bp, Homo sapien
ttgaatatcatctttatgtttttaaggatcacg

SEQ ID NO: 480879 - DNA, 33 bp, Homo sapien
ggccagagtggagatactactgaccatcctgca

SEQ ID NO: 480880 - DNA, 33 bp, Homo sapien
ggccagagtggagatattactgaccatcctgca

SEQ ID NO: 480881 - DNA, 33 bp, Homo sapien
gtgagggttggtaaagcagtccagatagaacaa

SEQ ID NO: 480882 - DNA, 33 bp, Homo sapien
gtgagggttggtaaagtagtccagatagaacaa

SEQ ID NO: 480883 - DNA, 33 bp, Homo sapien
gagagagactatggcagccatgggaataagaga

SEQ ID NO: 480884 - DNA, 33 bp, Homo sapien
gagagagactatggcatccatgggaataagaga

SEQ ID NO: 480885 - DNA, 33 bp, Homo sapien
taatcacccaaccctacgtaacatggctgccag

SEQ ID NO: 480886 - DNA, 33 bp, Homo sapien
taatcacccaaccctatgtaacatggctgccag

SEQ ID NO: 480887 - DNA, 33 bp, Homo sapien
ctgtagcacctctataaactaacaatgaactat

SEQ ID NO: 480888 - DNA, 33 bp, Homo sapien
ctgtagcacctctatacactaacaatgaactat

SEQ ID NO: 480889 - DNA, 33 bp, Homo sapien
ttgtatctctagtgctcaccacatatcataggc

SEQ ID NO: 480890 - DNA, 33 bp, Homo sapien
ttgtatctctagtgctgaccacatatcataggc

SEQ ID NO: 480891 - DNA, 33 bp, Homo sapien
atctatgttagcaaacagaggttctccaaaaag

SEQ ID NO: 480892 - DNA, 33 bp, Homo sapien
atctatgttagcaaactgaggttctccaaaaag

SEQ ID NO: 480893 - DNA, 33 bp, Homo sapien
tccccctcttgctacactggaaatggtaaattg

SEQ ID NO: 480894 - DNA, 33 bp, Homo sapien
tccccctcttgctacattggaaatggtaaattg

SEQ ID NO: 480895 - DNA, 33 bp, Homo sapien
tgcccaagaccttttaagctgaaaacatgcata

SEQ ID NO: 480896 - DNA, 33 bp, Homo sapien
tgcccaagaccttttaggctgaaaacatgcata

SEQ ID NO: 480897 - DNA, 33 bp, Homo sapien
ggttctcactcagttccctttcatgtttctgtt

SEQ ID NO: 480898 - DNA, 33 bp, Homo sapien
ggttctcactcagttctctttcatgtttctgtt

SEQ ID NO: 480899 - DNA, 33 bp, Homo sapien
tctctggctatttggaaattggccatctggaaa

SEQ ID NO: 480900 - DNA, 33 bp, Homo sapien
tctctggctatttggagattggccatctggaaa

SEQ ID NO: 480901 - DNA, 33 bp, Homo sapien
taaagctacatccagaaagttcagtagaacccc

SEQ ID NO: 480902 - DNA, 33 bp, Homo sapien
taaagctacatccagatagttcagtagaacccc

SEQ ID NO: 480903 - DNA, 33 bp, Homo sapien
tattactatgaaaaaaaagaagaattgatattg

SEQ ID NO: 480904 - DNA, 33 bp, Homo sapien
tattactatgaaaaaagagaagaattgatattg

SEQ ID NO: 480905 - DNA, 33 bp, Homo sapien
agaagacacagatggaaaactcacactcaaata

SEQ ID NO: 480906 - DNA, 33 bp, Homo sapien
agaagacacagatggataactcacactcaaata

SEQ ID NO: 480907 - DNA, 33 bp, Homo sapien
tctttttttttctattcaacactgtcagtctgc

SEQ ID NO: 480908 - DNA, 33 bp, Homo sapien
tctttttttttctatttaacactgtcagtctgc

SEQ ID NO: 480909 - DNA, 33 bp, Homo sapien
cacagagctcacaatcaaaggtggaagaaagac

SEQ ID NO: 480910 - DNA, 33 bp, Homo sapien
cacagagctcacaatcgaaggtggaagaaagac

SEQ ID NO: 480911 - DNA, 33 bp, Homo sapien
agaaagacaagtcaacaggcaatgataatgtcc

SEQ ID NO: 480912 - DNA, 33 bp, Homo sapien
agaaagacaagtcaacgggcaatgataatgtcc

SEQ ID NO: 480913 - DNA, 33 bp, Homo sapien
actttctacttggtcagcctttgattatgcaac

SEQ ID NO: 480914 - DNA, 33 bp, Homo sapien
actttctacttggtcatcctttgattatgcaac

SEQ ID NO: 480915 - DNA, 33 bp, Homo sapien
accccactgtttcctgcatgatgggatgttggc

SEQ ID NO: 480916 - DNA, 33 bp, Homo sapien
accccactgtttcctggatgatgggatgttggc

SEQ ID NO: 480917 - DNA, 33 bp, Homo sapien
gcaaccttgagaaccacaggtgggaaaacatga

SEQ ID NO: 480918 - DNA, 33 bp, Homo sapien
gcaaccttgagaaccagaggtgggaaaacatga

SEQ ID NO: 480919 - DNA, 33 bp, Homo sapien
caaggttgattgcaaaaatctttccatgcctta

SEQ ID NO: 480920 - DNA, 33 bp, Homo sapien
caaggttgattgcaaacatctttccatgcctta

SEQ ID NO: 480921 - DNA, 33 bp, Homo sapien
tgcaaaccagatcgaactgtaggattaccttta

SEQ ID NO: 480922 - DNA, 33 bp, Homo sapien
tgcaaaccagatcgaattgtaggattaccttta

SEQ ID NO: 480923 - DNA, 33 bp, Homo sapien
taggcattttgtactagaaaatttccactcaaa

SEQ ID NO: 480924 - DNA, 33 bp, Homo sapien
taggcattttgtactataaaatttccactcaaa

SEQ ID NO: 480925 - DNA, 33 bp, Homo sapien
agattactatagccaacgaaatctactagtaat

SEQ ID NO: 480926 - DNA, 33 bp, Homo sapien
agattactatagccaatgaaatctactagtaat

SEQ ID NO: 480927 - DNA, 33 bp, Homo sapien
cccagcaagtgccagaagaagcaagaacgaatc

SEQ ID NO: 480928 - DNA, 33 bp, Homo sapien
cccagcaagtgccagaggaagcaagaacgaatc

SEQ ID NO: 480929 - DNA, 33 bp, Homo sapien
aaggaggcgccctgtgaagaaaataagaagggc

SEQ ID NO: 480930 - DNA, 33 bp, Homo sapien
aaggaggcgccctgtggagaaaataagaagggc

SEQ ID NO: 480931 - DNA, 33 bp, Homo sapien
ttaagttgtgagaacaagattctaaggagggaa

SEQ ID NO: 480932 - DNA, 33 bp, Homo sapien
ttaagttgtgagaacacgattctaaggagggaa

SEQ ID NO: 480933 - DNA, 33 bp, Homo sapien
cacccagtgattttaacatccattgccgatcct

SEQ ID NO: 480934 - DNA, 33 bp, Homo sapien
cacccagtgattttaatatccattgccgatcct

SEQ ID NO: 480935 - DNA, 33 bp, Homo sapien
ggtttagagtagggtaagtataaggtgagtata

SEQ ID NO: 480936 - DNA, 33 bp, Homo sapien
ggtttagagtagggtacgtataaggtgagtata

SEQ ID NO: 480937 - DNA, 33 bp, Homo sapien
tctccttcatggattacaactgtctttaagagg

SEQ ID NO: 480938 - DNA, 33 bp, Homo sapien
tctccttcatggattagaactgtctttaagagg

SEQ ID NO: 480939 - DNA, 33 bp, Homo sapien
cagcgcatctaaaacgcattctctaagactagg

SEQ ID NO: 480940 - DNA, 33 bp, Homo sapien
cagcgcatctaaaacgtattctctaagactagg

SEQ ID NO: 480941 - DNA, 33 bp, Homo sapien
ttaattatatgtgttacgtaagaatttaaagtc

SEQ ID NO: 480942 - DNA, 33 bp, Homo sapien
ttaattatatgtgttatgtaagaatttaaagtc

SEQ ID NO: 480943 - DNA, 33 bp, Homo sapien
gaagaaggaacactgacgggccaggaggctgtt

SEQ ID NO: 480944 - DNA, 33 bp, Homo sapien
gaagaaggaacactgatgggccaggaggctgtt

SEQ ID NO: 480945 - DNA, 33 bp, Homo sapien
atctagcagggtttgacggtttccacaaactct

SEQ ID NO: 480946 - DNA, 33 bp, Homo sapien
atctagcagggtttgatggtttccacaaactct

SEQ ID NO: 480947 - DNA, 33 bp, Homo sapien
gtctaacttctcacctaaaaatgaatcacttat

SEQ ID NO: 480948 - DNA, 33 bp, Homo sapien
gtctaacttctcacctgaaaatgaatcacttat

SEQ ID NO: 480949 - DNA, 33 bp, Homo sapien
ctgttcctccttgacgccagaatacaaatgttc

SEQ ID NO: 480950 - DNA, 33 bp, Homo sapien
ctgttcctccttgacggcagaatacaaatgttc

SEQ ID NO: 480951 - DNA, 33 bp, Homo sapien
tctctgtaaaattctgaaaatcttgagccacag

SEQ ID NO: 480952 - DNA, 33 bp, Homo sapien
tctctgtaaaattctggaaatcttgagccacag

SEQ ID NO: 480953 - DNA, 33 bp, Homo sapien
ctcctgatttcaaatcccccagcagagtactat

SEQ ID NO: 480954 - DNA, 33 bp, Homo sapien
ctcctgatttcaaatctcccagcagagtactat

SEQ ID NO: 480955 - DNA, 33 bp, Homo sapien
ccataattgtggcagacacatagagttttaaac

SEQ ID NO: 480956 - DNA, 33 bp, Homo sapien
ccataattgtggcagatacatagagttttaaac

SEQ ID NO: 480957 - DNA, 33 bp, Homo sapien
agaggtaggatctcagccagtgcaaagtgaagt

SEQ ID NO: 480958 - DNA, 33 bp, Homo sapien
agaggtaggatctcaggcagtgcaaagtgaagt

SEQ ID NO: 480959 - DNA, 33 bp, Homo sapien
gaaaacaagtgtgttcaattagctttgttcaga

SEQ ID NO: 480960 - DNA, 33 bp, Homo sapien
gaaaacaagtgtgttcgattagctttgttcaga

SEQ ID NO: 480961 - DNA, 33 bp, Homo sapien
caagtggtgcagtcacaaggaaaccagtcacca

SEQ ID NO: 480962 - DNA, 33 bp, Homo sapien
caagtggtgcagtcacgaggaaaccagtcacca

SEQ ID NO: 480963 - DNA, 33 bp, Homo sapien
gaatccctctctacaaatgaatccccacgaagc

SEQ ID NO: 480964 - DNA, 33 bp, Homo sapien
gaatccctctctacaagtgaatccccacgaagc

SEQ ID NO: 480965 - DNA, 33 bp, Homo sapien
aactctgaggatgctccctcaaagacagctcaa

SEQ ID NO: 480966 - DNA, 33 bp, Homo sapien
aactctgaggatgctctctcaaagacagctcaa

SEQ ID NO: 480967 - DNA, 33 bp, Homo sapien
ggtttttccttagcaactgggttctgtgcagcc

SEQ ID NO: 480968 - DNA, 33 bp, Homo sapien
ggtttttccttagcaagtgggttctgtgcagcc

SEQ ID NO: 480969 - DNA, 33 bp, Homo sapien
tcttcaaagcggagacaattagaagttgaaggc

SEQ ID NO: 480970 - DNA, 33 bp, Homo sapien
tcttcaaagcggagaccattagaagttgaaggc

SEQ ID NO: 480971 - DNA, 33 bp, Homo sapien
ccacaaaggaacaaaccaagctatgaggggact

SEQ ID NO: 480972 - DNA, 33 bp, Homo sapien
ccacaaaggaacaaactaagctatgaggggact

SEQ ID NO: 480973 - DNA, 33 bp, Homo sapien
atgtcatctcttttcccaactggaataaaagct

SEQ ID NO: 480974 - DNA, 33 bp, Homo sapien
atgtcatctcttttccgaactggaataaaagct

SEQ ID NO: 480975 - DNA, 33 bp, Homo sapien
cgagtttgacaacctccatcagtatgtccccag

SEQ ID NO: 480976 - DNA, 33 bp, Homo sapien
cgagtttgacaacctctatcagtatgtccccag

SEQ ID NO: 480977 - DNA, 33 bp, Homo sapien
gctcctacccgaagaaactataggctagaatga

SEQ ID NO: 480978 - DNA, 33 bp, Homo sapien
gctcctacccgaagaacctataggctagaatga

SEQ ID NO: 480979 - DNA, 33 bp, Homo sapien
aagataactggaataagtcatgaactctaggat

SEQ ID NO: 480980 - DNA, 33 bp, Homo sapien
aagataactggaataattcatgaactctaggat

SEQ ID NO: 480981 - DNA, 33 bp, Homo sapien
tctccagagttgttcacctacttccagatgaag

SEQ ID NO: 480982 - DNA, 33 bp, Homo sapien
tctccagagttgttcagctacttccagatgaag

SEQ ID NO: 480983 - DNA, 33 bp, Homo sapien
agggataaagttcagcgcagtatttttcaatta

SEQ ID NO: 480984 - DNA, 33 bp, Homo sapien
agggataaagttcagctcagtatttttcaatta

SEQ ID NO: 480985 - DNA, 33 bp, Homo sapien
taagctgcccaagtaaacaaatactctatccag

SEQ ID NO: 480986 - DNA, 33 bp, Homo sapien
taagctgcccaagtaagcaaatactctatccag

SEQ ID NO: 480987 - DNA, 33 bp, Homo sapien
aaagccaaagagggaacagggacaaatcaaaag

SEQ ID NO: 480988 - DNA, 33 bp, Homo sapien
aaagccaaagagggaagagggacaaatcaaaag

SEQ ID NO: 480989 - DNA, 33 bp, Homo sapien
gaggctgacacaactccactagtattttgcttc

SEQ ID NO: 480990 - DNA, 33 bp, Homo sapien
gaggctgacacaactctactagtattttgcttc

SEQ ID NO: 480991 - DNA, 33 bp, Homo sapien
agttatgaagtcccaaagtgccatgaactgaac

SEQ ID NO: 480992 - DNA, 33 bp, Homo sapien
agttatgaagtcccaatgtgccatgaactgaac

SEQ ID NO: 480993 - DNA, 33 bp, Homo sapien
acctcgctcctctttacagtacagctgcaggct

SEQ ID NO: 480994 - DNA, 33 bp, Homo sapien
acctcgctcctctttagagtacagctgcaggct

SEQ ID NO: 480995 - DNA, 33 bp, Homo sapien
agatgccctccataccacattgtctcccaggag

SEQ ID NO: 480996 - DNA, 33 bp, Homo sapien
agatgccctccatacctcattgtctcccaggag

SEQ ID NO: 480997 - DNA, 33 bp, Homo sapien
aattacactgccttcaacacactcgggatggtt

SEQ ID NO: 480998 - DNA, 33 bp, Homo sapien
aattacactgccttcaccacactcgggatggtt

SEQ ID NO: 480999 - DNA, 33 bp, Homo sapien
tttaagggatgttgagaaaaagtatctcacttt

SEQ ID NO: 481000 - DNA, 33 bp, Homo sapien
tttaagggatgttgaggaaaagtatctcacttt

SEQ ID NO: 481001 - DNA, 33 bp, Homo sapien
cacgattaatgtaaaacgttgctttccatgtgc

SEQ ID NO: 481002 - DNA, 33 bp, Homo sapien
cacgattaatgtaaaatgttgctttccatgtgc

SEQ ID NO: 481003 - DNA, 33 bp, Homo sapien
gatgcttctcatgatacgtacatctactccttg

SEQ ID NO: 481004 - DNA, 33 bp, Homo sapien
gatgcttctcatgatatgtacatctactccttg

SEQ ID NO: 481005 - DNA, 33 bp, Homo sapien
gccaaatattggctaaaaagttctgtctttctc

SEQ ID NO: 481006 - DNA, 33 bp, Homo sapien
gccaaatattggctaacaagttctgtctttctc

SEQ ID NO: 481007 - DNA, 33 bp, Homo sapien
cagaaagcaatggttaagaaagccaaaaaccaa

SEQ ID NO: 481008 - DNA, 33 bp, Homo sapien
cagaaagcaatggttatgaaagccaaaaaccaa

SEQ ID NO: 481009 - DNA, 33 bp, Homo sapien
catctggttttagcaacatctggttgagctatc

SEQ ID NO: 481010 - DNA, 33 bp, Homo sapien
catctggttttagcaatatctggttgagctatc

SEQ ID NO: 481011 - DNA, 33 bp, Homo sapien
tataagagtcatcactgaacatcaaatagagga

SEQ ID NO: 481012 - DNA, 33 bp, Homo sapien
tataagagtcatcacttaacatcaaatagagga

SEQ ID NO: 481013 - DNA, 33 bp, Homo sapien
aatatagcagaagtgacaacaagttgtaacatc

SEQ ID NO: 481014 - DNA, 33 bp, Homo sapien
aatatagcagaagtgataacaagttgtaacatc

SEQ ID NO: 481015 - DNA, 33 bp, Homo sapien
aaactctttgtggggacagaatagagggaacaa

SEQ ID NO: 481016 - DNA, 33 bp, Homo sapien
aaactctttgtggggatagaatagagggaacaa

SEQ ID NO: 481017 - DNA, 33 bp, Homo sapien
ataactgggagctaaacagtaggcacttaggga

SEQ ID NO: 481018 - DNA, 33 bp, Homo sapien
ataactgggagctaaatagtaggcacttaggga

SEQ ID NO: 481019 - DNA, 33 bp, Homo sapien
aagtcaataagcttataaacatctgaacaaaac

SEQ ID NO: 481020 - DNA, 33 bp, Homo sapien
aagtcaataagcttatcaacatctgaacaaaac

SEQ ID NO: 481021 - DNA, 33 bp, Homo sapien
gctactgcgctcaataacacttattatttatcc

SEQ ID NO: 481022 - DNA, 33 bp, Homo sapien
gctactgcgctcaatagcacttattatttatcc

SEQ ID NO: 481023 - DNA, 33 bp, Homo sapien
actcctgtggacaagaaagaccaaaacagtttt

SEQ ID NO: 481024 - DNA, 33 bp, Homo sapien
actcctgtggacaagagagaccaaaacagtttt

SEQ ID NO: 481025 - DNA, 33 bp, Homo sapien
agtaagttgtggtaaaccaacttgaagacttgt

SEQ ID NO: 481026 - DNA, 33 bp, Homo sapien
agtaagttgtggtaaatcaacttgaagacttgt

SEQ ID NO: 481027 - DNA, 33 bp, Homo sapien
aatgtgagagaaatcagatccaatactggtata

SEQ ID NO: 481028 - DNA, 33 bp, Homo sapien
aatgtgagagaaatcatatccaatactggtata

SEQ ID NO: 481029 - DNA, 33 bp, Homo sapien
gagaagttgacgttggacaaaagtgttattcat

SEQ ID NO: 481030 - DNA, 33 bp, Homo sapien
gagaagttgacgttgggcaaaagtgttattcat

SEQ ID NO: 481031 - DNA, 33 bp, Homo sapien
aattccagagaaatgacaacactagcctaggaa

SEQ ID NO: 481032 - DNA, 33 bp, Homo sapien
aattccagagaaatgataacactagcctaggaa

SEQ ID NO: 481033 - DNA, 33 bp, Homo sapien
acactaggaggcatgaaagaacacggcaagttc

SEQ ID NO: 481034 - DNA, 33 bp, Homo sapien
acactaggaggcatgagagaacacggcaagttc

SEQ ID NO: 481035 - DNA, 33 bp, Homo sapien
cgagaaagcctaagtacggtatctgtataggta

SEQ ID NO: 481036 - DNA, 33 bp, Homo sapien
cgagaaagcctaagtatggtatctgtataggta

SEQ ID NO: 481037 - DNA, 33 bp, Homo sapien
gcataggagataggaaaatgaagagatgaagat

SEQ ID NO: 481038 - DNA, 33 bp, Homo sapien
gcataggagataggaagatgaagagatgaagat

SEQ ID NO: 481039 - DNA, 33 bp, Homo sapien
ggagagcctgaatagcacatttattgggtctat

SEQ ID NO: 481040 - DNA, 33 bp, Homo sapien
ggagagcctgaatagcgcatttattgggtctat

SEQ ID NO: 481041 - DNA, 33 bp, Homo sapien
gagaactaaggtaaaacgacaagacacaatgag

SEQ ID NO: 481042 - DNA, 33 bp, Homo sapien
gagaactaaggtaaaaggacaagacacaatgag

SEQ ID NO: 481043 - DNA, 33 bp, Homo sapien
tttttacaccttgagacattttgctgctatgag

SEQ ID NO: 481044 - DNA, 33 bp, Homo sapien
tttttacaccttgagatattttgctgctatgag

SEQ ID NO: 481045 - DNA, 33 bp, Homo sapien
atgtgagattgttacaatattccttattcttgt

SEQ ID NO: 481046 - DNA, 33 bp, Homo sapien
atgtgagattgttacagtattccttattcttgt

SEQ ID NO: 481047 - DNA, 33 bp, Homo sapien
aaaaggtgtgtaggataaagttagaggaaacca

SEQ ID NO: 481048 - DNA, 33 bp, Homo sapien
aaaaggtgtgtaggatgaagttagaggaaacca

SEQ ID NO: 481049 - DNA, 33 bp, Homo sapien
aagctgcttggatacaaagaagcaagatacaag

SEQ ID NO: 481050 - DNA, 33 bp, Homo sapien
aagctgcttggatacagagaagcaagatacaag

SEQ ID NO: 481051 - DNA, 33 bp, Homo sapien
tatgttagtagccaaaataattgtcccaagatc

SEQ ID NO: 481052 - DNA, 33 bp, Homo sapien
tatgttagtagccaaagtaattgtcccaagatc

SEQ ID NO: 481053 - DNA, 33 bp, Homo sapien
taatcacactaactaactggctctttaaatgta

SEQ ID NO: 481054 - DNA, 33 bp, Homo sapien
taatcacactaactaattggctctttaaatgta

SEQ ID NO: 481055 - DNA, 33 bp, Homo sapien
cacaaaacattcatcactctcaggttattctaa

SEQ ID NO: 481056 - DNA, 33 bp, Homo sapien
cacaaaacattcatcattctcaggttattctaa

SEQ ID NO: 481057 - DNA, 33 bp, Homo sapien
ttacttcctagggatacacaatttagcagttgg

SEQ ID NO: 481058 - DNA, 33 bp, Homo sapien
ttacttcctagggatagacaatttagcagttgg

SEQ ID NO: 481059 - DNA, 33 bp, Homo sapien
ttagccccaaagcgtacaggtccacttcctttc

SEQ ID NO: 481060 - DNA, 33 bp, Homo sapien
ttagccccaaagcgtagaggtccacttcctttc

SEQ ID NO: 481061 - DNA, 33 bp, Homo sapien
taattttagatgtgtccagaaatctttgactat

SEQ ID NO: 481062 - DNA, 33 bp, Homo sapien
taattttagatgtgtcgagaaatctttgactat

SEQ ID NO: 481063 - DNA, 33 bp, Homo sapien
tctatacgccattaccactaaagtttacatatt

SEQ ID NO: 481064 - DNA, 33 bp, Homo sapien
tctatacgccattacctctaaagtttacatatt

SEQ ID NO: 481065 - DNA, 33 bp, Homo sapien
gatatcattccttccaactctctgaacatcagc

SEQ ID NO: 481066 - DNA, 33 bp, Homo sapien
gatatcattccttccatctctctgaacatcagc

SEQ ID NO: 481067 - DNA, 33 bp, Homo sapien
agagccacaagagatacggtacaacataaatat

SEQ ID NO: 481068 - DNA, 33 bp, Homo sapien
agagccacaagagatatggtacaacataaatat

SEQ ID NO: 481069 - DNA, 33 bp, Homo sapien
ttccctttatgatggacagttcaaattggtaat

SEQ ID NO: 481070 - DNA, 33 bp, Homo sapien
ttccctttatgatggatagttcaaattggtaat

SEQ ID NO: 481071 - DNA, 33 bp, Homo sapien
atgagacatatactgaaaatctcaatttggatg

SEQ ID NO: 481072 - DNA, 33 bp, Homo sapien
atgagacatatactgagaatctcaatttggatg

SEQ ID NO: 481073 - DNA, 33 bp, Homo sapien
atcaggattcagaaaagtattcactgtaaaaca

SEQ ID NO: 481074 - DNA, 33 bp, Homo sapien
atcaggattcagaaaattattcactgtaaaaca

SEQ ID NO: 481075 - DNA, 33 bp, Homo sapien
tcatttctaaaggtgaggttaagcactctcttt

SEQ ID NO: 481076 - DNA, 33 bp, Homo sapien
tcatttctaaaggtgatgttaagcactctcttt

SEQ ID NO: 481077 - DNA, 33 bp, Homo sapien
ggaggtaagtgccgagccctggatttggttggc

SEQ ID NO: 481078 - DNA, 33 bp, Homo sapien
ggaggtaagtgccgagtcctggatttggttggc

SEQ ID NO: 481079 - DNA, 33 bp, Homo sapien
tgaaagttggaacctacatggaaggaagcccat

SEQ ID NO: 481080 - DNA, 33 bp, Homo sapien
tgaaagttggaacctagatggaaggaagcccat

SEQ ID NO: 481081 - DNA, 33 bp, Homo sapien
ctgaggatgtaaggcccaaaaagagactgaggc

SEQ ID NO: 481082 - DNA, 33 bp, Homo sapien
ctgaggatgtaaggccgaaaaagagactgaggc

SEQ ID NO: 481083 - DNA, 33 bp, Homo sapien
tgagcctgcagaaaacccggtgacgccgatgct

SEQ ID NO: 481084 - DNA, 33 bp, Homo sapien
tgagcctgcagaaaacgcggtgacgccgatgct

SEQ ID NO: 481085 - DNA, 33 bp, Homo sapien
tccatccttcctcccgcattccttctcccaaag

SEQ ID NO: 481086 - DNA, 33 bp, Homo sapien
tccatccttcctcccgtattccttctcccaaag

SEQ ID NO: 481087 - DNA, 33 bp, Homo sapien
tcagtccctttctaaaccaccctcttctatttc

SEQ ID NO: 481088 - DNA, 33 bp, Homo sapien
tcagtccctttctaaatcaccctcttctatttc

SEQ ID NO: 481089 - DNA, 33 bp, Homo sapien
ttaggtttgtttcacaccaatctacatttttaa

SEQ ID NO: 481090 - DNA, 33 bp, Homo sapien
ttaggtttgtttcacagcaatctacatttttaa

SEQ ID NO: 481091 - DNA, 33 bp, Homo sapien
gcagatgacaatctacaaagaacaagttacaca

SEQ ID NO: 481092 - DNA, 33 bp, Homo sapien
gcagatgacaatctacgaagaacaagttacaca

SEQ ID NO: 481093 - DNA, 33 bp, Homo sapien
gccccatagaagttaacagaaccagtgctgggg

SEQ ID NO: 481094 - DNA, 33 bp, Homo sapien
gccccatagaagttaatagaaccagtgctgggg

SEQ ID NO: 481095 - DNA, 33 bp, Homo sapien
agttaaatcttaaaaaatcttgaatataaacag

SEQ ID NO: 481096 - DNA, 33 bp, Homo sapien
agttaaatcttaaaaagtcttgaatataaacag

SEQ ID NO: 481097 - DNA, 33 bp, Homo sapien
agaaatttccacagagaaagccctttagttgag

SEQ ID NO: 481098 - DNA, 33 bp, Homo sapien
agaaatttccacagaggaagccctttagttgag

SEQ ID NO: 481099 - DNA, 33 bp, Homo sapien
catattactgggattaacctaactttgagagac

SEQ ID NO: 481100 - DNA, 33 bp, Homo sapien
catattactgggattagcctaactttgagagac

SEQ ID NO: 481101 - DNA, 33 bp, Homo sapien
ggagcactaggatgaacaaacagggaagcagga

SEQ ID NO: 481102 - DNA, 33 bp, Homo sapien
ggagcactaggatgaataaacagggaagcagga

SEQ ID NO: 481103 - DNA, 33 bp, Homo sapien
ctttgaaccagtcttaccactttgtaacactgt

SEQ ID NO: 481104 - DNA, 33 bp, Homo sapien
ctttgaaccagtcttatcactttgtaacactgt

SEQ ID NO: 481105 - DNA, 33 bp, Homo sapien
tagggaagttaccaaccgcaaagtctagcctag

SEQ ID NO: 481106 - DNA, 33 bp, Homo sapien
tagggaagttaccaactgcaaagtctagcctag

SEQ ID NO: 481107 - DNA, 33 bp, Homo sapien
gagatgggatatataaaggtattagatggtagc

SEQ ID NO: 481108 - DNA, 33 bp, Homo sapien
gagatgggatatataagggtattagatggtagc

SEQ ID NO: 481109 - DNA, 33 bp, Homo sapien
gcagagcttaaccacaagaatcatttatttcaa

SEQ ID NO: 481110 - DNA, 33 bp, Homo sapien
gcagagcttaaccacaggaatcatttatttcaa

SEQ ID NO: 481111 - DNA, 33 bp, Homo sapien
aatgtttaatttaccaatctttgaatgagaaaa

SEQ ID NO: 481112 - DNA, 33 bp, Homo sapien
aatgtttaatttaccagtctttgaatgagaaaa

SEQ ID NO: 481113 - DNA, 33 bp, Homo sapien
gtgcctggcaaataataatcagtgaatatatac

SEQ ID NO: 481114 - DNA, 33 bp, Homo sapien
gtgcctggcaaataatcatcagtgaatatatac

SEQ ID NO: 481115 - DNA, 33 bp, Homo sapien
cctggaagtcctgctcacatctcttccttctct

SEQ ID NO: 481116 - DNA, 33 bp, Homo sapien
cctggaagtcctgctcgcatctcttccttctct

SEQ ID NO: 481117 - DNA, 33 bp, Homo sapien
aattaaggtcagaaaacgagatgaaactaggtt

SEQ ID NO: 481118 - DNA, 33 bp, Homo sapien
aattaaggtcagaaaatgagatgaaactaggtt

SEQ ID NO: 481119 - DNA, 33 bp, Homo sapien
ccagcaatctcgctacagggtatctacccgaaa

SEQ ID NO: 481120 - DNA, 33 bp, Homo sapien
ccagcaatctcgctacggggtatctacccgaaa

SEQ ID NO: 481121 - DNA, 33 bp, Homo sapien
gttctttgttctcctgaagtctgatttagaaca

SEQ ID NO: 481122 - DNA, 33 bp, Homo sapien
gttctttgttctcctggagtctgatttagaaca

SEQ ID NO: 481123 - DNA, 33 bp, Homo sapien
ttccaaaactctgctacggcataatatactctg

SEQ ID NO: 481124 - DNA, 33 bp, Homo sapien
ttccaaaactctgctatggcataatatactctg

SEQ ID NO: 481125 - DNA, 33 bp, Homo sapien
ttgtcagatatttccacgattcagtaatttttg

SEQ ID NO: 481126 - DNA, 33 bp, Homo sapien
ttgtcagatatttccatgattcagtaatttttg

SEQ ID NO: 481127 - DNA, 33 bp, Homo sapien
aggcagaaaaggacctaagaacagaagggacaa

SEQ ID NO: 481128 - DNA, 33 bp, Homo sapien
aggcagaaaaggacctgagaacagaagggacaa

SEQ ID NO: 481129 - DNA, 33 bp, Homo sapien
aacaaggagtatacagacggatgctgatgtgtt

SEQ ID NO: 481130 - DNA, 33 bp, Homo sapien
aacaaggagtatacagtcggatgctgatgtgtt

SEQ ID NO: 481131 - DNA, 33 bp, Homo sapien
ttaaaatcgatgagcacatttatgtattaccta

SEQ ID NO: 481132 - DNA, 33 bp, Homo sapien
ttaaaatcgatgagcagatttatgtattaccta

SEQ ID NO: 481133 - DNA, 33 bp, Homo sapien
atagaaagatcaaggagagagatgcagatctgt

SEQ ID NO: 481134 - DNA, 33 bp, Homo sapien
atagaaagatcaaggatagagatgcagatctgt

SEQ ID NO: 481135 - DNA, 33 bp, Homo sapien
aatgattagtgatgctcaagtgttgctttgctt

SEQ ID NO: 481136 - DNA, 33 bp, Homo sapien
aatgattagtgatgctgaagtgttgctttgctt

SEQ ID NO: 481137 - DNA, 33 bp, Homo sapien
ttgaaatacagggcacactggtaaatgcccact

SEQ ID NO: 481138 - DNA, 33 bp, Homo sapien
ttgaaatacagggcacgctggtaaatgcccact

SEQ ID NO: 481139 - DNA, 33 bp, Homo sapien
acactcatctatactccgagatggctgtttact

SEQ ID NO: 481140 - DNA, 33 bp, Homo sapien
acactcatctatactctgagatggctgtttact

SEQ ID NO: 481141 - DNA, 33 bp, Homo sapien
ccttctgcaatttgccaaagagccgatgaattc

SEQ ID NO: 481142 - DNA, 33 bp, Homo sapien
ccttctgcaatttgccgaagagccgatgaattc

SEQ ID NO: 481143 - DNA, 33 bp, Homo sapien
aagaaagcaacaggtgcagaaagtagcatcact

SEQ ID NO: 481144 - DNA, 33 bp, Homo sapien
aagaaagcaacaggtggagaaagtagcatcact

SEQ ID NO: 481145 - DNA, 33 bp, Homo sapien
gaggtctgaaataacccgaaccaccccctagct

SEQ ID NO: 481146 - DNA, 33 bp, Homo sapien
gaggtctgaaataacctgaaccaccccctagct

SEQ ID NO: 481147 - DNA, 33 bp, Homo sapien
ggagttgtctattcacactgtctccaatcccac

SEQ ID NO: 481148 - DNA, 33 bp, Homo sapien
ggagttgtctattcacgctgtctccaatcccac

SEQ ID NO: 481149 - DNA, 33 bp, Homo sapien
ctcacctccaccctacaagtgattgggactaca

SEQ ID NO: 481150 - DNA, 33 bp, Homo sapien
ctcacctccaccctacgagtgattgggactaca

SEQ ID NO: 481151 - DNA, 33 bp, Homo sapien
ccctcaaatgctcctacacatgaacattggccc

SEQ ID NO: 481152 - DNA, 33 bp, Homo sapien
ccctcaaatgctcctatacatgaacattggccc

SEQ ID NO: 481153 - DNA, 33 bp, Homo sapien
agatggccagctttgccacaaatacagcttgtt

SEQ ID NO: 481154 - DNA, 33 bp, Homo sapien
agatggccagctttgctacaaatacagcttgtt

SEQ ID NO: 481155 - DNA, 33 bp, Homo sapien
ctagaaattatcaaaccgtacacttacaatggg

SEQ ID NO: 481156 - DNA, 33 bp, Homo sapien
ctagaaattatcaaactgtacacttacaatggg

SEQ ID NO: 481157 - DNA, 33 bp, Homo sapien
tgaggaagtgcaatcaactcatatttagtgatt

SEQ ID NO: 481158 - DNA, 33 bp, Homo sapien
tgaggaagtgcaatcagctcatatttagtgatt

SEQ ID NO: 481159 - DNA, 33 bp, Homo sapien
ggtttcaaattgtgcaaaaacatctctccagat

SEQ ID NO: 481160 - DNA, 33 bp, Homo sapien
ggtttcaaattgtgcagaaacatctctccagat

SEQ ID NO: 481161 - DNA, 33 bp, Homo sapien
gtagataagggatatacctaacagattgacaga

SEQ ID NO: 481162 - DNA, 33 bp, Homo sapien
gtagataagggatatagctaacagattgacaga

SEQ ID NO: 481163 - DNA, 33 bp, Homo sapien
ggtattggcagtactacattttaagacattttc

SEQ ID NO: 481164 - DNA, 33 bp, Homo sapien
ggtattggcagtactatattttaagacattttc

SEQ ID NO: 481165 - DNA, 33 bp, Homo sapien
gagtggctctcctacaatcgtgtggcttggggt

SEQ ID NO: 481166 - DNA, 33 bp, Homo sapien
gagtggctctcctacagtcgtgtggcttggggt

SEQ ID NO: 481167 - DNA, 33 bp, Homo sapien
tctcttcaattcattaccctccagttcaaacag

SEQ ID NO: 481168 - DNA, 33 bp, Homo sapien
tctcttcaattcattatcctccagttcaaacag

SEQ ID NO: 481169 - DNA, 33 bp, Homo sapien
agcttgtgccttcttacggataacccactcagg

SEQ ID NO: 481170 - DNA, 33 bp, Homo sapien
agcttgtgccttcttatggataacccactcagg

SEQ ID NO: 481171 - DNA, 33 bp, Homo sapien
aaacgtgaaagaaaaaacaccaagcactgctct

SEQ ID NO: 481172 - DNA, 33 bp, Homo sapien
aaacgtgaaagaaaaatcaccaagcactgctct

SEQ ID NO: 481173 - DNA, 33 bp, Homo sapien
tatatgtgtcaaagcaactgattgaagagtaga

SEQ ID NO: 481174 - DNA, 33 bp, Homo sapien
tatatgtgtcaaagcatctgattgaagagtaga

SEQ ID NO: 481175 - DNA, 33 bp, Homo sapien
ctagctttaattcaacgagagggttagctttag

SEQ ID NO: 481176 - DNA, 33 bp, Homo sapien
ctagctttaattcaactagagggttagctttag

SEQ ID NO: 481177 - DNA, 33 bp, Homo sapien
tttactagctgtgaaaacttgttcaaattgtat

SEQ ID NO: 481178 - DNA, 33 bp, Homo sapien
tttactagctgtgaaaccttgttcaaattgtat

SEQ ID NO: 481179 - DNA, 33 bp, Homo sapien
aactaatcacatgggacgcccacttcagttagc

SEQ ID NO: 481180 - DNA, 33 bp, Homo sapien
aactaatcacatgggatgcccacttcagttagc

SEQ ID NO: 481181 - DNA, 33 bp, Homo sapien
gttgactttgaagaacaagacgaggttgcaagt

SEQ ID NO: 481182 - DNA, 33 bp, Homo sapien
gttgactttgaagaaccagacgaggttgcaagt

SEQ ID NO: 481183 - DNA, 33 bp, Homo sapien
gaagccttttagaacactgacaagtaaataatc

SEQ ID NO: 481184 - DNA, 33 bp, Homo sapien
gaagccttttagaacattgacaagtaaataatc

SEQ ID NO: 481185 - DNA, 33 bp, Homo sapien
acaaactgaagctctccattttaccaagtcttt

SEQ ID NO: 481186 - DNA, 33 bp, Homo sapien
acaaactgaagctctctattttaccaagtcttt

SEQ ID NO: 481187 - DNA, 33 bp, Homo sapien
tacttggggcttcagccaataaatcgggtgtgt

SEQ ID NO: 481188 - DNA, 33 bp, Homo sapien
tacttggggcttcagctaataaatcgggtgtgt

SEQ ID NO: 481189 - DNA, 33 bp, Homo sapien
agacctaaatgggtacagatggactgtgcataa

SEQ ID NO: 481190 - DNA, 33 bp, Homo sapien
agacctaaatgggtacggatggactgtgcataa

SEQ ID NO: 481191 - DNA, 33 bp, Homo sapien
ttacaactgaagattccaagtgacaagacctaa

SEQ ID NO: 481192 - DNA, 33 bp, Homo sapien
ttacaactgaagattctaagtgacaagacctaa

SEQ ID NO: 481193 - DNA, 33 bp, Homo sapien
tctgtaattagcctaacgatttcaacaactgat

SEQ ID NO: 481194 - DNA, 33 bp, Homo sapien
tctgtaattagcctaatgatttcaacaactgat

SEQ ID NO: 481195 - DNA, 33 bp, Homo sapien
cacattagcatattgacggcttggagaaatcct

SEQ ID NO: 481196 - DNA, 33 bp, Homo sapien
cacattagcatattgatggcttggagaaatcct

SEQ ID NO: 481197 - DNA, 33 bp, Homo sapien
tggttccatgatccaaaacttttaggaaactct

SEQ ID NO: 481198 - DNA, 33 bp, Homo sapien
tggttccatgatccaatacttttaggaaactct

SEQ ID NO: 481199 - DNA, 33 bp, Homo sapien
cttacaaaacttagtcaaattcagcacttccca

SEQ ID NO: 481200 - DNA, 33 bp, Homo sapien
cttacaaaacttagtccaattcagcacttccca

SEQ ID NO: 481201 - DNA, 33 bp, Homo sapien
cagctcacgctaccagactcgatcccatgcctg

SEQ ID NO: 481202 - DNA, 33 bp, Homo sapien
cagctcacgctaccagcctcgatcccatgcctg

SEQ ID NO: 481203 - DNA, 33 bp, Homo sapien
ttgtctttcatataacactgattttgagattta

SEQ ID NO: 481204 - DNA, 33 bp, Homo sapien
ttgtctttcatataactctgattttgagattta

SEQ ID NO: 481205 - DNA, 33 bp, Homo sapien
gtgttgctccattaagaagtagtatgttcattt

SEQ ID NO: 481206 - DNA, 33 bp, Homo sapien
gtgttgctccattaaggagtagtatgttcattt

SEQ ID NO: 481207 - DNA, 33 bp, Homo sapien
tttacacaagagaaaaatggaacacctaaaaat

SEQ ID NO: 481208 - DNA, 33 bp, Homo sapien
tttacacaagagaaaactggaacacctaaaaat

SEQ ID NO: 481209 - DNA, 33 bp, Homo sapien
catacaggtagtataaatctgaccccctacatt

SEQ ID NO: 481210 - DNA, 33 bp, Homo sapien
catacaggtagtataagtctgaccccctacatt

SEQ ID NO: 481211 - DNA, 33 bp, Homo sapien
acttctttgtctggctaaacccaaaaactttag

SEQ ID NO: 481212 - DNA, 33 bp, Homo sapien
acttctttgtctggctgaacccaaaaactttag

SEQ ID NO: 481213 - DNA, 33 bp, Homo sapien
gatagaaactgtctcaaaaatcagtatgttcgt

SEQ ID NO: 481214 - DNA, 33 bp, Homo sapien
gatagaaactgtctcagaaatcagtatgttcgt

SEQ ID NO: 481215 - DNA, 33 bp, Homo sapien
ttttttggtagaatcaacaacttagatagattg

SEQ ID NO: 481216 - DNA, 33 bp, Homo sapien
ttttttggtagaatcaccaacttagatagattg

SEQ ID NO: 481217 - DNA, 33 bp, Homo sapien
gattctgtgacggactaaagctctcaagaaaac

SEQ ID NO: 481218 - DNA, 33 bp, Homo sapien
gattctgtgacggactgaagctctcaagaaaac

SEQ ID NO: 481219 - DNA, 33 bp, Homo sapien
ctgcagcaaggttacacaccaattacctttgga

SEQ ID NO: 481220 - DNA, 33 bp, Homo sapien
ctgcagcaaggttacataccaattacctttgga

SEQ ID NO: 481221 - DNA, 33 bp, Homo sapien
tagacctggttcagaaagccaagtcatgagcac

SEQ ID NO: 481222 - DNA, 33 bp, Homo sapien
tagacctggttcagaaggccaagtcatgagcac

SEQ ID NO: 481223 - DNA, 33 bp, Homo sapien
aacctttaataattacaccagagctgggcacag

SEQ ID NO: 481224 - DNA, 33 bp, Homo sapien
aacctttaataattacgccagagctgggcacag

SEQ ID NO: 481225 - DNA, 33 bp, Homo sapien
ttatatactggaatacaatggcttaaaaatatc

SEQ ID NO: 481226 - DNA, 33 bp, Homo sapien
ttatatactggaatacgatggcttaaaaatatc

SEQ ID NO: 481227 - DNA, 33 bp, Homo sapien
accaatcttagggtgccaatgtcaagtatgatg

SEQ ID NO: 481228 - DNA, 33 bp, Homo sapien
accaatcttagggtgctaatgtcaagtatgatg

SEQ ID NO: 481229 - DNA, 33 bp, Homo sapien
tttctccattctacacactgttagtctgtccat

SEQ ID NO: 481230 - DNA, 33 bp, Homo sapien
tttctccattctacaccctgttagtctgtccat

SEQ ID NO: 481231 - DNA, 33 bp, Homo sapien
aagaaaatgaaatagacgtgatagagaatgtat

SEQ ID NO: 481232 - DNA, 33 bp, Homo sapien
aagaaaatgaaatagatgtgatagagaatgtat

SEQ ID NO: 481233 - DNA, 33 bp, Homo sapien
gatgagaagtacagaaaggactattttaaaatt

SEQ ID NO: 481234 - DNA, 33 bp, Homo sapien
gatgagaagtacagaacggactattttaaaatt

SEQ ID NO: 481235 - DNA, 33 bp, Homo sapien
acagtagctggcatgcaatttagaactatttta

SEQ ID NO: 481236 - DNA, 33 bp, Homo sapien
acagtagctggcatgcgatttagaactatttta

SEQ ID NO: 481237 - DNA, 33 bp, Homo sapien
cataaatatgtccacaagggtgtattcagcagc

SEQ ID NO: 481238 - DNA, 33 bp, Homo sapien
cataaatatgtccacaggggtgtattcagcagc

SEQ ID NO: 481239 - DNA, 33 bp, Homo sapien
tgagacaaatagtccacggatcccagtttgagt

SEQ ID NO: 481240 - DNA, 33 bp, Homo sapien
tgagacaaatagtccatggatcccagtttgagt

SEQ ID NO: 481241 - DNA, 33 bp, Homo sapien
ttttattgtaagctcacattggctgtaattcta

SEQ ID NO: 481242 - DNA, 33 bp, Homo sapien
ttttattgtaagctcatattggctgtaattcta

SEQ ID NO: 481243 - DNA, 33 bp, Homo sapien
ccttacttttatagagacgaatgattcatttcc

SEQ ID NO: 481244 - DNA, 33 bp, Homo sapien
ccttacttttatagagccgaatgattcatttcc

SEQ ID NO: 481245 - DNA, 33 bp, Homo sapien
tcaactctcgtttctcactgactgcttctcctt

SEQ ID NO: 481246 - DNA, 33 bp, Homo sapien
tcaactctcgtttctcgctgactgcttctcctt

SEQ ID NO: 481247 - DNA, 33 bp, Homo sapien
agcccaaagacctagacagataggaatgttgta

SEQ ID NO: 481248 - DNA, 33 bp, Homo sapien
agcccaaagacctagagagataggaatgttgta

SEQ ID NO: 481249 - DNA, 33 bp, Homo sapien
atgaggaagctttaacagtaagagtctgtgtag

SEQ ID NO: 481250 - DNA, 33 bp, Homo sapien
atgaggaagctttaacggtaagagtctgtgtag

SEQ ID NO: 481251 - DNA, 33 bp, Homo sapien
tgcttcctgctatgcacctggagagtctgaacg

SEQ ID NO: 481252 - DNA, 33 bp, Homo sapien
tgcttcctgctatgcatctggagagtctgaacg

SEQ ID NO: 481253 - DNA, 33 bp, Homo sapien
atgctcaactttagaagtaaaatgtctctcctt

SEQ ID NO: 481254 - DNA, 33 bp, Homo sapien
atgctcaactttagaattaaaatgtctctcctt

SEQ ID NO: 481255 - DNA, 33 bp, Homo sapien
cactagaaaatagttaacccatgtcaaaattgc

SEQ ID NO: 481256 - DNA, 33 bp, Homo sapien
cactagaaaatagttatcccatgtcaaaattgc

SEQ ID NO: 481257 - DNA, 33 bp, Homo sapien
tgctcacaatggtgtaactatttaaattcaccc

SEQ ID NO: 481258 - DNA, 33 bp, Homo sapien
tgctcacaatggtgtagctatttaaattcaccc

SEQ ID NO: 481259 - DNA, 33 bp, Homo sapien
tttgtttagaggaccagtatcagcctgagtcac

SEQ ID NO: 481260 - DNA, 33 bp, Homo sapien
tttgtttagaggaccattatcagcctgagtcac

SEQ ID NO: 481261 - DNA, 33 bp, Homo sapien
gtccatacactaagcaggtgtcagtagaaagga

SEQ ID NO: 481262 - DNA, 33 bp, Homo sapien
gtccatacactaagcatgtgtcagtagaaagga

SEQ ID NO: 481263 - DNA, 33 bp, Homo sapien
cacatcgtattgatcacaagagccacaaaactg

SEQ ID NO: 481264 - DNA, 33 bp, Homo sapien
cacatcgtattgatcagaagagccacaaaactg

SEQ ID NO: 481265 - DNA, 33 bp, Homo sapien
cataccctcaaaatcaaagagaaaccctcaaat

SEQ ID NO: 481266 - DNA, 33 bp, Homo sapien
cataccctcaaaatcagagagaaaccctcaaat

SEQ ID NO: 481267 - DNA, 33 bp, Homo sapien
ttaatgggattctgcaccacaaatctagtccct

SEQ ID NO: 481268 - DNA, 33 bp, Homo sapien
ttaatgggattctgcagcacaaatctagtccct

SEQ ID NO: 481269 - DNA, 33 bp, Homo sapien
ttgactgattattaaccagcagttttcagatgt

SEQ ID NO: 481270 - DNA, 33 bp, Homo sapien
ttgactgattattaacgagcagttttcagatgt

SEQ ID NO: 481271 - DNA, 33 bp, Homo sapien
taaacagaaataaagacaaacacatagtgcaag

SEQ ID NO: 481272 - DNA, 33 bp, Homo sapien
taaacagaaataaagagaaacacatagtgcaag

SEQ ID NO: 481273 - DNA, 33 bp, Homo sapien
ttcctaaatgctttgacctctttttaaatgtta

SEQ ID NO: 481274 - DNA, 33 bp, Homo sapien
ttcctaaatgctttgatctctttttaaatgtta

SEQ ID NO: 481275 - DNA, 33 bp, Homo sapien
ttggtaagttattctacagtgtgaagcagtttt

SEQ ID NO: 481276 - DNA, 33 bp, Homo sapien
ttggtaagttattctatagtgtgaagcagtttt

SEQ ID NO: 481277 - DNA, 33 bp, Homo sapien
agcaggattaagaccccaaagtgtgtagagagt

SEQ ID NO: 481278 - DNA, 33 bp, Homo sapien
agcaggattaagaccctaaagtgtgtagagagt

SEQ ID NO: 481279 - DNA, 33 bp, Homo sapien
aaataaataaatccaaaactagatgcattaaag

SEQ ID NO: 481280 - DNA, 33 bp, Homo sapien
aaataaataaatccaagactagatgcattaaag

SEQ ID NO: 481281 - DNA, 33 bp, Homo sapien
agtatccttccagaaacttgcctgcagagagga

SEQ ID NO: 481282 - DNA, 33 bp, Homo sapien
agtatccttccagaaatttgcctgcagagagga

SEQ ID NO: 481283 - DNA, 33 bp, Homo sapien
gttgacagtcctactacgagttacacatcttgg

SEQ ID NO: 481284 - DNA, 33 bp, Homo sapien
gttgacagtcctactatgagttacacatcttgg

SEQ ID NO: 481285 - DNA, 33 bp, Homo sapien
gttatttttgttctaacccagccacatcttccc

SEQ ID NO: 481286 - DNA, 33 bp, Homo sapien
gttatttttgttctaagccagccacatcttccc

SEQ ID NO: 481287 - DNA, 33 bp, Homo sapien
acttcctgaagtcccaatcaatatccctgggta

SEQ ID NO: 481288 - DNA, 33 bp, Homo sapien
acttcctgaagtcccagtcaatatccctgggta

SEQ ID NO: 481289 - DNA, 33 bp, Homo sapien
agaggggtgttacgcacgagcacagagatatga

SEQ ID NO: 481290 - DNA, 33 bp, Homo sapien
agaggggtgttacgcatgagcacagagatatga

SEQ ID NO: 481291 - DNA, 33 bp, Homo sapien
acttttaactcatataataggcttcagacactt

SEQ ID NO: 481292 - DNA, 33 bp, Homo sapien
acttttaactcatatagtaggcttcagacactt

SEQ ID NO: 481293 - DNA, 33 bp, Homo sapien
atgtaaattgagggtacaatgcagcaaatgaac

SEQ ID NO: 481294 - DNA, 33 bp, Homo sapien
atgtaaattgagggtataatgcagcaaatgaac

SEQ ID NO: 481295 - DNA, 33 bp, Homo sapien
catgggaaagcaccaacgtgaagaaagacagga

SEQ ID NO: 481296 - DNA, 33 bp, Homo sapien
catgggaaagcaccaatgtgaagaaagacagga

SEQ ID NO: 481297 - DNA, 33 bp, Homo sapien
cagagggcaaattgaacaagaggccagagagtt

SEQ ID NO: 481298 - DNA, 33 bp, Homo sapien
cagagggcaaattgaagaagaggccagagagtt

SEQ ID NO: 481299 - DNA, 33 bp, Homo sapien
aggagaaaagtctagcactgcattaacattaca

SEQ ID NO: 481300 - DNA, 33 bp, Homo sapien
aggagaaaagtctagccctgcattaacattaca

SEQ ID NO: 481301 - DNA, 33 bp, Homo sapien
aatcatatctgtaaggccccttttaccaaataa

SEQ ID NO: 481302 - DNA, 33 bp, Homo sapien
aatcatatctgtaaggtcccttttaccaaataa

SEQ ID NO: 481303 - DNA, 33 bp, Homo sapien
ttcaatacatctggcaatctggacttcacaaac

SEQ ID NO: 481304 - DNA, 33 bp, Homo sapien
ttcaatacatctggcactctggacttcacaaac

SEQ ID NO: 481305 - DNA, 33 bp, Homo sapien
tttttaaaaagagggccattactgaagcttcac

SEQ ID NO: 481306 - DNA, 33 bp, Homo sapien
tttttaaaaagagggcgattactgaagcttcac

SEQ ID NO: 481307 - DNA, 33 bp, Homo sapien
aaccattagcaatgccccagaaacagatgaaac

SEQ ID NO: 481308 - DNA, 33 bp, Homo sapien
aaccattagcaatgccgcagaaacagatgaaac

SEQ ID NO: 481309 - DNA, 33 bp, Homo sapien
taacagcaaccaataacggattgtaaagtgtaa

SEQ ID NO: 481310 - DNA, 33 bp, Homo sapien
taacagcaaccaataatggattgtaaagtgtaa

SEQ ID NO: 481311 - DNA, 33 bp, Homo sapien
tttagaaaacccaacacaaaactgcaaatacag

SEQ ID NO: 481312 - DNA, 33 bp, Homo sapien
tttagaaaacccaacataaaactgcaaatacag

SEQ ID NO: 481313 - DNA, 33 bp, Homo sapien
tgaaggatgtgacaaccgagccagaaaggggaa

SEQ ID NO: 481314 - DNA, 33 bp, Homo sapien
tgaaggatgtgacaactgagccagaaaggggaa

SEQ ID NO: 481315 - DNA, 33 bp, Homo sapien
cacctcacgtaatccaaccttgctactgctttg

SEQ ID NO: 481316 - DNA, 33 bp, Homo sapien
cacctcacgtaatccagccttgctactgctttg

SEQ ID NO: 481317 - DNA, 33 bp, Homo sapien
gtttgatttaagtagaatcactgagtttgaatt

SEQ ID NO: 481318 - DNA, 33 bp, Homo sapien
gtttgatttaagtagagtcactgagtttgaatt

SEQ ID NO: 481319 - DNA, 33 bp, Homo sapien
ttaaccttaaggtagacgcaaaatagaagttga

SEQ ID NO: 481320 - DNA, 33 bp, Homo sapien
ttaaccttaaggtagaggcaaaatagaagttga

SEQ ID NO: 481321 - DNA, 33 bp, Homo sapien
caagtcacttgccctactaataagatcccttta

SEQ ID NO: 481322 - DNA, 33 bp, Homo sapien
caagtcacttgccctattaataagatcccttta

SEQ ID NO: 481323 - DNA, 33 bp, Homo sapien
cttgatcctgttagtgcaaaccagtgactaata

SEQ ID NO: 481324 - DNA, 33 bp, Homo sapien
cttgatcctgttagtgtaaaccagtgactaata

SEQ ID NO: 481325 - DNA, 33 bp, Homo sapien
tctgatgcggtttacaaatatccctatgggttg

SEQ ID NO: 481326 - DNA, 33 bp, Homo sapien
tctgatgcggtttacatatatccctatgggttg

SEQ ID NO: 481327 - DNA, 33 bp, Homo sapien
aaatgccaaatagggacgcatattctgatacgt

SEQ ID NO: 481328 - DNA, 33 bp, Homo sapien
aaatgccaaatagggatgcatattctgatacgt

SEQ ID NO: 481329 - DNA, 33 bp, Homo sapien
aaggcattttaaagaccgactttcattgacttg

SEQ ID NO: 481330 - DNA, 33 bp, Homo sapien
aaggcattttaaagactgactttcattgacttg

SEQ ID NO: 481331 - DNA, 33 bp, Homo sapien
agaaggcaggactagacgacctctaagatctca

SEQ ID NO: 481332 - DNA, 33 bp, Homo sapien
agaaggcaggactagatgacctctaagatctca

SEQ ID NO: 481333 - DNA, 33 bp, Homo sapien
agggccctgggacagacagaaatatggtatcct

SEQ ID NO: 481334 - DNA, 33 bp, Homo sapien
agggccctgggacagagagaaatatggtatcct

SEQ ID NO: 481335 - DNA, 33 bp, Homo sapien
ggatagtgggtctgcacataagagccagataaa

SEQ ID NO: 481336 - DNA, 33 bp, Homo sapien
ggatagtgggtctgcatataagagccagataaa

SEQ ID NO: 481337 - DNA, 33 bp, Homo sapien
atcctgtcatggcctacggtgattaggacagtg

SEQ ID NO: 481338 - DNA, 33 bp, Homo sapien
atcctgtcatggcctagggtgattaggacagtg

SEQ ID NO: 481339 - DNA, 33 bp, Homo sapien
ttaagtaaatacttacaaacatgattgctgggt

SEQ ID NO: 481340 - DNA, 33 bp, Homo sapien
ttaagtaaatacttacgaacatgattgctgggt

SEQ ID NO: 481341 - DNA, 33 bp, Homo sapien
tgctataaaattctcaggctgatttttgtgtag

SEQ ID NO: 481342 - DNA, 33 bp, Homo sapien
tgctataaaattctcatgctgatttttgtgtag

SEQ ID NO: 481343 - DNA, 33 bp, Homo sapien
aaatgatctgaatttaagagtcagtcatccaca

SEQ ID NO: 481344 - DNA, 33 bp, Homo sapien
aaatgatctgaatttatgagtcagtcatccaca

SEQ ID NO: 481345 - DNA, 33 bp, Homo sapien
gacagcctcaaccaaacatataattgacaaata

SEQ ID NO: 481346 - DNA, 33 bp, Homo sapien
gacagcctcaaccaaagatataattgacaaata

SEQ ID NO: 481347 - DNA, 33 bp, Homo sapien
taatcaaccagacatcacaaaccagacacagag

SEQ ID NO: 481348 - DNA, 33 bp, Homo sapien
taatcaaccagacatcgcaaaccagacacagag

SEQ ID NO: 481349 - DNA, 33 bp, Homo sapien
ggacatgtggtctcggaatgatcatcagaatcc

SEQ ID NO: 481350 - DNA, 33 bp, Homo sapien
ggacatgtggtctcgggatgatcatcagaatcc

SEQ ID NO: 481351 - DNA, 33 bp, Homo sapien
ccttcactacatgctccaaaccatcattagatg

SEQ ID NO: 481352 - DNA, 33 bp, Homo sapien
ccttcactacatgctctaaaccatcattagatg

SEQ ID NO: 481353 - DNA, 33 bp, Homo sapien
gagaactcaagtgaagaccagttctataaaatg

SEQ ID NO: 481354 - DNA, 33 bp, Homo sapien
gagaactcaagtgaagcccagttctataaaatg

SEQ ID NO: 481355 - DNA, 33 bp, Homo sapien
tggttggtttacataacgaaaagcctggacaag

SEQ ID NO: 481356 - DNA, 33 bp, Homo sapien
tggttggtttacataaggaaaagcctggacaag

SEQ ID NO: 481357 - DNA, 33 bp, Homo sapien
tgacctatgttccacaatctgtgatacatgacc

SEQ ID NO: 481358 - DNA, 33 bp, Homo sapien
tgacctatgttccacagtctgtgatacatgacc

SEQ ID NO: 481359 - DNA, 33 bp, Homo sapien
atcattcatattacaaccagaacactgcctact

SEQ ID NO: 481360 - DNA, 33 bp, Homo sapien
atcattcatattacaagcagaacactgcctact

SEQ ID NO: 481361 - DNA, 33 bp, Homo sapien
ttgacgtgaagatagaaaaatacatcaagagaa

SEQ ID NO: 481362 - DNA, 33 bp, Homo sapien
ttgacgtgaagatagacaaatacatcaagagaa

SEQ ID NO: 481363 - DNA, 33 bp, Homo sapien
actaatcaatgcattgcagtattgacgtgaaga

SEQ ID NO: 481364 - DNA, 33 bp, Homo sapien
actaatcaatgcattgtagtattgacgtgaaga

SEQ ID NO: 481365 - DNA, 33 bp, Homo sapien
caggcccatactcataagccaaatcagattccc

SEQ ID NO: 481366 - DNA, 33 bp, Homo sapien
caggcccatactcataggccaaatcagattccc

SEQ ID NO: 481367 - DNA, 33 bp, Homo sapien
tttaattacaatcttccacaatcttatgtgtct

SEQ ID NO: 481368 - DNA, 33 bp, Homo sapien
tttaattacaatcttctacaatcttatgtgtct

SEQ ID NO: 481369 - DNA, 33 bp, Homo sapien
aaaatcttggtgtatcagaggctcatcaaggga

SEQ ID NO: 481370 - DNA, 33 bp, Homo sapien
aaaatcttggtgtatcggaggctcatcaaggga

SEQ ID NO: 481371 - DNA, 33 bp, Homo sapien
aaaccctaattccttacaatggcatagaaggcc

SEQ ID NO: 481372 - DNA, 33 bp, Homo sapien
aaaccctaattccttataatggcatagaaggcc

SEQ ID NO: 481373 - DNA, 33 bp, Homo sapien
cttcttggtagagagacctataatgctaatggg

SEQ ID NO: 481374 - DNA, 33 bp, Homo sapien
cttcttggtagagagatctataatgctaatggg

SEQ ID NO: 481375 - DNA, 33 bp, Homo sapien
agtaatgttagatacacagatctagctacagac

SEQ ID NO: 481376 - DNA, 33 bp, Homo sapien
agtaatgttagatacagagatctagctacagac

SEQ ID NO: 481377 - DNA, 33 bp, Homo sapien
accaggattgttttcaaggattttacaagtagg

SEQ ID NO: 481378 - DNA, 33 bp, Homo sapien
accaggattgttttcagggattttacaagtagg

SEQ ID NO: 481379 - DNA, 33 bp, Homo sapien
tttgaagacaactttaaggagctcttgttaaga

SEQ ID NO: 481380 - DNA, 33 bp, Homo sapien
tttgaagacaactttacggagctcttgttaaga

SEQ ID NO: 481381 - DNA, 33 bp, Homo sapien; identical to SEQ ID NO: 481379

SEQ ID NO: 481382 - DNA, 33 bp, Homo sapien; identical to SEQ ID NO: 481380

SEQ ID NO: 481383 - DNA, 33 bp, Homo sapien
caggtataatgcataagtgtctcagttctgaag

SEQ ID NO: 481384 - DNA, 33 bp, Homo sapien
caggtataatgcataattgtctcagttctgaag

SEQ ID NO: 481385 - DNA, 33 bp, Homo sapien
gctgacggctcccatacagcagtgctaggaatt

SEQ ID NO: 481386 - DNA, 33 bp, Homo sapien
gctgacggctcccatatagcagtgctaggaatt

SEQ ID NO: 481387 - DNA, 33 bp, Homo sapien; identical to SEQ ID NO: 481385

SEQ ID NO: 481388 - DNA, 33 bp, Homo sapien; identical to SEQ ID NO: 481386

SEQ ID NO: 481389 - DNA, 33 bp, Homo sapien
aggccagacaattttgcagcttaacttagagga

SEQ ID NO: 481390 - DNA, 33 bp, Homo sapien
aggccagacaattttggagcttaacttagagga

SEQ ID NO: 481391 - DNA, 33 bp, Homo sapien
ttctggttaaggatcacggtgtataggcattaa

SEQ ID NO: 481392 - DNA, 33 bp, Homo sapien
ttctggttaaggatcatggtgtataggcattaa

SEQ ID NO: 481393 - DNA, 33 bp, Homo sapien
tttttcaagaaggggaaggtaagaattaatgcc

SEQ ID NO: 481394 - DNA, 33 bp, Homo sapien
tttttcaagaaggggagggtaagaattaatgcc

SEQ ID NO: 481395 - DNA, 33 bp, Homo sapien
ggaaaattgcattttccaaattaccaacctttc

SEQ ID NO: 481396 - DNA, 33 bp, Homo sapien
ggaaaattgcattttcgaaattaccaacctttc

SEQ ID NO: 481397 - DNA, 33 bp, Homo sapien
ctctcatttcaaagcacgtctgtgggatggttc

SEQ ID NO: 481398 - DNA, 33 bp, Homo sapien
ctctcatttcaaagcatgtctgtgggatggttc

SEQ ID NO: 481399 - DNA, 33 bp, Homo sapien
cccattagcccaggcacaaaacagggaagaaag

SEQ ID NO: 481400 - DNA, 33 bp, Homo sapien
cccattagcccaggcataaaacagggaagaaag

SEQ ID NO: 481401 - DNA, 33 bp, Homo sapien
aacatccttaggtagaaagaaaaacacccaaca

SEQ ID NO: 481402 - DNA, 33 bp, Homo sapien
aacatccttaggtagacagaaaaacacccaaca

SEQ ID NO: 481403 - DNA, 33 bp, Homo sapien
gagcaaatgcacaaaacaggagaagcagaggat

SEQ ID NO: 481404 - DNA, 33 bp, Homo sapien
gagcaaatgcacaaaagaggagaagcagaggat

SEQ ID NO: 481405 - DNA, 33 bp, Homo sapien
tgaattgtagaatatacgagagggagtagcagg

SEQ ID NO: 481406 - DNA, 33 bp, Homo sapien
tgaattgtagaatatatgagagggagtagcagg

SEQ ID NO: 481407 - DNA, 33 bp, Homo sapien; identical to SEQ ID NO: 481405

SEQ ID NO: 481408 - DNA, 33 bp, Homo sapien; identical to SEQ ID NO: 481406

SEQ ID NO: 481409 - DNA, 33 bp, Homo sapien
tcatttttctttaacgaatctctctgtttacat

SEQ ID NO: 481410 - DNA, 33 bp, Homo sapien
tcatttttctttaacgcatctctctgtttacat

SEQ ID NO: 481411 - DNA, 33 bp, Homo sapien
tctgcattcaaatacaccctccaggagctttca

SEQ ID NO: 481412 - DNA, 33 bp, Homo sapien
tctgcattcaaatacatcctccaggagctttca

SEQ ID NO: 481413 - DNA, 33 bp, Homo sapien
acttgtctacaaggaaagaaatagctcctgatc

SEQ ID NO: 481414 - DNA, 33 bp, Homo sapien
acttgtctacaaggaacgaaatagctcctgatc

SEQ ID NO: 481415 - DNA, 33 bp, Homo sapien
aggctatggatgagtggaatggaaaggctgcca

SEQ ID NO: 481416 - DNA, 33 bp, Homo sapien
aggctatggatgagtgtaatggaaaggctgcca

SEQ ID NO: 481417 - DNA, 33 bp, Homo sapien
tgtgttgaggacataacgaagtgatgagtgctc

SEQ ID NO: 481418 - DNA, 33 bp, Homo sapien
tgtgttgaggacataatgaagtgatgagtgctc

SEQ ID NO: 481419 - DNA, 33 bp, Homo sapien
ctgactcagacagagacggtaacaggagcagtt

SEQ ID NO: 481420 - DNA, 33 bp, Homo sapien
ctgactcagacagagatggtaacaggagcagtt

SEQ ID NO: 481421 - DNA, 33 bp, Homo sapien
gcccctgccaggaaaactgtctgttctgaatct

SEQ ID NO: 481422 - DNA, 33 bp, Homo sapien
gcccctgccaggaaaattgtctgttctgaatct

SEQ ID NO: 481423 - DNA, 33 bp, Homo sapien
ggagtggagtctggaccggaagatgatgacagt

SEQ ID NO: 481424 - DNA, 33 bp, Homo sapien
ggagtggagtctggactggaagatgatgacagt

SEQ ID NO: 481425 - DNA, 33 bp, Homo sapien
ccctttttggtccaggaaacaccggtgatcaca

SEQ ID NO: 481426 - DNA, 33 bp, Homo sapien
ccctttttggtccaggtaacaccggtgatcaca

SEQ ID NO: 481427 - DNA, 33 bp, Homo sapien
caactcatccactgagcagtttttgctgctaca

SEQ ID NO: 481428 - DNA, 33 bp, Homo sapien
caactcatccactgagtagtttttgctgctaca

SEQ ID NO: 481429 - DNA, 33 bp, Homo sapien
ttgtggtctgtgtttaagataatgtggaagcta

SEQ ID NO: 481430 - DNA, 33 bp, Homo sapien
ttgtggtctgtgtttaggataatgtggaagcta

SEQ ID NO: 481431 - DNA, 33 bp, Homo sapien
ttccttcttaggttcagtcccagtgccaccatc

SEQ ID NO: 481432 - DNA, 33 bp, Homo sapien
ttccttcttaggttcattcccagtgccaccatc

SEQ ID NO: 481433 - DNA, 33 bp, Homo sapien
aggaagggaggactctcagaatccacacagcaa

SEQ ID NO: 481434 - DNA, 33 bp, Homo sapien
aggaagggaggactcttagaatccacacagcaa

SEQ ID NO: 481435 - DNA, 33 bp, Homo sapien
cagaccaaatccttcacgcaatgcctttggcgg

SEQ ID NO: 481436 - DNA, 33 bp, Homo sapien
cagaccaaatccttcatgcaatgcctttggcgg

SEQ ID NO: 481437 - DNA, 33 bp, Homo sapien
gccaaagatatgcccaagatgatatggaagggt

SEQ ID NO: 481438 - DNA, 33 bp, Homo sapien
gccaaagatatgcccaggatgatatggaagggt

SEQ ID NO: 481439 - DNA, 33 bp, Homo sapien
taatgcttggaatgaaattatcacaagatactt

SEQ ID NO: 481440 - DNA, 33 bp, Homo sapien
taatgcttggaatgaagttatcacaagatactt

SEQ ID NO: 481441 - DNA, 33 bp, Homo sapien
aaccctagaacacagacggtcactagaagagtt

SEQ ID NO: 481442 - DNA, 33 bp, Homo sapien
aaccctagaacacagatggtcactagaagagtt

SEQ ID NO: 481443 - DNA, 33 bp, Homo sapien
atcaactccaataaaggatgttcaatataatga

SEQ ID NO: 481444 - DNA, 33 bp, Homo sapien
atcaactccaataaagtatgttcaatataatga

SEQ ID NO: 481445 - DNA, 33 bp, Homo sapien
tgtctaataatgaaaaccagccttcttcgtaag

SEQ ID NO: 481446 - DNA, 33 bp, Homo sapien
tgtctaataatgaaaatcagccttcttcgtaag

SEQ ID NO: 481447 - DNA, 33 bp, Homo sapien
tgtcagaaacataacaatgaggccctctctccc

SEQ ID NO: 481448 - DNA, 33 bp, Homo sapien
tgtcagaaacataacagtgaggccctctctccc

SEQ ID NO: 481449 - DNA, 33 bp, Homo sapien
gcagagctcttaccacaaaataggcacagtgtt

SEQ ID NO: 481450 - DNA, 33 bp, Homo sapien
gcagagctcttaccacgaaataggcacagtgtt

SEQ ID NO: 481451 - DNA, 33 bp, Homo sapien
ttcagggcaccatgacactccataggttcagct

SEQ ID NO: 481452 - DNA, 33 bp, Homo sapien
ttcagggcaccatgacgctccataggttcagct

SEQ ID NO: 481453 - DNA, 33 bp, Homo sapien
gttctgaagaattccaacactggggcaagatgg

SEQ ID NO: 481454 - DNA, 33 bp, Homo sapien
gttctgaagaattccagcactggggcaagatgg

SEQ ID NO: 481455 - DNA, 33 bp, Homo sapien
aagaagttgcagacccagaagagactaagtaaa

SEQ ID NO: 481456 - DNA, 33 bp, Homo sapien
aagaagttgcagacccggaagagactaagtaaa

SEQ ID NO: 481457 - DNA, 33 bp, Homo sapien
aatgctgccagggctcaaagtacatttcagaag

SEQ ID NO: 481458 - DNA, 33 bp, Homo sapien
aatgctgccagggctcgaagtacatttcagaag

SEQ ID NO: 481459 - DNA, 33 bp, Homo sapien
ataaaaagaaagtaaacgatgccaaaggccaga

SEQ ID NO: 481460 - DNA, 33 bp, Homo sapien
ataaaaagaaagtaaatgatgccaaaggccaga

SEQ ID NO: 481461 - DNA, 33 bp, Homo sapien
ggcattcattttgcccaacacccagagttgccc

SEQ ID NO: 481462 - DNA, 33 bp, Homo sapien
ggcattcattttgcccgacacccagagttgccc

SEQ ID NO: 481463 - DNA, 33 bp, Homo sapien
attccttgttccgtcaccgcctggttgagtttc

SEQ ID NO: 481464 - DNA, 33 bp, Homo sapien
attccttgttccgtcatcgcctggttgagtttc

SEQ ID NO: 481465 - DNA, 33 bp, Homo sapien
agtctgtatgacataaaaagcttattccagtaa

SEQ ID NO: 481466 - DNA, 33 bp, Homo sapien
agtctgtatgacataagaagcttattccagtaa

SEQ ID NO: 481467 - DNA, 33 bp, Homo sapien
tcaccacacttatgatcaatcttacaaaactta

SEQ ID NO: 481468 - DNA, 33 bp, Homo sapien
tcaccacacttatgatgaatcttacaaaactta

SEQ ID NO: 481469 - DNA, 33 bp, Homo sapien
tggaagatttgcatccacttccacaagctgcta

SEQ ID NO: 481470 - DNA, 33 bp, Homo sapien
tggaagatttgcatccgcttccacaagctgcta

SEQ ID NO: 481471 - DNA, 33 bp, Homo sapien
gcacccaatgcatgaaagatgtgcaaaggctca

SEQ ID NO: 481472 - DNA, 33 bp, Homo sapien
gcacccaatgcatgaacgatgtgcaaaggctca

SEQ ID NO: 481473 - DNA, 33 bp, Homo sapien
aaagctgttctacacacagcatatgcctccaga

SEQ ID NO: 481474 - DNA, 33 bp, Homo sapien
aaagctgttctacacatagcatatgcctccaga

SEQ ID NO: 481475 - DNA, 33 bp, Homo sapien
tacaaataaaattagaacttgaccttgtacctc

SEQ ID NO: 481476 - DNA, 33 bp, Homo sapien
tacaaataaaattagagcttgaccttgtacctc

SEQ ID NO: 481477 - DNA, 33 bp, Homo sapien
gcgaaaagaaccctgcaaagctatcacagagat

SEQ ID NO: 481478 - DNA, 33 bp, Homo sapien
gcgaaaagaaccctgcgaagctatcacagagat

SEQ ID NO: 481479 - DNA, 33 bp, Homo sapien
ctgatggacaaagaataatgtgttctgggtttc

SEQ ID NO: 481480 - DNA, 33 bp, Homo sapien
ctgatggacaaagaatcatgtgttctgggtttc

SEQ ID NO: 481481 - DNA, 33 bp, Homo sapien
tccttctctggaaaaccgtgtaggagagaatcc

SEQ ID NO: 481482 - DNA, 33 bp, Homo sapien
tccttctctggaaaactgtgtaggagagaatcc

SEQ ID NO: 481483 - DNA, 33 bp, Homo sapien
aactggtttctgtccccatctctcatcaatctt

SEQ ID NO: 481484 - DNA, 33 bp, Homo sapien
aactggtttctgtccctatctctcatcaatctt

SEQ ID NO: 481485 - DNA, 33 bp, Homo sapien
catcaatcttcttctccagttggtaaatgcttt

SEQ ID NO: 481486 - DNA, 33 bp, Homo sapien
catcaatcttcttctctagttggtaaatgcttt

SEQ ID NO: 481487 - DNA, 33 bp, Homo sapien
ctaccatcaaatcagcaattagtagataaggtc

SEQ ID NO: 481488 - DNA, 33 bp, Homo sapien
ctaccatcaaatcagcgattagtagataaggtc

SEQ ID NO: 481489 - DNA, 33 bp, Homo sapien
aacttggattccactgaaggagatgccacaaaa

SEQ ID NO: 481490 - DNA, 33 bp, Homo sapien
aacttggattccactggaggagatgccacaaaa

SEQ ID NO: 481491 - DNA, 33 bp, Homo sapien
aagaaaattcaaactaagaaggcaagcttctgt

SEQ ID NO: 481492 - DNA, 33 bp, Homo sapien
aagaaaattcaaactaggaaggcaagcttctgt

SEQ ID NO: 481493 - DNA, 33 bp, Homo sapien
ccctggctccacaagaagatgaacagaagaaca

SEQ ID NO: 481494 - DNA, 33 bp, Homo sapien
ccctggctccacaagaggatgaacagaagaaca

SEQ ID NO: 481495 - DNA, 33 bp, Homo sapien
ttacctaactcacttacaatctggcaactcata

SEQ ID NO: 481496 - DNA, 33 bp, Homo sapien
ttacctaactcacttataatctggcaactcata

SEQ ID NO: 481497 - DNA, 33 bp, Homo sapien
tttggacaagattcataaattttcaggcatctc

SEQ ID NO: 481498 - DNA, 33 bp, Homo sapien
tttggacaagattcatgaattttcaggcatctc

SEQ ID NO: 481499 - DNA, 33 bp, Homo sapien
tctcaggagagtgagaagacaacctgagggaat

SEQ ID NO: 481500 - DNA, 33 bp, Homo sapien
tctcaggagagtgagaggacaacctgagggaat

SEQ ID NO: 481501 - DNA, 33 bp, Homo sapien
cctccatgaacttttcccttagacatagcacag

SEQ ID NO: 481502 - DNA, 33 bp, Homo sapien
cctccatgaacttttctcttagacatagcacag

SEQ ID NO: 481503 - DNA, 33 bp, Homo sapien
actctccttagcaagacaaagtatcaatgtcct

SEQ ID NO: 481504 - DNA, 33 bp, Homo sapien
actctccttagcaagagaaagtatcaatgtcct

SEQ ID NO: 481505 - DNA, 33 bp, Homo sapien
cataaatgtgcacttaagttgacataattgcac

SEQ ID NO: 481506 - DNA, 33 bp, Homo sapien
cataaatgtgcacttacgttgacataattgcac

SEQ ID NO: 481507 - DNA, 33 bp, Homo sapien
aaggggtgatagagcaacgaagatggatttgag

SEQ ID NO: 481508 - DNA, 33 bp, Homo sapien
aaggggtgatagagcagcgaagatggatttgag

SEQ ID NO: 481509 - DNA, 33 bp, Homo sapien
agtaggcgtatgggaaacttcaacaatttttaa

SEQ ID NO: 481510 - DNA, 33 bp, Homo sapien
agtaggcgtatgggaagcttcaacaatttttaa

SEQ ID NO: 481511 - DNA, 33 bp, Homo sapien
cctgagtaggtaactacgctgcatgacaataaa

SEQ ID NO: 481512 - DNA, 33 bp, Homo sapien
cctgagtaggtaactaggctgcatgacaataaa

SEQ ID NO: 481513 - DNA, 33 bp, Homo sapien
atgcgtccagacctacagcaagacagtcatgac

SEQ ID NO: 481514 - DNA, 33 bp, Homo sapien
atgcgtccagacctacggcaagacagtcatgac

SEQ ID NO: 481515 - DNA, 33 bp, Homo sapien
tagagcctagagcagtaacgggatagcactgtg

SEQ ID NO: 481516 - DNA, 33 bp, Homo sapien
tagagcctagagcagtgacgggatagcactgtg

SEQ ID NO: 481517 - DNA, 33 bp, Homo sapien
caccaagtcggcaatacgtgtgtattcatcaag

SEQ ID NO: 481518 - DNA, 33 bp, Homo sapien
caccaagtcggcaatatgtgtgtattcatcaag

SEQ ID NO: 481519 - DNA, 33 bp, Homo sapien
cttgccatagttttgaaccaatggatggagcag

SEQ ID NO: 481520 - DNA, 33 bp, Homo sapien
cttgccatagttttgagccaatggatggagcag

SEQ ID NO: 481521 - DNA, 33 bp, Homo sapien
tgaagggagtttgcccagaggtctaaggaaagc

SEQ ID NO: 481522 - DNA, 33 bp, Homo sapien
tgaagggagtttgcccggaggtctaaggaaagc

SEQ ID NO: 481523 - DNA, 33 bp, Homo sapien
agcacttaacagacaccgtcattattcgttatg

SEQ ID NO: 481524 - DNA, 33 bp, Homo sapien
agcacttaacagacactgtcattattcgttatg

SEQ ID NO: 481525 - DNA, 33 bp, Homo sapien
aatcatggtggagttcaaagaagaagaatgaag

SEQ ID NO: 481526 - DNA, 33 bp, Homo sapien
aatcatggtggagttcgaagaagaagaatgaag

SEQ ID NO: 481527 - DNA, 33 bp, Homo sapien
caatcaagtcgactacaggacctgctcagtcag

SEQ ID NO: 481528 - DNA, 33 bp, Homo sapien
caatcaagtcgactacgggacctgctcagtcag

SEQ ID NO: 481529 - DNA, 33 bp, Homo sapien
ctgatttatccctcgaaaccacttcaagggtag

SEQ ID NO: 481530 - DNA, 33 bp, Homo sapien
ctgatttatccctcgataccacttcaagggtag

SEQ ID NO: 481531 - DNA, 33 bp, Homo sapien
agaaccatctgagatgaacaagcctatttgtaa

SEQ ID NO: 481532 - DNA, 33 bp, Homo sapien
agaaccatctgagatggacaagcctatttgtaa

SEQ ID NO: 481533 - DNA, 33 bp, Homo sapien
ctccagtttaatgataaaaagctagtgactctg

SEQ ID NO: 481534 - DNA, 33 bp, Homo sapien
ctccagtttaatgatataaagctagtgactctg

SEQ ID NO: 481535 - DNA, 33 bp, Homo sapien
ttaacatatttattcacgctaggttgcaaacac

SEQ ID NO: 481536 - DNA, 33 bp, Homo sapien
ttaacatatttattcatgctaggttgcaaacac

SEQ ID NO: 481537 - DNA, 33 bp, Homo sapien
atagggatctggggaacgcaaggacctgatttt

SEQ ID NO: 481538 - DNA, 33 bp, Homo sapien
atagggatctggggaatgcaaggacctgatttt

SEQ ID NO: 481539 - DNA, 33 bp, Homo sapien
tacaaatgatgtaataacacattagaagggcta

SEQ ID NO: 481540 - DNA, 33 bp, Homo sapien
tacaaatgatgtaatatcacattagaagggcta

SEQ ID NO: 481541 - DNA, 33 bp, Homo sapien
atgttttctgtaaccagtattagaatctcttgt

SEQ ID NO: 481542 - DNA, 33 bp, Homo sapien
atgttttctgtaaccattattagaatctcttgt

SEQ ID NO: 481543 - DNA, 33 bp, Homo sapien
tgccccaaactaaaaactgactgagttaacttg

SEQ ID NO: 481544 - DNA, 33 bp, Homo sapien
tgccccaaactaaaaattgactgagttaacttg

SEQ ID NO: 481545 - DNA, 33 bp, Homo sapien
gagaaaggtgagctacagaacagttctaatata

SEQ ID NO: 481546 - DNA, 33 bp, Homo sapien
gagaaaggtgagctaccgaacagttctaatata

SEQ ID NO: 481547 - DNA, 33 bp, Homo sapien
aaccatttcctcaaaggagacctcttttttcac

SEQ ID NO: 481548 - DNA, 33 bp, Homo sapien
aaccatttcctcaaagtagacctcttttttcac

SEQ ID NO: 481549 - DNA, 33 bp, Homo sapien
gaggttgtttttagtacgttgatatggtcctcc

SEQ ID NO: 481550 - DNA, 33 bp, Homo sapien
gaggttgtttttagtaggttgatatggtcctcc

SEQ ID NO: 481551 - DNA, 33 bp, Homo sapien
agtccttatgtcctgggcactgttctaatcaca

SEQ ID NO: 481552 - DNA, 33 bp, Homo sapien
agtccttatgtcctggtcactgttctaatcaca

SEQ ID NO: 481553 - DNA, 33 bp, Homo sapien
gcaaatgtgtaaagaaagtttccagcatatgca

SEQ ID NO: 481554 - DNA, 33 bp, Homo sapien
gcaaatgtgtaaagaatgtttccagcatatgca

SEQ ID NO: 481555 - DNA, 33 bp, Homo sapien
caagcatcaactgggtcaatacccttttaagtg

SEQ ID NO: 481556 - DNA, 33 bp, Homo sapien
caagcatcaactgggtgaatacccttttaagtg

SEQ ID NO: 481557 - DNA, 33 bp, Homo sapien
ttaggctaatcaggaggactgggactaagttta

SEQ ID NO: 481558 - DNA, 33 bp, Homo sapien
ttaggctaatcaggagtactgggactaagttta

SEQ ID NO: 481559 - DNA, 33 bp, Homo sapien
tacagtggtggttacacaggtatataagtttgt

SEQ ID NO: 481560 - DNA, 33 bp, Homo sapien
tacagtggtggttacataggtatataagtttgt

SEQ ID NO: 481561 - DNA, 33 bp, Homo sapien
aaacacaaatacataaaactgaataaatgtgca

SEQ ID NO: 481562 - DNA, 33 bp, Homo sapien
aaacacaaatacataacactgaataaatgtgca

SEQ ID NO: 481563 - DNA, 33 bp, Homo sapien
tgtgcccactttcccccggaccacagattgtac

SEQ ID NO: 481564 - DNA, 33 bp, Homo sapien
tgtgcccactttcccctggaccacagattgtac

SEQ ID NO: 481565 - DNA, 33 bp, Homo sapien
atattggctatatttacgcaattgccctcttat

SEQ ID NO: 481566 - DNA, 33 bp, Homo sapien
atattggctatatttatgcaattgccctcttat

SEQ ID NO: 481567 - DNA, 33 bp, Homo sapien
ctgctacaaaggagaaaacttctgtacgcaaag

SEQ ID NO: 481568 - DNA, 33 bp, Homo sapien
ctgctacaaaggagaacacttctgtacgcaaag

SEQ ID NO: 481569 - DNA, 33 bp, Homo sapien
tgaaggctttcccacacagatcatattcatatg

SEQ ID NO: 481570 - DNA, 33 bp, Homo sapien
tgaaggctttcccacatagatcatattcatatg

SEQ ID NO: 481571 - DNA, 33 bp, Homo sapien
accaaaatttaaatgaatcaaagttgtgctttt

SEQ ID NO: 481572 - DNA, 33 bp, Homo sapien
accaaaatttaaatgagtcaaagttgtgctttt

SEQ ID NO: 481573 - DNA, 33 bp, Homo sapien
gtgagtgaagtaaccaaagaaaacgagattccc

SEQ ID NO: 481574 - DNA, 33 bp, Homo sapien
gtgagtgaagtaaccatagaaaacgagattccc

SEQ ID NO: 481575 - DNA, 33 bp, Homo sapien
catttacaaacttgcaatctatctaatactcta

SEQ ID NO: 481576 - DNA, 33 bp, Homo sapien
catttacaaacttgcagtctatctaatactcta

SEQ ID NO: 481577 - DNA, 33 bp, Homo sapien
aaagacacttgatgtaagtcacctttaaagaat

SEQ ID NO: 481578 - DNA, 33 bp, Homo sapien
aaagacacttgatgtaggtcacctttaaagaat

SEQ ID NO: 481579 - DNA, 33 bp, Homo sapien
aatgttattttctattcaaaggatagaggatga

SEQ ID NO: 481580 - DNA, 33 bp, Homo sapien
aatgttattttctattgaaaggatagaggatga

SEQ ID NO: 481581 - DNA, 33 bp, Homo sapien
gtcactggtcagagaactatgaataaaccacag

SEQ ID NO: 481582 - DNA, 33 bp, Homo sapien
gtcactggtcagagaagtatgaataaaccacag

SEQ ID NO: 481583 - DNA, 33 bp, Homo sapien
aatctatgcggagaatcaatgtgtgtccacatg

SEQ ID NO: 481584 - DNA, 33 bp, Homo sapien
aatctatgcggagaatgaatgtgtgtccacatg

SEQ ID NO: 481585 - DNA, 33 bp, Homo sapien
attgcaaattcaattcaactttaaaagtattta

SEQ ID NO: 481586 - DNA, 33 bp, Homo sapien
attgcaaattcaattcgactttaaaagtattta

SEQ ID NO: 481587 - DNA, 33 bp, Homo sapien
atctttacggaatataccagcatattgttttga

SEQ ID NO: 481588 - DNA, 33 bp, Homo sapien
atctttacggaatatatcagcatattgttttga

SEQ ID NO: 481589 - DNA, 33 bp, Homo sapien
tctgaataccacagcaaggaaaggtatgccagc

SEQ ID NO: 481590 - DNA, 33 bp, Homo sapien
tctgaataccacagcagggaaaggtatgccagc

SEQ ID NO: 481591 - DNA, 33 bp, Homo sapien
aagaactaaaattacccgacttcaggactgtct

SEQ ID NO: 481592 - DNA, 33 bp, Homo sapien
aagaactaaaattacctgacttcaggactgtct

SEQ ID NO: 481593 - DNA, 33 bp, Homo sapien
agctgatacttcaaaaatgactgtatgaaaaga

SEQ ID NO: 481594 - DNA, 33 bp, Homo sapien
agctgatacttcaaaattgactgtatgaaaaga

SEQ ID NO: 481595 - DNA, 33 bp, Homo sapien
ggcttattttctttgcaacagagtgtaggggag

SEQ ID NO: 481596 - DNA, 33 bp, Homo sapien
ggcttattttctttgcgacagagtgtaggggag

SEQ ID NO: 481597 - DNA, 33 bp, Homo sapien
taaccctcgacaaccaatgatctactcttcatc

SEQ ID NO: 481598 - DNA, 33 bp, Homo sapien
taaccctcgacaaccactgatctactcttcatc

SEQ ID NO: 481599 - DNA, 33 bp, Homo sapien
attcatcatgacttcaaactgaaaacaacctaa

SEQ ID NO: 481600 - DNA, 33 bp, Homo sapien
attcatcatgacttcatactgaaaacaacctaa

SEQ ID NO: 481601 - DNA, 33 bp, Homo sapien
ttgggaaagtgcaaaacgctacagtatgagaag

SEQ ID NO: 481602 - DNA, 33 bp, Homo sapien
ttgggaaagtgcaaaatgctacagtatgagaag

SEQ ID NO: 481603 - DNA, 33 bp, Homo sapien
gtttaagagaatactcactagttttccagatgt

SEQ ID NO: 481604 - DNA, 33 bp, Homo sapien
gtttaagagaatactcgctagttttccagatgt

SEQ ID NO: 481605 - DNA, 33 bp, Homo sapien
tgcaggcgccacagaaaggtgtttggaaggcag

SEQ ID NO: 481606 - DNA, 33 bp, Homo sapien
tgcaggcgccacagaagggtgtttggaaggcag

SEQ ID NO: 481607 - DNA, 33 bp, Homo sapien
tcaaaaatcagaggaactaggttggtaagtgct

SEQ ID NO: 481608 - DNA, 33 bp, Homo sapien
tcaaaaatcagaggaagtaggttggtaagtgct

SEQ ID NO: 481609 - DNA, 33 bp, Homo sapien
tttggtttgccataaccgataagggcttatctt

SEQ ID NO: 481610 - DNA, 33 bp, Homo sapien
tttggtttgccataactgataagggcttatctt

SEQ ID NO: 481611 - DNA, 33 bp, Homo sapien
cactccaagaaatctaaaaagtgcttaatacaa

SEQ ID NO: 481612 - DNA, 33 bp, Homo sapien
cactccaagaaatctagaaagtgcttaatacaa

SEQ ID NO: 481613 - DNA, 33 bp, Homo sapien
ggagtggttagcaccaagggtattggctaccaa

SEQ ID NO: 481614 - DNA, 33 bp, Homo sapien
ggagtggttagcaccatgggtattggctaccaa

SEQ ID NO: 481615 - DNA, 33 bp, Homo sapien
gttccatgttggcaaacctaagtcaaagtaacc

SEQ ID NO: 481616 - DNA, 33 bp, Homo sapien
gttccatgttggcaaagctaagtcaaagtaacc

SEQ ID NO: 481617 - DNA, 33 bp, Homo sapien
gaggagataatctgaaaacaggcatatgtattc

SEQ ID NO: 481618 - DNA, 33 bp, Homo sapien
gaggagataatctgaacacaggcatatgtattc

SEQ ID NO: 481619 - DNA, 33 bp, Homo sapien
attacacatgaaaaaaatttgaagcttgtcaga

SEQ ID NO: 481620 - DNA, 33 bp, Homo sapien
attacacatgaaaaaattttgaagcttgtcaga

SEQ ID NO: 481621 - DNA, 33 bp, Homo sapien
aggaaatcaagaattaagatccggagtttctgt

SEQ ID NO: 481622 - DNA, 33 bp, Homo sapien
aggaaatcaagaattaggatccggagtttctgt

SEQ ID NO: 481623 - DNA, 33 bp, Homo sapien
tccctgtgctagtgacccaggaataaagctagg

SEQ ID NO: 481624 - DNA, 33 bp, Homo sapien
tccctgtgctagtgacgcaggaataaagctagg

SEQ ID NO: 481625 - DNA, 33 bp, Homo sapien
tactgagacatagatcaagacagggacccataa

SEQ ID NO: 481626 - DNA, 33 bp, Homo sapien
tactgagacatagatcgagacagggacccataa

SEQ ID NO: 481627 - DNA, 33 bp, Homo sapien
aaaaggataggccttaagccaacagttcagaaa

SEQ ID NO: 481628 - DNA, 33 bp, Homo sapien
aaaaggataggccttatgccaacagttcagaaa

SEQ ID NO: 481629 - DNA, 33 bp, Homo sapien
ccattgtatgtatgtaccattattgatttcact

SEQ ID NO: 481630 - DNA, 33 bp, Homo sapien
ccattgtatgtatgtatcattattgatttcact

SEQ ID NO: 481631 - DNA, 33 bp, Homo sapien
ctagtgcttattttgacgcttagtgaccatctc

SEQ ID NO: 481632 - DNA, 33 bp, Homo sapien
ctagtgcttattttgatgcttagtgaccatctc

SEQ ID NO: 481633 - DNA, 33 bp, Homo sapien
aatcagacctttagtaaacacggagctcttcaa

SEQ ID NO: 481634 - DNA, 33 bp, Homo sapien
aatcagacctttagtagacacggagctcttcaa

SEQ ID NO: 481635 - DNA, 33 bp, Homo sapien
tgaaggaatagaggaagagtagaggcaaagaca

SEQ ID NO: 481636 - DNA, 33 bp, Homo sapien
tgaaggaatagaggaatagtagaggcaaagaca

SEQ ID NO: 481637 - DNA, 33 bp, Homo sapien
aaaaagagttgaatgccacctgcagaagaagca

SEQ ID NO: 481638 - DNA, 33 bp, Homo sapien
aaaaagagttgaatgctacctgcagaagaagca

SEQ ID NO: 481639 - DNA, 33 bp, Homo sapien
ccccagagtcctatgagtaggtatgttagtgcc

SEQ ID NO: 481640 - DNA, 33 bp, Homo sapien
ccccagagtcctatgattaggtatgttagtgcc

SEQ ID NO: 481641 - DNA, 33 bp, Homo sapien
aactaaggttatttgagaattcctgggccactg

SEQ ID NO: 481642 - DNA, 33 bp, Homo sapien
aactaaggttatttgataattcctgggccactg

SEQ ID NO: 481643 - DNA, 33 bp, Homo sapien
aaaaagatcttcaaaaaaggcttgataattgca

SEQ ID NO: 481644 - DNA, 33 bp, Homo sapien
aaaaagatcttcaaaagaggcttgataattgca

SEQ ID NO: 481645 - DNA, 33 bp, Homo sapien
tttagctattcagtgcaagcattgagtgaaatt

SEQ ID NO: 481646 - DNA, 33 bp, Homo sapien
tttagctattcagtgcgagcattgagtgaaatt

SEQ ID NO: 481647 - DNA, 33 bp, Homo sapien
gagatggcaatggagacaagtggaagtataaaa

SEQ ID NO: 481648 - DNA, 33 bp, Homo sapien
gagatggcaatggagagaagtggaagtataaaa

SEQ ID NO: 481649 - DNA, 33 bp, Homo sapien
tggattttcacctttacaagctatcaccatctc

SEQ ID NO: 481650 - DNA, 33 bp, Homo sapien
tggattttcacctttataagctatcaccatctc

SEQ ID NO: 481651 - DNA, 33 bp, Homo sapien
ctgactttcctgtttagaactaaaggctgtctc

SEQ ID NO: 481652 - DNA, 33 bp, Homo sapien
ctgactttcctgtttataactaaaggctgtctc

SEQ ID NO: 481653 - DNA, 33 bp, Homo sapien
tagtacatgtactgccaaagcgagcacttgaat

SEQ ID NO: 481654 - DNA, 33 bp, Homo sapien
tagtacatgtactgccgaagcgagcacttgaat

SEQ ID NO: 481655 - DNA, 33 bp, Homo sapien
tcattgagcaatgatcaaggtcctatttgaaag

SEQ ID NO: 481656 - DNA, 33 bp, Homo sapien
tcattgagcaatgatcgaggtcctatttgaaag

SEQ ID NO: 481657 - DNA, 33 bp, Homo sapien
catgagaactaagtcactctcccagtgccagga

SEQ ID NO: 481658 - DNA, 33 bp, Homo sapien
catgagaactaagtcagtctcccagtgccagga

SEQ ID NO: 481659 - DNA, 33 bp, Homo sapien
accattaggccaaagaccttctgaggtatatgc

SEQ ID NO: 481660 - DNA, 33 bp, Homo sapien
accattaggccaaagatcttctgaggtatatgc

SEQ ID NO: 481661 - DNA, 33 bp, Homo sapien
gaggctgaatactagcacttattccgtctaact

SEQ ID NO: 481662 - DNA, 33 bp, Homo sapien
gaggctgaatactagcgcttattccgtctaact

SEQ ID NO: 481663 - DNA, 33 bp, Homo sapien
tgattttacttaacaaaatgcccttcaattcca

SEQ ID NO: 481664 - DNA, 33 bp, Homo sapien
tgattttacttaacaagatgcccttcaattcca

SEQ ID NO: 481665 - DNA, 33 bp, Homo sapien
gataggtgactcattaactacccatggcctcta

SEQ ID NO: 481666 - DNA, 33 bp, Homo sapien
gataggtgactcattacctacccatggcctcta

SEQ ID NO: 481667 - DNA, 33 bp, Homo sapien
gagaagagcagatagcacttcctcatctgtgca

SEQ ID NO: 481668 - DNA, 33 bp, Homo sapien
gagaagagcagatagcgcttcctcatctgtgca

SEQ ID NO: 481669 - DNA, 33 bp, Homo sapien
caagttttgcaggaggaaaaaagagaatgggaa

SEQ ID NO: 481670 - DNA, 33 bp, Homo sapien
caagttttgcaggagggaaaaagagaatgggaa

SEQ ID NO: 481671 - DNA, 33 bp, Homo sapien
ttactcccagagtgccaagtcagtggtagccag

SEQ ID NO: 481672 - DNA, 33 bp, Homo sapien
ttactcccagagtgccgagtcagtggtagccag

SEQ ID NO: 481673 - DNA, 33 bp, Homo sapien
agaactaaataccacgaagtagaggttaggtca

SEQ ID NO: 481674 - DNA, 33 bp, Homo sapien
agaactaaataccacgcagtagaggttaggtca

SEQ ID NO: 481675 - DNA, 33 bp, Homo sapien
agactgaggcttactgaagttaagtgcctagtc

SEQ ID NO: 481676 - DNA, 33 bp, Homo sapien
agactgaggcttactgcagttaagtgcctagtc

SEQ ID NO: 481677 - DNA, 33 bp, Homo sapien
aatgtaaccactatcccgagaccagcaccatag

SEQ ID NO: 481678 - DNA, 33 bp, Homo sapien
aatgtaaccactatcctgagaccagcaccatag

SEQ ID NO: 481679 - DNA, 33 bp, Homo sapien
atcttggcatacataccaagtgctcagtaactc

SEQ ID NO: 481680 - DNA, 33 bp, Homo sapien
atcttggcatacatactaagtgctcagtaactc

SEQ ID NO: 481681 - DNA, 33 bp, Homo sapien
ctgatgaagaaagacactatccagctgtgatgc

SEQ ID NO: 481682 - DNA, 33 bp, Homo sapien
ctgatgaagaaagacagtatccagctgtgatgc

SEQ ID NO: 481683 - DNA, 33 bp, Homo sapien
acaagagtcctttgaaacctcaagctcagctta

SEQ ID NO: 481684 - DNA, 33 bp, Homo sapien
acaagagtcctttgaagcctcaagctcagctta

SEQ ID NO: 481685 - DNA, 33 bp, Homo sapien
ttgatttagagccacacgaaaaggtaagtgact

SEQ ID NO: 481686 - DNA, 33 bp, Homo sapien
ttgatttagagccacatgaaaaggtaagtgact

SEQ ID NO: 481687 - DNA, 33 bp, Homo sapien
attagttggcataaaacagctttcaggctttta

SEQ ID NO: 481688 - DNA, 33 bp, Homo sapien
attagttggcataaaatagctttcaggctttta

SEQ ID NO: 481689 - DNA, 33 bp, Homo sapien
accacctcttactttcaacttgaacactcaatt

SEQ ID NO: 481690 - DNA, 33 bp, Homo sapien
accacctcttactttctacttgaacactcaatt

SEQ ID NO: 481691 - DNA, 33 bp, Homo sapien
agctatgccacattaaatatgttttaacttgtc

SEQ ID NO: 481692 - DNA, 33 bp, Homo sapien
agctatgccacattaagtatgttttaacttgtc

SEQ ID NO: 481693 - DNA, 33 bp, Homo sapien
atgtgggactcctggaatatagtatatgtcttt

SEQ ID NO: 481694 - DNA, 33 bp, Homo sapien
atgtgggactcctggattatagtatatgtcttt

SEQ ID NO: 481695 - DNA, 33 bp, Homo sapien
tacgctttaaaaagaacagcagttagacattaa

SEQ ID NO: 481696 - DNA, 33 bp, Homo sapien
tacgctttaaaaagaatagcagttagacattaa

SEQ ID NO: 481697 - DNA, 33 bp, Homo sapien
actatataagcctccaatacttcctgaaaaagt

SEQ ID NO: 481698 - DNA, 33 bp, Homo sapien
actatataagcctccagtacttcctgaaaaagt

SEQ ID NO: 481699 - DNA, 33 bp, Homo sapien
ttatagccttgattgaaacacagaaagaggact

SEQ ID NO: 481700 - DNA, 33 bp, Homo sapien
ttatagccttgattgatacacagaaagaggact

SEQ ID NO: 481701 - DNA, 33 bp, Homo sapien
aaacttcgaagttgtcactgtatccaactccaa

SEQ ID NO: 481702 - DNA, 33 bp, Homo sapien
aaacttcgaagttgtcgctgtatccaactccaa

SEQ ID NO: 481703 - DNA, 33 bp, Homo sapien
acagtctaaataaacaccgattcttacaaggct

SEQ ID NO: 481704 - DNA, 33 bp, Homo sapien
acagtctaaataaacatcgattcttacaaggct

SEQ ID NO: 481705 - DNA, 33 bp, Homo sapien
aagtactgaatgtaaacttctctatcagctatc

SEQ ID NO: 481706 - DNA, 33 bp, Homo sapien
aagtactgaatgtaaagttctctatcagctatc

SEQ ID NO: 481707 - DNA, 33 bp, Homo sapien
acacctctactaaccacgttgactgtgactaaa

SEQ ID NO: 481708 - DNA, 33 bp, Homo sapien
acacctctactaaccatgttgactgtgactaaa

SEQ ID NO: 481709 - DNA, 33 bp, Homo sapien
tttacagctagaccagaactttgttaataagac

SEQ ID NO: 481710 - DNA, 33 bp, Homo sapien
tttacagctagaccaggactttgttaataagac

SEQ ID NO: 481711 - DNA, 33 bp, Homo sapien
acagagctctctgagacagggaaggaaaaccag

SEQ ID NO: 481712 - DNA, 33 bp, Homo sapien
acagagctctctgagatagggaaggaaaaccag

SEQ ID NO: 481713 - DNA, 33 bp, Homo sapien
gaaccaaattgagaggaatcatccagctccaga

SEQ ID NO: 481714 - DNA, 33 bp, Homo sapien
gaaccaaattgagagggatcatccagctccaga

SEQ ID NO: 481715 - DNA, 33 bp, Homo sapien
gtgcctgtgtgtattcacctcccacactgaata

SEQ ID NO: 481716 - DNA, 33 bp, Homo sapien
gtgcctgtgtgtattcccctcccacactgaata

SEQ ID NO: 481717 - DNA, 33 bp, Homo sapien
caaaaaatataaaaaccatgatcatcgatgtgg

SEQ ID NO: 481718 - DNA, 33 bp, Homo sapien
caaaaaatataaaaactatgatcatcgatgtgg

SEQ ID NO: 481719 - DNA, 33 bp, Homo sapien
tacactttgtaaagaacgtatattccatttgac

SEQ ID NO: 481720 - DNA, 33 bp, Homo sapien
tacactttgtaaagaaggtatattccatttgac

SEQ ID NO: 481721 - DNA, 33 bp, Homo sapien
ttaatattatggtaaaagtaggcatatagatca

SEQ ID NO: 481722 - DNA, 33 bp, Homo sapien
ttaatattatggtaaaggtaggcatatagatca

SEQ ID NO: 481723 - DNA, 33 bp, Homo sapien
agacaaattgagaacacaactagattttgttga

SEQ ID NO: 481724 - DNA, 33 bp, Homo sapien
agacaaattgagaacagaactagattttgttga

SEQ ID NO: 481725 - DNA, 33 bp, Homo sapien
gaacatttctggggacaaggacttcttatacaa

SEQ ID NO: 481726 - DNA, 33 bp, Homo sapien
gaacatttctggggacgaggacttcttatacaa

SEQ ID NO: 481727 - DNA, 33 bp, Homo sapien
tgtgtttatgaaattaccagaaaacactgtcac

SEQ ID NO: 481728 - DNA, 33 bp, Homo sapien
tgtgtttatgaaattatcagaaaacactgtcac

SEQ ID NO: 481729 - DNA, 33 bp, Homo sapien
cagcactaattgacaacaaataagtgataaata

SEQ ID NO: 481730 - DNA, 33 bp, Homo sapien
cagcactaattgacaataaataagtgataaata

SEQ ID NO: 481731 - DNA, 33 bp, Homo sapien
attgcattgactgtcacgtgttcacttaaataa

SEQ ID NO: 481732 - DNA, 33 bp, Homo sapien
attgcattgactgtcatgtgttcacttaaataa

SEQ ID NO: 481733 - DNA, 33 bp, Homo sapien
tcaaaattcatctcaacgcgctcaagaaagagt

SEQ ID NO: 481734 - DNA, 33 bp, Homo sapien
tcaaaattcatctcaatgcgctcaagaaagagt

SEQ ID NO: 481735 - DNA, 33 bp, Homo sapien
acatgtcatgaatggaaagactcaaaattcatc

SEQ ID NO: 481736 - DNA, 33 bp, Homo sapien
acatgtcatgaatggagagactcaaaattcatc

SEQ ID NO: 481737 - DNA, 33 bp, Homo sapien
cttcaaaccaagacacccttttgcctgccaact

SEQ ID NO: 481738 - DNA, 33 bp, Homo sapien
cttcaaaccaagacacgcttttgcctgccaact

SEQ ID NO: 481739 - DNA, 33 bp, Homo sapien
gttaattttccagatacctgaaggttaagttcc

SEQ ID NO: 481740 - DNA, 33 bp, Homo sapien
gttaattttccagatagctgaaggttaagttcc

SEQ ID NO: 481741 - DNA, 33 bp, Homo sapien
gattgtaaacaactgcaaacacaggcactagac

SEQ ID NO: 481742 - DNA, 33 bp, Homo sapien
gattgtaaacaactgccaacacaggcactagac

SEQ ID NO: 481743 - DNA, 33 bp, Homo sapien
gagagttttggcgaggcagtgattttactttca

SEQ ID NO: 481744 - DNA, 33 bp, Homo sapien
gagagttttggcgagggagtgattttactttca

SEQ ID NO: 481745 - DNA, 33 bp, Homo sapien
tggtgctgtgtttgcaaaagatagaatacatgg

SEQ ID NO: 481746 - DNA, 33 bp, Homo sapien
tggtgctgtgtttgcagaagatagaatacatgg

SEQ ID NO: 481747 - DNA, 33 bp, Homo sapien
tcatggtaagagtcgactacccttgtgagaatt

SEQ ID NO: 481748 - DNA, 33 bp, Homo sapien
tcatggtaagagtcgattacccttgtgagaatt

SEQ ID NO: 481749 - DNA, 33 bp, Homo sapien
ttcagttatagaggcaacttaccatttgaacat

SEQ ID NO: 481750 - DNA, 33 bp, Homo sapien
ttcagttatagaggcaccttaccatttgaacat

SEQ ID NO: 481751 - DNA, 33 bp, Homo sapien
cagtattagaagaaaacgtccttcaagagtttt

SEQ ID NO: 481752 - DNA, 33 bp, Homo sapien
cagtattagaagaaaatgtccttcaagagtttt

SEQ ID NO: 481753 - DNA, 33 bp, Homo sapien
gaatacaggccctgcccaagtgctccagaacca

SEQ ID NO: 481754 - DNA, 33 bp, Homo sapien
gaatacaggccctgccgaagtgctccagaacca

SEQ ID NO: 481755 - DNA, 33 bp, Homo sapien
attccttgttaacatacctgcacaaaaacccag

SEQ ID NO: 481756 - DNA, 33 bp, Homo sapien
attccttgttaacatatctgcacaaaaacccag

SEQ ID NO: 481757 - DNA, 33 bp, Homo sapien
ctggaaacacaactgaaagacgtttgtcaaact

SEQ ID NO: 481758 - DNA, 33 bp, Homo sapien
ctggaaacacaactgagagacgtttgtcaaact

SEQ ID NO: 481759 - DNA, 33 bp, Homo sapien
attctagttactgggaacccaggtatgtgtgtg

SEQ ID NO: 481760 - DNA, 33 bp, Homo sapien
attctagttactgggagcccaggtatgtgtgtg

SEQ ID NO: 481761 - DNA, 33 bp, Homo sapien
ctcctgtccagttctccctattgctcttgcaag

SEQ ID NO: 481762 - DNA, 33 bp, Homo sapien
ctcctgtccagttctctctattgctcttgcaag

SEQ ID NO: 481763 - DNA, 33 bp, Homo sapien
tataggcactgctcaaatgctccagaacaggcc

SEQ ID NO: 481764 - DNA, 33 bp, Homo sapien
tataggcactgctcaattgctccagaacaggcc

SEQ ID NO: 481765 - DNA, 33 bp, Homo sapien
ttgaggttgacacctaactcaaatctgttcatc

SEQ ID NO: 481766 - DNA, 33 bp, Homo sapien
ttgaggttgacacctagctcaaatctgttcatc

SEQ ID NO: 481767 - DNA, 33 bp, Homo sapien
agcgagagagatttccaagagttttccaatcat

SEQ ID NO: 481768 - DNA, 33 bp, Homo sapien
agcgagagagatttccgagagttttccaatcat

SEQ ID NO: 481769 - DNA, 33 bp, Homo sapien
atctggactcaatagtcacctacactaaataaa

SEQ ID NO: 481770 - DNA, 33 bp, Homo sapien
atctggactcaatagtgacctacactaaataaa

SEQ ID NO: 481771 - DNA, 33 bp, Homo sapien
aggatcaatgacctcaaataaaatggtaacact

SEQ ID NO: 481772 - DNA, 33 bp, Homo sapien
aggatcaatgacctcagataaaatggtaacact

SEQ ID NO: 481773 - DNA, 33 bp, Homo sapien
acctgaacagccatgcaactatcccttatacaa

SEQ ID NO: 481774 - DNA, 33 bp, Homo sapien
acctgaacagccatgccactatcccttatacaa

SEQ ID NO: 481775 - DNA, 33 bp, Homo sapien
aagtaggctcaaatgacggagttccctgcagtt

SEQ ID NO: 481776 - DNA, 33 bp, Homo sapien
aagtaggctcaaatgatggagttccctgcagtt

SEQ ID NO: 481777 - DNA, 33 bp, Homo sapien
cttccttgttctaacagtggaatgcatgctaga

SEQ ID NO: 481778 - DNA, 33 bp, Homo sapien
cttccttgttctaacattggaatgcatgctaga

SEQ ID NO: 481779 - DNA, 33 bp, Homo sapien
cttttaacatgatacccacactcattctgcagg

SEQ ID NO: 481780 - DNA, 33 bp, Homo sapien
cttttaacatgatacctacactcattctgcagg

SEQ ID NO: 481781 - DNA, 33 bp, Homo sapien
gcaggaagttactgagccaacagcataatcttt

SEQ ID NO: 481782 - DNA, 33 bp, Homo sapien
gcaggaagttactgagtcaacagcataatcttt

SEQ ID NO: 481783 - DNA, 33 bp, Homo sapien
ctgaaaggcccttcacaatcttgcccaggtctt

SEQ ID NO: 481784 - DNA, 33 bp, Homo sapien
ctgaaaggcccttcaccatcttgcccaggtctt

SEQ ID NO: 481785 - DNA, 33 bp, Homo sapien
ggtctttaaacttcaactccactcctacatccg

SEQ ID NO: 481786 - DNA, 33 bp, Homo sapien
ggtctttaaacttcaattccactcctacatccg

SEQ ID NO: 481787 - DNA, 33 bp, Homo sapien
acaagctgaaaattacccataacattaccactc

SEQ ID NO: 481788 - DNA, 33 bp, Homo sapien
acaagctgaaaattacgcataacattaccactc

SEQ ID NO: 481789 - DNA, 33 bp, Homo sapien
tagttttgaggtacaacgccttagagctctcaa

SEQ ID NO: 481790 - DNA, 33 bp, Homo sapien
tagttttgaggtacaatgccttagagctctcaa

SEQ ID NO: 481791 - DNA, 33 bp, Homo sapien
ataagtttttttgagacaagcatctttttattt

SEQ ID NO: 481792 - DNA, 33 bp, Homo sapien
ataagtttttttgagagaagcatctttttattt

SEQ ID NO: 481793 - DNA, 33 bp, Homo sapien
aaaaggttattttgtacctcagcgcaaaggaat

SEQ ID NO: 481794 - DNA, 33 bp, Homo sapien
aaaaggttattttgtatctcagcgcaaaggaat

SEQ ID NO: 481795 - DNA, 33 bp, Homo sapien
agaaactagaaccggacagaacaccaaacacaa

SEQ ID NO: 481796 - DNA, 33 bp, Homo sapien
agaaactagaaccggatagaacaccaaacacaa

SEQ ID NO: 481797 - DNA, 33 bp, Homo sapien
aaaacccaggtaattaagcttagaagtctagtt

SEQ ID NO: 481798 - DNA, 33 bp, Homo sapien
aaaacccaggtaattaggcttagaagtctagtt

SEQ ID NO: 481799 - DNA, 33 bp, Homo sapien
cccaaagtgatggacacaataaatactgtacac

SEQ ID NO: 481800 - DNA, 33 bp, Homo sapien
cccaaagtgatggacagaataaatactgtacac

SEQ ID NO: 481801 - DNA, 33 bp, Homo sapien
gcaaaaaccatgattacagaatttatagcatta

SEQ ID NO: 481802 - DNA, 33 bp, Homo sapien
gcaaaaaccatgattagagaatttatagcatta

SEQ ID NO: 481803 - DNA, 33 bp, Homo sapien
ttaggtaagttgtttaaatcctagagaaattcc

SEQ ID NO: 481804 - DNA, 33 bp, Homo sapien
ttaggtaagttgtttatatcctagagaaattcc

SEQ ID NO: 481805 - DNA, 33 bp, Homo sapien
gctaattctgacacaaggggtgaaaggtctaga

SEQ ID NO: 481806 - DNA, 33 bp, Homo sapien
gctaattctgacacaatgggtgaaaggtctaga

SEQ ID NO: 481807 - DNA, 33 bp, Homo sapien
agaggataccattcaccaccccgttttcagagg

SEQ ID NO: 481808 - DNA, 33 bp, Homo sapien
agaggataccattcactaccccgttttcagagg

SEQ ID NO: 481809 - DNA, 33 bp, Homo sapien
aattataaatgctcagaatacgagttccatctt

SEQ ID NO: 481810 - DNA, 33 bp, Homo sapien
aattataaatgctcaggatacgagttccatctt

SEQ ID NO: 481811 - DNA, 33 bp, Homo sapien; identical to SEQ ID NO: 481809

SEQ ID NO: 481812 - DNA, 33 bp, Homo sapien; identical to SEQ ID NO: 481810

SEQ ID NO: 481813 - DNA, 33 bp, Homo sapien
tcatttgtatcactgtaaaacaaaacaatgtga

SEQ ID NO: 481814 - DNA, 33 bp, Homo sapien
tcatttgtatcactgtgaaacaaaacaatgtga

SEQ ID NO: 481815 - DNA, 33 bp, Homo sapien
agagtcatagccagtacagtaaccaaaacagca

SEQ ID NO: 481816 - DNA, 33 bp, Homo sapien
agagtcatagccagtatagtaaccaaaacagca

SEQ ID NO: 481817 - DNA, 33 bp, Homo sapien
ctccatgcttaaagaaatgtttcggagtcaaaa

SEQ ID NO: 481818 - DNA, 33 bp, Homo sapien
ctccatgcttaaagaagtgtttcggagtcaaaa

SEQ ID NO: 481819 - DNA, 33 bp, Homo sapien
ttaattcattttaaagccacaaactgagtacga

SEQ ID NO: 481820 - DNA, 33 bp, Homo sapien
ttaattcattttaaagtcacaaactgagtacga

SEQ ID NO: 481821 - DNA, 33 bp, Homo sapien
tgccaaatagtctggacgcccgaaggtgagagt

SEQ ID NO: 481822 - DNA, 33 bp, Homo sapien
tgccaaatagtctggatgcccgaaggtgagagt

SEQ ID NO: 481823 - DNA, 33 bp, Homo sapien
tctaaaaaatacctacagcttccttctattcat

SEQ ID NO: 481824 - DNA, 33 bp, Homo sapien
tctaaaaaatacctacggcttccttctattcat

SEQ ID NO: 481825 - DNA, 33 bp, Homo sapien
taaagttcagcaagtccatgctccatgtcctga

SEQ ID NO: 481826 - DNA, 33 bp, Homo sapien
taaagttcagcaagtctatgctccatgtcctga

SEQ ID NO: 481827 - DNA, 33 bp, Homo sapien
ttgtggacaattcaaacgacatgggtgtggttc

SEQ ID NO: 481828 - DNA, 33 bp, Homo sapien
ttgtggacaattcaaatgacatgggtgtggttc

SEQ ID NO: 481829 - DNA, 33 bp, Homo sapien
ctcacagtgaaattccccccaagtctttggctc

SEQ ID NO: 481830 - DNA, 33 bp, Homo sapien
ctcacagtgaaattcctcccaagtctttggctc

SEQ ID NO: 481831 - DNA, 33 bp, Homo sapien
agaggaaatagcaagcccgaaggttcttttctc

SEQ ID NO: 481832 - DNA, 33 bp, Homo sapien
agaggaaatagcaagctcgaaggttcttttctc

SEQ ID NO: 481833 - DNA, 33 bp, Homo sapien
gattactcttgctctgaatgtaatggctcttta

SEQ ID NO: 481834 - DNA, 33 bp, Homo sapien
gattactcttgctctgtatgtaatggctcttta

SEQ ID NO: 481835 - DNA, 33 bp, Homo sapien
ttgaggggagcatacactgagaggccagttggt

SEQ ID NO: 481836 - DNA, 33 bp, Homo sapien
ttgaggggagcatacattgagaggccagttggt

SEQ ID NO: 481837 - DNA, 33 bp, Homo sapien
cattaaaatctggttaagaatcacagctgggtg

SEQ ID NO: 481838 - DNA, 33 bp, Homo sapien
cattaaaatctggttacgaatcacagctgggtg

SEQ ID NO: 481839 - DNA, 33 bp, Homo sapien
cccatggtcacatagcaaaatacacgtcaaaat

SEQ ID NO: 481840 - DNA, 33 bp, Homo sapien
cccatggtcacatagctaaatacacgtcaaaat

SEQ ID NO: 481841 - DNA, 33 bp, Homo sapien
ctttcctattctttaccatctaggtcctcatgt

SEQ ID NO: 481842 - DNA, 33 bp, Homo sapien
ctttcctattctttactatctaggtcctcatgt

SEQ ID NO: 481843 - DNA, 33 bp, Homo sapien
taattggtctaaaccaatcatgaaaataccatc

SEQ ID NO: 481844 - DNA, 33 bp, Homo sapien
taattggtctaaaccagtcatgaaaataccatc

SEQ ID NO: 481845 - DNA, 33 bp, Homo sapien
gcattgtgagcagaacaaagtaatcattcaaag

SEQ ID NO: 481846 - DNA, 33 bp, Homo sapien
gcattgtgagcagaacgaagtaatcattcaaag

SEQ ID NO: 481847 - DNA, 33 bp, Homo sapien
tacatggcatatgtaacataaataaacctttgt

SEQ ID NO: 481848 - DNA, 33 bp, Homo sapien
tacatggcatatgtaagataaataaacctttgt

SEQ ID NO: 481849 - DNA, 33 bp, Homo sapien
acctctaccgtgaagagactttgaacaccaggc

SEQ ID NO: 481850 - DNA, 33 bp, Homo sapien
acctctaccgtgaagatactttgaacaccaggc

SEQ ID NO: 481851 - DNA, 33 bp, Homo sapien
acggcacacaactccaggaagaattgttaacac

SEQ ID NO: 481852 - DNA, 33 bp, Homo sapien
acggcacacaactccatgaagaattgttaacac

SEQ ID NO: 481853 - DNA, 33 bp, Homo sapien
aaaggtatccagcggcaccatgaggacactggt

SEQ ID NO: 481854 - DNA, 33 bp, Homo sapien
aaaggtatccagcggcgccatgaggacactggt

SEQ ID NO: 481855 - DNA, 33 bp, Homo sapien
acagttatacaaaacaacaagtttagcgaagtt

SEQ ID NO: 481856 - DNA, 33 bp, Homo sapien
acagttatacaaaacagcaagtttagcgaagtt

SEQ ID NO: 481857 - DNA, 33 bp, Homo sapien
caccctctttgttccaaaacgggcaaagggctc

SEQ ID NO: 481858 - DNA, 33 bp, Homo sapien
caccctctttgttccacaacgggcaaagggctc

SEQ ID NO: 481859 - DNA, 33 bp, Homo sapien
catatgaaatcttcaacgcaaatattatttgtc

SEQ ID NO: 481860 - DNA, 33 bp, Homo sapien
catatgaaatcttcaatgcaaatattatttgtc

SEQ ID NO: 481861 - DNA, 33 bp, Homo sapien
gttctgtattcgggaaagcactagcaggaatga

SEQ ID NO: 481862 - DNA, 33 bp, Homo sapien
gttctgtattcgggaaggcactagcaggaatga

SEQ ID NO: 481863 - DNA, 33 bp, Homo sapien
ttagatacttctgtaccggagcaaaagtcatca

SEQ ID NO: 481864 - DNA, 33 bp, Homo sapien
ttagatacttctgtactggagcaaaagtcatca

SEQ ID NO: 481865 - DNA, 33 bp, Homo sapien
gttccagcctccatagaaaggaagaaaaatcag

SEQ ID NO: 481866 - DNA, 33 bp, Homo sapien
gttccagcctccataggaaggaagaaaaatcag

SEQ ID NO: 481867 - DNA, 33 bp, Homo sapien
ggcagacattgctcacaccatcattctggcagg

SEQ ID NO: 481868 - DNA, 33 bp, Homo sapien
ggcagacattgctcacgccatcattctggcagg

SEQ ID NO: 481869 - DNA, 33 bp, Homo sapien
ggctgagcaactccaactggttcctgtgtgaat

SEQ ID NO: 481870 - DNA, 33 bp, Homo sapien
ggctgagcaactccaagtggttcctgtgtgaat

SEQ ID NO: 481871 - DNA, 33 bp, Homo sapien
ggtcaaatgaatttcccatagtcctctagatag

SEQ ID NO: 481872 - DNA, 33 bp, Homo sapien
ggtcaaatgaatttcctatagtcctctagatag

SEQ ID NO: 481873 - DNA, 33 bp, Homo sapien
tcacacagaccattagaaaataagtttgcacac

SEQ ID NO: 481874 - DNA, 33 bp, Homo sapien
tcacacagaccattaggaaataagtttgcacac

SEQ ID NO: 481875 - DNA, 33 bp, Homo sapien
agaaaaagtgtgagggccatttaacacaaaaga

SEQ ID NO: 481876 - DNA, 33 bp, Homo sapien
agaaaaagtgtgaggggcatttaacacaaaaga

SEQ ID NO: 481877 - DNA, 33 bp, Homo sapien
gctaggattccacttacaacccagaggcacact

SEQ ID NO: 481878 - DNA, 33 bp, Homo sapien
gctaggattccacttataacccagaggcacact

SEQ ID NO: 481879 - DNA, 33 bp, Homo sapien
gatgtcaaactcaaagccttgttcaagcacaga

SEQ ID NO: 481880 - DNA, 33 bp, Homo sapien
gatgtcaaactcaaaggcttgttcaagcacaga

SEQ ID NO: 481881 - DNA, 33 bp, Homo sapien
ggaaacactgaacttgaaggaataaaccattgg

SEQ ID NO: 481882 - DNA, 33 bp, Homo sapien
ggaaacactgaacttggaggaataaaccattgg

SEQ ID NO: 481883 - DNA, 33 bp, Homo sapien
gggagggaaatactgaaataaggttacgggcgg

SEQ ID NO: 481884 - DNA, 33 bp, Homo sapien
gggagggaaatactgacataaggttacgggcgg

SEQ ID NO: 481885 - DNA, 33 bp, Homo sapien
ggatggatccatgcaaacttgctgtgctgagag

SEQ ID NO: 481886 - DNA, 33 bp, Homo sapien
ggatggatccatgcaaccttgctgtgctgagag

SEQ ID NO: 481887 - DNA, 33 bp, Homo sapien
aaggccatttatttaaccaccgtgaaagaaaat

SEQ ID NO: 481888 - DNA, 33 bp, Homo sapien
aaggccatttatttaagcaccgtgaaagaaaat

SEQ ID NO: 481889 - DNA, 33 bp, Homo sapien
tgttgttgttgagagagtctcagtctgtctcca

SEQ ID NO: 481890 - DNA, 33 bp, Homo sapien
tgttgttgttgagagattctcagtctgtctcca

SEQ ID NO: 481891 - DNA, 33 bp, Homo sapien
accacgtgtcaaactcagaacacaaagaatcac

SEQ ID NO: 481892 - DNA, 33 bp, Homo sapien
accacgtgtcaaactcggaacacaaagaatcac

SEQ ID NO: 481893 - DNA, 33 bp, Homo sapien
cttttctcgactgtaaaatttctaggttgatga

SEQ ID NO: 481894 - DNA, 33 bp, Homo sapien
cttttctcgactgtaacatttctaggttgatga

SEQ ID NO: 481895 - DNA, 33 bp, Homo sapien
atttttcatgatgcagacaactggcaggcagtc

SEQ ID NO: 481896 - DNA, 33 bp, Homo sapien
atttttcatgatgcaggcaactggcaggcagtc

SEQ ID NO: 481897 - DNA, 33 bp, Homo sapien
gtatattgctagacagaaagttttggacacatt

SEQ ID NO: 481898 - DNA, 33 bp, Homo sapien
gtatattgctagacaggaagttttggacacatt

SEQ ID NO: 481899 - DNA, 33 bp, Homo sapien
acatggttcctccgaaaataatagaaccctggc

SEQ ID NO: 481900 - DNA, 33 bp, Homo sapien
acatggttcctccgaagataatagaaccctggc

SEQ ID NO: 481901 - DNA, 33 bp, Homo sapien
cagcagaaaaacacacacaaatctatgtctctt

SEQ ID NO: 481902 - DNA, 33 bp, Homo sapien
cagcagaaaaacacactcaaatctatgtctctt

SEQ ID NO: 481903 - DNA, 33 bp, Homo sapien
gaatcagacgattccaacttaaaccactaattt

SEQ ID NO: 481904 - DNA, 33 bp, Homo sapien
gaatcagacgattccaccttaaaccactaattt

SEQ ID NO: 481905 - DNA, 33 bp, Homo sapien
aaaacagaagtgagcaaaaagttgaaccctaaa

SEQ ID NO: 481906 - DNA, 33 bp, Homo sapien
aaaacagaagtgagcagaaagttgaaccctaaa

SEQ ID NO: 481907 - DNA, 33 bp, Homo sapien
agcagattaagggtagacattatttgtttaggt

SEQ ID NO: 481908 - DNA, 33 bp, Homo sapien
agcagattaagggtaggcattatttgtttaggt

SEQ ID NO: 481909 - DNA, 33 bp, Homo sapien
gtcatttctgaagttacgatgcaagagaagtgc

SEQ ID NO: 481910 - DNA, 33 bp, Homo sapien
gtcatttctgaagttatgatgcaagagaagtgc

SEQ ID NO: 481911 - DNA, 33 bp, Homo sapien
cctacttgacagcagccaattcaatcaaatgtt

SEQ ID NO: 481912 - DNA, 33 bp, Homo sapien
cctacttgacagcagcgaattcaatcaaatgtt

SEQ ID NO: 481913 - DNA, 33 bp, Homo sapien
agaaattcagagcgtgaatctattatgtaggag

SEQ ID NO: 481914 - DNA, 33 bp, Homo sapien
agaaattcagagcgtgcatctattatgtaggag

SEQ ID NO: 481915 - DNA, 33 bp, Homo sapien
agcagacactaaccaacgtgaattctgattcct

SEQ ID NO: 481916 - DNA, 33 bp, Homo sapien
agcagacactaaccaatgtgaattctgattcct

SEQ ID NO: 481917 - DNA, 33 bp, Homo sapien
ttgctcgattctagaactgtaaataaaagccaa

SEQ ID NO: 481918 - DNA, 33 bp, Homo sapien
ttgctcgattctagaattgtaaataaaagccaa

SEQ ID NO: 481919 - DNA, 33 bp, Homo sapien
tagtgcctgagtcatacgggtgtttatcatggt

SEQ ID NO: 481920 - DNA, 33 bp, Homo sapien
tagtgcctgagtcataggggtgtttatcatggt

SEQ ID NO: 481921 - DNA, 33 bp, Homo sapien
gacgagccaaggaaaaaaagtacaagtgtggct

SEQ ID NO: 481922 - DNA, 33 bp, Homo sapien
gacgagccaaggaaaagaagtacaagtgtggct

SEQ ID NO: 481923 - DNA, 33 bp, Homo sapien
ggccgtgtggccatccagcatttgggaaaaact

SEQ ID NO: 481924 - DNA, 33 bp, Homo sapien
ggccgtgtggccatccggcatttgggaaaaact

SEQ ID NO: 481925 - DNA, 33 bp, Homo sapien
atttctgagacaaccaagcctcaaagagaatct

SEQ ID NO: 481926 - DNA, 33 bp, Homo sapien
atttctgagacaaccaggcctcaaagagaatct

SEQ ID NO: 481927 - DNA, 33 bp, Homo sapien
tctcagaaatgctccactaagctcagtggttgc

SEQ ID NO: 481928 - DNA, 33 bp, Homo sapien
tctcagaaatgctccagtaagctcagtggttgc

SEQ ID NO: 481929 - DNA, 33 bp, Homo sapien
atgacagcacttttaaaacttcaattcaggctg

SEQ ID NO: 481930 - DNA, 33 bp, Homo sapien
atgacagcacttttaatacttcaattcaggctg

SEQ ID NO: 481931 - DNA, 33 bp, Homo sapien
atgatctactctggtgcaatattactgttggaa

SEQ ID NO: 481932 - DNA, 33 bp, Homo sapien
atgatctactctggtggaatattactgttggaa

SEQ ID NO: 481933 - DNA, 33 bp, Homo sapien
attatgttgtgtggaaataacaaggcaccaaag

SEQ ID NO: 481934 - DNA, 33 bp, Homo sapien
attatgttgtgtggaagtaacaaggcaccaaag

SEQ ID NO: 481935 - DNA, 33 bp, Homo sapien
ctcaagtaagttcccaaagcagatttgtattca

SEQ ID NO: 481936 - DNA, 33 bp, Homo sapien
ctcaagtaagttcccagagcagatttgtattca

SEQ ID NO: 481937 - DNA, 33 bp, Homo sapien
atgactgttaagccaagaagccaaagagacagt

SEQ ID NO: 481938 - DNA, 33 bp, Homo sapien
atgactgttaagccaataagccaaagagacagt

SEQ ID NO: 481939 - DNA, 33 bp, Homo sapien; identical to SEQ ID NO: 481937

SEQ ID NO: 481940 - DNA, 33 bp, Homo sapien; identical to SEQ ID NO: 481938

SEQ ID NO: 481941 - DNA, 33 bp, Homo sapien
ttcccagcagcttgggcaggctccggtgacaat

SEQ ID NO: 481942 - DNA, 33 bp, Homo sapien
ttcccagcagcttgggtaggctccggtgacaat

SEQ ID NO: 481943 - DNA, 33 bp, Homo sapien
atggctgttactatggacagtagcagagggaaa

SEQ ID NO: 481944 - DNA, 33 bp, Homo sapien
atggctgttactatggtcagtagcagagggaaa

SEQ ID NO: 481945 - DNA, 33 bp, Homo sapien
gttctacttatagtgccattcatcacaaaacaa

SEQ ID NO: 481946 - DNA, 33 bp, Homo sapien
gttctacttatagtgctattcatcacaaaacaa

SEQ ID NO: 481947 - DNA, 33 bp, Homo sapien
ccagattctctcggttaaacagtggacacccac

SEQ ID NO: 481948 - DNA, 33 bp, Homo sapien
ccagattctctcggttgaacagtggacacccac

SEQ ID NO: 481949 - DNA, 33 bp, Homo sapien
ggcttaaacaatgttacggttgagtttttgttt

SEQ ID NO: 481950 - DNA, 33 bp, Homo sapien
ggcttaaacaatgttatggttgagtttttgttt

SEQ ID NO: 481951 - DNA, 33 bp, Homo sapien
catttactatgctacaagtgacccaataccaca

SEQ ID NO: 481952 - DNA, 33 bp, Homo sapien
catttactatgctacaggtgacccaataccaca

SEQ ID NO: 481953 - DNA, 33 bp, Homo sapien
cctgtgctggtagtcccgcatttttttccatgt

SEQ ID NO: 481954 - DNA, 33 bp, Homo sapien
cctgtgctggtagtcctgcatttttttccatgt

SEQ ID NO: 481955 - DNA, 33 bp, Homo sapien
attatcatctatgtcacacaattggggaacaaa

SEQ ID NO: 481956 - DNA, 33 bp, Homo sapien
attatcatctatgtcagacaattggggaacaaa

SEQ ID NO: 481957 - DNA, 33 bp, Homo sapien
ggagttcatttatgcccggagtggtttccgagt

SEQ ID NO: 481958 - DNA, 33 bp, Homo sapien
ggagttcatttatgcctggagtggtttccgagt

SEQ ID NO: 481959 - DNA, 33 bp, Homo sapien
ttcatgagaagacttacatgctaagtagaaaga

SEQ ID NO: 481960 - DNA, 33 bp, Homo sapien
ttcatgagaagacttatatgctaagtagaaaga

SEQ ID NO: 481961 - DNA, 33 bp, Homo sapien
gaagtagaaaagaagacaatgtgaggagaggga

SEQ ID NO: 481962 - DNA, 33 bp, Homo sapien
gaagtagaaaagaagagaatgtgaggagaggga

SEQ ID NO: 481963 - DNA, 33 bp, Homo sapien
gtctgcagtgaatcatgatccttgcactgcact

SEQ ID NO: 481964 - DNA, 33 bp, Homo sapien
gtctgcagtgaatcattatccttgcactgcact

SEQ ID NO: 481965 - DNA, 33 bp, Homo sapien
ttgtttaatcctttaactgtatcccacaatgat

SEQ ID NO: 481966 - DNA, 33 bp, Homo sapien
ttgtttaatcctttaattgtatcccacaatgat

SEQ ID NO: 481967 - DNA, 33 bp, Homo sapien
gacactggaccagagacctgagtatcccaatcc

SEQ ID NO: 481968 - DNA, 33 bp, Homo sapien
gacactggaccagagatctgagtatcccaatcc

SEQ ID NO: 481969 - DNA, 33 bp, Homo sapien
tttgagaaaattctaccggaagtctattctatc

SEQ ID NO: 481970 - DNA, 33 bp, Homo sapien
tttgagaaaattctactggaagtctattctatc

SEQ ID NO: 481971 - DNA, 33 bp, Homo sapien
gcctacccaaaatccaatgagagtgtttaaaat

SEQ ID NO: 481972 - DNA, 33 bp, Homo sapien
gcctacccaaaatccagtgagagtgtttaaaat

SEQ ID NO: 481973 - DNA, 33 bp, Homo sapien
atgatttgggaaaaggcaatagaagtcctgttc

SEQ ID NO: 481974 - DNA, 33 bp, Homo sapien
atgatttgggaaaaggtaatagaagtcctgttc

SEQ ID NO: 481975 - DNA, 33 bp, Homo sapien
gactcacagaactttaaaactggagggcctaga

SEQ ID NO: 481976 - DNA, 33 bp, Homo sapien
gactcacagaactttagaactggagggcctaga

SEQ ID NO: 481977 - DNA, 33 bp, Homo sapien
cgtatgtttaactatacaaaatccgaggcttgg

SEQ ID NO: 481978 - DNA, 33 bp, Homo sapien
cgtatgtttaactatataaaatccgaggcttgg

SEQ ID NO: 481979 - DNA, 33 bp, Homo sapien
ctacagctcttgtcaaagttaaccatgataccc

SEQ ID NO: 481980 - DNA, 33 bp, Homo sapien
ctacagctcttgtcaaggttaaccatgataccc

SEQ ID NO: 481981 - DNA, 33 bp, Homo sapien
taagaattgtccactgcatttgacaatgtgggt

SEQ ID NO: 481982 - DNA, 33 bp, Homo sapien
taagaattgtccactggatttgacaatgtgggt

SEQ ID NO: 481983 - DNA, 33 bp, Homo sapien
aaatgcttctggtaggccaaggaaaatgtgcac

SEQ ID NO: 481984 - DNA, 33 bp, Homo sapien
aaatgcttctggtaggtcaaggaaaatgtgcac

SEQ ID NO: 481985 - DNA, 33 bp, Homo sapien
caattagatcagaaagaccagactgtataggac

SEQ ID NO: 481986 - DNA, 33 bp, Homo sapien
caattagatcagaaaggccagactgtataggac

SEQ ID NO: 481987 - DNA, 33 bp, Homo sapien
ttcctttatttctgtgaacatacttataatgac

SEQ ID NO: 481988 - DNA, 33 bp, Homo sapien
ttcctttatttctgtggacatacttataatgac

SEQ ID NO: 481989 - DNA, 33 bp, Homo sapien
tataactgctttttaaatcatttcagagaaaag

SEQ ID NO: 481990 - DNA, 33 bp, Homo sapien
tataactgctttttaagtcatttcagagaaaag

SEQ ID NO: 481991 - DNA, 33 bp, Homo sapien
ggaatgaatgattgaaagttgaaaaaatgactt

SEQ ID NO: 481992 - DNA, 33 bp, Homo sapien
ggaatgaatgattgaaggttgaaaaaatgactt

SEQ ID NO: 481993 - DNA, 33 bp, Homo sapien
aatctgtataacaaacactgtgacatgagttta

SEQ ID NO: 481994 - DNA, 33 bp, Homo sapien
aatctgtataacaaaccctgtgacatgagttta

SEQ ID NO: 481995 - DNA, 33 bp, Homo sapien
actttcataatcatagcaaggctttttccaaaa

SEQ ID NO: 481996 - DNA, 33 bp, Homo sapien
actttcataatcataggaaggctttttccaaaa

SEQ ID NO: 481997 - DNA, 33 bp, Homo sapien
ttagataattgacagacgagcaaatctaaactt

SEQ ID NO: 481998 - DNA, 33 bp, Homo sapien
ttagataattgacagatgagcaaatctaaactt

SEQ ID NO: 481999 - DNA, 33 bp, Homo sapien
tcatgtaagcatgaaacttatgtcaagctaggg

SEQ ID NO: 482000 - DNA, 33 bp, Homo sapien
tcatgtaagcatgaaagttatgtcaagctaggg

SEQ ID NO: 482001 - DNA, 33 bp, Homo sapien
tgaaataagccagaaaaaatgaaacatactggt

SEQ ID NO: 482002 - DNA, 33 bp, Homo sapien
tgaaataagccagaaagaatgaaacatactggt

SEQ ID NO: 482003 - DNA, 33 bp, Homo sapien
aacattgctagtgggaatattagccaactgctt

SEQ ID NO: 482004 - DNA, 33 bp, Homo sapien
aacattgctagtgggagtattagccaactgctt

SEQ ID NO: 482005 - DNA, 33 bp, Homo sapien
gcaaaattaataaaaaagactcacatcattaca

SEQ ID NO: 482006 - DNA, 33 bp, Homo sapien
gcaaaattaataaaaaggactcacatcattaca

SEQ ID NO: 482007 - DNA, 33 bp, Homo sapien
aagaaaccctctgataacctacaactccctgag

SEQ ID NO: 482008 - DNA, 33 bp, Homo sapien
aagaaaccctctgataccctacaactccctgag

SEQ ID NO: 482009 - DNA, 33 bp, Homo sapien
tgtgtgactttcagagccctaagttaggtcttc

SEQ ID NO: 482010 - DNA, 33 bp, Homo sapien
tgtgtgactttcagaggcctaagttaggtcttc

SEQ ID NO: 482011 - DNA, 33 bp, Homo sapien
aaagaaaaattgtgtccagaaacagaaataagt

SEQ ID NO: 482012 - DNA, 33 bp, Homo sapien
aaagaaaaattgtgtctagaaacagaaataagt

SEQ ID NO: 482013 - DNA, 33 bp, Homo sapien
gaataggtgagataaacttatcaatggattctt

SEQ ID NO: 482014 - DNA, 33 bp, Homo sapien
gaataggtgagataaagttatcaatggattctt

SEQ ID NO: 482015 - DNA, 33 bp, Homo sapien
ggaggagggactgatacatgagaaaggacaaga

SEQ ID NO: 482016 - DNA, 33 bp, Homo sapien
ggaggagggactgatatatgagaaaggacaaga

SEQ ID NO: 482017 - DNA, 33 bp, Homo sapien
tagttttcaaagtccacaaactcagcttaaatt

SEQ ID NO: 482018 - DNA, 33 bp, Homo sapien
tagttttcaaagtccataaactcagcttaaatt

SEQ ID NO: 482019 - DNA, 33 bp, Homo sapien
atgatgtgcatatgtacattcttaaatcagaat

SEQ ID NO: 482020 - DNA, 33 bp, Homo sapien
atgatgtgcatatgtatattcttaaatcagaat

SEQ ID NO: 482021 - DNA, 33 bp, Homo sapien
aaatttatccttgtagaaatgaaaatctattta

SEQ ID NO: 482022 - DNA, 33 bp, Homo sapien
aaatttatccttgtagtaatgaaaatctattta

SEQ ID NO: 482023 - DNA, 33 bp, Homo sapien
ctgtattacagaatagaaaggtattgtaattca

SEQ ID NO: 482024 - DNA, 33 bp, Homo sapien
ctgtattacagaataggaaggtattgtaattca

SEQ ID NO: 482025 - DNA, 33 bp, Homo sapien
ttttgcaagcctgtcaaatgtgggactgcatac

SEQ ID NO: 482026 - DNA, 33 bp, Homo sapien
ttttgcaagcctgtcagatgtgggactgcatac

SEQ ID NO: 482027 - DNA, 33 bp, Homo sapien
gcttagaataagtcccaaaaaatgagaagtgta

SEQ ID NO: 482028 - DNA, 33 bp, Homo sapien
gcttagaataagtccccaaaaatgagaagtgta

SEQ ID NO: 482029 - DNA, 33 bp, Homo sapien
gcccaggtgctgagaaataaccaagtaactaat

SEQ ID NO: 482030 - DNA, 33 bp, Homo sapien
gcccaggtgctgagaagtaaccaagtaactaat

SEQ ID NO: 482031 - DNA, 33 bp, Homo sapien
aaatgctactataaagcaacgctaaaagtacac

SEQ ID NO: 482032 - DNA, 33 bp, Homo sapien
aaatgctactataaaggaacgctaaaagtacac

SEQ ID NO: 482033 - DNA, 33 bp, Homo sapien
tacttcatggagatgtaaatgaaaagtaggtcc

SEQ ID NO: 482034 - DNA, 33 bp, Homo sapien
tacttcatggagatgtgaatgaaaagtaggtcc

SEQ ID NO: 482035 - DNA, 33 bp, Homo sapien
ttttataagaagcacaatgtcttttattagcat

SEQ ID NO: 482036 - DNA, 33 bp, Homo sapien
ttttataagaagcacagtgtcttttattagcat

SEQ ID NO: 482037 - DNA, 33 bp, Homo sapien
aaatcatcattattggcatctaaaaagtttttt

SEQ ID NO: 482038 - DNA, 33 bp, Homo sapien
aaatcatcattattgggatctaaaaagtttttt

SEQ ID NO: 482039 - DNA, 33 bp, Homo sapien
ctgtccatatcaattacgtctacctcattccag

SEQ ID NO: 482040 - DNA, 33 bp, Homo sapien
ctgtccatatcaattatgtctacctcattccag

SEQ ID NO: 482041 - DNA, 33 bp, Homo sapien
aaaaagtaaatgttgccaagtgtagtggcttgt

SEQ ID NO: 482042 - DNA, 33 bp, Homo sapien
aaaaagtaaatgttgcgaagtgtagtggcttgt

SEQ ID NO: 482043 - DNA, 33 bp, Homo sapien
atataatccctgcttgcatggtccttatactct

SEQ ID NO: 482044 - DNA, 33 bp, Homo sapien
atataatccctgcttgtatggtccttatactct

SEQ ID NO: 482045 - DNA, 33 bp, Homo sapien
atccctatactatataccacatttctgttattg

SEQ ID NO: 482046 - DNA, 33 bp, Homo sapien
atccctatactatatatcacatttctgttattg

SEQ ID NO: 482047 - DNA, 33 bp, Homo sapien
ggaaatgtttatatcaatacagcaaaactaaat

SEQ ID NO: 482048 - DNA, 33 bp, Homo sapien
ggaaatgtttatatcagtacagcaaaactaaat

SEQ ID NO: 482049 - DNA, 33 bp, Homo sapien
tattttacatgatagaagatttcagaattacag

SEQ ID NO: 482050 - DNA, 33 bp, Homo sapien
tattttacatgatagatgatttcagaattacag

SEQ ID NO: 482051 - DNA, 33 bp, Homo sapien
tgtattaccctaataactgatgatgaacatttt

SEQ ID NO: 482052 - DNA, 33 bp, Homo sapien
tgtattaccctaataattgatgatgaacatttt

SEQ ID NO: 482053 - DNA, 33 bp, Homo sapien
acatcaatactacctaaagcaatgtacagattc

SEQ ID NO: 482054 - DNA, 33 bp, Homo sapien
acatcaatactacctagagcaatgtacagattc

SEQ ID NO: 482055 - DNA, 33 bp, Homo sapien
gaagtataatgcagtacgatggtgctctaattg

SEQ ID NO: 482056 - DNA, 33 bp, Homo sapien
gaagtataatgcagtatgatggtgctctaattg

SEQ ID NO: 482057 - DNA, 33 bp, Homo sapien
ttaatctttttgaaaaacgagactgttcacaag

SEQ ID NO: 482058 - DNA, 33 bp, Homo sapien
ttaatctttttgaaaagcgagactgttcacaag

SEQ ID NO: 482059 - DNA, 33 bp, Homo sapien
cctcaggaagatgttcaattgctggcactgggc

SEQ ID NO: 482060 - DNA, 33 bp, Homo sapien
cctcaggaagatgttctattgctggcactgggc

SEQ ID NO: 482061 - DNA, 33 bp, Homo sapien
acctagtaggaaattacagaagtgatactctgc

SEQ ID NO: 482062 - DNA, 33 bp, Homo sapien
acctagtaggaaattatagaagtgatactctgc

SEQ ID NO: 482063 - DNA, 33 bp, Homo sapien
aaggccagcttggactcaaggtagggacagagg

SEQ ID NO: 482064 - DNA, 33 bp, Homo sapien
aaggccagcttggactgaaggtagggacagagg

SEQ ID NO: 482065 - DNA, 33 bp, Homo sapien
agtttatgtgtttctaagtgcggaagactttta

SEQ ID NO: 482066 - DNA, 33 bp, Homo sapien
agtttatgtgtttctaggtgcggaagactttta

SEQ ID NO: 482067 - DNA, 33 bp, Homo sapien
gacaggaggagaaaagaataaggaatggtgata

SEQ ID NO: 482068 - DNA, 33 bp, Homo sapien
gacaggaggagaaaaggataaggaatggtgata

SEQ ID NO: 482069 - DNA, 33 bp, Homo sapien
atgctaatgagaagacaaatgactgaaaattag

SEQ ID NO: 482070 - DNA, 33 bp, Homo sapien
atgctaatgagaagacgaatgactgaaaattag

SEQ ID NO: 482071 - DNA, 33 bp, Homo sapien
aaaataaataagtagacgaacattgcctaataa

SEQ ID NO: 482072 - DNA, 33 bp, Homo sapien
aaaataaataagtagatgaacattgcctaataa

SEQ ID NO: 482073 - DNA, 33 bp, Homo sapien
agctggtccatcaagaagaagactatagactat

SEQ ID NO: 482074 - DNA, 33 bp, Homo sapien
agctggtccatcaagaggaagactatagactat

SEQ ID NO: 482075 - DNA, 33 bp, Homo sapien
cagggaacttgtcctacatcttgcagttttcat

SEQ ID NO: 482076 - DNA, 33 bp, Homo sapien
cagggaacttgtcctatatcttgcagttttcat

SEQ ID NO: 482077 - DNA, 33 bp, Homo sapien
agctcacgaaagaaacacttgcagtctcattcc

SEQ ID NO: 482078 - DNA, 33 bp, Homo sapien
agctcacgaaagaaacccttgcagtctcattcc

SEQ ID NO: 482079 - DNA, 33 bp, Homo sapien
atttattgtagttttcacgtgcaacaatatcaa

SEQ ID NO: 482080 - DNA, 33 bp, Homo sapien
atttattgtagttttctcgtgcaacaatatcaa

SEQ ID NO: 482081 - DNA, 33 bp, Homo sapien
taagagatgttaattacctaaagtgctcttgaa

SEQ ID NO: 482082 - DNA, 33 bp, Homo sapien
taagagatgttaattatctaaagtgctcttgaa

SEQ ID NO: 482083 - DNA, 33 bp, Homo sapien
atttttaaaggaactcccatgatagtctcaaag

SEQ ID NO: 482084 - DNA, 33 bp, Homo sapien
atttttaaaggaactctcatgatagtctcaaag

SEQ ID NO: 482085 - DNA, 33 bp, Homo sapien
gcgctctatctttctgcactgggcgccgcgtcg

SEQ ID NO: 482086 - DNA, 33 bp, Homo sapien
gcgctctatctttctggactgggcgccgcgtcg

SEQ ID NO: 482087 - DNA, 33 bp, Homo sapien
tttctgttttcaaaagccctactatatgttcat

SEQ ID NO: 482088 - DNA, 33 bp, Homo sapien
tttctgttttcaaaagtcctactatatgttcat

SEQ ID NO: 482089 - DNA, 33 bp, Homo sapien
cagagcctcagagaccaatggaggcaaaatcaa

SEQ ID NO: 482090 - DNA, 33 bp, Homo sapien
cagagcctcagagaccgatggaggcaaaatcaa

SEQ ID NO: 482091 - DNA, 33 bp, Homo sapien
agttatacagttttaacgcttacattttggtct

SEQ ID NO: 482092 - DNA, 33 bp, Homo sapien
agttatacagttttaatgcttacattttggtct

SEQ ID NO: 482093 - DNA, 33 bp, Homo sapien
agaataaagttcaaacggtagtatgatatttac

SEQ ID NO: 482094 - DNA, 33 bp, Homo sapien
agaataaagttcaaactgtagtatgatatttac

SEQ ID NO: 482095 - DNA, 33 bp, Homo sapien
tacaagtatcaccttacgtacaaatccatcaac

SEQ ID NO: 482096 - DNA, 33 bp, Homo sapien
tacaagtatcaccttatgtacaaatccatcaac

SEQ ID NO: 482097 - DNA, 33 bp, Homo sapien
aaatttgaacctcggcacttgattcaaagtgta

SEQ ID NO: 482098 - DNA, 33 bp, Homo sapien
aaatttgaacctcggcgcttgattcaaagtgta

SEQ ID NO: 482099 - DNA, 33 bp, Homo sapien
tcatgactgtgattaccaatatattttggggtt

SEQ ID NO: 482100 - DNA, 33 bp, Homo sapien
tcatgactgtgattactaatatattttggggtt

SEQ ID NO: 482101 - DNA, 33 bp, Homo sapien
cctgctcagttcctcacgtgattttagaaagtg

SEQ ID NO: 482102 - DNA, 33 bp, Homo sapien
cctgctcagttcctcatgtgattttagaaagtg

SEQ ID NO: 482103 - DNA, 33 bp, Homo sapien
gagtgatcattgagtaggtagtatgtagcagca

SEQ ID NO: 482104 - DNA, 33 bp, Homo sapien
gagtgatcattgagtatgtagtatgtagcagca

SEQ ID NO: 482105 - DNA, 33 bp, Homo sapien
tagtgaagtgatggaagatgatcaaaaaggtaa

SEQ ID NO: 482106 - DNA, 33 bp, Homo sapien
tagtgaagtgatggaatatgatcaaaaaggtaa

SEQ ID NO: 482107 - DNA, 33 bp, Homo sapien
gcaaaacagataaaatgacggcacattcacaaa

SEQ ID NO: 482108 - DNA, 33 bp, Homo sapien
gcaaaacagataaaattacggcacattcacaaa

SEQ ID NO: 482109 - DNA, 33 bp, Homo sapien
tcaggtagagtcaagtaaatttgctgcagttct

SEQ ID NO: 482110 - DNA, 33 bp, Homo sapien
tcaggtagagtcaagtcaatttgctgcagttct

SEQ ID NO: 482111 - DNA, 33 bp, Homo sapien
ctacacagagatgaaacagccaagaaatttgtt

SEQ ID NO: 482112 - DNA, 33 bp, Homo sapien
ctacacagagatgaaatagccaagaaatttgtt

SEQ ID NO: 482113 - DNA, 33 bp, Homo sapien
gttatagatcagtgcacaaaggatgagttcaaa

SEQ ID NO: 482114 - DNA, 33 bp, Homo sapien
gttatagatcagtgcagaaaggatgagttcaaa

SEQ ID NO: 482115 - DNA, 33 bp, Homo sapien
atttgatgcaccaacaacctttattatattaca

SEQ ID NO: 482116 - DNA, 33 bp, Homo sapien
atttgatgcaccaacagcctttattatattaca

SEQ ID NO: 482117 - DNA, 33 bp, Homo sapien
cttgccaaagactccacagctattcagtggctg

SEQ ID NO: 482118 - DNA, 33 bp, Homo sapien
cttgccaaagactccatagctattcagtggctg

SEQ ID NO: 482119 - DNA, 33 bp, Homo sapien
ccccagaaagatactcagaaaataaacaaaatc

SEQ ID NO: 482120 - DNA, 33 bp, Homo sapien
ccccagaaagatactctgaaaataaacaaaatc

SEQ ID NO: 482121 - DNA, 33 bp, Homo sapien
atcatatggctttccacacatttttggtatata

SEQ ID NO: 482122 - DNA, 33 bp, Homo sapien
atcatatggctttccagacatttttggtatata

SEQ ID NO: 482123 - DNA, 33 bp, Homo sapien
ctcaacagatgtcaacaagatgaatagggtttt

SEQ ID NO: 482124 - DNA, 33 bp, Homo sapien
ctcaacagatgtcaacgagatgaatagggtttt

SEQ ID NO: 482125 - DNA, 33 bp, Homo sapien
gcactaatcaggcatcaacttgttaatgaatga

SEQ ID NO: 482126 - DNA, 33 bp, Homo sapien
gcactaatcaggcatcgacttgttaatgaatga

SEQ ID NO: 482127 - DNA, 33 bp, Homo sapien
atgtaacatggagcaccggaaaaggaaaagcat

SEQ ID NO: 482128 - DNA, 33 bp, Homo sapien
atgtaacatggagcactggaaaaggaaaagcat

SEQ ID NO: 482129 - DNA, 33 bp, Homo sapien
aacaaccagaaatcacaggtaatatggaatgtt

SEQ ID NO: 482130 - DNA, 33 bp, Homo sapien
aacaaccagaaatcacgggtaatatggaatgtt

SEQ ID NO: 482131 - DNA, 33 bp, Homo sapien
tggctggctcactactaagcataatttcgtaat

SEQ ID NO: 482132 - DNA, 33 bp, Homo sapien
tggctggctcactacttagcataatttcgtaat

SEQ ID NO: 482133 - DNA, 33 bp, Homo sapien
ccctgtcaaatgctcccctgtaccacaggaaac

SEQ ID NO: 482134 - DNA, 33 bp, Homo sapien
ccctgtcaaatgctccgctgtaccacaggaaac

SEQ ID NO: 482135 - DNA, 33 bp, Homo sapien
ctctgtggtaacatatcagtgattctcaacttc

SEQ ID NO: 482136 - DNA, 33 bp, Homo sapien
ctctgtggtaacatatgagtgattctcaacttc

SEQ ID NO: 482137 - DNA, 33 bp, Homo sapien
gtccaagatacaaccaatgagttccatagagag

SEQ ID NO: 482138 - DNA, 33 bp, Homo sapien
gtccaagatacaaccagtgagttccatagagag

SEQ ID NO: 482139 - DNA, 33 bp, Homo sapien
acattttggataaagaagagacctttaatttcc

SEQ ID NO: 482140 - DNA, 33 bp, Homo sapien
acattttggataaagaggagacctttaatttcc

SEQ ID NO: 482141 - DNA, 33 bp, Homo sapien
tgaaacttaatctcaaagaggcaggacactgag

SEQ ID NO: 482142 - DNA, 33 bp, Homo sapien
tgaaacttaatctcaacgaggcaggacactgag

SEQ ID NO: 482143 - DNA, 33 bp, Homo sapien
ctcttagccccttacaactctaacatcctacaa

SEQ ID NO: 482144 - DNA, 33 bp, Homo sapien
ctcttagccccttacagctctaacatcctacaa

SEQ ID NO: 482145 - DNA, 33 bp, Homo sapien
tacagtctttcatcataataatttcttgctgca

SEQ ID NO: 482146 - DNA, 33 bp, Homo sapien
tacagtctttcatcatgataatttcttgctgca

SEQ ID NO: 482147 - DNA, 33 bp, Homo sapien
caccactgtatctagaaagtaactcacttgctt

SEQ ID NO: 482148 - DNA, 33 bp, Homo sapien
caccactgtatctagagagtaactcacttgctt

SEQ ID NO: 482149 - DNA, 33 bp, Homo sapien
tgcataattaagatgagaagcaacagtcagaca

SEQ ID NO: 482150 - DNA, 33 bp, Homo sapien
tgcataattaagatgataagcaacagtcagaca

SEQ ID NO: 482151 - DNA, 33 bp, Homo sapien
agtataaaaattcactcagattatagacgtaaa

SEQ ID NO: 482152 - DNA, 33 bp, Homo sapien
agtataaaaattcactgagattatagacgtaaa

SEQ ID NO: 482153 - DNA, 33 bp, Homo sapien
gatgtgaatatgaataaaagttctgagtgagag

SEQ ID NO: 482154 - DNA, 33 bp, Homo sapien
gatgtgaatatgaatacaagttctgagtgagag

SEQ ID NO: 482155 - DNA, 33 bp, Homo sapien
gaccctttatcgacaacttgctgatccttgctt

SEQ ID NO: 482156 - DNA, 33 bp, Homo sapien
gaccctttatcgacaatttgctgatccttgctt

SEQ ID NO: 482157 - DNA, 33 bp, Homo sapien
tgctttaaaacagcaccgtcggccgggcatggt

SEQ ID NO: 482158 - DNA, 33 bp, Homo sapien
tgctttaaaacagcactgtcggccgggcatggt

SEQ ID NO: 482159 - DNA, 33 bp, Homo sapien
accattatttgactaaagacccctaaaagctcc

SEQ ID NO: 482160 - DNA, 33 bp, Homo sapien
accattatttgactaaggacccctaaaagctcc

SEQ ID NO: 482161 - DNA, 33 bp, Homo sapien
tgaaagcttcgatgcaaggatggtagagtcaag

SEQ ID NO: 482162 - DNA, 33 bp, Homo sapien
tgaaagcttcgatgcatggatggtagagtcaag

SEQ ID NO: 482163 - DNA, 33 bp, Homo sapien
gtactcaaaccatgaaacgtggtctttcccagt

SEQ ID NO: 482164 - DNA, 33 bp, Homo sapien
gtactcaaaccatgaagcgtggtctttcccagt

SEQ ID NO: 482165 - DNA, 33 bp, Homo sapien
tttacatgtaagaaccaattttagtcttaatcc

SEQ ID NO: 482166 - DNA, 33 bp, Homo sapien
tttacatgtaagaaccgattttagtcttaatcc

SEQ ID NO: 482167 - DNA, 33 bp, Homo sapien
cttttcccattggatcacctttgcttctttgtg

SEQ ID NO: 482168 - DNA, 33 bp, Homo sapien
cttttcccattggatcgcctttgcttctttgtg

SEQ ID NO: 482169 - DNA, 33 bp, Homo sapien
cgtaattgcttcctaaatcatatcttcatctcc

SEQ ID NO: 482170 - DNA, 33 bp, Homo sapien
cgtaattgcttcctaagtcatatcttcatctcc

SEQ ID NO: 482171 - DNA, 33 bp, Homo sapien
gctggatgttatgtaaaatggaatcagggaaac

SEQ ID NO: 482172 - DNA, 33 bp, Homo sapien
gctggatgttatgtaagatggaatcagggaaac

SEQ ID NO: 482173 - DNA, 33 bp, Homo sapien
aaatgaaatatttcaaccatcaacatacagaaa

SEQ ID NO: 482174 - DNA, 33 bp, Homo sapien
aaatgaaatatttcaagcatcaacatacagaaa

SEQ ID NO: 482175 - DNA, 33 bp, Homo sapien
tactggctcataatggaaaaacgagaagtattt

SEQ ID NO: 482176 - DNA, 33 bp, Homo sapien
tactggctcataatgggaaaacgagaagtattt

SEQ ID NO: 482177 - DNA, 33 bp, Homo sapien
ggtaaccatatcagaaacacctggagttgagga

SEQ ID NO: 482178 - DNA, 33 bp, Homo sapien
ggtaaccatatcagaaccacctggagttgagga

SEQ ID NO: 482179 - DNA, 33 bp, Homo sapien
aggagaaaccttaggaacaaacaagcctctttt

SEQ ID NO: 482180 - DNA, 33 bp, Homo sapien
aggagaaaccttaggagcaaacaagcctctttt

SEQ ID NO: 482181 - DNA, 33 bp, Homo sapien
ggttgttgatcaagaaaaccaggaaagggtggc

SEQ ID NO: 482182 - DNA, 33 bp, Homo sapien
ggttgttgatcaagaagaccaggaaagggtggc

SEQ ID NO: 482183 - DNA, 33 bp, Homo sapien
tcatgacttttcccataatagtggagccacctg

SEQ ID NO: 482184 - DNA, 33 bp, Homo sapien
tcatgacttttcccatcatagtggagccacctg

SEQ ID NO: 482185 - DNA, 33 bp, Homo sapien
tctggtgatttggaaggcggccgagctaggcac

SEQ ID NO: 482186 - DNA, 33 bp, Homo sapien
tctggtgatttggaagtcggccgagctaggcac

SEQ ID NO: 482187 - DNA, 33 bp, Homo sapien
tgggacacagattagaatagtttgaaacaaagg

SEQ ID NO: 482188 - DNA, 33 bp, Homo sapien
tgggacacagattagagtagtttgaaacaaagg

SEQ ID NO: 482189 - DNA, 33 bp, Homo sapien
ttactgagatggatcaaattacctaaggagtac

SEQ ID NO: 482190 - DNA, 33 bp, Homo sapien
ttactgagatggatcacattacctaaggagtac

SEQ ID NO: 482191 - DNA, 33 bp, Homo sapien
tacactctaattcctacgtcatcatgggcctgg

SEQ ID NO: 482192 - DNA, 33 bp, Homo sapien
tacactctaattcctatgtcatcatgggcctgg

SEQ ID NO: 482193 - DNA, 33 bp, Homo sapien
gatagtgggagtggaaatagggaaaaaagtaca

SEQ ID NO: 482194 - DNA, 33 bp, Homo sapien
gatagtgggagtggaagtagggaaaaaagtaca

SEQ ID NO: 482195 - DNA, 33 bp, Homo sapien
ttatccaggaagaggtaaaggtagcttagacta

SEQ ID NO: 482196 - DNA, 33 bp, Homo sapien
ttatccaggaagaggtgaaggtagcttagacta

SEQ ID NO: 482197 - DNA, 33 bp, Homo sapien
caaaggtgatacttcccactaaggcaagtactt

SEQ ID NO: 482198 - DNA, 33 bp, Homo sapien
caaaggtgatacttcctactaaggcaagtactt

SEQ ID NO: 482199 - DNA, 33 bp, Homo sapien
ctaaaataccgatgaccaatccaagctcaagct

SEQ ID NO: 482200 - DNA, 33 bp, Homo sapien
ctaaaataccgatgacgaatccaagctcaagct

SEQ ID NO: 482201 - DNA, 33 bp, Homo sapien
aactttcagaaagaataaatgttggtaaaccat

SEQ ID NO: 482202 - DNA, 33 bp, Homo sapien
aactttcagaaagaatgaatgttggtaaaccat

SEQ ID NO: 482203 - DNA, 33 bp, Homo sapien
tgggacaattacattacgatgtgctatttgtaa

SEQ ID NO: 482204 - DNA, 33 bp, Homo sapien
tgggacaattacattatgatgtgctatttgtaa

SEQ ID NO: 482205 - DNA, 33 bp, Homo sapien
gctgttatgtttcaaaattgtgccaagtttatg

SEQ ID NO: 482206 - DNA, 33 bp, Homo sapien
gctgttatgtttcaaagttgtgccaagtttatg

SEQ ID NO: 482207 - DNA, 33 bp, Homo sapien
agggattagtacaagtgcaaagccatgttcaat

SEQ ID NO: 482208 - DNA, 33 bp, Homo sapien
agggattagtacaagttcaaagccatgttcaat

SEQ ID NO: 482209 - DNA, 33 bp, Homo sapien
tgaatggcagaaatggaaggacagaagaaaaat

SEQ ID NO: 482210 - DNA, 33 bp, Homo sapien
tgaatggcagaaatgggaggacagaagaaaaat

SEQ ID NO: 482211 - DNA, 33 bp, Homo sapien
ctcagctgtaaaacaacaacagtcctagtacct

SEQ ID NO: 482212 - DNA, 33 bp, Homo sapien
ctcagctgtaaaacaagaacagtcctagtacct

SEQ ID NO: 482213 - DNA, 33 bp, Homo sapien
tttaacaattcgataacagctagtaaagttgaa

SEQ ID NO: 482214 - DNA, 33 bp, Homo sapien
tttaacaattcgataatagctagtaaagttgaa

SEQ ID NO: 482215 - DNA, 33 bp, Homo sapien
tgaagctactttcccaacctgggcacatattgc

SEQ ID NO: 482216 - DNA, 33 bp, Homo sapien
tgaagctactttcccatcctgggcacatattgc

SEQ ID NO: 482217 - DNA, 33 bp, Homo sapien
ctgtaaatggaagcataaaaatgagtgtgtctg

SEQ ID NO: 482218 - DNA, 33 bp, Homo sapien
ctgtaaatggaagcatcaaaatgagtgtgtctg

SEQ ID NO: 482219 - DNA, 33 bp, Homo sapien
ccgtcaggttctacctgaaatctatgtggagcg

SEQ ID NO: 482220 - DNA, 33 bp, Homo sapien
ccgtcaggttctaccttaaatctatgtggagcg

SEQ ID NO: 482221 - DNA, 33 bp, Homo sapien
agagaaagcaataatgcaagaggcttgggacct

SEQ ID NO: 482222 - DNA, 33 bp, Homo sapien
agagaaagcaataatgtaagaggcttgggacct

SEQ ID NO: 482223 - DNA, 33 bp, Homo sapien
ggctctttacttgctcaactccttccaaaagcc

SEQ ID NO: 482224 - DNA, 33 bp, Homo sapien
ggctctttacttgctcgactccttccaaaagcc

SEQ ID NO: 482225 - DNA, 33 bp, Homo sapien
aacaaatcttaagctacggttattgatccacat

SEQ ID NO: 482226 - DNA, 33 bp, Homo sapien
aacaaatcttaagctagggttattgatccacat

SEQ ID NO: 482227 - DNA, 33 bp, Homo sapien
ggggatcttaaataaaattgtaactcgctacac

SEQ ID NO: 482228 - DNA, 33 bp, Homo sapien
ggggatcttaaataaagttgtaactcgctacac

SEQ ID NO: 482229 - DNA, 33 bp, Homo sapien
ctccccaaaggcaataagcaaaggctctgatga

SEQ ID NO: 482230 - DNA, 33 bp, Homo sapien
ctccccaaaggcaataggcaaaggctctgatga

SEQ ID NO: 482231 - DNA, 33 bp, Homo sapien
gaatgacaggttcaggacagatttggaagccag

SEQ ID NO: 482232 - DNA, 33 bp, Homo sapien
gaatgacaggttcaggtcagatttggaagccag

SEQ ID NO: 482233 - DNA, 33 bp, Homo sapien
ccgatccattaccaaggcatttatgcaagtcag

SEQ ID NO: 482234 - DNA, 33 bp, Homo sapien
ccgatccattaccaagtcatttatgcaagtcag

SEQ ID NO: 482235 - DNA, 33 bp, Homo sapien
ttgggctgtccgtgaccatttttcctgtgatgt

SEQ ID NO: 482236 - DNA, 33 bp, Homo sapien
ttgggctgtccgtgacgatttttcctgtgatgt

SEQ ID NO: 482237 - DNA, 33 bp, Homo sapien
atctcaaactattcacaagggctcattctcact

SEQ ID NO: 482238 - DNA, 33 bp, Homo sapien
atctcaaactattcaccagggctcattctcact

SEQ ID NO: 482239 - DNA, 33 bp, Homo sapien
ggctcagacctgttgcgaagggacagatatgca

SEQ ID NO: 482240 - DNA, 33 bp, Homo sapien
ggctcagacctgttgctaagggacagatatgca

SEQ ID NO: 482241 - DNA, 33 bp, Homo sapien
ctcttccttttaaaataatgcttcgacgtcttg

SEQ ID NO: 482242 - DNA, 33 bp, Homo sapien
ctcttccttttaaaatcatgcttcgacgtcttg

SEQ ID NO: 482243 - DNA, 33 bp, Homo sapien
aaaggtgaaatggtccaccaataaaacaagacg

SEQ ID NO: 482244 - DNA, 33 bp, Homo sapien
aaaggtgaaatggtccgccaataaaacaagacg

SEQ ID NO: 482245 - DNA, 33 bp, Homo sapien
gccctctcacttttgaaacattctaagtcagct

SEQ ID NO: 482246 - DNA, 33 bp, Homo sapien
gccctctcacttttgacacattctaagtcagct

SEQ ID NO: 482247 - DNA, 33 bp, Homo sapien
ctccactatccagagcacaattgggcccttcaa

SEQ ID NO: 482248 - DNA, 33 bp, Homo sapien
ctccactatccagagcgcaattgggcccttcaa

SEQ ID NO: 482249 - DNA, 33 bp, Homo sapien
aggtaagtcatgtaaagttctttgcacagtccc

SEQ ID NO: 482250 - DNA, 33 bp, Homo sapien
aggtaagtcatgtaaatttctttgcacagtccc

SEQ ID NO: 482251 - DNA, 33 bp, Homo sapien
tcctctcctctctacagacaaggctctctccgc

SEQ ID NO: 482252 - DNA, 33 bp, Homo sapien
tcctctcctctctacatacaaggctctctccgc

SEQ ID NO: 482253 - DNA, 33 bp, Homo sapien
attaccttgtgagtcaataatgttatcctaagg

SEQ ID NO: 482254 - DNA, 33 bp, Homo sapien
attaccttgtgagtcagtaatgttatcctaagg

SEQ ID NO: 482255 - DNA, 33 bp, Homo sapien
agtgctggggattcaacgtcggataggttgtga

SEQ ID NO: 482256 - DNA, 33 bp, Homo sapien
agtgctggggattcaatgtcggataggttgtga

SEQ ID NO: 482257 - DNA, 33 bp, Homo sapien
tttaacaaatggattggacacaatgggcacctt

SEQ ID NO: 482258 - DNA, 33 bp, Homo sapien
tttaacaaatggattgtacacaatgggcacctt

SEQ ID NO: 482259 - DNA, 33 bp, Homo sapien
cattcacttatgaggcagactgaggtttaccga

SEQ ID NO: 482260 - DNA, 33 bp, Homo sapien
cattcacttatgaggctgactgaggtttaccga

SEQ ID NO: 482261 - DNA, 33 bp, Homo sapien
ctgcttttaaccatcacagtgcattaaactctc

SEQ ID NO: 482262 - DNA, 33 bp, Homo sapien
ctgcttttaaccatcatagtgcattaaactctc

SEQ ID NO: 482263 - DNA, 33 bp, Homo sapien
tttcaatttaggaaaactatagcacagccaaaa

SEQ ID NO: 482264 - DNA, 33 bp, Homo sapien
tttcaatttaggaaaattatagcacagccaaaa

SEQ ID NO: 482265 - DNA, 33 bp, Homo sapien
tttagcttctcttgcaccctttgctctacatac

SEQ ID NO: 482266 - DNA, 33 bp, Homo sapien
tttagcttctcttgcagcctttgctctacatac

SEQ ID NO: 482267 - DNA, 33 bp, Homo sapien
tttggtctcttctccacgtcccttcttcaaaca

SEQ ID NO: 482268 - DNA, 33 bp, Homo sapien
tttggtctcttctccatgtcccttcttcaaaca

SEQ ID NO: 482269 - DNA, 33 bp, Homo sapien
gctgagggtccttctcacttctcatttgtttca

SEQ ID NO: 482270 - DNA, 33 bp, Homo sapien
gctgagggtccttctcgcttctcatttgtttca

SEQ ID NO: 482271 - DNA, 33 bp, Homo sapien
agtctgaatctaaccaatatttccaaacttaat

SEQ ID NO: 482272 - DNA, 33 bp, Homo sapien
agtctgaatctaaccattatttccaaacttaat

SEQ ID NO: 482273 - DNA, 33 bp, Homo sapien
atgtcttgtgtacataacttgttcattactatc

SEQ ID NO: 482274 - DNA, 33 bp, Homo sapien
atgtcttgtgtacataccttgttcattactatc

SEQ ID NO: 482275 - DNA, 33 bp, Homo sapien
aaacaaacaaaactaacgagcgtctgtacagta

SEQ ID NO: 482276 - DNA, 33 bp, Homo sapien
aaacaaacaaaactaatgagcgtctgtacagta

SEQ ID NO: 482277 - DNA, 33 bp, Homo sapien
ttttgcacatttttgaagtatcttatgttaaag

SEQ ID NO: 482278 - DNA, 33 bp, Homo sapien
ttttgcacatttttgaggtatcttatgttaaag

SEQ ID NO: 482279 - DNA, 33 bp, Homo sapien
acgctcattaagaaccaagactagaaccctttg

SEQ ID NO: 482280 - DNA, 33 bp, Homo sapien
acgctcattaagaacccagactagaaccctttg

SEQ ID NO: 482281 - DNA, 33 bp, Homo sapien
gctcctccaacaaaaactgatcttttatagcaa

SEQ ID NO: 482282 - DNA, 33 bp, Homo sapien
gctcctccaacaaaaattgatcttttatagcaa

SEQ ID NO: 482283 - DNA, 33 bp, Homo sapien
tttaagtaaaaatatccgatagattccttaata

SEQ ID NO: 482284 - DNA, 33 bp, Homo sapien
tttaagtaaaaatatcggatagattccttaata

SEQ ID NO: 482285 - DNA, 33 bp, Homo sapien
tgtctgcaagttgtctaaccctctccttcttgt

SEQ ID NO: 482286 - DNA, 33 bp, Homo sapien
tgtctgcaagttgtctcaccctctccttcttgt

SEQ ID NO: 482287 - DNA, 33 bp, Homo sapien
aagtgactaggaagcacgaaaaaggtgcaggaa

SEQ ID NO: 482288 - DNA, 33 bp, Homo sapien
aagtgactaggaagcatgaaaaaggtgcaggaa

SEQ ID NO: 482289 - DNA, 33 bp, Homo sapien
tttcacctttatatgcactcagattccaccaat

SEQ ID NO: 482290 - DNA, 33 bp, Homo sapien
tttcacctttatatgcgctcagattccaccaat

SEQ ID NO: 482291 - DNA, 33 bp, Homo sapien
tgaagatttttttaaacggctggcagtgttaaa

SEQ ID NO: 482292 - DNA, 33 bp, Homo sapien
tgaagatttttttaaatggctggcagtgttaaa

SEQ ID NO: 482293 - DNA, 33 bp, Homo sapien
catgagcgaatgttagccctttaacactgccag

SEQ ID NO: 482294 - DNA, 33 bp, Homo sapien
catgagcgaatgttagtcctttaacactgccag

SEQ ID NO: 482295 - DNA, 33 bp, Homo sapien
aatttcatgaaaagtacctactctgtcttaaaa

SEQ ID NO: 482296 - DNA, 33 bp, Homo sapien
aatttcatgaaaagtatctactctgtcttaaaa

SEQ ID NO: 482297 - DNA, 33 bp, Homo sapien
caagactggaagctacggtaatccatcctccat

SEQ ID NO: 482298 - DNA, 33 bp, Homo sapien
caagactggaagctactgtaatccatcctccat

SEQ ID NO: 482299 - DNA, 33 bp, Homo sapien
agtgtggacttctccacggactcagagacggta

SEQ ID NO: 482300 - DNA, 33 bp, Homo sapien
agtgtggacttctccatggactcagagacggta

SEQ ID NO: 482301 - DNA, 33 bp, Homo sapien
tttccattttaaccagccaacctgtcacatggt

SEQ ID NO: 482302 - DNA, 33 bp, Homo sapien
tttccattttaaccaggcaacctgtcacatggt

SEQ ID NO: 482303 - DNA, 33 bp, Homo sapien
ctcttcttggtcacaactggactcagttcaaca

SEQ ID NO: 482304 - DNA, 33 bp, Homo sapien
ctcttcttggtcacaattggactcagttcaaca

SEQ ID NO: 482305 - DNA, 33 bp, Homo sapien
ctttcctgaccagttacgctccgcacatgaatt

SEQ ID NO: 482306 - DNA, 33 bp, Homo sapien
ctttcctgaccagttatgctccgcacatgaatt

SEQ ID NO: 482307 - DNA, 33 bp, Homo sapien
tcatcacacgactgtacattttttatgggctcc

SEQ ID NO: 482308 - DNA, 33 bp, Homo sapien
tcatcacacgactgtatattttttatgggctcc

SEQ ID NO: 482309 - DNA, 33 bp, Homo sapien
actcagagcattaacccaagatctctcagccag

SEQ ID NO: 482310 - DNA, 33 bp, Homo sapien
actcagagcattaacctaagatctctcagccag

SEQ ID NO: 482311 - DNA, 33 bp, Homo sapien
tgcacctgctatctacccttcctggacattcct

SEQ ID NO: 482312 - DNA, 33 bp, Homo sapien
tgcacctgctatctactcttcctggacattcct

SEQ ID NO: 482313 - DNA, 33 bp, Homo sapien
cctttggcccagtgaacgaattgtccttggttt

SEQ ID NO: 482314 - DNA, 33 bp, Homo sapien
cctttggcccagtgaatgaattgtccttggttt

SEQ ID NO: 482315 - DNA, 33 bp, Homo sapien
ctctagttccatctgacattctgtaagttaggg

SEQ ID NO: 482316 - DNA, 33 bp, Homo sapien
ctctagttccatctgatattctgtaagttaggg

SEQ ID NO: 482317 - DNA, 33 bp, Homo sapien
taggaggttctaaataggtagttggaagattgc

SEQ ID NO: 482318 - DNA, 33 bp, Homo sapien
taggaggttctaaatatgtagttggaagattgc

SEQ ID NO: 482319 - DNA, 33 bp, Homo sapien
ttaatgcctattacagaaatacgtgttgtaaga

SEQ ID NO: 482320 - DNA, 33 bp, Homo sapien
ttaatgcctattacaggaatacgtgttgtaaga

SEQ ID NO: 482321 - DNA, 33 bp, Homo sapien
aacctgcggccaagataaaccagaaaaagcctg

SEQ ID NO: 482322 - DNA, 33 bp, Homo sapien
aacctgcggccaagatgaaccagaaaaagcctg

SEQ ID NO: 482323 - DNA, 33 bp, Homo sapien
aaaacctgaggaatacaagccctatgaggcggg

SEQ ID NO: 482324 - DNA, 33 bp, Homo sapien
aaaacctgaggaatacgagccctatgaggcggg

SEQ ID NO: 482325 - DNA, 33 bp, Homo sapien
gctgggactctgataacggagactgatactctg

SEQ ID NO: 482326 - DNA, 33 bp, Homo sapien
gctgggactctgataatggagactgatactctg

SEQ ID NO: 482327 - DNA, 33 bp, Homo sapien
tagtggtatttgaacaactttgctatgtttggg

SEQ ID NO: 482328 - DNA, 33 bp, Homo sapien
tagtggtatttgaacagctttgctatgtttggg

SEQ ID NO: 482329 - DNA, 33 bp, Homo sapien
actttccctttagatcaaatggctattctaaat

SEQ ID NO: 482330 - DNA, 33 bp, Homo sapien
actttccctttagatcgaatggctattctaaat

SEQ ID NO: 482331 - DNA, 33 bp, Homo sapien
gaatcttgcagaatacagcgtgggccatataag

SEQ ID NO: 482332 - DNA, 33 bp, Homo sapien
gaatcttgcagaatacggcgtgggccatataag

SEQ ID NO: 482333 - DNA, 33 bp, Homo sapien
ctgttaaatttcgcacaattattagactctaag

SEQ ID NO: 482334 - DNA, 33 bp, Homo sapien
ctgttaaatttcgcacgattattagactctaag

SEQ ID NO: 482335 - DNA, 33 bp, Homo sapien
accccaagacaaacccacacaaattcttgacat

SEQ ID NO: 482336 - DNA, 33 bp, Homo sapien
accccaagacaaacccgcacaaattcttgacat

SEQ ID NO: 482337 - DNA, 33 bp, Homo sapien
tttgcgtacttttcacaacagccctataaggta

SEQ ID NO: 482338 - DNA, 33 bp, Homo sapien
tttgcgtacttttcacgacagccctataaggta

SEQ ID NO: 482339 - DNA, 33 bp, Homo sapien
ttgttgtcttgttttacagcacttatgcccttc

SEQ ID NO: 482340 - DNA, 33 bp, Homo sapien
ttgttgtcttgttttatagcacttatgcccttc

SEQ ID NO: 482341 - DNA, 33 bp, Homo sapien
aataatgatgaagaacaatgctctttctggttt

SEQ ID NO: 482342 - DNA, 33 bp, Homo sapien
aataatgatgaagaacgatgctctttctggttt

SEQ ID NO: 482343 - DNA, 33 bp, Homo sapien
atggtgctgagataacaagttcgtcatatacag

SEQ ID NO: 482344 - DNA, 33 bp, Homo sapien
atggtgctgagataaccagttcgtcatatacag

SEQ ID NO: 482345 - DNA, 33 bp, Homo sapien
caagtggacaaacaagaaaagggccttgtaagg

SEQ ID NO: 482346 - DNA, 33 bp, Homo sapien
caagtggacaaacaagtaaagggccttgtaagg

SEQ ID NO: 482347 - DNA, 33 bp, Homo sapien
attagcttgatttagacgttccacaatgtatac

SEQ ID NO: 482348 - DNA, 33 bp, Homo sapien
attagcttgatttagatgttccacaatgtatac

SEQ ID NO: 482349 - DNA, 33 bp, Homo sapien
atcaaggaatgcttaacgaatatctttctatat

SEQ ID NO: 482350 - DNA, 33 bp, Homo sapien
atcaaggaatgcttaatgaatatctttctatat

SEQ ID NO: 482351 - DNA, 33 bp, Homo sapien
agtagaaaggagcatccattcccccaaagcaat

SEQ ID NO: 482352 - DNA, 33 bp, Homo sapien
agtagaaaggagcatctattcccccaaagcaat

SEQ ID NO: 482353 - DNA, 33 bp, Homo sapien
gtgcaaaccacagagactatatgcagaaagaaa

SEQ ID NO: 482354 - DNA, 33 bp, Homo sapien
gtgcaaaccacagagattatatgcagaaagaaa

SEQ ID NO: 482355 - DNA, 33 bp, Homo sapien
tttgaaagatgtgaccaaaatctacattcaaga

SEQ ID NO: 482356 - DNA, 33 bp, Homo sapien
tttgaaagatgtgaccgaaatctacattcaaga

SEQ ID NO: 482357 - DNA, 33 bp, Homo sapien
ttctctacaaagctaaaaagatagcaggatagg

SEQ ID NO: 482358 - DNA, 33 bp, Homo sapien
ttctctacaaagctaagaagatagcaggatagg

SEQ ID NO: 482359 - DNA, 33 bp, Homo sapien
agatgtcacagaagcccggaagagttaccctca

SEQ ID NO: 482360 - DNA, 33 bp, Homo sapien
agatgtcacagaagcctggaagagttaccctca

SEQ ID NO: 482361 - DNA, 33 bp, Homo sapien
tgagcggagattttcaataaggactaaatgaaa

SEQ ID NO: 482362 - DNA, 33 bp, Homo sapien
tgagcggagattttcagtaaggactaaatgaaa

SEQ ID NO: 482363 - DNA, 33 bp, Homo sapien
ttagtctttgctaccacgaagaataaaattata

SEQ ID NO: 482364 - DNA, 33 bp, Homo sapien
ttagtctttgctaccaggaagaataaaattata

SEQ ID NO: 482365 - DNA, 33 bp, Homo sapien
ggttatccccatgaagaaaattctaagcagaaa

SEQ ID NO: 482366 - DNA, 33 bp, Homo sapien
ggttatccccatgaagtaaattctaagcagaaa

SEQ ID NO: 482367 - DNA, 33 bp, Homo sapien
ttgtgaaatgctgataatacaataattcttcat

SEQ ID NO: 482368 - DNA, 33 bp, Homo sapien
ttgtgaaatgctgatagtacaataattcttcat

SEQ ID NO: 482369 - DNA, 33 bp, Homo sapien
aatttacaaggagcttaaacatatttacaagaa

SEQ ID NO: 482370 - DNA, 33 bp, Homo sapien
aatttacaaggagcttcaacatatttacaagaa

SEQ ID NO: 482371 - DNA, 33 bp, Homo sapien
attgtgtggagaagggacaaagtactcaggaag

SEQ ID NO: 482372 - DNA, 33 bp, Homo sapien
attgtgtggagaaggggcaaagtactcaggaag

SEQ ID NO: 482373 - DNA, 33 bp, Homo sapien
tcatgggaaggcactacactaagactggggtcg

SEQ ID NO: 482374 - DNA, 33 bp, Homo sapien
tcatgggaaggcactatactaagactggggtcg

SEQ ID NO: 482375 - DNA, 33 bp, Homo sapien
tcagatcgattggttagcaagattaaacctgag

SEQ ID NO: 482376 - DNA, 33 bp, Homo sapien
tcagatcgattggttatcaagattaaacctgag

SEQ ID NO: 482377 - DNA, 33 bp, Homo sapien
atcctggatgtagatacaggagtcttatgaaat

SEQ ID NO: 482378 - DNA, 33 bp, Homo sapien
atcctggatgtagatataggagtcttatgaaat

SEQ ID NO: 482379 - DNA, 33 bp, Homo sapien
gagctgtccatcactaaaagtattccatcagaa

SEQ ID NO: 482380 - DNA, 33 bp, Homo sapien
gagctgtccatcactagaagtattccatcagaa

SEQ ID NO: 482381 - DNA, 33 bp, Homo sapien
gttcagagagttgttacgagaccataaatgatt

SEQ ID NO: 482382 - DNA, 33 bp, Homo sapien
gttcagagagttgttatgagaccataaatgatt

SEQ ID NO: 482383 - DNA, 33 bp, Homo sapien
ctgccatcagcgtccaataggtccccgctggat

SEQ ID NO: 482384 - DNA, 33 bp, Homo sapien
ctgccatcagcgtccagtaggtccccgctggat

SEQ ID NO: 482385 - DNA, 33 bp, Homo sapien
tgtgagaccgccctcacagaacctcaacaagag

SEQ ID NO: 482386 - DNA, 33 bp, Homo sapien
tgtgagaccgccctcatagaacctcaacaagag

SEQ ID NO: 482387 - DNA, 33 bp, Homo sapien
tagctgtaatgttacactgaaatgctgcaggta

SEQ ID NO: 482388 - DNA, 33 bp, Homo sapien
tagctgtaatgttacattgaaatgctgcaggta

SEQ ID NO: 482389 - DNA, 33 bp, Homo sapien
ggattggcaccaaacactggggtttagaagtca

SEQ ID NO: 482390 - DNA, 33 bp, Homo sapien
ggattggcaccaaacattggggtttagaagtca

SEQ ID NO: 482391 - DNA, 33 bp, Homo sapien
aagcaatttttctcacaactcttcaagaacaca

SEQ ID NO: 482392 - DNA, 33 bp, Homo sapien
aagcaatttttctcaccactcttcaagaacaca

SEQ ID NO: 482393 - DNA, 33 bp, Homo sapien
aacaatttgatatgacagaaaacaccacatgat

SEQ ID NO: 482394 - DNA, 33 bp, Homo sapien
aacaatttgatatgacggaaaacaccacatgat

SEQ ID NO: 482395 - DNA, 33 bp, Homo sapien
agttactgctagtagcaatgtggtggatgaggg

SEQ ID NO: 482396 - DNA, 33 bp, Homo sapien
agttactgctagtagctatgtggtggatgaggg

SEQ ID NO: 482397 - DNA, 33 bp, Homo sapien
gaccttacatgccagagacagagtaggaaggtg

SEQ ID NO: 482398 - DNA, 33 bp, Homo sapien
gaccttacatgccagatacagagtaggaaggtg

SEQ ID NO: 482399 - DNA, 33 bp, Homo sapien
cctcctggctagtccacgtgttaggaacctgct

SEQ ID NO: 482400 - DNA, 33 bp, Homo sapien
cctcctggctagtccatgtgttaggaacctgct

SEQ ID NO: 482401 - DNA, 33 bp, Homo sapien
agatatggtgcactcaaaacctaccaagaccca

SEQ ID NO: 482402 - DNA, 33 bp, Homo sapien
agatatggtgcactcagaacctaccaagaccca

SEQ ID NO: 482403 - DNA, 33 bp, Homo sapien
cttccttacctcctcaatagcttacctgtctac

SEQ ID NO: 482404 - DNA, 33 bp, Homo sapien
cttccttacctcctcagtagcttacctgtctac

SEQ ID NO: 482405 - DNA, 33 bp, Homo sapien
actaaaacatggcaaacctggacctatcaacaa

SEQ ID NO: 482406 - DNA, 33 bp, Homo sapien
actaaaacatggcaaagctggacctatcaacaa

SEQ ID NO: 482407 - DNA, 33 bp, Homo sapien
gtaactctgcttctggcagttgaatggataaca

SEQ ID NO: 482408 - DNA, 33 bp, Homo sapien
gtaactctgcttctgggagttgaatggataaca

SEQ ID NO: 482409 - DNA, 33 bp, Homo sapien
caacaggaaatgagtaacttatgttcaccaaaa

SEQ ID NO: 482410 - DNA, 33 bp, Homo sapien
caacaggaaatgagtaccttatgttcaccaaaa

SEQ ID NO: 482411 - DNA, 33 bp, Homo sapien
ggaactgaaggtgtgtaaatcctgtgaataccg

SEQ ID NO: 482412 - DNA, 33 bp, Homo sapien
ggaactgaaggtgtgtgaatcctgtgaataccg

SEQ ID NO: 482413 - DNA, 33 bp, Homo sapien
ttcagcaaggggctccaagcttttatcagtgga

SEQ ID NO: 482414 - DNA, 33 bp, Homo sapien
ttcagcaaggggctccgagcttttatcagtgga

SEQ ID NO: 482415 - DNA, 33 bp, Homo sapien
ctaatgttttgccccactgagtttggatttggt

SEQ ID NO: 482416 - DNA, 33 bp, Homo sapien
ctaatgttttgccccattgagtttggatttggt

SEQ ID NO: 482417 - DNA, 33 bp, Homo sapien
agggagatgtggcataagatgtggatttttaag

SEQ ID NO: 482418 - DNA, 33 bp, Homo sapien
agggagatgtggcataggatgtggatttttaag

SEQ ID NO: 482419 - DNA, 33 bp, Homo sapien
agtgataatacagcagcaaagacaaaataaagt

SEQ ID NO: 482420 - DNA, 33 bp, Homo sapien
agtgataatacagcagtaaagacaaaataaagt

SEQ ID NO: 482421 - DNA, 33 bp, Homo sapien
tgattcatatgtgcctaaatcagttgctgtaaa

SEQ ID NO: 482422 - DNA, 33 bp, Homo sapien
tgattcatatgtgcctcaatcagttgctgtaaa

SEQ ID NO: 482423 - DNA, 33 bp, Homo sapien
tacaattcccagctgcaccatgaaaatttattt

SEQ ID NO: 482424 - DNA, 33 bp, Homo sapien
tacaattcccagctgcgccatgaaaatttattt

SEQ ID NO: 482425 - DNA, 33 bp, Homo sapien
aatatggattaaaagacggtccactgtgagtga

SEQ ID NO: 482426 - DNA, 33 bp, Homo sapien
aatatggattaaaagatggtccactgtgagtga

SEQ ID NO: 482427 - DNA, 33 bp, Homo sapien; identical to SEQ ID NO: 482425

SEQ ID NO: 482428 - DNA, 33 bp, Homo sapien; identical to SEQ ID NO: 482426

SEQ ID NO: 482429 - DNA, 33 bp, Homo sapien
ccatcatctttacccactgacaatctgatcaat

SEQ ID NO: 482430 - DNA, 33 bp, Homo sapien
ccatcatctttacccattgacaatctgatcaat

SEQ ID NO: 482431 - DNA, 33 bp, Homo sapien
ttaagtgtaacggttcgaagaatgctgaactat

SEQ ID NO: 482432 - DNA, 33 bp, Homo sapien
ttaagtgtaacggttctaagaatgctgaactat

SEQ ID NO: 482433 - DNA, 33 bp, Homo sapien
ccattgatagtcccgacgtcaattacttaaaag

SEQ ID NO: 482434 - DNA, 33 bp, Homo sapien
ccattgatagtcccgatgtcaattacttaaaag

SEQ ID NO: 482435 - DNA, 33 bp, Homo sapien
ataccctctttgctagaaattttctcattgctc

SEQ ID NO: 482436 - DNA, 33 bp, Homo sapien
ataccctctttgctaggaattttctcattgctc

SEQ ID NO: 482437 - DNA, 33 bp, Homo sapien
tttttactgcagtgtcccagctcaaagaacaaa

SEQ ID NO: 482438 - DNA, 33 bp, Homo sapien
tttttactgcagtgtctcagctcaaagaacaaa

SEQ ID NO: 482439 - DNA, 33 bp, Homo sapien
gaagtgagttataagacgggcagtgtgatatag

SEQ ID NO: 482440 - DNA, 33 bp, Homo sapien
gaagtgagttataagatgggcagtgtgatatag

SEQ ID NO: 482441 - DNA, 33 bp, Homo sapien
cacctgacagagttgacacagctttagcaagtt

SEQ ID NO: 482442 - DNA, 33 bp, Homo sapien
cacctgacagagttgagacagctttagcaagtt

SEQ ID NO: 482443 - DNA, 33 bp, Homo sapien
aaagacagaaaggccaagtccattcagtgatag

SEQ ID NO: 482444 - DNA, 33 bp, Homo sapien
aaagacagaaaggccacgtccattcagtgatag

SEQ ID NO: 482445 - DNA, 33 bp, Homo sapien
cccggctcaaatgctaaattacatggcattgta

SEQ ID NO: 482446 - DNA, 33 bp, Homo sapien
cccggctcaaatgctagattacatggcattgta

SEQ ID NO: 482447 - DNA, 33 bp, Homo sapien
tgcctctgcagtcctaccttgtagcataaatat

SEQ ID NO: 482448 - DNA, 33 bp, Homo sapien
tgcctctgcagtcctagcttgtagcataaatat

SEQ ID NO: 482449 - DNA, 33 bp, Homo sapien
acagaaactcttcaacagccaggaagctgatgc

SEQ ID NO: 482450 - DNA, 33 bp, Homo sapien
acagaaactcttcaaccgccaggaagctgatgc

SEQ ID NO: 482451 - DNA, 33 bp, Homo sapien
tagtgggcttctaagtaaaagtgtaaatgtctg

SEQ ID NO: 482452 - DNA, 33 bp, Homo sapien
tagtgggcttctaagtgaaagtgtaaatgtctg

SEQ ID NO: 482453 - DNA, 33 bp, Homo sapien
tcccatagccaaaaaccattctaaatttagtgt

SEQ ID NO: 482454 - DNA, 33 bp, Homo sapien
tcccatagccaaaaactattctaaatttagtgt

SEQ ID NO: 482455 - DNA, 33 bp, Homo sapien
acatgaacctctagtcaagatgaagaaatataa

SEQ ID NO: 482456 - DNA, 33 bp, Homo sapien
acatgaacctctagtccagatgaagaaatataa

SEQ ID NO: 482457 - DNA, 33 bp, Homo sapien
tctctttcactgtaaccgggtcataaggtttgg

SEQ ID NO: 482458 - DNA, 33 bp, Homo sapien
tctctttcactgtaactgggtcataaggtttgg

SEQ ID NO: 482459 - DNA, 33 bp, Homo sapien
ccatcatgcctgacttcaactccatgtcttacc

SEQ ID NO: 482460 - DNA, 33 bp, Homo sapien
ccatcatgcctgacttgaactccatgtcttacc

SEQ ID NO: 482461 - DNA, 33 bp, Homo sapien
gtttcaaatgtaacaccctctgaaaattctaaa

SEQ ID NO: 482462 - DNA, 33 bp, Homo sapien
gtttcaaatgtaacactctctgaaaattctaaa

SEQ ID NO: 482463 - DNA, 33 bp, Homo sapien
actaagtcagcagctaaaatgtggtatgttagg

SEQ ID NO: 482464 - DNA, 33 bp, Homo sapien
actaagtcagcagctagaatgtggtatgttagg

SEQ ID NO: 482465 - DNA, 33 bp, Homo sapien
atgttgctgcaaatgacgatgctttattctttt

SEQ ID NO: 482466 - DNA, 33 bp, Homo sapien
atgttgctgcaaatgatgatgctttattctttt

SEQ ID NO: 482467 - DNA, 33 bp, Homo sapien
gttaagagaatttctaaagccggtaacccctgg

SEQ ID NO: 482468 - DNA, 33 bp, Homo sapien
gttaagagaatttctatagccggtaacccctgg

SEQ ID NO: 482469 - DNA, 33 bp, Homo sapien
ggttgtcaactccacactatttcctggtgcctc

SEQ ID NO: 482470 - DNA, 33 bp, Homo sapien
ggttgtcaactccacagtatttcctggtgcctc

SEQ ID NO: 482471 - DNA, 33 bp, Homo sapien
gcaggcttggttgaagacaaggtcctcgatgtt

SEQ ID NO: 482472 - DNA, 33 bp, Homo sapien
gcaggcttggttgaaggcaaggtcctcgatgtt

SEQ ID NO: 482473 - DNA, 33 bp, Homo sapien
ggtttattagttccaaaagtactgtgtgaaagc

SEQ ID NO: 482474 - DNA, 33 bp, Homo sapien
ggtttattagttccaatagtactgtgtgaaagc

SEQ ID NO: 482475 - DNA, 33 bp, Homo sapien
taaatttgaatttccacgtctgtagtcctggtc

SEQ ID NO: 482476 - DNA, 33 bp, Homo sapien
taaatttgaatttccatgtctgtagtcctggtc

SEQ ID NO: 482477 - DNA, 33 bp, Homo sapien
cagttagaacttcgacgggttttagctgcattt

SEQ ID NO: 482478 - DNA, 33 bp, Homo sapien
cagttagaacttcgactggttttagctgcattt

SEQ ID NO: 482479 - DNA, 33 bp, Homo sapien
ctagagctctgctaacgcattctccatgaatct

SEQ ID NO: 482480 - DNA, 33 bp, Homo sapien
ctagagctctgctaactcattctccatgaatct

SEQ ID NO: 482481 - DNA, 33 bp, Homo sapien
cacctaattcttttgcaagataagcagtcctac

SEQ ID NO: 482482 - DNA, 33 bp, Homo sapien
cacctaattcttttgcgagataagcagtcctac

SEQ ID NO: 482483 - DNA, 33 bp, Homo sapien
cctggaagtgagagagaaattgaaggttgccca

SEQ ID NO: 482484 - DNA, 33 bp, Homo sapien
cctggaagtgagagaggaattgaaggttgccca

SEQ ID NO: 482485 - DNA, 33 bp, Homo sapien
tatgctggtctcaccaatcagaatgccccttcc

SEQ ID NO: 482486 - DNA, 33 bp, Homo sapien
tatgctggtctcaccactcagaatgccccttcc

SEQ ID NO: 482487 - DNA, 33 bp, Homo sapien
ccagtcaggccttaagaatagaaactagggcaa

SEQ ID NO: 482488 - DNA, 33 bp, Homo sapien
ccagtcaggccttaaggatagaaactagggcaa

SEQ ID NO: 482489 - DNA, 33 bp, Homo sapien
agttcctgtcttatacccatctccctctgcttt

SEQ ID NO: 482490 - DNA, 33 bp, Homo sapien
agttcctgtcttatactcatctccctctgcttt

SEQ ID NO: 482491 - DNA, 33 bp, Homo sapien
cctgaaagctgctgcaataaaatctaagtccct

SEQ ID NO: 482492 - DNA, 33 bp, Homo sapien
cctgaaagctgctgcagtaaaatctaagtccct

SEQ ID NO: 482493 - DNA, 33 bp, Homo sapien
tattgcagttttctaactcctaatatttctcca

SEQ ID NO: 482494 - DNA, 33 bp, Homo sapien
tattgcagttttctaattcctaatatttctcca

SEQ ID NO: 482495 - DNA, 33 bp, Homo sapien
attttatgtgcagcaaagaaccttagaataatg

SEQ ID NO: 482496 - DNA, 33 bp, Homo sapien
attttatgtgcagcaaggaaccttagaataatg

SEQ ID NO: 482497 - DNA, 33 bp, Homo sapien
tgagactcacaaaagcggcttatttttaatcac

SEQ ID NO: 482498 - DNA, 33 bp, Homo sapien
tgagactcacaaaagctgcttatttttaatcac

SEQ ID NO: 482499 - DNA, 33 bp, Homo sapien
gtttaatcagtatatacagcaaacctataagta

SEQ ID NO: 482500 - DNA, 33 bp, Homo sapien
gtttaatcagtatatagagcaaacctataagta

SEQ ID NO: 482501 - DNA, 33 bp, Homo sapien
gcatgaatctggaaagccttgtcaaacaaaaca

SEQ ID NO: 482502 - DNA, 33 bp, Homo sapien
gcatgaatctggaaaggcttgtcaaacaaaaca

SEQ ID NO: 482503 - DNA, 33 bp, Homo sapien
gatgtatatcagtctcactactttattttgaca

SEQ ID NO: 482504 - DNA, 33 bp, Homo sapien
gatgtatatcagtctcgctactttattttgaca

SEQ ID NO: 482505 - DNA, 33 bp, Homo sapien
aacaaaaaattagtgccattaggctatgaacta

SEQ ID NO: 482506 - DNA, 33 bp, Homo sapien
aacaaaaaattagtgctattaggctatgaacta

SEQ ID NO: 482507 - DNA, 33 bp, Homo sapien
cctcagaagtagagaaatgctgggccaaatagt

SEQ ID NO: 482508 - DNA, 33 bp, Homo sapien
cctcagaagtagagaattgctgggccaaatagt

SEQ ID NO: 482509 - DNA, 33 bp, Homo sapien
gaaaaatagagaaaagacaaacctattgagtca

SEQ ID NO: 482510 - DNA, 33 bp, Homo sapien
gaaaaatagagaaaagtcaaacctattgagtca

SEQ ID NO: 482511 - DNA, 33 bp, Homo sapien
cttcatctttctctgcacgtcttggtgggggtt

SEQ ID NO: 482512 - DNA, 33 bp, Homo sapien
cttcatctttctctgcgcgtcttggtgggggtt

SEQ ID NO: 482513 - DNA, 33 bp, Homo sapien
tccaataggaacaagacatgaaaggaaagtcca

SEQ ID NO: 482514 - DNA, 33 bp, Homo sapien
tccaataggaacaagagatgaaaggaaagtcca

SEQ ID NO: 482515 - DNA, 33 bp, Homo sapien
tttgagtctgaaaacaactacagtttaaatcat

SEQ ID NO: 482516 - DNA, 33 bp, Homo sapien
tttgagtctgaaaacagctacagtttaaatcat

SEQ ID NO: 482517 - DNA, 33 bp, Homo sapien
aggactgtgggaaatacggaaagtggacagtga

SEQ ID NO: 482518 - DNA, 33 bp, Homo sapien
aggactgtgggaaatatggaaagtggacagtga

SEQ ID NO: 482519 - DNA, 33 bp, Homo sapien
agaatttgatttgtaactactgtatgtcaggtt

SEQ ID NO: 482520 - DNA, 33 bp, Homo sapien
agaatttgatttgtaattactgtatgtcaggtt

SEQ ID NO: 482521 - DNA, 33 bp, Homo sapien
ttctacaactccagaaaaaaaatgagcaatgct

SEQ ID NO: 482522 - DNA, 33 bp, Homo sapien
ttctacaactccagaagaaaaatgagcaatgct

SEQ ID NO: 482523 - DNA, 33 bp, Homo sapien
agagactgttttagaacccaaggctcctgctgc

SEQ ID NO: 482524 - DNA, 33 bp, Homo sapien
agagactgttttagaatccaaggctcctgctgc

SEQ ID NO: 482525 - DNA, 33 bp, Homo sapien
gttgcttgcaaatcaaggtgtgaggcatgaggg

SEQ ID NO: 482526 - DNA, 33 bp, Homo sapien
gttgcttgcaaatcaatgtgtgaggcatgaggg

SEQ ID NO: 482527 - DNA, 33 bp, Homo sapien
tgtatgacatttgaaaactagtactttatcttt

SEQ ID NO: 482528 - DNA, 33 bp, Homo sapien
tgtatgacatttgaaagctagtactttatcttt

SEQ ID NO: 482529 - DNA, 33 bp, Homo sapien
caaactacaagtctcacgcctgttcttctgcct

SEQ ID NO: 482530 - DNA, 33 bp, Homo sapien
caaactacaagtctcatgcctgttcttctgcct

SEQ ID NO: 482531 - DNA, 33 bp, Homo sapien
atctttaaattatccaatccatccttgtaagtg

SEQ ID NO: 482532 - DNA, 33 bp, Homo sapien
atctttaaattatccagtccatccttgtaagtg

SEQ ID NO: 482533 - DNA, 33 bp, Homo sapien
tttggcttctatgacacggctggtactttgtag

SEQ ID NO: 482534 - DNA, 33 bp, Homo sapien
tttggcttctatgacatggctggtactttgtag

SEQ ID NO: 482535 - DNA, 33 bp, Homo sapien
cctaaggctaccacaacgattaagtaatgacaa

SEQ ID NO: 482536 - DNA, 33 bp, Homo sapien
cctaaggctaccacaaggattaagtaatgacaa

SEQ ID NO: 482537 - DNA, 33 bp, Homo sapien
tcttgcacaagcaaagcacagagttttatttag

SEQ ID NO: 482538 - DNA, 33 bp, Homo sapien
tcttgcacaagcaaagtacagagttttatttag

SEQ ID NO: 482539 - DNA, 33 bp, Homo sapien
taaaccaaacagcatcagaaccagggcccagca

SEQ ID NO: 482540 - DNA, 33 bp, Homo sapien
taaaccaaacagcatccgaaccagggcccagca

SEQ ID NO: 482541 - DNA, 33 bp, Homo sapien
tctactactctttccaagtggatcttaagcttt

SEQ ID NO: 482542 - DNA, 33 bp, Homo sapien
tctactactctttccaggtggatcttaagcttt

SEQ ID NO: 482543 - DNA, 33 bp, Homo sapien
cagcatatcactgtgacagcaagtgattataac

SEQ ID NO: 482544 - DNA, 33 bp, Homo sapien
cagcatatcactgtgagagcaagtgattataac

SEQ ID NO: 482545 - DNA, 33 bp, Homo sapien
tccttttctgccctcacgtgcttgtgttttgtt

SEQ ID NO: 482546 - DNA, 33 bp, Homo sapien
tccttttctgccctcatgtgcttgtgttttgtt

SEQ ID NO: 482547 - DNA, 33 bp, Homo sapien
cttcctaagacttgaaattaatgcagttagaac

SEQ ID NO: 482548 - DNA, 33 bp, Homo sapien
cttcctaagacttgaagttaatgcagttagaac

SEQ ID NO: 482549 - DNA, 33 bp, Homo sapien
aacagaaagatattcaaacacgtcaatgtgttt

SEQ ID NO: 482550 - DNA, 33 bp, Homo sapien
aacagaaagatattcagacacgtcaatgtgttt

SEQ ID NO: 482551 - DNA, 33 bp, Homo sapien
catcctagtagccacaagtttttagttagggtc

SEQ ID NO: 482552 - DNA, 33 bp, Homo sapien
catcctagtagccacaggtttttagttagggtc

SEQ ID NO: 482553 - DNA, 33 bp, Homo sapien
agatttgaagaaggtacaaatttggcaagccag

SEQ ID NO: 482554 - DNA, 33 bp, Homo sapien
agatttgaagaaggtataaatttggcaagccag

SEQ ID NO: 482555 - DNA, 33 bp, Homo sapien
tctgaataaacaatcccaactgaaatttctgaa

SEQ ID NO: 482556 - DNA, 33 bp, Homo sapien
tctgaataaacaatcctaactgaaatttctgaa

SEQ ID NO: 482557 - DNA, 33 bp, Homo sapien
gtttaagaggcttctaataagttagttgtagta

SEQ ID NO: 482558 - DNA, 33 bp, Homo sapien
gtttaagaggcttctagtaagttagttgtagta

SEQ ID NO: 482559 - DNA, 33 bp, Homo sapien
caaaaacattgatcagaattgtacttggccaat

SEQ ID NO: 482560 - DNA, 33 bp, Homo sapien
caaaaacattgatcaggattgtacttggccaat

SEQ ID NO: 482561 - DNA, 33 bp, Homo sapien
gggtgggttgcaaatacaagatggagaaatata

SEQ ID NO: 482562 - DNA, 33 bp, Homo sapien
gggtgggttgcaaatataagatggagaaatata

SEQ ID NO: 482563 - DNA, 33 bp, Homo sapien
attgttttccctgtcaatcgcaggtagtaggaa

SEQ ID NO: 482564 - DNA, 33 bp, Homo sapien
attgttttccctgtcagtcgcaggtagtaggaa

SEQ ID NO: 482565 - DNA, 33 bp, Homo sapien
gggagctctggcgatacgtttttacacaacagt

SEQ ID NO: 482566 - DNA, 33 bp, Homo sapien
gggagctctggcgatatgtttttacacaacagt

SEQ ID NO: 482567 - DNA, 33 bp, Homo sapien
tatccatttatcagccaatgaacctaagttgtt

SEQ ID NO: 482568 - DNA, 33 bp, Homo sapien
tatccatttatcagccgatgaacctaagttgtt

SEQ ID NO: 482569 - DNA, 33 bp, Homo sapien
tgcctttgcaaagtcaatagctctgttcatatc

SEQ ID NO: 482570 - DNA, 33 bp, Homo sapien
tgcctttgcaaagtcagtagctctgttcatatc

SEQ ID NO: 482571 - DNA, 33 bp, Homo sapien
caaaatatctcaccagaaatctaaaaatgatgt

SEQ ID NO: 482572 - DNA, 33 bp, Homo sapien
caaaatatctcaccagtaatctaaaaatgatgt

SEQ ID NO: 482573 - DNA, 33 bp, Homo sapien
aagaactgcaaaacaaaccactccttttcaact

SEQ ID NO: 482574 - DNA, 33 bp, Homo sapien
aagaactgcaaaacaagccactccttttcaact

SEQ ID NO: 482575 - DNA, 33 bp, Homo sapien
tctgaaacctaccataatagcatagaacattgt

SEQ ID NO: 482576 - DNA, 33 bp, Homo sapien
tctgaaacctaccatattagcatagaacattgt

SEQ ID NO: 482577 - DNA, 33 bp, Homo sapien
gtcacatttaacaaaacgatggcagattcttgg

SEQ ID NO: 482578 - DNA, 33 bp, Homo sapien
gtcacatttaacaaaatgatggcagattcttgg

SEQ ID NO: 482579 - DNA, 33 bp, Homo sapien
tttaaaatgttcaggacgaagagagcttttgaa

SEQ ID NO: 482580 - DNA, 33 bp, Homo sapien
tttaaaatgttcaggatgaagagagcttttgaa

SEQ ID NO: 482581 - DNA, 33 bp, Homo sapien
attgcaaatttgagaaatgcagaaatgaagaaa

SEQ ID NO: 482582 - DNA, 33 bp, Homo sapien
attgcaaatttgagaagtgcagaaatgaagaaa

SEQ ID NO: 482583 - DNA, 33 bp, Homo sapien
tttccccagcttgctacaccttttctccacttt

SEQ ID NO: 482584 - DNA, 33 bp, Homo sapien
tttccccagcttgctataccttttctccacttt

SEQ ID NO: 482585 - DNA, 33 bp, Homo sapien
ctgacaattgagttaacgtgaaatttgtcatag

SEQ ID NO: 482586 - DNA, 33 bp, Homo sapien
ctgacaattgagttaatgtgaaatttgtcatag

SEQ ID NO: 482587 - DNA, 33 bp, Homo sapien
tgctcactggactgaggcataatttgagttctt

SEQ ID NO: 482588 - DNA, 33 bp, Homo sapien
tgctcactggactgagtcataatttgagttctt

SEQ ID NO: 482589 - DNA, 33 bp, Homo sapien
caaaaacagatctaaaatctcagatatacacat

SEQ ID NO: 482590 - DNA, 33 bp, Homo sapien
caaaaacagatctaaactctcagatatacacat

SEQ ID NO: 482591 - DNA, 33 bp, Homo sapien
taatattcagggagtacgcatctgacttcagat

SEQ ID NO: 482592 - DNA, 33 bp, Homo sapien
taatattcagggagtatgcatctgacttcagat

SEQ ID NO: 482593 - DNA, 33 bp, Homo sapien
tctttttgagaagccaataggacttcaaaatgt

SEQ ID NO: 482594 - DNA, 33 bp, Homo sapien
tctttttgagaagccagtaggacttcaaaatgt

SEQ ID NO: 482595 - DNA, 33 bp, Homo sapien
accatttgatcaagcaatcccattacagggtat

SEQ ID NO: 482596 - DNA, 33 bp, Homo sapien
accatttgatcaagcagtcccattacagggtat

SEQ ID NO: 482597 - DNA, 33 bp, Homo sapien
ccacaactgtattaaaaggcctggaatgttcgc

SEQ ID NO: 482598 - DNA, 33 bp, Homo sapien
ccacaactgtattaaagggcctggaatgttcgc

SEQ ID NO: 482599 - DNA, 33 bp, Homo sapien
ggaaacaaaatgtaagcctgtcttaatacctac

SEQ ID NO: 482600 - DNA, 33 bp, Homo sapien
ggaaacaaaatgtaagtctgtcttaatacctac

SEQ ID NO: 482601 - DNA, 33 bp, Homo sapien
caaacataacctaacaactatacttttctagag

SEQ ID NO: 482602 - DNA, 33 bp, Homo sapien
caaacataacctaacagctatacttttctagag

SEQ ID NO: 482603 - DNA, 33 bp, Homo sapien
ttgggcttcatttccaacttaccactcggtttg

SEQ ID NO: 482604 - DNA, 33 bp, Homo sapien
ttgggcttcatttccagcttaccactcggtttg

SEQ ID NO: 482605 - DNA, 33 bp, Homo sapien
tgacttggaggtaagcactggtttcacagttgg

SEQ ID NO: 482606 - DNA, 33 bp, Homo sapien
tgacttggaggtaagcgctggtttcacagttgg

SEQ ID NO: 482607 - DNA, 33 bp, Homo sapien
attgtaaggcgttaccactttatataacaatat

SEQ ID NO: 482608 - DNA, 33 bp, Homo sapien
attgtaaggcgttaccgctttatataacaatat

SEQ ID NO: 482609 - DNA, 33 bp, Homo sapien
tttgtgaagctctacacggataccgtcttgaat

SEQ ID NO: 482610 - DNA, 33 bp, Homo sapien
tttgtgaagctctacagggataccgtcttgaat

SEQ ID NO: 482611 - DNA, 33 bp, Homo sapien
tgcacagtttaaaaatcaagtattgcctaagca

SEQ ID NO: 482612 - DNA, 33 bp, Homo sapien
tgcacagtttaaaaattaagtattgcctaagca

SEQ ID NO: 482613 - DNA, 33 bp, Homo sapien
catagaagatgaaatgaaaaaatgtattccaga

SEQ ID NO: 482614 - DNA, 33 bp, Homo sapien
catagaagatgaaatggaaaaatgtattccaga

SEQ ID NO: 482615 - DNA, 33 bp, Homo sapien
caagatgtgcaactataaaacctacatctggaa

SEQ ID NO: 482616 - DNA, 33 bp, Homo sapien
caagatgtgcaactatgaaacctacatctggaa

SEQ ID NO: 482617 - DNA, 33 bp, Homo sapien
ctgaaagcatatcaaagcaatatgacttcacca

SEQ ID NO: 482618 - DNA, 33 bp, Homo sapien
ctgaaagcatatcaaatcaatatgacttcacca

SEQ ID NO: 482619 - DNA, 33 bp, Homo sapien
ttgatatgctttcagactcaggctgttcatggg

SEQ ID NO: 482620 - DNA, 33 bp, Homo sapien
ttgatatgctttcagagtcaggctgttcatggg

SEQ ID NO: 482621 - DNA, 33 bp, Homo sapien
ttcaggtaatagtgaacatagcattgaacgtgg

SEQ ID NO: 482622 - DNA, 33 bp, Homo sapien
ttcaggtaatagtgaagatagcattgaacgtgg

SEQ ID NO: 482623 - DNA, 33 bp, Homo sapien
caactccaaactcagaggttgaaatcctaactc

SEQ ID NO: 482624 - DNA, 33 bp, Homo sapien
caactccaaactcagatgttgaaatcctaactc

SEQ ID NO: 482625 - DNA, 33 bp, Homo sapien
tatgtgctaacattcaccttctgattaaattga

SEQ ID NO: 482626 - DNA, 33 bp, Homo sapien
tatgtgctaacattcagcttctgattaaattga

SEQ ID NO: 482627 - DNA, 33 bp, Homo sapien
cagagaggtgaagtaacagaaccagtctcataa

SEQ ID NO: 482628 - DNA, 33 bp, Homo sapien
cagagaggtgaagtaagagaaccagtctcataa

SEQ ID NO: 482629 - DNA, 33 bp, Homo sapien
ccacatgtatttagaactgaataactgaattta

SEQ ID NO: 482630 - DNA, 33 bp, Homo sapien
ccacatgtatttagaagtgaataactgaattta

SEQ ID NO: 482631 - DNA, 33 bp, Homo sapien
cgtcaacacactcttaaggacacatcacacact

SEQ ID NO: 482632 - DNA, 33 bp, Homo sapien
cgtcaacacactcttagggacacatcacacact

SEQ ID NO: 482633 - DNA, 33 bp, Homo sapien
ggctcactggccaagacatactttcatgaattc

SEQ ID NO: 482634 - DNA, 33 bp, Homo sapien
ggctcactggccaagatatactttcatgaattc

SEQ ID NO: 482635 - DNA, 33 bp, Homo sapien
cgtaaagatagaatcaatcccattatgcaccct

SEQ ID NO: 482636 - DNA, 33 bp, Homo sapien
cgtaaagatagaatcactcccattatgcaccct

SEQ ID NO: 482637 - DNA, 33 bp, Homo sapien
tcatgaaattctccagcaactttttctgctctg

SEQ ID NO: 482638 - DNA, 33 bp, Homo sapien
tcatgaaattctccagtaactttttctgctctg

SEQ ID NO: 482639 - DNA, 33 bp, Homo sapien
taaactgtaatcacaacgacaggagtagagtga

SEQ ID NO: 482640 - DNA, 33 bp, Homo sapien
taaactgtaatcacaatgacaggagtagagtga

SEQ ID NO: 482641 - DNA, 33 bp, Homo sapien
aaatgaaagaaagtaactgacattcgtatttcc

SEQ ID NO: 482642 - DNA, 33 bp, Homo sapien
aaatgaaagaaagtaagtgacattcgtatttcc

SEQ ID NO: 482643 - DNA, 33 bp, Homo sapien
tgctactctgtatgacaaaatactatgccttta

SEQ ID NO: 482644 - DNA, 33 bp, Homo sapien
tgctactctgtatgaccaaatactatgccttta

SEQ ID NO: 482645 - DNA, 33 bp, Homo sapien
ttgcttcttggtgaaaatcttcaagtcatcttc

SEQ ID NO: 482646 - DNA, 33 bp, Homo sapien
ttgcttcttggtgaaagtcttcaagtcatcttc

SEQ ID NO: 482647 - DNA, 33 bp, Homo sapien
aggaaaacatagttaacatgccaagtccttttt

SEQ ID NO: 482648 - DNA, 33 bp, Homo sapien
aggaaaacatagttaatatgccaagtccttttt

SEQ ID NO: 482649 - DNA, 33 bp, Homo sapien
tagaaatctagtatgcaaatgtgatcatggaga

SEQ ID NO: 482650 - DNA, 33 bp, Homo sapien
tagaaatctagtatgcgaatgtgatcatggaga

SEQ ID NO: 482651 - DNA, 33 bp, Homo sapien
aaaagcttgccaaatacgccaatcaaactggca

SEQ ID NO: 482652 - DNA, 33 bp, Homo sapien
aaaagcttgccaaatatgccaatcaaactggca

SEQ ID NO: 482653 - DNA, 33 bp, Homo sapien
aaggagctgatttctgcactcccagggatgagc

SEQ ID NO: 482654 - DNA, 33 bp, Homo sapien
aaggagctgatttctgtactcccagggatgagc

SEQ ID NO: 482655 - DNA, 33 bp, Homo sapien
tagaaaaggaaagttaaattacgctgcctattc

SEQ ID NO: 482656 - DNA, 33 bp, Homo sapien
tagaaaaggaaagttatattacgctgcctattc

SEQ ID NO: 482657 - DNA, 33 bp, Homo sapien
caactgcctttgagaaaccatagatcatgggaa

SEQ ID NO: 482658 - DNA, 33 bp, Homo sapien
caactgcctttgagaagccatagatcatgggaa

SEQ ID NO: 482659 - DNA, 33 bp, Homo sapien
tcttgtttcagacttacgctgaggcacgaaaca

SEQ ID NO: 482660 - DNA, 33 bp, Homo sapien
tcttgtttcagacttatgctgaggcacgaaaca

SEQ ID NO: 482661 - DNA, 33 bp, Homo sapien
taaagacaaaatactccactaacttgactttgt

SEQ ID NO: 482662 - DNA, 33 bp, Homo sapien
taaagacaaaatactctactaacttgactttgt

SEQ ID NO: 482663 - DNA, 33 bp, Homo sapien
gtgcatttgtgtatctaacaaacttattgagca

SEQ ID NO: 482664 - DNA, 33 bp, Homo sapien
gtgcatttgtgtatctgacaaacttattgagca

SEQ ID NO: 482665 - DNA, 33 bp, Homo sapien
aagaggcagtggaaaacgtatgtatgcgaacaa

SEQ ID NO: 482666 - DNA, 33 bp, Homo sapien
aagaggcagtggaaaatgtatgtatgcgaacaa

SEQ ID NO: 482667 - DNA, 33 bp, Homo sapien
tccaaccaaatgttatcagttccaacaatcctt

SEQ ID NO: 482668 - DNA, 33 bp, Homo sapien
tccaaccaaatgttatgagttccaacaatcctt

SEQ ID NO: 482669 - DNA, 33 bp, Homo sapien
gacccactttaatgtacatgcaaccctacagta

SEQ ID NO: 482670 - DNA, 33 bp, Homo sapien
gacccactttaatgtatatgcaaccctacagta

SEQ ID NO: 482671 - DNA, 33 bp, Homo sapien
tcttatgctagcttggaaataaaagacactttt

SEQ ID NO: 482672 - DNA, 33 bp, Homo sapien
tcttatgctagcttgggaataaaagacactttt

SEQ ID NO: 482673 - DNA, 33 bp, Homo sapien
aatacaaaaatatctaggctacaatatgacagc

SEQ ID NO: 482674 - DNA, 33 bp, Homo sapien
aatacaaaaatatctatgctacaatatgacagc

SEQ ID NO: 482675 - DNA, 33 bp, Homo sapien
tactcaagacagctcaatcgtacagagtagttt

SEQ ID NO: 482676 - DNA, 33 bp, Homo sapien
tactcaagacagctcagtcgtacagagtagttt

SEQ ID NO: 482677 - DNA, 33 bp, Homo sapien
gtgtaagtaaatggcactgcaccttgaagttta

SEQ ID NO: 482678 - DNA, 33 bp, Homo sapien
gtgtaagtaaatggcagtgcaccttgaagttta

SEQ ID NO: 482679 - DNA, 33 bp, Homo sapien
cagactgagaaaaataggaatgggaaatatagt

SEQ ID NO: 482680 - DNA, 33 bp, Homo sapien
cagactgagaaaaatatgaatgggaaatatagt

SEQ ID NO: 482681 - DNA, 33 bp, Homo sapien
aaaaaatcccaggcaaatagtgcatgaaatcag

SEQ ID NO: 482682 - DNA, 33 bp, Homo sapien
aaaaaatcccaggcaagtagtgcatgaaatcag

SEQ ID NO: 482683 - DNA, 33 bp, Homo sapien
atctgaattcccagacgaatcttaagaattcat

SEQ ID NO: 482684 - DNA, 33 bp, Homo sapien
atctgaattcccagactaatcttaagaattcat

SEQ ID NO: 482685 - DNA, 33 bp, Homo sapien
attcatttccagagatcactaaaaatcagagat

SEQ ID NO: 482686 - DNA, 33 bp, Homo sapien
attcatttccagagatgactaaaaatcagagat

SEQ ID NO: 482687 - DNA, 33 bp, Homo sapien
aatggtacgcttattcaatatctacttcccttt

SEQ ID NO: 482688 - DNA, 33 bp, Homo sapien
aatggtacgcttattccatatctacttcccttt

SEQ ID NO: 482689 - DNA, 33 bp, Homo sapien
gcaaagcagagcatcaacctttccagcaaatcc

SEQ ID NO: 482690 - DNA, 33 bp, Homo sapien
gcaaagcagagcatcagcctttccagcaaatcc

SEQ ID NO: 482691 - DNA, 33 bp, Homo sapien
tatttggaagtattcacgcgatttttatttaaa

SEQ ID NO: 482692 - DNA, 33 bp, Homo sapien
tatttggaagtattcatgcgatttttatttaaa

SEQ ID NO: 482693 - DNA, 33 bp, Homo sapien
ataaataaataactacggaacaactgacataat

SEQ ID NO: 482694 - DNA, 33 bp, Homo sapien
ataaataaataactactgaacaactgacataat

SEQ ID NO: 482695 - DNA, 33 bp, Homo sapien
ctctgtactcatatcactatagccaatttttaa

SEQ ID NO: 482696 - DNA, 33 bp, Homo sapien
ctctgtactcatatcagtatagccaatttttaa

SEQ ID NO: 482697 - DNA, 33 bp, Homo sapien
acctctgaaaaccacaaggtaggcaggaaagat

SEQ ID NO: 482698 - DNA, 33 bp, Homo sapien
acctctgaaaaccacagggtaggcaggaaagat

SEQ ID NO: 482699 - DNA, 33 bp, Homo sapien
tgaaaaccattagcggaatacataaagcattaa

SEQ ID NO: 482700 - DNA, 33 bp, Homo sapien
tgaaaaccattagcggcatacataaagcattaa

SEQ ID NO: 482701 - DNA, 33 bp, Homo sapien
caacagattcaacacacaataccagttaaaatt

SEQ ID NO: 482702 - DNA, 33 bp, Homo sapien
caacagattcaacacagaataccagttaaaatt

SEQ ID NO: 482703 - DNA, 33 bp, Homo sapien
ctctgttctatctccaaaatcagataaaatctc

SEQ ID NO: 482704 - DNA, 33 bp, Homo sapien
ctctgttctatctccataatcagataaaatctc

SEQ ID NO: 482705 - DNA, 33 bp, Homo sapien
gatgggatgtgcaaaactgtctcccagcagaaa

SEQ ID NO: 482706 - DNA, 33 bp, Homo sapien
gatgggatgtgcaaaattgtctcccagcagaaa

SEQ ID NO: 482707 - DNA, 33 bp, Homo sapien
ctttaagttactcaagaaagagtttatcccgag

SEQ ID NO: 482708 - DNA, 33 bp, Homo sapien
ctttaagttactcaaggaagagtttatcccgag

SEQ ID NO: 482709 - DNA, 33 bp, Homo sapien
tgaagcacacaattcagaagtgagacttcaagc

SEQ ID NO: 482710 - DNA, 33 bp, Homo sapien
tgaagcacacaattcataagtgagacttcaagc

SEQ ID NO: 482711 - DNA, 33 bp, Homo sapien
ttcatatagctgataacagtttgtacctttcct

SEQ ID NO: 482712 - DNA, 33 bp, Homo sapien
ttcatatagctgataatagtttgtacctttcct

SEQ ID NO: 482713 - DNA, 33 bp, Homo sapien
ctaaagcaaaataaagcagcttacggcaagtga

SEQ ID NO: 482714 - DNA, 33 bp, Homo sapien
ctaaagcaaaataaagtagcttacggcaagtga

SEQ ID NO: 482715 - DNA, 33 bp, Homo sapien
agattgtatatccacaacaacaacctcagctgg

SEQ ID NO: 482716 - DNA, 33 bp, Homo sapien
agattgtatatccacatcaacaacctcagctgg

SEQ ID NO: 482717 - DNA, 33 bp, Homo sapien
gttatttcaaataccccaccacaagccctgaga

SEQ ID NO: 482718 - DNA, 33 bp, Homo sapien
gttatttcaaataccctaccacaagccctgaga

SEQ ID NO: 482719 - DNA, 33 bp, Homo sapien
acgagaccattccagacctgcataaaattcctt

SEQ ID NO: 482720 - DNA, 33 bp, Homo sapien
acgagaccattccagagctgcataaaattcctt

SEQ ID NO: 482721 - DNA, 33 bp, Homo sapien
ggatgtgtcatgatctaacagttgtccgctttt

SEQ ID NO: 482722 - DNA, 33 bp, Homo sapien
ggatgtgtcatgatctcacagttgtccgctttt

SEQ ID NO: 482723 - DNA, 33 bp, Homo sapien
tatacagcgttttaaacagtagtcaatgattat

SEQ ID NO: 482724 - DNA, 33 bp, Homo sapien
tatacagcgttttaaatagtagtcaatgattat

SEQ ID NO: 482725 - DNA, 33 bp, Homo sapien
tgcattatggccaaaaaataatggattcttagg

SEQ ID NO: 482726 - DNA, 33 bp, Homo sapien
tgcattatggccaaaagataatggattcttagg

SEQ ID NO: 482727 - DNA, 33 bp, Homo sapien
ctaacgcaaaccttcacaaaaaagcaagagtaa

SEQ ID NO: 482728 - DNA, 33 bp, Homo sapien
ctaacgcaaaccttcataaaaaagcaagagtaa

SEQ ID NO: 482729 - DNA, 33 bp, Homo sapien
taagcagcctgtgtaacatgaagagtatagcaa

SEQ ID NO: 482730 - DNA, 33 bp, Homo sapien
taagcagcctgtgtaatatgaagagtatagcaa

SEQ ID NO: 482731 - DNA, 33 bp, Homo sapien
gtaaggtctcaagctacaggacatgaatgtttt

SEQ ID NO: 482732 - DNA, 33 bp, Homo sapien
gtaaggtctcaagctataggacatgaatgtttt

SEQ ID NO: 482733 - DNA, 33 bp, Homo sapien
acccagatctacttcaaaatgtttcaagtgctt

SEQ ID NO: 482734 - DNA, 33 bp, Homo sapien
acccagatctacttcacaatgtttcaagtgctt

SEQ ID NO: 482735 - DNA, 33 bp, Homo sapien
catcagcagcaaacataagccagagagtgtagg

SEQ ID NO: 482736 - DNA, 33 bp, Homo sapien
catcagcagcaaacatgagccagagagtgtagg

SEQ ID NO: 482737 - DNA, 33 bp, Homo sapien
taaatatcagaaggttaaaaactcctatggtac

SEQ ID NO: 482738 - DNA, 33 bp, Homo sapien
taaatatcagaaggttgaaaactcctatggtac

SEQ ID NO: 482739 - DNA, 33 bp, Homo sapien
aatgctcacagggtcacgtgctgattcaccaaa

SEQ ID NO: 482740 - DNA, 33 bp, Homo sapien
aatgctcacagggtcatgtgctgattcaccaaa

SEQ ID NO: 482741 - DNA, 33 bp, Homo sapien
tccagcataacgagagcacctgggccctgacat

SEQ ID NO: 482742 - DNA, 33 bp, Homo sapien
tccagcataacgagagtacctgggccctgacat

SEQ ID NO: 482743 - DNA, 33 bp, Homo sapien
atgttttctggggacaaagagctcaagatttag

SEQ ID NO: 482744 - DNA, 33 bp, Homo sapien
atgttttctggggacagagagctcaagatttag

SEQ ID NO: 482745 - DNA, 33 bp, Homo sapien
ttcccttgctatgtgacgaatagaagtgcttac

SEQ ID NO: 482746 - DNA, 33 bp, Homo sapien
ttcccttgctatgtgatgaatagaagtgcttac

SEQ ID NO: 482747 - DNA, 33 bp, Homo sapien
catatctaagaaggtacgtctgtgaataatcct

SEQ ID NO: 482748 - DNA, 33 bp, Homo sapien
catatctaagaaggtaggtctgtgaataatcct

SEQ ID NO: 482749 - DNA, 33 bp, Homo sapien
gaagctactttttgtcccttccaaacatgatct

SEQ ID NO: 482750 - DNA, 33 bp, Homo sapien
gaagctactttttgtcgcttccaaacatgatct

SEQ ID NO: 482751 - DNA, 33 bp, Homo sapien
ttagtatcatctgtaaaactgggaaattctgct

SEQ ID NO: 482752 - DNA, 33 bp, Homo sapien
ttagtatcatctgtaacactgggaaattctgct

SEQ ID NO: 482753 - DNA, 33 bp, Homo sapien
tttgggcatcactggaatataaacatttaaaga

SEQ ID NO: 482754 - DNA, 33 bp, Homo sapien
tttgggcatcactggagtataaacatttaaaga

SEQ ID NO: 482755 - DNA, 33 bp, Homo sapien
tcttaattccaagtccagaggaaagaatggcaa

SEQ ID NO: 482756 - DNA, 33 bp, Homo sapien
tcttaattccaagtccggaggaaagaatggcaa

SEQ ID NO: 482757 - DNA, 33 bp, Homo sapien
ggatagaaaattattcaacacagcaaagtgcat

SEQ ID NO: 482758 - DNA, 33 bp, Homo sapien
ggatagaaaattattccacacagcaaagtgcat

SEQ ID NO: 482759 - DNA, 33 bp, Homo sapien
gtgattcctctcaaaacgaaaactcagtacttt

SEQ ID NO: 482760 - DNA, 33 bp, Homo sapien
gtgattcctctcaaaatgaaaactcagtacttt

SEQ ID NO: 482761 - DNA, 33 bp, Homo sapien
tctagcatagagacaaagcatttcataacttta

SEQ ID NO: 482762 - DNA, 33 bp, Homo sapien
tctagcatagagacaacgcatttcataacttta

SEQ ID NO: 482763 - DNA, 33 bp, Homo sapien
cttctctagagatttgcaaagaagagagatatt

SEQ ID NO: 482764 - DNA, 33 bp, Homo sapien
cttctctagagatttggaaagaagagagatatt

SEQ ID NO: 482765 - DNA, 33 bp, Homo sapien
gacctatgtctgaaccaggggaattgtaaacat

SEQ ID NO: 482766 - DNA, 33 bp, Homo sapien
gacctatgtctgaaccgggggaattgtaaacat

SEQ ID NO: 482767 - DNA, 33 bp, Homo sapien
ttgcatataatattaaaacggcacaaagaaaga

SEQ ID NO: 482768 - DNA, 33 bp, Homo sapien
ttgcatataatattaacacggcacaaagaaaga

SEQ ID NO: 482769 - DNA, 33 bp, Homo sapien
tgattcactgaactagacagagtggctcagatc

SEQ ID NO: 482770 - DNA, 33 bp, Homo sapien
tgattcactgaactagtcagagtggctcagatc

SEQ ID NO: 482771 - DNA, 33 bp, Homo sapien
aactcctgccaaacacaaaagtcaagagaaaaa

SEQ ID NO: 482772 - DNA, 33 bp, Homo sapien
aactcctgccaaacacgaaagtcaagagaaaaa

SEQ ID NO: 482773 - DNA, 33 bp, Homo sapien
ggagaaatggtcaaggcattcaaaatttttctt

SEQ ID NO: 482774 - DNA, 33 bp, Homo sapien
ggagaaatggtcaaggtattcaaaatttttctt

SEQ ID NO: 482775 - DNA, 33 bp, Homo sapien
tttaaatttcacgagaaagatagctctattgac

SEQ ID NO: 482776 - DNA, 33 bp, Homo sapien
tttaaatttcacgagagagatagctctattgac

SEQ ID NO: 482777 - DNA, 33 bp, Homo sapien
ctgttgtctacagtgaatatttatggagataaa

SEQ ID NO: 482778 - DNA, 33 bp, Homo sapien
ctgttgtctacagtgagtatttatggagataaa

SEQ ID NO: 482779 - DNA, 33 bp, Homo sapien
atcaaatgttttaacaataccaacaatacatga

SEQ ID NO: 482780 - DNA, 33 bp, Homo sapien
atcaaatgttttaacagtaccaacaatacatga

SEQ ID NO: 482781 - DNA, 33 bp, Homo sapien
ttagtaaaggctttcaacactgattttatagtc

SEQ ID NO: 482782 - DNA, 33 bp, Homo sapien
ttagtaaaggctttcagcactgattttatagtc

SEQ ID NO: 482783 - DNA, 33 bp, Homo sapien
aggtgaagtttttagcaatttgacgcatttcaa

SEQ ID NO: 482784 - DNA, 33 bp, Homo sapien
aggtgaagtttttagccatttgacgcatttcaa

SEQ ID NO: 482785 - DNA, 33 bp, Homo sapien
cactctcccctttctccctggttcatttggcca

SEQ ID NO: 482786 - DNA, 33 bp, Homo sapien
cactctcccctttctctctggttcatttggcca

SEQ ID NO: 482787 - DNA, 33 bp, Homo sapien
ctgcttgctaatactagagaggacaaaggacag

SEQ ID NO: 482788 - DNA, 33 bp, Homo sapien
ctgcttgctaatactatagaggacaaaggacag

SEQ ID NO: 482789 - DNA, 33 bp, Homo sapien
tctgcatgaatatcaacacctagtctatgaaca

SEQ ID NO: 482790 - DNA, 33 bp, Homo sapien
tctgcatgaatatcaatacctagtctatgaaca

SEQ ID NO: 482791 - DNA, 33 bp, Homo sapien
aagcataaataccttgccaaggcaataagcaga

SEQ ID NO: 482792 - DNA, 33 bp, Homo sapien
aagcataaataccttgtcaaggcaataagcaga

SEQ ID NO: 482793 - DNA, 33 bp, Homo sapien
gtgacagcacaaggaacagccttatttaatttt

SEQ ID NO: 482794 - DNA, 33 bp, Homo sapien
gtgacagcacaaggaatagccttatttaatttt

SEQ ID NO: 482795 - DNA, 33 bp, Homo sapien
actcaactctgctgaacggcttcatggattaac

SEQ ID NO: 482796 - DNA, 33 bp, Homo sapien
actcaactctgctgaatggcttcatggattaac

SEQ ID NO: 482797 - DNA, 33 bp, Homo sapien
catgcggtgtgcagtacagattgacttgcttta

SEQ ID NO: 482798 - DNA, 33 bp, Homo sapien
catgcggtgtgcagtatagattgacttgcttta

SEQ ID NO: 482799 - DNA, 33 bp, Homo sapien
ttgcgggttcagtgaacaggtagattcttggac

SEQ ID NO: 482800 - DNA, 33 bp, Homo sapien
ttgcgggttcagtgaagaggtagattcttggac

SEQ ID NO: 482801 - DNA, 33 bp, Homo sapien
caattggttattccaaataagaactcctaaaat

SEQ ID NO: 482802 - DNA, 33 bp, Homo sapien
caattggttattccaagtaagaactcctaaaat

SEQ ID NO: 482803 - DNA, 33 bp, Homo sapien
gaaaaaaaagctagtaccattaatccaacaaat

SEQ ID NO: 482804 - DNA, 33 bp, Homo sapien
gaaaaaaaagctagtatcattaatccaacaaat

SEQ ID NO: 482805 - DNA, 33 bp, Homo sapien
cttatactttcaatcacatctttggccaagggg

SEQ ID NO: 482806 - DNA, 33 bp, Homo sapien
cttatactttcaatcatatctttggccaagggg

SEQ ID NO: 482807 - DNA, 33 bp, Homo sapien
gtataaactgaggccaagttttttggaaaatct

SEQ ID NO: 482808 - DNA, 33 bp, Homo sapien
gtataaactgaggccacgttttttggaaaatct

SEQ ID NO: 482809 - DNA, 33 bp, Homo sapien
ggcattacactggttaagataaaattgtttagt

SEQ ID NO: 482810 - DNA, 33 bp, Homo sapien
ggcattacactggttaggataaaattgtttagt

SEQ ID NO: 482811 - DNA, 33 bp, Homo sapien
tccactgaaatgtcaaaattatttgtaactgcc

SEQ ID NO: 482812 - DNA, 33 bp, Homo sapien
tccactgaaatgtcaagattatttgtaactgcc

SEQ ID NO: 482813 - DNA, 33 bp, Homo sapien
gtactttcttcaccaaatgaatttgcaatttta

SEQ ID NO: 482814 - DNA, 33 bp, Homo sapien
gtactttcttcaccaattgaatttgcaatttta

SEQ ID NO: 482815 - DNA, 33 bp, Homo sapien
actttggaggtgtcaccaaactgctttccaaaa

SEQ ID NO: 482816 - DNA, 33 bp, Homo sapien
actttggaggtgtcactaaactgctttccaaaa

SEQ ID NO: 482817 - DNA, 33 bp, Homo sapien
attctgaatttggaagcatttttcaaattaaaa

SEQ ID NO: 482818 - DNA, 33 bp, Homo sapien
attctgaatttggaaggatttttcaaattaaaa

SEQ ID NO: 482819 - DNA, 33 bp, Homo sapien
aattatccactaaattaaattacaggcataaac

SEQ ID NO: 482820 - DNA, 33 bp, Homo sapien
aattatccactaaattgaattacaggcataaac

SEQ ID NO: 482821 - DNA, 33 bp, Homo sapien
aaatgagactcttttaactcctttcccatatct

SEQ ID NO: 482822 - DNA, 33 bp, Homo sapien
aaatgagactcttttagctcctttcccatatct

SEQ ID NO: 482823 - DNA, 33 bp, Homo sapien
catctactggactaaccggctatttggtctcat

SEQ ID NO: 482824 - DNA, 33 bp, Homo sapien
catctactggactaactggctatttggtctcat

SEQ ID NO: 482825 - DNA, 33 bp, Homo sapien
atcatcacaaagtctccgaaatttagaaaatac

SEQ ID NO: 482826 - DNA, 33 bp, Homo sapien
atcatcacaaagtctctgaaatttagaaaatac

SEQ ID NO: 482827 - DNA, 33 bp, Homo sapien
gtaattatttttgctcaatttctacagttgtta

SEQ ID NO: 482828 - DNA, 33 bp, Homo sapien
gtaattatttttgctcgatttctacagttgtta

SEQ ID NO: 482829 - DNA, 33 bp, Homo sapien
ttttttcctccttcaaacaaacatcataacatt

SEQ ID NO: 482830 - DNA, 33 bp, Homo sapien
ttttttcctccttcaagcaaacatcataacatt

SEQ ID NO: 482831 - DNA, 33 bp, Homo sapien
ttccctcttacagaaaaggtccaagcttcagga

SEQ ID NO: 482832 - DNA, 33 bp, Homo sapien
ttccctcttacagaaacggtccaagcttcagga

SEQ ID NO: 482833 - DNA, 33 bp, Homo sapien; identical to SEQ ID NO: 482831

SEQ ID NO: 482834 - DNA, 33 bp, Homo sapien; identical to SEQ ID NO: 482832

SEQ ID NO: 482835 - DNA, 33 bp, Homo sapien
aacttgtctttatacgacacagaaagagcagga

SEQ ID NO: 482836 - DNA, 33 bp, Homo sapien
aacttgtctttatacgtcacagaaagagcagga

SEQ ID NO: 482837 - DNA, 33 bp, Homo sapien
caactgagataaccaacggtattgaaagagtga

SEQ ID NO: 482838 - DNA, 33 bp, Homo sapien
caactgagataaccaatggtattgaaagagtga

SEQ ID NO: 482839 - DNA, 33 bp, Homo sapien
gatcacatggtcacaacagcccataatgtccat

SEQ ID NO: 482840 - DNA, 33 bp, Homo sapien
gatcacatggtcacaatagcccataatgtccat

SEQ ID NO: 482841 - DNA, 33 bp, Homo sapien
agctacacttgagttacggattgactattggtt

SEQ ID NO: 482842 - DNA, 33 bp, Homo sapien
agctacacttgagttagggattgactattggtt

SEQ ID NO: 482843 - DNA, 33 bp, Homo sapien
gtggtgccctttcaaccagacataaaaatttac

SEQ ID NO: 482844 - DNA, 33 bp, Homo sapien
gtggtgccctttcaacgagacataaaaatttac

SEQ ID NO: 482845 - DNA, 33 bp, Homo sapien
cacacatatatgcacacaaacatagagaaaata

SEQ ID NO: 482846 - DNA, 33 bp, Homo sapien
cacacatatatgcacagaaacatagagaaaata

SEQ ID NO: 482847 - DNA, 33 bp, Homo sapien
gccaagtgtgtgaggacaagcttaaacagtcac

SEQ ID NO: 482848 - DNA, 33 bp, Homo sapien
gccaagtgtgtgaggataagcttaaacagtcac

SEQ ID NO: 482849 - DNA, 33 bp, Homo sapien
agcattaatctttacaatatgaaaatccaatca

SEQ ID NO: 482850 - DNA, 33 bp, Homo sapien
agcattaatctttacagtatgaaaatccaatca

SEQ ID NO: 482851 - DNA, 33 bp, Homo sapien
agcaaaataatggttacgtataatgcacagaat

SEQ ID NO: 482852 - DNA, 33 bp, Homo sapien
agcaaaataatggttatgtataatgcacagaat

SEQ ID NO: 482853 - DNA, 33 bp, Homo sapien
tttaattccataatcccaatgaagtttatataa

SEQ ID NO: 482854 - DNA, 33 bp, Homo sapien
tttaattccataatcctaatgaagtttatataa

SEQ ID NO: 482855 - DNA, 33 bp, Homo sapien
gctggagaaatcaacccacctgttcagattact

SEQ ID NO: 482856 - DNA, 33 bp, Homo sapien
gctggagaaatcaaccgacctgttcagattact

SEQ ID NO: 482857 - DNA, 33 bp, Homo sapien
actgtactgtgtacaacaaactatctgtgtgtt

SEQ ID NO: 482858 - DNA, 33 bp, Homo sapien
actgtactgtgtacaataaactatctgtgtgtt

SEQ ID NO: 482859 - DNA, 33 bp, Homo sapien
ctctcctgttccctcacaataacgtagatgaca

SEQ ID NO: 482860 - DNA, 33 bp, Homo sapien
ctctcctgttccctcagaataacgtagatgaca

SEQ ID NO: 482861 - DNA, 33 bp, Homo sapien
gataaagttaaagaaacatccagaaagtagaaa

SEQ ID NO: 482862 - DNA, 33 bp, Homo sapien
gataaagttaaagaaagatccagaaagtagaaa

SEQ ID NO: 482863 - DNA, 33 bp, Homo sapien
gagacaggaaggatccagcatataattttcata

SEQ ID NO: 482864 - DNA, 33 bp, Homo sapien
gagacaggaaggatccggcatataattttcata

SEQ ID NO: 482865 - DNA, 33 bp, Homo sapien
aaagaggttcatataaactggatgtacagggag

SEQ ID NO: 482866 - DNA, 33 bp, Homo sapien
aaagaggttcatataacctggatgtacagggag

SEQ ID NO: 482867 - DNA, 33 bp, Homo sapien
tcaggggtgtgacatacgctatgctgaagccag

SEQ ID NO: 482868 - DNA, 33 bp, Homo sapien
tcaggggtgtgacataggctatgctgaagccag

SEQ ID NO: 482869 - DNA, 33 bp, Homo sapien
ataaggggctcattaccgtaactgacacagttc

SEQ ID NO: 482870 - DNA, 33 bp, Homo sapien
ataaggggctcattactgtaactgacacagttc

SEQ ID NO: 482871 - DNA, 33 bp, Homo sapien
ctgcctaaagacacaagtcacttactagtttca

SEQ ID NO: 482872 - DNA, 33 bp, Homo sapien
ctgcctaaagacacaattcacttactagtttca

SEQ ID NO: 482873 - DNA, 33 bp, Homo sapien
attaacatttcctttacctttcatggttttcat

SEQ ID NO: 482874 - DNA, 33 bp, Homo sapien
attaacatttcctttatctttcatggttttcat

SEQ ID NO: 482875 - DNA, 33 bp, Homo sapien
catgtctacaagaataacaaaaccacatagccc

SEQ ID NO: 482876 - DNA, 33 bp, Homo sapien
catgtctacaagaatagcaaaaccacatagccc

SEQ ID NO: 482877 - DNA, 33 bp, Homo sapien
caaaacaacgtgaaccaaaatcagaaattcagc

SEQ ID NO: 482878 - DNA, 33 bp, Homo sapien
caaaacaacgtgaaccgaaatcagaaattcagc

SEQ ID NO: 482879 - DNA, 33 bp, Homo sapien
ctctacacatttgatgcactaaagtgactatgc

SEQ ID NO: 482880 - DNA, 33 bp, Homo sapien
ctctacacatttgatgtactaaagtgactatgc

SEQ ID NO: 482881 - DNA, 33 bp, Homo sapien
cacatcatttgagtcacgtttaattaatcaaat

SEQ ID NO: 482882 - DNA, 33 bp, Homo sapien
cacatcatttgagtcaggtttaattaatcaaat

SEQ ID NO: 482883 - DNA, 33 bp, Homo sapien
actaataataaaacctaagggagtgattgaacc

SEQ ID NO: 482884 - DNA, 33 bp, Homo sapien
actaataataaaacctgagggagtgattgaacc

SEQ ID NO: 482885 - DNA, 33 bp, Homo sapien
atattctgaggtaggcgcattccagcatgatga

SEQ ID NO: 482886 - DNA, 33 bp, Homo sapien
atattctgaggtaggctcattccagcatgatga

SEQ ID NO: 482887 - DNA, 33 bp, Homo sapien
atagtacttaacactacaaagtatttcataccg

SEQ ID NO: 482888 - DNA, 33 bp, Homo sapien
atagtacttaacactagaaagtatttcataccg

SEQ ID NO: 482889 - DNA, 33 bp, Homo sapien
gagaatagagcccatacgaagatctgaaatgtt

SEQ ID NO: 482890 - DNA, 33 bp, Homo sapien
gagaatagagcccatatgaagatctgaaatgtt

SEQ ID NO: 482891 - DNA, 33 bp, Homo sapien
aaggaaaactcatggaaccagtacttacttggg

SEQ ID NO: 482892 - DNA, 33 bp, Homo sapien
aaggaaaactcatggagccagtacttacttggg

SEQ ID NO: 482893 - DNA, 33 bp, Homo sapien
acatatatagaaagcacgttacaactccagaaa

SEQ ID NO: 482894 - DNA, 33 bp, Homo sapien
acatatatagaaagcatgttacaactccagaaa

SEQ ID NO: 482895 - DNA, 33 bp, Homo sapien
tatttaaagagaagggaatatcaagcctgttat

SEQ ID NO: 482896 - DNA, 33 bp, Homo sapien
tatttaaagagaaggggatatcaagcctgttat

SEQ ID NO: 482897 - DNA, 33 bp, Homo sapien
tactgtctctaatgaaactgcctttctttacct

SEQ ID NO: 482898 - DNA, 33 bp, Homo sapien
tactgtctctaatgaatctgcctttctttacct

SEQ ID NO: 482899 - DNA, 33 bp, Homo sapien
aatatcaaaaaaggagaatgctacctggcagca

SEQ ID NO: 482900 - DNA, 33 bp, Homo sapien
aatatcaaaaaaggaggatgctacctggcagca

SEQ ID NO: 482901 - DNA, 33 bp, Homo sapien
taagtgttcaaatgaaagaaagggtcacatgac

SEQ ID NO: 482902 - DNA, 33 bp, Homo sapien
taagtgttcaaatgaacgaaagggtcacatgac

SEQ ID NO: 482903 - DNA, 33 bp, Homo sapien
aaatcatagtattcaaactcttgtacctgtcat

SEQ ID NO: 482904 - DNA, 33 bp, Homo sapien
aaatcatagtattcaatctcttgtacctgtcat

SEQ ID NO: 482905 - DNA, 33 bp, Homo sapien
agagacttctatgacacgatctgctaaatcagt

SEQ ID NO: 482906 - DNA, 33 bp, Homo sapien
agagacttctatgacatgatctgctaaatcagt

SEQ ID NO: 482907 - DNA, 33 bp, Homo sapien
aatcagttgtctttatgaactctcaaattatat

SEQ ID NO: 482908 - DNA, 33 bp, Homo sapien
aatcagttgtctttattaactctcaaattatat

SEQ ID NO: 482909 - DNA, 33 bp, Homo sapien
tttcttcagattattacaggagaaaaaacagtt

SEQ ID NO: 482910 - DNA, 33 bp, Homo sapien
tttcttcagattattagaggagaaaaaacagtt

SEQ ID NO: 482911 - DNA, 33 bp, Homo sapien
gaggcaaaacctttccagcagagaagagggagt

SEQ ID NO: 482912 - DNA, 33 bp, Homo sapien
gaggcaaaacctttccggcagagaagagggagt

SEQ ID NO: 482913 - DNA, 33 bp, Homo sapien
tcacattcaccttataagagattaaattatttc

SEQ ID NO: 482914 - DNA, 33 bp, Homo sapien
tcacattcaccttataggagattaaattatttc

SEQ ID NO: 482915 - DNA, 33 bp, Homo sapien
gcctaagaggaaagaaccaaaacatgggtctat

SEQ ID NO: 482916 - DNA, 33 bp, Homo sapien
gcctaagaggaaagaatcaaaacatgggtctat

SEQ ID NO: 482917 - DNA, 33 bp, Homo sapien
tgtgtcagtacttcaacgtatttatcttattaa

SEQ ID NO: 482918 - DNA, 33 bp, Homo sapien
tgtgtcagtacttcaaggtatttatcttattaa

SEQ ID NO: 482919 - DNA, 33 bp, Homo sapien
aaatcagtataaaatacgagtgcttggttattg

SEQ ID NO: 482920 - DNA, 33 bp, Homo sapien
aaatcagtataaaatatgagtgcttggttattg

SEQ ID NO: 482921 - DNA, 33 bp, Homo sapien
atcactaggcaggtatcaggtgaataagaagga

SEQ ID NO: 482922 - DNA, 33 bp, Homo sapien
atcactaggcaggtattaggtgaataagaagga

SEQ ID NO: 482923 - DNA, 33 bp, Homo sapien
tttatacctgtgccacactgcattaattgtaac

SEQ ID NO: 482924 - DNA, 33 bp, Homo sapien
tttatacctgtgccacgctgcattaattgtaac

SEQ ID NO: 482925 - DNA, 33 bp, Homo sapien
aaattttctatacagacgaaccactgaatcata

SEQ ID NO: 482926 - DNA, 33 bp, Homo sapien
aaattttctatacagatgaaccactgaatcata

SEQ ID NO: 482927 - DNA, 33 bp, Homo sapien
taatgtgcttggttgccatttattaccttccct

SEQ ID NO: 482928 - DNA, 33 bp, Homo sapien
taatgtgcttggttgctatttattaccttccct

SEQ ID NO: 482929 - DNA, 33 bp, Homo sapien
ccagtattggccctacaacagaaaaaggtcatt

SEQ ID NO: 482930 - DNA, 33 bp, Homo sapien
ccagtattggccctacgacagaaaaaggtcatt

SEQ ID NO: 482931 - DNA, 33 bp, Homo sapien
atgctggcaagaatacagagtaacagaagctct

SEQ ID NO: 482932 - DNA, 33 bp, Homo sapien
atgctggcaagaatacggagtaacagaagctct

SEQ ID NO: 482933 - DNA, 33 bp, Homo sapien
gtgtggtatgacagaaaattcagagctaagaat

SEQ ID NO: 482934 - DNA, 33 bp, Homo sapien
gtgtggtatgacagaacattcagagctaagaat

SEQ ID NO: 482935 - DNA, 33 bp, Homo sapien
gtcgtctctggtgttaactgtcacagatgttta

SEQ ID NO: 482936 - DNA, 33 bp, Homo sapien
gtcgtctctggtgttacctgtcacagatgttta

SEQ ID NO: 482937 - DNA, 33 bp, Homo sapien
gttaaatttgattttccatcttgggaagctctg

SEQ ID NO: 482938 - DNA, 33 bp, Homo sapien
gttaaatttgattttctatcttgggaagctctg

SEQ ID NO: 482939 - DNA, 33 bp, Homo sapien
gactccaaatggtacaccaaatattctacacgc

SEQ ID NO: 482940 - DNA, 33 bp, Homo sapien
gactccaaatggtacatcaaatattctacacgc

SEQ ID NO: 482941 - DNA, 33 bp, Homo sapien
ataaaactacagctagaaacaagaaatacattc

SEQ ID NO: 482942 - DNA, 33 bp, Homo sapien
ataaaactacagctaggaacaagaaatacattc

SEQ ID NO: 482943 - DNA, 33 bp, Homo sapien
cagttcacatacaacaatagctatcagtttcca

SEQ ID NO: 482944 - DNA, 33 bp, Homo sapien
cagttcacatacaacagtagctatcagtttcca

SEQ ID NO: 482945 - DNA, 33 bp, Homo sapien
tttcatatctaaaacaataaggttaacaattag

SEQ ID NO: 482946 - DNA, 33 bp, Homo sapien
tttcatatctaaaacactaaggttaacaattag

SEQ ID NO: 482947 - DNA, 33 bp, Homo sapien
atgtagatactttaaacgaagtgttaggaagca

SEQ ID NO: 482948 - DNA, 33 bp, Homo sapien
atgtagatactttaaatgaagtgttaggaagca

SEQ ID NO: 482949 - DNA, 33 bp, Homo sapien
tctataatgagaagcacgtataatttattcagc

SEQ ID NO: 482950 - DNA, 33 bp, Homo sapien
tctataatgagaagcaggtataatttattcagc

SEQ ID NO: 482951 - DNA, 33 bp, Homo sapien
caccttaggaaagttaacatcactgtgtagtca

SEQ ID NO: 482952 - DNA, 33 bp, Homo sapien
caccttaggaaagttagcatcactgtgtagtca

SEQ ID NO: 482953 - DNA, 33 bp, Homo sapien
aaactcaaagactcaaactatcctcctgtctcg

SEQ ID NO: 482954 - DNA, 33 bp, Homo sapien
aaactcaaagactcaagctatcctcctgtctcg

SEQ ID NO: 482955 - DNA, 33 bp, Homo sapien
attttaagcaattgccaaataagaatatatcat

SEQ ID NO: 482956 - DNA, 33 bp, Homo sapien
attttaagcaattgccgaataagaatatatcat

SEQ ID NO: 482957 - DNA, 33 bp, Homo sapien
gacccaccggctggcactccaagctagtgagct

SEQ ID NO: 482958 - DNA, 33 bp, Homo sapien
gacccaccggctggcagtccaagctagtgagct

SEQ ID NO: 482959 - DNA, 33 bp, Homo sapien
tagaagggtatatgaactagggatgggggcgat

SEQ ID NO: 482960 - DNA, 33 bp, Homo sapien
tagaagggtatatgaagtagggatgggggcgat

SEQ ID NO: 482961 - DNA, 33 bp, Homo sapien
caggatctattataccgggcacatagttgcaca

SEQ ID NO: 482962 - DNA, 33 bp, Homo sapien
caggatctattatacctggcacatagttgcaca

SEQ ID NO: 482963 - DNA, 33 bp, Homo sapien
cagtagtccaagttgacgaagacactgtttatg

SEQ ID NO: 482964 - DNA, 33 bp, Homo sapien
cagtagtccaagttgatgaagacactgtttatg

SEQ ID NO: 482965 - DNA, 33 bp, Homo sapien
accaccttgccatttgcacttagatcagaggtt

SEQ ID NO: 482966 - DNA, 33 bp, Homo sapien
accaccttgccatttggacttagatcagaggtt

SEQ ID NO: 482967 - DNA, 33 bp, Homo sapien
atcatcagtttacacaaaaaaaagtcaaactgt

SEQ ID NO: 482968 - DNA, 33 bp, Homo sapien
atcatcagtttacacacaaaaaagtcaaactgt

SEQ ID NO: 482969 - DNA, 33 bp, Homo sapien
acaagcactgcctctacgtatgtgttaaatttt

SEQ ID NO: 482970 - DNA, 33 bp, Homo sapien
acaagcactgcctctatgtatgtgttaaatttt

SEQ ID NO: 482971 - DNA, 33 bp, Homo sapien
tcagcaataatagcaactgagttagtaaatact

SEQ ID NO: 482972 - DNA, 33 bp, Homo sapien
tcagcaataatagcaattgagttagtaaatact

SEQ ID NO: 482973 - DNA, 33 bp, Homo sapien
ctttgctcatacaatactatcaggtacagtaag

SEQ ID NO: 482974 - DNA, 33 bp, Homo sapien
ctttgctcatacaatagtatcaggtacagtaag

SEQ ID NO: 482975 - DNA, 33 bp, Homo sapien
agtatcgattcttgcaaaacacagtcattaaga

SEQ ID NO: 482976 - DNA, 33 bp, Homo sapien
agtatcgattcttgcagaacacagtcattaaga

SEQ ID NO: 482977 - DNA, 33 bp, Homo sapien
atgccacctgaatgaacaattgcaaataacgtg

SEQ ID NO: 482978 - DNA, 33 bp, Homo sapien
atgccacctgaatgaataattgcaaataacgtg

SEQ ID NO: 482979 - DNA, 33 bp, Homo sapien
cacgagtgcttcttatcaatgatctgttagaaa

SEQ ID NO: 482980 - DNA, 33 bp, Homo sapien
cacgagtgcttcttattaatgatctgttagaaa

SEQ ID NO: 482981 - DNA, 33 bp, Homo sapien
agacccttttttaatccattacctgatcaaatg

SEQ ID NO: 482982 - DNA, 33 bp, Homo sapien
agacccttttttaatcgattacctgatcaaatg

SEQ ID NO: 482983 - DNA, 33 bp, Homo sapien
cagatggaaaaatgtaactataatgtcaacacc

SEQ ID NO: 482984 - DNA, 33 bp, Homo sapien
cagatggaaaaatgtatctataatgtcaacacc

SEQ ID NO: 482985 - DNA, 33 bp, Homo sapien
tgttacaaatgcatatgaatgagtaggcaaatt

SEQ ID NO: 482986 - DNA, 33 bp, Homo sapien
tgttacaaatgcatattaatgagtaggcaaatt

SEQ ID NO: 482987 - DNA, 33 bp, Homo sapien
ttgctcatggtcacacaaatagcttctgacaga

SEQ ID NO: 482988 - DNA, 33 bp, Homo sapien
ttgctcatggtcacaccaatagcttctgacaga

SEQ ID NO: 482989 - DNA, 33 bp, Homo sapien
ttgtgcacttcaagatcacaggattttcagaat

SEQ ID NO: 482990 - DNA, 33 bp, Homo sapien
ttgtgcacttcaagattacaggattttcagaat

SEQ ID NO: 482991 - DNA, 33 bp, Homo sapien
agcctaaaatttgagaagcttttctgaaaatgg

SEQ ID NO: 482992 - DNA, 33 bp, Homo sapien
agcctaaaatttgagacgcttttctgaaaatgg

SEQ ID NO: 482993 - DNA, 33 bp, Homo sapien
tcattggaggtgagaaaataaagttcaagatat

SEQ ID NO: 482994 - DNA, 33 bp, Homo sapien
tcattggaggtgagaagataaagttcaagatat

SEQ ID NO: 482995 - DNA, 33 bp, Homo sapien
tgcgttttagtgtttacgatgagaatttatagg

SEQ ID NO: 482996 - DNA, 33 bp, Homo sapien
tgcgttttagtgtttatgatgagaatttatagg

SEQ ID NO: 482997 - DNA, 33 bp, Homo sapien
aactttctgtcattccccttatcaaacagctca

SEQ ID NO: 482998 - DNA, 33 bp, Homo sapien
aactttctgtcattcctcttatcaaacagctca

SEQ ID NO: 482999 - DNA, 33 bp, Homo sapien
tagcaccaagtaatcactcttattactattatt

SEQ ID NO: 483000 - DNA, 33 bp, Homo sapien
tagcaccaagtaatcagtcttattactattatt

SEQ ID NO: 483001 - DNA, 33 bp, Homo sapien
cttcggtattcagactaactccttctctttctt

SEQ ID NO: 483002 - DNA, 33 bp, Homo sapien
cttcggtattcagactcactccttctctttctt

SEQ ID NO: 483003 - DNA, 33 bp, Homo sapien
ccttctgtaacatatccaacctagctctcgtaa

SEQ ID NO: 483004 - DNA, 33 bp, Homo sapien
ccttctgtaacatatctaacctagctctcgtaa

SEQ ID NO: 483005 - DNA, 33 bp, Homo sapien
gaatatgaacactttcaaaaagcctatggggaa

SEQ ID NO: 483006 - DNA, 33 bp, Homo sapien
gaatatgaacactttcgaaaagcctatggggaa

SEQ ID NO: 483007 - DNA, 33 bp, Homo sapien
gtttgaaaaatgttggaataaatgaacaggaaa

SEQ ID NO: 483008 - DNA, 33 bp, Homo sapien
gtttgaaaaatgttgggataaatgaacaggaaa

SEQ ID NO: 483009 - DNA, 33 bp, Homo sapien
ctatcctcaactatcccggaattatagcaaaca

SEQ ID NO: 483010 - DNA, 33 bp, Homo sapien
ctatcctcaactatcctggaattatagcaaaca

SEQ ID NO: 483011 - DNA, 33 bp, Homo sapien
tgctccataactcatacaccattactaatgcca

SEQ ID NO: 483012 - DNA, 33 bp, Homo sapien
tgctccataactcatagaccattactaatgcca

SEQ ID NO: 483013 - DNA, 33 bp, Homo sapien
aaacaaacttcaccacagcttagtgtcttaaaa

SEQ ID NO: 483014 - DNA, 33 bp, Homo sapien
aaacaaacttcaccacggcttagtgtcttaaaa

SEQ ID NO: 483015 - DNA, 33 bp, Homo sapien
gtacttaccgtaagaactgttatgagatatggg

SEQ ID NO: 483016 - DNA, 33 bp, Homo sapien
gtacttaccgtaagaattgttatgagatatggg

SEQ ID NO: 483017 - DNA, 33 bp, Homo sapien
attagagacaaaaacaatgataaagaaactgat

SEQ ID NO: 483018 - DNA, 33 bp, Homo sapien
attagagacaaaaacagtgataaagaaactgat

SEQ ID NO: 483019 - DNA, 33 bp, Homo sapien
accttgaaaaaagaacagcataacagcaatgtt

SEQ ID NO: 483020 - DNA, 33 bp, Homo sapien
accttgaaaaaagaacggcataacagcaatgtt

SEQ ID NO: 483021 - DNA, 33 bp, Homo sapien
aatggatgaaattaaacgcagacctacaataga

SEQ ID NO: 483022 - DNA, 33 bp, Homo sapien
aatggatgaaattaaatgcagacctacaataga

SEQ ID NO: 483023 - DNA, 33 bp, Homo sapien
gtccatactctattcacattccttagtttttcc

SEQ ID NO: 483024 - DNA, 33 bp, Homo sapien
gtccatactctattcagattccttagtttttcc

SEQ ID NO: 483025 - DNA, 33 bp, Homo sapien
acagtgccataaagcaagatcactggatcaccc

SEQ ID NO: 483026 - DNA, 33 bp, Homo sapien
acagtgccataaagcaggatcactggatcaccc

SEQ ID NO: 483027 - DNA, 33 bp, Homo sapien
gaaagaaggcaaagcaatgaaaagactgaagat

SEQ ID NO: 483028 - DNA, 33 bp, Homo sapien
gaaagaaggcaaagcagtgaaaagactgaagat

SEQ ID NO: 483029 - DNA, 33 bp, Homo sapien
caaaatatctgcctcacggactttatttactag

SEQ ID NO: 483030 - DNA, 33 bp, Homo sapien
caaaatatctgcctcatggactttatttactag

SEQ ID NO: 483031 - DNA, 33 bp, Homo sapien
agtttgctaatcagctaacgttgagatagggca

SEQ ID NO: 483032 - DNA, 33 bp, Homo sapien
agtttgctaatcagctgacgttgagatagggca

SEQ ID NO: 483033 - DNA, 33 bp, Homo sapien
gttgtctactagaaaacggaatgtctgacaggc

SEQ ID NO: 483034 - DNA, 33 bp, Homo sapien
gttgtctactagaaaatggaatgtctgacaggc

SEQ ID NO: 483035 - DNA, 33 bp, Homo sapien
tcaagtcattcttaaactgagcattgtatgata

SEQ ID NO: 483036 - DNA, 33 bp, Homo sapien
tcaagtcattcttaaattgagcattgtatgata

SEQ ID NO: 483037 - DNA, 33 bp, Homo sapien
ctgaatttcaacaataactttctgaccctgacc

SEQ ID NO: 483038 - DNA, 33 bp, Homo sapien
ctgaatttcaacaatatctttctgaccctgacc

SEQ ID NO: 483039 - DNA, 33 bp, Homo sapien
ttcgttccaaaccaaagaaacataatgtaagga

SEQ ID NO: 483040 - DNA, 33 bp, Homo sapien
ttcgttccaaaccaaataaacataatgtaagga

SEQ ID NO: 483041 - DNA, 33 bp, Homo sapien
agtctctatccatttaagccatcaagttaaact

SEQ ID NO: 483042 - DNA, 33 bp, Homo sapien
agtctctatccatttaggccatcaagttaaact

SEQ ID NO: 483043 - DNA, 33 bp, Homo sapien
gtgaggagtggaatgaaaagagatggaagttaa

SEQ ID NO: 483044 - DNA, 33 bp, Homo sapien
gtgaggagtggaatgagaagagatggaagttaa

SEQ ID NO: 483045 - DNA, 33 bp, Homo sapien
gcttacaggctattgcactagttgtagcactta

SEQ ID NO: 483046 - DNA, 33 bp, Homo sapien
gcttacaggctattgccctagttgtagcactta

SEQ ID NO: 483047 - DNA, 33 bp, Homo sapien
gtaagtacccaggaagccgatagtgaacaggac

SEQ ID NO: 483048 - DNA, 33 bp, Homo sapien
gtaagtacccaggaagtcgatagtgaacaggac

SEQ ID NO: 483049 - DNA, 33 bp, Homo sapien
aagcatggttaaaatcgctcttctctctgccat

SEQ ID NO: 483050 - DNA, 33 bp, Homo sapien
aagcatggttaaaatctctcttctctctgccat

SEQ ID NO: 483051 - DNA, 33 bp, Homo sapien
ctgtttcaaagcttaactctccaatgaagagct

SEQ ID NO: 483052 - DNA, 33 bp, Homo sapien
ctgtttcaaagcttaagtctccaatgaagagct

SEQ ID NO: 483053 - DNA, 33 bp, Homo sapien
aaaacactgaagaacaacatctaagagattatt

SEQ ID NO: 483054 - DNA, 33 bp, Homo sapien
aaaacactgaagaacatcatctaagagattatt

SEQ ID NO: 483055 - DNA, 33 bp, Homo sapien
atgctctgtgatataactggttactttttgtct

SEQ ID NO: 483056 - DNA, 33 bp, Homo sapien
atgctctgtgatataattggttactttttgtct

SEQ ID NO: 483057 - DNA, 33 bp, Homo sapien
atatatactgagcaaaataaatatctagggtac

SEQ ID NO: 483058 - DNA, 33 bp, Homo sapien
atatatactgagcaaagtaaatatctagggtac

SEQ ID NO: 483059 - DNA, 33 bp, Homo sapien
atctgtgtgccagtctaaatacaaaatcacctg

SEQ ID NO: 483060 - DNA, 33 bp, Homo sapien
atctgtgtgccagtctgaatacaaaatcacctg

SEQ ID NO: 483061 - DNA, 33 bp, Homo sapien
aacaccaacaaccaaaatctgtggtgtgttttc

SEQ ID NO: 483062 - DNA, 33 bp, Homo sapien
aacaccaacaaccaaagtctgtggtgtgttttc

SEQ ID NO: 483063 - DNA, 33 bp, Homo sapien
aatgtctaacacacaacgtcttcaaggagtaca

SEQ ID NO: 483064 - DNA, 33 bp, Homo sapien
aatgtctaacacacaatgtcttcaaggagtaca

SEQ ID NO: 483065 - DNA, 33 bp, Homo sapien
ctaggacactggatcaatcaaggcctagtattg

SEQ ID NO: 483066 - DNA, 33 bp, Homo sapien
ctaggacactggatcagtcaaggcctagtattg

SEQ ID NO: 483067 - DNA, 33 bp, Homo sapien
gatatgtgcttaatacaaaaaaatgaaatcatg

SEQ ID NO: 483068 - DNA, 33 bp, Homo sapien
gatatgtgcttaatactaaaaaatgaaatcatg

SEQ ID NO: 483069 - DNA, 33 bp, Homo sapien
ttatggatgacctgaactggcatcttttctaag

SEQ ID NO: 483070 - DNA, 33 bp, Homo sapien
ttatggatgacctgaattggcatcttttctaag

SEQ ID NO: 483071 - DNA, 33 bp, Homo sapien
ttcacaactctctacaatattttaatcttactg

SEQ ID NO: 483072 - DNA, 33 bp, Homo sapien
ttcacaactctctacagtattttaatcttactg

SEQ ID NO: 483073 - DNA, 33 bp, Homo sapien
tatgatgtatccgttcaaaaggagttttaccca

SEQ ID NO: 483074 - DNA, 33 bp, Homo sapien
tatgatgtatccgttccaaaggagttttaccca

SEQ ID NO: 483075 - DNA, 33 bp, Homo sapien
tgtcaagtaaaagtcaatagcctagagatgtgt

SEQ ID NO: 483076 - DNA, 33 bp, Homo sapien
tgtcaagtaaaagtcagtagcctagagatgtgt

SEQ ID NO: 483077 - DNA, 33 bp, Homo sapien
tactgattacactgtaagaaattgcaatacttc

SEQ ID NO: 483078 - DNA, 33 bp, Homo sapien
tactgattacactgtatgaaattgcaatacttc

SEQ ID NO: 483079 - DNA, 33 bp, Homo sapien
ctttgaaacctttgtacctgaaaatgtgtacta

SEQ ID NO: 483080 - DNA, 33 bp, Homo sapien
ctttgaaacctttgtatctgaaaatgtgtacta

SEQ ID NO: 483081 - DNA, 33 bp, Homo sapien
ttatttctgaccataacgttttagacaaaatgc

SEQ ID NO: 483082 - DNA, 33 bp, Homo sapien
ttatttctgaccataatgttttagacaaaatgc

SEQ ID NO: 483083 - DNA, 33 bp, Homo sapien
tgtgactattgatggacaataaagaggacattt

SEQ ID NO: 483084 - DNA, 33 bp, Homo sapien
tgtgactattgatggagaataaagaggacattt

SEQ ID NO: 483085 - DNA, 33 bp, Homo sapien
tcagtcctaattttgaactctagacctgtctta

SEQ ID NO: 483086 - DNA, 33 bp, Homo sapien
tcagtcctaattttgagctctagacctgtctta

SEQ ID NO: 483087 - DNA, 33 bp, Homo sapien
ctactgcagtacctaaccttccattaatcccat

SEQ ID NO: 483088 - DNA, 33 bp, Homo sapien
ctactgcagtacctaatcttccattaatcccat

SEQ ID NO: 483089 - DNA, 33 bp, Homo sapien
tgtgtcactggttaaacacctgggcaggcaata

SEQ ID NO: 483090 - DNA, 33 bp, Homo sapien
tgtgtcactggttaaatacctgggcaggcaata

SEQ ID NO: 483091 - DNA, 33 bp, Homo sapien
gcaatgtacttggccacgagtgcaaaggtgctt

SEQ ID NO: 483092 - DNA, 33 bp, Homo sapien
gcaatgtacttggccatgagtgcaaaggtgctt

SEQ ID NO: 483093 - DNA, 33 bp, Homo sapien
agaatgatgttaaagagataagagtgccacatt

SEQ ID NO: 483094 - DNA, 33 bp, Homo sapien
agaatgatgttaaagatataagagtgccacatt

SEQ ID NO: 483095 - DNA, 33 bp, Homo sapien
tactgcagtgtttttacaatttgacttcactta

SEQ ID NO: 483096 - DNA, 33 bp, Homo sapien
tactgcagtgtttttagaatttgacttcactta

SEQ ID NO: 483097 - DNA, 33 bp, Homo sapien
aaagtaggagatctagaagtaacattaaatatc

SEQ ID NO: 483098 - DNA, 33 bp, Homo sapien
aaagtaggagatctaggagtaacattaaatatc

SEQ ID NO: 483099 - DNA, 33 bp, Homo sapien
attctagtagattcagaaacatgctcatccctg

SEQ ID NO: 483100 - DNA, 33 bp, Homo sapien
attctagtagattcagcaacatgctcatccctg

SEQ ID NO: 483101 - DNA, 33 bp, Homo sapien
ttctttcacagtactacaggtcagaaatgttag

SEQ ID NO: 483102 - DNA, 33 bp, Homo sapien
ttctttcacagtactagaggtcagaaatgttag

SEQ ID NO: 483103 - DNA, 33 bp, Homo sapien
agacagagagaagaaaatggagccccaattatg

SEQ ID NO: 483104 - DNA, 33 bp, Homo sapien
agacagagagaagaaagtggagccccaattatg

SEQ ID NO: 483105 - DNA, 33 bp, Homo sapien
tttccttctcttcaaacagttcagtcagggtgc

SEQ ID NO: 483106 - DNA, 33 bp, Homo sapien
tttccttctcttcaaatagttcagtcagggtgc

SEQ ID NO: 483107 - DNA, 33 bp, Homo sapien
atttatggacggtacactaaattttttcaaagt

SEQ ID NO: 483108 - DNA, 33 bp, Homo sapien
atttatggacggtacattaaattttttcaaagt

SEQ ID NO: 483109 - DNA, 33 bp, Homo sapien
gtttctcattagttcccagattttaccaaatta

SEQ ID NO: 483110 - DNA, 33 bp, Homo sapien
gtttctcattagttcctagattttaccaaatta

SEQ ID NO: 483111 - DNA, 33 bp, Homo sapien
agctttttgtatatcaatcatatctcaagccgc

SEQ ID NO: 483112 - DNA, 33 bp, Homo sapien
agctttttgtatatcagtcatatctcaagccgc

SEQ ID NO: 483113 - DNA, 33 bp, Homo sapien
caatgaagcccgaatgacagtatatctctttac

SEQ ID NO: 483114 - DNA, 33 bp, Homo sapien
caatgaagcccgaatggcagtatatctctttac

SEQ ID NO: 483115 - DNA, 33 bp, Homo sapien
cagtgcattaattctacacttctggataaggcc

SEQ ID NO: 483116 - DNA, 33 bp, Homo sapien
cagtgcattaattctatacttctggataaggcc

SEQ ID NO: 483117 - DNA, 33 bp, Homo sapien
gagaaagcaattaatcaagtttctggccataaa

SEQ ID NO: 483118 - DNA, 33 bp, Homo sapien
gagaaagcaattaatccagtttctggccataaa

SEQ ID NO: 483119 - DNA, 33 bp, Homo sapien
gcatctcacatttggaaagtctttgaagatatt

SEQ ID NO: 483120 - DNA, 33 bp, Homo sapien
gcatctcacatttggatagtctttgaagatatt

SEQ ID NO: 483121 - DNA, 33 bp, Homo sapien
caaatgtgattttgataaattctagggtatgca

SEQ ID NO: 483122 - DNA, 33 bp, Homo sapien
caaatgtgattttgatcaattctagggtatgca

SEQ ID NO: 483123 - DNA, 33 bp, Homo sapien
ctctttcaaattgttaaaatgtagacactacac

SEQ ID NO: 483124 - DNA, 33 bp, Homo sapien
ctctttcaaattgttacaatgtagacactacac

SEQ ID NO: 483125 - DNA, 33 bp, Homo sapien
aacggatctctgtctaaccctcatatcaaggct

SEQ ID NO: 483126 - DNA, 33 bp, Homo sapien
aacggatctctgtctacccctcatatcaaggct

SEQ ID NO: 483127 - DNA, 33 bp, Homo sapien
acatatagcctttccacagacatacagagcatg

SEQ ID NO: 483128 - DNA, 33 bp, Homo sapien
acatatagcctttccagagacatacagagcatg

SEQ ID NO: 483129 - DNA, 33 bp, Homo sapien
aatcgtggctacaacactgattagaaaaagtgc

SEQ ID NO: 483130 - DNA, 33 bp, Homo sapien
aatcgtggctacaacattgattagaaaaagtgc

SEQ ID NO: 483131 - DNA, 33 bp, Homo sapien
ctggcagtcagtatgaactttacttagggaggt

SEQ ID NO: 483132 - DNA, 33 bp, Homo sapien
ctggcagtcagtatgacctttacttagggaggt

SEQ ID NO: 483133 - DNA, 33 bp, Homo sapien
catgcctagttatgtaaccagcctacaatcagc

SEQ ID NO: 483134 - DNA, 33 bp, Homo sapien
catgcctagttatgtacccagcctacaatcagc

SEQ ID NO: 483135 - DNA, 33 bp, Homo sapien
ggttccttcacacttccagtctctcagattcta

SEQ ID NO: 483136 - DNA, 33 bp, Homo sapien
ggttccttcacacttctagtctctcagattcta

SEQ ID NO: 483137 - DNA, 33 bp, Homo sapien
gcacgctaataacatccaccacattcttttctt

SEQ ID NO: 483138 - DNA, 33 bp, Homo sapien
gcacgctaataacatcgaccacattcttttctt

SEQ ID NO: 483139 - DNA, 33 bp, Homo sapien
tcgatgcctgcattcaatcaggtactgtgtgtg

SEQ ID NO: 483140 - DNA, 33 bp, Homo sapien
tcgatgcctgcattcagtcaggtactgtgtgtg

SEQ ID NO: 483141 - DNA, 33 bp, Homo sapien
gcaattttgactcaagaaagtaccccctgcgag

SEQ ID NO: 483142 - DNA, 33 bp, Homo sapien
gcaattttgactcaagtaagtaccccctgcgag

SEQ ID NO: 483143 - DNA, 33 bp, Homo sapien
tatttattagctatgaactcacataattgcctt

SEQ ID NO: 483144 - DNA, 33 bp, Homo sapien
tatttattagctatgagctcacataattgcctt

SEQ ID NO: 483145 - DNA, 33 bp, Homo sapien
cttattggagctcagagaaatagttgcagcagt

SEQ ID NO: 483146 - DNA, 33 bp, Homo sapien
cttattggagctcagataaatagttgcagcagt

SEQ ID NO: 483147 - DNA, 33 bp, Homo sapien
cacaggcagcttctaaaggattcttctctggag

SEQ ID NO: 483148 - DNA, 33 bp, Homo sapien
cacaggcagcttctaatggattcttctctggag

SEQ ID NO: 483149 - DNA, 33 bp, Homo sapien
tcatccatgtgcccgcaaaagacatgaactcat

SEQ ID NO: 483150 - DNA, 33 bp, Homo sapien
tcatccatgtgcccgcgaaagacatgaactcat

SEQ ID NO: 483151 - DNA, 33 bp, Homo sapien
atggaatttgaaatacaggaagcctataaagaa

SEQ ID NO: 483152 - DNA, 33 bp, Homo sapien
atggaatttgaaatacgggaagcctataaagaa

SEQ ID NO: 483153 - DNA, 33 bp, Homo sapien
aattatatttgcaggacgatttttaactactga

SEQ ID NO: 483154 - DNA, 33 bp, Homo sapien
aattatatttgcaggatgatttttaactactga

SEQ ID NO: 483155 - DNA, 33 bp, Homo sapien
tacattatgcctttaccgatattgtaagatgac

SEQ ID NO: 483156 - DNA, 33 bp, Homo sapien
tacattatgcctttactgatattgtaagatgac

SEQ ID NO: 483157 - DNA, 33 bp, Homo sapien
catactacccaacttcaaactataatacaaggc

SEQ ID NO: 483158 - DNA, 33 bp, Homo sapien
catactacccaacttcgaactataatacaaggc

SEQ ID NO: 483159 - DNA, 33 bp, Homo sapien
atgagcaccttcacataaaagatgactctgaaa

SEQ ID NO: 483160 - DNA, 33 bp, Homo sapien
atgagcaccttcacatgaaagatgactctgaaa

SEQ ID NO: 483161 - DNA, 33 bp, Homo sapien
gagaactattggcaataaaataggtgttccata

SEQ ID NO: 483162 - DNA, 33 bp, Homo sapien
gagaactattggcaatgaaataggtgttccata

SEQ ID NO: 483163 - DNA, 33 bp, Homo sapien
tttctaatgacttttccactagcattacagata

SEQ ID NO: 483164 - DNA, 33 bp, Homo sapien
tttctaatgacttttctactagcattacagata

SEQ ID NO: 483165 - DNA, 33 bp, Homo sapien
aaatggaatccagagggagtcaaatgatgtgtt

SEQ ID NO: 483166 - DNA, 33 bp, Homo sapien
aaatggaatccagaggtagtcaaatgatgtgtt

SEQ ID NO: 483167 - DNA, 33 bp, Homo sapien
tatccaagctctaggcaatatagtttttatcat

SEQ ID NO: 483168 - DNA, 33 bp, Homo sapien
tatccaagctctaggccatatagtttttatcat

SEQ ID NO: 483169 - DNA, 33 bp, Homo sapien
ggacttctgaactgcgaaattcaacaactgtgc

SEQ ID NO: 483170 - DNA, 33 bp, Homo sapien
ggacttctgaactgcggaattcaacaactgtgc

SEQ ID NO: 483171 - DNA, 33 bp, Homo sapien
gcttttgtggtacttactaaatgtataacctac

SEQ ID NO: 483172 - DNA, 33 bp, Homo sapien
gcttttgtggtacttattaaatgtataacctac

SEQ ID NO: 483173 - DNA, 33 bp, Homo sapien
aaactgcctagcataacagttgaaaccacctct

SEQ ID NO: 483174 - DNA, 33 bp, Homo sapien
aaactgcctagcataagagttgaaaccacctct

SEQ ID NO: 483175 - DNA, 33 bp, Homo sapien
tgtcttggggtcatgtaaatcacagtagttggt

SEQ ID NO: 483176 - DNA, 33 bp, Homo sapien
tgtcttggggtcatgtcaatcacagtagttggt

SEQ ID NO: 483177 - DNA, 33 bp, Homo sapien
gatatgctaactatccggatctaatcactaccc

SEQ ID NO: 483178 - DNA, 33 bp, Homo sapien
gatatgctaactatcctgatctaatcactaccc

SEQ ID NO: 483179 - DNA, 33 bp, Homo sapien
aatgttgagatccagacgaagagcctgcctgta

SEQ ID NO: 483180 - DNA, 33 bp, Homo sapien
aatgttgagatccagatgaagagcctgcctgta

SEQ ID NO: 483181 - DNA, 33 bp, Homo sapien
ggtctcagaaaggaaactaacctcagcaaactt

SEQ ID NO: 483182 - DNA, 33 bp, Homo sapien
ggtctcagaaaggaaattaacctcagcaaactt

SEQ ID NO: 483183 - DNA, 33 bp, Homo sapien
aaacactgtgcactgaaatatagacagttccac

SEQ ID NO: 483184 - DNA, 33 bp, Homo sapien
aaacactgtgcactgagatatagacagttccac

SEQ ID NO: 483185 - DNA, 33 bp, Homo sapien
ttttagcagggggaggaaacattatgaatcaat

SEQ ID NO: 483186 - DNA, 33 bp, Homo sapien
ttttagcagggggagggaacattatgaatcaat

SEQ ID NO: 483187 - DNA, 33 bp, Homo sapien
taatgctaataaatccaggaaagaaccactcat

SEQ ID NO: 483188 - DNA, 33 bp, Homo sapien
taatgctaataaatccgggaaagaaccactcat

SEQ ID NO: 483189 - DNA, 33 bp, Homo sapien
cagcaaaacttagcaacctcattctaaaatgca

SEQ ID NO: 483190 - DNA, 33 bp, Homo sapien
cagcaaaacttagcaatctcattctaaaatgca

SEQ ID NO: 483191 - DNA, 33 bp, Homo sapien
aaagagaatagtttgactacaggaccttacctg

SEQ ID NO: 483192 - DNA, 33 bp, Homo sapien
aaagagaatagtttgattacaggaccttacctg

SEQ ID NO: 483193 - DNA, 33 bp, Homo sapien
agacaaaagtgaaccactggtcactgcactctc

SEQ ID NO: 483194 - DNA, 33 bp, Homo sapien
agacaaaagtgaaccattggtcactgcactctc

SEQ ID NO: 483195 - DNA, 33 bp, Homo sapien
agaaagggaaactgccaaaaactgtacctccca

SEQ ID NO: 483196 - DNA, 33 bp, Homo sapien
agaaagggaaactgccgaaaactgtacctccca

SEQ ID NO: 483197 - DNA, 33 bp, Homo sapien
gtcacataaaattaaccagcctttcagtttttt

SEQ ID NO: 483198 - DNA, 33 bp, Homo sapien
gtcacataaaattaacgagcctttcagtttttt

SEQ ID NO: 483199 - DNA, 33 bp, Homo sapien
tggtattgtggcctagacaaaatggtcacataa

SEQ ID NO: 483200 - DNA, 33 bp, Homo sapien
tggtattgtggcctagccaaaatggtcacataa

SEQ ID NO: 483201 - DNA, 33 bp, Homo sapien
ttccaataatgcagaggatagacaacaaactat

SEQ ID NO: 483202 - DNA, 33 bp, Homo sapien
ttccaataatgcagagtatagacaacaaactat

SEQ ID NO: 483203 - DNA, 33 bp, Homo sapien
ccagagcagaaagaaagtgtatttgcaggattt

SEQ ID NO: 483204 - DNA, 33 bp, Homo sapien
ccagagcagaaagaaattgtatttgcaggattt

SEQ ID NO: 483205 - DNA, 33 bp, Homo sapien
agaaaggttattgatacgtctaggatgcaacga

SEQ ID NO: 483206 - DNA, 33 bp, Homo sapien
agaaaggttattgataggtctaggatgcaacga

SEQ ID NO: 483207 - DNA, 33 bp, Homo sapien
tgtacttcatagagaaatgagagagtgcaaaac

SEQ ID NO: 483208 - DNA, 33 bp, Homo sapien
tgtacttcatagagaactgagagagtgcaaaac

SEQ ID NO: 483209 - DNA, 33 bp, Homo sapien
aatcaatatgtagatcactttggccattcttgc

SEQ ID NO: 483210 - DNA, 33 bp, Homo sapien
aatcaatatgtagatcgctttggccattcttgc

SEQ ID NO: 483211 - DNA, 33 bp, Homo sapien
accaaaaaagtggagagaggagaatccaactta

SEQ ID NO: 483212 - DNA, 33 bp, Homo sapien
accaaaaaagtggagataggagaatccaactta

SEQ ID NO: 483213 - DNA, 33 bp, Homo sapien
ccatttagacaaggcacgtatctgataacatac

SEQ ID NO: 483214 - DNA, 33 bp, Homo sapien
ccatttagacaaggcaggtatctgataacatac

SEQ ID NO: 483215 - DNA, 33 bp, Homo sapien
tagaactcaaaactgacgaaacacaaagcaaag

SEQ ID NO: 483216 - DNA, 33 bp, Homo sapien
tagaactcaaaactgatgaaacacaaagcaaag

SEQ ID NO: 483217 - DNA, 33 bp, Homo sapien
caacttctgggatcagacaactagaagaccttg

SEQ ID NO: 483218 - DNA, 33 bp, Homo sapien
caacttctgggatcaggcaactagaagaccttg

SEQ ID NO: 483219 - DNA, 33 bp, Homo sapien
ctgatcccagaagttgaagatggaaaggcaggg

SEQ ID NO: 483220 - DNA, 33 bp, Homo sapien
ctgatcccagaagttggagatggaaaggcaggg

SEQ ID NO: 483221 - DNA, 33 bp, Homo sapien
catatattgaaacgtaactcccatggcaatgat

SEQ ID NO: 483222 - DNA, 33 bp, Homo sapien
catatattgaaacgtagctcccatggcaatgat

SEQ ID NO: 483223 - DNA, 33 bp, Homo sapien
tgacagcagacacagcaccttttaaactttttt

SEQ ID NO: 483224 - DNA, 33 bp, Homo sapien
tgacagcagacacagctccttttaaactttttt

SEQ ID NO: 483225 - DNA, 33 bp, Homo sapien
tattaatatgcaaaaacttcaatgttggaaaag

SEQ ID NO: 483226 - DNA, 33 bp, Homo sapien
tattaatatgcaaaaatttcaatgttggaaaag

SEQ ID NO: 483227 - DNA, 33 bp, Homo sapien
tgggccctgactccaacgggtctgataagttag

SEQ ID NO: 483228 - DNA, 33 bp, Homo sapien
tgggccctgactccaatgggtctgataagttag

SEQ ID NO: 483229 - DNA, 33 bp, Homo sapien
tctgataagttagaaaacgaaaactcttctgtt

SEQ ID NO: 483230 - DNA, 33 bp, Homo sapien
tctgataagttagaaagcgaaaactcttctgtt

SEQ ID NO: 483231 - DNA, 33 bp, Homo sapien
caacatttgtaagaacccttatacagtcagccc

SEQ ID NO: 483232 - DNA, 33 bp, Homo sapien
caacatttgtaagaactcttatacagtcagccc

SEQ ID NO: 483233 - DNA, 33 bp, Homo sapien
tagcattgcatatggaaaggggataggacacat

SEQ ID NO: 483234 - DNA, 33 bp, Homo sapien
tagcattgcatatggagaggggataggacacat

SEQ ID NO: 483235 - DNA, 33 bp, Homo sapien
gaaatgagttttagccacttgagtttcttttat

SEQ ID NO: 483236 - DNA, 33 bp, Homo sapien
gaaatgagttttagccgcttgagtttcttttat

SEQ ID NO: 483237 - DNA, 33 bp, Homo sapien
actgagagggttgaaaagagaacagtgtagggc

SEQ ID NO: 483238 - DNA, 33 bp, Homo sapien
actgagagggttgaaaggagaacagtgtagggc

SEQ ID NO: 483239 - DNA, 33 bp, Homo sapien
gaaactggcaatagggacaaaatctgagaacta

SEQ ID NO: 483240 - DNA, 33 bp, Homo sapien
gaaactggcaatagggccaaaatctgagaacta

SEQ ID NO: 483241 - DNA, 33 bp, Homo sapien
gaacaaaacaaaacaagtatgcaatctagtgct

SEQ ID NO: 483242 - DNA, 33 bp, Homo sapien
gaacaaaacaaaacaattatgcaatctagtgct

SEQ ID NO: 483243 - DNA, 33 bp, Homo sapien
tgttcttcagacagaaattccatgtactggatt

SEQ ID NO: 483244 - DNA, 33 bp, Homo sapien
tgttcttcagacagaagttccatgtactggatt

SEQ ID NO: 483245 - DNA, 33 bp, Homo sapien
atatactttctgaccacgcggactctttcctgg

SEQ ID NO: 483246 - DNA, 33 bp, Homo sapien
atatactttctgaccatgcggactctttcctgg

SEQ ID NO: 483247 - DNA, 33 bp, Homo sapien
accttgggcaagttacgatactcttcatgcctg

SEQ ID NO: 483248 - DNA, 33 bp, Homo sapien
accttgggcaagttactatactcttcatgcctg

SEQ ID NO: 483249 - DNA, 33 bp, Homo sapien
caggctcactctgtataacaccatgcaaaatag

SEQ ID NO: 483250 - DNA, 33 bp, Homo sapien
caggctcactctgtatgacaccatgcaaaatag

SEQ ID NO: 483251 - DNA, 33 bp, Homo sapien
aataggataacagggacatcataatggagaaga

SEQ ID NO: 483252 - DNA, 33 bp, Homo sapien
aataggataacagggatatcataatggagaaga

SEQ ID NO: 483253 - DNA, 33 bp, Homo sapien
atattactggaccagacgaggccctgctctgct

SEQ ID NO: 483254 - DNA, 33 bp, Homo sapien
atattactggaccagatgaggccctgctctgct

SEQ ID NO: 483255 - DNA, 33 bp, Homo sapien
tctgggttcaccatcaccttcctttctatgaga

SEQ ID NO: 483256 - DNA, 33 bp, Homo sapien
tctgggttcaccatcatcttcctttctatgaga

SEQ ID NO: 483257 - DNA, 33 bp, Homo sapien
agagagaacaaagtaaataacagatgaggctgc

SEQ ID NO: 483258 - DNA, 33 bp, Homo sapien
agagagaacaaagtaagtaacagatgaggctgc

SEQ ID NO: 483259 - DNA, 33 bp, Homo sapien
tggtaatttgtatagtcacctgtcagaagaaag

SEQ ID NO: 483260 - DNA, 33 bp, Homo sapien
tggtaatttgtatagttacctgtcagaagaaag

SEQ ID NO: 483261 - DNA, 33 bp, Homo sapien
tttcaaaacccatgaccctactgtctctataat

SEQ ID NO: 483262 - DNA, 33 bp, Homo sapien
tttcaaaacccatgactctactgtctctataat

SEQ ID NO: 483263 - DNA, 33 bp, Homo sapien
atacagctatctgataacagaacttgaactgga

SEQ ID NO: 483264 - DNA, 33 bp, Homo sapien
atacagctatctgataccagaacttgaactgga

SEQ ID NO: 483265 - DNA, 33 bp, Homo sapien
catccattaaatgtaacatcaactgattgctat

SEQ ID NO: 483266 - DNA, 33 bp, Homo sapien
catccattaaatgtaagatcaactgattgctat

SEQ ID NO: 483267 - DNA, 33 bp, Homo sapien
gcaatattctacaagaactcaaagtgtcaatag

SEQ ID NO: 483268 - DNA, 33 bp, Homo sapien
gcaatattctacaagagctcaaagtgtcaatag

SEQ ID NO: 483269 - DNA, 33 bp, Homo sapien
aaaaatgagtcaattgaaagggcaaaatacctg

SEQ ID NO: 483270 - DNA, 33 bp, Homo sapien
aaaaatgagtcaattggaagggcaaaatacctg

SEQ ID NO: 483271 - DNA, 33 bp, Homo sapien
taagattctccatctcaatatactaggaaaata

SEQ ID NO: 483272 - DNA, 33 bp, Homo sapien
taagattctccatctcgatatactaggaaaata

SEQ ID NO: 483273 - DNA, 33 bp, Homo sapien
ggtgttctagaagaaacaggcaaactgaattct

SEQ ID NO: 483274 - DNA, 33 bp, Homo sapien
ggtgttctagaagaaataggcaaactgaattct

SEQ ID NO: 483275 - DNA, 33 bp, Homo sapien
taaaatgtgatagaaacatggcaacagggtcta

SEQ ID NO: 483276 - DNA, 33 bp, Homo sapien
taaaatgtgatagaaagatggcaacagggtcta

SEQ ID NO: 483277 - DNA, 33 bp, Homo sapien
aaatagacttttctaccattggctggttagaac

SEQ ID NO: 483278 - DNA, 33 bp, Homo sapien
aaatagacttttctactattggctggttagaac

SEQ ID NO: 483279 - DNA, 33 bp, Homo sapien
actgccttccttccaaatccatctgcttgtccc

SEQ ID NO: 483280 - DNA, 33 bp, Homo sapien
actgccttccttccaattccatctgcttgtccc

SEQ ID NO: 483281 - DNA, 33 bp, Homo sapien
aggacaggaaagaggaaaaaatgaagttggaaa

SEQ ID NO: 483282 - DNA, 33 bp, Homo sapien
aggacaggaaagaggagaaaatgaagttggaaa

SEQ ID NO: 483283 - DNA, 33 bp, Homo sapien
gtttcattatttgaacacccttggatttcttcc

SEQ ID NO: 483284 - DNA, 33 bp, Homo sapien
gtttcattatttgaacgcccttggatttcttcc

SEQ ID NO: 483285 - DNA, 33 bp, Homo sapien
cccacacgaaggtttacaatagtatcctcaaaa

SEQ ID NO: 483286 - DNA, 33 bp, Homo sapien
cccacacgaaggtttataatagtatcctcaaaa

SEQ ID NO: 483287 - DNA, 33 bp, Homo sapien
tagtattgtccttgacccagagtccttatgtgt

SEQ ID NO: 483288 - DNA, 33 bp, Homo sapien
tagtattgtccttgactcagagtccttatgtgt

SEQ ID NO: 483289 - DNA, 33 bp, Homo sapien
catattctgaagaaaccgattacacaaccccct

SEQ ID NO: 483290 - DNA, 33 bp, Homo sapien
catattctgaagaaactgattacacaaccccct

SEQ ID NO: 483291 - DNA, 33 bp, Homo sapien
tacatagtgaatcctccgaagatgctcattctt

SEQ ID NO: 483292 - DNA, 33 bp, Homo sapien
tacatagtgaatcctctgaagatgctcattctt

SEQ ID NO: 483293 - DNA, 33 bp, Homo sapien
ggagcccctaaagccaatggaaatcctagtcat

SEQ ID NO: 483294 - DNA, 33 bp, Homo sapien
ggagcccctaaagccagtggaaatcctagtcat

SEQ ID NO: 483295 - DNA, 33 bp, Homo sapien
agcctggatttcaatgaaaaagagagattcctg

SEQ ID NO: 483296 - DNA, 33 bp, Homo sapien
agcctggatttcaatggaaaagagagattcctg

SEQ ID NO: 483297 - DNA, 33 bp, Homo sapien
tcttaaattatcataaagaacatggctgggcac

SEQ ID NO: 483298 - DNA, 33 bp, Homo sapien
tcttaaattatcataaggaacatggctgggcac

SEQ ID NO: 483299 - DNA, 33 bp, Homo sapien
actctgtgactctctacgactattaataatgga

SEQ ID NO: 483300 - DNA, 33 bp, Homo sapien
actctgtgactctctatgactattaataatgga

SEQ ID NO: 483301 - DNA, 33 bp, Homo sapien
caattcatgttttaagcagagaacataaaattt

SEQ ID NO: 483302 - DNA, 33 bp, Homo sapien
caattcatgttttaagtagagaacataaaattt

SEQ ID NO: 483303 - DNA, 33 bp, Homo sapien
cagttgagagacggacaaaaggttctggtgaga

SEQ ID NO: 483304 - DNA, 33 bp, Homo sapien
cagttgagagacggacgaaaggttctggtgaga

SEQ ID NO: 483305 - DNA, 33 bp, Homo sapien
cattttgaggtcagacagaattattttgaaagt

SEQ ID NO: 483306 - DNA, 33 bp, Homo sapien
cattttgaggtcagacggaattattttgaaagt

SEQ ID NO: 483307 - DNA, 33 bp, Homo sapien
atgaggattaaattagaaaaatagcacagtgac

SEQ ID NO: 483308 - DNA, 33 bp, Homo sapien
atgaggattaaattaggaaaatagcacagtgac

SEQ ID NO: 483309 - DNA, 33 bp, Homo sapien
gggaacaaggtaataactgctcctctctatcca

SEQ ID NO: 483310 - DNA, 33 bp, Homo sapien
gggaacaaggtaataattgctcctctctatcca

SEQ ID NO: 483311 - DNA, 33 bp, Homo sapien
aatatgctggaaaaaagctattatgatgctgta

SEQ ID NO: 483312 - DNA, 33 bp, Homo sapien
aatatgctggaaaaaatctattatgatgctgta

SEQ ID NO: 483313 - DNA, 33 bp, Homo sapien
taatttgcccatgatcagacacaatttaagagt

SEQ ID NO: 483314 - DNA, 33 bp, Homo sapien
taatttgcccatgatcggacacaatttaagagt

SEQ ID NO: 483315 - DNA, 33 bp, Homo sapien
taaggtgtttaagtcacagatgagtgaacaatt

SEQ ID NO: 483316 - DNA, 33 bp, Homo sapien
taaggtgtttaagtcagagatgagtgaacaatt

SEQ ID NO: 483317 - DNA, 33 bp, Homo sapien
atggctgtatagctgtcaaagaacccacagaga

SEQ ID NO: 483318 - DNA, 33 bp, Homo sapien
atggctgtatagctgttaaagaacccacagaga

SEQ ID NO: 483319 - DNA, 33 bp, Homo sapien
catgtgaatatgtttacgcatcttttaatgtgg

SEQ ID NO: 483320 - DNA, 33 bp, Homo sapien
catgtgaatatgtttaggcatcttttaatgtgg

SEQ ID NO: 483321 - DNA, 33 bp, Homo sapien
atcttaaatactacaacggtgcaacaagtttat

SEQ ID NO: 483322 - DNA, 33 bp, Homo sapien
atcttaaatactacaatggtgcaacaagtttat

SEQ ID NO: 483323 - DNA, 33 bp, Homo sapien
ttctcattgccaaggacacatctattttattta

SEQ ID NO: 483324 - DNA, 33 bp, Homo sapien
ttctcattgccaaggatacatctattttattta

SEQ ID NO: 483325 - DNA, 33 bp, Homo sapien
attcaaatggttggctaaagtatatgcagtcca

SEQ ID NO: 483326 - DNA, 33 bp, Homo sapien
attcaaatggttggctgaagtatatgcagtcca

SEQ ID NO: 483327 - DNA, 33 bp, Homo sapien
ccttaatgttcatcaacgtaggaaaatagaccg

SEQ ID NO: 483328 - DNA, 33 bp, Homo sapien
ccttaatgttcatcaatgtaggaaaatagaccg

SEQ ID NO: 483329 - DNA, 33 bp, Homo sapien
gttcgaggtcaggaaccatccagctagggagaa

SEQ ID NO: 483330 - DNA, 33 bp, Homo sapien
gttcgaggtcaggaacgatccagctagggagaa

SEQ ID NO: 483331 - DNA, 33 bp, Homo sapien
gatgctctacacaaaacaggtaaccagaaaaat

SEQ ID NO: 483332 - DNA, 33 bp, Homo sapien
gatgctctacacaaaataggtaaccagaaaaat

SEQ ID NO: 483333 - DNA, 33 bp, Homo sapien
ccaaacataagatccaatcactttccctaataa

SEQ ID NO: 483334 - DNA, 33 bp, Homo sapien
ccaaacataagatccagtcactttccctaataa

SEQ ID NO: 483335 - DNA, 33 bp, Homo sapien
atttgtttttctttcaataatcagttctgtagg

SEQ ID NO: 483336 - DNA, 33 bp, Homo sapien
atttgtttttctttcagtaatcagttctgtagg

SEQ ID NO: 483337 - DNA, 33 bp, Homo sapien
cacgtcatgctgagaactgtcagtagaagaggt

SEQ ID NO: 483338 - DNA, 33 bp, Homo sapien
cacgtcatgctgagaattgtcagtagaagaggt

SEQ ID NO: 483339 - DNA, 33 bp, Homo sapien
cttggcgatggtgaaacataagctcttcttaga

SEQ ID NO: 483340 - DNA, 33 bp, Homo sapien
cttggcgatggtgaaatataagctcttcttaga

SEQ ID NO: 483341 - DNA, 33 bp, Homo sapien
atcagtcatcttccatcagcagcagaggataca

SEQ ID NO: 483342 - DNA, 33 bp, Homo sapien
atcagtcatcttccattagcagcagaggataca

SEQ ID NO: 483343 - DNA, 33 bp, Homo sapien
ggagtgaagggaaagaaagcaatgaaaacctct

SEQ ID NO: 483344 - DNA, 33 bp, Homo sapien
ggagtgaagggaaagagagcaatgaaaacctct

SEQ ID NO: 483345 - DNA, 33 bp, Homo sapien
tcccagtgtattggaaccttctttttctcttct

SEQ ID NO: 483346 - DNA, 33 bp, Homo sapien
tcccagtgtattggaatcttctttttctcttct

SEQ ID NO: 483347 - DNA, 33 bp, Homo sapien
cagtaactctcactcaaattttactcattcgtt

SEQ ID NO: 483348 - DNA, 33 bp, Homo sapien
cagtaactctcactcagattttactcattcgtt

SEQ ID NO: 483349 - DNA, 33 bp, Homo sapien
aagccatttcctaacactgacctcttgtaggtg

SEQ ID NO: 483350 - DNA, 33 bp, Homo sapien
aagccatttcctaacattgacctcttgtaggtg

SEQ ID NO: 483351 - DNA, 33 bp, Homo sapien
tgaggtatcttcagagaaaactgcctgataggc

SEQ ID NO: 483352 - DNA, 33 bp, Homo sapien
tgaggtatcttcagaggaaactgcctgataggc

SEQ ID NO: 483353 - DNA, 33 bp, Homo sapien
ccattgttaagaacaacgacattagagtcatga

SEQ ID NO: 483354 - DNA, 33 bp, Homo sapien
ccattgttaagaacaaggacattagagtcatga

SEQ ID NO: 483355 - DNA, 33 bp, Homo sapien
tacagtcttacttgatcatacttactttgtaga

SEQ ID NO: 483356 - DNA, 33 bp, Homo sapien
tacagtcttacttgatgatacttactttgtaga

SEQ ID NO: 483357 - DNA, 33 bp, Homo sapien
cagttcagactgttacaataaaataccatatac

SEQ ID NO: 483358 - DNA, 33 bp, Homo sapien
cagttcagactgttacgataaaataccatatac

SEQ ID NO: 483359 - DNA, 33 bp, Homo sapien
aggacaggtaggtatacactatgctaagctatt

SEQ ID NO: 483360 - DNA, 33 bp, Homo sapien
aggacaggtaggtatagactatgctaagctatt

SEQ ID NO: 483361 - DNA, 33 bp, Homo sapien
gggacacatattagacaatcgtgaaataagatt

SEQ ID NO: 483362 - DNA, 33 bp, Homo sapien
gggacacatattagacgatcgtgaaataagatt

SEQ ID NO: 483363 - DNA, 33 bp, Homo sapien
atccatgagactattcaaaaaaaagcaaggaac

SEQ ID NO: 483364 - DNA, 33 bp, Homo sapien
atccatgagactattccaaaaaaagcaaggaac

SEQ ID NO: 483365 - DNA, 33 bp, Homo sapien
caaaaaatgaaattgaactcctacctaaaaatg

SEQ ID NO: 483366 - DNA, 33 bp, Homo sapien
caaaaaatgaaattgatctcctacctaaaaatg

SEQ ID NO: 483367 - DNA, 33 bp, Homo sapien
tgacaaagtcaactacacatccttcccttggat

SEQ ID NO: 483368 - DNA, 33 bp, Homo sapien
tgacaaagtcaactacgcatccttcccttggat

SEQ ID NO: 483369 - DNA, 33 bp, Homo sapien
aaattgtgggactctgaaagttatttaattatc

SEQ ID NO: 483370 - DNA, 33 bp, Homo sapien
aaattgtgggactctgcaagttatttaattatc

SEQ ID NO: 483371 - DNA, 33 bp, Homo sapien
tgttcccaggtttgcacatgaagaaactgaagg

SEQ ID NO: 483372 - DNA, 33 bp, Homo sapien
tgttcccaggtttgcagatgaagaaactgaagg

SEQ ID NO: 483373 - DNA, 33 bp, Homo sapien
ccctgagggccaaataacataaagatttggtta

SEQ ID NO: 483374 - DNA, 33 bp, Homo sapien
ccctgagggccaaatagcataaagatttggtta

SEQ ID NO: 483375 - DNA, 33 bp, Homo sapien
tcaacaataagaaaacaaacaacatgattagaa

SEQ ID NO: 483376 - DNA, 33 bp, Homo sapien
tcaacaataagaaaacgaacaacatgattagaa

SEQ ID NO: 483377 - DNA, 33 bp, Homo sapien
cgttcctaaaaggtcacggactagttagtggtc

SEQ ID NO: 483378 - DNA, 33 bp, Homo sapien
cgttcctaaaaggtcatggactagttagtggtc

SEQ ID NO: 483379 - DNA, 33 bp, Homo sapien
atgcatttaattttctcacataattttcattgt

SEQ ID NO: 483380 - DNA, 33 bp, Homo sapien
atgcatttaattttctgacataattttcattgt

SEQ ID NO: 483381 - DNA, 33 bp, Homo sapien
ccaaaaatgttctgaacaaagacagcattagct

SEQ ID NO: 483382 - DNA, 33 bp, Homo sapien
ccaaaaatgttctgaagaaagacagcattagct

SEQ ID NO: 483383 - DNA, 33 bp, Homo sapien
cagtgatgcttaacagcctgtgaagattgtgga

SEQ ID NO: 483384 - DNA, 33 bp, Homo sapien
cagtgatgcttaacaggctgtgaagattgtgga

SEQ ID NO: 483385 - DNA, 33 bp, Homo sapien
gcagaggatcggagtgcaagacggcatttccct

SEQ ID NO: 483386 - DNA, 33 bp, Homo sapien
gcagaggatcggagtggaagacggcatttccct

SEQ ID NO: 483387 - DNA, 33 bp, Homo sapien
atttcaagtcctggtcaaatgccgtaaaagctt

SEQ ID NO: 483388 - DNA, 33 bp, Homo sapien
atttcaagtcctggtcgaatgccgtaaaagctt

SEQ ID NO: 483389 - DNA, 33 bp, Homo sapien
cctatcttcaaatacccatttccattagctatt

SEQ ID NO: 483390 - DNA, 33 bp, Homo sapien
cctatcttcaaatacctatttccattagctatt

SEQ ID NO: 483391 - DNA, 33 bp, Homo sapien
gtaagtttggaataaaaagatgggttacagaat

SEQ ID NO: 483392 - DNA, 33 bp, Homo sapien
gtaagtttggaataaatagatgggttacagaat

SEQ ID NO: 483393 - DNA, 33 bp, Homo sapien
cctgtcgaagccagatgaatctatcaaatagtt

SEQ ID NO: 483394 - DNA, 33 bp, Homo sapien
cctgtcgaagccagattaatctatcaaatagtt

SEQ ID NO: 483395 - DNA, 33 bp, Homo sapien
acatgatgagcataagaatcttcacagtaattc

SEQ ID NO: 483396 - DNA, 33 bp, Homo sapien
acatgatgagcataaggatcttcacagtaattc

SEQ ID NO: 483397 - DNA, 33 bp, Homo sapien
gcctataaaatggatacgtacagataaaattat

SEQ ID NO: 483398 - DNA, 33 bp, Homo sapien
gcctataaaatggatatgtacagataaaattat

SEQ ID NO: 483399 - DNA, 33 bp, Homo sapien
cttctagaaccataaacctgacagaaggataaa

SEQ ID NO: 483400 - DNA, 33 bp, Homo sapien
cttctagaaccataaagctgacagaaggataaa

SEQ ID NO: 483401 - DNA, 33 bp, Homo sapien
agagaatcatgtgaatgacatcattgtgtcatg

SEQ ID NO: 483402 - DNA, 33 bp, Homo sapien
agagaatcatgtgaattacatcattgtgtcatg

SEQ ID NO: 483403 - DNA, 33 bp, Homo sapien
gtatagccctgtcatgaatcccggagcccactg

SEQ ID NO: 483404 - DNA, 33 bp, Homo sapien
gtatagccctgtcatggatcccggagcccactg

SEQ ID NO: 483405 - DNA, 33 bp, Homo sapien
ttctcataatctggaacgtgtgtgggtttccat

SEQ ID NO: 483406 - DNA, 33 bp, Homo sapien
ttctcataatctggaatgtgtgtgggtttccat

SEQ ID NO: 483407 - DNA, 33 bp, Homo sapien
agtaaaattgcaacaagggaggtaaacagggtc

SEQ ID NO: 483408 - DNA, 33 bp, Homo sapien
agtaaaattgcaacaatggaggtaaacagggtc

SEQ ID NO: 483409 - DNA, 33 bp, Homo sapien
tatagaattcattcaaatacatgtaagtcccag

SEQ ID NO: 483410 - DNA, 33 bp, Homo sapien
tatagaattcattcaactacatgtaagtcccag

SEQ ID NO: 483411 - DNA, 33 bp, Homo sapien
caaatcttgttgaaaaattacaggtaaaacaca

SEQ ID NO: 483412 - DNA, 33 bp, Homo sapien
caaatcttgttgaaaagttacaggtaaaacaca

SEQ ID NO: 483413 - DNA, 33 bp, Homo sapien
ctttctgctaagtgaaaccagggatatgataga

SEQ ID NO: 483414 - DNA, 33 bp, Homo sapien
ctttctgctaagtgaatccagggatatgataga

SEQ ID NO: 483415 - DNA, 33 bp, Homo sapien
tcacagtgcagtgttacagtgtgggcaaaggca

SEQ ID NO: 483416 - DNA, 33 bp, Homo sapien
tcacagtgcagtgttatagtgtgggcaaaggca

SEQ ID NO: 483417 - DNA, 33 bp, Homo sapien
agataaatttaaatgcacggagccttgaaatct

SEQ ID NO: 483418 - DNA, 33 bp, Homo sapien
agataaatttaaatgctcggagccttgaaatct

SEQ ID NO: 483419 - DNA, 33 bp, Homo sapien
tagtcagcaagaaacactaagtttgagagtcat

SEQ ID NO: 483420 - DNA, 33 bp, Homo sapien
tagtcagcaagaaacattaagtttgagagtcat

SEQ ID NO: 483421 - DNA, 33 bp, Homo sapien
ctagatcccaaattcacagtttaaaatgcttta

SEQ ID NO: 483422 - DNA, 33 bp, Homo sapien
ctagatcccaaattcatagtttaaaatgcttta

SEQ ID NO: 483423 - DNA, 33 bp, Homo sapien
cctgataaagggttgacgtcctcttgcaagttc

SEQ ID NO: 483424 - DNA, 33 bp, Homo sapien
cctgataaagggttgatgtcctcttgcaagttc

SEQ ID NO: 483425 - DNA, 33 bp, Homo sapien
accacatgaggatttacggccaaggactcagcc

SEQ ID NO: 483426 - DNA, 33 bp, Homo sapien
accacatgaggatttatggccaaggactcagcc

SEQ ID NO: 483427 - DNA, 33 bp, Homo sapien
aacttaattctgccaaatcatagtaaaaggtag

SEQ ID NO: 483428 - DNA, 33 bp, Homo sapien
aacttaattctgccaactcatagtaaaaggtag

SEQ ID NO: 483429 - DNA, 33 bp, Homo sapien
agttacagcaccacgaatcatgagtcctctgag

SEQ ID NO: 483430 - DNA, 33 bp, Homo sapien
agttacagcaccacgagtcatgagtcctctgag

SEQ ID NO: 483431 - DNA, 33 bp, Homo sapien
gagtcttgagtgagaagtgagcttggaacagaa

SEQ ID NO: 483432 - DNA, 33 bp, Homo sapien
gagtcttgagtgagaattgagcttggaacagaa

SEQ ID NO: 483433 - DNA, 33 bp, Homo sapien
agtcaggaagtagttacagggaggcaatttcca

SEQ ID NO: 483434 - DNA, 33 bp, Homo sapien
agtcaggaagtagttagagggaggcaatttcca

SEQ ID NO: 483435 - DNA, 33 bp, Homo sapien
tcaacactgtgatcatcaagttgagaccatata

SEQ ID NO: 483436 - DNA, 33 bp, Homo sapien
tcaacactgtgatcatgaagttgagaccatata

SEQ ID NO: 483437 - DNA, 33 bp, Homo sapien
tgctaagaaaatgttgaaagtcactgaacaagg

SEQ ID NO: 483438 - DNA, 33 bp, Homo sapien
tgctaagaaaatgttggaagtcactgaacaagg

SEQ ID NO: 483439 - DNA, 33 bp, Homo sapien
tgctctggcttagtcaccactgatcctctagag

SEQ ID NO: 483440 - DNA, 33 bp, Homo sapien
tgctctggcttagtcatcactgatcctctagag

SEQ ID NO: 483441 - DNA, 33 bp, Homo sapien
gaaacttcaacgagaacagtccccctgccaatc

SEQ ID NO: 483442 - DNA, 33 bp, Homo sapien
gaaacttcaacgagaagagtccccctgccaatc

SEQ ID NO: 483443 - DNA, 33 bp, Homo sapien
gcatttaaataagtcactatctcatttgtcttt

SEQ ID NO: 483444 - DNA, 33 bp, Homo sapien
gcatttaaataagtcattatctcatttgtcttt

SEQ ID NO: 483445 - DNA, 33 bp, Homo sapien
cagagggctgccagagacatgctcacaactctg

SEQ ID NO: 483446 - DNA, 33 bp, Homo sapien
cagagggctgccagagtcatgctcacaactctg

SEQ ID NO: 483447 - DNA, 33 bp, Homo sapien
tctggcagccctctgaaattctaagcaaagaaa

SEQ ID NO: 483448 - DNA, 33 bp, Homo sapien
tctggcagccctctgacattctaagcaaagaaa

SEQ ID NO: 483449 - DNA, 33 bp, Homo sapien
atactctgtggaaacaaatgattcagggctcct

SEQ ID NO: 483450 - DNA, 33 bp, Homo sapien
atactctgtggaaacagatgattcagggctcct

SEQ ID NO: 483451 - DNA, 33 bp, Homo sapien
tagaacttgtcacatacaatatcagttttgcaa

SEQ ID NO: 483452 - DNA, 33 bp, Homo sapien
tagaacttgtcacatagaatatcagttttgcaa

SEQ ID NO: 483453 - DNA, 33 bp, Homo sapien
cctttttgggaaaggaatattttcatgtatttt

SEQ ID NO: 483454 - DNA, 33 bp, Homo sapien
cctttttgggaaaggagtattttcatgtatttt

SEQ ID NO: 483455 - DNA, 33 bp, Homo sapien
ttgcaagtacattttaccactcaatagcttgct

SEQ ID NO: 483456 - DNA, 33 bp, Homo sapien
ttgcaagtacattttatcactcaatagcttgct

SEQ ID NO: 483457 - DNA, 33 bp, Homo sapien
aaagaaagaatcaaggacaacttcaagtttttt

SEQ ID NO: 483458 - DNA, 33 bp, Homo sapien
aaagaaagaatcaagggcaacttcaagtttttt

SEQ ID NO: 483459 - DNA, 33 bp, Homo sapien
cctgattcctgccaaacctataacagctgcaaa

SEQ ID NO: 483460 - DNA, 33 bp, Homo sapien
cctgattcctgccaaagctataacagctgcaaa

SEQ ID NO: 483461 - DNA, 33 bp, Homo sapien
gagaagagggggataacgcaagtgcttgtaagt

SEQ ID NO: 483462 - DNA, 33 bp, Homo sapien
gagaagagggggataatgcaagtgcttgtaagt

SEQ ID NO: 483463 - DNA, 33 bp, Homo sapien
tgcccagccgaagacactgtatactatagagaa

SEQ ID NO: 483464 - DNA, 33 bp, Homo sapien
tgcccagccgaagacattgtatactatagagaa

SEQ ID NO: 483465 - DNA, 33 bp, Homo sapien
agtacttgactgaacaatgtgcagagagattac

SEQ ID NO: 483466 - DNA, 33 bp, Homo sapien
agtacttgactgaacagtgtgcagagagattac

SEQ ID NO: 483467 - DNA, 33 bp, Homo sapien
ggaagtaaaagggaaactgcacatgttgctcat

SEQ ID NO: 483468 - DNA, 33 bp, Homo sapien
ggaagtaaaagggaaattgcacatgttgctcat

SEQ ID NO: 483469 - DNA, 33 bp, Homo sapien
ttcattttccccaaaacccttacatgagagtac

SEQ ID NO: 483470 - DNA, 33 bp, Homo sapien
ttcattttccccaaaatccttacatgagagtac

SEQ ID NO: 483471 - DNA, 33 bp, Homo sapien
attcttgtctagaaataatgcttcagtacatca

SEQ ID NO: 483472 - DNA, 33 bp, Homo sapien
attcttgtctagaaatgatgcttcagtacatca

SEQ ID NO: 483473 - DNA, 33 bp, Homo sapien
atttctcaaagtaaagccattgagccacttact

SEQ ID NO: 483474 - DNA, 33 bp, Homo sapien
atttctcaaagtaaaggcattgagccacttact

SEQ ID NO: 483475 - DNA, 33 bp, Homo sapien
ctcttctaggctgaaacaacccacttcccactt

SEQ ID NO: 483476 - DNA, 33 bp, Homo sapien
ctcttctaggctgaaagaacccacttcccactt

SEQ ID NO: 483477 - DNA, 33 bp, Homo sapien
tgtcaggcatggcctgccaatctgtaatgcagc

SEQ ID NO: 483478 - DNA, 33 bp, Homo sapien
tgtcaggcatggcctgtcaatctgtaatgcagc

SEQ ID NO: 483479 - DNA, 33 bp, Homo sapien
aatttaaaaattgtaaacatcaatcccaatcat

SEQ ID NO: 483480 - DNA, 33 bp, Homo sapien
aatttaaaaattgtaaccatcaatcccaatcat

SEQ ID NO: 483481 - DNA, 33 bp, Homo sapien
gaccaaaattgacccaataagattaaatggaag

SEQ ID NO: 483482 - DNA, 33 bp, Homo sapien
gaccaaaattgacccagtaagattaaatggaag

SEQ ID NO: 483483 - DNA, 33 bp, Homo sapien
gataggtgccaaaagacattgggaaaacttgtg

SEQ ID NO: 483484 - DNA, 33 bp, Homo sapien
gataggtgccaaaagagattgggaaaacttgtg

SEQ ID NO: 483485 - DNA, 33 bp, Homo sapien
agcccagaagctaaagcactttgtgactctgag

SEQ ID NO: 483486 - DNA, 33 bp, Homo sapien
agcccagaagctaaaggactttgtgactctgag

SEQ ID NO: 483487 - DNA, 33 bp, Homo sapien
tgtagattttgtgtcacgttgaaaactaaaatt

SEQ ID NO: 483488 - DNA, 33 bp, Homo sapien
tgtagattttgtgtcatgttgaaaactaaaatt

SEQ ID NO: 483489 - DNA, 33 bp, Homo sapien
ggtagagcatgacctaccaaagtcacctacaga

SEQ ID NO: 483490 - DNA, 33 bp, Homo sapien
ggtagagcatgacctatcaaagtcacctacaga

SEQ ID NO: 483491 - DNA, 33 bp, Homo sapien
agtcagttaaaatccggattcctagctcttacc

SEQ ID NO: 483492 - DNA, 33 bp, Homo sapien
agtcagttaaaatccgtattcctagctcttacc

SEQ ID NO: 483493 - DNA, 33 bp, Homo sapien
tttcatttttcataaactgtgagaggactgagg

SEQ ID NO: 483494 - DNA, 33 bp, Homo sapien
tttcatttttcataaattgtgagaggactgagg

SEQ ID NO: 483495 - DNA, 33 bp, Homo sapien
tgtgacagatgtaaagcagaattggagtctagg

SEQ ID NO: 483496 - DNA, 33 bp, Homo sapien
tgtgacagatgtaaaggagaattggagtctagg

SEQ ID NO: 483497 - DNA, 33 bp, Homo sapien
ttcattttgattttccaatagtgtttcgagtct

SEQ ID NO: 483498 - DNA, 33 bp, Homo sapien
ttcattttgattttcctatagtgtttcgagtct

SEQ ID NO: 483499 - DNA, 33 bp, Homo sapien
catattggtatcagataaagtcgatttcagaac

SEQ ID NO: 483500 - DNA, 33 bp, Homo sapien
catattggtatcagattaagtcgatttcagaac

SEQ ID NO: 483501 - DNA, 33 bp, Homo sapien
catgttctatctttaaacctttcagtggcttct

SEQ ID NO: 483502 - DNA, 33 bp, Homo sapien
catgttctatctttaagcctttcagtggcttct

SEQ ID NO: 483503 - DNA, 33 bp, Homo sapien
ctcaaactagtgcatgcagaacgactagcccac

SEQ ID NO: 483504 - DNA, 33 bp, Homo sapien
ctcaaactagtgcatggagaacgactagcccac

SEQ ID NO: 483505 - DNA, 33 bp, Homo sapien
ttgggtccataaccctgactcatctcacactct

SEQ ID NO: 483506 - DNA, 33 bp, Homo sapien
ttgggtccataacccttactcatctcacactct

SEQ ID NO: 483507 - DNA, 33 bp, Homo sapien
taaagcgcttagaagacggtcttgcacacagca

SEQ ID NO: 483508 - DNA, 33 bp, Homo sapien
taaagcgcttagaagagggtcttgcacacagca

SEQ ID NO: 483509 - DNA, 33 bp, Homo sapien
tcactttgggagctaggacaagaatgtaatgac

SEQ ID NO: 483510 - DNA, 33 bp, Homo sapien
tcactttgggagctagtacaagaatgtaatgac

SEQ ID NO: 483511 - DNA, 33 bp, Homo sapien
cttcttccagaaaagacgagatggggctcccca

SEQ ID NO: 483512 - DNA, 33 bp, Homo sapien
cttcttccagaaaagatgagatggggctcccca

SEQ ID NO: 483513 - DNA, 33 bp, Homo sapien
accccctcatgaaatcactaaggaagatattta

SEQ ID NO: 483514 - DNA, 33 bp, Homo sapien
accccctcatgaaatcgctaaggaagatattta

SEQ ID NO: 483515 - DNA, 33 bp, Homo sapien
tgaatttatctttcaacgcctccatcccaaagc

SEQ ID NO: 483516 - DNA, 33 bp, Homo sapien
tgaatttatctttcaatgcctccatcccaaagc

SEQ ID NO: 483517 - DNA, 33 bp, Homo sapien
tacacaggaccttacaaattgtttacttaatgt

SEQ ID NO: 483518 - DNA, 33 bp, Homo sapien
tacacaggaccttacagattgtttacttaatgt

SEQ ID NO: 483519 - DNA, 33 bp, Homo sapien
ggattaaaatgtgattcaaatttgtcaatataa

SEQ ID NO: 483520 - DNA, 33 bp, Homo sapien
ggattaaaatgtgattgaaatttgtcaatataa

SEQ ID NO: 483521 - DNA, 33 bp, Homo sapien
tgcatccaagggctgacgaatatttgcaacacc

SEQ ID NO: 483522 - DNA, 33 bp, Homo sapien
tgcatccaagggctgatgaatatttgcaacacc

SEQ ID NO: 483523 - DNA, 33 bp, Homo sapien
ggtagaggaatgccccacggccagcagtggttc

SEQ ID NO: 483524 - DNA, 33 bp, Homo sapien
ggtagaggaatgccccccggccagcagtggttc

SEQ ID NO: 483525 - DNA, 33 bp, Homo sapien
gacagatgacccccgacattagaagagatgcca

SEQ ID NO: 483526 - DNA, 33 bp, Homo sapien
gacagatgacccccgagattagaagagatgcca

SEQ ID NO: 483527 - DNA, 33 bp, Homo sapien
tccccaacagtcagaaagaaggctgcactgtcc

SEQ ID NO: 483528 - DNA, 33 bp, Homo sapien
tccccaacagtcagaaggaaggctgcactgtcc

SEQ ID NO: 483529 - DNA, 33 bp, Homo sapien
ggttcaagcaattctcagaactccgggtgtggt

SEQ ID NO: 483530 - DNA, 33 bp, Homo sapien
ggttcaagcaattctcggaactccgggtgtggt

SEQ ID NO: 483531 - DNA, 33 bp, Homo sapien
taataacaacaacaaaaattcggaagggtaagt

SEQ ID NO: 483532 - DNA, 33 bp, Homo sapien
taataacaacaacaaatattcggaagggtaagt

SEQ ID NO: 483533 - DNA, 33 bp, Homo sapien
aggcatactgggaatcaaaaaagtgaggttagc

SEQ ID NO: 483534 - DNA, 33 bp, Homo sapien
aggcatactgggaatccaaaaagtgaggttagc

SEQ ID NO: 483535 - DNA, 33 bp, Homo sapien
gcatagaaagctggaggcattttagtatagaga

SEQ ID NO: 483536 - DNA, 33 bp, Homo sapien
gcatagaaagctggagtcattttagtatagaga

SEQ ID NO: 483537 - DNA, 33 bp, Homo sapien
caacttacttgacttacaggagtgaaaatccta

SEQ ID NO: 483538 - DNA, 33 bp, Homo sapien
caacttacttgacttataggagtgaaaatccta

SEQ ID NO: 483539 - DNA, 33 bp, Homo sapien
tcatatttatgtttcacgtcattttagctgctt

SEQ ID NO: 483540 - DNA, 33 bp, Homo sapien
tcatatttatgtttcaggtcattttagctgctt

SEQ ID NO: 483541 - DNA, 33 bp, Homo sapien
cgtctttgcgctctataaaaacaaggttaaatt

SEQ ID NO: 483542 - DNA, 33 bp, Homo sapien
cgtctttgcgctctatgaaaacaaggttaaatt

SEQ ID NO: 483543 - DNA, 33 bp, Homo sapien
aggtcacacaactagaatatgccagaactggga

SEQ ID NO: 483544 - DNA, 33 bp, Homo sapien
aggtcacacaactagagtatgccagaactggga

SEQ ID NO: 483545 - DNA, 33 bp, Homo sapien
aagaggattttcacctcaagaatttaaaataaa

SEQ ID NO: 483546 - DNA, 33 bp, Homo sapien
aagaggattttcacctgaagaatttaaaataaa

SEQ ID NO: 483547 - DNA, 33 bp, Homo sapien
aaggatagaatgtgaaggtccaacctacatcta

SEQ ID NO: 483548 - DNA, 33 bp, Homo sapien
aaggatagaatgtgaatgtccaacctacatcta

SEQ ID NO: 483549 - DNA, 33 bp, Homo sapien
cttccaatgtgtccacaagtaacctgttcttta

SEQ ID NO: 483550 - DNA, 33 bp, Homo sapien
cttccaatgtgtccacgagtaacctgttcttta

SEQ ID NO: 483551 - DNA, 33 bp, Homo sapien
tgctgtgtgtctgctaaggctgtttagagaagc

SEQ ID NO: 483552 - DNA, 33 bp, Homo sapien
tgctgtgtgtctgctacggctgtttagagaagc

SEQ ID NO: 483553 - DNA, 33 bp, Homo sapien
gccaaccccctgctcaccattatttgtgctcat

SEQ ID NO: 483554 - DNA, 33 bp, Homo sapien
gccaaccccctgctcagcattatttgtgctcat

SEQ ID NO: 483555 - DNA, 33 bp, Homo sapien
gtaagcacagtaagaaagagtttacagcttcct

SEQ ID NO: 483556 - DNA, 33 bp, Homo sapien
gtaagcacagtaagaacgagtttacagcttcct

SEQ ID NO: 483557 - DNA, 33 bp, Homo sapien
cctccaggcaggccaacgtgcgaccagctgaga

SEQ ID NO: 483558 - DNA, 33 bp, Homo sapien
cctccaggcaggccaatgtgcgaccagctgaga

SEQ ID NO: 483559 - DNA, 33 bp, Homo sapien
ctatcaccatcaaacaagatttttacccaaagg

SEQ ID NO: 483560 - DNA, 33 bp, Homo sapien
ctatcaccatcaaacaggatttttacccaaagg

SEQ ID NO: 483561 - DNA, 33 bp, Homo sapien
agcctcttcatctgcaaagtggcagccatggag

SEQ ID NO: 483562 - DNA, 33 bp, Homo sapien
agcctcttcatctgcacagtggcagccatggag

SEQ ID NO: 483563 - DNA, 33 bp, Homo sapien
agatgcaattgtgtacaaagaaaagtataaata

SEQ ID NO: 483564 - DNA, 33 bp, Homo sapien
agatgcaattgtgtaccaagaaaagtataaata

SEQ ID NO: 483565 - DNA, 33 bp, Homo sapien
ggtctggctttcttcaaacgttgtatggctctt

SEQ ID NO: 483566 - DNA, 33 bp, Homo sapien
ggtctggctttcttcagacgttgtatggctctt

SEQ ID NO: 483567 - DNA, 33 bp, Homo sapien
gaaactgagtctcaaaaaaattaactagctcaa

SEQ ID NO: 483568 - DNA, 33 bp, Homo sapien
gaaactgagtctcaaagaaattaactagctcaa

SEQ ID NO: 483569 - DNA, 33 bp, Homo sapien
tccacagtcatttccaaacctgaacttagtggt

SEQ ID NO: 483570 - DNA, 33 bp, Homo sapien
tccacagtcatttccagacctgaacttagtggt

SEQ ID NO: 483571 - DNA, 33 bp, Homo sapien
acaagcagctttttaacaggttttcaggtgatt

SEQ ID NO: 483572 - DNA, 33 bp, Homo sapien
acaagcagctttttaataggttttcaggtgatt

SEQ ID NO: 483573 - DNA, 33 bp, Homo sapien
tccagaaaagaagctacgatgaaagaattgggg

SEQ ID NO: 483574 - DNA, 33 bp, Homo sapien
tccagaaaagaagctatgatgaaagaattgggg

SEQ ID NO: 483575 - DNA, 33 bp, Homo sapien
aagcaaaccaaagccaagataaaagggattatg

SEQ ID NO: 483576 - DNA, 33 bp, Homo sapien
aagcaaaccaaagccaggataaaagggattatg

SEQ ID NO: 483577 - DNA, 33 bp, Homo sapien
ggtttcagcttccacactaactaatcagcttgc

SEQ ID NO: 483578 - DNA, 33 bp, Homo sapien
ggtttcagcttccacattaactaatcagcttgc

SEQ ID NO: 483579 - DNA, 33 bp, Homo sapien
ctcttctaggatgtgagctaggttttcccatag

SEQ ID NO: 483580 - DNA, 33 bp, Homo sapien
ctcttctaggatgtgatctaggttttcccatag

SEQ ID NO: 483581 - DNA, 33 bp, Homo sapien
actcatgactggcagaacgaggattcaaacact

SEQ ID NO: 483582 - DNA, 33 bp, Homo sapien
actcatgactggcagagcgaggattcaaacact

SEQ ID NO: 483583 - DNA, 33 bp, Homo sapien
caggtcaagcctgttccagaagaaacaactata

SEQ ID NO: 483584 - DNA, 33 bp, Homo sapien
caggtcaagcctgttctagaagaaacaactata

SEQ ID NO: 483585 - DNA, 33 bp, Homo sapien
agtcagtaaaaaggagacagttctatacataca

SEQ ID NO: 483586 - DNA, 33 bp, Homo sapien
agtcagtaaaaaggaggcagttctatacataca

SEQ ID NO: 483587 - DNA, 33 bp, Homo sapien
tgcaggctcaagacccagagagagctgatgttt

SEQ ID NO: 483588 - DNA, 33 bp, Homo sapien
tgcaggctcaagacccggagagagctgatgttt

SEQ ID NO: 483589 - DNA, 33 bp, Homo sapien
ttcacagggttgttgaacagattatatgaatta

SEQ ID NO: 483590 - DNA, 33 bp, Homo sapien
ttcacagggttgttgagcagattatatgaatta

SEQ ID NO: 483591 - DNA, 33 bp, Homo sapien
gcactttgaagaagtacctgagaatggcaataa

SEQ ID NO: 483592 - DNA, 33 bp, Homo sapien
gcactttgaagaagtagctgagaatggcaataa

SEQ ID NO: 483593 - DNA, 33 bp, Homo sapien
agcaggtgctcagtaacgttcactgcatgaact

SEQ ID NO: 483594 - DNA, 33 bp, Homo sapien
agcaggtgctcagtaatgttcactgcatgaact

SEQ ID NO: 483595 - DNA, 33 bp, Homo sapien
gttggagggaagccaacgaccttgtgagaagag

SEQ ID NO: 483596 - DNA, 33 bp, Homo sapien
gttggagggaagccaatgaccttgtgagaagag

SEQ ID NO: 483597 - DNA, 33 bp, Homo sapien
caatgtaaaaatggtacattcagaggtgttggc

SEQ ID NO: 483598 - DNA, 33 bp, Homo sapien
caatgtaaaaatggtatattcagaggtgttggc

SEQ ID NO: 483599 - DNA, 33 bp, Homo sapien
gttctgttgactgcaactggcaggagatggacc

SEQ ID NO: 483600 - DNA, 33 bp, Homo sapien
gttctgttgactgcaattggcaggagatggacc

SEQ ID NO: 483601 - DNA, 33 bp, Homo sapien
gtgtattatacaaaaaccagacctgtgagcctg

SEQ ID NO: 483602 - DNA, 33 bp, Homo sapien
gtgtattatacaaaaagcagacctgtgagcctg

SEQ ID NO: 483603 - DNA, 33 bp, Homo sapien
tggaagtccgtacttgccattttctcttaagtt

SEQ ID NO: 483604 - DNA, 33 bp, Homo sapien
tggaagtccgtacttggcattttctcttaagtt

SEQ ID NO: 483605 - DNA, 33 bp, Homo sapien
ctagaaaattcacgggaagcctgttgtgttcca

SEQ ID NO: 483606 - DNA, 33 bp, Homo sapien
ctagaaaattcacggggagcctgttgtgttcca

SEQ ID NO: 483607 - DNA, 33 bp, Homo sapien
gagaccttgccaattgcaggaagttgggaaata

SEQ ID NO: 483608 - DNA, 33 bp, Homo sapien
gagaccttgccaattgtaggaagttgggaaata

SEQ ID NO: 483609 - DNA, 33 bp, Homo sapien
tgaagttgccgaagaccacagataggtgagaga

SEQ ID NO: 483610 - DNA, 33 bp, Homo sapien
tgaagttgccgaagactacagataggtgagaga

SEQ ID NO: 483611 - DNA, 33 bp, Homo sapien
gagatgagctcagagacgtaaaggcagcagtga

SEQ ID NO: 483612 - DNA, 33 bp, Homo sapien
gagatgagctcagagaggtaaaggcagcagtga

SEQ ID NO: 483613 - DNA, 33 bp, Homo sapien
aacaaaatgccttcaacgcaatgatctcatctg

SEQ ID NO: 483614 - DNA, 33 bp, Homo sapien
aacaaaatgccttcaatgcaatgatctcatctg

SEQ ID NO: 483615 - DNA, 33 bp, Homo sapien
ctgcatggacacttaacccatcgcttctaatta

SEQ ID NO: 483616 - DNA, 33 bp, Homo sapien
ctgcatggacacttaatccatcgcttctaatta

SEQ ID NO: 483617 - DNA, 33 bp, Homo sapien
accaccccatcctcagaatagcctttctgcctc

SEQ ID NO: 483618 - DNA, 33 bp, Homo sapien
accaccccatcctcagtatagcctttctgcctc

SEQ ID NO: 483619 - DNA, 33 bp, Homo sapien
accatgcccggcctcacgtctcatttctaaggg

SEQ ID NO: 483620 - DNA, 33 bp, Homo sapien
accatgcccggcctcaggtctcatttctaaggg

SEQ ID NO: 483621 - DNA, 33 bp, Homo sapien
cttggattgtgagaaacttaagtgacaaaccaa

SEQ ID NO: 483622 - DNA, 33 bp, Homo sapien
cttggattgtgagaaagttaagtgacaaaccaa

SEQ ID NO: 483623 - DNA, 33 bp, Homo sapien
aagaggtggttcacacagaaaaagggcttcaga

SEQ ID NO: 483624 - DNA, 33 bp, Homo sapien
aagaggtggttcacacggaaaaagggcttcaga

SEQ ID NO: 483625 - DNA, 33 bp, Homo sapien
agctagacaatctgaacgacagaataagcttcc

SEQ ID NO: 483626 - DNA, 33 bp, Homo sapien
agctagacaatctgaatgacagaataagcttcc

SEQ ID NO: 483627 - DNA, 33 bp, Homo sapien
ggaccacatcaagacacgctcagagccccgacc

SEQ ID NO: 483628 - DNA, 33 bp, Homo sapien
ggaccacatcaagacatgctcagagccccgacc

SEQ ID NO: 483629 - DNA, 33 bp, Homo sapien
cttgcaggccggtctccagtatccatgagggac

SEQ ID NO: 483630 - DNA, 33 bp, Homo sapien
cttgcaggccggtctctagtatccatgagggac

SEQ ID NO: 483631 - DNA, 33 bp, Homo sapien
tggattcaggaggtaaacccaggctgtcttggg

SEQ ID NO: 483632 - DNA, 33 bp, Homo sapien
tggattcaggaggtaaccccaggctgtcttggg

SEQ ID NO: 483633 - DNA, 33 bp, Homo sapien
agataaaagaatagaaataaccagctcccagag

SEQ ID NO: 483634 - DNA, 33 bp, Homo sapien
agataaaagaatagaagtaaccagctcccagag

SEQ ID NO: 483635 - DNA, 33 bp, Homo sapien
ccaccctgatgatcaactgggtctcatctctga

SEQ ID NO: 483636 - DNA, 33 bp, Homo sapien
ccaccctgatgatcaattgggtctcatctctga

SEQ ID NO: 483637 - DNA, 33 bp, Homo sapien
atgatgtgttggaagcaatgtcgttggcagatg

SEQ ID NO: 483638 - DNA, 33 bp, Homo sapien
atgatgtgttggaagcgatgtcgttggcagatg

SEQ ID NO: 483639 - DNA, 33 bp, Homo sapien
atctggtgcccatacacgcttcgaggtgggaag

SEQ ID NO: 483640 - DNA, 33 bp, Homo sapien
atctggtgcccatacatgcttcgaggtgggaag

SEQ ID NO: 483641 - DNA, 33 bp, Homo sapien
aaggtctgatatgttcactcctaaccacccagc

SEQ ID NO: 483642 - DNA, 33 bp, Homo sapien
aaggtctgatatgttcgctcctaaccacccagc

SEQ ID NO: 483643 - DNA, 33 bp, Homo sapien
cgcctgggctggcttccctatctctgcctcgga

SEQ ID NO: 483644 - DNA, 33 bp, Homo sapien
cgcctgggctggcttctctatctctgcctcgga

SEQ ID NO: 483645 - DNA, 33 bp, Homo sapien
agggcacatagcttggacaggcagtacaagata

SEQ ID NO: 483646 - DNA, 33 bp, Homo sapien
agggcacatagcttggtcaggcagtacaagata

SEQ ID NO: 483647 - DNA, 33 bp, Homo sapien
ctcatttttacagaccagcttcttatgtatgaa

SEQ ID NO: 483648 - DNA, 33 bp, Homo sapien
ctcatttttacagaccggcttcttatgtatgaa

SEQ ID NO: 483649 - DNA, 33 bp, Homo sapien
gggacccattgcagcaagaagagtgtaagctag

SEQ ID NO: 483650 - DNA, 33 bp, Homo sapien
gggacccattgcagcaggaagagtgtaagctag

SEQ ID NO: 483651 - DNA, 33 bp, Homo sapien
tgcaggattgggcccaaaagtgtgacttcattc

SEQ ID NO: 483652 - DNA, 33 bp, Homo sapien
tgcaggattgggcccagaagtgtgacttcattc

SEQ ID NO: 483653 - DNA, 33 bp, Homo sapien
tgcagaaagtcccttaaagcatgcattctcaac

SEQ ID NO: 483654 - DNA, 33 bp, Homo sapien
tgcagaaagtcccttacagcatgcattctcaac

SEQ ID NO: 483655 - DNA, 33 bp, Homo sapien
atattgtaagtcctcaatcctacaatatgagta

SEQ ID NO: 483656 - DNA, 33 bp, Homo sapien
atattgtaagtcctcagtcctacaatatgagta

SEQ ID NO: 483657 - DNA, 33 bp, Homo sapien
caggcaattgccagcacagccaagaatgactat

SEQ ID NO: 483658 - DNA, 33 bp, Homo sapien
caggcaattgccagcagagccaagaatgactat

SEQ ID NO: 483659 - DNA, 33 bp, Homo sapien
ggggagctggctctagcatttctcaaaaacaga

SEQ ID NO: 483660 - DNA, 33 bp, Homo sapien
ggggagctggctctagtatttctcaaaaacaga

SEQ ID NO: 483661 - DNA, 33 bp, Homo sapien
caagcagtaccttcacagtaagtcctgtgcagg

SEQ ID NO: 483662 - DNA, 33 bp, Homo sapien
caagcagtaccttcacggtaagtcctgtgcagg

SEQ ID NO: 483663 - DNA, 33 bp, Homo sapien
taaacattgttaaaaacttcaagatggtggcca

SEQ ID NO: 483664 - DNA, 33 bp, Homo sapien
taaacattgttaaaaatttcaagatggtggcca

SEQ ID NO: 483665 - DNA, 33 bp, Homo sapien
gtgacttagtcttggaggtacaaggatattgtt

SEQ ID NO: 483666 - DNA, 33 bp, Homo sapien
gtgacttagtcttggatgtacaaggatattgtt

SEQ ID NO: 483667 - DNA, 33 bp, Homo sapien
caataaataactgagacgtgcttcaaggagtgg

SEQ ID NO: 483668 - DNA, 33 bp, Homo sapien
caataaataactgagatgtgcttcaaggagtgg

SEQ ID NO: 483669 - DNA, 33 bp, Homo sapien
ccctggttgcaagataagtgcctaagctattct

SEQ ID NO: 483670 - DNA, 33 bp, Homo sapien
ccctggttgcaagataggtgcctaagctattct

SEQ ID NO: 483671 - DNA, 33 bp, Homo sapien
cattctgaactctggccaggatcttgcctctta

SEQ ID NO: 483672 - DNA, 33 bp, Homo sapien
cattctgaactctggctaggatcttgcctctta

SEQ ID NO: 483673 - DNA, 33 bp, Homo sapien
atattctaaagaatcaaactgggtgcagcagct

SEQ ID NO: 483674 - DNA, 33 bp, Homo sapien
atattctaaagaatcagactgggtgcagcagct

SEQ ID NO: 483675 - DNA, 33 bp, Homo sapien
gaaataggttgaagaaaatggagtgggatgaga

SEQ ID NO: 483676 - DNA, 33 bp, Homo sapien
gaaataggttgaagaagatggagtgggatgaga

SEQ ID NO: 483677 - DNA, 33 bp, Homo sapien
ttctcctgagtttacccgaaacagattagcatt

SEQ ID NO: 483678 - DNA, 33 bp, Homo sapien
ttctcctgagtttacctgaaacagattagcatt

SEQ ID NO: 483679 - DNA, 33 bp, Homo sapien
cagttcctaaagctgacaggaagaataaggctg

SEQ ID NO: 483680 - DNA, 33 bp, Homo sapien
cagttcctaaagctgataggaagaataaggctg

SEQ ID NO: 483681 - DNA, 33 bp, Homo sapien
gcttacaagaactccacgaaaaatgtgagctgt

SEQ ID NO: 483682 - DNA, 33 bp, Homo sapien
gcttacaagaactccatgaaaaatgtgagctgt

SEQ ID NO: 483683 - DNA, 33 bp, Homo sapien
taacaaatgcctttacaatcctttcccaatctc

SEQ ID NO: 483684 - DNA, 33 bp, Homo sapien
taacaaatgcctttacgatcctttcccaatctc

SEQ ID NO: 483685 - DNA, 33 bp, Homo sapien
gtacttatttgcttaacgtctatctcctttact

SEQ ID NO: 483686 - DNA, 33 bp, Homo sapien
gtacttatttgcttaatgtctatctcctttact

SEQ ID NO: 483687 - DNA, 33 bp, Homo sapien
tagttgttttttattacagaaagggcggtgagt

SEQ ID NO: 483688 - DNA, 33 bp, Homo sapien
tagttgttttttattagagaaagggcggtgagt

SEQ ID NO: 483689 - DNA, 33 bp, Homo sapien
ctgaatggttgtgtccacccaaaatttacgtgt

SEQ ID NO: 483690 - DNA, 33 bp, Homo sapien
ctgaatggttgtgtcctcccaaaatttacgtgt

SEQ ID NO: 483691 - DNA, 33 bp, Homo sapien
tactaaatgctccaaacatgcaagaatgtctct

SEQ ID NO: 483692 - DNA, 33 bp, Homo sapien
tactaaatgctccaaatatgcaagaatgtctct

SEQ ID NO: 483693 - DNA, 33 bp, Homo sapien
aagtgctgctggaagcgcggagaaaggaccgag

SEQ ID NO: 483694 - DNA, 33 bp, Homo sapien
aagtgctgctggaagctcggagaaaggaccgag

SEQ ID NO: 483695 - DNA, 33 bp, Homo sapien
cacgtagtgatcagggaaagtcgaaagtgcaga

SEQ ID NO: 483696 - DNA, 33 bp, Homo sapien
cacgtagtgatcaggggaagtcgaaagtgcaga

SEQ ID NO: 483697 - DNA, 33 bp, Homo sapien
tagctggactggaaaccacaaatcacaaccagg

SEQ ID NO: 483698 - DNA, 33 bp, Homo sapien
tagctggactggaaacgacaaatcacaaccagg

SEQ ID NO: 483699 - DNA, 33 bp, Homo sapien
agtaaatagggcagacactgctgatggaagtag

SEQ ID NO: 483700 - DNA, 33 bp, Homo sapien
agtaaatagggcagacgctgctgatggaagtag

SEQ ID NO: 483701 - DNA, 33 bp, Homo sapien
tcgcactgccttttgccaaaacggactcaaacc

SEQ ID NO: 483702 - DNA, 33 bp, Homo sapien
tcgcactgccttttgcgaaaacggactcaaacc

SEQ ID NO: 483703 - DNA, 33 bp, Homo sapien
ctggtttgcacaaatacgaatgcctttctcatg

SEQ ID NO: 483704 - DNA, 33 bp, Homo sapien
ctggtttgcacaaatatgaatgcctttctcatg

SEQ ID NO: 483705 - DNA, 33 bp, Homo sapien
aacagtgtattcagggaacaaaagagaaatgca

SEQ ID NO: 483706 - DNA, 33 bp, Homo sapien
aacagtgtattcaggggacaaaagagaaatgca

SEQ ID NO: 483707 - DNA, 33 bp, Homo sapien
agatagtaccttgaaaatagaaaccattcagca

SEQ ID NO: 483708 - DNA, 33 bp, Homo sapien
agatagtaccttgaaagtagaaaccattcagca

SEQ ID NO: 483709 - DNA, 33 bp, Homo sapien
ccaatgtacatttccactaatcaggcttgtctg

SEQ ID NO: 483710 - DNA, 33 bp, Homo sapien
ccaatgtacatttccagtaatcaggcttgtctg

SEQ ID NO: 483711 - DNA, 33 bp, Homo sapien
acaataattactctaccacaagcgttattattt

SEQ ID NO: 483712 - DNA, 33 bp, Homo sapien
acaataattactctacgacaagcgttattattt

SEQ ID NO: 483713 - DNA, 33 bp, Homo sapien
ccaaccaagcagggaaagagcggttcaaaaaag

SEQ ID NO: 483714 - DNA, 33 bp, Homo sapien
ccaaccaagcagggaaggagcggttcaaaaaag

SEQ ID NO: 483715 - DNA, 33 bp, Homo sapien
aaaaagagtcacagcaaccttactgagcaaaag

SEQ ID NO: 483716 - DNA, 33 bp, Homo sapien
aaaaagagtcacagcacccttactgagcaaaag

SEQ ID NO: 483717 - DNA, 33 bp, Homo sapien
aagctctggcagggaactcattacaacaaagca

SEQ ID NO: 483718 - DNA, 33 bp, Homo sapien
aagctctggcagggaagtcattacaacaaagca

SEQ ID NO: 483719 - DNA, 33 bp, Homo sapien
taacataaacaacttacaggtacactcagatgg

SEQ ID NO: 483720 - DNA, 33 bp, Homo sapien
taacataaacaacttataggtacactcagatgg

SEQ ID NO: 483721 - DNA, 33 bp, Homo sapien
tggaaaggtggtggaacgttgtaccctgaagag

SEQ ID NO: 483722 - DNA, 33 bp, Homo sapien
tggaaaggtggtggaaggttgtaccctgaagag

SEQ ID NO: 483723 - DNA, 33 bp, Homo sapien
attgatgattcctgtcgaaacaaatctttatta

SEQ ID NO: 483724 - DNA, 33 bp, Homo sapien
attgatgattcctgtctaaacaaatctttatta

SEQ ID NO: 483725 - DNA, 33 bp, Homo sapien
cttgaactcaatctagaagagacatgataaagg

SEQ ID NO: 483726 - DNA, 33 bp, Homo sapien
cttgaactcaatctaggagagacatgataaagg

SEQ ID NO: 483727 - DNA, 33 bp, Homo sapien
tttccactgtcagtctaaacaatcacacagcag

SEQ ID NO: 483728 - DNA, 33 bp, Homo sapien
tttccactgtcagtctgaacaatcacacagcag

SEQ ID NO: 483729 - DNA, 33 bp, Homo sapien
gaccctgtctcaaaaaaaagttttacatctacc

SEQ ID NO: 483730 - DNA, 33 bp, Homo sapien
gaccctgtctcaaaaagaagttttacatctacc

SEQ ID NO: 483731 - DNA, 33 bp, Homo sapien
gagtaatattctgtcacatgggtataaccgtgt

SEQ ID NO: 483732 - DNA, 33 bp, Homo sapien
gagtaatattctgtcatatgggtataaccgtgt

SEQ ID NO: 483733 - DNA, 33 bp, Homo sapien
acctaagagaaataaagacagatgaccacataa

SEQ ID NO: 483734 - DNA, 33 bp, Homo sapien
acctaagagaaataaatacagatgaccacataa

SEQ ID NO: 483735 - DNA, 33 bp, Homo sapien
cactcacacataatggaacatctacgtgattaa

SEQ ID NO: 483736 - DNA, 33 bp, Homo sapien
cactcacacataatggtacatctacgtgattaa

SEQ ID NO: 483737 - DNA, 33 bp, Homo sapien
gcaatgtaacagagcacagtagttatcaccaga

SEQ ID NO: 483738 - DNA, 33 bp, Homo sapien
gcaatgtaacagagcatagtagttatcaccaga

SEQ ID NO: 483739 - DNA, 33 bp, Homo sapien
tgtccctgctttcaaagagtgtatcacctagtg

SEQ ID NO: 483740 - DNA, 33 bp, Homo sapien
tgtccctgctttcaaatagtgtatcacctagtg

SEQ ID NO: 483741 - DNA, 33 bp, Homo sapien
gtagagatgtatagcaaacaatgtcatgtagat

SEQ ID NO: 483742 - DNA, 33 bp, Homo sapien
gtagagatgtatagcagacaatgtcatgtagat

SEQ ID NO: 483743 - DNA, 33 bp, Homo sapien
tttgcatggcatattcacaacacattttctagt

SEQ ID NO: 483744 - DNA, 33 bp, Homo sapien
tttgcatggcatattcgcaacacattttctagt

SEQ ID NO: 483745 - DNA, 33 bp, Homo sapien
cctttttcctcaaaataagcagatttctttcca

SEQ ID NO: 483746 - DNA, 33 bp, Homo sapien
cctttttcctcaaaatgagcagatttctttcca

SEQ ID NO: 483747 - DNA, 33 bp, Homo sapien
taaatgaatgaatgaacgtataaaatgtatatc

SEQ ID NO: 483748 - DNA, 33 bp, Homo sapien
taaatgaatgaatgaatgtataaaatgtatatc

SEQ ID NO: 483749 - DNA, 33 bp, Homo sapien
agattttaggactaaacgtgcctggagccaaaa

SEQ ID NO: 483750 - DNA, 33 bp, Homo sapien
agattttaggactaaatgtgcctggagccaaaa

SEQ ID NO: 483751 - DNA, 33 bp, Homo sapien
tcttatactaattacactagcaagccaacttac

SEQ ID NO: 483752 - DNA, 33 bp, Homo sapien
tcttatactaattacagtagcaagccaacttac

SEQ ID NO: 483753 - DNA, 33 bp, Homo sapien
tcaataatgaagctgacgctaacttaaatataa

SEQ ID NO: 483754 - DNA, 33 bp, Homo sapien
tcaataatgaagctgatgctaacttaaatataa

SEQ ID NO: 483755 - DNA, 33 bp, Homo sapien
agatcagtaacaatacaaagtctggtggtccag

SEQ ID NO: 483756 - DNA, 33 bp, Homo sapien
agatcagtaacaatacgaagtctggtggtccag

SEQ ID NO: 483757 - DNA, 33 bp, Homo sapien
gtgattgtgaaatggtcacaaaaggagctaaag

SEQ ID NO: 483758 - DNA, 33 bp, Homo sapien
gtgattgtgaaatggttacaaaaggagctaaag

SEQ ID NO: 483759 - DNA, 33 bp, Homo sapien
aggtgatacgataatacaaggacatcaaattta

SEQ ID NO: 483760 - DNA, 33 bp, Homo sapien
aggtgatacgataatataaggacatcaaattta

SEQ ID NO: 483761 - DNA, 33 bp, Homo sapien
gatatgggggcactacagaagttattgggacaa

SEQ ID NO: 483762 - DNA, 33 bp, Homo sapien
gatatgggggcactacggaagttattgggacaa

SEQ ID NO: 483763 - DNA, 33 bp, Homo sapien
gccacgtgctttttccacttggtcctcattccc

SEQ ID NO: 483764 - DNA, 33 bp, Homo sapien
gccacgtgctttttccgcttggtcctcattccc

SEQ ID NO: 483765 - DNA, 33 bp, Homo sapien
agctggggcctgtcgccctcggagaaagcctgg

SEQ ID NO: 483766 - DNA, 33 bp, Homo sapien
agctggggcctgtcgctctcggagaaagcctgg

SEQ ID NO: 483767 - DNA, 33 bp, Homo sapien
aattgcaaaaaaaaaaactgtcagtcattagag

SEQ ID NO: 483768 - DNA, 33 bp, Homo sapien
aattgcaaaaaaaaaacctgtcagtcattagag

SEQ ID NO: 483769 - DNA, 33 bp, Homo sapien
gggcaatgtaggaataagtgcaaatattggtaa

SEQ ID NO: 483770 - DNA, 33 bp, Homo sapien
gggcaatgtaggaatatgtgcaaatattggtaa

SEQ ID NO: 483771 - DNA, 33 bp, Homo sapien
ggttggtttgtttactcagaggaagaccctcct

SEQ ID NO: 483772 - DNA, 33 bp, Homo sapien
ggttggtttgtttactgagaggaagaccctcct

SEQ ID NO: 483773 - DNA, 33 bp, Homo sapien
tcagttaaagttcggtaaagcaagagacgcctt

SEQ ID NO: 483774 - DNA, 33 bp, Homo sapien
tcagttaaagttcggttaagcaagagacgcctt

SEQ ID NO: 483775 - DNA, 33 bp, Homo sapien
aaaaagctaggaggaaattatcaatcagtgaaa

SEQ ID NO: 483776 - DNA, 33 bp, Homo sapien
aaaaagctaggaggaagttatcaatcagtgaaa

SEQ ID NO: 483777 - DNA, 33 bp, Homo sapien
tgtaaaatacactagcaaagtatcaaacattgt

SEQ ID NO: 483778 - DNA, 33 bp, Homo sapien
tgtaaaatacactagcgaagtatcaaacattgt

SEQ ID NO: 483779 - DNA, 33 bp, Homo sapien
aatgatattcttaccacggagaagaagagtaat

SEQ ID NO: 483780 - DNA, 33 bp, Homo sapien
aatgatattcttaccatggagaagaagagtaat

SEQ ID NO: 483781 - DNA, 33 bp, Homo sapien
ctgtacacaaattgctaaagttgacgcaataga

SEQ ID NO: 483782 - DNA, 33 bp, Homo sapien
ctgtacacaaattgctgaagttgacgcaataga

SEQ ID NO: 483783 - DNA, 33 bp, Homo sapien
tcctactgtttctgagcagattaaagcctttgt

SEQ ID NO: 483784 - DNA, 33 bp, Homo sapien
tcctactgtttctgaggagattaaagcctttgt

SEQ ID NO: 483785 - DNA, 33 bp, Homo sapien
agagtgccatttggaaacatgaggaattttggc

SEQ ID NO: 483786 - DNA, 33 bp, Homo sapien
agagtgccatttggaaccatgaggaattttggc

SEQ ID NO: 483787 - DNA, 33 bp, Homo sapien
atgccaccactgacaactgctgaaaaactgagt

SEQ ID NO: 483788 - DNA, 33 bp, Homo sapien
atgccaccactgacaattgctgaaaaactgagt

SEQ ID NO: 483789 - DNA, 33 bp, Homo sapien
ttcccctagtatctccactttacagatgacaaa

SEQ ID NO: 483790 - DNA, 33 bp, Homo sapien
ttcccctagtatctccgctttacagatgacaaa

SEQ ID NO: 483791 - DNA, 33 bp, Homo sapien
accagccatgctaagcacccttggatccaactg

SEQ ID NO: 483792 - DNA, 33 bp, Homo sapien
accagccatgctaagcgcccttggatccaactg

SEQ ID NO: 483793 - DNA, 33 bp, Homo sapien
acttggctgattataacaatatctttacccaga

SEQ ID NO: 483794 - DNA, 33 bp, Homo sapien
acttggctgattataagaatatctttacccaga

SEQ ID NO: 483795 - DNA, 33 bp, Homo sapien
ccaccatgcccaataacgtgaacgagatgcaac

SEQ ID NO: 483796 - DNA, 33 bp, Homo sapien
ccaccatgcccaataatgtgaacgagatgcaac

SEQ ID NO: 483797 - DNA, 33 bp, Homo sapien
tataccatctgaccaacttctagccaatgaaat

SEQ ID NO: 483798 - DNA, 33 bp, Homo sapien
tataccatctgaccaagttctagccaatgaaat

SEQ ID NO: 483799 - DNA, 33 bp, Homo sapien
ttgataagctacactccaaattccttaaggaaa

SEQ ID NO: 483800 - DNA, 33 bp, Homo sapien
ttgataagctacactctaaattccttaaggaaa

SEQ ID NO: 483801 - DNA, 33 bp, Homo sapien
aaacaattcaatgcaccaattttgtactacaca

SEQ ID NO: 483802 - DNA, 33 bp, Homo sapien
aaacaattcaatgcacgaattttgtactacaca

SEQ ID NO: 483803 - DNA, 33 bp, Homo sapien
acagagccctctctaactgacagtagccatctg

SEQ ID NO: 483804 - DNA, 33 bp, Homo sapien
acagagccctctctaattgacagtagccatctg

SEQ ID NO: 483805 - DNA, 33 bp, Homo sapien
agggaaagccagcccgaatgacagctgtttctt

SEQ ID NO: 483806 - DNA, 33 bp, Homo sapien
agggaaagccagcccggatgacagctgtttctt

SEQ ID NO: 483807 - DNA, 33 bp, Homo sapien
tatactttggatttaaacatgcttgtaatctag

SEQ ID NO: 483808 - DNA, 33 bp, Homo sapien
tatactttggatttaatcatgcttgtaatctag

SEQ ID NO: 483809 - DNA, 33 bp, Homo sapien
agtgccaatgcagcagcaactttatcaatcttc

SEQ ID NO: 483810 - DNA, 33 bp, Homo sapien
agtgccaatgcagcagtaactttatcaatcttc

SEQ ID NO: 483811 - DNA, 33 bp, Homo sapien
ttatacagaatatactaaccctagcaaatctaa

SEQ ID NO: 483812 - DNA, 33 bp, Homo sapien
ttatacagaatatacttaccctagcaaatctaa

SEQ ID NO: 483813 - DNA, 33 bp, Homo sapien
aagacccaaagacagcagcgtgacataagcttt

SEQ ID NO: 483814 - DNA, 33 bp, Homo sapien
aagacccaaagacagcggcgtgacataagcttt

SEQ ID NO: 483815 - DNA, 33 bp, Homo sapien
tgtccaaattgtcaaaggtccctgggatacaat

SEQ ID NO: 483816 - DNA, 33 bp, Homo sapien
tgtccaaattgtcaaatgtccctgggatacaat

SEQ ID NO: 483817 - DNA, 33 bp, Homo sapien
gtaatgaatggcattacagagaatggtacatgg

SEQ ID NO: 483818 - DNA, 33 bp, Homo sapien
gtaatgaatggcattatagagaatggtacatgg

SEQ ID NO: 483819 - DNA, 33 bp, Homo sapien
taaagcagagtttcaaaagctagcaaaattaaa

SEQ ID NO: 483820 - DNA, 33 bp, Homo sapien
taaagcagagtttcaagagctagcaaaattaaa

SEQ ID NO: 483821 - DNA, 33 bp, Homo sapien
aacagtacaaaattaaatcaagccaaaagaaac

SEQ ID NO: 483822 - DNA, 33 bp, Homo sapien
aacagtacaaaattaagtcaagccaaaagaaac

SEQ ID NO: 483823 - DNA, 33 bp, Homo sapien
aaaatttcattttggtcaataaactcataaatc

SEQ ID NO: 483824 - DNA, 33 bp, Homo sapien
aaaatttcattttggtgaataaactcataaatc

SEQ ID NO: 483825 - DNA, 33 bp, Homo sapien
ctcattttccctgttacgcgacattccgttgta

SEQ ID NO: 483826 - DNA, 33 bp, Homo sapien
ctcattttccctgttatgcgacattccgttgta

SEQ ID NO: 483827 - DNA, 33 bp, Homo sapien
tttatatttattaacacggctagatctcaataa

SEQ ID NO: 483828 - DNA, 33 bp, Homo sapien
tttatatttattaacatggctagatctcaataa

SEQ ID NO: 483829 - DNA, 33 bp, Homo sapien
gaattgaaataattccaaaaaagatcagcagct

SEQ ID NO: 483830 - DNA, 33 bp, Homo sapien
gaattgaaataattccgaaaaagatcagcagct

SEQ ID NO: 483831 - DNA, 33 bp, Homo sapien
tctttggaagctgaaagaactcaggctagagct

SEQ ID NO: 483832 - DNA, 33 bp, Homo sapien
tctttggaagctgaaataactcaggctagagct

SEQ ID NO: 483833 - DNA, 33 bp, Homo sapien
aattaaggagtcctgaaagcccgtcagcactga

SEQ ID NO: 483834 - DNA, 33 bp, Homo sapien
aattaaggagtcctgatagcccgtcagcactga

SEQ ID NO: 483835 - DNA, 33 bp, Homo sapien
tcatgggctatcaaaacaactcgttaaccccta

SEQ ID NO: 483836 - DNA, 33 bp, Homo sapien
tcatgggctatcaaaagaactcgttaaccccta

SEQ ID NO: 483837 - DNA, 33 bp, Homo sapien
accaggcaccatgtcacgtatgcgaactttctg

SEQ ID NO: 483838 - DNA, 33 bp, Homo sapien
accaggcaccatgtcaggtatgcgaactttctg

SEQ ID NO: 483839 - DNA, 33 bp, Homo sapien
acctggagagtcattacatggccaagcccaaga

SEQ ID NO: 483840 - DNA, 33 bp, Homo sapien
acctggagagtcattatatggccaagcccaaga

SEQ ID NO: 483841 - DNA, 33 bp, Homo sapien
taacatcagtcacagtaacagtcgtgtgtgtgt

SEQ ID NO: 483842 - DNA, 33 bp, Homo sapien
taacatcagtcacagtgacagtcgtgtgtgtgt

SEQ ID NO: 483843 - DNA, 33 bp, Homo sapien
ccacattcttgtgttacgaatggaccttttcat

SEQ ID NO: 483844 - DNA, 33 bp, Homo sapien
ccacattcttgtgttatgaatggaccttttcat

SEQ ID NO: 483845 - DNA, 33 bp, Homo sapien
tcctataccctgtggaaataggaaacaggccca

SEQ ID NO: 483846 - DNA, 33 bp, Homo sapien
tcctataccctgtggacataggaaacaggccca

SEQ ID NO: 483847 - DNA, 33 bp, Homo sapien
tcttctgcccatcaacactctgtttggtatgct

SEQ ID NO: 483848 - DNA, 33 bp, Homo sapien
tcttctgcccatcaaccctctgtttggtatgct

SEQ ID NO: 483849 - DNA, 33 bp, Homo sapien
gcccacagggagctaaatgagtccttcctataa

SEQ ID NO: 483850 - DNA, 33 bp, Homo sapien
gcccacagggagctaagtgagtccttcctataa

SEQ ID NO: 483851 - DNA, 33 bp, Homo sapien
cgaattccaaaaaaaagagactgccagggacag

SEQ ID NO: 483852 - DNA, 33 bp, Homo sapien
cgaattccaaaaaaaatagactgccagggacag

SEQ ID NO: 483853 - DNA, 33 bp, Homo sapien
ccagcagatgttgttcaagcacagattttaaaa

SEQ ID NO: 483854 - DNA, 33 bp, Homo sapien
ccagcagatgttgttcgagcacagattttaaaa

SEQ ID NO: 483855 - DNA, 33 bp, Homo sapien
atttgccactttggtacgtactcgccctgactg

SEQ ID NO: 483856 - DNA, 33 bp, Homo sapien
atttgccactttggtatgtactcgccctgactg

SEQ ID NO: 483857 - DNA, 33 bp, Homo sapien
gaggtcaggatgctctcactgggctgttagcag

SEQ ID NO: 483858 - DNA, 33 bp, Homo sapien
gaggtcaggatgctcttactgggctgttagcag

SEQ ID NO: 483859 - DNA, 33 bp, Homo sapien
aaaatcaagctcccaaagaagaacatagaaaag

SEQ ID NO: 483860 - DNA, 33 bp, Homo sapien
aaaatcaagctcccaacgaagaacatagaaaag

SEQ ID NO: 483861 - DNA, 33 bp, Homo sapien
cctgaggcctcacccaagaaagcagttctgcct

SEQ ID NO: 483862 - DNA, 33 bp, Homo sapien
cctgaggcctcacccaggaaagcagttctgcct

SEQ ID NO: 483863 - DNA, 33 bp, Homo sapien
ctttgacgcctactgacagtcccaggttagaat

SEQ ID NO: 483864 - DNA, 33 bp, Homo sapien
ctttgacgcctactgatagtcccaggttagaat

SEQ ID NO: 483865 - DNA, 33 bp, Homo sapien
tcgccctgcactttcaccttccctatggcctcc

SEQ ID NO: 483866 - DNA, 33 bp, Homo sapien
tcgccctgcactttcagcttccctatggcctcc

SEQ ID NO: 483867 - DNA, 33 bp, Homo sapien
aggaacctgggagcaactgaaagctgaactaca

SEQ ID NO: 483868 - DNA, 33 bp, Homo sapien
aggaacctgggagcaagtgaaagctgaactaca

SEQ ID NO: 483869 - DNA, 33 bp, Homo sapien
gtgttggggcctccgacgaacatgactttgagc

SEQ ID NO: 483870 - DNA, 33 bp, Homo sapien
gtgttggggcctccgatgaacatgactttgagc

SEQ ID NO: 483871 - DNA, 33 bp, Homo sapien
ctggtgcctgcaatgcacaaagtgggggagacg

SEQ ID NO: 483872 - DNA, 33 bp, Homo sapien
ctggtgcctgcaatgcgcaaagtgggggagacg

SEQ ID NO: 483873 - DNA, 33 bp, Homo sapien
acaggatcaagatctcaaattacaggagagtag

SEQ ID NO: 483874 - DNA, 33 bp, Homo sapien
acaggatcaagatctcgaattacaggagagtag

SEQ ID NO: 483875 - DNA, 33 bp, Homo sapien
gggaggcagagaatccactcctttgggaagatc

SEQ ID NO: 483876 - DNA, 33 bp, Homo sapien
gggaggcagagaatccgctcctttgggaagatc

SEQ ID NO: 483877 - DNA, 33 bp, Homo sapien
aggctgtaggagatgacatgacagggtgcacct

SEQ ID NO: 483878 - DNA, 33 bp, Homo sapien
aggctgtaggagatgagatgacagggtgcacct

SEQ ID NO: 483879 - DNA, 33 bp, Homo sapien
gtaagttgatcaaaaaaatgacacaataactcc

SEQ ID NO: 483880 - DNA, 33 bp, Homo sapien
gtaagttgatcaaaaagatgacacaataactcc

SEQ ID NO: 483881 - DNA, 33 bp, Homo sapien
ccttcctgaatccatacgccttgtgactttgcc

SEQ ID NO: 483882 - DNA, 33 bp, Homo sapien
ccttcctgaatccatatgccttgtgactttgcc

SEQ ID NO: 483883 - DNA, 33 bp, Homo sapien
tcttcttgtccatcacaggatgaccccatgcca

SEQ ID NO: 483884 - DNA, 33 bp, Homo sapien
tcttcttgtccatcaccggatgaccccatgcca

SEQ ID NO: 483885 - DNA, 33 bp, Homo sapien
gattttgccagcacccaacagagtttcctgctt

SEQ ID NO: 483886 - DNA, 33 bp, Homo sapien
gattttgccagcacccgacagagtttcctgctt

SEQ ID NO: 483887 - DNA, 33 bp, Homo sapien
gctcgatcaggatgaaaccgggcacttagccat

SEQ ID NO: 483888 - DNA, 33 bp, Homo sapien
gctcgatcaggatgaacccgggcacttagccat

SEQ ID NO: 483889 - DNA, 33 bp, Homo sapien; identical to SEQ ID NO: 483887

SEQ ID NO: 483890 - DNA, 33 bp, Homo sapien; identical to SEQ ID NO: 483888

SEQ ID NO: 483891 - DNA, 33 bp, Homo sapien
ggttatggaagagaaccgtggaaaccagtgact

SEQ ID NO: 483892 - DNA, 33 bp, Homo sapien
ggttatggaagagaactgtggaaaccagtgact

SEQ ID NO: 483893 - DNA, 33 bp, Homo sapien; identical to SEQ ID NO: 483891

SEQ ID NO: 483894 - DNA, 33 bp, Homo sapien; identical to SEQ ID NO: 483892

SEQ ID NO: 483895 - DNA, 33 bp, Homo sapien
taagattggaagtgaaaatagtgaacgcaataa

SEQ ID NO: 483896 - DNA, 33 bp, Homo sapien
taagattggaagtgaacatagtgaacgcaataa

SEQ ID NO: 483897 - DNA, 33 bp, Homo sapien
cctgtgaccgagtgaactggacttaggggactg

SEQ ID NO: 483898 - DNA, 33 bp, Homo sapien
cctgtgaccgagtgaattggacttaggggactg

SEQ ID NO: 483899 - DNA, 33 bp, Homo sapien
acggaccaggcattgaaggttagatcaagagga

SEQ ID NO: 483900 - DNA, 33 bp, Homo sapien
acggaccaggcattgatggttagatcaagagga

SEQ ID NO: 483901 - DNA, 33 bp, Homo sapien
aagtacttcactgccacctgcagaaaatatgac

SEQ ID NO: 483902 - DNA, 33 bp, Homo sapien
aagtacttcactgccatctgcagaaaatatgac

SEQ ID NO: 483903 - DNA, 33 bp, Homo sapien
taaaataatttgatcacgaaatcttagatatag

SEQ ID NO: 483904 - DNA, 33 bp, Homo sapien
taaaataatttgatcatgaaatcttagatatag

SEQ ID NO: 483905 - DNA, 33 bp, Homo sapien
agctgtaatgtttgaaaggtaaatttaacttta

SEQ ID NO: 483906 - DNA, 33 bp, Homo sapien
agctgtaatgtttgaagggtaaatttaacttta

SEQ ID NO: 483907 - DNA, 33 bp, Homo sapien
atccgttcagctggccacaaagagcagaggcca

SEQ ID NO: 483908 - DNA, 33 bp, Homo sapien
atccgttcagctggccgcaaagagcagaggcca

SEQ ID NO: 483909 - DNA, 33 bp, Homo sapien
ggagccacaacatagcactgggaattcagcccc

SEQ ID NO: 483910 - DNA, 33 bp, Homo sapien
ggagccacaacatagcgctgggaattcagcccc

SEQ ID NO: 483911 - DNA, 33 bp, Homo sapien
tgtgcttggttgcaaacggctcaggtaggatct

SEQ ID NO: 483912 - DNA, 33 bp, Homo sapien
tgtgcttggttgcaaatggctcaggtaggatct

SEQ ID NO: 483913 - DNA, 33 bp, Homo sapien
cttcttaagaaagatcccaagttctggtggcca

SEQ ID NO: 483914 - DNA, 33 bp, Homo sapien
cttcttaagaaagatctcaagttctggtggcca

SEQ ID NO: 483915 - DNA, 33 bp, Homo sapien
gacctactgggctgcaatcccaaatggttaggt

SEQ ID NO: 483916 - DNA, 33 bp, Homo sapien
gacctactgggctgcattcccaaatggttaggt

SEQ ID NO: 483917 - DNA, 33 bp, Homo sapien
gatggttttaatctgcggcaaaatcggcatgtg

SEQ ID NO: 483918 - DNA, 33 bp, Homo sapien
gatggttttaatctgctgcaaaatcggcatgtg

SEQ ID NO: 483919 - DNA, 33 bp, Homo sapien
cactctgaaatcactaagtcatactcccttgca

SEQ ID NO: 483920 - DNA, 33 bp, Homo sapien
cactctgaaatcactatgtcatactcccttgca

SEQ ID NO: 483921 - DNA, 33 bp, Homo sapien
actgttatgtgagtgacaagtagcctctattat

SEQ ID NO: 483922 - DNA, 33 bp, Homo sapien
actgttatgtgagtgagaagtagcctctattat

SEQ ID NO: 483923 - DNA, 33 bp, Homo sapien
tctagatataggtctacaagcaaagaatgctga

SEQ ID NO: 483924 - DNA, 33 bp, Homo sapien
tctagatataggtctagaagcaaagaatgctga

SEQ ID NO: 483925 - DNA, 33 bp, Homo sapien
aggtcatataggacaactgaatggggatgtagt

SEQ ID NO: 483926 - DNA, 33 bp, Homo sapien
aggtcatataggacaattgaatggggatgtagt

SEQ ID NO: 483927 - DNA, 33 bp, Homo sapien
agtagcatacccaaagaaggaatgtgttacttc

SEQ ID NO: 483928 - DNA, 33 bp, Homo sapien
agtagcatacccaaaggaggaatgtgttacttc

SEQ ID NO: 483929 - DNA, 33 bp, Homo sapien
gtgtttagtttctactaaggcccagtaacagtc

SEQ ID NO: 483930 - DNA, 33 bp, Homo sapien
gtgtttagtttctactgaggcccagtaacagtc

SEQ ID NO: 483931 - DNA, 33 bp, Homo sapien
tggaaaattgatgacaaagaaatgtggggaaga

SEQ ID NO: 483932 - DNA, 33 bp, Homo sapien
tggaaaattgatgacagagaaatgtggggaaga

SEQ ID NO: 483933 - DNA, 33 bp, Homo sapien
gccagccaaaatctgccgaattcaaaatggtga

SEQ ID NO: 483934 - DNA, 33 bp, Homo sapien
gccagccaaaatctgctgaattcaaaatggtga

SEQ ID NO: 483935 - DNA, 33 bp, Homo sapien
tgtcatgagtattttacgcttattttgttatga

SEQ ID NO: 483936 - DNA, 33 bp, Homo sapien
tgtcatgagtattttatgcttattttgttatga

SEQ ID NO: 483937 - DNA, 33 bp, Homo sapien
gttactgcaccagccccaatcctactacctcta

SEQ ID NO: 483938 - DNA, 33 bp, Homo sapien
gttactgcaccagcccgaatcctactacctcta

SEQ ID NO: 483939 - DNA, 33 bp, Homo sapien
gtccagcacttgagacactacagagggctgcag

SEQ ID NO: 483940 - DNA, 33 bp, Homo sapien
gtccagcacttgagacgctacagagggctgcag

SEQ ID NO: 483941 - DNA, 33 bp, Homo sapien
ctgtaaaatgggctgacaaccatcctgggttaa

SEQ ID NO: 483942 - DNA, 33 bp, Homo sapien
ctgtaaaatgggctgataaccatcctgggttaa

SEQ ID NO: 483943 - DNA, 33 bp, Homo sapien
cctcagttgcctcagcaataaatggatataata

SEQ ID NO: 483944 - DNA, 33 bp, Homo sapien
cctcagttgcctcagctataaatggatataata

SEQ ID NO: 483945 - DNA, 33 bp, Homo sapien
catccagaatggagcacggcatttgtcctgtcc

SEQ ID NO: 483946 - DNA, 33 bp, Homo sapien
catccagaatggagcagggcatttgtcctgtcc

SEQ ID NO: 483947 - DNA, 33 bp, Homo sapien
cagcagccctgctgaacgcaaggactcgtagct

SEQ ID NO: 483948 - DNA, 33 bp, Homo sapien
cagcagccctgctgaatgcaaggactcgtagct

SEQ ID NO: 483949 - DNA, 33 bp, Homo sapien
aaatgaacagaagcaacggggcttcaggacgag

SEQ ID NO: 483950 - DNA, 33 bp, Homo sapien
aaatgaacagaagcaatggggcttcaggacgag

SEQ ID NO: 483951 - DNA, 33 bp, Homo sapien
caaaatacatacttgacaatatgcttgcagtga

SEQ ID NO: 483952 - DNA, 33 bp, Homo sapien
caaaatacatacttgagaatatgcttgcagtga

SEQ ID NO: 483953 - DNA, 33 bp, Homo sapien
gttattcatctaacctcacttatatcttctgtt

SEQ ID NO: 483954 - DNA, 33 bp, Homo sapien
gttattcatctaaccttacttatatcttctgtt

SEQ ID NO: 483955 - DNA, 33 bp, Homo sapien
gaacttgtaatatgaccaaaattgtccatctta

SEQ ID NO: 483956 - DNA, 33 bp, Homo sapien
gaacttgtaatatgacgaaaattgtccatctta

SEQ ID NO: 483957 - DNA, 33 bp, Homo sapien
tcacctacaagcaacaaaattttggcaaaacag

SEQ ID NO: 483958 - DNA, 33 bp, Homo sapien
tcacctacaagcaacataattttggcaaaacag

SEQ ID NO: 483959 - DNA, 33 bp, Homo sapien
aaaaattctattcacccacaaaggacagagatt

SEQ ID NO: 483960 - DNA, 33 bp, Homo sapien
aaaaattctattcacctacaaaggacagagatt

SEQ ID NO: 483961 - DNA, 33 bp, Homo sapien
agacatgaaaggatgaaactggctatgggacac

SEQ ID NO: 483962 - DNA, 33 bp, Homo sapien
agacatgaaaggatgagactggctatgggacac

SEQ ID NO: 483963 - DNA, 33 bp, Homo sapien
taagttttaaaaagtaagttcctgccaggcaca

SEQ ID NO: 483964 - DNA, 33 bp, Homo sapien
taagttttaaaaagtacgttcctgccaggcaca

SEQ ID NO: 483965 - DNA, 33 bp, Homo sapien
ccccaggcagcattgaaatctgggttcaaacta

SEQ ID NO: 483966 - DNA, 33 bp, Homo sapien
ccccaggcagcattgacatctgggttcaaacta

SEQ ID NO: 483967 - DNA, 33 bp, Homo sapien
gtgctcagacccagcacaggatgagatgatctg

SEQ ID NO: 483968 - DNA, 33 bp, Homo sapien
gtgctcagacccagcagaggatgagatgatctg

SEQ ID NO: 483969 - DNA, 33 bp, Homo sapien
gctgagacctgaaagacgggaatgagtcagcca

SEQ ID NO: 483970 - DNA, 33 bp, Homo sapien
gctgagacctgaaagatgggaatgagtcagcca

SEQ ID NO: 483971 - DNA, 33 bp, Homo sapien
tctggagctctctgaagtggctatagctaaggc

SEQ ID NO: 483972 - DNA, 33 bp, Homo sapien
tctggagctctctgaattggctatagctaaggc

SEQ ID NO: 483973 - DNA, 33 bp, Homo sapien
tcagctgaaccacaaaatcagacggaaaccttt

SEQ ID NO: 483974 - DNA, 33 bp, Homo sapien
tcagctgaaccacaaagtcagacggaaaccttt

SEQ ID NO: 483975 - DNA, 33 bp, Homo sapien
tctggttggacggcaaaactttgaggtacctct

SEQ ID NO: 483976 - DNA, 33 bp, Homo sapien
tctggttggacggcaagactttgaggtacctct

SEQ ID NO: 483977 - DNA, 33 bp, Homo sapien
acaggactgtccataccaagcaggaggcatgag

SEQ ID NO: 483978 - DNA, 33 bp, Homo sapien
acaggactgtccatacgaagcaggaggcatgag

SEQ ID NO: 483979 - DNA, 33 bp, Homo sapien
aattgttcaaaacccactggatcaaacgaaggg

SEQ ID NO: 483980 - DNA, 33 bp, Homo sapien
aattgttcaaaacccattggatcaaacgaaggg

SEQ ID NO: 483981 - DNA, 33 bp, Homo sapien
taatggtgggattttaagcagcagagatttggg

SEQ ID NO: 483982 - DNA, 33 bp, Homo sapien
taatggtgggattttaggcagcagagatttggg

SEQ ID NO: 483983 - DNA, 33 bp, Homo sapien
ggagtcctgactcctaaattcctgcctctggtc

SEQ ID NO: 483984 - DNA, 33 bp, Homo sapien
ggagtcctgactcctacattcctgcctctggtc

SEQ ID NO: 483985 - DNA, 33 bp, Homo sapien
acccagcaggacactaagagggaccagaggcag

SEQ ID NO: 483986 - DNA, 33 bp, Homo sapien
acccagcaggacactatgagggaccagaggcag

SEQ ID NO: 483987 - DNA, 33 bp, Homo sapien
ccacaggagccctcaacgccgcttgtgttttct

SEQ ID NO: 483988 - DNA, 33 bp, Homo sapien
ccacaggagccctcaatgccgcttgtgttttct

SEQ ID NO: 483989 - DNA, 33 bp, Homo sapien
gccattgaaggctggtaaaaaaggggtgaagtg

SEQ ID NO: 483990 - DNA, 33 bp, Homo sapien
gccattgaaggctggtgaaaaaggggtgaagtg

SEQ ID NO: 483991 - DNA, 33 bp, Homo sapien
aggcagggttgtgaacactggaaaggagagcag

SEQ ID NO: 483992 - DNA, 33 bp, Homo sapien
aggcagggttgtgaacgctggaaaggagagcag

SEQ ID NO: 483993 - DNA, 33 bp, Homo sapien
actcctcttcccaccaccatgaggtctgtaaat

SEQ ID NO: 483994 - DNA, 33 bp, Homo sapien
actcctcttcccaccatcatgaggtctgtaaat

SEQ ID NO: 483995 - DNA, 33 bp, Homo sapien
ggaatagggagaaaaccatgagtattttgctga

SEQ ID NO: 483996 - DNA, 33 bp, Homo sapien
ggaatagggagaaaacgatgagtattttgctga

SEQ ID NO: 483997 - DNA, 33 bp, Homo sapien
ccatgccgtgaggacagtcaagcagttctgtgg

SEQ ID NO: 483998 - DNA, 33 bp, Homo sapien
ccatgccgtgaggacattcaagcagttctgtgg

SEQ ID NO: 483999 - DNA, 33 bp, Homo sapien
tcttgctctttcagataacttattctggaggaa

SEQ ID NO: 484000 - DNA, 33 bp, Homo sapien
tcttgctctttcagatgacttattctggaggaa

SEQ ID NO: 484001 - DNA, 33 bp, Homo sapien
tgggaactgctttgtacctggaattttctgacc

SEQ ID NO: 484002 - DNA, 33 bp, Homo sapien
tgggaactgctttgtatctggaattttctgacc

SEQ ID NO: 484003 - DNA, 33 bp, Homo sapien
tcatagtctgagaaaacggaacttgaacatatg

SEQ ID NO: 484004 - DNA, 33 bp, Homo sapien
tcatagtctgagaaaatggaacttgaacatatg

SEQ ID NO: 484005 - DNA, 33 bp, Homo sapien
ttcaagggtgtataaacatgtcaaaacttatca

SEQ ID NO: 484006 - DNA, 33 bp, Homo sapien
ttcaagggtgtataaatatgtcaaaacttatca

SEQ ID NO: 484007 - DNA, 33 bp, Homo sapien
tttacttttctgcttacggatatgttccagtac

SEQ ID NO: 484008 - DNA, 33 bp, Homo sapien
tttacttttctgcttatggatatgttccagtac

SEQ ID NO: 484009 - DNA, 33 bp, Homo sapien
gaacaaagtactcatagacacaatgtgggtgaa

SEQ ID NO: 484010 - DNA, 33 bp, Homo sapien
gaacaaagtactcatatacacaatgtgggtgaa

SEQ ID NO: 484011 - DNA, 33 bp, Homo sapien
tattgttcactttatacattgttactcatgtgg

SEQ ID NO: 484012 - DNA, 33 bp, Homo sapien
tattgttcactttatatattgttactcatgtgg

SEQ ID NO: 484013 - DNA, 33 bp, Homo sapien
taagtcaatgtttaaccgtggcctgagcccagg

SEQ ID NO: 484014 - DNA, 33 bp, Homo sapien
taagtcaatgtttaactgtggcctgagcccagg

SEQ ID NO: 484015 - DNA, 33 bp, Homo sapien
ttccagaatattccaacgtttcaacagggcaac

SEQ ID NO: 484016 - DNA, 33 bp, Homo sapien
ttccagaatattccaatgtttcaacagggcaac

SEQ ID NO: 484017 - DNA, 33 bp, Homo sapien
acccagtaggatggcaataataaaaaaggcaaa

SEQ ID NO: 484018 - DNA, 33 bp, Homo sapien
acccagtaggatggcagtaataaaaaaggcaaa

SEQ ID NO: 484019 - DNA, 33 bp, Homo sapien
ctctttgttacagcagcctaatttttgtttatt

SEQ ID NO: 484020 - DNA, 33 bp, Homo sapien
ctctttgttacagcaggctaatttttgtttatt

SEQ ID NO: 484021 - DNA, 33 bp, Homo sapien
tagcagaggggatggaaaacaatgaacctttat

SEQ ID NO: 484022 - DNA, 33 bp, Homo sapien
tagcagaggggatggagaacaatgaacctttat

SEQ ID NO: 484023 - DNA, 33 bp, Homo sapien
tagacaactatgcacaaatgatgcaggactcac

SEQ ID NO: 484024 - DNA, 33 bp, Homo sapien
tagacaactatgcacagatgatgcaggactcac

SEQ ID NO: 484025 - DNA, 33 bp, Homo sapien
tggacatgggacagtacagacgaccccacatcc

SEQ ID NO: 484026 - DNA, 33 bp, Homo sapien
tggacatgggacagtagagacgaccccacatcc

SEQ ID NO: 484027 - DNA, 33 bp, Homo sapien
taacaaatcgccaccaacttagcggcttaaagc

SEQ ID NO: 484028 - DNA, 33 bp, Homo sapien
taacaaatcgccaccaccttagcggcttaaagc

SEQ ID NO: 484029 - DNA, 33 bp, Homo sapien
aggggcgcagccagtcagacgaaatgaaagcag

SEQ ID NO: 484030 - DNA, 33 bp, Homo sapien
aggggcgcagccagtccgacgaaatgaaagcag

SEQ ID NO: 484031 - DNA, 33 bp, Homo sapien
gggattgaggaggaaaagaaccggatgtcaaat

SEQ ID NO: 484032 - DNA, 33 bp, Homo sapien
gggattgaggaggaaaggaaccggatgtcaaat

SEQ ID NO: 484033 - DNA, 33 bp, Homo sapien
cagacacacaaaatacacgcatttcacaaaact

SEQ ID NO: 484034 - DNA, 33 bp, Homo sapien
cagacacacaaaatacgcgcatttcacaaaact

SEQ ID NO: 484035 - DNA, 33 bp, Homo sapien
gctgagatggaaacagcaggatctgcagcttct

SEQ ID NO: 484036 - DNA, 33 bp, Homo sapien
gctgagatggaaacagtaggatctgcagcttct

SEQ ID NO: 484037 - DNA, 33 bp, Homo sapien
agacacagacatgcccaatgacagtaccgatgg

SEQ ID NO: 484038 - DNA, 33 bp, Homo sapien
agacacagacatgcccgatgacagtaccgatgg

SEQ ID NO: 484039 - DNA, 33 bp, Homo sapien
aatttattctgcgtcactagaaagagaagcaaa

SEQ ID NO: 484040 - DNA, 33 bp, Homo sapien
aatttattctgcgtcattagaaagagaagcaaa

SEQ ID NO: 484041 - DNA, 33 bp, Homo sapien
aaagatgttaggacaactggagttctcataaac

SEQ ID NO: 484042 - DNA, 33 bp, Homo sapien
aaagatgttaggacaattggagttctcataaac

SEQ ID NO: 484043 - DNA, 33 bp, Homo sapien
tattgataataccatcactgtgtaaatggctgc

SEQ ID NO: 484044 - DNA, 33 bp, Homo sapien
tattgataataccatcgctgtgtaaatggctgc

SEQ ID NO: 484045 - DNA, 33 bp, Homo sapien
tacaaagccatagtaaactgaacatctgctaac

SEQ ID NO: 484046 - DNA, 33 bp, Homo sapien
tacaaagccatagtaacctgaacatctgctaac

SEQ ID NO: 484047 - DNA, 33 bp, Homo sapien
caacttacctttgcaacaaccctctgacacaga

SEQ ID NO: 484048 - DNA, 33 bp, Homo sapien
caacttacctttgcaagaaccctctgacacaga

SEQ ID NO: 484049 - DNA, 33 bp, Homo sapien
ccttgagtatctgtgaatatcatctgcaattct

SEQ ID NO: 484050 - DNA, 33 bp, Homo sapien
ccttgagtatctgtgagtatcatctgcaattct

SEQ ID NO: 484051 - DNA, 33 bp, Homo sapien
gccatgaaggagttcaacatctgatccaggtag

SEQ ID NO: 484052 - DNA, 33 bp, Homo sapien
gccatgaaggagttcagcatctgatccaggtag

SEQ ID NO: 484053 - DNA, 33 bp, Homo sapien
agatccatttgggaaaaccattgtccaagacca

SEQ ID NO: 484054 - DNA, 33 bp, Homo sapien
agatccatttgggaaagccattgtccaagacca

SEQ ID NO: 484055 - DNA, 33 bp, Homo sapien
tcctttatgtacacacacatcacatggagatgt

SEQ ID NO: 484056 - DNA, 33 bp, Homo sapien
tcctttatgtacacacgcatcacatggagatgt

SEQ ID NO: 484057 - DNA, 33 bp, Homo sapien
acccaaatatccatcaacaggggagctaaacaa

SEQ ID NO: 484058 - DNA, 33 bp, Homo sapien
acccaaatatccatcagcaggggagctaaacaa

SEQ ID NO: 484059 - DNA, 33 bp, Homo sapien
ttttaactctagttaacaggcaaactcaatctg

SEQ ID NO: 484060 - DNA, 33 bp, Homo sapien
ttttaactctagttaataggcaaactcaatctg

SEQ ID NO: 484061 - DNA, 33 bp, Homo sapien
agtcttgctttcaagcaccatgtcggcaactca

SEQ ID NO: 484062 - DNA, 33 bp, Homo sapien
agtcttgctttcaagcgccatgtcggcaactca

SEQ ID NO: 484063 - DNA, 33 bp, Homo sapien
ctcaggagcaggttaacgcatccctcaacatga

SEQ ID NO: 484064 - DNA, 33 bp, Homo sapien
ctcaggagcaggttaatgcatccctcaacatga

SEQ ID NO: 484065 - DNA, 33 bp, Homo sapien
cttcatgcaggagtgaacttcaggaattctcca

SEQ ID NO: 484066 - DNA, 33 bp, Homo sapien
cttcatgcaggagtgatcttcaggaattctcca

SEQ ID NO: 484067 - DNA, 33 bp, Homo sapien
aagttcatcaagccacaccattaagacgagtgt

SEQ ID NO: 484068 - DNA, 33 bp, Homo sapien
aagttcatcaagccacgccattaagacgagtgt

SEQ ID NO: 484069 - DNA, 33 bp, Homo sapien
aagtcctgactgtgtgacaatgaactgctgatt

SEQ ID NO: 484070 - DNA, 33 bp, Homo sapien
aagtcctgactgtgtggcaatgaactgctgatt

SEQ ID NO: 484071 - DNA, 33 bp, Homo sapien
ccttcatattctgaacaatgcctagctgcagaa

SEQ ID NO: 484072 - DNA, 33 bp, Homo sapien
ccttcatattctgaacgatgcctagctgcagaa

SEQ ID NO: 484073 - DNA, 33 bp, Homo sapien
catagcacagtgtttaaattcctacagcacaca

SEQ ID NO: 484074 - DNA, 33 bp, Homo sapien
catagcacagtgtttagattcctacagcacaca

SEQ ID NO: 484075 - DNA, 33 bp, Homo sapien
agaggaagccagactacgtaaaagaatgtcctt

SEQ ID NO: 484076 - DNA, 33 bp, Homo sapien
agaggaagccagactatgtaaaagaatgtcctt

SEQ ID NO: 484077 - DNA, 33 bp, Homo sapien
cagtaagagcagaagccgcaatgcccactcaaa

SEQ ID NO: 484078 - DNA, 33 bp, Homo sapien
cagtaagagcagaagctgcaatgcccactcaaa

SEQ ID NO: 484079 - DNA, 33 bp, Homo sapien
ggcatggctagatttgcatttccaaaaaggtgc

SEQ ID NO: 484080 - DNA, 33 bp, Homo sapien
ggcatggctagatttgtatttccaaaaaggtgc

SEQ ID NO: 484081 - DNA, 33 bp, Homo sapien
gagagagagagagtataaggtattggttcaagc

SEQ ID NO: 484082 - DNA, 33 bp, Homo sapien
gagagagagagagtatgaggtattggttcaagc

SEQ ID NO: 484083 - DNA, 33 bp, Homo sapien
actacacacatattacaagtatctcagttatct

SEQ ID NO: 484084 - DNA, 33 bp, Homo sapien
actacacacatattactagtatctcagttatct

SEQ ID NO: 484085 - DNA, 33 bp, Homo sapien
tcatgaatctacccacacttcttttcagctagg

SEQ ID NO: 484086 - DNA, 33 bp, Homo sapien
tcatgaatctacccacgcttcttttcagctagg

SEQ ID NO: 484087 - DNA, 33 bp, Homo sapien
catattagggcttgctcaatgcatgaatgatgt

SEQ ID NO: 484088 - DNA, 33 bp, Homo sapien
catattagggcttgctgaatgcatgaatgatgt

SEQ ID NO: 484089 - DNA, 33 bp, Homo sapien
agcacacatattactacatcagagctgttttct

SEQ ID NO: 484090 - DNA, 33 bp, Homo sapien
agcacacatattactatatcagagctgttttct

SEQ ID NO: 484091 - DNA, 33 bp, Homo sapien
tctcacacacattccccgaaagcaacaggaaca

SEQ ID NO: 484092 - DNA, 33 bp, Homo sapien
tctcacacacattccctgaaagcaacaggaaca

SEQ ID NO: 484093 - DNA, 33 bp, Homo sapien
agttctgattggttccactggctgttcttaagg

SEQ ID NO: 484094 - DNA, 33 bp, Homo sapien
agttctgattggttccgctggctgttcttaagg

SEQ ID NO: 484095 - DNA, 33 bp, Homo sapien
ttagtctgcaatcaaggagggaagtacaacaga

SEQ ID NO: 484096 - DNA, 33 bp, Homo sapien
ttagtctgcaatcaagtagggaagtacaacaga

SEQ ID NO: 484097 - DNA, 33 bp, Homo sapien
ttagaacttggaagaaaccacatctggacttga

SEQ ID NO: 484098 - DNA, 33 bp, Homo sapien
ttagaacttggaagaagccacatctggacttga

SEQ ID NO: 484099 - DNA, 33 bp, Homo sapien
caaaaaagagacaagccacatcttaaacaccaa

SEQ ID NO: 484100 - DNA, 33 bp, Homo sapien
caaaaaagagacaagcgacatcttaaacaccaa

SEQ ID NO: 484101 - DNA, 33 bp, Homo sapien
cagctgaacttgaatacgggctgtggattagag

SEQ ID NO: 484102 - DNA, 33 bp, Homo sapien
cagctgaacttgaatatgggctgtggattagag

SEQ ID NO: 484103 - DNA, 33 bp, Homo sapien
aaagagcagagaacccaatgttctatgcaactg

SEQ ID NO: 484104 - DNA, 33 bp, Homo sapien
aaagagcagagaacccgatgttctatgcaactg

SEQ ID NO: 484105 - DNA, 33 bp, Homo sapien
actccacaatgagccaatcatgtggtctgcatt

SEQ ID NO: 484106 - DNA, 33 bp, Homo sapien
actccacaatgagccagtcatgtggtctgcatt

SEQ ID NO: 484107 - DNA, 33 bp, Homo sapien
aggctgacttgatgaccgatctgaaaaacttcg

SEQ ID NO: 484108 - DNA, 33 bp, Homo sapien
aggctgacttgatgactgatctgaaaaacttcg

SEQ ID NO: 484109 - DNA, 33 bp, Homo sapien
ttctacaccatcctgcactggtaagatgatttg

SEQ ID NO: 484110 - DNA, 33 bp, Homo sapien
ttctacaccatcctgccctggtaagatgatttg

SEQ ID NO: 484111 - DNA, 33 bp, Homo sapien
gagtccgggaaacatacaatacgagcttctcag

SEQ ID NO: 484112 - DNA, 33 bp, Homo sapien
gagtccgggaaacatataatacgagcttctcag

SEQ ID NO: 484113 - DNA, 33 bp, Homo sapien
cagatgagtttcgaagcccctcccaggtctaat

SEQ ID NO: 484114 - DNA, 33 bp, Homo sapien
cagatgagtttcgaaggccctcccaggtctaat

SEQ ID NO: 484115 - DNA, 33 bp, Homo sapien
gcaatctgaaaagttacgcatgctgtatgattt

SEQ ID NO: 484116 - DNA, 33 bp, Homo sapien
gcaatctgaaaagttatgcatgctgtatgattt

SEQ ID NO: 484117 - DNA, 33 bp, Homo sapien
actctggtctttctccaactccctgccctgttc

SEQ ID NO: 484118 - DNA, 33 bp, Homo sapien
actctggtctttctccgactccctgccctgttc

SEQ ID NO: 484119 - DNA, 33 bp, Homo sapien
tattttgcttttaccaacattgcagcatgaacg

SEQ ID NO: 484120 - DNA, 33 bp, Homo sapien
tattttgcttttaccagcattgcagcatgaacg

SEQ ID NO: 484121 - DNA, 33 bp, Homo sapien
aagcaaactattgctaaatctcttacctacctt

SEQ ID NO: 484122 - DNA, 33 bp, Homo sapien
aagcaaactattgctacatctcttacctacctt

SEQ ID NO: 484123 - DNA, 33 bp, Homo sapien
atcagcaaaatcagtacctgcagctcaagtgac

SEQ ID NO: 484124 - DNA, 33 bp, Homo sapien
atcagcaaaatcagtatctgcagctcaagtgac

SEQ ID NO: 484125 - DNA, 33 bp, Homo sapien
ttaaaaaaaaatcaggacaattctcataaagat

SEQ ID NO: 484126 - DNA, 33 bp, Homo sapien
ttaaaaaaaaatcagggcaattctcataaagat

SEQ ID NO: 484127 - DNA, 33 bp, Homo sapien
tgcagttgcattacccagagcaagaatttacta

SEQ ID NO: 484128 - DNA, 33 bp, Homo sapien
tgcagttgcattacccggagcaagaatttacta

SEQ ID NO: 484129 - DNA, 33 bp, Homo sapien
cttgcttcctaatgaagtgtctgcattttgggt

SEQ ID NO: 484130 - DNA, 33 bp, Homo sapien
cttgcttcctaatgaattgtctgcattttgggt

SEQ ID NO: 484131 - DNA, 33 bp, Homo sapien
tattaacttctcttacagatgccaaatctatac

SEQ ID NO: 484132 - DNA, 33 bp, Homo sapien
tattaacttctcttaccgatgccaaatctatac

SEQ ID NO: 484133 - DNA, 33 bp, Homo sapien
aacacacagccagctacggagagaggcccagag

SEQ ID NO: 484134 - DNA, 33 bp, Homo sapien
aacacacagccagctatggagagaggcccagag

SEQ ID NO: 484135 - DNA, 33 bp, Homo sapien
caccatcagtagaccacgtcaaaaaagaagggc

SEQ ID NO: 484136 - DNA, 33 bp, Homo sapien
caccatcagtagaccatgtcaaaaaagaagggc

SEQ ID NO: 484137 - DNA, 33 bp, Homo sapien
cattttggataaaggaagcttaactgcattagg

SEQ ID NO: 484138 - DNA, 33 bp, Homo sapien
cattttggataaaggatgcttaactgcattagg

SEQ ID NO: 484139 - DNA, 33 bp, Homo sapien
ttcagggtgagacaaaattagtttccaaatccc

SEQ ID NO: 484140 - DNA, 33 bp, Homo sapien
ttcagggtgagacaaagttagtttccaaatccc

SEQ ID NO: 484141 - DNA, 33 bp, Homo sapien
cagactagaatgaaagccagcgctatggtaaaa

SEQ ID NO: 484142 - DNA, 33 bp, Homo sapien
cagactagaatgaaaggcagcgctatggtaaaa

SEQ ID NO: 484143 - DNA, 33 bp, Homo sapien
ttcaagtccacagatacagcttttcatatgtga

SEQ ID NO: 484144 - DNA, 33 bp, Homo sapien
ttcaagtccacagatatagcttttcatatgtga

SEQ ID NO: 484145 - DNA, 33 bp, Homo sapien
ctcccatgtggcctcacagagtcatagcttctt

SEQ ID NO: 484146 - DNA, 33 bp, Homo sapien
ctcccatgtggcctcatagagtcatagcttctt

SEQ ID NO: 484147 - DNA, 33 bp, Homo sapien
taccgggtctagggaagatgcagaacacttcag

SEQ ID NO: 484148 - DNA, 33 bp, Homo sapien
taccgggtctagggaatatgcagaacacttcag

SEQ ID NO: 484149 - DNA, 33 bp, Homo sapien
tacattccccaggatcaaaacctgctcttccag

SEQ ID NO: 484150 - DNA, 33 bp, Homo sapien
tacattccccaggatccaaacctgctcttccag

SEQ ID NO: 484151 - DNA, 33 bp, Homo sapien
caaagcttcttcataccgcagcgagaaataaaa

SEQ ID NO: 484152 - DNA, 33 bp, Homo sapien
caaagcttcttcatactgcagcgagaaataaaa

SEQ ID NO: 484153 - DNA, 33 bp, Homo sapien
tacctgacaactactaacatttgttgagggctt

SEQ ID NO: 484154 - DNA, 33 bp, Homo sapien
tacctgacaactactatcatttgttgagggctt

SEQ ID NO: 484155 - DNA, 33 bp, Homo sapien
gcaatgacatccgcaaagcctctgtgaggagta

SEQ ID NO: 484156 - DNA, 33 bp, Homo sapien
gcaatgacatccgcaaggcctctgtgaggagta

SEQ ID NO: 484157 - DNA, 33 bp, Homo sapien
ggaggcaggaaggctagattagtgctaagaatc

SEQ ID NO: 484158 - DNA, 33 bp, Homo sapien
ggaggcaggaaggctatattagtgctaagaatc

SEQ ID NO: 484159 - DNA, 33 bp, Homo sapien
ctaggatttgttttccacttcaggcatattaac

SEQ ID NO: 484160 - DNA, 33 bp, Homo sapien
ctaggatttgttttccgcttcaggcatattaac

SEQ ID NO: 484161 - DNA, 33 bp, Homo sapien
agtacttgtaaggcaacagttaactcaacagtg

SEQ ID NO: 484162 - DNA, 33 bp, Homo sapien
agtacttgtaaggcaatagttaactcaacagtg

SEQ ID NO: 484163 - DNA, 33 bp, Homo sapien
tgatattctttccaaccgagactgctccataaa

SEQ ID NO: 484164 - DNA, 33 bp, Homo sapien
tgatattctttccaactgagactgctccataaa

SEQ ID NO: 484165 - DNA, 33 bp, Homo sapien
acaatatacctttcacaggtcgcagcttccctg

SEQ ID NO: 484166 - DNA, 33 bp, Homo sapien
acaatatacctttcacgggtcgcagcttccctg

SEQ ID NO: 484167 - DNA, 33 bp, Homo sapien
tctgtttttgttgccaaaactcttcatgttggg

SEQ ID NO: 484168 - DNA, 33 bp, Homo sapien
tctgtttttgttgccagaactcttcatgttggg

SEQ ID NO: 484169 - DNA, 33 bp, Homo sapien
gctccaagtgctcacaaaggcctaccctcctcc

SEQ ID NO: 484170 - DNA, 33 bp, Homo sapien
gctccaagtgctcacagaggcctaccctcctcc

SEQ ID NO: 484171 - DNA, 33 bp, Homo sapien
atgtttacatacgttacctatcgggcagctcaa

SEQ ID NO: 484172 - DNA, 33 bp, Homo sapien
atgtttacatacgttatctatcgggcagctcaa

SEQ ID NO: 484173 - DNA, 33 bp, Homo sapien
ttaaaagagcacaaggaaacattaattctggtt

SEQ ID NO: 484174 - DNA, 33 bp, Homo sapien
ttaaaagagcacaagggaacattaattctggtt

SEQ ID NO: 484175 - DNA, 33 bp, Homo sapien
aaactgattacatacacctataccctgccacta

SEQ ID NO: 484176 - DNA, 33 bp, Homo sapien
aaactgattacatacatctataccctgccacta

SEQ ID NO: 484177 - DNA, 33 bp, Homo sapien
gggcttcagctgtataataatgtaccgtgcttc

SEQ ID NO: 484178 - DNA, 33 bp, Homo sapien
gggcttcagctgtatagtaatgtaccgtgcttc

SEQ ID NO: 484179 - DNA, 33 bp, Homo sapien
acagaccaccttttccaagagcctggctataaa

SEQ ID NO: 484180 - DNA, 33 bp, Homo sapien
acagaccaccttttcctagagcctggctataaa

SEQ ID NO: 484181 - DNA, 33 bp, Homo sapien
tacttggttactcaataaactgattagattcta

SEQ ID NO: 484182 - DNA, 33 bp, Homo sapien
tacttggttactcaattaactgattagattcta

SEQ ID NO: 484183 - DNA, 33 bp, Homo sapien
atataaggcctaaaacaccaccattagagtttt

SEQ ID NO: 484184 - DNA, 33 bp, Homo sapien
atataaggcctaaaacgccaccattagagtttt

SEQ ID NO: 484185 - DNA, 33 bp, Homo sapien
aaaagatgtaacacaacaagtggtaataggctc

SEQ ID NO: 484186 - DNA, 33 bp, Homo sapien
aaaagatgtaacacaagaagtggtaataggctc

SEQ ID NO: 484187 - DNA, 33 bp, Homo sapien
tggaagagtctgcgagccggtgcaatgggtggc

SEQ ID NO: 484188 - DNA, 33 bp, Homo sapien
tggaagagtctgcgaggcggtgcaatgggtggc

SEQ ID NO: 484189 - DNA, 33 bp, Homo sapien
ggtttaaagaataacaatgcaataaacaccttg

SEQ ID NO: 484190 - DNA, 33 bp, Homo sapien
ggtttaaagaataacagtgcaataaacaccttg

SEQ ID NO: 484191 - DNA, 33 bp, Homo sapien
agcagatggactaggccagagagtagaaacatg

SEQ ID NO: 484192 - DNA, 33 bp, Homo sapien
agcagatggactaggctagagagtagaaacatg

SEQ ID NO: 484193 - DNA, 33 bp, Homo sapien
tgatatctcaagtctaccttaggtacctgtcct

SEQ ID NO: 484194 - DNA, 33 bp, Homo sapien
tgatatctcaagtctagcttaggtacctgtcct

SEQ ID NO: 484195 - DNA, 33 bp, Homo sapien
gcctgtgttagggaaaacaaagggtgtagtgta

SEQ ID NO: 484196 - DNA, 33 bp, Homo sapien
gcctgtgttagggaaagcaaagggtgtagtgta

SEQ ID NO: 484197 - DNA, 33 bp, Homo sapien
gatgatgcattttgtgaaattattaatgtgtta

SEQ ID NO: 484198 - DNA, 33 bp, Homo sapien
gatgatgcattttgtgtaattattaatgtgtta

SEQ ID NO: 484199 - DNA, 33 bp, Homo sapien
acacacccatttcttacacacacatcccatatc

SEQ ID NO: 484200 - DNA, 33 bp, Homo sapien
acacacccatttcttatacacacatcccatatc

SEQ ID NO: 484201 - DNA, 33 bp, Homo sapien
aaaagtccaaaaatcccatggctacctacagag

SEQ ID NO: 484202 - DNA, 33 bp, Homo sapien
aaaagtccaaaaatcctatggctacctacagag

SEQ ID NO: 484203 - DNA, 33 bp, Homo sapien
agcaagaagatagcaaatatttactaatgcctc

SEQ ID NO: 484204 - DNA, 33 bp, Homo sapien
agcaagaagatagcaagtatttactaatgcctc

SEQ ID NO: 484205 - DNA, 33 bp, Homo sapien
tgatgtggctggattgaaaagttgtgctcaaga

SEQ ID NO: 484206 - DNA, 33 bp, Homo sapien
tgatgtggctggattggaaagttgtgctcaaga

SEQ ID NO: 484207 - DNA, 33 bp, Homo sapien
aatgatcatactaaagcaaatcctgttatacct

SEQ ID NO: 484208 - DNA, 33 bp, Homo sapien
aatgatcatactaaaggaaatcctgttatacct

SEQ ID NO: 484209 - DNA, 33 bp, Homo sapien
aaaatgtattttccaaatctttgcatggacaga

SEQ ID NO: 484210 - DNA, 33 bp, Homo sapien
aaaatgtattttccaagtctttgcatggacaga

SEQ ID NO: 484211 - DNA, 33 bp, Homo sapien
ttcagtaaatcacatacacttgagtaagtgcag

SEQ ID NO: 484212 - DNA, 33 bp, Homo sapien
ttcagtaaatcacatatacttgagtaagtgcag

SEQ ID NO: 484213 - DNA, 33 bp, Homo sapien
tgcactggctccaggcaataccacagctttacc

SEQ ID NO: 484214 - DNA, 33 bp, Homo sapien
tgcactggctccaggcgataccacagctttacc

SEQ ID NO: 484215 - DNA, 33 bp, Homo sapien
gactcaattatttgggcagagacatgtggttaa

SEQ ID NO: 484216 - DNA, 33 bp, Homo sapien
gactcaattatttgggtagagacatgtggttaa

SEQ ID NO: 484217 - DNA, 33 bp, Homo sapien
atggtcaggatttcaacaggtagagaagagggt

SEQ ID NO: 484218 - DNA, 33 bp, Homo sapien
atggtcaggatttcaataggtagagaagagggt

SEQ ID NO: 484219 - DNA, 33 bp, Homo sapien
aaagtagtttataacacgtctgagatttcaagg

SEQ ID NO: 484220 - DNA, 33 bp, Homo sapien
aaagtagtttataacatgtctgagatttcaagg

SEQ ID NO: 484221 - DNA, 33 bp, Homo sapien
ataaactacttttgtacataccaggatgccaag

SEQ ID NO: 484222 - DNA, 33 bp, Homo sapien
ataaactacttttgtatataccaggatgccaag

SEQ ID NO: 484223 - DNA, 33 bp, Homo sapien
tgtctaacttagccgaaatcacagctctgcgag

SEQ ID NO: 484224 - DNA, 33 bp, Homo sapien
tgtctaacttagccgagatcacagctctgcgag

SEQ ID NO: 484225 - DNA, 33 bp, Homo sapien
caaatgctcacaggaaaagtgagtgacacaggc

SEQ ID NO: 484226 - DNA, 33 bp, Homo sapien
caaatgctcacaggaacagtgagtgacacaggc

SEQ ID NO: 484227 - DNA, 33 bp, Homo sapien
gtcccagatatctttaccaagtcatcttagacc

SEQ ID NO: 484228 - DNA, 33 bp, Homo sapien
gtcccagatatctttatcaagtcatcttagacc

SEQ ID NO: 484229 - DNA, 33 bp, Homo sapien
acttctaggtatatagccatgagaaatgaaaac

SEQ ID NO: 484230 - DNA, 33 bp, Homo sapien
acttctaggtatatagtcatgagaaatgaaaac

SEQ ID NO: 484231 - DNA, 33 bp, Homo sapien
aatggagaaatgataacagctgtaatgaaccac

SEQ ID NO: 484232 - DNA, 33 bp, Homo sapien
aatggagaaatgataatagctgtaatgaaccac

SEQ ID NO: 484233 - DNA, 33 bp, Homo sapien
gtcttggttagtaccactcaataaaatgttagg

SEQ ID NO: 484234 - DNA, 33 bp, Homo sapien
gtcttggttagtaccattcaataaaatgttagg

SEQ ID NO: 484235 - DNA, 33 bp, Homo sapien
tttccctatattttaaaaatgcctactaggtag

SEQ ID NO: 484236 - DNA, 33 bp, Homo sapien
tttccctatattttaagaatgcctactaggtag

SEQ ID NO: 484237 - DNA, 33 bp, Homo sapien
aataaacataaaaatagggtattaagccacttg

SEQ ID NO: 484238 - DNA, 33 bp, Homo sapien
aataaacataaaaatatggtattaagccacttg

SEQ ID NO: 484239 - DNA, 33 bp, Homo sapien
tggtgatttagctacccaagaagaaaagaagct

SEQ ID NO: 484240 - DNA, 33 bp, Homo sapien
tggtgatttagctacctaagaagaaaagaagct

SEQ ID NO: 484241 - DNA, 33 bp, Homo sapien
tgtaaacccttttatgaagacagattttttaaa

SEQ ID NO: 484242 - DNA, 33 bp, Homo sapien
tgtaaacccttttatggagacagattttttaaa

SEQ ID NO: 484243 - DNA, 33 bp, Homo sapien
caatagaggataccagacagaaattcattttaa

SEQ ID NO: 484244 - DNA, 33 bp, Homo sapien
caatagaggataccaggcagaaattcattttaa

SEQ ID NO: 484245 - DNA, 33 bp, Homo sapien
gatttgggtgctatgtaaaaagtgtcaaggcaa

SEQ ID NO: 484246 - DNA, 33 bp, Homo sapien
gatttgggtgctatgtgaaaagtgtcaaggcaa

SEQ ID NO: 484247 - DNA, 33 bp, Homo sapien
caggcagtttagggaaagacactcagttctgcc

SEQ ID NO: 484248 - DNA, 33 bp, Homo sapien
caggcagtttagggaaggacactcagttctgcc

SEQ ID NO: 484249 - DNA, 33 bp, Homo sapien
atgcaatacaagtctcagaatttgttggtgaga

SEQ ID NO: 484250 - DNA, 33 bp, Homo sapien
atgcaatacaagtctcggaatttgttggtgaga

SEQ ID NO: 484251 - DNA, 33 bp, Homo sapien
aaaattattatttccaagatggtagaaacagcc

SEQ ID NO: 484252 - DNA, 33 bp, Homo sapien
aaaattattatttccaggatggtagaaacagcc

SEQ ID NO: 484253 - DNA, 33 bp, Homo sapien
tattcaacataaatccactgtttagaaaaaagt

SEQ ID NO: 484254 - DNA, 33 bp, Homo sapien
tattcaacataaatcctctgtttagaaaaaagt

SEQ ID NO: 484255 - DNA, 33 bp, Homo sapien
actgatgggagactcccgcattcactggatgct

SEQ ID NO: 484256 - DNA, 33 bp, Homo sapien
actgatgggagactcctgcattcactggatgct

SEQ ID NO: 484257 - DNA, 33 bp, Homo sapien
ttaatgatacgtttgaactatgacatgctcact

SEQ ID NO: 484258 - DNA, 33 bp, Homo sapien
ttaatgatacgtttgatctatgacatgctcact

SEQ ID NO: 484259 - DNA, 33 bp, Homo sapien
tagcctatgtaagtaaacaattcaagtgattta

SEQ ID NO: 484260 - DNA, 33 bp, Homo sapien
tagcctatgtaagtaagcaattcaagtgattta

SEQ ID NO: 484261 - DNA, 33 bp, Homo sapien
aaatacataaggactcacttggaaggctcagaa

SEQ ID NO: 484262 - DNA, 33 bp, Homo sapien
aaatacataaggactcgcttggaaggctcagaa

SEQ ID NO: 484263 - DNA, 33 bp, Homo sapien
agaaaggatcagggacaaaatctgcaccttcca

SEQ ID NO: 484264 - DNA, 33 bp, Homo sapien
agaaaggatcagggacgaaatctgcaccttcca

SEQ ID NO: 484265 - DNA, 33 bp, Homo sapien
tatcaagctgtatatacgtttcgacatttcata

SEQ ID NO: 484266 - DNA, 33 bp, Homo sapien
tatcaagctgtatatatgtttcgacatttcata

SEQ ID NO: 484267 - DNA, 33 bp, Homo sapien
tcactttcagccattaaggcaaaaacaccacaa

SEQ ID NO: 484268 - DNA, 33 bp, Homo sapien
tcactttcagccattatggcaaaaacaccacaa

SEQ ID NO: 484269 - DNA, 33 bp, Homo sapien
agtcatatggcaaccacgaggcaacaaacgtgg

SEQ ID NO: 484270 - DNA, 33 bp, Homo sapien
agtcatatggcaaccatgaggcaacaaacgtgg

SEQ ID NO: 484271 - DNA, 33 bp, Homo sapien
cattttaaagcttcataatcagtaaagtgttta

SEQ ID NO: 484272 - DNA, 33 bp, Homo sapien
cattttaaagcttcatgatcagtaaagtgttta

SEQ ID NO: 484273 - DNA, 33 bp, Homo sapien
tttttagtattttagacaggatttcatcatgtt

SEQ ID NO: 484274 - DNA, 33 bp, Homo sapien
tttttagtattttagagaggatttcatcatgtt

SEQ ID NO: 484275 - DNA, 33 bp, Homo sapien
agttaacagtgttgaaagtttgcaattaatgtc

SEQ ID NO: 484276 - DNA, 33 bp, Homo sapien
agttaacagtgttgaacgtttgcaattaatgtc

SEQ ID NO: 484277 - DNA, 33 bp, Homo sapien
aactcttggaagaaggaagaagtacagctgcct

SEQ ID NO: 484278 - DNA, 33 bp, Homo sapien
aactcttggaagaagggagaagtacagctgcct

SEQ ID NO: 484279 - DNA, 33 bp, Homo sapien
aactcagtgtggataccatcatcatgtgaaagt

SEQ ID NO: 484280 - DNA, 33 bp, Homo sapien
aactcagtgtggatactatcatcatgtgaaagt

SEQ ID NO: 484281 - DNA, 33 bp, Homo sapien
actgtatgtttttggactaaggcttcagtagat

SEQ ID NO: 484282 - DNA, 33 bp, Homo sapien
actgtatgtttttggattaaggcttcagtagat

SEQ ID NO: 484283 - DNA, 33 bp, Homo sapien
aaaagccacatagtaaaggatttttcaggatgt

SEQ ID NO: 484284 - DNA, 33 bp, Homo sapien
aaaagccacatagtaagggatttttcaggatgt

SEQ ID NO: 484285 - DNA, 33 bp, Homo sapien
cagtcacttctgattacgttgttttggacctgc

SEQ ID NO: 484286 - DNA, 33 bp, Homo sapien
cagtcacttctgattatgttgttttggacctgc

SEQ ID NO: 484287 - DNA, 33 bp, Homo sapien
ttggacctgcttcccaatacttcgatgtcatct

SEQ ID NO: 484288 - DNA, 33 bp, Homo sapien
ttggacctgcttcccactacttcgatgtcatct

SEQ ID NO: 484289 - DNA, 33 bp, Homo sapien
tgtacatttcaacgtacacttctgcataggggg

SEQ ID NO: 484290 - DNA, 33 bp, Homo sapien
tgtacatttcaacgtatacttctgcataggggg

SEQ ID NO: 484291 - DNA, 33 bp, Homo sapien
atatacattaaagagcaaaaacagttgttctac

SEQ ID NO: 484292 - DNA, 33 bp, Homo sapien
atatacattaaagagctaaaacagttgttctac

SEQ ID NO: 484293 - DNA, 33 bp, Homo sapien
ttgtgtttttacgttacgtagcagggatagaaa

SEQ ID NO: 484294 - DNA, 33 bp, Homo sapien
ttgtgtttttacgttaggtagcagggatagaaa

SEQ ID NO: 484295 - DNA, 33 bp, Homo sapien
gggtgatggctaagacaagtgaggtttattttt

SEQ ID NO: 484296 - DNA, 33 bp, Homo sapien
gggtgatggctaagacgagtgaggtttattttt

SEQ ID NO: 484297 - DNA, 33 bp, Homo sapien
tatgcaagtttagactgaatgatgttttgctga

SEQ ID NO: 484298 - DNA, 33 bp, Homo sapien
tatgcaagtttagacttaatgatgttttgctga

SEQ ID NO: 484299 - DNA, 33 bp, Homo sapien
gatttttgtcaggatcaaccaattatgtcctta

SEQ ID NO: 484300 - DNA, 33 bp, Homo sapien
gatttttgtcaggatccaccaattatgtcctta

SEQ ID NO: 484301 - DNA, 33 bp, Homo sapien
acatgttatcagggaacttatcacagaaagaaa

SEQ ID NO: 484302 - DNA, 33 bp, Homo sapien
acatgttatcagggaatttatcacagaaagaaa

SEQ ID NO: 484303 - DNA, 33 bp, Homo sapien
tctaaatgtattcccaatatctgcagcattgat

SEQ ID NO: 484304 - DNA, 33 bp, Homo sapien
tctaaatgtattcccagtatctgcagcattgat

SEQ ID NO: 484305 - DNA, 33 bp, Homo sapien
gcacaattgtagatacagaagaaggagggcaaa

SEQ ID NO: 484306 - DNA, 33 bp, Homo sapien
gcacaattgtagatacggaagaaggagggcaaa

SEQ ID NO: 484307 - DNA, 33 bp, Homo sapien
aattgtccttgcagaacgtaaagttaacacaat

SEQ ID NO: 484308 - DNA, 33 bp, Homo sapien
aattgtccttgcagaaggtaaagttaacacaat

SEQ ID NO: 484309 - DNA, 33 bp, Homo sapien
agctggacaagcattaagtcttttggatgtctc

SEQ ID NO: 484310 - DNA, 33 bp, Homo sapien
agctggacaagcattatgtcttttggatgtctc

SEQ ID NO: 484311 - DNA, 33 bp, Homo sapien
ctaacacatgagctaaccttccctttctgtaaa

SEQ ID NO: 484312 - DNA, 33 bp, Homo sapien
ctaacacatgagctaatcttccctttctgtaaa

SEQ ID NO: 484313 - DNA, 33 bp, Homo sapien
accaataaatgtgatgcaatcctatgggttgac

SEQ ID NO: 484314 - DNA, 33 bp, Homo sapien
accaataaatgtgatggaatcctatgggttgac

SEQ ID NO: 484315 - DNA, 33 bp, Homo sapien
ataaatatacaaggcaaatccacttaaaacttg

SEQ ID NO: 484316 - DNA, 33 bp, Homo sapien
ataaatatacaaggcatatccacttaaaacttg

SEQ ID NO: 484317 - DNA, 33 bp, Homo sapien
aggtctattctctaaggccaaaattcaagtctt

SEQ ID NO: 484318 - DNA, 33 bp, Homo sapien
aggtctattctctaagtccaaaattcaagtctt

SEQ ID NO: 484319 - DNA, 33 bp, Homo sapien
taagtgtagcactagccaaaaggcacttaagcc

SEQ ID NO: 484320 - DNA, 33 bp, Homo sapien
taagtgtagcactagcgaaaaggcacttaagcc

SEQ ID NO: 484321 - DNA, 33 bp, Homo sapien
agtcagcagtacctccaatagaaacaagtgaca

SEQ ID NO: 484322 - DNA, 33 bp, Homo sapien
agtcagcagtacctccgatagaaacaagtgaca

SEQ ID NO: 484323 - DNA, 33 bp, Homo sapien
ctaattctactactaaccactttcccccagtct

SEQ ID NO: 484324 - DNA, 33 bp, Homo sapien
ctaattctactactaatcactttcccccagtct

SEQ ID NO: 484325 - DNA, 33 bp, Homo sapien
tcagaagtcatagatacagtagcattaaatgct

SEQ ID NO: 484326 - DNA, 33 bp, Homo sapien
tcagaagtcatagatagagtagcattaaatgct

SEQ ID NO: 484327 - DNA, 33 bp, Homo sapien
tgagtggctataacatgaagctagaaaccattc

SEQ ID NO: 484328 - DNA, 33 bp, Homo sapien
tgagtggctataacattaagctagaaaccattc

SEQ ID NO: 484329 - DNA, 33 bp, Homo sapien
atttaaaaagcaattccattaatacatgattac

SEQ ID NO: 484330 - DNA, 33 bp, Homo sapien
atttaaaaagcaattcgattaatacatgattac

SEQ ID NO: 484331 - DNA, 33 bp, Homo sapien
cctttagtctgctctacgttttattgttccata

SEQ ID NO: 484332 - DNA, 33 bp, Homo sapien
cctttagtctgctctatgttttattgttccata

SEQ ID NO: 484333 - DNA, 33 bp, Homo sapien
tgtaacacatttaagcaagaaagggaaaatgtg

SEQ ID NO: 484334 - DNA, 33 bp, Homo sapien
tgtaacacatttaagcgagaaagggaaaatgtg

SEQ ID NO: 484335 - DNA, 33 bp, Homo sapien
atgcacaggaggttcccaccttagtgagcaatc

SEQ ID NO: 484336 - DNA, 33 bp, Homo sapien
atgcacaggaggttcctaccttagtgagcaatc

SEQ ID NO: 484337 - DNA, 33 bp, Homo sapien
cacacacgcatatatacctcctttgatccagca

SEQ ID NO: 484338 - DNA, 33 bp, Homo sapien
cacacacgcatatatatctcctttgatccagca

SEQ ID NO: 484339 - DNA, 33 bp, Homo sapien
ggaagctgttctctcacaaggttctaagggtga

SEQ ID NO: 484340 - DNA, 33 bp, Homo sapien
ggaagctgttctctcataaggttctaagggtga

SEQ ID NO: 484341 - DNA, 33 bp, Homo sapien
gctgcactaggaacaaatcctttggagaaaaag

SEQ ID NO: 484342 - DNA, 33 bp, Homo sapien
gctgcactaggaacaagtcctttggagaaaaag

SEQ ID NO: 484343 - DNA, 33 bp, Homo sapien
ccagtctacatcggagaagagtgctggagggct

SEQ ID NO: 484344 - DNA, 33 bp, Homo sapien
ccagtctacatcggaggagagtgctggagggct

SEQ ID NO: 484345 - DNA, 33 bp, Homo sapien
gagacagatggttatacgaaataatattagcca

SEQ ID NO: 484346 - DNA, 33 bp, Homo sapien
gagacagatggttataggaaataatattagcca

SEQ ID NO: 484347 - DNA, 33 bp, Homo sapien
acactatgcctaggaccgaggtttcacagatgg

SEQ ID NO: 484348 - DNA, 33 bp, Homo sapien
acactatgcctaggactgaggtttcacagatgg

SEQ ID NO: 484349 - DNA, 33 bp, Homo sapien
agcccagaactctgacaccttaaattatagctt

SEQ ID NO: 484350 - DNA, 33 bp, Homo sapien
agcccagaactctgacgccttaaattatagctt

SEQ ID NO: 484351 - DNA, 33 bp, Homo sapien
agcaggttgtcaaggaggacttaccaaggtaag

SEQ ID NO: 484352 - DNA, 33 bp, Homo sapien
agcaggttgtcaaggatgacttaccaaggtaag

SEQ ID NO: 484353 - DNA, 33 bp, Homo sapien
aatgacatatttgaacaaggctcatttccaggg

SEQ ID NO: 484354 - DNA, 33 bp, Homo sapien
aatgacatatttgaacgaggctcatttccaggg

SEQ ID NO: 484355 - DNA, 33 bp, Homo sapien
gcctcaggtactttccacacatacacacatgct

SEQ ID NO: 484356 - DNA, 33 bp, Homo sapien
gcctcaggtactttccgcacatacacacatgct

SEQ ID NO: 484357 - DNA, 33 bp, Homo sapien
gatatattcaaggtgaagagtgattagatttat

SEQ ID NO: 484358 - DNA, 33 bp, Homo sapien
gatatattcaaggtgaggagtgattagatttat

SEQ ID NO: 484359 - DNA, 33 bp, Homo sapien
gatctgacccaatgtacagttttttgtttttaa

SEQ ID NO: 484360 - DNA, 33 bp, Homo sapien
gatctgacccaatgtagagttttttgtttttaa

SEQ ID NO: 484361 - DNA, 33 bp, Homo sapien
attgcaataaatacttcaaaaactgacagagaa

SEQ ID NO: 484362 - DNA, 33 bp, Homo sapien
attgcaataaatacttgaaaaactgacagagaa

SEQ ID NO: 484363 - DNA, 33 bp, Homo sapien
ctgcatttgtgaaaaaatgttaagcattagaaa

SEQ ID NO: 484364 - DNA, 33 bp, Homo sapien
ctgcatttgtgaaaaactgttaagcattagaaa

SEQ ID NO: 484365 - DNA, 33 bp, Homo sapien
agaacatggtggttaacgcttgaccactaaaca

SEQ ID NO: 484366 - DNA, 33 bp, Homo sapien
agaacatggtggttaatgcttgaccactaaaca

SEQ ID NO: 484367 - DNA, 33 bp, Homo sapien
ctgtccatcagaatcacaatggcagtgaagccc

SEQ ID NO: 484368 - DNA, 33 bp, Homo sapien
ctgtccatcagaatcataatggcagtgaagccc

SEQ ID NO: 484369 - DNA, 33 bp, Homo sapien
ctgagtatgatggctacgattggaactgaagtg

SEQ ID NO: 484370 - DNA, 33 bp, Homo sapien
ctgagtatgatggctatgattggaactgaagtg

SEQ ID NO: 484371 - DNA, 33 bp, Homo sapien
cttgagccaatcctaagcataactgtgatccct

SEQ ID NO: 484372 - DNA, 33 bp, Homo sapien
cttgagccaatcctaatcataactgtgatccct

SEQ ID NO: 484373 - DNA, 33 bp, Homo sapien
ataaatactaagcaaaattacaggaatattttt

SEQ ID NO: 484374 - DNA, 33 bp, Homo sapien
ataaatactaagcaaagttacaggaatattttt

SEQ ID NO: 484375 - DNA, 33 bp, Homo sapien
ccatttgcaagtgcccaggctaccagaattccc

SEQ ID NO: 484376 - DNA, 33 bp, Homo sapien
ccatttgcaagtgcccgggctaccagaattccc

SEQ ID NO: 484377 - DNA, 33 bp, Homo sapien
gtgctgcccagattcacaagaatattgcccaca

SEQ ID NO: 484378 - DNA, 33 bp, Homo sapien
gtgctgcccagattcagaagaatattgcccaca

SEQ ID NO: 484379 - DNA, 33 bp, Homo sapien
tatcacagcttagaaacgactttaactctcaat

SEQ ID NO: 484380 - DNA, 33 bp, Homo sapien
tatcacagcttagaaatgactttaactctcaat

SEQ ID NO: 484381 - DNA, 33 bp, Homo sapien
gaagtgagtgatctaaactattgtatagaggta

SEQ ID NO: 484382 - DNA, 33 bp, Homo sapien
gaagtgagtgatctaagctattgtatagaggta

SEQ ID NO: 484383 - DNA, 33 bp, Homo sapien
gtgtctttcttaagggcagcgatcttttcttac

SEQ ID NO: 484384 - DNA, 33 bp, Homo sapien
gtgtctttcttaagggtagcgatcttttcttac

SEQ ID NO: 484385 - DNA, 33 bp, Homo sapien
ttaaaatttaaaataaggcacgtaattttaata

SEQ ID NO: 484386 - DNA, 33 bp, Homo sapien
ttaaaatttaaaataatgcacgtaattttaata

SEQ ID NO: 484387 - DNA, 33 bp, Homo sapien
aatgcaagactttaacacagttctctagcagtt

SEQ ID NO: 484388 - DNA, 33 bp, Homo sapien
aatgcaagactttaacgcagttctctagcagtt

SEQ ID NO: 484389 - DNA, 33 bp, Homo sapien
tttggccaacatgtgggagttactgtcaggaaa

SEQ ID NO: 484390 - DNA, 33 bp, Homo sapien
tttggccaacatgtggtagttactgtcaggaaa

SEQ ID NO: 484391 - DNA, 33 bp, Homo sapien
cattcctgttcaaaaacgggcaaagaggccagg

SEQ ID NO: 484392 - DNA, 33 bp, Homo sapien
cattcctgttcaaaaatgggcaaagaggccagg

SEQ ID NO: 484393 - DNA, 33 bp, Homo sapien
acaaaaatcaactctaacagtgtgtgtattggg

SEQ ID NO: 484394 - DNA, 33 bp, Homo sapien
acaaaaatcaactctatcagtgtgtgtattggg

SEQ ID NO: 484395 - DNA, 33 bp, Homo sapien
tacttatttttgccaccagagagggtcacacat

SEQ ID NO: 484396 - DNA, 33 bp, Homo sapien
tacttatttttgccactagagagggtcacacat

SEQ ID NO: 484397 - DNA, 33 bp, Homo sapien
aatactaccattatctaaaaacaatgaattatt

SEQ ID NO: 484398 - DNA, 33 bp, Homo sapien
aatactaccattatctgaaaacaatgaattatt

SEQ ID NO: 484399 - DNA, 33 bp, Homo sapien
agctctattactaaaaatacgtggagttatcaa

SEQ ID NO: 484400 - DNA, 33 bp, Homo sapien
agctctattactaaaattacgtggagttatcaa

SEQ ID NO: 484401 - DNA, 33 bp, Homo sapien
tcagagaggacataaaaatagcaaagcagcaca

SEQ ID NO: 484402 - DNA, 33 bp, Homo sapien
tcagagaggacataaacatagcaaagcagcaca

SEQ ID NO: 484403 - DNA, 33 bp, Homo sapien
cggaattgggttcacaaatgtcaaaattttact

SEQ ID NO: 484404 - DNA, 33 bp, Homo sapien
cggaattgggttcacagatgtcaaaattttact

SEQ ID NO: 484405 - DNA, 33 bp, Homo sapien
tggtatttaaaataaacgtgtcagtctcacagc

SEQ ID NO: 484406 - DNA, 33 bp, Homo sapien
tggtatttaaaataaatgtgtcagtctcacagc

SEQ ID NO: 484407 - DNA, 33 bp, Homo sapien
ctcagtctttagcacacgtttcttgctgagtgc

SEQ ID NO: 484408 - DNA, 33 bp, Homo sapien
ctcagtctttagcacaggtttcttgctgagtgc

SEQ ID NO: 484409 - DNA, 33 bp, Homo sapien
ataagtgacagagaaaaagagttgtgggtttag

SEQ ID NO: 484410 - DNA, 33 bp, Homo sapien
ataagtgacagagaaagagagttgtgggtttag

SEQ ID NO: 484411 - DNA, 33 bp, Homo sapien
ttaggcaaaaataaaaggtttcaaggattcctg

SEQ ID NO: 484412 - DNA, 33 bp, Homo sapien
ttaggcaaaaataaaatgtttcaaggattcctg

SEQ ID NO: 484413 - DNA, 33 bp, Homo sapien
gacaacaatgaggaacagcattgatagcataag

SEQ ID NO: 484414 - DNA, 33 bp, Homo sapien
gacaacaatgaggaacggcattgatagcataag

SEQ ID NO: 484415 - DNA, 33 bp, Homo sapien
tggagctctccctgcacgagtcccactagctcc

SEQ ID NO: 484416 - DNA, 33 bp, Homo sapien
tggagctctccctgcatgagtcccactagctcc

SEQ ID NO: 484417 - DNA, 33 bp, Homo sapien
acgtacatgttaggcaaaattttatactctttc

SEQ ID NO: 484418 - DNA, 33 bp, Homo sapien
acgtacatgttaggcagaattttatactctttc

SEQ ID NO: 484419 - DNA, 33 bp, Homo sapien
acaacctgaaaggccaggtgtaaattgagaaat

SEQ ID NO: 484420 - DNA, 33 bp, Homo sapien
acaacctgaaaggccatgtgtaaattgagaaat

SEQ ID NO: 484421 - DNA, 33 bp, Homo sapien
caaatcagcttaaagaactctcatgtacacacc

SEQ ID NO: 484422 - DNA, 33 bp, Homo sapien
caaatcagcttaaagatctctcatgtacacacc

SEQ ID NO: 484423 - DNA, 33 bp, Homo sapien
cttttcattcttcttaccttcagacctagaaac

SEQ ID NO: 484424 - DNA, 33 bp, Homo sapien
cttttcattcttcttatcttcagacctagaaac

SEQ ID NO: 484425 - DNA, 33 bp, Homo sapien
gggtaggtgctgttgtcaagagtcatgagtgcg

SEQ ID NO: 484426 - DNA, 33 bp, Homo sapien
gggtaggtgctgttgttaagagtcatgagtgcg

SEQ ID NO: 484427 - DNA, 33 bp, Homo sapien
tgatctttggttatacagtaaacagaacttatc

SEQ ID NO: 484428 - DNA, 33 bp, Homo sapien
tgatctttggttatacggtaaacagaacttatc

SEQ ID NO: 484429 - DNA, 33 bp, Homo sapien
ctgtatgctgtgctaagccactatgaggaaccc

SEQ ID NO: 484430 - DNA, 33 bp, Homo sapien
ctgtatgctgtgctaatccactatgaggaaccc

SEQ ID NO: 484431 - DNA, 33 bp, Homo sapien
tttaagagattcgtcacagtgccccttgggaga

SEQ ID NO: 484432 - DNA, 33 bp, Homo sapien
tttaagagattcgtcatagtgccccttgggaga

SEQ ID NO: 484433 - DNA, 33 bp, Homo sapien
accctggtggataacaaagctaaaagaaaagtc

SEQ ID NO: 484434 - DNA, 33 bp, Homo sapien
accctggtggataacacagctaaaagaaaagtc

SEQ ID NO: 484435 - DNA, 33 bp, Homo sapien
tcagaggtctttgtgaacaaactcaaaatctaa

SEQ ID NO: 484436 - DNA, 33 bp, Homo sapien
tcagaggtctttgtgaccaaactcaaaatctaa

SEQ ID NO: 484437 - DNA, 33 bp, Homo sapien
cattaaaacacagacactaaatacggccctatg

SEQ ID NO: 484438 - DNA, 33 bp, Homo sapien
cattaaaacacagacagtaaatacggccctatg

SEQ ID NO: 484439 - DNA, 33 bp, Homo sapien
ttggctgagctacatacctttgttttgtgcatg

SEQ ID NO: 484440 - DNA, 33 bp, Homo sapien
ttggctgagctacatatctttgttttgtgcatg

SEQ ID NO: 484441 - DNA, 33 bp, Homo sapien
tgggatgacagaaaaactggtagactagaagtt

SEQ ID NO: 484442 - DNA, 33 bp, Homo sapien
tgggatgacagaaaaattggtagactagaagtt

SEQ ID NO: 484443 - DNA, 33 bp, Homo sapien
gaaaaactagattcaaattcaagtgatcacatg

SEQ ID NO: 484444 - DNA, 33 bp, Homo sapien
gaaaaactagattcaatttcaagtgatcacatg

SEQ ID NO: 484445 - DNA, 33 bp, Homo sapien
gcacataaaggaaataggtgatgcaagtatctt

SEQ ID NO: 484446 - DNA, 33 bp, Homo sapien
gcacataaaggaaatatgtgatgcaagtatctt

SEQ ID NO: 484447 - DNA, 33 bp, Homo sapien
attactgtaacatggccctatacattttatgct

SEQ ID NO: 484448 - DNA, 33 bp, Homo sapien
attactgtaacatggcgctatacattttatgct

SEQ ID NO: 484449 - DNA, 33 bp, Homo sapien
gctagatgctactcaacctctttcaggaactgt

SEQ ID NO: 484450 - DNA, 33 bp, Homo sapien
gctagatgctactcaatctctttcaggaactgt

SEQ ID NO: 484451 - DNA, 33 bp, Homo sapien
tcctaaaactgtataccattggttaatttttct

SEQ ID NO: 484452 - DNA, 33 bp, Homo sapien
tcctaaaactgtatactattggttaatttttct

SEQ ID NO: 484453 - DNA, 33 bp, Homo sapien
aagcaaaacttcaaacacctcttacaggtctct

SEQ ID NO: 484454 - DNA, 33 bp, Homo sapien
aagcaaaacttcaaacgcctcttacaggtctct

SEQ ID NO: 484455 - DNA, 33 bp, Homo sapien
cacttcgttgtcaaccacttgatttttcaggct

SEQ ID NO: 484456 - DNA, 33 bp, Homo sapien
cacttcgttgtcaacctcttgatttttcaggct

SEQ ID NO: 484457 - DNA, 33 bp, Homo sapien
taacaatattttgataagccaaagatcctgttt

SEQ ID NO: 484458 - DNA, 33 bp, Homo sapien
taacaatattttgatacgccaaagatcctgttt

SEQ ID NO: 484459 - DNA, 33 bp, Homo sapien
tagataagctcagtaactgaattttagcaaaaa

SEQ ID NO: 484460 - DNA, 33 bp, Homo sapien
tagataagctcagtaattgaattttagcaaaaa

SEQ ID NO: 484461 - DNA, 33 bp, Homo sapien
ttaaaaagacaatatgccaatatcgggaaaaat

SEQ ID NO: 484462 - DNA, 33 bp, Homo sapien
ttaaaaagacaatatggcaatatcgggaaaaat

SEQ ID NO: 484463 - DNA, 33 bp, Homo sapien
tccatcttggcgctcacacctatctacacagat

SEQ ID NO: 484464 - DNA, 33 bp, Homo sapien
tccatcttggcgctcagacctatctacacagat

SEQ ID NO: 484465 - DNA, 33 bp, Homo sapien
ttacagtcacttttaaatatagggatattgtca

SEQ ID NO: 484466 - DNA, 33 bp, Homo sapien
ttacagtcacttttaagtatagggatattgtca

SEQ ID NO: 484467 - DNA, 33 bp, Homo sapien
catactggctcctttacatttcctagttaaatg

SEQ ID NO: 484468 - DNA, 33 bp, Homo sapien
catactggctcctttatatttcctagttaaatg

SEQ ID NO: 484469 - DNA, 33 bp, Homo sapien
gccactgctcaataaacaatagctgtcttatta

SEQ ID NO: 484470 - DNA, 33 bp, Homo sapien
gccactgctcaataaataatagctgtcttatta

SEQ ID NO: 484471 - DNA, 33 bp, Homo sapien
tgctaatttgcaatacaagtgttgttccatccc

SEQ ID NO: 484472 - DNA, 33 bp, Homo sapien
tgctaatttgcaataccagtgttgttccatccc

SEQ ID NO: 484473 - DNA, 33 bp, Homo sapien
taagtacagattttgacaaagtttatgtagatt

SEQ ID NO: 484474 - DNA, 33 bp, Homo sapien
taagtacagattttgataaagtttatgtagatt

SEQ ID NO: 484475 - DNA, 33 bp, Homo sapien
ggaaaactccattcaaaagaacgcaggcaaaag

SEQ ID NO: 484476 - DNA, 33 bp, Homo sapien
ggaaaactccattcaagagaacgcaggcaaaag

SEQ ID NO: 484477 - DNA, 33 bp, Homo sapien
acaaaagcaccagctaaacaaatgtaccagact

SEQ ID NO: 484478 - DNA, 33 bp, Homo sapien
acaaaagcaccagctagacaaatgtaccagact

SEQ ID NO: 484479 - DNA, 33 bp, Homo sapien
tccagttctcagggtacagtctggtacatttgt

SEQ ID NO: 484480 - DNA, 33 bp, Homo sapien
tccagttctcagggtatagtctggtacatttgt

SEQ ID NO: 484481 - DNA, 33 bp, Homo sapien
gtcacactaaatgcaagctcaggcacagaattc

SEQ ID NO: 484482 - DNA, 33 bp, Homo sapien
gtcacactaaatgcaatctcaggcacagaattc

SEQ ID NO: 484483 - DNA, 33 bp, Homo sapien
atactccattactgaacagtcattggctgtaga

SEQ ID NO: 484484 - DNA, 33 bp, Homo sapien
atactccattactgaagagtcattggctgtaga

SEQ ID NO: 484485 - DNA, 33 bp, Homo sapien
catggccttgagttaaatgaaggcaggggggtt

SEQ ID NO: 484486 - DNA, 33 bp, Homo sapien
catggccttgagttaagtgaaggcaggggggtt

SEQ ID NO: 484487 - DNA, 33 bp, Homo sapien
atgatgtggctcaccacctgggtttcctccttt

SEQ ID NO: 484488 - DNA, 33 bp, Homo sapien
atgatgtggctcaccagctgggtttcctccttt

SEQ ID NO: 484489 - DNA, 33 bp, Homo sapien
gggaagaaaaccaggcagattgcaataaaaatt

SEQ ID NO: 484490 - DNA, 33 bp, Homo sapien
gggaagaaaaccaggcggattgcaataaaaatt

SEQ ID NO: 484491 - DNA, 33 bp, Homo sapien
ataatttatccatagactattagatcacaatga

SEQ ID NO: 484492 - DNA, 33 bp, Homo sapien
ataatttatccatagattattagatcacaatga

SEQ ID NO: 484493 - DNA, 33 bp, Homo sapien
cagtaaaaacctctctcaaactagcttaagtac

SEQ ID NO: 484494 - DNA, 33 bp, Homo sapien
cagtaaaaacctctctgaaactagcttaagtac

SEQ ID NO: 484495 - DNA, 33 bp, Homo sapien
ctacctgcagttgtcaccattaatgctgtgcct

SEQ ID NO: 484496 - DNA, 33 bp, Homo sapien
ctacctgcagttgtcatcattaatgctgtgcct

SEQ ID NO: 484497 - DNA, 33 bp, Homo sapien
gactacaggaggggtcaatgggaagggaaccag

SEQ ID NO: 484498 - DNA, 33 bp, Homo sapien
gactacaggaggggtcgatgggaagggaaccag

SEQ ID NO: 484499 - DNA, 33 bp, Homo sapien
agttggagaagatgctaaaatacttggctttca

SEQ ID NO: 484500 - DNA, 33 bp, Homo sapien
agttggagaagatgctgaaatacttggctttca

SEQ ID NO: 484501 - DNA, 33 bp, Homo sapien
ccaaagactcactgtgcagctaacgccaattac

SEQ ID NO: 484502 - DNA, 33 bp, Homo sapien
ccaaagactcactgtgtagctaacgccaattac

SEQ ID NO: 484503 - DNA, 33 bp, Homo sapien
ttgaaaaatctagctaaactgattgttggatgg

SEQ ID NO: 484504 - DNA, 33 bp, Homo sapien
ttgaaaaatctagctatactgattgttggatgg

SEQ ID NO: 484505 - DNA, 33 bp, Homo sapien
aggaagtgtgacctcaagagaggcaattttgtt

SEQ ID NO: 484506 - DNA, 33 bp, Homo sapien
aggaagtgtgacctcaggagaggcaattttgtt

SEQ ID NO: 484507 - DNA, 33 bp, Homo sapien
tatggttaaaacagaccctggaatcagacagat

SEQ ID NO: 484508 - DNA, 33 bp, Homo sapien
tatggttaaaacagactctggaatcagacagat

SEQ ID NO: 484509 - DNA, 33 bp, Homo sapien
gatgcagtagagtaataaagtccaggtactctt

SEQ ID NO: 484510 - DNA, 33 bp, Homo sapien
gatgcagtagagtaatgaagtccaggtactctt

SEQ ID NO: 484511 - DNA, 33 bp, Homo sapien
gggctcacagttaaccagaggatacaggcaata

SEQ ID NO: 484512 - DNA, 33 bp, Homo sapien
gggctcacagttaaccggaggatacaggcaata

SEQ ID NO: 484513 - DNA, 33 bp, Homo sapien
gatgttgggtgttgcacgattctagtgttacaa

SEQ ID NO: 484514 - DNA, 33 bp, Homo sapien
gatgttgggtgttgcaggattctagtgttacaa

SEQ ID NO: 484515 - DNA, 33 bp, Homo sapien
ccacttgactcttaggaaaaacgaaaacaaaga

SEQ ID NO: 484516 - DNA, 33 bp, Homo sapien
ccacttgactcttagggaaaacgaaaacaaaga

SEQ ID NO: 484517 - DNA, 33 bp, Homo sapien
tgtgctgcaccgaagaaaaatatctaaacatca

SEQ ID NO: 484518 - DNA, 33 bp, Homo sapien
tgtgctgcaccgaagagaaatatctaaacatca

SEQ ID NO: 484519 - DNA, 33 bp, Homo sapien; identical to SEQ ID NO: 484517

SEQ ID NO: 484520 - DNA, 33 bp, Homo sapien; identical to SEQ ID NO: 484518

SEQ ID NO: 484521 - DNA, 33 bp, Homo sapien
aactgaagatccagaacaggaagttagagaatc

SEQ ID NO: 484522 - DNA, 33 bp, Homo sapien
aactgaagatccagaagaggaagttagagaatc

SEQ ID NO: 484523 - DNA, 33 bp, Homo sapien
tgtgtcaagttggctaaactggtgttcccaggg

SEQ ID NO: 484524 - DNA, 33 bp, Homo sapien
tgtgtcaagttggctacactggtgttcccaggg

SEQ ID NO: 484525 - DNA, 33 bp, Homo sapien
agtaaatgatggctataatacaatgtcatggtt

SEQ ID NO: 484526 - DNA, 33 bp, Homo sapien
agtaaatgatggctattatacaatgtcatggtt

SEQ ID NO: 484527 - DNA, 33 bp, Homo sapien
tttctcttacaaaggaagcaagcaaataagagt

SEQ ID NO: 484528 - DNA, 33 bp, Homo sapien
tttctcttacaaaggacgcaagcaaataagagt

SEQ ID NO: 484529 - DNA, 33 bp, Homo sapien
ctcagatcctcattcacactgaggtgttgatga

SEQ ID NO: 484530 - DNA, 33 bp, Homo sapien
ctcagatcctcattcatactgaggtgttgatga

SEQ ID NO: 484531 - DNA, 33 bp, Homo sapien
cagaagtacaatggtccccaaactattcagcac

SEQ ID NO: 484532 - DNA, 33 bp, Homo sapien
cagaagtacaatggtcgccaaactattcagcac

SEQ ID NO: 484533 - DNA, 33 bp, Homo sapien
catcagggacaacaccaggaaagaaaatggaga

SEQ ID NO: 484534 - DNA, 33 bp, Homo sapien
catcagggacaacacctggaaagaaaatggaga

SEQ ID NO: 484535 - DNA, 33 bp, Homo sapien
tggcctgggccagtcacgtagcagcttcagagg

SEQ ID NO: 484536 - DNA, 33 bp, Homo sapien
tggcctgggccagtcatgtagcagcttcagagg

SEQ ID NO: 484537 - DNA, 33 bp, Homo sapien
ggtatttaggttaaaaagtgacttgacttaggc

SEQ ID NO: 484538 - DNA, 33 bp, Homo sapien
ggtatttaggttaaaaggtgacttgacttaggc

SEQ ID NO: 484539 - DNA, 33 bp, Homo sapien
catatagcaggcactccatgaatactgaatcct

SEQ ID NO: 484540 - DNA, 33 bp, Homo sapien
catatagcaggcactctatgaatactgaatcct

SEQ ID NO: 484541 - DNA, 33 bp, Homo sapien
cctgcagagtctccagaaaataatattcagtct

SEQ ID NO: 484542 - DNA, 33 bp, Homo sapien
cctgcagagtctccaggaaataatattcagtct

SEQ ID NO: 484543 - DNA, 33 bp, Homo sapien
acagagaatggtggtactaagctcttgggactg

SEQ ID NO: 484544 - DNA, 33 bp, Homo sapien
acagagaatggtggtattaagctcttgggactg

SEQ ID NO: 484545 - DNA, 33 bp, Homo sapien
tggtggcatgtaacaccatttaagcaaagatgc

SEQ ID NO: 484546 - DNA, 33 bp, Homo sapien
tggtggcatgtaacactatttaagcaaagatgc

SEQ ID NO: 484547 - DNA, 33 bp, Homo sapien
aaacagaaagtctttaccgttaagaatgtgtag

SEQ ID NO: 484548 - DNA, 33 bp, Homo sapien
aaacagaaagtctttatcgttaagaatgtgtag

SEQ ID NO: 484549 - DNA, 33 bp, Homo sapien
aatagttaagaggttgcagtgcaaattctggtg

SEQ ID NO: 484550 - DNA, 33 bp, Homo sapien
aatagttaagaggttgtagtgcaaattctggtg

SEQ ID NO: 484551 - DNA, 33 bp, Homo sapien
gatcatgggtctatgcaattcaagcagtctctt

SEQ ID NO: 484552 - DNA, 33 bp, Homo sapien
gatcatgggtctatgcgattcaagcagtctctt

SEQ ID NO: 484553 - DNA, 33 bp, Homo sapien
tagaatctgaaaccatgaaggtaggatccagaa

SEQ ID NO: 484554 - DNA, 33 bp, Homo sapien
tagaatctgaaaccattaaggtaggatccagaa

SEQ ID NO: 484555 - DNA, 33 bp, Homo sapien
cctcacccatcacaaaattcatggctgaggccc

SEQ ID NO: 484556 - DNA, 33 bp, Homo sapien
cctcacccatcacaaacttcatggctgaggccc

SEQ ID NO: 484557 - DNA, 33 bp, Homo sapien
aatatccacacttatcggaatctgaaatgacta

SEQ ID NO: 484558 - DNA, 33 bp, Homo sapien
aatatccacacttatctgaatctgaaatgacta

SEQ ID NO: 484559 - DNA, 33 bp, Homo sapien
ggatccccattgctccaatagataagatgtctg

SEQ ID NO: 484560 - DNA, 33 bp, Homo sapien
ggatccccattgctcctatagataagatgtctg

SEQ ID NO: 484561 - DNA, 33 bp, Homo sapien
tttcagaggtcacaaaattggaacaagtaatgt

SEQ ID NO: 484562 - DNA, 33 bp, Homo sapien
tttcagaggtcacaaagttggaacaagtaatgt

SEQ ID NO: 484563 - DNA, 33 bp, Homo sapien
gaggcagatagataagcaaatgctataaaagtt

SEQ ID NO: 484564 - DNA, 33 bp, Homo sapien
gaggcagatagataagtaaatgctataaaagtt

SEQ ID NO: 484565 - DNA, 33 bp, Homo sapien
gtgtttatgatcttaacaggtccagagtgactg

SEQ ID NO: 484566 - DNA, 33 bp, Homo sapien
gtgtttatgatcttaataggtccagagtgactg

SEQ ID NO: 484567 - DNA, 33 bp, Homo sapien
ccaagaaaatgtccatcaggctaagcttgtctt

SEQ ID NO: 484568 - DNA, 33 bp, Homo sapien
ccaagaaaatgtccatgaggctaagcttgtctt

SEQ ID NO: 484569 - DNA, 33 bp, Homo sapien
tttatgatggtaaacaccagttttcaaagttgt

SEQ ID NO: 484570 - DNA, 33 bp, Homo sapien
tttatgatggtaaacagcagttttcaaagttgt

SEQ ID NO: 484571 - DNA, 33 bp, Homo sapien
agaaagcccaacaagagtcacaactttgaaaac

SEQ ID NO: 484572 - DNA, 33 bp, Homo sapien
agaaagcccaacaagattcacaactttgaaaac

SEQ ID NO: 484573 - DNA, 33 bp, Homo sapien
cctcccaaagctcaacaaaatctcctatataat

SEQ ID NO: 484574 - DNA, 33 bp, Homo sapien
cctcccaaagctcaacgaaatctcctatataat

SEQ ID NO: 484575 - DNA, 33 bp, Homo sapien
atggtcatgtacatacacctcttaaaacagtac

SEQ ID NO: 484576 - DNA, 33 bp, Homo sapien
atggtcatgtacatacgcctcttaaaacagtac

SEQ ID NO: 484577 - DNA, 33 bp, Homo sapien
ttcttagctcctttcccaccctaattcgtgacc

SEQ ID NO: 484578 - DNA, 33 bp, Homo sapien
ttcttagctcctttcctaccctaattcgtgacc

SEQ ID NO: 484579 - DNA, 33 bp, Homo sapien
tattatcctaatttacaggagcaacaacaaaag

SEQ ID NO: 484580 - DNA, 33 bp, Homo sapien
tattatcctaatttacgggagcaacaacaaaag

SEQ ID NO: 484581 - DNA, 33 bp, Homo sapien
acattccaggcaatgacaacagcaaagactagg

SEQ ID NO: 484582 - DNA, 33 bp, Homo sapien
acattccaggcaatgagaacagcaaagactagg

SEQ ID NO: 484583 - DNA, 33 bp, Homo sapien
tctactaaacatacgaaattaactgggcatggt

SEQ ID NO: 484584 - DNA, 33 bp, Homo sapien
tctactaaacatacgatattaactgggcatggt

SEQ ID NO: 484585 - DNA, 33 bp, Homo sapien
gccaggtttcttcataaacttcaaccatcgggc

SEQ ID NO: 484586 - DNA, 33 bp, Homo sapien
gccaggtttcttcatatacttcaaccatcgggc

SEQ ID NO: 484587 - DNA, 33 bp, Homo sapien
gccaccagatgcaaaacgcctcaaacctgagtc

SEQ ID NO: 484588 - DNA, 33 bp, Homo sapien
gccaccagatgcaaaatgcctcaaacctgagtc

SEQ ID NO: 484589 - DNA, 33 bp, Homo sapien
gggtgaaaaggccatcaaacggggaaagaatac

SEQ ID NO: 484590 - DNA, 33 bp, Homo sapien
gggtgaaaaggccatccaacggggaaagaatac

SEQ ID NO: 484591 - DNA, 33 bp, Homo sapien
agaccccggatccaggaagctcaacagacaacc

SEQ ID NO: 484592 - DNA, 33 bp, Homo sapien
agaccccggatccaggcagctcaacagacaacc

SEQ ID NO: 484593 - DNA, 33 bp, Homo sapien
ccagctgctgggctaaatgtcaaggaacagagc

SEQ ID NO: 484594 - DNA, 33 bp, Homo sapien
ccagctgctgggctaagtgtcaaggaacagagc

SEQ ID NO: 484595 - DNA, 33 bp, Homo sapien
gcatatgccgtggtcaacctgtatctgccgggc

SEQ ID NO: 484596 - DNA, 33 bp, Homo sapien
gcatatgccgtggtcaccctgtatctgccgggc

SEQ ID NO: 484597 - DNA, 33 bp, Homo sapien
cttcatggatgtcaacaagttttagtgtcagga

SEQ ID NO: 484598 - DNA, 33 bp, Homo sapien
cttcatggatgtcaacgagttttagtgtcagga

SEQ ID NO: 484599 - DNA, 33 bp, Homo sapien
actctgctgtcatgagaacttaccatccagtta

SEQ ID NO: 484600 - DNA, 33 bp, Homo sapien
actctgctgtcatgaggacttaccatccagtta

SEQ ID NO: 484601 - DNA, 33 bp, Homo sapien
ctcccttaatgaaaagaacctggcagaggctgt

SEQ ID NO: 484602 - DNA, 33 bp, Homo sapien
ctcccttaatgaaaaggacctggcagaggctgt

SEQ ID NO: 484603 - DNA, 33 bp, Homo sapien
atcttactccttcttacgactgaataacattcc

SEQ ID NO: 484604 - DNA, 33 bp, Homo sapien
atcttactccttcttatgactgaataacattcc

SEQ ID NO: 484605 - DNA, 33 bp, Homo sapien
agaaagcagagaaaataatagcaaacataagac

SEQ ID NO: 484606 - DNA, 33 bp, Homo sapien
agaaagcagagaaaattatagcaaacataagac

SEQ ID NO: 484607 - DNA, 33 bp, Homo sapien
gtacttattgactcccagacaagccgaaacccc

SEQ ID NO: 484608 - DNA, 33 bp, Homo sapien
gtacttattgactcccggacaagccgaaacccc

SEQ ID NO: 484609 - DNA, 33 bp, Homo sapien
ataaggggcaaaattgcagcaagtgttttgggt

SEQ ID NO: 484610 - DNA, 33 bp, Homo sapien
ataaggggcaaaattggagcaagtgttttgggt

SEQ ID NO: 484611 - DNA, 33 bp, Homo sapien
gccttcccgctaaaataagaataaggttaagta

SEQ ID NO: 484612 - DNA, 33 bp, Homo sapien
gccttcccgctaaaatgagaataaggttaagta

SEQ ID NO: 484613 - DNA, 33 bp, Homo sapien
gtagcttgaatgtaaccgctttaagaaaggttc

SEQ ID NO: 484614 - DNA, 33 bp, Homo sapien
gtagcttgaatgtaactgctttaagaaaggttc

SEQ ID NO: 484615 - DNA, 33 bp, Homo sapien
gagcatgatttgaaaactactttcctaggttaa

SEQ ID NO: 484616 - DNA, 33 bp, Homo sapien
gagcatgatttgaaaattactttcctaggttaa

SEQ ID NO: 484617 - DNA, 33 bp, Homo sapien
aaacttctgacacagcaaaagcaggaagaggcc

SEQ ID NO: 484618 - DNA, 33 bp, Homo sapien
aaacttctgacacagcgaaagcaggaagaggcc

SEQ ID NO: 484619 - DNA, 33 bp, Homo sapien
tttgctgtgcaggaacgctttagtttccagttg

SEQ ID NO: 484620 - DNA, 33 bp, Homo sapien
tttgctgtgcaggaactctttagtttccagttg

SEQ ID NO: 484621 - DNA, 33 bp, Homo sapien
acttgtgaagtccatgacataagacactatctt

SEQ ID NO: 484622 - DNA, 33 bp, Homo sapien
acttgtgaagtccatgccataagacactatctt

SEQ ID NO: 484623 - DNA, 33 bp, Homo sapien
atcctctaagtaattccaagataaccctcctaa

SEQ ID NO: 484624 - DNA, 33 bp, Homo sapien
atcctctaagtaattctaagataaccctcctaa

SEQ ID NO: 484625 - DNA, 33 bp, Homo sapien
taagctaaactgcataaatattttgattaacag

SEQ ID NO: 484626 - DNA, 33 bp, Homo sapien
taagctaaactgcatatatattttgattaacag

SEQ ID NO: 484627 - DNA, 33 bp, Homo sapien
taaaagagcaaacttacaaactcgtgattttat

SEQ ID NO: 484628 - DNA, 33 bp, Homo sapien
taaaagagcaaacttataaactcgtgattttat

SEQ ID NO: 484629 - DNA, 33 bp, Homo sapien
tagcaaaatgttagcaatgatggaatcaagatg

SEQ ID NO: 484630 - DNA, 33 bp, Homo sapien
tagcaaaatgttagcagtgatggaatcaagatg

SEQ ID NO: 484631 - DNA, 33 bp, Homo sapien
ggcttgaaagcagacaaagaaggtttacacatg

SEQ ID NO: 484632 - DNA, 33 bp, Homo sapien
ggcttgaaagcagacagagaaggtttacacatg

SEQ ID NO: 484633 - DNA, 33 bp, Homo sapien
tagagtccatgtcatacaatatgttttgattta

SEQ ID NO: 484634 - DNA, 33 bp, Homo sapien
tagagtccatgtcatagaatatgttttgattta

SEQ ID NO: 484635 - DNA, 33 bp, Homo sapien
tagaaggcaaaagatccagccacgattggtgtg

SEQ ID NO: 484636 - DNA, 33 bp, Homo sapien
tagaaggcaaaagatctagccacgattggtgtg

SEQ ID NO: 484637 - DNA, 33 bp, Homo sapien
ttattgtttttgcataccagtgttatgcctctg

SEQ ID NO: 484638 - DNA, 33 bp, Homo sapien
ttattgtttttgcatagcagtgttatgcctctg

SEQ ID NO: 484639 - DNA, 33 bp, Homo sapien
tcatacctctaggcaacatttttcattcggtag

SEQ ID NO: 484640 - DNA, 33 bp, Homo sapien
tcatacctctaggcaagatttttcattcggtag

SEQ ID NO: 484641 - DNA, 33 bp, Homo sapien
atttcataactctcaacacgtaatttgaaacaa

SEQ ID NO: 484642 - DNA, 33 bp, Homo sapien
atttcataactctcaagacgtaatttgaaacaa

SEQ ID NO: 484643 - DNA, 33 bp, Homo sapien
gctacctagggaagaggataggatgacatcttt

SEQ ID NO: 484644 - DNA, 33 bp, Homo sapien
gctacctagggaagagtataggatgacatcttt

SEQ ID NO: 484645 - DNA, 33 bp, Homo sapien
agtagtggaacgaaataactttggagaaaagga

SEQ ID NO: 484646 - DNA, 33 bp, Homo sapien
agtagtggaacgaaatgactttggagaaaagga

SEQ ID NO: 484647 - DNA, 33 bp, Homo sapien
cctttcttaggttgggaaagtacaaagaggtta

SEQ ID NO: 484648 - DNA, 33 bp, Homo sapien
cctttcttaggttgggcaagtacaaagaggtta

SEQ ID NO: 484649 - DNA, 33 bp, Homo sapien
atagcgaaaagctctgaaagtgattaacaaaga

SEQ ID NO: 484650 - DNA, 33 bp, Homo sapien
atagcgaaaagctctggaagtgattaacaaaga

SEQ ID NO: 484651 - DNA, 33 bp, Homo sapien
ttgcgcaatgtatcacagccctttcacatggac

SEQ ID NO: 484652 - DNA, 33 bp, Homo sapien
ttgcgcaatgtatcacggccctttcacatggac

SEQ ID NO: 484653 - DNA, 33 bp, Homo sapien
tttgggccacaaattcaatataatacaaatcta

SEQ ID NO: 484654 - DNA, 33 bp, Homo sapien
tttgggccacaaattcgatataatacaaatcta

SEQ ID NO: 484655 - DNA, 33 bp, Homo sapien
attagtagctccattacgttaaatgatgttgaa

SEQ ID NO: 484656 - DNA, 33 bp, Homo sapien
attagtagctccattatgttaaatgatgttgaa

SEQ ID NO: 484657 - DNA, 33 bp, Homo sapien
ttctggctacaaaacagcttttcgtatacaaac

SEQ ID NO: 484658 - DNA, 33 bp, Homo sapien
ttctggctacaaaacatcttttcgtatacaaac

SEQ ID NO: 484659 - DNA, 33 bp, Homo sapien
tttagaaacatcagtaaaagtcggtcagagaat

SEQ ID NO: 484660 - DNA, 33 bp, Homo sapien
tttagaaacatcagtagaagtcggtcagagaat

SEQ ID NO: 484661 - DNA, 33 bp, Homo sapien
gaaaatggcagtcagaagcctatctaagagttc

SEQ ID NO: 484662 - DNA, 33 bp, Homo sapien
gaaaatggcagtcagaggcctatctaagagttc

SEQ ID NO: 484663 - DNA, 33 bp, Homo sapien
atgtaactcgtattcccgacaagcttatctgca

SEQ ID NO: 484664 - DNA, 33 bp, Homo sapien
atgtaactcgtattcctgacaagcttatctgca

SEQ ID NO: 484665 - DNA, 33 bp, Homo sapien
ttcacctctgtaaacagatttttcactaatgat

SEQ ID NO: 484666 - DNA, 33 bp, Homo sapien
ttcacctctgtaaacatatttttcactaatgat

SEQ ID NO: 484667 - DNA, 33 bp, Homo sapien
atttaagaattgcagacgaagcttctccaactt

SEQ ID NO: 484668 - DNA, 33 bp, Homo sapien
atttaagaattgcagatgaagcttctccaactt

SEQ ID NO: 484669 - DNA, 33 bp, Homo sapien
taccagtcttgtaaccgaaatggtgccttgtgt

SEQ ID NO: 484670 - DNA, 33 bp, Homo sapien
taccagtcttgtaacctaaatggtgccttgtgt

SEQ ID NO: 484671 - DNA, 33 bp, Homo sapien
gagtctttgaaactagaaataagtaagaagaga

SEQ ID NO: 484672 - DNA, 33 bp, Homo sapien
gagtctttgaaactaggaataagtaagaagaga

SEQ ID NO: 484673 - DNA, 33 bp, Homo sapien
tctattgaaagagataagacaagtagttccatt

SEQ ID NO: 484674 - DNA, 33 bp, Homo sapien
tctattgaaagagatacgacaagtagttccatt

SEQ ID NO: 484675 - DNA, 33 bp, Homo sapien
atattaaatcttgtcacgttcagggttttaggg

SEQ ID NO: 484676 - DNA, 33 bp, Homo sapien
atattaaatcttgtcatgttcagggttttaggg

SEQ ID NO: 484677 - DNA, 33 bp, Homo sapien
atgtacttgttgattccattggacagcactcaa

SEQ ID NO: 484678 - DNA, 33 bp, Homo sapien
atgtacttgttgattcgattggacagcactcaa

SEQ ID NO: 484679 - DNA, 33 bp, Homo sapien
ggcaaaaatcaggtggccaaaaatgtctttatc

SEQ ID NO: 484680 - DNA, 33 bp, Homo sapien
ggcaaaaatcaggtggtcaaaaatgtctttatc

SEQ ID NO: 484681 - DNA, 33 bp, Homo sapien
tacgaaattgtaatgactaagtgcatatttttg

SEQ ID NO: 484682 - DNA, 33 bp, Homo sapien
tacgaaattgtaatgattaagtgcatatttttg

SEQ ID NO: 484683 - DNA, 33 bp, Homo sapien
ctcaaagtaaagaacagtgaataatccttaaat

SEQ ID NO: 484684 - DNA, 33 bp, Homo sapien
ctcaaagtaaagaacattgaataatccttaaat

SEQ ID NO: 484685 - DNA, 33 bp, Homo sapien
ttcagacacctgccggacatcggggcagggtga

SEQ ID NO: 484686 - DNA, 33 bp, Homo sapien
ttcagacacctgccgggcatcggggcagggtga

SEQ ID NO: 484687 - DNA, 33 bp, Homo sapien
ttgacatgggtcatcaccaaaactgagaaactg

SEQ ID NO: 484688 - DNA, 33 bp, Homo sapien
ttgacatgggtcatcagcaaaactgagaaactg

SEQ ID NO: 484689 - DNA, 33 bp, Homo sapien
tcaatatcttaggacaaagcaatctcttatatt

SEQ ID NO: 484690 - DNA, 33 bp, Homo sapien
tcaatatcttaggacagagcaatctcttatatt

SEQ ID NO: 484691 - DNA, 33 bp, Homo sapien
tagccacattggtgggaaatagcagagcaaata

SEQ ID NO: 484692 - DNA, 33 bp, Homo sapien
tagccacattggtggggaatagcagagcaaata

SEQ ID NO: 484693 - DNA, 33 bp, Homo sapien
tactgtcaaaatgagacaaatgaaagtacaatt

SEQ ID NO: 484694 - DNA, 33 bp, Homo sapien
tactgtcaaaatgagataaatgaaagtacaatt

SEQ ID NO: 484695 - DNA, 33 bp, Homo sapien
cattgtaagttgactacacatcatgtctttcaa

SEQ ID NO: 484696 - DNA, 33 bp, Homo sapien
cattgtaagttgactatacatcatgtctttcaa

SEQ ID NO: 484697 - DNA, 33 bp, Homo sapien
agtcaaaatgcttacaatctggcaaaggtagct

SEQ ID NO: 484698 - DNA, 33 bp, Homo sapien
agtcaaaatgcttacagtctggcaaaggtagct

SEQ ID NO: 484699 - DNA, 33 bp, Homo sapien
gttggacaaagaagaaaacagagctaacaaccc

SEQ ID NO: 484700 - DNA, 33 bp, Homo sapien
gttggacaaagaagaagacagagctaacaaccc

SEQ ID NO: 484701 - DNA, 33 bp, Homo sapien
gaagataccaagtttacagagtgtattagtctg

SEQ ID NO: 484702 - DNA, 33 bp, Homo sapien
gaagataccaagtttagagagtgtattagtctg

SEQ ID NO: 484703 - DNA, 33 bp, Homo sapien
aaattgcaatctgtgactaatttgagaaatttc

SEQ ID NO: 484704 - DNA, 33 bp, Homo sapien
aaattgcaatctgtgagtaatttgagaaatttc

SEQ ID NO: 484705 - DNA, 33 bp, Homo sapien
aattgtcatactcatccaatacaccaaatacag

SEQ ID NO: 484706 - DNA, 33 bp, Homo sapien
aattgtcatactcatctaatacaccaaatacag

SEQ ID NO: 484707 - DNA, 33 bp, Homo sapien
ggcatggaaataaacaatgacaatgcataatag

SEQ ID NO: 484708 - DNA, 33 bp, Homo sapien
ggcatggaaataaacagtgacaatgcataatag

SEQ ID NO: 484709 - DNA, 33 bp, Homo sapien
tttatcatgaaggtaactgtatgccattaaagt

SEQ ID NO: 484710 - DNA, 33 bp, Homo sapien
tttatcatgaaggtaattgtatgccattaaagt

SEQ ID NO: 484711 - DNA, 33 bp, Homo sapien
cctagcatcatttaccaaaaagttcatctttgt

SEQ ID NO: 484712 - DNA, 33 bp, Homo sapien
cctagcatcatttaccgaaaagttcatctttgt

SEQ ID NO: 484713 - DNA, 33 bp, Homo sapien
acaaatagactgaccaatagaatagaacaaaag

SEQ ID NO: 484714 - DNA, 33 bp, Homo sapien
acaaatagactgaccagtagaatagaacaaaag

SEQ ID NO: 484715 - DNA, 33 bp, Homo sapien
tagagtcacctgaacaatgagaatttagagtct

SEQ ID NO: 484716 - DNA, 33 bp, Homo sapien
tagagtcacctgaacagtgagaatttagagtct

SEQ ID NO: 484717 - DNA, 33 bp, Homo sapien
gtactactatgctcaactaattttttaaatttt

SEQ ID NO: 484718 - DNA, 33 bp, Homo sapien
gtactactatgctcaagtaattttttaaatttt

SEQ ID NO: 484719 - DNA, 33 bp, Homo sapien
cctcaagttgtttcagaaccctggagtgtaatt

SEQ ID NO: 484720 - DNA, 33 bp, Homo sapien
cctcaagttgtttcagtaccctggagtgtaatt

SEQ ID NO: 484721 - DNA, 33 bp, Homo sapien
cccctgctcaagaggaccttactctctcagtac

SEQ ID NO: 484722 - DNA, 33 bp, Homo sapien
cccctgctcaagaggagcttactctctcagtac

SEQ ID NO: 484723 - DNA, 33 bp, Homo sapien
atctaaccaactcctacgccataactagtgtta

SEQ ID NO: 484724 - DNA, 33 bp, Homo sapien
atctaaccaactcctatgccataactagtgtta

SEQ ID NO: 484725 - DNA, 33 bp, Homo sapien
tgtgttatcagcttggcaaataatagcaatgca

SEQ ID NO: 484726 - DNA, 33 bp, Homo sapien
tgtgttatcagcttggtaaataatagcaatgca

SEQ ID NO: 484727 - DNA, 33 bp, Homo sapien
caaaagactgctattacacagagacagacatgg

SEQ ID NO: 484728 - DNA, 33 bp, Homo sapien
caaaagactgctattagacagagacagacatgg

SEQ ID NO: 484729 - DNA, 33 bp, Homo sapien
gaagctcaattcaggcgcagcttgttttgctcg

SEQ ID NO: 484730 - DNA, 33 bp, Homo sapien
gaagctcaattcaggctcagcttgttttgctcg

SEQ ID NO: 484731 - DNA, 33 bp, Homo sapien
ccttcctctcctgttacgctgacctgcttcagc

SEQ ID NO: 484732 - DNA, 33 bp, Homo sapien
ccttcctctcctgttatgctgacctgcttcagc

SEQ ID NO: 484733 - DNA, 33 bp, Homo sapien
ctctagcctccacagcacacttacttttatttt

SEQ ID NO: 484734 - DNA, 33 bp, Homo sapien
ctctagcctccacagcgcacttacttttatttt

SEQ ID NO: 484735 - DNA, 33 bp, Homo sapien
gatatgctgggttctaactctttgcagctctgt

SEQ ID NO: 484736 - DNA, 33 bp, Homo sapien
gatatgctgggttctatctctttgcagctctgt

SEQ ID NO: 484737 - DNA, 33 bp, Homo sapien
acgtcttcttttgacaagcgtccgttcatatcc

SEQ ID NO: 484738 - DNA, 33 bp, Homo sapien
acgtcttcttttgacaggcgtccgttcatatcc

SEQ ID NO: 484739 - DNA, 33 bp, Homo sapien
gacaaattcttacatccatcacagacctactga

SEQ ID NO: 484740 - DNA, 33 bp, Homo sapien
gacaaattcttacatctatcacagacctactga

SEQ ID NO: 484741 - DNA, 33 bp, Homo sapien
attctgaactctttgtcaatcctaatttacatt

SEQ ID NO: 484742 - DNA, 33 bp, Homo sapien
attctgaactctttgttaatcctaatttacatt

SEQ ID NO: 484743 - DNA, 33 bp, Homo sapien
atgggctctaaaggaaaacgatattgatgtatc

SEQ ID NO: 484744 - DNA, 33 bp, Homo sapien
atgggctctaaaggaatacgatattgatgtatc

SEQ ID NO: 484745 - DNA, 33 bp, Homo sapien
ttctgtctgtcttccaaaaattcatggtaataa

SEQ ID NO: 484746 - DNA, 33 bp, Homo sapien
ttctgtctgtcttccagaaattcatggtaataa

SEQ ID NO: 484747 - DNA, 33 bp, Homo sapien
tgtgctgctgttgctcaaagtatgtttttgtta

SEQ ID NO: 484748 - DNA, 33 bp, Homo sapien
tgtgctgctgttgctccaagtatgtttttgtta

SEQ ID NO: 484749 - DNA, 33 bp, Homo sapien
gaaatctaaggagttcgcaatcactgcccatga

SEQ ID NO: 484750 - DNA, 33 bp, Homo sapien
gaaatctaaggagttctcaatcactgcccatga

SEQ ID NO: 484751 - DNA, 33 bp, Homo sapien
aatactcaggaattatcaggtgcaggctcaaat

SEQ ID NO: 484752 - DNA, 33 bp, Homo sapien
aatactcaggaattattaggtgcaggctcaaat

SEQ ID NO: 484753 - DNA, 33 bp, Homo sapien
attattgctcttccccagccccaaatggtttct

SEQ ID NO: 484754 - DNA, 33 bp, Homo sapien
attattgctcttccccggccccaaatggtttct

SEQ ID NO: 484755 - DNA, 33 bp, Homo sapien
tgtttgtcctctctaacagactgtgagcttcct

SEQ ID NO: 484756 - DNA, 33 bp, Homo sapien
tgtttgtcctctctaatagactgtgagcttcct

SEQ ID NO: 484757 - DNA, 33 bp, Homo sapien
aatttgaactgaaaaacgaatgaaagctaaatg

SEQ ID NO: 484758 - DNA, 33 bp, Homo sapien
aatttgaactgaaaaatgaatgaaagctaaatg

SEQ ID NO: 484759 - DNA, 33 bp, Homo sapien
agctgtaaaatgaagaatacctaattgcctcct

SEQ ID NO: 484760 - DNA, 33 bp, Homo sapien
agctgtaaaatgaagagtacctaattgcctcct

SEQ ID NO: 484761 - DNA, 33 bp, Homo sapien
ctcttgaataatagctaagaaaactgcaattgc

SEQ ID NO: 484762 - DNA, 33 bp, Homo sapien
ctcttgaataatagctgagaaaactgcaattgc

SEQ ID NO: 484763 - DNA, 33 bp, Homo sapien
cttgggttctcactagaagagttttcacgtaaa

SEQ ID NO: 484764 - DNA, 33 bp, Homo sapien
cttgggttctcactaggagagttttcacgtaaa

SEQ ID NO: 484765 - DNA, 33 bp, Homo sapien
agaagactttcacccaaatttcaggatgtcagg

SEQ ID NO: 484766 - DNA, 33 bp, Homo sapien
agaagactttcacccagatttcaggatgtcagg

SEQ ID NO: 484767 - DNA, 33 bp, Homo sapien
gcagaagaatacttcaactcagattggctgtta

SEQ ID NO: 484768 - DNA, 33 bp, Homo sapien
gcagaagaatacttcacctcagattggctgtta

SEQ ID NO: 484769 - DNA, 33 bp, Homo sapien
tttgagagcagtgataccttcaaggtgaagtta

SEQ ID NO: 484770 - DNA, 33 bp, Homo sapien
tttgagagcagtgatatcttcaaggtgaagtta

SEQ ID NO: 484771 - DNA, 33 bp, Homo sapien
gtctaatgagacataactggaagatttagggga

SEQ ID NO: 484772 - DNA, 33 bp, Homo sapien
gtctaatgagacataagtggaagatttagggga

SEQ ID NO: 484773 - DNA, 33 bp, Homo sapien
aattatggagaagttgcatttcttgctctggca

SEQ ID NO: 484774 - DNA, 33 bp, Homo sapien
aattatggagaagttgtatttcttgctctggca

SEQ ID NO: 484775 - DNA, 33 bp, Homo sapien
ctttataagaacacaaataaaagggattgctaa

SEQ ID NO: 484776 - DNA, 33 bp, Homo sapien
ctttataagaacacaagtaaaagggattgctaa

SEQ ID NO: 484777 - DNA, 33 bp, Homo sapien
ttgctagcagtccaaggaaagagtagagcagca

SEQ ID NO: 484778 - DNA, 33 bp, Homo sapien
ttgctagcagtccaagtaaagagtagagcagca

SEQ ID NO: 484779 - DNA, 33 bp, Homo sapien
tgccttggccttgaaaatgttggggttacaggt

SEQ ID NO: 484780 - DNA, 33 bp, Homo sapien
tgccttggccttgaaactgttggggttacaggt

SEQ ID NO: 484781 - DNA, 33 bp, Homo sapien
ggaaatgagggaactaccacaatcattttcact

SEQ ID NO: 484782 - DNA, 33 bp, Homo sapien
ggaaatgagggaactatcacaatcattttcact

SEQ ID NO: 484783 - DNA, 33 bp, Homo sapien
aatactttatttcctccactccattggcacatt

SEQ ID NO: 484784 - DNA, 33 bp, Homo sapien
aatactttatttcctctactccattggcacatt

SEQ ID NO: 484785 - DNA, 33 bp, Homo sapien
attttttagcccatcacggatattgaatcaaca

SEQ ID NO: 484786 - DNA, 33 bp, Homo sapien
attttttagcccatcatggatattgaatcaaca

SEQ ID NO: 484787 - DNA, 33 bp, Homo sapien
ttcttcttccaatgccagctgtacttccatcta

SEQ ID NO: 484788 - DNA, 33 bp, Homo sapien
ttcttcttccaatgccggctgtacttccatcta

SEQ ID NO: 484789 - DNA, 33 bp, Homo sapien
actgatgagtcataaggaaactatatgtgcctc

SEQ ID NO: 484790 - DNA, 33 bp, Homo sapien
actgatgagtcataagtaaactatatgtgcctc

SEQ ID NO: 484791 - DNA, 33 bp, Homo sapien
gttgtttaagcaagaaaatatttcaaaaataat

SEQ ID NO: 484792 - DNA, 33 bp, Homo sapien
gttgtttaagcaagaagatatttcaaaaataat

SEQ ID NO: 484793 - DNA, 33 bp, Homo sapien
agacaatgctgtaaaacagatccaggcaatatt

SEQ ID NO: 484794 - DNA, 33 bp, Homo sapien
agacaatgctgtaaaagagatccaggcaatatt

SEQ ID NO: 484795 - DNA, 33 bp, Homo sapien
tgtaaatgacttgaacactgtaaacactgtaaa

SEQ ID NO: 484796 - DNA, 33 bp, Homo sapien
tgtaaatgacttgaacgctgtaaacactgtaaa

SEQ ID NO: 484797 - DNA, 33 bp, Homo sapien
atgtccatagctgttacgatttttctttatttt

SEQ ID NO: 484798 - DNA, 33 bp, Homo sapien
atgtccatagctgttatgatttttctttatttt

SEQ ID NO: 484799 - DNA, 33 bp, Homo sapien
cagatgacttaaacaacactatcaataacttga

SEQ ID NO: 484800 - DNA, 33 bp, Homo sapien
cagatgacttaaacaatactatcaataacttga

SEQ ID NO: 484801 - DNA, 33 bp, Homo sapien
tgaattatttcatagccccctaattggtctccc

SEQ ID NO: 484802 - DNA, 33 bp, Homo sapien
tgaattatttcatagctccctaattggtctccc

SEQ ID NO: 484803 - DNA, 33 bp, Homo sapien
aacagcactgaggttacattcaacgtctgactt

SEQ ID NO: 484804 - DNA, 33 bp, Homo sapien
aacagcactgaggttagattcaacgtctgactt

SEQ ID NO: 484805 - DNA, 33 bp, Homo sapien
taatggagataagtacaaggctaattacacatg

SEQ ID NO: 484806 - DNA, 33 bp, Homo sapien
taatggagataagtaccaggctaattacacatg

SEQ ID NO: 484807 - DNA, 33 bp, Homo sapien
gtgaatgataaaccacccttcataagaaactca

SEQ ID NO: 484808 - DNA, 33 bp, Homo sapien
gtgaatgataaaccactcttcataagaaactca

SEQ ID NO: 484809 - DNA, 33 bp, Homo sapien
ctacttgagagcagtacattaaatgctttgacc

SEQ ID NO: 484810 - DNA, 33 bp, Homo sapien
ctacttgagagcagtatattaaatgctttgacc

SEQ ID NO: 484811 - DNA, 33 bp, Homo sapien
acaaccaatggcgacaaccctggctgggaacaa

SEQ ID NO: 484812 - DNA, 33 bp, Homo sapien
acaaccaatggcgacatccctggctgggaacaa

SEQ ID NO: 484813 - DNA, 33 bp, Homo sapien
gggagtgaaagaggaaggagcaaagtggtcatg

SEQ ID NO: 484814 - DNA, 33 bp, Homo sapien
gggagtgaaagaggaatgagcaaagtggtcatg

SEQ ID NO: 484815 - DNA, 33 bp, Homo sapien
acaaaataaggttatgcattgatctgttggtga

SEQ ID NO: 484816 - DNA, 33 bp, Homo sapien
acaaaataaggttatgtattgatctgttggtga

SEQ ID NO: 484817 - DNA, 33 bp, Homo sapien
tgctcttctcaaacctcagatcctttccccttg

SEQ ID NO: 484818 - DNA, 33 bp, Homo sapien
tgctcttctcaaaccttagatcctttccccttg

SEQ ID NO: 484819 - DNA, 33 bp, Homo sapien
caaggagttcatagccagaggtgaaaaggactg

SEQ ID NO: 484820 - DNA, 33 bp, Homo sapien
caaggagttcatagccggaggtgaaaaggactg

SEQ ID NO: 484821 - DNA, 33 bp, Homo sapien
agagacgtagtaggagaaaaatcagtatctgct

SEQ ID NO: 484822 - DNA, 33 bp, Homo sapien
agagacgtagtaggagcaaaatcagtatctgct

SEQ ID NO: 484823 - DNA, 33 bp, Homo sapien
gcctgaaattcatctacgtgtttggtcatgtac

SEQ ID NO: 484824 - DNA, 33 bp, Homo sapien
gcctgaaattcatctatgtgtttggtcatgtac

SEQ ID NO: 484825 - DNA, 33 bp, Homo sapien
caatgggacaaacttacggagtgttaatgaggg

SEQ ID NO: 484826 - DNA, 33 bp, Homo sapien
caatgggacaaacttatggagtgttaatgaggg

SEQ ID NO: 484827 - DNA, 33 bp, Homo sapien
gtggctaaaaactctacgtacccaactctggtc

SEQ ID NO: 484828 - DNA, 33 bp, Homo sapien
gtggctaaaaactctatgtacccaactctggtc

SEQ ID NO: 484829 - DNA, 33 bp, Homo sapien
aatttttctattaacccactatccttgtccagg

SEQ ID NO: 484830 - DNA, 33 bp, Homo sapien
aatttttctattaacctactatccttgtccagg

SEQ ID NO: 484831 - DNA, 33 bp, Homo sapien
ttcttcaaaaagatcaatgaaactggtaagact

SEQ ID NO: 484832 - DNA, 33 bp, Homo sapien
ttcttcaaaaagatcagtgaaactggtaagact

SEQ ID NO: 484833 - DNA, 33 bp, Homo sapien
attggtttgggagacacagttctggccaatgga

SEQ ID NO: 484834 - DNA, 33 bp, Homo sapien
attggtttgggagacagagttctggccaatgga

SEQ ID NO: 484835 - DNA, 33 bp, Homo sapien
tttggaaggtagatacaattcagatgcaaccta

SEQ ID NO: 484836 - DNA, 33 bp, Homo sapien
tttggaaggtagatactattcagatgcaaccta

SEQ ID NO: 484837 - DNA, 33 bp, Homo sapien
atgtttttgcttcagggagttatatgggctaat

SEQ ID NO: 484838 - DNA, 33 bp, Homo sapien
atgtttttgcttcaggtagttatatgggctaat

SEQ ID NO: 484839 - DNA, 33 bp, Homo sapien
ccctatagtaaagagaggaccacaaatcataag

SEQ ID NO: 484840 - DNA, 33 bp, Homo sapien
ccctatagtaaagagatgaccacaaatcataag

SEQ ID NO: 484841 - DNA, 33 bp, Homo sapien
tatctggtctgtagtacctaacattagttgata

SEQ ID NO: 484842 - DNA, 33 bp, Homo sapien
tatctggtctgtagtatctaacattagttgata

SEQ ID NO: 484843 - DNA, 33 bp, Homo sapien
ttctcacactgctataagcacttacttgagact

SEQ ID NO: 484844 - DNA, 33 bp, Homo sapien
ttctcacactgctatacgcacttacttgagact

SEQ ID NO: 484845 - DNA, 33 bp, Homo sapien
aggattatgggaactacagtttgagatgagatt

SEQ ID NO: 484846 - DNA, 33 bp, Homo sapien
aggattatgggaactagagtttgagatgagatt

SEQ ID NO: 484847 - DNA, 33 bp, Homo sapien
gaggccagggacagaactatattgtttggctgt

SEQ ID NO: 484848 - DNA, 33 bp, Homo sapien
gaggccagggacagaattatattgtttggctgt

SEQ ID NO: 484849 - DNA, 33 bp, Homo sapien
cacagacgacctggaacagtgtttggcatattg

SEQ ID NO: 484850 - DNA, 33 bp, Homo sapien
cacagacgacctggaagagtgtttggcatattg

SEQ ID NO: 484851 - DNA, 33 bp, Homo sapien
ggctgttttagttcctcacactttctatgttaa

SEQ ID NO: 484852 - DNA, 33 bp, Homo sapien
ggctgttttagttccttacactttctatgttaa

SEQ ID NO: 484853 - DNA, 33 bp, Homo sapien
cttctgtgtctcacgacagtgcacataactggc

SEQ ID NO: 484854 - DNA, 33 bp, Homo sapien
cttctgtgtctcacgagagtgcacataactggc

SEQ ID NO: 484855 - DNA, 33 bp, Homo sapien
cccagaacaccatcacagaactgatccaccaag

SEQ ID NO: 484856 - DNA, 33 bp, Homo sapien
cccagaacaccatcaccgaactgatccaccaag

SEQ ID NO: 484857 - DNA, 33 bp, Homo sapien
cccccaagcatccccaaagttgacaagatttgt

SEQ ID NO: 484858 - DNA, 33 bp, Homo sapien
cccccaagcatccccagagttgacaagatttgt

SEQ ID NO: 484859 - DNA, 33 bp, Homo sapien
ggagtgaagttaggaaaatgtaattctttgtgc

SEQ ID NO: 484860 - DNA, 33 bp, Homo sapien
ggagtgaagttaggaagatgtaattctttgtgc

SEQ ID NO: 484861 - DNA, 33 bp, Homo sapien
cctaaactaataactgaacaactgctatgtacc

SEQ ID NO: 484862 - DNA, 33 bp, Homo sapien
cctaaactaataactggacaactgctatgtacc

SEQ ID NO: 484863 - DNA, 33 bp, Homo sapien
tttaaaaactcttgaaacctgtttgccttcccc

SEQ ID NO: 484864 - DNA, 33 bp, Homo sapien
tttaaaaactcttgaatcctgtttgccttcccc

SEQ ID NO: 484865 - DNA, 33 bp, Homo sapien
agatctcccagggcatcagtgacaggcttctga

SEQ ID NO: 484866 - DNA, 33 bp, Homo sapien
agatctcccagggcatgagtgacaggcttctga

SEQ ID NO: 484867 - DNA, 33 bp, Homo sapien
acaatcaaagataaggcacttgggtagcagtat

SEQ ID NO: 484868 - DNA, 33 bp, Homo sapien
acaatcaaagataagggacttgggtagcagtat

SEQ ID NO: 484869 - DNA, 33 bp, Homo sapien
aagaatctgtctgcaactaggaatctctttatc

SEQ ID NO: 484870 - DNA, 33 bp, Homo sapien
aagaatctgtctgcaagtaggaatctctttatc

SEQ ID NO: 484871 - DNA, 33 bp, Homo sapien
gctctcttattctccaaaaatgctttgttctca

SEQ ID NO: 484872 - DNA, 33 bp, Homo sapien
gctctcttattctccagaaatgctttgttctca

SEQ ID NO: 484873 - DNA, 33 bp, Homo sapien
caaacattgatgaagaatatcacaccatggtgc

SEQ ID NO: 484874 - DNA, 33 bp, Homo sapien
caaacattgatgaagagtatcacaccatggtgc

SEQ ID NO: 484875 - DNA, 33 bp, Homo sapien
gctttgctgcttgttacagtggatgaagtgtcc

SEQ ID NO: 484876 - DNA, 33 bp, Homo sapien
gctttgctgcttgttatagtggatgaagtgtcc

SEQ ID NO: 484877 - DNA, 33 bp, Homo sapien
gaaataatggaaaaaagtaaacagccaattgaa

SEQ ID NO: 484878 - DNA, 33 bp, Homo sapien
gaaataatggaaaaaattaaacagccaattgaa

SEQ ID NO: 484879 - DNA, 33 bp, Homo sapien
ttttagcccacaattacagtctgcatgcaatag

SEQ ID NO: 484880 - DNA, 33 bp, Homo sapien
ttttagcccacaattatagtctgcatgcaatag

SEQ ID NO: 484881 - DNA, 33 bp, Homo sapien
gaggatgtctttaaaggcaaccttgcaataact

SEQ ID NO: 484882 - DNA, 33 bp, Homo sapien
gaggatgtctttaaagtcaaccttgcaataact

SEQ ID NO: 484883 - DNA, 33 bp, Homo sapien
atcatgctactcccagcactatggcttctgggc

SEQ ID NO: 484884 - DNA, 33 bp, Homo sapien
atcatgctactcccaggactatggcttctgggc

SEQ ID NO: 484885 - DNA, 33 bp, Homo sapien
ggatttatgattcagagtcagttttctttttct

SEQ ID NO: 484886 - DNA, 33 bp, Homo sapien
ggatttatgattcagattcagttttctttttct

SEQ ID NO: 484887 - DNA, 33 bp, Homo sapien
ccagccctctgcagcaatctatagtatgcatca

SEQ ID NO: 484888 - DNA, 33 bp, Homo sapien
ccagccctctgcagcagtctatagtatgcatca

SEQ ID NO: 484889 - DNA, 33 bp, Homo sapien
ccagtggctgcacatacaaaaggaaggcaccta

SEQ ID NO: 484890 - DNA, 33 bp, Homo sapien
ccagtggctgcacatagaaaaggaaggcaccta

SEQ ID NO: 484891 - DNA, 33 bp, Homo sapien
ctgagatgtacattcaacaaagggcttcttgta

SEQ ID NO: 484892 - DNA, 33 bp, Homo sapien
ctgagatgtacattcagcaaagggcttcttgta

SEQ ID NO: 484893 - DNA, 33 bp, Homo sapien
tcctgaactgggtacacctttctccacaacaag

SEQ ID NO: 484894 - DNA, 33 bp, Homo sapien
tcctgaactgggtacatctttctccacaacaag

SEQ ID NO: 484895 - DNA, 33 bp, Homo sapien
tttgtgtatggcttagccagtttctctgtcctt

SEQ ID NO: 484896 - DNA, 33 bp, Homo sapien
tttgtgtatggcttaggcagtttctctgtcctt

SEQ ID NO: 484897 - DNA, 33 bp, Homo sapien
acccccagtattcgtcccacttcccaagtccag

SEQ ID NO: 484898 - DNA, 33 bp, Homo sapien
acccccagtattcgtctcacttcccaagtccag

SEQ ID NO: 484899 - DNA, 33 bp, Homo sapien
gcacgcaagatgaggcaaaagcgggagaaggga

SEQ ID NO: 484900 - DNA, 33 bp, Homo sapien
gcacgcaagatgaggcgaaagcgggagaaggga

SEQ ID NO: 484901 - DNA, 33 bp, Homo sapien
gtccagagcaaagcaacgtcttcaccatcagac

SEQ ID NO: 484902 - DNA, 33 bp, Homo sapien
gtccagagcaaagcaatgtcttcaccatcagac

SEQ ID NO: 484903 - DNA, 33 bp, Homo sapien
gacagctgcgaaggagaaagaaagtgaaaattt

SEQ ID NO: 484904 - DNA, 33 bp, Homo sapien
gacagctgcgaaggaggaagaaagtgaaaattt

SEQ ID NO: 484905 - DNA, 33 bp, Homo sapien
attcaaccaaacaaccaaggaggagactaatga

SEQ ID NO: 484906 - DNA, 33 bp, Homo sapien
attcaaccaaacaaccgaggaggagactaatga

SEQ ID NO: 484907 - DNA, 33 bp, Homo sapien
cctagcagcgctagtacctcttggggactcgtt

SEQ ID NO: 484908 - DNA, 33 bp, Homo sapien
cctagcagcgctagtatctcttggggactcgtt

SEQ ID NO: 484909 - DNA, 33 bp, Homo sapien
acactggggactaatcaagaagagaggtgaagg

SEQ ID NO: 484910 - DNA, 33 bp, Homo sapien
acactggggactaatcgagaagagaggtgaagg

SEQ ID NO: 484911 - DNA, 33 bp, Homo sapien
ggcactaagacagaccacatttgaccccactgt

SEQ ID NO: 484912 - DNA, 33 bp, Homo sapien
ggcactaagacagaccgcatttgaccccactgt

SEQ ID NO: 484913 - DNA, 33 bp, Homo sapien
agaggttgccaaaagacagtctgaggggaaatg

SEQ ID NO: 484914 - DNA, 33 bp, Homo sapien
agaggttgccaaaagagagtctgaggggaaatg

SEQ ID NO: 484915 - DNA, 33 bp, Homo sapien
gaaccctgggcactccaactgttatgggctggg

SEQ ID NO: 484916 - DNA, 33 bp, Homo sapien
gaaccctgggcactccgactgttatgggctggg

SEQ ID NO: 484917 - DNA, 33 bp, Homo sapien
actagataatcccaaactgtcattctggagttt

SEQ ID NO: 484918 - DNA, 33 bp, Homo sapien
actagataatcccaaattgtcattctggagttt

SEQ ID NO: 484919 - DNA, 33 bp, Homo sapien
tcgcaggcgacggagaagcggaaggtaaagtta

SEQ ID NO: 484920 - DNA, 33 bp, Homo sapien
tcgcaggcgacggagacgcggaaggtaaagtta

SEQ ID NO: 484921 - DNA, 33 bp, Homo sapien
cgcctgcgatggaagccgaatttgcaggcagtg

SEQ ID NO: 484922 - DNA, 33 bp, Homo sapien
cgcctgcgatggaagctgaatttgcaggcagtg

SEQ ID NO: 484923 - DNA, 33 bp, Homo sapien
acctaattcaattgctcacccaatgcaggcatc

SEQ ID NO: 484924 - DNA, 33 bp, Homo sapien
acctaattcaattgcttacccaatgcaggcatc

SEQ ID NO: 484925 - DNA, 33 bp, Homo sapien
aagttgtcaaattgcaagaaggatgcctgcatt

SEQ ID NO: 484926 - DNA, 33 bp, Homo sapien
aagttgtcaaattgcaggaaggatgcctgcatt

SEQ ID NO: 484927 - DNA, 33 bp, Homo sapien
gacttcaaggtcagcactctgtgcaacacagct

SEQ ID NO: 484928 - DNA, 33 bp, Homo sapien
gacttcaaggtcagcagtctgtgcaacacagct

SEQ ID NO: 484929 - DNA, 33 bp, Homo sapien
atgagatagaagaacacggttgttgttttggtt

SEQ ID NO: 484930 - DNA, 33 bp, Homo sapien
atgagatagaagaacatggttgttgttttggtt

SEQ ID NO: 484931 - DNA, 33 bp, Homo sapien
atgggtgccaagacaacgggatctagcttcagt

SEQ ID NO: 484932 - DNA, 33 bp, Homo sapien
atgggtgccaagacaatgggatctagcttcagt

SEQ ID NO: 484933 - DNA, 33 bp, Homo sapien
gagatctttgatgagacagaaaaaaagtgacag

SEQ ID NO: 484934 - DNA, 33 bp, Homo sapien
gagatctttgatgagatagaaaaaaagtgacag

SEQ ID NO: 484935 - DNA, 33 bp, Homo sapien
cgcttcaaacaaataccaacggcaaacagggaa

SEQ ID NO: 484936 - DNA, 33 bp, Homo sapien
cgcttcaaacaaatactaacggcaaacagggaa

SEQ ID NO: 484937 - DNA, 33 bp, Homo sapien
aagcatcttactgacaccacattccactggctt

SEQ ID NO: 484938 - DNA, 33 bp, Homo sapien
aagcatcttactgacatcacattccactggctt

SEQ ID NO: 484939 - DNA, 33 bp, Homo sapien
ctgcctgtgagtcaaactggcgcctctgaccaa

SEQ ID NO: 484940 - DNA, 33 bp, Homo sapien
ctgcctgtgagtcaaattggcgcctctgaccaa

SEQ ID NO: 484941 - DNA, 33 bp, Homo sapien
atttgttacagtgacaccttatgtagtcttttt

SEQ ID NO: 484942 - DNA, 33 bp, Homo sapien
atttgttacagtgacatcttatgtagtcttttt

SEQ ID NO: 484943 - DNA, 33 bp, Homo sapien
ggaagaggagagaaaagacagggactttgaacc

SEQ ID NO: 484944 - DNA, 33 bp, Homo sapien
ggaagaggagagaaaatacagggactttgaacc

SEQ ID NO: 484945 - DNA, 33 bp, Homo sapien
tcctggtttacctgagcacatccaactcccagc

SEQ ID NO: 484946 - DNA, 33 bp, Homo sapien
tcctggtttacctgaggacatccaactcccagc

SEQ ID NO: 484947 - DNA, 33 bp, Homo sapien
atagacaccaagcaaaaccaaaagttgaaccca

SEQ ID NO: 484948 - DNA, 33 bp, Homo sapien
atagacaccaagcaaagccaaaagttgaaccca

SEQ ID NO: 484949 - DNA, 33 bp, Homo sapien
aggtgcactaggttgccagacggtctgatcaca

SEQ ID NO: 484950 - DNA, 33 bp, Homo sapien
aggtgcactaggttgcgagacggtctgatcaca

SEQ ID NO: 484951 - DNA, 33 bp, Homo sapien
cttctcaatagctagcactcttaattgggaaaa

SEQ ID NO: 484952 - DNA, 33 bp, Homo sapien
cttctcaatagctagcgctcttaattgggaaaa

SEQ ID NO: 484953 - DNA, 33 bp, Homo sapien
gcattgtaagtactgacgtaggtgacgtatgac

SEQ ID NO: 484954 - DNA, 33 bp, Homo sapien
gcattgtaagtactgatgtaggtgacgtatgac

SEQ ID NO: 484955 - DNA, 33 bp, Homo sapien
cttcctgttcttcaaacgtgccaaacttgttcc

SEQ ID NO: 484956 - DNA, 33 bp, Homo sapien
cttcctgttcttcaaatgtgccaaacttgttcc

SEQ ID NO: 484957 - DNA, 33 bp, Homo sapien
taacacacaccaagcactgagcacatactcttc

SEQ ID NO: 484958 - DNA, 33 bp, Homo sapien
taacacacaccaagcagtgagcacatactcttc

SEQ ID NO: 484959 - DNA, 33 bp, Homo sapien
aagtgtttttcaacccgggaatagaattatctt

SEQ ID NO: 484960 - DNA, 33 bp, Homo sapien
aagtgtttttcaaccctggaatagaattatctt

SEQ ID NO: 484961 - DNA, 33 bp, Homo sapien
gtttcctccagtataaactactcatttggcagt

SEQ ID NO: 484962 - DNA, 33 bp, Homo sapien
gtttcctccagtataagctactcatttggcagt

SEQ ID NO: 484963 - DNA, 33 bp, Homo sapien
tctttgcctcttctgaacaacaaaatccatatg

SEQ ID NO: 484964 - DNA, 33 bp, Homo sapien
tctttgcctcttctgagcaacaaaatccatatg

SEQ ID NO: 484965 - DNA, 33 bp, Homo sapien
cattcccagaagcaagcatgaaaattagaagtg

SEQ ID NO: 484966 - DNA, 33 bp, Homo sapien
cattcccagaagcaagtatgaaaattagaagtg

SEQ ID NO: 484967 - DNA, 33 bp, Homo sapien
gtcaatgtcattcaaccgagacttattgagtgt

SEQ ID NO: 484968 - DNA, 33 bp, Homo sapien
gtcaatgtcattcaactgagacttattgagtgt

SEQ ID NO: 484969 - DNA, 33 bp, Homo sapien
cagttaatcctctcaacggccttaaatgtgggt

SEQ ID NO: 484970 - DNA, 33 bp, Homo sapien
cagttaatcctctcaatggccttaaatgtgggt

SEQ ID NO: 484971 - DNA, 33 bp, Homo sapien
aggaagggagtccttaccaggaaccgaatcagc

SEQ ID NO: 484972 - DNA, 33 bp, Homo sapien
aggaagggagtccttatcaggaaccgaatcagc

SEQ ID NO: 484973 - DNA, 33 bp, Homo sapien
gtgctgcatagacagacggtagcttcagcctag

SEQ ID NO: 484974 - DNA, 33 bp, Homo sapien
gtgctgcatagacagatggtagcttcagcctag

SEQ ID NO: 484975 - DNA, 33 bp, Homo sapien
ctcagtcagtccccatcatgaccgtgggttcag

SEQ ID NO: 484976 - DNA, 33 bp, Homo sapien
ctcagtcagtccccatgatgaccgtgggttcag

SEQ ID NO: 484977 - DNA, 33 bp, Homo sapien
atggcattatggaaaacgtggctcttgaaatat

SEQ ID NO: 484978 - DNA, 33 bp, Homo sapien
atggcattatggaaaaggtggctcttgaaatat

SEQ ID NO: 484979 - DNA, 33 bp, Homo sapien
tttgaagcccatggtgcattttcaacgtagaag

SEQ ID NO: 484980 - DNA, 33 bp, Homo sapien
tttgaagcccatggtggattttcaacgtagaag

SEQ ID NO: 484981 - DNA, 33 bp, Homo sapien
aggtgaaaggatgagcaatgtggctcaggtgca

SEQ ID NO: 484982 - DNA, 33 bp, Homo sapien
aggtgaaaggatgagcgatgtggctcaggtgca

SEQ ID NO: 484983 - DNA, 33 bp, Homo sapien
tctactatgaacatgacaagagctgctgagtat

SEQ ID NO: 484984 - DNA, 33 bp, Homo sapien
tctactatgaacatgataagagctgctgagtat

SEQ ID NO: 484985 - DNA, 33 bp, Homo sapien
gttttgctgcatgaagcccaaattcagcctatg

SEQ ID NO: 484986 - DNA, 33 bp, Homo sapien
gttttgctgcatgaagtccaaattcagcctatg

SEQ ID NO: 484987 - DNA, 33 bp, Homo sapien
gggtcctgcttcaggacggagttgatcctagct

SEQ ID NO: 484988 - DNA, 33 bp, Homo sapien
gggtcctgcttcaggatggagttgatcctagct

SEQ ID NO: 484989 - DNA, 33 bp, Homo sapien
tgtatgagacctctctaaaggttccgtattttg

SEQ ID NO: 484990 - DNA, 33 bp, Homo sapien
tgtatgagacctctctcaaggttccgtattttg

SEQ ID NO: 484991 - DNA, 33 bp, Homo sapien
gcacatcagcctgtgaagccttgtatttcccat

SEQ ID NO: 484992 - DNA, 33 bp, Homo sapien
gcacatcagcctgtgatgccttgtatttcccat

SEQ ID NO: 484993 - DNA, 33 bp, Homo sapien
tgaaaaaatgaatagcaatgacaggttgcattt

SEQ ID NO: 484994 - DNA, 33 bp, Homo sapien
tgaaaaaatgaatagccatgacaggttgcattt

SEQ ID NO: 484995 - DNA, 33 bp, Homo sapien
tatccaaacagatggcaaaactatttcaccact

SEQ ID NO: 484996 - DNA, 33 bp, Homo sapien
tatccaaacagatggcgaaactatttcaccact

SEQ ID NO: 484997 - DNA, 33 bp, Homo sapien
atcctactgcataaagcaataaataaaaataaa

SEQ ID NO: 484998 - DNA, 33 bp, Homo sapien
atcctactgcataaaggaataaataaaaataaa

SEQ ID NO: 484999 - DNA, 33 bp, Homo sapien
cccaggagaccccagcaccctgctgcaatgctc

SEQ ID NO: 485000 - DNA, 33 bp, Homo sapien
cccaggagaccccagcgccctgctgcaatgctc

SEQ ID NO: 485001 - DNA, 33 bp, Homo sapien
cattgaagatgggatgaaatctacatatggtat

SEQ ID NO: 485002 - DNA, 33 bp, Homo sapien
cattgaagatgggatggaatctacatatggtat

SEQ ID NO: 485003 - DNA, 33 bp, Homo sapien
aaatagtgacgctctgcagaaaatgcacttgcc

SEQ ID NO: 485004 - DNA, 33 bp, Homo sapien
aaatagtgacgctctgtagaaaatgcacttgcc

SEQ ID NO: 485005 - DNA, 33 bp, Homo sapien
ggggagattatcctgcaaactgttgaccttcct

SEQ ID NO: 485006 - DNA, 33 bp, Homo sapien
ggggagattatcctgcgaactgttgaccttcct

SEQ ID NO: 485007 - DNA, 33 bp, Homo sapien
atttcacaactaggtaggtggtcataaaaaact

SEQ ID NO: 485008 - DNA, 33 bp, Homo sapien
atttcacaactaggtatgtggtcataaaaaact

SEQ ID NO: 485009 - DNA, 33 bp, Homo sapien
cagactgacttccaggaaaaagagccaaagtac

SEQ ID NO: 485010 - DNA, 33 bp, Homo sapien
cagactgacttccaggcaaaagagccaaagtac

SEQ ID NO: 485011 - DNA, 33 bp, Homo sapien
gccttctgtaatgtaaagacatatgttctgtgg

SEQ ID NO: 485012 - DNA, 33 bp, Homo sapien
gccttctgtaatgtaatgacatatgttctgtgg

SEQ ID NO: 485013 - DNA, 33 bp, Homo sapien
caaagatgtgacatcaacaaaaggaatgcagta

SEQ ID NO: 485014 - DNA, 33 bp, Homo sapien
caaagatgtgacatcatcaaaaggaatgcagta

SEQ ID NO: 485015 - DNA, 33 bp, Homo sapien
tggttgccctatgactaaattgccgtgccacca

SEQ ID NO: 485016 - DNA, 33 bp, Homo sapien
tggttgccctatgactgaattgccgtgccacca

SEQ ID NO: 485017 - DNA, 33 bp, Homo sapien
atagcctggtaaataacctatacttctcacttc

SEQ ID NO: 485018 - DNA, 33 bp, Homo sapien
atagcctggtaaataatctatacttctcacttc

SEQ ID NO: 485019 - DNA, 33 bp, Homo sapien
gtttgatagtcttgtccagggtttggcacactg

SEQ ID NO: 485020 - DNA, 33 bp, Homo sapien
gtttgatagtcttgtctagggtttggcacactg

SEQ ID NO: 485021 - DNA, 33 bp, Homo sapien
gggcccactttccagaacctgagatgctatcca

SEQ ID NO: 485022 - DNA, 33 bp, Homo sapien
gggcccactttccagagcctgagatgctatcca

SEQ ID NO: 485023 - DNA, 33 bp, Homo sapien
agataactgtaagggaagctattgcaggattgt

SEQ ID NO: 485024 - DNA, 33 bp, Homo sapien
agataactgtaagggaggctattgcaggattgt

SEQ ID NO: 485025 - DNA, 33 bp, Homo sapien
ccatgaccatttgaaacaggaagaaattgagtg

SEQ ID NO: 485026 - DNA, 33 bp, Homo sapien
ccatgaccatttgaaataggaagaaattgagtg

SEQ ID NO: 485027 - DNA, 33 bp, Homo sapien
atggagcaaaacttcaaactccatttacccagt

SEQ ID NO: 485028 - DNA, 33 bp, Homo sapien
atggagcaaaacttcagactccatttacccagt

SEQ ID NO: 485029 - DNA, 33 bp, Homo sapien
tggtgctgtaccctcacggaagggaacatctgc

SEQ ID NO: 485030 - DNA, 33 bp, Homo sapien
tggtgctgtaccctcatggaagggaacatctgc

SEQ ID NO: 485031 - DNA, 33 bp, Homo sapien
ctgttttcttggaggccacttctattaggtgtt

SEQ ID NO: 485032 - DNA, 33 bp, Homo sapien
ctgttttcttggaggctacttctattaggtgtt

SEQ ID NO: 485033 - DNA, 33 bp, Homo sapien
ctgtaaaaggagacaaaaatagagctgttggga

SEQ ID NO: 485034 - DNA, 33 bp, Homo sapien
ctgtaaaaggagacaacaatagagctgttggga

SEQ ID NO: 485035 - DNA, 33 bp, Homo sapien
gttcctcatgagccatgaatcctttctccctgg

SEQ ID NO: 485036 - DNA, 33 bp, Homo sapien
gttcctcatgagccattaatcctttctccctgg

SEQ ID NO: 485037 - DNA, 33 bp, Homo sapien
ttctcatttgatgttgaataaaacattaaacag

SEQ ID NO: 485038 - DNA, 33 bp, Homo sapien
ttctcatttgatgttggataaaacattaaacag

SEQ ID NO: 485039 - DNA, 33 bp, Homo sapien
gaccattcttttctcacaactccaaatacacag

SEQ ID NO: 485040 - DNA, 33 bp, Homo sapien
gaccattcttttctcataactccaaatacacag

SEQ ID NO: 485041 - DNA, 33 bp, Homo sapien
catttccctgacgaataaagatattgagcaact

SEQ ID NO: 485042 - DNA, 33 bp, Homo sapien
catttccctgacgaatgaagatattgagcaact

SEQ ID NO: 485043 - DNA, 33 bp, Homo sapien
aggtgaaaaacatgtacggagtgagtaaggaga

SEQ ID NO: 485044 - DNA, 33 bp, Homo sapien
aggtgaaaaacatgtatggagtgagtaaggaga

SEQ ID NO: 485045 - DNA, 33 bp, Homo sapien
cccttttgaaatcctacgtggcttgtaaggctc

SEQ ID NO: 485046 - DNA, 33 bp, Homo sapien
cccttttgaaatcctatgtggcttgtaaggctc

SEQ ID NO: 485047 - DNA, 33 bp, Homo sapien
gagtggactgcatgagaagatgtctgtaagaaa

SEQ ID NO: 485048 - DNA, 33 bp, Homo sapien
gagtggactgcatgaggagatgtctgtaagaaa

SEQ ID NO: 485049 - DNA, 33 bp, Homo sapien
gtagttacaagacctaaaaatgaacttgcagga

SEQ ID NO: 485050 - DNA, 33 bp, Homo sapien
gtagttacaagacctacaaatgaacttgcagga

SEQ ID NO: 485051 - DNA, 33 bp, Homo sapien
taaggagctacaaaacccatagcaagatcatgt

SEQ ID NO: 485052 - DNA, 33 bp, Homo sapien
taaggagctacaaaacgcatagcaagatcatgt

SEQ ID NO: 485053 - DNA, 33 bp, Homo sapien
atttcaatggatgcagaaaaagtatttgaccac

SEQ ID NO: 485054 - DNA, 33 bp, Homo sapien
atttcaatggatgcagcaaaagtatttgaccac

SEQ ID NO: 485055 - DNA, 33 bp, Homo sapien
agcaaagtgtggctgcaagagatgctcaaggac

SEQ ID NO: 485056 - DNA, 33 bp, Homo sapien
agcaaagtgtggctgcgagagatgctcaaggac

SEQ ID NO: 485057 - DNA, 33 bp, Homo sapien
tcttgagggacaagaacataatgtgaaaccaga

SEQ ID NO: 485058 - DNA, 33 bp, Homo sapien
tcttgagggacaagaatataatgtgaaaccaga

SEQ ID NO: 485059 - DNA, 33 bp, Homo sapien
cctatgaagaatttccagattattggtggggct

SEQ ID NO: 485060 - DNA, 33 bp, Homo sapien
cctatgaagaatttccggattattggtggggct

SEQ ID NO: 485061 - DNA, 33 bp, Homo sapien
ggcagaaattcaaaccagcagcttaaactcctt

SEQ ID NO: 485062 - DNA, 33 bp, Homo sapien
ggcagaaattcaaaccggcagcttaaactcctt

SEQ ID NO: 485063 - DNA, 33 bp, Homo sapien
atttcaaaatccgaagcagtttggcttgcatcc

SEQ ID NO: 485064 - DNA, 33 bp, Homo sapien
atttcaaaatccgaagtagtttggcttgcatcc

SEQ ID NO: 485065 - DNA, 33 bp, Homo sapien
aggaattaatctgacaaaagtaatttttactaa

SEQ ID NO: 485066 - DNA, 33 bp, Homo sapien
aggaattaatctgacataagtaatttttactaa

SEQ ID NO: 485067 - DNA, 33 bp, Homo sapien
atggtaaatgctgtgccacattaaaaacaaatt

SEQ ID NO: 485068 - DNA, 33 bp, Homo sapien
atggtaaatgctgtgctacattaaaaacaaatt

SEQ ID NO: 485069 - DNA, 33 bp, Homo sapien
aatgtcacctccaaaactccctgcagggccctg

SEQ ID NO: 485070 - DNA, 33 bp, Homo sapien
aatgtcacctccaaaagtccctgcagggccctg

SEQ ID NO: 485071 - DNA, 33 bp, Homo sapien
attccatattggaaaaatgatgatttgtaaaat

SEQ ID NO: 485072 - DNA, 33 bp, Homo sapien
attccatattggaaaactgatgatttgtaaaat

SEQ ID NO: 485073 - DNA, 33 bp, Homo sapien
agatgcatttccaataacattgcatttttgtta

SEQ ID NO: 485074 - DNA, 33 bp, Homo sapien
agatgcatttccaatatcattgcatttttgtta

SEQ ID NO: 485075 - DNA, 33 bp, Homo sapien
tgagaaacctctctaactgacctcaaaagtcat

SEQ ID NO: 485076 - DNA, 33 bp, Homo sapien
tgagaaacctctctaagtgacctcaaaagtcat

SEQ ID NO: 485077 - DNA, 33 bp, Homo sapien
gaagcccctatctttcggaaaagcatcatcacc

SEQ ID NO: 485078 - DNA, 33 bp, Homo sapien
gaagcccctatctttctgaaaagcatcatcacc

SEQ ID NO: 485079 - DNA, 33 bp, Homo sapien
aatttgtcctgggaaggaggaaatagtcctagt

SEQ ID NO: 485080 - DNA, 33 bp, Homo sapien
aatttgtcctgggaagtaggaaatagtcctagt

SEQ ID NO: 485081 - DNA, 33 bp, Homo sapien
gacctcacaaacaccacgttggaatctgggaaa

SEQ ID NO: 485082 - DNA, 33 bp, Homo sapien
gacctcacaaacaccatgttggaatctgggaaa

SEQ ID NO: 485083 - DNA, 33 bp, Homo sapien
ctggggatgaatacaaccggccctctgtatctg

SEQ ID NO: 485084 - DNA, 33 bp, Homo sapien
ctggggatgaatacaatcggccctctgtatctg

SEQ ID NO: 485085 - DNA, 33 bp, Homo sapien
gatataagcaggctgcgaaatagtgtgtacatc

SEQ ID NO: 485086 - DNA, 33 bp, Homo sapien
gatataagcaggctgctaaatagtgtgtacatc

SEQ ID NO: 485087 - DNA, 33 bp, Homo sapien
ctggactccgtttcacaacacagccagcctcga

SEQ ID NO: 485088 - DNA, 33 bp, Homo sapien
ctggactccgtttcaccacacagccagcctcga

SEQ ID NO: 485089 - DNA, 33 bp, Homo sapien
ggaagtgtgttagatacgaggagggatttggga

SEQ ID NO: 485090 - DNA, 33 bp, Homo sapien
ggaagtgtgttagatatgaggagggatttggga

SEQ ID NO: 485091 - DNA, 33 bp, Homo sapien
acttttcaaactggaaataacctgatgaccata

SEQ ID NO: 485092 - DNA, 33 bp, Homo sapien
acttttcaaactggaagtaacctgatgaccata

SEQ ID NO: 485093 - DNA, 33 bp, Homo sapien
ctaggaaatgggcaacggcttttcagaacactg

SEQ ID NO: 485094 - DNA, 33 bp, Homo sapien
ctaggaaatgggcaactgcttttcagaacactg

SEQ ID NO: 485095 - DNA, 33 bp, Homo sapien
ttatcactgcaacagcaaagtagaagccacaga

SEQ ID NO: 485096 - DNA, 33 bp, Homo sapien
ttatcactgcaacagccaagtagaagccacaga

SEQ ID NO: 485097 - DNA, 33 bp, Homo sapien
acaaagtaggtctccaataacctcttgatgatg

SEQ ID NO: 485098 - DNA, 33 bp, Homo sapien
acaaagtaggtctccagtaacctcttgatgatg

SEQ ID NO: 485099 - DNA, 33 bp, Homo sapien
tctggacagagggtacaagctgaccatccagag

SEQ ID NO: 485100 - DNA, 33 bp, Homo sapien
tctggacagagggtactagctgaccatccagag

SEQ ID NO: 485101 - DNA, 33 bp, Homo sapien
tcagttctgaaggttagaagtcctaaaggggtc

SEQ ID NO: 485102 - DNA, 33 bp, Homo sapien
tcagttctgaaggttataagtcctaaaggggtc

SEQ ID NO: 485103 - DNA, 33 bp, Homo sapien
cagtaataaaaatacaaattgtcatgccttacg

SEQ ID NO: 485104 - DNA, 33 bp, Homo sapien
cagtaataaaaatacagattgtcatgccttacg

SEQ ID NO: 485105 - DNA, 33 bp, Homo sapien
gcattgggaatatgtacgtacgtgtgtctctgc

SEQ ID NO: 485106 - DNA, 33 bp, Homo sapien
gcattgggaatatgtatgtacgtgtgtctctgc

SEQ ID NO: 485107 - DNA, 33 bp, Homo sapien
atttttgttaatgaaaatatgttgaatgttcat

SEQ ID NO: 485108 - DNA, 33 bp, Homo sapien
atttttgttaatgaaactatgttgaatgttcat

SEQ ID NO: 485109 - DNA, 33 bp, Homo sapien
cccaccagcacagtgacggtttataaatgccat

SEQ ID NO: 485110 - DNA, 33 bp, Homo sapien
cccaccagcacagtgatggtttataaatgccat

SEQ ID NO: 485111 - DNA, 33 bp, Homo sapien
agtgttcccttttcaaagcctgtaacaccagga

SEQ ID NO: 485112 - DNA, 33 bp, Homo sapien
agtgttcccttttcaatgcctgtaacaccagga

SEQ ID NO: 485113 - DNA, 33 bp, Homo sapien
tagatgccctcagtaaatgtattcagaataaat

SEQ ID NO: 485114 - DNA, 33 bp, Homo sapien
tagatgccctcagtaagtgtattcagaataaat

SEQ ID NO: 485115 - DNA, 33 bp, Homo sapien
actccatgttgctgtaacacttggacacgttac

SEQ ID NO: 485116 - DNA, 33 bp, Homo sapien
actccatgttgctgtatcacttggacacgttac

SEQ ID NO: 485117 - DNA, 33 bp, Homo sapien
gccctttttggaacaaacttcttgaggatagag

SEQ ID NO: 485118 - DNA, 33 bp, Homo sapien
gccctttttggaacaaccttcttgaggatagag

SEQ ID NO: 485119 - DNA, 33 bp, Homo sapien
tccctccacagacataacctgagccccgaccat

SEQ ID NO: 485120 - DNA, 33 bp, Homo sapien
tccctccacagacataccctgagccccgaccat

SEQ ID NO: 485121 - DNA, 33 bp, Homo sapien
catttttattgctctcagaaccaaatcaaaagt

SEQ ID NO: 485122 - DNA, 33 bp, Homo sapien
catttttattgctctcggaaccaaatcaaaagt

SEQ ID NO: 485123 - DNA, 33 bp, Homo sapien
ctccatttgtgccccacaatcggtacggattct

SEQ ID NO: 485124 - DNA, 33 bp, Homo sapien
ctccatttgtgccccataatcggtacggattct

SEQ ID NO: 485125 - DNA, 33 bp, Homo sapien
aactcagggtgtcaaaatggataggtcttactt

SEQ ID NO: 485126 - DNA, 33 bp, Homo sapien
aactcagggtgtcaaactggataggtcttactt

SEQ ID NO: 485127 - DNA, 33 bp, Homo sapien
ctcctggcttgcttgacaatgggtatggggttt

SEQ ID NO: 485128 - DNA, 33 bp, Homo sapien
ctcctggcttgcttgataatgggtatggggttt

SEQ ID NO: 485129 - DNA, 33 bp, Homo sapien
acaaaggcagcattcccgaccctgtgagttgag

SEQ ID NO: 485130 - DNA, 33 bp, Homo sapien
acaaaggcagcattcctgaccctgtgagttgag

SEQ ID NO: 485131 - DNA, 33 bp, Homo sapien
ttctcactctggcttaaaggaaatcacaatttc

SEQ ID NO: 485132 - DNA, 33 bp, Homo sapien
ttctcactctggcttagaggaaatcacaatttc

SEQ ID NO: 485133 - DNA, 33 bp, Homo sapien
gagcggagagacaacactggtgccatagacagt

SEQ ID NO: 485134 - DNA, 33 bp, Homo sapien
gagcggagagacaacattggtgccatagacagt

SEQ ID NO: 485135 - DNA, 33 bp, Homo sapien
tggcagataacaaggtaaatataacatactata

SEQ ID NO: 485136 - DNA, 33 bp, Homo sapien
tggcagataacaaggttaatataacatactata

SEQ ID NO: 485137 - DNA, 33 bp, Homo sapien
agacagagctcaaggccaaacactatatctaga

SEQ ID NO: 485138 - DNA, 33 bp, Homo sapien
agacagagctcaaggctaaacactatatctaga

SEQ ID NO: 485139 - DNA, 33 bp, Homo sapien
ctttgacagagcggtaacaccaggacaatgtac

SEQ ID NO: 485140 - DNA, 33 bp, Homo sapien
ctttgacagagcggtaccaccaggacaatgtac

SEQ ID NO: 485141 - DNA, 33 bp, Homo sapien
tcctagattcaattaaagatcaataacctcaag

SEQ ID NO: 485142 - DNA, 33 bp, Homo sapien
tcctagattcaattaatgatcaataacctcaag

SEQ ID NO: 485143 - DNA, 33 bp, Homo sapien
ataagactgtcttctcaatccttatgtataatg

SEQ ID NO: 485144 - DNA, 33 bp, Homo sapien
ataagactgtcttctcgatccttatgtataatg

SEQ ID NO: 485145 - DNA, 33 bp, Homo sapien
agtctcttgtttccaaaggtcttactttctcag

SEQ ID NO: 485146 - DNA, 33 bp, Homo sapien
agtctcttgtttccaacggtcttactttctcag

SEQ ID NO: 485147 - DNA, 33 bp, Homo sapien
tcccagttgcattgtacactcagagcaaagatc

SEQ ID NO: 485148 - DNA, 33 bp, Homo sapien
tcccagttgcattgtagactcagagcaaagatc

SEQ ID NO: 485149 - DNA, 33 bp, Homo sapien
ctgtactggatttttcacatccatcttcatttt

SEQ ID NO: 485150 - DNA, 33 bp, Homo sapien
ctgtactggatttttcgcatccatcttcatttt

SEQ ID NO: 485151 - DNA, 33 bp, Homo sapien
aaaagccctgcacttacaacaagtttctgttga

SEQ ID NO: 485152 - DNA, 33 bp, Homo sapien
aaaagccctgcacttataacaagtttctgttga

SEQ ID NO: 485153 - DNA, 33 bp, Homo sapien
agacctatggctagacaatattagattgcctta

SEQ ID NO: 485154 - DNA, 33 bp, Homo sapien
agacctatggctagaccatattagattgcctta

SEQ ID NO: 485155 - DNA, 33 bp, Homo sapien
gggcaccagttaggaacctttatattcatttat

SEQ ID NO: 485156 - DNA, 33 bp, Homo sapien
gggcaccagttaggaatctttatattcatttat

SEQ ID NO: 485157 - DNA, 33 bp, Homo sapien
aatgttgaaaagtatcagagagtagacagccgt

SEQ ID NO: 485158 - DNA, 33 bp, Homo sapien
aatgttgaaaagtatcggagagtagacagccgt

SEQ ID NO: 485159 - DNA, 33 bp, Homo sapien
gataatttagtctccacgtactcctcagaatta

SEQ ID NO: 485160 - DNA, 33 bp, Homo sapien
gataatttagtctccatgtactcctcagaatta

SEQ ID NO: 485161 - DNA, 33 bp, Homo sapien
gtataaagttgtcaagcagagaacgtctatggg

SEQ ID NO: 485162 - DNA, 33 bp, Homo sapien
gtataaagttgtcaagtagagaacgtctatggg

SEQ ID NO: 485163 - DNA, 33 bp, Homo sapien
cgtcatgctgaaaagacaaagatcaaatattaa

SEQ ID NO: 485164 - DNA, 33 bp, Homo sapien
cgtcatgctgaaaagagaaagatcaaatattaa

SEQ ID NO: 485165 - DNA, 33 bp, Homo sapien
ttattatctgtttgtccaaacccataatgtgta

SEQ ID NO: 485166 - DNA, 33 bp, Homo sapien
ttattatctgtttgtctaaacccataatgtgta

SEQ ID NO: 485167 - DNA, 33 bp, Homo sapien
aaatggccagcaaatgaacaaagagatcttcaa

SEQ ID NO: 485168 - DNA, 33 bp, Homo sapien
aaatggccagcaaatggacaaagagatcttcaa

SEQ ID NO: 485169 - DNA, 33 bp, Homo sapien
aaaacctacccagaaactattggcatgagaatt

SEQ ID NO: 485170 - DNA, 33 bp, Homo sapien
aaaacctacccagaaagtattggcatgagaatt

SEQ ID NO: 485171 - DNA, 33 bp, Homo sapien
ctgtctgtggtaaatgacatcccataaatgagt

SEQ ID NO: 485172 - DNA, 33 bp, Homo sapien
ctgtctgtggtaaatggcatcccataaatgagt

SEQ ID NO: 485173 - DNA, 33 bp, Homo sapien
aatgagtcctactacaatgaacattaaagaaaa

SEQ ID NO: 485174 - DNA, 33 bp, Homo sapien
aatgagtcctactacattgaacattaaagaaaa

SEQ ID NO: 485175 - DNA, 33 bp, Homo sapien
cgaagcagagttcttacaggtcagattgaagac

SEQ ID NO: 485176 - DNA, 33 bp, Homo sapien
cgaagcagagttcttataggtcagattgaagac

SEQ ID NO: 485177 - DNA, 33 bp, Homo sapien
aggtggtcaaatgtccagcaagtaagttaaccc

SEQ ID NO: 485178 - DNA, 33 bp, Homo sapien
aggtggtcaaatgtccggcaagtaagttaaccc

SEQ ID NO: 485179 - DNA, 33 bp, Homo sapien
taagaagcatttgtgaccaggctacattttctt

SEQ ID NO: 485180 - DNA, 33 bp, Homo sapien
taagaagcatttgtgatcaggctacattttctt

SEQ ID NO: 485181 - DNA, 33 bp, Homo sapien
catctatttaacattccctctttgaacagcttt

SEQ ID NO: 485182 - DNA, 33 bp, Homo sapien
catctatttaacattctctctttgaacagcttt

SEQ ID NO: 485183 - DNA, 33 bp, Homo sapien
agcccaccatcttgatcacgttcttagtttcat

SEQ ID NO: 485184 - DNA, 33 bp, Homo sapien
agcccaccatcttgatgacgttcttagtttcat

SEQ ID NO: 485185 - DNA, 33 bp, Homo sapien
ctactgaagtaaaggggagttgagtaaatattt

SEQ ID NO: 485186 - DNA, 33 bp, Homo sapien
ctactgaagtaaagggtagttgagtaaatattt

SEQ ID NO: 485187 - DNA, 33 bp, Homo sapien
tctagtcatcttaaaaacttaggtaaggccagg

SEQ ID NO: 485188 - DNA, 33 bp, Homo sapien
tctagtcatcttaaaaccttaggtaaggccagg

SEQ ID NO: 485189 - DNA, 33 bp, Homo sapien
tcagtttccgaagatacgcagctttggcgaaac

SEQ ID NO: 485190 - DNA, 33 bp, Homo sapien
tcagtttccgaagatatgcagctttggcgaaac

SEQ ID NO: 485191 - DNA, 33 bp, Homo sapien
ttattttcaacagccaacttcaattacaaatgt

SEQ ID NO: 485192 - DNA, 33 bp, Homo sapien
ttattttcaacagccaccttcaattacaaatgt

SEQ ID NO: 485193 - DNA, 33 bp, Homo sapien
gattgttaccccttgaaggaagtagagataatt

SEQ ID NO: 485194 - DNA, 33 bp, Homo sapien
gattgttaccccttgatggaagtagagataatt

SEQ ID NO: 485195 - DNA, 33 bp, Homo sapien
gccaaagcagagctaaacatttaaaagataaaa

SEQ ID NO: 485196 - DNA, 33 bp, Homo sapien
gccaaagcagagctaaccatttaaaagataaaa

SEQ ID NO: 485197 - DNA, 33 bp, Homo sapien
atataaaatggtgcagacattatgataactcaa

SEQ ID NO: 485198 - DNA, 33 bp, Homo sapien
atataaaatggtgcagccattatgataactcaa

SEQ ID NO: 485199 - DNA, 33 bp, Homo sapien
ctctagattagctctcacaatatggtaaactcc

SEQ ID NO: 485200 - DNA, 33 bp, Homo sapien
ctctagattagctctcgcaatatggtaaactcc

SEQ ID NO: 485201 - DNA, 33 bp, Homo sapien
atcaagttatagaagagtaggattcatgtaaag

SEQ ID NO: 485202 - DNA, 33 bp, Homo sapien
atcaagttatagaagattaggattcatgtaaag

SEQ ID NO: 485203 - DNA, 33 bp, Homo sapien
aacaggctggaagttaaactggttgaacaatct

SEQ ID NO: 485204 - DNA, 33 bp, Homo sapien
aacaggctggaagttacactggttgaacaatct

SEQ ID NO: 485205 - DNA, 33 bp, Homo sapien
tgtttggctgtatcacaattagtttattcaatc

SEQ ID NO: 485206 - DNA, 33 bp, Homo sapien
tgtttggctgtatcacgattagtttattcaatc

SEQ ID NO: 485207 - DNA, 33 bp, Homo sapien
gtaattagaatttgcacctttggatgacttgcc

SEQ ID NO: 485208 - DNA, 33 bp, Homo sapien
gtaattagaatttgcagctttggatgacttgcc

SEQ ID NO: 485209 - DNA, 33 bp, Homo sapien
ctggagaaaatgtacaaaatgcacaaatactat

SEQ ID NO: 485210 - DNA, 33 bp, Homo sapien
ctggagaaaatgtacagaatgcacaaatactat

SEQ ID NO: 485211 - DNA, 33 bp, Homo sapien
acaaacaagatcagctgaaagaagtatacaagc

SEQ ID NO: 485212 - DNA, 33 bp, Homo sapien
acaaacaagatcagcttaaagaagtatacaagc

SEQ ID NO: 485213 - DNA, 33 bp, Homo sapien
aactgacaatgtagaaatgatgacagagataga

SEQ ID NO: 485214 - DNA, 33 bp, Homo sapien
aactgacaatgtagaactgatgacagagataga

SEQ ID NO: 485215 - DNA, 33 bp, Homo sapien
ttttccacatttaaaggagagacagtttccctt

SEQ ID NO: 485216 - DNA, 33 bp, Homo sapien
ttttccacatttaaagtagagacagtttccctt

SEQ ID NO: 485217 - DNA, 33 bp, Homo sapien
attctctcaaatctacaagtaaagtattaccat

SEQ ID NO: 485218 - DNA, 33 bp, Homo sapien
attctctcaaatctacgagtaaagtattaccat

SEQ ID NO: 485219 - DNA, 33 bp, Homo sapien
cagaaacgagatactacaaaataagcatacatc

SEQ ID NO: 485220 - DNA, 33 bp, Homo sapien
cagaaacgagatactataaaataagcatacatc

SEQ ID NO: 485221 - DNA, 33 bp, Homo sapien
agctacctacaggtaaaggtcaaccacacttcc

SEQ ID NO: 485222 - DNA, 33 bp, Homo sapien
agctacctacaggtaagggtcaaccacacttcc

SEQ ID NO: 485223 - DNA, 33 bp, Homo sapien
atctttcaagggtcaaccaaaatgctattcctt

SEQ ID NO: 485224 - DNA, 33 bp, Homo sapien
atctttcaagggtcaatcaaaatgctattcctt

SEQ ID NO: 485225 - DNA, 33 bp, Homo sapien
cccaagactgggaagaaaaagtggtttaattgg

SEQ ID NO: 485226 - DNA, 33 bp, Homo sapien
cccaagactgggaagagaaagtggtttaattgg

SEQ ID NO: 485227 - DNA, 33 bp, Homo sapien
atataacattcctgaacagattagaggttggca

SEQ ID NO: 485228 - DNA, 33 bp, Homo sapien
atataacattcctgaagagattagaggttggca

SEQ ID NO: 485229 - DNA, 33 bp, Homo sapien
tcctcagctcttgtcacaacattctttcccacc

SEQ ID NO: 485230 - DNA, 33 bp, Homo sapien
tcctcagctcttgtcataacattctttcccacc

SEQ ID NO: 485231 - DNA, 33 bp, Homo sapien
gccttattcacttccacatcatagaacctagca

SEQ ID NO: 485232 - DNA, 33 bp, Homo sapien
gccttattcacttccatatcatagaacctagca

SEQ ID NO: 485233 - DNA, 33 bp, Homo sapien
ggaaacagacacccaagcaaaacagtctagctt

SEQ ID NO: 485234 - DNA, 33 bp, Homo sapien
ggaaacagacacccaatcaaaacagtctagctt

SEQ ID NO: 485235 - DNA, 33 bp, Homo sapien
ttttgcagtagtatacacaacaatggcacatct

SEQ ID NO: 485236 - DNA, 33 bp, Homo sapien
ttttgcagtagtatacgcaacaatggcacatct

SEQ ID NO: 485237 - DNA, 33 bp, Homo sapien
tagagcaaatgaaccactgaaggagatactagt

SEQ ID NO: 485238 - DNA, 33 bp, Homo sapien
tagagcaaatgaaccagtgaaggagatactagt

SEQ ID NO: 485239 - DNA, 33 bp, Homo sapien
gctaaacacaaattcacaagttctcctcaccac

SEQ ID NO: 485240 - DNA, 33 bp, Homo sapien
gctaaacacaaattcataagttctcctcaccac

SEQ ID NO: 485241 - DNA, 33 bp, Homo sapien
caaaaatttagaggaaaaagtgtcaagatatct

SEQ ID NO: 485242 - DNA, 33 bp, Homo sapien
caaaaatttagaggaataagtgtcaagatatct

SEQ ID NO: 485243 - DNA, 33 bp, Homo sapien
caggtctctggtataacggcgtgagtaagataa

SEQ ID NO: 485244 - DNA, 33 bp, Homo sapien
caggtctctggtataatggcgtgagtaagataa

SEQ ID NO: 485245 - DNA, 33 bp, Homo sapien
ttgaataaatgcaggcccatcgagaggcaggtg

SEQ ID NO: 485246 - DNA, 33 bp, Homo sapien
ttgaataaatgcaggctcatcgagaggcaggtg

SEQ ID NO: 485247 - DNA, 33 bp, Homo sapien
aacgatgctgtcctcactccctgaaaaccatgc

SEQ ID NO: 485248 - DNA, 33 bp, Homo sapien
aacgatgctgtcctcagtccctgaaaaccatgc

SEQ ID NO: 485249 - DNA, 33 bp, Homo sapien
atccgcagggctgtcaccttttctccaagctcc

SEQ ID NO: 485250 - DNA, 33 bp, Homo sapien
atccgcagggctgtcatcttttctccaagctcc

SEQ ID NO: 485251 - DNA, 33 bp, Homo sapien
gactgtcttaaaacaacctacaaacttccagca

SEQ ID NO: 485252 - DNA, 33 bp, Homo sapien
gactgtcttaaaacaagctacaaacttccagca

SEQ ID NO: 485253 - DNA, 33 bp, Homo sapien
atcttctgacatacaactagaaaaaatgtgttc

SEQ ID NO: 485254 - DNA, 33 bp, Homo sapien
atcttctgacatacaagtagaaaaaatgtgttc

SEQ ID NO: 485255 - DNA, 33 bp, Homo sapien
aaatccaaaatgtgaacgagccagctagctgtc

SEQ ID NO: 485256 - DNA, 33 bp, Homo sapien
aaatccaaaatgtgaatgagccagctagctgtc

SEQ ID NO: 485257 - DNA, 33 bp, Homo sapien
tagtgtgtttgggagactatatacccgtgcatg

SEQ ID NO: 485258 - DNA, 33 bp, Homo sapien
tagtgtgtttgggagattatatacccgtgcatg

SEQ ID NO: 485259 - DNA, 33 bp, Homo sapien
tgtttattcactggagaaaaaggtgagctgaga

SEQ ID NO: 485260 - DNA, 33 bp, Homo sapien
tgtttattcactggaggaaaaggtgagctgaga

SEQ ID NO: 485261 - DNA, 33 bp, Homo sapien
tttaattggtcacgcaaaagaaaggcttacatt

SEQ ID NO: 485262 - DNA, 33 bp, Homo sapien
tttaattggtcacgcagaagaaaggcttacatt

SEQ ID NO: 485263 - DNA, 33 bp, Homo sapien
ccaagtagacaatatgcacaggaagtactgtgg

SEQ ID NO: 485264 - DNA, 33 bp, Homo sapien
ccaagtagacaatatggacaggaagtactgtgg

SEQ ID NO: 485265 - DNA, 33 bp, Homo sapien
tctactaatacagaaacgtgctaaatctcttcc

SEQ ID NO: 485266 - DNA, 33 bp, Homo sapien
tctactaatacagaaatgtgctaaatctcttcc

SEQ ID NO: 485267 - DNA, 33 bp, Homo sapien
attagacaaataatgaaatgatggtttgatatt

SEQ ID NO: 485268 - DNA, 33 bp, Homo sapien
attagacaaataatgacatgatggtttgatatt

SEQ ID NO: 485269 - DNA, 33 bp, Homo sapien
aagaaaagtaataccccgaggagtaaggtgcca

SEQ ID NO: 485270 - DNA, 33 bp, Homo sapien
aagaaaagtaataccctgaggagtaaggtgcca

SEQ ID NO: 485271 - DNA, 33 bp, Homo sapien
aatataacaagataaacggtcccaggcagtctt

SEQ ID NO: 485272 - DNA, 33 bp, Homo sapien
aatataacaagataaatggtcccaggcagtctt

SEQ ID NO: 485273 - DNA, 33 bp, Homo sapien
gtggatgagcaaccaacgatttgtgcctcatac

SEQ ID NO: 485274 - DNA, 33 bp, Homo sapien
gtggatgagcaaccaatgatttgtgcctcatac

SEQ ID NO: 485275 - DNA, 33 bp, Homo sapien
taggaacatgcctccaaataagatgaaatgctc

SEQ ID NO: 485276 - DNA, 33 bp, Homo sapien
taggaacatgcctccatataagatgaaatgctc

SEQ ID NO: 485277 - DNA, 33 bp, Homo sapien
cctcccaggtagagcacggactctttgaaagga

SEQ ID NO: 485278 - DNA, 33 bp, Homo sapien
cctcccaggtagagcatggactctttgaaagga

SEQ ID NO: 485279 - DNA, 33 bp, Homo sapien
tttctttgcagcactcaaagtctgatggcaaag

SEQ ID NO: 485280 - DNA, 33 bp, Homo sapien
tttctttgcagcactcgaagtctgatggcaaag

SEQ ID NO: 485281 - DNA, 33 bp, Homo sapien
agagctttaaaatgcaagtgggtaacagtgacc

SEQ ID NO: 485282 - DNA, 33 bp, Homo sapien
agagctttaaaatgcaggtgggtaacagtgacc

SEQ ID NO: 485283 - DNA, 33 bp, Homo sapien
cataccctacaaggagccatttgaacaccttac

SEQ ID NO: 485284 - DNA, 33 bp, Homo sapien
cataccctacaaggaggcatttgaacaccttac

SEQ ID NO: 485285 - DNA, 33 bp, Homo sapien
cagcctcggcagataacagcctttcctattatc

SEQ ID NO: 485286 - DNA, 33 bp, Homo sapien
cagcctcggcagataagagcctttcctattatc

SEQ ID NO: 485287 - DNA, 33 bp, Homo sapien
ctgatggctgttgttacgtcactcctacctgag

SEQ ID NO: 485288 - DNA, 33 bp, Homo sapien
ctgatggctgttgttatgtcactcctacctgag

SEQ ID NO: 485289 - DNA, 33 bp, Homo sapien
agatcacactatacagcagttggcaaggtcaag

SEQ ID NO: 485290 - DNA, 33 bp, Homo sapien
agatcacactatacagtagttggcaaggtcaag

SEQ ID NO: 485291 - DNA, 33 bp, Homo sapien
tgatcatcaatagcaagaaatacctttcatttg

SEQ ID NO: 485292 - DNA, 33 bp, Homo sapien
tgatcatcaatagcaataaatacctttcatttg

SEQ ID NO: 485293 - DNA, 33 bp, Homo sapien
taggcccagatgaggaagatagaattacagtga

SEQ ID NO: 485294 - DNA, 33 bp, Homo sapien
taggcccagatgaggatgatagaattacagtga

SEQ ID NO: 485295 - DNA, 33 bp, Homo sapien
cagtacagcttctgtaacatccaggtttgtgtg

SEQ ID NO: 485296 - DNA, 33 bp, Homo sapien
cagtacagcttctgtagcatccaggtttgtgtg

SEQ ID NO: 485297 - DNA, 33 bp, Homo sapien
tccctggagcaaaatacgttccttctaagttct

SEQ ID NO: 485298 - DNA, 33 bp, Homo sapien
tccctggagcaaaatatgttccttctaagttct

SEQ ID NO: 485299 - DNA, 33 bp, Homo sapien
tgtaaagtgtggaaaaatggtttattagcagca

SEQ ID NO: 485300 - DNA, 33 bp, Homo sapien
tgtaaagtgtggaaaagtggtttattagcagca

SEQ ID NO: 485301 - DNA, 33 bp, Homo sapien
catgctatgtagccgtaaaacacacatggcatt

SEQ ID NO: 485302 - DNA, 33 bp, Homo sapien
catgctatgtagccgtgaaacacacatggcatt

SEQ ID NO: 485303 - DNA, 33 bp, Homo sapien
cgaggcaataggatcaatagccacaggctccca

SEQ ID NO: 485304 - DNA, 33 bp, Homo sapien
cgaggcaataggatcagtagccacaggctccca

SEQ ID NO: 485305 - DNA, 33 bp, Homo sapien
tgatgcagtcttctccagagtagaaaactgtgt

SEQ ID NO: 485306 - DNA, 33 bp, Homo sapien
tgatgcagtcttctccggagtagaaaactgtgt

SEQ ID NO: 485307 - DNA, 33 bp, Homo sapien
ggtgtgatcctaatacacttatgagacagccag

SEQ ID NO: 485308 - DNA, 33 bp, Homo sapien
ggtgtgatcctaatacgcttatgagacagccag

SEQ ID NO: 485309 - DNA, 33 bp, Homo sapien
aaactcaccagtctctaaactgtccacagtagc

SEQ ID NO: 485310 - DNA, 33 bp, Homo sapien
aaactcaccagtctctgaactgtccacagtagc

SEQ ID NO: 485311 - DNA, 33 bp, Homo sapien
caacaaaaaaccgacacgagtgaactgttttct

SEQ ID NO: 485312 - DNA, 33 bp, Homo sapien
caacaaaaaaccgacatgagtgaactgttttct

SEQ ID NO: 485313 - DNA, 33 bp, Homo sapien
ccttctggtagctctccacatgcccactgagag

SEQ ID NO: 485314 - DNA, 33 bp, Homo sapien
ccttctggtagctctctacatgcccactgagag

SEQ ID NO: 485315 - DNA, 33 bp, Homo sapien
cctaaataggttttgccctgcctaatattaaat

SEQ ID NO: 485316 - DNA, 33 bp, Homo sapien
cctaaataggttttgctctgcctaatattaaat

SEQ ID NO: 485317 - DNA, 33 bp, Homo sapien
gacagctttgccttccaatgcacgtcagcccag

SEQ ID NO: 485318 - DNA, 33 bp, Homo sapien
gacagctttgccttccgatgcacgtcagcccag

SEQ ID NO: 485319 - DNA, 33 bp, Homo sapien
ctgttttgctgagaaacgcttattgacttcctg

SEQ ID NO: 485320 - DNA, 33 bp, Homo sapien
ctgttttgctgagaaatgcttattgacttcctg

SEQ ID NO: 485321 - DNA, 33 bp, Homo sapien
ctgccatcctaagcaccctgaggctattttttc

SEQ ID NO: 485322 - DNA, 33 bp, Homo sapien
ctgccatcctaagcacgctgaggctattttttc

SEQ ID NO: 485323 - DNA, 33 bp, Homo sapien
ctggactctgcttttacgattcttggaagggac

SEQ ID NO: 485324 - DNA, 33 bp, Homo sapien
ctggactctgcttttatgattcttggaagggac

SEQ ID NO: 485325 - DNA, 33 bp, Homo sapien
gtctctggatgaaaaacggttagttcttcagtt

SEQ ID NO: 485326 - DNA, 33 bp, Homo sapien
gtctctggatgaaaaatggttagttcttcagtt

SEQ ID NO: 485327 - DNA, 33 bp, Homo sapien
ccttaggcaatatgcacacttttgaaacagaag

SEQ ID NO: 485328 - DNA, 33 bp, Homo sapien
ccttaggcaatatgcatacttttgaaacagaag

SEQ ID NO: 485329 - DNA, 33 bp, Homo sapien
tctgaacacacactgccgaccatgggagggaag

SEQ ID NO: 485330 - DNA, 33 bp, Homo sapien
tctgaacacacactgctgaccatgggagggaag

SEQ ID NO: 485331 - DNA, 33 bp, Homo sapien
agctgcttactgaagaaatgtgagttgagcatc

SEQ ID NO: 485332 - DNA, 33 bp, Homo sapien
agctgcttactgaagagatgtgagttgagcatc

SEQ ID NO: 485333 - DNA, 33 bp, Homo sapien
tgctcagcaccatttaaggtgaagttgtgggtt

SEQ ID NO: 485334 - DNA, 33 bp, Homo sapien
tgctcagcaccatttagggtgaagttgtgggtt

SEQ ID NO: 485335 - DNA, 33 bp, Homo sapien
ggtctgtggactcttcaaatgagtttgcttgga

SEQ ID NO: 485336 - DNA, 33 bp, Homo sapien
ggtctgtggactcttcgaatgagtttgcttgga

SEQ ID NO: 485337 - DNA, 33 bp, Homo sapien
ggatgtatgtggacatgataacatcaaatctaa

SEQ ID NO: 485338 - DNA, 33 bp, Homo sapien
ggatgtatgtggacattataacatcaaatctaa

SEQ ID NO: 485339 - DNA, 33 bp, Homo sapien
aagacttcacaggtcacgaggttttactttttg

SEQ ID NO: 485340 - DNA, 33 bp, Homo sapien
aagacttcacaggtcatgaggttttactttttg

SEQ ID NO: 485341 - DNA, 33 bp, Homo sapien
caatattccaaagcaaacttaaagagaaattca

SEQ ID NO: 485342 - DNA, 33 bp, Homo sapien
caatattccaaagcaatcttaaagagaaattca

SEQ ID NO: 485343 - DNA, 33 bp, Homo sapien
gatctgaggccgggaaaagggtaatgtttataa

SEQ ID NO: 485344 - DNA, 33 bp, Homo sapien
gatctgaggccgggaagagggtaatgtttataa

SEQ ID NO: 485345 - DNA, 33 bp, Homo sapien
tgggtgacctccttgcacctctctggacctcaa

SEQ ID NO: 485346 - DNA, 33 bp, Homo sapien
tgggtgacctccttgcgcctctctggacctcaa

SEQ ID NO: 485347 - DNA, 33 bp, Homo sapien
gaatcaagccacttccagcatacaggacttcag

SEQ ID NO: 485348 - DNA, 33 bp, Homo sapien
gaatcaagccacttccggcatacaggacttcag

SEQ ID NO: 485349 - DNA, 33 bp, Homo sapien
agctgcaagtgtagcaagcagtgatgccagagg

SEQ ID NO: 485350 - DNA, 33 bp, Homo sapien
agctgcaagtgtagcaggcagtgatgccagagg

SEQ ID NO: 485351 - DNA, 33 bp, Homo sapien
aaaacatggataatgacgaaaacctatgcaaac

SEQ ID NO: 485352 - DNA, 33 bp, Homo sapien
aaaacatggataatgatgaaaacctatgcaaac

SEQ ID NO: 485353 - DNA, 33 bp, Homo sapien
acagcagccgatttacagaggatgaaacttgag

SEQ ID NO: 485354 - DNA, 33 bp, Homo sapien
acagcagccgatttacggaggatgaaacttgag

SEQ ID NO: 485355 - DNA, 33 bp, Homo sapien
tccttgaaagtcaagtcactctctgattcttta

SEQ ID NO: 485356 - DNA, 33 bp, Homo sapien
tccttgaaagtcaagttactctctgattcttta

SEQ ID NO: 485357 - DNA, 33 bp, Homo sapien
accaccttgaatagaaactccaaaatatgtcat

SEQ ID NO: 485358 - DNA, 33 bp, Homo sapien
accaccttgaatagaagctccaaaatatgtcat

SEQ ID NO: 485359 - DNA, 33 bp, Homo sapien
ttattagtgctgttgaaaatctgagaaagctgg

SEQ ID NO: 485360 - DNA, 33 bp, Homo sapien
ttattagtgctgttgagaatctgagaaagctgg

SEQ ID NO: 485361 - DNA, 33 bp, Homo sapien
tgaggggctttgtaaacggctgagcaccacccc

SEQ ID NO: 485362 - DNA, 33 bp, Homo sapien
tgaggggctttgtaaatggctgagcaccacccc

SEQ ID NO: 485363 - DNA, 33 bp, Homo sapien
cctggggcacagaggaaaggtcaacagagcttg

SEQ ID NO: 485364 - DNA, 33 bp, Homo sapien
cctggggcacagaggagaggtcaacagagcttg

SEQ ID NO: 485365 - DNA, 33 bp, Homo sapien
ggcaccttacctgcatcagttcatctaatctcc

SEQ ID NO: 485366 - DNA, 33 bp, Homo sapien
ggcaccttacctgcattagttcatctaatctcc

SEQ ID NO: 485367 - DNA, 33 bp, Homo sapien
gtctgcttttgtgtcacgccagctgcctggtgc

SEQ ID NO: 485368 - DNA, 33 bp, Homo sapien
gtctgcttttgtgtcatgccagctgcctggtgc

SEQ ID NO: 485369 - DNA, 33 bp, Homo sapien
gtggcacaacttcaccactgaattagtttaatc

SEQ ID NO: 485370 - DNA, 33 bp, Homo sapien
gtggcacaacttcaccgctgaattagtttaatc

SEQ ID NO: 485371 - DNA, 33 bp, Homo sapien
attacattgctgtttacgcctctgttacctggg

SEQ ID NO: 485372 - DNA, 33 bp, Homo sapien
attacattgctgtttatgcctctgttacctggg

SEQ ID NO: 485373 - DNA, 33 bp, Homo sapien
aattacatcatatgaaaggaagaaatactaaca

SEQ ID NO: 485374 - DNA, 33 bp, Homo sapien
aattacatcatatgaagggaagaaatactaaca

SEQ ID NO: 485375 - DNA, 33 bp, Homo sapien
ttcctattcctttgtaccctctgtattttgttg

SEQ ID NO: 485376 - DNA, 33 bp, Homo sapien
ttcctattcctttgtatcctctgtattttgttg

SEQ ID NO: 485377 - DNA, 33 bp, Homo sapien
aatatgcaatccctccagaacttgacttatctg

SEQ ID NO: 485378 - DNA, 33 bp, Homo sapien
aatatgcaatccctccggaacttgacttatctg

SEQ ID NO: 485379 - DNA, 33 bp, Homo sapien
ccctgaatagcctgccagatgcttcttcaaggg

SEQ ID NO: 485380 - DNA, 33 bp, Homo sapien
ccctgaatagcctgcctgatgcttcttcaaggg

SEQ ID NO: 485381 - DNA, 33 bp, Homo sapien
agagctcttagctttaccaagtgcccagcagta

SEQ ID NO: 485382 - DNA, 33 bp, Homo sapien
agagctcttagctttatcaagtgcccagcagta

SEQ ID NO: 485383 - DNA, 33 bp, Homo sapien
aataaattcttgttcccagaagtgactatatgc

SEQ ID NO: 485384 - DNA, 33 bp, Homo sapien
aataaattcttgttcctagaagtgactatatgc

SEQ ID NO: 485385 - DNA, 33 bp, Homo sapien
agaaagtgcctaacagccataggttgaatgagt

SEQ ID NO: 485386 - DNA, 33 bp, Homo sapien
agaaagtgcctaacagtcataggttgaatgagt

SEQ ID NO: 485387 - DNA, 33 bp, Homo sapien
gccacaggagtagaaacagactgaggtttcttt

SEQ ID NO: 485388 - DNA, 33 bp, Homo sapien
gccacaggagtagaaagagactgaggtttcttt

SEQ ID NO: 485389 - DNA, 33 bp, Homo sapien
actggatgggtgccagaagagtgctgcagatct

SEQ ID NO: 485390 - DNA, 33 bp, Homo sapien
actggatgggtgccaggagagtgctgcagatct

SEQ ID NO: 485391 - DNA, 33 bp, Homo sapien
gctccagctctcagaacaaggcaagacctcaga

SEQ ID NO: 485392 - DNA, 33 bp, Homo sapien
gctccagctctcagaagaaggcaagacctcaga

SEQ ID NO: 485393 - DNA, 33 bp, Homo sapien
cctgggattttcttcaaactaacaatggcgggg

SEQ ID NO: 485394 - DNA, 33 bp, Homo sapien
cctgggattttcttcagactaacaatggcgggg

SEQ ID NO: 485395 - DNA, 33 bp, Homo sapien
attattcagtttgtctcaagttcgaatttaatt

SEQ ID NO: 485396 - DNA, 33 bp, Homo sapien
attattcagtttgtcttaagttcgaatttaatt

SEQ ID NO: 485397 - DNA, 33 bp, Homo sapien
agatactgtgcattccagccatatcttcaggga

SEQ ID NO: 485398 - DNA, 33 bp, Homo sapien
agatactgtgcattccggccatatcttcaggga

SEQ ID NO: 485399 - DNA, 33 bp, Homo sapien
aatccatatttagaacaattaaagaagtctgcc

SEQ ID NO: 485400 - DNA, 33 bp, Homo sapien
aatccatatttagaaccattaaagaagtctgcc

SEQ ID NO: 485401 - DNA, 33 bp, Homo sapien
ttagtagagaccattacacacttgaacccaagg

SEQ ID NO: 485402 - DNA, 33 bp, Homo sapien
ttagtagagaccattatacacttgaacccaagg

SEQ ID NO: 485403 - DNA, 33 bp, Homo sapien
tagatgaaaatgctaacacagatcagatatgct

SEQ ID NO: 485404 - DNA, 33 bp, Homo sapien
tagatgaaaatgctaagacagatcagatatgct

SEQ ID NO: 485405 - DNA, 33 bp, Homo sapien
catctaagtgttttaaaatgtgtccacctggat

SEQ ID NO: 485406 - DNA, 33 bp, Homo sapien
catctaagtgttttaagatgtgtccacctggat

SEQ ID NO: 485407 - DNA, 33 bp, Homo sapien
tttactattgagggaacgagattgaattttaac

SEQ ID NO: 485408 - DNA, 33 bp, Homo sapien
tttactattgagggaatgagattgaattttaac

SEQ ID NO: 485409 - DNA, 33 bp, Homo sapien
aaatgtctccttaggccactgtcatgacaacac

SEQ ID NO: 485410 - DNA, 33 bp, Homo sapien
aaatgtctccttaggctactgtcatgacaacac

SEQ ID NO: 485411 - DNA, 33 bp, Homo sapien
gcactccatatacttgcagagctatctgaattt

SEQ ID NO: 485412 - DNA, 33 bp, Homo sapien
gcactccatatacttgtagagctatctgaattt

SEQ ID NO: 485413 - DNA, 33 bp, Homo sapien
ctcgcatgaggccatgccatgatgatcacaggg

SEQ ID NO: 485414 - DNA, 33 bp, Homo sapien
ctcgcatgaggccatgtcatgatgatcacaggg

SEQ ID NO: 485415 - DNA, 33 bp, Homo sapien
atcaccctgtcaaggcagagatagcttccccca

SEQ ID NO: 485416 - DNA, 33 bp, Homo sapien
atcaccctgtcaaggcggagatagcttccccca

SEQ ID NO: 485417 - DNA, 33 bp, Homo sapien
tctcccaacctgattccacccactgaagttagc

SEQ ID NO: 485418 - DNA, 33 bp, Homo sapien
tctcccaacctgattctacccactgaagttagc

SEQ ID NO: 485419 - DNA, 33 bp, Homo sapien
agaagcttgatgtgcagtccccctaagagttgg

SEQ ID NO: 485420 - DNA, 33 bp, Homo sapien
agaagcttgatgtgcattccccctaagagttgg

SEQ ID NO: 485421 - DNA, 33 bp, Homo sapien
ttaagccccaatggaacggtgaagcaaaagaat

SEQ ID NO: 485422 - DNA, 33 bp, Homo sapien
ttaagccccaatggaatggtgaagcaaaagaat

SEQ ID NO: 485423 - DNA, 33 bp, Homo sapien
ggtgatgaactggaaaagaggtctgagggaagc

SEQ ID NO: 485424 - DNA, 33 bp, Homo sapien
ggtgatgaactggaaatgaggtctgagggaagc

SEQ ID NO: 485425 - DNA, 33 bp, Homo sapien
gatctcccattccaaacagtaataagtttctta

SEQ ID NO: 485426 - DNA, 33 bp, Homo sapien
gatctcccattccaaagagtaataagtttctta

SEQ ID NO: 485427 - DNA, 33 bp, Homo sapien
ggtccactggagtcccagagtggtctgattaca

SEQ ID NO: 485428 - DNA, 33 bp, Homo sapien
ggtccactggagtcccggagtggtctgattaca

SEQ ID NO: 485429 - DNA, 33 bp, Homo sapien
agtctgctttggagtacatttaattgtgtcctt

SEQ ID NO: 485430 - DNA, 33 bp, Homo sapien
agtctgctttggagtatatttaattgtgtcctt

SEQ ID NO: 485431 - DNA, 33 bp, Homo sapien
tccactggtggggggccagattagaacacaggc

SEQ ID NO: 485432 - DNA, 33 bp, Homo sapien
tccactggtggggggctagattagaacacaggc

SEQ ID NO: 485433 - DNA, 33 bp, Homo sapien
ttacatccttactaacactttaatgtcagattt

SEQ ID NO: 485434 - DNA, 33 bp, Homo sapien
ttacatccttactaaccctttaatgtcagattt

SEQ ID NO: 485435 - DNA, 33 bp, Homo sapien
tgtcccgctgatacacaatgttttaattgcttt

SEQ ID NO: 485436 - DNA, 33 bp, Homo sapien
tgtcccgctgatacaccatgttttaattgcttt

SEQ ID NO: 485437 - DNA, 33 bp, Homo sapien
cccgtgttgtgcaatagtagtcctaattatttt

SEQ ID NO: 485438 - DNA, 33 bp, Homo sapien
cccgtgttgtgcaatattagtcctaattatttt

SEQ ID NO: 485439 - DNA, 33 bp, Homo sapien
tcacagttacatattacagtcatggtggaactt

SEQ ID NO: 485440 - DNA, 33 bp, Homo sapien
tcacagttacatattagagtcatggtggaactt

SEQ ID NO: 485441 - DNA, 33 bp, Homo sapien
atctcagactttgatacggtaggcacagcagca

SEQ ID NO: 485442 - DNA, 33 bp, Homo sapien
atctcagactttgatatggtaggcacagcagca

SEQ ID NO: 485443 - DNA, 33 bp, Homo sapien
ttcactttttttttccgatgtagtgaacactag

SEQ ID NO: 485444 - DNA, 33 bp, Homo sapien
ttcactttttttttcctatgtagtgaacactag

SEQ ID NO: 485445 - DNA, 33 bp, Homo sapien
cacaaggctttaggaccgggaaaactgtcagaa

SEQ ID NO: 485446 - DNA, 33 bp, Homo sapien
cacaaggctttaggactgggaaaactgtcagaa

SEQ ID NO: 485447 - DNA, 33 bp, Homo sapien
tgctcttttacgaaaagaacctgcatcctgtgt

SEQ ID NO: 485448 - DNA, 33 bp, Homo sapien
tgctcttttacgaaaataacctgcatcctgtgt

SEQ ID NO: 485449 - DNA, 33 bp, Homo sapien
gtgaaagtatgaagcgaaacaaaaacttgccta

SEQ ID NO: 485450 - DNA, 33 bp, Homo sapien
gtgaaagtatgaagcggaacaaaaacttgccta

SEQ ID NO: 485451 - DNA, 33 bp, Homo sapien
atctcaatgaaccctcaaaacaactccacttga

SEQ ID NO: 485452 - DNA, 33 bp, Homo sapien
atctcaatgaaccctcgaaacaactccacttga

SEQ ID NO: 485453 - DNA, 33 bp, Homo sapien
tgaccttcacttgctacatttggtcatgaactg

SEQ ID NO: 485454 - DNA, 33 bp, Homo sapien
tgaccttcacttgctatatttggtcatgaactg

SEQ ID NO: 485455 - DNA, 33 bp, Homo sapien
aaccttctctgcctgaaaccctgtcatttcatt

SEQ ID NO: 485456 - DNA, 33 bp, Homo sapien
aaccttctctgcctgagaccctgtcatttcatt

SEQ ID NO: 485457 - DNA, 33 bp, Homo sapien
aggcggcaacaaccacaggaataaaaagagtca

SEQ ID NO: 485458 - DNA, 33 bp, Homo sapien
aggcggcaacaaccacgggaataaaaagagtca

SEQ ID NO: 485459 - DNA, 33 bp, Homo sapien
cactgctaaggaagtacgagatcactgtgccca

SEQ ID NO: 485460 - DNA, 33 bp, Homo sapien
cactgctaaggaagtatgagatcactgtgccca

SEQ ID NO: 485461 - DNA, 33 bp, Homo sapien
attaacaaaggcttgcactcagttcttggccaa

SEQ ID NO: 485462 - DNA, 33 bp, Homo sapien
attaacaaaggcttgcgctcagttcttggccaa

SEQ ID NO: 485463 - DNA, 33 bp, Homo sapien
ggcaagggaaaacagagaaccataacatcatac

SEQ ID NO: 485464 - DNA, 33 bp, Homo sapien
ggcaagggaaaacagataaccataacatcatac

SEQ ID NO: 485465 - DNA, 33 bp, Homo sapien
ccctagacctgtcaacaccactcccttgagttg

SEQ ID NO: 485466 - DNA, 33 bp, Homo sapien
ccctagacctgtcaacgccactcccttgagttg

SEQ ID NO: 485467 - DNA, 33 bp, Homo sapien
cttattgtctgaagcacagtcggacagaaggag

SEQ ID NO: 485468 - DNA, 33 bp, Homo sapien
cttattgtctgaagcatagtcggacagaaggag

SEQ ID NO: 485469 - DNA, 33 bp, Homo sapien
tagttgtttggggacaccaaagcttgaagaaaa

SEQ ID NO: 485470 - DNA, 33 bp, Homo sapien
tagttgtttggggacagcaaagcttgaagaaaa

SEQ ID NO: 485471 - DNA, 33 bp, Homo sapien
gaatgagaattaggcacgagtgacagaaagaga

SEQ ID NO: 485472 - DNA, 33 bp, Homo sapien
gaatgagaattaggcatgagtgacagaaagaga

SEQ ID NO: 485473 - DNA, 33 bp, Homo sapien
gaacggtggctgatcactgaaggtagaaacctt

SEQ ID NO: 485474 - DNA, 33 bp, Homo sapien
gaacggtggctgatcattgaaggtagaaacctt

SEQ ID NO: 485475 - DNA, 33 bp, Homo sapien
aagctctgctgcgcatcaggtgccaataagagt

SEQ ID NO: 485476 - DNA, 33 bp, Homo sapien
aagctctgctgcgcattaggtgccaataagagt

SEQ ID NO: 485477 - DNA, 33 bp, Homo sapien
ggcttaagaggtatgcactaatgcaatttcttg

SEQ ID NO: 485478 - DNA, 33 bp, Homo sapien
ggcttaagaggtatgcgctaatgcaatttcttg

SEQ ID NO: 485479 - DNA, 33 bp, Homo sapien
cagaggaccctgatccaaggcatgagatgatta

SEQ ID NO: 485480 - DNA, 33 bp, Homo sapien
cagaggaccctgatccgaggcatgagatgatta

SEQ ID NO: 485481 - DNA, 33 bp, Homo sapien
aattacagtacaccaaatatttttacagttaca

SEQ ID NO: 485482 - DNA, 33 bp, Homo sapien
aattacagtacaccaactatttttacagttaca

SEQ ID NO: 485483 - DNA, 33 bp, Homo sapien
gaaggggtgtcagctcaattttacatgaactca

SEQ ID NO: 485484 - DNA, 33 bp, Homo sapien
gaaggggtgtcagctctattttacatgaactca

SEQ ID NO: 485485 - DNA, 33 bp, Homo sapien
aggtgctcaataaatacgtctctccttcctctt

SEQ ID NO: 485486 - DNA, 33 bp, Homo sapien
aggtgctcaataaatatgtctctccttcctctt

SEQ ID NO: 485487 - DNA, 33 bp, Homo sapien
atgctagtgcctatgacagtttggatgctttca

SEQ ID NO: 485488 - DNA, 33 bp, Homo sapien
atgctagtgcctatgatagtttggatgctttca

SEQ ID NO: 485489 - DNA, 33 bp, Homo sapien
caaatccaattctaccacttcttaactatgtga

SEQ ID NO: 485490 - DNA, 33 bp, Homo sapien
caaatccaattctaccgcttcttaactatgtga

SEQ ID NO: 485491 - DNA, 33 bp, Homo sapien
tagtcatgggctgagaagaggagcatgatggac

SEQ ID NO: 485492 - DNA, 33 bp, Homo sapien
tagtcatgggctgagaggaggagcatgatggac

SEQ ID NO: 485493 - DNA, 33 bp, Homo sapien
ctttctctcagcttcccgattaggaccttctag

SEQ ID NO: 485494 - DNA, 33 bp, Homo sapien
ctttctctcagcttcctgattaggaccttctag

SEQ ID NO: 485495 - DNA, 33 bp, Homo sapien
aaatctgactggatttcaaaaagatctgtaagc

SEQ ID NO: 485496 - DNA, 33 bp, Homo sapien
aaatctgactggatttgaaaaagatctgtaagc

SEQ ID NO: 485497 - DNA, 33 bp, Homo sapien
gtttatcagcccttaacgggatcttgtccattc

SEQ ID NO: 485498 - DNA, 33 bp, Homo sapien
gtttatcagcccttaatgggatcttgtccattc

SEQ ID NO: 485499 - DNA, 33 bp, Homo sapien
tctctctcatgcccacagatactttaagcttct

SEQ ID NO: 485500 - DNA, 33 bp, Homo sapien
tctctctcatgcccaccgatactttaagcttct

SEQ ID NO: 485501 - DNA, 33 bp, Homo sapien
ggaataatttaggagcaagccaacacatttgga

SEQ ID NO: 485502 - DNA, 33 bp, Homo sapien
ggaataatttaggagcgagccaacacatttgga

SEQ ID NO: 485503 - DNA, 33 bp, Homo sapien
atccagctttttggaacgtctgttaaatagtct

SEQ ID NO: 485504 - DNA, 33 bp, Homo sapien
atccagctttttggaatgtctgttaaatagtct

SEQ ID NO: 485505 - DNA, 33 bp, Homo sapien
agctaactctcctaacactacagaccaagaata

SEQ ID NO: 485506 - DNA, 33 bp, Homo sapien
agctaactctcctaacgctacagaccaagaata

SEQ ID NO: 485507 - DNA, 33 bp, Homo sapien
tacagaccaagaatataacgcaaggtaggggta

SEQ ID NO: 485508 - DNA, 33 bp, Homo sapien
tacagaccaagaatatgacgcaaggtaggggta

SEQ ID NO: 485509 - DNA, 33 bp, Homo sapien
gtgtattttaaacacacgcgggaattcagcacc

SEQ ID NO: 485510 - DNA, 33 bp, Homo sapien
gtgtattttaaacacatgcgggaattcagcacc

SEQ ID NO: 485511 - DNA, 33 bp, Homo sapien
atttactttgcccttcaccttcaaagcctacct

SEQ ID NO: 485512 - DNA, 33 bp, Homo sapien
atttactttgcccttcgccttcaaagcctacct

SEQ ID NO: 485513 - DNA, 33 bp, Homo sapien
cagatcttggatgcaaactgggaaccactgatg

SEQ ID NO: 485514 - DNA, 33 bp, Homo sapien
cagatcttggatgcaatctgggaaccactgatg

SEQ ID NO: 485515 - DNA, 33 bp, Homo sapien
tatgttttgccataataatcataaacacagatt

SEQ ID NO: 485516 - DNA, 33 bp, Homo sapien
tatgttttgccataatgatcataaacacagatt

SEQ ID NO: 485517 - DNA, 33 bp, Homo sapien
ctattgattcaatagacctgatatatggagttc

SEQ ID NO: 485518 - DNA, 33 bp, Homo sapien
ctattgattcaatagatctgatatatggagttc

SEQ ID NO: 485519 - DNA, 33 bp, Homo sapien
ggcagagggaacaagcaaaatgcacaataaaga

SEQ ID NO: 485520 - DNA, 33 bp, Homo sapien
ggcagagggaacaagcgaaatgcacaataaaga

SEQ ID NO: 485521 - DNA, 33 bp, Homo sapien
ttgaccatgatgtttacaaaaagtcagataaga

SEQ ID NO: 485522 - DNA, 33 bp, Homo sapien
ttgaccatgatgtttataaaaagtcagataaga

SEQ ID NO: 485523 - DNA, 33 bp, Homo sapien
ccttcattcatgtcagcaaatccctaactgtgt

SEQ ID NO: 485524 - DNA, 33 bp, Homo sapien
ccttcattcatgtcaggaaatccctaactgtgt

SEQ ID NO: 485525 - DNA, 33 bp, Homo sapien
attttccacagtggtaagtcactagataatgtg

SEQ ID NO: 485526 - DNA, 33 bp, Homo sapien
attttccacagtggtaggtcactagataatgtg

SEQ ID NO: 485527 - DNA, 33 bp, Homo sapien
gctgcaaagctgtcaccctgggatcccacttca

SEQ ID NO: 485528 - DNA, 33 bp, Homo sapien
gctgcaaagctgtcacgctgggatcccacttca

SEQ ID NO: 485529 - DNA, 33 bp, Homo sapien
gaaggtcaagagcaatcaaatttttgctgcaga

SEQ ID NO: 485530 - DNA, 33 bp, Homo sapien
gaaggtcaagagcaatgaaatttttgctgcaga

SEQ ID NO: 485531 - DNA, 33 bp, Homo sapien
tcctttttggtgtgacaaaagttttctaaagtt

SEQ ID NO: 485532 - DNA, 33 bp, Homo sapien
tcctttttggtgtgacgaaagttttctaaagtt

SEQ ID NO: 485533 - DNA, 33 bp, Homo sapien
tgtttgaatcccagacggtacttacagatatct

SEQ ID NO: 485534 - DNA, 33 bp, Homo sapien
tgtttgaatcccagactgtacttacagatatct

SEQ ID NO: 485535 - DNA, 33 bp, Homo sapien
acatagtaggtaatcactgaatctttgtcaact

SEQ ID NO: 485536 - DNA, 33 bp, Homo sapien
acatagtaggtaatcattgaatctttgtcaact

SEQ ID NO: 485537 - DNA, 33 bp, Homo sapien
cctttgaggttgtttaaaatgacgacatcattg

SEQ ID NO: 485538 - DNA, 33 bp, Homo sapien
cctttgaggttgtttagaatgacgacatcattg

SEQ ID NO: 485539 - DNA, 33 bp, Homo sapien
caacgcccaaactgccagattccacagcgactc

SEQ ID NO: 485540 - DNA, 33 bp, Homo sapien
caacgcccaaactgccggattccacagcgactc

SEQ ID NO: 485541 - DNA, 33 bp, Homo sapien
gggcgttgacctgtccaatagcaaacccagagc

SEQ ID NO: 485542 - DNA, 33 bp, Homo sapien
gggcgttgacctgtccgatagcaaacccagagc

SEQ ID NO: 485543 - DNA, 33 bp, Homo sapien
ttcagttaggtcaagaatagagaaaaacaggac

SEQ ID NO: 485544 - DNA, 33 bp, Homo sapien
ttcagttaggtcaagactagagaaaaacaggac

SEQ ID NO: 485545 - DNA, 33 bp, Homo sapien
caaaatgaggcactacactaaaaactcaattta

SEQ ID NO: 485546 - DNA, 33 bp, Homo sapien
caaaatgaggcactacgctaaaaactcaattta

SEQ ID NO: 485547 - DNA, 33 bp, Homo sapien
tctctgcttagcaagtaaagaaatatttgcaaa

SEQ ID NO: 485548 - DNA, 33 bp, Homo sapien
tctctgcttagcaagtgaagaaatatttgcaaa

SEQ ID NO: 485549 - DNA, 33 bp, Homo sapien
agacacattatcattacagacttcaacagttct

SEQ ID NO: 485550 - DNA, 33 bp, Homo sapien
agacacattatcattatagacttcaacagttct

SEQ ID NO: 485551 - DNA, 33 bp, Homo sapien
tatcttcagaagagttaaaaaagcctacatcat

SEQ ID NO: 485552 - DNA, 33 bp, Homo sapien
tatcttcagaagagttcaaaaagcctacatcat

SEQ ID NO: 485553 - DNA, 33 bp, Homo sapien
taaatgtgtctaaaaagttcctttcaagactta

SEQ ID NO: 485554 - DNA, 33 bp, Homo sapien
taaatgtgtctaaaaatttcctttcaagactta

SEQ ID NO: 485555 - DNA, 33 bp, Homo sapien
aagtctttgggaagagcatttgggaaaatgaat

SEQ ID NO: 485556 - DNA, 33 bp, Homo sapien
aagtctttgggaagaggatttgggaaaatgaat

SEQ ID NO: 485557 - DNA, 33 bp, Homo sapien
gcctctattagtctggaaagtcttttctcaaaa

SEQ ID NO: 485558 - DNA, 33 bp, Homo sapien
gcctctattagtctgggaagtcttttctcaaaa

SEQ ID NO: 485559 - DNA, 33 bp, Homo sapien
atcccaagctcagtgtcaaatcttttctatctc

SEQ ID NO: 485560 - DNA, 33 bp, Homo sapien
atcccaagctcagtgttaaatcttttctatctc

SEQ ID NO: 485561 - DNA, 33 bp, Homo sapien
ttttgcacatatgtgaaggtaactatacacatt

SEQ ID NO: 485562 - DNA, 33 bp, Homo sapien
ttttgcacatatgtgagggtaactatacacatt

SEQ ID NO: 485563 - DNA, 33 bp, Homo sapien
tgaactacagaaagaacagtgagcccaaccaag

SEQ ID NO: 485564 - DNA, 33 bp, Homo sapien
tgaactacagaaagaatagtgagcccaaccaag

SEQ ID NO: 485565 - DNA, 33 bp, Homo sapien
aacccacagccctgacacggtagaagaacccag

SEQ ID NO: 485566 - DNA, 33 bp, Homo sapien
aacccacagccctgacgcggtagaagaacccag

SEQ ID NO: 485567 - DNA, 33 bp, Homo sapien
gataagggttcgatacactgtgaggagagaaga

SEQ ID NO: 485568 - DNA, 33 bp, Homo sapien
gataagggttcgataccctgtgaggagagaaga

SEQ ID NO: 485569 - DNA, 33 bp, Homo sapien
tggtctcccgctctgacgcacattagctctcat

SEQ ID NO: 485570 - DNA, 33 bp, Homo sapien
tggtctcccgctctgatgcacattagctctcat

SEQ ID NO: 485571 - DNA, 33 bp, Homo sapien
acatacctccaactcaagaagactatattgggg

SEQ ID NO: 485572 - DNA, 33 bp, Homo sapien
acatacctccaactcaggaagactatattgggg

SEQ ID NO: 485573 - DNA, 33 bp, Homo sapien
tattggtggttctggactaggatgggaaagaga

SEQ ID NO: 485574 - DNA, 33 bp, Homo sapien
tattggtggttctggattaggatgggaaagaga

SEQ ID NO: 485575 - DNA, 33 bp, Homo sapien
aacaaacacttcatgccgagcaaaacatcccaa

SEQ ID NO: 485576 - DNA, 33 bp, Homo sapien
aacaaacacttcatgctgagcaaaacatcccaa

SEQ ID NO: 485577 - DNA, 33 bp, Homo sapien
tctttcctatcttacacgtctcagaaccatgaa

SEQ ID NO: 485578 - DNA, 33 bp, Homo sapien
tctttcctatcttacatgtctcagaaccatgaa

SEQ ID NO: 485579 - DNA, 33 bp, Homo sapien
ggagtgatagataagtaaacaactaattaagca

SEQ ID NO: 485580 - DNA, 33 bp, Homo sapien
ggagtgatagataagtgaacaactaattaagca

SEQ ID NO: 485581 - DNA, 33 bp, Homo sapien
gctcttctggtgggaaaaggagcgcatgtctgt

SEQ ID NO: 485582 - DNA, 33 bp, Homo sapien
gctcttctggtgggaagaggagcgcatgtctgt

SEQ ID NO: 485583 - DNA, 33 bp, Homo sapien
gaggaatgtacctaggaaaaaagggcacagggg

SEQ ID NO: 485584 - DNA, 33 bp, Homo sapien
gaggaatgtacctaggcaaaaagggcacagggg

SEQ ID NO: 485585 - DNA, 33 bp, Homo sapien
tgtatcttgctttttccactcagtgagatcttg

SEQ ID NO: 485586 - DNA, 33 bp, Homo sapien
tgtatcttgctttttctactcagtgagatcttg

SEQ ID NO: 485587 - DNA, 33 bp, Homo sapien
ttcctttagttactcagctgacttgggaagaga

SEQ ID NO: 485588 - DNA, 33 bp, Homo sapien
ttcctttagttactcatctgacttgggaagaga

SEQ ID NO: 485589 - DNA, 33 bp, Homo sapien
ttaatttaattgagcacacgtataccaataaaa

SEQ ID NO: 485590 - DNA, 33 bp, Homo sapien
ttaatttaattgagcatacgtataccaataaaa

SEQ ID NO: 485591 - DNA, 33 bp, Homo sapien
acatggaggggtcaacagtcctttttgagataa

SEQ ID NO: 485592 - DNA, 33 bp, Homo sapien
acatggaggggtcaacggtcctttttgagataa

SEQ ID NO: 485593 - DNA, 33 bp, Homo sapien
gagaactctctaaggaccaacattactcagctc

SEQ ID NO: 485594 - DNA, 33 bp, Homo sapien
gagaactctctaaggatcaacattactcagctc

SEQ ID NO: 485595 - DNA, 33 bp, Homo sapien
aattgggatactatgagaattcttcactcatgg

SEQ ID NO: 485596 - DNA, 33 bp, Homo sapien
aattgggatactatgataattcttcactcatgg

SEQ ID NO: 485597 - DNA, 33 bp, Homo sapien
atgtgggcagaacacacccccccagtcagcttg

SEQ ID NO: 485598 - DNA, 33 bp, Homo sapien
atgtgggcagaacacagccccccagtcagcttg

SEQ ID NO: 485599 - DNA, 33 bp, Homo sapien
tttctggacctatttcaccttaacagcagcttt

SEQ ID NO: 485600 - DNA, 33 bp, Homo sapien
tttctggacctatttcgccttaacagcagcttt

SEQ ID NO: 485601 - DNA, 33 bp, Homo sapien
ggctggttgcttctcaatgaatttcacaaccac

SEQ ID NO: 485602 - DNA, 33 bp, Homo sapien
ggctggttgcttctcagtgaatttcacaaccac

SEQ ID NO: 485603 - DNA, 33 bp, Homo sapien
aaacagccctctcacaaaggtgacatcaagtcc

SEQ ID NO: 485604 - DNA, 33 bp, Homo sapien
aaacagccctctcacataggtgacatcaagtcc

SEQ ID NO: 485605 - DNA, 33 bp, Homo sapien
aactcataacatggtaaaattggattgatacaa

SEQ ID NO: 485606 - DNA, 33 bp, Homo sapien
aactcataacatggtagaattggattgatacaa

SEQ ID NO: 485607 - DNA, 33 bp, Homo sapien
aaaagtggagcatagacaagaatatggacattt

SEQ ID NO: 485608 - DNA, 33 bp, Homo sapien
aaaagtggagcatagataagaatatggacattt

SEQ ID NO: 485609 - DNA, 33 bp, Homo sapien
ccccgtgtgacagatgaaaagaccacggcttaa

SEQ ID NO: 485610 - DNA, 33 bp, Homo sapien
ccccgtgtgacagatggaaagaccacggcttaa

SEQ ID NO: 485611 - DNA, 33 bp, Homo sapien
ttctttgcaaatttgacgatgctgtgctgccta

SEQ ID NO: 485612 - DNA, 33 bp, Homo sapien
ttctttgcaaatttgaggatgctgtgctgccta

SEQ ID NO: 485613 - DNA, 33 bp, Homo sapien
tatttcattcagtagaaacttattgctggggaa

SEQ ID NO: 485614 - DNA, 33 bp, Homo sapien
tatttcattcagtagacacttattgctggggaa

SEQ ID NO: 485615 - DNA, 33 bp, Homo sapien
ggcacaaggtagtagacaagggacaatatcccc

SEQ ID NO: 485616 - DNA, 33 bp, Homo sapien
ggcacaaggtagtagagaagggacaatatcccc

SEQ ID NO: 485617 - DNA, 33 bp, Homo sapien
tgcaaggatgtgcaccaaaaattggcttaggga

SEQ ID NO: 485618 - DNA, 33 bp, Homo sapien
tgcaaggatgtgcaccgaaaattggcttaggga

SEQ ID NO: 485619 - DNA, 33 bp, Homo sapien
gaggagaaagtctacaagggcagagtccgaggc

SEQ ID NO: 485620 - DNA, 33 bp, Homo sapien
gaggagaaagtctacacgggcagagtccgaggc

SEQ ID NO: 485621 - DNA, 33 bp, Homo sapien
aagtaaggccatttacaaaggtcattaacacgg

SEQ ID NO: 485622 - DNA, 33 bp, Homo sapien
aagtaaggccatttacgaaggtcattaacacgg

SEQ ID NO: 485623 - DNA, 33 bp, Homo sapien
aggaatttgtccaagcaacatacccagcctcag

SEQ ID NO: 485624 - DNA, 33 bp, Homo sapien
aggaatttgtccaagccacatacccagcctcag

SEQ ID NO: 485625 - DNA, 33 bp, Homo sapien
gaaggagaactctctgaagataagtgtgaatca

SEQ ID NO: 485626 - DNA, 33 bp, Homo sapien
gaaggagaactctctggagataagtgtgaatca

SEQ ID NO: 485627 - DNA, 33 bp, Homo sapien
tagataaaactaggcccggatggatcagagcag

SEQ ID NO: 485628 - DNA, 33 bp, Homo sapien
tagataaaactaggcctggatggatcagagcag

SEQ ID NO: 485629 - DNA, 33 bp, Homo sapien
tgacttcattctatgacgctttaacatccacgt

SEQ ID NO: 485630 - DNA, 33 bp, Homo sapien
tgacttcattctatgaggctttaacatccacgt

SEQ ID NO: 485631 - DNA, 33 bp, Homo sapien
tggtgagaagatgggaggtttgtggttgagttt

SEQ ID NO: 485632 - DNA, 33 bp, Homo sapien
tggtgagaagatgggatgtttgtggttgagttt

SEQ ID NO: 485633 - DNA, 33 bp, Homo sapien
gcacttttgcctagaaagctagaaggttgtggt

SEQ ID NO: 485634 - DNA, 33 bp, Homo sapien
gcacttttgcctagaacgctagaaggttgtggt

SEQ ID NO: 485635 - DNA, 33 bp, Homo sapien
agaaaacctcacaaacacaacaaatactattct

SEQ ID NO: 485636 - DNA, 33 bp, Homo sapien
agaaaacctcacaaacgcaacaaatactattct

SEQ ID NO: 485637 - DNA, 33 bp, Homo sapien
ggaaaacacttctggaccttacccagggcctgg

SEQ ID NO: 485638 - DNA, 33 bp, Homo sapien
ggaaaacacttctggatcttacccagggcctgg

SEQ ID NO: 485639 - DNA, 33 bp, Homo sapien
ttgaccatggataagtaaaactgcagaaagtga

SEQ ID NO: 485640 - DNA, 33 bp, Homo sapien
ttgaccatggataagttaaactgcagaaagtga

SEQ ID NO: 485641 - DNA, 33 bp, Homo sapien
agatagactaattacaatagaacatggaagggc

SEQ ID NO: 485642 - DNA, 33 bp, Homo sapien
agatagactaattacagtagaacatggaagggc

SEQ ID NO: 485643 - DNA, 33 bp, Homo sapien
ggaaacctccagaaaaattgaatgaagagacat

SEQ ID NO: 485644 - DNA, 33 bp, Homo sapien
ggaaacctccagaaaacttgaatgaagagacat

SEQ ID NO: 485645 - DNA, 33 bp, Homo sapien
agtgaccctgtggagacattcacatagtgagaa

SEQ ID NO: 485646 - DNA, 33 bp, Homo sapien
agtgaccctgtggagagattcacatagtgagaa

SEQ ID NO: 485647 - DNA, 33 bp, Homo sapien
tgacaatggatgacataaatgggtagtcataaa

SEQ ID NO: 485648 - DNA, 33 bp, Homo sapien
tgacaatggatgacatcaatgggtagtcataaa

SEQ ID NO: 485649 - DNA, 33 bp, Homo sapien
aatatcctactggtcacacaggtcctccctttt

SEQ ID NO: 485650 - DNA, 33 bp, Homo sapien
aatatcctactggtcatacaggtcctccctttt

SEQ ID NO: 485651 - DNA, 33 bp, Homo sapien
actccaacgaacaacaccatgaaatttcagaac

SEQ ID NO: 485652 - DNA, 33 bp, Homo sapien
actccaacgaacaacagcatgaaatttcagaac

SEQ ID NO: 485653 - DNA, 33 bp, Homo sapien
tttcctgacccagcaaaccttcagcagatttgt

SEQ ID NO: 485654 - DNA, 33 bp, Homo sapien
tttcctgacccagcaagccttcagcagatttgt

SEQ ID NO: 485655 - DNA, 33 bp, Homo sapien
gtgagttctttgagaacggggactgcatcatat

SEQ ID NO: 485656 - DNA, 33 bp, Homo sapien
gtgagttctttgagaatggggactgcatcatat

SEQ ID NO: 485657 - DNA, 33 bp, Homo sapien
tccctggtgcttgtcaaatctcatcttgtgaaa

SEQ ID NO: 485658 - DNA, 33 bp, Homo sapien
tccctggtgcttgtcagatctcatcttgtgaaa

SEQ ID NO: 485659 - DNA, 33 bp, Homo sapien
aagaaatctccttccaaatagcttttcagaaca

SEQ ID NO: 485660 - DNA, 33 bp, Homo sapien
aagaaatctccttccatatagcttttcagaaca

SEQ ID NO: 485661 - DNA, 33 bp, Homo sapien
agctgtcaggttagcaagcagcccagttaaatg

SEQ ID NO: 485662 - DNA, 33 bp, Homo sapien
agctgtcaggttagcacgcagcccagttaaatg

SEQ ID NO: 485663 - DNA, 33 bp, Homo sapien
acctcacagactcacacaggctgaaatagacac

SEQ ID NO: 485664 - DNA, 33 bp, Homo sapien
acctcacagactcacataggctgaaatagacac

SEQ ID NO: 485665 - DNA, 33 bp, Homo sapien
ggtggccatccaagaacagatctgcaggctgct

SEQ ID NO: 485666 - DNA, 33 bp, Homo sapien
ggtggccatccaagaagagatctgcaggctgct

SEQ ID NO: 485667 - DNA, 33 bp, Homo sapien
gcagaacctgtcagcaaacactttaccaaagac

SEQ ID NO: 485668 - DNA, 33 bp, Homo sapien
gcagaacctgtcagcagacactttaccaaagac

SEQ ID NO: 485669 - DNA, 33 bp, Homo sapien
ctgtgaactggctcagcccctattgctccagtc

SEQ ID NO: 485670 - DNA, 33 bp, Homo sapien
ctgtgaactggctcagtccctattgctccagtc

SEQ ID NO: 485671 - DNA, 33 bp, Homo sapien
agaatctgtgaaaagaagtggcaactgtgctgg

SEQ ID NO: 485672 - DNA, 33 bp, Homo sapien
agaatctgtgaaaagacgtggcaactgtgctgg

SEQ ID NO: 485673 - DNA, 33 bp, Homo sapien
tctttctttaaagcaaatgacccacttctaaaa

SEQ ID NO: 485674 - DNA, 33 bp, Homo sapien
tctttctttaaagcaagtgacccacttctaaaa

SEQ ID NO: 485675 - DNA, 33 bp, Homo sapien
ctgacctgctgtgtcacggactgtgtggccagt

SEQ ID NO: 485676 - DNA, 33 bp, Homo sapien
ctgacctgctgtgtcatggactgtgtggccagt

SEQ ID NO: 485677 - DNA, 33 bp, Homo sapien
atttgtgaacggctaccagtctcattatcttca

SEQ ID NO: 485678 - DNA, 33 bp, Homo sapien
atttgtgaacggctactagtctcattatcttca

SEQ ID NO: 485679 - DNA, 33 bp, Homo sapien
aggagtactctatggaggttggtgtggtcaaga

SEQ ID NO: 485680 - DNA, 33 bp, Homo sapien
aggagtactctatggatgttggtgtggtcaaga

SEQ ID NO: 485681 - DNA, 33 bp, Homo sapien
ctttctgaggctggataatagttcattgtacta

SEQ ID NO: 485682 - DNA, 33 bp, Homo sapien
ctttctgaggctggattatagttcattgtacta

SEQ ID NO: 485683 - DNA, 33 bp, Homo sapien
cctcaaggagtaaaacagcaatcccacataagt

SEQ ID NO: 485684 - DNA, 33 bp, Homo sapien
cctcaaggagtaaaacggcaatcccacataagt

SEQ ID NO: 485685 - DNA, 33 bp, Homo sapien
cctgccaatgtttagaatcaccttcagatacct

SEQ ID NO: 485686 - DNA, 33 bp, Homo sapien
cctgccaatgtttagactcaccttcagatacct

SEQ ID NO: 485687 - DNA, 33 bp, Homo sapien
ataagacaaaaacaataagtagataagagtcac

SEQ ID NO: 485688 - DNA, 33 bp, Homo sapien
ataagacaaaaacaatcagtagataagagtcac

SEQ ID NO: 485689 - DNA, 33 bp, Homo sapien
gcaaagtttttatcaaaagtgaaatgtgtgtat

SEQ ID NO: 485690 - DNA, 33 bp, Homo sapien
gcaaagtttttatcaagagtgaaatgtgtgtat

SEQ ID NO: 485691 - DNA, 33 bp, Homo sapien
aacacaaaggaaaagacgtggatatgttcacag

SEQ ID NO: 485692 - DNA, 33 bp, Homo sapien
aacacaaaggaaaagatgtggatatgttcacag

SEQ ID NO: 485693 - DNA, 33 bp, Homo sapien
atttttgtcatatagacgaaacaactgaggcac

SEQ ID NO: 485694 - DNA, 33 bp, Homo sapien
atttttgtcatatagatgaaacaactgaggcac

SEQ ID NO: 485695 - DNA, 33 bp, Homo sapien
cctaaaaatcaccacaatatgcaaaactaaaaa

SEQ ID NO: 485696 - DNA, 33 bp, Homo sapien
cctaaaaatcaccacactatgcaaaactaaaaa

SEQ ID NO: 485697 - DNA, 33 bp, Homo sapien
ggaacagtaaccctgacagcagactggtttaag

SEQ ID NO: 485698 - DNA, 33 bp, Homo sapien
ggaacagtaaccctgagagcagactggtttaag

SEQ ID NO: 485699 - DNA, 33 bp, Homo sapien
aaaacacattacagagcctctctgagtcccaaa

SEQ ID NO: 485700 - DNA, 33 bp, Homo sapien
aaaacacattacagaggctctctgagtcccaaa

SEQ ID NO: 485701 - DNA, 33 bp, Homo sapien
gcctacaggatattctaacactgaggctattag

SEQ ID NO: 485702 - DNA, 33 bp, Homo sapien
gcctacaggatattcttacactgaggctattag

SEQ ID NO: 485703 - DNA, 33 bp, Homo sapien
tgtctgaaagtgaagcactaggattggttactg

SEQ ID NO: 485704 - DNA, 33 bp, Homo sapien
tgtctgaaagtgaagcgctaggattggttactg

SEQ ID NO: 485705 - DNA, 33 bp, Homo sapien
ttgaggtttgtcagaacttctctagaattggca

SEQ ID NO: 485706 - DNA, 33 bp, Homo sapien
ttgaggtttgtcagaagttctctagaattggca

SEQ ID NO: 485707 - DNA, 33 bp, Homo sapien
tgctttgcataaagtacaattagcagtgctcct

SEQ ID NO: 485708 - DNA, 33 bp, Homo sapien
tgctttgcataaagtagaattagcagtgctcct

SEQ ID NO: 485709 - DNA, 33 bp, Homo sapien
cggaggttaattagtcccttagctgaaggctgc

SEQ ID NO: 485710 - DNA, 33 bp, Homo sapien
cggaggttaattagtctcttagctgaaggctgc

SEQ ID NO: 485711 - DNA, 33 bp, Homo sapien
tggcaagttctagcacaggcaatatttaaaagc

SEQ ID NO: 485712 - DNA, 33 bp, Homo sapien
tggcaagttctagcacgggcaatatttaaaagc

SEQ ID NO: 485713 - DNA, 33 bp, Homo sapien
ctcctgccacacattcgctagactgattgttaa

SEQ ID NO: 485714 - DNA, 33 bp, Homo sapien
ctcctgccacacattctctagactgattgttaa

SEQ ID NO: 485715 - DNA, 33 bp, Homo sapien
gtactcctcttcataacgctacatgtgttggaa

SEQ ID NO: 485716 - DNA, 33 bp, Homo sapien
gtactcctcttcataaggctacatgtgttggaa

SEQ ID NO: 485717 - DNA, 33 bp, Homo sapien
tttgcttcctgtgatacgaatctcaatcggcag

SEQ ID NO: 485718 - DNA, 33 bp, Homo sapien
tttgcttcctgtgatatgaatctcaatcggcag

SEQ ID NO: 485719 - DNA, 33 bp, Homo sapien
attgtaaggataagtacgtaaagtgcctaaaac

SEQ ID NO: 485720 - DNA, 33 bp, Homo sapien
attgtaaggataagtatgtaaagtgcctaaaac

SEQ ID NO: 485721 - DNA, 33 bp, Homo sapien
gtaccctgatgagacgcaggtcaagtaggtttt

SEQ ID NO: 485722 - DNA, 33 bp, Homo sapien
gtaccctgatgagacgtaggtcaagtaggtttt

SEQ ID NO: 485723 - DNA, 33 bp, Homo sapien
acttcctccagggagacgcacccgtgccaaggt

SEQ ID NO: 485724 - DNA, 33 bp, Homo sapien
acttcctccagggagatgcacccgtgccaaggt

SEQ ID NO: 485725 - DNA, 33 bp, Homo sapien
ccaatatggtagctacaagccaagtgtggatat

SEQ ID NO: 485726 - DNA, 33 bp, Homo sapien
ccaatatggtagctacgagccaagtgtggatat

SEQ ID NO: 485727 - DNA, 33 bp, Homo sapien
aagaatgcttcaaaacaagtgcccacagtggtg

SEQ ID NO: 485728 - DNA, 33 bp, Homo sapien
aagaatgcttcaaaacgagtgcccacagtggtg

SEQ ID NO: 485729 - DNA, 33 bp, Homo sapien
agaaacttctctgagacatcataatgggccctg

SEQ ID NO: 485730 - DNA, 33 bp, Homo sapien
agaaacttctctgagatatcataatgggccctg

SEQ ID NO: 485731 - DNA, 33 bp, Homo sapien
cctacaagataaaaggcaatactgtcctccaag

SEQ ID NO: 485732 - DNA, 33 bp, Homo sapien
cctacaagataaaaggtaatactgtcctccaag

SEQ ID NO: 485733 - DNA, 33 bp, Homo sapien
tgacagatgacctggaaaaatcaaggatatcaa

SEQ ID NO: 485734 - DNA, 33 bp, Homo sapien
tgacagatgacctggagaaatcaaggatatcaa

SEQ ID NO: 485735 - DNA, 33 bp, Homo sapien
gatagcacacaatagtcaatattttctgaatgg

SEQ ID NO: 485736 - DNA, 33 bp, Homo sapien
gatagcacacaatagttaatattttctgaatgg

SEQ ID NO: 485737 - DNA, 33 bp, Homo sapien
tataccaccccactcaagtgcaataatatttaa

SEQ ID NO: 485738 - DNA, 33 bp, Homo sapien
tataccaccccactcaggtgcaataatatttaa

SEQ ID NO: 485739 - DNA, 33 bp, Homo sapien
gtggccgctgtagaacacatctaaaaggggctg

SEQ ID NO: 485740 - DNA, 33 bp, Homo sapien
gtggccgctgtagaacccatctaaaaggggctg

SEQ ID NO: 485741 - DNA, 33 bp, Homo sapien
cagcttgttaattagcagcccctctacaaatag

SEQ ID NO: 485742 - DNA, 33 bp, Homo sapien
cagcttgttaattagcggcccctctacaaatag

SEQ ID NO: 485743 - DNA, 33 bp, Homo sapien
cttcgggacctccatcccaaagtgcactatgtg

SEQ ID NO: 485744 - DNA, 33 bp, Homo sapien
cttcgggacctccatctcaaagtgcactatgtg

SEQ ID NO: 485745 - DNA, 33 bp, Homo sapien
attgaagtcctaatgcccaggctgcccctttcc

SEQ ID NO: 485746 - DNA, 33 bp, Homo sapien
attgaagtcctaatgctcaggctgcccctttcc

SEQ ID NO: 485747 - DNA, 33 bp, Homo sapien
ggtatcgtgtccactacgcagagaaggaaactg

SEQ ID NO: 485748 - DNA, 33 bp, Homo sapien
ggtatcgtgtccactatgcagagaaggaaactg

SEQ ID NO: 485749 - DNA, 33 bp, Homo sapien
gcttagtgagtcagatcacaccttaatgctctt

SEQ ID NO: 485750 - DNA, 33 bp, Homo sapien
gcttagtgagtcagattacaccttaatgctctt

SEQ ID NO: 485751 - DNA, 33 bp, Homo sapien
cctagactaaagattacgatggtcccacctaac

SEQ ID NO: 485752 - DNA, 33 bp, Homo sapien
cctagactaaagattatgatggtcccacctaac

SEQ ID NO: 485753 - DNA, 33 bp, Homo sapien
aagattagcagaaaaaatcatcaaaataattag

SEQ ID NO: 485754 - DNA, 33 bp, Homo sapien
aagattagcagaaaaagtcatcaaaataattag

SEQ ID NO: 485755 - DNA, 33 bp, Homo sapien
tggacaatgattgtagcaaacagcagtcacgtg

SEQ ID NO: 485756 - DNA, 33 bp, Homo sapien
tggacaatgattgtaggaaacagcagtcacgtg

SEQ ID NO: 485757 - DNA, 33 bp, Homo sapien
ctcaaacacagtctgacatgaactaatgtttac

SEQ ID NO: 485758 - DNA, 33 bp, Homo sapien
ctcaaacacagtctgatatgaactaatgtttac

SEQ ID NO: 485759 - DNA, 33 bp, Homo sapien
aagtgggccaacaagaacagcgatgattcccac

SEQ ID NO: 485760 - DNA, 33 bp, Homo sapien
aagtgggccaacaagagcagcgatgattcccac

SEQ ID NO: 485761 - DNA, 33 bp, Homo sapien
gttattgtcaccctaacttaccccacaatctga

SEQ ID NO: 485762 - DNA, 33 bp, Homo sapien
gttattgtcaccctaatttaccccacaatctga

SEQ ID NO: 485763 - DNA, 33 bp, Homo sapien
ctaccagccacattgcagaagctaataactggg

SEQ ID NO: 485764 - DNA, 33 bp, Homo sapien
ctaccagccacattgcggaagctaataactggg

SEQ ID NO: 485765 - DNA, 33 bp, Homo sapien
actaagatgtcctaaaatcaagttgttcaggat

SEQ ID NO: 485766 - DNA, 33 bp, Homo sapien
actaagatgtcctaaattcaagttgttcaggat

SEQ ID NO: 485767 - DNA, 33 bp, Homo sapien
gtaatagcaacaatttaaaatgaaacagagagc

SEQ ID NO: 485768 - DNA, 33 bp, Homo sapien
gtaatagcaacaatttcaaatgaaacagagagc

SEQ ID NO: 485769 - DNA, 33 bp, Homo sapien
agtcctacagtttccacactttactgtctggag

SEQ ID NO: 485770 - DNA, 33 bp, Homo sapien
agtcctacagtttccatactttactgtctggag

SEQ ID NO: 485771 - DNA, 33 bp, Homo sapien
gaggcaggtgtgttgaaaggaaactgacttgct

SEQ ID NO: 485772 - DNA, 33 bp, Homo sapien
gaggcaggtgtgttgagaggaaactgacttgct

SEQ ID NO: 485773 - DNA, 33 bp, Homo sapien
tgtattgcctctctgcagcacatcctcacttaa

SEQ ID NO: 485774 - DNA, 33 bp, Homo sapien
tgtattgcctctctgcggcacatcctcacttaa

SEQ ID NO: 485775 - DNA, 33 bp, Homo sapien
tgctgttacaaataacactgtaatacacctcta

SEQ ID NO: 485776 - DNA, 33 bp, Homo sapien
tgctgttacaaataacgctgtaatacacctcta

SEQ ID NO: 485777 - DNA, 33 bp, Homo sapien
tcctctcacctctgaaaagttacaggccccaaa

SEQ ID NO: 485778 - DNA, 33 bp, Homo sapien
tcctctcacctctgaagagttacaggccccaaa

SEQ ID NO: 485779 - DNA, 33 bp, Homo sapien
gagtgctaggagagaaagatctattccaggtct

SEQ ID NO: 485780 - DNA, 33 bp, Homo sapien
gagtgctaggagagaaggatctattccaggtct

SEQ ID NO: 485781 - DNA, 33 bp, Homo sapien
agagttccaactcatgaaactcagaattccacc

SEQ ID NO: 485782 - DNA, 33 bp, Homo sapien
agagttccaactcatgcaactcagaattccacc

SEQ ID NO: 485783 - DNA, 33 bp, Homo sapien
atgtaggctatgatgacgacaggggattgtgat

SEQ ID NO: 485784 - DNA, 33 bp, Homo sapien
atgtaggctatgatgaggacaggggattgtgat

SEQ ID NO: 485785 - DNA, 33 bp, Homo sapien
cacaaaaatgcagaaaagctaacccagaaacaa

SEQ ID NO: 485786 - DNA, 33 bp, Homo sapien
cacaaaaatgcagaaaggctaacccagaaacaa

SEQ ID NO: 485787 - DNA, 33 bp, Homo sapien
cattgggctctcgagcaactctcagtaaaatca

SEQ ID NO: 485788 - DNA, 33 bp, Homo sapien
cattgggctctcgagcgactctcagtaaaatca

SEQ ID NO: 485789 - DNA, 33 bp, Homo sapien
catagcctcacatacacaaagcccataatattt

SEQ ID NO: 485790 - DNA, 33 bp, Homo sapien
catagcctcacatacataaagcccataatattt

SEQ ID NO: 485791 - DNA, 33 bp, Homo sapien
cactcctagtacaaaaatagaatgtgattcact

SEQ ID NO: 485792 - DNA, 33 bp, Homo sapien
cactcctagtacaaaagtagaatgtgattcact

SEQ ID NO: 485793 - DNA, 33 bp, Homo sapien
ccttgaggtgtttcaaaagacagatctcttaat

SEQ ID NO: 485794 - DNA, 33 bp, Homo sapien
ccttgaggtgtttcaagagacagatctcttaat

SEQ ID NO: 485795 - DNA, 33 bp, Homo sapien
ttgtgctgctgcctataacaaagtcttctttac

SEQ ID NO: 485796 - DNA, 33 bp, Homo sapien
ttgtgctgctgcctatgacaaagtcttctttac

SEQ ID NO: 485797 - DNA, 33 bp, Homo sapien
agtaagtaggtacccagtcatccatcacatcca

SEQ ID NO: 485798 - DNA, 33 bp, Homo sapien
agtaagtaggtacccattcatccatcacatcca

SEQ ID NO: 485799 - DNA, 33 bp, Homo sapien
acatatgtcaacacaaggtttgtggatctcctt

SEQ ID NO: 485800 - DNA, 33 bp, Homo sapien
acatatgtcaacacaatgtttgtggatctcctt

SEQ ID NO: 485801 - DNA, 33 bp, Homo sapien
gcagtctccctggtaacgtgttctgcccttgga

SEQ ID NO: 485802 - DNA, 33 bp, Homo sapien
gcagtctccctggtaatgtgttctgcccttgga

SEQ ID NO: 485803 - DNA, 33 bp, Homo sapien
cagcacccttcttgctaaccatatctttctgat

SEQ ID NO: 485804 - DNA, 33 bp, Homo sapien
cagcacccttcttgcttaccatatctttctgat

SEQ ID NO: 485805 - DNA, 33 bp, Homo sapien
caaccaatgcacacttaaaacattttttttgga

SEQ ID NO: 485806 - DNA, 33 bp, Homo sapien
caaccaatgcacacttcaaacattttttttgga

SEQ ID NO: 485807 - DNA, 33 bp, Homo sapien
tttttcataaaatgaacgatgacaacctagtct

SEQ ID NO: 485808 - DNA, 33 bp, Homo sapien
tttttcataaaatgaatgatgacaacctagtct

SEQ ID NO: 485809 - DNA, 33 bp, Homo sapien
tagtgcctcaccagacactgtaacccacgcttt

SEQ ID NO: 485810 - DNA, 33 bp, Homo sapien
tagtgcctcaccagacgctgtaacccacgcttt

SEQ ID NO: 485811 - DNA, 33 bp, Homo sapien
ggtggtcctaaagcacaataaaccctcaccttt

SEQ ID NO: 485812 - DNA, 33 bp, Homo sapien
ggtggtcctaaagcacgataaaccctcaccttt

SEQ ID NO: 485813 - DNA, 33 bp, Homo sapien
gaggtcctgccacacaatcaaagcatcccctcc

SEQ ID NO: 485814 - DNA, 33 bp, Homo sapien
gaggtcctgccacacagtcaaagcatcccctcc

SEQ ID NO: 485815 - DNA, 33 bp, Homo sapien
aggagcaaactgttacaacggcagacaggcaca

SEQ ID NO: 485816 - DNA, 33 bp, Homo sapien
aggagcaaactgttacgacggcagacaggcaca

SEQ ID NO: 485817 - DNA, 33 bp, Homo sapien
actaccccagacaccaaatggaccataggtaga

SEQ ID NO: 485818 - DNA, 33 bp, Homo sapien
actaccccagacaccacatggaccataggtaga

SEQ ID NO: 485819 - DNA, 33 bp, Homo sapien
gtgttcttcgcctgtgaatctgggtgctctagt

SEQ ID NO: 485820 - DNA, 33 bp, Homo sapien
gtgttcttcgcctgtggatctgggtgctctagt

SEQ ID NO: 485821 - DNA, 33 bp, Homo sapien
gttcaacactagcttcacttcccagaggcttat

SEQ ID NO: 485822 - DNA, 33 bp, Homo sapien
gttcaacactagcttcgcttcccagaggcttat

SEQ ID NO: 485823 - DNA, 33 bp, Homo sapien
tctcctttttctcataatactccataatcttca

SEQ ID NO: 485824 - DNA, 33 bp, Homo sapien
tctcctttttctcatagtactccataatcttca

SEQ ID NO: 485825 - DNA, 33 bp, Homo sapien
taccttccctgcattacaggttgagctgtgtct

SEQ ID NO: 485826 - DNA, 33 bp, Homo sapien
taccttccctgcattataggttgagctgtgtct

SEQ ID NO: 485827 - DNA, 33 bp, Homo sapien
gctgtgggctctaggccgatctcttaatccttg

SEQ ID NO: 485828 - DNA, 33 bp, Homo sapien
gctgtgggctctaggctgatctcttaatccttg

SEQ ID NO: 485829 - DNA, 33 bp, Homo sapien
tgattggcttaatccaaccagggactctctata

SEQ ID NO: 485830 - DNA, 33 bp, Homo sapien
tgattggcttaatccacccagggactctctata

SEQ ID NO: 485831 - DNA, 33 bp, Homo sapien
gaaatgattggtccaactgtcctcctttgtgct

SEQ ID NO: 485832 - DNA, 33 bp, Homo sapien
gaaatgattggtccaattgtcctcctttgtgct

SEQ ID NO: 485833 - DNA, 33 bp, Homo sapien
atttttttctgatcacaaagataatgtatattt

SEQ ID NO: 485834 - DNA, 33 bp, Homo sapien
atttttttctgatcacgaagataatgtatattt

SEQ ID NO: 485835 - DNA, 33 bp, Homo sapien
ttattgtgatacaagacgaaaaatctgatgttt

SEQ ID NO: 485836 - DNA, 33 bp, Homo sapien
ttattgtgatacaagatgaaaaatctgatgttt

SEQ ID NO: 485837 - DNA, 33 bp, Homo sapien
ttaaattagcaggaaacatatgtatactgataa

SEQ ID NO: 485838 - DNA, 33 bp, Homo sapien
ttaaattagcaggaaatatatgtatactgataa

SEQ ID NO: 485839 - DNA, 33 bp, Homo sapien
catactatctagaagaagctacttttcaataac

SEQ ID NO: 485840 - DNA, 33 bp, Homo sapien
catactatctagaagaggctacttttcaataac

SEQ ID NO: 485841 - DNA, 33 bp, Homo sapien
gtgtagttggggagtaagagatggaggatgata

SEQ ID NO: 485842 - DNA, 33 bp, Homo sapien
gtgtagttggggagtatgagatggaggatgata

SEQ ID NO: 485843 - DNA, 33 bp, Homo sapien
gaaggttttcaatcaacgcaactttacgatcag

SEQ ID NO: 485844 - DNA, 33 bp, Homo sapien
gaaggttttcaatcaaggcaactttacgatcag

SEQ ID NO: 485845 - DNA, 33 bp, Homo sapien
tagcttggcttcataaattaccgacttattccc

SEQ ID NO: 485846 - DNA, 33 bp, Homo sapien
tagcttggcttcataagttaccgacttattccc

SEQ ID NO: 485847 - DNA, 33 bp, Homo sapien
cctttgagttcctacaccacttattgctggatt

SEQ ID NO: 485848 - DNA, 33 bp, Homo sapien
cctttgagttcctacagcacttattgctggatt

SEQ ID NO: 485849 - DNA, 33 bp, Homo sapien
ataaaaatgtttccaacgccaacctagaaaaaa

SEQ ID NO: 485850 - DNA, 33 bp, Homo sapien
ataaaaatgtttccaatgccaacctagaaaaaa

SEQ ID NO: 485851 - DNA, 33 bp, Homo sapien
gttctttagttattaacctagacccaaatcaaa

SEQ ID NO: 485852 - DNA, 33 bp, Homo sapien
gttctttagttattaatctagacccaaatcaaa

SEQ ID NO: 485853 - DNA, 33 bp, Homo sapien
actgttctggttttcacgacaatttgaattcaa

SEQ ID NO: 485854 - DNA, 33 bp, Homo sapien
actgttctggttttcatgacaatttgaattcaa

SEQ ID NO: 485855 - DNA, 33 bp, Homo sapien
ggttagatcagagataggtgcccaaagcatgga

SEQ ID NO: 485856 - DNA, 33 bp, Homo sapien
ggttagatcagagatatgtgcccaaagcatgga

SEQ ID NO: 485857 - DNA, 33 bp, Homo sapien
gtgtgttgtgtgccttcaaaacttccttgggtc

SEQ ID NO: 485858 - DNA, 33 bp, Homo sapien
gtgtgttgtgtgccttgaaaacttccttgggtc

SEQ ID NO: 485859 - DNA, 33 bp, Homo sapien
ttgttttttactgtcaccaaatctgtcaattgt

SEQ ID NO: 485860 - DNA, 33 bp, Homo sapien
ttgttttttactgtcatcaaatctgtcaattgt

SEQ ID NO: 485861 - DNA, 33 bp, Homo sapien
catgtctgtaggatgaaatgagtatcttcagct

SEQ ID NO: 485862 - DNA, 33 bp, Homo sapien
catgtctgtaggatgagatgagtatcttcagct

SEQ ID NO: 485863 - DNA, 33 bp, Homo sapien
gagaggtgtagggaaagccaaaggtgacagctg

SEQ ID NO: 485864 - DNA, 33 bp, Homo sapien
gagaggtgtagggaaatccaaaggtgacagctg

SEQ ID NO: 485865 - DNA, 33 bp, Homo sapien
atattcaaagtagagccaatatcatgcttgagt

SEQ ID NO: 485866 - DNA, 33 bp, Homo sapien
atattcaaagtagagctaatatcatgcttgagt

SEQ ID NO: 485867 - DNA, 33 bp, Homo sapien
aggcctcagttcaagacgggagctcctgacaga

SEQ ID NO: 485868 - DNA, 33 bp, Homo sapien
aggcctcagttcaagatgggagctcctgacaga

SEQ ID NO: 485869 - DNA, 33 bp, Homo sapien
taatgtctatcacatcccactctgtgcaagtca

SEQ ID NO: 485870 - DNA, 33 bp, Homo sapien
taatgtctatcacatcgcactctgtgcaagtca

SEQ ID NO: 485871 - DNA, 33 bp, Homo sapien
agtccgcagtggcgtacgtaaagtgacttgcac

SEQ ID NO: 485872 - DNA, 33 bp, Homo sapien
agtccgcagtggcgtatgtaaagtgacttgcac

SEQ ID NO: 485873 - DNA, 33 bp, Homo sapien
ttcggcctaacttccacgggtacatcagatcct

SEQ ID NO: 485874 - DNA, 33 bp, Homo sapien
ttcggcctaacttccatgggtacatcagatcct

SEQ ID NO: 485875 - DNA, 33 bp, Homo sapien
agagcacaagttcctacctactatctgtgactt

SEQ ID NO: 485876 - DNA, 33 bp, Homo sapien
agagcacaagttcctagctactatctgtgactt

SEQ ID NO: 485877 - DNA, 33 bp, Homo sapien
catcatgtgcctctaacatttcgctaggaaagt

SEQ ID NO: 485878 - DNA, 33 bp, Homo sapien
catcatgtgcctctaagatttcgctaggaaagt

SEQ ID NO: 485879 - DNA, 33 bp, Homo sapien
gaattggagatctgagccctttgtagtgactac

SEQ ID NO: 485880 - DNA, 33 bp, Homo sapien
gaattggagatctgaggcctttgtagtgactac

SEQ ID NO: 485881 - DNA, 33 bp, Homo sapien
gaaagcctctgggtggccagataccacagggac

SEQ ID NO: 485882 - DNA, 33 bp, Homo sapien
gaaagcctctgggtgggcagataccacagggac

SEQ ID NO: 485883 - DNA, 33 bp, Homo sapien
caggtcagtacttttcccatactaacaaagtgt

SEQ ID NO: 485884 - DNA, 33 bp, Homo sapien
caggtcagtacttttcgcatactaacaaagtgt

SEQ ID NO: 485885 - DNA, 33 bp, Homo sapien
cacaagagcatcgttacccctatcattcagaga

SEQ ID NO: 485886 - DNA, 33 bp, Homo sapien
cacaagagcatcgttatccctatcattcagaga

SEQ ID NO: 485887 - DNA, 33 bp, Homo sapien
acgttgggctcatgtcaacttggagttataact

SEQ ID NO: 485888 - DNA, 33 bp, Homo sapien
acgttgggctcatgtcgacttggagttataact

SEQ ID NO: 485889 - DNA, 33 bp, Homo sapien
atctctatagagtcccaatctactgatcatctg

SEQ ID NO: 485890 - DNA, 33 bp, Homo sapien
atctctatagagtcccgatctactgatcatctg

SEQ ID NO: 485891 - DNA, 33 bp, Homo sapien
tatatgtttcatttacagaatggtgcctggagt

SEQ ID NO: 485892 - DNA, 33 bp, Homo sapien
tatatgtttcatttacggaatggtgcctggagt

SEQ ID NO: 485893 - DNA, 33 bp, Homo sapien
gaagctgtttggggtaacaatggaacgctgaga

SEQ ID NO: 485894 - DNA, 33 bp, Homo sapien
gaagctgtttggggtagcaatggaacgctgaga

SEQ ID NO: 485895 - DNA, 33 bp, Homo sapien
cagacttggttaagacacctgagtttctctgtg

SEQ ID NO: 485896 - DNA, 33 bp, Homo sapien
cagacttggttaagacgcctgagtttctctgtg

SEQ ID NO: 485897 - DNA, 33 bp, Homo sapien
tgaacccaaagtctgcaaatagtatcaaagggc

SEQ ID NO: 485898 - DNA, 33 bp, Homo sapien
tgaacccaaagtctgcgaatagtatcaaagggc

SEQ ID NO: 485899 - DNA, 33 bp, Homo sapien
ctattcctaaacagcaaaaggaaaactatgaac

SEQ ID NO: 485900 - DNA, 33 bp, Homo sapien
ctattcctaaacagcataaggaaaactatgaac

SEQ ID NO: 485901 - DNA, 33 bp, Homo sapien
ttctgggtagaagacacaaattgccatgttctt

SEQ ID NO: 485902 - DNA, 33 bp, Homo sapien
ttctgggtagaagacagaaattgccatgttctt

SEQ ID NO: 485903 - DNA, 33 bp, Homo sapien
tttgttttattagcaactcccaaaacacacatg

SEQ ID NO: 485904 - DNA, 33 bp, Homo sapien
tttgttttattagcaattcccaaaacacacatg

SEQ ID NO: 485905 - DNA, 33 bp, Homo sapien
gaggcccttcccatcagtagttcacatgagcac

SEQ ID NO: 485906 - DNA, 33 bp, Homo sapien
gaggcccttcccatcattagttcacatgagcac

SEQ ID NO: 485907 - DNA, 33 bp, Homo sapien
tattattcctgttgaacagatgagaaggcagag

SEQ ID NO: 485908 - DNA, 33 bp, Homo sapien
tattattcctgttgaagagatgagaaggcagag

SEQ ID NO: 485909 - DNA, 33 bp, Homo sapien
ctaatatcttcagtgcacttggctatcttttca

SEQ ID NO: 485910 - DNA, 33 bp, Homo sapien
ctaatatcttcagtgcgcttggctatcttttca

SEQ ID NO: 485911 - DNA, 33 bp, Homo sapien
ttcataaatgccaagaaagttccctagttatct

SEQ ID NO: 485912 - DNA, 33 bp, Homo sapien
ttcataaatgccaagatagttccctagttatct

SEQ ID NO: 485913 - DNA, 33 bp, Homo sapien
taacaggttgcacatacatttatcacactaaat

SEQ ID NO: 485914 - DNA, 33 bp, Homo sapien
taacaggttgcacatatatttatcacactaaat

SEQ ID NO: 485915 - DNA, 33 bp, Homo sapien
tgctttaactacaagaaaactcccatccctcac

SEQ ID NO: 485916 - DNA, 33 bp, Homo sapien
tgctttaactacaagacaactcccatccctcac

SEQ ID NO: 485917 - DNA, 33 bp, Homo sapien
gttattcaagaactaacaaggtgccaactgaaa

SEQ ID NO: 485918 - DNA, 33 bp, Homo sapien
gttattcaagaactaagaaggtgccaactgaaa

SEQ ID NO: 485919 - DNA, 33 bp, Homo sapien
aattgtcctgcagttacaaacaagtagaaaact

SEQ ID NO: 485920 - DNA, 33 bp, Homo sapien
aattgtcctgcagttagaaacaagtagaaaact

SEQ ID NO: 485921 - DNA, 33 bp, Homo sapien
cttgtttctcagtctaaagtttatacccatgtc

SEQ ID NO: 485922 - DNA, 33 bp, Homo sapien
cttgtttctcagtctagagtttatacccatgtc

SEQ ID NO: 485923 - DNA, 33 bp, Homo sapien
gcacataagaaaatgggattcatgtgttcatgt

SEQ ID NO: 485924 - DNA, 33 bp, Homo sapien
gcacataagaaaatggtattcatgtgttcatgt

SEQ ID NO: 485925 - DNA, 33 bp, Homo sapien
accagctattgtgaaaattgattataaattcac

SEQ ID NO: 485926 - DNA, 33 bp, Homo sapien
accagctattgtgaaagttgattataaattcac

SEQ ID NO: 485927 - DNA, 33 bp, Homo sapien
cttgattctggacttaacagagactgtgttttt

SEQ ID NO: 485928 - DNA, 33 bp, Homo sapien
cttgattctggacttatcagagactgtgttttt

SEQ ID NO: 485929 - DNA, 33 bp, Homo sapien
cttgtatgacgcttaaccaattatcattatact

SEQ ID NO: 485930 - DNA, 33 bp, Homo sapien
cttgtatgacgcttaatcaattatcattatact

SEQ ID NO: 485931 - DNA, 33 bp, Homo sapien
tgcaagcaataacaaaagatttttacccactat

SEQ ID NO: 485932 - DNA, 33 bp, Homo sapien
tgcaagcaataacaaaggatttttacccactat

SEQ ID NO: 485933 - DNA, 33 bp, Homo sapien
aataatctctccctagacataaaacagccttac

SEQ ID NO: 485934 - DNA, 33 bp, Homo sapien
aataatctctccctagtcataaaacagccttac

SEQ ID NO: 485935 - DNA, 33 bp, Homo sapien
tttgaattattggagaacataaaaagatggaat

SEQ ID NO: 485936 - DNA, 33 bp, Homo sapien
tttgaattattggagagcataaaaagatggaat

SEQ ID NO: 485937 - DNA, 33 bp, Homo sapien
acattgttagcccccaataatgtaaattgtcat

SEQ ID NO: 485938 - DNA, 33 bp, Homo sapien
acattgttagcccccagtaatgtaaattgtcat

SEQ ID NO: 485939 - DNA, 33 bp, Homo sapien
cataggaacagatccaacttttatgaaacaaca

SEQ ID NO: 485940 - DNA, 33 bp, Homo sapien
cataggaacagatccagcttttatgaaacaaca

SEQ ID NO: 485941 - DNA, 33 bp, Homo sapien
acgactttcagtatcacataacttaggacctgt

SEQ ID NO: 485942 - DNA, 33 bp, Homo sapien
acgactttcagtatcatataacttaggacctgt

SEQ ID NO: 485943 - DNA, 33 bp, Homo sapien
aaaggtcattggaaaccgtgatctgatcaagat

SEQ ID NO: 485944 - DNA, 33 bp, Homo sapien
aaaggtcattggaaactgtgatctgatcaagat

SEQ ID NO: 485945 - DNA, 33 bp, Homo sapien
aaattctttcacttgacggaaaactaaaacatt

SEQ ID NO: 485946 - DNA, 33 bp, Homo sapien
aaattctttcacttgatggaaaactaaaacatt

SEQ ID NO: 485947 - DNA, 33 bp, Homo sapien
gaagcaaagagaaacaagtcttctccatgatgg

SEQ ID NO: 485948 - DNA, 33 bp, Homo sapien
gaagcaaagagaaacaggtcttctccatgatgg

SEQ ID NO: 485949 - DNA, 33 bp, Homo sapien
aaccacaacgaactaccactacacacttactgg

SEQ ID NO: 485950 - DNA, 33 bp, Homo sapien
aaccacaacgaactacgactacacacttactgg

SEQ ID NO: 485951 - DNA, 33 bp, Homo sapien
aatttttcactcatcaaatgactcaacagttcc

SEQ ID NO: 485952 - DNA, 33 bp, Homo sapien
aatttttcactcatcatatgactcaacagttcc

SEQ ID NO: 485953 - DNA, 33 bp, Homo sapien
cagagagtaaatcatcaatacagctttgttgaa

SEQ ID NO: 485954 - DNA, 33 bp, Homo sapien
cagagagtaaatcatccatacagctttgttgaa

SEQ ID NO: 485955 - DNA, 33 bp, Homo sapien
gaaccgaatgcaccgaatcattcagcgcacatt

SEQ ID NO: 485956 - DNA, 33 bp, Homo sapien
gaaccgaatgcaccgactcattcagcgcacatt

SEQ ID NO: 485957 - DNA, 33 bp, Homo sapien
atacaagctcattgaacactctggtgccgtttt

SEQ ID NO: 485958 - DNA, 33 bp, Homo sapien
atacaagctcattgaatactctggtgccgtttt

SEQ ID NO: 485959 - DNA, 33 bp, Homo sapien
agggtggctaccaaacacatttcctttattggc

SEQ ID NO: 485960 - DNA, 33 bp, Homo sapien
agggtggctaccaaacgcatttcctttattggc

SEQ ID NO: 485961 - DNA, 33 bp, Homo sapien
gggagtagccctcatacccatgtcagctggctc

SEQ ID NO: 485962 - DNA, 33 bp, Homo sapien
gggagtagccctcatatccatgtcagctggctc

SEQ ID NO: 485963 - DNA, 33 bp, Homo sapien
attcccctgccagaaacgcctttacctatcctt

SEQ ID NO: 485964 - DNA, 33 bp, Homo sapien
attcccctgccagaaatgcctttacctatcctt

SEQ ID NO: 485965 - DNA, 33 bp, Homo sapien
cttgtggccatttgcaatcaatccctgttacac

SEQ ID NO: 485966 - DNA, 33 bp, Homo sapien
cttgtggccatttgcagtcaatccctgttacac

SEQ ID NO: 485967 - DNA, 33 bp, Homo sapien
aaagaagaggatctcaaagcataagtttctcaa

SEQ ID NO: 485968 - DNA, 33 bp, Homo sapien
aaagaagaggatctcacagcataagtttctcaa

SEQ ID NO: 485969 - DNA, 33 bp, Homo sapien
attgctcaactcccagaaactcctatctgcaaa

SEQ ID NO: 485970 - DNA, 33 bp, Homo sapien
attgctcaactcccaggaactcctatctgcaaa

SEQ ID NO: 485971 - DNA, 33 bp, Homo sapien
tcctcctggaatgttacggaaagcaggttgggg

SEQ ID NO: 485972 - DNA, 33 bp, Homo sapien
tcctcctggaatgttagggaaagcaggttgggg

SEQ ID NO: 485973 - DNA, 33 bp, Homo sapien
ggtttgtcttcctaagcagatccaatcggtctt

SEQ ID NO: 485974 - DNA, 33 bp, Homo sapien
ggtttgtcttcctaagtagatccaatcggtctt

SEQ ID NO: 485975 - DNA, 33 bp, Homo sapien
ggagaagggatttcagaaaaagcaaccaggtat

SEQ ID NO: 485976 - DNA, 33 bp, Homo sapien
ggagaagggatttcaggaaaagcaaccaggtat

SEQ ID NO: 485977 - DNA, 33 bp, Homo sapien
gccaccctcatcctgcaaatctctgcggctagt

SEQ ID NO: 485978 - DNA, 33 bp, Homo sapien
gccaccctcatcctgcgaatctctgcggctagt

SEQ ID NO: 485979 - DNA, 33 bp, Homo sapien
aactttggaactcactcaccccgtgactaatac

SEQ ID NO: 485980 - DNA, 33 bp, Homo sapien
aactttggaactcacttaccccgtgactaatac

SEQ ID NO: 485981 - DNA, 33 bp, Homo sapien
gcctacttgtttaggacgtgttaatcaaataag

SEQ ID NO: 485982 - DNA, 33 bp, Homo sapien
gcctacttgtttaggatgtgttaatcaaataag

SEQ ID NO: 485983 - DNA, 33 bp, Homo sapien
taaactaatgtaggaaacacaacaagctgttca

SEQ ID NO: 485984 - DNA, 33 bp, Homo sapien
taaactaatgtaggaaccacaacaagctgttca

SEQ ID NO: 485985 - DNA, 33 bp, Homo sapien
ctcgagttcagtgacactcagcacagagccagg

SEQ ID NO: 485986 - DNA, 33 bp, Homo sapien
ctcgagttcagtgacagtcagcacagagccagg

SEQ ID NO: 485987 - DNA, 33 bp, Homo sapien
caaaggcacgtcgttacgaaacagcatagtaca

SEQ ID NO: 485988 - DNA, 33 bp, Homo sapien
caaaggcacgtcgttatgaaacagcatagtaca

SEQ ID NO: 485989 - DNA, 33 bp, Homo sapien
tatactactaatctagacatcatctgaatagct

SEQ ID NO: 485990 - DNA, 33 bp, Homo sapien
tatactactaatctagtcatcatctgaatagct

SEQ ID NO: 485991 - DNA, 33 bp, Homo sapien
gatgaccaagtcaagccctggaggtcgccattg

SEQ ID NO: 485992 - DNA, 33 bp, Homo sapien
gatgaccaagtcaagctctggaggtcgccattg

SEQ ID NO: 485993 - DNA, 33 bp, Homo sapien
ccgtggatttcagctaaccacagatcaaaaata

SEQ ID NO: 485994 - DNA, 33 bp, Homo sapien
ccgtggatttcagctagccacagatcaaaaata

SEQ ID NO: 485995 - DNA, 33 bp, Homo sapien
tctgtcagagcaaagccaattctctgaaagcct

SEQ ID NO: 485996 - DNA, 33 bp, Homo sapien
tctgtcagagcaaagcgaattctctgaaagcct

SEQ ID NO: 485997 - DNA, 33 bp, Homo sapien
tgcgcctcagcttcagaaaaaagcctatcacgg

SEQ ID NO: 485998 - DNA, 33 bp, Homo sapien
tgcgcctcagcttcaggaaaaagcctatcacgg

SEQ ID NO: 485999 - DNA, 33 bp, Homo sapien
ggtctggtatgttttcaataatgctatcaaatt

SEQ ID NO: 486000 - DNA, 33 bp, Homo sapien
ggtctggtatgttttcgataatgctatcaaatt

SEQ ID NO: 486001 - DNA, 33 bp, Homo sapien
gtggcagaccacactcaaggattacacagagat

SEQ ID NO: 486002 - DNA, 33 bp, Homo sapien
gtggcagaccacactcgaggattacacagagat

SEQ ID NO: 486003 - DNA, 33 bp, Homo sapien
tcaggatgccatcaggaactcccagggtttggc

SEQ ID NO: 486004 - DNA, 33 bp, Homo sapien
tcaggatgccatcagggactcccagggtttggc

SEQ ID NO: 486005 - DNA, 33 bp, Homo sapien
tctttacctgcaaccaagagtctcataacttgg

SEQ ID NO: 486006 - DNA, 33 bp, Homo sapien
tctttacctgcaaccaggagtctcataacttgg

SEQ ID NO: 486007 - DNA, 33 bp, Homo sapien
ctaatggtttggtcaactgtgcctatgtaataa

SEQ ID NO: 486008 - DNA, 33 bp, Homo sapien
ctaatggtttggtcaattgtgcctatgtaataa

SEQ ID NO: 486009 - DNA, 33 bp, Homo sapien
tccagaaatgtgaggacggtttaacctttgaaa

SEQ ID NO: 486010 - DNA, 33 bp, Homo sapien
tccagaaatgtgaggatggtttaacctttgaaa

SEQ ID NO: 486011 - DNA, 33 bp, Homo sapien
ttttcttccttagatccattaatatggtgaaat

SEQ ID NO: 486012 - DNA, 33 bp, Homo sapien
ttttcttccttagatctattaatatggtgaaat

SEQ ID NO: 486013 - DNA, 33 bp, Homo sapien
tgctacctacagcagaagtggctcgagcatggg

SEQ ID NO: 486014 - DNA, 33 bp, Homo sapien
tgctacctacagcagaggtggctcgagcatggg

SEQ ID NO: 486015 - DNA, 33 bp, Homo sapien
gtggctactgtaagtgaaagggcagcttgtaag

SEQ ID NO: 486016 - DNA, 33 bp, Homo sapien
gtggctactgtaagtgcaagggcagcttgtaag

SEQ ID NO: 486017 - DNA, 33 bp, Homo sapien
ttgcgggtgagatagaaaatactacaaatgatg

SEQ ID NO: 486018 - DNA, 33 bp, Homo sapien
ttgcgggtgagatagagaatactacaaatgatg

SEQ ID NO: 486019 - DNA, 33 bp, Homo sapien
gccactgtagggggagacataagctttagggtc

SEQ ID NO: 486020 - DNA, 33 bp, Homo sapien
gccactgtagggggaggcataagctttagggtc

SEQ ID NO: 486021 - DNA, 33 bp, Homo sapien
gacagcccagctggggaaatcgtgccatttaac

SEQ ID NO: 486022 - DNA, 33 bp, Homo sapien
gacagcccagctgggggaatcgtgccatttaac

SEQ ID NO: 486023 - DNA, 33 bp, Homo sapien
gggcattactgagcaacaggtcaatatgatgac

SEQ ID NO: 486024 - DNA, 33 bp, Homo sapien
gggcattactgagcaataggtcaatatgatgac

SEQ ID NO: 486025 - DNA, 33 bp, Homo sapien
aacctaacatccatcaacttggtctagagtgga

SEQ ID NO: 486026 - DNA, 33 bp, Homo sapien
aacctaacatccatcatcttggtctagagtgga

SEQ ID NO: 486027 - DNA, 33 bp, Homo sapien
aggagaatgtaaggaaacagctttgtgcagagt

SEQ ID NO: 486028 - DNA, 33 bp, Homo sapien
aggagaatgtaaggaagcagctttgtgcagagt

SEQ ID NO: 486029 - DNA, 33 bp, Homo sapien
ctaacttggcattcccagcaggtgtttgctgaa

SEQ ID NO: 486030 - DNA, 33 bp, Homo sapien
ctaacttggcattcccggcaggtgtttgctgaa

SEQ ID NO: 486031 - DNA, 33 bp, Homo sapien
atgagaccaagccaggaccatgagaagcttccc

SEQ ID NO: 486032 - DNA, 33 bp, Homo sapien
atgagaccaagccaggtccatgagaagcttccc

SEQ ID NO: 486033 - DNA, 33 bp, Homo sapien
ggaattgtgtggctgagtaaaactttttaaaaa

SEQ ID NO: 486034 - DNA, 33 bp, Homo sapien
ggaattgtgtggctgattaaaactttttaaaaa

SEQ ID NO: 486035 - DNA, 33 bp, Homo sapien
ggctgtgatgactgcaacaggcaggtggacctg

SEQ ID NO: 486036 - DNA, 33 bp, Homo sapien
ggctgtgatgactgcagcaggcaggtggacctg

SEQ ID NO: 486037 - DNA, 33 bp, Homo sapien
actcctcagtgacttacgaagcccggcacggac

SEQ ID NO: 486038 - DNA, 33 bp, Homo sapien
actcctcagtgacttatgaagcccggcacggac

SEQ ID NO: 486039 - DNA, 33 bp, Homo sapien
ggacaagaatgtgagccgactctgctcctttac

SEQ ID NO: 486040 - DNA, 33 bp, Homo sapien
ggacaagaatgtgagcggactctgctcctttac

SEQ ID NO: 486041 - DNA, 33 bp, Homo sapien
atggaacctaaacagacactagtgcatatggcc

SEQ ID NO: 486042 - DNA, 33 bp, Homo sapien
atggaacctaaacagatactagtgcatatggcc

SEQ ID NO: 486043 - DNA, 33 bp, Homo sapien
tgcctttctgatattcaatggagaattatagca

SEQ ID NO: 486044 - DNA, 33 bp, Homo sapien
tgcctttctgatattcgatggagaattatagca

SEQ ID NO: 486045 - DNA, 33 bp, Homo sapien
tttaacttcagctgagcagcatatttgggttca

SEQ ID NO: 486046 - DNA, 33 bp, Homo sapien
tttaacttcagctgagtagcatatttgggttca

SEQ ID NO: 486047 - DNA, 33 bp, Homo sapien
gggtcagagtgcaagacatggcaagtgagcaag

SEQ ID NO: 486048 - DNA, 33 bp, Homo sapien
gggtcagagtgcaagatatggcaagtgagcaag

SEQ ID NO: 486049 - DNA, 33 bp, Homo sapien
tgtcactaagactggcactgacccacccacagc

SEQ ID NO: 486050 - DNA, 33 bp, Homo sapien
tgtcactaagactggcgctgacccacccacagc

SEQ ID NO: 486051 - DNA, 33 bp, Homo sapien
tccatagacaccatgcactcctctgggagagat

SEQ ID NO: 486052 - DNA, 33 bp, Homo sapien
tccatagacaccatgcgctcctctgggagagat

SEQ ID NO: 486053 - DNA, 33 bp, Homo sapien
cctcaagctacaagatcaaagtaggtggctgcc

SEQ ID NO: 486054 - DNA, 33 bp, Homo sapien
cctcaagctacaagatgaaagtaggtggctgcc

SEQ ID NO: 486055 - DNA, 33 bp, Homo sapien
gccagctgcagcgagacatagaggatgacctgg

SEQ ID NO: 486056 - DNA, 33 bp, Homo sapien
gccagctgcagcgagagatagaggatgacctgg

SEQ ID NO: 486057 - DNA, 33 bp, Homo sapien
ttatctgtcatgtaagccctttgagccctcatc

SEQ ID NO: 486058 - DNA, 33 bp, Homo sapien
ttatctgtcatgtaagtcctttgagccctcatc

SEQ ID NO: 486059 - DNA, 33 bp, Homo sapien
cccttcctgtgtacccaccacggctttacccac

SEQ ID NO: 486060 - DNA, 33 bp, Homo sapien
cccttcctgtgtacccgccacggctttacccac

SEQ ID NO: 486061 - DNA, 33 bp, Homo sapien
cagccatgtgtggaaacgtcaccctggagttct

SEQ ID NO: 486062 - DNA, 33 bp, Homo sapien
cagccatgtgtggaaatgtcaccctggagttct

SEQ ID NO: 486063 - DNA, 33 bp, Homo sapien
cccaaacacatgcattcaagcagtctcctttgt

SEQ ID NO: 486064 - DNA, 33 bp, Homo sapien
cccaaacacatgcattgaagcagtctcctttgt

SEQ ID NO: 486065 - DNA, 33 bp, Homo sapien
ctctcctgagtctcacaataaacctcccaagcc

SEQ ID NO: 486066 - DNA, 33 bp, Homo sapien
ctctcctgagtctcacgataaacctcccaagcc

SEQ ID NO: 486067 - DNA, 33 bp, Homo sapien
ccatgtgaggcaaagagaaacaatttcttccca

SEQ ID NO: 486068 - DNA, 33 bp, Homo sapien
ccatgtgaggcaaagataaacaatttcttccca

SEQ ID NO: 486069 - DNA, 33 bp, Homo sapien
ttgtcggagggcataaatgttgaaagctgctgg

SEQ ID NO: 486070 - DNA, 33 bp, Homo sapien
ttgtcggagggcataactgttgaaagctgctgg

SEQ ID NO: 486071 - DNA, 33 bp, Homo sapien
ggaggcgttgcttgggcacctatactgttgtgg

SEQ ID NO: 486072 - DNA, 33 bp, Homo sapien
ggaggcgttgcttgggtacctatactgttgtgg

SEQ ID NO: 486073 - DNA, 33 bp, Homo sapien
gccaagatggggaggaaagtgaggcttttgaat

SEQ ID NO: 486074 - DNA, 33 bp, Homo sapien
gccaagatggggaggagagtgaggcttttgaat

SEQ ID NO: 486075 - DNA, 33 bp, Homo sapien
tgtcaggaggttcaaactggactatggatgtga

SEQ ID NO: 486076 - DNA, 33 bp, Homo sapien
tgtcaggaggttcaaattggactatggatgtga

SEQ ID NO: 486077 - DNA, 33 bp, Homo sapien
ctcttctagcctccaaatggaatgaggaaagaa

SEQ ID NO: 486078 - DNA, 33 bp, Homo sapien
ctcttctagcctccaagtggaatgaggaaagaa

SEQ ID NO: 486079 - DNA, 33 bp, Homo sapien
ggaagcagaccagggagctctctttgggcccct

SEQ ID NO: 486080 - DNA, 33 bp, Homo sapien
ggaagcagaccagggatctctctttgggcccct

SEQ ID NO: 486081 - DNA, 33 bp, Homo sapien
ggagcagggccttcaaattcatctgacctggac

SEQ ID NO: 486082 - DNA, 33 bp, Homo sapien
ggagcagggccttcaagttcatctgacctggac

SEQ ID NO: 486083 - DNA, 33 bp, Homo sapien
agccacaagaaattcacacagagggttgagtga

SEQ ID NO: 486084 - DNA, 33 bp, Homo sapien
agccacaagaaattcatacagagggttgagtga

SEQ ID NO: 486085 - DNA, 33 bp, Homo sapien
caagtgtccactctgacgctgttcaatcgggaa

SEQ ID NO: 486086 - DNA, 33 bp, Homo sapien
caagtgtccactctgatgctgttcaatcgggaa

SEQ ID NO: 486087 - DNA, 33 bp, Homo sapien
acaaaatacagttttccaaacatgagaacgtac

SEQ ID NO: 486088 - DNA, 33 bp, Homo sapien
acaaaatacagttttctaaacatgagaacgtac

SEQ ID NO: 486089 - DNA, 33 bp, Homo sapien
tgctaggctgaggtcaccgggggaaagatgatg

SEQ ID NO: 486090 - DNA, 33 bp, Homo sapien
tgctaggctgaggtcatcgggggaaagatgatg

SEQ ID NO: 486091 - DNA, 33 bp, Homo sapien
tcctttgacgtttggccaggacttgattagatt

SEQ ID NO: 486092 - DNA, 33 bp, Homo sapien
tcctttgacgtttggctaggacttgattagatt

SEQ ID NO: 486093 - DNA, 33 bp, Homo sapien
gatcctgggagcatacaggactcctccaaacct

SEQ ID NO: 486094 - DNA, 33 bp, Homo sapien
gatcctgggagcataccggactcctccaaacct

SEQ ID NO: 486095 - DNA, 33 bp, Homo sapien
ggagagatacaaagaaagtggatcctgggagca

SEQ ID NO: 486096 - DNA, 33 bp, Homo sapien
ggagagatacaaagaacgtggatcctgggagca

SEQ ID NO: 486097 - DNA, 33 bp, Homo sapien
tctgtcataccgcgaaaaagcctggcttattgg

SEQ ID NO: 486098 - DNA, 33 bp, Homo sapien
tctgtcataccgcgaagaagcctggcttattgg

SEQ ID NO: 486099 - DNA, 33 bp, Homo sapien
tgggctcatgtctacccagaataaggattcact

SEQ ID NO: 486100 - DNA, 33 bp, Homo sapien
tgggctcatgtctaccgagaataaggattcact

SEQ ID NO: 486101 - DNA, 33 bp, Homo sapien
tacagcatttatcacaagaaggtttgagacatt

SEQ ID NO: 486102 - DNA, 33 bp, Homo sapien
tacagcatttatcacacgaaggtttgagacatt

SEQ ID NO: 486103 - DNA, 33 bp, Homo sapien
catgcattcccagagcagacttatggatttggt

SEQ ID NO: 486104 - DNA, 33 bp, Homo sapien
catgcattcccagagccgacttatggatttggt

SEQ ID NO: 486105 - DNA, 33 bp, Homo sapien
gaagatatacgagaaacgagtaaccaatttgtg

SEQ ID NO: 486106 - DNA, 33 bp, Homo sapien
gaagatatacgagaaatgagtaaccaatttgtg

SEQ ID NO: 486107 - DNA, 33 bp, Homo sapien
tccaagtattcaaaggaaattaagtgctgtaat

SEQ ID NO: 486108 - DNA, 33 bp, Homo sapien
tccaagtattcaaagggaattaagtgctgtaat

SEQ ID NO: 486109 - DNA, 33 bp, Homo sapien
gtaatccagggaactcgctcagatcttatccaa

SEQ ID NO: 486110 - DNA, 33 bp, Homo sapien
gtaatccagggaactctctcagatcttatccaa

SEQ ID NO: 486111 - DNA, 33 bp, Homo sapien
gcatatatttcaccataaaatttgtattgactg

SEQ ID NO: 486112 - DNA, 33 bp, Homo sapien
gcatatatttcaccattaaatttgtattgactg

SEQ ID NO: 486113 - DNA, 33 bp, Homo sapien
tggaagatacccactgaaatttgagaccctaga

SEQ ID NO: 486114 - DNA, 33 bp, Homo sapien
tggaagatacccactggaatttgagaccctaga

SEQ ID NO: 486115 - DNA, 33 bp, Homo sapien
caggataagatatacccaatgaacacttatcat

SEQ ID NO: 486116 - DNA, 33 bp, Homo sapien
caggataagatatacctaatgaacacttatcat

SEQ ID NO: 486117 - DNA, 33 bp, Homo sapien
gcaacaatacaggacaaagtttatcaagtgctc

SEQ ID NO: 486118 - DNA, 33 bp, Homo sapien
gcaacaatacaggacagagtttatcaagtgctc

SEQ ID NO: 486119 - DNA, 33 bp, Homo sapien
aaatatgaaataataacggatgaatgggtatag

SEQ ID NO: 486120 - DNA, 33 bp, Homo sapien
aaatatgaaataataatggatgaatgggtatag

SEQ ID NO: 486121 - DNA, 33 bp, Homo sapien
tataggtcatcaagcaagactgcattaaaagta

SEQ ID NO: 486122 - DNA, 33 bp, Homo sapien
tataggtcatcaagcaggactgcattaaaagta

SEQ ID NO: 486123 - DNA, 33 bp, Homo sapien
agaagtatcaaagaagaagctcagctttagcag

SEQ ID NO: 486124 - DNA, 33 bp, Homo sapien
agaagtatcaaagaagcagctcagctttagcag

SEQ ID NO: 486125 - DNA, 33 bp, Homo sapien
agattttcttctcacaagctttcataaccgtct

SEQ ID NO: 486126 - DNA, 33 bp, Homo sapien
agattttcttctcacatgctttcataaccgtct

SEQ ID NO: 486127 - DNA, 33 bp, Homo sapien
acacaaattgactgcccaagtccctcatttttc

SEQ ID NO: 486128 - DNA, 33 bp, Homo sapien
acacaaattgactgcctaagtccctcatttttc

SEQ ID NO: 486129 - DNA, 33 bp, Homo sapien
cagggaagaggtaatacggaatgaaactggaag

SEQ ID NO: 486130 - DNA, 33 bp, Homo sapien
cagggaagaggtaatatggaatgaaactggaag

SEQ ID NO: 486131 - DNA, 33 bp, Homo sapien
aaagccattccttggacctccaggtttcagtta

SEQ ID NO: 486132 - DNA, 33 bp, Homo sapien
aaagccattccttggatctccaggtttcagtta

SEQ ID NO: 486133 - DNA, 33 bp, Homo sapien
caggatatttgttttacctgtatcaaaagcaat

SEQ ID NO: 486134 - DNA, 33 bp, Homo sapien
caggatatttgttttatctgtatcaaaagcaat

SEQ ID NO: 486135 - DNA, 33 bp, Homo sapien
catcatacatcagcacaaaattccagcatattt

SEQ ID NO: 486136 - DNA, 33 bp, Homo sapien
catcatacatcagcaccaaattccagcatattt

SEQ ID NO: 486137 - DNA, 33 bp, Homo sapien
tctatttaagccgagcacttcacgtcattccac

SEQ ID NO: 486138 - DNA, 33 bp, Homo sapien
tctatttaagccgagcgcttcacgtcattccac

SEQ ID NO: 486139 - DNA, 33 bp, Homo sapien
tgagtcttctagaataaagtaaccaggccaggc

SEQ ID NO: 486140 - DNA, 33 bp, Homo sapien
tgagtcttctagaatagagtaaccaggccaggc

SEQ ID NO: 486141 - DNA, 33 bp, Homo sapien
tgtgggttccaacacacagtcgtttaaatggtt

SEQ ID NO: 486142 - DNA, 33 bp, Homo sapien
tgtgggttccaacacagagtcgtttaaatggtt

SEQ ID NO: 486143 - DNA, 33 bp, Homo sapien
cttatgaaaggctgaaacaaaaggtaatgccca

SEQ ID NO: 486144 - DNA, 33 bp, Homo sapien
cttatgaaaggctgaatcaaaaggtaatgccca

SEQ ID NO: 486145 - DNA, 33 bp, Homo sapien
ggaaggaggatactcacgggatccatacagagg

SEQ ID NO: 486146 - DNA, 33 bp, Homo sapien
ggaaggaggatactcatgggatccatacagagg

SEQ ID NO: 486147 - DNA, 33 bp, Homo sapien
gtccggactgtccttacaattcacaggtcactg

SEQ ID NO: 486148 - DNA, 33 bp, Homo sapien
gtccggactgtccttataattcacaggtcactg

SEQ ID NO: 486149 - DNA, 33 bp, Homo sapien
ttagtgtgctgcagagaaatgctggttaaaatg

SEQ ID NO: 486150 - DNA, 33 bp, Homo sapien
ttagtgtgctgcagaggaatgctggttaaaatg

SEQ ID NO: 486151 - DNA, 33 bp, Homo sapien
agcgctattttccaaaagtgaagcctcagttct

SEQ ID NO: 486152 - DNA, 33 bp, Homo sapien
agcgctattttccaaaggtgaagcctcagttct

SEQ ID NO: 486153 - DNA, 33 bp, Homo sapien
tgcccgccacagtgctaagcacataaagaatac

SEQ ID NO: 486154 - DNA, 33 bp, Homo sapien
tgcccgccacagtgcttagcacataaagaatac

SEQ ID NO: 486155 - DNA, 33 bp, Homo sapien
aaagtaggaacaggaaattccaatgaaaatgct

SEQ ID NO: 486156 - DNA, 33 bp, Homo sapien
aaagtaggaacaggaacttccaatgaaaatgct

SEQ ID NO: 486157 - DNA, 33 bp, Homo sapien
atgccatcagtttgggcaattagcagttatggt

SEQ ID NO: 486158 - DNA, 33 bp, Homo sapien
atgccatcagtttgggtaattagcagttatggt

SEQ ID NO: 486159 - DNA, 33 bp, Homo sapien
ttcttgccctggtacccgggttagatcatggct

SEQ ID NO: 486160 - DNA, 33 bp, Homo sapien
ttcttgccctggtacctgggttagatcatggct

SEQ ID NO: 486161 - DNA, 33 bp, Homo sapien
aggtcctgcggcctcactcattctcattccata

SEQ ID NO: 486162 - DNA, 33 bp, Homo sapien
aggtcctgcggcctcattcattctcattccata

SEQ ID NO: 486163 - DNA, 33 bp, Homo sapien
cagattgaggtgcccaataaactgccaaaggat

SEQ ID NO: 486164 - DNA, 33 bp, Homo sapien
cagattgaggtgcccactaaactgccaaaggat

SEQ ID NO: 486165 - DNA, 33 bp, Homo sapien
cctctggaacaagaaacaaggagaatgtcaggc

SEQ ID NO: 486166 - DNA, 33 bp, Homo sapien
cctctggaacaagaaagaaggagaatgtcaggc

SEQ ID NO: 486167 - DNA, 33 bp, Homo sapien
acaactgaaagattcagggttgagacgtgagaa

SEQ ID NO: 486168 - DNA, 33 bp, Homo sapien
acaactgaaagattcatggttgagacgtgagaa

SEQ ID NO: 486169 - DNA, 33 bp, Homo sapien
acaggagctgatggccaggacaaaacaaggctc

SEQ ID NO: 486170 - DNA, 33 bp, Homo sapien
acaggagctgatggccgggacaaaacaaggctc

SEQ ID NO: 486171 - DNA, 33 bp, Homo sapien
ttcaaattctggaggaaggaatctgatggactc

SEQ ID NO: 486172 - DNA, 33 bp, Homo sapien
ttcaaattctggaggagggaatctgatggactc

SEQ ID NO: 486173 - DNA, 33 bp, Homo sapien
ctcagttccttcatccacaaaatgggataatag

SEQ ID NO: 486174 - DNA, 33 bp, Homo sapien
ctcagttccttcatccgcaaaatgggataatag

SEQ ID NO: 486175 - DNA, 33 bp, Homo sapien
aggaggatggataccaaccttctctgagggcag

SEQ ID NO: 486176 - DNA, 33 bp, Homo sapien
aggaggatggataccagccttctctgagggcag

SEQ ID NO: 486177 - DNA, 33 bp, Homo sapien
ggggtgaatgaatgaactgtggcttagatagct

SEQ ID NO: 486178 - DNA, 33 bp, Homo sapien
ggggtgaatgaatgaattgtggcttagatagct

SEQ ID NO: 486179 - DNA, 33 bp, Homo sapien
aattaaaatgagagcaatagactagatcgcttc

SEQ ID NO: 486180 - DNA, 33 bp, Homo sapien
aattaaaatgagagcagtagactagatcgcttc

SEQ ID NO: 486181 - DNA, 33 bp, Homo sapien
ggagctcataggattcacctctacagaaggtgt

SEQ ID NO: 486182 - DNA, 33 bp, Homo sapien
ggagctcataggattcgcctctacagaaggtgt

SEQ ID NO: 486183 - DNA, 33 bp, Homo sapien
aatatttatttgagtaccagataagctttggta

SEQ ID NO: 486184 - DNA, 33 bp, Homo sapien
aatatttatttgagtatcagataagctttggta

SEQ ID NO: 486185 - DNA, 33 bp, Homo sapien
tctagaaactcctcaaaggaatgtgtgaggatg

SEQ ID NO: 486186 - DNA, 33 bp, Homo sapien
tctagaaactcctcaagggaatgtgtgaggatg

SEQ ID NO: 486187 - DNA, 33 bp, Homo sapien
agcacgtaagtctcaactaaatcagctcaaaat

SEQ ID NO: 486188 - DNA, 33 bp, Homo sapien
agcacgtaagtctcaattaaatcagctcaaaat

SEQ ID NO: 486189 - DNA, 33 bp, Homo sapien
tgtagatgcataaccactgccattctaggccct

SEQ ID NO: 486190 - DNA, 33 bp, Homo sapien
tgtagatgcataaccattgccattctaggccct

SEQ ID NO: 486191 - DNA, 33 bp, Homo sapien
gcacacaaacaggtaaaaaatgtgattattata

SEQ ID NO: 486192 - DNA, 33 bp, Homo sapien
gcacacaaacaggtaacaaatgtgattattata

SEQ ID NO: 486193 - DNA, 33 bp, Homo sapien
agcttctgagttactgcagaatggtcaaaggaa

SEQ ID NO: 486194 - DNA, 33 bp, Homo sapien
agcttctgagttactgtagaatggtcaaaggaa

SEQ ID NO: 486195 - DNA, 33 bp, Homo sapien
ttctgcaagtgatatccaacacactgcatttca

SEQ ID NO: 486196 - DNA, 33 bp, Homo sapien
ttctgcaagtgatatctaacacactgcatttca

SEQ ID NO: 486197 - DNA, 33 bp, Homo sapien
taattaacaaaccaaacaacaaatgataagaga

SEQ ID NO: 486198 - DNA, 33 bp, Homo sapien
taattaacaaaccaaagaacaaatgataagaga

SEQ ID NO: 486199 - DNA, 33 bp, Homo sapien
tggagtacagttgcacaatgttggctcattgca

SEQ ID NO: 486200 - DNA, 33 bp, Homo sapien
tggagtacagttgcacgatgttggctcattgca

SEQ ID NO: 486201 - DNA, 33 bp, Homo sapien
tagaatactattggggacatatacatcatcagc

SEQ ID NO: 486202 - DNA, 33 bp, Homo sapien
tagaatactattgggggcatatacatcatcagc

SEQ ID NO: 486203 - DNA, 33 bp, Homo sapien
cacaatgaaagactgcaaacaatcagtgatcaa

SEQ ID NO: 486204 - DNA, 33 bp, Homo sapien
cacaatgaaagactgcgaacaatcagtgatcaa

SEQ ID NO: 486205 - DNA, 33 bp, Homo sapien
atactgaaacagaggaagataattaggtctgct

SEQ ID NO: 486206 - DNA, 33 bp, Homo sapien
atactgaaacagaggacgataattaggtctgct

SEQ ID NO: 486207 - DNA, 33 bp, Homo sapien
aaatgaagctttgagcagaaataaatatgaaag

SEQ ID NO: 486208 - DNA, 33 bp, Homo sapien
aaatgaagctttgagcggaaataaatatgaaag

SEQ ID NO: 486209 - DNA, 33 bp, Homo sapien
ggggtatgcccacagacggctatagcagcatac

SEQ ID NO: 486210 - DNA, 33 bp, Homo sapien
ggggtatgcccacagatggctatagcagcatac

SEQ ID NO: 486211 - DNA, 33 bp, Homo sapien
cactccagaataagcactgcgaagggtgtcatc

SEQ ID NO: 486212 - DNA, 33 bp, Homo sapien
cactccagaataagcattgcgaagggtgtcatc

SEQ ID NO: 486213 - DNA, 33 bp, Homo sapien
cacggcatcttccccccgcttcatctctctccc

SEQ ID NO: 486214 - DNA, 33 bp, Homo sapien
cacggcatcttcccccggcttcatctctctccc

SEQ ID NO: 486215 - DNA, 33 bp, Homo sapien
actggctagagagtccaagagagagtcgctgtt

SEQ ID NO: 486216 - DNA, 33 bp, Homo sapien
actggctagagagtccgagagagagtcgctgtt

SEQ ID NO: 486217 - DNA, 33 bp, Homo sapien
agtgctagtgagaacacagagacgtggagagat

SEQ ID NO: 486218 - DNA, 33 bp, Homo sapien
agtgctagtgagaacagagagacgtggagagat

SEQ ID NO: 486219 - DNA, 33 bp, Homo sapien
aaaggaatggtaagcacggtttcaaggggcagg

SEQ ID NO: 486220 - DNA, 33 bp, Homo sapien
aaaggaatggtaagcatggtttcaaggggcagg

SEQ ID NO: 486221 - DNA, 33 bp, Homo sapien
attatagcttttgcaacctatgagttagacaag

SEQ ID NO: 486222 - DNA, 33 bp, Homo sapien
attatagcttttgcaatctatgagttagacaag

SEQ ID NO: 486223 - DNA, 33 bp, Homo sapien
gtaacttccatcatacaggtgctgtgaaactat

SEQ ID NO: 486224 - DNA, 33 bp, Homo sapien
gtaacttccatcatacgggtgctgtgaaactat

SEQ ID NO: 486225 - DNA, 33 bp, Homo sapien
tgctccacagtagttacagcagttaagcagtga

SEQ ID NO: 486226 - DNA, 33 bp, Homo sapien
tgctccacagtagttatagcagttaagcagtga

SEQ ID NO: 486227 - DNA, 33 bp, Homo sapien
ggccttcatagaaaaggaattacctaaaaagaa

SEQ ID NO: 486228 - DNA, 33 bp, Homo sapien
ggccttcatagaaaagtaattacctaaaaagaa

SEQ ID NO: 486229 - DNA, 33 bp, Homo sapien
aaatttacattgattccgaaaatatttctgtag

SEQ ID NO: 486230 - DNA, 33 bp, Homo sapien
aaatttacattgattctgaaaatatttctgtag

SEQ ID NO: 486231 - DNA, 33 bp, Homo sapien
ctgctgggtgaaggtcactgaaggaaggcactg

SEQ ID NO: 486232 - DNA, 33 bp, Homo sapien
ctgctgggtgaaggtcgctgaaggaaggcactg

SEQ ID NO: 486233 - DNA, 33 bp, Homo sapien
gctggcttggcccaggaatagcggcagaccatt

SEQ ID NO: 486234 - DNA, 33 bp, Homo sapien
gctggcttggcccaggtatagcggcagaccatt

SEQ ID NO: 486235 - DNA, 33 bp, Homo sapien
agtccaggggagagcaaggggatccaggtacct

SEQ ID NO: 486236 - DNA, 33 bp, Homo sapien
agtccaggggagagcagggggatccaggtacct

SEQ ID NO: 486237 - DNA, 33 bp, Homo sapien
gtaggttctcaataaaaatctgttcatcagtta

SEQ ID NO: 486238 - DNA, 33 bp, Homo sapien
gtaggttctcaataaatatctgttcatcagtta

SEQ ID NO: 486239 - DNA, 33 bp, Homo sapien
tatgctgaacagaaagacctgcatattcaataa

SEQ ID NO: 486240 - DNA, 33 bp, Homo sapien
tatgctgaacagaaaggcctgcatattcaataa

SEQ ID NO: 486241 - DNA, 33 bp, Homo sapien
ccctcaggttacagtacattatgctttttaagt

SEQ ID NO: 486242 - DNA, 33 bp, Homo sapien
ccctcaggttacagtatattatgctttttaagt

SEQ ID NO: 486243 - DNA, 33 bp, Homo sapien
agcagctcaacagtcaaagataggtttatttcg

SEQ ID NO: 486244 - DNA, 33 bp, Homo sapien
agcagctcaacagtcagagataggtttatttcg

SEQ ID NO: 486245 - DNA, 33 bp, Homo sapien
aacagtaatctacttacagggttgctgtgtaga

SEQ ID NO: 486246 - DNA, 33 bp, Homo sapien
aacagtaatctacttatagggttgctgtgtaga

SEQ ID NO: 486247 - DNA, 33 bp, Homo sapien
cctccatcagtaataactgctttatctgctggg

SEQ ID NO: 486248 - DNA, 33 bp, Homo sapien
cctccatcagtaataattgctttatctgctggg

SEQ ID NO: 486249 - DNA, 33 bp, Homo sapien
gagcctttctggctgccatcctacagacctgca

SEQ ID NO: 486250 - DNA, 33 bp, Homo sapien
gagcctttctggctgctatcctacagacctgca

SEQ ID NO: 486251 - DNA, 33 bp, Homo sapien
ccttaaaggtcagtgcaaatcctagttttctat

SEQ ID NO: 486252 - DNA, 33 bp, Homo sapien
ccttaaaggtcagtgcgaatcctagttttctat

SEQ ID NO: 486253 - DNA, 33 bp, Homo sapien
ccattttgatacagccacttgacacataatttt

SEQ ID NO: 486254 - DNA, 33 bp, Homo sapien
ccattttgatacagccgcttgacacataatttt

SEQ ID NO: 486255 - DNA, 33 bp, Homo sapien
ccacatggggaaggtaggtatagatttgctggc

SEQ ID NO: 486256 - DNA, 33 bp, Homo sapien
ccacatggggaaggtatgtatagatttgctggc

SEQ ID NO: 486257 - DNA, 33 bp, Homo sapien
gagataaccttcaacacactcagtcaaagaaaa

SEQ ID NO: 486258 - DNA, 33 bp, Homo sapien
gagataaccttcaacagactcagtcaaagaaaa

SEQ ID NO: 486259 - DNA, 33 bp, Homo sapien
agattctctccagcaacgtttggcatctcaggc

SEQ ID NO: 486260 - DNA, 33 bp, Homo sapien
agattctctccagcaatgtttggcatctcaggc

SEQ ID NO: 486261 - DNA, 33 bp, Homo sapien
atgcaaaaatgtaaaagaaagcgtctccaccct

SEQ ID NO: 486262 - DNA, 33 bp, Homo sapien
atgcaaaaatgtaaaataaagcgtctccaccct

SEQ ID NO: 486263 - DNA, 33 bp, Homo sapien
ggaatgaactgccacagattttgtctccaggta

SEQ ID NO: 486264 - DNA, 33 bp, Homo sapien
ggaatgaactgccacatattttgtctccaggta

SEQ ID NO: 486265 - DNA, 33 bp, Homo sapien
accatagtaaccagagcattctgacctttagag

SEQ ID NO: 486266 - DNA, 33 bp, Homo sapien
accatagtaaccagaggattctgacctttagag

SEQ ID NO: 486267 - DNA, 33 bp, Homo sapien
atatttatgactcatacagggctaagtgccatc

SEQ ID NO: 486268 - DNA, 33 bp, Homo sapien
atatttatgactcatatagggctaagtgccatc

SEQ ID NO: 486269 - DNA, 33 bp, Homo sapien
tcataattagacaatggatctttcctgccagca

SEQ ID NO: 486270 - DNA, 33 bp, Homo sapien
tcataattagacaatgtatctttcctgccagca

SEQ ID NO: 486271 - DNA, 33 bp, Homo sapien
gaagctctgttaaaacaaattgagaactggctt

SEQ ID NO: 486272 - DNA, 33 bp, Homo sapien
gaagctctgttaaaacgaattgagaactggctt

SEQ ID NO: 486273 - DNA, 33 bp, Homo sapien
taaaggcctgcagaaacgctctggtttgaatgt

SEQ ID NO: 486274 - DNA, 33 bp, Homo sapien
taaaggcctgcagaaatgctctggtttgaatgt

SEQ ID NO: 486275 - DNA, 33 bp, Homo sapien
ctcattgagtagagtcaatctgtgtaaccaaca

SEQ ID NO: 486276 - DNA, 33 bp, Homo sapien
ctcattgagtagagtcgatctgtgtaaccaaca

SEQ ID NO: 486277 - DNA, 33 bp, Homo sapien
ccctcctctgaattcacacttacatacagagca

SEQ ID NO: 486278 - DNA, 33 bp, Homo sapien
ccctcctctgaattcatacttacatacagagca

SEQ ID NO: 486279 - DNA, 33 bp, Homo sapien
gtactatctacaagtgaatcattcatataacaa

SEQ ID NO: 486280 - DNA, 33 bp, Homo sapien
gtactatctacaagtggatcattcatataacaa

SEQ ID NO: 486281 - DNA, 33 bp, Homo sapien
tggagagatgtgtgaaaagaaaaaagttggctt

SEQ ID NO: 486282 - DNA, 33 bp, Homo sapien
tggagagatgtgtgaacagaaaaaagttggctt

SEQ ID NO: 486283 - DNA, 33 bp, Homo sapien
tacaaaactaggtataatagccgtcatttatgc

SEQ ID NO: 486284 - DNA, 33 bp, Homo sapien
tacaaaactaggtatagtagccgtcatttatgc

SEQ ID NO: 486285 - DNA, 33 bp, Homo sapien
tcttggatattgacaacgaacattttccgggta

SEQ ID NO: 486286 - DNA, 33 bp, Homo sapien
tcttggatattgacaatgaacattttccgggta

SEQ ID NO: 486287 - DNA, 33 bp, Homo sapien
cttaaatctgctgaaacgaagactctgacggaa

SEQ ID NO: 486288 - DNA, 33 bp, Homo sapien
cttaaatctgctgaaatgaagactctgacggaa

SEQ ID NO: 486289 - DNA, 33 bp, Homo sapien
tgaccagaaaggagacactgtttccacacggcc

SEQ ID NO: 486290 - DNA, 33 bp, Homo sapien
tgaccagaaaggagaccctgtttccacacggcc

SEQ ID NO: 486291 - DNA, 33 bp, Homo sapien
cagaattccttcctgacaagagaccactaacca

SEQ ID NO: 486292 - DNA, 33 bp, Homo sapien
cagaattccttcctgataagagaccactaacca

SEQ ID NO: 486293 - DNA, 33 bp, Homo sapien
atgcacctggcctaaaatcatttcttggagtta

SEQ ID NO: 486294 - DNA, 33 bp, Homo sapien
atgcacctggcctaaagtcatttcttggagtta

SEQ ID NO: 486295 - DNA, 33 bp, Homo sapien
ctgaatgacagactgaaacacttgctcaaaggg

SEQ ID NO: 486296 - DNA, 33 bp, Homo sapien
ctgaatgacagactgatacacttgctcaaaggg

SEQ ID NO: 486297 - DNA, 33 bp, Homo sapien
tgtaactcttaagccaaccttgcattgaaaaca

SEQ ID NO: 486298 - DNA, 33 bp, Homo sapien
tgtaactcttaagccagccttgcattgaaaaca

SEQ ID NO: 486299 - DNA, 33 bp, Homo sapien
gtcacccggtgctaccaagacatgagcgcccgg

SEQ ID NO: 486300 - DNA, 33 bp, Homo sapien
gtcacccggtgctaccgagacatgagcgcccgg

SEQ ID NO: 486301 - DNA, 33 bp, Homo sapien
gaagattattttaaaccgaagacactagagata

SEQ ID NO: 486302 - DNA, 33 bp, Homo sapien
gaagattattttaaactgaagacactagagata

SEQ ID NO: 486303 - DNA, 33 bp, Homo sapien
gttggagtaaagtgaacgaaataatcagaatgt

SEQ ID NO: 486304 - DNA, 33 bp, Homo sapien
gttggagtaaagtgaatgaaataatcagaatgt

SEQ ID NO: 486305 - DNA, 33 bp, Homo sapien
taactcacaatattatcataaagcatactgatt

SEQ ID NO: 486306 - DNA, 33 bp, Homo sapien
taactcacaatattattataaagcatactgatt

SEQ ID NO: 486307 - DNA, 33 bp, Homo sapien
gttgtgacttctcaccaggagatttggtttggg

SEQ ID NO: 486308 - DNA, 33 bp, Homo sapien
gttgtgacttctcaccgggagatttggtttggg

SEQ ID NO: 486309 - DNA, 33 bp, Homo sapien
tcaaactactcactaacgaacacatctgagttg

SEQ ID NO: 486310 - DNA, 33 bp, Homo sapien
tcaaactactcactaatgaacacatctgagttg

SEQ ID NO: 486311 - DNA, 33 bp, Homo sapien
cacaaagtgctgcaccaagcacagtagcaggtg

SEQ ID NO: 486312 - DNA, 33 bp, Homo sapien
cacaaagtgctgcaccgagcacagtagcaggtg

SEQ ID NO: 486313 - DNA, 33 bp, Homo sapien
aaaaaagagagagagactatgcagttcttaaaa

SEQ ID NO: 486314 - DNA, 33 bp, Homo sapien
aaaaaagagagagagattatgcagttcttaaaa

SEQ ID NO: 486315 - DNA, 33 bp, Homo sapien
taaaccaaaaaattgacgcgactctctttattg

SEQ ID NO: 486316 - DNA, 33 bp, Homo sapien
taaaccaaaaaattgatgcgactctctttattg

SEQ ID NO: 486317 - DNA, 33 bp, Homo sapien
gtatctgtctaatctgaaatttaacccatctac

SEQ ID NO: 486318 - DNA, 33 bp, Homo sapien
gtatctgtctaatctgtaatttaacccatctac

SEQ ID NO: 486319 - DNA, 33 bp, Homo sapien
tgattacaacttgacaatcattggcataatatt

SEQ ID NO: 486320 - DNA, 33 bp, Homo sapien
tgattacaacttgacagtcattggcataatatt

SEQ ID NO: 486321 - DNA, 33 bp, Homo sapien
tgcagtaacaaatccccaaaatctccagtctag

SEQ ID NO: 486322 - DNA, 33 bp, Homo sapien
tgcagtaacaaatcccgaaaatctccagtctag

SEQ ID NO: 486323 - DNA, 33 bp, Homo sapien
tttacattttttctgacgactaattatttgaac

SEQ ID NO: 486324 - DNA, 33 bp, Homo sapien
tttacattttttctgatgactaattatttgaac

SEQ ID NO: 486325 - DNA, 33 bp, Homo sapien
ctcaagatattagttaacatttcaccaaaaatt

SEQ ID NO: 486326 - DNA, 33 bp, Homo sapien
ctcaagatattagttaccatttcaccaaaaatt

SEQ ID NO: 486327 - DNA, 33 bp, Homo sapien
tttttctgaaaaggggccataactctcatcgga

SEQ ID NO: 486328 - DNA, 33 bp, Homo sapien
tttttctgaaaaggggtcataactctcatcgga

SEQ ID NO: 486329 - DNA, 33 bp, Homo sapien
cagtttgattttcaaccgtatacatctatgctt

SEQ ID NO: 486330 - DNA, 33 bp, Homo sapien
cagtttgattttcaactgtatacatctatgctt

SEQ ID NO: 486331 - DNA, 33 bp, Homo sapien
tgattggtcatatcaactgttaattattttcaa

SEQ ID NO: 486332 - DNA, 33 bp, Homo sapien
tgattggtcatatcaattgttaattattttcaa

SEQ ID NO: 486333 - DNA, 33 bp, Homo sapien
gagccactgcgcccagccaatgatcacttttta

SEQ ID NO: 486334 - DNA, 33 bp, Homo sapien
gagccactgcgcccaggcaatgatcacttttta

SEQ ID NO: 486335 - DNA, 33 bp, Homo sapien
tgtttggttaactacacggtatcccagaccctc

SEQ ID NO: 486336 - DNA, 33 bp, Homo sapien
tgtttggttaactacagggtatcccagaccctc

SEQ ID NO: 486337 - DNA, 33 bp, Homo sapien
cctttcttttctactaccattccagttcagtag

SEQ ID NO: 486338 - DNA, 33 bp, Homo sapien
cctttcttttctactagcattccagttcagtag

SEQ ID NO: 486339 - DNA, 33 bp, Homo sapien
cattgctgaactggcccaatgaggaagctgttc

SEQ ID NO: 486340 - DNA, 33 bp, Homo sapien
cattgctgaactggcctaatgaggaagctgttc

SEQ ID NO: 486341 - DNA, 33 bp, Homo sapien
tcatctgtgctagcaaagaatgtaccctcagtg

SEQ ID NO: 486342 - DNA, 33 bp, Homo sapien
tcatctgtgctagcaatgaatgtaccctcagtg

SEQ ID NO: 486343 - DNA, 33 bp, Homo sapien
tagtaggtggcagtgacagaactagagtccagg

SEQ ID NO: 486344 - DNA, 33 bp, Homo sapien
tagtaggtggcagtgagagaactagagtccagg

SEQ ID NO: 486345 - DNA, 33 bp, Homo sapien
gctggagaaacttgaacgtgaattgaatgttag

SEQ ID NO: 486346 - DNA, 33 bp, Homo sapien
gctggagaaacttgaatgtgaattgaatgttag

SEQ ID NO: 486347 - DNA, 33 bp, Homo sapien
ggctacactaaatgcccgaaatcttctctttaa

SEQ ID NO: 486348 - DNA, 33 bp, Homo sapien
ggctacactaaatgcctgaaatcttctctttaa

SEQ ID NO: 486349 - DNA, 33 bp, Homo sapien
aatactacagagcagacgaataggataattaga

SEQ ID NO: 486350 - DNA, 33 bp, Homo sapien
aatactacagagcagatgaataggataattaga

SEQ ID NO: 486351 - DNA, 33 bp, Homo sapien
ttggctcgatttcaccagcttttattgaaactg

SEQ ID NO: 486352 - DNA, 33 bp, Homo sapien
ttggctcgatttcacccgcttttattgaaactg

SEQ ID NO: 486353 - DNA, 33 bp, Homo sapien
gaaattcattggcctaaaaggagattaaaccca

SEQ ID NO: 486354 - DNA, 33 bp, Homo sapien
gaaattcattggcctacaaggagattaaaccca

SEQ ID NO: 486355 - DNA, 33 bp, Homo sapien
atataagtttgttggggagggttgaacaatttt

SEQ ID NO: 486356 - DNA, 33 bp, Homo sapien
atataagtttgttgggtagggttgaacaatttt

SEQ ID NO: 486357 - DNA, 33 bp, Homo sapien
ctttacacaaatgacacggtcctgaaacttgga

SEQ ID NO: 486358 - DNA, 33 bp, Homo sapien
ctttacacaaatgacatggtcctgaaacttgga

SEQ ID NO: 486359 - DNA, 33 bp, Homo sapien
ctggaatacaaaggacacttgaagaagtcattc

SEQ ID NO: 486360 - DNA, 33 bp, Homo sapien
ctggaatacaaaggacccttgaagaagtcattc

SEQ ID NO: 486361 - DNA, 33 bp, Homo sapien
tcagaagaaaggagaggccagaacgggctggag

SEQ ID NO: 486362 - DNA, 33 bp, Homo sapien
tcagaagaaaggagagtccagaacgggctggag

SEQ ID NO: 486363 - DNA, 33 bp, Homo sapien
ccaggggggaaaatggaatcttaggaaagttag

SEQ ID NO: 486364 - DNA, 33 bp, Homo sapien
ccaggggggaaaatgggatcttaggaaagttag

SEQ ID NO: 486365 - DNA, 33 bp, Homo sapien
cgtacgtcattccaaactcttcctctgttgtca

SEQ ID NO: 486366 - DNA, 33 bp, Homo sapien
cgtacgtcattccaaagtcttcctctgttgtca

SEQ ID NO: 486367 - DNA, 33 bp, Homo sapien
ggtacatcgtaaccaaatctcactagtctcaga

SEQ ID NO: 486368 - DNA, 33 bp, Homo sapien
ggtacatcgtaaccaagtctcactagtctcaga

SEQ ID NO: 486369 - DNA, 33 bp, Homo sapien
aataaaaatggagaaaagcgtgactgacttatt

SEQ ID NO: 486370 - DNA, 33 bp, Homo sapien
aataaaaatggagaaatgcgtgactgacttatt

SEQ ID NO: 486371 - DNA, 33 bp, Homo sapien
aaaagctttagaattacactgagctattatttg

SEQ ID NO: 486372 - DNA, 33 bp, Homo sapien
aaaagctttagaattagactgagctattatttg

SEQ ID NO: 486373 - DNA, 33 bp, Homo sapien
gtattctttatggtaacacaaaatgggctaaga

SEQ ID NO: 486374 - DNA, 33 bp, Homo sapien
gtattctttatggtaatacaaaatgggctaaga

SEQ ID NO: 486375 - DNA, 33 bp, Homo sapien
attcagcaggacacataaaagtcctatttgctc

SEQ ID NO: 486376 - DNA, 33 bp, Homo sapien
attcagcaggacacatgaaagtcctatttgctc

SEQ ID NO: 486377 - DNA, 33 bp, Homo sapien
atttgaaatggttaaaattaaaagtctggagct

SEQ ID NO: 486378 - DNA, 33 bp, Homo sapien
atttgaaatggttaaagttaaaagtctggagct

SEQ ID NO: 486379 - DNA, 33 bp, Homo sapien
cattttctcctaagtacagtgattgcaaccatg

SEQ ID NO: 486380 - DNA, 33 bp, Homo sapien
cattttctcctaagtagagtgattgcaaccatg

SEQ ID NO: 486381 - DNA, 33 bp, Homo sapien
tctggatggggaacaactcaaaaaggccaactt

SEQ ID NO: 486382 - DNA, 33 bp, Homo sapien
tctggatggggaacaattcaaaaaggccaactt

SEQ ID NO: 486383 - DNA, 33 bp, Homo sapien
atttatttattccacaaatagtgagcacatact

SEQ ID NO: 486384 - DNA, 33 bp, Homo sapien
atttatttattccacatatagtgagcacatact

SEQ ID NO: 486385 - DNA, 33 bp, Homo sapien
aagacatcaagattaacggagaaggcctttaga

SEQ ID NO: 486386 - DNA, 33 bp, Homo sapien
aagacatcaagattaatggagaaggcctttaga

SEQ ID NO: 486387 - DNA, 33 bp, Homo sapien
acagctattggacgtaaaattcacataattatc

SEQ ID NO: 486388 - DNA, 33 bp, Homo sapien
acagctattggacgtataattcacataattatc

SEQ ID NO: 486389 - DNA, 33 bp, Homo sapien
gtgaattgttctgctagaaacacgtgtatgcga

SEQ ID NO: 486390 - DNA, 33 bp, Homo sapien
gtgaattgttctgctataaacacgtgtatgcga

SEQ ID NO: 486391 - DNA, 33 bp, Homo sapien
acatacaccacttggcgcaacccgaaggcccaa

SEQ ID NO: 486392 - DNA, 33 bp, Homo sapien
acatacaccacttggctcaacccgaaggcccaa

SEQ ID NO: 486393 - DNA, 33 bp, Homo sapien
ccaaagagcctttttacgcttgggaacgcacaa

SEQ ID NO: 486394 - DNA, 33 bp, Homo sapien
ccaaagagcctttttatgcttgggaacgcacaa

SEQ ID NO: 486395 - DNA, 33 bp, Homo sapien
cttcgaagagtaactacaacacacccactgatt

SEQ ID NO: 486396 - DNA, 33 bp, Homo sapien
cttcgaagagtaactataacacacccactgatt

SEQ ID NO: 486397 - DNA, 33 bp, Homo sapien; identical to SEQ ID NO: 486395

SEQ ID NO: 486398 - DNA, 33 bp, Homo sapien; identical to SEQ ID NO: 486396

SEQ ID NO: 486399 - DNA, 33 bp, Homo sapien
ttttcagtggaggggaccttttcttcacagttc

SEQ ID NO: 486400 - DNA, 33 bp, Homo sapien
ttttcagtggaggggatcttttcttcacagttc

SEQ ID NO: 486401 - DNA, 33 bp, Homo sapien
tcctgtggtgccacctcaagatgctgttcctca

SEQ ID NO: 486402 - DNA, 33 bp, Homo sapien
tcctgtggtgccacctgaagatgctgttcctca

SEQ ID NO: 486403 - DNA, 33 bp, Homo sapien
cctatcaatgtctcaactctggctgcgtctctg

SEQ ID NO: 486404 - DNA, 33 bp, Homo sapien
cctatcaatgtctcaagtctggctgcgtctctg

SEQ ID NO: 486405 - DNA, 33 bp, Homo sapien
atgtcactcaacttcacggtctttacactcatt

SEQ ID NO: 486406 - DNA, 33 bp, Homo sapien
atgtcactcaacttcatggtctttacactcatt

SEQ ID NO: 486407 - DNA, 33 bp, Homo sapien
atgagtataggttctacgcgaaactgcacctgt

SEQ ID NO: 486408 - DNA, 33 bp, Homo sapien
atgagtataggttctatgcgaaactgcacctgt

SEQ ID NO: 486409 - DNA, 33 bp, Homo sapien
tgtgagaaaacaagaaactaaaatggaaatctg

SEQ ID NO: 486410 - DNA, 33 bp, Homo sapien
tgtgagaaaacaagaacctaaaatggaaatctg

SEQ ID NO: 486411 - DNA, 33 bp, Homo sapien
ttagctggacacataacacataaagcaattaag

SEQ ID NO: 486412 - DNA, 33 bp, Homo sapien
ttagctggacacataagacataaagcaattaag

SEQ ID NO: 486413 - DNA, 33 bp, Homo sapien
gtcctgtgcagaatagaattaatatagtgaaca

SEQ ID NO: 486414 - DNA, 33 bp, Homo sapien
gtcctgtgcagaatagcattaatatagtgaaca

SEQ ID NO: 486415 - DNA, 33 bp, Homo sapien
tactattaggtttagaaccttctgccactccct

SEQ ID NO: 486416 - DNA, 33 bp, Homo sapien
tactattaggtttagagccttctgccactccct

SEQ ID NO: 486417 - DNA, 33 bp, Homo sapien
acagctactttgctagcatttacccacattgct

SEQ ID NO: 486418 - DNA, 33 bp, Homo sapien
acagctactttgctagtatttacccacattgct

SEQ ID NO: 486419 - DNA, 33 bp, Homo sapien
atgttggctcttccaactggaatggttcatgat

SEQ ID NO: 486420 - DNA, 33 bp, Homo sapien
atgttggctcttccaagtggaatggttcatgat

SEQ ID NO: 486421 - DNA, 33 bp, Homo sapien
gtgtttataaaatctacgctagtgtacagtggt

SEQ ID NO: 486422 - DNA, 33 bp, Homo sapien
gtgtttataaaatctatgctagtgtacagtggt

SEQ ID NO: 486423 - DNA, 33 bp, Homo sapien
ttatgtgctttgcctacgtgatgctcatgataa

SEQ ID NO: 486424 - DNA, 33 bp, Homo sapien
ttatgtgctttgcctatgtgatgctcatgataa

SEQ ID NO: 486425 - DNA, 33 bp, Homo sapien
tcatcctagattaaagactgtattaccatgaaa

SEQ ID NO: 486426 - DNA, 33 bp, Homo sapien
tcatcctagattaaagcctgtattaccatgaaa

SEQ ID NO: 486427 - DNA, 33 bp, Homo sapien
acattatcatctgaccaaggtctgctctgtgat

SEQ ID NO: 486428 - DNA, 33 bp, Homo sapien
acattatcatctgaccgaggtctgctctgtgat

SEQ ID NO: 486429 - DNA, 33 bp, Homo sapien
ctcctaatcagactcactaccactgttcaatat

SEQ ID NO: 486430 - DNA, 33 bp, Homo sapien
ctcctaatcagactcattaccactgttcaatat

SEQ ID NO: 486431 - DNA, 33 bp, Homo sapien
agagagagtacctggaccaccatggcaaaatcg

SEQ ID NO: 486432 - DNA, 33 bp, Homo sapien
agagagagtacctggatcaccatggcaaaatcg

SEQ ID NO: 486433 - DNA, 33 bp, Homo sapien
acatgcaagagaatcacgggctctgaagtgaat

SEQ ID NO: 486434 - DNA, 33 bp, Homo sapien
acatgcaagagaatcatgggctctgaagtgaat

SEQ ID NO: 486435 - DNA, 33 bp, Homo sapien
gattcaagtcaaggtacagtgccaaccagtcaa

SEQ ID NO: 486436 - DNA, 33 bp, Homo sapien
gattcaagtcaaggtatagtgccaaccagtcaa

SEQ ID NO: 486437 - DNA, 33 bp, Homo sapien
ttgctattacatgaaacacagatgattatgtgt

SEQ ID NO: 486438 - DNA, 33 bp, Homo sapien
ttgctattacatgaaatacagatgattatgtgt

SEQ ID NO: 486439 - DNA, 33 bp, Homo sapien
cattaaatctgaaatacctctgaaatctgtcca

SEQ ID NO: 486440 - DNA, 33 bp, Homo sapien
cattaaatctgaaatatctctgaaatctgtcca

SEQ ID NO: 486441 - DNA, 33 bp, Homo sapien
agtaaattcagtggaaagttgccacacatattt

SEQ ID NO: 486442 - DNA, 33 bp, Homo sapien
agtaaattcagtggaaggttgccacacatattt

SEQ ID NO: 486443 - DNA, 33 bp, Homo sapien
agtagacttgaactaaacaatttctaggagcgt

SEQ ID NO: 486444 - DNA, 33 bp, Homo sapien
agtagacttgaactaagcaatttctaggagcgt

SEQ ID NO: 486445 - DNA, 33 bp, Homo sapien
agtttcatatagaaaacatacgcagcattactt

SEQ ID NO: 486446 - DNA, 33 bp, Homo sapien
agtttcatatagaaaagatacgcagcattactt

SEQ ID NO: 486447 - DNA, 33 bp, Homo sapien
gtaaaacaacaatgcaagccacttcactgaatt

SEQ ID NO: 486448 - DNA, 33 bp, Homo sapien
gtaaaacaacaatgcaggccacttcactgaatt

SEQ ID NO: 486449 - DNA, 33 bp, Homo sapien
aaaccagaagctaataacatttgaacctcacta

SEQ ID NO: 486450 - DNA, 33 bp, Homo sapien
aaaccagaagctaataccatttgaacctcacta

SEQ ID NO: 486451 - DNA, 33 bp, Homo sapien
ccaaagcaacgctaggaaaactgattttaatat

SEQ ID NO: 486452 - DNA, 33 bp, Homo sapien
ccaaagcaacgctagggaaactgattttaatat

SEQ ID NO: 486453 - DNA, 33 bp, Homo sapien
tctagagagaagtttaaaaaacaccaagtggat

SEQ ID NO: 486454 - DNA, 33 bp, Homo sapien
tctagagagaagtttagaaaacaccaagtggat

SEQ ID NO: 486455 - DNA, 33 bp, Homo sapien
tagatagcaggagacacaggattcttacactga

SEQ ID NO: 486456 - DNA, 33 bp, Homo sapien
tagatagcaggagacagaggattcttacactga

SEQ ID NO: 486457 - DNA, 33 bp, Homo sapien
gtttagtttcatttcaataagacacaaatctta

SEQ ID NO: 486458 - DNA, 33 bp, Homo sapien
gtttagtttcatttcagtaagacacaaatctta

SEQ ID NO: 486459 - DNA, 33 bp, Homo sapien
tttgaattgcttacaaagaatgcctcaatatga

SEQ ID NO: 486460 - DNA, 33 bp, Homo sapien
tttgaattgcttacaaggaatgcctcaatatga

SEQ ID NO: 486461 - DNA, 33 bp, Homo sapien
ccatttactacttccactgagagtatgctctca

SEQ ID NO: 486462 - DNA, 33 bp, Homo sapien
ccatttactacttccattgagagtatgctctca

SEQ ID NO: 486463 - DNA, 33 bp, Homo sapien
aaaaaaaattgctgtacaatagtctgctgtctg

SEQ ID NO: 486464 - DNA, 33 bp, Homo sapien
aaaaaaaattgctgtataatagtctgctgtctg

SEQ ID NO: 486465 - DNA, 33 bp, Homo sapien
tagtaagtgtttcagccaaattatgttgttgta

SEQ ID NO: 486466 - DNA, 33 bp, Homo sapien
tagtaagtgtttcagctaaattatgttgttgta

SEQ ID NO: 486467 - DNA, 33 bp, Homo sapien
ttacagagttatattaccattggcaacactagc

SEQ ID NO: 486468 - DNA, 33 bp, Homo sapien
ttacagagttatattagcattggcaacactagc

SEQ ID NO: 486469 - DNA, 33 bp, Homo sapien
aatctacctacacataacttctcaaaaatagaa

SEQ ID NO: 486470 - DNA, 33 bp, Homo sapien
aatctacctacacataccttctcaaaaatagaa

SEQ ID NO: 486471 - DNA, 33 bp, Homo sapien
gtccccattcttcctgccacactccgccaaatc

SEQ ID NO: 486472 - DNA, 33 bp, Homo sapien
gtccccattcttcctgtcacactccgccaaatc

SEQ ID NO: 486473 - DNA, 33 bp, Homo sapien
accctgagcgtgaacactgaatatctattcttt

SEQ ID NO: 486474 - DNA, 33 bp, Homo sapien
accctgagcgtgaacattgaatatctattcttt

SEQ ID NO: 486475 - DNA, 33 bp, Homo sapien
tatgattactggggccaaatttttgggaggaca

SEQ ID NO: 486476 - DNA, 33 bp, Homo sapien
tatgattactggggccgaatttttgggaggaca

SEQ ID NO: 486477 - DNA, 33 bp, Homo sapien
ccacatagaagcattcccgagagtgttagtgtt

SEQ ID NO: 486478 - DNA, 33 bp, Homo sapien
ccacatagaagcattcgcgagagtgttagtgtt

SEQ ID NO: 486479 - DNA, 33 bp, Homo sapien
aacccatctgtcagaacattaaacaacaacaaa

SEQ ID NO: 486480 - DNA, 33 bp, Homo sapien
aacccatctgtcagaagattaaacaacaacaaa

SEQ ID NO: 486481 - DNA, 33 bp, Homo sapien
tgctcttagatcgctcactatgagaaatgttag

SEQ ID NO: 486482 - DNA, 33 bp, Homo sapien
tgctcttagatcgctcgctatgagaaatgttag

SEQ ID NO: 486483 - DNA, 33 bp, Homo sapien
ccttttatgtttcccacgagtctaccaacttca

SEQ ID NO: 486484 - DNA, 33 bp, Homo sapien
ccttttatgtttcccatgagtctaccaacttca

SEQ ID NO: 486485 - DNA, 33 bp, Homo sapien
ttctgctgaaacaggaatatccatgatcaaaac

SEQ ID NO: 486486 - DNA, 33 bp, Homo sapien
ttctgctgaaacaggactatccatgatcaaaac

SEQ ID NO: 486487 - DNA, 33 bp, Homo sapien
ctgtttagatgcaataaggcctaaagataaaat

SEQ ID NO: 486488 - DNA, 33 bp, Homo sapien
ctgtttagatgcaatagggcctaaagataaaat

SEQ ID NO: 486489 - DNA, 33 bp, Homo sapien
aattacaaaaacaggccataatttgttggtgac

SEQ ID NO: 486490 - DNA, 33 bp, Homo sapien
aattacaaaaacaggctataatttgttggtgac

SEQ ID NO: 486491 - DNA, 33 bp, Homo sapien
ttaggtcttacataaacaaagagcaatcctttc

SEQ ID NO: 486492 - DNA, 33 bp, Homo sapien
ttaggtcttacataaataaagagcaatcctttc

SEQ ID NO: 486493 - DNA, 33 bp, Homo sapien
aggtaccagaaacagaaggaagtggaagttagg

SEQ ID NO: 486494 - DNA, 33 bp, Homo sapien
aggtaccagaaacagagggaagtggaagttagg

SEQ ID NO: 486495 - DNA, 33 bp, Homo sapien
tgaaagcagtctacacaaagatattttccccat

SEQ ID NO: 486496 - DNA, 33 bp, Homo sapien
tgaaagcagtctacacgaagatattttccccat

SEQ ID NO: 486497 - DNA, 33 bp, Homo sapien
agcagagggtgcctaactgaggtcattctcagc

SEQ ID NO: 486498 - DNA, 33 bp, Homo sapien
agcagagggtgcctaattgaggtcattctcagc

SEQ ID NO: 486499 - DNA, 33 bp, Homo sapien
ttctgaattctttcaccgatgtttatagctgct

SEQ ID NO: 486500 - DNA, 33 bp, Homo sapien
ttctgaattctttcactgatgtttatagctgct

SEQ ID NO: 486501 - DNA, 33 bp, Homo sapien
ggaaagtagggaagggaacttgaactatgagct

SEQ ID NO: 486502 - DNA, 33 bp, Homo sapien
ggaaagtagggaagggtacttgaactatgagct

SEQ ID NO: 486503 - DNA, 33 bp, Homo sapien
aagttggtgactgaccaggaatccgggttggag

SEQ ID NO: 486504 - DNA, 33 bp, Homo sapien
aagttggtgactgaccgggaatccgggttggag

SEQ ID NO: 486505 - DNA, 33 bp, Homo sapien
aggtgtccagaggtaaaggtggactgtgtgttc

SEQ ID NO: 486506 - DNA, 33 bp, Homo sapien
aggtgtccagaggtaacggtggactgtgtgttc

SEQ ID NO: 486507 - DNA, 33 bp, Homo sapien
atttgaaaaacagccaatggaaccgcacagaca

SEQ ID NO: 486508 - DNA, 33 bp, Homo sapien
atttgaaaaacagccagtggaaccgcacagaca

SEQ ID NO: 486509 - DNA, 33 bp, Homo sapien
atgctatggcggctgacatccagtggaaaatgc

SEQ ID NO: 486510 - DNA, 33 bp, Homo sapien
atgctatggcggctgatatccagtggaaaatgc

SEQ ID NO: 486511 - DNA, 33 bp, Homo sapien
ccaaattctgggcaccactctgtcactcactag

SEQ ID NO: 486512 - DNA, 33 bp, Homo sapien
ccaaattctgggcaccgctctgtcactcactag

SEQ ID NO: 486513 - DNA, 33 bp, Homo sapien
gcatgaaagaccatccagattttggctgactcc

SEQ ID NO: 486514 - DNA, 33 bp, Homo sapien
gcatgaaagaccatccggattttggctgactcc

SEQ ID NO: 486515 - DNA, 33 bp, Homo sapien
tggtagaaataggtgcaaaaggaaacaaataaa

SEQ ID NO: 486516 - DNA, 33 bp, Homo sapien
tggtagaaataggtgcgaaaggaaacaaataaa

SEQ ID NO: 486517 - DNA, 33 bp, Homo sapien
attgagagctaaattactaagtgttcccaacat

SEQ ID NO: 486518 - DNA, 33 bp, Homo sapien
attgagagctaaattattaagtgttcccaacat

SEQ ID NO: 486519 - DNA, 33 bp, Homo sapien
aacctaatagtttgtaagatggcttgtttcaat

SEQ ID NO: 486520 - DNA, 33 bp, Homo sapien
aacctaatagtttgtaggatggcttgtttcaat

SEQ ID NO: 486521 - DNA, 33 bp, Homo sapien
agtcccttttgtagaacccagaattgtgaactc

SEQ ID NO: 486522 - DNA, 33 bp, Homo sapien
agtcccttttgtagaatccagaattgtgaactc

SEQ ID NO: 486523 - DNA, 33 bp, Homo sapien
tacactcatacctgacacttcaactagctttca

SEQ ID NO: 486524 - DNA, 33 bp, Homo sapien
tacactcatacctgacccttcaactagctttca

SEQ ID NO: 486525 - DNA, 33 bp, Homo sapien
tactcccacttcctccaagaatgttacatcaca

SEQ ID NO: 486526 - DNA, 33 bp, Homo sapien
tactcccacttcctccgagaatgttacatcaca

SEQ ID NO: 486527 - DNA, 33 bp, Homo sapien
agtcttagctaggtaacgtatgccccaagatgc

SEQ ID NO: 486528 - DNA, 33 bp, Homo sapien
agtcttagctaggtaaggtatgccccaagatgc

SEQ ID NO: 486529 - DNA, 33 bp, Homo sapien
tacagacactccttcaaagaattcacaatcaga

SEQ ID NO: 486530 - DNA, 33 bp, Homo sapien
tacagacactccttcatagaattcacaatcaga

SEQ ID NO: 486531 - DNA, 33 bp, Homo sapien
tttggaagtgagatgaactttaattgctctatt

SEQ ID NO: 486532 - DNA, 33 bp, Homo sapien
tttggaagtgagatgagctttaattgctctatt

SEQ ID NO: 486533 - DNA, 33 bp, Homo sapien
cttctcaccctaagaacattaccctgtctaact

SEQ ID NO: 486534 - DNA, 33 bp, Homo sapien
cttctcaccctaagaagattaccctgtctaact

SEQ ID NO: 486535 - DNA, 33 bp, Homo sapien
ccatgcagctgggttacctagaatggctgactt

SEQ ID NO: 486536 - DNA, 33 bp, Homo sapien
ccatgcagctgggttatctagaatggctgactt

SEQ ID NO: 486537 - DNA, 33 bp, Homo sapien
cacatttccgtgagaccataatattgagcataa

SEQ ID NO: 486538 - DNA, 33 bp, Homo sapien
cacatttccgtgagactataatattgagcataa

SEQ ID NO: 486539 - DNA, 33 bp, Homo sapien
tcttagcatttgattacattccacatattttag

SEQ ID NO: 486540 - DNA, 33 bp, Homo sapien
tcttagcatttgattatattccacatattttag

SEQ ID NO: 486541 - DNA, 33 bp, Homo sapien
aggtaaatcaaatgctaagatatgcagcacaga

SEQ ID NO: 486542 - DNA, 33 bp, Homo sapien
aggtaaatcaaatgctgagatatgcagcacaga

SEQ ID NO: 486543 - DNA, 33 bp, Homo sapien
aaagccctgtaagtcaagagagtttacctgaga

SEQ ID NO: 486544 - DNA, 33 bp, Homo sapien
aaagccctgtaagtcaggagagtttacctgaga

SEQ ID NO: 486545 - DNA, 33 bp, Homo sapien
ttagagtgaatagcatcagttaattgtcgtggg

SEQ ID NO: 486546 - DNA, 33 bp, Homo sapien
ttagagtgaatagcattagttaattgtcgtggg

SEQ ID NO: 486547 - DNA, 33 bp, Homo sapien
tctttggacttctttaacatttgtcctctgcat

SEQ ID NO: 486548 - DNA, 33 bp, Homo sapien
tctttggacttctttagcatttgtcctctgcat

SEQ ID NO: 486549 - DNA, 33 bp, Homo sapien
taatctactatagtcaagactcttcctttatcc

SEQ ID NO: 486550 - DNA, 33 bp, Homo sapien
taatctactatagtcaggactcttcctttatcc

SEQ ID NO: 486551 - DNA, 33 bp, Homo sapien
ggtgggcatttagtccaaagataaatcaccagg

SEQ ID NO: 486552 - DNA, 33 bp, Homo sapien
ggtgggcatttagtccgaagataaatcaccagg

SEQ ID NO: 486553 - DNA, 33 bp, Homo sapien
ttgcaaaagagttacacagaaggttgctgatag

SEQ ID NO: 486554 - DNA, 33 bp, Homo sapien
ttgcaaaagagttacatagaaggttgctgatag

SEQ ID NO: 486555 - DNA, 33 bp, Homo sapien
gtatcatgctgttgacacattattacaaggttt

SEQ ID NO: 486556 - DNA, 33 bp, Homo sapien
gtatcatgctgttgacgcattattacaaggttt

SEQ ID NO: 486557 - DNA, 33 bp, Homo sapien
atttcaagcgtgggaacatgattctcttaccac

SEQ ID NO: 486558 - DNA, 33 bp, Homo sapien
atttcaagcgtgggaatatgattctcttaccac

SEQ ID NO: 486559 - DNA, 33 bp, Homo sapien
gtgaaatgctctgtcacgaaatttgaacaatta

SEQ ID NO: 486560 - DNA, 33 bp, Homo sapien
gtgaaatgctctgtcatgaaatttgaacaatta

SEQ ID NO: 486561 - DNA, 33 bp, Homo sapien
agagagtcctctgagacgatctcttcttttgct

SEQ ID NO: 486562 - DNA, 33 bp, Homo sapien
agagagtcctctgagatgatctcttcttttgct

SEQ ID NO: 486563 - DNA, 33 bp, Homo sapien
gaaaaaagagaaaacacggattggaatgactct

SEQ ID NO: 486564 - DNA, 33 bp, Homo sapien
gaaaaaagagaaaacatggattggaatgactct

SEQ ID NO: 486565 - DNA, 33 bp, Homo sapien
agactatgtcttttgcacttactcattattttg

SEQ ID NO: 486566 - DNA, 33 bp, Homo sapien
agactatgtcttttgcgcttactcattattttg

SEQ ID NO: 486567 - DNA, 33 bp, Homo sapien
tgtccaccatgagatgacagtgtagccagggaa

SEQ ID NO: 486568 - DNA, 33 bp, Homo sapien
tgtccaccatgagatggcagtgtagccagggaa

SEQ ID NO: 486569 - DNA, 33 bp, Homo sapien
gtgtgatgtcaggcaaataggttaacctcttca

SEQ ID NO: 486570 - DNA, 33 bp, Homo sapien
gtgtgatgtcaggcaagtaggttaacctcttca

SEQ ID NO: 486571 - DNA, 33 bp, Homo sapien
gtgtgtataactcacacagtagcttacaactgt

SEQ ID NO: 486572 - DNA, 33 bp, Homo sapien
gtgtgtataactcacatagtagcttacaactgt

SEQ ID NO: 486573 - DNA, 33 bp, Homo sapien
acccatctgaggtgcacagttgtggtgtatcac

SEQ ID NO: 486574 - DNA, 33 bp, Homo sapien
acccatctgaggtgcatagttgtggtgtatcac

SEQ ID NO: 486575 - DNA, 33 bp, Homo sapien
gagtagatggaagttcaaagctgatgaagctaa

SEQ ID NO: 486576 - DNA, 33 bp, Homo sapien
gagtagatggaagttccaagctgatgaagctaa

SEQ ID NO: 486577 - DNA, 33 bp, Homo sapien
actcacactttcctgacgtcattcatggttcct

SEQ ID NO: 486578 - DNA, 33 bp, Homo sapien
actcacactttcctgatgtcattcatggttcct

SEQ ID NO: 486579 - DNA, 33 bp, Homo sapien
aaagtatggtcttagcccagcagtatgaacatc

SEQ ID NO: 486580 - DNA, 33 bp, Homo sapien
aaagtatggtcttagctcagcagtatgaacatc

SEQ ID NO: 486581 - DNA, 33 bp, Homo sapien
cttaaactttgacaaccacaaatgtaggattcc

SEQ ID NO: 486582 - DNA, 33 bp, Homo sapien
cttaaactttgacaacgacaaatgtaggattcc

SEQ ID NO: 486583 - DNA, 33 bp, Homo sapien
aaaacgggctaaggacagcaccatgggaatgcc

SEQ ID NO: 486584 - DNA, 33 bp, Homo sapien
aaaacgggctaaggacggcaccatgggaatgcc

SEQ ID NO: 486585 - DNA, 33 bp, Homo sapien
ggaggtaggcagtctaacattgatataatggca

SEQ ID NO: 486586 - DNA, 33 bp, Homo sapien
ggaggtaggcagtctagcattgatataatggca

SEQ ID NO: 486587 - DNA, 33 bp, Homo sapien
aagaattcttaatctcggacggcaatccaacaa

SEQ ID NO: 486588 - DNA, 33 bp, Homo sapien
aagaattcttaatctctgacggcaatccaacaa

SEQ ID NO: 486589 - DNA, 33 bp, Homo sapien
catatttcaatttcccaccctcgtcagactctc

SEQ ID NO: 486590 - DNA, 33 bp, Homo sapien
catatttcaatttcccgccctcgtcagactctc

SEQ ID NO: 486591 - DNA, 33 bp, Homo sapien
atatttaaaaggtgtaaatcactcatagtggat

SEQ ID NO: 486592 - DNA, 33 bp, Homo sapien
atatttaaaaggtgtagatcactcatagtggat

SEQ ID NO: 486593 - DNA, 33 bp, Homo sapien
ggggctgtgaaaagacggtaggtaagtgagaag

SEQ ID NO: 486594 - DNA, 33 bp, Homo sapien
ggggctgtgaaaagactgtaggtaagtgagaag

SEQ ID NO: 486595 - DNA, 33 bp, Homo sapien
taagtcagtttccaaagacatcattcttcctct

SEQ ID NO: 486596 - DNA, 33 bp, Homo sapien
taagtcagtttccaaatacatcattcttcctct

SEQ ID NO: 486597 - DNA, 33 bp, Homo sapien
gcaacacaggatgggaaaaaaacaatgcaagga

SEQ ID NO: 486598 - DNA, 33 bp, Homo sapien
gcaacacaggatgggagaaaaacaatgcaagga

SEQ ID NO: 486599 - DNA, 33 bp, Homo sapien
gtaatgttctacctcaatgaatatttccttttc

SEQ ID NO: 486600 - DNA, 33 bp, Homo sapien
gtaatgttctacctcattgaatatttccttttc

SEQ ID NO: 486601 - DNA, 33 bp, Homo sapien
tttccaagtataaatacgtccaagatgcctcat

SEQ ID NO: 486602 - DNA, 33 bp, Homo sapien
tttccaagtataaataggtccaagatgcctcat

SEQ ID NO: 486603 - DNA, 33 bp, Homo sapien
cagttttggaaagaaaactctggagcctctcag

SEQ ID NO: 486604 - DNA, 33 bp, Homo sapien
cagttttggaaagaaagctctggagcctctcag

SEQ ID NO: 486605 - DNA, 33 bp, Homo sapien
attactgtacagctgcaatttctcatttggcag

SEQ ID NO: 486606 - DNA, 33 bp, Homo sapien
attactgtacagctgcgatttctcatttggcag

SEQ ID NO: 486607 - DNA, 33 bp, Homo sapien
ttcttattcctcacataacttaagattgggata

SEQ ID NO: 486608 - DNA, 33 bp, Homo sapien
ttcttattcctcacatcacttaagattgggata

SEQ ID NO: 486609 - DNA, 33 bp, Homo sapien
gaactctctaggtctcaaacttctcatgattat

SEQ ID NO: 486610 - DNA, 33 bp, Homo sapien
gaactctctaggtctcgaacttctcatgattat

SEQ ID NO: 486611 - DNA, 33 bp, Homo sapien
gagcttgaagctcctcaatgaattaaaactcac

SEQ ID NO: 486612 - DNA, 33 bp, Homo sapien
gagcttgaagctcctcgatgaattaaaactcac

SEQ ID NO: 486613 - DNA, 33 bp, Homo sapien
cctacaggctaaatcactcttggctttaactag

SEQ ID NO: 486614 - DNA, 33 bp, Homo sapien
cctacaggctaaatcattcttggctttaactag

SEQ ID NO: 486615 - DNA, 33 bp, Homo sapien
ctttgactgcactccaaagttggactcctctat

SEQ ID NO: 486616 - DNA, 33 bp, Homo sapien
ctttgactgcactccacagttggactcctctat

SEQ ID NO: 486617 - DNA, 33 bp, Homo sapien
gtctggtgtgtgacttaaaacaaatccctgcgt

SEQ ID NO: 486618 - DNA, 33 bp, Homo sapien
gtctggtgtgtgacttgaaacaaatccctgcgt

SEQ ID NO: 486619 - DNA, 33 bp, Homo sapien
taacaccttcttggtcaagcacataaggcacag

SEQ ID NO: 486620 - DNA, 33 bp, Homo sapien
taacaccttcttggtcgagcacataaggcacag

SEQ ID NO: 486621 - DNA, 33 bp, Homo sapien
agtcatatcacgtcttaaaaagtcttaaaaaga

SEQ ID NO: 486622 - DNA, 33 bp, Homo sapien
agtcatatcacgtcttgaaaagtcttaaaaaga

SEQ ID NO: 486623 - DNA, 33 bp, Homo sapien
aacccaaagacaaacactaggctggttagcagc

SEQ ID NO: 486624 - DNA, 33 bp, Homo sapien
aacccaaagacaaacagtaggctggttagcagc

SEQ ID NO: 486625 - DNA, 33 bp, Homo sapien
gccaaggtagacagacaacttgagcccagaagt

SEQ ID NO: 486626 - DNA, 33 bp, Homo sapien
gccaaggtagacagaccacttgagcccagaagt

SEQ ID NO: 486627 - DNA, 33 bp, Homo sapien
cttctccagtattttaaatgtacccaggagaaa

SEQ ID NO: 486628 - DNA, 33 bp, Homo sapien
cttctccagtattttagatgtacccaggagaaa

SEQ ID NO: 486629 - DNA, 33 bp, Homo sapien
ttatgcatatactcaaagtcaaatctagattac

SEQ ID NO: 486630 - DNA, 33 bp, Homo sapien
ttatgcatatactcaatgtcaaatctagattac

SEQ ID NO: 486631 - DNA, 33 bp, Homo sapien
aaggatataccacttgcagatgtgagtgatttt

SEQ ID NO: 486632 - DNA, 33 bp, Homo sapien
aaggatataccacttgtagatgtgagtgatttt

SEQ ID NO: 486633 - DNA, 33 bp, Homo sapien
tccttcatagcactcaccataattaatagctga

SEQ ID NO: 486634 - DNA, 33 bp, Homo sapien
tccttcatagcactcatcataattaatagctga

SEQ ID NO: 486635 - DNA, 33 bp, Homo sapien
cttttttggttccttccccctgagcatcctttc

SEQ ID NO: 486636 - DNA, 33 bp, Homo sapien
cttttttggttccttcgccctgagcatcctttc

SEQ ID NO: 486637 - DNA, 33 bp, Homo sapien
tgatattaaatcctgagaaacacaaaacacctc

SEQ ID NO: 486638 - DNA, 33 bp, Homo sapien
tgatattaaatcctgataaacacaaaacacctc

SEQ ID NO: 486639 - DNA, 33 bp, Homo sapien
ttctgggcttcagggacgctagtctctttgcac

SEQ ID NO: 486640 - DNA, 33 bp, Homo sapien
ttctgggcttcagggatgctagtctctttgcac

SEQ ID NO: 486641 - DNA, 33 bp, Homo sapien
gtagtaatgttttaaccggcttaattcaatttg

SEQ ID NO: 486642 - DNA, 33 bp, Homo sapien
gtagtaatgttttaactggcttaattcaatttg

SEQ ID NO: 486643 - DNA, 33 bp, Homo sapien
actgtgctgctctggccacatcctatcaccttg

SEQ ID NO: 486644 - DNA, 33 bp, Homo sapien
actgtgctgctctggctacatcctatcaccttg

SEQ ID NO: 486645 - DNA, 33 bp, Homo sapien
acttcaactcccctcacgtctgttggcttctcc

SEQ ID NO: 486646 - DNA, 33 bp, Homo sapien
acttcaactcccctcatgtctgttggcttctcc

SEQ ID NO: 486647 - DNA, 33 bp, Homo sapien
atgagtgctgtaaggacaaagggagaagccaac

SEQ ID NO: 486648 - DNA, 33 bp, Homo sapien
atgagtgctgtaaggagaaagggagaagccaac

SEQ ID NO: 486649 - DNA, 33 bp, Homo sapien
tttgaaggtacttaccaatgcactttctggatc

SEQ ID NO: 486650 - DNA, 33 bp, Homo sapien
tttgaaggtacttaccgatgcactttctggatc

SEQ ID NO: 486651 - DNA, 33 bp, Homo sapien
gccacatatctcagcactatattggagtctggc

SEQ ID NO: 486652 - DNA, 33 bp, Homo sapien
gccacatatctcagcattatattggagtctggc

SEQ ID NO: 486653 - DNA, 33 bp, Homo sapien
atgaatacatgaaataccagtttatcaaaaagc

SEQ ID NO: 486654 - DNA, 33 bp, Homo sapien
atgaatacatgaaatatcagtttatcaaaaagc

SEQ ID NO: 486655 - DNA, 33 bp, Homo sapien
ctccaggggcacagaaagaacctccgcaatgag

SEQ ID NO: 486656 - DNA, 33 bp, Homo sapien
ctccaggggcacagaacgaacctccgcaatgag

SEQ ID NO: 486657 - DNA, 33 bp, Homo sapien
tctgactgtggcacagaaaatgtagaatttgag

SEQ ID NO: 486658 - DNA, 33 bp, Homo sapien
tctgactgtggcacaggaaatgtagaatttgag

SEQ ID NO: 486659 - DNA, 33 bp, Homo sapien
aaagtaattgctagaaaccttcagagtggggac

SEQ ID NO: 486660 - DNA, 33 bp, Homo sapien
aaagtaattgctagaagccttcagagtggggac

SEQ ID NO: 486661 - DNA, 33 bp, Homo sapien
tggaatatgggagtcacgttcagagtccttcaa

SEQ ID NO: 486662 - DNA, 33 bp, Homo sapien
tggaatatgggagtcaggttcagagtccttcaa

SEQ ID NO: 486663 - DNA, 33 bp, Homo sapien
aaattacacacaaaaccctggatcatagaaaaa

SEQ ID NO: 486664 - DNA, 33 bp, Homo sapien
aaattacacacaaaactctggatcatagaaaaa

SEQ ID NO: 486665 - DNA, 33 bp, Homo sapien
aatactatctcaaacactgatttgcagtctgct

SEQ ID NO: 486666 - DNA, 33 bp, Homo sapien
aatactatctcaaacagtgatttgcagtctgct

SEQ ID NO: 486667 - DNA, 33 bp, Homo sapien
cagccatatgttttcaaaagatgattcactgat

SEQ ID NO: 486668 - DNA, 33 bp, Homo sapien
cagccatatgttttcacaagatgattcactgat

SEQ ID NO: 486669 - DNA, 33 bp, Homo sapien
ccccaccattagacaaaacaaggcttaaaagta

SEQ ID NO: 486670 - DNA, 33 bp, Homo sapien
ccccaccattagacaacacaaggcttaaaagta

SEQ ID NO: 486671 - DNA, 33 bp, Homo sapien
agacaccatgactagacataaacctaaaagcag

SEQ ID NO: 486672 - DNA, 33 bp, Homo sapien
agacaccatgactagagataaacctaaaagcag

SEQ ID NO: 486673 - DNA, 33 bp, Homo sapien
tttattttagcattcccgattgtctatatgttc

SEQ ID NO: 486674 - DNA, 33 bp, Homo sapien
tttattttagcattcctgattgtctatatgttc

SEQ ID NO: 486675 - DNA, 33 bp, Homo sapien
gacggcaatcataaaaattcttggaatgagcat

SEQ ID NO: 486676 - DNA, 33 bp, Homo sapien
gacggcaatcataaaagttcttggaatgagcat

SEQ ID NO: 486677 - DNA, 33 bp, Homo sapien
tcaagatgttaggactaaaaaatagagactggg

SEQ ID NO: 486678 - DNA, 33 bp, Homo sapien
tcaagatgttaggactgaaaaatagagactggg

SEQ ID NO: 486679 - DNA, 33 bp, Homo sapien
gttacacagatgtaaacaattatcaaaccgatc

SEQ ID NO: 486680 - DNA, 33 bp, Homo sapien
gttacacagatgtaaagaattatcaaaccgatc

SEQ ID NO: 486681 - DNA, 33 bp, Homo sapien
ggtcatagaaaccagaactcttccctaaagaca

SEQ ID NO: 486682 - DNA, 33 bp, Homo sapien
ggtcatagaaaccagagctcttccctaaagaca

SEQ ID NO: 486683 - DNA, 33 bp, Homo sapien
ctttgttcatccctaaaagagaccatttgctgg

SEQ ID NO: 486684 - DNA, 33 bp, Homo sapien
ctttgttcatccctaagagagaccatttgctgg

SEQ ID NO: 486685 - DNA, 33 bp, Homo sapien
aggtgcacaacctagagaggtcacttaaccttt

SEQ ID NO: 486686 - DNA, 33 bp, Homo sapien
aggtgcacaacctagataggtcacttaaccttt

SEQ ID NO: 486687 - DNA, 33 bp, Homo sapien
tcaatttctctatttccaaaagggtggaagcag

SEQ ID NO: 486688 - DNA, 33 bp, Homo sapien
tcaatttctctatttctaaaagggtggaagcag

SEQ ID NO: 486689 - DNA, 33 bp, Homo sapien
ctgcgtcttctctttcaatgtcagaagccagcc

SEQ ID NO: 486690 - DNA, 33 bp, Homo sapien
ctgcgtcttctctttctatgtcagaagccagcc

SEQ ID NO: 486691 - DNA, 33 bp, Homo sapien
tatgtaagtggaaccactggtgactctgggagc

SEQ ID NO: 486692 - DNA, 33 bp, Homo sapien
tatgtaagtggaaccattggtgactctgggagc

SEQ ID NO: 486693 - DNA, 33 bp, Homo sapien
atgtgcggcagatatgaacatcagtctctggca

SEQ ID NO: 486694 - DNA, 33 bp, Homo sapien
atgtgcggcagatatgtacatcagtctctggca

SEQ ID NO: 486695 - DNA, 33 bp, Homo sapien
tctctccttgaaggtagaaggctctcgcattct

SEQ ID NO: 486696 - DNA, 33 bp, Homo sapien
tctctccttgaaggtataaggctctcgcattct

SEQ ID NO: 486697 - DNA, 33 bp, Homo sapien
cagacaactacttactcaatagatttcatgagc

SEQ ID NO: 486698 - DNA, 33 bp, Homo sapien
cagacaactacttactgaatagatttcatgagc

SEQ ID NO: 486699 - DNA, 33 bp, Homo sapien
ttctacttactccccaatgcatgtctgtctcct

SEQ ID NO: 486700 - DNA, 33 bp, Homo sapien
ttctacttactccccagtgcatgtctgtctcct

SEQ ID NO: 486701 - DNA, 33 bp, Homo sapien
atagcatgtgttgcaacgttaaaagtgatattt

SEQ ID NO: 486702 - DNA, 33 bp, Homo sapien
atagcatgtgttgcaatgttaaaagtgatattt

SEQ ID NO: 486703 - DNA, 33 bp, Homo sapien
aggtgatgagttaagaagtaagagtaggagtat

SEQ ID NO: 486704 - DNA, 33 bp, Homo sapien
aggtgatgagttaagaggtaagagtaggagtat

SEQ ID NO: 486705 - DNA, 33 bp, Homo sapien
atttgcctattgactacataattaatatttctt

SEQ ID NO: 486706 - DNA, 33 bp, Homo sapien
atttgcctattgactagataattaatatttctt

SEQ ID NO: 486707 - DNA, 33 bp, Homo sapien
catatggtccttcacaatgattaatatatatca

SEQ ID NO: 486708 - DNA, 33 bp, Homo sapien
catatggtccttcacagtgattaatatatatca

SEQ ID NO: 486709 - DNA, 33 bp, Homo sapien
tgttgttaatgcgctaaaaaattatatacagaa

SEQ ID NO: 486710 - DNA, 33 bp, Homo sapien
tgttgttaatgcgctagaaaattatatacagaa

SEQ ID NO: 486711 - DNA, 33 bp, Homo sapien
aactaccaaatgtaagaaacactttaaacagtc

SEQ ID NO: 486712 - DNA, 33 bp, Homo sapien
aactaccaaatgtaaggaacactttaaacagtc

SEQ ID NO: 486713 - DNA, 33 bp, Homo sapien
taaatgatccagagagacctaataaagtgactg

SEQ ID NO: 486714 - DNA, 33 bp, Homo sapien
taaatgatccagagaggcctaataaagtgactg

SEQ ID NO: 486715 - DNA, 33 bp, Homo sapien
acagagccttctggccgaaactaagagtagcaa

SEQ ID NO: 486716 - DNA, 33 bp, Homo sapien
acagagccttctggcctaaactaagagtagcaa

SEQ ID NO: 486717 - DNA, 33 bp, Homo sapien
aagtaatcagaccaaactgatggtggttgagaa

SEQ ID NO: 486718 - DNA, 33 bp, Homo sapien
aagtaatcagaccaaagtgatggtggttgagaa

SEQ ID NO: 486719 - DNA, 33 bp, Homo sapien
ctgcagattctgttcggacctagcatcctagat

SEQ ID NO: 486720 - DNA, 33 bp, Homo sapien
ctgcagattctgttcgtacctagcatcctagat

SEQ ID NO: 486721 - DNA, 33 bp, Homo sapien
ccagactgttgatcaaaacacagcacaagccaa

SEQ ID NO: 486722 - DNA, 33 bp, Homo sapien
ccagactgttgatcaagacacagcacaagccaa

SEQ ID NO: 486723 - DNA, 33 bp, Homo sapien
ttttatgttgctgtaaactgtagctacccagat

SEQ ID NO: 486724 - DNA, 33 bp, Homo sapien
ttttatgttgctgtaacctgtagctacccagat

SEQ ID NO: 486725 - DNA, 33 bp, Homo sapien
cctctgcactctgcaactgatgttcaccctccc

SEQ ID NO: 486726 - DNA, 33 bp, Homo sapien
cctctgcactctgcaagtgatgttcaccctccc

SEQ ID NO: 486727 - DNA, 33 bp, Homo sapien
tcaagtcttttccagaacagtgcaaggtgcctt

SEQ ID NO: 486728 - DNA, 33 bp, Homo sapien
tcaagtcttttccagagcagtgcaaggtgcctt

SEQ ID NO: 486729 - DNA, 33 bp, Homo sapien
gtgttttgtcaattcaaggacctcaactgatag

SEQ ID NO: 486730 - DNA, 33 bp, Homo sapien
gtgttttgtcaattcagggacctcaactgatag

SEQ ID NO: 486731 - DNA, 33 bp, Homo sapien
tctttgtatccaataaatcagtaacaactctac

SEQ ID NO: 486732 - DNA, 33 bp, Homo sapien
tctttgtatccaataagtcagtaacaactctac

SEQ ID NO: 486733 - DNA, 33 bp, Homo sapien
agtgctaaatgctctgcatgggtaatctcacta

SEQ ID NO: 486734 - DNA, 33 bp, Homo sapien
agtgctaaatgctctgtatgggtaatctcacta

SEQ ID NO: 486735 - DNA, 33 bp, Homo sapien
tgggtaatctcactaacggctttgtctcatcag

SEQ ID NO: 486736 - DNA, 33 bp, Homo sapien
tgggtaatctcactaatggctttgtctcatcag

SEQ ID NO: 486737 - DNA, 33 bp, Homo sapien
ttgtatttgagtcacactgatggtcttatttta

SEQ ID NO: 486738 - DNA, 33 bp, Homo sapien
ttgtatttgagtcacattgatggtcttatttta

SEQ ID NO: 486739 - DNA, 33 bp, Homo sapien
tctaggttatcagccaagcagcagaggtagcat

SEQ ID NO: 486740 - DNA, 33 bp, Homo sapien
tctaggttatcagccaggcagcagaggtagcat

SEQ ID NO: 486741 - DNA, 33 bp, Homo sapien
tgactatgataaaataccctgataaaggcaaaa

SEQ ID NO: 486742 - DNA, 33 bp, Homo sapien
tgactatgataaaatatcctgataaaggcaaaa

SEQ ID NO: 486743 - DNA, 33 bp, Homo sapien
tatgttgctgcactcaatagattctttttctct

SEQ ID NO: 486744 - DNA, 33 bp, Homo sapien
tatgttgctgcactcagtagattctttttctct

SEQ ID NO: 486745 - DNA, 33 bp, Homo sapien
cattcctggatccacaacttggagagtctatag

SEQ ID NO: 486746 - DNA, 33 bp, Homo sapien
cattcctggatccacagcttggagagtctatag

SEQ ID NO: 486747 - DNA, 33 bp, Homo sapien
aattggaagggaatccaaggagatctataccag

SEQ ID NO: 486748 - DNA, 33 bp, Homo sapien
aattggaagggaatccgaggagatctataccag

SEQ ID NO: 486749 - DNA, 33 bp, Homo sapien
tccaatttttttccccagagtgacttagttctg

SEQ ID NO: 486750 - DNA, 33 bp, Homo sapien
tccaatttttttcccccgagtgacttagttctg

SEQ ID NO: 486751 - DNA, 33 bp, Homo sapien
atgagaaccaaaccagactagataacaatgggg

SEQ ID NO: 486752 - DNA, 33 bp, Homo sapien
atgagaaccaaaccaggctagataacaatgggg

SEQ ID NO: 486753 - DNA, 33 bp, Homo sapien
ggtgctcctcaccaaccgaaaatgtgagtttcc

SEQ ID NO: 486754 - DNA, 33 bp, Homo sapien
ggtgctcctcaccaactgaaaatgtgagtttcc

SEQ ID NO: 486755 - DNA, 33 bp, Homo sapien
caaagagaaaatgctcaaataaggtgtatccat

SEQ ID NO: 486756 - DNA, 33 bp, Homo sapien
caaagagaaaatgctccaataaggtgtatccat

SEQ ID NO: 486757 - DNA, 33 bp, Homo sapien
actacatctcagttaactcacactgtatagaca

SEQ ID NO: 486758 - DNA, 33 bp, Homo sapien
actacatctcagttaattcacactgtatagaca

SEQ ID NO: 486759 - DNA, 33 bp, Homo sapien
cattttaactcttccacctgttactactaccac

SEQ ID NO: 486760 - DNA, 33 bp, Homo sapien
cattttaactcttccatctgttactactaccac

SEQ ID NO: 486761 - DNA, 33 bp, Homo sapien
atttatatgaacctcaaaaaagaagaaaatcta

SEQ ID NO: 486762 - DNA, 33 bp, Homo sapien
atttatatgaacctcagaaaagaagaaaatcta

SEQ ID NO: 486763 - DNA, 33 bp, Homo sapien
agtatcccagaatggcaaagcacagctctagtt

SEQ ID NO: 486764 - DNA, 33 bp, Homo sapien
agtatcccagaatggcgaagcacagctctagtt

SEQ ID NO: 486765 - DNA, 33 bp, Homo sapien
cagtagtgaccatagaacctggaatggtggggc

SEQ ID NO: 486766 - DNA, 33 bp, Homo sapien
cagtagtgaccatagaccctggaatggtggggc

SEQ ID NO: 486767 - DNA, 33 bp, Homo sapien
ttattaccagacatcacattgcatatttagaat

SEQ ID NO: 486768 - DNA, 33 bp, Homo sapien
ttattaccagacatcatattgcatatttagaat

SEQ ID NO: 486769 - DNA, 33 bp, Homo sapien
gatttctgtgccaggaacttatgacttaagtct

SEQ ID NO: 486770 - DNA, 33 bp, Homo sapien
gatttctgtgccaggagcttatgacttaagtct

SEQ ID NO: 486771 - DNA, 33 bp, Homo sapien
tctagggatcttcctcactgcagacttaagtca

SEQ ID NO: 486772 - DNA, 33 bp, Homo sapien
tctagggatcttcctcgctgcagacttaagtca

SEQ ID NO: 486773 - DNA, 33 bp, Homo sapien
ggaacctggcttgtccaaggaatttttagagga

SEQ ID NO: 486774 - DNA, 33 bp, Homo sapien
ggaacctggcttgtccgaggaatttttagagga

SEQ ID NO: 486775 - DNA, 33 bp, Homo sapien
ggcatgagacaccacacctagactaacagtaga

SEQ ID NO: 486776 - DNA, 33 bp, Homo sapien
ggcatgagacaccacagctagactaacagtaga

SEQ ID NO: 486777 - DNA, 33 bp, Homo sapien
atataatggtgaataaaggtgtcaaagtattgt

SEQ ID NO: 486778 - DNA, 33 bp, Homo sapien
atataatggtgaataatggtgtcaaagtattgt

SEQ ID NO: 486779 - DNA, 33 bp, Homo sapien
ctaacatttattgaagacctatcatgtacaggc

SEQ ID NO: 486780 - DNA, 33 bp, Homo sapien
ctaacatttattgaagccctatcatgtacaggc

SEQ ID NO: 486781 - DNA, 33 bp, Homo sapien
agagagtatttatagtaaaagaagcactgagga

SEQ ID NO: 486782 - DNA, 33 bp, Homo sapien
agagagtatttatagtgaaagaagcactgagga

SEQ ID NO: 486783 - DNA, 33 bp, Homo sapien
aatggcaggaaagagaagggaaaagtctctaaa

SEQ ID NO: 486784 - DNA, 33 bp, Homo sapien
aatggcaggaaagagaggggaaaagtctctaaa

SEQ ID NO: 486785 - DNA, 33 bp, Homo sapien
aagagaatcagatacactctttagagacttttc

SEQ ID NO: 486786 - DNA, 33 bp, Homo sapien
aagagaatcagatacattctttagagacttttc

SEQ ID NO: 486787 - DNA, 33 bp, Homo sapien
ccagcatcaccacatcgccagtacaatcacctg

SEQ ID NO: 486788 - DNA, 33 bp, Homo sapien
ccagcatcaccacatctccagtacaatcacctg

SEQ ID NO: 486789 - DNA, 33 bp, Homo sapien
acattcattctagaccaaagcaatactctccca

SEQ ID NO: 486790 - DNA, 33 bp, Homo sapien
acattcattctagacccaagcaatactctccca

SEQ ID NO: 486791 - DNA, 33 bp, Homo sapien
ctctattgtatcatgaaaagggtaaagaaatca

SEQ ID NO: 486792 - DNA, 33 bp, Homo sapien
ctctattgtatcatgacaagggtaaagaaatca

SEQ ID NO: 486793 - DNA, 33 bp, Homo sapien
ctccagcactttgcaccataactggaccttcat

SEQ ID NO: 486794 - DNA, 33 bp, Homo sapien
ctccagcactttgcactataactggaccttcat

SEQ ID NO: 486795 - DNA, 33 bp, Homo sapien
taggggcaagagggaaaactgcaatttggtgtg

SEQ ID NO: 486796 - DNA, 33 bp, Homo sapien
taggggcaagagggaatactgcaatttggtgtg

SEQ ID NO: 486797 - DNA, 33 bp, Homo sapien
ccaaaatagtctcctcactctcttctctgccct

SEQ ID NO: 486798 - DNA, 33 bp, Homo sapien
ccaaaatagtctcctcgctctcttctctgccct

SEQ ID NO: 486799 - DNA, 33 bp, Homo sapien
gggagggtggaaaggcaagagagcacatgcgcg

SEQ ID NO: 486800 - DNA, 33 bp, Homo sapien
gggagggtggaaaggcgagagagcacatgcgcg

SEQ ID NO: 486801 - DNA, 33 bp, Homo sapien
gtgaaagttacagagacggtttgcaggcctccc

SEQ ID NO: 486802 - DNA, 33 bp, Homo sapien
gtgaaagttacagagatggtttgcaggcctccc

SEQ ID NO: 486803 - DNA, 33 bp, Homo sapien
caatacaggcaaataactgggctcacccatgtt

SEQ ID NO: 486804 - DNA, 33 bp, Homo sapien
caatacaggcaaataattgggctcacccatgtt

SEQ ID NO: 486805 - DNA, 33 bp, Homo sapien
ttcagttcaactcatcaattgaatttagtgcaa

SEQ ID NO: 486806 - DNA, 33 bp, Homo sapien
ttcagttcaactcatctattgaatttagtgcaa

SEQ ID NO: 486807 - DNA, 33 bp, Homo sapien
accttccagaaattacaagcattagaattccac

SEQ ID NO: 486808 - DNA, 33 bp, Homo sapien
accttccagaaattacgagcattagaattccac

SEQ ID NO: 486809 - DNA, 33 bp, Homo sapien
gagatcaaagttttgcctgagctataggaggaa

SEQ ID NO: 486810 - DNA, 33 bp, Homo sapien
gagatcaaagttttgcttgagctataggaggaa

SEQ ID NO: 486811 - DNA, 33 bp, Homo sapien
tagggatgtaatcctaccttatgaaccaacatt

SEQ ID NO: 486812 - DNA, 33 bp, Homo sapien
tagggatgtaatcctatcttatgaaccaacatt

SEQ ID NO: 486813 - DNA, 33 bp, Homo sapien
atgcaacagaaagatcaacaaattgaggatatt

SEQ ID NO: 486814 - DNA, 33 bp, Homo sapien
atgcaacagaaagatccacaaattgaggatatt

SEQ ID NO: 486815 - DNA, 33 bp, Homo sapien
ctgtgtcagaaaccatcaagaatgcacagctga

SEQ ID NO: 486816 - DNA, 33 bp, Homo sapien
ctgtgtcagaaaccatgaagaatgcacagctga

SEQ ID NO: 486817 - DNA, 33 bp, Homo sapien
atgtcactctgaagaccaaaagtataattgaat

SEQ ID NO: 486818 - DNA, 33 bp, Homo sapien
atgtcactctgaagactaaaagtataattgaat

SEQ ID NO: 486819 - DNA, 33 bp, Homo sapien
ttattttctttctttgccttacattccttattt

SEQ ID NO: 486820 - DNA, 33 bp, Homo sapien
ttattttctttctttggcttacattccttattt

SEQ ID NO: 486821 - DNA, 33 bp, Homo sapien
ggtgaatggaatgatacgataaaaatgtacata

SEQ ID NO: 486822 - DNA, 33 bp, Homo sapien
ggtgaatggaatgataggataaaaatgtacata

SEQ ID NO: 486823 - DNA, 33 bp, Homo sapien
atatacacacaaatataaaccgaggctcaaatg

SEQ ID NO: 486824 - DNA, 33 bp, Homo sapien
atatacacacaaatatgaaccgaggctcaaatg

SEQ ID NO: 486825 - DNA, 33 bp, Homo sapien
ccttcaccatgtaagcaaactgaaaaattgcca

SEQ ID NO: 486826 - DNA, 33 bp, Homo sapien
ccttcaccatgtaagcgaactgaaaaattgcca

SEQ ID NO: 486827 - DNA, 33 bp, Homo sapien
gtgcctgcaacccttcaatacatttctgatcaa

SEQ ID NO: 486828 - DNA, 33 bp, Homo sapien
gtgcctgcaacccttcgatacatttctgatcaa

SEQ ID NO: 486829 - DNA, 33 bp, Homo sapien
catggaaatgagacccacattattcagacaaga

SEQ ID NO: 486830 - DNA, 33 bp, Homo sapien
catggaaatgagacccgcattattcagacaaga

SEQ ID NO: 486831 - DNA, 33 bp, Homo sapien
ctttaagcagaaaagacgtaaaaggccttcaag

SEQ ID NO: 486832 - DNA, 33 bp, Homo sapien
ctttaagcagaaaagaggtaaaaggccttcaag

SEQ ID NO: 486833 - DNA, 33 bp, Homo sapien
atgaattataagataacgtgataatgtggcatt

SEQ ID NO: 486834 - DNA, 33 bp, Homo sapien
atgaattataagataatgtgataatgtggcatt

SEQ ID NO: 486835 - DNA, 33 bp, Homo sapien
agggtacacaagaacaaggaagaatcaagagcc

SEQ ID NO: 486836 - DNA, 33 bp, Homo sapien
agggtacacaagaacagggaagaatcaagagcc

SEQ ID NO: 486837 - DNA, 33 bp, Homo sapien
cattacagagttatcaaatgacacttaattaaa

SEQ ID NO: 486838 - DNA, 33 bp, Homo sapien
cattacagagttatcacatgacacttaattaaa

SEQ ID NO: 486839 - DNA, 33 bp, Homo sapien
tgaagttctctgattaacatttcaggtaaattt

SEQ ID NO: 486840 - DNA, 33 bp, Homo sapien
tgaagttctctgattaccatttcaggtaaattt

SEQ ID NO: 486841 - DNA, 33 bp, Homo sapien
tgtaggcagtccgataaacaaatctggagttca

SEQ ID NO: 486842 - DNA, 33 bp, Homo sapien
tgtaggcagtccgatatacaaatctggagttca

SEQ ID NO: 486843 - DNA, 33 bp, Homo sapien
ggaactatttgatgcactgagtaaacaagagta

SEQ ID NO: 486844 - DNA, 33 bp, Homo sapien
ggaactatttgatgcattgagtaaacaagagta

SEQ ID NO: 486845 - DNA, 33 bp, Homo sapien
ttacttgtttctcaaacgtagggagagggatag

SEQ ID NO: 486846 - DNA, 33 bp, Homo sapien
ttacttgtttctcaaaggtagggagagggatag

SEQ ID NO: 486847 - DNA, 33 bp, Homo sapien
ggtgtttagtatagcaaaacaaagtgcaggcag

SEQ ID NO: 486848 - DNA, 33 bp, Homo sapien
ggtgtttagtatagcacaacaaagtgcaggcag

SEQ ID NO: 486849 - DNA, 33 bp, Homo sapien
atatattccaagcatacgatctaacgtgagtaa

SEQ ID NO: 486850 - DNA, 33 bp, Homo sapien
atatattccaagcatatgatctaacgtgagtaa

SEQ ID NO: 486851 - DNA, 33 bp, Homo sapien
gtaaaacattcaaagcactgaatattgtctggt

SEQ ID NO: 486852 - DNA, 33 bp, Homo sapien
gtaaaacattcaaagcgctgaatattgtctggt

SEQ ID NO: 486853 - DNA, 33 bp, Homo sapien
ttctcttctctcataggccctgtaattggtcca

SEQ ID NO: 486854 - DNA, 33 bp, Homo sapien
ttctcttctctcatagtccctgtaattggtcca

SEQ ID NO: 486855 - DNA, 33 bp, Homo sapien
taatagctatcttcaaagtcagcagtgtattat

SEQ ID NO: 486856 - DNA, 33 bp, Homo sapien
taatagctatcttcaaggtcagcagtgtattat

SEQ ID NO: 486857 - DNA, 33 bp, Homo sapien
gctggagaggtgctaaacagacccagcccggct

SEQ ID NO: 486858 - DNA, 33 bp, Homo sapien
gctggagaggtgctaagcagacccagcccggct

SEQ ID NO: 486859 - DNA, 33 bp, Homo sapien
acctttaatgtcgtgaactgacaacctagttaa

SEQ ID NO: 486860 - DNA, 33 bp, Homo sapien
acctttaatgtcgtgagctgacaacctagttaa

SEQ ID NO: 486861 - DNA, 33 bp, Homo sapien
atgaatgaaactgaaaggtgtttagtcacttgc

SEQ ID NO: 486862 - DNA, 33 bp, Homo sapien
atgaatgaaactgaaatgtgtttagtcacttgc

SEQ ID NO: 486863 - DNA, 33 bp, Homo sapien
ttcattttcagacacaatgccagcaagagacag

SEQ ID NO: 486864 - DNA, 33 bp, Homo sapien
ttcattttcagacacagtgccagcaagagacag

SEQ ID NO: 486865 - DNA, 33 bp, Homo sapien
gagtggcatcttatgaaccctggaatagtggca

SEQ ID NO: 486866 - DNA, 33 bp, Homo sapien
gagtggcatcttatgacccctggaatagtggca

SEQ ID NO: 486867 - DNA, 33 bp, Homo sapien
aaatgaccgtgggtaaccactgctgcctttaca

SEQ ID NO: 486868 - DNA, 33 bp, Homo sapien
aaatgaccgtgggtaatcactgctgcctttaca

SEQ ID NO: 486869 - DNA, 33 bp, Homo sapien
catgcatttcagaaggacagaaccaagactcat

SEQ ID NO: 486870 - DNA, 33 bp, Homo sapien
catgcatttcagaagggcagaaccaagactcat

SEQ ID NO: 486871 - DNA, 33 bp, Homo sapien
aagactatctgatacaatggctgtagggatgtg

SEQ ID NO: 486872 - DNA, 33 bp, Homo sapien
aagactatctgatacagtggctgtagggatgtg

SEQ ID NO: 486873 - DNA, 33 bp, Homo sapien
cctgtggatatacttcagaaatccataaataaa

SEQ ID NO: 486874 - DNA, 33 bp, Homo sapien
cctgtggatatacttcggaaatccataaataaa

SEQ ID NO: 486875 - DNA, 33 bp, Homo sapien
caaagctatcttcttacaccagtcaagtaagaa

SEQ ID NO: 486876 - DNA, 33 bp, Homo sapien
caaagctatcttcttataccagtcaagtaagaa

SEQ ID NO: 486877 - DNA, 33 bp, Homo sapien
atgtattagaccctaccgcatcatctttctctt

SEQ ID NO: 486878 - DNA, 33 bp, Homo sapien
atgtattagaccctactgcatcatctttctctt

SEQ ID NO: 486879 - DNA, 33 bp, Homo sapien
aggaaatccagactcaaaccggcaagtgacaag

SEQ ID NO: 486880 - DNA, 33 bp, Homo sapien
aggaaatccagactcagaccggcaagtgacaag

SEQ ID NO: 486881 - DNA, 33 bp, Homo sapien
aaggacacagtgttcaccccctttcgcccttcc

SEQ ID NO: 486882 - DNA, 33 bp, Homo sapien
aaggacacagtgttcatcccctttcgcccttcc

SEQ ID NO: 486883 - DNA, 33 bp, Homo sapien
agtctgcaacaattatcacatgagcttgatgtt

SEQ ID NO: 486884 - DNA, 33 bp, Homo sapien
agtctgcaacaattattacatgagcttgatgtt

SEQ ID NO: 486885 - DNA, 33 bp, Homo sapien
aatgaatgtaggtcagcattcaccaaagtattg

SEQ ID NO: 486886 - DNA, 33 bp, Homo sapien
aatgaatgtaggtcagtattcaccaaagtattg

SEQ ID NO: 486887 - DNA, 33 bp, Homo sapien
ccttgctgtttactgacaggtggagacaaaggg

SEQ ID NO: 486888 - DNA, 33 bp, Homo sapien
ccttgctgtttactgataggtggagacaaaggg

SEQ ID NO: 486889 - DNA, 33 bp, Homo sapien
ttccttctgctatataacttgatctctttactt

SEQ ID NO: 486890 - DNA, 33 bp, Homo sapien
ttccttctgctatataccttgatctctttactt

SEQ ID NO: 486891 - DNA, 33 bp, Homo sapien
ccttcatccaccaccactgacttttccacaagc

SEQ ID NO: 486892 - DNA, 33 bp, Homo sapien
ccttcatccaccaccattgacttttccacaagc

SEQ ID NO: 486893 - DNA, 33 bp, Homo sapien
ggaggactttttagaccagaaaggaagtgctta

SEQ ID NO: 486894 - DNA, 33 bp, Homo sapien
ggaggactttttagactagaaaggaagtgctta

SEQ ID NO: 486895 - DNA, 33 bp, Homo sapien
ttaaaagcgtaggcaggaagaagagacttagta

SEQ ID NO: 486896 - DNA, 33 bp, Homo sapien
ttaaaagcgtaggcagtaagaagagacttagta

SEQ ID NO: 486897 - DNA, 33 bp, Homo sapien
taaatatggaaatctgaactcatcatgtctaat

SEQ ID NO: 486898 - DNA, 33 bp, Homo sapien
taaatatggaaatctggactcatcatgtctaat

SEQ ID NO: 486899 - DNA, 33 bp, Homo sapien
gaggggtgttgcagaaccaaattaaaatagcac

SEQ ID NO: 486900 - DNA, 33 bp, Homo sapien
gaggggtgttgcagaatcaaattaaaatagcac

SEQ ID NO: 486901 - DNA, 33 bp, Homo sapien
ttaacctttaagatgaaggataacatttgtctt

SEQ ID NO: 486902 - DNA, 33 bp, Homo sapien
ttaacctttaagatgagggataacatttgtctt

SEQ ID NO: 486903 - DNA, 33 bp, Homo sapien
ttctccaaccgatcaactgtgactctttgcagg

SEQ ID NO: 486904 - DNA, 33 bp, Homo sapien
ttctccaaccgatcaattgtgactctttgcagg

SEQ ID NO: 486905 - DNA, 33 bp, Homo sapien
agttaccccctggtcacagagaaacaaatcttt

SEQ ID NO: 486906 - DNA, 33 bp, Homo sapien
agttaccccctggtcagagagaaacaaatcttt

SEQ ID NO: 486907 - DNA, 33 bp, Homo sapien
aggtggttacagataacgaccagttaagcaaac

SEQ ID NO: 486908 - DNA, 33 bp, Homo sapien
aggtggttacagataaggaccagttaagcaaac

SEQ ID NO: 486909 - DNA, 33 bp, Homo sapien
agtcagagaatctcaacaaaaattttagcagtc

SEQ ID NO: 486910 - DNA, 33 bp, Homo sapien
agtcagagaatctcaagaaaaattttagcagtc

SEQ ID NO: 486911 - DNA, 33 bp, Homo sapien
agatgtatcagaagcccaaatgtataactccaa

SEQ ID NO: 486912 - DNA, 33 bp, Homo sapien
agatgtatcagaagcctaaatgtataactccaa

SEQ ID NO: 486913 - DNA, 33 bp, Homo sapien
ttgtttttctataacacacatgtgcgcgtgcac

SEQ ID NO: 486914 - DNA, 33 bp, Homo sapien
ttgtttttctataacatacatgtgcgcgtgcac

SEQ ID NO: 486915 - DNA, 33 bp, Homo sapien
ataatatcatctcagaaagaaataagttagttg

SEQ ID NO: 486916 - DNA, 33 bp, Homo sapien
ataatatcatctcagagagaaataagttagttg

SEQ ID NO: 486917 - DNA, 33 bp, Homo sapien
tattgacttcttaaaccgagaaatttatattgc

SEQ ID NO: 486918 - DNA, 33 bp, Homo sapien
tattgacttcttaaactgagaaatttatattgc

SEQ ID NO: 486919 - DNA, 33 bp, Homo sapien
gaaattgctaagggagcccctaccacatagtaa

SEQ ID NO: 486920 - DNA, 33 bp, Homo sapien
gaaattgctaagggagtccctaccacatagtaa

SEQ ID NO: 486921 - DNA, 33 bp, Homo sapien
gttagggagagcatgaagtatatcttggggagg

SEQ ID NO: 486922 - DNA, 33 bp, Homo sapien
gttagggagagcatgacgtatatcttggggagg

SEQ ID NO: 486923 - DNA, 33 bp, Homo sapien
aacactgggtctctaacacatcactagtgggaa

SEQ ID NO: 486924 - DNA, 33 bp, Homo sapien
aacactgggtctctaatacatcactagtgggaa

SEQ ID NO: 486925 - DNA, 33 bp, Homo sapien
aaaaagcagtaaaaagcaacatgctactgatac

SEQ ID NO: 486926 - DNA, 33 bp, Homo sapien
aaaaagcagtaaaaaggaacatgctactgatac

SEQ ID NO: 486927 - DNA, 33 bp, Homo sapien
caggaagaggacaataagaaaagaggaaacata

SEQ ID NO: 486928 - DNA, 33 bp, Homo sapien
caggaagaggacaataggaaaagaggaaacata

SEQ ID NO: 486929 - DNA, 33 bp, Homo sapien
atagaaacatttaccaaaagtgctaagccattt

SEQ ID NO: 486930 - DNA, 33 bp, Homo sapien
atagaaacatttaccagaagtgctaagccattt

SEQ ID NO: 486931 - DNA, 33 bp, Homo sapien
ccagtgtccctaattaaagccatctgtgtttcc

SEQ ID NO: 486932 - DNA, 33 bp, Homo sapien
ccagtgtccctaattagagccatctgtgtttcc

SEQ ID NO: 486933 - DNA, 33 bp, Homo sapien
acataagagatgttcaataaacactgtgcaaaa

SEQ ID NO: 486934 - DNA, 33 bp, Homo sapien
acataagagatgttcagtaaacactgtgcaaaa

SEQ ID NO: 486935 - DNA, 33 bp, Homo sapien
gcaacatggatgcaaccgaagaccattatccca

SEQ ID NO: 486936 - DNA, 33 bp, Homo sapien
gcaacatggatgcaactgaagaccattatccca

SEQ ID NO: 486937 - DNA, 33 bp, Homo sapien
cccaaggcagcccatacgcaatgaatgatggaa

SEQ ID NO: 486938 - DNA, 33 bp, Homo sapien
cccaaggcagcccatatgcaatgaatgatggaa

SEQ ID NO: 486939 - DNA, 33 bp, Homo sapien
ctgtataagatcaaaacgcttggaaaattgttg

SEQ ID NO: 486940 - DNA, 33 bp, Homo sapien
ctgtataagatcaaaatgcttggaaaattgttg

SEQ ID NO: 486941 - DNA, 33 bp, Homo sapien
tttcctcaggtttagacctacctattgccaaag

SEQ ID NO: 486942 - DNA, 33 bp, Homo sapien
tttcctcaggtttagatctacctattgccaaag

SEQ ID NO: 486943 - DNA, 33 bp, Homo sapien
tacttgccaggttcagcagtaaaatggacaaga

SEQ ID NO: 486944 - DNA, 33 bp, Homo sapien
tacttgccaggttcaggagtaaaatggacaaga

SEQ ID NO: 486945 - DNA, 33 bp, Homo sapien
cttgatgaacatgaacacaaagatactcaacaa

SEQ ID NO: 486946 - DNA, 33 bp, Homo sapien
cttgatgaacatgaacgcaaagatactcaacaa

SEQ ID NO: 486947 - DNA, 33 bp, Homo sapien
ttaaaatggccatatcactccaagcaatttaca

SEQ ID NO: 486948 - DNA, 33 bp, Homo sapien
ttaaaatggccatatccctccaagcaatttaca

SEQ ID NO: 486949 - DNA, 33 bp, Homo sapien
catttggctgtaggtacgttaatttatttctgg

SEQ ID NO: 486950 - DNA, 33 bp, Homo sapien
catttggctgtaggtatgttaatttatttctgg

SEQ ID NO: 486951 - DNA, 33 bp, Homo sapien
atttaggattcacttaggtcaaatatgaagtgt

SEQ ID NO: 486952 - DNA, 33 bp, Homo sapien
atttaggattcacttatgtcaaatatgaagtgt

SEQ ID NO: 486953 - DNA, 33 bp, Homo sapien
ctcagagctttgaccacctgtgtaagtaaccaa

SEQ ID NO: 486954 - DNA, 33 bp, Homo sapien
ctcagagctttgaccatctgtgtaagtaaccaa

SEQ ID NO: 486955 - DNA, 33 bp, Homo sapien
caaaaaatatatgccaactcttaggctaacacc

SEQ ID NO: 486956 - DNA, 33 bp, Homo sapien
caaaaaatatatgccagctcttaggctaacacc

SEQ ID NO: 486957 - DNA, 33 bp, Homo sapien
aagaagggaatgagaaagttgcacacaggtaat

SEQ ID NO: 486958 - DNA, 33 bp, Homo sapien
aagaagggaatgagaaggttgcacacaggtaat

SEQ ID NO: 486959 - DNA, 33 bp, Homo sapien
gaacctgactaataaaccttctaaaccaattat

SEQ ID NO: 486960 - DNA, 33 bp, Homo sapien
gaacctgactaataaagcttctaaaccaattat

SEQ ID NO: 486961 - DNA, 33 bp, Homo sapien
tttgtaaagcttaaaactgcaaataaaccaaat

SEQ ID NO: 486962 - DNA, 33 bp, Homo sapien
tttgtaaagcttaaaattgcaaataaaccaaat

SEQ ID NO: 486963 - DNA, 33 bp, Homo sapien
ctgttgcctggataaactggtctgcaataattt

SEQ ID NO: 486964 - DNA, 33 bp, Homo sapien
ctgttgcctggataaattggtctgcaataattt

SEQ ID NO: 486965 - DNA, 33 bp, Homo sapien
aggcaactgttttctcacaaagagccttatgtc

SEQ ID NO: 486966 - DNA, 33 bp, Homo sapien
aggcaactgttttctcgcaaagagccttatgtc

SEQ ID NO: 486967 - DNA, 33 bp, Homo sapien
ttatggccttcaccaaaaactttatctgtcaag

SEQ ID NO: 486968 - DNA, 33 bp, Homo sapien
ttatggccttcaccaataactttatctgtcaag

SEQ ID NO: 486969 - DNA, 33 bp, Homo sapien
tttcttgttcttgattcaataaagatgaagaca

SEQ ID NO: 486970 - DNA, 33 bp, Homo sapien
tttcttgttcttgattgaataaagatgaagaca

SEQ ID NO: 486971 - DNA, 33 bp, Homo sapien
tcttcaagaaagaaaaatgttagaggcttacat

SEQ ID NO: 486972 - DNA, 33 bp, Homo sapien
tcttcaagaaagaaaagtgttagaggcttacat

SEQ ID NO: 486973 - DNA, 33 bp, Homo sapien
tatttgttgaagttcacgagacgctgaattata

SEQ ID NO: 486974 - DNA, 33 bp, Homo sapien
tatttgttgaagttcatgagacgctgaattata

SEQ ID NO: 486975 - DNA, 33 bp, Homo sapien
ggtccatcatcagtcaatcgggagcttagaatt

SEQ ID NO: 486976 - DNA, 33 bp, Homo sapien
ggtccatcatcagtcagtcgggagcttagaatt

SEQ ID NO: 486977 - DNA, 33 bp, Homo sapien
agttaccactaaaaggaaatgattgtgatataa

SEQ ID NO: 486978 - DNA, 33 bp, Homo sapien
agttaccactaaaagggaatgattgtgatataa

SEQ ID NO: 486979 - DNA, 33 bp, Homo sapien
gaatctgtgacccatccaataccctttcaaaca

SEQ ID NO: 486980 - DNA, 33 bp, Homo sapien
gaatctgtgacccatcgaataccctttcaaaca

SEQ ID NO: 486981 - DNA, 33 bp, Homo sapien
tgtagtgtcagtatcaagttacacagagcaaaa

SEQ ID NO: 486982 - DNA, 33 bp, Homo sapien
tgtagtgtcagtatcatgttacacagagcaaaa

SEQ ID NO: 486983 - DNA, 33 bp, Homo sapien
gctgctttggactacaatctgggcatttcccca

SEQ ID NO: 486984 - DNA, 33 bp, Homo sapien
gctgctttggactacagtctgggcatttcccca

SEQ ID NO: 486985 - DNA, 33 bp, Homo sapien
tctgctctgacactataaatctactcttaatag

SEQ ID NO: 486986 - DNA, 33 bp, Homo sapien
tctgctctgacactatgaatctactcttaatag

SEQ ID NO: 486987 - DNA, 33 bp, Homo sapien
atgtgggcaagtcagcagagtgaaggttaaaaa

SEQ ID NO: 486988 - DNA, 33 bp, Homo sapien
atgtgggcaagtcagcggagtgaaggttaaaaa

SEQ ID NO: 486989 - DNA, 33 bp, Homo sapien
ttccacttaagggatcaaagtagttacattaac

SEQ ID NO: 486990 - DNA, 33 bp, Homo sapien
ttccacttaagggatcgaagtagttacattaac

SEQ ID NO: 486991 - DNA, 33 bp, Homo sapien
agtaaagactgaaatcgaagacctaaaatcata

SEQ ID NO: 486992 - DNA, 33 bp, Homo sapien
agtaaagactgaaatctaagacctaaaatcata

SEQ ID NO: 486993 - DNA, 33 bp, Homo sapien
gttataagtaccacacacattattaaaaccatt

SEQ ID NO: 486994 - DNA, 33 bp, Homo sapien
gttataagtaccacacgcattattaaaaccatt

SEQ ID NO: 486995 - DNA, 33 bp, Homo sapien
agtaataagtgtgcaacaaactaagcaatggtt

SEQ ID NO: 486996 - DNA, 33 bp, Homo sapien
agtaataagtgtgcaataaactaagcaatggtt

SEQ ID NO: 486997 - DNA, 33 bp, Homo sapien
ccaggccccaaaagacaacatcctgctatgaga

SEQ ID NO: 486998 - DNA, 33 bp, Homo sapien
ccaggccccaaaagacgacatcctgctatgaga

SEQ ID NO: 486999 - DNA, 33 bp, Homo sapien
gccactgagggtctcacggacaccattgattct

SEQ ID NO: 487000 - DNA, 33 bp, Homo sapien
gccactgagggtctcagggacaccattgattct

SEQ ID NO: 487001 - DNA, 33 bp, Homo sapien
aggatttcaagcacataaaaatcaacaatataa

SEQ ID NO: 487002 - DNA, 33 bp, Homo sapien
aggatttcaagcacatgaaaatcaacaatataa

SEQ ID NO: 487003 - DNA, 33 bp, Homo sapien
aattttgattttgcataaagttagcctaggcca

SEQ ID NO: 487004 - DNA, 33 bp, Homo sapien
aattttgattttgcatcaagttagcctaggcca

SEQ ID NO: 487005 - DNA, 33 bp, Homo sapien
cagctatgaagtgggacggaaacctgaacaaat

SEQ ID NO: 487006 - DNA, 33 bp, Homo sapien
cagctatgaagtgggatggaaacctgaacaaat

SEQ ID NO: 487007 - DNA, 33 bp, Homo sapien
agatgaatatttcaaactggctttaaattgatc

SEQ ID NO: 487008 - DNA, 33 bp, Homo sapien
agatgaatatttcaaattggctttaaattgatc

SEQ ID NO: 487009 - DNA, 33 bp, Homo sapien
aacatcagttttcttacagctggattcattgtt

SEQ ID NO: 487010 - DNA, 33 bp, Homo sapien
aacatcagttttcttatagctggattcattgtt

SEQ ID NO: 487011 - DNA, 33 bp, Homo sapien
caagatttttctttgacgaaccaagactctctg

SEQ ID NO: 487012 - DNA, 33 bp, Homo sapien
caagatttttctttgaggaaccaagactctctg

SEQ ID NO: 487013 - DNA, 33 bp, Homo sapien
gtgaaagggatcagcgaaagggcccatttccat

SEQ ID NO: 487014 - DNA, 33 bp, Homo sapien
gtgaaagggatcagcggaagggcccatttccat

SEQ ID NO: 487015 - DNA, 33 bp, Homo sapien
tgccccaaacactgaaagaaactgaaagtctat

SEQ ID NO: 487016 - DNA, 33 bp, Homo sapien
tgccccaaacactgaatgaaactgaaagtctat

SEQ ID NO: 487017 - DNA, 33 bp, Homo sapien
tcctatgaactactcgcatatgggacaaggttc

SEQ ID NO: 487018 - DNA, 33 bp, Homo sapien
tcctatgaactactcgtatatgggacaaggttc

SEQ ID NO: 487019 - DNA, 33 bp, Homo sapien
agagaacattactccactcacataataaagcta

SEQ ID NO: 487020 - DNA, 33 bp, Homo sapien
agagaacattactccattcacataataaagcta

SEQ ID NO: 487021 - DNA, 33 bp, Homo sapien
gccaattatctgactacaggttggatgatatta

SEQ ID NO: 487022 - DNA, 33 bp, Homo sapien
gccaattatctgactataggttggatgatatta

SEQ ID NO: 487023 - DNA, 33 bp, Homo sapien
agtactatagtgtggacaaaaaggttgtgaaag

SEQ ID NO: 487024 - DNA, 33 bp, Homo sapien
agtactatagtgtggataaaaaggttgtgaaag

SEQ ID NO: 487025 - DNA, 33 bp, Homo sapien
gaatagcaagtttagcacagagataatgtacaa

SEQ ID NO: 487026 - DNA, 33 bp, Homo sapien
gaatagcaagtttagcgcagagataatgtacaa

SEQ ID NO: 487027 - DNA, 33 bp, Homo sapien
ttcctggataaaagcacgctaattctagggtcc

SEQ ID NO: 487028 - DNA, 33 bp, Homo sapien
ttcctggataaaagcaggctaattctagggtcc

SEQ ID NO: 487029 - DNA, 33 bp, Homo sapien
tagcatacaatctagacaacacagttcttgggt

SEQ ID NO: 487030 - DNA, 33 bp, Homo sapien
tagcatacaatctagataacacagttcttgggt

SEQ ID NO: 487031 - DNA, 33 bp, Homo sapien
tctcctaacaggcaagaaaaataaaagcagaat

SEQ ID NO: 487032 - DNA, 33 bp, Homo sapien
tctcctaacaggcaagcaaaataaaagcagaat

SEQ ID NO: 487033 - DNA, 33 bp, Homo sapien
ctctattcctgtattacctgagggaaagccatg

SEQ ID NO: 487034 - DNA, 33 bp, Homo sapien
ctctattcctgtattagctgagggaaagccatg

SEQ ID NO: 487035 - DNA, 33 bp, Homo sapien
ggaattcacagctttcaaagattcatttagttt

SEQ ID NO: 487036 - DNA, 33 bp, Homo sapien
ggaattcacagctttcgaagattcatttagttt

SEQ ID NO: 487037 - DNA, 33 bp, Homo sapien
ttcatgctctgagaaaaagaaagttttggggtt

SEQ ID NO: 487038 - DNA, 33 bp, Homo sapien
ttcatgctctgagaaacagaaagttttggggtt

SEQ ID NO: 487039 - DNA, 33 bp, Homo sapien
actttctgaagcctcactccctctcagaatccc

SEQ ID NO: 487040 - DNA, 33 bp, Homo sapien
actttctgaagcctcagtccctctcagaatccc

SEQ ID NO: 487041 - DNA, 33 bp, Homo sapien
acaacctgagagctcgacaatggggaaagcaga

SEQ ID NO: 487042 - DNA, 33 bp, Homo sapien
acaacctgagagctcggcaatggggaaagcaga

SEQ ID NO: 487043 - DNA, 33 bp, Homo sapien
tcaaatgagatttttgcaaatgatttttctgca

SEQ ID NO: 487044 - DNA, 33 bp, Homo sapien
tcaaatgagatttttggaaatgatttttctgca

SEQ ID NO: 487045 - DNA, 33 bp, Homo sapien
gatggcaagaagtgaacgtaaagttggaaaaat

SEQ ID NO: 487046 - DNA, 33 bp, Homo sapien
gatggcaagaagtgaatgtaaagttggaaaaat

SEQ ID NO: 487047 - DNA, 33 bp, Homo sapien
ctgtgatttgttagtccatttctctcagactgc

SEQ ID NO: 487048 - DNA, 33 bp, Homo sapien
ctgtgatttgttagtctatttctctcagactgc

SEQ ID NO: 487049 - DNA, 33 bp, Homo sapien
tctcatctcatcctcacaaagattctccaagat

SEQ ID NO: 487050 - DNA, 33 bp, Homo sapien
tctcatctcatcctcagaaagattctccaagat

SEQ ID NO: 487051 - DNA, 33 bp, Homo sapien
ccagtagcagcattacactcatctgatttggag

SEQ ID NO: 487052 - DNA, 33 bp, Homo sapien
ccagtagcagcattacgctcatctgatttggag

SEQ ID NO: 487053 - DNA, 33 bp, Homo sapien
tatgctccctggaagactcaattcaatttcaca

SEQ ID NO: 487054 - DNA, 33 bp, Homo sapien
tatgctccctggaagagtcaattcaatttcaca

SEQ ID NO: 487055 - DNA, 33 bp, Homo sapien
agtactgagtcaagagaagttgaatataataaa

SEQ ID NO: 487056 - DNA, 33 bp, Homo sapien
agtactgagtcaagaggagttgaatataataaa

SEQ ID NO: 487057 - DNA, 33 bp, Homo sapien
aaggaaagaaatgctgaatctactgtaccaggg

SEQ ID NO: 487058 - DNA, 33 bp, Homo sapien
aaggaaagaaatgctggatctactgtaccaggg

SEQ ID NO: 487059 - DNA, 33 bp, Homo sapien
ttattagaattctcatgaaaactggatataaaa

SEQ ID NO: 487060 - DNA, 33 bp, Homo sapien
ttattagaattctcattaaaactggatataaaa

SEQ ID NO: 487061 - DNA, 33 bp, Homo sapien
ccatatttcttgacaagttcacaaggacaatta

SEQ ID NO: 487062 - DNA, 33 bp, Homo sapien
ccatatttcttgacaatttcacaaggacaatta

SEQ ID NO: 487063 - DNA, 33 bp, Homo sapien
ttatgtaaggtaatttaaaaggttcctggaata

SEQ ID NO: 487064 - DNA, 33 bp, Homo sapien
ttatgtaaggtaatttgaaaggttcctggaata

SEQ ID NO: 487065 - DNA, 33 bp, Homo sapien
attttggaatagggtagagccggagagtaattt

SEQ ID NO: 487066 - DNA, 33 bp, Homo sapien
attttggaatagggtatagccggagagtaattt

SEQ ID NO: 487067 - DNA, 33 bp, Homo sapien
ctaggtagaaacagcaatgaagtttgaatctgt

SEQ ID NO: 487068 - DNA, 33 bp, Homo sapien
ctaggtagaaacagcagtgaagtttgaatctgt

SEQ ID NO: 487069 - DNA, 33 bp, Homo sapien
ctaataacatgaaatcagatctttgaagtatca

SEQ ID NO: 487070 - DNA, 33 bp, Homo sapien
ctaataacatgaaatctgatctttgaagtatca

SEQ ID NO: 487071 - DNA, 33 bp, Homo sapien
gcaataatgcaatgcaataaaacactggacatg

SEQ ID NO: 487072 - DNA, 33 bp, Homo sapien
gcaataatgcaatgcagtaaaacactggacatg

SEQ ID NO: 487073 - DNA, 33 bp, Homo sapien
ttggagagatttactagattcactaggtttact

SEQ ID NO: 487074 - DNA, 33 bp, Homo sapien
ttggagagatttactatattcactaggtttact

SEQ ID NO: 487075 - DNA, 33 bp, Homo sapien
ttaaagtagttgttaccggtcagctaattcttt

SEQ ID NO: 487076 - DNA, 33 bp, Homo sapien
ttaaagtagttgttactggtcagctaattcttt

SEQ ID NO: 487077 - DNA, 33 bp, Homo sapien
ttagctcatatacaaactgtgtcacgtatgtgt

SEQ ID NO: 487078 - DNA, 33 bp, Homo sapien
ttagctcatatacaaagtgtgtcacgtatgtgt

SEQ ID NO: 487079 - DNA, 33 bp, Homo sapien
aattctatcctttctccaattggtgtgtgctga

SEQ ID NO: 487080 - DNA, 33 bp, Homo sapien
aattctatcctttctctaattggtgtgtgctga

SEQ ID NO: 487081 - DNA, 33 bp, Homo sapien
atcccacagccattcaatcaaaatcctcagcaa

SEQ ID NO: 487082 - DNA, 33 bp, Homo sapien
atcccacagccattcagtcaaaatcctcagcaa

SEQ ID NO: 487083 - DNA, 33 bp, Homo sapien
ggttgattagctttaccctggtacataaattct

SEQ ID NO: 487084 - DNA, 33 bp, Homo sapien
ggttgattagctttactctggtacataaattct

SEQ ID NO: 487085 - DNA, 33 bp, Homo sapien
ctcacccagaaataaaataccatgtgaaacact

SEQ ID NO: 487086 - DNA, 33 bp, Homo sapien
ctcacccagaaataaactaccatgtgaaacact

SEQ ID NO: 487087 - DNA, 33 bp, Homo sapien
aagagacaggatagaacgggcttactctttctc

SEQ ID NO: 487088 - DNA, 33 bp, Homo sapien
aagagacaggatagaatgggcttactctttctc

SEQ ID NO: 487089 - DNA, 33 bp, Homo sapien
actgggataattgtcacgcataaatgaaaatga

SEQ ID NO: 487090 - DNA, 33 bp, Homo sapien
actgggataattgtcaggcataaatgaaaatga

SEQ ID NO: 487091 - DNA, 33 bp, Homo sapien
atgtcactttccataaaaattgaacaaactata

SEQ ID NO: 487092 - DNA, 33 bp, Homo sapien
atgtcactttccataagaattgaacaaactata

SEQ ID NO: 487093 - DNA, 33 bp, Homo sapien
tcattttctatgcttacaggtccaagactatgg

SEQ ID NO: 487094 - DNA, 33 bp, Homo sapien
tcattttctatgcttagaggtccaagactatgg

SEQ ID NO: 487095 - DNA, 33 bp, Homo sapien
atatttcccaagtcaaatcactctctcattttc

SEQ ID NO: 487096 - DNA, 33 bp, Homo sapien
atatttcccaagtcaattcactctctcattttc

SEQ ID NO: 487097 - DNA, 33 bp, Homo sapien
ggcataggtaaaatatcaatgaaaagcttctag

SEQ ID NO: 487098 - DNA, 33 bp, Homo sapien
ggcataggtaaaatatgaatgaaaagcttctag

SEQ ID NO: 487099 - DNA, 33 bp, Homo sapien
aaacgacagtaaagaaagaaggcataggtaaaa

SEQ ID NO: 487100 - DNA, 33 bp, Homo sapien
aaacgacagtaaagaaggaaggcataggtaaaa

SEQ ID NO: 487101 - DNA, 33 bp, Homo sapien
aactgtttggcagagaataggatctgcagtctt

SEQ ID NO: 487102 - DNA, 33 bp, Homo sapien
aactgtttggcagagagtaggatctgcagtctt

SEQ ID NO: 487103 - DNA, 33 bp, Homo sapien
aatgacctactgtgacaatatatttaacttttc

SEQ ID NO: 487104 - DNA, 33 bp, Homo sapien
aatgacctactgtgactatatatttaacttttc

SEQ ID NO: 487105 - DNA, 33 bp, Homo sapien
aacatgtaagatgaagccatgataggctattca

SEQ ID NO: 487106 - DNA, 33 bp, Homo sapien
aacatgtaagatgaagtcatgataggctattca

SEQ ID NO: 487107 - DNA, 33 bp, Homo sapien
tattgccgtagtctcccagtctctcattcctga

SEQ ID NO: 487108 - DNA, 33 bp, Homo sapien
tattgccgtagtctcctagtctctcattcctga

SEQ ID NO: 487109 - DNA, 33 bp, Homo sapien
aagtctaccttgtctcccaccttccaattttgt

SEQ ID NO: 487110 - DNA, 33 bp, Homo sapien
aagtctaccttgtctctcaccttccaattttgt

SEQ ID NO: 487111 - DNA, 33 bp, Homo sapien
atactcatgaaatgtaccaggcaatgttataac

SEQ ID NO: 487112 - DNA, 33 bp, Homo sapien
atactcatgaaatgtagcaggcaatgttataac

SEQ ID NO: 487113 - DNA, 33 bp, Homo sapien
acctgagattttcaaaagatggatagaaattca

SEQ ID NO: 487114 - DNA, 33 bp, Homo sapien
acctgagattttcaaaggatggatagaaattca

SEQ ID NO: 487115 - DNA, 33 bp, Homo sapien
tggacatagacggacagtgacatagagatacaa

SEQ ID NO: 487116 - DNA, 33 bp, Homo sapien
tggacatagacggacattgacatagagatacaa

SEQ ID NO: 487117 - DNA, 33 bp, Homo sapien
ctaaagtgctactcaaaatgcattctttattac

SEQ ID NO: 487118 - DNA, 33 bp, Homo sapien
ctaaagtgctactcaagatgcattctttattac

SEQ ID NO: 487119 - DNA, 33 bp, Homo sapien
tagttgtttttacaagcaggtttgcagatggga

SEQ ID NO: 487120 - DNA, 33 bp, Homo sapien
tagttgtttttacaagtaggtttgcagatggga

SEQ ID NO: 487121 - DNA, 33 bp, Homo sapien
acctctgtgggcctcaatattggactctatact

SEQ ID NO: 487122 - DNA, 33 bp, Homo sapien
acctctgtgggcctcactattggactctatact

SEQ ID NO: 487123 - DNA, 33 bp, Homo sapien
tatcatctcaatgttgcaataggccacagttgc

SEQ ID NO: 487124 - DNA, 33 bp, Homo sapien
tatcatctcaatgttgtaataggccacagttgc

SEQ ID NO: 487125 - DNA, 33 bp, Homo sapien
gtaatggtcagataaccagtctttttcaaaatc

SEQ ID NO: 487126 - DNA, 33 bp, Homo sapien
gtaatggtcagataactagtctttttcaaaatc

SEQ ID NO: 487127 - DNA, 33 bp, Homo sapien
tgatgtctcagataccagggtctgaatgagttc

SEQ ID NO: 487128 - DNA, 33 bp, Homo sapien
tgatgtctcagatacctgggtctgaatgagttc

SEQ ID NO: 487129 - DNA, 33 bp, Homo sapien
ccaagtaaaaccatttcaaaggtagcttgcctt

SEQ ID NO: 487130 - DNA, 33 bp, Homo sapien
ccaagtaaaaccatttgaaaggtagcttgcctt

SEQ ID NO: 487131 - DNA, 33 bp, Homo sapien
ttatgtgattgtgacactctactagtcgtgttg

SEQ ID NO: 487132 - DNA, 33 bp, Homo sapien
ttatgtgattgtgacattctactagtcgtgttg

SEQ ID NO: 487133 - DNA, 33 bp, Homo sapien
caaattccttggatgcccaacttactgttataa

SEQ ID NO: 487134 - DNA, 33 bp, Homo sapien
caaattccttggatgctcaacttactgttataa

SEQ ID NO: 487135 - DNA, 33 bp, Homo sapien
cattctacagtgcataaatatgtcaaaatattg

SEQ ID NO: 487136 - DNA, 33 bp, Homo sapien
cattctacagtgcatacatatgtcaaaatattg

SEQ ID NO: 487137 - DNA, 33 bp, Homo sapien
accaaatagattcaggcattcaaagtcctgatg

SEQ ID NO: 487138 - DNA, 33 bp, Homo sapien
accaaatagattcaggtattcaaagtcctgatg

SEQ ID NO: 487139 - DNA, 33 bp, Homo sapien
cttgctagaataatcagtagcttccaaatcatt

SEQ ID NO: 487140 - DNA, 33 bp, Homo sapien
cttgctagaataatcattagcttccaaatcatt

SEQ ID NO: 487141 - DNA, 33 bp, Homo sapien
taaacaccatttatcacgcagagttgcaaaaac

SEQ ID NO: 487142 - DNA, 33 bp, Homo sapien
taaacaccatttatcatgcagagttgcaaaaac

SEQ ID NO: 487143 - DNA, 33 bp, Homo sapien
cttcttacaaaaccaccgcatgagtcgaaatta

SEQ ID NO: 487144 - DNA, 33 bp, Homo sapien
cttcttacaaaaccactgcatgagtcgaaatta

SEQ ID NO: 487145 - DNA, 33 bp, Homo sapien
acaggctgctacctcaaatggtaccacatcgaa

SEQ ID NO: 487146 - DNA, 33 bp, Homo sapien
acaggctgctacctcatatggtaccacatcgaa

SEQ ID NO: 487147 - DNA, 33 bp, Homo sapien
tagcatcttccaataaaaaattgtgatgtgaaa

SEQ ID NO: 487148 - DNA, 33 bp, Homo sapien
tagcatcttccaataagaaattgtgatgtgaaa

SEQ ID NO: 487149 - DNA, 33 bp, Homo sapien
tttgcattaacaaaatcagtgaggtggatatgg

SEQ ID NO: 487150 - DNA, 33 bp, Homo sapien
tttgcattaacaaaatgagtgaggtggatatgg

SEQ ID NO: 487151 - DNA, 33 bp, Homo sapien
atggtaacagtatttacgttagtcacatcagaa

SEQ ID NO: 487152 - DNA, 33 bp, Homo sapien
atggtaacagtatttatgttagtcacatcagaa

SEQ ID NO: 487153 - DNA, 33 bp, Homo sapien
tcagtttcccaatatgaaaaatgaagagcttag

SEQ ID NO: 487154 - DNA, 33 bp, Homo sapien
tcagtttcccaatatgtaaaatgaagagcttag

SEQ ID NO: 487155 - DNA, 33 bp, Homo sapien
caatttgaaaagcaacaagaagcattgtcatgt

SEQ ID NO: 487156 - DNA, 33 bp, Homo sapien
caatttgaaaagcaacgagaagcattgtcatgt

SEQ ID NO: 487157 - DNA, 33 bp, Homo sapien
agaagaagctacctgcaagttttcacagtgcca

SEQ ID NO: 487158 - DNA, 33 bp, Homo sapien
agaagaagctacctgcgagttttcacagtgcca

SEQ ID NO: 487159 - DNA, 33 bp, Homo sapien
ctgtgctagaagctgacgttccaaagatgaagt

SEQ ID NO: 487160 - DNA, 33 bp, Homo sapien
ctgtgctagaagctgatgttccaaagatgaagt

SEQ ID NO: 487161 - DNA, 33 bp, Homo sapien
caaagaactcgtaaaactcaacaatgataaaac

SEQ ID NO: 487162 - DNA, 33 bp, Homo sapien
caaagaactcgtaaaattcaacaatgataaaac

SEQ ID NO: 487163 - DNA, 33 bp, Homo sapien
gtattttttgaaactacaccttgctcaaaaatg

SEQ ID NO: 487164 - DNA, 33 bp, Homo sapien
gtattttttgaaactataccttgctcaaaaatg

SEQ ID NO: 487165 - DNA, 33 bp, Homo sapien
aataagtaatcaggaaatgagacaatagtataa

SEQ ID NO: 487166 - DNA, 33 bp, Homo sapien
aataagtaatcaggaagtgagacaatagtataa

SEQ ID NO: 487167 - DNA, 33 bp, Homo sapien
ttcctcttgcctacacaatattcccacttccat

SEQ ID NO: 487168 - DNA, 33 bp, Homo sapien
ttcctcttgcctacaccatattcccacttccat

SEQ ID NO: 487169 - DNA, 33 bp, Homo sapien
ttcccacttccattaccctagttctaattttca

SEQ ID NO: 487170 - DNA, 33 bp, Homo sapien
ttcccacttccattacgctagttctaattttca

SEQ ID NO: 487171 - DNA, 33 bp, Homo sapien
gcaggcattagagagcaattgatgttttttaag

SEQ ID NO: 487172 - DNA, 33 bp, Homo sapien
gcaggcattagagagcgattgatgttttttaag

SEQ ID NO: 487173 - DNA, 33 bp, Homo sapien
agcacaacttctggatcatcagaacgatttagc

SEQ ID NO: 487174 - DNA, 33 bp, Homo sapien
agcacaacttctggattatcagaacgatttagc

SEQ ID NO: 487175 - DNA, 33 bp, Homo sapien
cagcttgtatttgctcagaaattcattaaaatc

SEQ ID NO: 487176 - DNA, 33 bp, Homo sapien
cagcttgtatttgctctgaaattcattaaaatc

SEQ ID NO: 487177 - DNA, 33 bp, Homo sapien
tagagacatagcagacaatacaactacatcaca

SEQ ID NO: 487178 - DNA, 33 bp, Homo sapien
tagagacatagcagacgatacaactacatcaca

SEQ ID NO: 487179 - DNA, 33 bp, Homo sapien
aggagaacaccaaatagtatttcatgaaacaga

SEQ ID NO: 487180 - DNA, 33 bp, Homo sapien
aggagaacaccaaatattatttcatgaaacaga

SEQ ID NO: 487181 - DNA, 33 bp, Homo sapien
gccttttgcaacgataactctaagaaaatgccc

SEQ ID NO: 487182 - DNA, 33 bp, Homo sapien
gccttttgcaacgatatctctaagaaaatgccc

SEQ ID NO: 487183 - DNA, 33 bp, Homo sapien
ctcaatagcacaaacaatatatatttcctgaga

SEQ ID NO: 487184 - DNA, 33 bp, Homo sapien
ctcaatagcacaaacagtatatatttcctgaga

SEQ ID NO: 487185 - DNA, 33 bp, Homo sapien
gctcaagatggtctcaatcaataactttgcaac

SEQ ID NO: 487186 - DNA, 33 bp, Homo sapien
gctcaagatggtctcagtcaataactttgcaac

SEQ ID NO: 487187 - DNA, 33 bp, Homo sapien
attctttccactagcaaagcatgtgccacagca

SEQ ID NO: 487188 - DNA, 33 bp, Homo sapien
attctttccactagcagagcatgtgccacagca

SEQ ID NO: 487189 - DNA, 33 bp, Homo sapien
ttaacttgggagtttacgaagccagtaaaatca

SEQ ID NO: 487190 - DNA, 33 bp, Homo sapien
ttaacttgggagtttatgaagccagtaaaatca

SEQ ID NO: 487191 - DNA, 33 bp, Homo sapien
cagaaagtccagacaccagttacaggaaacaag

SEQ ID NO: 487192 - DNA, 33 bp, Homo sapien
cagaaagtccagacacgagttacaggaaacaag

SEQ ID NO: 487193 - DNA, 33 bp, Homo sapien
cctcaagaacagctcaatgaattctggcttact

SEQ ID NO: 487194 - DNA, 33 bp, Homo sapien
cctcaagaacagctcattgaattctggcttact

SEQ ID NO: 487195 - DNA, 33 bp, Homo sapien
ttacaaataactggcaaccttgatctataaaaa

SEQ ID NO: 487196 - DNA, 33 bp, Homo sapien
ttacaaataactggcagccttgatctataaaaa

SEQ ID NO: 487197 - DNA, 33 bp, Homo sapien
acctgaaattttgccaaacaggcttatcctcag

SEQ ID NO: 487198 - DNA, 33 bp, Homo sapien
acctgaaattttgccagacaggcttatcctcag

SEQ ID NO: 487199 - DNA, 33 bp, Homo sapien
tctcattcttcctggaaagaaagtcctactact

SEQ ID NO: 487200 - DNA, 33 bp, Homo sapien
tctcattcttcctggagagaaagtcctactact

SEQ ID NO: 487201 - DNA, 33 bp, Homo sapien
ttaaaaggtcaattcactagctttgcctttgct

SEQ ID NO: 487202 - DNA, 33 bp, Homo sapien
ttaaaaggtcaattcattagctttgcctttgct

SEQ ID NO: 487203 - DNA, 33 bp, Homo sapien
aatgcctggggtgctacgaaaattgtacaaaat

SEQ ID NO: 487204 - DNA, 33 bp, Homo sapien
aatgcctggggtgctatgaaaattgtacaaaat

SEQ ID NO: 487205 - DNA, 33 bp, Homo sapien
ataatatgcctgatagaccacggtggatgacat

SEQ ID NO: 487206 - DNA, 33 bp, Homo sapien
ataatatgcctgatagtccacggtggatgacat

SEQ ID NO: 487207 - DNA, 33 bp, Homo sapien
acagtcttgtaaatagccatatctagtctcact

SEQ ID NO: 487208 - DNA, 33 bp, Homo sapien
acagtcttgtaaataggcatatctagtctcact

SEQ ID NO: 487209 - DNA, 33 bp, Homo sapien
actacggactgaattaggtccctgcccaaatcc

SEQ ID NO: 487210 - DNA, 33 bp, Homo sapien
actacggactgaattatgtccctgcccaaatcc

SEQ ID NO: 487211 - DNA, 33 bp, Homo sapien
aatgtctgggtaactacgtgtcaagtgggtagc

SEQ ID NO: 487212 - DNA, 33 bp, Homo sapien
aatgtctgggtaactatgtgtcaagtgggtagc

SEQ ID NO: 487213 - DNA, 33 bp, Homo sapien
atttaggcattcacaaaatatggaatttagaaa

SEQ ID NO: 487214 - DNA, 33 bp, Homo sapien
atttaggcattcacaatatatggaatttagaaa

SEQ ID NO: 487215 - DNA, 33 bp, Homo sapien
actaaactgtgttcccagaaaattcataggttg

SEQ ID NO: 487216 - DNA, 33 bp, Homo sapien
actaaactgtgttcccggaaaattcataggttg

SEQ ID NO: 487217 - DNA, 33 bp, Homo sapien
acagggctacaagacaagctgtgcataaggttg

SEQ ID NO: 487218 - DNA, 33 bp, Homo sapien
acagggctacaagacacgctgtgcataaggttg

SEQ ID NO: 487219 - DNA, 33 bp, Homo sapien
taatcattaggcttcccagagattttcgcctgt

SEQ ID NO: 487220 - DNA, 33 bp, Homo sapien
taatcattaggcttcctagagattttcgcctgt

SEQ ID NO: 487221 - DNA, 33 bp, Homo sapien
tctcgactctttgaaacgggcaagctacttgca

SEQ ID NO: 487222 - DNA, 33 bp, Homo sapien
tctcgactctttgaaatgggcaagctacttgca

SEQ ID NO: 487223 - DNA, 33 bp, Homo sapien
gaaagtttcataaaatcaggaggccttatggaa

SEQ ID NO: 487224 - DNA, 33 bp, Homo sapien
gaaagtttcataaaatgaggaggccttatggaa

SEQ ID NO: 487225 - DNA, 33 bp, Homo sapien
ctcataccaactcacactggcataacacttctg

SEQ ID NO: 487226 - DNA, 33 bp, Homo sapien
ctcataccaactcacattggcataacacttctg

SEQ ID NO: 487227 - DNA, 33 bp, Homo sapien
tgtaagtacttccacaatctggtcccttcctac

SEQ ID NO: 487228 - DNA, 33 bp, Homo sapien
tgtaagtacttccacagtctggtcccttcctac

SEQ ID NO: 487229 - DNA, 33 bp, Homo sapien
tcctggcaaagaagggccacagaaaccatgaac

SEQ ID NO: 487230 - DNA, 33 bp, Homo sapien
tcctggcaaagaagggtcacagaaaccatgaac

SEQ ID NO: 487231 - DNA, 33 bp, Homo sapien
gaacatgtcaagccaaatatttcactgcttttt

SEQ ID NO: 487232 - DNA, 33 bp, Homo sapien
gaacatgtcaagccaagtatttcactgcttttt

SEQ ID NO: 487233 - DNA, 33 bp, Homo sapien
tgaaattcttcataaaattgtcaaggcaccata

SEQ ID NO: 487234 - DNA, 33 bp, Homo sapien
tgaaattcttcataaagttgtcaaggcaccata

SEQ ID NO: 487235 - DNA, 33 bp, Homo sapien
ctaaccgactatataacgtggatacactagaaa

SEQ ID NO: 487236 - DNA, 33 bp, Homo sapien
ctaaccgactatataatgtggatacactagaaa

SEQ ID NO: 487237 - DNA, 33 bp, Homo sapien
aatctgttggcaaacaggaataataatgtcttt

SEQ ID NO: 487238 - DNA, 33 bp, Homo sapien
aatctgttggcaaacatgaataataatgtcttt

SEQ ID NO: 487239 - DNA, 33 bp, Homo sapien
aaaatacactgtaaaacctaatgaacaacttaa

SEQ ID NO: 487240 - DNA, 33 bp, Homo sapien
aaaatacactgtaaaagctaatgaacaacttaa

SEQ ID NO: 487241 - DNA, 33 bp, Homo sapien
gttcaaacctattccacaagcctagtactctgc

SEQ ID NO: 487242 - DNA, 33 bp, Homo sapien
gttcaaacctattccataagcctagtactctgc

SEQ ID NO: 487243 - DNA, 33 bp, Homo sapien
aacacataacctcaaactgtctgtggttcaccc

SEQ ID NO: 487244 - DNA, 33 bp, Homo sapien
aacacataacctcaaattgtctgtggttcaccc

SEQ ID NO: 487245 - DNA, 33 bp, Homo sapien
caatttggctaaggtcacacagctggaaagaga

SEQ ID NO: 487246 - DNA, 33 bp, Homo sapien
caatttggctaaggtcgcacagctggaaagaga

SEQ ID NO: 487247 - DNA, 33 bp, Homo sapien
ccagactctggagcctaactgtgtggatctgaa

SEQ ID NO: 487248 - DNA, 33 bp, Homo sapien
ccagactctggagcctgactgtgtggatctgaa

SEQ ID NO: 487249 - DNA, 33 bp, Homo sapien
aagaaccaaatgcttcagaaaagtgcctcctta

SEQ ID NO: 487250 - DNA, 33 bp, Homo sapien
aagaaccaaatgcttccgaaaagtgcctcctta

SEQ ID NO: 487251 - DNA, 33 bp, Homo sapien
gacttggtggcctatggaaccttcttaattttt

SEQ ID NO: 487252 - DNA, 33 bp, Homo sapien
gacttggtggcctatgtaaccttcttaattttt

SEQ ID NO: 487253 - DNA, 33 bp, Homo sapien
caggtgctgattaaaaacacaatctttgtttat

SEQ ID NO: 487254 - DNA, 33 bp, Homo sapien
caggtgctgattaaaaccacaatctttgtttat

SEQ ID NO: 487255 - DNA, 33 bp, Homo sapien
taactctaatgttccaaatttccatagcacaaa

SEQ ID NO: 487256 - DNA, 33 bp, Homo sapien
taactctaatgttccacatttccatagcacaaa

SEQ ID NO: 487257 - DNA, 33 bp, Homo sapien
ttacttttgttacgcactattccataacctagt

SEQ ID NO: 487258 - DNA, 33 bp, Homo sapien
ttacttttgttacgcattattccataacctagt

SEQ ID NO: 487259 - DNA, 33 bp, Homo sapien
tgacattgtagaagtaagtgacttttgaaaaag

SEQ ID NO: 487260 - DNA, 33 bp, Homo sapien
tgacattgtagaagtatgtgacttttgaaaaag

SEQ ID NO: 487261 - DNA, 33 bp, Homo sapien
tggtggtctgtgccaaggtcaacagagtaactt

SEQ ID NO: 487262 - DNA, 33 bp, Homo sapien
tggtggtctgtgccaatgtcaacagagtaactt

SEQ ID NO: 487263 - DNA, 33 bp, Homo sapien
tcaaggcaaaagcaggaaatacttaagttctcc

SEQ ID NO: 487264 - DNA, 33 bp, Homo sapien
tcaaggcaaaagcaggcaatacttaagttctcc

SEQ ID NO: 487265 - DNA, 33 bp, Homo sapien
ctgtatgtggaatgccgcaaggctcacctttcc

SEQ ID NO: 487266 - DNA, 33 bp, Homo sapien
ctgtatgtggaatgcctcaaggctcacctttcc

SEQ ID NO: 487267 - DNA, 33 bp, Homo sapien
agcatttctgacttgacgctgctgttttcctga

SEQ ID NO: 487268 - DNA, 33 bp, Homo sapien
agcatttctgacttgatgctgctgttttcctga

SEQ ID NO: 487269 - DNA, 33 bp, Homo sapien
ttagtattcttactaacggacacattctgttaa

SEQ ID NO: 487270 - DNA, 33 bp, Homo sapien
ttagtattcttactaagggacacattctgttaa

SEQ ID NO: 487271 - DNA, 33 bp, Homo sapien
tagaagaaggctaaaactgacatctgtcctaga

SEQ ID NO: 487272 - DNA, 33 bp, Homo sapien
tagaagaaggctaaaattgacatctgtcctaga

SEQ ID NO: 487273 - DNA, 33 bp, Homo sapien
cctgcacacatcagaacaagactagggaggaca

SEQ ID NO: 487274 - DNA, 33 bp, Homo sapien
cctgcacacatcagaagaagactagggaggaca

SEQ ID NO: 487275 - DNA, 33 bp, Homo sapien
attccttctgagaagaagatgcctaagaaggac

SEQ ID NO: 487276 - DNA, 33 bp, Homo sapien
attccttctgagaagaggatgcctaagaaggac

SEQ ID NO: 487277 - DNA, 33 bp, Homo sapien
catgtttttctttccaatagaggcagaatatag

SEQ ID NO: 487278 - DNA, 33 bp, Homo sapien
catgtttttctttccagtagaggcagaatatag

SEQ ID NO: 487279 - DNA, 33 bp, Homo sapien
ataatgaacatgtttacagctttcaacccaagc

SEQ ID NO: 487280 - DNA, 33 bp, Homo sapien
ataatgaacatgtttatagctttcaacccaagc

SEQ ID NO: 487281 - DNA, 33 bp, Homo sapien
tgggtaaacggctggaaaggctaaatgggctgt

SEQ ID NO: 487282 - DNA, 33 bp, Homo sapien
tgggtaaacggctggagaggctaaatgggctgt

SEQ ID NO: 487283 - DNA, 33 bp, Homo sapien
tagatctatacaattaacacactttgccagagc

SEQ ID NO: 487284 - DNA, 33 bp, Homo sapien
tagatctatacaattagcacactttgccagagc

SEQ ID NO: 487285 - DNA, 33 bp, Homo sapien
cttttcctcttaagtcccctagctgcaaatatt

SEQ ID NO: 487286 - DNA, 33 bp, Homo sapien
cttttcctcttaagtctcctagctgcaaatatt

SEQ ID NO: 487287 - DNA, 33 bp, Homo sapien
gcctttggatagctaacggggcagtgagacatg

SEQ ID NO: 487288 - DNA, 33 bp, Homo sapien
gcctttggatagctaatggggcagtgagacatg

SEQ ID NO: 487289 - DNA, 33 bp, Homo sapien
aaacgtgccaagttgaaaggtgcagataaaagg

SEQ ID NO: 487290 - DNA, 33 bp, Homo sapien
aaacgtgccaagttgagaggtgcagataaaagg

SEQ ID NO: 487291 - DNA, 33 bp, Homo sapien
gtaacattatttcttccctggtgactatcaaaa

SEQ ID NO: 487292 - DNA, 33 bp, Homo sapien
gtaacattatttcttctctggtgactatcaaaa

SEQ ID NO: 487293 - DNA, 33 bp, Homo sapien
aactctgacctcctgacgatcccagatgtgaga

SEQ ID NO: 487294 - DNA, 33 bp, Homo sapien
aactctgacctcctgatgatcccagatgtgaga

SEQ ID NO: 487295 - DNA, 33 bp, Homo sapien
ttagaggatgtcttatcactagaatggtgttta

SEQ ID NO: 487296 - DNA, 33 bp, Homo sapien
ttagaggatgtcttatgactagaatggtgttta

SEQ ID NO: 487297 - DNA, 33 bp, Homo sapien
ttgctacattgctcaaacaatattagcttgtct

SEQ ID NO: 487298 - DNA, 33 bp, Homo sapien
ttgctacattgctcaatcaatattagcttgtct

SEQ ID NO: 487299 - DNA, 33 bp, Homo sapien
ttcttttcctgaacacaggtccattgctagaca

SEQ ID NO: 487300 - DNA, 33 bp, Homo sapien
ttcttttcctgaacacgggtccattgctagaca

SEQ ID NO: 487301 - DNA, 33 bp, Homo sapien
gaggatagaaacacacaaagtttaatcagattc

SEQ ID NO: 487302 - DNA, 33 bp, Homo sapien
gaggatagaaacacacgaagtttaatcagattc

SEQ ID NO: 487303 - DNA, 33 bp, Homo sapien
aattcaaagacacatagaggtacacaggtgggg

SEQ ID NO: 487304 - DNA, 33 bp, Homo sapien
aattcaaagacacatataggtacacaggtgggg

SEQ ID NO: 487305 - DNA, 33 bp, Homo sapien
ctacaattcgggccaaaccttcatggctttttg

SEQ ID NO: 487306 - DNA, 33 bp, Homo sapien
ctacaattcgggccaatccttcatggctttttg

SEQ ID NO: 487307 - DNA, 33 bp, Homo sapien
tagctgtaaagtaccactgaagtactacaaaca

SEQ ID NO: 487308 - DNA, 33 bp, Homo sapien
tagctgtaaagtaccattgaagtactacaaaca

SEQ ID NO: 487309 - DNA, 33 bp, Homo sapien
gaggtttctgaaagcaagagactctccaaacaa

SEQ ID NO: 487310 - DNA, 33 bp, Homo sapien
gaggtttctgaaagcaggagactctccaaacaa

SEQ ID NO: 487311 - DNA, 33 bp, Homo sapien
acctatatattacattcaacttcactgcttgct

SEQ ID NO: 487312 - DNA, 33 bp, Homo sapien
acctatatattacattgaacttcactgcttgct

SEQ ID NO: 487313 - DNA, 33 bp, Homo sapien
tgacactcaaaagaaacgctcattgaaacattt

SEQ ID NO: 487314 - DNA, 33 bp, Homo sapien
tgacactcaaaagaaatgctcattgaaacattt

SEQ ID NO: 487315 - DNA, 33 bp, Homo sapien
aagctgctattaaaaaccaagtaaggatgtggg

SEQ ID NO: 487316 - DNA, 33 bp, Homo sapien
aagctgctattaaaaatcaagtaaggatgtggg

SEQ ID NO: 487317 - DNA, 33 bp, Homo sapien
caaattcaaggcaaggacatccaacaggccatc

SEQ ID NO: 487318 - DNA, 33 bp, Homo sapien
caaattcaaggcaaggccatccaacaggccatc

SEQ ID NO: 487319 - DNA, 33 bp, Homo sapien
gtaacagcagtagttgaaatcaggcagtagtct

SEQ ID NO: 487320 - DNA, 33 bp, Homo sapien
gtaacagcagtagttggaatcaggcagtagtct

SEQ ID NO: 487321 - DNA, 33 bp, Homo sapien
gattttgtgccaaacccatagtggctttatttg

SEQ ID NO: 487322 - DNA, 33 bp, Homo sapien
gattttgtgccaaaccgatagtggctttatttg

SEQ ID NO: 487323 - DNA, 33 bp, Homo sapien
taaaaagtacttttctcaatgactgagtagaca

SEQ ID NO: 487324 - DNA, 33 bp, Homo sapien
taaaaagtacttttcttaatgactgagtagaca

SEQ ID NO: 487325 - DNA, 33 bp, Homo sapien
tatttctagaggtaagcaaggtccactaaaaca

SEQ ID NO: 487326 - DNA, 33 bp, Homo sapien
tatttctagaggtaagtaaggtccactaaaaca

SEQ ID NO: 487327 - DNA, 33 bp, Homo sapien
caaacaaaccaataaaaatcacacctaaaacat

SEQ ID NO: 487328 - DNA, 33 bp, Homo sapien
caaacaaaccaataaagatcacacctaaaacat

SEQ ID NO: 487329 - DNA, 33 bp, Homo sapien
tctccaaatatgcaaacgcctttttctttaaaa

SEQ ID NO: 487330 - DNA, 33 bp, Homo sapien
tctccaaatatgcaaatgcctttttctttaaaa

SEQ ID NO: 487331 - DNA, 33 bp, Homo sapien
aatcatttcgtgtggaaagtcacaaacatgact

SEQ ID NO: 487332 - DNA, 33 bp, Homo sapien
aatcatttcgtgtggagagtcacaaacatgact

SEQ ID NO: 487333 - DNA, 33 bp, Homo sapien
tggttgtaaagtcaaacctcttgtcttttcagt

SEQ ID NO: 487334 - DNA, 33 bp, Homo sapien
tggttgtaaagtcaaatctcttgtcttttcagt

SEQ ID NO: 487335 - DNA, 33 bp, Homo sapien
ggcatagggaaggtaggcaattaaacatagaat

SEQ ID NO: 487336 - DNA, 33 bp, Homo sapien
ggcatagggaaggtagtcaattaaacatagaat

SEQ ID NO: 487337 - DNA, 33 bp, Homo sapien
aaggttaaatgcaagaaaaatgtgaactgatat

SEQ ID NO: 487338 - DNA, 33 bp, Homo sapien
aaggttaaatgcaagacaaatgtgaactgatat

SEQ ID NO: 487339 - DNA, 33 bp, Homo sapien
gcaaagtggttcttcaccatgagaatttccaaa

SEQ ID NO: 487340 - DNA, 33 bp, Homo sapien
gcaaagtggttcttcatcatgagaatttccaaa

SEQ ID NO: 487341 - DNA, 33 bp, Homo sapien
ttctatgagcaattataaagacagaacacatct

SEQ ID NO: 487342 - DNA, 33 bp, Homo sapien
ttctatgagcaattatgaagacagaacacatct

SEQ ID NO: 487343 - DNA, 33 bp, Homo sapien
ttcaaaatccgattggcaaatacttcagaggta

SEQ ID NO: 487344 - DNA, 33 bp, Homo sapien
ttcaaaatccgattggtaaatacttcagaggta

SEQ ID NO: 487345 - DNA, 33 bp, Homo sapien
aagtgtgctaacgtggcatcattgatcattaaa

SEQ ID NO: 487346 - DNA, 33 bp, Homo sapien
aagtgtgctaacgtggtatcattgatcattaaa

SEQ ID NO: 487347 - DNA, 33 bp, Homo sapien
ggggggttggtttcaccgctatactagtgtaat

SEQ ID NO: 487348 - DNA, 33 bp, Homo sapien
ggggggttggtttcactgctatactagtgtaat

SEQ ID NO: 487349 - DNA, 33 bp, Homo sapien
ttttatttgttgcctacggatgaaagtatttac

SEQ ID NO: 487350 - DNA, 33 bp, Homo sapien
ttttatttgttgcctatggatgaaagtatttac

SEQ ID NO: 487351 - DNA, 33 bp, Homo sapien
cctaattaacagtaatgaacagatgacatactt

SEQ ID NO: 487352 - DNA, 33 bp, Homo sapien
cctaattaacagtaattaacagatgacatactt

SEQ ID NO: 487353 - DNA, 33 bp, Homo sapien
acaatttaatgggctacaaggacatataaagac

SEQ ID NO: 487354 - DNA, 33 bp, Homo sapien
acaatttaatgggctataaggacatataaagac

SEQ ID NO: 487355 - DNA, 33 bp, Homo sapien
ttctattgccgtatcacgaggtagctttcctaa

SEQ ID NO: 487356 - DNA, 33 bp, Homo sapien
ttctattgccgtatcatgaggtagctttcctaa

SEQ ID NO: 487357 - DNA, 33 bp, Homo sapien
ccctgaggggaaataactgggtttatcttgttg

SEQ ID NO: 487358 - DNA, 33 bp, Homo sapien
ccctgaggggaaataattgggtttatcttgttg

SEQ ID NO: 487359 - DNA, 33 bp, Homo sapien
agttacgatgtgttgacgattatttaactgata

SEQ ID NO: 487360 - DNA, 33 bp, Homo sapien
agttacgatgtgttgaggattatttaactgata

SEQ ID NO: 487361 - DNA, 33 bp, Homo sapien
ttccacaggaggctaccgataatctattacctt

SEQ ID NO: 487362 - DNA, 33 bp, Homo sapien
ttccacaggaggctactgataatctattacctt

SEQ ID NO: 487363 - DNA, 33 bp, Homo sapien
actgtgacttgaaaaacgagacactcaaaatcc

SEQ ID NO: 487364 - DNA, 33 bp, Homo sapien
actgtgacttgaaaaatgagacactcaaaatcc

SEQ ID NO: 487365 - DNA, 33 bp, Homo sapien
tcagatcatgtagagacaaccagactgctaatt

SEQ ID NO: 487366 - DNA, 33 bp, Homo sapien
tcagatcatgtagagagaaccagactgctaatt

SEQ ID NO: 487367 - DNA, 33 bp, Homo sapien
agtaacactaacaccactatttgtattttgtac

SEQ ID NO: 487368 - DNA, 33 bp, Homo sapien
agtaacactaacaccattatttgtattttgtac

SEQ ID NO: 487369 - DNA, 33 bp, Homo sapien
tgagtgtatggagggaacacttctcgtatacct

SEQ ID NO: 487370 - DNA, 33 bp, Homo sapien
tgagtgtatggagggaccacttctcgtatacct

SEQ ID NO: 487371 - DNA, 33 bp, Homo sapien
tgcactgatttgggtacgatgatgaagaaagag

SEQ ID NO: 487372 - DNA, 33 bp, Homo sapien
tgcactgatttgggtatgatgatgaagaaagag

SEQ ID NO: 487373 - DNA, 33 bp, Homo sapien
gaggcaaacagatatccatgtgctttgagtgtt

SEQ ID NO: 487374 - DNA, 33 bp, Homo sapien
gaggcaaacagatatctatgtgctttgagtgtt

SEQ ID NO: 487375 - DNA, 33 bp, Homo sapien
taaaccttagaagtatcatacaagcattagtgc

SEQ ID NO: 487376 - DNA, 33 bp, Homo sapien
taaaccttagaagtatgatacaagcattagtgc

SEQ ID NO: 487377 - DNA, 33 bp, Homo sapien
tcagagcatatattaaatcataaaacctggtta

SEQ ID NO: 487378 - DNA, 33 bp, Homo sapien
tcagagcatatattaagtcataaaacctggtta

SEQ ID NO: 487379 - DNA, 33 bp, Homo sapien
atgatcttcaaaatacccatacagcacaccttt

SEQ ID NO: 487380 - DNA, 33 bp, Homo sapien
atgatcttcaaaatactcatacagcacaccttt

SEQ ID NO: 487381 - DNA, 33 bp, Homo sapien
agatgtttgctttctaccacctgactctaggat

SEQ ID NO: 487382 - DNA, 33 bp, Homo sapien
agatgtttgctttctatcacctgactctaggat

SEQ ID NO: 487383 - DNA, 33 bp, Homo sapien
cgtgggaattatgggaggtacacttcaagatga

SEQ ID NO: 487384 - DNA, 33 bp, Homo sapien
cgtgggaattatgggatgtacacttcaagatga

SEQ ID NO: 487385 - DNA, 33 bp, Homo sapien
ccctaactagaagagacagctccatgaattaaa

SEQ ID NO: 487386 - DNA, 33 bp, Homo sapien
ccctaactagaagagatagctccatgaattaaa

SEQ ID NO: 487387 - DNA, 33 bp, Homo sapien
aatggttgaaatgagacgaaaagtcagatgcag

SEQ ID NO: 487388 - DNA, 33 bp, Homo sapien
aatggttgaaatgagatgaaaagtcagatgcag

SEQ ID NO: 487389 - DNA, 33 bp, Homo sapien
ctgtgagttgctactacgtcatcaaaagcagaa

SEQ ID NO: 487390 - DNA, 33 bp, Homo sapien
ctgtgagttgctactaggtcatcaaaagcagaa

SEQ ID NO: 487391 - DNA, 33 bp, Homo sapien
ggaacgtataaggagaaatagaactggatggga

SEQ ID NO: 487392 - DNA, 33 bp, Homo sapien
ggaacgtataaggagagatagaactggatggga

SEQ ID NO: 487393 - DNA, 33 bp, Homo sapien
cttgtacaaagctaacaggttgagaatccaagt

SEQ ID NO: 487394 - DNA, 33 bp, Homo sapien
cttgtacaaagctaacgggttgagaatccaagt

SEQ ID NO: 487395 - DNA, 33 bp, Homo sapien
gtctcaagtgtaaagaatcaagagaaacaccgg

SEQ ID NO: 487396 - DNA, 33 bp, Homo sapien
gtctcaagtgtaaagactcaagagaaacaccgg

SEQ ID NO: 487397 - DNA, 33 bp, Homo sapien
ttttatatcacctgtaaggtcattacactttag

SEQ ID NO: 487398 - DNA, 33 bp, Homo sapien
ttttatatcacctgtatggtcattacactttag

SEQ ID NO: 487399 - DNA, 33 bp, Homo sapien
agcactatctttagcactactttattcagtaaa

SEQ ID NO: 487400 - DNA, 33 bp, Homo sapien
agcactatctttagcattactttattcagtaaa

SEQ ID NO: 487401 - DNA, 33 bp, Homo sapien
ttttccccctgaagaactgatgtattttacact

SEQ ID NO: 487402 - DNA, 33 bp, Homo sapien
ttttccccctgaagaattgatgtattttacact

SEQ ID NO: 487403 - DNA, 33 bp, Homo sapien
aaattatatcctgtgaggtatgtatccaatgca

SEQ ID NO: 487404 - DNA, 33 bp, Homo sapien
aaattatatcctgtgatgtatgtatccaatgca

SEQ ID NO: 487405 - DNA, 33 bp, Homo sapien
gtaaagactataaagccaaagaagagaaatgtg

SEQ ID NO: 487406 - DNA, 33 bp, Homo sapien
gtaaagactataaagcgaaagaagagaaatgtg

SEQ ID NO: 487407 - DNA, 33 bp, Homo sapien
acttcttcactttttacagctgggtaatatata

SEQ ID NO: 487408 - DNA, 33 bp, Homo sapien
acttcttcactttttatagctgggtaatatata

SEQ ID NO: 487409 - DNA, 33 bp, Homo sapien
attaatgagaatatcaagccacaaatagacttt

SEQ ID NO: 487410 - DNA, 33 bp, Homo sapien
attaatgagaatatcatgccacaaatagacttt

SEQ ID NO: 487411 - DNA, 33 bp, Homo sapien
cccttacaaaaccttaacgattatcaacctatc

SEQ ID NO: 487412 - DNA, 33 bp, Homo sapien
cccttacaaaaccttaccgattatcaacctatc

SEQ ID NO: 487413 - DNA, 33 bp, Homo sapien
tgtgacaagttcttcacatgtgtaaaattctgt

SEQ ID NO: 487414 - DNA, 33 bp, Homo sapien
tgtgacaagttcttcatatgtgtaaaattctgt

SEQ ID NO: 487415 - DNA, 33 bp, Homo sapien
cctaacaagttgcttacgtagtgctcaagcact

SEQ ID NO: 487416 - DNA, 33 bp, Homo sapien
cctaacaagttgcttatgtagtgctcaagcact

SEQ ID NO: 487417 - DNA, 33 bp, Homo sapien
ggggaaagagaatggacaaaagactcacaattc

SEQ ID NO: 487418 - DNA, 33 bp, Homo sapien
ggggaaagagaatggagaaaagactcacaattc

SEQ ID NO: 487419 - DNA, 33 bp, Homo sapien
aatcataaacttcagaagcactcacttgcagga

SEQ ID NO: 487420 - DNA, 33 bp, Homo sapien
aatcataaacttcagaggcactcacttgcagga

SEQ ID NO: 487421 - DNA, 33 bp, Homo sapien
gacataaagataatgacctgcgatgtggttttt

SEQ ID NO: 487422 - DNA, 33 bp, Homo sapien
gacataaagataatgagctgcgatgtggttttt

SEQ ID NO: 487423 - DNA, 33 bp, Homo sapien
agttgatccaatataactacaggcagatcagtg

SEQ ID NO: 487424 - DNA, 33 bp, Homo sapien
agttgatccaatataattacaggcagatcagtg

SEQ ID NO: 487425 - DNA, 33 bp, Homo sapien
tatagaagagaagtagcctaattttttattggc

SEQ ID NO: 487426 - DNA, 33 bp, Homo sapien
tatagaagagaagtaggctaattttttattggc

SEQ ID NO: 487427 - DNA, 33 bp, Homo sapien
aaactcctttgctttaacgaacacgaattcaaa

SEQ ID NO: 487428 - DNA, 33 bp, Homo sapien
aaactcctttgctttagcgaacacgaattcaaa

SEQ ID NO: 487429 - DNA, 33 bp, Homo sapien
cctcagtggaagttaaagaatgccctttgtaat

SEQ ID NO: 487430 - DNA, 33 bp, Homo sapien
cctcagtggaagttaaggaatgccctttgtaat

SEQ ID NO: 487431 - DNA, 33 bp, Homo sapien
tcatccttcccttgaaacttattcgtagatccc

SEQ ID NO: 487432 - DNA, 33 bp, Homo sapien
tcatccttcccttgaagcttattcgtagatccc

SEQ ID NO: 487433 - DNA, 33 bp, Homo sapien
tgagggtctgataaaaatgtggatccactttcc

SEQ ID NO: 487434 - DNA, 33 bp, Homo sapien
tgagggtctgataaaattgtggatccactttcc

SEQ ID NO: 487435 - DNA, 33 bp, Homo sapien
gtgcccacatactaaacgctgaatggtttcaaa

SEQ ID NO: 487436 - DNA, 33 bp, Homo sapien
gtgcccacatactaaatgctgaatggtttcaaa

SEQ ID NO: 487437 - DNA, 33 bp, Homo sapien
gcttagcctagcttcaaatgtgctcagtgatat

SEQ ID NO: 487438 - DNA, 33 bp, Homo sapien
gcttagcctagcttcatatgtgctcagtgatat

SEQ ID NO: 487439 - DNA, 33 bp, Homo sapien
gacaactgacattcaccgtatgtctgtcttccc

SEQ ID NO: 487440 - DNA, 33 bp, Homo sapien
gacaactgacattcactgtatgtctgtcttccc

SEQ ID NO: 487441 - DNA, 33 bp, Homo sapien
ggcattaccagtaaaaactgtgacttttcatta

SEQ ID NO: 487442 - DNA, 33 bp, Homo sapien
ggcattaccagtaaaagctgtgacttttcatta

SEQ ID NO: 487443 - DNA, 33 bp, Homo sapien
ggaagacttcttgagcagcctcaggttcaccat

SEQ ID NO: 487444 - DNA, 33 bp, Homo sapien
ggaagacttcttgagccgcctcaggttcaccat

SEQ ID NO: 487445 - DNA, 33 bp, Homo sapien
aacggggtaagttgaactggcttttcagcaaag

SEQ ID NO: 487446 - DNA, 33 bp, Homo sapien
aacggggtaagttgaattggcttttcagcaaag

SEQ ID NO: 487447 - DNA, 33 bp, Homo sapien
tgcctgacctttgtcacattttgaagagaagaa

SEQ ID NO: 487448 - DNA, 33 bp, Homo sapien
tgcctgacctttgtcagattttgaagagaagaa

SEQ ID NO: 487449 - DNA, 33 bp, Homo sapien
tatgggaaatacatgaggatgttgattgttggt

SEQ ID NO: 487450 - DNA, 33 bp, Homo sapien
tatgggaaatacatgatgatgttgattgttggt

SEQ ID NO: 487451 - DNA, 33 bp, Homo sapien
gtcataatggattttcaaaagtaaaactcaaat

SEQ ID NO: 487452 - DNA, 33 bp, Homo sapien
gtcataatggattttcgaaagtaaaactcaaat

SEQ ID NO: 487453 - DNA, 33 bp, Homo sapien
catattcaagccataggagtctttaggagaggg

SEQ ID NO: 487454 - DNA, 33 bp, Homo sapien
catattcaagccatagtagtctttaggagaggg

SEQ ID NO: 487455 - DNA, 33 bp, Homo sapien
tgtagcagaggaatcagtctcaaacacaggcaa

SEQ ID NO: 487456 - DNA, 33 bp, Homo sapien
tgtagcagaggaatcattctcaaacacaggcaa

SEQ ID NO: 487457 - DNA, 33 bp, Homo sapien
tggctaaagtttcacaacgaataattcatctct

SEQ ID NO: 487458 - DNA, 33 bp, Homo sapien
tggctaaagtttcacagcgaataattcatctct

SEQ ID NO: 487459 - DNA, 33 bp, Homo sapien
tatgattaccctaataggattaccacagcaaaa

SEQ ID NO: 487460 - DNA, 33 bp, Homo sapien
tatgattaccctaatatgattaccacagcaaaa

SEQ ID NO: 487461 - DNA, 33 bp, Homo sapien
cactgacagcacttaaggtacctgtaaggggaa

SEQ ID NO: 487462 - DNA, 33 bp, Homo sapien
cactgacagcacttaatgtacctgtaaggggaa

SEQ ID NO: 487463 - DNA, 33 bp, Homo sapien
tggtatactgcacaaactggcttgctgtttttt

SEQ ID NO: 487464 - DNA, 33 bp, Homo sapien
tggtatactgcacaaattggcttgctgtttttt

SEQ ID NO: 487465 - DNA, 33 bp, Homo sapien
tgcattttgaaaaaaaataggtgcttatatttc

SEQ ID NO: 487466 - DNA, 33 bp, Homo sapien
tgcattttgaaaaaaattaggtgcttatatttc

SEQ ID NO: 487467 - DNA, 33 bp, Homo sapien
ttttatttcaagtgttcaaagtatggattttgt

SEQ ID NO: 487468 - DNA, 33 bp, Homo sapien
ttttatttcaagtgtttaaagtatggattttgt

SEQ ID NO: 487469 - DNA, 33 bp, Homo sapien
gatgagattagttggacgagggatattaagtga

SEQ ID NO: 487470 - DNA, 33 bp, Homo sapien
gatgagattagttggatgagggatattaagtga

SEQ ID NO: 487471 - DNA, 33 bp, Homo sapien
ggacaccttggaagaactcacagaggaaggagg

SEQ ID NO: 487472 - DNA, 33 bp, Homo sapien
ggacaccttggaagaagtcacagaggaaggagg

SEQ ID NO: 487473 - DNA, 33 bp, Homo sapien
aacatctacctcatgcgctttttcttggttttc

SEQ ID NO: 487474 - DNA, 33 bp, Homo sapien
aacatctacctcatgctctttttcttggttttc

SEQ ID NO: 487475 - DNA, 33 bp, Homo sapien
tctcccactttatgaaatcaaattatcaggagt

SEQ ID NO: 487476 - DNA, 33 bp, Homo sapien
tctcccactttatgaagtcaaattatcaggagt

SEQ ID NO: 487477 - DNA, 33 bp, Homo sapien
atagaatttctaaatgacatctcgctgataagg

SEQ ID NO: 487478 - DNA, 33 bp, Homo sapien
atagaatttctaaatgtcatctcgctgataagg

SEQ ID NO: 487479 - DNA, 33 bp, Homo sapien
agtccagctgttgtcaatgaatggctggcatta

SEQ ID NO: 487480 - DNA, 33 bp, Homo sapien
agtccagctgttgtcagtgaatggctggcatta

SEQ ID NO: 487481 - DNA, 33 bp, Homo sapien
ttctacactttcacaagtattttcaactcttat

SEQ ID NO: 487482 - DNA, 33 bp, Homo sapien
ttctacactttcacaattattttcaactcttat

SEQ ID NO: 487483 - DNA, 33 bp, Homo sapien
atctctaatgccatggaataaggatcagtagac

SEQ ID NO: 487484 - DNA, 33 bp, Homo sapien
atctctaatgccatgggataaggatcagtagac

SEQ ID NO: 487485 - DNA, 33 bp, Homo sapien
tgctcagaaactacccaagcttgattgcactac

SEQ ID NO: 487486 - DNA, 33 bp, Homo sapien
tgctcagaaactaccccagcttgattgcactac

SEQ ID NO: 487487 - DNA, 33 bp, Homo sapien
ccctgataacctttacccctcttgtagctcaac

SEQ ID NO: 487488 - DNA, 33 bp, Homo sapien
ccctgataacctttactcctcttgtagctcaac

SEQ ID NO: 487489 - DNA, 33 bp, Homo sapien
ataataacgaggatgacggtgacaataacgaag

SEQ ID NO: 487490 - DNA, 33 bp, Homo sapien
ataataacgaggatgatggtgacaataacgaag

SEQ ID NO: 487491 - DNA, 33 bp, Homo sapien
tgggcccctttgtccaatacagatctagatgag

SEQ ID NO: 487492 - DNA, 33 bp, Homo sapien
tgggcccctttgtccattacagatctagatgag

SEQ ID NO: 487493 - DNA, 33 bp, Homo sapien
acttgggttataaatgaagatatcaaaggctca

SEQ ID NO: 487494 - DNA, 33 bp, Homo sapien
acttgggttataaatggagatatcaaaggctca

SEQ ID NO: 487495 - DNA, 33 bp, Homo sapien
ccctgatcaactcaaacacccaagaaagactcg

SEQ ID NO: 487496 - DNA, 33 bp, Homo sapien
ccctgatcaactcaaatacccaagaaagactcg

SEQ ID NO: 487497 - DNA, 33 bp, Homo sapien
aataggtggcactctcactaccaatctccatct

SEQ ID NO: 487498 - DNA, 33 bp, Homo sapien
aataggtggcactctcgctaccaatctccatct

SEQ ID NO: 487499 - DNA, 33 bp, Homo sapien
cccaccattagaatcacgtgaacttaggaagta

SEQ ID NO: 487500 - DNA, 33 bp, Homo sapien
cccaccattagaatcatgtgaacttaggaagta

SEQ ID NO: 487501 - DNA, 33 bp, Homo sapien
attatgtgctgaaaatgaaattctggtcagtct

SEQ ID NO: 487502 - DNA, 33 bp, Homo sapien
attatgtgctgaaaattaaattctggtcagtct

SEQ ID NO: 487503 - DNA, 33 bp, Homo sapien
tcacagttttaaggcaagtttacacaaatcttc

SEQ ID NO: 487504 - DNA, 33 bp, Homo sapien
tcacagttttaaggcacgtttacacaaatcttc

SEQ ID NO: 487505 - DNA, 33 bp, Homo sapien
atttgtcaaactggccaaaggggacacacatag

SEQ ID NO: 487506 - DNA, 33 bp, Homo sapien
atttgtcaaactggccgaaggggacacacatag

SEQ ID NO: 487507 - DNA, 33 bp, Homo sapien
tttgcaggaagggaatcagaacaaaccaatggc

SEQ ID NO: 487508 - DNA, 33 bp, Homo sapien
tttgcaggaagggaattagaacaaaccaatggc

SEQ ID NO: 487509 - DNA, 33 bp, Homo sapien
gattatatacttcaacaatgttaatgtgatgaa

SEQ ID NO: 487510 - DNA, 33 bp, Homo sapien
gattatatacttcaacgatgttaatgtgatgaa

SEQ ID NO: 487511 - DNA, 33 bp, Homo sapien
gaacagattgattttacaagataaggtttttaa

SEQ ID NO: 487512 - DNA, 33 bp, Homo sapien
gaacagattgattttagaagataaggtttttaa

SEQ ID NO: 487513 - DNA, 33 bp, Homo sapien
acatctgcagattaataatgtaaaggtgaagca

SEQ ID NO: 487514 - DNA, 33 bp, Homo sapien
acatctgcagattaatcatgtaaaggtgaagca

SEQ ID NO: 487515 - DNA, 33 bp, Homo sapien
gatagaagctgctcaaagaataagggaagttca

SEQ ID NO: 487516 - DNA, 33 bp, Homo sapien
gatagaagctgctcaaggaataagggaagttca

SEQ ID NO: 487517 - DNA, 33 bp, Homo sapien
taacacacagtgattaaatgagcagtgatttct

SEQ ID NO: 487518 - DNA, 33 bp, Homo sapien
taacacacagtgattacatgagcagtgatttct

SEQ ID NO: 487519 - DNA, 33 bp, Homo sapien
tttcgcaagtttaagacctctatttgttcctca

SEQ ID NO: 487520 - DNA, 33 bp, Homo sapien
tttcgcaagtttaagatctctatttgttcctca

SEQ ID NO: 487521 - DNA, 33 bp, Homo sapien
gaacaactggagtctaaaaatgccacttgcagt

SEQ ID NO: 487522 - DNA, 33 bp, Homo sapien
gaacaactggagtctacaaatgccacttgcagt

SEQ ID NO: 487523 - DNA, 33 bp, Homo sapien
ctcgagaatggaaaccaaagtgtacagccaaca

SEQ ID NO: 487524 - DNA, 33 bp, Homo sapien
ctcgagaatggaaacctaagtgtacagccaaca

SEQ ID NO: 487525 - DNA, 33 bp, Homo sapien
gctttgctaattcgtacgaacttgtattttaga

SEQ ID NO: 487526 - DNA, 33 bp, Homo sapien
gctttgctaattcgtatgaacttgtattttaga

SEQ ID NO: 487527 - DNA, 33 bp, Homo sapien
tttccattgatatatacagtttggcaactactc

SEQ ID NO: 487528 - DNA, 33 bp, Homo sapien
tttccattgatatatagagtttggcaactactc

SEQ ID NO: 487529 - DNA, 33 bp, Homo sapien
aggagaattttcaaagactgaggtacataaatg

SEQ ID NO: 487530 - DNA, 33 bp, Homo sapien
aggagaattttcaaaggctgaggtacataaatg

SEQ ID NO: 487531 - DNA, 33 bp, Homo sapien
gtttctgtggtatctaacaacagcggctaccac

SEQ ID NO: 487532 - DNA, 33 bp, Homo sapien
gtttctgtggtatctagcaacagcggctaccac

SEQ ID NO: 487533 - DNA, 33 bp, Homo sapien
gaaactcagtaagtcacgagtttgaagaattgt

SEQ ID NO: 487534 - DNA, 33 bp, Homo sapien
gaaactcagtaagtcaggagtttgaagaattgt

SEQ ID NO: 487535 - DNA, 33 bp, Homo sapien
ttgtgggagaagaatacgtggtgttgtttaatg

SEQ ID NO: 487536 - DNA, 33 bp, Homo sapien
ttgtgggagaagaatatgtggtgttgtttaatg

SEQ ID NO: 487537 - DNA, 33 bp, Homo sapien
actgaggccccatcaaaaaccaattaaaaatag

SEQ ID NO: 487538 - DNA, 33 bp, Homo sapien
actgaggccccatcaacaaccaattaaaaatag

SEQ ID NO: 487539 - DNA, 33 bp, Homo sapien
caaaacccaactgttacagccagacacaccaaa

SEQ ID NO: 487540 - DNA, 33 bp, Homo sapien
caaaacccaactgttatagccagacacaccaaa

SEQ ID NO: 487541 - DNA, 33 bp, Homo sapien
tacatactgtttgatgcagctctatacaatgct

SEQ ID NO: 487542 - DNA, 33 bp, Homo sapien
tacatactgtttgatgtagctctatacaatgct

SEQ ID NO: 487543 - DNA, 33 bp, Homo sapien
gtgttaaaggttccccaacagtgctgatgtgca

SEQ ID NO: 487544 - DNA, 33 bp, Homo sapien
gtgttaaaggttccccgacagtgctgatgtgca

SEQ ID NO: 487545 - DNA, 33 bp, Homo sapien
acaatatgaataatgaataaatgagttggattt

SEQ ID NO: 487546 - DNA, 33 bp, Homo sapien
acaatatgaataatgactaaatgagttggattt

SEQ ID NO: 487547 - DNA, 33 bp, Homo sapien
aattgcataacatcaaagcatctcatatctaaa

SEQ ID NO: 487548 - DNA, 33 bp, Homo sapien
aattgcataacatcaaggcatctcatatctaaa

SEQ ID NO: 487549 - DNA, 33 bp, Homo sapien
caaaccggtgttatcaaacagaactgtcacgta

SEQ ID NO: 487550 - DNA, 33 bp, Homo sapien
caaaccggtgttatcacacagaactgtcacgta

SEQ ID NO: 487551 - DNA, 33 bp, Homo sapien
acttttaacaactcataactgggtcttatgatt

SEQ ID NO: 487552 - DNA, 33 bp, Homo sapien
acttttaacaactcatgactgggtcttatgatt

SEQ ID NO: 487553 - DNA, 33 bp, Homo sapien
caacttttcctgtctcaactcttatctctattt

SEQ ID NO: 487554 - DNA, 33 bp, Homo sapien
caacttttcctgtctcgactcttatctctattt

SEQ ID NO: 487555 - DNA, 33 bp, Homo sapien
tctctctccagattcccgagtgcattatcttac

SEQ ID NO: 487556 - DNA, 33 bp, Homo sapien
tctctctccagattcctgagtgcattatcttac

SEQ ID NO: 487557 - DNA, 33 bp, Homo sapien
gtatgtttttaatgaagacgtgattacagtata

SEQ ID NO: 487558 - DNA, 33 bp, Homo sapien
gtatgtttttaatgaatacgtgattacagtata

SEQ ID NO: 487559 - DNA, 33 bp, Homo sapien
tattccctggtgtagtcaagcagatggtagggc

SEQ ID NO: 487560 - DNA, 33 bp, Homo sapien
tattccctggtgtagttaagcagatggtagggc

SEQ ID NO: 487561 - DNA, 33 bp, Homo sapien
tccccaatcatctaaaacaacttccctgctcag

SEQ ID NO: 487562 - DNA, 33 bp, Homo sapien
tccccaatcatctaaatcaacttccctgctcag

SEQ ID NO: 487563 - DNA, 33 bp, Homo sapien
tgtattgccagagccaaggacattcaatcttga

SEQ ID NO: 487564 - DNA, 33 bp, Homo sapien
tgtattgccagagccagggacattcaatcttga

SEQ ID NO: 487565 - DNA, 33 bp, Homo sapien
tttttttcagtgcaacgctgggtagactattgt

SEQ ID NO: 487566 - DNA, 33 bp, Homo sapien
tttttttcagtgcaactctgggtagactattgt

SEQ ID NO: 487567 - DNA, 33 bp, Homo sapien
catatcatgcagcaggaagaagaaaatgcattg

SEQ ID NO: 487568 - DNA, 33 bp, Homo sapien
catatcatgcagcagggagaagaaaatgcattg

SEQ ID NO: 487569 - DNA, 33 bp, Homo sapien
tattattttgctgagacataggtatggctttct

SEQ ID NO: 487570 - DNA, 33 bp, Homo sapien
tattattttgctgagatataggtatggctttct

SEQ ID NO: 487571 - DNA, 33 bp, Homo sapien
ttttatgtgcagttacaactattatatacttac

SEQ ID NO: 487572 - DNA, 33 bp, Homo sapien
ttttatgtgcagttacgactattatatacttac

SEQ ID NO: 487573 - DNA, 33 bp, Homo sapien
agcaataataaagatgaagagtatcagctaaga

SEQ ID NO: 487574 - DNA, 33 bp, Homo sapien
agcaataataaagatggagagtatcagctaaga

SEQ ID NO: 487575 - DNA, 33 bp, Homo sapien
agcagcttaagatccaatcaaaaagacaaaata

SEQ ID NO: 487576 - DNA, 33 bp, Homo sapien
agcagcttaagatccagtcaaaaagacaaaata

SEQ ID NO: 487577 - DNA, 33 bp, Homo sapien
tgagaattgaatagcaaaaccttgaatccaaac

SEQ ID NO: 487578 - DNA, 33 bp, Homo sapien
tgagaattgaatagcataaccttgaatccaaac

SEQ ID NO: 487579 - DNA, 33 bp, Homo sapien
gtattatgtttagaagcatctatgtaggaagac

SEQ ID NO: 487580 - DNA, 33 bp, Homo sapien
gtattatgtttagaagtatctatgtaggaagac

SEQ ID NO: 487581 - DNA, 33 bp, Homo sapien
agttggtatattttcaaaattgcagatatgtct

SEQ ID NO: 487582 - DNA, 33 bp, Homo sapien
agttggtatattttcagaattgcagatatgtct

SEQ ID NO: 487583 - DNA, 33 bp, Homo sapien
gatgcaaaaagataaaataacatgcccaaacag

SEQ ID NO: 487584 - DNA, 33 bp, Homo sapien
gatgcaaaaagataaagtaacatgcccaaacag

SEQ ID NO: 487585 - DNA, 33 bp, Homo sapien
gatgtttggcttaagacagctagattctcacaa

SEQ ID NO: 487586 - DNA, 33 bp, Homo sapien
gatgtttggcttaagagagctagattctcacaa

SEQ ID NO: 487587 - DNA, 33 bp, Homo sapien
caccatatcttgtccacaaaaattgccattggc

SEQ ID NO: 487588 - DNA, 33 bp, Homo sapien
caccatatcttgtccagaaaaattgccattggc

SEQ ID NO: 487589 - DNA, 33 bp, Homo sapien
atgttcagaagagtcaataaatattcttttcta

SEQ ID NO: 487590 - DNA, 33 bp, Homo sapien
atgttcagaagagtcagtaaatattcttttcta

SEQ ID NO: 487591 - DNA, 33 bp, Homo sapien
aaaaaagagagaaaccacttccagaggcccgtt

SEQ ID NO: 487592 - DNA, 33 bp, Homo sapien
aaaaaagagagaaaccgcttccagaggcccgtt

SEQ ID NO: 487593 - DNA, 33 bp, Homo sapien
attaccgttaaagaaacttggatgtggatcgac

SEQ ID NO: 487594 - DNA, 33 bp, Homo sapien
attaccgttaaagaaagttggatgtggatcgac

SEQ ID NO: 487595 - DNA, 33 bp, Homo sapien
tattaaactggaattacggtaagaggtttaatg

SEQ ID NO: 487596 - DNA, 33 bp, Homo sapien
tattaaactggaattatggtaagaggtttaatg

SEQ ID NO: 487597 - DNA, 33 bp, Homo sapien
aactggaagatgcagcccgacctttgttaatgt

SEQ ID NO: 487598 - DNA, 33 bp, Homo sapien
aactggaagatgcagcgcgacctttgttaatgt

SEQ ID NO: 487599 - DNA, 33 bp, Homo sapien
tgtctgccattttagccaacacagagttttttt

SEQ ID NO: 487600 - DNA, 33 bp, Homo sapien
tgtctgccattttagcgaacacagagttttttt

SEQ ID NO: 487601 - DNA, 33 bp, Homo sapien
gggcgttccacaaacaaacacaaaattgcatct

SEQ ID NO: 487602 - DNA, 33 bp, Homo sapien
gggcgttccacaaacacacacaaaattgcatct

SEQ ID NO: 487603 - DNA, 33 bp, Homo sapien
atactaagggaagtgacgcttgtgagattatca

SEQ ID NO: 487604 - DNA, 33 bp, Homo sapien
atactaagggaagtgatgcttgtgagattatca

SEQ ID NO: 487605 - DNA, 33 bp, Homo sapien
aatatgaaaggctgtacgctaatgacattaaca

SEQ ID NO: 487606 - DNA, 33 bp, Homo sapien
aatatgaaaggctgtatgctaatgacattaaca

SEQ ID NO: 487607 - DNA, 33 bp, Homo sapien
gtaaagcactggtctaagaatatcatgtttttc

SEQ ID NO: 487608 - DNA, 33 bp, Homo sapien
gtaaagcactggtctacgaatatcatgtttttc

SEQ ID NO: 487609 - DNA, 33 bp, Homo sapien
agggcctcagaaaccaactagtccaattctgaa

SEQ ID NO: 487610 - DNA, 33 bp, Homo sapien
agggcctcagaaaccacctagtccaattctgaa

SEQ ID NO: 487611 - DNA, 33 bp, Homo sapien
cggacttttagattctaacatagagcagggcct

SEQ ID NO: 487612 - DNA, 33 bp, Homo sapien
cggacttttagattctcacatagagcagggcct

SEQ ID NO: 487613 - DNA, 33 bp, Homo sapien
gctgtagagggttatgcactaattcctgggaaa

SEQ ID NO: 487614 - DNA, 33 bp, Homo sapien
gctgtagagggttatggactaattcctgggaaa

SEQ ID NO: 487615 - DNA, 33 bp, Homo sapien
gtttctcatgtgttcaatagcaaggagttaatt

SEQ ID NO: 487616 - DNA, 33 bp, Homo sapien
gtttctcatgtgttcagtagcaaggagttaatt

SEQ ID NO: 487617 - DNA, 33 bp, Homo sapien
gggaaattaacatgaccatctagtgtcaaaaac

SEQ ID NO: 487618 - DNA, 33 bp, Homo sapien
gggaaattaacatgactatctagtgtcaaaaac

SEQ ID NO: 487619 - DNA, 33 bp, Homo sapien
gttccaaacttagcctcacctgtgaaacctcac

SEQ ID NO: 487620 - DNA, 33 bp, Homo sapien
gttccaaacttagccttacctgtgaaacctcac

SEQ ID NO: 487621 - DNA, 33 bp, Homo sapien
tgtatcctccccaaaactcacttattgaagccc

SEQ ID NO: 487622 - DNA, 33 bp, Homo sapien
tgtatcctccccaaaattcacttattgaagccc

SEQ ID NO: 487623 - DNA, 33 bp, Homo sapien
aatttttgtatattgaactattgtgagtctgca

SEQ ID NO: 487624 - DNA, 33 bp, Homo sapien
aatttttgtatattgacctattgtgagtctgca

SEQ ID NO: 487625 - DNA, 33 bp, Homo sapien
tgagatgataagagccaatcctgctttgatttg

SEQ ID NO: 487626 - DNA, 33 bp, Homo sapien
tgagatgataagagccgatcctgctttgatttg

SEQ ID NO: 487627 - DNA, 33 bp, Homo sapien
ggtaaattaagaaataccatagctgcagatgtt

SEQ ID NO: 487628 - DNA, 33 bp, Homo sapien
ggtaaattaagaaatagcatagctgcagatgtt

SEQ ID NO: 487629 - DNA, 33 bp, Homo sapien
tttgaggctattaaaactcctgagataaacttg

SEQ ID NO: 487630 - DNA, 33 bp, Homo sapien
tttgaggctattaaaattcctgagataaacttg

SEQ ID NO: 487631 - DNA, 33 bp, Homo sapien
tatagtctagataatcacaaggtgtcatacttc

SEQ ID NO: 487632 - DNA, 33 bp, Homo sapien
tatagtctagataatcccaaggtgtcatacttc

SEQ ID NO: 487633 - DNA, 33 bp, Homo sapien
agtcacatatgtaaccacaaagatattatttcc

SEQ ID NO: 487634 - DNA, 33 bp, Homo sapien
agtcacatatgtaaccgcaaagatattatttcc

SEQ ID NO: 487635 - DNA, 33 bp, Homo sapien
cttaactcttctcaaactgcatttttatgaatt

SEQ ID NO: 487636 - DNA, 33 bp, Homo sapien
cttaactcttctcaaagtgcatttttatgaatt

SEQ ID NO: 487637 - DNA, 33 bp, Homo sapien
caccagtactttaacacatctagctgattcaga

SEQ ID NO: 487638 - DNA, 33 bp, Homo sapien
caccagtactttaacatatctagctgattcaga

SEQ ID NO: 487639 - DNA, 33 bp, Homo sapien
tttaatctacaatcaaagcaccagtactttaac

SEQ ID NO: 487640 - DNA, 33 bp, Homo sapien
tttaatctacaatcaatgcaccagtactttaac

SEQ ID NO: 487641 - DNA, 33 bp, Homo sapien
tgctgatgaatcccaaatgtatatctctaatcc

SEQ ID NO: 487642 - DNA, 33 bp, Homo sapien
tgctgatgaatcccaagtgtatatctctaatcc

SEQ ID NO: 487643 - DNA, 33 bp, Homo sapien
caaggtgctgagtggccaggaaacattcagtaa

SEQ ID NO: 487644 - DNA, 33 bp, Homo sapien
caaggtgctgagtggctaggaaacattcagtaa

SEQ ID NO: 487645 - DNA, 33 bp, Homo sapien
tacagatgaaatatacaggataagtcagcctgt

SEQ ID NO: 487646 - DNA, 33 bp, Homo sapien
tacagatgaaatatacgggataagtcagcctgt

SEQ ID NO: 487647 - DNA, 33 bp, Homo sapien
ctcatttctctgtttaccttggttattgaatca

SEQ ID NO: 487648 - DNA, 33 bp, Homo sapien
ctcatttctctgtttatcttggttattgaatca

SEQ ID NO: 487649 - DNA, 33 bp, Homo sapien
aaacttggacatgaagaattatttctctctgag

SEQ ID NO: 487650 - DNA, 33 bp, Homo sapien
aaacttggacatgaaggattatttctctctgag

SEQ ID NO: 487651 - DNA, 33 bp, Homo sapien
gtcagtggacatagtaagatattcaatgaatgt

SEQ ID NO: 487652 - DNA, 33 bp, Homo sapien
gtcagtggacatagtaggatattcaatgaatgt

SEQ ID NO: 487653 - DNA, 33 bp, Homo sapien
gggtccaggaaagccaggtctcagcatacagaa

SEQ ID NO: 487654 - DNA, 33 bp, Homo sapien
gggtccaggaaagccatgtctcagcatacagaa

SEQ ID NO: 487655 - DNA, 33 bp, Homo sapien
aagtatacatttttcaacactgaattaaagatg

SEQ ID NO: 487656 - DNA, 33 bp, Homo sapien
aagtatacatttttcagcactgaattaaagatg

SEQ ID NO: 487657 - DNA, 33 bp, Homo sapien
agaaacatttgctttgaagatacataatatcca

SEQ ID NO: 487658 - DNA, 33 bp, Homo sapien
agaaacatttgctttggagatacataatatcca

SEQ ID NO: 487659 - DNA, 33 bp, Homo sapien
acagaggcagtaatacccagacttagagaaaga

SEQ ID NO: 487660 - DNA, 33 bp, Homo sapien
acagaggcagtaatactcagacttagagaaaga

SEQ ID NO: 487661 - DNA, 33 bp, Homo sapien
tgttttgtttttgctaccatcaattttatggag

SEQ ID NO: 487662 - DNA, 33 bp, Homo sapien
tgttttgtttttgctatcatcaattttatggag

SEQ ID NO: 487663 - DNA, 33 bp, Homo sapien
ggacaagtttagtttacatatgccaggtcacac

SEQ ID NO: 487664 - DNA, 33 bp, Homo sapien
ggacaagtttagtttagatatgccaggtcacac

SEQ ID NO: 487665 - DNA, 33 bp, Homo sapien
aattcaggattcttgcagacagattaaaaatta

SEQ ID NO: 487666 - DNA, 33 bp, Homo sapien
aattcaggattcttgccgacagattaaaaatta

SEQ ID NO: 487667 - DNA, 33 bp, Homo sapien
tttcttagatacatgaagtcttggtaaccttaa

SEQ ID NO: 487668 - DNA, 33 bp, Homo sapien
tttcttagatacatgaggtcttggtaaccttaa

SEQ ID NO: 487669 - DNA, 33 bp, Homo sapien
taaaatgtttataggaaaagtggtcatgtagta

SEQ ID NO: 487670 - DNA, 33 bp, Homo sapien
taaaatgtttataggagaagtggtcatgtagta

SEQ ID NO: 487671 - DNA, 33 bp, Homo sapien
atgaaactatcagtagcatgggaatgagtatgt

SEQ ID NO: 487672 - DNA, 33 bp, Homo sapien
atgaaactatcagtagtatgggaatgagtatgt

SEQ ID NO: 487673 - DNA, 33 bp, Homo sapien
ttctaaatgtacatccacactggaatcagaaca

SEQ ID NO: 487674 - DNA, 33 bp, Homo sapien
ttctaaatgtacatccgcactggaatcagaaca

SEQ ID NO: 487675 - DNA, 33 bp, Homo sapien
atagattagatacgggaactgaaatataaacct

SEQ ID NO: 487676 - DNA, 33 bp, Homo sapien
atagattagatacgggcactgaaatataaacct

SEQ ID NO: 487677 - DNA, 33 bp, Homo sapien
gtcacttgtttcttacaataaagtcgtggtaaa

SEQ ID NO: 487678 - DNA, 33 bp, Homo sapien
gtcacttgtttcttacgataaagtcgtggtaaa

SEQ ID NO: 487679 - DNA, 33 bp, Homo sapien
ccacactttctgattaaaatctttccaaatatt

SEQ ID NO: 487680 - DNA, 33 bp, Homo sapien
ccacactttctgattacaatctttccaaatatt

SEQ ID NO: 487681 - DNA, 33 bp, Homo sapien
cagccacttgacactaacaagcattatgtttat

SEQ ID NO: 487682 - DNA, 33 bp, Homo sapien
cagccacttgacactagcaagcattatgtttat

SEQ ID NO: 487683 - DNA, 33 bp, Homo sapien
accctgcattagccaaacattgtatgcaaaaca

SEQ ID NO: 487684 - DNA, 33 bp, Homo sapien
accctgcattagccaagcattgtatgcaaaaca

SEQ ID NO: 487685 - DNA, 33 bp, Homo sapien
agtagaataatcacaaatatatcaacagggaat

SEQ ID NO: 487686 - DNA, 33 bp, Homo sapien
agtagaataatcacaagtatatcaacagggaat

SEQ ID NO: 487687 - DNA, 33 bp, Homo sapien
cttatctaaacattcgaaactcatcatggcact

SEQ ID NO: 487688 - DNA, 33 bp, Homo sapien
cttatctaaacattcggaactcatcatggcact

SEQ ID NO: 487689 - DNA, 33 bp, Homo sapien
aagagaggcagtagaggaacctttgtatgacca

SEQ ID NO: 487690 - DNA, 33 bp, Homo sapien
aagagaggcagtagagtaacctttgtatgacca

SEQ ID NO: 487691 - DNA, 33 bp, Homo sapien
tattttgttataggaaattcaaccatgaaccca

SEQ ID NO: 487692 - DNA, 33 bp, Homo sapien
tattttgttataggaacttcaaccatgaaccca

SEQ ID NO: 487693 - DNA, 33 bp, Homo sapien
aaatgtgtgtttcttacggaaagtcattttaac

SEQ ID NO: 487694 - DNA, 33 bp, Homo sapien
aaatgtgtgtttcttatggaaagtcattttaac

SEQ ID NO: 487695 - DNA, 33 bp, Homo sapien
agcatcttctatgcagacctcataaggtaacaa

SEQ ID NO: 487696 - DNA, 33 bp, Homo sapien
agcatcttctatgcagccctcataaggtaacaa

SEQ ID NO: 487697 - DNA, 33 bp, Homo sapien
gcattgtcaagttccactatgcctgcacaaatt

SEQ ID NO: 487698 - DNA, 33 bp, Homo sapien
gcattgtcaagttccattatgcctgcacaaatt

SEQ ID NO: 487699 - DNA, 33 bp, Homo sapien
tcctttaacagtttcacctctaggaactttggt

SEQ ID NO: 487700 - DNA, 33 bp, Homo sapien
tcctttaacagtttcatctctaggaactttggt

SEQ ID NO: 487701 - DNA, 33 bp, Homo sapien
tgtgttctgtttgactcaatggaaggaatttct

SEQ ID NO: 487702 - DNA, 33 bp, Homo sapien
tgtgttctgtttgacttaatggaaggaatttct

SEQ ID NO: 487703 - DNA, 33 bp, Homo sapien
ttctacctaaaatgtaccgagatgtatctgttt

SEQ ID NO: 487704 - DNA, 33 bp, Homo sapien
ttctacctaaaatgtatcgagatgtatctgttt

SEQ ID NO: 487705 - DNA, 33 bp, Homo sapien
agaggaaatagttctacgtaccttaacctaggt

SEQ ID NO: 487706 - DNA, 33 bp, Homo sapien
agaggaaatagttctatgtaccttaacctaggt

SEQ ID NO: 487707 - DNA, 33 bp, Homo sapien
gaggagatcacaaataaatggaaaaatgtctca

SEQ ID NO: 487708 - DNA, 33 bp, Homo sapien
gaggagatcacaaatacatggaaaaatgtctca

SEQ ID NO: 487709 - DNA, 33 bp, Homo sapien
taataaaacataagcgaaacagtgaaaaacttg

SEQ ID NO: 487710 - DNA, 33 bp, Homo sapien
taataaaacataagcgcaacagtgaaaaacttg

SEQ ID NO: 487711 - DNA, 33 bp, Homo sapien
tcaaaatgcggacttccaggctttatgactata

SEQ ID NO: 487712 - DNA, 33 bp, Homo sapien
tcaaaatgcggacttctaggctttatgactata

SEQ ID NO: 487713 - DNA, 33 bp, Homo sapien
ataacttataaactcaccagctcaattacttta

SEQ ID NO: 487714 - DNA, 33 bp, Homo sapien
ataacttataaactcatcagctcaattacttta

SEQ ID NO: 487715 - DNA, 33 bp, Homo sapien
aactggtaaaagagaaacttagatttcatgatt

SEQ ID NO: 487716 - DNA, 33 bp, Homo sapien
aactggtaaaagagaaccttagatttcatgatt

SEQ ID NO: 487717 - DNA, 33 bp, Homo sapien
ttaataatttttcttacagagtgtcccattgcc

SEQ ID NO: 487718 - DNA, 33 bp, Homo sapien
ttaataatttttcttatagagtgtcccattgcc

SEQ ID NO: 487719 - DNA, 33 bp, Homo sapien
cagggcaagtgctcgacgatattagccatttct

SEQ ID NO: 487720 - DNA, 33 bp, Homo sapien
cagggcaagtgctcgatgatattagccatttct

SEQ ID NO: 487721 - DNA, 33 bp, Homo sapien
tgcactgttcttttctcaactgtctcacgtttt

SEQ ID NO: 487722 - DNA, 33 bp, Homo sapien
tgcactgttcttttcttaactgtctcacgtttt

SEQ ID NO: 487723 - DNA, 33 bp, Homo sapien
tgtcaaagggacatagaaatcaatttgagaaag

SEQ ID NO: 487724 - DNA, 33 bp, Homo sapien
tgtcaaagggacataggaatcaatttgagaaag

SEQ ID NO: 487725 - DNA, 33 bp, Homo sapien
acatgagtcaggaacaacttaagagttttggaa

SEQ ID NO: 487726 - DNA, 33 bp, Homo sapien
acatgagtcaggaacatcttaagagttttggaa

SEQ ID NO: 487727 - DNA, 33 bp, Homo sapien
cagagagtaggagttaggatgaggaaaaatggc

SEQ ID NO: 487728 - DNA, 33 bp, Homo sapien
cagagagtaggagttatgatgaggaaaaatggc

SEQ ID NO: 487729 - DNA, 33 bp, Homo sapien
gaaatccactgtattaagggcactgcgtgacca

SEQ ID NO: 487730 - DNA, 33 bp, Homo sapien
gaaatccactgtattaggggcactgcgtgacca

SEQ ID NO: 487731 - DNA, 33 bp, Homo sapien
tagaggtatgctgtaccgacaaaataatggtta

SEQ ID NO: 487732 - DNA, 33 bp, Homo sapien
tagaggtatgctgtactgacaaaataatggtta

SEQ ID NO: 487733 - DNA, 33 bp, Homo sapien
aatggtaaagagagaaatgaaatcctactaggt

SEQ ID NO: 487734 - DNA, 33 bp, Homo sapien
aatggtaaagagagaagtgaaatcctactaggt

SEQ ID NO: 487735 - DNA, 33 bp, Homo sapien
cctcagggcttccaaaacattgtttctagcgta

SEQ ID NO: 487736 - DNA, 33 bp, Homo sapien
cctcagggcttccaaagcattgtttctagcgta

SEQ ID NO: 487737 - DNA, 33 bp, Homo sapien
ttattgctttcaaacagtcaagtcctatgccag

SEQ ID NO: 487738 - DNA, 33 bp, Homo sapien
ttattgctttcaaacattcaagtcctatgccag

SEQ ID NO: 487739 - DNA, 33 bp, Homo sapien
caatggattccataaagtattgatccatgagct

SEQ ID NO: 487740 - DNA, 33 bp, Homo sapien
caatggattccataaattattgatccatgagct

SEQ ID NO: 487741 - DNA, 33 bp, Homo sapien
atacgaaacagcttaaatattctgaaatctgaa

SEQ ID NO: 487742 - DNA, 33 bp, Homo sapien
atacgaaacagcttaagtattctgaaatctgaa

SEQ ID NO: 487743 - DNA, 33 bp, Homo sapien
aatcataacttttatcaaccatcactacctctt

SEQ ID NO: 487744 - DNA, 33 bp, Homo sapien
aatcataacttttatcgaccatcactacctctt

SEQ ID NO: 487745 - DNA, 33 bp, Homo sapien
tgattataatgctatgacaaaaaataatcaacc

SEQ ID NO: 487746 - DNA, 33 bp, Homo sapien
tgattataatgctatgccaaaaaataatcaacc

SEQ ID NO: 487747 - DNA, 33 bp, Homo sapien
ctgtttgttaacagtaaccacaggaacagttgt

SEQ ID NO: 487748 - DNA, 33 bp, Homo sapien
ctgtttgttaacagtagccacaggaacagttgt

SEQ ID NO: 487749 - DNA, 33 bp, Homo sapien
ttacttctagataacacgaacttgtcaaaaagg

SEQ ID NO: 487750 - DNA, 33 bp, Homo sapien
ttacttctagataacatgaacttgtcaaaaagg

SEQ ID NO: 487751 - DNA, 33 bp, Homo sapien
gcctgcctgatccaaacgttaaagacagattca

SEQ ID NO: 487752 - DNA, 33 bp, Homo sapien
gcctgcctgatccaaatgttaaagacagattca

SEQ ID NO: 487753 - DNA, 33 bp, Homo sapien
acctgcaaacatctaaacaagactctaagaagt

SEQ ID NO: 487754 - DNA, 33 bp, Homo sapien
acctgcaaacatctaaccaagactctaagaagt

SEQ ID NO: 487755 - DNA, 33 bp, Homo sapien
gcttttactatgaaatcaaggtaattaaaataa

SEQ ID NO: 487756 - DNA, 33 bp, Homo sapien
gcttttactatgaaatgaaggtaattaaaataa

SEQ ID NO: 487757 - DNA, 33 bp, Homo sapien
tattacactgatttgaataacacagaaaactga

SEQ ID NO: 487758 - DNA, 33 bp, Homo sapien
tattacactgatttgagtaacacagaaaactga

SEQ ID NO: 487759 - DNA, 33 bp, Homo sapien
caagaaatactgcaggaacatatcaggaaagct

SEQ ID NO: 487760 - DNA, 33 bp, Homo sapien
caagaaatactgcagggacatatcaggaaagct

SEQ ID NO: 487761 - DNA, 33 bp, Homo sapien
tctctgcaggctccgcaaggcagctgaaaaact

SEQ ID NO: 487762 - DNA, 33 bp, Homo sapien
tctctgcaggctccgcgaggcagctgaaaaact

SEQ ID NO: 487763 - DNA, 33 bp, Homo sapien
ttcatattctgcatcacgtttttgatttctcta

SEQ ID NO: 487764 - DNA, 33 bp, Homo sapien
ttcatattctgcatcatgtttttgatttctcta

SEQ ID NO: 487765 - DNA, 33 bp, Homo sapien
gatataaaattaatgcacacaaatcaatagcac

SEQ ID NO: 487766 - DNA, 33 bp, Homo sapien
gatataaaattaatgcgcacaaatcaatagcac

SEQ ID NO: 487767 - DNA, 33 bp, Homo sapien
tcaacactgaaagaaacacctatcaattctcgt

SEQ ID NO: 487768 - DNA, 33 bp, Homo sapien
tcaacactgaaagaaatacctatcaattctcgt

SEQ ID NO: 487769 - DNA, 33 bp, Homo sapien
tcagtatctataattaactcttgctgaattttt

SEQ ID NO: 487770 - DNA, 33 bp, Homo sapien
tcagtatctataattacctcttgctgaattttt

SEQ ID NO: 487771 - DNA, 33 bp, Homo sapien
ttaatgtgatatgtcactattcagggaatgtag

SEQ ID NO: 487772 - DNA, 33 bp, Homo sapien
ttaatgtgatatgtcagtattcagggaatgtag

SEQ ID NO: 487773 - DNA, 33 bp, Homo sapien
ataatatgctcctagggattatagcagactgtg

SEQ ID NO: 487774 - DNA, 33 bp, Homo sapien
ataatatgctcctaggtattatagcagactgtg

SEQ ID NO: 487775 - DNA, 33 bp, Homo sapien
agaatgtgacataaaccgttattgcaaggtagg

SEQ ID NO: 487776 - DNA, 33 bp, Homo sapien
agaatgtgacataaactgttattgcaaggtagg

SEQ ID NO: 487777 - DNA, 33 bp, Homo sapien
ggaagaaaaatagctacgagaagattgcatcat

SEQ ID NO: 487778 - DNA, 33 bp, Homo sapien
ggaagaaaaatagctatgagaagattgcatcat

SEQ ID NO: 487779 - DNA, 33 bp, Homo sapien
ttgtcaagaagttgacaggtgagttccataaac

SEQ ID NO: 487780 - DNA, 33 bp, Homo sapien
ttgtcaagaagttgaccggtgagttccataaac

SEQ ID NO: 487781 - DNA, 33 bp, Homo sapien
atgagcaaagctagaaataagctacataagcaa

SEQ ID NO: 487782 - DNA, 33 bp, Homo sapien
atgagcaaagctagaagtaagctacataagcaa

SEQ ID NO: 487783 - DNA, 33 bp, Homo sapien
aatgtgactttttaaccgactaacccacatttg

SEQ ID NO: 487784 - DNA, 33 bp, Homo sapien
aatgtgactttttaactgactaacccacatttg

SEQ ID NO: 487785 - DNA, 33 bp, Homo sapien
aaatattactagatcaaaagagcgagagactct

SEQ ID NO: 487786 - DNA, 33 bp, Homo sapien
aaatattactagatcagaagagcgagagactct

SEQ ID NO: 487787 - DNA, 33 bp, Homo sapien
gtctggtacacgaagacaacaatacaatgagtg

SEQ ID NO: 487788 - DNA, 33 bp, Homo sapien
gtctggtacacgaagagaacaatacaatgagtg

SEQ ID NO: 487789 - DNA, 33 bp, Homo sapien
tcattacaataaactacgttgaacacagcacaa

SEQ ID NO: 487790 - DNA, 33 bp, Homo sapien
tcattacaataaactatgttgaacacagcacaa

SEQ ID NO: 487791 - DNA, 33 bp, Homo sapien
atctcattgtctgagcaaagatgggtccagata

SEQ ID NO: 487792 - DNA, 33 bp, Homo sapien
atctcattgtctgagccaagatgggtccagata

SEQ ID NO: 487793 - DNA, 33 bp, Homo sapien
ccagaactgcctgatcacaaaccccatgatttt

SEQ ID NO: 487794 - DNA, 33 bp, Homo sapien
ccagaactgcctgatcgcaaaccccatgatttt

SEQ ID NO: 487795 - DNA, 33 bp, Homo sapien
agctctcctacttaaacgtcatggaagtaagca

SEQ ID NO: 487796 - DNA, 33 bp, Homo sapien
agctctcctacttaaatgtcatggaagtaagca

SEQ ID NO: 487797 - DNA, 33 bp, Homo sapien
tctagactcagaggcacgattgttttctaaatg

SEQ ID NO: 487798 - DNA, 33 bp, Homo sapien
tctagactcagaggcaggattgttttctaaatg

SEQ ID NO: 487799 - DNA, 33 bp, Homo sapien
tagaactagaaacaaaagtcaactgttttagat

SEQ ID NO: 487800 - DNA, 33 bp, Homo sapien
tagaactagaaacaaaggtcaactgttttagat

SEQ ID NO: 487801 - DNA, 33 bp, Homo sapien
taaagaggtccaaaaaaataatgttcacattgt

SEQ ID NO: 487802 - DNA, 33 bp, Homo sapien
taaagaggtccaaaaacataatgttcacattgt

SEQ ID NO: 487803 - DNA, 33 bp, Homo sapien
tacatggacaagacctaaataaacattctgcta

SEQ ID NO: 487804 - DNA, 33 bp, Homo sapien
tacatggacaagacctcaataaacattctgcta

SEQ ID NO: 487805 - DNA, 33 bp, Homo sapien
caccaatcacacgttccctgaggttaacaagct

SEQ ID NO: 487806 - DNA, 33 bp, Homo sapien
caccaatcacacgttctctgaggttaacaagct

SEQ ID NO: 487807 - DNA, 33 bp, Homo sapien
tggataaaagcaacataacaggattatcattgt

SEQ ID NO: 487808 - DNA, 33 bp, Homo sapien
tggataaaagcaacatgacaggattatcattgt

SEQ ID NO: 487809 - DNA, 33 bp, Homo sapien
tattttgttcccaaataaaatgttcaacagaca

SEQ ID NO: 487810 - DNA, 33 bp, Homo sapien
tattttgttcccaaatgaaatgttcaacagaca

SEQ ID NO: 487811 - DNA, 33 bp, Homo sapien
aaagcttctctcaggaaaagaaaggacgaaaaa

SEQ ID NO: 487812 - DNA, 33 bp, Homo sapien
aaagcttctctcaggacaagaaaggacgaaaaa

SEQ ID NO: 487813 - DNA, 33 bp, Homo sapien
ttcttctgtacaacaccgtgtgattccagatac

SEQ ID NO: 487814 - DNA, 33 bp, Homo sapien
ttcttctgtacaacactgtgtgattccagatac

SEQ ID NO: 487815 - DNA, 33 bp, Homo sapien
catatttaaacccacaataaaagctactgaatg

SEQ ID NO: 487816 - DNA, 33 bp, Homo sapien
catatttaaacccacagtaaaagctactgaatg

SEQ ID NO: 487817 - DNA, 33 bp, Homo sapien
gaagctatcttttatacggaagtagccataaga

SEQ ID NO: 487818 - DNA, 33 bp, Homo sapien
gaagctatcttttatatggaagtagccataaga

SEQ ID NO: 487819 - DNA, 33 bp, Homo sapien
tttgctttttgactaagccatatttctaaaaca

SEQ ID NO: 487820 - DNA, 33 bp, Homo sapien
tttgctttttgactaatccatatttctaaaaca

SEQ ID NO: 487821 - DNA, 33 bp, Homo sapien
atcttaaccatccttgcagattttcacttcctg

SEQ ID NO: 487822 - DNA, 33 bp, Homo sapien
atcttaaccatccttgtagattttcacttcctg

SEQ ID NO: 487823 - DNA, 33 bp, Homo sapien
gtctcaattgtagtacagtaccactctgacgga

SEQ ID NO: 487824 - DNA, 33 bp, Homo sapien
gtctcaattgtagtacggtaccactctgacgga

SEQ ID NO: 487825 - DNA, 33 bp, Homo sapien
ccatactggtgactcactcttaacatggttccg

SEQ ID NO: 487826 - DNA, 33 bp, Homo sapien
ccatactggtgactcagtcttaacatggttccg

SEQ ID NO: 487827 - DNA, 33 bp, Homo sapien
gtaccagtctactccacctttgaacatacttca

SEQ ID NO: 487828 - DNA, 33 bp, Homo sapien
gtaccagtctactccatctttgaacatacttca

SEQ ID NO: 487829 - DNA, 33 bp, Homo sapien
ctcagtgggacatacaatgaaaagtagtaaggc

SEQ ID NO: 487830 - DNA, 33 bp, Homo sapien
ctcagtgggacatacagtgaaaagtagtaaggc

SEQ ID NO: 487831 - DNA, 33 bp, Homo sapien
tgtatatatgcctttaacttatcaactttgttt

SEQ ID NO: 487832 - DNA, 33 bp, Homo sapien
tgtatatatgcctttaccttatcaactttgttt

SEQ ID NO: 487833 - DNA, 33 bp, Homo sapien
agcaaaagtttcattcacaaaccatatctttat

SEQ ID NO: 487834 - DNA, 33 bp, Homo sapien
agcaaaagtttcattcccaaaccatatctttat

SEQ ID NO: 487835 - DNA, 33 bp, Homo sapien
tataaagtgaaaaccaagtactgtcgggagagg

SEQ ID NO: 487836 - DNA, 33 bp, Homo sapien
tataaagtgaaaaccaggtactgtcgggagagg

SEQ ID NO: 487837 - DNA, 33 bp, Homo sapien
taagggcagccagagacaaagcccagattaccc

SEQ ID NO: 487838 - DNA, 33 bp, Homo sapien
taagggcagccagagagaaagcccagattaccc

SEQ ID NO: 487839 - DNA, 33 bp, Homo sapien
cctgaatacagcacacaaagcctcttgactctt

SEQ ID NO: 487840 - DNA, 33 bp, Homo sapien
cctgaatacagcacacgaagcctcttgactctt

SEQ ID NO: 487841 - DNA, 33 bp, Homo sapien
agcaatcaattaatacaatccacaacgtcaaca

SEQ ID NO: 487842 - DNA, 33 bp, Homo sapien
agcaatcaattaatacgatccacaacgtcaaca

SEQ ID NO: 487843 - DNA, 33 bp, Homo sapien
actcaaggcacctgaccatagctaaggtttcca

SEQ ID NO: 487844 - DNA, 33 bp, Homo sapien
actcaaggcacctgacgatagctaaggtttcca

SEQ ID NO: 487845 - DNA, 33 bp, Homo sapien
ctaccttgaacttagaggaatggctttatttcc

SEQ ID NO: 487846 - DNA, 33 bp, Homo sapien
ctaccttgaacttagatgaatggctttatttcc

SEQ ID NO: 487847 - DNA, 33 bp, Homo sapien
accaaatgaggtgtgacacttcctgagggctca

SEQ ID NO: 487848 - DNA, 33 bp, Homo sapien
accaaatgaggtgtgatacttcctgagggctca

SEQ ID NO: 487849 - DNA, 33 bp, Homo sapien
acatataggtttgtgccatacaaaagaaattca

SEQ ID NO: 487850 - DNA, 33 bp, Homo sapien
acatataggtttgtgctatacaaaagaaattca

SEQ ID NO: 487851 - DNA, 33 bp, Homo sapien
ccctagattcaatgatgagtgtctttatcatca

SEQ ID NO: 487852 - DNA, 33 bp, Homo sapien
ccctagattcaatgattagtgtctttatcatca

SEQ ID NO: 487853 - DNA, 33 bp, Homo sapien
taaacatcatcttaccacataatcctgtactgt

SEQ ID NO: 487854 - DNA, 33 bp, Homo sapien
taaacatcatcttaccgcataatcctgtactgt

SEQ ID NO: 487855 - DNA, 33 bp, Homo sapien
ttgtacataaaattggcattttgaaacgtgagt

SEQ ID NO: 487856 - DNA, 33 bp, Homo sapien
ttgtacataaaattgggattttgaaacgtgagt

SEQ ID NO: 487857 - DNA, 33 bp, Homo sapien; identical to SEQ ID NO: 487855

SEQ ID NO: 487858 - DNA, 33 bp, Homo sapien; identical to SEQ ID NO: 487856

SEQ ID NO: 487859 - DNA, 33 bp, Homo sapien
cacttgaagtattaaaatccaaactgtcatatt

SEQ ID NO: 487860 - DNA, 33 bp, Homo sapien
cacttgaagtattaaagtccaaactgtcatatt

SEQ ID NO: 487861 - DNA, 33 bp, Homo sapien
aagaaatacagtgatagtacagatcagccaatt

SEQ ID NO: 487862 - DNA, 33 bp, Homo sapien
aagaaatacagtgatattacagatcagccaatt

SEQ ID NO: 487863 - DNA, 33 bp, Homo sapien
gaaggtctttacttcaataacgttatctctatc

SEQ ID NO: 487864 - DNA, 33 bp, Homo sapien
gaaggtctttacttcattaacgttatctctatc

SEQ ID NO: 487865 - DNA, 33 bp, Homo sapien
tgaaacgatgagctgagagaaatagtatagaag

SEQ ID NO: 487866 - DNA, 33 bp, Homo sapien
tgaaacgatgagctgatagaaatagtatagaag

SEQ ID NO: 487867 - DNA, 33 bp, Homo sapien
gcagcttgaaagggaaaggcttggcaatatcta

SEQ ID NO: 487868 - DNA, 33 bp, Homo sapien
gcagcttgaaagggaagggcttggcaatatcta

SEQ ID NO: 487869 - DNA, 33 bp, Homo sapien
taattgctcttcttcaaactggcctaaagttaa

SEQ ID NO: 487870 - DNA, 33 bp, Homo sapien
taattgctcttcttcacactggcctaaagttaa

SEQ ID NO: 487871 - DNA, 33 bp, Homo sapien
ggcttcaattgatttccctttgcatgggctact

SEQ ID NO: 487872 - DNA, 33 bp, Homo sapien
ggcttcaattgatttctctttgcatgggctact

SEQ ID NO: 487873 - DNA, 33 bp, Homo sapien
ctgtaagtgtcccaccaggtgactctgggagaa

SEQ ID NO: 487874 - DNA, 33 bp, Homo sapien
ctgtaagtgtcccacctggtgactctgggagaa

SEQ ID NO: 487875 - DNA, 33 bp, Homo sapien
aaagacacattcatataagctccctagacaaat

SEQ ID NO: 487876 - DNA, 33 bp, Homo sapien
aaagacacattcatatgagctccctagacaaat

SEQ ID NO: 487877 - DNA, 33 bp, Homo sapien
aggaattcattgccaaaggacaagataaaaata

SEQ ID NO: 487878 - DNA, 33 bp, Homo sapien
aggaattcattgccaacggacaagataaaaata

SEQ ID NO: 487879 - DNA, 33 bp, Homo sapien
gaaattctagagtggccatattactgtgacaga

SEQ ID NO: 487880 - DNA, 33 bp, Homo sapien
gaaattctagagtggctatattactgtgacaga

SEQ ID NO: 487881 - DNA, 33 bp, Homo sapien
atgccagaggtgataggcacttttgcagccata

SEQ ID NO: 487882 - DNA, 33 bp, Homo sapien
atgccagaggtgatagtcacttttgcagccata

SEQ ID NO: 487883 - DNA, 33 bp, Homo sapien
gtctcaggattacataagaatttaggaaatttg

SEQ ID NO: 487884 - DNA, 33 bp, Homo sapien
gtctcaggattacataggaatttaggaaatttg

SEQ ID NO: 487885 - DNA, 33 bp, Homo sapien; identical to SEQ ID NO: 487883

SEQ ID NO: 487886 - DNA, 33 bp, Homo sapien; identical to SEQ ID NO: 487884

SEQ ID NO: 487887 - DNA, 33 bp, Homo sapien
atttcttaagctaggaggtatggtcaagcatat

SEQ ID NO: 487888 - DNA, 33 bp, Homo sapien
atttcttaagctaggatgtatggtcaagcatat

SEQ ID NO: 487889 - DNA, 33 bp, Homo sapien; identical to SEQ ID NO: 487887

SEQ ID NO: 487890 - DNA, 33 bp, Homo sapien; identical to SEQ ID NO: 487888

SEQ ID NO: 487891 - DNA, 33 bp, Homo sapien
cagctaaaccgtatcactgacaatagattcttc

SEQ ID NO: 487892 - DNA, 33 bp, Homo sapien
cagctaaaccgtatcattgacaatagattcttc

SEQ ID NO: 487893 - DNA, 33 bp, Homo sapien; identical to SEQ ID NO: 487891

SEQ ID NO: 487894 - DNA, 33 bp, Homo sapien; identical to SEQ ID NO: 487892

SEQ ID NO: 487895 - DNA, 33 bp, Homo sapien
ggcacagaatctctcaatagtcttcagattttc

SEQ ID NO: 487896 - DNA, 33 bp, Homo sapien
ggcacagaatctctcagtagtcttcagattttc

SEQ ID NO: 487897 - DNA, 33 bp, Homo sapien
agtcctatgcactcaaagaatttaaatagcaga

SEQ ID NO: 487898 - DNA, 33 bp, Homo sapien
agtcctatgcactcaaggaatttaaatagcaga

SEQ ID NO: 487899 - DNA, 33 bp, Homo sapien
cagcaggaagatgaagaaaaaaatccagcaaga

SEQ ID NO: 487900 - DNA, 33 bp, Homo sapien
cagcaggaagatgaaggaaaaaatccagcaaga

SEQ ID NO: 487901 - DNA, 33 bp, Homo sapien; identical to SEQ ID NO: 487899

SEQ ID NO: 487902 - DNA, 33 bp, Homo sapien; identical to SEQ ID NO: 487900

SEQ ID NO: 487903 - DNA, 33 bp, Homo sapien
tattctcacatcaagcagcctttacatatggcc

SEQ ID NO: 487904 - DNA, 33 bp, Homo sapien
tattctcacatcaagcggcctttacatatggcc

SEQ ID NO: 487905 - DNA, 33 bp, Homo sapien; identical to SEQ ID NO: 487903

SEQ ID NO: 487906 - DNA, 33 bp, Homo sapien; identical to SEQ ID NO: 487904

SEQ ID NO: 487907 - DNA, 33 bp, Homo sapien
aagcttttgagtccagacataacctaagataag

SEQ ID NO: 487908 - DNA, 33 bp, Homo sapien
aagcttttgagtccaggcataacctaagataag

SEQ ID NO: 487909 - DNA, 33 bp, Homo sapien
ggatttaactgcataaatgttccttagaagaag

SEQ ID NO: 487910 - DNA, 33 bp, Homo sapien
ggatttaactgcataagtgttccttagaagaag

SEQ ID NO: 487911 - DNA, 33 bp, Homo sapien
cacatatgaatgcctaatatgcacatgaaaaga

SEQ ID NO: 487912 - DNA, 33 bp, Homo sapien
cacatatgaatgcctagtatgcacatgaaaaga

SEQ ID NO: 487913 - DNA, 33 bp, Homo sapien
tgatctctctagatgccgatatcctactcatgc

SEQ ID NO: 487914 - DNA, 33 bp, Homo sapien
tgatctctctagatgctgatatcctactcatgc

SEQ ID NO: 487915 - DNA, 33 bp, Homo sapien
ttttaaaaccttcaaacgagatggtagacaata

SEQ ID NO: 487916 - DNA, 33 bp, Homo sapien
ttttaaaaccttcaaatgagatggtagacaata

SEQ ID NO: 487917 - DNA, 33 bp, Homo sapien
taggccagctcatgaacgtcaggatttactctt

SEQ ID NO: 487918 - DNA, 33 bp, Homo sapien
taggccagctcatgaatgtcaggatttactctt

SEQ ID NO: 487919 - DNA, 33 bp, Homo sapien
ttatcaaaggtccaaaagagaatttacagttta

SEQ ID NO: 487920 - DNA, 33 bp, Homo sapien
ttatcaaaggtccaaaggagaatttacagttta

SEQ ID NO: 487921 - DNA, 33 bp, Homo sapien; identical to SEQ ID NO: 487919

SEQ ID NO: 487922 - DNA, 33 bp, Homo sapien; identical to SEQ ID NO: 487920

SEQ ID NO: 487923 - DNA, 33 bp, Homo sapien
accataattccactttcaaactttgcatatgtg

SEQ ID NO: 487924 - DNA, 33 bp, Homo sapien
accataattccactttgaaactttgcatatgtg

SEQ ID NO: 487925 - DNA, 33 bp, Homo sapien
cagcacatgggcgaatcagaacggagatggttt

SEQ ID NO: 487926 - DNA, 33 bp, Homo sapien
cagcacatgggcgaatgagaacggagatggttt

SEQ ID NO: 487927 - DNA, 33 bp, Homo sapien
attgtgggtcattagacagatatttaggttaag

SEQ ID NO: 487928 - DNA, 33 bp, Homo sapien
attgtgggtcattagatagatatttaggttaag

SEQ ID NO: 487929 - DNA, 33 bp, Homo sapien
tcattttctaagcttggaaactttttgcaaatt

SEQ ID NO: 487930 - DNA, 33 bp, Homo sapien
tcattttctaagcttgtaaactttttgcaaatt

SEQ ID NO: 487931 - DNA, 33 bp, Homo sapien; identical to SEQ ID NO: 487929

SEQ ID NO: 487932 - DNA, 33 bp, Homo sapien; identical to SEQ ID NO: 487930

SEQ ID NO: 487933 - DNA, 33 bp, Homo sapien
cacacacgttttcttacgatggatgtaacatga

SEQ ID NO: 487934 - DNA, 33 bp, Homo sapien
cacacacgttttcttatgatggatgtaacatga

SEQ ID NO: 487935 - DNA, 33 bp, Homo sapien
tttccagtgctaatcaaaataaagactctgttg

SEQ ID NO: 487936 - DNA, 33 bp, Homo sapien
tttccagtgctaatcagaataaagactctgttg

SEQ ID NO: 487937 - DNA, 33 bp, Homo sapien
tatttcaatgattttccattgtggttttcttca

SEQ ID NO: 487938 - DNA, 33 bp, Homo sapien
tatttcaatgattttctattgtggttttcttca

SEQ ID NO: 487939 - DNA, 33 bp, Homo sapien; identical to SEQ ID NO: 487937

SEQ ID NO: 487940 - DNA, 33 bp, Homo sapien; identical to SEQ ID NO: 487938

SEQ ID NO: 487941 - DNA, 33 bp, Homo sapien
aacaacgaagtttatactaaagtgcaaaagctg

SEQ ID NO: 487942 - DNA, 33 bp, Homo sapien
aacaacgaagtttatagtaaagtgcaaaagctg

SEQ ID NO: 487943 - DNA, 33 bp, Homo sapien; identical to SEQ ID NO: 487941

SEQ ID NO: 487944 - DNA, 33 bp, Homo sapien; identical to SEQ ID NO: 487942

SEQ ID NO: 487945 - DNA, 33 bp, Homo sapien
gccatcttgcctcaaaattactatccctctcta

SEQ ID NO: 487946 - DNA, 33 bp, Homo sapien
gccatcttgcctcaaagttactatccctctcta

SEQ ID NO: 487947 - DNA, 33 bp, Homo sapien
ttgcaggtagcttggaagttttgttcatcattt

SEQ ID NO: 487948 - DNA, 33 bp, Homo sapien
ttgcaggtagcttggaggttttgttcatcattt

SEQ ID NO: 487949 - DNA, 33 bp, Homo sapien
tacaagataacaatccccagtgcacatagtaat

SEQ ID NO: 487950 - DNA, 33 bp, Homo sapien
tacaagataacaatcctcagtgcacatagtaat

SEQ ID NO: 487951 - DNA, 33 bp, Homo sapien
tggtcaaagtcattaaacaaatctctacaaagt

SEQ ID NO: 487952 - DNA, 33 bp, Homo sapien
tggtcaaagtcattaagcaaatctctacaaagt

SEQ ID NO: 487953 - DNA, 33 bp, Homo sapien
ctcatgaatggctgtacatactcgctttcactg

SEQ ID NO: 487954 - DNA, 33 bp, Homo sapien
ctcatgaatggctgtatatactcgctttcactg

SEQ ID NO: 487955 - DNA, 33 bp, Homo sapien
ataaattaggcaactacaagtgatgtgaattat

SEQ ID NO: 487956 - DNA, 33 bp, Homo sapien
ataaattaggcaactagaagtgatgtgaattat

SEQ ID NO: 487957 - DNA, 33 bp, Homo sapien
aaacaagagatcaatgcattcaacatcatggtt

SEQ ID NO: 487958 - DNA, 33 bp, Homo sapien
aaacaagagatcaatggattcaacatcatggtt

SEQ ID NO: 487959 - DNA, 33 bp, Homo sapien
ataatattttaagtgacgagaaaaacatgcatt

SEQ ID NO: 487960 - DNA, 33 bp, Homo sapien
ataatattttaagtgatgagaaaaacatgcatt

SEQ ID NO: 487961 - DNA, 33 bp, Homo sapien; identical to SEQ ID NO: 487959

SEQ ID NO: 487962 - DNA, 33 bp, Homo sapien; identical to SEQ ID NO: 487960

SEQ ID NO: 487963 - DNA, 33 bp, Homo sapien
cagcagataaccctgaagcccaaagattgctag

SEQ ID NO: 487964 - DNA, 33 bp, Homo sapien
cagcagataaccctgaggcccaaagattgctag

SEQ ID NO: 487965 - DNA, 33 bp, Homo sapien
tttggcagaatttcgacgtttgtaataagttga

SEQ ID NO: 487966 - DNA, 33 bp, Homo sapien
tttggcagaatttcgatgtttgtaataagttga

SEQ ID NO: 487967 - DNA, 33 bp, Homo sapien
acaagccctttgtaagaaatgttgtaaccaagt

SEQ ID NO: 487968 - DNA, 33 bp, Homo sapien
acaagccctttgtaagtaatgttgtaaccaagt

SEQ ID NO: 487969 - DNA, 33 bp, Homo sapien
aacatttgactcctataactctgatttttctga

SEQ ID NO: 487970 - DNA, 33 bp, Homo sapien
aacatttgactcctatgactctgatttttctga

SEQ ID NO: 487971 - DNA, 33 bp, Homo sapien
ttctgtatttggtaaaactcttcttgcaaaatg

SEQ ID NO: 487972 - DNA, 33 bp, Homo sapien
ttctgtatttggtaaacctcttcttgcaaaatg

SEQ ID NO: 487973 - DNA, 33 bp, Homo sapien; identical to SEQ ID NO: 487971

SEQ ID NO: 487974 - DNA, 33 bp, Homo sapien; identical to SEQ ID NO: 487972

SEQ ID NO: 487975 - DNA, 33 bp, Homo sapien
tagaagcattgagagagaatcaacttgccacat

SEQ ID NO: 487976 - DNA, 33 bp, Homo sapien
tagaagcattgagagataatcaacttgccacat

SEQ ID NO: 487977 - DNA, 33 bp, Homo sapien
attatgtcttctgatactactgttagaattttc

SEQ ID NO: 487978 - DNA, 33 bp, Homo sapien
attatgtcttctgatagtactgttagaattttc

SEQ ID NO: 487979 - DNA, 33 bp, Homo sapien
atgtgctgcagttaaaacctactgctcctctct

SEQ ID NO: 487980 - DNA, 33 bp, Homo sapien
atgtgctgcagttaaagcctactgctcctctct

SEQ ID NO: 487981 - DNA, 33 bp, Homo sapien
gcacttctcattgcaaagttacatataactctg

SEQ ID NO: 487982 - DNA, 33 bp, Homo sapien
gcacttctcattgcaaggttacatataactctg

SEQ ID NO: 487983 - DNA, 33 bp, Homo sapien
ggtgtgtgcatactcaagaagaaagggaatgga

SEQ ID NO: 487984 - DNA, 33 bp, Homo sapien
ggtgtgtgcatactcaggaagaaagggaatgga

SEQ ID NO: 487985 - DNA, 33 bp, Homo sapien; identical to SEQ ID NO: 487983

SEQ ID NO: 487986 - DNA, 33 bp, Homo sapien; identical to SEQ ID NO: 487984

SEQ ID NO: 487987 - DNA, 33 bp, Homo sapien
atatttaaatgtttaactgtgcttctatgacat

SEQ ID NO: 487988 - DNA, 33 bp, Homo sapien
atatttaaatgtttaagtgtgcttctatgacat

SEQ ID NO: 487989 - DNA, 33 bp, Homo sapien; identical to SEQ ID NO: 487987

SEQ ID NO: 487990 - DNA, 33 bp, Homo sapien; identical to SEQ ID NO: 487988

SEQ ID NO: 487991 - DNA, 33 bp, Homo sapien
tttaacctctccctccaaaattctgagtacttg

SEQ ID NO: 487992 - DNA, 33 bp, Homo sapien
tttaacctctccctcccaaattctgagtacttg

SEQ ID NO: 487993 - DNA, 33 bp, Homo sapien; identical to SEQ ID NO: 487991

SEQ ID NO: 487994 - DNA, 33 bp, Homo sapien; identical to SEQ ID NO: 487992

SEQ ID NO: 487995 - DNA, 33 bp, Homo sapien
gatcctagcaaaagcactattgttatgtacaga

SEQ ID NO: 487996 - DNA, 33 bp, Homo sapien
gatcctagcaaaagcattattgttatgtacaga

SEQ ID NO: 487997 - DNA, 33 bp, Homo sapien; identical to SEQ ID NO: 487995

SEQ ID NO: 487998 - DNA, 33 bp, Homo sapien; identical to SEQ ID NO: 487996

SEQ ID NO: 487999 - DNA, 33 bp, Homo sapien
aaataagacaataggaaaagggagtgaataaca

SEQ ID NO: 488000 - DNA, 33 bp, Homo sapien
aaataagacaataggagaagggagtgaataaca

SEQ ID NO: 488001 - DNA, 33 bp, Homo sapien; identical to SEQ ID NO: 487999

SEQ ID NO: 488002 - DNA, 33 bp, Homo sapien; identical to SEQ ID NO: 488000

SEQ ID NO: 488003 - DNA, 33 bp, Homo sapien
atttgagaagagacgcattggtaattgtgtaca

SEQ ID NO: 488004 - DNA, 33 bp, Homo sapien
atttgagaagagacgcgttggtaattgtgtaca

SEQ ID NO: 488005 - DNA, 33 bp, Homo sapien
ggccccaactgcaacactggaaatcaaatttca

SEQ ID NO: 488006 - DNA, 33 bp, Homo sapien
ggccccaactgcaacagtggaaatcaaatttca

SEQ ID NO: 488007 - DNA, 33 bp, Homo sapien
ggtagctacaaaattggacactgagggtttgca

SEQ ID NO: 488008 - DNA, 33 bp, Homo sapien
ggtagctacaaaattgtacactgagggtttgca

SEQ ID NO: 488009 - DNA, 33 bp, Homo sapien
cacacatttctgttacaaaaaggctttttagct

SEQ ID NO: 488010 - DNA, 33 bp, Homo sapien
cacacatttctgttaccaaaaggctttttagct

SEQ ID NO: 488011 - DNA, 33 bp, Homo sapien
tcagggaagaatatagaaaagtctagtggatac

SEQ ID NO: 488012 - DNA, 33 bp, Homo sapien
tcagggaagaatataggaaagtctagtggatac

SEQ ID NO: 488013 - DNA, 33 bp, Homo sapien; identical to SEQ ID NO: 488011

SEQ ID NO: 488014 - DNA, 33 bp, Homo sapien; identical to SEQ ID NO: 488012

SEQ ID NO: 488015 - DNA, 33 bp, Homo sapien
tgtctagctctttagcaaggctgggaaaatttt

SEQ ID NO: 488016 - DNA, 33 bp, Homo sapien
tgtctagctctttagcgaggctgggaaaatttt

SEQ ID NO: 488017 - DNA, 33 bp, Homo sapien
ctagtaagttgtcagacagaaacaatggcacac

SEQ ID NO: 488018 - DNA, 33 bp, Homo sapien
ctagtaagttgtcagatagaaacaatggcacac

SEQ ID NO: 488019 - DNA, 33 bp, Homo sapien
gagaaagagaaatatgaaactggatatggtgaa

SEQ ID NO: 488020 - DNA, 33 bp, Homo sapien
gagaaagagaaatatgcaactggatatggtgaa

SEQ ID NO: 488021 - DNA, 33 bp, Homo sapien
atgtgcaaggagtgaagataaaaaactcagaat

SEQ ID NO: 488022 - DNA, 33 bp, Homo sapien
atgtgcaaggagtgaatataaaaaactcagaat

SEQ ID NO: 488023 - DNA, 33 bp, Homo sapien
tatgagtttgggaagtaaagcaaaaactgaaat

SEQ ID NO: 488024 - DNA, 33 bp, Homo sapien
tatgagtttgggaagtgaagcaaaaactgaaat

SEQ ID NO: 488025 - DNA, 33 bp, Homo sapien
tttctccatcacactccaggctaaacaagtact

SEQ ID NO: 488026 - DNA, 33 bp, Homo sapien
tttctccatcacactctaggctaaacaagtact

SEQ ID NO: 488027 - DNA, 33 bp, Homo sapien
aatcagtcataccaacccaaaaatatctgtgga

SEQ ID NO: 488028 - DNA, 33 bp, Homo sapien
aatcagtcataccaactcaaaaatatctgtgga

SEQ ID NO: 488029 - DNA, 33 bp, Homo sapien
tttctgcaggagacaaacaaaccatgtacagaa

SEQ ID NO: 488030 - DNA, 33 bp, Homo sapien
tttctgcaggagacaatcaaaccatgtacagaa

SEQ ID NO: 488031 - DNA, 33 bp, Homo sapien
aaaatctctgtcaaaaatttgttaccagttatt

SEQ ID NO: 488032 - DNA, 33 bp, Homo sapien
aaaatctctgtcaaaagtttgttaccagttatt

SEQ ID NO: 488033 - DNA, 33 bp, Homo sapien
ataagtgaatcagtaaagtcaatgcacacaaaa

SEQ ID NO: 488034 - DNA, 33 bp, Homo sapien
ataagtgaatcagtaatgtcaatgcacacaaaa

SEQ ID NO: 488035 - DNA, 33 bp, Homo sapien
ttcaatgtggtcattagagagtagcaggcatta

SEQ ID NO: 488036 - DNA, 33 bp, Homo sapien
ttcaatgtggtcattatagagtagcaggcatta

SEQ ID NO: 488037 - DNA, 33 bp, Homo sapien
ttggttccccaagcctgagactttacagagttt

SEQ ID NO: 488038 - DNA, 33 bp, Homo sapien
ttggttccccaagccttagactttacagagttt

SEQ ID NO: 488039 - DNA, 33 bp, Homo sapien
tgtgtgactttaatcacctactactttgggatt

SEQ ID NO: 488040 - DNA, 33 bp, Homo sapien
tgtgtgactttaatcatctactactttgggatt

SEQ ID NO: 488041 - DNA, 33 bp, Homo sapien
atgggcacaaagagtgcaaagaatgaataggac

SEQ ID NO: 488042 - DNA, 33 bp, Homo sapien
atgggcacaaagagtggaaagaatgaataggac

SEQ ID NO: 488043 - DNA, 33 bp, Homo sapien
aagtctttgccgaagccaatgtatacaagggtt

SEQ ID NO: 488044 - DNA, 33 bp, Homo sapien
aagtctttgccgaagcgaatgtatacaagggtt

SEQ ID NO: 488045 - DNA, 33 bp, Homo sapien
cagtgttttattttcccaccagcagttttcaag

SEQ ID NO: 488046 - DNA, 33 bp, Homo sapien
cagtgttttattttcctaccagcagttttcaag

SEQ ID NO: 488047 - DNA, 33 bp, Homo sapien; identical to SEQ ID NO: 488045

SEQ ID NO: 488048 - DNA, 33 bp, Homo sapien; identical to SEQ ID NO: 488046

SEQ ID NO: 488049 - DNA, 33 bp, Homo sapien
ttataatgatgtgaccaataaacaaaatttaac

SEQ ID NO: 488050 - DNA, 33 bp, Homo sapien
ttataatgatgtgaccgataaacaaaatttaac

SEQ ID NO: 488051 - DNA, 33 bp, Homo sapien
ttattagtttcaaaggacacttatctggatagg

SEQ ID NO: 488052 - DNA, 33 bp, Homo sapien
ttattagtttcaaagggcacttatctggatagg

SEQ ID NO: 488053 - DNA, 33 bp, Homo sapien
ataatggtatgtatctaaaagtgactactactc

SEQ ID NO: 488054 - DNA, 33 bp, Homo sapien
ataatggtatgtatctgaaagtgactactactc

SEQ ID NO: 488055 - DNA, 33 bp, Homo sapien
ttactcctgagtatgcaaattcttttccaaaac

SEQ ID NO: 488056 - DNA, 33 bp, Homo sapien
ttactcctgagtatgcgaattcttttccaaaac

SEQ ID NO: 488057 - DNA, 33 bp, Homo sapien
cactgaaaacagtcttaaaaaaggcataatgag

SEQ ID NO: 488058 - DNA, 33 bp, Homo sapien
cactgaaaacagtctttaaaaaggcataatgag

SEQ ID NO: 488059 - DNA, 33 bp, Homo sapien
tgattgatgcataggaagtgatatggaaaatgt

SEQ ID NO: 488060 - DNA, 33 bp, Homo sapien
tgattgatgcataggatgtgatatggaaaatgt

SEQ ID NO: 488061 - DNA, 33 bp, Homo sapien
cttcccagatcttctccacttagcagctgaaga

SEQ ID NO: 488062 - DNA, 33 bp, Homo sapien
cttcccagatcttctctacttagcagctgaaga

SEQ ID NO: 488063 - DNA, 33 bp, Homo sapien
atgttgtcgcctttgaataattttcaccatttt

SEQ ID NO: 488064 - DNA, 33 bp, Homo sapien
atgttgtcgcctttgattaattttcaccatttt

SEQ ID NO: 488065 - DNA, 33 bp, Homo sapien
gtctttttacctctaaagaagctgccctttcct

SEQ ID NO: 488066 - DNA, 33 bp, Homo sapien
gtctttttacctctaaggaagctgccctttcct

SEQ ID NO: 488067 - DNA, 33 bp, Homo sapien
ctgactctggtacataaatacttcaacagacag

SEQ ID NO: 488068 - DNA, 33 bp, Homo sapien
ctgactctggtacatacatacttcaacagacag

SEQ ID NO: 488069 - DNA, 33 bp, Homo sapien
atgtaccagagtcagacatttttggtttgaatc

SEQ ID NO: 488070 - DNA, 33 bp, Homo sapien
atgtaccagagtcagatatttttggtttgaatc

SEQ ID NO: 488071 - DNA, 33 bp, Homo sapien
ttacccttaaaacctacaaaagctagcttatca

SEQ ID NO: 488072 - DNA, 33 bp, Homo sapien
ttacccttaaaacctataaaagctagcttatca

SEQ ID NO: 488073 - DNA, 33 bp, Homo sapien
tgtctggctaccccaagtcctctaggcaaacaa

SEQ ID NO: 488074 - DNA, 33 bp, Homo sapien
tgtctggctaccccaattcctctaggcaaacaa

SEQ ID NO: 488075 - DNA, 33 bp, Homo sapien
tgctggagtctaattagaaagttagagagaaga

SEQ ID NO: 488076 - DNA, 33 bp, Homo sapien
tgctggagtctaattataaagttagagagaaga

SEQ ID NO: 488077 - DNA, 33 bp, Homo sapien
ttaacacatttatgccaaagattgcaaatgttt

SEQ ID NO: 488078 - DNA, 33 bp, Homo sapien
ttaacacatttatgccgaagattgcaaatgttt

SEQ ID NO: 488079 - DNA, 33 bp, Homo sapien
tctcaaaaatgaggtactaaacttttcagctat

SEQ ID NO: 488080 - DNA, 33 bp, Homo sapien
tctcaaaaatgaggtattaaacttttcagctat

SEQ ID NO: 488081 - DNA, 33 bp, Homo sapien
tgcaagatataatacaatggaaacagcctaata

SEQ ID NO: 488082 - DNA, 33 bp, Homo sapien
tgcaagatataatacagtggaaacagcctaata

SEQ ID NO: 488083 - DNA, 33 bp, Homo sapien
tgtcaggatggaagaaacagagtgaaacttgat

SEQ ID NO: 488084 - DNA, 33 bp, Homo sapien
tgtcaggatggaagaaccagagtgaaacttgat

SEQ ID NO: 488085 - DNA, 33 bp, Homo sapien
ttgcaatggtcaataacctctcgtgcttttagt

SEQ ID NO: 488086 - DNA, 33 bp, Homo sapien
ttgcaatggtcaataatctctcgtgcttttagt

SEQ ID NO: 488087 - DNA, 33 bp, Homo sapien
tttgaggtacagggtgaaagctgctggtatatc

SEQ ID NO: 488088 - DNA, 33 bp, Homo sapien
tttgaggtacagggtgcaagctgctggtatatc

SEQ ID NO: 488089 - DNA, 33 bp, Homo sapien
gttcttcgccacaccacattggagtacagtttc

SEQ ID NO: 488090 - DNA, 33 bp, Homo sapien
gttcttcgccacaccagattggagtacagtttc

SEQ ID NO: 488091 - DNA, 33 bp, Homo sapien
aattccaagagcagtcagaaacagtgtaggtta

SEQ ID NO: 488092 - DNA, 33 bp, Homo sapien
aattccaagagcagtccgaaacagtgtaggtta

SEQ ID NO: 488093 - DNA, 33 bp, Homo sapien
gctttataatggcctaccaagtatcccagtcac

SEQ ID NO: 488094 - DNA, 33 bp, Homo sapien
gctttataatggcctatcaagtatcccagtcac

SEQ ID NO: 488095 - DNA, 33 bp, Homo sapien
cttagaccacttgctacggaaaaagccagctgt

SEQ ID NO: 488096 - DNA, 33 bp, Homo sapien
cttagaccacttgctatggaaaaagccagctgt

SEQ ID NO: 488097 - DNA, 33 bp, Homo sapien
agcccatgaagcaagtaactgaagcctccagct

SEQ ID NO: 488098 - DNA, 33 bp, Homo sapien
agcccatgaagcaagtgactgaagcctccagct

SEQ ID NO: 488099 - DNA, 33 bp, Homo sapien
cttttcttctagcctacgtccattgcttcctca

SEQ ID NO: 488100 - DNA, 33 bp, Homo sapien
cttttcttctagcctatgtccattgcttcctca

SEQ ID NO: 488101 - DNA, 33 bp, Homo sapien
aaataagtttgaaaaaatcttaggtatcctgag

SEQ ID NO: 488102 - DNA, 33 bp, Homo sapien
aaataagtttgaaaaagtcttaggtatcctgag

SEQ ID NO: 488103 - DNA, 33 bp, Homo sapien
ctaaactcaggagagaggggttatcagttacgg

SEQ ID NO: 488104 - DNA, 33 bp, Homo sapien
ctaaactcaggagagatgggttatcagttacgg

SEQ ID NO: 488105 - DNA, 33 bp, Homo sapien
acaaataccctgaagacgttatgccgttacttc

SEQ ID NO: 488106 - DNA, 33 bp, Homo sapien
acaaataccctgaagatgttatgccgttacttc

SEQ ID NO: 488107 - DNA, 33 bp, Homo sapien
ttgccctacactccttcaagcattagtcttgcc

SEQ ID NO: 488108 - DNA, 33 bp, Homo sapien
ttgccctacactcctttaagcattagtcttgcc

SEQ ID NO: 488109 - DNA, 33 bp, Homo sapien
tactgccggattactgctgatactaccttaagg

SEQ ID NO: 488110 - DNA, 33 bp, Homo sapien
tactgccggattactgttgatactaccttaagg

SEQ ID NO: 488111 - DNA, 33 bp, Homo sapien
ggatcctttccttcaaagcaatgggttctcttc

SEQ ID NO: 488112 - DNA, 33 bp, Homo sapien
ggatcctttccttcaaggcaatgggttctcttc

SEQ ID NO: 488113 - DNA, 33 bp, Homo sapien
aggccactaagcaccaaagtatggcattgatct

SEQ ID NO: 488114 - DNA, 33 bp, Homo sapien
aggccactaagcaccagagtatggcattgatct

SEQ ID NO: 488115 - DNA, 33 bp, Homo sapien
aagcagagctcttacccgaagcaagagagaaag

SEQ ID NO: 488116 - DNA, 33 bp, Homo sapien
aagcagagctcttacctgaagcaagagagaaag

SEQ ID NO: 488117 - DNA, 33 bp, Homo sapien
gtttcctgtctatatgaaggtattttgacaaac

SEQ ID NO: 488118 - DNA, 33 bp, Homo sapien
gtttcctgtctatatggaggtattttgacaaac

SEQ ID NO: 488119 - DNA, 33 bp, Homo sapien
tgaaagtaattgccaacatttggggtgacgaag

SEQ ID NO: 488120 - DNA, 33 bp, Homo sapien
tgaaagtaattgccaatatttggggtgacgaag

SEQ ID NO: 488121 - DNA, 33 bp, Homo sapien
tgtgggcttgagggggaaagtccatctctggtc

SEQ ID NO: 488122 - DNA, 33 bp, Homo sapien
tgtgggcttgaggggggaagtccatctctggtc

SEQ ID NO: 488123 - DNA, 33 bp, Homo sapien
ttatcatgtttgactacagaggtaattaatcat

SEQ ID NO: 488124 - DNA, 33 bp, Homo sapien
ttatcatgtttgactatagaggtaattaatcat

SEQ ID NO: 488125 - DNA, 33 bp, Homo sapien
actctttctattaaaccatcactgtatacaaaa

SEQ ID NO: 488126 - DNA, 33 bp, Homo sapien
actctttctattaaactatcactgtatacaaaa

SEQ ID NO: 488127 - DNA, 33 bp, Homo sapien
ggccccagctctaacagtggaaatcacacttca

SEQ ID NO: 488128 - DNA, 33 bp, Homo sapien
ggccccagctctaacattggaaatcacacttca

SEQ ID NO: 488129 - DNA, 33 bp, Homo sapien
ttccttgcctaggaaaggaattgtttcgaggat

SEQ ID NO: 488130 - DNA, 33 bp, Homo sapien
ttccttgcctaggaaatgaattgtttcgaggat

SEQ ID NO: 488131 - DNA, 33 bp, Homo sapien
agttagtaaagttcaacgaaggcttttcacaag

SEQ ID NO: 488132 - DNA, 33 bp, Homo sapien
agttagtaaagttcaatgaaggcttttcacaag

SEQ ID NO: 488133 - DNA, 33 bp, Homo sapien
ggggtggatccgtcatcaatggctaggtgctgt

SEQ ID NO: 488134 - DNA, 33 bp, Homo sapien
ggggtggatccgtcatgaatggctaggtgctgt

SEQ ID NO: 488135 - DNA, 33 bp, Homo sapien
gagaaattttatgtacagagggtttgcctttca

SEQ ID NO: 488136 - DNA, 33 bp, Homo sapien
gagaaattttatgtacggagggtttgcctttca

SEQ ID NO: 488137 - DNA, 33 bp, Homo sapien
ttcttgctttgcttggacacatgaatatcccat

SEQ ID NO: 488138 - DNA, 33 bp, Homo sapien
ttcttgctttgcttgggcacatgaatatcccat

SEQ ID NO: 488139 - DNA, 33 bp, Homo sapien
acatatctttcatttcaagttttgctatcaaat

SEQ ID NO: 488140 - DNA, 33 bp, Homo sapien
acatatctttcatttcgagttttgctatcaaat

SEQ ID NO: 488141 - DNA, 33 bp, Homo sapien
agtaaagagataaaaacaatcaagcgttctaga

SEQ ID NO: 488142 - DNA, 33 bp, Homo sapien
agtaaagagataaaaataatcaagcgttctaga

SEQ ID NO: 488143 - DNA, 33 bp, Homo sapien
tacctgtgaagtattacatggattagttaacag

SEQ ID NO: 488144 - DNA, 33 bp, Homo sapien
tacctgtgaagtattatatggattagttaacag

SEQ ID NO: 488145 - DNA, 33 bp, Homo sapien
tcttttaaccaaagaaaaatcactaagaatatc

SEQ ID NO: 488146 - DNA, 33 bp, Homo sapien
tcttttaaccaaagaagaatcactaagaatatc

SEQ ID NO: 488147 - DNA, 33 bp, Homo sapien
gcatgtgcctgataaaccaacctattcctagcc

SEQ ID NO: 488148 - DNA, 33 bp, Homo sapien
gcatgtgcctgataaatcaacctattcctagcc

SEQ ID NO: 488149 - DNA, 33 bp, Homo sapien
aatgtttgtagactgtaaagtgagacaaaaata

SEQ ID NO: 488150 - DNA, 33 bp, Homo sapien
aatgtttgtagactgtcaagtgagacaaaaata

SEQ ID NO: 488151 - DNA, 33 bp, Homo sapien
atagtttttagaaagaagcctgtaaagagcttt

SEQ ID NO: 488152 - DNA, 33 bp, Homo sapien
atagtttttagaaagatgcctgtaaagagcttt

SEQ ID NO: 488153 - DNA, 33 bp, Homo sapien
gagggatattatcgaacgagaagggctatgagg

SEQ ID NO: 488154 - DNA, 33 bp, Homo sapien
gagggatattatcgaatgagaagggctatgagg

SEQ ID NO: 488155 - DNA, 33 bp, Homo sapien
gatcactaaaccttcaaatgggggacaatgatg

SEQ ID NO: 488156 - DNA, 33 bp, Homo sapien
gatcactaaaccttcagatgggggacaatgatg

SEQ ID NO: 488157 - DNA, 33 bp, Homo sapien
gatacttagatcaacacagagtcacataaacaa

SEQ ID NO: 488158 - DNA, 33 bp, Homo sapien
gatacttagatcaacatagagtcacataaacaa

SEQ ID NO: 488159 - DNA, 33 bp, Homo sapien
tcaaatcataagacaaagcctacaaggagttga

SEQ ID NO: 488160 - DNA, 33 bp, Homo sapien
tcaaatcataagacaaggcctacaaggagttga

SEQ ID NO: 488161 - DNA, 33 bp, Homo sapien
ttacagctaagagtcacagtagcattttataaa

SEQ ID NO: 488162 - DNA, 33 bp, Homo sapien
ttacagctaagagtcatagtagcattttataaa

SEQ ID NO: 488163 - DNA, 33 bp, Homo sapien
gttccttttgataccacgtaaacttgaaatggg

SEQ ID NO: 488164 - DNA, 33 bp, Homo sapien
gttccttttgataccatgtaaacttgaaatggg

SEQ ID NO: 488165 - DNA, 33 bp, Homo sapien
tggtcaatgagaaacaaactgatattactagga

SEQ ID NO: 488166 - DNA, 33 bp, Homo sapien
tggtcaatgagaaacagactgatattactagga

SEQ ID NO: 488167 - DNA, 33 bp, Homo sapien
tataattttgctcaaactattggttaattcatg

SEQ ID NO: 488168 - DNA, 33 bp, Homo sapien
tataattttgctcaaagtattggttaattcatg

SEQ ID NO: 488169 - DNA, 33 bp, Homo sapien
ctataccctgtccttaaattaaaagctgtaagc

SEQ ID NO: 488170 - DNA, 33 bp, Homo sapien
ctataccctgtccttacattaaaagctgtaagc

SEQ ID NO: 488171 - DNA, 33 bp, Homo sapien
agaacatatttcccaaagacacttaagctctta

SEQ ID NO: 488172 - DNA, 33 bp, Homo sapien
agaacatatttcccaatgacacttaagctctta

SEQ ID NO: 488173 - DNA, 33 bp, Homo sapien
atatgtagaaatcacaaagctgttgtacaaaaa

SEQ ID NO: 488174 - DNA, 33 bp, Homo sapien
atatgtagaaatcacatagctgttgtacaaaaa

SEQ ID NO: 488175 - DNA, 33 bp, Homo sapien
ttagtgaaagagtcaacagtttaatagttagag

SEQ ID NO: 488176 - DNA, 33 bp, Homo sapien
ttagtgaaagagtcaatagtttaatagttagag

SEQ ID NO: 488177 - DNA, 33 bp, Homo sapien
gatgttcagatatcaacatacggacacaaggaa

SEQ ID NO: 488178 - DNA, 33 bp, Homo sapien
gatgttcagatatcaatatacggacacaaggaa

SEQ ID NO: 488179 - DNA, 33 bp, Homo sapien
tgtataattagaggacaaaggctatggtaataa

SEQ ID NO: 488180 - DNA, 33 bp, Homo sapien
tgtataattagaggacgaaggctatggtaataa

SEQ ID NO: 488181 - DNA, 33 bp, Homo sapien
taccatacaggaacacagagaagaatctgcact

SEQ ID NO: 488182 - DNA, 33 bp, Homo sapien
taccatacaggaacacggagaagaatctgcact

SEQ ID NO: 488183 - DNA, 33 bp, Homo sapien
aatatcctcacataaaagttgatttggaaaaaa

SEQ ID NO: 488184 - DNA, 33 bp, Homo sapien
aatatcctcacataaaggttgatttggaaaaaa

SEQ ID NO: 488185 - DNA, 33 bp, Homo sapien
agtcttgattctggaaacatagaagtcttggaa

SEQ ID NO: 488186 - DNA, 33 bp, Homo sapien
agtcttgattctggaagcatagaagtcttggaa

SEQ ID NO: 488187 - DNA, 33 bp, Homo sapien
ccaaatggtcatcattcaaacaataacaaattg

SEQ ID NO: 488188 - DNA, 33 bp, Homo sapien
ccaaatggtcatcattgaaacaataacaaattg

SEQ ID NO: 488189 - DNA, 33 bp, Homo sapien
gcctcaggcctctaacagtgtgacattccatgg

SEQ ID NO: 488190 - DNA, 33 bp, Homo sapien
gcctcaggcctctaacggtgtgacattccatgg

SEQ ID NO: 488191 - DNA, 33 bp, Homo sapien
acatattacagttgaactctgatgtgaataaga

SEQ ID NO: 488192 - DNA, 33 bp, Homo sapien
acatattacagttgaattctgatgtgaataaga

SEQ ID NO: 488193 - DNA, 33 bp, Homo sapien
aatatgtgtatttttaaaagtaccagttgctac

SEQ ID NO: 488194 - DNA, 33 bp, Homo sapien
aatatgtgtatttttagaagtaccagttgctac

SEQ ID NO: 488195 - DNA, 33 bp, Homo sapien
tgcctgctcaggatgacgaactggtgcacaccc

SEQ ID NO: 488196 - DNA, 33 bp, Homo sapien
tgcctgctcaggatgaggaactggtgcacaccc

SEQ ID NO: 488197 - DNA, 33 bp, Homo sapien
tcagcttcttcccatacgcgctctgacaggtcc

SEQ ID NO: 488198 - DNA, 33 bp, Homo sapien
tcagcttcttcccataggcgctctgacaggtcc

SEQ ID NO: 488199 - DNA, 33 bp, Homo sapien
ataaataaagggagtccgaaaatagcaaagatt

SEQ ID NO: 488200 - DNA, 33 bp, Homo sapien
ataaataaagggagtctgaaaatagcaaagatt

SEQ ID NO: 488201 - DNA, 33 bp, Homo sapien
ggcttgctagatccaactggctagatcacagta

SEQ ID NO: 488202 - DNA, 33 bp, Homo sapien
ggcttgctagatccaattggctagatcacagta

SEQ ID NO: 488203 - DNA, 33 bp, Homo sapien
taaaaccatttaagccaattcacttgccattta

SEQ ID NO: 488204 - DNA, 33 bp, Homo sapien
taaaaccatttaagcccattcacttgccattta

SEQ ID NO: 488205 - DNA, 33 bp, Homo sapien
ggacctaaatgaaagacggggtatgcaaaggct

SEQ ID NO: 488206 - DNA, 33 bp, Homo sapien
ggacctaaatgaaagatggggtatgcaaaggct

SEQ ID NO: 488207 - DNA, 33 bp, Homo sapien; identical to SEQ ID NO: 488205

SEQ ID NO: 488208 - DNA, 33 bp, Homo sapien; identical to SEQ ID NO: 488206

SEQ ID NO: 488209 - DNA, 33 bp, Homo sapien
ttgatcaaatatacgaagacagaatttttccag

SEQ ID NO: 488210 - DNA, 33 bp, Homo sapien
ttgatcaaatatacgaggacagaatttttccag

SEQ ID NO: 488211 - DNA, 33 bp, Homo sapien
caattataattgttaacgacgtgtggatgtttg

SEQ ID NO: 488212 - DNA, 33 bp, Homo sapien
caattataattgttaatgacgtgtggatgtttg

SEQ ID NO: 488213 - DNA, 33 bp, Homo sapien
tgcactcaacaagataacatacattggaagtga

SEQ ID NO: 488214 - DNA, 33 bp, Homo sapien
tgcactcaacaagatagcatacattggaagtga

SEQ ID NO: 488215 - DNA, 33 bp, Homo sapien
gttgttaggtaagaaaaaagatgcccagttaaa

SEQ ID NO: 488216 - DNA, 33 bp, Homo sapien
gttgttaggtaagaaacaagatgcccagttaaa

SEQ ID NO: 488217 - DNA, 33 bp, Homo sapien
aggatcaatttgggtcccaaagagctgagagga

SEQ ID NO: 488218 - DNA, 33 bp, Homo sapien
aggatcaatttgggtctcaaagagctgagagga

SEQ ID NO: 488219 - DNA, 33 bp, Homo sapien
atccacatgatcatcaatgataggctgaataaa

SEQ ID NO: 488220 - DNA, 33 bp, Homo sapien
atccacatgatcatcagtgataggctgaataaa

SEQ ID NO: 488221 - DNA, 33 bp, Homo sapien
aaaaaataggacctgacgtcactgaagtccaaa

SEQ ID NO: 488222 - DNA, 33 bp, Homo sapien
aaaaaataggacctgatgtcactgaagtccaaa

SEQ ID NO: 488223 - DNA, 33 bp, Homo sapien
ttaagttatatgcctacgggattactttttttc

SEQ ID NO: 488224 - DNA, 33 bp, Homo sapien
ttaagttatatgcctatgggattactttttttc

SEQ ID NO: 488225 - DNA, 33 bp, Homo sapien
cgataactgattcctacattgaagtttctgttt

SEQ ID NO: 488226 - DNA, 33 bp, Homo sapien
cgataactgattcctatattgaagtttctgttt

SEQ ID NO: 488227 - DNA, 33 bp, Homo sapien
tgaagttagtggcctacgaatgatatatcttga

SEQ ID NO: 488228 - DNA, 33 bp, Homo sapien
tgaagttagtggcctatgaatgatatatcttga

SEQ ID NO: 488229 - DNA, 33 bp, Homo sapien
ttgctcactaatacgaccataggttcttgctac

SEQ ID NO: 488230 - DNA, 33 bp, Homo sapien
ttgctcactaatacgagcataggttcttgctac

SEQ ID NO: 488231 - DNA, 33 bp, Homo sapien
atgctgctaaaagctccactgaatacaagactt

SEQ ID NO: 488232 - DNA, 33 bp, Homo sapien
atgctgctaaaagctctactgaatacaagactt

SEQ ID NO: 488233 - DNA, 33 bp, Homo sapien
gaaattaagtgaagacaatttgattaacttttg

SEQ ID NO: 488234 - DNA, 33 bp, Homo sapien
gaaattaagtgaagaccatttgattaacttttg

SEQ ID NO: 488235 - DNA, 33 bp, Homo sapien
actcataatccacatgaaaaggtagaacactgg

SEQ ID NO: 488236 - DNA, 33 bp, Homo sapien
actcataatccacatggaaaggtagaacactgg

SEQ ID NO: 488237 - DNA, 33 bp, Homo sapien
ttttattaataattcacaacagtgtgctaaata

SEQ ID NO: 488238 - DNA, 33 bp, Homo sapien
ttttattaataattcataacagtgtgctaaata

SEQ ID NO: 488239 - DNA, 33 bp, Homo sapien
acatattcatcacctccgaaagcttcctcccac

SEQ ID NO: 488240 - DNA, 33 bp, Homo sapien
acatattcatcacctctgaaagcttcctcccac

SEQ ID NO: 488241 - DNA, 33 bp, Homo sapien
aaaacaggcatgtacactaagtgatttcagaga

SEQ ID NO: 488242 - DNA, 33 bp, Homo sapien
aaaacaggcatgtacagtaagtgatttcagaga

SEQ ID NO: 488243 - DNA, 33 bp, Homo sapien
gatgctatataagccgaagttctaaaaccactg

SEQ ID NO: 488244 - DNA, 33 bp, Homo sapien
gatgctatataagccgcagttctaaaaccactg

SEQ ID NO: 488245 - DNA, 33 bp, Homo sapien
gataggagaatgatgacgaaagaaaacagaagt

SEQ ID NO: 488246 - DNA, 33 bp, Homo sapien
gataggagaatgatgatgaaagaaaacagaagt

SEQ ID NO: 488247 - DNA, 33 bp, Homo sapien
ctatttctctgaataacgttttgtcactattat

SEQ ID NO: 488248 - DNA, 33 bp, Homo sapien
ctatttctctgaataatgttttgtcactattat

SEQ ID NO: 488249 - DNA, 33 bp, Homo sapien
tcgatcttggttgtacaaatcacttactggtac

SEQ ID NO: 488250 - DNA, 33 bp, Homo sapien
tcgatcttggttgtacgaatcacttactggtac

SEQ ID NO: 488251 - DNA, 33 bp, Homo sapien
tttggtctctttacacaagcctatatttctcag

SEQ ID NO: 488252 - DNA, 33 bp, Homo sapien
tttggtctctttacacgagcctatatttctcag

SEQ ID NO: 488253 - DNA, 33 bp, Homo sapien
ccatactggcctacacaaggcagtgagcccact

SEQ ID NO: 488254 - DNA, 33 bp, Homo sapien
ccatactggcctacacgaggcagtgagcccact

SEQ ID NO: 488255 - DNA, 33 bp, Homo sapien
caacttattgattgcactaacctcatacactat

SEQ ID NO: 488256 - DNA, 33 bp, Homo sapien
caacttattgattgcattaacctcatacactat

SEQ ID NO: 488257 - DNA, 33 bp, Homo sapien
tagaaatggacaattacggtcttaaaacttgaa

SEQ ID NO: 488258 - DNA, 33 bp, Homo sapien
tagaaatggacaattatggtcttaaaacttgaa

SEQ ID NO: 488259 - DNA, 33 bp, Homo sapien
tgttgaaaccaagtcaatagtcctatagatagt

SEQ ID NO: 488260 - DNA, 33 bp, Homo sapien
tgttgaaaccaagtcagtagtcctatagatagt

SEQ ID NO: 488261 - DNA, 33 bp, Homo sapien
ctaaaatggcgttaggcccaaatgaggacaggg

SEQ ID NO: 488262 - DNA, 33 bp, Homo sapien
ctaaaatggcgttaggtccaaatgaggacaggg

SEQ ID NO: 488263 - DNA, 33 bp, Homo sapien
tagctgtggctctaaacggcttattagattcag

SEQ ID NO: 488264 - DNA, 33 bp, Homo sapien
tagctgtggctctaaatggcttattagattcag

SEQ ID NO: 488265 - DNA, 33 bp, Homo sapien
atagttctgagaagaacaactgtggctaagggc

SEQ ID NO: 488266 - DNA, 33 bp, Homo sapien
atagttctgagaagaagaactgtggctaagggc

SEQ ID NO: 488267 - DNA, 33 bp, Homo sapien
aagaatcaagctaataaacaatagtggttgaaa

SEQ ID NO: 488268 - DNA, 33 bp, Homo sapien
aagaatcaagctaatacacaatagtggttgaaa

SEQ ID NO: 488269 - DNA, 33 bp, Homo sapien
tacttttaatctaccagagccctctctatgacc

SEQ ID NO: 488270 - DNA, 33 bp, Homo sapien
tacttttaatctaccatagccctctctatgacc

SEQ ID NO: 488271 - DNA, 33 bp, Homo sapien
gtctgatattgtaatgaaatcagactttggagg

SEQ ID NO: 488272 - DNA, 33 bp, Homo sapien
gtctgatattgtaatggaatcagactttggagg

SEQ ID NO: 488273 - DNA, 33 bp, Homo sapien
tagttacaattgtgaacgctgtacctaaattat

SEQ ID NO: 488274 - DNA, 33 bp, Homo sapien
tagttacaattgtgaatgctgtacctaaattat

SEQ ID NO: 488275 - DNA, 33 bp, Homo sapien
ctataaaaatagtaacaggcatggagaaagaca

SEQ ID NO: 488276 - DNA, 33 bp, Homo sapien
ctataaaaatagtaacgggcatggagaaagaca

SEQ ID NO: 488277 - DNA, 33 bp, Homo sapien
ctgttataaaacaaaaatttcacagatggtgtg

SEQ ID NO: 488278 - DNA, 33 bp, Homo sapien
ctgttataaaacaaaagtttcacagatggtgtg

SEQ ID NO: 488279 - DNA, 33 bp, Homo sapien
tgggaaatgtttcaaacagtgatatggtttggc

SEQ ID NO: 488280 - DNA, 33 bp, Homo sapien
tgggaaatgtttcaaagagtgatatggtttggc

SEQ ID NO: 488281 - DNA, 33 bp, Homo sapien
aatgaaatgtattataaagtctttccaggagga

SEQ ID NO: 488282 - DNA, 33 bp, Homo sapien
aatgaaatgtattatacagtctttccaggagga

SEQ ID NO: 488283 - DNA, 33 bp, Homo sapien
gatatttaaaaactacacaaagcatcattttca

SEQ ID NO: 488284 - DNA, 33 bp, Homo sapien
gatatttaaaaactacgcaaagcatcattttca

SEQ ID NO: 488285 - DNA, 33 bp, Homo sapien
agaacctgttgggaaacttattaacaagctgag

SEQ ID NO: 488286 - DNA, 33 bp, Homo sapien
agaacctgttgggaaatttattaacaagctgag

SEQ ID NO: 488287 - DNA, 33 bp, Homo sapien
actgatcctgaaaacactgaaataattgctatt

SEQ ID NO: 488288 - DNA, 33 bp, Homo sapien
actgatcctgaaaacattgaaataattgctatt

SEQ ID NO: 488289 - DNA, 33 bp, Homo sapien
tggaacaatgctttggaatacaagtagtttgca

SEQ ID NO: 488290 - DNA, 33 bp, Homo sapien
tggaacaatgctttgggatacaagtagtttgca

SEQ ID NO: 488291 - DNA, 33 bp, Homo sapien
gcctcaaaaaaataaaagttgtatgtgaccaaa

SEQ ID NO: 488292 - DNA, 33 bp, Homo sapien
gcctcaaaaaaataaaggttgtatgtgaccaaa

SEQ ID NO: 488293 - DNA, 33 bp, Homo sapien
agtaaccaaaacagtacggtattagtacaaaag

SEQ ID NO: 488294 - DNA, 33 bp, Homo sapien
agtaaccaaaacagtatggtattagtacaaaag

SEQ ID NO: 488295 - DNA, 33 bp, Homo sapien
tcagggaaatgtaacccgaaataagatatcatc

SEQ ID NO: 488296 - DNA, 33 bp, Homo sapien
tcagggaaatgtaacctgaaataagatatcatc

SEQ ID NO: 488297 - DNA, 33 bp, Homo sapien
tcatttacaatagccacaaaaaaactcacctag

SEQ ID NO: 488298 - DNA, 33 bp, Homo sapien
tcatttacaatagccagaaaaaaactcacctag

SEQ ID NO: 488299 - DNA, 33 bp, Homo sapien
tccaccaaaatggctacagagatccaccattgg

SEQ ID NO: 488300 - DNA, 33 bp, Homo sapien
tccaccaaaatggctagagagatccaccattgg

SEQ ID NO: 488301 - DNA, 33 bp, Homo sapien
ctgtccagtcattgcacggcatagactcagccc

SEQ ID NO: 488302 - DNA, 33 bp, Homo sapien
ctgtccagtcattgcatggcatagactcagccc

SEQ ID NO: 488303 - DNA, 33 bp, Homo sapien
atctgctggaagagtgcagtgtagacagtaatt

SEQ ID NO: 488304 - DNA, 33 bp, Homo sapien
atctgctggaagagtgtagtgtagacagtaatt

SEQ ID NO: 488305 - DNA, 33 bp, Homo sapien
acggttttgtgtcacaactagagagcaatcaac

SEQ ID NO: 488306 - DNA, 33 bp, Homo sapien
acggttttgtgtcacagctagagagcaatcaac

SEQ ID NO: 488307 - DNA, 33 bp, Homo sapien
cattttcagaaatgggaaaggagatgataacat

SEQ ID NO: 488308 - DNA, 33 bp, Homo sapien
cattttcagaaatggggaaggagatgataacat

SEQ ID NO: 488309 - DNA, 33 bp, Homo sapien
gaaacctattctgagaagcacattactcacttg

SEQ ID NO: 488310 - DNA, 33 bp, Homo sapien
gaaacctattctgagaggcacattactcacttg

SEQ ID NO: 488311 - DNA, 33 bp, Homo sapien
atgtctctaatcatcaataccattctctatgcc

SEQ ID NO: 488312 - DNA, 33 bp, Homo sapien
atgtctctaatcatcagtaccattctctatgcc

SEQ ID NO: 488313 - DNA, 33 bp, Homo sapien
agatatagaaaaaccaaagctgttgaatttcat

SEQ ID NO: 488314 - DNA, 33 bp, Homo sapien
agatatagaaaaaccatagctgttgaatttcat

SEQ ID NO: 488315 - DNA, 33 bp, Homo sapien
ctctcaagaatccaaagatgttacctctctgac

SEQ ID NO: 488316 - DNA, 33 bp, Homo sapien
ctctcaagaatccaaatatgttacctctctgac

SEQ ID NO: 488317 - DNA, 33 bp, Homo sapien
tgatttgccagatgaaaattataatgattacat

SEQ ID NO: 488318 - DNA, 33 bp, Homo sapien
tgatttgccagatgaagattataatgattacat

SEQ ID NO: 488319 - DNA, 33 bp, Homo sapien
aaagtgtcccaatatacgcttccattttttttt

SEQ ID NO: 488320 - DNA, 33 bp, Homo sapien
aaagtgtcccaatatatgcttccattttttttt

SEQ ID NO: 488321 - DNA, 33 bp, Homo sapien
taaaataagcgtagacagagaagtaatgatttt

SEQ ID NO: 488322 - DNA, 33 bp, Homo sapien
taaaataagcgtagacggagaagtaatgatttt

SEQ ID NO: 488323 - DNA, 33 bp, Homo sapien
gactcttagttttagacggacagacctggatac

SEQ ID NO: 488324 - DNA, 33 bp, Homo sapien
gactcttagttttagatggacagacctggatac

SEQ ID NO: 488325 - DNA, 33 bp, Homo sapien
cttggcctttatttaacgtttgtgaggagaaaa

SEQ ID NO: 488326 - DNA, 33 bp, Homo sapien
cttggcctttatttaatgtttgtgaggagaaaa

SEQ ID NO: 488327 - DNA, 33 bp, Homo sapien
atgaattttctcacaaatgtatatgtgcaggtt

SEQ ID NO: 488328 - DNA, 33 bp, Homo sapien
atgaattttctcacaagtgtatatgtgcaggtt

SEQ ID NO: 488329 - DNA, 33 bp, Homo sapien
ctaggagatcagttagaaaaactatgaatctat

SEQ ID NO: 488330 - DNA, 33 bp, Homo sapien
ctaggagatcagttaggaaaactatgaatctat

SEQ ID NO: 488331 - DNA, 33 bp, Homo sapien
atgccaagggcaagataaatgtagcccagacta

SEQ ID NO: 488332 - DNA, 33 bp, Homo sapien
atgccaagggcaagattaatgtagcccagacta

SEQ ID NO: 488333 - DNA, 33 bp, Homo sapien
atggttactttactctcaatcttcattctgtgc

SEQ ID NO: 488334 - DNA, 33 bp, Homo sapien
atggttactttactcttaatcttcattctgtgc

SEQ ID NO: 488335 - DNA, 33 bp, Homo sapien
gttcataatcagtaacagacatctgagatcaga

SEQ ID NO: 488336 - DNA, 33 bp, Homo sapien
gttcataatcagtaaccgacatctgagatcaga

SEQ ID NO: 488337 - DNA, 33 bp, Homo sapien
cttgagagttgtattacattttgattcctgggg

SEQ ID NO: 488338 - DNA, 33 bp, Homo sapien
cttgagagttgtattatattttgattcctgggg

SEQ ID NO: 488339 - DNA, 33 bp, Homo sapien
ttggtattatcttgacacattacaaagccatta

SEQ ID NO: 488340 - DNA, 33 bp, Homo sapien
ttggtattatcttgacgcattacaaagccatta

SEQ ID NO: 488341 - DNA, 33 bp, Homo sapien
accaaggcaatgggacaaatttctccctggcat

SEQ ID NO: 488342 - DNA, 33 bp, Homo sapien
accaaggcaatgggactaatttctccctggcat

SEQ ID NO: 488343 - DNA, 33 bp, Homo sapien
gccactatcctccacaacacataatggtagatc

SEQ ID NO: 488344 - DNA, 33 bp, Homo sapien
gccactatcctccacaccacataatggtagatc

SEQ ID NO: 488345 - DNA, 33 bp, Homo sapien
aagtcagttggacaaaaccataggagtcccagg

SEQ ID NO: 488346 - DNA, 33 bp, Homo sapien
aagtcagttggacaaagccataggagtcccagg

SEQ ID NO: 488347 - DNA, 33 bp, Homo sapien
caatatgcctcctgaacgtcagaaggcagattc

SEQ ID NO: 488348 - DNA, 33 bp, Homo sapien
caatatgcctcctgaaggtcagaaggcagattc

SEQ ID NO: 488349 - DNA, 33 bp, Homo sapien
atagtgagattgattgcaacgtcagctcttttc

SEQ ID NO: 488350 - DNA, 33 bp, Homo sapien
atagtgagattgattggaacgtcagctcttttc

SEQ ID NO: 488351 - DNA, 33 bp, Homo sapien
agatcaaatgaagttgaaaccctttaacaactc

SEQ ID NO: 488352 - DNA, 33 bp, Homo sapien
agatcaaatgaagttggaaccctttaacaactc

SEQ ID NO: 488353 - DNA, 33 bp, Homo sapien
atcactttagataaggacaatgagaaagcctct

SEQ ID NO: 488354 - DNA, 33 bp, Homo sapien
atcactttagataagggcaatgagaaagcctct

SEQ ID NO: 488355 - DNA, 33 bp, Homo sapien
caactacatagttatccctgagcctgcagtgct

SEQ ID NO: 488356 - DNA, 33 bp, Homo sapien
caactacatagttatctctgagcctgcagtgct

SEQ ID NO: 488357 - DNA, 33 bp, Homo sapien
agttctagaaaacacaatgtccaccatcaaaat

SEQ ID NO: 488358 - DNA, 33 bp, Homo sapien
agttctagaaaacacagtgtccaccatcaaaat

SEQ ID NO: 488359 - DNA, 33 bp, Homo sapien
agagttctaaaactctaactgctgattattttt

SEQ ID NO: 488360 - DNA, 33 bp, Homo sapien
agagttctaaaactctgactgctgattattttt

SEQ ID NO: 488361 - DNA, 33 bp, Homo sapien
caaataattaaaccaaaccctgttgataactgc

SEQ ID NO: 488362 - DNA, 33 bp, Homo sapien
caaataattaaaccaagccctgttgataactgc

SEQ ID NO: 488363 - DNA, 33 bp, Homo sapien
acactcctcgaagaaaccagagataatatatac

SEQ ID NO: 488364 - DNA, 33 bp, Homo sapien
acactcctcgaagaaatcagagataatatatac

SEQ ID NO: 488365 - DNA, 33 bp, Homo sapien
tgtgcatatatcttaacggtaaaacaatttata

SEQ ID NO: 488366 - DNA, 33 bp, Homo sapien
tgtgcatatatcttaatggtaaaacaatttata

SEQ ID NO: 488367 - DNA, 33 bp, Homo sapien
acatcagcattttcaccaacctctggctcagaa

SEQ ID NO: 488368 - DNA, 33 bp, Homo sapien
acatcagcattttcactaacctctggctcagaa

SEQ ID NO: 488369 - DNA, 33 bp, Homo sapien
tcattcatttgtctgacggtttatgctagaagg

SEQ ID NO: 488370 - DNA, 33 bp, Homo sapien
tcattcatttgtctgatggtttatgctagaagg

SEQ ID NO: 488371 - DNA, 33 bp, Homo sapien
tccagtttgagtacaaatccagtggtagaagac

SEQ ID NO: 488372 - DNA, 33 bp, Homo sapien
tccagtttgagtacaagtccagtggtagaagac

SEQ ID NO: 488373 - DNA, 33 bp, Homo sapien
atggatacatttgcaaatacaggttaatatttt

SEQ ID NO: 488374 - DNA, 33 bp, Homo sapien
atggatacatttgcaagtacaggttaatatttt

SEQ ID NO: 488375 - DNA, 33 bp, Homo sapien
aactggacaattgggacctcttaaaggatatct

SEQ ID NO: 488376 - DNA, 33 bp, Homo sapien
aactggacaattgggatctcttaaaggatatct

SEQ ID NO: 488377 - DNA, 33 bp, Homo sapien
ccaattggcttatgaactactggttctgacaaa

SEQ ID NO: 488378 - DNA, 33 bp, Homo sapien
ccaattggcttatgaattactggttctgacaaa

SEQ ID NO: 488379 - DNA, 33 bp, Homo sapien
ggtttcttctgttatgcaggcagcatattctgc

SEQ ID NO: 488380 - DNA, 33 bp, Homo sapien
ggtttcttctgttatgtaggcagcatattctgc

SEQ ID NO: 488381 - DNA, 33 bp, Homo sapien
atccaaggaagatgtcagaaattaatgccactc

SEQ ID NO: 488382 - DNA, 33 bp, Homo sapien
atccaaggaagatgtcggaaattaatgccactc

SEQ ID NO: 488383 - DNA, 33 bp, Homo sapien
ctgccactggagaggaaaattaagagtttgtta

SEQ ID NO: 488384 - DNA, 33 bp, Homo sapien
ctgccactggagaggacaattaagagtttgtta

SEQ ID NO: 488385 - DNA, 33 bp, Homo sapien
actacttctgtgagcaatatcactgggcttgag

SEQ ID NO: 488386 - DNA, 33 bp, Homo sapien
actacttctgtgagcagtatcactgggcttgag

SEQ ID NO: 488387 - DNA, 33 bp, Homo sapien
gcaattctgaaaaatacgttattgaggctacat

SEQ ID NO: 488388 - DNA, 33 bp, Homo sapien
gcaattctgaaaaatatgttattgaggctacat

SEQ ID NO: 488389 - DNA, 33 bp, Homo sapien
catagaaagcatgatgcagtcttagttttctgc

SEQ ID NO: 488390 - DNA, 33 bp, Homo sapien
catagaaagcatgatggagtcttagttttctgc

SEQ ID NO: 488391 - DNA, 33 bp, Homo sapien
gttttttctcgtgctacacttctatttgctctt

SEQ ID NO: 488392 - DNA, 33 bp, Homo sapien
gttttttctcgtgctatacttctatttgctctt

SEQ ID NO: 488393 - DNA, 33 bp, Homo sapien
ctttgcaatgaaatgacgcttgctctcctctct

SEQ ID NO: 488394 - DNA, 33 bp, Homo sapien
ctttgcaatgaaatgatgcttgctctcctctct

SEQ ID NO: 488395 - DNA, 33 bp, Homo sapien
cgcatcacatagataactggctttgaattttta

SEQ ID NO: 488396 - DNA, 33 bp, Homo sapien
cgcatcacatagataattggctttgaattttta

SEQ ID NO: 488397 - DNA, 33 bp, Homo sapien
tttcaagagaccagaactgttttatataggtaa

SEQ ID NO: 488398 - DNA, 33 bp, Homo sapien
tttcaagagaccagaattgttttatataggtaa

SEQ ID NO: 488399 - DNA, 33 bp, Homo sapien
aggtaaagtggatcccccaaaatgaaattaaat

SEQ ID NO: 488400 - DNA, 33 bp, Homo sapien
aggtaaagtggatccctcaaaatgaaattaaat

SEQ ID NO: 488401 - DNA, 33 bp, Homo sapien
gggaggttccatttaaatcacaacacaacatga

SEQ ID NO: 488402 - DNA, 33 bp, Homo sapien
gggaggttccatttaattcacaacacaacatga

SEQ ID NO: 488403 - DNA, 33 bp, Homo sapien
agctgtgggatatcaaagtttgtatttaaacct

SEQ ID NO: 488404 - DNA, 33 bp, Homo sapien
agctgtgggatatcaacgtttgtatttaaacct

SEQ ID NO: 488405 - DNA, 33 bp, Homo sapien
accattttaatagtcaaaggcatcaccattatt

SEQ ID NO: 488406 - DNA, 33 bp, Homo sapien
accattttaatagtcacaggcatcaccattatt

SEQ ID NO: 488407 - DNA, 33 bp, Homo sapien
cctaatcaagaatatgaaaccactcttaggaat

SEQ ID NO: 488408 - DNA, 33 bp, Homo sapien
cctaatcaagaatatgcaaccactcttaggaat

SEQ ID NO: 488409 - DNA, 33 bp, Homo sapien
tgtatggatacctttggatgtgtgttcctggct

SEQ ID NO: 488410 - DNA, 33 bp, Homo sapien
tgtatggatacctttgtatgtgtgttcctggct

SEQ ID NO: 488411 - DNA, 33 bp, Homo sapien
ctacagatgagataaccatgtcaagtttggggg

SEQ ID NO: 488412 - DNA, 33 bp, Homo sapien
ctacagatgagataacgatgtcaagtttggggg

SEQ ID NO: 488413 - DNA, 33 bp, Homo sapien
atataaatgtgtcataactaagaaactgcattc

SEQ ID NO: 488414 - DNA, 33 bp, Homo sapien
atataaatgtgtcatatctaagaaactgcattc

SEQ ID NO: 488415 - DNA, 33 bp, Homo sapien
gggtttgatccttgaaataaagaagaacatatg

SEQ ID NO: 488416 - DNA, 33 bp, Homo sapien
gggtttgatccttgaagtaaagaagaacatatg

SEQ ID NO: 488417 - DNA, 33 bp, Homo sapien
cccaaactagttctcacgctattttgatagtga

SEQ ID NO: 488418 - DNA, 33 bp, Homo sapien
cccaaactagttctcatgctattttgatagtga

SEQ ID NO: 488419 - DNA, 33 bp, Homo sapien
atagaagtctaacataaatataaaaaagtgcac

SEQ ID NO: 488420 - DNA, 33 bp, Homo sapien
atagaagtctaacatacatataaaaaagtgcac

SEQ ID NO: 488421 - DNA, 33 bp, Homo sapien
ctacagaaaagaggacaagtaaaaagtgagcca

SEQ ID NO: 488422 - DNA, 33 bp, Homo sapien
ctacagaaaagaggaccagtaaaaagtgagcca

SEQ ID NO: 488423 - DNA, 33 bp, Homo sapien
ctaatatttgtatacactaaaggcaaagaaatt

SEQ ID NO: 488424 - DNA, 33 bp, Homo sapien
ctaatatttgtatacattaaaggcaaagaaatt

SEQ ID NO: 488425 - DNA, 33 bp, Homo sapien
taataatggacaggaaaaatagaatgtccaaaa

SEQ ID NO: 488426 - DNA, 33 bp, Homo sapien
taataatggacaggaagaatagaatgtccaaaa

SEQ ID NO: 488427 - DNA, 33 bp, Homo sapien
tgtggttggtagagagactaaaagcaatctttg

SEQ ID NO: 488428 - DNA, 33 bp, Homo sapien
tgtggttggtagagagcctaaaagcaatctttg

SEQ ID NO: 488429 - DNA, 33 bp, Homo sapien
cctttctggctctttcaacagttttcctatgca

SEQ ID NO: 488430 - DNA, 33 bp, Homo sapien
cctttctggctctttccacagttttcctatgca

SEQ ID NO: 488431 - DNA, 33 bp, Homo sapien
agcacagaaaaaataacagaaaagagagacaca

SEQ ID NO: 488432 - DNA, 33 bp, Homo sapien
agcacagaaaaaataagagaaaagagagacaca

SEQ ID NO: 488433 - DNA, 33 bp, Homo sapien
cttggtgtacactgcacgttatatcaggaactt

SEQ ID NO: 488434 - DNA, 33 bp, Homo sapien
cttggtgtacactgcatgttatatcaggaactt

SEQ ID NO: 488435 - DNA, 33 bp, Homo sapien
actatgtattgatttccaactctgtggccccat

SEQ ID NO: 488436 - DNA, 33 bp, Homo sapien
actatgtattgatttctaactctgtggccccat

SEQ ID NO: 488437 - DNA, 33 bp, Homo sapien
gaccatatgtgaaaagcctaaccatagtgtttg

SEQ ID NO: 488438 - DNA, 33 bp, Homo sapien
gaccatatgtgaaaaggctaaccatagtgtttg

SEQ ID NO: 488439 - DNA, 33 bp, Homo sapien
cagcaagttccccatgaagtttttgcagattgc

SEQ ID NO: 488440 - DNA, 33 bp, Homo sapien
cagcaagttccccatgtagtttttgcagattgc

SEQ ID NO: 488441 - DNA, 33 bp, Homo sapien
ctcacaatgaaaaccacgtgtgtaaatttgttt

SEQ ID NO: 488442 - DNA, 33 bp, Homo sapien
ctcacaatgaaaaccatgtgtgtaaatttgttt

SEQ ID NO: 488443 - DNA, 33 bp, Homo sapien
taaatgacttcacaaacggagatcaagtgtcgt

SEQ ID NO: 488444 - DNA, 33 bp, Homo sapien
taaatgacttcacaaatggagatcaagtgtcgt

SEQ ID NO: 488445 - DNA, 33 bp, Homo sapien
gtttttcttggttttacatacagagacagtgat

SEQ ID NO: 488446 - DNA, 33 bp, Homo sapien
gtttttcttggttttatatacagagacagtgat

SEQ ID NO: 488447 - DNA, 33 bp, Homo sapien
gtattcatttgccaaccgtcctttcttgaaaaa

SEQ ID NO: 488448 - DNA, 33 bp, Homo sapien
gtattcatttgccaactgtcctttcttgaaaaa

SEQ ID NO: 488449 - DNA, 33 bp, Homo sapien
gccaaagccttgtcaacaggattacccattcga

SEQ ID NO: 488450 - DNA, 33 bp, Homo sapien
gccaaagccttgtcaataggattacccattcga

SEQ ID NO: 488451 - DNA, 33 bp, Homo sapien
tgacaaaattataagccatttgcagagtcatat

SEQ ID NO: 488452 - DNA, 33 bp, Homo sapien
tgacaaaattataagctatttgcagagtcatat

SEQ ID NO: 488453 - DNA, 33 bp, Homo sapien
cttgtcatttatcggcgaaaaagcaatctgacc

SEQ ID NO: 488454 - DNA, 33 bp, Homo sapien
cttgtcatttatcggctaaaaagcaatctgacc

SEQ ID NO: 488455 - DNA, 33 bp, Homo sapien
aatattctctctcataaacagaccaactcaatc

SEQ ID NO: 488456 - DNA, 33 bp, Homo sapien
aatattctctctcatagacagaccaactcaatc

SEQ ID NO: 488457 - DNA, 33 bp, Homo sapien
ctgctggggctactcaatatgtttctaaacaca

SEQ ID NO: 488458 - DNA, 33 bp, Homo sapien
ctgctggggctactcagtatgtttctaaacaca

SEQ ID NO: 488459 - DNA, 33 bp, Homo sapien
gattaaaccagcctagcagggatatggacctaa

SEQ ID NO: 488460 - DNA, 33 bp, Homo sapien
gattaaaccagcctagtagggatatggacctaa

SEQ ID NO: 488461 - DNA, 33 bp, Homo sapien
ctgtagctgtggacaaagataaggatgtggatg

SEQ ID NO: 488462 - DNA, 33 bp, Homo sapien
ctgtagctgtggacaaggataaggatgtggatg

SEQ ID NO: 488463 - DNA, 33 bp, Homo sapien
taacaaaggtgtattgcatttacactgaactct

SEQ ID NO: 488464 - DNA, 33 bp, Homo sapien
taacaaaggtgtattggatttacactgaactct

SEQ ID NO: 488465 - DNA, 33 bp, Homo sapien
tataacatcaaaccacaaagacaaacaataaga

SEQ ID NO: 488466 - DNA, 33 bp, Homo sapien
tataacatcaaaccacgaagacaaacaataaga

SEQ ID NO: 488467 - DNA, 33 bp, Homo sapien
gccaagaagtaatcccacatacctacaacaaac

SEQ ID NO: 488468 - DNA, 33 bp, Homo sapien
gccaagaagtaatcccccatacctacaacaaac

SEQ ID NO: 488469 - DNA, 33 bp, Homo sapien
tttgatattaggaagagtaattttctggagtca

SEQ ID NO: 488470 - DNA, 33 bp, Homo sapien
tttgatattaggaagattaattttctggagtca

SEQ ID NO: 488471 - DNA, 33 bp, Homo sapien
gagatttttctcaagacagacatttcaaatgag

SEQ ID NO: 488472 - DNA, 33 bp, Homo sapien
gagatttttctcaagagagacatttcaaatgag

SEQ ID NO: 488473 - DNA, 33 bp, Homo sapien
attccagactttaaaccaattccatgccaagat

SEQ ID NO: 488474 - DNA, 33 bp, Homo sapien
attccagactttaaactaattccatgccaagat

SEQ ID NO: 488475 - DNA, 33 bp, Homo sapien
actttctccaacttaaaattctctgtccctctt

SEQ ID NO: 488476 - DNA, 33 bp, Homo sapien
actttctccaacttaacattctctgtccctctt

SEQ ID NO: 488477 - DNA, 33 bp, Homo sapien
aaccattgggtacaaaatagaggagttggaaga

SEQ ID NO: 488478 - DNA, 33 bp, Homo sapien
aaccattgggtacaaagtagaggagttggaaga

SEQ ID NO: 488479 - DNA, 33 bp, Homo sapien
gacagatgagacttaaatgcaaatactttaata

SEQ ID NO: 488480 - DNA, 33 bp, Homo sapien
gacagatgagacttaactgcaaatactttaata

SEQ ID NO: 488481 - DNA, 33 bp, Homo sapien
gcacctaccaactccaactgaagaataaactgc

SEQ ID NO: 488482 - DNA, 33 bp, Homo sapien
gcacctaccaactccagctgaagaataaactgc

SEQ ID NO: 488483 - DNA, 33 bp, Homo sapien
ttttctcttgagtaaactgacataacctataga

SEQ ID NO: 488484 - DNA, 33 bp, Homo sapien
ttttctcttgagtaaagtgacataacctataga

SEQ ID NO: 488485 - DNA, 33 bp, Homo sapien
gaccacaagtttcagagagtaagcataagtgat

SEQ ID NO: 488486 - DNA, 33 bp, Homo sapien
gaccacaagtttcagatagtaagcataagtgat

SEQ ID NO: 488487 - DNA, 33 bp, Homo sapien
tctgagtaaagtcagtcacagtaagtaaagtca

SEQ ID NO: 488488 - DNA, 33 bp, Homo sapien
tctgagtaaagtcagtgacagtaagtaaagtca

SEQ ID NO: 488489 - DNA, 33 bp, Homo sapien
ctgcagcaagttatctaaaatatctacctaaga

SEQ ID NO: 488490 - DNA, 33 bp, Homo sapien
ctgcagcaagttatctgaaatatctacctaaga

SEQ ID NO: 488491 - DNA, 33 bp, Homo sapien
tttgctaagagaatagcccttgactgttctcat

SEQ ID NO: 488492 - DNA, 33 bp, Homo sapien
tttgctaagagaataggccttgactgttctcat

SEQ ID NO: 488493 - DNA, 33 bp, Homo sapien
tcaaattaatacgaaaacagaatcaaatcaaac

SEQ ID NO: 488494 - DNA, 33 bp, Homo sapien
tcaaattaatacgaaagcagaatcaaatcaaac

SEQ ID NO: 488495 - DNA, 33 bp, Homo sapien
ccacagagggttaggcaagtagaaagataatta

SEQ ID NO: 488496 - DNA, 33 bp, Homo sapien
ccacagagggttaggccagtagaaagataatta

SEQ ID NO: 488497 - DNA, 33 bp, Homo sapien
gaattgatatccttggcaaatgttgagattcag

SEQ ID NO: 488498 - DNA, 33 bp, Homo sapien
gaattgatatccttggtaaatgttgagattcag

SEQ ID NO: 488499 - DNA, 33 bp, Homo sapien
tagagagctagattcccatcaattatgttgctc

SEQ ID NO: 488500 - DNA, 33 bp, Homo sapien
tagagagctagattcctatcaattatgttgctc

SEQ ID NO: 488501 - DNA, 33 bp, Homo sapien
taatgtaaatcactaacgtgccttttaccatca

SEQ ID NO: 488502 - DNA, 33 bp, Homo sapien
taatgtaaatcactaatgtgccttttaccatca

SEQ ID NO: 488503 - DNA, 33 bp, Homo sapien
cccaataaacagaaaaatacaaatgaaaatgtg

SEQ ID NO: 488504 - DNA, 33 bp, Homo sapien
cccaataaacagaaaagtacaaatgaaaatgtg

SEQ ID NO: 488505 - DNA, 33 bp, Homo sapien
acttcatcaatcttcaaaaaatccttaaagaat

SEQ ID NO: 488506 - DNA, 33 bp, Homo sapien
acttcatcaatcttcagaaaatccttaaagaat

SEQ ID NO: 488507 - DNA, 33 bp, Homo sapien
gttttcatattctaccacattccaacaggacac

SEQ ID NO: 488508 - DNA, 33 bp, Homo sapien
gttttcatattctaccgcattccaacaggacac

SEQ ID NO: 488509 - DNA, 33 bp, Homo sapien
gaatcttctgcctctacatccttccttggtttg

SEQ ID NO: 488510 - DNA, 33 bp, Homo sapien
gaatcttctgcctctatatccttccttggtttg

SEQ ID NO: 488511 - DNA, 33 bp, Homo sapien
cttttcttctttttcacatcggctggtctcatt

SEQ ID NO: 488512 - DNA, 33 bp, Homo sapien
cttttcttctttttcagatcggctggtctcatt

SEQ ID NO: 488513 - DNA, 33 bp, Homo sapien
ctagtgcaggcagaaaagaatggtgttatttct

SEQ ID NO: 488514 - DNA, 33 bp, Homo sapien
ctagtgcaggcagaaaggaatggtgttatttct

SEQ ID NO: 488515 - DNA, 33 bp, Homo sapien
ttgtatagatgaaccaatatgccacagtctcct

SEQ ID NO: 488516 - DNA, 33 bp, Homo sapien
ttgtatagatgaaccagtatgccacagtctcct

SEQ ID NO: 488517 - DNA, 33 bp, Homo sapien
aaaccctaaaataaagaagagttgatcaggtct

SEQ ID NO: 488518 - DNA, 33 bp, Homo sapien
aaaccctaaaataaaggagagttgatcaggtct

SEQ ID NO: 488519 - DNA, 33 bp, Homo sapien
ttcaatagtcagaaaccacatggaagggaaagg

SEQ ID NO: 488520 - DNA, 33 bp, Homo sapien
ttcaatagtcagaaactacatggaagggaaagg

SEQ ID NO: 488521 - DNA, 33 bp, Homo sapien
ttattcatcagaaagaatataacagctacctcc

SEQ ID NO: 488522 - DNA, 33 bp, Homo sapien
ttattcatcagaaagactataacagctacctcc

SEQ ID NO: 488523 - DNA, 33 bp, Homo sapien
tactttgctacatcttaaagagcagcatggaat

SEQ ID NO: 488524 - DNA, 33 bp, Homo sapien
tactttgctacatcttgaagagcagcatggaat

SEQ ID NO: 488525 - DNA, 33 bp, Homo sapien
agccagttatccagcaagagtttttgaataggg

SEQ ID NO: 488526 - DNA, 33 bp, Homo sapien
agccagttatccagcacgagtttttgaataggg

SEQ ID NO: 488527 - DNA, 33 bp, Homo sapien
taccatgtgaaattaaagtgatgaactgcttgc

SEQ ID NO: 488528 - DNA, 33 bp, Homo sapien
taccatgtgaaattaatgtgatgaactgcttgc

SEQ ID NO: 488529 - DNA, 33 bp, Homo sapien
ttggtttctaactaacacaacgtctaagaagca

SEQ ID NO: 488530 - DNA, 33 bp, Homo sapien
ttggtttctaactaacgcaacgtctaagaagca

SEQ ID NO: 488531 - DNA, 33 bp, Homo sapien
tacatccagatcccaaaccatgagttctacata

SEQ ID NO: 488532 - DNA, 33 bp, Homo sapien
tacatccagatcccaatccatgagttctacata

SEQ ID NO: 488533 - DNA, 33 bp, Homo sapien
ctctaaggcttcttaaaaatggagaaagattac

SEQ ID NO: 488534 - DNA, 33 bp, Homo sapien
ctctaaggcttcttaacaatggagaaagattac

SEQ ID NO: 488535 - DNA, 33 bp, Homo sapien
ggaagctccgggccacaactctaaggcttctta

SEQ ID NO: 488536 - DNA, 33 bp, Homo sapien
ggaagctccgggccactactctaaggcttctta

SEQ ID NO: 488537 - DNA, 33 bp, Homo sapien
gtttgacagctcacagactagtaatcttagtac

SEQ ID NO: 488538 - DNA, 33 bp, Homo sapien
gtttgacagctcacagtctagtaatcttagtac

SEQ ID NO: 488539 - DNA, 33 bp, Homo sapien
gaatcaacatctttcccctaccagatccctagt

SEQ ID NO: 488540 - DNA, 33 bp, Homo sapien
gaatcaacatctttcctctaccagatccctagt

SEQ ID NO: 488541 - DNA, 33 bp, Homo sapien
acaaaacgctttataccaacacatagcttctct

SEQ ID NO: 488542 - DNA, 33 bp, Homo sapien
acaaaacgctttatactaacacatagcttctct

SEQ ID NO: 488543 - DNA, 33 bp, Homo sapien
ctaataaggaatgtaaagagtcaatgagaggac

SEQ ID NO: 488544 - DNA, 33 bp, Homo sapien
ctaataaggaatgtaaggagtcaatgagaggac

SEQ ID NO: 488545 - DNA, 33 bp, Homo sapien
aaagattaagttattccagcaaacataaatttg

SEQ ID NO: 488546 - DNA, 33 bp, Homo sapien
aaagattaagttattcgagcaaacataaatttg

SEQ ID NO: 488547 - DNA, 33 bp, Homo sapien
ttaacaagtactaaaaagagtgtaggggagaag

SEQ ID NO: 488548 - DNA, 33 bp, Homo sapien
ttaacaagtactaaaaggagtgtaggggagaag

SEQ ID NO: 488549 - DNA, 33 bp, Homo sapien
ttgaaagtaggaattccagcatcttatttacaa

SEQ ID NO: 488550 - DNA, 33 bp, Homo sapien
ttgaaagtaggaattctagcatcttatttacaa

SEQ ID NO: 488551 - DNA, 33 bp, Homo sapien
ctttactgagagtttacaacacaagtttaataa

SEQ ID NO: 488552 - DNA, 33 bp, Homo sapien
ctttactgagagtttagaacacaagtttaataa

SEQ ID NO: 488553 - DNA, 33 bp, Homo sapien
tacttacattctcttcaaggcaattcataaact

SEQ ID NO: 488554 - DNA, 33 bp, Homo sapien
tacttacattctcttccaggcaattcataaact

SEQ ID NO: 488555 - DNA, 33 bp, Homo sapien
aggagaggcatggagacaaaccactggcaactg

SEQ ID NO: 488556 - DNA, 33 bp, Homo sapien
aggagaggcatggagagaaaccactggcaactg

SEQ ID NO: 488557 - DNA, 33 bp, Homo sapien
aaatggtgaaatagaacagatgcgctcagtttt

SEQ ID NO: 488558 - DNA, 33 bp, Homo sapien
aaatggtgaaatagaagagatgcgctcagtttt

SEQ ID NO: 488559 - DNA, 33 bp, Homo sapien
cagattcacgaaacaaatacttctagatgttct

SEQ ID NO: 488560 - DNA, 33 bp, Homo sapien
cagattcacgaaacaagtacttctagatgttct

SEQ ID NO: 488561 - DNA, 33 bp, Homo sapien
acactatcttctacaacgcctgtaccaatttat

SEQ ID NO: 488562 - DNA, 33 bp, Homo sapien
acactatcttctacaatgcctgtaccaatttat

SEQ ID NO: 488563 - DNA, 33 bp, Homo sapien
aacgaatccgaaaaggaatcaaagaacttagta

SEQ ID NO: 488564 - DNA, 33 bp, Homo sapien
aacgaatccgaaaagggatcaaagaacttagta

SEQ ID NO: 488565 - DNA, 33 bp, Homo sapien
agttatcttttctatcaccagctagaattaaga

SEQ ID NO: 488566 - DNA, 33 bp, Homo sapien
agttatcttttctatctccagctagaattaaga

SEQ ID NO: 488567 - DNA, 33 bp, Homo sapien
gagcaaatacctaaaagagagtcagctgtatga

SEQ ID NO: 488568 - DNA, 33 bp, Homo sapien
gagcaaatacctaaaatagagtcagctgtatga

SEQ ID NO: 488569 - DNA, 33 bp, Homo sapien
tagtaccagatacctgacagacaaaagacagtg

SEQ ID NO: 488570 - DNA, 33 bp, Homo sapien
tagtaccagatacctggcagacaaaagacagtg

SEQ ID NO: 488571 - DNA, 33 bp, Homo sapien
tagtaataatggattacgtgacttatatccaca

SEQ ID NO: 488572 - DNA, 33 bp, Homo sapien
tagtaataatggattatgtgacttatatccaca

SEQ ID NO: 488573 - DNA, 33 bp, Homo sapien
atgatttctgaaaatgaatttaggaatgataac

SEQ ID NO: 488574 - DNA, 33 bp, Homo sapien
atgatttctgaaaatggatttaggaatgataac

SEQ ID NO: 488575 - DNA, 33 bp, Homo sapien
tattacataagacagacctttctccaacacatt

SEQ ID NO: 488576 - DNA, 33 bp, Homo sapien
tattacataagacagatctttctccaacacatt

SEQ ID NO: 488577 - DNA, 33 bp, Homo sapien
gaaatgggaatccagccattgcgtctttgaggc

SEQ ID NO: 488578 - DNA, 33 bp, Homo sapien
gaaatgggaatccagctattgcgtctttgaggc

SEQ ID NO: 488579 - DNA, 33 bp, Homo sapien
agcatttttcagtgagcacttgccatgcctgat

SEQ ID NO: 488580 - DNA, 33 bp, Homo sapien
agcatttttcagtgagtacttgccatgcctgat

SEQ ID NO: 488581 - DNA, 33 bp, Homo sapien
ttatatgagtccctaaatgtcagatgagtctct

SEQ ID NO: 488582 - DNA, 33 bp, Homo sapien
ttatatgagtccctaagtgtcagatgagtctct

SEQ ID NO: 488583 - DNA, 33 bp, Homo sapien
aacctggtcagtgaaacgggtgatgatagaaac

SEQ ID NO: 488584 - DNA, 33 bp, Homo sapien
aacctggtcagtgaaaggggtgatgatagaaac

SEQ ID NO: 488585 - DNA, 33 bp, Homo sapien
tcctatatttgtatgaagtagcacaggagttca

SEQ ID NO: 488586 - DNA, 33 bp, Homo sapien
tcctatatttgtatgaggtagcacaggagttca

SEQ ID NO: 488587 - DNA, 33 bp, Homo sapien
ggtaacttttgtcagggagaaaattgccatctt

SEQ ID NO: 488588 - DNA, 33 bp, Homo sapien
ggtaacttttgtcaggtagaaaattgccatctt

SEQ ID NO: 488589 - DNA, 33 bp, Homo sapien
cttcctttgacaaccaatgatatcaagagatag

SEQ ID NO: 488590 - DNA, 33 bp, Homo sapien
cttcctttgacaaccagtgatatcaagagatag

SEQ ID NO: 488591 - DNA, 33 bp, Homo sapien
tgatgcttagagcatacgataaagccagaaaaa

SEQ ID NO: 488592 - DNA, 33 bp, Homo sapien
tgatgcttagagcatatgataaagccagaaaaa

SEQ ID NO: 488593 - DNA, 33 bp, Homo sapien
caagaactcttgatcacccaacaaggcccactg

SEQ ID NO: 488594 - DNA, 33 bp, Homo sapien
caagaactcttgatcagccaacaaggcccactg

SEQ ID NO: 488595 - DNA, 33 bp, Homo sapien
gaattgaagcctgagaggtattcattcatttat

SEQ ID NO: 488596 - DNA, 33 bp, Homo sapien
gaattgaagcctgagatgtattcattcatttat

SEQ ID NO: 488597 - DNA, 33 bp, Homo sapien
cagaaaggaatcaggactcagcacttacgcata

SEQ ID NO: 488598 - DNA, 33 bp, Homo sapien
cagaaaggaatcaggagtcagcacttacgcata

SEQ ID NO: 488599 - DNA, 33 bp, Homo sapien
tcacagacagcaacacgaaaagaccactgtaac

SEQ ID NO: 488600 - DNA, 33 bp, Homo sapien
tcacagacagcaacactaaaagaccactgtaac

SEQ ID NO: 488601 - DNA, 33 bp, Homo sapien
aaattaacaacactcaacaacctggtgcaaatt

SEQ ID NO: 488602 - DNA, 33 bp, Homo sapien
aaattaacaacactcagcaacctggtgcaaatt

SEQ ID NO: 488603 - DNA, 33 bp, Homo sapien
atatccagagcataagaaaacctaaaggatgta

SEQ ID NO: 488604 - DNA, 33 bp, Homo sapien
atatccagagcataaggaaacctaaaggatgta

SEQ ID NO: 488605 - DNA, 33 bp, Homo sapien
ctgtgaggaggcttatcaaagcagtctgggaga

SEQ ID NO: 488606 - DNA, 33 bp, Homo sapien
ctgtgaggaggcttatgaaagcagtctgggaga

SEQ ID NO: 488607 - DNA, 33 bp, Homo sapien
aaatagtttctttctcaccaacattgttcccat

SEQ ID NO: 488608 - DNA, 33 bp, Homo sapien
aaatagtttctttctcgccaacattgttcccat

SEQ ID NO: 488609 - DNA, 33 bp, Homo sapien
ttgaaagccaaaccaacattagggatgtcatat

SEQ ID NO: 488610 - DNA, 33 bp, Homo sapien
ttgaaagccaaaccaatattagggatgtcatat

SEQ ID NO: 488611 - DNA, 33 bp, Homo sapien
ggtgacaatgctctaccggtttgtagtttgtgt

SEQ ID NO: 488612 - DNA, 33 bp, Homo sapien
ggtgacaatgctctactggtttgtagtttgtgt

SEQ ID NO: 488613 - DNA, 33 bp, Homo sapien
gattataacaatgcctcagaacaatttccaaat

SEQ ID NO: 488614 - DNA, 33 bp, Homo sapien
gattataacaatgcctgagaacaatttccaaat

SEQ ID NO: 488615 - DNA, 33 bp, Homo sapien
ctttataaaggtagaccggttgctttaatttgg

SEQ ID NO: 488616 - DNA, 33 bp, Homo sapien
ctttataaaggtagactggttgctttaatttgg

SEQ ID NO: 488617 - DNA, 33 bp, Homo sapien
cctaggttacgatgaccatatgttcccaattac

SEQ ID NO: 488618 - DNA, 33 bp, Homo sapien
cctaggttacgatgactatatgttcccaattac

SEQ ID NO: 488619 - DNA, 33 bp, Homo sapien
gatcaaacacagagagcaagttgaacaggatga

SEQ ID NO: 488620 - DNA, 33 bp, Homo sapien
gatcaaacacagagaggaagttgaacaggatga

SEQ ID NO: 488621 - DNA, 33 bp, Homo sapien
gtaatgttatagaccagggctaaaatttacatg

SEQ ID NO: 488622 - DNA, 33 bp, Homo sapien
gtaatgttatagaccatggctaaaatttacatg

SEQ ID NO: 488623 - DNA, 33 bp, Homo sapien
tagtttgattgtcacactggaaattcctaatcg

SEQ ID NO: 488624 - DNA, 33 bp, Homo sapien
tagtttgattgtcacattggaaattcctaatcg

SEQ ID NO: 488625 - DNA, 33 bp, Homo sapien
ttatacagttcagaaggcaatctgtgatatcaa

SEQ ID NO: 488626 - DNA, 33 bp, Homo sapien
ttatacagttcagaagtcaatctgtgatatcaa

SEQ ID NO: 488627 - DNA, 33 bp, Homo sapien
gcaacagagtgacagtcaatgagaaaaatcagt

SEQ ID NO: 488628 - DNA, 33 bp, Homo sapien
gcaacagagtgacagtgaatgagaaaaatcagt

SEQ ID NO: 488629 - DNA, 33 bp, Homo sapien
atacaagaattcagtagagaaaaaggtatatga

SEQ ID NO: 488630 - DNA, 33 bp, Homo sapien
atacaagaattcagtatagaaaaaggtatatga

SEQ ID NO: 488631 - DNA, 33 bp, Homo sapien
gaatttatcgttgactaaaaaatagttaaatgt

SEQ ID NO: 488632 - DNA, 33 bp, Homo sapien
gaatttatcgttgactcaaaaatagttaaatgt

SEQ ID NO: 488633 - DNA, 33 bp, Homo sapien
cactggagaattgtacacttggtgcagcccaat

SEQ ID NO: 488634 - DNA, 33 bp, Homo sapien
cactggagaattgtacgcttggtgcagcccaat

SEQ ID NO: 488635 - DNA, 33 bp, Homo sapien
caccaatattcattcaatctgccagccatttct

SEQ ID NO: 488636 - DNA, 33 bp, Homo sapien
caccaatattcattcagtctgccagccatttct

SEQ ID NO: 488637 - DNA, 33 bp, Homo sapien
agactgatgatggaagaagttataataactgtt

SEQ ID NO: 488638 - DNA, 33 bp, Homo sapien
agactgatgatggaaggagttataataactgtt

SEQ ID NO: 488639 - DNA, 33 bp, Homo sapien
attagagatacttgtaataagacttcttaccct

SEQ ID NO: 488640 - DNA, 33 bp, Homo sapien
attagagatacttgtagtaagacttcttaccct

SEQ ID NO: 488641 - DNA, 33 bp, Homo sapien
cgagtggccttttgcaccttcagtttcttactc

SEQ ID NO: 488642 - DNA, 33 bp, Homo sapien
cgagtggccttttgcatcttcagtttcttactc

SEQ ID NO: 488643 - DNA, 33 bp, Homo sapien
aaagttgcacaaaaaaactcacaatccacattt

SEQ ID NO: 488644 - DNA, 33 bp, Homo sapien
aaagttgcacaaaaaagctcacaatccacattt

SEQ ID NO: 488645 - DNA, 33 bp, Homo sapien
caaaaattgacaaatgacatcagattaaactaa

SEQ ID NO: 488646 - DNA, 33 bp, Homo sapien
caaaaattgacaaatggcatcagattaaactaa

SEQ ID NO: 488647 - DNA, 33 bp, Homo sapien
tagttgctgcttctccagatgttttttatttcc

SEQ ID NO: 488648 - DNA, 33 bp, Homo sapien
tagttgctgcttctccggatgttttttatttcc

SEQ ID NO: 488649 - DNA, 33 bp, Homo sapien
caagtctatatttagcaagacaatgtgggagag

SEQ ID NO: 488650 - DNA, 33 bp, Homo sapien
caagtctatatttagccagacaatgtgggagag

SEQ ID NO: 488651 - DNA, 33 bp, Homo sapien
tcttagtggtattaaccgagaatttagttctca

SEQ ID NO: 488652 - DNA, 33 bp, Homo sapien
tcttagtggtattaactgagaatttagttctca

SEQ ID NO: 488653 - DNA, 33 bp, Homo sapien
taacaacctgactccaaatttttttgttccctt

SEQ ID NO: 488654 - DNA, 33 bp, Homo sapien
taacaacctgactccacatttttttgttccctt

SEQ ID NO: 488655 - DNA, 33 bp, Homo sapien
gatgtagaagctacaaaaaattatccagaagat

SEQ ID NO: 488656 - DNA, 33 bp, Homo sapien
gatgtagaagctacaacaaattatccagaagat

SEQ ID NO: 488657 - DNA, 33 bp, Homo sapien
taatactgtttgtagacagacaaattcatcttc

SEQ ID NO: 488658 - DNA, 33 bp, Homo sapien
taatactgtttgtagatagacaaattcatcttc

SEQ ID NO: 488659 - DNA, 33 bp, Homo sapien
tagaaaaaatggggcaaaatgtactaacaaagt

SEQ ID NO: 488660 - DNA, 33 bp, Homo sapien
tagaaaaaatggggcacaatgtactaacaaagt

SEQ ID NO: 488661 - DNA, 33 bp, Homo sapien
aatcagttcgtatgccactataggcctcagatt

SEQ ID NO: 488662 - DNA, 33 bp, Homo sapien
aatcagttcgtatgccgctataggcctcagatt

SEQ ID NO: 488663 - DNA, 33 bp, Homo sapien
atttatggtgcataaactccagtgaattctaat

SEQ ID NO: 488664 - DNA, 33 bp, Homo sapien
atttatggtgcataaattccagtgaattctaat

SEQ ID NO: 488665 - DNA, 33 bp, Homo sapien
tcaatgatgacagtaaccgccttttccaatttt

SEQ ID NO: 488666 - DNA, 33 bp, Homo sapien
tcaatgatgacagtaatcgccttttccaatttt

SEQ ID NO: 488667 - DNA, 33 bp, Homo sapien
atctaatgactaagaaatagatggagtcaggat

SEQ ID NO: 488668 - DNA, 33 bp, Homo sapien
atctaatgactaagaagtagatggagtcaggat

SEQ ID NO: 488669 - DNA, 33 bp, Homo sapien
ctgtgttctcagtctcaaaattactaatcattt

SEQ ID NO: 488670 - DNA, 33 bp, Homo sapien
ctgtgttctcagtctcgaaattactaatcattt

SEQ ID NO: 488671 - DNA, 33 bp, Homo sapien
gtcatctgtctcctcacgggatgtccacaaaga

SEQ ID NO: 488672 - DNA, 33 bp, Homo sapien
gtcatctgtctcctcaggggatgtccacaaaga

SEQ ID NO: 488673 - DNA, 33 bp, Homo sapien
cattagctgataaacaaatactacctattgata

SEQ ID NO: 488674 - DNA, 33 bp, Homo sapien
cattagctgataaacagatactacctattgata

SEQ ID NO: 488675 - DNA, 33 bp, Homo sapien
tttctctgtctgatcacgtgagtgctgtttggg

SEQ ID NO: 488676 - DNA, 33 bp, Homo sapien
tttctctgtctgatcatgtgagtgctgtttggg

SEQ ID NO: 488677 - DNA, 33 bp, Homo sapien
aaaagagaccatcaagaaagacttgctccatct

SEQ ID NO: 488678 - DNA, 33 bp, Homo sapien
aaaagagaccatcaaggaagacttgctccatct

SEQ ID NO: 488679 - DNA, 33 bp, Homo sapien
agactagtgtatgaataatcacagagaaaagta

SEQ ID NO: 488680 - DNA, 33 bp, Homo sapien
agactagtgtatgaatcatcacagagaaaagta

SEQ ID NO: 488681 - DNA, 33 bp, Homo sapien
ctaggatagtgactgactaaaataaacttaatt

SEQ ID NO: 488682 - DNA, 33 bp, Homo sapien
ctaggatagtgactgagtaaaataaacttaatt

SEQ ID NO: 488683 - DNA, 33 bp, Homo sapien
atgtttttatagtggtcaagtctcatgcttatt

SEQ ID NO: 488684 - DNA, 33 bp, Homo sapien
atgtttttatagtggtgaagtctcatgcttatt

SEQ ID NO: 488685 - DNA, 33 bp, Homo sapien
tgtgcaacttcataaaagatgaggattctgtct

SEQ ID NO: 488686 - DNA, 33 bp, Homo sapien
tgtgcaacttcataaacgatgaggattctgtct

SEQ ID NO: 488687 - DNA, 33 bp, Homo sapien
cacatcattacaacaacctaaaacactctcaca

SEQ ID NO: 488688 - DNA, 33 bp, Homo sapien
cacatcattacaacaatctaaaacactctcaca

SEQ ID NO: 488689 - DNA, 33 bp, Homo sapien
gcctcagtcccaattaggatggaaactcaatga

SEQ ID NO: 488690 - DNA, 33 bp, Homo sapien
gcctcagtcccaattatgatggaaactcaatga

SEQ ID NO: 488691 - DNA, 33 bp, Homo sapien
ataagctcaggtctcaaaaagaaagtaaccata

SEQ ID NO: 488692 - DNA, 33 bp, Homo sapien
ataagctcaggtctcagaaagaaagtaaccata

SEQ ID NO: 488693 - DNA, 33 bp, Homo sapien
taaggagttagtatccaaaatatgtatggaact

SEQ ID NO: 488694 - DNA, 33 bp, Homo sapien
taaggagttagtatcccaaatatgtatggaact

SEQ ID NO: 488695 - DNA, 33 bp, Homo sapien
catctgggaaaatacactctcaccagtctattg

SEQ ID NO: 488696 - DNA, 33 bp, Homo sapien
catctgggaaaatacattctcaccagtctattg

SEQ ID NO: 488697 - DNA, 33 bp, Homo sapien
aaggtagaaagggaaaagtagatctgttagttt

SEQ ID NO: 488698 - DNA, 33 bp, Homo sapien
aaggtagaaagggaaaggtagatctgttagttt

SEQ ID NO: 488699 - DNA, 33 bp, Homo sapien
gatcctgctgtcttgacaagctattatggcaga

SEQ ID NO: 488700 - DNA, 33 bp, Homo sapien
gatcctgctgtcttgataagctattatggcaga

SEQ ID NO: 488701 - DNA, 33 bp, Homo sapien
gaagctcccccaaacaccatggcaaacactact

SEQ ID NO: 488702 - DNA, 33 bp, Homo sapien
gaagctcccccaaacatcatggcaaacactact

SEQ ID NO: 488703 - DNA, 33 bp, Homo sapien
caagcagggtcacagactaacaccccatgcaga

SEQ ID NO: 488704 - DNA, 33 bp, Homo sapien
caagcagggtcacagagtaacaccccatgcaga

SEQ ID NO: 488705 - DNA, 33 bp, Homo sapien
acatttgtttcatgcacaaagttattaaaaata

SEQ ID NO: 488706 - DNA, 33 bp, Homo sapien
acatttgtttcatgcagaaagttattaaaaata

SEQ ID NO: 488707 - DNA, 33 bp, Homo sapien
attgcctaacagtcccgctgtgtttccctagtc

SEQ ID NO: 488708 - DNA, 33 bp, Homo sapien
attgcctaacagtccctctgtgtttccctagtc

SEQ ID NO: 488709 - DNA, 33 bp, Homo sapien
ctgcactctttcatccgacttttttcctctcta

SEQ ID NO: 488710 - DNA, 33 bp, Homo sapien
ctgcactctttcatcctacttttttcctctcta

SEQ ID NO: 488711 - DNA, 33 bp, Homo sapien
gctattcatgtgctaccgacttctcctatccta

SEQ ID NO: 488712 - DNA, 33 bp, Homo sapien
gctattcatgtgctactgacttctcctatccta

SEQ ID NO: 488713 - DNA, 33 bp, Homo sapien
gctacctgaagccatacatcacatctcatatct

SEQ ID NO: 488714 - DNA, 33 bp, Homo sapien
gctacctgaagccatagatcacatctcatatct

SEQ ID NO: 488715 - DNA, 33 bp, Homo sapien
caagactaagtcacaaaagattatttggtttcc

SEQ ID NO: 488716 - DNA, 33 bp, Homo sapien
caagactaagtcacaagagattatttggtttcc

SEQ ID NO: 488717 - DNA, 33 bp, Homo sapien
acactagacgtgttaaatgagcaagactttaga

SEQ ID NO: 488718 - DNA, 33 bp, Homo sapien
acactagacgtgttaagtgagcaagactttaga

SEQ ID NO: 488719 - DNA, 33 bp, Homo sapien
ccaaaagattggatacactgatctaaagtcttg

SEQ ID NO: 488720 - DNA, 33 bp, Homo sapien
ccaaaagattggataccctgatctaaagtcttg

SEQ ID NO: 488721 - DNA, 33 bp, Homo sapien
caaattaaattaccaactcaaaacagctagtca

SEQ ID NO: 488722 - DNA, 33 bp, Homo sapien
caaattaaattaccaagtcaaaacagctagtca

SEQ ID NO: 488723 - DNA, 33 bp, Homo sapien
atttcatccatttaacagggaatttgcacccag

SEQ ID NO: 488724 - DNA, 33 bp, Homo sapien
atttcatccatttaacggggaatttgcacccag

SEQ ID NO: 488725 - DNA, 33 bp, Homo sapien
cttctggaagagtgaaatgttctaaacttgatt

SEQ ID NO: 488726 - DNA, 33 bp, Homo sapien
cttctggaagagtgaagtgttctaaacttgatt

SEQ ID NO: 488727 - DNA, 33 bp, Homo sapien
tagacagagtatactaaaaacctcactaaaaaa

SEQ ID NO: 488728 - DNA, 33 bp, Homo sapien
tagacagagtatactagaaacctcactaaaaaa

SEQ ID NO: 488729 - DNA, 33 bp, Homo sapien
tcatctcatcttggtccaaattcacctgaatta

SEQ ID NO: 488730 - DNA, 33 bp, Homo sapien
tcatctcatcttggtctaaattcacctgaatta

SEQ ID NO: 488731 - DNA, 33 bp, Homo sapien
gagctcagacatgccaatctaatagttgttttg

SEQ ID NO: 488732 - DNA, 33 bp, Homo sapien
gagctcagacatgccagtctaatagttgttttg

SEQ ID NO: 488733 - DNA, 33 bp, Homo sapien
caaagtaacatttacacaacatgagttaggcat

SEQ ID NO: 488734 - DNA, 33 bp, Homo sapien
caaagtaacatttacagaacatgagttaggcat

SEQ ID NO: 488735 - DNA, 33 bp, Homo sapien
gattcacaaagtctcaaatgaaggcagaagttg

SEQ ID NO: 488736 - DNA, 33 bp, Homo sapien
gattcacaaagtctcatatgaaggcagaagttg

SEQ ID NO: 488737 - DNA, 33 bp, Homo sapien
ttgagtctaatttttaactatttactggttgta

SEQ ID NO: 488738 - DNA, 33 bp, Homo sapien
ttgagtctaatttttatctatttactggttgta

SEQ ID NO: 488739 - DNA, 33 bp, Homo sapien
ctccttcctttagatacatgtttgagtctaatt

SEQ ID NO: 488740 - DNA, 33 bp, Homo sapien
ctccttcctttagatagatgtttgagtctaatt

SEQ ID NO: 488741 - DNA, 33 bp, Homo sapien
atatcctcaggtttaacagtataacagaattta

SEQ ID NO: 488742 - DNA, 33 bp, Homo sapien
atatcctcaggtttaatagtataacagaattta

SEQ ID NO: 488743 - DNA, 33 bp, Homo sapien
tctgatttcctgttacagaaaggtctactaacc

SEQ ID NO: 488744 - DNA, 33 bp, Homo sapien
tctgatttcctgttactgaaaggtctactaacc

SEQ ID NO: 488745 - DNA, 33 bp, Homo sapien
agagaaagttgagttggaaattgagtgggatcc

SEQ ID NO: 488746 - DNA, 33 bp, Homo sapien
agagaaagttgagttgtaaattgagtgggatcc

SEQ ID NO: 488747 - DNA, 33 bp, Homo sapien
acatctaccaattgagacctatgaatagacata

SEQ ID NO: 488748 - DNA, 33 bp, Homo sapien
acatctaccaattgagccctatgaatagacata

SEQ ID NO: 488749 - DNA, 33 bp, Homo sapien
ccatttgtccttgatactagcaacatctcctct

SEQ ID NO: 488750 - DNA, 33 bp, Homo sapien
ccatttgtccttgatagtagcaacatctcctct

SEQ ID NO: 488751 - DNA, 33 bp, Homo sapien
aactcattggtaatcacggaaaggcaaattaag

SEQ ID NO: 488752 - DNA, 33 bp, Homo sapien
aactcattggtaatcatggaaaggcaaattaag

SEQ ID NO: 488753 - DNA, 33 bp, Homo sapien
tgtcactgaaactgaaatataagcatacttaca

SEQ ID NO: 488754 - DNA, 33 bp, Homo sapien
tgtcactgaaactgaattataagcatacttaca

SEQ ID NO: 488755 - DNA, 33 bp, Homo sapien
ggctacagtggttcaacgtaacttgattggaat

SEQ ID NO: 488756 - DNA, 33 bp, Homo sapien
ggctacagtggttcaatgtaacttgattggaat

SEQ ID NO: 488757 - DNA, 33 bp, Homo sapien
gactgcctttcagcaaaacattacttatctgac

SEQ ID NO: 488758 - DNA, 33 bp, Homo sapien
gactgcctttcagcaacacattacttatctgac

SEQ ID NO: 488759 - DNA, 33 bp, Homo sapien
tgagcataaaaagtccaaagtcaatggtgaatt

SEQ ID NO: 488760 - DNA, 33 bp, Homo sapien
tgagcataaaaagtccgaagtcaatggtgaatt

SEQ ID NO: 488761 - DNA, 33 bp, Homo sapien
acctgttccctgcaaaattgtaacctgttagat

SEQ ID NO: 488762 - DNA, 33 bp, Homo sapien
acctgttccctgcaaatttgtaacctgttagat

SEQ ID NO: 488763 - DNA, 33 bp, Homo sapien
atgtgggaccctccaacattacaactgggataa

SEQ ID NO: 488764 - DNA, 33 bp, Homo sapien
atgtgggaccctccaatattacaactgggataa

SEQ ID NO: 488765 - DNA, 33 bp, Homo sapien
aaagcaatggtaagcaaaattctgtgtaaacac

SEQ ID NO: 488766 - DNA, 33 bp, Homo sapien
aaagcaatggtaagcacaattctgtgtaaacac

SEQ ID NO: 488767 - DNA, 33 bp, Homo sapien
cagaaaatggaactgcaaggccctggggagagc

SEQ ID NO: 488768 - DNA, 33 bp, Homo sapien
cagaaaatggaactgcgaggccctggggagagc

SEQ ID NO: 488769 - DNA, 33 bp, Homo sapien
aagcaagaagtaatgacggcatgaacatggatg

SEQ ID NO: 488770 - DNA, 33 bp, Homo sapien
aagcaagaagtaatgatggcatgaacatggatg

SEQ ID NO: 488771 - DNA, 33 bp, Homo sapien
atgaatatacagtgcacgtagatgaggctttac

SEQ ID NO: 488772 - DNA, 33 bp, Homo sapien
atgaatatacagtgcaggtagatgaggctttac

SEQ ID NO: 488773 - DNA, 33 bp, Homo sapien
acgtaagcaatgatcaacttcagtttattactg

SEQ ID NO: 488774 - DNA, 33 bp, Homo sapien
acgtaagcaatgatcatcttcagtttattactg

SEQ ID NO: 488775 - DNA, 33 bp, Homo sapien
agcaaatgcctaagtaaggacctgtactcggca

SEQ ID NO: 488776 - DNA, 33 bp, Homo sapien
agcaaatgcctaagtatggacctgtactcggca

SEQ ID NO: 488777 - DNA, 33 bp, Homo sapien
cactacatctgtggtaccttcagttaattccct

SEQ ID NO: 488778 - DNA, 33 bp, Homo sapien
cactacatctgtggtatcttcagttaattccct

SEQ ID NO: 488779 - DNA, 33 bp, Homo sapien
ccatcagaaccactagacctttagaccagtgag

SEQ ID NO: 488780 - DNA, 33 bp, Homo sapien
ccatcagaaccactaggcctttagaccagtgag

SEQ ID NO: 488781 - DNA, 33 bp, Homo sapien
tgttttctcttctacaagccttaaagctcttct

SEQ ID NO: 488782 - DNA, 33 bp, Homo sapien
tgttttctcttctacatgccttaaagctcttct

SEQ ID NO: 488783 - DNA, 33 bp, Homo sapien
atccagctgaggatgacaataggctctgtgtta

SEQ ID NO: 488784 - DNA, 33 bp, Homo sapien
atccagctgaggatgataataggctctgtgtta

SEQ ID NO: 488785 - DNA, 33 bp, Homo sapien
ggcttttctgaaaccaatcttccttgtcttttg

SEQ ID NO: 488786 - DNA, 33 bp, Homo sapien
ggcttttctgaaaccagtcttccttgtcttttg

SEQ ID NO: 488787 - DNA, 33 bp, Homo sapien
agctgttctctttgcaagccacacactgtagat

SEQ ID NO: 488788 - DNA, 33 bp, Homo sapien
agctgttctctttgcaggccacacactgtagat

SEQ ID NO: 488789 - DNA, 33 bp, Homo sapien
tcagaccaaacttcaaaaccagcaatcattttg

SEQ ID NO: 488790 - DNA, 33 bp, Homo sapien
tcagaccaaacttcaacaccagcaatcattttg

SEQ ID NO: 488791 - DNA, 33 bp, Homo sapien
aaaacacaatgagagaagtttagtaaggcatga

SEQ ID NO: 488792 - DNA, 33 bp, Homo sapien
aaaacacaatgagagatgtttagtaaggcatga

SEQ ID NO: 488793 - DNA, 33 bp, Homo sapien
tcttcataaaagttcacgtgcattcccaattct

SEQ ID NO: 488794 - DNA, 33 bp, Homo sapien
tcttcataaaagttcaggtgcattcccaattct

SEQ ID NO: 488795 - DNA, 33 bp, Homo sapien
ttaaacaattgaagataatcctgagcaaaacat

SEQ ID NO: 488796 - DNA, 33 bp, Homo sapien
ttaaacaattgaagatcatcctgagcaaaacat

SEQ ID NO: 488797 - DNA, 33 bp, Homo sapien
tcgtgagaggaaaaaacctcctaacatctacac

SEQ ID NO: 488798 - DNA, 33 bp, Homo sapien
tcgtgagaggaaaaaatctcctaacatctacac

SEQ ID NO: 488799 - DNA, 33 bp, Homo sapien
aaagagaaatcacagcaaaaaagagatgtaaat

SEQ ID NO: 488800 - DNA, 33 bp, Homo sapien
aaagagaaatcacagcgaaaaagagatgtaaat

SEQ ID NO: 488801 - DNA, 33 bp, Homo sapien
ctgacaattgagaacactcagttttgggcagcc

SEQ ID NO: 488802 - DNA, 33 bp, Homo sapien
ctgacaattgagaacagtcagttttgggcagcc

SEQ ID NO: 488803 - DNA, 33 bp, Homo sapien
caaataatttgaagacaagacaatagtgaaagt

SEQ ID NO: 488804 - DNA, 33 bp, Homo sapien
caaataatttgaagaccagacaatagtgaaagt

SEQ ID NO: 488805 - DNA, 33 bp, Homo sapien
aaggctgggctattggacattcatctttttttt

SEQ ID NO: 488806 - DNA, 33 bp, Homo sapien
aaggctgggctattggccattcatctttttttt

SEQ ID NO: 488807 - DNA, 33 bp, Homo sapien
gagaaataaatataccaaaaggtcagctttcat

SEQ ID NO: 488808 - DNA, 33 bp, Homo sapien
gagaaataaatataccgaaaggtcagctttcat

SEQ ID NO: 488809 - DNA, 33 bp, Homo sapien
tttctcatctagtaaaacttcagctaaagcctc

SEQ ID NO: 488810 - DNA, 33 bp, Homo sapien
tttctcatctagtaaagcttcagctaaagcctc

SEQ ID NO: 488811 - DNA, 33 bp, Homo sapien
actgatccaaacccagcattcatgcacatcaca

SEQ ID NO: 488812 - DNA, 33 bp, Homo sapien
actgatccaaacccagtattcatgcacatcaca

SEQ ID NO: 488813 - DNA, 33 bp, Homo sapien
tagtgttgataataaaactggtggcattttgcc

SEQ ID NO: 488814 - DNA, 33 bp, Homo sapien
tagtgttgataataaagctggtggcattttgcc

SEQ ID NO: 488815 - DNA, 33 bp, Homo sapien
aagagaccatttccacaattcatacatggaaat

SEQ ID NO: 488816 - DNA, 33 bp, Homo sapien
aagagaccatttccacgattcatacatggaaat

SEQ ID NO: 488817 - DNA, 33 bp, Homo sapien
gatagatcatataaagcctttctactccgctgc

SEQ ID NO: 488818 - DNA, 33 bp, Homo sapien
gatagatcatataaaggctttctactccgctgc

SEQ ID NO: 488819 - DNA, 33 bp, Homo sapien
ttattcttcctactaccgcactaaataagcaaa

SEQ ID NO: 488820 - DNA, 33 bp, Homo sapien
ttattcttcctactactgcactaaataagcaaa

SEQ ID NO: 488821 - DNA, 33 bp, Homo sapien
aaaaaccttgctcaagaagatgttggactggtg

SEQ ID NO: 488822 - DNA, 33 bp, Homo sapien
aaaaaccttgctcaaggagatgttggactggtg

SEQ ID NO: 488823 - DNA, 33 bp, Homo sapien
gtgtcttaacttctcaatcacactctaggttct

SEQ ID NO: 488824 - DNA, 33 bp, Homo sapien
gtgtcttaacttctcagtcacactctaggttct

SEQ ID NO: 488825 - DNA, 33 bp, Homo sapien
cctccaagcttggcccactgtctgacacataaa

SEQ ID NO: 488826 - DNA, 33 bp, Homo sapien
cctccaagcttggcccgctgtctgacacataaa

SEQ ID NO: 488827 - DNA, 33 bp, Homo sapien
cttgaaaatgacaaccaactagcagtccaaaca

SEQ ID NO: 488828 - DNA, 33 bp, Homo sapien
cttgaaaatgacaaccgactagcagtccaaaca

SEQ ID NO: 488829 - DNA, 33 bp, Homo sapien
tgtgagagtcccctaacagaacggtagtcctag

SEQ ID NO: 488830 - DNA, 33 bp, Homo sapien
tgtgagagtcccctaagagaacggtagtcctag

SEQ ID NO: 488831 - DNA, 33 bp, Homo sapien
cgccttcctgccattcaaaagttctcttattag

SEQ ID NO: 488832 - DNA, 33 bp, Homo sapien
cgccttcctgccattccaaagttctcttattag

SEQ ID NO: 488833 - DNA, 33 bp, Homo sapien
tcaattgtgaaggtacactgatagcaatttttt

SEQ ID NO: 488834 - DNA, 33 bp, Homo sapien
tcaattgtgaaggtacgctgatagcaatttttt

SEQ ID NO: 488835 - DNA, 33 bp, Homo sapien
taggacagatcattgaaagaatagtaaaaggtg

SEQ ID NO: 488836 - DNA, 33 bp, Homo sapien
taggacagatcattgacagaatagtaaaaggtg

SEQ ID NO: 488837 - DNA, 33 bp, Homo sapien
ggtatgaggtcagcacaagatataggtcataaa

SEQ ID NO: 488838 - DNA, 33 bp, Homo sapien
ggtatgaggtcagcacgagatataggtcataaa

SEQ ID NO: 488839 - DNA, 33 bp, Homo sapien
aggagaagtgccacagactaaatattgtgtctc

SEQ ID NO: 488840 - DNA, 33 bp, Homo sapien
aggagaagtgccacagtctaaatattgtgtctc

SEQ ID NO: 488841 - DNA, 33 bp, Homo sapien
agctacagtttcctcacgtgatatgaagattaa

SEQ ID NO: 488842 - DNA, 33 bp, Homo sapien
agctacagtttcctcatgtgatatgaagattaa

SEQ ID NO: 488843 - DNA, 33 bp, Homo sapien
tctgcattacattacacgaaggagtgagtccgt

SEQ ID NO: 488844 - DNA, 33 bp, Homo sapien
tctgcattacattacatgaaggagtgagtccgt

SEQ ID NO: 488845 - DNA, 33 bp, Homo sapien
caaggaagtctccagacgcacgcttctacatgg

SEQ ID NO: 488846 - DNA, 33 bp, Homo sapien
caaggaagtctccagaggcacgcttctacatgg

SEQ ID NO: 488847 - DNA, 33 bp, Homo sapien
acagtaaaagcaaccacgagacagggtacactc

SEQ ID NO: 488848 - DNA, 33 bp, Homo sapien
acagtaaaagcaaccatgagacagggtacactc

SEQ ID NO: 488849 - DNA, 33 bp, Homo sapien
cggcagagctacattacatgacttcagggggct

SEQ ID NO: 488850 - DNA, 33 bp, Homo sapien
cggcagagctacattatatgacttcagggggct

SEQ ID NO: 488851 - DNA, 33 bp, Homo sapien
gttcttttaaaaactcaagactgctcaggtcca

SEQ ID NO: 488852 - DNA, 33 bp, Homo sapien
gttcttttaaaaactcgagactgctcaggtcca

SEQ ID NO: 488853 - DNA, 33 bp, Homo sapien
ctggataaccactcagaaccgtgcatatcctgg

SEQ ID NO: 488854 - DNA, 33 bp, Homo sapien
ctggataaccactcagcaccgtgcatatcctgg

SEQ ID NO: 488855 - DNA, 33 bp, Homo sapien
aagagccctttacatacgtcaattaggctaata

SEQ ID NO: 488856 - DNA, 33 bp, Homo sapien
aagagccctttacatatgtcaattaggctaata

SEQ ID NO: 488857 - DNA, 33 bp, Homo sapien
ctgtgattcagtaaaacgcctgcacatagagga

SEQ ID NO: 488858 - DNA, 33 bp, Homo sapien
ctgtgattcagtaaaatgcctgcacatagagga

SEQ ID NO: 488859 - DNA, 33 bp, Homo sapien
gttgatactcacatataaatagacgagaaataa

SEQ ID NO: 488860 - DNA, 33 bp, Homo sapien
gttgatactcacatatcaatagacgagaaataa

SEQ ID NO: 488861 - DNA, 33 bp, Homo sapien
gtactggagatgcagccgcaggaaaacaggacg

SEQ ID NO: 488862 - DNA, 33 bp, Homo sapien
gtactggagatgcagcggcaggaaaacaggacg

SEQ ID NO: 488863 - DNA, 33 bp, Homo sapien
agggtgaggcaagtaccgtacaaccttaagagt

SEQ ID NO: 488864 - DNA, 33 bp, Homo sapien
agggtgaggcaagtactgtacaaccttaagagt

SEQ ID NO: 488865 - DNA, 33 bp, Homo sapien
ccacaagctgagaaacagacttcaagaccccct

SEQ ID NO: 488866 - DNA, 33 bp, Homo sapien
ccacaagctgagaaacggacttcaagaccccct

SEQ ID NO: 488867 - DNA, 33 bp, Homo sapien
gtctctacaaccaccaagaggattccatagaca

SEQ ID NO: 488868 - DNA, 33 bp, Homo sapien
gtctctacaaccaccatgaggattccatagaca

SEQ ID NO: 488869 - DNA, 33 bp, Homo sapien
ctggctggctcactcacacatttgtggctttat

SEQ ID NO: 488870 - DNA, 33 bp, Homo sapien
ctggctggctcactcatacatttgtggctttat

SEQ ID NO: 488871 - DNA, 33 bp, Homo sapien
ctgactgattaaaaaaccaagaagcaactataa

SEQ ID NO: 488872 - DNA, 33 bp, Homo sapien
ctgactgattaaaaaagcaagaagcaactataa

SEQ ID NO: 488873 - DNA, 33 bp, Homo sapien
tattggatcaaggagagctattgctactctaac

SEQ ID NO: 488874 - DNA, 33 bp, Homo sapien
tattggatcaaggagatctattgctactctaac

SEQ ID NO: 488875 - DNA, 33 bp, Homo sapien
ataggtaatgtttgcggatctgttattcttcca

SEQ ID NO: 488876 - DNA, 33 bp, Homo sapien
ataggtaatgtttgcgtatctgttattcttcca

SEQ ID NO: 488877 - DNA, 33 bp, Homo sapien
ttcacaagtacaacaacatcaagaacaaattca

SEQ ID NO: 488878 - DNA, 33 bp, Homo sapien
ttcacaagtacaacaagatcaagaacaaattca

SEQ ID NO: 488879 - DNA, 33 bp, Homo sapien
tttccatttagatgaacgtgcttctgtcctgag

SEQ ID NO: 488880 - DNA, 33 bp, Homo sapien
tttccatttagatgaatgtgcttctgtcctgag

SEQ ID NO: 488881 - DNA, 33 bp, Homo sapien
gtactgagaatagcacgcaacagttagttcttc

SEQ ID NO: 488882 - DNA, 33 bp, Homo sapien
gtactgagaatagcactcaacagttagttcttc

SEQ ID NO: 488883 - DNA, 33 bp, Homo sapien
agagaatgaagcattacactggcatttgagcta

SEQ ID NO: 488884 - DNA, 33 bp, Homo sapien
agagaatgaagcattagactggcatttgagcta

SEQ ID NO: 488885 - DNA, 33 bp, Homo sapien
atcatgaaacaaaaaaatttgcagaatccctcc

SEQ ID NO: 488886 - DNA, 33 bp, Homo sapien
atcatgaaacaaaaaattttgcagaatccctcc

SEQ ID NO: 488887 - DNA, 33 bp, Homo sapien
gggattctccttaaaaatagagttgccaggtaa

SEQ ID NO: 488888 - DNA, 33 bp, Homo sapien
gggattctccttaaaagtagagttgccaggtaa

SEQ ID NO: 488889 - DNA, 33 bp, Homo sapien; identical to SEQ ID NO: 488887

SEQ ID NO: 488890 - DNA, 33 bp, Homo sapien; identical to SEQ ID NO: 488888

SEQ ID NO: 488891 - DNA, 33 bp, Homo sapien
ctaggcccaccctttacagcagctaaatcagtt

SEQ ID NO: 488892 - DNA, 33 bp, Homo sapien
ctaggcccaccctttagagcagctaaatcagtt

SEQ ID NO: 488893 - DNA, 33 bp, Homo sapien
caaataagagtaaccaagttattcaaatgtgga

SEQ ID NO: 488894 - DNA, 33 bp, Homo sapien
caaataagagtaaccacgttattcaaatgtgga

SEQ ID NO: 488895 - DNA, 33 bp, Homo sapien
catgttaggagttctgaaccactgtcttttgcc

SEQ ID NO: 488896 - DNA, 33 bp, Homo sapien
catgttaggagttctggaccactgtcttttgcc

SEQ ID NO: 488897 - DNA, 33 bp, Homo sapien
caaacttttcttccaaatataggtagaaagata

SEQ ID NO: 488898 - DNA, 33 bp, Homo sapien
caaacttttcttccaactataggtagaaagata

SEQ ID NO: 488899 - DNA, 33 bp, Homo sapien
caaaggccaaagacaacgtacggtgcattaagc

SEQ ID NO: 488900 - DNA, 33 bp, Homo sapien
caaaggccaaagacaatgtacggtgcattaagc

SEQ ID NO: 488901 - DNA, 33 bp, Homo sapien
accacagtaagtcagaagtagaggaggctccaa

SEQ ID NO: 488902 - DNA, 33 bp, Homo sapien
accacagtaagtcagaggtagaggaggctccaa

SEQ ID NO: 488903 - DNA, 33 bp, Homo sapien
atgatcaatcctttaaaaaccaagtatgtatta

SEQ ID NO: 488904 - DNA, 33 bp, Homo sapien
atgatcaatcctttaacaaccaagtatgtatta

SEQ ID NO: 488905 - DNA, 33 bp, Homo sapien
aattatgggatctaataagaaacctcagcaagg

SEQ ID NO: 488906 - DNA, 33 bp, Homo sapien
aattatgggatctaatgagaaacctcagcaagg

SEQ ID NO: 488907 - DNA, 33 bp, Homo sapien
gtacccatctttatcacaaatcaagcacctttg

SEQ ID NO: 488908 - DNA, 33 bp, Homo sapien
gtacccatctttatcataaatcaagcacctttg

SEQ ID NO: 488909 - DNA, 33 bp, Homo sapien
atgagaagtctatacaacaaaatctactaaata

SEQ ID NO: 488910 - DNA, 33 bp, Homo sapien
atgagaagtctatacagcaaaatctactaaata

SEQ ID NO: 488911 - DNA, 33 bp, Homo sapien
taatacattttgttaacaattccctcctgccat

SEQ ID NO: 488912 - DNA, 33 bp, Homo sapien
taatacattttgttaataattccctcctgccat

SEQ ID NO: 488913 - DNA, 33 bp, Homo sapien
caaggaaccaaggaaccaaggaacagtccgcta

SEQ ID NO: 488914 - DNA, 33 bp, Homo sapien
caaggaaccaaggaacgaaggaacagtccgcta

SEQ ID NO: 488915 - DNA, 33 bp, Homo sapien
gtcaaggacattaacccagccttgaaaacaata

SEQ ID NO: 488916 - DNA, 33 bp, Homo sapien
gtcaaggacattaaccgagccttgaaaacaata

SEQ ID NO: 488917 - DNA, 33 bp, Homo sapien
ctgataatgtatttgccattgacatctgacatt

SEQ ID NO: 488918 - DNA, 33 bp, Homo sapien
ctgataatgtatttgctattgacatctgacatt

SEQ ID NO: 488919 - DNA, 33 bp, Homo sapien
tggcagcagaaaagtacaagtatgttcattgca

SEQ ID NO: 488920 - DNA, 33 bp, Homo sapien
tggcagcagaaaagtataagtatgttcattgca

SEQ ID NO: 488921 - DNA, 33 bp, Homo sapien
agcattgaactcaaccacctgtttatttctgca

SEQ ID NO: 488922 - DNA, 33 bp, Homo sapien
agcattgaactcaaccgcctgtttatttctgca

SEQ ID NO: 488923 - DNA, 33 bp, Homo sapien
acctagctgatgaaaaaaaatgaagatgtgctt

SEQ ID NO: 488924 - DNA, 33 bp, Homo sapien
acctagctgatgaaaacaaatgaagatgtgctt

SEQ ID NO: 488925 - DNA, 33 bp, Homo sapien
gaaaacatgtgaatacactcggtctgtaaattt

SEQ ID NO: 488926 - DNA, 33 bp, Homo sapien
gaaaacatgtgaatacgctcggtctgtaaattt

SEQ ID NO: 488927 - DNA, 33 bp, Homo sapien
acattttctaacacagactcctttcagccccag

SEQ ID NO: 488928 - DNA, 33 bp, Homo sapien
acattttctaacacagcctcctttcagccccag

SEQ ID NO: 488929 - DNA, 33 bp, Homo sapien
ctttctgggaacccaaactatgtctgctctagg

SEQ ID NO: 488930 - DNA, 33 bp, Homo sapien
ctttctgggaacccaagctatgtctgctctagg

SEQ ID NO: 488931 - DNA, 33 bp, Homo sapien
ccttcttgcttcccacccagggctttctagttg

SEQ ID NO: 488932 - DNA, 33 bp, Homo sapien
ccttcttgcttcccactcagggctttctagttg

SEQ ID NO: 488933 - DNA, 33 bp, Homo sapien
tagctgggtttcaacacaatggtgattagttaa

SEQ ID NO: 488934 - DNA, 33 bp, Homo sapien
tagctgggtttcaacataatggtgattagttaa

SEQ ID NO: 488935 - DNA, 33 bp, Homo sapien
gattttatgatctggcagaatttcatctcctta

SEQ ID NO: 488936 - DNA, 33 bp, Homo sapien
gattttatgatctggccgaatttcatctcctta

SEQ ID NO: 488937 - DNA, 33 bp, Homo sapien
acttactaaactataacgcaaatacagaagaat

SEQ ID NO: 488938 - DNA, 33 bp, Homo sapien
acttactaaactataatgcaaatacagaagaat

SEQ ID NO: 488939 - DNA, 33 bp, Homo sapien
aagaggaaagcagaacaatgtgtaaaatagact

SEQ ID NO: 488940 - DNA, 33 bp, Homo sapien
aagaggaaagcagaaccatgtgtaaaatagact

SEQ ID NO: 488941 - DNA, 33 bp, Homo sapien
atctcccttctcaatagcttttctctctgtgtc

SEQ ID NO: 488942 - DNA, 33 bp, Homo sapien
atctcccttctcaatatcttttctctctgtgtc

SEQ ID NO: 488943 - DNA, 33 bp, Homo sapien
gcaggaatagaaaacccaatagcacattttctc

SEQ ID NO: 488944 - DNA, 33 bp, Homo sapien
gcaggaatagaaaacctaatagcacattttctc

SEQ ID NO: 488945 - DNA, 33 bp, Homo sapien
aatttcaacagaagaacttcccttgataatttg

SEQ ID NO: 488946 - DNA, 33 bp, Homo sapien
aatttcaacagaagaatttcccttgataatttg

SEQ ID NO: 488947 - DNA, 33 bp, Homo sapien
ggaacaaaaggatggaaaccaacgagaaagaca

SEQ ID NO: 488948 - DNA, 33 bp, Homo sapien
ggaacaaaaggatggataccaacgagaaagaca

SEQ ID NO: 488949 - DNA, 33 bp, Homo sapien
tacgttaagaaaggagaaattggccaggcgcca

SEQ ID NO: 488950 - DNA, 33 bp, Homo sapien
tacgttaagaaaggagcaattggccaggcgcca

SEQ ID NO: 488951 - DNA, 33 bp, Homo sapien
aacttactatctattaccaaatccctaaaaatt

SEQ ID NO: 488952 - DNA, 33 bp, Homo sapien
aacttactatctattatcaaatccctaaaaatt

SEQ ID NO: 488953 - DNA, 33 bp, Homo sapien
cttaatgagtgatacacgaatttcctatatcac

SEQ ID NO: 488954 - DNA, 33 bp, Homo sapien
cttaatgagtgatacatgaatttcctatatcac

SEQ ID NO: 488955 - DNA, 33 bp, Homo sapien
ctggtaaacatatccaacctcttttgctcaagt

SEQ ID NO: 488956 - DNA, 33 bp, Homo sapien
ctggtaaacatatccaccctcttttgctcaagt

SEQ ID NO: 488957 - DNA, 33 bp, Homo sapien
tcacagcaaaagaagacctgggcagggtaaaca

SEQ ID NO: 488958 - DNA, 33 bp, Homo sapien
tcacagcaaaagaagagctgggcagggtaaaca

SEQ ID NO: 488959 - DNA, 33 bp, Homo sapien
tggtaggctaaaggggcaaaatcgctggaggtc

SEQ ID NO: 488960 - DNA, 33 bp, Homo sapien
tggtaggctaaagggggaaaatcgctggaggtc

SEQ ID NO: 488961 - DNA, 33 bp, Homo sapien
taacaaactagagctaggctgtttccattttca

SEQ ID NO: 488962 - DNA, 33 bp, Homo sapien
taacaaactagagctatgctgtttccattttca

SEQ ID NO: 488963 - DNA, 33 bp, Homo sapien
taattatggaggaattcaagcacgaagttaatg

SEQ ID NO: 488964 - DNA, 33 bp, Homo sapien
taattatggaggaatttaagcacgaagttaatg

SEQ ID NO: 488965 - DNA, 33 bp, Homo sapien
cttcagtaataagcacacttatcatttcttgtt

SEQ ID NO: 488966 - DNA, 33 bp, Homo sapien
cttcagtaataagcacgcttatcatttcttgtt

SEQ ID NO: 488967 - DNA, 33 bp, Homo sapien
cacttaaattctaatccctgtctcctcagttta

SEQ ID NO: 488968 - DNA, 33 bp, Homo sapien
cacttaaattctaatctctgtctcctcagttta

SEQ ID NO: 488969 - DNA, 33 bp, Homo sapien
gtttctttgctccttcacctttttatgtgagac

SEQ ID NO: 488970 - DNA, 33 bp, Homo sapien
gtttctttgctccttcgcctttttatgtgagac

SEQ ID NO: 488971 - DNA, 33 bp, Homo sapien
cctgcaataatttctacggagacattttctggt

SEQ ID NO: 488972 - DNA, 33 bp, Homo sapien
cctgcaataatttctagggagacattttctggt

SEQ ID NO: 488973 - DNA, 33 bp, Homo sapien
tggctggctatgcagaaatcatctatatattca

SEQ ID NO: 488974 - DNA, 33 bp, Homo sapien
tggctggctatgcagagatcatctatatattca

SEQ ID NO: 488975 - DNA, 33 bp, Homo sapien
tttagctttatgttcaatcataatcagatccaa

SEQ ID NO: 488976 - DNA, 33 bp, Homo sapien
tttagctttatgttcagtcataatcagatccaa

SEQ ID NO: 488977 - DNA, 33 bp, Homo sapien
tattagtatttggagaaaattagagatgcatag

SEQ ID NO: 488978 - DNA, 33 bp, Homo sapien
tattagtatttggagacaattagagatgcatag

SEQ ID NO: 488979 - DNA, 33 bp, Homo sapien
ctagacttactatatactaaaccatgtcttaaa

SEQ ID NO: 488980 - DNA, 33 bp, Homo sapien
ctagacttactatatattaaaccatgtcttaaa

SEQ ID NO: 488981 - DNA, 33 bp, Homo sapien
cactactgagtgaaggacattgactaaaggcga

SEQ ID NO: 488982 - DNA, 33 bp, Homo sapien
cactactgagtgaaggtcattgactaaaggcga

SEQ ID NO: 488983 - DNA, 33 bp, Homo sapien
caatacagaaagtgacggccatgccacagtctc

SEQ ID NO: 488984 - DNA, 33 bp, Homo sapien
caatacagaaagtgactgccatgccacagtctc

SEQ ID NO: 488985 - DNA, 33 bp, Homo sapien
aaactctggctcttgaggtatgataaggctctt

SEQ ID NO: 488986 - DNA, 33 bp, Homo sapien
aaactctggctcttgatgtatgataaggctctt

SEQ ID NO: 488987 - DNA, 33 bp, Homo sapien
ttatattctttcattaccatttcattgaaacag

SEQ ID NO: 488988 - DNA, 33 bp, Homo sapien
ttatattctttcattatcatttcattgaaacag

SEQ ID NO: 488989 - DNA, 33 bp, Homo sapien
ctgtcacccaagtattcaacatagtatcctaat

SEQ ID NO: 488990 - DNA, 33 bp, Homo sapien
ctgtcacccaagtattgaacatagtatcctaat

SEQ ID NO: 488991 - DNA, 33 bp, Homo sapien
ttacaaaaattgggtaaatacagcaagtttctc

SEQ ID NO: 488992 - DNA, 33 bp, Homo sapien
ttacaaaaattgggtacatacagcaagtttctc

SEQ ID NO: 488993 - DNA, 33 bp, Homo sapien
agcaggcaagatgatgcattgggttgtaggaag

SEQ ID NO: 488994 - DNA, 33 bp, Homo sapien
agcaggcaagatgatgtattgggttgtaggaag

SEQ ID NO: 488995 - DNA, 33 bp, Homo sapien
gcattagcataataaaaataacatatgggaaaa

SEQ ID NO: 488996 - DNA, 33 bp, Homo sapien
gcattagcataataaagataacatatgggaaaa

SEQ ID NO: 488997 - DNA, 33 bp, Homo sapien
gttcttgcaaagagagaagagggggtaccaatt

SEQ ID NO: 488998 - DNA, 33 bp, Homo sapien
gttcttgcaaagagaggagagggggtaccaatt

SEQ ID NO: 488999 - DNA, 33 bp, Homo sapien
gcctgtgtagccggaaagaactggtccctggtt

SEQ ID NO: 489000 - DNA, 33 bp, Homo sapien
gcctgtgtagccggaatgaactggtccctggtt

SEQ ID NO: 489001 - DNA, 33 bp, Homo sapien
aagtctataagcaggacagtgacatataggatt

SEQ ID NO: 489002 - DNA, 33 bp, Homo sapien
aagtctataagcaggagagtgacatataggatt

SEQ ID NO: 489003 - DNA, 33 bp, Homo sapien
tactgagatgataaaacggtaggaggagttcgt

SEQ ID NO: 489004 - DNA, 33 bp, Homo sapien
tactgagatgataaaatggtaggaggagttcgt

SEQ ID NO: 489005 - DNA, 33 bp, Homo sapien
aaggattggaatcatacagatctcactgtctgg

SEQ ID NO: 489006 - DNA, 33 bp, Homo sapien
aaggattggaatcatatagatctcactgtctgg

SEQ ID NO: 489007 - DNA, 33 bp, Homo sapien
tccaacttagcaccccagagtcccttagcaaac

SEQ ID NO: 489008 - DNA, 33 bp, Homo sapien
tccaacttagcaccccggagtcccttagcaaac

SEQ ID NO: 489009 - DNA, 33 bp, Homo sapien
aacaaagaactcgagaagtacaccacagagaaa

SEQ ID NO: 489010 - DNA, 33 bp, Homo sapien
aacaaagaactcgagaggtacaccacagagaaa

SEQ ID NO: 489011 - DNA, 33 bp, Homo sapien
cctacaattctgtaaacaaatcatactcagtta

SEQ ID NO: 489012 - DNA, 33 bp, Homo sapien
cctacaattctgtaaataaatcatactcagtta

SEQ ID NO: 489013 - DNA, 33 bp, Homo sapien
gtactttgattgaagagaatccatttagctaac

SEQ ID NO: 489014 - DNA, 33 bp, Homo sapien
gtactttgattgaagataatccatttagctaac

SEQ ID NO: 489015 - DNA, 33 bp, Homo sapien
tcaacatctatgtcaaatggcactagtatgaag

SEQ ID NO: 489016 - DNA, 33 bp, Homo sapien
tcaacatctatgtcaactggcactagtatgaag

SEQ ID NO: 489017 - DNA, 33 bp, Homo sapien
ggggatatagcaggaaataagtttataggctaa

SEQ ID NO: 489018 - DNA, 33 bp, Homo sapien
ggggatatagcaggaagtaagtttataggctaa

SEQ ID NO: 489019 - DNA, 33 bp, Homo sapien
taggtctagtgaagaacactgctcctatcatta

SEQ ID NO: 489020 - DNA, 33 bp, Homo sapien
taggtctagtgaagaatactgctcctatcatta

SEQ ID NO: 489021 - DNA, 33 bp, Homo sapien
gctgaaaaaattctacagtaaacatccatatct

SEQ ID NO: 489022 - DNA, 33 bp, Homo sapien
gctgaaaaaattctacggtaaacatccatatct

SEQ ID NO: 489023 - DNA, 33 bp, Homo sapien
gccttacctgactgtacgaacttgtagataaac

SEQ ID NO: 489024 - DNA, 33 bp, Homo sapien
gccttacctgactgtatgaacttgtagataaac

SEQ ID NO: 489025 - DNA, 33 bp, Homo sapien
cacctaaaagtctgcactaattgttttaaagtc

SEQ ID NO: 489026 - DNA, 33 bp, Homo sapien
cacctaaaagtctgcagtaattgttttaaagtc

SEQ ID NO: 489027 - DNA, 33 bp, Homo sapien
ctaagaagtttccttacaactgtagcaattact

SEQ ID NO: 489028 - DNA, 33 bp, Homo sapien
ctaagaagtttccttataactgtagcaattact

SEQ ID NO: 489029 - DNA, 33 bp, Homo sapien
ggaacaaagagcttcaaagattcttctgggcag

SEQ ID NO: 489030 - DNA, 33 bp, Homo sapien
ggaacaaagagcttcagagattcttctgggcag

SEQ ID NO: 489031 - DNA, 33 bp, Homo sapien
aataagtcagaaaataagctatagtctgaattc

SEQ ID NO: 489032 - DNA, 33 bp, Homo sapien
aataagtcagaaaataggctatagtctgaattc

SEQ ID NO: 489033 - DNA, 33 bp, Homo sapien
taagctttatgttcaacgcaatgttttatgtga

SEQ ID NO: 489034 - DNA, 33 bp, Homo sapien
taagctttatgttcaatgcaatgttttatgtga

SEQ ID NO: 489035 - DNA, 33 bp, Homo sapien
ccaacattgagtaatacagaaggtcagcaataa

SEQ ID NO: 489036 - DNA, 33 bp, Homo sapien
ccaacattgagtaatatagaaggtcagcaataa

SEQ ID NO: 489037 - DNA, 33 bp, Homo sapien
ttgtgcaaaactgtccaaaaaccaattaggacc

SEQ ID NO: 489038 - DNA, 33 bp, Homo sapien
ttgtgcaaaactgtccgaaaaccaattaggacc

SEQ ID NO: 489039 - DNA, 33 bp, Homo sapien
tcaaattacacagaaacaggcacattaaaatat

SEQ ID NO: 489040 - DNA, 33 bp, Homo sapien
tcaaattacacagaaataggcacattaaaatat

SEQ ID NO: 489041 - DNA, 33 bp, Homo sapien
cactgaagaaccgttaagttatagcatctttca

SEQ ID NO: 489042 - DNA, 33 bp, Homo sapien
cactgaagaaccgttacgttatagcatctttca

SEQ ID NO: 489043 - DNA, 33 bp, Homo sapien
gcaacacaaaaacctaagagtctcacttgaaaa

SEQ ID NO: 489044 - DNA, 33 bp, Homo sapien
gcaacacaaaaacctaggagtctcacttgaaaa

SEQ ID NO: 489045 - DNA, 33 bp, Homo sapien
tggaaaagttgaagaaattacgggagcaagcaa

SEQ ID NO: 489046 - DNA, 33 bp, Homo sapien
tggaaaagttgaagaatttacgggagcaagcaa

SEQ ID NO: 489047 - DNA, 33 bp, Homo sapien
aagcagagttagatcacgtagtaccttgtaaat

SEQ ID NO: 489048 - DNA, 33 bp, Homo sapien
aagcagagttagatcatgtagtaccttgtaaat

SEQ ID NO: 489049 - DNA, 33 bp, Homo sapien
ggaggcttgtggtttaaaaagatgactctgggc

SEQ ID NO: 489050 - DNA, 33 bp, Homo sapien
ggaggcttgtggtttagaaagatgactctgggc

SEQ ID NO: 489051 - DNA, 33 bp, Homo sapien
atgattaataaacgaactggttgggaaagtgtc

SEQ ID NO: 489052 - DNA, 33 bp, Homo sapien
atgattaataaacgaattggttgggaaagtgtc

SEQ ID NO: 489053 - DNA, 33 bp, Homo sapien
ttatgctgtgataacgcagaacctcaaattctt

SEQ ID NO: 489054 - DNA, 33 bp, Homo sapien
ttatgctgtgataacgtagaacctcaaattctt

SEQ ID NO: 489055 - DNA, 33 bp, Homo sapien
aagtggcttctacaaaaactattgacaaaaacc

SEQ ID NO: 489056 - DNA, 33 bp, Homo sapien
aagtggcttctacaaagactattgacaaaaacc

SEQ ID NO: 489057 - DNA, 33 bp, Homo sapien
aaattacatgcacccaaaggtccaatttggcag

SEQ ID NO: 489058 - DNA, 33 bp, Homo sapien
aaattacatgcacccagaggtccaatttggcag

SEQ ID NO: 489059 - DNA, 33 bp, Homo sapien
aaatacagatgacatacacaacatgcaatatag

SEQ ID NO: 489060 - DNA, 33 bp, Homo sapien
aaatacagatgacatatacaacatgcaatatag

SEQ ID NO: 489061 - DNA, 33 bp, Homo sapien
gactggtatcaatccacgatgtattccattatt

SEQ ID NO: 489062 - DNA, 33 bp, Homo sapien
gactggtatcaatccaggatgtattccattatt

SEQ ID NO: 489063 - DNA, 33 bp, Homo sapien
taagtggctaaaagaacccatcaggatctctga

SEQ ID NO: 489064 - DNA, 33 bp, Homo sapien
taagtggctaaaagaagccatcaggatctctga

SEQ ID NO: 489065 - DNA, 33 bp, Homo sapien
agaacaagttatgaaacgctagactaggactat

SEQ ID NO: 489066 - DNA, 33 bp, Homo sapien
agaacaagttatgaaatgctagactaggactat

SEQ ID NO: 489067 - DNA, 33 bp, Homo sapien
caaaaaatctctctcaccaggtatgtagagtca

SEQ ID NO: 489068 - DNA, 33 bp, Homo sapien
caaaaaatctctctcatcaggtatgtagagtca

SEQ ID NO: 489069 - DNA, 33 bp, Homo sapien
tctcacactgttataacattttggaaattttca

SEQ ID NO: 489070 - DNA, 33 bp, Homo sapien
tctcacactgttataatattttggaaattttca

SEQ ID NO: 489071 - DNA, 33 bp, Homo sapien
tacgtggacataggaaactttttgcagtataaa

SEQ ID NO: 489072 - DNA, 33 bp, Homo sapien
tacgtggacataggaagctttttgcagtataaa

SEQ ID NO: 489073 - DNA, 33 bp, Homo sapien
taacatttaccagacaaatttttgagatggagt

SEQ ID NO: 489074 - DNA, 33 bp, Homo sapien
taacatttaccagacacatttttgagatggagt

SEQ ID NO: 489075 - DNA, 33 bp, Homo sapien
acttaaactcccgaaaaggcttgactcagattt

SEQ ID NO: 489076 - DNA, 33 bp, Homo sapien
acttaaactcccgaaagggcttgactcagattt

SEQ ID NO: 489077 - DNA, 33 bp, Homo sapien
tagaaaacaggaagtaggcatctgaaggtattg

SEQ ID NO: 489078 - DNA, 33 bp, Homo sapien
tagaaaacaggaagtatgcatctgaaggtattg

SEQ ID NO: 489079 - DNA, 33 bp, Homo sapien
cagccagaaatctccacggctagtggcacctct

SEQ ID NO: 489080 - DNA, 33 bp, Homo sapien
cagccagaaatctccatggctagtggcacctct

SEQ ID NO: 489081 - DNA, 33 bp, Homo sapien
ccagaccagtagcacaacctgagcgcagtctgc

SEQ ID NO: 489082 - DNA, 33 bp, Homo sapien
ccagaccagtagcacagcctgagcgcagtctgc

SEQ ID NO: 489083 - DNA, 33 bp, Homo sapien
aggtagaagttggtcacggcacccctggaccag

SEQ ID NO: 489084 - DNA, 33 bp, Homo sapien
aggtagaagttggtcatggcacccctggaccag

SEQ ID NO: 489085 - DNA, 33 bp, Homo sapien
tatattctataaaacaaccaatttgaccattta

SEQ ID NO: 489086 - DNA, 33 bp, Homo sapien
tatattctataaaacatccaatttgaccattta

SEQ ID NO: 489087 - DNA, 33 bp, Homo sapien
gggatgaatcatatgcaattggcaaaaaatggt

SEQ ID NO: 489088 - DNA, 33 bp, Homo sapien
gggatgaatcatatgcgattggcaaaaaatggt

SEQ ID NO: 489089 - DNA, 33 bp, Homo sapien
tacctgaaatataaacccttttcaaatctctcc

SEQ ID NO: 489090 - DNA, 33 bp, Homo sapien
tacctgaaatataaactcttttcaaatctctcc

SEQ ID NO: 489091 - DNA, 33 bp, Homo sapien
gaaatcctctaggcaacggtacatatgttgcac

SEQ ID NO: 489092 - DNA, 33 bp, Homo sapien
gaaatcctctaggcaagggtacatatgttgcac

SEQ ID NO: 489093 - DNA, 33 bp, Homo sapien
aaacaaaacacgctaacgttgcataatgaagtg

SEQ ID NO: 489094 - DNA, 33 bp, Homo sapien
aaacaaaacacgctaatgttgcataatgaagtg

SEQ ID NO: 489095 - DNA, 33 bp, Homo sapien
tgccacaggacatacaaattggagagggaagcc

SEQ ID NO: 489096 - DNA, 33 bp, Homo sapien
tgccacaggacatacagattggagagggaagcc

SEQ ID NO: 489097 - DNA, 33 bp, Homo sapien
acaaggcttttgaaaacgtcattgtgtacacag

SEQ ID NO: 489098 - DNA, 33 bp, Homo sapien
acaaggcttttgaaaatgtcattgtgtacacag

SEQ ID NO: 489099 - DNA, 33 bp, Homo sapien
gagcctactgaatccgaagcccagggtaagttc

SEQ ID NO: 489100 - DNA, 33 bp, Homo sapien
gagcctactgaatccggagcccagggtaagttc

SEQ ID NO: 489101 - DNA, 33 bp, Homo sapien
ataatcagcagtggacacccttgaaaattacat

SEQ ID NO: 489102 - DNA, 33 bp, Homo sapien
ataatcagcagtggacgcccttgaaaattacat

SEQ ID NO: 489103 - DNA, 33 bp, Homo sapien
ccacaagaggcacctcaaaaggacaaatgtggt

SEQ ID NO: 489104 - DNA, 33 bp, Homo sapien
ccacaagaggcacctctaaaggacaaatgtggt

SEQ ID NO: 489105 - DNA, 33 bp, Homo sapien
ttaatccaccaaaacacacacatgtgacactgc

SEQ ID NO: 489106 - DNA, 33 bp, Homo sapien
ttaatccaccaaaacatacacatgtgacactgc

SEQ ID NO: 489107 - DNA, 33 bp, Homo sapien
gaagtaagacatggaggatttgatccagaaaac

SEQ ID NO: 489108 - DNA, 33 bp, Homo sapien
gaagtaagacatggagtatttgatccagaaaac

SEQ ID NO: 489109 - DNA, 33 bp, Homo sapien
ttttgtttagtagcccaaactgactaagacatc

SEQ ID NO: 489110 - DNA, 33 bp, Homo sapien
ttttgtttagtagcccgaactgactaagacatc

SEQ ID NO: 489111 - DNA, 33 bp, Homo sapien
gaagtgcccttgggaacagtgcctgtgaaagga

SEQ ID NO: 489112 - DNA, 33 bp, Homo sapien
gaagtgcccttgggaagagtgcctgtgaaagga

SEQ ID NO: 489113 - DNA, 33 bp, Homo sapien
aacataaacggcccacaatccttatttccaaat

SEQ ID NO: 489114 - DNA, 33 bp, Homo sapien
aacataaacggcccacgatccttatttccaaat

SEQ ID NO: 489115 - DNA, 33 bp, Homo sapien
atcttacaatagacaacttgagatatcttagaa

SEQ ID NO: 489116 - DNA, 33 bp, Homo sapien
atcttacaatagacaagttgagatatcttagaa

SEQ ID NO: 489117 - DNA, 33 bp, Homo sapien
tttaacatgatcagccaccagggaaatacaaat

SEQ ID NO: 489118 - DNA, 33 bp, Homo sapien
tttaacatgatcagccgccagggaaatacaaat

SEQ ID NO: 489119 - DNA, 33 bp, Homo sapien
tgtgcttcgaaagacaagaccaagaaagtgaaa

SEQ ID NO: 489120 - DNA, 33 bp, Homo sapien
tgtgcttcgaaagacatgaccaagaaagtgaaa

SEQ ID NO: 489121 - DNA, 33 bp, Homo sapien
ctaaacgtcagggcttaaagcagaaacttagaa

SEQ ID NO: 489122 - DNA, 33 bp, Homo sapien
ctaaacgtcagggctttaagcagaaacttagaa

SEQ ID NO: 489123 - DNA, 33 bp, Homo sapien
gcaactctgcagtaataaagatgtgaattatac

SEQ ID NO: 489124 - DNA, 33 bp, Homo sapien
gcaactctgcagtaatcaagatgtgaattatac

SEQ ID NO: 489125 - DNA, 33 bp, Homo sapien
gactgtacactctgagaatctcatccttgactc

SEQ ID NO: 489126 - DNA, 33 bp, Homo sapien
gactgtacactctgaggatctcatccttgactc

SEQ ID NO: 489127 - DNA, 33 bp, Homo sapien
taggagaaactgcaataaattatttctacatct

SEQ ID NO: 489128 - DNA, 33 bp, Homo sapien
taggagaaactgcaatgaattatttctacatct

SEQ ID NO: 489129 - DNA, 33 bp, Homo sapien
tagcatgtgaaagtctcaagctgtccgtacaat

SEQ ID NO: 489130 - DNA, 33 bp, Homo sapien
tagcatgtgaaagtctgaagctgtccgtacaat

SEQ ID NO: 489131 - DNA, 33 bp, Homo sapien
gacattcctggaaaagcagaacagtccatgacc

SEQ ID NO: 489132 - DNA, 33 bp, Homo sapien
gacattcctggaaaaggagaacagtccatgacc

SEQ ID NO: 489133 - DNA, 33 bp, Homo sapien
acattttgatcaacgacgaactgcatatataac

SEQ ID NO: 489134 - DNA, 33 bp, Homo sapien
acattttgatcaacgatgaactgcatatataac

SEQ ID NO: 489135 - DNA, 33 bp, Homo sapien
aagatgactaaaacataatcttggcccttgaag

SEQ ID NO: 489136 - DNA, 33 bp, Homo sapien
aagatgactaaaacatcatcttggcccttgaag

SEQ ID NO: 489137 - DNA, 33 bp, Homo sapien
cttggcccttgaagaacttaaaattgagtgaca

SEQ ID NO: 489138 - DNA, 33 bp, Homo sapien
cttggcccttgaagaagttaaaattgagtgaca

SEQ ID NO: 489139 - DNA, 33 bp, Homo sapien
gacaaatataaactacaaacatctgtaaacaac

SEQ ID NO: 489140 - DNA, 33 bp, Homo sapien
gacaaatataaactacgaacatctgtaaacaac

SEQ ID NO: 489141 - DNA, 33 bp, Homo sapien
agggaaccagtgcaaacactgacactctgacta

SEQ ID NO: 489142 - DNA, 33 bp, Homo sapien
agggaaccagtgcaaatactgacactctgacta

SEQ ID NO: 489143 - DNA, 33 bp, Homo sapien
tggtcttatctgatgcggaagactggaaactat

SEQ ID NO: 489144 - DNA, 33 bp, Homo sapien
tggtcttatctgatgctgaagactggaaactat

SEQ ID NO: 489145 - DNA, 33 bp, Homo sapien
aattcacacagaccaacttgccccctgctgttc

SEQ ID NO: 489146 - DNA, 33 bp, Homo sapien
aattcacacagaccaagttgccccctgctgttc

SEQ ID NO: 489147 - DNA, 33 bp, Homo sapien
aaattctctgggaaacagaaaaacatgatgttt

SEQ ID NO: 489148 - DNA, 33 bp, Homo sapien
aaattctctgggaaaccgaaaaacatgatgttt

SEQ ID NO: 489149 - DNA, 33 bp, Homo sapien
caagactatacaattcacaggctcttttcagtc

SEQ ID NO: 489150 - DNA, 33 bp, Homo sapien
caagactatacaattcgcaggctcttttcagtc

SEQ ID NO: 489151 - DNA, 33 bp, Homo sapien
tctacttgtttctgtacaatatgcatccaccca

SEQ ID NO: 489152 - DNA, 33 bp, Homo sapien
tctacttgtttctgtataatatgcatccaccca

SEQ ID NO: 489153 - DNA, 33 bp, Homo sapien
aggtaagttggaaataccttaacacttgacttc

SEQ ID NO: 489154 - DNA, 33 bp, Homo sapien
aggtaagttggaaatatcttaacacttgacttc

SEQ ID NO: 489155 - DNA, 33 bp, Homo sapien
ctattgttggaaattcaagttgttccaattgtt

SEQ ID NO: 489156 - DNA, 33 bp, Homo sapien
ctattgttggaaattcgagttgttccaattgtt

SEQ ID NO: 489157 - DNA, 33 bp, Homo sapien
tataaagagagttgtcactaaggctggagtgca

SEQ ID NO: 489158 - DNA, 33 bp, Homo sapien
tataaagagagttgtcgctaaggctggagtgca

SEQ ID NO: 489159 - DNA, 33 bp, Homo sapien
ctcctgtgtgtctccacgtgactcctttgtgta

SEQ ID NO: 489160 - DNA, 33 bp, Homo sapien
ctcctgtgtgtctccatgtgactcctttgtgta

SEQ ID NO: 489161 - DNA, 33 bp, Homo sapien
tttaacataactggaaaagagaacatcctggac

SEQ ID NO: 489162 - DNA, 33 bp, Homo sapien
tttaacataactggaagagagaacatcctggac

SEQ ID NO: 489163 - DNA, 33 bp, Homo sapien
acttacaaaataattgcaagaactggaataaca

SEQ ID NO: 489164 - DNA, 33 bp, Homo sapien
acttacaaaataattggaagaactggaataaca

SEQ ID NO: 489165 - DNA, 33 bp, Homo sapien
attatgagtttactgacatatgcttttgaaaaa

SEQ ID NO: 489166 - DNA, 33 bp, Homo sapien
attatgagtttactgatatatgcttttgaaaaa

SEQ ID NO: 489167 - DNA, 33 bp, Homo sapien
gagaatggaggagttacaccacagcaagtgtag

SEQ ID NO: 489168 - DNA, 33 bp, Homo sapien
gagaatggaggagttagaccacagcaagtgtag

SEQ ID NO: 489169 - DNA, 33 bp, Homo sapien
actttgaaatgtaatcaaatgaagagagcttta

SEQ ID NO: 489170 - DNA, 33 bp, Homo sapien
actttgaaatgtaatcgaatgaagagagcttta

SEQ ID NO: 489171 - DNA, 33 bp, Homo sapien
aacaaacagagtaaaacagaaatgaggaatgtc

SEQ ID NO: 489172 - DNA, 33 bp, Homo sapien
aacaaacagagtaaaatagaaatgaggaatgtc

SEQ ID NO: 489173 - DNA, 33 bp, Homo sapien
ctagggtatcctgagacgttggtgataggcaaa

SEQ ID NO: 489174 - DNA, 33 bp, Homo sapien
ctagggtatcctgagatgttggtgataggcaaa

SEQ ID NO: 489175 - DNA, 33 bp, Homo sapien
tgaaggagcagttacacacgaaagaacttgctt

SEQ ID NO: 489176 - DNA, 33 bp, Homo sapien
tgaaggagcagttacatacgaaagaacttgctt

SEQ ID NO: 489177 - DNA, 33 bp, Homo sapien
gcttcaaccttcaccaatctcttcaagtcctaa

SEQ ID NO: 489178 - DNA, 33 bp, Homo sapien
gcttcaaccttcaccagtctcttcaagtcctaa

SEQ ID NO: 489179 - DNA, 33 bp, Homo sapien
aggcagagtactgagaacagggcccgatgctta

SEQ ID NO: 489180 - DNA, 33 bp, Homo sapien
aggcagagtactgagagcagggcccgatgctta

SEQ ID NO: 489181 - DNA, 33 bp, Homo sapien
ccggctgggctgccagaattaaaatagagcaag

SEQ ID NO: 489182 - DNA, 33 bp, Homo sapien
ccggctgggctgccaggattaaaatagagcaag

SEQ ID NO: 489183 - DNA, 33 bp, Homo sapien
gcagctcaggagcaaccaatcacgactcgcaca

SEQ ID NO: 489184 - DNA, 33 bp, Homo sapien
gcagctcaggagcaacgaatcacgactcgcaca

SEQ ID NO: 489185 - DNA, 33 bp, Homo sapien
tgcccagtgccacttgaaaaaaaatggtttagt

SEQ ID NO: 489186 - DNA, 33 bp, Homo sapien
tgcccagtgccacttggaaaaaaatggtttagt

SEQ ID NO: 489187 - DNA, 33 bp, Homo sapien
ttttgcctatacctaagtagcattttttaaagt

SEQ ID NO: 489188 - DNA, 33 bp, Homo sapien
ttttgcctatacctaattagcattttttaaagt

SEQ ID NO: 489189 - DNA, 33 bp, Homo sapien
gtccctccaggataacaagctgatgaaaatggg

SEQ ID NO: 489190 - DNA, 33 bp, Homo sapien
gtccctccaggataacgagctgatgaaaatggg

SEQ ID NO: 489191 - DNA, 33 bp, Homo sapien
ggcaatgtgagggaaagtcaagagcagatttta

SEQ ID NO: 489192 - DNA, 33 bp, Homo sapien
ggcaatgtgagggaaattcaagagcagatttta

SEQ ID NO: 489193 - DNA, 33 bp, Homo sapien
gagagataaaaccaggcagtaggccaacagttc

SEQ ID NO: 489194 - DNA, 33 bp, Homo sapien
gagagataaaaccagggagtaggccaacagttc

SEQ ID NO: 489195 - DNA, 33 bp, Homo sapien
tcagtaaaatatatcaagatgctctataatatt

SEQ ID NO: 489196 - DNA, 33 bp, Homo sapien
tcagtaaaatatatcaggatgctctataatatt

SEQ ID NO: 489197 - DNA, 33 bp, Homo sapien
atatagggcagggtccaagagaattccaagcat

SEQ ID NO: 489198 - DNA, 33 bp, Homo sapien
atatagggcagggtccgagagaattccaagcat

SEQ ID NO: 489199 - DNA, 33 bp, Homo sapien
agaagcaagatgtggacaactgcaacagcaggt

SEQ ID NO: 489200 - DNA, 33 bp, Homo sapien
agaagcaagatgtggagaactgcaacagcaggt

SEQ ID NO: 489201 - DNA, 33 bp, Homo sapien
acattatcatttaacacataaaggacccagacc

SEQ ID NO: 489202 - DNA, 33 bp, Homo sapien
acattatcatttaacagataaaggacccagacc

SEQ ID NO: 489203 - DNA, 33 bp, Homo sapien
cctcctttgcatctaccaactagaccctccaca

SEQ ID NO: 489204 - DNA, 33 bp, Homo sapien
cctcctttgcatctactaactagaccctccaca

SEQ ID NO: 489205 - DNA, 33 bp, Homo sapien
ttaaccaacaactgtacgtaagacactttgtta

SEQ ID NO: 489206 - DNA, 33 bp, Homo sapien
ttaaccaacaactgtatgtaagacactttgtta

SEQ ID NO: 489207 - DNA, 33 bp, Homo sapien
agggtgatgacttaagactaatgccaattctga

SEQ ID NO: 489208 - DNA, 33 bp, Homo sapien
agggtgatgacttaaggctaatgccaattctga

SEQ ID NO: 489209 - DNA, 33 bp, Homo sapien
aattctgaaagtcctaaaatttcaaatcgttct

SEQ ID NO: 489210 - DNA, 33 bp, Homo sapien
aattctgaaagtcctacaatttcaaatcgttct

SEQ ID NO: 489211 - DNA, 33 bp, Homo sapien
gggagaatcacttcagcctaggagtttgggatt

SEQ ID NO: 489212 - DNA, 33 bp, Homo sapien
gggagaatcacttcagtctaggagtttgggatt

SEQ ID NO: 489213 - DNA, 33 bp, Homo sapien
aacaaatagatcctagaagagagcaggacaaaa

SEQ ID NO: 489214 - DNA, 33 bp, Homo sapien
aacaaatagatcctaggagagagcaggacaaaa

SEQ ID NO: 489215 - DNA, 33 bp, Homo sapien
ctctccacaatacaaccgcctccatctctgtgt

SEQ ID NO: 489216 - DNA, 33 bp, Homo sapien
ctctccacaatacaactgcctccatctctgtgt

SEQ ID NO: 489217 - DNA, 33 bp, Homo sapien
attctctctgaaactaaggccctctattagttt

SEQ ID NO: 489218 - DNA, 33 bp, Homo sapien
attctctctgaaactagggccctctattagttt

SEQ ID NO: 489219 - DNA, 33 bp, Homo sapien
actaaggactggccaacgaatcccaatgaataa

SEQ ID NO: 489220 - DNA, 33 bp, Homo sapien
actaaggactggccaatgaatcccaatgaataa

SEQ ID NO: 489221 - DNA, 33 bp, Homo sapien
tttcagtggtgagctaaggaaagagggaaaagg

SEQ ID NO: 489222 - DNA, 33 bp, Homo sapien
tttcagtggtgagctagggaaagagggaaaagg

SEQ ID NO: 489223 - DNA, 33 bp, Homo sapien
tgaaattgcattaatacatgggctgtagtgctt

SEQ ID NO: 489224 - DNA, 33 bp, Homo sapien
tgaaattgcattaatatatgggctgtagtgctt

SEQ ID NO: 489225 - DNA, 33 bp, Homo sapien
aattttagctaacgtgaatgacataagatgcaa

SEQ ID NO: 489226 - DNA, 33 bp, Homo sapien
aattttagctaacgtgcatgacataagatgcaa

SEQ ID NO: 489227 - DNA, 33 bp, Homo sapien
gccttgggtttccccaggtcgttctagcctgag

SEQ ID NO: 489228 - DNA, 33 bp, Homo sapien
gccttgggtttccccatgtcgttctagcctgag

SEQ ID NO: 489229 - DNA, 33 bp, Homo sapien
ttgagttggcagttgaatatatttgtttggagt

SEQ ID NO: 489230 - DNA, 33 bp, Homo sapien
ttgagttggcagttgactatatttgtttggagt

SEQ ID NO: 489231 - DNA, 33 bp, Homo sapien
ttggtcagaggcataaaatagaacaaagatatc

SEQ ID NO: 489232 - DNA, 33 bp, Homo sapien
ttggtcagaggcataagatagaacaaagatatc

SEQ ID NO: 489233 - DNA, 33 bp, Homo sapien
gaaataactgatgggacagtgacagtagctgat

SEQ ID NO: 489234 - DNA, 33 bp, Homo sapien
gaaataactgatgggatagtgacagtagctgat

SEQ ID NO: 489235 - DNA, 33 bp, Homo sapien
ctggtgatagtgccacagctttacccacctctg

SEQ ID NO: 489236 - DNA, 33 bp, Homo sapien
ctggtgatagtgccacggctttacccacctctg

SEQ ID NO: 489237 - DNA, 33 bp, Homo sapien
tctcatccgtcaaatggaagggtagtagtatac

SEQ ID NO: 489238 - DNA, 33 bp, Homo sapien
tctcatccgtcaaatgtaagggtagtagtatac

SEQ ID NO: 489239 - DNA, 33 bp, Homo sapien
gcaaagttgaaacaaacagggaatgggctgttc

SEQ ID NO: 489240 - DNA, 33 bp, Homo sapien
gcaaagttgaaacaaagagggaatgggctgttc

SEQ ID NO: 489241 - DNA, 33 bp, Homo sapien
tgccaatgagggtacacctgctttgactggctt

SEQ ID NO: 489242 - DNA, 33 bp, Homo sapien
tgccaatgagggtacatctgctttgactggctt

SEQ ID NO: 489243 - DNA, 33 bp, Homo sapien
gaacagaaagttgagaaaaacagctctgcttca

SEQ ID NO: 489244 - DNA, 33 bp, Homo sapien
gaacagaaagttgagacaaacagctctgcttca

SEQ ID NO: 489245 - DNA, 33 bp, Homo sapien
tgtgtacttaggggaaggttttctataggttac

SEQ ID NO: 489246 - DNA, 33 bp, Homo sapien
tgtgtacttaggggaatgttttctataggttac

SEQ ID NO: 489247 - DNA, 33 bp, Homo sapien
ccaggatcaggtgggaccagaagagccactgca

SEQ ID NO: 489248 - DNA, 33 bp, Homo sapien
ccaggatcaggtgggatcagaagagccactgca

SEQ ID NO: 489249 - DNA, 33 bp, Homo sapien
attttagcattatgtacctgtgaagagtggcaa

SEQ ID NO: 489250 - DNA, 33 bp, Homo sapien
attttagcattatgtatctgtgaagagtggcaa

SEQ ID NO: 489251 - DNA, 33 bp, Homo sapien
atcttccaatcacatactatgtaccaatcatac

SEQ ID NO: 489252 - DNA, 33 bp, Homo sapien
atcttccaatcacatattatgtaccaatcatac

SEQ ID NO: 489253 - DNA, 33 bp, Homo sapien
cttctgtaagaatgtgaaagtattatggaacca

SEQ ID NO: 489254 - DNA, 33 bp, Homo sapien
cttctgtaagaatgtggaagtattatggaacca

SEQ ID NO: 489255 - DNA, 33 bp, Homo sapien
tagcccatcagtccacagtccttgagtgaggat

SEQ ID NO: 489256 - DNA, 33 bp, Homo sapien
tagcccatcagtccaccgtccttgagtgaggat

SEQ ID NO: 489257 - DNA, 33 bp, Homo sapien
caccagcactttctggacagcactgctgaaaat

SEQ ID NO: 489258 - DNA, 33 bp, Homo sapien
caccagcactttctgggcagcactgctgaaaat

SEQ ID NO: 489259 - DNA, 33 bp, Homo sapien
aacaaaaagtctaaaacttactgacaatgggaa

SEQ ID NO: 489260 - DNA, 33 bp, Homo sapien
aacaaaaagtctaaaatttactgacaatgggaa

SEQ ID NO: 489261 - DNA, 33 bp, Homo sapien
taagaatttctagtcactaggtccaggagtctg

SEQ ID NO: 489262 - DNA, 33 bp, Homo sapien
taagaatttctagtcattaggtccaggagtctg

SEQ ID NO: 489263 - DNA, 33 bp, Homo sapien
cctctttattccagccacagcagaagaggtcct

SEQ ID NO: 489264 - DNA, 33 bp, Homo sapien
cctctttattccagccgcagcagaagaggtcct

SEQ ID NO: 489265 - DNA, 33 bp, Homo sapien
catcctcttccatgccagagctcaaacgagctt

SEQ ID NO: 489266 - DNA, 33 bp, Homo sapien
catcctcttccatgccggagctcaaacgagctt

SEQ ID NO: 489267 - DNA, 33 bp, Homo sapien
cacctgcaaatatctacgttggcacttagtctt

SEQ ID NO: 489268 - DNA, 33 bp, Homo sapien
cacctgcaaatatctatgttggcacttagtctt

SEQ ID NO: 489269 - DNA, 33 bp, Homo sapien
ttcatctgtgctattcacaaaaagtaaccatct

SEQ ID NO: 489270 - DNA, 33 bp, Homo sapien
ttcatctgtgctattcccaaaaagtaaccatct

SEQ ID NO: 489271 - DNA, 33 bp, Homo sapien
ttctgtttaacagatacgtagacagaagcacag

SEQ ID NO: 489272 - DNA, 33 bp, Homo sapien
ttctgtttaacagatatgtagacagaagcacag

SEQ ID NO: 489273 - DNA, 33 bp, Homo sapien
gtgttggttttcagtgcagttttacatatttgt

SEQ ID NO: 489274 - DNA, 33 bp, Homo sapien
gtgttggttttcagtgtagttttacatatttgt

SEQ ID NO: 489275 - DNA, 33 bp, Homo sapien
tatgaaatttcacaacaaatagggcagtgaaat

SEQ ID NO: 489276 - DNA, 33 bp, Homo sapien
tatgaaatttcacaacgaatagggcagtgaaat

SEQ ID NO: 489277 - DNA, 33 bp, Homo sapien
tggtcgaaagagtcatcatcagtagaaaggaat

SEQ ID NO: 489278 - DNA, 33 bp, Homo sapien
tggtcgaaagagtcattatcagtagaaaggaat

SEQ ID NO: 489279 - DNA, 33 bp, Homo sapien
aactaaaatctaccaaatggctcccaatgccat

SEQ ID NO: 489280 - DNA, 33 bp, Homo sapien
aactaaaatctaccaattggctcccaatgccat

SEQ ID NO: 489281 - DNA, 33 bp, Homo sapien
ctctggtagcattgtacgggaatggattaggga

SEQ ID NO: 489282 - DNA, 33 bp, Homo sapien
ctctggtagcattgtaggggaatggattaggga

SEQ ID NO: 489283 - DNA, 33 bp, Homo sapien
acgcacagatcaagaagaatagtgtttcaggca

SEQ ID NO: 489284 - DNA, 33 bp, Homo sapien
acgcacagatcaagaataatagtgtttcaggca

SEQ ID NO: 489285 - DNA, 33 bp, Homo sapien
tgatatatccgggccacggtaagcagaaaagca

SEQ ID NO: 489286 - DNA, 33 bp, Homo sapien
tgatatatccgggccatggtaagcagaaaagca

SEQ ID NO: 489287 - DNA, 33 bp, Homo sapien
gataatgaagccccaactctagagtgactgatt

SEQ ID NO: 489288 - DNA, 33 bp, Homo sapien
gataatgaagccccaattctagagtgactgatt

SEQ ID NO: 489289 - DNA, 33 bp, Homo sapien
ggaaggtaatgaaggaaattatcttatcctact

SEQ ID NO: 489290 - DNA, 33 bp, Homo sapien
ggaaggtaatgaaggagattatcttatcctact

SEQ ID NO: 489291 - DNA, 33 bp, Homo sapien
taacaggattgaccaacgctctcctcagcttcc

SEQ ID NO: 489292 - DNA, 33 bp, Homo sapien
taacaggattgaccaatgctctcctcagcttcc

SEQ ID NO: 489293 - DNA, 33 bp, Homo sapien
caatcctgttaactagcacagtgaagtagtttt

SEQ ID NO: 489294 - DNA, 33 bp, Homo sapien
caatcctgttaactaggacagtgaagtagtttt

SEQ ID NO: 489295 - DNA, 33 bp, Homo sapien
gcaatcacgggatgcaagcaatcatttacagaa

SEQ ID NO: 489296 - DNA, 33 bp, Homo sapien
gcaatcacgggatgcaggcaatcatttacagaa

SEQ ID NO: 489297 - DNA, 33 bp, Homo sapien
cactattacttatctaagagagcagagacagaa

SEQ ID NO: 489298 - DNA, 33 bp, Homo sapien
cactattacttatctacgagagcagagacagaa

SEQ ID NO: 489299 - DNA, 33 bp, Homo sapien
tgctgggaagatgacaataagtaacaatgaatg

SEQ ID NO: 489300 - DNA, 33 bp, Homo sapien
tgctgggaagatgacagtaagtaacaatgaatg

SEQ ID NO: 489301 - DNA, 33 bp, Homo sapien
gtatggttcacagtaaactttcctcttcaagaa

SEQ ID NO: 489302 - DNA, 33 bp, Homo sapien
gtatggttcacagtaacctttcctcttcaagaa

SEQ ID NO: 489303 - DNA, 33 bp, Homo sapien
aaaaaaaagttcaaacactgcagaagtggacaa

SEQ ID NO: 489304 - DNA, 33 bp, Homo sapien
aaaaaaaagttcaaaccctgcagaagtggacaa

SEQ ID NO: 489305 - DNA, 33 bp, Homo sapien
gcctgaagattacgaccgattaaatgaatgcac

SEQ ID NO: 489306 - DNA, 33 bp, Homo sapien
gcctgaagattacgactgattaaatgaatgcac

SEQ ID NO: 489307 - DNA, 33 bp, Homo sapien
taccaacttggagttacgctagaagcagcagag

SEQ ID NO: 489308 - DNA, 33 bp, Homo sapien
taccaacttggagttaggctagaagcagcagag

SEQ ID NO: 489309 - DNA, 33 bp, Homo sapien
aagagatacacatgaccaatttaaaacaggagg

SEQ ID NO: 489310 - DNA, 33 bp, Homo sapien
aagagatacacatgactaatttaaaacaggagg

SEQ ID NO: 489311 - DNA, 33 bp, Homo sapien
agagttgtcattagagacagaactcatgatctc

SEQ ID NO: 489312 - DNA, 33 bp, Homo sapien
agagttgtcattagagtcagaactcatgatctc

SEQ ID NO: 489313 - DNA, 33 bp, Homo sapien
gctggaaggcagtacgaaatttatgaggccttt

SEQ ID NO: 489314 - DNA, 33 bp, Homo sapien
gctggaaggcagtacgtaatttatgaggccttt

SEQ ID NO: 489315 - DNA, 33 bp, Homo sapien
ttcaacctagctgaggaaatcagacacactagg

SEQ ID NO: 489316 - DNA, 33 bp, Homo sapien
ttcaacctagctgagggaatcagacacactagg

SEQ ID NO: 489317 - DNA, 33 bp, Homo sapien
cctctggatttttggcaaagggcatttctcagt

SEQ ID NO: 489318 - DNA, 33 bp, Homo sapien
cctctggatttttggcgaagggcatttctcagt

SEQ ID NO: 489319 - DNA, 33 bp, Homo sapien
catgtggaatcacagaacttaggctgggaacaa

SEQ ID NO: 489320 - DNA, 33 bp, Homo sapien
catgtggaatcacagaccttaggctgggaacaa

SEQ ID NO: 489321 - DNA, 33 bp, Homo sapien
catttatgctgcactaagcactggtttatatta

SEQ ID NO: 489322 - DNA, 33 bp, Homo sapien
catttatgctgcactaggcactggtttatatta

SEQ ID NO: 489323 - DNA, 33 bp, Homo sapien
tgacaaaatgtgatggcatttgtacacattcaa

SEQ ID NO: 489324 - DNA, 33 bp, Homo sapien
tgacaaaatgtgatgggatttgtacacattcaa

SEQ ID NO: 489325 - DNA, 33 bp, Homo sapien
gtattaagaggatgacaagttcaccgtttgcca

SEQ ID NO: 489326 - DNA, 33 bp, Homo sapien
gtattaagaggatgacgagttcaccgtttgcca

SEQ ID NO: 489327 - DNA, 33 bp, Homo sapien
aaaactcaactgacaaatcctggaaggccgttg

SEQ ID NO: 489328 - DNA, 33 bp, Homo sapien
aaaactcaactgacaactcctggaaggccgttg

SEQ ID NO: 489329 - DNA, 33 bp, Homo sapien
tccctcagtgatcttcaagctaaaaatgggttc

SEQ ID NO: 489330 - DNA, 33 bp, Homo sapien
tccctcagtgatcttcgagctaaaaatgggttc

SEQ ID NO: 489331 - DNA, 33 bp, Homo sapien
gactcagctgacagtaaagactctcttgatctg

SEQ ID NO: 489332 - DNA, 33 bp, Homo sapien
gactcagctgacagtacagactctcttgatctg

SEQ ID NO: 489333 - DNA, 33 bp, Homo sapien
aggtgatggcattacccagaaacatggagttag

SEQ ID NO: 489334 - DNA, 33 bp, Homo sapien
aggtgatggcattacctagaaacatggagttag

SEQ ID NO: 489335 - DNA, 33 bp, Homo sapien
gaagtagtaatgacaacagaaaaaggcttttac

SEQ ID NO: 489336 - DNA, 33 bp, Homo sapien
gaagtagtaatgacaagagaaaaaggcttttac

SEQ ID NO: 489337 - DNA, 33 bp, Homo sapien
ctgtcggaaactgtcaagaacggctggaattgg

SEQ ID NO: 489338 - DNA, 33 bp, Homo sapien
ctgtcggaaactgtcacgaacggctggaattgg

SEQ ID NO: 489339 - DNA, 33 bp, Homo sapien
caagacgtataataaaagatgagagaccacatc

SEQ ID NO: 489340 - DNA, 33 bp, Homo sapien
caagacgtataataaaggatgagagaccacatc

SEQ ID NO: 489341 - DNA, 33 bp, Homo sapien
taaacaagagtcacataagagagggccgcagca

SEQ ID NO: 489342 - DNA, 33 bp, Homo sapien
taaacaagagtcacatcagagagggccgcagca

SEQ ID NO: 489343 - DNA, 33 bp, Homo sapien
caacaggttttgtctcaccttggtttgaaaatg

SEQ ID NO: 489344 - DNA, 33 bp, Homo sapien
caacaggttttgtctcgccttggtttgaaaatg

SEQ ID NO: 489345 - DNA, 33 bp, Homo sapien
agatctcaggaccagactagaatgaggcttgag

SEQ ID NO: 489346 - DNA, 33 bp, Homo sapien
agatctcaggaccagagtagaatgaggcttgag

SEQ ID NO: 489347 - DNA, 33 bp, Homo sapien
gccgttttatataagcaacttgagcatttatgg

SEQ ID NO: 489348 - DNA, 33 bp, Homo sapien
gccgttttatataagcgacttgagcatttatgg

SEQ ID NO: 489349 - DNA, 33 bp, Homo sapien
agcagttttcattgacagggtagatcgtctgca

SEQ ID NO: 489350 - DNA, 33 bp, Homo sapien
agcagttttcattgacggggtagatcgtctgca

SEQ ID NO: 489351 - DNA, 33 bp, Homo sapien
gtagagtagaaagccaatggaagcagaggcctc

SEQ ID NO: 489352 - DNA, 33 bp, Homo sapien
gtagagtagaaagccagtggaagcagaggcctc

SEQ ID NO: 489353 - DNA, 33 bp, Homo sapien
aattgctattggcaaactttatgagtgcatggg

SEQ ID NO: 489354 - DNA, 33 bp, Homo sapien
aattgctattggcaaattttatgagtgcatggg

SEQ ID NO: 489355 - DNA, 33 bp, Homo sapien
tggtttgttcaatccactccagaaggtcagagg

SEQ ID NO: 489356 - DNA, 33 bp, Homo sapien
tggtttgttcaatccattccagaaggtcagagg

SEQ ID NO: 489357 - DNA, 33 bp, Homo sapien
tgaaatggcaatttgacagggtggtcacctcct

SEQ ID NO: 489358 - DNA, 33 bp, Homo sapien
tgaaatggcaatttgatagggtggtcacctcct

SEQ ID NO: 489359 - DNA, 33 bp, Homo sapien
aatagctcagggatgcaatgtaatctggaaaaa

SEQ ID NO: 489360 - DNA, 33 bp, Homo sapien
aatagctcagggatgcgatgtaatctggaaaaa

SEQ ID NO: 489361 - DNA, 33 bp, Homo sapien
cattttgcctatgtgggataagcatattaagat

SEQ ID NO: 489362 - DNA, 33 bp, Homo sapien
cattttgcctatgtggtataagcatattaagat

SEQ ID NO: 489363 - DNA, 33 bp, Homo sapien
agagagaaattgctctaagaatcgaatgaaaac

SEQ ID NO: 489364 - DNA, 33 bp, Homo sapien
agagagaaattgctctgagaatcgaatgaaaac

SEQ ID NO: 489365 - DNA, 33 bp, Homo sapien
actacaatagcggagaacttcatttccaatagg

SEQ ID NO: 489366 - DNA, 33 bp, Homo sapien
actacaatagcggagagcttcatttccaatagg

SEQ ID NO: 489367 - DNA, 33 bp, Homo sapien
ggaatacaacttcaatcatcacagacaccctgc

SEQ ID NO: 489368 - DNA, 33 bp, Homo sapien
ggaatacaacttcaattatcacagacaccctgc

SEQ ID NO: 489369 - DNA, 33 bp, Homo sapien
taagacagcagtttaacggatgcaaaggattgc

SEQ ID NO: 489370 - DNA, 33 bp, Homo sapien
taagacagcagtttaatggatgcaaaggattgc

SEQ ID NO: 489371 - DNA, 33 bp, Homo sapien
gtttcaccttgagaaaccatctgtgactccctg

SEQ ID NO: 489372 - DNA, 33 bp, Homo sapien
gtttcaccttgagaaagcatctgtgactccctg

SEQ ID NO: 489373 - DNA, 33 bp, Homo sapien
atttaatactattacaggatgttggtattgttc

SEQ ID NO: 489374 - DNA, 33 bp, Homo sapien
atttaatactattacatgatgttggtattgttc

SEQ ID NO: 489375 - DNA, 33 bp, Homo sapien
caccttctctaaccaaagcacccaacaaggaag

SEQ ID NO: 489376 - DNA, 33 bp, Homo sapien
caccttctctaaccaaggcacccaacaaggaag

SEQ ID NO: 489377 - DNA, 33 bp, Homo sapien
acattcacatattttcactattcataaccactt

SEQ ID NO: 489378 - DNA, 33 bp, Homo sapien
acattcacatattttcgctattcataaccactt

SEQ ID NO: 489379 - DNA, 33 bp, Homo sapien
tactgcctgcctgtaacggccatgccagagtcc

SEQ ID NO: 489380 - DNA, 33 bp, Homo sapien
tactgcctgcctgtaagggccatgccagagtcc

SEQ ID NO: 489381 - DNA, 33 bp, Homo sapien
ggttgtgtacattacaagggtttcatgggaatt

SEQ ID NO: 489382 - DNA, 33 bp, Homo sapien
ggttgtgtacattacatgggtttcatgggaatt

SEQ ID NO: 489383 - DNA, 33 bp, Homo sapien
tagttatgagaaggtaggttagaaccaggcttt

SEQ ID NO: 489384 - DNA, 33 bp, Homo sapien
tagttatgagaaggtatgttagaaccaggcttt

SEQ ID NO: 489385 - DNA, 33 bp, Homo sapien
aaacaccagtgcacaaatcctattctaaggcct

SEQ ID NO: 489386 - DNA, 33 bp, Homo sapien
aaacaccagtgcacaattcctattctaaggcct

SEQ ID NO: 489387 - DNA, 33 bp, Homo sapien
tcagccgatgacttcaaggtgtcaaactgtttt

SEQ ID NO: 489388 - DNA, 33 bp, Homo sapien
tcagccgatgacttcagggtgtcaaactgtttt

SEQ ID NO: 489389 - DNA, 33 bp, Homo sapien
ggtttctgattccactaacacatctaaatatgg

SEQ ID NO: 489390 - DNA, 33 bp, Homo sapien
ggtttctgattccactgacacatctaaatatgg

SEQ ID NO: 489391 - DNA, 33 bp, Homo sapien
tttgatatgtgttctccatgagttaagtctgat

SEQ ID NO: 489392 - DNA, 33 bp, Homo sapien
tttgatatgtgttctctatgagttaagtctgat

SEQ ID NO: 489393 - DNA, 33 bp, Homo sapien
tactctgggggaatgccatgtagctctgataga

SEQ ID NO: 489394 - DNA, 33 bp, Homo sapien
tactctgggggaatgctatgtagctctgataga

SEQ ID NO: 489395 - DNA, 33 bp, Homo sapien
caggctctttgggtcccggaacactttacattt

SEQ ID NO: 489396 - DNA, 33 bp, Homo sapien
caggctctttgggtcctggaacactttacattt

SEQ ID NO: 489397 - DNA, 33 bp, Homo sapien
actatgtaggatttgaggcatgtgggccagtgg

SEQ ID NO: 489398 - DNA, 33 bp, Homo sapien
actatgtaggatttgatgcatgtgggccagtgg

SEQ ID NO: 489399 - DNA, 33 bp, Homo sapien
aggttctgccccttgaagttacagattctgcaa

SEQ ID NO: 489400 - DNA, 33 bp, Homo sapien
aggttctgccccttgaggttacagattctgcaa

SEQ ID NO: 489401 - DNA, 33 bp, Homo sapien
agctataggcttaataacaaatgtcctgccctc

SEQ ID NO: 489402 - DNA, 33 bp, Homo sapien
agctataggcttaatagcaaatgtcctgccctc

SEQ ID NO: 489403 - DNA, 33 bp, Homo sapien
ctacagctgctaagagaacttcaactctaccca

SEQ ID NO: 489404 - DNA, 33 bp, Homo sapien
ctacagctgctaagaggacttcaactctaccca

SEQ ID NO: 489405 - DNA, 33 bp, Homo sapien
atgttcatttatgtaccagctgctatattctat

SEQ ID NO: 489406 - DNA, 33 bp, Homo sapien
atgttcatttatgtactagctgctatattctat

SEQ ID NO: 489407 - DNA, 33 bp, Homo sapien
tccatctaggccagtagagaagtataaggaaga

SEQ ID NO: 489408 - DNA, 33 bp, Homo sapien
tccatctaggccagtatagaagtataaggaaga

SEQ ID NO: 489409 - DNA, 33 bp, Homo sapien
cagtcaaaataccttaagcacaaacattcaaaa

SEQ ID NO: 489410 - DNA, 33 bp, Homo sapien
cagtcaaaataccttacgcacaaacattcaaaa

SEQ ID NO: 489411 - DNA, 33 bp, Homo sapien
cctcttataaacacttcaacagattttcaaaag

SEQ ID NO: 489412 - DNA, 33 bp, Homo sapien
cctcttataaacacttgaacagattttcaaaag

SEQ ID NO: 489413 - DNA, 33 bp, Homo sapien
tctccttttctcttcaggccatgctcttttcct

SEQ ID NO: 489414 - DNA, 33 bp, Homo sapien
tctccttttctcttcatgccatgctcttttcct

SEQ ID NO: 489415 - DNA, 33 bp, Homo sapien
ccatcaaagccaggagaccagttagtactctat

SEQ ID NO: 489416 - DNA, 33 bp, Homo sapien
ccatcaaagccaggaggccagttagtactctat

SEQ ID NO: 489417 - DNA, 33 bp, Homo sapien
agaaggcactatcccacctggatctccatccaa

SEQ ID NO: 489418 - DNA, 33 bp, Homo sapien
agaaggcactatcccatctggatctccatccaa

SEQ ID NO: 489419 - DNA, 33 bp, Homo sapien
tttgatggagcaacaactcagaggtttgaaaat

SEQ ID NO: 489420 - DNA, 33 bp, Homo sapien
tttgatggagcaacaagtcagaggtttgaaaat

SEQ ID NO: 489421 - DNA, 33 bp, Homo sapien
aaaatcatgggtgttactaaaagctgtcttcta

SEQ ID NO: 489422 - DNA, 33 bp, Homo sapien
aaaatcatgggtgttattaaaagctgtcttcta

SEQ ID NO: 489423 - DNA, 33 bp, Homo sapien
ttttgtgagcattaaacaaggtaatgtatgcaa

SEQ ID NO: 489424 - DNA, 33 bp, Homo sapien
ttttgtgagcattaaataaggtaatgtatgcaa

SEQ ID NO: 489425 - DNA, 33 bp, Homo sapien
gcccagaatcggagccggagtcttgatcctgct

SEQ ID NO: 489426 - DNA, 33 bp, Homo sapien
gcccagaatcggagcctgagtcttgatcctgct

SEQ ID NO: 489427 - DNA, 33 bp, Homo sapien
tagttacacgttatgaagttggaaaattcaaat

SEQ ID NO: 489428 - DNA, 33 bp, Homo sapien
tagttacacgttatgatgttggaaaattcaaat

SEQ ID NO: 489429 - DNA, 33 bp, Homo sapien
gatttcacattagccactgaattactaagcatt

SEQ ID NO: 489430 - DNA, 33 bp, Homo sapien
gatttcacattagccattgaattactaagcatt

SEQ ID NO: 489431 - DNA, 33 bp, Homo sapien
ctctgcatctctaccacgttgcttgtcaccaac

SEQ ID NO: 489432 - DNA, 33 bp, Homo sapien
ctctgcatctctaccatgttgcttgtcaccaac

SEQ ID NO: 489433 - DNA, 33 bp, Homo sapien
aaaataaggcaggttgaacccctgtgaggctgg

SEQ ID NO: 489434 - DNA, 33 bp, Homo sapien
aaaataaggcaggttggacccctgtgaggctgg

SEQ ID NO: 489435 - DNA, 33 bp, Homo sapien
ttagtggtacggtaaaatcttataacacttttg

SEQ ID NO: 489436 - DNA, 33 bp, Homo sapien
ttagtggtacggtaaagtcttataacacttttg

SEQ ID NO: 489437 - DNA, 33 bp, Homo sapien
gatcaaacaagatttcaccaaaataactggtta

SEQ ID NO: 489438 - DNA, 33 bp, Homo sapien
gatcaaacaagatttcgccaaaataactggtta

SEQ ID NO: 489439 - DNA, 33 bp, Homo sapien
gaccctattgtgtataaaggacattggtaactt

SEQ ID NO: 489440 - DNA, 33 bp, Homo sapien
gaccctattgtgtatagaggacattggtaactt

SEQ ID NO: 489441 - DNA, 33 bp, Homo sapien
tgtaaatgttgatagcagctatatttgtgattg

SEQ ID NO: 489442 - DNA, 33 bp, Homo sapien
tgtaaatgttgatagcggctatatttgtgattg

SEQ ID NO: 489443 - DNA, 33 bp, Homo sapien
aactgttgcgtatctgcattactgtggtggtta

SEQ ID NO: 489444 - DNA, 33 bp, Homo sapien
aactgttgcgtatctggattactgtggtggtta

SEQ ID NO: 489445 - DNA, 33 bp, Homo sapien
tggatgaaaaccaatacgggggaagagaaggga

SEQ ID NO: 489446 - DNA, 33 bp, Homo sapien
tggatgaaaaccaatatgggggaagagaaggga

SEQ ID NO: 489447 - DNA, 33 bp, Homo sapien
taaatatatggactctcaataggcagatagact

SEQ ID NO: 489448 - DNA, 33 bp, Homo sapien
taaatatatggactcttaataggcagatagact

SEQ ID NO: 489449 - DNA, 33 bp, Homo sapien
gcttttgaaatgacatcacaaatttaaaataga

SEQ ID NO: 489450 - DNA, 33 bp, Homo sapien
gcttttgaaatgacatgacaaatttaaaataga

SEQ ID NO: 489451 - DNA, 33 bp, Homo sapien
aagattcctgaagatagattttccagcaagcac

SEQ ID NO: 489452 - DNA, 33 bp, Homo sapien
aagattcctgaagatatattttccagcaagcac

SEQ ID NO: 489453 - DNA, 33 bp, Homo sapien
cgttgtgccctcatagccgaattggacaaatct

SEQ ID NO: 489454 - DNA, 33 bp, Homo sapien
cgttgtgccctcatagtcgaattggacaaatct

SEQ ID NO: 489455 - DNA, 33 bp, Homo sapien
ttgtgaggtgatggaccatttgtcatttctaaa

SEQ ID NO: 489456 - DNA, 33 bp, Homo sapien
ttgtgaggtgatggactatttgtcatttctaaa

SEQ ID NO: 489457 - DNA, 33 bp, Homo sapien
agttgggtactagaggaaacagttctgggatgg

SEQ ID NO: 489458 - DNA, 33 bp, Homo sapien
agttgggtactagaggcaacagttctgggatgg

SEQ ID NO: 489459 - DNA, 33 bp, Homo sapien
tatacttttctgcccaatactgagtccttgagc

SEQ ID NO: 489460 - DNA, 33 bp, Homo sapien
tatacttttctgcccattactgagtccttgagc

SEQ ID NO: 489461 - DNA, 33 bp, Homo sapien
agcacatcctattctccagtcccgcgggcggct

SEQ ID NO: 489462 - DNA, 33 bp, Homo sapien
agcacatcctattctctagtcccgcgggcggct

SEQ ID NO: 489463 - DNA, 33 bp, Homo sapien
tgaggaaataacagcagagaaagtttgtattac

SEQ ID NO: 489464 - DNA, 33 bp, Homo sapien
tgaggaaataacagcatagaaagtttgtattac

SEQ ID NO: 489465 - DNA, 33 bp, Homo sapien
agagcagaatagaaagcagtataagacagcttc

SEQ ID NO: 489466 - DNA, 33 bp, Homo sapien
agagcagaatagaaaggagtataagacagcttc

SEQ ID NO: 489467 - DNA, 33 bp, Homo sapien
gaaataactattactgaaagcacttttatatat

SEQ ID NO: 489468 - DNA, 33 bp, Homo sapien
gaaataactattactggaagcacttttatatat

SEQ ID NO: 489469 - DNA, 33 bp, Homo sapien
ctggtttccttcaaataatgaaaatgacccaaa

SEQ ID NO: 489470 - DNA, 33 bp, Homo sapien
ctggtttccttcaaatcatgaaaatgacccaaa

SEQ ID NO: 489471 - DNA, 33 bp, Homo sapien
acagtctaacccaacaaactgatgtgaggctgt

SEQ ID NO: 489472 - DNA, 33 bp, Homo sapien
acagtctaacccaacagactgatgtgaggctgt

SEQ ID NO: 489473 - DNA, 33 bp, Homo sapien
agtcgagagaacgacaaatgcattcagaggaat

SEQ ID NO: 489474 - DNA, 33 bp, Homo sapien
agtcgagagaacgacagatgcattcagaggaat

SEQ ID NO: 489475 - DNA, 33 bp, Homo sapien
attctcactaccaaccacacataactcattact

SEQ ID NO: 489476 - DNA, 33 bp, Homo sapien
attctcactaccaaccgcacataactcattact

SEQ ID NO: 489477 - DNA, 33 bp, Homo sapien
gctggaccaacaaagaaactagaaataagctca

SEQ ID NO: 489478 - DNA, 33 bp, Homo sapien
gctggaccaacaaagatactagaaataagctca

SEQ ID NO: 489479 - DNA, 33 bp, Homo sapien
taattatgtctgaaagaatttcctttgcttttc

SEQ ID NO: 489480 - DNA, 33 bp, Homo sapien
taattatgtctgaaaggatttcctttgcttttc

SEQ ID NO: 489481 - DNA, 33 bp, Homo sapien
ttgaacaatttttagactaagcaaggaaaggga

SEQ ID NO: 489482 - DNA, 33 bp, Homo sapien
ttgaacaatttttagagtaagcaaggaaaggga

SEQ ID NO: 489483 - DNA, 33 bp, Homo sapien
tataggatatcaattagcatcgagttatgttta

SEQ ID NO: 489484 - DNA, 33 bp, Homo sapien
tataggatatcaattatcatcgagttatgttta

SEQ ID NO: 489485 - DNA, 33 bp, Homo sapien
gaatgtctcagaggcaaattacaagatttataa

SEQ ID NO: 489486 - DNA, 33 bp, Homo sapien
gaatgtctcagaggcacattacaagatttataa

SEQ ID NO: 489487 - DNA, 33 bp, Homo sapien
tgaggccagaggattcacttcttccaagatggc

SEQ ID NO: 489488 - DNA, 33 bp, Homo sapien
tgaggccagaggattcgcttcttccaagatggc

SEQ ID NO: 489489 - DNA, 33 bp, Homo sapien
ccaggtagtgagtgcaatagaaaaagctacttg

SEQ ID NO: 489490 - DNA, 33 bp, Homo sapien
ccaggtagtgagtgcagtagaaaaagctacttg

SEQ ID NO: 489491 - DNA, 33 bp, Homo sapien
tatatggacttgtaggcacttgcagcggcttct

SEQ ID NO: 489492 - DNA, 33 bp, Homo sapien
tatatggacttgtaggtacttgcagcggcttct

SEQ ID NO: 489493 - DNA, 33 bp, Homo sapien
tcaacttccaaaaaaactgaagtcagctgatca

SEQ ID NO: 489494 - DNA, 33 bp, Homo sapien
tcaacttccaaaaaaattgaagtcagctgatca

SEQ ID NO: 489495 - DNA, 33 bp, Homo sapien
gaactgtaagtgtcgccaatagagatttaagat

SEQ ID NO: 489496 - DNA, 33 bp, Homo sapien
gaactgtaagtgtcgctaatagagatttaagat

SEQ ID NO: 489497 - DNA, 33 bp, Homo sapien
ctttgcatccatttaaaggactgatgtattcat

SEQ ID NO: 489498 - DNA, 33 bp, Homo sapien
ctttgcatccatttaagggactgatgtattcat

SEQ ID NO: 489499 - DNA, 33 bp, Homo sapien
ctgagcacttaaaatacggctattctgaaaaaa

SEQ ID NO: 489500 - DNA, 33 bp, Homo sapien
ctgagcacttaaaatatggctattctgaaaaaa

SEQ ID NO: 489501 - DNA, 33 bp, Homo sapien
gttattcaattcttcaaactcctgtgataggcc

SEQ ID NO: 489502 - DNA, 33 bp, Homo sapien
gttattcaattcttcagactcctgtgataggcc

SEQ ID NO: 489503 - DNA, 33 bp, Homo sapien
gaaaaagcgcacacaacagctgaggatctgcta

SEQ ID NO: 489504 - DNA, 33 bp, Homo sapien
gaaaaagcgcacacaatagctgaggatctgcta

SEQ ID NO: 489505 - DNA, 33 bp, Homo sapien
ttctgcttctcagtcaaggaagtcacttgtaca

SEQ ID NO: 489506 - DNA, 33 bp, Homo sapien
ttctgcttctcagtcagggaagtcacttgtaca

SEQ ID NO: 489507 - DNA, 33 bp, Homo sapien
tgaaatgcctgggagacgctgacacaagtaact

SEQ ID NO: 489508 - DNA, 33 bp, Homo sapien
tgaaatgcctgggagatgctgacacaagtaact

SEQ ID NO: 489509 - DNA, 33 bp, Homo sapien
cacatttcctttgtaaatatcacactaatcaag

SEQ ID NO: 489510 - DNA, 33 bp, Homo sapien
cacatttcctttgtaagtatcacactaatcaag

SEQ ID NO: 489511 - DNA, 33 bp, Homo sapien
acagaagtctctgtgcagattgttgttgagtga

SEQ ID NO: 489512 - DNA, 33 bp, Homo sapien
acagaagtctctgtgctgattgttgttgagtga

SEQ ID NO: 489513 - DNA, 33 bp, Homo sapien
ttgctagcttggtaacactacatgaaaaatatg

SEQ ID NO: 489514 - DNA, 33 bp, Homo sapien
ttgctagcttggtaacgctacatgaaaaatatg

SEQ ID NO: 489515 - DNA, 33 bp, Homo sapien
cccagctcgagagagagatttgagcactgcctc

SEQ ID NO: 489516 - DNA, 33 bp, Homo sapien
cccagctcgagagagatatttgagcactgcctc

SEQ ID NO: 489517 - DNA, 33 bp, Homo sapien
aaattcaacttagttccaataaaaagaccacgg

SEQ ID NO: 489518 - DNA, 33 bp, Homo sapien
aaattcaacttagttctaataaaaagaccacgg

SEQ ID NO: 489519 - DNA, 33 bp, Homo sapien
ggaaaaggtagtatacaggacaagccattagat

SEQ ID NO: 489520 - DNA, 33 bp, Homo sapien
ggaaaaggtagtatacgggacaagccattagat

SEQ ID NO: 489521 - DNA, 33 bp, Homo sapien
aggaagtagttgtcataaagctcagtcaagaga

SEQ ID NO: 489522 - DNA, 33 bp, Homo sapien
aggaagtagttgtcatgaagctcagtcaagaga

SEQ ID NO: 489523 - DNA, 33 bp, Homo sapien
cttcctaaatatatgacatggaaaactctggtg

SEQ ID NO: 489524 - DNA, 33 bp, Homo sapien
cttcctaaatatatgagatggaaaactctggtg

SEQ ID NO: 489525 - DNA, 33 bp, Homo sapien
atgttttatgcttgaccaaggcttttcacttct

SEQ ID NO: 489526 - DNA, 33 bp, Homo sapien
atgttttatgcttgactaaggcttttcacttct

SEQ ID NO: 489527 - DNA, 33 bp, Homo sapien
ctgtgtaaagtccctcaatatggagccatcact

SEQ ID NO: 489528 - DNA, 33 bp, Homo sapien
ctgtgtaaagtccctcgatatggagccatcact

SEQ ID NO: 489529 - DNA, 33 bp, Homo sapien
tactggccttctaagaagagtttaaaagtgttc

SEQ ID NO: 489530 - DNA, 33 bp, Homo sapien
tactggccttctaagatgagtttaaaagtgttc

SEQ ID NO: 489531 - DNA, 33 bp, Homo sapien
attgagttctatgtcaacagtcttggtgatacc

SEQ ID NO: 489532 - DNA, 33 bp, Homo sapien
attgagttctatgtcatcagtcttggtgatacc

SEQ ID NO: 489533 - DNA, 33 bp, Homo sapien
tgtggtggtaataagacctcacaggtatcacca

SEQ ID NO: 489534 - DNA, 33 bp, Homo sapien
tgtggtggtaataagatctcacaggtatcacca

SEQ ID NO: 489535 - DNA, 33 bp, Homo sapien
tgggcaaatctgtcaaaatttcgtactgccaaa

SEQ ID NO: 489536 - DNA, 33 bp, Homo sapien
tgggcaaatctgtcaacatttcgtactgccaaa

SEQ ID NO: 489537 - DNA, 33 bp, Homo sapien
aaaaaaaagatgcctacggtctgatctctgagg

SEQ ID NO: 489538 - DNA, 33 bp, Homo sapien
aaaaaaaagatgcctatggtctgatctctgagg

SEQ ID NO: 489539 - DNA, 33 bp, Homo sapien
gcataaagcacagctaccttcaaggcatttttc

SEQ ID NO: 489540 - DNA, 33 bp, Homo sapien
gcataaagcacagctatcttcaaggcatttttc

SEQ ID NO: 489541 - DNA, 33 bp, Homo sapien
attcttttgagaccaactgtaaatttcttctca

SEQ ID NO: 489542 - DNA, 33 bp, Homo sapien
attcttttgagaccaattgtaaatttcttctca

SEQ ID NO: 489543 - DNA, 33 bp, Homo sapien
atagcaatttttaggcagcactgttagggcttc

SEQ ID NO: 489544 - DNA, 33 bp, Homo sapien
atagcaatttttaggcggcactgttagggcttc

SEQ ID NO: 489545 - DNA, 33 bp, Homo sapien
ggagaggagagctttacgtgtaaccctgatcag

SEQ ID NO: 489546 - DNA, 33 bp, Homo sapien
ggagaggagagctttatgtgtaaccctgatcag

SEQ ID NO: 489547 - DNA, 33 bp, Homo sapien
agataaagcagtgtataaaacagaaattttgct

SEQ ID NO: 489548 - DNA, 33 bp, Homo sapien
agataaagcagtgtatgaaacagaaattttgct

SEQ ID NO: 489549 - DNA, 33 bp, Homo sapien
cttagggccctttccgaagcctggcttgtaagt

SEQ ID NO: 489550 - DNA, 33 bp, Homo sapien
cttagggccctttccgcagcctggcttgtaagt

SEQ ID NO: 489551 - DNA, 33 bp, Homo sapien
aggtgagttaaacaatcacttgtagtctgatat

SEQ ID NO: 489552 - DNA, 33 bp, Homo sapien
aggtgagttaaacaattacttgtagtctgatat

SEQ ID NO: 489553 - DNA, 33 bp, Homo sapien
agttctaagatgaccacacattcagttgcagct

SEQ ID NO: 489554 - DNA, 33 bp, Homo sapien
agttctaagatgaccatacattcagttgcagct

SEQ ID NO: 489555 - DNA, 33 bp, Homo sapien
tgtatctgggacacgccctaccaggcaagcgca

SEQ ID NO: 489556 - DNA, 33 bp, Homo sapien
tgtatctgggacacgctctaccaggcaagcgca

SEQ ID NO: 489557 - DNA, 33 bp, Homo sapien
gacagagagcatcttgcagtgggaagaactaga

SEQ ID NO: 489558 - DNA, 33 bp, Homo sapien
gacagagagcatcttggagtgggaagaactaga

SEQ ID NO: 489559 - DNA, 33 bp, Homo sapien
ggctagcgataggtcacatatcagcactggctc

SEQ ID NO: 489560 - DNA, 33 bp, Homo sapien
ggctagcgataggtcagatatcagcactggctc

SEQ ID NO: 489561 - DNA, 33 bp, Homo sapien
aaagtaacacaacatacgggaagaaagcacttg

SEQ ID NO: 489562 - DNA, 33 bp, Homo sapien
aaagtaacacaacatatgggaagaaagcacttg

SEQ ID NO: 489563 - DNA, 33 bp, Homo sapien
cactcctggaggaccacgaagttggagcttgca

SEQ ID NO: 489564 - DNA, 33 bp, Homo sapien
cactcctggaggaccatgaagttggagcttgca

SEQ ID NO: 489565 - DNA, 33 bp, Homo sapien
gctttggcttacggccgctcttttccgccggtc

SEQ ID NO: 489566 - DNA, 33 bp, Homo sapien
gctttggcttacggcctctcttttccgccggtc

SEQ ID NO: 489567 - DNA, 33 bp, Homo sapien
actgcaaggagccttcaccgtgacttccttcta

SEQ ID NO: 489568 - DNA, 33 bp, Homo sapien
actgcaaggagccttcgccgtgacttccttcta

SEQ ID NO: 489569 - DNA, 33 bp, Homo sapien
gcaccaatgttttaacccacatatatcatacag

SEQ ID NO: 489570 - DNA, 33 bp, Homo sapien
gcaccaatgttttaactcacatatatcatacag

SEQ ID NO: 489571 - DNA, 33 bp, Homo sapien
aactgcttcaaccagcaaatggtagcttgtgct

SEQ ID NO: 489572 - DNA, 33 bp, Homo sapien
aactgcttcaaccagcgaatggtagcttgtgct

SEQ ID NO: 489573 - DNA, 33 bp, Homo sapien
cattgttatgcaagaaattattaattacaaaat

SEQ ID NO: 489574 - DNA, 33 bp, Homo sapien
cattgttatgcaagaatttattaattacaaaat

SEQ ID NO: 489575 - DNA, 33 bp, Homo sapien
attttgtcacagaatcgatggactgaatctaat

SEQ ID NO: 489576 - DNA, 33 bp, Homo sapien
attttgtcacagaatctatggactgaatctaat

SEQ ID NO: 489577 - DNA, 33 bp, Homo sapien
tctggcattggctgacagaatggatttggatgc

SEQ ID NO: 489578 - DNA, 33 bp, Homo sapien
tctggcattggctgacggaatggatttggatgc

SEQ ID NO: 489579 - DNA, 33 bp, Homo sapien
atgttgcagccagaaaggagtcattcactaagt

SEQ ID NO: 489580 - DNA, 33 bp, Homo sapien
atgttgcagccagaaatgagtcattcactaagt

SEQ ID NO: 489581 - DNA, 33 bp, Homo sapien
atacaggagtgagagagaacatcagggttttat

SEQ ID NO: 489582 - DNA, 33 bp, Homo sapien
atacaggagtgagagataacatcagggttttat

SEQ ID NO: 489583 - DNA, 33 bp, Homo sapien
tcctactagagtataaactgttatggaccagga

SEQ ID NO: 489584 - DNA, 33 bp, Homo sapien
tcctactagagtataagctgttatggaccagga

SEQ ID NO: 489585 - DNA, 33 bp, Homo sapien
tctatgaaaacaaaaacgctactacataaagta

SEQ ID NO: 489586 - DNA, 33 bp, Homo sapien
tctatgaaaacaaaaaggctactacataaagta

SEQ ID NO: 489587 - DNA, 33 bp, Homo sapien
cttctaagagttgataaatataatgccataaaa

SEQ ID NO: 489588 - DNA, 33 bp, Homo sapien
cttctaagagttgatagatataatgccataaaa

SEQ ID NO: 489589 - DNA, 33 bp, Homo sapien
tggaatagcactaagcgcctttagatgttttag

SEQ ID NO: 489590 - DNA, 33 bp, Homo sapien
tggaatagcactaagctcctttagatgttttag

SEQ ID NO: 489591 - DNA, 33 bp, Homo sapien
ttttttaatggctacacatttctcttgcataaa

SEQ ID NO: 489592 - DNA, 33 bp, Homo sapien
ttttttaatggctacatatttctcttgcataaa

SEQ ID NO: 489593 - DNA, 33 bp, Homo sapien
ggaaaaaaattgcttacgtagaatgtctatttt

SEQ ID NO: 489594 - DNA, 33 bp, Homo sapien
ggaaaaaaattgcttatgtagaatgtctatttt

SEQ ID NO: 489595 - DNA, 33 bp, Homo sapien
gattttgcagcccacacatagcaggttccagaa

SEQ ID NO: 489596 - DNA, 33 bp, Homo sapien
gattttgcagcccacagatagcaggttccagaa

SEQ ID NO: 489597 - DNA, 33 bp, Homo sapien
ttaaaatcatttttcaactctcatggtaaagac

SEQ ID NO: 489598 - DNA, 33 bp, Homo sapien
ttaaaatcatttttcagctctcatggtaaagac

SEQ ID NO: 489599 - DNA, 33 bp, Homo sapien
aattttgaccgtctggacaagatgagctctgat

SEQ ID NO: 489600 - DNA, 33 bp, Homo sapien
aattttgaccgtctgggcaagatgagctctgat

SEQ ID NO: 489601 - DNA, 33 bp, Homo sapien
aggacttggtgtttgacggatagggacataaag

SEQ ID NO: 489602 - DNA, 33 bp, Homo sapien
aggacttggtgtttgatggatagggacataaag

SEQ ID NO: 489603 - DNA, 33 bp, Homo sapien
gaaaacgtaaagccaccagaattctcacacatt

SEQ ID NO: 489604 - DNA, 33 bp, Homo sapien
gaaaacgtaaagccactagaattctcacacatt

SEQ ID NO: 489605 - DNA, 33 bp, Homo sapien
tggttcctgggcaactcagtgtcaaatttgtgg

SEQ ID NO: 489606 - DNA, 33 bp, Homo sapien
tggttcctgggcaactgagtgtcaaatttgtgg

SEQ ID NO: 489607 - DNA, 33 bp, Homo sapien
ctggagagtttaaagaaagtagttgcagaacat

SEQ ID NO: 489608 - DNA, 33 bp, Homo sapien
ctggagagtttaaagagagtagttgcagaacat

SEQ ID NO: 489609 - DNA, 33 bp, Homo sapien
tctttcttatcttgctgaaccatcccttttgtg

SEQ ID NO: 489610 - DNA, 33 bp, Homo sapien
tctttcttatcttgcttaaccatcccttttgtg

SEQ ID NO: 489611 - DNA, 33 bp, Homo sapien
tttgattgcttcgtcaaggtaccagttagcttg

SEQ ID NO: 489612 - DNA, 33 bp, Homo sapien
tttgattgcttcgtcagggtaccagttagcttg

SEQ ID NO: 489613 - DNA, 33 bp, Homo sapien
ctcaagatccctttacactcttccgtgctgtgg

SEQ ID NO: 489614 - DNA, 33 bp, Homo sapien
ctcaagatccctttacgctcttccgtgctgtgg

SEQ ID NO: 489615 - DNA, 33 bp, Homo sapien
tattttcagcatgatacagtagcatttctatga

SEQ ID NO: 489616 - DNA, 33 bp, Homo sapien
tattttcagcatgatatagtagcatttctatga

SEQ ID NO: 489617 - DNA, 33 bp, Homo sapien
aagttgacatttttcaacttctctgcacatctc

SEQ ID NO: 489618 - DNA, 33 bp, Homo sapien
aagttgacatttttcaccttctctgcacatctc

SEQ ID NO: 489619 - DNA, 33 bp, Homo sapien
aatgaataatccttaaatctccaccacaagacc

SEQ ID NO: 489620 - DNA, 33 bp, Homo sapien
aatgaataatccttaagtctccaccacaagacc

SEQ ID NO: 489621 - DNA, 33 bp, Homo sapien
ctcttcgacacttcccagaactctcctttatgc

SEQ ID NO: 489622 - DNA, 33 bp, Homo sapien
ctcttcgacacttcccggaactctcctttatgc

SEQ ID NO: 489623 - DNA, 33 bp, Homo sapien
agactgctggagcaccactaggatctagggcat

SEQ ID NO: 489624 - DNA, 33 bp, Homo sapien
agactgctggagcacctctaggatctagggcat

SEQ ID NO: 489625 - DNA, 33 bp, Homo sapien
aaagctgcccaagcgtaaaatgaaacgaaatca

SEQ ID NO: 489626 - DNA, 33 bp, Homo sapien
aaagctgcccaagcgtgaaatgaaacgaaatca

SEQ ID NO: 489627 - DNA, 33 bp, Homo sapien
ttaggaattagttctcactctccagttttgttg

SEQ ID NO: 489628 - DNA, 33 bp, Homo sapien
ttaggaattagttctcgctctccagttttgttg

SEQ ID NO: 489629 - DNA, 33 bp, Homo sapien
gcccacccagcaggcaatcaccttagctcagag

SEQ ID NO: 489630 - DNA, 33 bp, Homo sapien
gcccacccagcaggcattcaccttagctcagag

SEQ ID NO: 489631 - DNA, 33 bp, Homo sapien
tcaaatctctatctccagcagtccggttccaga

SEQ ID NO: 489632 - DNA, 33 bp, Homo sapien
tcaaatctctatctccggcagtccggttccaga

SEQ ID NO: 489633 - DNA, 33 bp, Homo sapien
attgcaggcttctacacgaaaaagggtgagttc

SEQ ID NO: 489634 - DNA, 33 bp, Homo sapien
attgcaggcttctacatgaaaaagggtgagttc

SEQ ID NO: 489635 - DNA, 33 bp, Homo sapien
tgcagactggcaataacatttgactcttctatt

SEQ ID NO: 489636 - DNA, 33 bp, Homo sapien
tgcagactggcaataatatttgactcttctatt

SEQ ID NO: 489637 - DNA, 33 bp, Homo sapien
tcagtcagttctctatcagcagagcctgggcct

SEQ ID NO: 489638 - DNA, 33 bp, Homo sapien
tcagtcagttctctatgagcagagcctgggcct

SEQ ID NO: 489639 - DNA, 33 bp, Homo sapien
gccctgggccagtgcaacataatgcagtgtgat

SEQ ID NO: 489640 - DNA, 33 bp, Homo sapien
gccctgggccagtgcagcataatgcagtgtgat

SEQ ID NO: 489641 - DNA, 33 bp, Homo sapien
attgaaaactctgaaaattctgtgccatggaca

SEQ ID NO: 489642 - DNA, 33 bp, Homo sapien
attgaaaactctgaaagttctgtgccatggaca

SEQ ID NO: 489643 - DNA, 33 bp, Homo sapien
agcaggaatggaaaacagtgcaaccaaacagat

SEQ ID NO: 489644 - DNA, 33 bp, Homo sapien
agcaggaatggaaaacggtgcaaccaaacagat

SEQ ID NO: 489645 - DNA, 33 bp, Homo sapien
caaactgtcagacttacagaagcattacagtgt

SEQ ID NO: 489646 - DNA, 33 bp, Homo sapien
caaactgtcagacttagagaagcattacagtgt

SEQ ID NO: 489647 - DNA, 33 bp, Homo sapien
cctactcattaatatacctgagttgtcttggat

SEQ ID NO: 489648 - DNA, 33 bp, Homo sapien
cctactcattaatatatctgagttgtcttggat

SEQ ID NO: 489649 - DNA, 33 bp, Homo sapien
aagtgtccaaattcacacaagtgaaatacacct

SEQ ID NO: 489650 - DNA, 33 bp, Homo sapien
aagtgtccaaattcacgcaagtgaaatacacct

SEQ ID NO: 489651 - DNA, 33 bp, Homo sapien
aagagctgctggcttacgatgtggtatgtgaag

SEQ ID NO: 489652 - DNA, 33 bp, Homo sapien
aagagctgctggcttatgatgtggtatgtgaag

SEQ ID NO: 489653 - DNA, 33 bp, Homo sapien
aaaagtctgaattttacacatttgatcagataa

SEQ ID NO: 489654 - DNA, 33 bp, Homo sapien
aaaagtctgaattttatacatttgatcagataa

SEQ ID NO: 489655 - DNA, 33 bp, Homo sapien
tagttatgttctagaaatatggagactttagtt

SEQ ID NO: 489656 - DNA, 33 bp, Homo sapien
tagttatgttctagaattatggagactttagtt

SEQ ID NO: 489657 - DNA, 33 bp, Homo sapien
aataatgccaagaaaccatttcctatttatctt

SEQ ID NO: 489658 - DNA, 33 bp, Homo sapien
aataatgccaagaaacgatttcctatttatctt

SEQ ID NO: 489659 - DNA, 33 bp, Homo sapien
aagcaatgtatcacataacagaggatttagaaa

SEQ ID NO: 489660 - DNA, 33 bp, Homo sapien
aagcaatgtatcacattacagaggatttagaaa

SEQ ID NO: 489661 - DNA, 33 bp, Homo sapien
ggaaggtcacagaaaaggattacggttttgatg

SEQ ID NO: 489662 - DNA, 33 bp, Homo sapien
ggaaggtcacagaaaatgattacggttttgatg

SEQ ID NO: 489663 - DNA, 33 bp, Homo sapien
atgtaaccacaaagaacgtgagtggggaggcaa

SEQ ID NO: 489664 - DNA, 33 bp, Homo sapien
atgtaaccacaaagaaggtgagtggggaggcaa

SEQ ID NO: 489665 - DNA, 33 bp, Homo sapien
acatggtctggacgtaacggaatgctaaagaat

SEQ ID NO: 489666 - DNA, 33 bp, Homo sapien
acatggtctggacgtatcggaatgctaaagaat

SEQ ID NO: 489667 - DNA, 33 bp, Homo sapien
acttgccaagatctcactcctcagcagcttttt

SEQ ID NO: 489668 - DNA, 33 bp, Homo sapien
acttgccaagatctcattcctcagcagcttttt

SEQ ID NO: 489669 - DNA, 33 bp, Homo sapien
taccatttcaagaaacaactagacagtagtaac

SEQ ID NO: 489670 - DNA, 33 bp, Homo sapien
taccatttcaagaaacgactagacagtagtaac

SEQ ID NO: 489671 - DNA, 33 bp, Homo sapien
tttcaaaatgatttaacgttaacagcatttggt

SEQ ID NO: 489672 - DNA, 33 bp, Homo sapien
tttcaaaatgatttaatgttaacagcatttggt

SEQ ID NO: 489673 - DNA, 33 bp, Homo sapien
ccaaattaagtgtgaaacaagtgcacattgcat

SEQ ID NO: 489674 - DNA, 33 bp, Homo sapien
ccaaattaagtgtgaagcaagtgcacattgcat

SEQ ID NO: 489675 - DNA, 33 bp, Homo sapien
ttgcttctggaaaaaaatgttcatttcctccct

SEQ ID NO: 489676 - DNA, 33 bp, Homo sapien
ttgcttctggaaaaaagtgttcatttcctccct

SEQ ID NO: 489677 - DNA, 33 bp, Homo sapien
tgctatttcaaaagaacagaatgtgtctgtgtg

SEQ ID NO: 489678 - DNA, 33 bp, Homo sapien
tgctatttcaaaagaatagaatgtgtctgtgtg

SEQ ID NO: 489679 - DNA, 33 bp, Homo sapien
gtacaacaggaaggtaaatatatccatcttaga

SEQ ID NO: 489680 - DNA, 33 bp, Homo sapien
gtacaacaggaaggtacatatatccatcttaga

SEQ ID NO: 489681 - DNA, 33 bp, Homo sapien
cagtcttaccaaaaaaattcaggcagggaacat

SEQ ID NO: 489682 - DNA, 33 bp, Homo sapien
cagtcttaccaaaaaatttcaggcagggaacat

SEQ ID NO: 489683 - DNA, 33 bp, Homo sapien
agaaactaatgatcaaagaaatgactagtctgt

SEQ ID NO: 489684 - DNA, 33 bp, Homo sapien
agaaactaatgatcaacgaaatgactagtctgt

SEQ ID NO: 489685 - DNA, 33 bp, Homo sapien
tgagatcaagctgcaaaacatgtgaaagagagt

SEQ ID NO: 489686 - DNA, 33 bp, Homo sapien
tgagatcaagctgcaagacatgtgaaagagagt

SEQ ID NO: 489687 - DNA, 33 bp, Homo sapien
aatattaattgttgagacataggctttcttaag

SEQ ID NO: 489688 - DNA, 33 bp, Homo sapien
aatattaattgttgagtcataggctttcttaag

SEQ ID NO: 489689 - DNA, 33 bp, Homo sapien
ttgttgttcatgtttacaagtctacagaagaaa

SEQ ID NO: 489690 - DNA, 33 bp, Homo sapien
ttgttgttcatgtttataagtctacagaagaaa

SEQ ID NO: 489691 - DNA, 33 bp, Homo sapien
tcacagtttaaaggaacggttgagaaatgtatt

SEQ ID NO: 489692 - DNA, 33 bp, Homo sapien
tcacagtttaaaggaatggttgagaaatgtatt

SEQ ID NO: 489693 - DNA, 33 bp, Homo sapien
ctgtaggcattgcaaaagttacttagtaaaagt

SEQ ID NO: 489694 - DNA, 33 bp, Homo sapien
ctgtaggcattgcaaaggttacttagtaaaagt

SEQ ID NO: 489695 - DNA, 33 bp, Homo sapien
aataactggcaaataactaatatgtactttatc

SEQ ID NO: 489696 - DNA, 33 bp, Homo sapien
aataactggcaaataattaatatgtactttatc

SEQ ID NO: 489697 - DNA, 33 bp, Homo sapien
aagctaagaatttttacgcaaggcagttctacc

SEQ ID NO: 489698 - DNA, 33 bp, Homo sapien
aagctaagaatttttatgcaaggcagttctacc

SEQ ID NO: 489699 - DNA, 33 bp, Homo sapien
gccaatctgtctatgaaaaagtccaaatcttct

SEQ ID NO: 489700 - DNA, 33 bp, Homo sapien
gccaatctgtctatgagaaagtccaaatcttct

SEQ ID NO: 489701 - DNA, 33 bp, Homo sapien
ctaggcacagctcttaccatctctgtgtagtct

SEQ ID NO: 489702 - DNA, 33 bp, Homo sapien
ctaggcacagctcttatcatctctgtgtagtct

SEQ ID NO: 489703 - DNA, 33 bp, Homo sapien
gggaccaggagtggaaataaatggtctatgttc

SEQ ID NO: 489704 - DNA, 33 bp, Homo sapien
gggaccaggagtggaagtaaatggtctatgttc

SEQ ID NO: 489705 - DNA, 33 bp, Homo sapien
ccacattgaagattaccatccattgggacaatt

SEQ ID NO: 489706 - DNA, 33 bp, Homo sapien
ccacattgaagattactatccattgggacaatt

SEQ ID NO: 489707 - DNA, 33 bp, Homo sapien
aaaaaggtgtttgctacggatcaagtgattatt

SEQ ID NO: 489708 - DNA, 33 bp, Homo sapien
aaaaaggtgtttgctatggatcaagtgattatt

SEQ ID NO: 489709 - DNA, 33 bp, Homo sapien
gagaggtcatgagagaaataagtggtaacatta

SEQ ID NO: 489710 - DNA, 33 bp, Homo sapien
gagaggtcatgagagagataagtggtaacatta

SEQ ID NO: 489711 - DNA, 33 bp, Homo sapien
tgggacattgcctgttcaaatataagccctatt

SEQ ID NO: 489712 - DNA, 33 bp, Homo sapien
tgggacattgcctgttgaaatataagccctatt

SEQ ID NO: 489713 - DNA, 33 bp, Homo sapien
gaaactgtatagcaaacgattagtgaacttgaa

SEQ ID NO: 489714 - DNA, 33 bp, Homo sapien
gaaactgtatagcaaatgattagtgaacttgaa

SEQ ID NO: 489715 - DNA, 33 bp, Homo sapien
tccctctcactgagtactacatttagatcctga

SEQ ID NO: 489716 - DNA, 33 bp, Homo sapien
tccctctcactgagtattacatttagatcctga

SEQ ID NO: 489717 - DNA, 33 bp, Homo sapien
ttcaacatttacttacaacttacgacatgccaa

SEQ ID NO: 489718 - DNA, 33 bp, Homo sapien
ttcaacatttacttacgacttacgacatgccaa

SEQ ID NO: 489719 - DNA, 33 bp, Homo sapien
agaggtgacactaacaaagatcatacaaaacta

SEQ ID NO: 489720 - DNA, 33 bp, Homo sapien
agaggtgacactaacagagatcatacaaaacta

SEQ ID NO: 489721 - DNA, 33 bp, Homo sapien
tgtgttccaaagtgaaacttctcaaattcacag

SEQ ID NO: 489722 - DNA, 33 bp, Homo sapien
tgtgttccaaagtgaaccttctcaaattcacag

SEQ ID NO: 489723 - DNA, 33 bp, Homo sapien
tcaatgtcctgggcaaaacctttggttcttcaa

SEQ ID NO: 489724 - DNA, 33 bp, Homo sapien
tcaatgtcctgggcaagacctttggttcttcaa

SEQ ID NO: 489725 - DNA, 33 bp, Homo sapien
tccacagattgttgggaagagcttcatccagtc

SEQ ID NO: 489726 - DNA, 33 bp, Homo sapien
tccacagattgttgggcagagcttcatccagtc

SEQ ID NO: 489727 - DNA, 33 bp, Homo sapien
atccagtctccttaaactagtcagactgcctgt

SEQ ID NO: 489728 - DNA, 33 bp, Homo sapien
atccagtctccttaaattagtcagactgcctgt

SEQ ID NO: 489729 - DNA, 33 bp, Homo sapien; identical to SEQ ID NO: 489727

SEQ ID NO: 489730 - DNA, 33 bp, Homo sapien; identical to SEQ ID NO: 489728

SEQ ID NO: 489731 - DNA, 33 bp, Homo sapien
ttgatctatccagaccactaaaactttctccat

SEQ ID NO: 489732 - DNA, 33 bp, Homo sapien
ttgatctatccagaccgctaaaactttctccat

SEQ ID NO: 489733 - DNA, 33 bp, Homo sapien
taaaatagtaacatcaaaaatcagtgatcaaag

SEQ ID NO: 489734 - DNA, 33 bp, Homo sapien
taaaatagtaacatcagaaatcagtgatcaaag

SEQ ID NO: 489735 - DNA, 33 bp, Homo sapien
gaaagaatctgatgtcacaggttgggtcagatg

SEQ ID NO: 489736 - DNA, 33 bp, Homo sapien
gaaagaatctgatgtcccaggttgggtcagatg

SEQ ID NO: 489737 - DNA, 33 bp, Homo sapien
aataatgatagtaataagttgtaactcgtggaa

SEQ ID NO: 489738 - DNA, 33 bp, Homo sapien
aataatgatagtaataggttgtaactcgtggaa

SEQ ID NO: 489739 - DNA, 33 bp, Homo sapien
gaatgtggaacttgaactagacttctggaaaag

SEQ ID NO: 489740 - DNA, 33 bp, Homo sapien
gaatgtggaacttgaattagacttctggaaaag

SEQ ID NO: 489741 - DNA, 33 bp, Homo sapien
tttaaaaattcacttacgtacatggaatgtgct

SEQ ID NO: 489742 - DNA, 33 bp, Homo sapien
tttaaaaattcacttatgtacatggaatgtgct

SEQ ID NO: 489743 - DNA, 33 bp, Homo sapien
tatccagaaactaccaagtctctgtgtctccta

SEQ ID NO: 489744 - DNA, 33 bp, Homo sapien
tatccagaaactaccaggtctctgtgtctccta

SEQ ID NO: 489745 - DNA, 33 bp, Homo sapien
atgagatacaacttcaaactcaccagattggcc

SEQ ID NO: 489746 - DNA, 33 bp, Homo sapien
atgagatacaacttcatactcaccagattggcc

SEQ ID NO: 489747 - DNA, 33 bp, Homo sapien
aggtgggactggacaccgaagaaagtgaccaca

SEQ ID NO: 489748 - DNA, 33 bp, Homo sapien
aggtgggactggacactgaagaaagtgaccaca

SEQ ID NO: 489749 - DNA, 33 bp, Homo sapien
gatcaattagagtgtgcaactattatttgcaga

SEQ ID NO: 489750 - DNA, 33 bp, Homo sapien
gatcaattagagtgtggaactattatttgcaga

SEQ ID NO: 489751 - DNA, 33 bp, Homo sapien
aaaatgttcatgtccagtatttaaaccaaatca

SEQ ID NO: 489752 - DNA, 33 bp, Homo sapien
aaaatgttcatgtccattatttaaaccaaatca

SEQ ID NO: 489753 - DNA, 33 bp, Homo sapien
tgaataaagatcaacaaatttgaaatcctgaac

SEQ ID NO: 489754 - DNA, 33 bp, Homo sapien
tgaataaagatcaacagatttgaaatcctgaac

SEQ ID NO: 489755 - DNA, 33 bp, Homo sapien
gctaacgtcactctcactaataacagcggtgtt

SEQ ID NO: 489756 - DNA, 33 bp, Homo sapien
gctaacgtcactctcagtaataacagcggtgtt

SEQ ID NO: 489757 - DNA, 33 bp, Homo sapien
attttcagtgtaaatacatgggctatgaaagaa

SEQ ID NO: 489758 - DNA, 33 bp, Homo sapien
attttcagtgtaaatatatgggctatgaaagaa

SEQ ID NO: 489759 - DNA, 33 bp, Homo sapien
taagtagacaataagaccaattagaatattatg

SEQ ID NO: 489760 - DNA, 33 bp, Homo sapien
taagtagacaataagagcaattagaatattatg

SEQ ID NO: 489761 - DNA, 33 bp, Homo sapien
cacaaatcgaccactcaaacttattttcacaaa

SEQ ID NO: 489762 - DNA, 33 bp, Homo sapien
cacaaatcgaccactcgaacttattttcacaaa

SEQ ID NO: 489763 - DNA, 33 bp, Homo sapien
tctattattataagcaatgctgttgtaactgta

SEQ ID NO: 489764 - DNA, 33 bp, Homo sapien
tctattattataagcagtgctgttgtaactgta

SEQ ID NO: 489765 - DNA, 33 bp, Homo sapien
tattaaaaatagaaaacgagttggaattctgtt

SEQ ID NO: 489766 - DNA, 33 bp, Homo sapien
tattaaaaatagaaaatgagttggaattctgtt

SEQ ID NO: 489767 - DNA, 33 bp, Homo sapien
ttacgggtgccgattacataagaaagagaatat

SEQ ID NO: 489768 - DNA, 33 bp, Homo sapien
ttacgggtgccgattatataagaaagagaatat

SEQ ID NO: 489769 - DNA, 33 bp, Homo sapien
ctcattctagatatcgcacaaatttggcgacaa

SEQ ID NO: 489770 - DNA, 33 bp, Homo sapien
ctcattctagatatcgtacaaatttggcgacaa

SEQ ID NO: 489771 - DNA, 33 bp, Homo sapien
tgatacgaatatgaaacgcagtgaagaaccaat

SEQ ID NO: 489772 - DNA, 33 bp, Homo sapien
tgatacgaatatgaaatgcagtgaagaaccaat

SEQ ID NO: 489773 - DNA, 33 bp, Homo sapien
acaggtgtgatcatcacgaactatagcctcaaa

SEQ ID NO: 489774 - DNA, 33 bp, Homo sapien
acaggtgtgatcatcatgaactatagcctcaaa

SEQ ID NO: 489775 - DNA, 33 bp, Homo sapien
taaaacaacttttgttaaaacgaatggcttgaa

SEQ ID NO: 489776 - DNA, 33 bp, Homo sapien
taaaacaacttttgttgaaacgaatggcttgaa

SEQ ID NO: 489777 - DNA, 33 bp, Homo sapien
gactggacttatcctcagagaccgagactctct

SEQ ID NO: 489778 - DNA, 33 bp, Homo sapien
gactggacttatcctcggagaccgagactctct

SEQ ID NO: 489779 - DNA, 33 bp, Homo sapien
agttgtgtccatagacaattcctggttagatgc

SEQ ID NO: 489780 - DNA, 33 bp, Homo sapien
agttgtgtccatagacgattcctggttagatgc

SEQ ID NO: 489781 - DNA, 33 bp, Homo sapien
gaaaaatcctgcatcaactgtacaaatgtaccc

SEQ ID NO: 489782 - DNA, 33 bp, Homo sapien
gaaaaatcctgcatcagctgtacaaatgtaccc

SEQ ID NO: 489783 - DNA, 33 bp, Homo sapien
tagcatcgattttaccaatacctcatagagtaa

SEQ ID NO: 489784 - DNA, 33 bp, Homo sapien
tagcatcgattttaccgatacctcatagagtaa

SEQ ID NO: 489785 - DNA, 33 bp, Homo sapien
ggcatcgtattccccacatcttttaaatgccta

SEQ ID NO: 489786 - DNA, 33 bp, Homo sapien
ggcatcgtattccccatatcttttaaatgccta

SEQ ID NO: 489787 - DNA, 33 bp, Homo sapien
ccatttctgctcttccactgcaggaaataaaag

SEQ ID NO: 489788 - DNA, 33 bp, Homo sapien
ccatttctgctcttccgctgcaggaaataaaag

SEQ ID NO: 489789 - DNA, 33 bp, Homo sapien
tgctcacttactagtcccaattgttttgtaacc

SEQ ID NO: 489790 - DNA, 33 bp, Homo sapien
tgctcacttactagtcgcaattgttttgtaacc

SEQ ID NO: 489791 - DNA, 33 bp, Homo sapien
tttcatgaaaaccaaaattgagttgttgactat

SEQ ID NO: 489792 - DNA, 33 bp, Homo sapien
tttcatgaaaaccaaacttgagttgttgactat

SEQ ID NO: 489793 - DNA, 33 bp, Homo sapien
aaacatctattaaccgaaagtcatgatccttca

SEQ ID NO: 489794 - DNA, 33 bp, Homo sapien
aaacatctattaaccgtaagtcatgatccttca

SEQ ID NO: 489795 - DNA, 33 bp, Homo sapien
gatattacagatcatgaacaaaactatttcaaa

SEQ ID NO: 489796 - DNA, 33 bp, Homo sapien
gatattacagatcatggacaaaactatttcaaa

SEQ ID NO: 489797 - DNA, 33 bp, Homo sapien
ccagcctatcacaaaaagttctattgcatagta

SEQ ID NO: 489798 - DNA, 33 bp, Homo sapien
ccagcctatcacaaaacgttctattgcatagta

SEQ ID NO: 489799 - DNA, 33 bp, Homo sapien
ggctttggctctctcactctcataagcccatta

SEQ ID NO: 489800 - DNA, 33 bp, Homo sapien
ggctttggctctctcattctcataagcccatta

SEQ ID NO: 489801 - DNA, 33 bp, Homo sapien
tttcctgcaaattgaccgctagatccagaggtt

SEQ ID NO: 489802 - DNA, 33 bp, Homo sapien
tttcctgcaaattgactgctagatccagaggtt

SEQ ID NO: 489803 - DNA, 33 bp, Homo sapien
gtcatttaggtagaaaacaaactaagttcacaa

SEQ ID NO: 489804 - DNA, 33 bp, Homo sapien
gtcatttaggtagaaagcaaactaagttcacaa

SEQ ID NO: 489805 - DNA, 33 bp, Homo sapien
ttatgtcatgtcatggcatttgaaaatgttata

SEQ ID NO: 489806 - DNA, 33 bp, Homo sapien
ttatgtcatgtcatggtatttgaaaatgttata

SEQ ID NO: 489807 - DNA, 33 bp, Homo sapien
aagtcactttggcaaagaatataaacagttcac

SEQ ID NO: 489808 - DNA, 33 bp, Homo sapien
aagtcactttggcaaataatataaacagttcac

SEQ ID NO: 489809 - DNA, 33 bp, Homo sapien
aagtagccacatgatcagatataaaacattccc

SEQ ID NO: 489810 - DNA, 33 bp, Homo sapien
aagtagccacatgatccgatataaaacattccc

SEQ ID NO: 489811 - DNA, 33 bp, Homo sapien
caccaacattctgaacagtaccatttagatgtt

SEQ ID NO: 489812 - DNA, 33 bp, Homo sapien
caccaacattctgaaccgtaccatttagatgtt

SEQ ID NO: 489813 - DNA, 33 bp, Homo sapien
gataattatttactcactgagccatttttatat

SEQ ID NO: 489814 - DNA, 33 bp, Homo sapien
gataattatttactcagtgagccatttttatat

SEQ ID NO: 489815 - DNA, 33 bp, Homo sapien
aagaggtaataaatcaaagccatatgccattgc

SEQ ID NO: 489816 - DNA, 33 bp, Homo sapien
aagaggtaataaatcagagccatatgccattgc

SEQ ID NO: 489817 - DNA, 33 bp, Homo sapien
gcattctgtctaccaaggtaaattctgaatacc

SEQ ID NO: 489818 - DNA, 33 bp, Homo sapien
gcattctgtctaccaatgtaaattctgaatacc

SEQ ID NO: 489819 - DNA, 33 bp, Homo sapien
taatcgcgttctgatacgtttgaccctctctag

SEQ ID NO: 489820 - DNA, 33 bp, Homo sapien
taatcgcgttctgataggtttgaccctctctag

SEQ ID NO: 489821 - DNA, 33 bp, Homo sapien
aatgataaatgtgaaaacaacatactgcctaca

SEQ ID NO: 489822 - DNA, 33 bp, Homo sapien
aatgataaatgtgaaagcaacatactgcctaca

SEQ ID NO: 489823 - DNA, 33 bp, Homo sapien
ccctctaaaaattctccaactcctaatttcctt

SEQ ID NO: 489824 - DNA, 33 bp, Homo sapien
ccctctaaaaattctctaactcctaatttcctt

SEQ ID NO: 489825 - DNA, 33 bp, Homo sapien
ttagcctctagaagcaaaggtttctcagctatg

SEQ ID NO: 489826 - DNA, 33 bp, Homo sapien
ttagcctctagaagcagaggtttctcagctatg

SEQ ID NO: 489827 - DNA, 33 bp, Homo sapien
actcacaaagaaggaactgggctccaaaggact

SEQ ID NO: 489828 - DNA, 33 bp, Homo sapien
actcacaaagaaggaattgggctccaaaggact

SEQ ID NO: 489829 - DNA, 33 bp, Homo sapien
agtttcttgtagagtgcatattagacctttgtc

SEQ ID NO: 489830 - DNA, 33 bp, Homo sapien
agtttcttgtagagtggatattagacctttgtc

SEQ ID NO: 489831 - DNA, 33 bp, Homo sapien
cacagggagaatactacgtgatgatgaaggcag

SEQ ID NO: 489832 - DNA, 33 bp, Homo sapien
cacagggagaatactatgtgatgatgaaggcag

SEQ ID NO: 489833 - DNA, 33 bp, Homo sapien
tcctaatcttgctttacggatttcctcactatg

SEQ ID NO: 489834 - DNA, 33 bp, Homo sapien
tcctaatcttgctttatggatttcctcactatg

SEQ ID NO: 489835 - DNA, 33 bp, Homo sapien
aaatttgaaaattagaaacagtgaggacaaaga

SEQ ID NO: 489836 - DNA, 33 bp, Homo sapien
aaatttgaaaattagacacagtgaggacaaaga

SEQ ID NO: 489837 - DNA, 33 bp, Homo sapien
agctcatctctgaatcacagggtacccaactag

SEQ ID NO: 489838 - DNA, 33 bp, Homo sapien
agctcatctctgaatcgcagggtacccaactag

SEQ ID NO: 489839 - DNA, 33 bp, Homo sapien
gaaggcctttgcaaacccagattggaaacctaa

SEQ ID NO: 489840 - DNA, 33 bp, Homo sapien
gaaggcctttgcaaactcagattggaaacctaa

SEQ ID NO: 489841 - DNA, 33 bp, Homo sapien
tcctctgtttttctcaaatccccagacactagt

SEQ ID NO: 489842 - DNA, 33 bp, Homo sapien
tcctctgtttttctcagatccccagacactagt

SEQ ID NO: 489843 - DNA, 33 bp, Homo sapien
aagacttgcaaggtgaactacatatttccctac

SEQ ID NO: 489844 - DNA, 33 bp, Homo sapien
aagacttgcaaggtgagctacatatttccctac

SEQ ID NO: 489845 - DNA, 33 bp, Homo sapien
caaaaaaagagaaaaacggccatgaaatttggg

SEQ ID NO: 489846 - DNA, 33 bp, Homo sapien
caaaaaaagagaaaaatggccatgaaatttggg

SEQ ID NO: 489847 - DNA, 33 bp, Homo sapien
gcccagcacaggagaaataagaggggccatacc

SEQ ID NO: 489848 - DNA, 33 bp, Homo sapien
gcccagcacaggagaagtaagaggggccatacc

SEQ ID NO: 489849 - DNA, 33 bp, Homo sapien
agtgtcttcagcagatcagagacacagattgtg

SEQ ID NO: 489850 - DNA, 33 bp, Homo sapien
agtgtcttcagcagattagagacacagattgtg

SEQ ID NO: 489851 - DNA, 33 bp, Homo sapien
ccattgtctgatatgaagtaaatgttgataagt

SEQ ID NO: 489852 - DNA, 33 bp, Homo sapien
ccattgtctgatatgaggtaaatgttgataagt

SEQ ID NO: 489853 - DNA, 33 bp, Homo sapien
ttcatatcagacttaacaaatacaggacatcca

SEQ ID NO: 489854 - DNA, 33 bp, Homo sapien
ttcatatcagacttaataaatacaggacatcca

SEQ ID NO: 489855 - DNA, 33 bp, Homo sapien
acattgagcagctaagaagatcccttccaaaat

SEQ ID NO: 489856 - DNA, 33 bp, Homo sapien
acattgagcagctaaggagatcccttccaaaat

SEQ ID NO: 489857 - DNA, 33 bp, Homo sapien
gacatagtcatgagacaatagaagaaaagtgaa

SEQ ID NO: 489858 - DNA, 33 bp, Homo sapien
gacatagtcatgagacgatagaagaaaagtgaa

SEQ ID NO: 489859 - DNA, 33 bp, Homo sapien
aggaaggaacaaagaccctaactgctttaccta

SEQ ID NO: 489860 - DNA, 33 bp, Homo sapien
aggaaggaacaaagactctaactgctttaccta

SEQ ID NO: 489861 - DNA, 33 bp, Homo sapien
gcccgcactctaagagaactgagagaaagcaca

SEQ ID NO: 489862 - DNA, 33 bp, Homo sapien
gcccgcactctaagagcactgagagaaagcaca

SEQ ID NO: 489863 - DNA, 33 bp, Homo sapien
aagagtgagagatatgaagaaagttatggagtt

SEQ ID NO: 489864 - DNA, 33 bp, Homo sapien
aagagtgagagatatgcagaaagttatggagtt

SEQ ID NO: 489865 - DNA, 33 bp, Homo sapien
tgggcattaaactaaactggaggttcagtccca

SEQ ID NO: 489866 - DNA, 33 bp, Homo sapien
tgggcattaaactaaattggaggttcagtccca

SEQ ID NO: 489867 - DNA, 33 bp, Homo sapien
agtcatggaaacaagactcaacaataaactttt

SEQ ID NO: 489868 - DNA, 33 bp, Homo sapien
agtcatggaaacaagattcaacaataaactttt

SEQ ID NO: 489869 - DNA, 33 bp, Homo sapien
atttgcaccttcgaaaatcacctaatgaatgtt

SEQ ID NO: 489870 - DNA, 33 bp, Homo sapien
atttgcaccttcgaaattcacctaatgaatgtt

SEQ ID NO: 489871 - DNA, 33 bp, Homo sapien
tcttgaacagtgtccactccacatcatgggcca

SEQ ID NO: 489872 - DNA, 33 bp, Homo sapien
tcttgaacagtgtccattccacatcatgggcca

SEQ ID NO: 489873 - DNA, 33 bp, Homo sapien
tcttgactgtaagcaaccatgtagacagggtaa

SEQ ID NO: 489874 - DNA, 33 bp, Homo sapien
tcttgactgtaagcaatcatgtagacagggtaa

SEQ ID NO: 489875 - DNA, 33 bp, Homo sapien
taattaacctaactaacctgctgttgattttca

SEQ ID NO: 489876 - DNA, 33 bp, Homo sapien
taattaacctaactaagctgctgttgattttca

SEQ ID NO: 489877 - DNA, 33 bp, Homo sapien
ataatgtccctgatgacaagaactggtgtttaa

SEQ ID NO: 489878 - DNA, 33 bp, Homo sapien
ataatgtccctgatgagaagaactggtgtttaa

SEQ ID NO: 489879 - DNA, 33 bp, Homo sapien
tcctggacctaactacactactgaatgaattgg

SEQ ID NO: 489880 - DNA, 33 bp, Homo sapien
tcctggacctaactacgctactgaatgaattgg

SEQ ID NO: 489881 - DNA, 33 bp, Homo sapien
atatgacagacgtttgaagttgttccaacaaat

SEQ ID NO: 489882 - DNA, 33 bp, Homo sapien
atatgacagacgtttgtagttgttccaacaaat

SEQ ID NO: 489883 - DNA, 33 bp, Homo sapien
aaatgcaagctcgagaagttaagaccaagctag

SEQ ID NO: 489884 - DNA, 33 bp, Homo sapien
aaatgcaagctcgagaggttaagaccaagctag

SEQ ID NO: 489885 - DNA, 33 bp, Homo sapien
tagaaaactccagagaaaacaaagtttggccat

SEQ ID NO: 489886 - DNA, 33 bp, Homo sapien
tagaaaactccagagataacaaagtttggccat

SEQ ID NO: 489887 - DNA, 33 bp, Homo sapien
tgattggaatgcttgaagttgaaacagttaagg

SEQ ID NO: 489888 - DNA, 33 bp, Homo sapien
tgattggaatgcttgaggttgaaacagttaagg

SEQ ID NO: 489889 - DNA, 33 bp, Homo sapien
attcagtctgtttataacctttagcattagata

SEQ ID NO: 489890 - DNA, 33 bp, Homo sapien
attcagtctgtttatagcctttagcattagata

SEQ ID NO: 489891 - DNA, 33 bp, Homo sapien
tcctagattatcaggaaaatcatggctgacctg

SEQ ID NO: 489892 - DNA, 33 bp, Homo sapien
tcctagattatcaggagaatcatggctgacctg

SEQ ID NO: 489893 - DNA, 33 bp, Homo sapien
tcctatccagaaagataagtccattttcagact

SEQ ID NO: 489894 - DNA, 33 bp, Homo sapien
tcctatccagaaagatgagtccattttcagact

SEQ ID NO: 489895 - DNA, 33 bp, Homo sapien
accatgcttatggtaacagggtgatgaatcacg

SEQ ID NO: 489896 - DNA, 33 bp, Homo sapien
accatgcttatggtaatagggtgatgaatcacg

SEQ ID NO: 489897 - DNA, 33 bp, Homo sapien
ttaaggcatgacattacacatttctaacaagct

SEQ ID NO: 489898 - DNA, 33 bp, Homo sapien
ttaaggcatgacattatacatttctaacaagct

SEQ ID NO: 489899 - DNA, 33 bp, Homo sapien
gggtaggggccaggaccatattcaaacatacat

SEQ ID NO: 489900 - DNA, 33 bp, Homo sapien
gggtaggggccaggactatattcaaacatacat

SEQ ID NO: 489901 - DNA, 33 bp, Homo sapien
tatttttcagtgtaaaacttgataggctgagaa

SEQ ID NO: 489902 - DNA, 33 bp, Homo sapien
tatttttcagtgtaaatcttgataggctgagaa

SEQ ID NO: 489903 - DNA, 33 bp, Homo sapien
agagcattagtttccaataaaccaacctatcac

SEQ ID NO: 489904 - DNA, 33 bp, Homo sapien
agagcattagtttccagtaaaccaacctatcac

SEQ ID NO: 489905 - DNA, 33 bp, Homo sapien
ggagataaaatgatgaggttattcttatacatg

SEQ ID NO: 489906 - DNA, 33 bp, Homo sapien
ggagataaaatgatgatgttattcttatacatg

SEQ ID NO: 489907 - DNA, 33 bp, Homo sapien
aggggtgatggaatttcaaataagtacggttca

SEQ ID NO: 489908 - DNA, 33 bp, Homo sapien
aggggtgatggaatttgaaataagtacggttca

SEQ ID NO: 489909 - DNA, 33 bp, Homo sapien
gatcgcaccgcagcccaaggtaccagtttcggg

SEQ ID NO: 489910 - DNA, 33 bp, Homo sapien
gatcgcaccgcagcccgaggtaccagtttcggg

SEQ ID NO: 489911 - DNA, 33 bp, Homo sapien
ttgttatctgggaagagcccacaatttttgagg

SEQ ID NO: 489912 - DNA, 33 bp, Homo sapien
ttgttatctgggaagatcccacaatttttgagg

SEQ ID NO: 489913 - DNA, 33 bp, Homo sapien
caggctcagagtctcagtctacaggcctcagct

SEQ ID NO: 489914 - DNA, 33 bp, Homo sapien
caggctcagagtctcattctacaggcctcagct

SEQ ID NO: 489915 - DNA, 33 bp, Homo sapien
agaaacttaacttcacagagactggacctaaag

SEQ ID NO: 489916 - DNA, 33 bp, Homo sapien
agaaacttaacttcacggagactggacctaaag

SEQ ID NO: 489917 - DNA, 33 bp, Homo sapien
tcaagctaatcttcaaattagagctgaagagag

SEQ ID NO: 489918 - DNA, 33 bp, Homo sapien
tcaagctaatcttcaagttagagctgaagagag

SEQ ID NO: 489919 - DNA, 33 bp, Homo sapien
gacacggaagtgcaccgcagctggctctaaaca

SEQ ID NO: 489920 - DNA, 33 bp, Homo sapien
gacacggaagtgcacctcagctggctctaaaca

SEQ ID NO: 489921 - DNA, 33 bp, Homo sapien
agaagtcatatgaagacaaacttcggacaaggc

SEQ ID NO: 489922 - DNA, 33 bp, Homo sapien
agaagtcatatgaagagaaacttcggacaaggc

SEQ ID NO: 489923 - DNA, 33 bp, Homo sapien
ttgaaaaatcaaaccactggtgatatgctaaaa

SEQ ID NO: 489924 - DNA, 33 bp, Homo sapien
ttgaaaaatcaaaccagtggtgatatgctaaaa

SEQ ID NO: 489925 - DNA, 33 bp, Homo sapien
tgtaagactgcattctgaatttcacaaggcagg

SEQ ID NO: 489926 - DNA, 33 bp, Homo sapien
tgtaagactgcattcttaatttcacaaggcagg

SEQ ID NO: 489927 - DNA, 33 bp, Homo sapien
cctttgttcttctgtgaacttctggaggaacaa

SEQ ID NO: 489928 - DNA, 33 bp, Homo sapien
cctttgttcttctgtgcacttctggaggaacaa

SEQ ID NO: 489929 - DNA, 33 bp, Homo sapien
ggtatggctaagccacaagctggaacaggaacc

SEQ ID NO: 489930 - DNA, 33 bp, Homo sapien
ggtatggctaagccacgagctggaacaggaacc

SEQ ID NO: 489931 - DNA, 33 bp, Homo sapien
tctaaaccaagagggaaactggtgtaaagtctt

SEQ ID NO: 489932 - DNA, 33 bp, Homo sapien
tctaaaccaagagggacactggtgtaaagtctt

SEQ ID NO: 489933 - DNA, 33 bp, Homo sapien
ctcgattcaacttggcaatgtgaagagcctgga

SEQ ID NO: 489934 - DNA, 33 bp, Homo sapien
ctcgattcaacttggccatgtgaagagcctgga

SEQ ID NO: 489935 - DNA, 33 bp, Homo sapien
caaatgacaaaccacaatgtaatttctcacacg

SEQ ID NO: 489936 - DNA, 33 bp, Homo sapien
caaatgacaaaccacagtgtaatttctcacacg

SEQ ID NO: 489937 - DNA, 33 bp, Homo sapien
gctgcgttggaaggaccgtaaagaaatttgtga

SEQ ID NO: 489938 - DNA, 33 bp, Homo sapien
gctgcgttggaaggactgtaaagaaatttgtga

SEQ ID NO: 489939 - DNA, 33 bp, Homo sapien
ccaaaatggagaaaaaaaccacaggatggcttt

SEQ ID NO: 489940 - DNA, 33 bp, Homo sapien
ccaaaatggagaaaaacaccacaggatggcttt

SEQ ID NO: 489941 - DNA, 33 bp, Homo sapien
atgtctggtaattcccaaaagatctgattattt

SEQ ID NO: 489942 - DNA, 33 bp, Homo sapien
atgtctggtaattcccgaaagatctgattattt

SEQ ID NO: 489943 - DNA, 33 bp, Homo sapien
ccaggacctacctctagattttgattcagtagg

SEQ ID NO: 489944 - DNA, 33 bp, Homo sapien
ccaggacctacctctatattttgattcagtagg

SEQ ID NO: 489945 - DNA, 33 bp, Homo sapien
acatctgaaagttcacaaggttatgacccctct

SEQ ID NO: 489946 - DNA, 33 bp, Homo sapien
acatctgaaagttcacgaggttatgacccctct

SEQ ID NO: 489947 - DNA, 33 bp, Homo sapien
atacactcacattttacggtttgatctcacatt

SEQ ID NO: 489948 - DNA, 33 bp, Homo sapien
atacactcacattttatggtttgatctcacatt

SEQ ID NO: 489949 - DNA, 33 bp, Homo sapien
ttgattttctttgtagcatttttttgctagttg

SEQ ID NO: 489950 - DNA, 33 bp, Homo sapien
ttgattttctttgtaggatttttttgctagttg

SEQ ID NO: 489951 - DNA, 33 bp, Homo sapien
cagtgtaagggaattcagaatagtatgccctat

SEQ ID NO: 489952 - DNA, 33 bp, Homo sapien
cagtgtaagggaattcggaatagtatgccctat

SEQ ID NO: 489953 - DNA, 33 bp, Homo sapien
cggctgtacaatgaggacaatactgcttcagct

SEQ ID NO: 489954 - DNA, 33 bp, Homo sapien
cggctgtacaatgaggtcaatactgcttcagct

SEQ ID NO: 489955 - DNA, 33 bp, Homo sapien
ttagagtattttggagcaaatctctgcagcttc

SEQ ID NO: 489956 - DNA, 33 bp, Homo sapien
ttagagtattttggaggaaatctctgcagcttc

SEQ ID NO: 489957 - DNA, 33 bp, Homo sapien
caggccccagtgccaaataagtgataagtgctc

SEQ ID NO: 489958 - DNA, 33 bp, Homo sapien
caggccccagtgccaagtaagtgataagtgctc

SEQ ID NO: 489959 - DNA, 33 bp, Homo sapien
aattctcgtcactactcagaatggttttacttt

SEQ ID NO: 489960 - DNA, 33 bp, Homo sapien
aattctcgtcactacttagaatggttttacttt

SEQ ID NO: 489961 - DNA, 33 bp, Homo sapien
taagtgcaagatcccaagtcttctaacccaaat

SEQ ID NO: 489962 - DNA, 33 bp, Homo sapien
taagtgcaagatcccaggtcttctaacccaaat

SEQ ID NO: 489963 - DNA, 33 bp, Homo sapien
tagatggtaacactgactcaccatggcctatgt

SEQ ID NO: 489964 - DNA, 33 bp, Homo sapien
tagatggtaacactgattcaccatggcctatgt

SEQ ID NO: 489965 - DNA, 33 bp, Homo sapien
gaatagacaaaaacataaaaaatggaagtggct

SEQ ID NO: 489966 - DNA, 33 bp, Homo sapien
gaatagacaaaaacatgaaaaatggaagtggct

SEQ ID NO: 489967 - DNA, 33 bp, Homo sapien
tcaaaggagtagggtacgctatgcatggtgatg

SEQ ID NO: 489968 - DNA, 33 bp, Homo sapien
tcaaaggagtagggtaggctatgcatggtgatg

SEQ ID NO: 489969 - DNA, 33 bp, Homo sapien
tcctggggtttgtgaccgctgaaaattactcag

SEQ ID NO: 489970 - DNA, 33 bp, Homo sapien
tcctggggtttgtgactgctgaaaattactcag

SEQ ID NO: 489971 - DNA, 33 bp, Homo sapien
agctgcttcactgggaaaactttttttaatgct

SEQ ID NO: 489972 - DNA, 33 bp, Homo sapien
agctgcttcactgggagaactttttttaatgct

SEQ ID NO: 489973 - DNA, 33 bp, Homo sapien
atttgatgttttcatacatagtaacaataagga

SEQ ID NO: 489974 - DNA, 33 bp, Homo sapien
atttgatgttttcatagatagtaacaataagga

SEQ ID NO: 489975 - DNA, 33 bp, Homo sapien
tactgaatcagaattaagggtcagcaggagctg

SEQ ID NO: 489976 - DNA, 33 bp, Homo sapien
tactgaatcagaattaggggtcagcaggagctg

SEQ ID NO: 489977 - DNA, 33 bp, Homo sapien
ttaaaggacctcttacaaggaactttgctatgc

SEQ ID NO: 489978 - DNA, 33 bp, Homo sapien
ttaaaggacctcttaccaggaactttgctatgc

SEQ ID NO: 489979 - DNA, 33 bp, Homo sapien
ccaacaacctggctcaagacatccaccagcaag

SEQ ID NO: 489980 - DNA, 33 bp, Homo sapien
ccaacaacctggctcaggacatccaccagcaag

SEQ ID NO: 489981 - DNA, 33 bp, Homo sapien
ctgaagcagctactcaagaacatcctggttacc

SEQ ID NO: 489982 - DNA, 33 bp, Homo sapien
ctgaagcagctactcaggaacatcctggttacc

SEQ ID NO: 489983 - DNA, 33 bp, Homo sapien
ttaaattgctcatgtaactggaagtctagaaga

SEQ ID NO: 489984 - DNA, 33 bp, Homo sapien
ttaaattgctcatgtacctggaagtctagaaga

SEQ ID NO: 489985 - DNA, 33 bp, Homo sapien
cttccttccccactgacgctagattccatacgc

SEQ ID NO: 489986 - DNA, 33 bp, Homo sapien
cttccttccccactgatgctagattccatacgc

SEQ ID NO: 489987 - DNA, 33 bp, Homo sapien
atccacccttgttcttgaaatattaccggcaca

SEQ ID NO: 489988 - DNA, 33 bp, Homo sapien
atccacccttgttctttaaatattaccggcaca

SEQ ID NO: 489989 - DNA, 33 bp, Homo sapien
tgaactctgatttccaacgaatacttagaaaag

SEQ ID NO: 489990 - DNA, 33 bp, Homo sapien
tgaactctgatttccagcgaatacttagaaaag

SEQ ID NO: 489991 - DNA, 33 bp, Homo sapien
agatatgtaagtaacacagtgacctaactgacc

SEQ ID NO: 489992 - DNA, 33 bp, Homo sapien
agatatgtaagtaacatagtgacctaactgacc

SEQ ID NO: 489993 - DNA, 33 bp, Homo sapien
ttccaaattattctacaagaccaaaagcagaag

SEQ ID NO: 489994 - DNA, 33 bp, Homo sapien
ttccaaattattctacgagaccaaaagcagaag

SEQ ID NO: 489995 - DNA, 33 bp, Homo sapien
aaaaaactagatatgacgacaaacagcttgttc

SEQ ID NO: 489996 - DNA, 33 bp, Homo sapien
aaaaaactagatatgaggacaaacagcttgttc

SEQ ID NO: 489997 - DNA, 33 bp, Homo sapien
gtccatggagcctacaactataaaattcactct

SEQ ID NO: 489998 - DNA, 33 bp, Homo sapien
gtccatggagcctacacctataaaattcactct

SEQ ID NO: 489999 - DNA, 33 bp, Homo sapien
agtgtggatggatagagtatcatgggtgtccaa

SEQ ID NO: 490000 - DNA, 33 bp, Homo sapien
agtgtggatggatagattatcatgggtgtccaa

SEQ ID NO: 490001 - DNA, 33 bp, Homo sapien
aaaacatacatgtgctaaaactaaaggtgaccc

SEQ ID NO: 490002 - DNA, 33 bp, Homo sapien
aaaacatacatgtgctgaaactaaaggtgaccc

SEQ ID NO: 490003 - DNA, 33 bp, Homo sapien
ggctgcagtgaagactaaaggacaattgcacct

SEQ ID NO: 490004 - DNA, 33 bp, Homo sapien
ggctgcagtgaagactgaaggacaattgcacct

SEQ ID NO: 490005 - DNA, 33 bp, Homo sapien
gatgctgacatacaggccaagagtttggggaag

SEQ ID NO: 490006 - DNA, 33 bp, Homo sapien
gatgctgacatacaggtcaagagtttggggaag

SEQ ID NO: 490007 - DNA, 33 bp, Homo sapien
ccaggggaacccatccaaaagagaggtggagga

SEQ ID NO: 490008 - DNA, 33 bp, Homo sapien
ccaggggaacccatcccaaagagaggtggagga

SEQ ID NO: 490009 - DNA, 33 bp, Homo sapien
ggagagcccgggtctcacgcaaaggagctccag

SEQ ID NO: 490010 - DNA, 33 bp, Homo sapien
ggagagcccgggtctcgcgcaaaggagctccag

SEQ ID NO: 490011 - DNA, 33 bp, Homo sapien
actttgcaaatgagaccgctgacttccagagag

SEQ ID NO: 490012 - DNA, 33 bp, Homo sapien
actttgcaaatgagactgctgacttccagagag

SEQ ID NO: 490013 - DNA, 33 bp, Homo sapien
tgtctctaccttcaaaatacatccaggttttga

SEQ ID NO: 490014 - DNA, 33 bp, Homo sapien
tgtctctaccttcaaagtacatccaggttttga

SEQ ID NO: 490015 - DNA, 33 bp, Homo sapien
gcccaggaacctggacaaccactcaactagaga

SEQ ID NO: 490016 - DNA, 33 bp, Homo sapien
gcccaggaacctggactaccactcaactagaga

SEQ ID NO: 490017 - DNA, 33 bp, Homo sapien
agagccctctttctaaacatctcacttcttgga

SEQ ID NO: 490018 - DNA, 33 bp, Homo sapien
agagccctctttctaatcatctcacttcttgga

SEQ ID NO: 490019 - DNA, 33 bp, Homo sapien
tttaaaacccattttagcaatagttggagaatg

SEQ ID NO: 490020 - DNA, 33 bp, Homo sapien
tttaaaacccattttatcaatagttggagaatg

SEQ ID NO: 490021 - DNA, 33 bp, Homo sapien
tcgtggcttgctctaccccgaatgcctaaaact

SEQ ID NO: 490022 - DNA, 33 bp, Homo sapien
tcgtggcttgctctactccgaatgcctaaaact

SEQ ID NO: 490023 - DNA, 33 bp, Homo sapien
gtaatgaattcaaccaaaggagagagtaagcct

SEQ ID NO: 490024 - DNA, 33 bp, Homo sapien
gtaatgaattcaaccacaggagagagtaagcct

SEQ ID NO: 490025 - DNA, 33 bp, Homo sapien
cagctttacggcaatgaaaaacaattttataaa

SEQ ID NO: 490026 - DNA, 33 bp, Homo sapien
cagctttacggcaatggaaaacaattttataaa

SEQ ID NO: 490027 - DNA, 33 bp, Homo sapien
tatgttgataaacataaaagccacagtgttaac

SEQ ID NO: 490028 - DNA, 33 bp, Homo sapien
tatgttgataaacatagaagccacagtgttaac

SEQ ID NO: 490029 - DNA, 33 bp, Homo sapien
cttacatagttctccacgttgcttagtaagatg

SEQ ID NO: 490030 - DNA, 33 bp, Homo sapien
cttacatagttctccatgttgcttagtaagatg

SEQ ID NO: 490031 - DNA, 33 bp, Homo sapien
ctaccttctccatttcactgaagagccttactc

SEQ ID NO: 490032 - DNA, 33 bp, Homo sapien
ctaccttctccatttctctgaagagccttactc

SEQ ID NO: 490033 - DNA, 33 bp, Homo sapien
tactactcacatccatcagtcttatcagttcat

SEQ ID NO: 490034 - DNA, 33 bp, Homo sapien
tactactcacatccatgagtcttatcagttcat

SEQ ID NO: 490035 - DNA, 33 bp, Homo sapien
atacagtgtaagggaacgtaagatcaatcattt

SEQ ID NO: 490036 - DNA, 33 bp, Homo sapien
atacagtgtaagggaaggtaagatcaatcattt

SEQ ID NO: 490037 - DNA, 33 bp, Homo sapien
ctgctttaccaacttacgttatctgaccattgt

SEQ ID NO: 490038 - DNA, 33 bp, Homo sapien
ctgctttaccaacttatgttatctgaccattgt

SEQ ID NO: 490039 - DNA, 33 bp, Homo sapien
tattgaatagttggaacgcaaaggaaagatggg

SEQ ID NO: 490040 - DNA, 33 bp, Homo sapien
tattgaatagttggaaggcaaaggaaagatggg

SEQ ID NO: 490041 - DNA, 33 bp, Homo sapien
gcatgattctttgcaaatgaacttttaaattgt

SEQ ID NO: 490042 - DNA, 33 bp, Homo sapien
gcatgattctttgcaagtgaacttttaaattgt

SEQ ID NO: 490043 - DNA, 33 bp, Homo sapien
tcaggcttctgaaatccgagaaccaatggcttg

SEQ ID NO: 490044 - DNA, 33 bp, Homo sapien
tcaggcttctgaaatctgagaaccaatggcttg

SEQ ID NO: 490045 - DNA, 33 bp, Homo sapien
ccggctgttttgactacgcttcaatatggttct

SEQ ID NO: 490046 - DNA, 33 bp, Homo sapien
ccggctgttttgactatgcttcaatatggttct

SEQ ID NO: 490047 - DNA, 33 bp, Homo sapien
ctaacagtgtcccttacagaaatcagtgaaaca

SEQ ID NO: 490048 - DNA, 33 bp, Homo sapien
ctaacagtgtcccttatagaaatcagtgaaaca

SEQ ID NO: 490049 - DNA, 33 bp, Homo sapien
cttcctgcattttacacaatttcttctggtccc

SEQ ID NO: 490050 - DNA, 33 bp, Homo sapien
cttcctgcattttacataatttcttctggtccc

SEQ ID NO: 490051 - DNA, 33 bp, Homo sapien
gtaaacactcaggtaaaggaagatgaatacata

SEQ ID NO: 490052 - DNA, 33 bp, Homo sapien
gtaaacactcaggtaacggaagatgaatacata

SEQ ID NO: 490053 - DNA, 33 bp, Homo sapien
taattcccagaaataaactttactttggtctga

SEQ ID NO: 490054 - DNA, 33 bp, Homo sapien
taattcccagaaataatctttactttggtctga

SEQ ID NO: 490055 - DNA, 33 bp, Homo sapien
aagagacaactgtatccaaagtctttcaaatgt

SEQ ID NO: 490056 - DNA, 33 bp, Homo sapien
aagagacaactgtatctaaagtctttcaaatgt

SEQ ID NO: 490057 - DNA, 33 bp, Homo sapien
cttctctttccaacccactctggtcttcttgtt

SEQ ID NO: 490058 - DNA, 33 bp, Homo sapien
cttctctttccaacccgctctggtcttcttgtt

SEQ ID NO: 490059 - DNA, 33 bp, Homo sapien
acaggaagaagtgtcaaggatgatttctaagtt

SEQ ID NO: 490060 - DNA, 33 bp, Homo sapien
acaggaagaagtgtcagggatgatttctaagtt

SEQ ID NO: 490061 - DNA, 33 bp, Homo sapien
cagtaaattcccagaacatctgatgcactccta

SEQ ID NO: 490062 - DNA, 33 bp, Homo sapien
cagtaaattcccagaatatctgatgcactccta

SEQ ID NO: 490063 - DNA, 33 bp, Homo sapien
agctagagtgcaaactgaggaggccattcttgg

SEQ ID NO: 490064 - DNA, 33 bp, Homo sapien
agctagagtgcaaacttaggaggccattcttgg

SEQ ID NO: 490065 - DNA, 33 bp, Homo sapien
caagaccagcccaatacacagctagagtgcaaa

SEQ ID NO: 490066 - DNA, 33 bp, Homo sapien
caagaccagcccaatatacagctagagtgcaaa

SEQ ID NO: 490067 - DNA, 33 bp, Homo sapien
aagatgagtgggatgacgtagacacttgagcag

SEQ ID NO: 490068 - DNA, 33 bp, Homo sapien
aagatgagtgggatgatgtagacacttgagcag

SEQ ID NO: 490069 - DNA, 33 bp, Homo sapien
tctagtctgcatacaaacaccagagtcatcctg

SEQ ID NO: 490070 - DNA, 33 bp, Homo sapien
tctagtctgcatacaaccaccagagtcatcctg

SEQ ID NO: 490071 - DNA, 33 bp, Homo sapien
cactgattttaacaaaattggtgctgttaatac

SEQ ID NO: 490072 - DNA, 33 bp, Homo sapien
cactgattttaacaaagttggtgctgttaatac

SEQ ID NO: 490073 - DNA, 33 bp, Homo sapien
ttaatacaggttatttcccatggagcaaaattg

SEQ ID NO: 490074 - DNA, 33 bp, Homo sapien
ttaatacaggttattttccatggagcaaaattg

SEQ ID NO: 490075 - DNA, 33 bp, Homo sapien
accatcaaattctatgaaactcaaaagtgctag

SEQ ID NO: 490076 - DNA, 33 bp, Homo sapien
accatcaaattctatggaactcaaaagtgctag

SEQ ID NO: 490077 - DNA, 33 bp, Homo sapien
cttataatggattaaaaagccaaggttcaaaaa

SEQ ID NO: 490078 - DNA, 33 bp, Homo sapien
cttataatggattaaagagccaaggttcaaaaa

SEQ ID NO: 490079 - DNA, 33 bp, Homo sapien
gccatttcttagtcaacgagagtgagatgctta

SEQ ID NO: 490080 - DNA, 33 bp, Homo sapien
gccatttcttagtcaatgagagtgagatgctta

SEQ ID NO: 490081 - DNA, 33 bp, Homo sapien
tagagagagtgttaaaaaacaatgaggtggagg

SEQ ID NO: 490082 - DNA, 33 bp, Homo sapien
tagagagagtgttaaagaacaatgaggtggagg

SEQ ID NO: 490083 - DNA, 33 bp, Homo sapien
gtggcactaaaatgatcagaggaaatgagaggg

SEQ ID NO: 490084 - DNA, 33 bp, Homo sapien
gtggcactaaaatgattagaggaaatgagaggg

SEQ ID NO: 490085 - DNA, 33 bp, Homo sapien
gtgtgtaggggtgtaaacagggttgtgaaatgg

SEQ ID NO: 490086 - DNA, 33 bp, Homo sapien
gtgtgtaggggtgtaaccagggttgtgaaatgg

SEQ ID NO: 490087 - DNA, 33 bp, Homo sapien
aacatattcgtctctgcaaatggttacagctat

SEQ ID NO: 490088 - DNA, 33 bp, Homo sapien
aacatattcgtctctggaaatggttacagctat

SEQ ID NO: 490089 - DNA, 33 bp, Homo sapien
cagtggtcactaaatacgttgtgtttgtctgtg

SEQ ID NO: 490090 - DNA, 33 bp, Homo sapien
cagtggtcactaaatatgttgtgtttgtctgtg

SEQ ID NO: 490091 - DNA, 33 bp, Homo sapien
gcatgagcattttgggaaactgacactaaaagc

SEQ ID NO: 490092 - DNA, 33 bp, Homo sapien
gcatgagcattttggggaactgacactaaaagc

SEQ ID NO: 490093 - DNA, 33 bp, Homo sapien
tcaggtctcaatgcctcaacctgtttatttgac

SEQ ID NO: 490094 - DNA, 33 bp, Homo sapien
tcaggtctcaatgccttaacctgtttatttgac

SEQ ID NO: 490095 - DNA, 33 bp, Homo sapien
ttcagtaaaggtaattaaatctgaagtgggaat

SEQ ID NO: 490096 - DNA, 33 bp, Homo sapien
ttcagtaaaggtaattgaatctgaagtgggaat

SEQ ID NO: 490097 - DNA, 33 bp, Homo sapien
tcatgactttaaattgaacagagtgaacatttc

SEQ ID NO: 490098 - DNA, 33 bp, Homo sapien
tcatgactttaaattggacagagtgaacatttc

SEQ ID NO: 490099 - DNA, 33 bp, Homo sapien
aaataaagagtgtatacgaggaaaattatctgg

SEQ ID NO: 490100 - DNA, 33 bp, Homo sapien
aaataaagagtgtatatgaggaaaattatctgg

SEQ ID NO: 490101 - DNA, 33 bp, Homo sapien
tcactttgttgcactgaaagagttcaattatac

SEQ ID NO: 490102 - DNA, 33 bp, Homo sapien
tcactttgttgcactgcaagagttcaattatac

SEQ ID NO: 490103 - DNA, 33 bp, Homo sapien
ctctaagaaatggctaagaaagatcatgtttta

SEQ ID NO: 490104 - DNA, 33 bp, Homo sapien
ctctaagaaatggctaggaaagatcatgtttta

SEQ ID NO: 490105 - DNA, 33 bp, Homo sapien
agcgagtgcctgtctcaaaaaaagaaaaagaaa

SEQ ID NO: 490106 - DNA, 33 bp, Homo sapien
agcgagtgcctgtctcgaaaaaagaaaaagaaa

SEQ ID NO: 490107 - DNA, 33 bp, Homo sapien
aaatgagtgtgataaaagcttgtggatttctct

SEQ ID NO: 490108 - DNA, 33 bp, Homo sapien
aaatgagtgtgataaaggcttgtggatttctct

SEQ ID NO: 490109 - DNA, 33 bp, Homo sapien
gatgtcaaccagaaaaactaaagaaaggcctca

SEQ ID NO: 490110 - DNA, 33 bp, Homo sapien
gatgtcaaccagaaaatctaaagaaaggcctca

SEQ ID NO: 490111 - DNA, 33 bp, Homo sapien
ggaaagggactgcatacggcttcataggttggg

SEQ ID NO: 490112 - DNA, 33 bp, Homo sapien
ggaaagggactgcatatggcttcataggttggg

SEQ ID NO: 490113 - DNA, 33 bp, Homo sapien
tcatgctattaaccagcatagaaaataccgggg

SEQ ID NO: 490114 - DNA, 33 bp, Homo sapien
tcatgctattaaccaggatagaaaataccgggg

SEQ ID NO: 490115 - DNA, 33 bp, Homo sapien
aagcttcagccctcaaatggtctaagtataaag

SEQ ID NO: 490116 - DNA, 33 bp, Homo sapien
aagcttcagccctcaagtggtctaagtataaag

SEQ ID NO: 490117 - DNA, 33 bp, Homo sapien
cgatctgcttttaccacgtgagtttcacaactc

SEQ ID NO: 490118 - DNA, 33 bp, Homo sapien
cgatctgcttttaccatgtgagtttcacaactc

SEQ ID NO: 490119 - DNA, 33 bp, Homo sapien
gtgctccgaacaaagaagaatttgacgcatgca

SEQ ID NO: 490120 - DNA, 33 bp, Homo sapien
gtgctccgaacaaagaggaatttgacgcatgca

SEQ ID NO: 490121 - DNA, 33 bp, Homo sapien
tgctgatgttgttcaaataatcagatattctga

SEQ ID NO: 490122 - DNA, 33 bp, Homo sapien
tgctgatgttgttcaagtaatcagatattctga

SEQ ID NO: 490123 - DNA, 33 bp, Homo sapien
taaggctatgttaccaagttttctcatctggat

SEQ ID NO: 490124 - DNA, 33 bp, Homo sapien
taaggctatgttaccatgttttctcatctggat

SEQ ID NO: 490125 - DNA, 33 bp, Homo sapien
cagttctgatttcttaacgaaagatttcaatcc

SEQ ID NO: 490126 - DNA, 33 bp, Homo sapien
cagttctgatttcttaccgaaagatttcaatcc

SEQ ID NO: 490127 - DNA, 33 bp, Homo sapien
ggaaataggtagctgtaaatccaaagagagcag

SEQ ID NO: 490128 - DNA, 33 bp, Homo sapien
ggaaataggtagctgtgaatccaaagagagcag

SEQ ID NO: 490129 - DNA, 33 bp, Homo sapien
agtagtgagaagataacaaatgcctagagggag

SEQ ID NO: 490130 - DNA, 33 bp, Homo sapien
agtagtgagaagataataaatgcctagagggag

SEQ ID NO: 490131 - DNA, 33 bp, Homo sapien
agtcctttcttggggccgataaacaatgaaatt

SEQ ID NO: 490132 - DNA, 33 bp, Homo sapien
agtcctttcttggggctgataaacaatgaaatt

SEQ ID NO: 490133 - DNA, 33 bp, Homo sapien
agtaggatttctgtcaaggaaagttccaataca

SEQ ID NO: 490134 - DNA, 33 bp, Homo sapien
agtaggatttctgtcagggaaagttccaataca

SEQ ID NO: 490135 - DNA, 33 bp, Homo sapien
aaaaaaattagtaccaatcatcaaattattcac

SEQ ID NO: 490136 - DNA, 33 bp, Homo sapien
aaaaaaattagtaccagtcatcaaattattcac

SEQ ID NO: 490137 - DNA, 33 bp, Homo sapien
tgtaacttgcgtagtcccttcttcctattcctg

SEQ ID NO: 490138 - DNA, 33 bp, Homo sapien
tgtaacttgcgtagtctcttcttcctattcctg

SEQ ID NO: 490139 - DNA, 33 bp, Homo sapien
ggcttatagattctaaatatggaagcagggcac

SEQ ID NO: 490140 - DNA, 33 bp, Homo sapien
ggcttatagattctaagtatggaagcagggcac

SEQ ID NO: 490141 - DNA, 33 bp, Homo sapien
catgtctgagtcaacagaaagctgagctggagt

SEQ ID NO: 490142 - DNA, 33 bp, Homo sapien
catgtctgagtcaacataaagctgagctggagt

SEQ ID NO: 490143 - DNA, 33 bp, Homo sapien
tgaaatacctcctgacagaatctctcaacttac

SEQ ID NO: 490144 - DNA, 33 bp, Homo sapien
tgaaatacctcctgacggaatctctcaacttac

SEQ ID NO: 490145 - DNA, 33 bp, Homo sapien
aatactattcatttaaagagatctatcaatggc

SEQ ID NO: 490146 - DNA, 33 bp, Homo sapien
aatactattcatttaaggagatctatcaatggc

SEQ ID NO: 490147 - DNA, 33 bp, Homo sapien
atgggatgaactgtcgaaagaacaccaagagta

SEQ ID NO: 490148 - DNA, 33 bp, Homo sapien
atgggatgaactgtcggaagaacaccaagagta

SEQ ID NO: 490149 - DNA, 33 bp, Homo sapien
tagcatttctatacacaaacaaaatccaagtga

SEQ ID NO: 490150 - DNA, 33 bp, Homo sapien
tagcatttctatacaccaacaaaatccaagtga

SEQ ID NO: 490151 - DNA, 33 bp, Homo sapien
ggatatcccagttctcacaactttaggtggctt

SEQ ID NO: 490152 - DNA, 33 bp, Homo sapien
ggatatcccagttctcccaactttaggtggctt

SEQ ID NO: 490153 - DNA, 33 bp, Homo sapien
ccagagagaatttggaactatttgtggcctcta

SEQ ID NO: 490154 - DNA, 33 bp, Homo sapien
ccagagagaatttggagctatttgtggcctcta

SEQ ID NO: 490155 - DNA, 33 bp, Homo sapien
tgtcttatctgagtcactccaatgtaatcacaa

SEQ ID NO: 490156 - DNA, 33 bp, Homo sapien
tgtcttatctgagtcagtccaatgtaatcacaa

SEQ ID NO: 490157 - DNA, 33 bp, Homo sapien
gtagctatctctttccggcaagctaatgatctt

SEQ ID NO: 490158 - DNA, 33 bp, Homo sapien
gtagctatctctttcctgcaagctaatgatctt

SEQ ID NO: 490159 - DNA, 33 bp, Homo sapien
catgtcctgggtcacaatacccacactccattt

SEQ ID NO: 490160 - DNA, 33 bp, Homo sapien
catgtcctgggtcacactacccacactccattt

SEQ ID NO: 490161 - DNA, 33 bp, Homo sapien
gacaccttgctactcaaaatagtccgccgtttg

SEQ ID NO: 490162 - DNA, 33 bp, Homo sapien
gacaccttgctactcacaatagtccgccgtttg

SEQ ID NO: 490163 - DNA, 33 bp, Homo sapien
tgattcaaggaaaacaactataaaatgacattt

SEQ ID NO: 490164 - DNA, 33 bp, Homo sapien
tgattcaaggaaaacatctataaaatgacattt

SEQ ID NO: 490165 - DNA, 33 bp, Homo sapien
ttaagggcagttgacagtcaatggccaacctgt

SEQ ID NO: 490166 - DNA, 33 bp, Homo sapien
ttaagggcagttgacattcaatggccaacctgt

SEQ ID NO: 490167 - DNA, 33 bp, Homo sapien
ctagtgccctaaccctcagcctaaatagtacag

SEQ ID NO: 490168 - DNA, 33 bp, Homo sapien
ctagtgccctaaccctgagcctaaatagtacag

SEQ ID NO: 490169 - DNA, 33 bp, Homo sapien
tgtataattgtactgcaaaatagtttgttccag

SEQ ID NO: 490170 - DNA, 33 bp, Homo sapien
tgtataattgtactgctaaatagtttgttccag

SEQ ID NO: 490171 - DNA, 33 bp, Homo sapien
ttgttgaaatgctctacgatagtgagttcgtga

SEQ ID NO: 490172 - DNA, 33 bp, Homo sapien
ttgttgaaatgctctatgatagtgagttcgtga

SEQ ID NO: 490173 - DNA, 33 bp, Homo sapien
acacaaaagaagatacaggcaataaataaacag

SEQ ID NO: 490174 - DNA, 33 bp, Homo sapien
acacaaaagaagatacgggcaataaataaacag

SEQ ID NO: 490175 - DNA, 33 bp, Homo sapien
aatctatgaatactggccaaccacatacgagct

SEQ ID NO: 490176 - DNA, 33 bp, Homo sapien
aatctatgaatactggtcaaccacatacgagct

SEQ ID NO: 490177 - DNA, 33 bp, Homo sapien
tcaggctctttgcttcactgtactgagttttca

SEQ ID NO: 490178 - DNA, 33 bp, Homo sapien
tcaggctctttgcttccctgtactgagttttca

SEQ ID NO: 490179 - DNA, 33 bp, Homo sapien
taaatgactgacaaccactgtctgccttaaact

SEQ ID NO: 490180 - DNA, 33 bp, Homo sapien
taaatgactgacaaccgctgtctgccttaaact

SEQ ID NO: 490181 - DNA, 33 bp, Homo sapien
actgcactaccatccaaagatttttatgtgaag

SEQ ID NO: 490182 - DNA, 33 bp, Homo sapien
actgcactaccatccagagatttttatgtgaag

SEQ ID NO: 490183 - DNA, 33 bp, Homo sapien
cagggctgggttaggaaactgtaatgaagttac

SEQ ID NO: 490184 - DNA, 33 bp, Homo sapien
cagggctgggttaggatactgtaatgaagttac

SEQ ID NO: 490185 - DNA, 33 bp, Homo sapien
tctgaagtgctgagcaagaagatattgatggag

SEQ ID NO: 490186 - DNA, 33 bp, Homo sapien
tctgaagtgctgagcaggaagatattgatggag

SEQ ID NO: 490187 - DNA, 33 bp, Homo sapien
tggagacactcagggagaatttattttcttttt

SEQ ID NO: 490188 - DNA, 33 bp, Homo sapien
tggagacactcagggataatttattttcttttt

SEQ ID NO: 490189 - DNA, 33 bp, Homo sapien
gtcagttgaaaaatgactcaacaatggcctact

SEQ ID NO: 490190 - DNA, 33 bp, Homo sapien
gtcagttgaaaaatgagtcaacaatggcctact

SEQ ID NO: 490191 - DNA, 33 bp, Homo sapien
attctatttttggacacattctatttttggaca

SEQ ID NO: 490192 - DNA, 33 bp, Homo sapien
attctatttttggacatattctatttttggaca

SEQ ID NO: 490193 - DNA, 33 bp, Homo sapien
tttgacaagaggacatcaagagtgctggatttc

SEQ ID NO: 490194 - DNA, 33 bp, Homo sapien
tttgacaagaggacatgaagagtgctggatttc

SEQ ID NO: 490195 - DNA, 33 bp, Homo sapien
ctgtcatcttcctgcccagagtgtctcctcctt

SEQ ID NO: 490196 - DNA, 33 bp, Homo sapien
ctgtcatcttcctgccgagagtgtctcctcctt

SEQ ID NO: 490197 - DNA, 33 bp, Homo sapien
cttaaatttgagtacactaatgtgactttaatt

SEQ ID NO: 490198 - DNA, 33 bp, Homo sapien
cttaaatttgagtacagtaatgtgactttaatt

SEQ ID NO: 490199 - DNA, 33 bp, Homo sapien
agaaaacagaatcctaactctgaaattaataag

SEQ ID NO: 490200 - DNA, 33 bp, Homo sapien
agaaaacagaatcctacctctgaaattaataag

SEQ ID NO: 490201 - DNA, 33 bp, Homo sapien
ttttctttttcaccacaatttgaagctcagttt

SEQ ID NO: 490202 - DNA, 33 bp, Homo sapien
ttttctttttcaccacgatttgaagctcagttt

SEQ ID NO: 490203 - DNA, 33 bp, Homo sapien
accagtaagagtcttaacaaaccaaaaataata

SEQ ID NO: 490204 - DNA, 33 bp, Homo sapien
accagtaagagtcttagcaaaccaaaaataata

SEQ ID NO: 490205 - DNA, 33 bp, Homo sapien
caaagcacctaaggcaataagcaatttgtctat

SEQ ID NO: 490206 - DNA, 33 bp, Homo sapien
caaagcacctaaggcagtaagcaatttgtctat

SEQ ID NO: 490207 - DNA, 33 bp, Homo sapien
ctattcaaacagctaaaagtgatgaatgtggct

SEQ ID NO: 490208 - DNA, 33 bp, Homo sapien
ctattcaaacagctaacagtgatgaatgtggct

SEQ ID NO: 490209 - DNA, 33 bp, Homo sapien
acaaggcataggggataacatctaagcaaagac

SEQ ID NO: 490210 - DNA, 33 bp, Homo sapien
acaaggcataggggatgacatctaagcaaagac

SEQ ID NO: 490211 - DNA, 33 bp, Homo sapien
aatatttgctttacaacacctaccaaccatttt

SEQ ID NO: 490212 - DNA, 33 bp, Homo sapien
aatatttgctttacaatacctaccaaccatttt

SEQ ID NO: 490213 - DNA, 33 bp, Homo sapien
agggacaatacccaaaagaccaagatcatcttt

SEQ ID NO: 490214 - DNA, 33 bp, Homo sapien
agggacaatacccaaaggaccaagatcatcttt

SEQ ID NO: 490215 - DNA, 33 bp, Homo sapien
caaatctcagcaaataacacgacgtcagcaaga

SEQ ID NO: 490216 - DNA, 33 bp, Homo sapien
caaatctcagcaaatagcacgacgtcagcaaga

SEQ ID NO: 490217 - DNA, 33 bp, Homo sapien
atttgttgagtgagtgaatatttataaactgaa

SEQ ID NO: 490218 - DNA, 33 bp, Homo sapien
atttgttgagtgagtgcatatttataaactgaa

SEQ ID NO: 490219 - DNA, 33 bp, Homo sapien
atcctctcttccagtaaccatccttatctgatt

SEQ ID NO: 490220 - DNA, 33 bp, Homo sapien
atcctctcttccagtatccatccttatctgatt

SEQ ID NO: 490221 - DNA, 33 bp, Homo sapien
ccagcaacagttcccactcgaaaagaaattcat

SEQ ID NO: 490222 - DNA, 33 bp, Homo sapien
ccagcaacagttcccagtcgaaaagaaattcat

SEQ ID NO: 490223 - DNA, 33 bp, Homo sapien
caggcaatgagcaaaaattctaatcaaagagaa

SEQ ID NO: 490224 - DNA, 33 bp, Homo sapien
caggcaatgagcaaaagttctaatcaaagagaa

SEQ ID NO: 490225 - DNA, 33 bp, Homo sapien
ataagtatgtaaaaggaaagcagaagggcctgg

SEQ ID NO: 490226 - DNA, 33 bp, Homo sapien
ataagtatgtaaaaggcaagcagaagggcctgg

SEQ ID NO: 490227 - DNA, 33 bp, Homo sapien
tcttaattgacctaaaagataactgtttgttaa

SEQ ID NO: 490228 - DNA, 33 bp, Homo sapien
tcttaattgacctaaatgataactgtttgttaa

SEQ ID NO: 490229 - DNA, 33 bp, Homo sapien
caacactgtactattcaacagggactcagaata

SEQ ID NO: 490230 - DNA, 33 bp, Homo sapien
caacactgtactattccacagggactcagaata

SEQ ID NO: 490231 - DNA, 33 bp, Homo sapien
ctaaacacttgaaacacagaggtgaattaaata

SEQ ID NO: 490232 - DNA, 33 bp, Homo sapien
ctaaacacttgaaacagagaggtgaattaaata

SEQ ID NO: 490233 - DNA, 33 bp, Homo sapien
ttcatgatttttggacgaattaaccataaccaa

SEQ ID NO: 490234 - DNA, 33 bp, Homo sapien
ttcatgatttttggactaattaaccataaccaa

SEQ ID NO: 490235 - DNA, 33 bp, Homo sapien
tggggagaacaagagacagaatatgggcaagac

SEQ ID NO: 490236 - DNA, 33 bp, Homo sapien
tggggagaacaagagatagaatatgggcaagac

SEQ ID NO: 490237 - DNA, 33 bp, Homo sapien
ctatttgaaggtgagaaaggagtggacaatata

SEQ ID NO: 490238 - DNA, 33 bp, Homo sapien
ctatttgaaggtgagagaggagtggacaatata

SEQ ID NO: 490239 - DNA, 33 bp, Homo sapien
caagctctggtacacaatcttcaaagtcctttc

SEQ ID NO: 490240 - DNA, 33 bp, Homo sapien
caagctctggtacacagtcttcaaagtcctttc

SEQ ID NO: 490241 - DNA, 33 bp, Homo sapien
aagctatcatcccttcccttcatttattggttc

SEQ ID NO: 490242 - DNA, 33 bp, Homo sapien
aagctatcatcccttcgcttcatttattggttc

SEQ ID NO: 490243 - DNA, 33 bp, Homo sapien
tatttgttctgagtcacggaaatttagtctatc

SEQ ID NO: 490244 - DNA, 33 bp, Homo sapien
tatttgttctgagtcatggaaatttagtctatc

SEQ ID NO: 490245 - DNA, 33 bp, Homo sapien
acattcattttcactaaacaaactgcctttgtt

SEQ ID NO: 490246 - DNA, 33 bp, Homo sapien
acattcattttcactacacaaactgcctttgtt

SEQ ID NO: 490247 - DNA, 33 bp, Homo sapien
gtgctatctgatgctacgccaaaaatcctggca

SEQ ID NO: 490248 - DNA, 33 bp, Homo sapien
gtgctatctgatgctatgccaaaaatcctggca

SEQ ID NO: 490249 - DNA, 33 bp, Homo sapien
cttcattctcacactaaaattacagtgtgaaca

SEQ ID NO: 490250 - DNA, 33 bp, Homo sapien
cttcattctcacactacaattacagtgtgaaca

SEQ ID NO: 490251 - DNA, 33 bp, Homo sapien
gataatcccctgtgtacctatagtgacctccta

SEQ ID NO: 490252 - DNA, 33 bp, Homo sapien
gataatcccctgtgtatctatagtgacctccta

SEQ ID NO: 490253 - DNA, 33 bp, Homo sapien
tgtgtcttatcagaaagattccaccaagaaaac

SEQ ID NO: 490254 - DNA, 33 bp, Homo sapien
tgtgtcttatcagaaatattccaccaagaaaac

SEQ ID NO: 490255 - DNA, 33 bp, Homo sapien
catgacaatcaattagaataattaactgcctat

SEQ ID NO: 490256 - DNA, 33 bp, Homo sapien
catgacaatcaattaggataattaactgcctat

SEQ ID NO: 490257 - DNA, 33 bp, Homo sapien
tttcaaagagaaatcagatttgcagaaatagaa

SEQ ID NO: 490258 - DNA, 33 bp, Homo sapien
tttcaaagagaaatcatatttgcagaaatagaa

SEQ ID NO: 490259 - DNA, 33 bp, Homo sapien
ccacacatgaagtaataagattctgctttagcc

SEQ ID NO: 490260 - DNA, 33 bp, Homo sapien
ccacacatgaagtaatgagattctgctttagcc

SEQ ID NO: 490261 - DNA, 33 bp, Homo sapien
atattgtagatgttaaccttattgaaacttctt

SEQ ID NO: 490262 - DNA, 33 bp, Homo sapien
atattgtagatgttaagcttattgaaacttctt

SEQ ID NO: 490263 - DNA, 33 bp, Homo sapien
cagaacagtaggataacgctgatattcctaaga

SEQ ID NO: 490264 - DNA, 33 bp, Homo sapien
cagaacagtaggataaggctgatattcctaaga

SEQ ID NO: 490265 - DNA, 33 bp, Homo sapien
tttcagtggctgatataacagtattattattat

SEQ ID NO: 490266 - DNA, 33 bp, Homo sapien
tttcagtggctgatatcacagtattattattat

SEQ ID NO: 490267 - DNA, 33 bp, Homo sapien
tgcagaaaactctttgaaccactcagattcatt

SEQ ID NO: 490268 - DNA, 33 bp, Homo sapien
tgcagaaaactctttgcaccactcagattcatt

SEQ ID NO: 490269 - DNA, 33 bp, Homo sapien
aatcaggagtaacaaaagcgagaaaatgatcaa

SEQ ID NO: 490270 - DNA, 33 bp, Homo sapien
aatcaggagtaacaaaggcgagaaaatgatcaa

SEQ ID NO: 490271 - DNA, 33 bp, Homo sapien
ttcaggatgcttggtcaccagccactggacttt

SEQ ID NO: 490272 - DNA, 33 bp, Homo sapien
ttcaggatgcttggtcgccagccactggacttt

SEQ ID NO: 490273 - DNA, 33 bp, Homo sapien
agaactgtatttttcaaggttgactcctatgaa

SEQ ID NO: 490274 - DNA, 33 bp, Homo sapien
agaactgtatttttcagggttgactcctatgaa

SEQ ID NO: 490275 - DNA, 33 bp, Homo sapien
ctctagaaagaaataaagagaagctgcccaaat

SEQ ID NO: 490276 - DNA, 33 bp, Homo sapien
ctctagaaagaaataaggagaagctgcccaaat

SEQ ID NO: 490277 - DNA, 33 bp, Homo sapien
catgtctaaaagtatacggacaactgtggaagg

SEQ ID NO: 490278 - DNA, 33 bp, Homo sapien
catgtctaaaagtatagggacaactgtggaagg

SEQ ID NO: 490279 - DNA, 33 bp, Homo sapien
atctactaggtcagtcactcttactgcttttgt

SEQ ID NO: 490280 - DNA, 33 bp, Homo sapien
atctactaggtcagtcgctcttactgcttttgt

SEQ ID NO: 490281 - DNA, 33 bp, Homo sapien
ggcctcactaacaccagagtaaccgctgacata

SEQ ID NO: 490282 - DNA, 33 bp, Homo sapien
ggcctcactaacaccatagtaaccgctgacata

SEQ ID NO: 490283 - DNA, 33 bp, Homo sapien
tgctattcgatttccaaacgagtaaggccactt

SEQ ID NO: 490284 - DNA, 33 bp, Homo sapien
tgctattcgatttccacacgagtaaggccactt

SEQ ID NO: 490285 - DNA, 33 bp, Homo sapien
gaagctggagagagagaatgggactgtattatt

SEQ ID NO: 490286 - DNA, 33 bp, Homo sapien
gaagctggagagagaggatgggactgtattatt

SEQ ID NO: 490287 - DNA, 33 bp, Homo sapien
tagcttccaatcacacaacatgaggatacagag

SEQ ID NO: 490288 - DNA, 33 bp, Homo sapien
tagcttccaatcacaccacatgaggatacagag

SEQ ID NO: 490289 - DNA, 33 bp, Homo sapien
ttattgctctactcaaagtggccttttctacat

SEQ ID NO: 490290 - DNA, 33 bp, Homo sapien
ttattgctctactcaaggtggccttttctacat

SEQ ID NO: 490291 - DNA, 33 bp, Homo sapien
agaccaaagagaacaacggaaaagtgtataata

SEQ ID NO: 490292 - DNA, 33 bp, Homo sapien
agaccaaagagaacaatggaaaagtgtataata

SEQ ID NO: 490293 - DNA, 33 bp, Homo sapien
gctgactgtggaaaacgctaataaagttgactt

SEQ ID NO: 490294 - DNA, 33 bp, Homo sapien
gctgactgtggaaaactctaataaagttgactt

SEQ ID NO: 490295 - DNA, 33 bp, Homo sapien
tgaattcatgacttgcaccataagtattttgtt

SEQ ID NO: 490296 - DNA, 33 bp, Homo sapien
tgaattcatgacttgcgccataagtattttgtt

SEQ ID NO: 490297 - DNA, 33 bp, Homo sapien
tttgcaggaatctttcaaaaactaaaagaaagg

SEQ ID NO: 490298 - DNA, 33 bp, Homo sapien
tttgcaggaatctttcgaaaactaaaagaaagg

SEQ ID NO: 490299 - DNA, 33 bp, Homo sapien
ttatgccaagaactaaaagcaaatacaaaagaa

SEQ ID NO: 490300 - DNA, 33 bp, Homo sapien
ttatgccaagaactaagagcaaatacaaaagaa

SEQ ID NO: 490301 - DNA, 33 bp, Homo sapien
gagaattaaaattttacacattgaagagatcaa

SEQ ID NO: 490302 - DNA, 33 bp, Homo sapien
gagaattaaaattttagacattgaagagatcaa

SEQ ID NO: 490303 - DNA, 33 bp, Homo sapien
tcagaaataatgccacaaatctggtctttgaca

SEQ ID NO: 490304 - DNA, 33 bp, Homo sapien
tcagaaataatgccactaatctggtctttgaca

SEQ ID NO: 490305 - DNA, 33 bp, Homo sapien
gaaggtcataaaaatgcaatatacatatgaagt

SEQ ID NO: 490306 - DNA, 33 bp, Homo sapien
gaaggtcataaaaatggaatatacatatgaagt

SEQ ID NO: 490307 - DNA, 33 bp, Homo sapien
agtagaaatgaacagacggtcaactttccagac

SEQ ID NO: 490308 - DNA, 33 bp, Homo sapien
agtagaaatgaacagatggtcaactttccagac

SEQ ID NO: 490309 - DNA, 33 bp, Homo sapien
tctgacattgactgccggaattcctaactgaag

SEQ ID NO: 490310 - DNA, 33 bp, Homo sapien
tctgacattgactgcctgaattcctaactgaag

SEQ ID NO: 490311 - DNA, 33 bp, Homo sapien
tggttgtttaaacttgcaagcttattttctact

SEQ ID NO: 490312 - DNA, 33 bp, Homo sapien
tggttgtttaaacttggaagcttattttctact

SEQ ID NO: 490313 - DNA, 33 bp, Homo sapien
atgtgtgtgtgtataacgctgttaaaaatattg

SEQ ID NO: 490314 - DNA, 33 bp, Homo sapien
atgtgtgtgtgtataatgctgttaaaaatattg

SEQ ID NO: 490315 - DNA, 33 bp, Homo sapien
acaaagtgttgaaatccctcttgtaaatatatg

SEQ ID NO: 490316 - DNA, 33 bp, Homo sapien
acaaagtgttgaaatctctcttgtaaatatatg

SEQ ID NO: 490317 - DNA, 33 bp, Homo sapien
tttaagaaaccaagtacggaaagacagtgactg

SEQ ID NO: 490318 - DNA, 33 bp, Homo sapien
tttaagaaaccaagtagggaaagacagtgactg

SEQ ID NO: 490319 - DNA, 33 bp, Homo sapien
aaaaccaacaaaagcaacttcatgtagttagta

SEQ ID NO: 490320 - DNA, 33 bp, Homo sapien
aaaaccaacaaaagcagcttcatgtagttagta

SEQ ID NO: 490321 - DNA, 33 bp, Homo sapien
atgagattcaggcttacatatgttacataaccg

SEQ ID NO: 490322 - DNA, 33 bp, Homo sapien
atgagattcaggcttagatatgttacataaccg

SEQ ID NO: 490323 - DNA, 33 bp, Homo sapien
aaatgttgtaacagacaactgaaatattttgac

SEQ ID NO: 490324 - DNA, 33 bp, Homo sapien
aaatgttgtaacagacgactgaaatattttgac

SEQ ID NO: 490325 - DNA, 33 bp, Homo sapien
tgatagaatgaaacagcaaagtctcaagtctgt

SEQ ID NO: 490326 - DNA, 33 bp, Homo sapien
tgatagaatgaaacaggaaagtctcaagtctgt

SEQ ID NO: 490327 - DNA, 33 bp, Homo sapien
atcaagttttgcctcccaaagatgaacgtgtcc

SEQ ID NO: 490328 - DNA, 33 bp, Homo sapien
atcaagttttgcctcctaaagatgaacgtgtcc

SEQ ID NO: 490329 - DNA, 33 bp, Homo sapien
cctatcaacggtttccgcataattattacggtt

SEQ ID NO: 490330 - DNA, 33 bp, Homo sapien
cctatcaacggtttcctcataattattacggtt

SEQ ID NO: 490331 - DNA, 33 bp, Homo sapien
tgatctacatagtaacagcctatcaacggtttc

SEQ ID NO: 490332 - DNA, 33 bp, Homo sapien
tgatctacatagtaacggcctatcaacggtttc

SEQ ID NO: 490333 - DNA, 33 bp, Homo sapien
gaagtcttaacaacccgcatctacattttacac

SEQ ID NO: 490334 - DNA, 33 bp, Homo sapien
gaagtcttaacaaccctcatctacattttacac

SEQ ID NO: 490335 - DNA, 33 bp, Homo sapien
tcccttatacaggattcaacatcatttgcccaa

SEQ ID NO: 490336 - DNA, 33 bp, Homo sapien
tcccttatacaggattgaacatcatttgcccaa

SEQ ID NO: 490337 - DNA, 33 bp, Homo sapien
tttattaggtcagtgacagggtcaagtaggcaa

SEQ ID NO: 490338 - DNA, 33 bp, Homo sapien
tttattaggtcagtgatagggtcaagtaggcaa

SEQ ID NO: 490339 - DNA, 33 bp, Homo sapien
tccaggagcaagaaaccggaggatattccaggt

SEQ ID NO: 490340 - DNA, 33 bp, Homo sapien
tccaggagcaagaaactggaggatattccaggt

SEQ ID NO: 490341 - DNA, 33 bp, Homo sapien
tgggttttagagttgcccaagttcttaacactg

SEQ ID NO: 490342 - DNA, 33 bp, Homo sapien
tgggttttagagttgcgcaagttcttaacactg

SEQ ID NO: 490343 - DNA, 33 bp, Homo sapien
tattccactttgggtacactgcgctgcaaatct

SEQ ID NO: 490344 - DNA, 33 bp, Homo sapien
tattccactttgggtagactgcgctgcaaatct

SEQ ID NO: 490345 - DNA, 33 bp, Homo sapien
gatattgtccataaaaatttcctcaacctcact

SEQ ID NO: 490346 - DNA, 33 bp, Homo sapien
gatattgtccataaaagtttcctcaacctcact

SEQ ID NO: 490347 - DNA, 33 bp, Homo sapien
cttggagaggtggataataaaagtctggtcctg

SEQ ID NO: 490348 - DNA, 33 bp, Homo sapien
cttggagaggtggatagtaaaagtctggtcctg

SEQ ID NO: 490349 - DNA, 33 bp, Homo sapien
ttacttttaataactggcagggatttaatatat

SEQ ID NO: 490350 - DNA, 33 bp, Homo sapien
ttacttttaataactgtcagggatttaatatat

SEQ ID NO: 490351 - DNA, 33 bp, Homo sapien
atcttcctagtccaaacagatgtggacattccc

SEQ ID NO: 490352 - DNA, 33 bp, Homo sapien
atcttcctagtccaaagagatgtggacattccc

SEQ ID NO: 490353 - DNA, 33 bp, Homo sapien
atggccacgacacacacagtcaggatttggctt

SEQ ID NO: 490354 - DNA, 33 bp, Homo sapien
atggccacgacacacagagtcaggatttggctt

SEQ ID NO: 490355 - DNA, 33 bp, Homo sapien
catcgtagcaaaatagccactagtagagcatat

SEQ ID NO: 490356 - DNA, 33 bp, Homo sapien
catcgtagcaaaatagtcactagtagagcatat

SEQ ID NO: 490357 - DNA, 33 bp, Homo sapien
ttacaaccaaattctcaaaagccaaaggcagag

SEQ ID NO: 490358 - DNA, 33 bp, Homo sapien
ttacaaccaaattctcgaaagccaaaggcagag

SEQ ID NO: 490359 - DNA, 33 bp, Homo sapien
tgttggcaaatccttaagttcttggttgtaata

SEQ ID NO: 490360 - DNA, 33 bp, Homo sapien
tgttggcaaatccttaggttcttggttgtaata

SEQ ID NO: 490361 - DNA, 33 bp, Homo sapien
ctgagctcttatcagactatggtttcctctgct

SEQ ID NO: 490362 - DNA, 33 bp, Homo sapien
ctgagctcttatcagattatggtttcctctgct

SEQ ID NO: 490363 - DNA, 33 bp, Homo sapien
tagaaagaccttactcagagattataaaagtaa

SEQ ID NO: 490364 - DNA, 33 bp, Homo sapien
tagaaagaccttactcggagattataaaagtaa

SEQ ID NO: 490365 - DNA, 33 bp, Homo sapien
tgaaaggagtatggataaagagatttttacgca

SEQ ID NO: 490366 - DNA, 33 bp, Homo sapien
tgaaaggagtatggatgaagagatttttacgca

SEQ ID NO: 490367 - DNA, 33 bp, Homo sapien
tatagatacatcactccagtctctgtctacatt

SEQ ID NO: 490368 - DNA, 33 bp, Homo sapien
tatagatacatcactctagtctctgtctacatt

SEQ ID NO: 490369 - DNA, 33 bp, Homo sapien
aacaggtgtaaaggcacaaatagtgaacaatag

SEQ ID NO: 490370 - DNA, 33 bp, Homo sapien
aacaggtgtaaaggcagaaatagtgaacaatag

SEQ ID NO: 490371 - DNA, 33 bp, Homo sapien
atgtccaataggagaacacaagtatgttgaatt

SEQ ID NO: 490372 - DNA, 33 bp, Homo sapien
atgtccaataggagaatacaagtatgttgaatt

SEQ ID NO: 490373 - DNA, 33 bp, Homo sapien
tgtgtgcttcgaaatgcaccaagtattttacat

SEQ ID NO: 490374 - DNA, 33 bp, Homo sapien
tgtgtgcttcgaaatgtaccaagtattttacat

SEQ ID NO: 490375 - DNA, 33 bp, Homo sapien
gtgctatggaacactgcaacatatttcttctat

SEQ ID NO: 490376 - DNA, 33 bp, Homo sapien
gtgctatggaacactggaacatatttcttctat

SEQ ID NO: 490377 - DNA, 33 bp, Homo sapien
cttgccttgtatgagacgagattttgaatttag

SEQ ID NO: 490378 - DNA, 33 bp, Homo sapien
cttgccttgtatgagatgagattttgaatttag

SEQ ID NO: 490379 - DNA, 33 bp, Homo sapien; identical to SEQ ID NO: 490377

SEQ ID NO: 490380 - DNA, 33 bp, Homo sapien; identical to SEQ ID NO: 490378

SEQ ID NO: 490381 - DNA, 33 bp, Homo sapien
cattatttatgagagcaaagatgttaaaaacaa

SEQ ID NO: 490382 - DNA, 33 bp, Homo sapien
cattatttatgagagcgaagatgttaaaaacaa

SEQ ID NO: 490383 - DNA, 33 bp, Homo sapien
acctggaatagtgaacacattattgaagaacaa

SEQ ID NO: 490384 - DNA, 33 bp, Homo sapien
acctggaatagtgaacgcattattgaagaacaa

SEQ ID NO: 490385 - DNA, 33 bp, Homo sapien
ctgaaactgctctaaaaataaggtattcataaa

SEQ ID NO: 490386 - DNA, 33 bp, Homo sapien
ctgaaactgctctaaagataaggtattcataaa

SEQ ID NO: 490387 - DNA, 33 bp, Homo sapien
gaatttgaaaactccagcattatacttatgaat

SEQ ID NO: 490388 - DNA, 33 bp, Homo sapien
gaatttgaaaactccatcattatacttatgaat

SEQ ID NO: 490389 - DNA, 33 bp, Homo sapien
aatttgtaaattgacaacctaataaatgggaca

SEQ ID NO: 490390 - DNA, 33 bp, Homo sapien
aatttgtaaattgacagcctaataaatgggaca

SEQ ID NO: 490391 - DNA, 33 bp, Homo sapien
cttcccttattcaactgacaattagaaccaatg

SEQ ID NO: 490392 - DNA, 33 bp, Homo sapien
cttcccttattcaacttacaattagaaccaatg

SEQ ID NO: 490393 - DNA, 33 bp, Homo sapien
atggacatttcatataagaatccacaaatactg

SEQ ID NO: 490394 - DNA, 33 bp, Homo sapien
atggacatttcatataggaatccacaaatactg

SEQ ID NO: 490395 - DNA, 33 bp, Homo sapien
tgttggtgaggcagaagagaaagggaatatgtc

SEQ ID NO: 490396 - DNA, 33 bp, Homo sapien
tgttggtgaggcagaatagaaagggaatatgtc

SEQ ID NO: 490397 - DNA, 33 bp, Homo sapien
tcaaacctccatgacaatagtttacctagctaa

SEQ ID NO: 490398 - DNA, 33 bp, Homo sapien
tcaaacctccatgacagtagtttacctagctaa

SEQ ID NO: 490399 - DNA, 33 bp, Homo sapien
tgatgaaaacgatgagaaataaaatatcattcc

SEQ ID NO: 490400 - DNA, 33 bp, Homo sapien
tgatgaaaacgatgaggaataaaatatcattcc

SEQ ID NO: 490401 - DNA, 33 bp, Homo sapien
ttcttactaagttgaaattaaacattgagtaca

SEQ ID NO: 490402 - DNA, 33 bp, Homo sapien
ttcttactaagttgaagttaaacattgagtaca

SEQ ID NO: 490403 - DNA, 33 bp, Homo sapien
taagaaacaacaaagtcacattatttgcagcaa

SEQ ID NO: 490404 - DNA, 33 bp, Homo sapien
taagaaacaacaaagtgacattatttgcagcaa

SEQ ID NO: 490405 - DNA, 33 bp, Homo sapien
tctatttgggcaagctcagaaagagactacaca

SEQ ID NO: 490406 - DNA, 33 bp, Homo sapien
tctatttgggcaagcttagaaagagactacaca

SEQ ID NO: 490407 - DNA, 33 bp, Homo sapien
agccatataaccaaaaatcgtgtctgttattac

SEQ ID NO: 490408 - DNA, 33 bp, Homo sapien
agccatataaccaaaattcgtgtctgttattac

SEQ ID NO: 490409 - DNA, 33 bp, Homo sapien
gcctacactgtttatcaccctggctggaacacc

SEQ ID NO: 490410 - DNA, 33 bp, Homo sapien
gcctacactgtttatcgccctggctggaacacc

SEQ ID NO: 490411 - DNA, 33 bp, Homo sapien
ttttggtcaaattctgaaatcatatgtaacaaa

SEQ ID NO: 490412 - DNA, 33 bp, Homo sapien
ttttggtcaaattctgcaatcatatgtaacaaa

SEQ ID NO: 490413 - DNA, 33 bp, Homo sapien
ttatgacagtgcaccaactgataatggtttggc

SEQ ID NO: 490414 - DNA, 33 bp, Homo sapien
ttatgacagtgcaccagctgataatggtttggc

SEQ ID NO: 490415 - DNA, 33 bp, Homo sapien
aactgggtttgggctaactgtaggcctcgtcat

SEQ ID NO: 490416 - DNA, 33 bp, Homo sapien
aactgggtttgggctagctgtaggcctcgtcat

SEQ ID NO: 490417 - DNA, 33 bp, Homo sapien
ggggtttgtaattttacatgaggaagtaactac

SEQ ID NO: 490418 - DNA, 33 bp, Homo sapien
ggggtttgtaattttagatgaggaagtaactac

SEQ ID NO: 490419 - DNA, 33 bp, Homo sapien
aagtaacacatatggcagactatgaaagacaaa

SEQ ID NO: 490420 - DNA, 33 bp, Homo sapien
aagtaacacatatggcggactatgaaagacaaa

SEQ ID NO: 490421 - DNA, 33 bp, Homo sapien
ttattgactttgcagcacttggtattgttatag

SEQ ID NO: 490422 - DNA, 33 bp, Homo sapien
ttattgactttgcagcccttggtattgttatag

SEQ ID NO: 490423 - DNA, 33 bp, Homo sapien
tatgtattcaagtttaggtattcaagtatattc

SEQ ID NO: 490424 - DNA, 33 bp, Homo sapien
tatgtattcaagtttatgtattcaagtatattc

SEQ ID NO: 490425 - DNA, 33 bp, Homo sapien
tacaatgtgaaatgcaataatgcacagtgtcag

SEQ ID NO: 490426 - DNA, 33 bp, Homo sapien
tacaatgtgaaatgcagtaatgcacagtgtcag

SEQ ID NO: 490427 - DNA, 33 bp, Homo sapien
gtcctaaaaatgtgtccaggacagcttgctgga

SEQ ID NO: 490428 - DNA, 33 bp, Homo sapien
gtcctaaaaatgtgtctaggacagcttgctgga

SEQ ID NO: 490429 - DNA, 33 bp, Homo sapien
aaagattaagtctgctaaacttgagaacgcaat

SEQ ID NO: 490430 - DNA, 33 bp, Homo sapien
aaagattaagtctgctgaacttgagaacgcaat

SEQ ID NO: 490431 - DNA, 33 bp, Homo sapien
tatgtaactgactctgcagtaaaattaattcat

SEQ ID NO: 490432 - DNA, 33 bp, Homo sapien
tatgtaactgactctgtagtaaaattaattcat

SEQ ID NO: 490433 - DNA, 33 bp, Homo sapien
gtgagagcaatagcaacagaagaagggagagag

SEQ ID NO: 490434 - DNA, 33 bp, Homo sapien
gtgagagcaatagcaagagaagaagggagagag

SEQ ID NO: 490435 - DNA, 33 bp, Homo sapien
atgattggatcatggacgtgggtctctcacgaa

SEQ ID NO: 490436 - DNA, 33 bp, Homo sapien
atgattggatcatggatgtgggtctctcacgaa

SEQ ID NO: 490437 - DNA, 33 bp, Homo sapien
ggcactatctgtgaacacacgtatctcccaaag

SEQ ID NO: 490438 - DNA, 33 bp, Homo sapien
ggcactatctgtgaacgcacgtatctcccaaag

SEQ ID NO: 490439 - DNA, 33 bp, Homo sapien
tcacctacaggtcactaaaattatccccagtga

SEQ ID NO: 490440 - DNA, 33 bp, Homo sapien
tcacctacaggtcactcaaattatccccagtga

SEQ ID NO: 490441 - DNA, 33 bp, Homo sapien
tgacctagtgatcaacagccataccagcttctc

SEQ ID NO: 490442 - DNA, 33 bp, Homo sapien
tgacctagtgatcaacggccataccagcttctc

SEQ ID NO: 490443 - DNA, 33 bp, Homo sapien
tatatagctatcttcaacatcagtatacctatg

SEQ ID NO: 490444 - DNA, 33 bp, Homo sapien
tatatagctatcttcaccatcagtatacctatg

SEQ ID NO: 490445 - DNA, 33 bp, Homo sapien
aaaagtcctcacaaaggaaaaaacagaaacggg

SEQ ID NO: 490446 - DNA, 33 bp, Homo sapien
aaaagtcctcacaaagtaaaaaacagaaacggg

SEQ ID NO: 490447 - DNA, 33 bp, Homo sapien
ataaatctcccatatacctcagtttactccagg

SEQ ID NO: 490448 - DNA, 33 bp, Homo sapien
ataaatctcccatatatctcagtttactccagg

SEQ ID NO: 490449 - DNA, 33 bp, Homo sapien
tgtttaactgcatacacataactttggaaatct

SEQ ID NO: 490450 - DNA, 33 bp, Homo sapien
tgtttaactgcatacagataactttggaaatct

SEQ ID NO: 490451 - DNA, 33 bp, Homo sapien
gaagcgtggaggaaacaaatgcatggtgtgact

SEQ ID NO: 490452 - DNA, 33 bp, Homo sapien
gaagcgtggaggaaacgaatgcatggtgtgact

SEQ ID NO: 490453 - DNA, 33 bp, Homo sapien
tcagcatgttagaatcactaagctatagactaa

SEQ ID NO: 490454 - DNA, 33 bp, Homo sapien
tcagcatgttagaatcgctaagctatagactaa

SEQ ID NO: 490455 - DNA, 33 bp, Homo sapien
tgaaccattttaacccactgagcattgtaagat

SEQ ID NO: 490456 - DNA, 33 bp, Homo sapien
tgaaccattttaaccccctgagcattgtaagat

SEQ ID NO: 490457 - DNA, 33 bp, Homo sapien
aaatggtttcttctccaaagtagtttgtaagta

SEQ ID NO: 490458 - DNA, 33 bp, Homo sapien
aaatggtttcttctccgaagtagtttgtaagta

SEQ ID NO: 490459 - DNA, 33 bp, Homo sapien
atgttacctattcaaagtcagcaaaacaaaatg

SEQ ID NO: 490460 - DNA, 33 bp, Homo sapien
atgttacctattcaaattcagcaaaacaaaatg

SEQ ID NO: 490461 - DNA, 33 bp, Homo sapien
gtaatggcttctttacagatttctcaccagagt

SEQ ID NO: 490462 - DNA, 33 bp, Homo sapien
gtaatggcttctttaccgatttctcaccagagt

SEQ ID NO: 490463 - DNA, 33 bp, Homo sapien
ttcttgtcctgcatccagaaagaataatgtata

SEQ ID NO: 490464 - DNA, 33 bp, Homo sapien
ttcttgtcctgcatcctgaaagaataatgtata

SEQ ID NO: 490465 - DNA, 33 bp, Homo sapien
gaatcttgaaagcaggaatagaattgaccccta

SEQ ID NO: 490466 - DNA, 33 bp, Homo sapien
gaatcttgaaagcagggatagaattgaccccta

SEQ ID NO: 490467 - DNA, 33 bp, Homo sapien
ggggttgtcattgagacacatcgtgaagcaaac

SEQ ID NO: 490468 - DNA, 33 bp, Homo sapien
ggggttgtcattgagatacatcgtgaagcaaac

SEQ ID NO: 490469 - DNA, 33 bp, Homo sapien
ttagatgtgtgaatgaagtggatagaccaaaaa

SEQ ID NO: 490470 - DNA, 33 bp, Homo sapien
ttagatgtgtgaatgatgtggatagaccaaaaa

SEQ ID NO: 490471 - DNA, 33 bp, Homo sapien
gggggaggttctcatacctcagttcttgacttc

SEQ ID NO: 490472 - DNA, 33 bp, Homo sapien
gggggaggttctcatatctcagttcttgacttc

SEQ ID NO: 490473 - DNA, 33 bp, Homo sapien
aaattgaccaaaaagacggggctacgggctgca

SEQ ID NO: 490474 - DNA, 33 bp, Homo sapien
aaattgaccaaaaagatggggctacgggctgca

SEQ ID NO: 490475 - DNA, 33 bp, Homo sapien
gagaaagttatagcagcctaagtctattgttcc

SEQ ID NO: 490476 - DNA, 33 bp, Homo sapien
gagaaagttatagcagtctaagtctattgttcc

SEQ ID NO: 490477 - DNA, 33 bp, Homo sapien
cagggtaactgggataaccatgacctcaaatat

SEQ ID NO: 490478 - DNA, 33 bp, Homo sapien
cagggtaactgggatatccatgacctcaaatat

SEQ ID NO: 490479 - DNA, 33 bp, Homo sapien
atcctggggactcttaaacttttcagattattc

SEQ ID NO: 490480 - DNA, 33 bp, Homo sapien
atcctggggactcttacacttttcagattattc

SEQ ID NO: 490481 - DNA, 33 bp, Homo sapien
tgtttcacattacctgcaaagtaactgttattt

SEQ ID NO: 490482 - DNA, 33 bp, Homo sapien
tgtttcacattacctggaaagtaactgttattt

SEQ ID NO: 490483 - DNA, 33 bp, Homo sapien
attacataaacacatacgtaggcatatatttca

SEQ ID NO: 490484 - DNA, 33 bp, Homo sapien
attacataaacacataggtaggcatatatttca

SEQ ID NO: 490485 - DNA, 33 bp, Homo sapien
gatttatgttacttcaacaaaagataaacaagg

SEQ ID NO: 490486 - DNA, 33 bp, Homo sapien
gatttatgttacttcatcaaaagataaacaagg

SEQ ID NO: 490487 - DNA, 33 bp, Homo sapien
caattatacctcattcaagctggaaaagtaata

SEQ ID NO: 490488 - DNA, 33 bp, Homo sapien
caattatacctcattcgagctggaaaagtaata

SEQ ID NO: 490489 - DNA, 33 bp, Homo sapien
tgcttccagcttttacacactcaatatgatgtt

SEQ ID NO: 490490 - DNA, 33 bp, Homo sapien
tgcttccagcttttacccactcaatatgatgtt

SEQ ID NO: 490491 - DNA, 33 bp, Homo sapien
gaaagtaaggacatcacagtaaaattgtggaaa

SEQ ID NO: 490492 - DNA, 33 bp, Homo sapien
gaaagtaaggacatcatagtaaaattgtggaaa

SEQ ID NO: 490493 - DNA, 33 bp, Homo sapien
ggtagctgtggaggaacgttaggaatagggaga

SEQ ID NO: 490494 - DNA, 33 bp, Homo sapien
ggtagctgtggaggaatgttaggaatagggaga

SEQ ID NO: 490495 - DNA, 33 bp, Homo sapien
atctaaatatggtcaaaaataacacaaatagga

SEQ ID NO: 490496 - DNA, 33 bp, Homo sapien
atctaaatatggtcaagaataacacaaatagga

SEQ ID NO: 490497 - DNA, 33 bp, Homo sapien
agttgacttgagagtacgtggaaatgttctcaa

SEQ ID NO: 490498 - DNA, 33 bp, Homo sapien
agttgacttgagagtatgtggaaatgttctcaa

SEQ ID NO: 490499 - DNA, 33 bp, Homo sapien
aagttttgtgattgataagtcttgtgtttcctt

SEQ ID NO: 490500 - DNA, 33 bp, Homo sapien
aagttttgtgattgatcagtcttgtgtttcctt

SEQ ID NO: 490501 - DNA, 33 bp, Homo sapien
gaagaaattaggtttcaaaattgtacctgcatg

SEQ ID NO: 490502 - DNA, 33 bp, Homo sapien
gaagaaattaggtttcgaaattgtacctgcatg

SEQ ID NO: 490503 - DNA, 33 bp, Homo sapien
tgaatatcattggtaacctgcagtgcacctcat

SEQ ID NO: 490504 - DNA, 33 bp, Homo sapien
tgaatatcattggtaagctgcagtgcacctcat

SEQ ID NO: 490505 - DNA, 33 bp, Homo sapien
tttgagtgagtgaatacagtcttacctcctttt

SEQ ID NO: 490506 - DNA, 33 bp, Homo sapien
tttgagtgagtgaatagagtcttacctcctttt

SEQ ID NO: 490507 - DNA, 33 bp, Homo sapien
attctacggtgtgctacaaaaccttgatgaaac

SEQ ID NO: 490508 - DNA, 33 bp, Homo sapien
attctacggtgtgctataaaaccttgatgaaac

SEQ ID NO: 490509 - DNA, 33 bp, Homo sapien
ctaaaaaaatcctggcaaatctccctaccataa

SEQ ID NO: 490510 - DNA, 33 bp, Homo sapien
ctaaaaaaatcctggcgaatctccctaccataa

SEQ ID NO: 490511 - DNA, 33 bp, Homo sapien
ccttagatttctctcactgactatttaactgtt

SEQ ID NO: 490512 - DNA, 33 bp, Homo sapien
ccttagatttctctcattgactatttaactgtt

SEQ ID NO: 490513 - DNA, 33 bp, Homo sapien
acaactgatcttgctacgcacagtttatatttt

SEQ ID NO: 490514 - DNA, 33 bp, Homo sapien
acaactgatcttgctatgcacagtttatatttt

SEQ ID NO: 490515 - DNA, 33 bp, Homo sapien
ttctgttcaactaatacaaagactaaatgaact

SEQ ID NO: 490516 - DNA, 33 bp, Homo sapien
ttctgttcaactaatagaaagactaaatgaact

SEQ ID NO: 490517 - DNA, 33 bp, Homo sapien
aatcacgtaaatcctaagtcatcagcccttatc

SEQ ID NO: 490518 - DNA, 33 bp, Homo sapien
aatcacgtaaatcctacgtcatcagcccttatc

SEQ ID NO: 490519 - DNA, 33 bp, Homo sapien
tactgggcaaagcagaaatttaaatagaattaa

SEQ ID NO: 490520 - DNA, 33 bp, Homo sapien
tactgggcaaagcagacatttaaatagaattaa

SEQ ID NO: 490521 - DNA, 33 bp, Homo sapien
ataaagagacaaatgaataaagaaaatgtgtac

SEQ ID NO: 490522 - DNA, 33 bp, Homo sapien
ataaagagacaaatgattaaagaaaatgtgtac

SEQ ID NO: 490523 - DNA, 33 bp, Homo sapien
tcagtgtagtcaatccggagtatttacaggatg

SEQ ID NO: 490524 - DNA, 33 bp, Homo sapien
tcagtgtagtcaatcctgagtatttacaggatg

SEQ ID NO: 490525 - DNA, 33 bp, Homo sapien
tttgccacataaggtacaaaagtttgctagggc

SEQ ID NO: 490526 - DNA, 33 bp, Homo sapien
tttgccacataaggtataaaagtttgctagggc

SEQ ID NO: 490527 - DNA, 33 bp, Homo sapien
ggattaagtcaaggtaactttcattcagcaaat

SEQ ID NO: 490528 - DNA, 33 bp, Homo sapien
ggattaagtcaaggtatctttcattcagcaaat

SEQ ID NO: 490529 - DNA, 33 bp, Homo sapien
gtctgtggattttagtaacagctcatcttttta

SEQ ID NO: 490530 - DNA, 33 bp, Homo sapien
gtctgtggattttagtgacagctcatcttttta

SEQ ID NO: 490531 - DNA, 33 bp, Homo sapien
tcaactgtaaaatgaacttaattatacctacct

SEQ ID NO: 490532 - DNA, 33 bp, Homo sapien
tcaactgtaaaatgaagttaattatacctacct

SEQ ID NO: 490533 - DNA, 33 bp, Homo sapien
ttccattgtaacatcaacaggtgacatgatttg

SEQ ID NO: 490534 - DNA, 33 bp, Homo sapien
ttccattgtaacatcagcaggtgacatgatttg

SEQ ID NO: 490535 - DNA, 33 bp, Homo sapien
ttctgtgaagatacagactatttccaacaaata

SEQ ID NO: 490536 - DNA, 33 bp, Homo sapien
ttctgtgaagatacaggctatttccaacaaata

SEQ ID NO: 490537 - DNA, 33 bp, Homo sapien
tatatatttctcggaacggcctaaaaaaagtaa

SEQ ID NO: 490538 - DNA, 33 bp, Homo sapien
tatatatttctcggaatggcctaaaaaaagtaa

SEQ ID NO: 490539 - DNA, 33 bp, Homo sapien
ctcatcatcgaatgaactaaatgaaacaccagt

SEQ ID NO: 490540 - DNA, 33 bp, Homo sapien
ctcatcatcgaatgaagtaaatgaaacaccagt

SEQ ID NO: 490541 - DNA, 33 bp, Homo sapien
agagaactttgttttgaaacttgaacactagct

SEQ ID NO: 490542 - DNA, 33 bp, Homo sapien
agagaactttgttttggaacttgaacactagct

SEQ ID NO: 490543 - DNA, 33 bp, Homo sapien
acctattaatgggatcactcggtccagtggtat

SEQ ID NO: 490544 - DNA, 33 bp, Homo sapien
acctattaatgggatcgctcggtccagtggtat

SEQ ID NO: 490545 - DNA, 33 bp, Homo sapien
aacttatttttagtacagaagagcaccagaact

SEQ ID NO: 490546 - DNA, 33 bp, Homo sapien
aacttatttttagtacggaagagcaccagaact

SEQ ID NO: 490547 - DNA, 33 bp, Homo sapien
aaacatggacgaaagactctaacattttaccaa

SEQ ID NO: 490548 - DNA, 33 bp, Homo sapien
aaacatggacgaaagagtctaacattttaccaa

SEQ ID NO: 490549 - DNA, 33 bp, Homo sapien
taataataaacagaaaaatttaatcggacttag

SEQ ID NO: 490550 - DNA, 33 bp, Homo sapien
taataataaacagaaacatttaatcggacttag

SEQ ID NO: 490551 - DNA, 33 bp, Homo sapien
attagcaactcagggcggaactcctaggaaccc

SEQ ID NO: 490552 - DNA, 33 bp, Homo sapien
attagcaactcagggctgaactcctaggaaccc

SEQ ID NO: 490553 - DNA, 33 bp, Homo sapien
ttctaagagatcaaaaccatacattcttacatg

SEQ ID NO: 490554 - DNA, 33 bp, Homo sapien
ttctaagagatcaaaagcatacattcttacatg

SEQ ID NO: 490555 - DNA, 33 bp, Homo sapien
acaggtttaaccacaaacttctgctgcaatcaa

SEQ ID NO: 490556 - DNA, 33 bp, Homo sapien
acaggtttaaccacaatcttctgctgcaatcaa

SEQ ID NO: 490557 - DNA, 33 bp, Homo sapien
actaggatgctgcaaacctctaattttgaggcc

SEQ ID NO: 490558 - DNA, 33 bp, Homo sapien
actaggatgctgcaaatctctaattttgaggcc

SEQ ID NO: 490559 - DNA, 33 bp, Homo sapien
acgttatcttattagaactaaccggtaaccctg

SEQ ID NO: 490560 - DNA, 33 bp, Homo sapien
acgttatcttattagacctaaccggtaaccctg

SEQ ID NO: 490561 - DNA, 33 bp, Homo sapien
acaggtggaggcccacggatctatgaaacacca

SEQ ID NO: 490562 - DNA, 33 bp, Homo sapien
acaggtggaggcccactgatctatgaaacacca

SEQ ID NO: 490563 - DNA, 33 bp, Homo sapien
attaaattcagaaaaacgcatagagcatgaggg

SEQ ID NO: 490564 - DNA, 33 bp, Homo sapien
attaaattcagaaaaaggcatagagcatgaggg

SEQ ID NO: 490565 - DNA, 33 bp, Homo sapien
aggataccttttaagaaagagaaaagagaacaa

SEQ ID NO: 490566 - DNA, 33 bp, Homo sapien
aggataccttttaagacagagaaaagagaacaa

SEQ ID NO: 490567 - DNA, 33 bp, Homo sapien
attatgccattgttcaaaacccttcatggctct

SEQ ID NO: 490568 - DNA, 33 bp, Homo sapien
attatgccattgttcagaacccttcatggctct

SEQ ID NO: 490569 - DNA, 33 bp, Homo sapien
gttattgactttggtaccagtcagaggacagag

SEQ ID NO: 490570 - DNA, 33 bp, Homo sapien
gttattgactttggtatcagtcagaggacagag

SEQ ID NO: 490571 - DNA, 33 bp, Homo sapien
taccctaaaatatgtcactgagaccgatttgag

SEQ ID NO: 490572 - DNA, 33 bp, Homo sapien
taccctaaaatatgtcgctgagaccgatttgag

SEQ ID NO: 490573 - DNA, 33 bp, Homo sapien
ctgcctttaacacttgaagaacctggaataaag

SEQ ID NO: 490574 - DNA, 33 bp, Homo sapien
ctgcctttaacacttgcagaacctggaataaag

SEQ ID NO: 490575 - DNA, 33 bp, Homo sapien
agtttatcctgaatgaagtgtataaaatgtatg

SEQ ID NO: 490576 - DNA, 33 bp, Homo sapien
agtttatcctgaatgacgtgtataaaatgtatg

SEQ ID NO: 490577 - DNA, 33 bp, Homo sapien
ttatgagcaaagagtacagtcacaatctctcaa

SEQ ID NO: 490578 - DNA, 33 bp, Homo sapien
ttatgagcaaagagtagagtcacaatctctcaa

SEQ ID NO: 490579 - DNA, 33 bp, Homo sapien
gccatgttggtaagagaagcctgagaaatgtgg

SEQ ID NO: 490580 - DNA, 33 bp, Homo sapien
gccatgttggtaagaggagcctgagaaatgtgg

SEQ ID NO: 490581 - DNA, 33 bp, Homo sapien
gaggaactcttttcctaaaatgaccataaaaat

SEQ ID NO: 490582 - DNA, 33 bp, Homo sapien
gaggaactcttttcctgaaatgaccataaaaat

SEQ ID NO: 490583 - DNA, 33 bp, Homo sapien
acagaaatgcatgaaaactatgaagtgtttttt

SEQ ID NO: 490584 - DNA, 33 bp, Homo sapien
acagaaatgcatgaaagctatgaagtgtttttt

SEQ ID NO: 490585 - DNA, 33 bp, Homo sapien
aatgctatcaaaaagaaagtatttggaaagcaa

SEQ ID NO: 490586 - DNA, 33 bp, Homo sapien
aatgctatcaaaaagagagtatttggaaagcaa

SEQ ID NO: 490587 - DNA, 33 bp, Homo sapien
tgacaatgatcagacccatgaggtaaactgctg

SEQ ID NO: 490588 - DNA, 33 bp, Homo sapien
tgacaatgatcagacctatgaggtaaactgctg

SEQ ID NO: 490589 - DNA, 33 bp, Homo sapien
taattgtgaaaggtaaaagttgaaattcatcct

SEQ ID NO: 490590 - DNA, 33 bp, Homo sapien
taattgtgaaaggtaacagttgaaattcatcct

SEQ ID NO: 490591 - DNA, 33 bp, Homo sapien
gtctgagagtgaagaaactgctttcaagttgta

SEQ ID NO: 490592 - DNA, 33 bp, Homo sapien
gtctgagagtgaagaacctgctttcaagttgta

SEQ ID NO: 490593 - DNA, 33 bp, Homo sapien
aattcctgaaaatttaacagtaaggctgtgtaa

SEQ ID NO: 490594 - DNA, 33 bp, Homo sapien
aattcctgaaaatttagcagtaaggctgtgtaa

SEQ ID NO: 490595 - DNA, 33 bp, Homo sapien
tggcataattagttcacctgggaacatttttga

SEQ ID NO: 490596 - DNA, 33 bp, Homo sapien
tggcataattagttcatctgggaacatttttga

SEQ ID NO: 490597 - DNA, 33 bp, Homo sapien
ttgaaccttacctaataaagtatccattccttt

SEQ ID NO: 490598 - DNA, 33 bp, Homo sapien
ttgaaccttacctaatgaagtatccattccttt

SEQ ID NO: 490599 - DNA, 33 bp, Homo sapien
ccatcatgtaacatgacagaaaaataagcggtt

SEQ ID NO: 490600 - DNA, 33 bp, Homo sapien
ccatcatgtaacatgagagaaaaataagcggtt

SEQ ID NO: 490601 - DNA, 33 bp, Homo sapien
tttcttcatcatcacacagtccatcttttctaa

SEQ ID NO: 490602 - DNA, 33 bp, Homo sapien
tttcttcatcatcacatagtccatcttttctaa

SEQ ID NO: 490603 - DNA, 33 bp, Homo sapien
tgcctgaaattgtgagcaatgtttgttggatga

SEQ ID NO: 490604 - DNA, 33 bp, Homo sapien
tgcctgaaattgtgagtaatgtttgttggatga

SEQ ID NO: 490605 - DNA, 33 bp, Homo sapien
aagtaaaatcttcaaaattggctagttacatgg

SEQ ID NO: 490606 - DNA, 33 bp, Homo sapien
aagtaaaatcttcaaacttggctagttacatgg

SEQ ID NO: 490607 - DNA, 33 bp, Homo sapien
caaacatcaaagggacaaatacatcaatgagat

SEQ ID NO: 490608 - DNA, 33 bp, Homo sapien
caaacatcaaagggacgaatacatcaatgagat

SEQ ID NO: 490609 - DNA, 33 bp, Homo sapien
aatatttagcaattcaagtgtataaacagttaa

SEQ ID NO: 490610 - DNA, 33 bp, Homo sapien
aatatttagcaattcatgtgtataaacagttaa

SEQ ID NO: 490611 - DNA, 33 bp, Homo sapien
ttgtgggtcctcaaaaaaaagcacataatgcta

SEQ ID NO: 490612 - DNA, 33 bp, Homo sapien
ttgtgggtcctcaaaataaagcacataatgcta

SEQ ID NO: 490613 - DNA, 33 bp, Homo sapien
gggaccagattgagaaagtttcttcccatttgt

SEQ ID NO: 490614 - DNA, 33 bp, Homo sapien
gggaccagattgagaatgtttcttcccatttgt

SEQ ID NO: 490615 - DNA, 33 bp, Homo sapien
ctgtcactatcaactgcacatttcaatataata

SEQ ID NO: 490616 - DNA, 33 bp, Homo sapien
ctgtcactatcaactggacatttcaatataata

SEQ ID NO: 490617 - DNA, 33 bp, Homo sapien
tgtgtgcagtcatgaaagtctctggttagctca

SEQ ID NO: 490618 - DNA, 33 bp, Homo sapien
tgtgtgcagtcatgaaggtctctggttagctca

SEQ ID NO: 490619 - DNA, 33 bp, Homo sapien
ggccagaggtgaaagactagggctctctcaggt

SEQ ID NO: 490620 - DNA, 33 bp, Homo sapien
ggccagaggtgaaagattagggctctctcaggt

SEQ ID NO: 490621 - DNA, 33 bp, Homo sapien
gagatacaattctctacagacggagcatcttga

SEQ ID NO: 490622 - DNA, 33 bp, Homo sapien
gagatacaattctctagagacggagcatcttga

SEQ ID NO: 490623 - DNA, 33 bp, Homo sapien
aaaaaatctttattcagtagggaagttgcccaa

SEQ ID NO: 490624 - DNA, 33 bp, Homo sapien
aaaaaatctttattcattagggaagttgcccaa

SEQ ID NO: 490625 - DNA, 33 bp, Homo sapien
tttttggttcccttaaagaatatgcagtaacaa

SEQ ID NO: 490626 - DNA, 33 bp, Homo sapien
tttttggttcccttaaggaatatgcagtaacaa

SEQ ID NO: 490627 - DNA, 33 bp, Homo sapien
tgttttacattttatgaagccaaacctgtctga

SEQ ID NO: 490628 - DNA, 33 bp, Homo sapien
tgttttacattttatgcagccaaacctgtctga

SEQ ID NO: 490629 - DNA, 33 bp, Homo sapien
ttaagatcctgataccaaaatcatattctatat

SEQ ID NO: 490630 - DNA, 33 bp, Homo sapien
ttaagatcctgatacccaaatcatattctatat

SEQ ID NO: 490631 - DNA, 33 bp, Homo sapien
gcagctaaatgtaaaacagcaccaataacacat

SEQ ID NO: 490632 - DNA, 33 bp, Homo sapien
gcagctaaatgtaaaatagcaccaataacacat

SEQ ID NO: 490633 - DNA, 33 bp, Homo sapien
tgccttatatccaagacattgatttgcatagtt

SEQ ID NO: 490634 - DNA, 33 bp, Homo sapien
tgccttatatccaagagattgatttgcatagtt

SEQ ID NO: 490635 - DNA, 33 bp, Homo sapien
attaaagaggtcagaaaatgtcctactggattc

SEQ ID NO: 490636 - DNA, 33 bp, Homo sapien
attaaagaggtcagaagatgtcctactggattc

SEQ ID NO: 490637 - DNA, 33 bp, Homo sapien
agaactcagaaataaagcaccatatctacaatc

SEQ ID NO: 490638 - DNA, 33 bp, Homo sapien
agaactcagaaataaatcaccatatctacaatc

SEQ ID NO: 490639 - DNA, 33 bp, Homo sapien
cattgcataactcagtcaatcttgtaacttcta

SEQ ID NO: 490640 - DNA, 33 bp, Homo sapien
cattgcataactcagtgaatcttgtaacttcta

SEQ ID NO: 490641 - DNA, 33 bp, Homo sapien
atactttccctgacaaaccatgtagattttgct

SEQ ID NO: 490642 - DNA, 33 bp, Homo sapien
atactttccctgacaatccatgtagattttgct

SEQ ID NO: 490643 - DNA, 33 bp, Homo sapien
tcactgtacttgggtgaatgtggaatgtcttct

SEQ ID NO: 490644 - DNA, 33 bp, Homo sapien
tcactgtacttgggtggatgtggaatgtcttct

SEQ ID NO: 490645 - DNA, 33 bp, Homo sapien
tgtgttctgtcttacaaacctcactgtacttgg

SEQ ID NO: 490646 - DNA, 33 bp, Homo sapien
tgtgttctgtcttacacacctcactgtacttgg

SEQ ID NO: 490647 - DNA, 33 bp, Homo sapien
ggaactctccattcaggaacagtttagttccag

SEQ ID NO: 490648 - DNA, 33 bp, Homo sapien
ggaactctccattcagtaacagtttagttccag

SEQ ID NO: 490649 - DNA, 33 bp, Homo sapien
attactggatgagaaccgcatttgttttgcttc

SEQ ID NO: 490650 - DNA, 33 bp, Homo sapien
attactggatgagaactgcatttgttttgcttc

SEQ ID NO: 490651 - DNA, 33 bp, Homo sapien
agcttggtcaagaacactacaatatctacatat

SEQ ID NO: 490652 - DNA, 33 bp, Homo sapien
agcttggtcaagaacattacaatatctacatat

SEQ ID NO: 490653 - DNA, 33 bp, Homo sapien
gaacacctttgatgtgcacttcaggtctctaaa

SEQ ID NO: 490654 - DNA, 33 bp, Homo sapien
gaacacctttgatgtggacttcaggtctctaaa

SEQ ID NO: 490655 - DNA, 33 bp, Homo sapien
tttattgatttcctccaatatacttcaaggttg

SEQ ID NO: 490656 - DNA, 33 bp, Homo sapien
tttattgatttcctccgatatacttcaaggttg

SEQ ID NO: 490657 - DNA, 33 bp, Homo sapien
gaaattggaggatgcaatgaatgggttatcttg

SEQ ID NO: 490658 - DNA, 33 bp, Homo sapien
gaaattggaggatgcagtgaatgggttatcttg

SEQ ID NO: 490659 - DNA, 33 bp, Homo sapien
ttatgaaattgttggacaggtcccggccagcct

SEQ ID NO: 490660 - DNA, 33 bp, Homo sapien
ttatgaaattgttggataggtcccggccagcct

SEQ ID NO: 490661 - DNA, 33 bp, Homo sapien
tatcctgcaaatgttacactccttttccttgac

SEQ ID NO: 490662 - DNA, 33 bp, Homo sapien
tatcctgcaaatgttagactccttttccttgac

SEQ ID NO: 490663 - DNA, 33 bp, Homo sapien
tgtcgggtactattcaataaatctttgcccaca

SEQ ID NO: 490664 - DNA, 33 bp, Homo sapien
tgtcgggtactattcagtaaatctttgcccaca

SEQ ID NO: 490665 - DNA, 33 bp, Homo sapien
ttttagtgcctgataacataaggtaactaaaat

SEQ ID NO: 490666 - DNA, 33 bp, Homo sapien
ttttagtgcctgataatataaggtaactaaaat

SEQ ID NO: 490667 - DNA, 33 bp, Homo sapien
actcaattctcaaaaaatgatgttaatattgtt

SEQ ID NO: 490668 - DNA, 33 bp, Homo sapien
actcaattctcaaaaactgatgttaatattgtt

SEQ ID NO: 490669 - DNA, 33 bp, Homo sapien
ttcaaaatttgtttcacaagagcagacaataga

SEQ ID NO: 490670 - DNA, 33 bp, Homo sapien
ttcaaaatttgtttcagaagagcagacaataga

SEQ ID NO: 490671 - DNA, 33 bp, Homo sapien
ctggttgatttggaaacgagagatggcaatcag

SEQ ID NO: 490672 - DNA, 33 bp, Homo sapien
ctggttgatttggaaatgagagatggcaatcag

SEQ ID NO: 490673 - DNA, 33 bp, Homo sapien
atgtacaattgacaagacttcatagatccatgg

SEQ ID NO: 490674 - DNA, 33 bp, Homo sapien
atgtacaattgacaagccttcatagatccatgg

SEQ ID NO: 490675 - DNA, 33 bp, Homo sapien
gaagcctgttgaaagacaataatcctcctcctt

SEQ ID NO: 490676 - DNA, 33 bp, Homo sapien
gaagcctgttgaaagagaataatcctcctcctt

SEQ ID NO: 490677 - DNA, 33 bp, Homo sapien
cctatagcatttctgaccattttgagatcctga

SEQ ID NO: 490678 - DNA, 33 bp, Homo sapien
cctatagcatttctgagcattttgagatcctga

SEQ ID NO: 490679 - DNA, 33 bp, Homo sapien
aactcttcgtgttccaaattaacgtgagggagt

SEQ ID NO: 490680 - DNA, 33 bp, Homo sapien
aactcttcgtgttccagattaacgtgagggagt

SEQ ID NO: 490681 - DNA, 33 bp, Homo sapien
ttaacgattctgtatacctcagaaaaatcacga

SEQ ID NO: 490682 - DNA, 33 bp, Homo sapien
ttaacgattctgtatatctcagaaaaatcacga

SEQ ID NO: 490683 - DNA, 33 bp, Homo sapien
tatgtgcttatccagaaatgcttcagttattga

SEQ ID NO: 490684 - DNA, 33 bp, Homo sapien
tatgtgcttatccagagatgcttcagttattga

SEQ ID NO: 490685 - DNA, 33 bp, Homo sapien
aaagtcaataaggaacaactggacttgaactgc

SEQ ID NO: 490686 - DNA, 33 bp, Homo sapien
aaagtcaataaggaaccactggacttgaactgc

SEQ ID NO: 490687 - DNA, 33 bp, Homo sapien
tattaaactggaattgaaagtatcagtatgaac

SEQ ID NO: 490688 - DNA, 33 bp, Homo sapien
tattaaactggaattgcaagtatcagtatgaac

SEQ ID NO: 490689 - DNA, 33 bp, Homo sapien
taagacagctttctgaaggtgtagcttgactca

SEQ ID NO: 490690 - DNA, 33 bp, Homo sapien
taagacagctttctgatggtgtagcttgactca

SEQ ID NO: 490691 - DNA, 33 bp, Homo sapien
cttcactttctgccataaatctaagtctcctga

SEQ ID NO: 490692 - DNA, 33 bp, Homo sapien
cttcactttctgccatgaatctaagtctcctga

SEQ ID NO: 490693 - DNA, 33 bp, Homo sapien
gttatgtcaaaaacaacgaaacaggctgagata

SEQ ID NO: 490694 - DNA, 33 bp, Homo sapien
gttatgtcaaaaacaaggaaacaggctgagata

SEQ ID NO: 490695 - DNA, 33 bp, Homo sapien
aatagatgttacagtaaaacctccccactgacc

SEQ ID NO: 490696 - DNA, 33 bp, Homo sapien
aatagatgttacagtacaacctccccactgacc

SEQ ID NO: 490697 - DNA, 33 bp, Homo sapien
aggaagtctttgaccagaagccataattctttt

SEQ ID NO: 490698 - DNA, 33 bp, Homo sapien
aggaagtctttgaccataagccataattctttt

SEQ ID NO: 490699 - DNA, 33 bp, Homo sapien
atgataagtgacagagacggcaaaaggcattca

SEQ ID NO: 490700 - DNA, 33 bp, Homo sapien
atgataagtgacagagtcggcaaaaggcattca

SEQ ID NO: 490701 - DNA, 33 bp, Homo sapien
tgtgctcacacacaaccatgatttccactgtca

SEQ ID NO: 490702 - DNA, 33 bp, Homo sapien
tgtgctcacacacaacgatgatttccactgtca

SEQ ID NO: 490703 - DNA, 33 bp, Homo sapien
ctgggcatggcatggaactacagcagataataa

SEQ ID NO: 490704 - DNA, 33 bp, Homo sapien
ctgggcatggcatggagctacagcagataataa

SEQ ID NO: 490705 - DNA, 33 bp, Homo sapien
aaaaatatttcaggccaatatgataccagttgg

SEQ ID NO: 490706 - DNA, 33 bp, Homo sapien
aaaaatatttcaggccgatatgataccagttgg

SEQ ID NO: 490707 - DNA, 33 bp, Homo sapien
tccccatattattttaacatcctagggagcaca

SEQ ID NO: 490708 - DNA, 33 bp, Homo sapien
tccccatattattttaccatcctagggagcaca

SEQ ID NO: 490709 - DNA, 33 bp, Homo sapien
attgtgaaagcacccacctaagcagttcctttt

SEQ ID NO: 490710 - DNA, 33 bp, Homo sapien
attgtgaaagcacccatctaagcagttcctttt

SEQ ID NO: 490711 - DNA, 33 bp, Homo sapien
attgcagcattattcaacctagtcaagatatgg

SEQ ID NO: 490712 - DNA, 33 bp, Homo sapien
attgcagcattattcaccctagtcaagatatgg

SEQ ID NO: 490713 - DNA, 33 bp, Homo sapien
aagtatgaaactcacaatggttagtatacagtc

SEQ ID NO: 490714 - DNA, 33 bp, Homo sapien
aagtatgaaactcacagtggttagtatacagtc

SEQ ID NO: 490715 - DNA, 33 bp, Homo sapien
tttatgttactaataactgcccttgaatcaggt

SEQ ID NO: 490716 - DNA, 33 bp, Homo sapien
tttatgttactaataagtgcccttgaatcaggt

SEQ ID NO: 490717 - DNA, 33 bp, Homo sapien
tcacttccttctccccaacagatgcagcaattt

SEQ ID NO: 490718 - DNA, 33 bp, Homo sapien
tcacttccttctcccccacagatgcagcaattt

SEQ ID NO: 490719 - DNA, 33 bp, Homo sapien
tttaaatctcctatcaacttgtacttttattat

SEQ ID NO: 490720 - DNA, 33 bp, Homo sapien
tttaaatctcctatcaccttgtacttttattat

SEQ ID NO: 490721 - DNA, 33 bp, Homo sapien
aaatttaatatgcacacaatgattgatctcttt

SEQ ID NO: 490722 - DNA, 33 bp, Homo sapien
aaatttaatatgcacataatgattgatctcttt

SEQ ID NO: 490723 - DNA, 33 bp, Homo sapien
ttaactgaaggcccataacagcagtgcattatg

SEQ ID NO: 490724 - DNA, 33 bp, Homo sapien
ttaactgaaggcccatcacagcagtgcattatg

SEQ ID NO: 490725 - DNA, 33 bp, Homo sapien
tttggaaaatttggcacgaatatttcactgttc

SEQ ID NO: 490726 - DNA, 33 bp, Homo sapien
tttggaaaatttggcatgaatatttcactgttc

SEQ ID NO: 490727 - DNA, 33 bp, Homo sapien
cagctagttgccattacgaatcaggcagttgtg

SEQ ID NO: 490728 - DNA, 33 bp, Homo sapien
cagctagttgccattatgaatcaggcagttgtg

SEQ ID NO: 490729 - DNA, 33 bp, Homo sapien
tgcatcggttgactgtaaactgaagtatcattt

SEQ ID NO: 490730 - DNA, 33 bp, Homo sapien
tgcatcggttgactgtgaactgaagtatcattt

SEQ ID NO: 490731 - DNA, 33 bp, Homo sapien
caggctcctgcatatacctcttgtagatccatt

SEQ ID NO: 490732 - DNA, 33 bp, Homo sapien
caggctcctgcatatatctcttgtagatccatt

SEQ ID NO: 490733 - DNA, 33 bp, Homo sapien
aattggctgtaacaacagagtctaattcacaag

SEQ ID NO: 490734 - DNA, 33 bp, Homo sapien
aattggctgtaacaacggagtctaattcacaag

SEQ ID NO: 490735 - DNA, 33 bp, Homo sapien
ctacagtcatgatatcaaaggcgagattcatgt

SEQ ID NO: 490736 - DNA, 33 bp, Homo sapien
ctacagtcatgatatcgaaggcgagattcatgt

SEQ ID NO: 490737 - DNA, 33 bp, Homo sapien
cgatcagtgattacgcaataaagtgaggactgt

SEQ ID NO: 490738 - DNA, 33 bp, Homo sapien
cgatcagtgattacgccataaagtgaggactgt

SEQ ID NO: 490739 - DNA, 33 bp, Homo sapien
caaaggctctgaggaaaaagttagcttagtgtt

SEQ ID NO: 490740 - DNA, 33 bp, Homo sapien
caaaggctctgaggaagaagttagcttagtgtt

SEQ ID NO: 490741 - DNA, 33 bp, Homo sapien
ctgtcttcaagagtcacgtctcatatgcaatga

SEQ ID NO: 490742 - DNA, 33 bp, Homo sapien
ctgtcttcaagagtcatgtctcatatgcaatga

SEQ ID NO: 490743 - DNA, 33 bp, Homo sapien
tgtgttatttggaagacgctttttcatagactt

SEQ ID NO: 490744 - DNA, 33 bp, Homo sapien
tgtgttatttggaagatgctttttcatagactt

SEQ ID NO: 490745 - DNA, 33 bp, Homo sapien
cttactattaaacacaagattctgagaaagagt

SEQ ID NO: 490746 - DNA, 33 bp, Homo sapien
cttactattaaacacaggattctgagaaagagt

SEQ ID NO: 490747 - DNA, 33 bp, Homo sapien
ggacattaagtattggacactggaatatacact

SEQ ID NO: 490748 - DNA, 33 bp, Homo sapien
ggacattaagtattgggcactggaatatacact

SEQ ID NO: 490749 - DNA, 33 bp, Homo sapien
tcttttggttggaatacaggtctccattggaaa

SEQ ID NO: 490750 - DNA, 33 bp, Homo sapien
tcttttggttggaatataggtctccattggaaa

SEQ ID NO: 490751 - DNA, 33 bp, Homo sapien
tggagtagtcagtggagagcaaataaaatgact

SEQ ID NO: 490752 - DNA, 33 bp, Homo sapien
tggagtagtcagtggatagcaaataaaatgact

SEQ ID NO: 490753 - DNA, 33 bp, Homo sapien
tgattatatggaagcaccatactttagttgacc

SEQ ID NO: 490754 - DNA, 33 bp, Homo sapien
tgattatatggaagcatcatactttagttgacc

SEQ ID NO: 490755 - DNA, 33 bp, Homo sapien
tcatactgtgatgtcacatgagatgctgagcta

SEQ ID NO: 490756 - DNA, 33 bp, Homo sapien
tcatactgtgatgtcatatgagatgctgagcta

SEQ ID NO: 490757 - DNA, 33 bp, Homo sapien
gagacaaactgagctcaaggtctataggcccta

SEQ ID NO: 490758 - DNA, 33 bp, Homo sapien
gagacaaactgagctcgaggtctataggcccta

SEQ ID NO: 490759 - DNA, 33 bp, Homo sapien
atgtctctgataaacaaagaggtgcctttccag

SEQ ID NO: 490760 - DNA, 33 bp, Homo sapien
atgtctctgataaacacagaggtgcctttccag

SEQ ID NO: 490761 - DNA, 33 bp, Homo sapien
aaggaaaagctcagtacagactagaatcattaa

SEQ ID NO: 490762 - DNA, 33 bp, Homo sapien
aaggaaaagctcagtatagactagaatcattaa

SEQ ID NO: 490763 - DNA, 33 bp, Homo sapien
ccatgcaaaattcttacaaacacattcacactc

SEQ ID NO: 490764 - DNA, 33 bp, Homo sapien
ccatgcaaaattcttagaaacacattcacactc

SEQ ID NO: 490765 - DNA, 33 bp, Homo sapien
agagtaggtgctgttacggatacaaaaatgtat

SEQ ID NO: 490766 - DNA, 33 bp, Homo sapien
agagtaggtgctgttatggatacaaaaatgtat

SEQ ID NO: 490767 - DNA, 33 bp, Homo sapien
gctaagctagtggataaaagtccaaactaggaa

SEQ ID NO: 490768 - DNA, 33 bp, Homo sapien
gctaagctagtggatagaagtccaaactaggaa

SEQ ID NO: 490769 - DNA, 33 bp, Homo sapien
ttttcgtgattatttgaatcctacctgtaactt

SEQ ID NO: 490770 - DNA, 33 bp, Homo sapien
ttttcgtgattatttgtatcctacctgtaactt

SEQ ID NO: 490771 - DNA, 33 bp, Homo sapien
atcaatgtttagtctgcactcagagggtctctg

SEQ ID NO: 490772 - DNA, 33 bp, Homo sapien
atcaatgtttagtctgtactcagagggtctctg

SEQ ID NO: 490773 - DNA, 33 bp, Homo sapien
gcagttgctgtaagtcaaataataacttcaacc

SEQ ID NO: 490774 - DNA, 33 bp, Homo sapien
gcagttgctgtaagtcgaataataacttcaacc

SEQ ID NO: 490775 - DNA, 33 bp, Homo sapien
tggtgctgagttaggcaaaatgggagttaaata

SEQ ID NO: 490776 - DNA, 33 bp, Homo sapien
tggtgctgagttaggcgaaatgggagttaaata

SEQ ID NO: 490777 - DNA, 33 bp, Homo sapien
tagtctgccatcttcccaaagaccaacaccaac

SEQ ID NO: 490778 - DNA, 33 bp, Homo sapien
tagtctgccatcttcctaaagaccaacaccaac

SEQ ID NO: 490779 - DNA, 33 bp, Homo sapien
ttatgctttataggcccactggaataattattc

SEQ ID NO: 490780 - DNA, 33 bp, Homo sapien
ttatgctttataggcctactggaataattattc

SEQ ID NO: 490781 - DNA, 33 bp, Homo sapien
tatgacactatttctaatacaaagcaattttat

SEQ ID NO: 490782 - DNA, 33 bp, Homo sapien
tatgacactatttctagtacaaagcaattttat

SEQ ID NO: 490783 - DNA, 33 bp, Homo sapien
aagtgtgtgataattcccagtgtggacaacctt

SEQ ID NO: 490784 - DNA, 33 bp, Homo sapien
aagtgtgtgataattctcagtgtggacaacctt

SEQ ID NO: 490785 - DNA, 33 bp, Homo sapien
acatctgagatttaaacgttttttaatagagtc

SEQ ID NO: 490786 - DNA, 33 bp, Homo sapien
acatctgagatttaaatgttttttaatagagtc

SEQ ID NO: 490787 - DNA, 33 bp, Homo sapien
agacagagaaaggagaaacagagatatactatt

SEQ ID NO: 490788 - DNA, 33 bp, Homo sapien
agacagagaaaggagagacagagatatactatt

SEQ ID NO: 490789 - DNA, 33 bp, Homo sapien
gccatgtacaggactacgttggcttctctgata

SEQ ID NO: 490790 - DNA, 33 bp, Homo sapien
gccatgtacaggactatgttggcttctctgata

SEQ ID NO: 490791 - DNA, 33 bp, Homo sapien
gcaataaactgtcttacaggaagaaaagtatcc

SEQ ID NO: 490792 - DNA, 33 bp, Homo sapien
gcaataaactgtcttataggaagaaaagtatcc

SEQ ID NO: 490793 - DNA, 33 bp, Homo sapien
cagtggcatggaagccagaaaaaaatgctcttg

SEQ ID NO: 490794 - DNA, 33 bp, Homo sapien
cagtggcatggaagccggaaaaaaatgctcttg

SEQ ID NO: 490795 - DNA, 33 bp, Homo sapien
tggcaaaaagtatgcacggatggcctatatacc

SEQ ID NO: 490796 - DNA, 33 bp, Homo sapien
tggcaaaaagtatgcatggatggcctatatacc

SEQ ID NO: 490797 - DNA, 33 bp, Homo sapien
atattaaattgtcacaacctcactctgaatact

SEQ ID NO: 490798 - DNA, 33 bp, Homo sapien
atattaaattgtcacatcctcactctgaatact

SEQ ID NO: 490799 - DNA, 33 bp, Homo sapien
aacattgattttggaaagcctcaaagaatttat

SEQ ID NO: 490800 - DNA, 33 bp, Homo sapien
aacattgattttggaaggcctcaaagaatttat

SEQ ID NO: 490801 - DNA, 33 bp, Homo sapien
attagttgtgagaggacaaaaatcacaattata

SEQ ID NO: 490802 - DNA, 33 bp, Homo sapien
attagttgtgagaggagaaaaatcacaattata

SEQ ID NO: 490803 - DNA, 33 bp, Homo sapien
agaaaacagaatataactggaaacagacttctt

SEQ ID NO: 490804 - DNA, 33 bp, Homo sapien
agaaaacagaatataattggaaacagacttctt

SEQ ID NO: 490805 - DNA, 33 bp, Homo sapien
ttcagccttgaaaagaccatatccataagaaat

SEQ ID NO: 490806 - DNA, 33 bp, Homo sapien
ttcagccttgaaaagagcatatccataagaaat

SEQ ID NO: 490807 - DNA, 33 bp, Homo sapien
gttaagtgctaatcaaactcatttccttttcct

SEQ ID NO: 490808 - DNA, 33 bp, Homo sapien
gttaagtgctaatcaagctcatttccttttcct

SEQ ID NO: 490809 - DNA, 33 bp, Homo sapien
ttttattgttgcataacacagtttttagttgct

SEQ ID NO: 490810 - DNA, 33 bp, Homo sapien
ttttattgttgcataatacagtttttagttgct

SEQ ID NO: 490811 - DNA, 33 bp, Homo sapien
catcatagcttactcacgttcttcaataacctc

SEQ ID NO: 490812 - DNA, 33 bp, Homo sapien
catcatagcttactcatgttcttcaataacctc

SEQ ID NO: 490813 - DNA, 33 bp, Homo sapien
ataatgtctaaggtagaaatgagaggattggct

SEQ ID NO: 490814 - DNA, 33 bp, Homo sapien
ataatgtctaaggtagcaatgagaggattggct

SEQ ID NO: 490815 - DNA, 33 bp, Homo sapien
tgtttagttgggtagcccttcttagctctcata

SEQ ID NO: 490816 - DNA, 33 bp, Homo sapien
tgtttagttgggtagcgcttcttagctctcata

SEQ ID NO: 490817 - DNA, 33 bp, Homo sapien
attcaccagaatagcccaagctctattgcagtc

SEQ ID NO: 490818 - DNA, 33 bp, Homo sapien
attcaccagaatagccgaagctctattgcagtc

SEQ ID NO: 490819 - DNA, 33 bp, Homo sapien
cagggccacttgatccagagacttcagcttgcc

SEQ ID NO: 490820 - DNA, 33 bp, Homo sapien
cagggccacttgatccggagacttcagcttgcc

SEQ ID NO: 490821 - DNA, 33 bp, Homo sapien
aaaatttaaagtgatgccagtaagaaatagaaa

SEQ ID NO: 490822 - DNA, 33 bp, Homo sapien
aaaatttaaagtgatgtcagtaagaaatagaaa

SEQ ID NO: 490823 - DNA, 33 bp, Homo sapien
taaattttcacatccaataactcatgtcagtgt

SEQ ID NO: 490824 - DNA, 33 bp, Homo sapien
taaattttcacatccagtaactcatgtcagtgt

SEQ ID NO: 490825 - DNA, 33 bp, Homo sapien
aagtgatttggcttaacctgtggaaaataagtc

SEQ ID NO: 490826 - DNA, 33 bp, Homo sapien
aagtgatttggcttaagctgtggaaaataagtc

SEQ ID NO: 490827 - DNA, 33 bp, Homo sapien
caatatcctcctaaagacatgtagattcaacaa

SEQ ID NO: 490828 - DNA, 33 bp, Homo sapien
caatatcctcctaaaggcatgtagattcaacaa

SEQ ID NO: 490829 - DNA, 33 bp, Homo sapien
caggaatctatgataggaatatggacttctggg

SEQ ID NO: 490830 - DNA, 33 bp, Homo sapien
caggaatctatgatagtaatatggacttctggg

SEQ ID NO: 490831 - DNA, 33 bp, Homo sapien
tctcctgacatccaggacaatgctcttttcatg

SEQ ID NO: 490832 - DNA, 33 bp, Homo sapien
tctcctgacatccaggccaatgctcttttcatg

SEQ ID NO: 490833 - DNA, 33 bp, Homo sapien
taaaaacattcaaggcaaatatactggcacttg

SEQ ID NO: 490834 - DNA, 33 bp, Homo sapien
taaaaacattcaaggcgaatatactggcacttg

SEQ ID NO: 490835 - DNA, 33 bp, Homo sapien
tttctttctaatttcactccctgttgaatcttc

SEQ ID NO: 490836 - DNA, 33 bp, Homo sapien
tttctttctaatttcattccctgttgaatcttc

SEQ ID NO: 490837 - DNA, 33 bp, Homo sapien
tataaaggatatgctgaagtattaatcatctct

SEQ ID NO: 490838 - DNA, 33 bp, Homo sapien
tataaaggatatgctggagtattaatcatctct

SEQ ID NO: 490839 - DNA, 33 bp, Homo sapien
gaaccactgaaaaataatacaaggtaatagatg

SEQ ID NO: 490840 - DNA, 33 bp, Homo sapien
gaaccactgaaaaatactacaaggtaatagatg

SEQ ID NO: 490841 - DNA, 33 bp, Homo sapien
tgaagtataaagacaaacaaagctaaatacatt

SEQ ID NO: 490842 - DNA, 33 bp, Homo sapien
tgaagtataaagacaagcaaagctaaatacatt

SEQ ID NO: 490843 - DNA, 33 bp, Homo sapien
aaacaggactgacagaccaaaggaagtggctaa

SEQ ID NO: 490844 - DNA, 33 bp, Homo sapien
aaacaggactgacagagcaaaggaagtggctaa

SEQ ID NO: 490845 - DNA, 33 bp, Homo sapien
attgggaccacagtataaaaaagtgcctatagt

SEQ ID NO: 490846 - DNA, 33 bp, Homo sapien
attgggaccacagtatgaaaaagtgcctatagt

SEQ ID NO: 490847 - DNA, 33 bp, Homo sapien
gtcccttctggttaccaattatttcaaacttga

SEQ ID NO: 490848 - DNA, 33 bp, Homo sapien
gtcccttctggttacctattatttcaaacttga

SEQ ID NO: 490849 - DNA, 33 bp, Homo sapien
tcgatgacaaacccaaagagaagaattgcaggg

SEQ ID NO: 490850 - DNA, 33 bp, Homo sapien
tcgatgacaaacccaacgagaagaattgcaggg

SEQ ID NO: 490851 - DNA, 33 bp, Homo sapien
ttcttagagctcaatgacaccattacttcaatg

SEQ ID NO: 490852 - DNA, 33 bp, Homo sapien
ttcttagagctcaatgtcaccattacttcaatg

SEQ ID NO: 490853 - DNA, 33 bp, Homo sapien
gaaatgtagctatgtacgaatttccatttttta

SEQ ID NO: 490854 - DNA, 33 bp, Homo sapien
gaaatgtagctatgtatgaatttccatttttta

SEQ ID NO: 490855 - DNA, 33 bp, Homo sapien
ccaatcactgggagaaagtacatatcaaggtgg

SEQ ID NO: 490856 - DNA, 33 bp, Homo sapien
ccaatcactgggagaaggtacatatcaaggtgg

SEQ ID NO: 490857 - DNA, 33 bp, Homo sapien
ctgtggaacagagcagaactggagttggtgaca

SEQ ID NO: 490858 - DNA, 33 bp, Homo sapien
ctgtggaacagagcaggactggagttggtgaca

SEQ ID NO: 490859 - DNA, 33 bp, Homo sapien
taggtgttcacagcaaacagctttcagtgtgaa

SEQ ID NO: 490860 - DNA, 33 bp, Homo sapien
taggtgttcacagcaagcagctttcagtgtgaa

SEQ ID NO: 490861 - DNA, 33 bp, Homo sapien
ctaacctataagagacaacagttaagcaatggt

SEQ ID NO: 490862 - DNA, 33 bp, Homo sapien
ctaacctataagagacgacagttaagcaatggt

SEQ ID NO: 490863 - DNA, 33 bp, Homo sapien
aatccagacagaatcaaataattccattacctt

SEQ ID NO: 490864 - DNA, 33 bp, Homo sapien
aatccagacagaatcatataattccattacctt

SEQ ID NO: 490865 - DNA, 33 bp, Homo sapien
taatattttggatacactggggtaaaaatatat

SEQ ID NO: 490866 - DNA, 33 bp, Homo sapien
taatattttggatacattggggtaaaaatatat

SEQ ID NO: 490867 - DNA, 33 bp, Homo sapien
ggtttaaataatctaggccaactcttttcacag

SEQ ID NO: 490868 - DNA, 33 bp, Homo sapien
ggtttaaataatctagtccaactcttttcacag

SEQ ID NO: 490869 - DNA, 33 bp, Homo sapien
atactcctatgccccaagtacaccagtgaggga

SEQ ID NO: 490870 - DNA, 33 bp, Homo sapien
atactcctatgccccaggtacaccagtgaggga

SEQ ID NO: 490871 - DNA, 33 bp, Homo sapien
atgtggatcaagctaaacagtaatgcctttaat

SEQ ID NO: 490872 - DNA, 33 bp, Homo sapien
atgtggatcaagctaagcagtaatgcctttaat

SEQ ID NO: 490873 - DNA, 33 bp, Homo sapien
gagcttatcaacaccacagctaactacagggct

SEQ ID NO: 490874 - DNA, 33 bp, Homo sapien
gagcttatcaacaccagagctaactacagggct

SEQ ID NO: 490875 - DNA, 33 bp, Homo sapien
aaacaatgccagaatacgaaaagcttactgggc

SEQ ID NO: 490876 - DNA, 33 bp, Homo sapien
aaacaatgccagaatatgaaaagcttactgggc

SEQ ID NO: 490877 - DNA, 33 bp, Homo sapien
catgaatgttcacttaaaaatattcatcaaacc

SEQ ID NO: 490878 - DNA, 33 bp, Homo sapien
catgaatgttcacttacaaatattcatcaaacc

SEQ ID NO: 490879 - DNA, 33 bp, Homo sapien
ttttcttgactagaacaaaaggtgcatgaatgt

SEQ ID NO: 490880 - DNA, 33 bp, Homo sapien
ttttcttgactagaacgaaaggtgcatgaatgt

SEQ ID NO: 490881 - DNA, 33 bp, Homo sapien
cataacagttttaccaatctctctcagaagcct

SEQ ID NO: 490882 - DNA, 33 bp, Homo sapien
cataacagttttaccattctctctcagaagcct

SEQ ID NO: 490883 - DNA, 33 bp, Homo sapien
gcagtgaactttcacacgcgtcatctcgttacc

SEQ ID NO: 490884 - DNA, 33 bp, Homo sapien
gcagtgaactttcacatgcgtcatctcgttacc

SEQ ID NO: 490885 - DNA, 33 bp, Homo sapien
catggaaaagaaaggacgtaaatagggccttaa

SEQ ID NO: 490886 - DNA, 33 bp, Homo sapien
catggaaaagaaaggatgtaaatagggccttaa

SEQ ID NO: 490887 - DNA, 33 bp, Homo sapien
ctctgcttcttagtcaataagtttgtgatcttc

SEQ ID NO: 490888 - DNA, 33 bp, Homo sapien
ctctgcttcttagtcagtaagtttgtgatcttc

SEQ ID NO: 490889 - DNA, 33 bp, Homo sapien
cagaagtactaactcaatctccaatgtcacata

SEQ ID NO: 490890 - DNA, 33 bp, Homo sapien
cagaagtactaactcagtctccaatgtcacata

SEQ ID NO: 490891 - DNA, 33 bp, Homo sapien
aactacctgaaaatcaaaccaaaaagcagaagt

SEQ ID NO: 490892 - DNA, 33 bp, Homo sapien
aactacctgaaaatcagaccaaaaagcagaagt

SEQ ID NO: 490893 - DNA, 33 bp, Homo sapien
gctcaatgaatggtgaccaaatgtctgtgttag

SEQ ID NO: 490894 - DNA, 33 bp, Homo sapien
gctcaatgaatggtgagcaaatgtctgtgttag

SEQ ID NO: 490895 - DNA, 33 bp, Homo sapien
caagaccactgtatacaaaaaccagagcacata

SEQ ID NO: 490896 - DNA, 33 bp, Homo sapien
caagaccactgtatacgaaaaccagagcacata

SEQ ID NO: 490897 - DNA, 33 bp, Homo sapien
agacgttgagattaaaccagtaagtgacatttc

SEQ ID NO: 490898 - DNA, 33 bp, Homo sapien
agacgttgagattaaatcagtaagtgacatttc

SEQ ID NO: 490899 - DNA, 33 bp, Homo sapien
aagttctgaaagataaataggattcaaccagct

SEQ ID NO: 490900 - DNA, 33 bp, Homo sapien
aagttctgaaagataagtaggattcaaccagct

SEQ ID NO: 490901 - DNA, 33 bp, Homo sapien
tctggtaaggggcttcaagtgatagattttaca

SEQ ID NO: 490902 - DNA, 33 bp, Homo sapien
tctggtaaggggcttcgagtgatagattttaca

SEQ ID NO: 490903 - DNA, 33 bp, Homo sapien
cagagtcagtgggttccagaggccaagaactat

SEQ ID NO: 490904 - DNA, 33 bp, Homo sapien
cagagtcagtgggttcgagaggccaagaactat

SEQ ID NO: 490905 - DNA, 33 bp, Homo sapien
gtattctgtcctacaaaagtctctaatctttct

SEQ ID NO: 490906 - DNA, 33 bp, Homo sapien
gtattctgtcctacaagagtctctaatctttct

SEQ ID NO: 490907 - DNA, 33 bp, Homo sapien
ctttctagacatgtagcatttttgttgagattg

SEQ ID NO: 490908 - DNA, 33 bp, Homo sapien
ctttctagacatgtagtatttttgttgagattg

SEQ ID NO: 490909 - DNA, 33 bp, Homo sapien
gtaaagaaaaccactcaattccttcatataatt

SEQ ID NO: 490910 - DNA, 33 bp, Homo sapien
gtaaagaaaaccactcgattccttcatataatt

SEQ ID NO: 490911 - DNA, 33 bp, Homo sapien
aatgtttagagatgaacgatgagagcggacaca

SEQ ID NO: 490912 - DNA, 33 bp, Homo sapien
aatgtttagagatgaatgatgagagcggacaca

SEQ ID NO: 490913 - DNA, 33 bp, Homo sapien
tatacaactggacatacagtctcaacataaata

SEQ ID NO: 490914 - DNA, 33 bp, Homo sapien
tatacaactggacatatagtctcaacataaata

SEQ ID NO: 490915 - DNA, 33 bp, Homo sapien
gctttagatctttagccataaacatgccagcat

SEQ ID NO: 490916 - DNA, 33 bp, Homo sapien
gctttagatctttagcgataaacatgccagcat

SEQ ID NO: 490917 - DNA, 33 bp, Homo sapien
aattatttgaaaacaaagacctaatcatatttt

SEQ ID NO: 490918 - DNA, 33 bp, Homo sapien
aattatttgaaaacaaggacctaatcatatttt

SEQ ID NO: 490919 - DNA, 33 bp, Homo sapien
ctatattgaattctcaagtaatccatgctgtga

SEQ ID NO: 490920 - DNA, 33 bp, Homo sapien
ctatattgaattctcaggtaatccatgctgtga

SEQ ID NO: 490921 - DNA, 33 bp, Homo sapien
aaaaaacaaaaaacaccgcgtgagagatctgaa

SEQ ID NO: 490922 - DNA, 33 bp, Homo sapien
aaaaaacaaaaaacactgcgtgagagatctgaa

SEQ ID NO: 490923 - DNA, 33 bp, Homo sapien
tccttttcttccaccactcccaaagcagtatgt

SEQ ID NO: 490924 - DNA, 33 bp, Homo sapien
tccttttcttccaccagtcccaaagcagtatgt

SEQ ID NO: 490925 - DNA, 33 bp, Homo sapien
cagaattaatttgcaacgctgtcatcaacactg

SEQ ID NO: 490926 - DNA, 33 bp, Homo sapien
cagaattaatttgcaatgctgtcatcaacactg

SEQ ID NO: 490927 - DNA, 33 bp, Homo sapien
aaacattaggggtcaaatgaaatcctgatatga

SEQ ID NO: 490928 - DNA, 33 bp, Homo sapien
aaacattaggggtcaattgaaatcctgatatga

SEQ ID NO: 490929 - DNA, 33 bp, Homo sapien
taccaatatattagcaaagaagttcccaaaaag

SEQ ID NO: 490930 - DNA, 33 bp, Homo sapien
taccaatatattagcagagaagttcccaaaaag

SEQ ID NO: 490931 - DNA, 33 bp, Homo sapien
agagcatactacaagaacaactgtattagaagg

SEQ ID NO: 490932 - DNA, 33 bp, Homo sapien
agagcatactacaagatcaactgtattagaagg

SEQ ID NO: 490933 - DNA, 33 bp, Homo sapien
taacattacatccctaaccccaactcctcagaa

SEQ ID NO: 490934 - DNA, 33 bp, Homo sapien
taacattacatccctacccccaactcctcagaa

SEQ ID NO: 490935 - DNA, 33 bp, Homo sapien
gctgggagcaaaatcaatgacctgagcttgatc

SEQ ID NO: 490936 - DNA, 33 bp, Homo sapien
gctgggagcaaaatcagtgacctgagcttgatc

SEQ ID NO: 490937 - DNA, 33 bp, Homo sapien
accagtgtacaacatagaattctgtaggtgtct

SEQ ID NO: 490938 - DNA, 33 bp, Homo sapien
accagtgtacaacatataattctgtaggtgtct

SEQ ID NO: 490939 - DNA, 33 bp, Homo sapien
atcttctgtttcaccaaaccaaaagaaagatct

SEQ ID NO: 490940 - DNA, 33 bp, Homo sapien
atcttctgtttcaccagaccaaaagaaagatct

SEQ ID NO: 490941 - DNA, 33 bp, Homo sapien
aggatcttttttctcaatcatgttgctttatct

SEQ ID NO: 490942 - DNA, 33 bp, Homo sapien
aggatcttttttctcagtcatgttgctttatct

SEQ ID NO: 490943 - DNA, 33 bp, Homo sapien
ttagggttctccagtaccaaaaggggtgtgtgt

SEQ ID NO: 490944 - DNA, 33 bp, Homo sapien
ttagggttctccagtatcaaaaggggtgtgtgt

SEQ ID NO: 490945 - DNA, 33 bp, Homo sapien
tacctattgggtactaggtatgctatctgggtg

SEQ ID NO: 490946 - DNA, 33 bp, Homo sapien
tacctattgggtactatgtatgctatctgggtg

SEQ ID NO: 490947 - DNA, 33 bp, Homo sapien
aaattaaaggataaaacgaagtttgagaagttt

SEQ ID NO: 490948 - DNA, 33 bp, Homo sapien
aaattaaaggataaaatgaagtttgagaagttt

SEQ ID NO: 490949 - DNA, 33 bp, Homo sapien
ttcttggtttcttttacggactccacttctata

SEQ ID NO: 490950 - DNA, 33 bp, Homo sapien
ttcttggtttcttttatggactccacttctata

SEQ ID NO: 490951 - DNA, 33 bp, Homo sapien
attatactatcttttcaaagcactgtgttgtta

SEQ ID NO: 490952 - DNA, 33 bp, Homo sapien
attatactatcttttcgaagcactgtgttgtta

SEQ ID NO: 490953 - DNA, 33 bp, Homo sapien
gacttagatatccaaactttcccttgaagtcct

SEQ ID NO: 490954 - DNA, 33 bp, Homo sapien
gacttagatatccaaagtttcccttgaagtcct

SEQ ID NO: 490955 - DNA, 33 bp, Homo sapien
gataaaagcaggcttaaagtctggcccaataag

SEQ ID NO: 490956 - DNA, 33 bp, Homo sapien
gataaaagcaggcttagagtctggcccaataag

SEQ ID NO: 490957 - DNA, 33 bp, Homo sapien
atcatcttttggcatccatcatctatatctaaa

SEQ ID NO: 490958 - DNA, 33 bp, Homo sapien
atcatcttttggcatctatcatctatatctaaa

SEQ ID NO: 490959 - DNA, 33 bp, Homo sapien
caggagcacagccttcaaagaggaagcatgaca

SEQ ID NO: 490960 - DNA, 33 bp, Homo sapien
caggagcacagccttcgaagaggaagcatgaca

SEQ ID NO: 490961 - DNA, 33 bp, Homo sapien
cctgggctcccagttacgccctttgtttttata

SEQ ID NO: 490962 - DNA, 33 bp, Homo sapien
cctgggctcccagttatgccctttgtttttata

SEQ ID NO: 490963 - DNA, 33 bp, Homo sapien
gaagaacctctgctccaatcaactatcttctgc

SEQ ID NO: 490964 - DNA, 33 bp, Homo sapien
gaagaacctctgctcccatcaactatcttctgc

SEQ ID NO: 490965 - DNA, 33 bp, Homo sapien
ggaaaggctcctagaaaatcatctaagctccga

SEQ ID NO: 490966 - DNA, 33 bp, Homo sapien
ggaaaggctcctagaacatcatctaagctccga

SEQ ID NO: 490967 - DNA, 33 bp, Homo sapien
tgattgaaacatggatgaataatttgtctatca

SEQ ID NO: 490968 - DNA, 33 bp, Homo sapien
tgattgaaacatggattaataatttgtctatca

SEQ ID NO: 490969 - DNA, 33 bp, Homo sapien
acaatttgcctagtaggatttgtacggaacaag

SEQ ID NO: 490970 - DNA, 33 bp, Homo sapien
acaatttgcctagtagtatttgtacggaacaag

SEQ ID NO: 490971 - DNA, 33 bp, Homo sapien
tcaaatgaagcgaagacacaagtgacaccaatg

SEQ ID NO: 490972 - DNA, 33 bp, Homo sapien
tcaaatgaagcgaagatacaagtgacaccaatg

SEQ ID NO: 490973 - DNA, 33 bp, Homo sapien
tacagtgtgtcaactcagaataataagttgttc

SEQ ID NO: 490974 - DNA, 33 bp, Homo sapien
tacagtgtgtcaactcggaataataagttgttc

SEQ ID NO: 490975 - DNA, 33 bp, Homo sapien
gatataaaattgcttcaacaagatataagacac

SEQ ID NO: 490976 - DNA, 33 bp, Homo sapien
gatataaaattgcttcgacaagatataagacac

SEQ ID NO: 490977 - DNA, 33 bp, Homo sapien
gatgacagaacatttaaaacaagaacatgatca

SEQ ID NO: 490978 - DNA, 33 bp, Homo sapien
gatgacagaacatttagaacaagaacatgatca

SEQ ID NO: 490979 - DNA, 33 bp, Homo sapien
ttcccagagatacctacctgaaatgtagtgtgg

SEQ ID NO: 490980 - DNA, 33 bp, Homo sapien
ttcccagagatacctagctgaaatgtagtgtgg

SEQ ID NO: 490981 - DNA, 33 bp, Homo sapien
gtgtaaactctattacaagtctaatacatggta

SEQ ID NO: 490982 - DNA, 33 bp, Homo sapien
gtgtaaactctattacgagtctaatacatggta

SEQ ID NO: 490983 - DNA, 33 bp, Homo sapien
tctcttatttgaacaaggagttcatcacttgtc

SEQ ID NO: 490984 - DNA, 33 bp, Homo sapien
tctcttatttgaacaatgagttcatcacttgtc

SEQ ID NO: 490985 - DNA, 33 bp, Homo sapien
catccatagagtgctacgcagtctcaataagtg

SEQ ID NO: 490986 - DNA, 33 bp, Homo sapien
catccatagagtgctatgcagtctcaataagtg

SEQ ID NO: 490987 - DNA, 33 bp, Homo sapien
ccatacaccacatcaggagagtcattttccctc

SEQ ID NO: 490988 - DNA, 33 bp, Homo sapien
ccatacaccacatcagtagagtcattttccctc

SEQ ID NO: 490989 - DNA, 33 bp, Homo sapien
ggcacccgttacttagcagaccgcgaaagggag

SEQ ID NO: 490990 - DNA, 33 bp, Homo sapien
ggcacccgttacttagtagaccgcgaaagggag

SEQ ID NO: 490991 - DNA, 33 bp, Homo sapien
tttatgtaaagtgaaacaaataaggctgcttct

SEQ ID NO: 490992 - DNA, 33 bp, Homo sapien
tttatgtaaagtgaaagaaataaggctgcttct

SEQ ID NO: 490993 - DNA, 33 bp, Homo sapien
ttttaaagatgtggaccgggggctgttttctca

SEQ ID NO: 490994 - DNA, 33 bp, Homo sapien
ttttaaagatgtggactgggggctgttttctca

SEQ ID NO: 490995 - DNA, 33 bp, Homo sapien
ataaacaattgactaaccttcaagaatgaaatt

SEQ ID NO: 490996 - DNA, 33 bp, Homo sapien
ataaacaattgactaagcttcaagaatgaaatt

SEQ ID NO: 490997 - DNA, 33 bp, Homo sapien
ttactacttcctgtgaacttaagccaattactt

SEQ ID NO: 490998 - DNA, 33 bp, Homo sapien
ttactacttcctgtgaccttaagccaattactt

SEQ ID NO: 490999 - DNA, 33 bp, Homo sapien
cagctgctttgacacccggagtgccctttccct

SEQ ID NO: 491000 - DNA, 33 bp, Homo sapien
cagctgctttgacacctggagtgccctttccct

SEQ ID NO: 491001 - DNA, 33 bp, Homo sapien
gagacaggaaagcctccgaagcaagaaggtctc

SEQ ID NO: 491002 - DNA, 33 bp, Homo sapien
gagacaggaaagcctctgaagcaagaaggtctc

SEQ ID NO: 491003 - DNA, 33 bp, Homo sapien
gtgtgtgaatataatacgtctcaacctcaactt

SEQ ID NO: 491004 - DNA, 33 bp, Homo sapien
gtgtgtgaatataatatgtctcaacctcaactt

SEQ ID NO: 491005 - DNA, 33 bp, Homo sapien
gactttagtttgcaagcctggatttagagagca

SEQ ID NO: 491006 - DNA, 33 bp, Homo sapien
gactttagtttgcaagtctggatttagagagca

SEQ ID NO: 491007 - DNA, 33 bp, Homo sapien
tctgtcgctataacagaacttggtaagcattat

SEQ ID NO: 491008 - DNA, 33 bp, Homo sapien
tctgtcgctataacagcacttggtaagcattat

SEQ ID NO: 491009 - DNA, 33 bp, Homo sapien
aaatagattgctattcaaaaacgaaacatagag

SEQ ID NO: 491010 - DNA, 33 bp, Homo sapien
aaatagattgctattccaaaacgaaacatagag

SEQ ID NO: 491011 - DNA, 33 bp, Homo sapien
atgaaatgacattttagcatctctctcactgtg

SEQ ID NO: 491012 - DNA, 33 bp, Homo sapien
atgaaatgacattttatcatctctctcactgtg

SEQ ID NO: 491013 - DNA, 33 bp, Homo sapien
atatcttgagaggaaaacaaagtcaggaaagat

SEQ ID NO: 491014 - DNA, 33 bp, Homo sapien
atatcttgagaggaaatcaaagtcaggaaagat

SEQ ID NO: 491015 - DNA, 33 bp, Homo sapien
ggaagtttcagaaaaacgaggggataaaaataa

SEQ ID NO: 491016 - DNA, 33 bp, Homo sapien
ggaagtttcagaaaaatgaggggataaaaataa

SEQ ID NO: 491017 - DNA, 33 bp, Homo sapien
acaacagttatttccagccaaggccacctctag

SEQ ID NO: 491018 - DNA, 33 bp, Homo sapien
acaacagttatttccatccaaggccacctctag

SEQ ID NO: 491019 - DNA, 33 bp, Homo sapien
aatagtatgtagaaagacctagagccatgaaat

SEQ ID NO: 491020 - DNA, 33 bp, Homo sapien
aatagtatgtagaaaggcctagagccatgaaat

SEQ ID NO: 491021 - DNA, 33 bp, Homo sapien
attcttttatagtaacggaaaactcaaaaccaa

SEQ ID NO: 491022 - DNA, 33 bp, Homo sapien
attcttttatagtaactgaaaactcaaaaccaa

SEQ ID NO: 491023 - DNA, 33 bp, Homo sapien
gaagctgaactccatgaatattttaaaagaagg

SEQ ID NO: 491024 - DNA, 33 bp, Homo sapien
gaagctgaactccatggatattttaaaagaagg

SEQ ID NO: 491025 - DNA, 33 bp, Homo sapien
gcctggatgaagttcaagaaattagaagccagt

SEQ ID NO: 491026 - DNA, 33 bp, Homo sapien
gcctggatgaagttcaggaaattagaagccagt

SEQ ID NO: 491027 - DNA, 33 bp, Homo sapien
gtccgcttgagcaacacagtttcacttctaagg

SEQ ID NO: 491028 - DNA, 33 bp, Homo sapien
gtccgcttgagcaacatagtttcacttctaagg

SEQ ID NO: 491029 - DNA, 33 bp, Homo sapien
aagagccgcaaaaatacaatggacagaatgtct

SEQ ID NO: 491030 - DNA, 33 bp, Homo sapien
aagagccgcaaaaatataatggacagaatgtct

SEQ ID NO: 491031 - DNA, 33 bp, Homo sapien
ccagttatgtgatgaacgttgtatttcacatag

SEQ ID NO: 491032 - DNA, 33 bp, Homo sapien
ccagttatgtgatgaatgttgtatttcacatag

SEQ ID NO: 491033 - DNA, 33 bp, Homo sapien
cgaggaaaaccactgaccttcttcgtctctaaa

SEQ ID NO: 491034 - DNA, 33 bp, Homo sapien
cgaggaaaaccactgatcttcttcgtctctaaa

SEQ ID NO: 491035 - DNA, 33 bp, Homo sapien
tggatgtcatgagcgacagaatttcctgatagc

SEQ ID NO: 491036 - DNA, 33 bp, Homo sapien
tggatgtcatgagcgatagaatttcctgatagc

SEQ ID NO: 491037 - DNA, 33 bp, Homo sapien
tagatatgcttgaccaatatgtttttcttttcc

SEQ ID NO: 491038 - DNA, 33 bp, Homo sapien
tagatatgcttgaccagtatgtttttcttttcc

SEQ ID NO: 491039 - DNA, 33 bp, Homo sapien
gaggctgccgtcaccaatccatagcacaaagtc

SEQ ID NO: 491040 - DNA, 33 bp, Homo sapien
gaggctgccgtcaccagtccatagcacaaagtc

SEQ ID NO: 491041 - DNA, 33 bp, Homo sapien
taagcctgctcagtaactgtacaagatcatgtt

SEQ ID NO: 491042 - DNA, 33 bp, Homo sapien
taagcctgctcagtaagtgtacaagatcatgtt

SEQ ID NO: 491043 - DNA, 33 bp, Homo sapien
aattgtaataatgatacgttctgccctaaacaa

SEQ ID NO: 491044 - DNA, 33 bp, Homo sapien
aattgtaataatgatatgttctgccctaaacaa

SEQ ID NO: 491045 - DNA, 33 bp, Homo sapien
atatttccaagcatgcaacttttccaggataat

SEQ ID NO: 491046 - DNA, 33 bp, Homo sapien
atatttccaagcatgcgacttttccaggataat

SEQ ID NO: 491047 - DNA, 33 bp, Homo sapien
attagctcaaaagttaaatcctttgaatcctgg

SEQ ID NO: 491048 - DNA, 33 bp, Homo sapien
attagctcaaaagttacatcctttgaatcctgg

SEQ ID NO: 491049 - DNA, 33 bp, Homo sapien
ttctactttctcctaactgttttccatagatta

SEQ ID NO: 491050 - DNA, 33 bp, Homo sapien
ttctactttctcctaagtgttttccatagatta

SEQ ID NO: 491051 - DNA, 33 bp, Homo sapien
cactcctgcctactcacaccatgactctaaatc

SEQ ID NO: 491052 - DNA, 33 bp, Homo sapien
cactcctgcctactcataccatgactctaaatc

SEQ ID NO: 491053 - DNA, 33 bp, Homo sapien
atgtgttagtccttgccccaggtatcatgccta

SEQ ID NO: 491054 - DNA, 33 bp, Homo sapien
atgtgttagtccttgctccaggtatcatgccta

SEQ ID NO: 491055 - DNA, 33 bp, Homo sapien
gccagtatttagacccaaaccgagcataaaaaa

SEQ ID NO: 491056 - DNA, 33 bp, Homo sapien
gccagtatttagacccgaaccgagcataaaaaa

SEQ ID NO: 491057 - DNA, 33 bp, Homo sapien
tatgacatgaatatgacgggaaaatttagtgaa

SEQ ID NO: 491058 - DNA, 33 bp, Homo sapien
tatgacatgaatatgatgggaaaatttagtgaa

SEQ ID NO: 491059 - DNA, 33 bp, Homo sapien
gttcagagaaaagccaggctttcaaaggcacat

SEQ ID NO: 491060 - DNA, 33 bp, Homo sapien
gttcagagaaaagccatgctttcaaaggcacat

SEQ ID NO: 491061 - DNA, 33 bp, Homo sapien
ttattaaatagttggtcaaaacagaaagctaac

SEQ ID NO: 491062 - DNA, 33 bp, Homo sapien
ttattaaatagttggtgaaaacagaaagctaac

SEQ ID NO: 491063 - DNA, 33 bp, Homo sapien
tacactttttcagttcgcacaatgcaatcttac

SEQ ID NO: 491064 - DNA, 33 bp, Homo sapien
tacactttttcagttctcacaatgcaatcttac

SEQ ID NO: 491065 - DNA, 33 bp, Homo sapien
agatccttgacatatacagagagtctttgtcag

SEQ ID NO: 491066 - DNA, 33 bp, Homo sapien
agatccttgacatatatagagagtctttgtcag

SEQ ID NO: 491067 - DNA, 33 bp, Homo sapien
aggaggctttgggaaacatgtaggtggcacaaa

SEQ ID NO: 491068 - DNA, 33 bp, Homo sapien
aggaggctttgggaaatatgtaggtggcacaaa

SEQ ID NO: 491069 - DNA, 33 bp, Homo sapien
ggagaaaggttttatgacacctagctaatggtc

SEQ ID NO: 491070 - DNA, 33 bp, Homo sapien
ggagaaaggttttatggcacctagctaatggtc

SEQ ID NO: 491071 - DNA, 33 bp, Homo sapien
gaaagattcaccacatcatattgggctgagggc

SEQ ID NO: 491072 - DNA, 33 bp, Homo sapien
gaaagattcaccacattatattgggctgagggc

SEQ ID NO: 491073 - DNA, 33 bp, Homo sapien
tgctgagagacaagcaccaaaagtaaggaaaaa

SEQ ID NO: 491074 - DNA, 33 bp, Homo sapien
tgctgagagacaagcatcaaaagtaaggaaaaa

SEQ ID NO: 491075 - DNA, 33 bp, Homo sapien
taccacttataagataccactctcttctgtcac

SEQ ID NO: 491076 - DNA, 33 bp, Homo sapien
taccacttataagatatcactctcttctgtcac

SEQ ID NO: 491077 - DNA, 33 bp, Homo sapien
tcttcataatgacatcaataacagcagcaacag

SEQ ID NO: 491078 - DNA, 33 bp, Homo sapien
tcttcataatgacatcgataacagcagcaacag

SEQ ID NO: 491079 - DNA, 33 bp, Homo sapien
gtaaaatggtactgcaaagagtagcgtaaaaaa

SEQ ID NO: 491080 - DNA, 33 bp, Homo sapien
gtaaaatggtactgcacagagtagcgtaaaaaa

SEQ ID NO: 491081 - DNA, 33 bp, Homo sapien
tggaagttaacagactaaacaatagcagcagca

SEQ ID NO: 491082 - DNA, 33 bp, Homo sapien
tggaagttaacagactgaacaatagcagcagca

SEQ ID NO: 491083 - DNA, 33 bp, Homo sapien
tatcgggaaaaggttgaacatgaacaattgaat

SEQ ID NO: 491084 - DNA, 33 bp, Homo sapien
tatcgggaaaaggttgtacatgaacaattgaat

SEQ ID NO: 491085 - DNA, 33 bp, Homo sapien
acctgcttctgtctcacggctaggattcttgac

SEQ ID NO: 491086 - DNA, 33 bp, Homo sapien
acctgcttctgtctcagggctaggattcttgac

SEQ ID NO: 491087 - DNA, 33 bp, Homo sapien
tatctgcagcagaatacgttaaacagaactgac

SEQ ID NO: 491088 - DNA, 33 bp, Homo sapien
tatctgcagcagaatatgttaaacagaactgac

SEQ ID NO: 491089 - DNA, 33 bp, Homo sapien
atgaccatatatttcacgtctatagtacttttc

SEQ ID NO: 491090 - DNA, 33 bp, Homo sapien
atgaccatatatttcatgtctatagtacttttc

SEQ ID NO: 491091 - DNA, 33 bp, Homo sapien
tagcacagctcttaacaatataggtagaagagg

SEQ ID NO: 491092 - DNA, 33 bp, Homo sapien
tagcacagctcttaacgatataggtagaagagg

SEQ ID NO: 491093 - DNA, 33 bp, Homo sapien
gctgcattaaatgaagcatacaacatttgggtt

SEQ ID NO: 491094 - DNA, 33 bp, Homo sapien
gctgcattaaatgaaggatacaacatttgggtt

SEQ ID NO: 491095 - DNA, 33 bp, Homo sapien
aaaacatgagttctgtcaagagtatctgtagaa

SEQ ID NO: 491096 - DNA, 33 bp, Homo sapien
aaaacatgagttctgttaagagtatctgtagaa

SEQ ID NO: 491097 - DNA, 33 bp, Homo sapien
actgtgcctgacttggaatggatgacttggaga

SEQ ID NO: 491098 - DNA, 33 bp, Homo sapien
actgtgcctgacttgggatggatgacttggaga

SEQ ID NO: 491099 - DNA, 33 bp, Homo sapien
tagaagaactaggatccaaatcacataattaga

SEQ ID NO: 491100 - DNA, 33 bp, Homo sapien
tagaagaactaggatcgaaatcacataattaga

SEQ ID NO: 491101 - DNA, 33 bp, Homo sapien
tggtgtcatgtcttacaaattcagcacattgga

SEQ ID NO: 491102 - DNA, 33 bp, Homo sapien
tggtgtcatgtcttacgaattcagcacattgga

SEQ ID NO: 491103 - DNA, 33 bp, Homo sapien
tggccaactgtttgtaaagtgtgttgatgacca

SEQ ID NO: 491104 - DNA, 33 bp, Homo sapien
tggccaactgtttgtatagtgtgttgatgacca

SEQ ID NO: 491105 - DNA, 33 bp, Homo sapien
atagtcaccgccaggcacatttttaaagaagac

SEQ ID NO: 491106 - DNA, 33 bp, Homo sapien
atagtcaccgccaggctcatttttaaagaagac

SEQ ID NO: 491107 - DNA, 33 bp, Homo sapien
ccctctgcatctgtgacaggaagctgaggaaat

SEQ ID NO: 491108 - DNA, 33 bp, Homo sapien
ccctctgcatctgtgataggaagctgaggaaat

SEQ ID NO: 491109 - DNA, 33 bp, Homo sapien
cactgcacagaatatacggttcaacaccttgta

SEQ ID NO: 491110 - DNA, 33 bp, Homo sapien
cactgcacagaatatatggttcaacaccttgta

SEQ ID NO: 491111 - DNA, 33 bp, Homo sapien
aaagaggtaagtataaatattcaggaattgaag

SEQ ID NO: 491112 - DNA, 33 bp, Homo sapien
aaagaggtaagtataagtattcaggaattgaag

SEQ ID NO: 491113 - DNA, 33 bp, Homo sapien
ctttttaacgcacatcaaaggcaccattggcta

SEQ ID NO: 491114 - DNA, 33 bp, Homo sapien
ctttttaacgcacatcgaaggcaccattggcta

SEQ ID NO: 491115 - DNA, 33 bp, Homo sapien
tttatatgattcaaccgaatactgctctgtctt

SEQ ID NO: 491116 - DNA, 33 bp, Homo sapien
tttatatgattcaacctaatactgctctgtctt

SEQ ID NO: 491117 - DNA, 33 bp, Homo sapien
tgcataacattgcacacgttcagatggccttac

SEQ ID NO: 491118 - DNA, 33 bp, Homo sapien
tgcataacattgcacaggttcagatggccttac

SEQ ID NO: 491119 - DNA, 33 bp, Homo sapien
cttccaaagaagataccggaacttgtgggtctc

SEQ ID NO: 491120 - DNA, 33 bp, Homo sapien
cttccaaagaagatacgggaacttgtgggtctc

SEQ ID NO: 491121 - DNA, 33 bp, Homo sapien
ccctataaagccaagaaatgtcacgagttacat

SEQ ID NO: 491122 - DNA, 33 bp, Homo sapien
ccctataaagccaagagatgtcacgagttacat

SEQ ID NO: 491123 - DNA, 33 bp, Homo sapien
tggtggccatcataaactggatgacagaactaa

SEQ ID NO: 491124 - DNA, 33 bp, Homo sapien
tggtggccatcataaattggatgacagaactaa

SEQ ID NO: 491125 - DNA, 33 bp, Homo sapien
tggattgaatgtgacaaaacatttcaacttctt

SEQ ID NO: 491126 - DNA, 33 bp, Homo sapien
tggattgaatgtgacacaacatttcaacttctt

SEQ ID NO: 491127 - DNA, 33 bp, Homo sapien
ctgagaaaaatggacgccataaccagctaataa

SEQ ID NO: 491128 - DNA, 33 bp, Homo sapien
ctgagaaaaatggacgtcataaccagctaataa

SEQ ID NO: 491129 - DNA, 33 bp, Homo sapien
tcacttgtttctggcaatgaggtacacatcttg

SEQ ID NO: 491130 - DNA, 33 bp, Homo sapien
tcacttgtttctggcagtgaggtacacatcttg

SEQ ID NO: 491131 - DNA, 33 bp, Homo sapien
gtttgaagtaagggtacgtctagcaccaattaa

SEQ ID NO: 491132 - DNA, 33 bp, Homo sapien
gtttgaagtaagggtatgtctagcaccaattaa

SEQ ID NO: 491133 - DNA, 33 bp, Homo sapien
cagattgaagggaaaaatttcaacatcacaaaa

SEQ ID NO: 491134 - DNA, 33 bp, Homo sapien
cagattgaagggaaaagtttcaacatcacaaaa

SEQ ID NO: 491135 - DNA, 33 bp, Homo sapien
caaatggttaccaaaacgtatcaaagttctaaa

SEQ ID NO: 491136 - DNA, 33 bp, Homo sapien
caaatggttaccaaaatgtatcaaagttctaaa

SEQ ID NO: 491137 - DNA, 33 bp, Homo sapien
gaatccttgtagttcactccatcacagtaggag

SEQ ID NO: 491138 - DNA, 33 bp, Homo sapien
gaatccttgtagttcagtccatcacagtaggag

SEQ ID NO: 491139 - DNA, 33 bp, Homo sapien
gatcatgtaaggatgacagcaaggtcttcccct

SEQ ID NO: 491140 - DNA, 33 bp, Homo sapien
gatcatgtaaggatgatagcaaggtcttcccct

SEQ ID NO: 491141 - DNA, 33 bp, Homo sapien
actgaagagaaatagaaggaagtccaaagatac

SEQ ID NO: 491142 - DNA, 33 bp, Homo sapien
actgaagagaaatagagggaagtccaaagatac

SEQ ID NO: 491143 - DNA, 33 bp, Homo sapien
gtcaagcttgtggctgcataaagtacattttcc

SEQ ID NO: 491144 - DNA, 33 bp, Homo sapien
gtcaagcttgtggctgtataaagtacattttcc

SEQ ID NO: 491145 - DNA, 33 bp, Homo sapien
tacacacagcactttacctatcgtgatgaatta

SEQ ID NO: 491146 - DNA, 33 bp, Homo sapien
tacacacagcactttagctatcgtgatgaatta

SEQ ID NO: 491147 - DNA, 33 bp, Homo sapien
ggaatcagcacaagccaatctaatagaagtttc

SEQ ID NO: 491148 - DNA, 33 bp, Homo sapien
ggaatcagcacaagccgatctaatagaagtttc

SEQ ID NO: 491149 - DNA, 33 bp, Homo sapien
tttatagggcaaaataaaataggatgagctagg

SEQ ID NO: 491150 - DNA, 33 bp, Homo sapien
tttatagggcaaaatataataggatgagctagg

SEQ ID NO: 491151 - DNA, 33 bp, Homo sapien
caaaacatccacaaaaatgacaaacagcagaga

SEQ ID NO: 491152 - DNA, 33 bp, Homo sapien
caaaacatccacaaaagtgacaaacagcagaga

SEQ ID NO: 491153 - DNA, 33 bp, Homo sapien
atctctctgtctcagcactacatacgaagctcc

SEQ ID NO: 491154 - DNA, 33 bp, Homo sapien
atctctctgtctcagcgctacatacgaagctcc

SEQ ID NO: 491155 - DNA, 33 bp, Homo sapien
agcgtaaatacatgaacgcttctgcttacaagt

SEQ ID NO: 491156 - DNA, 33 bp, Homo sapien
agcgtaaatacatgaatgcttctgcttacaagt

SEQ ID NO: 491157 - DNA, 33 bp, Homo sapien
aatcttttaaaacttaactctttagatggatga

SEQ ID NO: 491158 - DNA, 33 bp, Homo sapien
aatcttttaaaacttatctctttagatggatga

SEQ ID NO: 491159 - DNA, 33 bp, Homo sapien
ggatagatttttgacacagaatattttgacttc

SEQ ID NO: 491160 - DNA, 33 bp, Homo sapien
ggatagatttttgacagagaatattttgacttc

SEQ ID NO: 491161 - DNA, 33 bp, Homo sapien
tactatgttccaaacaatattctaagtatttta

SEQ ID NO: 491162 - DNA, 33 bp, Homo sapien
tactatgttccaaacactattctaagtatttta

SEQ ID NO: 491163 - DNA, 33 bp, Homo sapien
aatcaattatttttaacgctactagtcctatca

SEQ ID NO: 491164 - DNA, 33 bp, Homo sapien
aatcaattatttttaatgctactagtcctatca

SEQ ID NO: 491165 - DNA, 33 bp, Homo sapien
aatgagcagaggagaacaggttttgcctttagc

SEQ ID NO: 491166 - DNA, 33 bp, Homo sapien
aatgagcagaggagaataggttttgcctttagc

SEQ ID NO: 491167 - DNA, 33 bp, Homo sapien
tcctcataaactgtacaacacacatgtatggat

SEQ ID NO: 491168 - DNA, 33 bp, Homo sapien
tcctcataaactgtacgacacacatgtatggat

SEQ ID NO: 491169 - DNA, 33 bp, Homo sapien
aagataatggttactgcaaactttcattacaaa

SEQ ID NO: 491170 - DNA, 33 bp, Homo sapien
aagataatggttactggaaactttcattacaaa

SEQ ID NO: 491171 - DNA, 33 bp, Homo sapien
aatattgagtgtcccagaagaaagcaataagaa

SEQ ID NO: 491172 - DNA, 33 bp, Homo sapien
aatattgagtgtcccataagaaagcaataagaa

SEQ ID NO: 491173 - DNA, 33 bp, Homo sapien
catgaggagtcacaacagtcactaactagaaaa

SEQ ID NO: 491174 - DNA, 33 bp, Homo sapien
catgaggagtcacaacggtcactaactagaaaa

SEQ ID NO: 491175 - DNA, 33 bp, Homo sapien
tattctgtttgccacaaatcaatgggaggaact

SEQ ID NO: 491176 - DNA, 33 bp, Homo sapien
tattctgtttgccacagatcaatgggaggaact

SEQ ID NO: 491177 - DNA, 33 bp, Homo sapien
gaatgtgggaactatacaatggaaggtatttat

SEQ ID NO: 491178 - DNA, 33 bp, Homo sapien
gaatgtgggaactatataatggaaggtatttat

SEQ ID NO: 491179 - DNA, 33 bp, Homo sapien
acttcctgttaaccaaacaaactattattagtc

SEQ ID NO: 491180 - DNA, 33 bp, Homo sapien
acttcctgttaaccaagcaaactattattagtc

SEQ ID NO: 491181 - DNA, 33 bp, Homo sapien
acagaacacacaggcaaggaaagtcctatagta

SEQ ID NO: 491182 - DNA, 33 bp, Homo sapien
acagaacacacaggcagggaaagtcctatagta

SEQ ID NO: 491183 - DNA, 33 bp, Homo sapien
actaactagggactcacacttactggctagtgt

SEQ ID NO: 491184 - DNA, 33 bp, Homo sapien
actaactagggactcagacttactggctagtgt

SEQ ID NO: 491185 - DNA, 33 bp, Homo sapien
tgacagataagaaggcaagttcataacagggca

SEQ ID NO: 491186 - DNA, 33 bp, Homo sapien
tgacagataagaaggccagttcataacagggca

SEQ ID NO: 491187 - DNA, 33 bp, Homo sapien
cagaggtcaatagtgacgtaggcatggccatag

SEQ ID NO: 491188 - DNA, 33 bp, Homo sapien
cagaggtcaatagtgaggtaggcatggccatag

SEQ ID NO: 491189 - DNA, 33 bp, Homo sapien
ctttcttggccttctacgctgtaagtccttagt

SEQ ID NO: 491190 - DNA, 33 bp, Homo sapien
ctttcttggccttctatgctgtaagtccttagt

SEQ ID NO: 491191 - DNA, 33 bp, Homo sapien
atataaagcagaactaataagagatcatgagct

SEQ ID NO: 491192 - DNA, 33 bp, Homo sapien
atataaagcagaactattaagagatcatgagct

SEQ ID NO: 491193 - DNA, 33 bp, Homo sapien
acttgcttgaagttcaaaaagttcatgtctgca

SEQ ID NO: 491194 - DNA, 33 bp, Homo sapien
acttgcttgaagttcagaaagttcatgtctgca

SEQ ID NO: 491195 - DNA, 33 bp, Homo sapien
taggttatcctagtcacaaaaacatctctcttt

SEQ ID NO: 491196 - DNA, 33 bp, Homo sapien
taggttatcctagtcagaaaaacatctctcttt

SEQ ID NO: 491197 - DNA, 33 bp, Homo sapien
ttccagagtaacatcaaacttttcactgcgagt

SEQ ID NO: 491198 - DNA, 33 bp, Homo sapien
ttccagagtaacatcacacttttcactgcgagt

SEQ ID NO: 491199 - DNA, 33 bp, Homo sapien
ctgcttacttgccccaaattttgtttcacattt

SEQ ID NO: 491200 - DNA, 33 bp, Homo sapien
ctgcttacttgccccacattttgtttcacattt

SEQ ID NO: 491201 - DNA, 33 bp, Homo sapien
aaactgaattatcctccgaaagaaacaccaaac

SEQ ID NO: 491202 - DNA, 33 bp, Homo sapien
aaactgaattatcctctgaaagaaacaccaaac

SEQ ID NO: 491203 - DNA, 33 bp, Homo sapien
ttttttctgttgaatagatttgcagtcagtttt

SEQ ID NO: 491204 - DNA, 33 bp, Homo sapien
ttttttctgttgaatatatttgcagtcagtttt

SEQ ID NO: 491205 - DNA, 33 bp, Homo sapien
aaatcacgttctttatcaagaagacatagatgg

SEQ ID NO: 491206 - DNA, 33 bp, Homo sapien
aaatcacgttctttatgaagaagacatagatgg

SEQ ID NO: 491207 - DNA, 33 bp, Homo sapien
cagtgaagggatgctacggatgtttgggagagc

SEQ ID NO: 491208 - DNA, 33 bp, Homo sapien
cagtgaagggatgctatggatgtttgggagagc

SEQ ID NO: 491209 - DNA, 33 bp, Homo sapien
acagtgagtacggagacgtaagctggggaagga

SEQ ID NO: 491210 - DNA, 33 bp, Homo sapien
acagtgagtacggagaggtaagctggggaagga

SEQ ID NO: 491211 - DNA, 33 bp, Homo sapien
ttgatataaacagtctcacaattcagctgatta

SEQ ID NO: 491212 - DNA, 33 bp, Homo sapien
ttgatataaacagtcttacaattcagctgatta

SEQ ID NO: 491213 - DNA, 33 bp, Homo sapien
aagtaactaaaagtgaagacattccgatgttgt

SEQ ID NO: 491214 - DNA, 33 bp, Homo sapien
aagtaactaaaagtgaggacattccgatgttgt

SEQ ID NO: 491215 - DNA, 33 bp, Homo sapien
tgacaaaaagtctttacggtctctgcttttctc

SEQ ID NO: 491216 - DNA, 33 bp, Homo sapien
tgacaaaaagtctttatggtctctgcttttctc

SEQ ID NO: 491217 - DNA, 33 bp, Homo sapien
gcagatttgttggtaactgattgaccatatttg

SEQ ID NO: 491218 - DNA, 33 bp, Homo sapien
gcagatttgttggtaattgattgaccatatttg

SEQ ID NO: 491219 - DNA, 33 bp, Homo sapien
gttttgtctgttcccactactcaattggcaaac

SEQ ID NO: 491220 - DNA, 33 bp, Homo sapien
gttttgtctgttcccattactcaattggcaaac

SEQ ID NO: 491221 - DNA, 33 bp, Homo sapien
atctgtcaggtcctgcacttttgttgtttgttt

SEQ ID NO: 491222 - DNA, 33 bp, Homo sapien
atctgtcaggtcctgcgcttttgttgtttgttt

SEQ ID NO: 491223 - DNA, 33 bp, Homo sapien
tgtgaccaaacacagaaacactgaatgaccctt

SEQ ID NO: 491224 - DNA, 33 bp, Homo sapien
tgtgaccaaacacagagacactgaatgaccctt

SEQ ID NO: 491225 - DNA, 33 bp, Homo sapien
tggtcacattcataaaaagaatgctgtcctata

SEQ ID NO: 491226 - DNA, 33 bp, Homo sapien
tggtcacattcataaagagaatgctgtcctata

SEQ ID NO: 491227 - DNA, 33 bp, Homo sapien
accatacaaaggcctcaaagcaaatagacaaag

SEQ ID NO: 491228 - DNA, 33 bp, Homo sapien
accatacaaaggcctcgaagcaaatagacaaag

SEQ ID NO: 491229 - DNA, 33 bp, Homo sapien
catccatggttggcaacaccacctttccgcagc

SEQ ID NO: 491230 - DNA, 33 bp, Homo sapien
catccatggttggcaagaccacctttccgcagc

SEQ ID NO: 491231 - DNA, 33 bp, Homo sapien
ccaagataattcaaatcaggagtgaagtctgaa

SEQ ID NO: 491232 - DNA, 33 bp, Homo sapien
ccaagataattcaaattaggagtgaagtctgaa

SEQ ID NO: 491233 - DNA, 33 bp, Homo sapien
cagaggtcttgagtgactaagtgcattgtcaaa

SEQ ID NO: 491234 - DNA, 33 bp, Homo sapien
cagaggtcttgagtgattaagtgcattgtcaaa

SEQ ID NO: 491235 - DNA, 33 bp, Homo sapien
cttcagttctacaaaggctgtgagaggtgagag

SEQ ID NO: 491236 - DNA, 33 bp, Homo sapien
cttcagttctacaaagtctgtgagaggtgagag

SEQ ID NO: 491237 - DNA, 33 bp, Homo sapien
taatttgacacaaaaacaaacagaccaatggaa

SEQ ID NO: 491238 - DNA, 33 bp, Homo sapien
taatttgacacaaaaataaacagaccaatggaa

SEQ ID NO: 491239 - DNA, 33 bp, Homo sapien
agataagctgcattcccatacaaaaagagttaa

SEQ ID NO: 491240 - DNA, 33 bp, Homo sapien
agataagctgcattcctatacaaaaagagttaa

SEQ ID NO: 491241 - DNA, 33 bp, Homo sapien
agaaattcttgctacaaatgtatctcagacaag

SEQ ID NO: 491242 - DNA, 33 bp, Homo sapien
agaaattcttgctacagatgtatctcagacaag

SEQ ID NO: 491243 - DNA, 33 bp, Homo sapien
atgtctatttcagaccaatagttatggcaaaac

SEQ ID NO: 491244 - DNA, 33 bp, Homo sapien
atgtctatttcagaccgatagttatggcaaaac

SEQ ID NO: 491245 - DNA, 33 bp, Homo sapien
aatagaaaatcttttaccaactgcgccataaat

SEQ ID NO: 491246 - DNA, 33 bp, Homo sapien
aatagaaaatcttttagcaactgcgccataaat

SEQ ID NO: 491247 - DNA, 33 bp, Homo sapien
gactgtgtgattcaagcagttaagccttcttgc

SEQ ID NO: 491248 - DNA, 33 bp, Homo sapien
gactgtgtgattcaaggagttaagccttcttgc

SEQ ID NO: 491249 - DNA, 33 bp, Homo sapien
agaccacgaagggtgcaaaattcagccaagttt

SEQ ID NO: 491250 - DNA, 33 bp, Homo sapien
agaccacgaagggtgcgaaattcagccaagttt

SEQ ID NO: 491251 - DNA, 33 bp, Homo sapien
atcattattgtgataacagacaactgatacagg

SEQ ID NO: 491252 - DNA, 33 bp, Homo sapien
atcattattgtgataatagacaactgatacagg

SEQ ID NO: 491253 - DNA, 33 bp, Homo sapien
tgactgaaggatggtaaaaaaatgtttcatgta

SEQ ID NO: 491254 - DNA, 33 bp, Homo sapien
tgactgaaggatggtagaaaaatgtttcatgta

SEQ ID NO: 491255 - DNA, 33 bp, Homo sapien
atattggccaaaagaacgaatgacaagcatagt

SEQ ID NO: 491256 - DNA, 33 bp, Homo sapien
atattggccaaaagaatgaatgacaagcatagt

SEQ ID NO: 491257 - DNA, 33 bp, Homo sapien
ttaacctagctacctgaactttttcctgttttt

SEQ ID NO: 491258 - DNA, 33 bp, Homo sapien
ttaacctagctacctgcactttttcctgttttt

SEQ ID NO: 491259 - DNA, 33 bp, Homo sapien
cacacttctttgacaccctttcttagtacccac

SEQ ID NO: 491260 - DNA, 33 bp, Homo sapien
cacacttctttgacactctttcttagtacccac

SEQ ID NO: 491261 - DNA, 33 bp, Homo sapien
ctccattagaccctacaccttcttaaaagccac

SEQ ID NO: 491262 - DNA, 33 bp, Homo sapien
ctccattagaccctacgccttcttaaaagccac

SEQ ID NO: 491263 - DNA, 33 bp, Homo sapien
tattgtgcagtatcacacaatgttttgtcgttg

SEQ ID NO: 491264 - DNA, 33 bp, Homo sapien
tattgtgcagtatcacgcaatgttttgtcgttg

SEQ ID NO: 491265 - DNA, 33 bp, Homo sapien
tcagggagaataataactagatgcaacaactca

SEQ ID NO: 491266 - DNA, 33 bp, Homo sapien
tcagggagaataataattagatgcaacaactca

SEQ ID NO: 491267 - DNA, 33 bp, Homo sapien
tcatactggggcacataagacctgtcaaatggc

SEQ ID NO: 491268 - DNA, 33 bp, Homo sapien
tcatactggggcacatgagacctgtcaaatggc

SEQ ID NO: 491269 - DNA, 33 bp, Homo sapien
ctattctgttgcctgcgatttttgagcaatcca

SEQ ID NO: 491270 - DNA, 33 bp, Homo sapien
ctattctgttgcctgctatttttgagcaatcca

SEQ ID NO: 491271 - DNA, 33 bp, Homo sapien
ttcaatagtataaaaccggcagccttgagggta

SEQ ID NO: 491272 - DNA, 33 bp, Homo sapien
ttcaatagtataaaactggcagccttgagggta

SEQ ID NO: 491273 - DNA, 33 bp, Homo sapien
ttcattctttcagttacaggcagtcatgaaaat

SEQ ID NO: 491274 - DNA, 33 bp, Homo sapien
ttcattctttcagttataggcagtcatgaaaat

SEQ ID NO: 491275 - DNA, 33 bp, Homo sapien
ttattagaatgcttgacataaaaaacatacagg

SEQ ID NO: 491276 - DNA, 33 bp, Homo sapien
ttattagaatgcttgagataaaaaacatacagg

SEQ ID NO: 491277 - DNA, 33 bp, Homo sapien
gttctttagcgtgtcaatatcaacaacaacaac

SEQ ID NO: 491278 - DNA, 33 bp, Homo sapien
gttctttagcgtgtcagtatcaacaacaacaac

SEQ ID NO: 491279 - DNA, 33 bp, Homo sapien
agagtgtccatttgtacgcaaattagtgcagtc

SEQ ID NO: 491280 - DNA, 33 bp, Homo sapien
agagtgtccatttgtatgcaaattagtgcagtc

SEQ ID NO: 491281 - DNA, 33 bp, Homo sapien
taacataaaaaactgacgtagaaaatgcaaaat

SEQ ID NO: 491282 - DNA, 33 bp, Homo sapien
taacataaaaaactgatgtagaaaatgcaaaat

SEQ ID NO: 491283 - DNA, 33 bp, Homo sapien
taaccatgttcagtcaagtgaggatttgcactt

SEQ ID NO: 491284 - DNA, 33 bp, Homo sapien
taaccatgttcagtcaggtgaggatttgcactt

SEQ ID NO: 491285 - DNA, 33 bp, Homo sapien
attacagccactgagaaatacataggaaactca

SEQ ID NO: 491286 - DNA, 33 bp, Homo sapien
attacagccactgagatatacataggaaactca

SEQ ID NO: 491287 - DNA, 33 bp, Homo sapien
atactgtcttcttgaaactgagcgttagtaatt

SEQ ID NO: 491288 - DNA, 33 bp, Homo sapien
atactgtcttcttgaagctgagcgttagtaatt

SEQ ID NO: 491289 - DNA, 33 bp, Homo sapien
ggtgttagaattggaacttagaaagtctctaat

SEQ ID NO: 491290 - DNA, 33 bp, Homo sapien
ggtgttagaattggaatttagaaagtctctaat

SEQ ID NO: 491291 - DNA, 33 bp, Homo sapien
agttcaaggtaagacacagtggaagaaccaatt

SEQ ID NO: 491292 - DNA, 33 bp, Homo sapien
agttcaaggtaagacatagtggaagaaccaatt

SEQ ID NO: 491293 - DNA, 33 bp, Homo sapien
ttagactatgattcaaagtcttccaaaacctgg

SEQ ID NO: 491294 - DNA, 33 bp, Homo sapien
ttagactatgattcaaggtcttccaaaacctgg

SEQ ID NO: 491295 - DNA, 33 bp, Homo sapien
aacatgagcaagactaacctcagtagaatgaga

SEQ ID NO: 491296 - DNA, 33 bp, Homo sapien
aacatgagcaagactatcctcagtagaatgaga

SEQ ID NO: 491297 - DNA, 33 bp, Homo sapien
gaaaccagtaagctaacccaagcacagtctctt

SEQ ID NO: 491298 - DNA, 33 bp, Homo sapien
gaaaccagtaagctaatccaagcacagtctctt

SEQ ID NO: 491299 - DNA, 33 bp, Homo sapien
cacagctgttcattcagatttcaaggctgccca

SEQ ID NO: 491300 - DNA, 33 bp, Homo sapien
cacagctgttcattcatatttcaaggctgccca

SEQ ID NO: 491301 - DNA, 33 bp, Homo sapien
agttcctcttccagagacagttatttcttcgtg

SEQ ID NO: 491302 - DNA, 33 bp, Homo sapien
agttcctcttccagaggcagttatttcttcgtg

SEQ ID NO: 491303 - DNA, 33 bp, Homo sapien
ctattgggcaccagaaaatataagcaaatgttt

SEQ ID NO: 491304 - DNA, 33 bp, Homo sapien
ctattgggcaccagaagatataagcaaatgttt

SEQ ID NO: 491305 - DNA, 33 bp, Homo sapien
ttgtcaatgtttatcaacgatgattagtgatgg

SEQ ID NO: 491306 - DNA, 33 bp, Homo sapien
ttgtcaatgtttatcagcgatgattagtgatgg

SEQ ID NO: 491307 - DNA, 33 bp, Homo sapien
tgtctctctttcctacaaggctgagtgatatgc

SEQ ID NO: 491308 - DNA, 33 bp, Homo sapien
tgtctctctttcctacgaggctgagtgatatgc

SEQ ID NO: 491309 - DNA, 33 bp, Homo sapien
tcagagaccaagaaaaccatgctgatcatgtca

SEQ ID NO: 491310 - DNA, 33 bp, Homo sapien
tcagagaccaagaaaatcatgctgatcatgtca

SEQ ID NO: 491311 - DNA, 33 bp, Homo sapien
tgtgtaagaagtcatacctgaagaactaaggtt

SEQ ID NO: 491312 - DNA, 33 bp, Homo sapien
tgtgtaagaagtcatatctgaagaactaaggtt

SEQ ID NO: 491313 - DNA, 33 bp, Homo sapien
gattgaattgccaaacagaaattgggcatccat

SEQ ID NO: 491314 - DNA, 33 bp, Homo sapien
gattgaattgccaaaccgaaattgggcatccat

SEQ ID NO: 491315 - DNA, 33 bp, Homo sapien
atcaagccctagagaagtggtgaaaccttagat

SEQ ID NO: 491316 - DNA, 33 bp, Homo sapien
atcaagccctagagaattggtgaaaccttagat

SEQ ID NO: 491317 - DNA, 33 bp, Homo sapien
atctatggtcacattcacccaaagtagctttta

SEQ ID NO: 491318 - DNA, 33 bp, Homo sapien
atctatggtcacattcgcccaaagtagctttta

SEQ ID NO: 491319 - DNA, 33 bp, Homo sapien
ggctggaataatagaagaatgcatggaggtgtt

SEQ ID NO: 491320 - DNA, 33 bp, Homo sapien
ggctggaataatagaataatgcatggaggtgtt

SEQ ID NO: 491321 - DNA, 33 bp, Homo sapien
ttacaaaattgtaaaacggaccttattagtcag

SEQ ID NO: 491322 - DNA, 33 bp, Homo sapien
ttacaaaattgtaaaatggaccttattagtcag

SEQ ID NO: 491323 - DNA, 33 bp, Homo sapien
attaaccaattactccgaccactgaagggctca

SEQ ID NO: 491324 - DNA, 33 bp, Homo sapien
attaaccaattactcctaccactgaagggctca

SEQ ID NO: 491325 - DNA, 33 bp, Homo sapien
gactgttaaaaatcaacaaaatcagcatggcat

SEQ ID NO: 491326 - DNA, 33 bp, Homo sapien
gactgttaaaaatcaataaaatcagcatggcat

SEQ ID NO: 491327 - DNA, 33 bp, Homo sapien
tatgtctgaaaaaacaatgacaggcacatcctt

SEQ ID NO: 491328 - DNA, 33 bp, Homo sapien
tatgtctgaaaaaacattgacaggcacatcctt

SEQ ID NO: 491329 - DNA, 33 bp, Homo sapien
atttttatttttgtccaaagagcaataaaagac

SEQ ID NO: 491330 - DNA, 33 bp, Homo sapien
atttttatttttgtcccaagagcaataaaagac

SEQ ID NO: 491331 - DNA, 33 bp, Homo sapien
ttcttctccatattcccgagattgttttacata

SEQ ID NO: 491332 - DNA, 33 bp, Homo sapien
ttcttctccatattcctgagattgttttacata

SEQ ID NO: 491333 - DNA, 33 bp, Homo sapien
aattttgtggttcaggaataaagaaacttttag

SEQ ID NO: 491334 - DNA, 33 bp, Homo sapien
aattttgtggttcaggcataaagaaacttttag

SEQ ID NO: 491335 - DNA, 33 bp, Homo sapien
gagttccacatgggccagaatggtaaaaggaga

SEQ ID NO: 491336 - DNA, 33 bp, Homo sapien
gagttccacatgggccggaatggtaaaaggaga

SEQ ID NO: 491337 - DNA, 33 bp, Homo sapien
caactattatggactaaacattgggtcaagcag

SEQ ID NO: 491338 - DNA, 33 bp, Homo sapien
caactattatggactagacattgggtcaagcag

SEQ ID NO: 491339 - DNA, 33 bp, Homo sapien
ctataaattaccttgactagtatggccattttc

SEQ ID NO: 491340 - DNA, 33 bp, Homo sapien
ctataaattaccttgagtagtatggccattttc

SEQ ID NO: 491341 - DNA, 33 bp, Homo sapien
agagttactcagaatactagcttcatttgtaga

SEQ ID NO: 491342 - DNA, 33 bp, Homo sapien
agagttactcagaatagtagcttcatttgtaga

SEQ ID NO: 491343 - DNA, 33 bp, Homo sapien
cataaaggttggtgaagaagaaaactatgtctt

SEQ ID NO: 491344 - DNA, 33 bp, Homo sapien
cataaaggttggtgaataagaaaactatgtctt

SEQ ID NO: 491345 - DNA, 33 bp, Homo sapien
gtaaaattggatcctcaaagttcaaacctgtgt

SEQ ID NO: 491346 - DNA, 33 bp, Homo sapien
gtaaaattggatcctcgaagttcaaacctgtgt

SEQ ID NO: 491347 - DNA, 33 bp, Homo sapien
gaatcatcatcatgtacgcagctattctagcca

SEQ ID NO: 491348 - DNA, 33 bp, Homo sapien
gaatcatcatcatgtaggcagctattctagcca

SEQ ID NO: 491349 - DNA, 33 bp, Homo sapien
tacacatacaccatctgactcccttttatcgct

SEQ ID NO: 491350 - DNA, 33 bp, Homo sapien
tacacatacaccatcttactcccttttatcgct

SEQ ID NO: 491351 - DNA, 33 bp, Homo sapien
tacacctggccttgaacctattttagaattaaa

SEQ ID NO: 491352 - DNA, 33 bp, Homo sapien
tacacctggccttgaagctattttagaattaaa

SEQ ID NO: 491353 - DNA, 33 bp, Homo sapien
gatttataattgatgcgacttttcttatggaag

SEQ ID NO: 491354 - DNA, 33 bp, Homo sapien
gatttataattgatgctacttttcttatggaag

SEQ ID NO: 491355 - DNA, 33 bp, Homo sapien
caaagatataaaagtacagccaactcgtagcta

SEQ ID NO: 491356 - DNA, 33 bp, Homo sapien
caaagatataaaagtatagccaactcgtagcta

SEQ ID NO: 491357 - DNA, 33 bp, Homo sapien
gacatcaaaaatgtgacagagctttcaaagtag

SEQ ID NO: 491358 - DNA, 33 bp, Homo sapien
gacatcaaaaatgtgatagagctttcaaagtag

SEQ ID NO: 491359 - DNA, 33 bp, Homo sapien
gattttactagccaaaatttcttaggccaaaga

SEQ ID NO: 491360 - DNA, 33 bp, Homo sapien
gattttactagccaaagtttcttaggccaaaga

SEQ ID NO: 491361 - DNA, 33 bp, Homo sapien
tgtcataatgtccccaacttccatttcatacag

SEQ ID NO: 491362 - DNA, 33 bp, Homo sapien
tgtcataatgtccccagcttccatttcatacag

SEQ ID NO: 491363 - DNA, 33 bp, Homo sapien
ctataaagccattctaagtcatatttttgcttt

SEQ ID NO: 491364 - DNA, 33 bp, Homo sapien
ctataaagccattctacgtcatatttttgcttt

SEQ ID NO: 491365 - DNA, 33 bp, Homo sapien
agctaaaccataaacacctatcaattcttcact

SEQ ID NO: 491366 - DNA, 33 bp, Homo sapien
agctaaaccataaacatctatcaattcttcact

SEQ ID NO: 491367 - DNA, 33 bp, Homo sapien
ccccaaagttcttcaacataaatgaaacaggtt

SEQ ID NO: 491368 - DNA, 33 bp, Homo sapien
ccccaaagttcttcaatataaatgaaacaggtt

SEQ ID NO: 491369 - DNA, 33 bp, Homo sapien
actggagggagcaagacgtgcagaaagaatatg

SEQ ID NO: 491370 - DNA, 33 bp, Homo sapien
actggagggagcaagatgtgcagaaagaatatg

SEQ ID NO: 491371 - DNA, 33 bp, Homo sapien
tctaagaactgggagagaattcctttggagtct

SEQ ID NO: 491372 - DNA, 33 bp, Homo sapien
tctaagaactgggagataattcctttggagtct

SEQ ID NO: 491373 - DNA, 33 bp, Homo sapien
aggtggctttcttaaacggcaccagtagcatta

SEQ ID NO: 491374 - DNA, 33 bp, Homo sapien
aggtggctttcttaaatggcaccagtagcatta

SEQ ID NO: 491375 - DNA, 33 bp, Homo sapien
tgtgataagaaaaaataacttgctaatcactga

SEQ ID NO: 491376 - DNA, 33 bp, Homo sapien
tgtgataagaaaaaatcacttgctaatcactga

SEQ ID NO: 491377 - DNA, 33 bp, Homo sapien
aaggttccaagccctcagaagaagcaaagtggg

SEQ ID NO: 491378 - DNA, 33 bp, Homo sapien
aaggttccaagccctcggaagaagcaaagtggg

SEQ ID NO: 491379 - DNA, 33 bp, Homo sapien
tgccacaactgaagctcaccaccactgctagag

SEQ ID NO: 491380 - DNA, 33 bp, Homo sapien
tgccacaactgaagctgaccaccactgctagag

SEQ ID NO: 491381 - DNA, 33 bp, Homo sapien
tcttgctgaataaaacccacagtaaatcacatg

SEQ ID NO: 491382 - DNA, 33 bp, Homo sapien
tcttgctgaataaaactcacagtaaatcacatg

SEQ ID NO: 491383 - DNA, 33 bp, Homo sapien
ttgagaacatgttttaacaccaagatggagtgg

SEQ ID NO: 491384 - DNA, 33 bp, Homo sapien
ttgagaacatgttttagcaccaagatggagtgg

SEQ ID NO: 491385 - DNA, 33 bp, Homo sapien
ataattctgtgcaaaccagtgccacaatccctg

SEQ ID NO: 491386 - DNA, 33 bp, Homo sapien
ataattctgtgcaaactagtgccacaatccctg

SEQ ID NO: 491387 - DNA, 33 bp, Homo sapien
atccaaaatgtgaatacgcaatacacacacaca

SEQ ID NO: 491388 - DNA, 33 bp, Homo sapien
atccaaaatgtgaatatgcaatacacacacaca

SEQ ID NO: 491389 - DNA, 33 bp, Homo sapien
agagtcacactcactaccaaaccatagactggt

SEQ ID NO: 491390 - DNA, 33 bp, Homo sapien
agagtcacactcactatcaaaccatagactggt

SEQ ID NO: 491391 - DNA, 33 bp, Homo sapien
ttgcttatccagtgacagggaagtgaactgtta

SEQ ID NO: 491392 - DNA, 33 bp, Homo sapien
ttgcttatccagtgacggggaagtgaactgtta

SEQ ID NO: 491393 - DNA, 33 bp, Homo sapien
cttcatgtcttaacttcaaaataaaggtggaat

SEQ ID NO: 491394 - DNA, 33 bp, Homo sapien
cttcatgtcttaacttgaaaataaaggtggaat

SEQ ID NO: 491395 - DNA, 33 bp, Homo sapien
agcagtatgcggaaagccagtggaatgggcgcc

SEQ ID NO: 491396 - DNA, 33 bp, Homo sapien
agcagtatgcggaaagtcagtggaatgggcgcc

SEQ ID NO: 491397 - DNA, 33 bp, Homo sapien
gctatcattattcaaacgctccctctcaatttc

SEQ ID NO: 491398 - DNA, 33 bp, Homo sapien
gctatcattattcaaatgctccctctcaatttc

SEQ ID NO: 491399 - DNA, 33 bp, Homo sapien
ggggcatgggtgtataagagaaagcccttctct

SEQ ID NO: 491400 - DNA, 33 bp, Homo sapien
ggggcatgggtgtatacgagaaagcccttctct

SEQ ID NO: 491401 - DNA, 33 bp, Homo sapien
acagagacggaaaggaagttgttttggtgaata

SEQ ID NO: 491402 - DNA, 33 bp, Homo sapien
acagagacggaaaggacgttgttttggtgaata

SEQ ID NO: 491403 - DNA, 33 bp, Homo sapien
acattccttgtgagatcatcaccatcgattcac

SEQ ID NO: 491404 - DNA, 33 bp, Homo sapien
acattccttgtgagattatcaccatcgattcac

SEQ ID NO: 491405 - DNA, 33 bp, Homo sapien
ctaacaaggacatcaaaggatacttaggtggag

SEQ ID NO: 491406 - DNA, 33 bp, Homo sapien
ctaacaaggacatcaagggatacttaggtggag

SEQ ID NO: 491407 - DNA, 33 bp, Homo sapien
aagcggagctaagagacggcaagagaaagagac

SEQ ID NO: 491408 - DNA, 33 bp, Homo sapien
aagcggagctaagagatggcaagagaaagagac

SEQ ID NO: 491409 - DNA, 33 bp, Homo sapien
atgactgctaaaattaggaaccagaaccttctg

SEQ ID NO: 491410 - DNA, 33 bp, Homo sapien
atgactgctaaaattatgaaccagaaccttctg

SEQ ID NO: 491411 - DNA, 33 bp, Homo sapien
gaaccttctgtatcaaatcaactcatctcaggc

SEQ ID NO: 491412 - DNA, 33 bp, Homo sapien
gaaccttctgtatcaagtcaactcatctcaggc

SEQ ID NO: 491413 - DNA, 33 bp, Homo sapien
agaagcctaaattggactaaagttcacatagac

SEQ ID NO: 491414 - DNA, 33 bp, Homo sapien
agaagcctaaattggattaaagttcacatagac

SEQ ID NO: 491415 - DNA, 33 bp, Homo sapien
ttagaggaagtggtgccacagtgtaaacataca

SEQ ID NO: 491416 - DNA, 33 bp, Homo sapien
ttagaggaagtggtgctacagtgtaaacataca

SEQ ID NO: 491417 - DNA, 33 bp, Homo sapien
gtcatccactctgagtaaaagagacttcgacgg

SEQ ID NO: 491418 - DNA, 33 bp, Homo sapien
gtcatccactctgagtcaaagagacttcgacgg

SEQ ID NO: 491419 - DNA, 33 bp, Homo sapien
aaacagggtatttgtacctatcacatgttcttc

SEQ ID NO: 491420 - DNA, 33 bp, Homo sapien
aaacagggtatttgtagctatcacatgttcttc

SEQ ID NO: 491421 - DNA, 33 bp, Homo sapien
gaagctgtttggtacagcttatatttccgcaga

SEQ ID NO: 491422 - DNA, 33 bp, Homo sapien
gaagctgtttggtacatcttatatttccgcaga

SEQ ID NO: 491423 - DNA, 33 bp, Homo sapien
aacatattaggcattacgaaggcacagaagcct

SEQ ID NO: 491424 - DNA, 33 bp, Homo sapien
aacatattaggcattatgaaggcacagaagcct

SEQ ID NO: 491425 - DNA, 33 bp, Homo sapien
tagagagaggtgaagactaagtgaaattgcaag

SEQ ID NO: 491426 - DNA, 33 bp, Homo sapien
tagagagaggtgaagattaagtgaaattgcaag

SEQ ID NO: 491427 - DNA, 33 bp, Homo sapien
tcaaactcagaagtagaacacctgtttgtagcc

SEQ ID NO: 491428 - DNA, 33 bp, Homo sapien
tcaaactcagaagtaggacacctgtttgtagcc

SEQ ID NO: 491429 - DNA, 33 bp, Homo sapien
acagttagggttaaataaaactattgcaaattt

SEQ ID NO: 491430 - DNA, 33 bp, Homo sapien
acagttagggttaaatcaaactattgcaaattt

SEQ ID NO: 491431 - DNA, 33 bp, Homo sapien
cggaattgcaagggctcagagaccaacagactt

SEQ ID NO: 491432 - DNA, 33 bp, Homo sapien
cggaattgcaagggcttagagaccaacagactt

SEQ ID NO: 491433 - DNA, 33 bp, Homo sapien
atccgccaccaaagagaagcaaaaaagtcatca

SEQ ID NO: 491434 - DNA, 33 bp, Homo sapien
atccgccaccaaagaggagcaaaaaagtcatca

SEQ ID NO: 491435 - DNA, 33 bp, Homo sapien
acatccattcattgacagccttctggtcttctg

SEQ ID NO: 491436 - DNA, 33 bp, Homo sapien
acatccattcattgacggccttctggtcttctg

SEQ ID NO: 491437 - DNA, 33 bp, Homo sapien
ttctgttgactttacaatcctttatggtcagga

SEQ ID NO: 491438 - DNA, 33 bp, Homo sapien
ttctgttgactttacagtcctttatggtcagga

SEQ ID NO: 491439 - DNA, 33 bp, Homo sapien
ttcctgaatgagctgacctatttagtcctgtgt

SEQ ID NO: 491440 - DNA, 33 bp, Homo sapien
ttcctgaatgagctgagctatttagtcctgtgt

SEQ ID NO: 491441 - DNA, 33 bp, Homo sapien
acaaatgtgaaaaagacatggttcctgccatca

SEQ ID NO: 491442 - DNA, 33 bp, Homo sapien
acaaatgtgaaaaagatatggttcctgccatca

SEQ ID NO: 491443 - DNA, 33 bp, Homo sapien
ctggtaccaggtaccacgaggacacaaatgtga

SEQ ID NO: 491444 - DNA, 33 bp, Homo sapien
ctggtaccaggtaccaggaggacacaaatgtga

SEQ ID NO: 491445 - DNA, 33 bp, Homo sapien
gagggaacgagatagaagaggtgtaagttctaa

SEQ ID NO: 491446 - DNA, 33 bp, Homo sapien
gagggaacgagatagaggaggtgtaagttctaa

SEQ ID NO: 491447 - DNA, 33 bp, Homo sapien
gggtcattcaaggagaaccagtccttcagataa

SEQ ID NO: 491448 - DNA, 33 bp, Homo sapien
gggtcattcaaggagatccagtccttcagataa

SEQ ID NO: 491449 - DNA, 33 bp, Homo sapien
cacctgccttgagtgaccacctactgtgcatta

SEQ ID NO: 491450 - DNA, 33 bp, Homo sapien
cacctgccttgagtgagcacctactgtgcatta

SEQ ID NO: 491451 - DNA, 33 bp, Homo sapien
ccactcaaggatattacggactgaaagtagagc

SEQ ID NO: 491452 - DNA, 33 bp, Homo sapien
ccactcaaggatattatggactgaaagtagagc

SEQ ID NO: 491453 - DNA, 33 bp, Homo sapien
gaggtactgagagtgaaaaaaggattgcagagt

SEQ ID NO: 491454 - DNA, 33 bp, Homo sapien
gaggtactgagagtgagaaaaggattgcagagt

SEQ ID NO: 491455 - DNA, 33 bp, Homo sapien
gctatatgtggggatacggaaataaatcaggcc

SEQ ID NO: 491456 - DNA, 33 bp, Homo sapien
gctatatgtggggatatggaaataaatcaggcc

SEQ ID NO: 491457 - DNA, 33 bp, Homo sapien
ccatccttgtctctcaaatgagggtgtgtgacc

SEQ ID NO: 491458 - DNA, 33 bp, Homo sapien
ccatccttgtctctcagatgagggtgtgtgacc

SEQ ID NO: 491459 - DNA, 33 bp, Homo sapien
tttttgctctttaaggaactacagtttaccaag

SEQ ID NO: 491460 - DNA, 33 bp, Homo sapien
tttttgctctttaaggcactacagtttaccaag

SEQ ID NO: 491461 - DNA, 33 bp, Homo sapien
acccgaatcccttttccaactgaagtgcttata

SEQ ID NO: 491462 - DNA, 33 bp, Homo sapien
acccgaatcccttttctaactgaagtgcttata

SEQ ID NO: 491463 - DNA, 33 bp, Homo sapien
cagccccggtcataaccacttagaggcaaagag

SEQ ID NO: 491464 - DNA, 33 bp, Homo sapien
cagccccggtcataacgacttagaggcaaagag

SEQ ID NO: 491465 - DNA, 33 bp, Homo sapien
tggctctcactgtatgacagacatcctagcaag

SEQ ID NO: 491466 - DNA, 33 bp, Homo sapien
tggctctcactgtatgtcagacatcctagcaag

SEQ ID NO: 491467 - DNA, 33 bp, Homo sapien
caaagcatttagtccacgcgaaacaaatctaat

SEQ ID NO: 491468 - DNA, 33 bp, Homo sapien
caaagcatttagtccatgcgaaacaaatctaat

SEQ ID NO: 491469 - DNA, 33 bp, Homo sapien
taaagaacacttaaaaaaattgcttgagatttc

SEQ ID NO: 491470 - DNA, 33 bp, Homo sapien
taaagaacacttaaaagaattgcttgagatttc

SEQ ID NO: 491471 - DNA, 33 bp, Homo sapien
gctatcagggctgtaaggtagtaaacaccacca

SEQ ID NO: 491472 - DNA, 33 bp, Homo sapien
gctatcagggctgtaatgtagtaaacaccacca

SEQ ID NO: 491473 - DNA, 33 bp, Homo sapien
aaaataagggtaatagacatttcacaggtttgc

SEQ ID NO: 491474 - DNA, 33 bp, Homo sapien
aaaataagggtaatagccatttcacaggtttgc

SEQ ID NO: 491475 - DNA, 33 bp, Homo sapien
tcccaggcgagcaagccacgaaggctaaattac

SEQ ID NO: 491476 - DNA, 33 bp, Homo sapien
tcccaggcgagcaagctacgaaggctaaattac

SEQ ID NO: 491477 - DNA, 33 bp, Homo sapien
aggccttgatgaaagacataaacaaaggtggca

SEQ ID NO: 491478 - DNA, 33 bp, Homo sapien
aggccttgatgaaagagataaacaaaggtggca

SEQ ID NO: 491479 - DNA, 33 bp, Homo sapien
agtgtgccattcctcaaatttctagaggggata

SEQ ID NO: 491480 - DNA, 33 bp, Homo sapien
agtgtgccattcctcagatttctagaggggata

SEQ ID NO: 491481 - DNA, 33 bp, Homo sapien
gaacaagaaagcaaaggcgtggcgccgtggcca

SEQ ID NO: 491482 - DNA, 33 bp, Homo sapien
gaacaagaaagcaaagtcgtggcgccgtggcca

SEQ ID NO: 491483 - DNA, 33 bp, Homo sapien
ctctccagaactcacaagctaatggagaagatg

SEQ ID NO: 491484 - DNA, 33 bp, Homo sapien
ctctccagaactcacatgctaatggagaagatg

SEQ ID NO: 491485 - DNA, 33 bp, Homo sapien
tagagcaccgtgtagactagtgtggatagtgtc

SEQ ID NO: 491486 - DNA, 33 bp, Homo sapien
tagagcaccgtgtagattagtgtggatagtgtc

SEQ ID NO: 491487 - DNA, 33 bp, Homo sapien
ttccatgatgcatctaggtaactgagttggttt

SEQ ID NO: 491488 - DNA, 33 bp, Homo sapien
ttccatgatgcatctatgtaactgagttggttt

SEQ ID NO: 491489 - DNA, 33 bp, Homo sapien
catggcattgcaagcgacctagattctaacttc

SEQ ID NO: 491490 - DNA, 33 bp, Homo sapien
catggcattgcaagcgtcctagattctaacttc

SEQ ID NO: 491491 - DNA, 33 bp, Homo sapien
tgttttcatttgctcgacattatatctctagag

SEQ ID NO: 491492 - DNA, 33 bp, Homo sapien
tgttttcatttgctcggcattatatctctagag

SEQ ID NO: 491493 - DNA, 33 bp, Homo sapien
acataaattcagtaaacagtagttcaatgaata

SEQ ID NO: 491494 - DNA, 33 bp, Homo sapien
acataaattcagtaaagagtagttcaatgaata

SEQ ID NO: 491495 - DNA, 33 bp, Homo sapien
cttggatatgaactcacggtggaacagtgcaag

SEQ ID NO: 491496 - DNA, 33 bp, Homo sapien
cttggatatgaactcatggtggaacagtgcaag

SEQ ID NO: 491497 - DNA, 33 bp, Homo sapien
ttgtcaatagagtctcagaaacttcaacttcaa

SEQ ID NO: 491498 - DNA, 33 bp, Homo sapien
ttgtcaatagagtctcggaaacttcaacttcaa

SEQ ID NO: 491499 - DNA, 33 bp, Homo sapien
aaaattaaaccatagcaagtcctcacttaagat

SEQ ID NO: 491500 - DNA, 33 bp, Homo sapien
aaaattaaaccatagccagtcctcacttaagat

SEQ ID NO: 491501 - DNA, 33 bp, Homo sapien
taagctctttggcatcaatagctcccggcataa

SEQ ID NO: 491502 - DNA, 33 bp, Homo sapien
taagctctttggcatcgatagctcccggcataa

SEQ ID NO: 491503 - DNA, 33 bp, Homo sapien
gccattctttatgtgactaaggactctctttcc

SEQ ID NO: 491504 - DNA, 33 bp, Homo sapien
gccattctttatgtgattaaggactctctttcc

SEQ ID NO: 491505 - DNA, 33 bp, Homo sapien
gccatgccacctacaaaaaaatgccagattgtc

SEQ ID NO: 491506 - DNA, 33 bp, Homo sapien
gccatgccacctacaagaaaatgccagattgtc

SEQ ID NO: 491507 - DNA, 33 bp, Homo sapien
gtccttgttttccttcaccatctagggctctgg

SEQ ID NO: 491508 - DNA, 33 bp, Homo sapien
gtccttgttttccttcgccatctagggctctgg

SEQ ID NO: 491509 - DNA, 33 bp, Homo sapien
ttaacccattttgtgccaacccagatgagttgc

SEQ ID NO: 491510 - DNA, 33 bp, Homo sapien
ttaacccattttgtgctaacccagatgagttgc

SEQ ID NO: 491511 - DNA, 33 bp, Homo sapien
gcccatgcagtcactgacagaactactcagctc

SEQ ID NO: 491512 - DNA, 33 bp, Homo sapien
gcccatgcagtcactgtcagaactactcagctc

SEQ ID NO: 491513 - DNA, 33 bp, Homo sapien
agctagtggaaccttacacaggaaaacacggca

SEQ ID NO: 491514 - DNA, 33 bp, Homo sapien
agctagtggaaccttatacaggaaaacacggca

SEQ ID NO: 491515 - DNA, 33 bp, Homo sapien
ctctgtcaaagttatgaatatggaaacaaagca

SEQ ID NO: 491516 - DNA, 33 bp, Homo sapien
ctctgtcaaagttatgcatatggaaacaaagca

SEQ ID NO: 491517 - DNA, 33 bp, Homo sapien
tgggactacagatagcgactggacactgtgtat

SEQ ID NO: 491518 - DNA, 33 bp, Homo sapien
tgggactacagatagctactggacactgtgtat

SEQ ID NO: 491519 - DNA, 33 bp, Homo sapien
aatttatgataaacatgacaatgaagcttcctc

SEQ ID NO: 491520 - DNA, 33 bp, Homo sapien
aatttatgataaacattacaatgaagcttcctc

SEQ ID NO: 491521 - DNA, 33 bp, Homo sapien
caatgactatgactgaaacataagaacgatgac

SEQ ID NO: 491522 - DNA, 33 bp, Homo sapien
caatgactatgactgagacataagaacgatgac

SEQ ID NO: 491523 - DNA, 33 bp, Homo sapien
aatgactgtgaattccccttcttgcccagtggc

SEQ ID NO: 491524 - DNA, 33 bp, Homo sapien
aatgactgtgaattcctcttcttgcccagtggc

SEQ ID NO: 491525 - DNA, 33 bp, Homo sapien
acaactggactatatcaaaattataaactgctg

SEQ ID NO: 491526 - DNA, 33 bp, Homo sapien
acaactggactatatccaaattataaactgctg

SEQ ID NO: 491527 - DNA, 33 bp, Homo sapien
tctttaccactgaaaaatcgtattaaaaagtta

SEQ ID NO: 491528 - DNA, 33 bp, Homo sapien
tctttaccactgaaaattcgtattaaaaagtta

SEQ ID NO: 491529 - DNA, 33 bp, Homo sapien
gtgatgccaagagagacgaggctgttcatggat

SEQ ID NO: 491530 - DNA, 33 bp, Homo sapien
gtgatgccaagagagatgaggctgttcatggat

SEQ ID NO: 491531 - DNA, 33 bp, Homo sapien
agtagataagcaaatcaatgcagaagcagaaaa

SEQ ID NO: 491532 - DNA, 33 bp, Homo sapien
agtagataagcaaatcgatgcagaagcagaaaa

SEQ ID NO: 491533 - DNA, 33 bp, Homo sapien
gatggccttgagatccaggacaattgttggaaa

SEQ ID NO: 491534 - DNA, 33 bp, Homo sapien
gatggccttgagatccgggacaattgttggaaa

SEQ ID NO: 491535 - DNA, 33 bp, Homo sapien
taaggtgaactctttaaaaacgaggaaactgca

SEQ ID NO: 491536 - DNA, 33 bp, Homo sapien
taaggtgaactctttacaaacgaggaaactgca

SEQ ID NO: 491537 - DNA, 33 bp, Homo sapien
aaaatatcagtttccacgttgcaggtctagatc

SEQ ID NO: 491538 - DNA, 33 bp, Homo sapien
aaaatatcagtttccatgttgcaggtctagatc

SEQ ID NO: 491539 - DNA, 33 bp, Homo sapien
tgagttggggtggcaaagtttccccattcctcc

SEQ ID NO: 491540 - DNA, 33 bp, Homo sapien
tgagttggggtggcaacgtttccccattcctcc

SEQ ID NO: 491541 - DNA, 33 bp, Homo sapien
atacatggccaggcagaaagtttccttcttcat

SEQ ID NO: 491542 - DNA, 33 bp, Homo sapien
atacatggccaggcaggaagtttccttcttcat

SEQ ID NO: 491543 - DNA, 33 bp, Homo sapien
agacccatgtataatgcaccagagaattgtccc

SEQ ID NO: 491544 - DNA, 33 bp, Homo sapien
agacccatgtataatggaccagagaattgtccc

SEQ ID NO: 491545 - DNA, 33 bp, Homo sapien
tcatttaatcttaacactccatggggaagataa

SEQ ID NO: 491546 - DNA, 33 bp, Homo sapien
tcatttaatcttaacagtccatggggaagataa

SEQ ID NO: 491547 - DNA, 33 bp, Homo sapien
tgggtcatttaacacacgggcagcctgttcaac

SEQ ID NO: 491548 - DNA, 33 bp, Homo sapien
tgggtcatttaacacatgggcagcctgttcaac

SEQ ID NO: 491549 - DNA, 33 bp, Homo sapien
ctcatgggatcaatcaatcctctcacctcagcc

SEQ ID NO: 491550 - DNA, 33 bp, Homo sapien
ctcatgggatcaatcattcctctcacctcagcc

SEQ ID NO: 491551 - DNA, 33 bp, Homo sapien
tagacagataaatatacgcctctgctagaattt

SEQ ID NO: 491552 - DNA, 33 bp, Homo sapien
tagacagataaatatatgcctctgctagaattt

SEQ ID NO: 491553 - DNA, 33 bp, Homo sapien
aagagtctctacaaacacaccagacttgaaatt

SEQ ID NO: 491554 - DNA, 33 bp, Homo sapien
aagagtctctacaaacgcaccagacttgaaatt

SEQ ID NO: 491555 - DNA, 33 bp, Homo sapien
aatctctttattgggaatcattcaagaattggt

SEQ ID NO: 491556 - DNA, 33 bp, Homo sapien
aatctctttattgggactcattcaagaattggt

SEQ ID NO: 491557 - DNA, 33 bp, Homo sapien
gacaaacccaggaacactgaatgcagacctgga

SEQ ID NO: 491558 - DNA, 33 bp, Homo sapien
gacaaacccaggaacattgaatgcagacctgga

SEQ ID NO: 491559 - DNA, 33 bp, Homo sapien
ctctggccacagtgtggattatgaactgacagc

SEQ ID NO: 491560 - DNA, 33 bp, Homo sapien
ctctggccacagtgtgtattatgaactgacagc

SEQ ID NO: 491561 - DNA, 33 bp, Homo sapien
agacataatgataaaaaaaagtcccagggcctg

SEQ ID NO: 491562 - DNA, 33 bp, Homo sapien
agacataatgataaaagaaagtcccagggcctg

SEQ ID NO: 491563 - DNA, 33 bp, Homo sapien
gccaacgctcaataacactgaggaggaattcag

SEQ ID NO: 491564 - DNA, 33 bp, Homo sapien
gccaacgctcaataacgctgaggaggaattcag

SEQ ID NO: 491565 - DNA, 33 bp, Homo sapien
tgcccaccaaagaaaacagacgttctctggcat

SEQ ID NO: 491566 - DNA, 33 bp, Homo sapien
tgcccaccaaagaaaatagacgttctctggcat

SEQ ID NO: 491567 - DNA, 33 bp, Homo sapien
gactagtaaacatttacgctgtatctgctacat

SEQ ID NO: 491568 - DNA, 33 bp, Homo sapien
gactagtaaacatttatgctgtatctgctacat

SEQ ID NO: 491569 - DNA, 33 bp, Homo sapien
ctcttaggcagttccaaaatccaaccaatgaga

SEQ ID NO: 491570 - DNA, 33 bp, Homo sapien
ctcttaggcagttccacaatccaaccaatgaga

SEQ ID NO: 491571 - DNA, 33 bp, Homo sapien
aatatcaggaattccaccttagtcactgtagta

SEQ ID NO: 491572 - DNA, 33 bp, Homo sapien
aatatcaggaattccagcttagtcactgtagta

SEQ ID NO: 491573 - DNA, 33 bp, Homo sapien
tagctttggaagacaacgctgccccttgaatca

SEQ ID NO: 491574 - DNA, 33 bp, Homo sapien
tagctttggaagacaatgctgccccttgaatca

SEQ ID NO: 491575 - DNA, 33 bp, Homo sapien
tctgtcttttagggtacgaccatgaggaggaag

SEQ ID NO: 491576 - DNA, 33 bp, Homo sapien
tctgtcttttagggtaggaccatgaggaggaag

SEQ ID NO: 491577 - DNA, 33 bp, Homo sapien
ccttctttaaaaaagcaagtgtgacacaggcat

SEQ ID NO: 491578 - DNA, 33 bp, Homo sapien
ccttctttaaaaaagcgagtgtgacacaggcat

SEQ ID NO: 491579 - DNA, 33 bp, Homo sapien
agttgaggcaatatccagagaaaattaccatta

SEQ ID NO: 491580 - DNA, 33 bp, Homo sapien
agttgaggcaatatccggagaaaattaccatta

SEQ ID NO: 491581 - DNA, 33 bp, Homo sapien
agaagtacagaagacaaatcctgcctttgcctg

SEQ ID NO: 491582 - DNA, 33 bp, Homo sapien
agaagtacagaagacagatcctgcctttgcctg

SEQ ID NO: 491583 - DNA, 33 bp, Homo sapien
ggaagccctgtagagaagtgagtgtcctgaatg

SEQ ID NO: 491584 - DNA, 33 bp, Homo sapien
ggaagccctgtagagaggtgagtgtcctgaatg

SEQ ID NO: 491585 - DNA, 33 bp, Homo sapien
tgctgcgattcacataacaagtagtcagggtag

SEQ ID NO: 491586 - DNA, 33 bp, Homo sapien
tgctgcgattcacatagcaagtagtcagggtag

SEQ ID NO: 491587 - DNA, 33 bp, Homo sapien
acaaatatcttacctacctttgtactattcaat

SEQ ID NO: 491588 - DNA, 33 bp, Homo sapien
acaaatatcttacctagctttgtactattcaat

SEQ ID NO: 491589 - DNA, 33 bp, Homo sapien
tcctgccaactgagaccgcaggataggactttc

SEQ ID NO: 491590 - DNA, 33 bp, Homo sapien
tcctgccaactgagactgcaggataggactttc

SEQ ID NO: 491591 - DNA, 33 bp, Homo sapien
ataaggttgctttgaccgggtcaggaaattgta

SEQ ID NO: 491592 - DNA, 33 bp, Homo sapien
ataaggttgctttgactgggtcaggaaattgta

SEQ ID NO: 491593 - DNA, 33 bp, Homo sapien
cattccagactttcaactggttatatgtcaggg

SEQ ID NO: 491594 - DNA, 33 bp, Homo sapien
cattccagactttcaattggttatatgtcaggg

SEQ ID NO: 491595 - DNA, 33 bp, Homo sapien
gagagttttgactcaagacttgcttgtctttta

SEQ ID NO: 491596 - DNA, 33 bp, Homo sapien
gagagttttgactcaatacttgcttgtctttta

SEQ ID NO: 491597 - DNA, 33 bp, Homo sapien
acacacagggcattacagcctctcattcttgca

SEQ ID NO: 491598 - DNA, 33 bp, Homo sapien
acacacagggcattacggcctctcattcttgca

SEQ ID NO: 491599 - DNA, 33 bp, Homo sapien
acaaaatagaaattgaagcccaaattgtggaat

SEQ ID NO: 491600 - DNA, 33 bp, Homo sapien
acaaaatagaaattgaggcccaaattgtggaat

SEQ ID NO: 491601 - DNA, 33 bp, Homo sapien
acgaagctctgtgccacaaatttgatgctggga

SEQ ID NO: 491602 - DNA, 33 bp, Homo sapien
acgaagctctgtgccataaatttgatgctggga

SEQ ID NO: 491603 - DNA, 33 bp, Homo sapien
acaataacagatgatcaccagggatttggatac

SEQ ID NO: 491604 - DNA, 33 bp, Homo sapien
acaataacagatgatctccagggatttggatac

SEQ ID NO: 491605 - DNA, 33 bp, Homo sapien
agtattagtaaacaaagagaaagaacacttggg

SEQ ID NO: 491606 - DNA, 33 bp, Homo sapien
agtattagtaaacaaatagaaagaacacttggg

SEQ ID NO: 491607 - DNA, 33 bp, Homo sapien
gccactagctttctaaaaacctgtggtggacat

SEQ ID NO: 491608 - DNA, 33 bp, Homo sapien
gccactagctttctaataacctgtggtggacat

SEQ ID NO: 491609 - DNA, 33 bp, Homo sapien
cagctacctacaatgtcaagtcggcaaagattc

SEQ ID NO: 491610 - DNA, 33 bp, Homo sapien
cagctacctacaatgtgaagtcggcaaagattc

SEQ ID NO: 491611 - DNA, 33 bp, Homo sapien
cacgaccacgattaaccgaagcctccacctccc

SEQ ID NO: 491612 - DNA, 33 bp, Homo sapien
cacgaccacgattaactgaagcctccacctccc

SEQ ID NO: 491613 - DNA, 33 bp, Homo sapien
gcccttcccagtattacgctgccctaaattgca

SEQ ID NO: 491614 - DNA, 33 bp, Homo sapien
gcccttcccagtattatgctgccctaaattgca

SEQ ID NO: 491615 - DNA, 33 bp, Homo sapien
cagcattaccccttgcaaacactgaccaggagc

SEQ ID NO: 491616 - DNA, 33 bp, Homo sapien
cagcattaccccttgcgaacactgaccaggagc

SEQ ID NO: 491617 - DNA, 33 bp, Homo sapien
ttaactctaaattcacaagccaaaatcacgaac

SEQ ID NO: 491618 - DNA, 33 bp, Homo sapien
ttaactctaaattcacgagccaaaatcacgaac

SEQ ID NO: 491619 - DNA, 33 bp, Homo sapien
acagaagaggctgtacggggggacttgatcgat

SEQ ID NO: 491620 - DNA, 33 bp, Homo sapien
acagaagaggctgtactgggggacttgatcgat

SEQ ID NO: 491621 - DNA, 33 bp, Homo sapien
cttggattcacctcctgaagtgtgcaccatgca

SEQ ID NO: 491622 - DNA, 33 bp, Homo sapien
cttggattcacctccttaagtgtgcaccatgca

SEQ ID NO: 491623 - DNA, 33 bp, Homo sapien
tggagagtaggcttaccagctcggggccagtgg

SEQ ID NO: 491624 - DNA, 33 bp, Homo sapien
tggagagtaggcttacgagctcggggccagtgg

SEQ ID NO: 491625 - DNA, 33 bp, Homo sapien
atgatcaggaccattcccattcattctgatttt

SEQ ID NO: 491626 - DNA, 33 bp, Homo sapien
atgatcaggaccattctcattcattctgatttt

SEQ ID NO: 491627 - DNA, 33 bp, Homo sapien
aggcccaaaacaatccagctagtgagaagggct

SEQ ID NO: 491628 - DNA, 33 bp, Homo sapien
aggcccaaaacaatccggctagtgagaagggct

SEQ ID NO: 491629 - DNA, 33 bp, Homo sapien
ataacaggcaagttaacagagatagaaatgaaa

SEQ ID NO: 491630 - DNA, 33 bp, Homo sapien
ataacaggcaagttaatagagatagaaatgaaa

SEQ ID NO: 491631 - DNA, 33 bp, Homo sapien
tgataccaacacagttgaacaccgaatgggctc

SEQ ID NO: 491632 - DNA, 33 bp, Homo sapien
tgataccaacacagtttaacaccgaatgggctc

SEQ ID NO: 491633 - DNA, 33 bp, Homo sapien
tattttttggatcaagaaaagggcaaaaaagtt

SEQ ID NO: 491634 - DNA, 33 bp, Homo sapien
tattttttggatcaaggaaagggcaaaaaagtt

SEQ ID NO: 491635 - DNA, 33 bp, Homo sapien
tcttccttaagcttacacccattaaactgtggc

SEQ ID NO: 491636 - DNA, 33 bp, Homo sapien
tcttccttaagcttacccccattaaactgtggc

SEQ ID NO: 491637 - DNA, 33 bp, Homo sapien
cttaggctgagtcctgaaaaatcccacacaaag

SEQ ID NO: 491638 - DNA, 33 bp, Homo sapien
cttaggctgagtcctgcaaaatcccacacaaag

SEQ ID NO: 491639 - DNA, 33 bp, Homo sapien
ctttgttccttcttcccgcatagttcagaagtg

SEQ ID NO: 491640 - DNA, 33 bp, Homo sapien
ctttgttccttcttcctgcatagttcagaagtg

SEQ ID NO: 491641 - DNA, 33 bp, Homo sapien
gactgcaactctaggtaaacatcccttctgttt

SEQ ID NO: 491642 - DNA, 33 bp, Homo sapien
gactgcaactctaggtgaacatcccttctgttt

SEQ ID NO: 491643 - DNA, 33 bp, Homo sapien
ccttcctcagagagtcaatgttagtattaaata

SEQ ID NO: 491644 - DNA, 33 bp, Homo sapien
ccttcctcagagagtcgatgttagtattaaata

SEQ ID NO: 491645 - DNA, 33 bp, Homo sapien
cacgcatcagcctgcaatatgcttttcctcatg

SEQ ID NO: 491646 - DNA, 33 bp, Homo sapien
cacgcatcagcctgcactatgcttttcctcatg

SEQ ID NO: 491647 - DNA, 33 bp, Homo sapien
gcattttcaattcttacagacccaactacacta

SEQ ID NO: 491648 - DNA, 33 bp, Homo sapien
gcattttcaattcttagagacccaactacacta

SEQ ID NO: 491649 - DNA, 33 bp, Homo sapien
acttctggagtcatccggaaagagggctgggct

SEQ ID NO: 491650 - DNA, 33 bp, Homo sapien
acttctggagtcatcctgaaagagggctgggct

SEQ ID NO: 491651 - DNA, 33 bp, Homo sapien
caatagtaaaatgagcaaattagatagatgacc

SEQ ID NO: 491652 - DNA, 33 bp, Homo sapien
caatagtaaaatgagcgaattagatagatgacc

SEQ ID NO: 491653 - DNA, 33 bp, Homo sapien
attcactgattgataactacacataaaacatgg

SEQ ID NO: 491654 - DNA, 33 bp, Homo sapien
attcactgattgataagtacacataaaacatgg

SEQ ID NO: 491655 - DNA, 33 bp, Homo sapien
attcacagctttcacccgctctttggttaccaa

SEQ ID NO: 491656 - DNA, 33 bp, Homo sapien
attcacagctttcacctgctctttggttaccaa

SEQ ID NO: 491657 - DNA, 33 bp, Homo sapien
tgaagataccacagacacttcagcaccccagcc

SEQ ID NO: 491658 - DNA, 33 bp, Homo sapien
tgaagataccacagacgcttcagcaccccagcc

SEQ ID NO: 491659 - DNA, 33 bp, Homo sapien
aagcaccatatcgttacgtgaatggaagcaaag

SEQ ID NO: 491660 - DNA, 33 bp, Homo sapien
aagcaccatatcgttatgtgaatggaagcaaag

SEQ ID NO: 491661 - DNA, 33 bp, Homo sapien
gtctggggactttccacgagaccggtttagctg

SEQ ID NO: 491662 - DNA, 33 bp, Homo sapien
gtctggggactttccatgagaccggtttagctg

SEQ ID NO: 491663 - DNA, 33 bp, Homo sapien
ttgggcatctctcttaagcctgctttgtctcac

SEQ ID NO: 491664 - DNA, 33 bp, Homo sapien
ttgggcatctctcttaggcctgctttgtctcac

SEQ ID NO: 491665 - DNA, 33 bp, Homo sapien
ccatgtctctcgctaaagccctagtgccaagag

SEQ ID NO: 491666 - DNA, 33 bp, Homo sapien
ccatgtctctcgctaaggccctagtgccaagag

SEQ ID NO: 491667 - DNA, 33 bp, Homo sapien
ggcctggaagtgccaaaagctaccagagacctc

SEQ ID NO: 491668 - DNA, 33 bp, Homo sapien
ggcctggaagtgccaagagctaccagagacctc

SEQ ID NO: 491669 - DNA, 33 bp, Homo sapien
actttcactgaagagacagtttttgagggtgtg

SEQ ID NO: 491670 - DNA, 33 bp, Homo sapien
actttcactgaagagatagtttttgagggtgtg

SEQ ID NO: 491671 - DNA, 33 bp, Homo sapien
ctaggcttgaatgagaaaataacgatacctttc

SEQ ID NO: 491672 - DNA, 33 bp, Homo sapien
ctaggcttgaatgagagaataacgatacctttc

SEQ ID NO: 491673 - DNA, 33 bp, Homo sapien
ctcccagcacctggtcaaggaatcacccacagc

SEQ ID NO: 491674 - DNA, 33 bp, Homo sapien
ctcccagcacctggtccaggaatcacccacagc

SEQ ID NO: 491675 - DNA, 33 bp, Homo sapien
cacagactttgaagacaggcggcctcgtatcag

SEQ ID NO: 491676 - DNA, 33 bp, Homo sapien
cacagactttgaagacgggcggcctcgtatcag

SEQ ID NO: 491677 - DNA, 33 bp, Homo sapien
tcctttatgggaggaaagaatgcaagttccacg

SEQ ID NO: 491678 - DNA, 33 bp, Homo sapien
tcctttatgggaggaatgaatgcaagttccacg

SEQ ID NO: 491679 - DNA, 33 bp, Homo sapien
gcagcggcttcttctagagtatgtgatcgtaga

SEQ ID NO: 491680 - DNA, 33 bp, Homo sapien
gcagcggcttcttctatagtatgtgatcgtaga

SEQ ID NO: 491681 - DNA, 33 bp, Homo sapien
gaacagaacacagtgaaaaaagaacaggtggtt

SEQ ID NO: 491682 - DNA, 33 bp, Homo sapien
gaacagaacacagtgataaaagaacaggtggtt

SEQ ID NO: 491683 - DNA, 33 bp, Homo sapien
cagccccaggttctccagctaatgggattccag

SEQ ID NO: 491684 - DNA, 33 bp, Homo sapien
cagccccaggttctccggctaatgggattccag

SEQ ID NO: 491685 - DNA, 33 bp, Homo sapien
ttccaccagaccaagcagcttgcacaataacag

SEQ ID NO: 491686 - DNA, 33 bp, Homo sapien
ttccaccagaccaagcggcttgcacaataacag

SEQ ID NO: 491687 - DNA, 33 bp, Homo sapien
aaatcaggggttgaaacagcaaaagagaattcc

SEQ ID NO: 491688 - DNA, 33 bp, Homo sapien
aaatcaggggttgaaagagcaaaagagaattcc

SEQ ID NO: 491689 - DNA, 33 bp, Homo sapien
aattttctttattgaccggctgatgcctgaaat

SEQ ID NO: 491690 - DNA, 33 bp, Homo sapien
aattttctttattgactggctgatgcctgaaat

SEQ ID NO: 491691 - DNA, 33 bp, Homo sapien
gaactaaatttcagaaagtgaagattccttcct

SEQ ID NO: 491692 - DNA, 33 bp, Homo sapien
gaactaaatttcagaaggtgaagattccttcct

SEQ ID NO: 491693 - DNA, 33 bp, Homo sapien
aagccttccttgcctacgaacacccccatgcag

SEQ ID NO: 491694 - DNA, 33 bp, Homo sapien
aagccttccttgcctatgaacacccccatgcag

SEQ ID NO: 491695 - DNA, 33 bp, Homo sapien
gtacaattctgcatcacaaaaaatggatttaca

SEQ ID NO: 491696 - DNA, 33 bp, Homo sapien
gtacaattctgcatcataaaaaatggatttaca

SEQ ID NO: 491697 - DNA, 33 bp, Homo sapien
gttctgggtttcttaccgacgcccttgcttccc

SEQ ID NO: 491698 - DNA, 33 bp, Homo sapien
gttctgggtttcttactgacgcccttgcttccc

SEQ ID NO: 491699 - DNA, 33 bp, Homo sapien
taaatcctgattctaactccaatccacagccag

SEQ ID NO: 491700 - DNA, 33 bp, Homo sapien
taaatcctgattctaattccaatccacagccag

SEQ ID NO: 491701 - DNA, 33 bp, Homo sapien
gcaagtctgagttagcaagttgtctcaaccagg

SEQ ID NO: 491702 - DNA, 33 bp, Homo sapien
gcaagtctgagttagcgagttgtctcaaccagg

SEQ ID NO: 491703 - DNA, 33 bp, Homo sapien
tattttatgtcttccacgtatattcactaacta

SEQ ID NO: 491704 - DNA, 33 bp, Homo sapien
tattttatgtcttccaggtatattcactaacta

SEQ ID NO: 491705 - DNA, 33 bp, Homo sapien
gaacaagactgcaggaaggaccatttacctacc

SEQ ID NO: 491706 - DNA, 33 bp, Homo sapien
gaacaagactgcaggagggaccatttacctacc

SEQ ID NO: 491707 - DNA, 33 bp, Homo sapien
ttttgcccttcctacactgcagataacacaact

SEQ ID NO: 491708 - DNA, 33 bp, Homo sapien
ttttgcccttcctacattgcagataacacaact

SEQ ID NO: 491709 - DNA, 33 bp, Homo sapien
cagaattgtactttcaatcccttgttgcttttc

SEQ ID NO: 491710 - DNA, 33 bp, Homo sapien
cagaattgtactttcattcccttgttgcttttc

SEQ ID NO: 491711 - DNA, 33 bp, Homo sapien
caacataatactttaaccattttctagcagtga

SEQ ID NO: 491712 - DNA, 33 bp, Homo sapien
caacataatactttaatcattttctagcagtga

SEQ ID NO: 491713 - DNA, 33 bp, Homo sapien
atggaaaagttcatgacaagccaacataatact

SEQ ID NO: 491714 - DNA, 33 bp, Homo sapien
atggaaaagttcatgataagccaacataatact

SEQ ID NO: 491715 - DNA, 33 bp, Homo sapien
gcaaatgccttgggtaaccgaatcatgggacag

SEQ ID NO: 491716 - DNA, 33 bp, Homo sapien
gcaaatgccttgggtagccgaatcatgggacag

SEQ ID NO: 491717 - DNA, 33 bp, Homo sapien
tttgtcctgtggaaaaaggctcagtctgcagac

SEQ ID NO: 491718 - DNA, 33 bp, Homo sapien
tttgtcctgtggaaaagggctcagtctgcagac

SEQ ID NO: 491719 - DNA, 33 bp, Homo sapien
gtaattcatatatcagcaggtaggtaaacatgg

SEQ ID NO: 491720 - DNA, 33 bp, Homo sapien
gtaattcatatatcagtaggtaggtaaacatgg

SEQ ID NO: 491721 - DNA, 33 bp, Homo sapien
ctttgtgaaatgaaagccttagcttagaatctt

SEQ ID NO: 491722 - DNA, 33 bp, Homo sapien
ctttgtgaaatgaaaggcttagcttagaatctt

SEQ ID NO: 491723 - DNA, 33 bp, Homo sapien
ggagggccgaccccaagccctgtgtctgaaggg

SEQ ID NO: 491724 - DNA, 33 bp, Homo sapien
ggagggccgaccccaatccctgtgtctgaaggg

SEQ ID NO: 491725 - DNA, 33 bp, Homo sapien
tctgatgtggctgcataaagacgtgtctctgaa

SEQ ID NO: 491726 - DNA, 33 bp, Homo sapien
tctgatgtggctgcatgaagacgtgtctctgaa

SEQ ID NO: 491727 - DNA, 33 bp, Homo sapien
tgatctattgggaatacctaaatcatatgtatg

SEQ ID NO: 491728 - DNA, 33 bp, Homo sapien
tgatctattgggaatatctaaatcatatgtatg

SEQ ID NO: 491729 - DNA, 33 bp, Homo sapien
cgagactttgaattagaaatctcatgaccctgc

SEQ ID NO: 491730 - DNA, 33 bp, Homo sapien
cgagactttgaattaggaatctcatgaccctgc

SEQ ID NO: 491731 - DNA, 33 bp, Homo sapien
taaggaaagcctccagacacatgaacaaaaatg

SEQ ID NO: 491732 - DNA, 33 bp, Homo sapien
taaggaaagcctccaggcacatgaacaaaaatg

SEQ ID NO: 491733 - DNA, 33 bp, Homo sapien
gcagaaaggcatcttgcagagccgttccaatgc

SEQ ID NO: 491734 - DNA, 33 bp, Homo sapien
gcagaaaggcatcttgtagagccgttccaatgc

SEQ ID NO: 491735 - DNA, 33 bp, Homo sapien
ccagggtgtccttccaataatcctccatcacct

SEQ ID NO: 491736 - DNA, 33 bp, Homo sapien
ccagggtgtccttccagtaatcctccatcacct

SEQ ID NO: 491737 - DNA, 33 bp, Homo sapien
tccctcccaacttcaaatatgttgcttttttaa

SEQ ID NO: 491738 - DNA, 33 bp, Homo sapien
tccctcccaacttcaactatgttgcttttttaa

SEQ ID NO: 491739 - DNA, 33 bp, Homo sapien
atattctttgagggcccaaacaagatgctttca

SEQ ID NO: 491740 - DNA, 33 bp, Homo sapien
atattctttgagggcctaaacaagatgctttca

SEQ ID NO: 491741 - DNA, 33 bp, Homo sapien
caggttgagaacttgccgcaactccttggacag

SEQ ID NO: 491742 - DNA, 33 bp, Homo sapien
caggttgagaacttgctgcaactccttggacag

SEQ ID NO: 491743 - DNA, 33 bp, Homo sapien
cacacatcacttgagaaatcaccatctcaaata

SEQ ID NO: 491744 - DNA, 33 bp, Homo sapien
cacacatcacttgagacatcaccatctcaaata

SEQ ID NO: 491745 - DNA, 33 bp, Homo sapien
aaggtgcagtaacaaacagacccaaatgcagtg

SEQ ID NO: 491746 - DNA, 33 bp, Homo sapien
aaggtgcagtaacaaatagacccaaatgcagtg

SEQ ID NO: 491747 - DNA, 33 bp, Homo sapien
ctcagaagccataatcactgctctctgaagcca

SEQ ID NO: 491748 - DNA, 33 bp, Homo sapien
ctcagaagccataatcgctgctctctgaagcca

SEQ ID NO: 491749 - DNA, 33 bp, Homo sapien
tccgagggacagggtaagaccgagacagctcct

SEQ ID NO: 491750 - DNA, 33 bp, Homo sapien
tccgagggacagggtaggaccgagacagctcct

SEQ ID NO: 491751 - DNA, 33 bp, Homo sapien
gtgaggatctgaaagaatatttgcaaagttcct

SEQ ID NO: 491752 - DNA, 33 bp, Homo sapien
gtgaggatctgaaagagtatttgcaaagttcct

SEQ ID NO: 491753 - DNA, 33 bp, Homo sapien
ccttgcaaagttaaagaatctgctccaatttac

SEQ ID NO: 491754 - DNA, 33 bp, Homo sapien
ccttgcaaagttaaagcatctgctccaatttac

SEQ ID NO: 491755 - DNA, 33 bp, Homo sapien
ctaatactgctatgaacgtgagtgtatagaaat

SEQ ID NO: 491756 - DNA, 33 bp, Homo sapien
ctaatactgctatgaatgtgagtgtatagaaat

SEQ ID NO: 491757 - DNA, 33 bp, Homo sapien
tgcttctgtcacaccaccaagaatgctggtaga

SEQ ID NO: 491758 - DNA, 33 bp, Homo sapien
tgcttctgtcacaccatcaagaatgctggtaga

SEQ ID NO: 491759 - DNA, 33 bp, Homo sapien
tctgtagtcttatcctcagaagctgtattcact

SEQ ID NO: 491760 - DNA, 33 bp, Homo sapien
tctgtagtcttatccttagaagctgtattcact

SEQ ID NO: 491761 - DNA, 33 bp, Homo sapien
cgcctcccggccgttcccttgtgactgatcctt

SEQ ID NO: 491762 - DNA, 33 bp, Homo sapien
cgcctcccggccgttctcttgtgactgatcctt

SEQ ID NO: 491763 - DNA, 33 bp, Homo sapien
tggattagaataagcaagcatgtatatacataa

SEQ ID NO: 491764 - DNA, 33 bp, Homo sapien
tggattagaataagcaggcatgtatatacataa

SEQ ID NO: 491765 - DNA, 33 bp, Homo sapien
ccttatgggttgatcccacaccacaccacacca

SEQ ID NO: 491766 - DNA, 33 bp, Homo sapien
ccttatgggttgatcctacaccacaccacacca

SEQ ID NO: 491767 - DNA, 33 bp, Homo sapien
gtgaggcatatctgagaaattcactctccagta

SEQ ID NO: 491768 - DNA, 33 bp, Homo sapien
gtgaggcatatctgaggaattcactctccagta

SEQ ID NO: 491769 - DNA, 33 bp, Homo sapien
ttcgagaccagtctaaccaacatagtgaaagcc

SEQ ID NO: 491770 - DNA, 33 bp, Homo sapien
ttcgagaccagtctaatcaacatagtgaaagcc

SEQ ID NO: 491771 - DNA, 33 bp, Homo sapien
tgttggtaggaagaggaaactctgcatgccttt

SEQ ID NO: 491772 - DNA, 33 bp, Homo sapien
tgttggtaggaagaggcaactctgcatgccttt

SEQ ID NO: 491773 - DNA, 33 bp, Homo sapien
actggcatcttaagcacgatttcaaactcagcc

SEQ ID NO: 491774 - DNA, 33 bp, Homo sapien
actggcatcttaagcatgatttcaaactcagcc

SEQ ID NO: 491775 - DNA, 33 bp, Homo sapien
tttaatggcaggaagaccaattggaccaatatt

SEQ ID NO: 491776 - DNA, 33 bp, Homo sapien
tttaatggcaggaagatcaattggaccaatatt

SEQ ID NO: 491777 - DNA, 33 bp, Homo sapien
gtgatcccagcataaaagcaacaggtacttgga

SEQ ID NO: 491778 - DNA, 33 bp, Homo sapien
gtgatcccagcataaacgcaacaggtacttgga

SEQ ID NO: 491779 - DNA, 33 bp, Homo sapien
ccaattgtgagaccaaatcagttcattggcacc

SEQ ID NO: 491780 - DNA, 33 bp, Homo sapien
ccaattgtgagaccaagtcagttcattggcacc

SEQ ID NO: 491781 - DNA, 33 bp, Homo sapien
cagaattagacagctaaaaacatttctatcagc

SEQ ID NO: 491782 - DNA, 33 bp, Homo sapien
cagaattagacagctacaaacatttctatcagc

SEQ ID NO: 491783 - DNA, 33 bp, Homo sapien
cactgtctttgtgagactcacccttgcatttat

SEQ ID NO: 491784 - DNA, 33 bp, Homo sapien
cactgtctttgtgagattcacccttgcatttat

SEQ ID NO: 491785 - DNA, 33 bp, Homo sapien
aagaagaaagaggggaaatttggagggatggtc

SEQ ID NO: 491786 - DNA, 33 bp, Homo sapien
aagaagaaagaggggagatttggagggatggtc

SEQ ID NO: 491787 - DNA, 33 bp, Homo sapien
acagaccagtcttggaagataagtcaggaaagc

SEQ ID NO: 491788 - DNA, 33 bp, Homo sapien
acagaccagtcttggatgataagtcaggaaagc

SEQ ID NO: 491789 - DNA, 33 bp, Homo sapien
ggtcatttagaatggccctccaacaggaagaaa

SEQ ID NO: 491790 - DNA, 33 bp, Homo sapien
ggtcatttagaatggctctccaacaggaagaaa

SEQ ID NO: 491791 - DNA, 33 bp, Homo sapien
aattgagaccaattcaccagaagacttaaggaa

SEQ ID NO: 491792 - DNA, 33 bp, Homo sapien
aattgagaccaattcatcagaagacttaaggaa

SEQ ID NO: 491793 - DNA, 33 bp, Homo sapien
tgcagttagcttaaaggcatggaggacattcct

SEQ ID NO: 491794 - DNA, 33 bp, Homo sapien
tgcagttagcttaaagtcatggaggacattcct

SEQ ID NO: 491795 - DNA, 33 bp, Homo sapien
tgtcacagttctctacccttgacctgctgatag

SEQ ID NO: 491796 - DNA, 33 bp, Homo sapien
tgtcacagttctctactcttgacctgctgatag

SEQ ID NO: 491797 - DNA, 33 bp, Homo sapien
ctttattttccccaaactctaaagcaacagttt

SEQ ID NO: 491798 - DNA, 33 bp, Homo sapien
ctttattttccccaaagtctaaagcaacagttt

SEQ ID NO: 491799 - DNA, 33 bp, Homo sapien
atcattctgctctgtgaaagaaattaaacacaa

SEQ ID NO: 491800 - DNA, 33 bp, Homo sapien
atcattctgctctgtggaagaaattaaacacaa

SEQ ID NO: 491801 - DNA, 33 bp, Homo sapien
gtcagagataacttaaatgtggtgttcggagtc

SEQ ID NO: 491802 - DNA, 33 bp, Homo sapien
gtcagagataacttaagtgtggtgttcggagtc

SEQ ID NO: 491803 - DNA, 33 bp, Homo sapien
tgcttcttcctgacccccaccacgaggcacaga

SEQ ID NO: 491804 - DNA, 33 bp, Homo sapien
tgcttcttcctgaccctcaccacgaggcacaga

SEQ ID NO: 491805 - DNA, 33 bp, Homo sapien
gcacagtacagaccctgaaatgaccccttcaca

SEQ ID NO: 491806 - DNA, 33 bp, Homo sapien
gcacagtacagacccttaaatgaccccttcaca

SEQ ID NO: 491807 - DNA, 33 bp, Homo sapien
caatgaacttcccagacacaagacttgagctca

SEQ ID NO: 491808 - DNA, 33 bp, Homo sapien
caatgaacttcccagatacaagacttgagctca

SEQ ID NO: 491809 - DNA, 33 bp, Homo sapien
gtggtttctacatggacagctttcaaaaacttc

SEQ ID NO: 491810 - DNA, 33 bp, Homo sapien
gtggtttctacatggatagctttcaaaaacttc

SEQ ID NO: 491811 - DNA, 33 bp, Homo sapien
gggtattcagctgacccggtatttaagaaaaca

SEQ ID NO: 491812 - DNA, 33 bp, Homo sapien
gggtattcagctgacctggtatttaagaaaaca

SEQ ID NO: 491813 - DNA, 33 bp, Homo sapien
gaggagaccaactaaacctattgtgaagtgaga

SEQ ID NO: 491814 - DNA, 33 bp, Homo sapien
gaggagaccaactaaagctattgtgaagtgaga

SEQ ID NO: 491815 - DNA, 33 bp, Homo sapien
tgtatgtgtgtcttaccgccttaaaaaacaaaa

SEQ ID NO: 491816 - DNA, 33 bp, Homo sapien
tgtatgtgtgtcttactgccttaaaaaacaaaa

SEQ ID NO: 491817 - DNA, 33 bp, Homo sapien
acaaattttgaactacaaatcgccatctgctca

SEQ ID NO: 491818 - DNA, 33 bp, Homo sapien
acaaattttgaactacgaatcgccatctgctca

SEQ ID NO: 491819 - DNA, 33 bp, Homo sapien
ctcctccaagaatgtaaaccaatcaacgacttc

SEQ ID NO: 491820 - DNA, 33 bp, Homo sapien
ctcctccaagaatgtagaccaatcaacgacttc

SEQ ID NO: 491821 - DNA, 33 bp, Homo sapien
gaacctcaggctggaccgtcaagctcccgcaga

SEQ ID NO: 491822 - DNA, 33 bp, Homo sapien
gaacctcaggctggacggtcaagctcccgcaga

SEQ ID NO: 491823 - DNA, 33 bp, Homo sapien
tgaaaatgctcaccccagaaagatagcagaaaa

SEQ ID NO: 491824 - DNA, 33 bp, Homo sapien
tgaaaatgctcaccccggaaagatagcagaaaa

SEQ ID NO: 491825 - DNA, 33 bp, Homo sapien
aagacagtatgtccacagtacaatccatgtttg

SEQ ID NO: 491826 - DNA, 33 bp, Homo sapien
aagacagtatgtccacggtacaatccatgtttg

SEQ ID NO: 491827 - DNA, 33 bp, Homo sapien
taacgtgtcttcgtcaatatctaagtgcatgat

SEQ ID NO: 491828 - DNA, 33 bp, Homo sapien
taacgtgtcttcgtcagtatctaagtgcatgat

SEQ ID NO: 491829 - DNA, 33 bp, Homo sapien
tggaccaaaagcccaaatggagaataataattt

SEQ ID NO: 491830 - DNA, 33 bp, Homo sapien
tggaccaaaagcccaactggagaataataattt

SEQ ID NO: 491831 - DNA, 33 bp, Homo sapien
gagacacattctgagaaattcgtcgttaggtga

SEQ ID NO: 491832 - DNA, 33 bp, Homo sapien
gagacacattctgagagattcgtcgttaggtga

SEQ ID NO: 491833 - DNA, 33 bp, Homo sapien
aaatttccatactggaccgtgggttctcaccaa

SEQ ID NO: 491834 - DNA, 33 bp, Homo sapien
aaatttccatactggatcgtgggttctcaccaa

SEQ ID NO: 491835 - DNA, 33 bp, Homo sapien
tgtaactccctttaagaaacacatcctataatt

SEQ ID NO: 491836 - DNA, 33 bp, Homo sapien
tgtaactccctttaaggaacacatcctataatt

SEQ ID NO: 491837 - DNA, 33 bp, Homo sapien
tccttggtgaaagccccagggacaatgactttc

SEQ ID NO: 491838 - DNA, 33 bp, Homo sapien
tccttggtgaaagcccgagggacaatgactttc

SEQ ID NO: 491839 - DNA, 33 bp, Homo sapien
attaaccactgttaacacttcttcatctgcact

SEQ ID NO: 491840 - DNA, 33 bp, Homo sapien
attaaccactgttaacgcttcttcatctgcact

SEQ ID NO: 491841 - DNA, 33 bp, Homo sapien
ctgttgaccatgaaaactggttagtacaagcaa

SEQ ID NO: 491842 - DNA, 33 bp, Homo sapien
ctgttgaccatgaaaagtggttagtacaagcaa

SEQ ID NO: 491843 - DNA, 33 bp, Homo sapien
aactcacaggtcttctcaaagatgggtaacagg

SEQ ID NO: 491844 - DNA, 33 bp, Homo sapien
aactcacaggtcttctgaaagatgggtaacagg

SEQ ID NO: 491845 - DNA, 33 bp, Homo sapien
gtttgcccaaggaacccgagctaagtcctccaa

SEQ ID NO: 491846 - DNA, 33 bp, Homo sapien
gtttgcccaaggaacctgagctaagtcctccaa

SEQ ID NO: 491847 - DNA, 33 bp, Homo sapien
ccagagtgagtgatccaagaaaaacaaagaggc

SEQ ID NO: 491848 - DNA, 33 bp, Homo sapien
ccagagtgagtgatccgagaaaaacaaagaggc

SEQ ID NO: 491849 - DNA, 33 bp, Homo sapien
atctttatggagaagacatgggagataatgtag

SEQ ID NO: 491850 - DNA, 33 bp, Homo sapien
atctttatggagaagatatgggagataatgtag

SEQ ID NO: 491851 - DNA, 33 bp, Homo sapien
ttaaagaacatgggaaaaatcttctaagcaatg

SEQ ID NO: 491852 - DNA, 33 bp, Homo sapien
ttaaagaacatgggaataatcttctaagcaatg

SEQ ID NO: 491853 - DNA, 33 bp, Homo sapien
aatgtccagaccggcacattgtggaacagaagt

SEQ ID NO: 491854 - DNA, 33 bp, Homo sapien
aatgtccagaccggcatattgtggaacagaagt

SEQ ID NO: 491855 - DNA, 33 bp, Homo sapien
tctaccaatgatcgtcccctgtgtggaactcca

SEQ ID NO: 491856 - DNA, 33 bp, Homo sapien
tctaccaatgatcgtctcctgtgtggaactcca

SEQ ID NO: 491857 - DNA, 33 bp, Homo sapien
ttccaatccacaaagcaataacgagcaacttga

SEQ ID NO: 491858 - DNA, 33 bp, Homo sapien
ttccaatccacaaagcgataacgagcaacttga

SEQ ID NO: 491859 - DNA, 33 bp, Homo sapien
gaccaccacgtgccagactaatcactacatgaa

SEQ ID NO: 491860 - DNA, 33 bp, Homo sapien
gaccaccacgtgccaggctaatcactacatgaa

SEQ ID NO: 491861 - DNA, 33 bp, Homo sapien
ttttatccactagcgcacgtatgttacattttg

SEQ ID NO: 491862 - DNA, 33 bp, Homo sapien
ttttatccactagcgcgcgtatgttacattttg

SEQ ID NO: 491863 - DNA, 33 bp, Homo sapien
aaagtaaatgctggtaaaggagcagacagtcct

SEQ ID NO: 491864 - DNA, 33 bp, Homo sapien
aaagtaaatgctggtacaggagcagacagtcct

SEQ ID NO: 491865 - DNA, 33 bp, Homo sapien
tagcctttttaacaaacgatgctggagcattga

SEQ ID NO: 491866 - DNA, 33 bp, Homo sapien
tagcctttttaacaaatgatgctggagcattga

SEQ ID NO: 491867 - DNA, 33 bp, Homo sapien
atccatcaatcttgcactcaactgttacttctt

SEQ ID NO: 491868 - DNA, 33 bp, Homo sapien
atccatcaatcttgcattcaactgttacttctt

SEQ ID NO: 491869 - DNA, 33 bp, Homo sapien
tctgagggttcgaatccatacaagagccttgca

SEQ ID NO: 491870 - DNA, 33 bp, Homo sapien
tctgagggttcgaatcgatacaagagccttgca

SEQ ID NO: 491871 - DNA, 33 bp, Homo sapien
tgcaccataacctacactggacatagaaactgt

SEQ ID NO: 491872 - DNA, 33 bp, Homo sapien
tgcaccataacctacattggacatagaaactgt

SEQ ID NO: 491873 - DNA, 33 bp, Homo sapien
ggggttactggacaaccagagctacctgtggac

SEQ ID NO: 491874 - DNA, 33 bp, Homo sapien
ggggttactggacaactagagctacctgtggac

SEQ ID NO: 491875 - DNA, 33 bp, Homo sapien
aacaacaaaaacctgacgtggcctggtgtggtg

SEQ ID NO: 491876 - DNA, 33 bp, Homo sapien
aacaacaaaaacctgatgtggcctggtgtggtg

SEQ ID NO: 491877 - DNA, 33 bp, Homo sapien
cgtgagccatcaagcccggctccaaaatgtgtt

SEQ ID NO: 491878 - DNA, 33 bp, Homo sapien
cgtgagccatcaagcctggctccaaaatgtgtt

SEQ ID NO: 491879 - DNA, 33 bp, Homo sapien
cagcgcccttaagaatcatgctcactctactgt

SEQ ID NO: 491880 - DNA, 33 bp, Homo sapien
cagcgcccttaagaatgatgctcactctactgt

SEQ ID NO: 491881 - DNA, 33 bp, Homo sapien
agaagctgatctaaaccatgcactttccccaag

SEQ ID NO: 491882 - DNA, 33 bp, Homo sapien
agaagctgatctaaactatgcactttccccaag

SEQ ID NO: 491883 - DNA, 33 bp, Homo sapien
cactgccactgaagataaggatttcactctcac

SEQ ID NO: 491884 - DNA, 33 bp, Homo sapien
cactgccactgaagatgaggatttcactctcac

SEQ ID NO: 491885 - DNA, 33 bp, Homo sapien
ccaatccaactcatgacatatatccagtttcat

SEQ ID NO: 491886 - DNA, 33 bp, Homo sapien
ccaatccaactcatgatatatatccagtttcat

SEQ ID NO: 491887 - DNA, 33 bp, Homo sapien
gccttttaagcaaatgaatacccaaagaaacag

SEQ ID NO: 491888 - DNA, 33 bp, Homo sapien
gccttttaagcaaatgcatacccaaagaaacag

SEQ ID NO: 491889 - DNA, 33 bp, Homo sapien
caaattgtgatatacccagttatgcaaatataa

SEQ ID NO: 491890 - DNA, 33 bp, Homo sapien
caaattgtgatatacctagttatgcaaatataa

SEQ ID NO: 491891 - DNA, 33 bp, Homo sapien
ctaaaattgaaccaaaacctaccctgcaatcca

SEQ ID NO: 491892 - DNA, 33 bp, Homo sapien
ctaaaattgaaccaaatcctaccctgcaatcca

SEQ ID NO: 491893 - DNA, 33 bp, Homo sapien
cccaaacctctatacactggacatcttctgaat

SEQ ID NO: 491894 - DNA, 33 bp, Homo sapien
cccaaacctctatacattggacatcttctgaat

SEQ ID NO: 491895 - DNA, 33 bp, Homo sapien
aatttcttcgagtctcaatttcctcattagtaa

SEQ ID NO: 491896 - DNA, 33 bp, Homo sapien
aatttcttcgagtctcgatttcctcattagtaa

SEQ ID NO: 491897 - DNA, 33 bp, Homo sapien
atattttattcatgtaagtgtgatgcatttttt

SEQ ID NO: 491898 - DNA, 33 bp, Homo sapien
atattttattcatgtatgtgtgatgcatttttt

SEQ ID NO: 491899 - DNA, 33 bp, Homo sapien
gtggtggtagacgtacacatcatctaccttcca

SEQ ID NO: 491900 - DNA, 33 bp, Homo sapien
gtggtggtagacgtacgcatcatctaccttcca

SEQ ID NO: 491901 - DNA, 33 bp, Homo sapien
aataaataattaaccaagagtggctgtttataa

SEQ ID NO: 491902 - DNA, 33 bp, Homo sapien
aataaataattaaccaggagtggctgtttataa

SEQ ID NO: 491903 - DNA, 33 bp, Homo sapien
gagaagtctttcatcaagaagttaattatggcc

SEQ ID NO: 491904 - DNA, 33 bp, Homo sapien
gagaagtctttcatcaggaagttaattatggcc

SEQ ID NO: 491905 - DNA, 33 bp, Homo sapien
caggctctgttctgcaatagggaggtctgcagt

SEQ ID NO: 491906 - DNA, 33 bp, Homo sapien
caggctctgttctgcagtagggaggtctgcagt

SEQ ID NO: 491907 - DNA, 33 bp, Homo sapien
gaaacctcatttcttacacattacgtagtctcc

SEQ ID NO: 491908 - DNA, 33 bp, Homo sapien
gaaacctcatttcttatacattacgtagtctcc

SEQ ID NO: 491909 - DNA, 33 bp, Homo sapien
agctgctgaattggaaccatcctacctcagact

SEQ ID NO: 491910 - DNA, 33 bp, Homo sapien
agctgctgaattggaagcatcctacctcagact

SEQ ID NO: 491911 - DNA, 33 bp, Homo sapien
gtatactagttggtgccgaataaatagtagcta

SEQ ID NO: 491912 - DNA, 33 bp, Homo sapien
gtatactagttggtgctgaataaatagtagcta

SEQ ID NO: 491913 - DNA, 33 bp, Homo sapien
catttgaaaaggttgacgtaacactaagacatc

SEQ ID NO: 491914 - DNA, 33 bp, Homo sapien
catttgaaaaggttgatgtaacactaagacatc

SEQ ID NO: 491915 - DNA, 33 bp, Homo sapien
aggttgagctagcagactaaactaacacatcag

SEQ ID NO: 491916 - DNA, 33 bp, Homo sapien
aggttgagctagcagagtaaactaacacatcag

SEQ ID NO: 491917 - DNA, 33 bp, Homo sapien
actctatcttatcaaaagtaactccaagaactt

SEQ ID NO: 491918 - DNA, 33 bp, Homo sapien
actctatcttatcaaaggtaactccaagaactt

SEQ ID NO: 491919 - DNA, 33 bp, Homo sapien
gtctttcccctaagaaacctacagtatcaccag

SEQ ID NO: 491920 - DNA, 33 bp, Homo sapien
gtctttcccctaagaatcctacagtatcaccag

SEQ ID NO: 491921 - DNA, 33 bp, Homo sapien
tttatattttactccaaagggaagaaggctcat

SEQ ID NO: 491922 - DNA, 33 bp, Homo sapien
tttatattttactccagagggaagaaggctcat

SEQ ID NO: 491923 - DNA, 33 bp, Homo sapien
aaaaaatcaagactaaccaaagttcattgagaa

SEQ ID NO: 491924 - DNA, 33 bp, Homo sapien
aaaaaatcaagactaatcaaagttcattgagaa

SEQ ID NO: 491925 - DNA, 33 bp, Homo sapien
cagcattatttcttacgatccaatgcaatacta

SEQ ID NO: 491926 - DNA, 33 bp, Homo sapien
cagcattatttcttactatccaatgcaatacta

SEQ ID NO: 491927 - DNA, 33 bp, Homo sapien
gtgacatgggtcctaaaatagagtcagattggg

SEQ ID NO: 491928 - DNA, 33 bp, Homo sapien
gtgacatgggtcctaagatagagtcagattggg

SEQ ID NO: 491929 - DNA, 33 bp, Homo sapien
aatgtatcctttggaactcactccaaactgcag

SEQ ID NO: 491930 - DNA, 33 bp, Homo sapien
aatgtatcctttggaattcactccaaactgcag

SEQ ID NO: 491931 - DNA, 33 bp, Homo sapien
ttgtgcccagttggaaacatattttacagaact

SEQ ID NO: 491932 - DNA, 33 bp, Homo sapien
ttgtgcccagttggaatcatattttacagaact

SEQ ID NO: 491933 - DNA, 33 bp, Homo sapien
ataatatgtatgtgtgaaataaaaatcaaaaca

SEQ ID NO: 491934 - DNA, 33 bp, Homo sapien
ataatatgtatgtgtgcaataaaaatcaaaaca

SEQ ID NO: 491935 - DNA, 33 bp, Homo sapien
ttcctggaaaaatcaacgtggatcgacgtggaa

SEQ ID NO: 491936 - DNA, 33 bp, Homo sapien
ttcctggaaaaatcaatgtggatcgacgtggaa

SEQ ID NO: 491937 - DNA, 33 bp, Homo sapien
tttgtagaaaatgcaaagtaccttgaaaggcca

SEQ ID NO: 491938 - DNA, 33 bp, Homo sapien
tttgtagaaaatgcaacgtaccttgaaaggcca

SEQ ID NO: 491939 - DNA, 33 bp, Homo sapien
tgtcctgctataacttcgtagtcctggatgctg

SEQ ID NO: 491940 - DNA, 33 bp, Homo sapien
tgtcctgctataactttgtagtcctggatgctg

SEQ ID NO: 491941 - DNA, 33 bp, Homo sapien
gtcctgcatttcctaaaccactcgttgttctac

SEQ ID NO: 491942 - DNA, 33 bp, Homo sapien
gtcctgcatttcctaacccactcgttgttctac

SEQ ID NO: 491943 - DNA, 33 bp, Homo sapien
agccccccttgctccaaagagaacccctgctcc

SEQ ID NO: 491944 - DNA, 33 bp, Homo sapien
agccccccttgctccagagagaacccctgctcc

SEQ ID NO: 491945 - DNA, 33 bp, Homo sapien
ttacaaacctaagttacatgcaactccatctcc

SEQ ID NO: 491946 - DNA, 33 bp, Homo sapien
ttacaaacctaagttatatgcaactccatctcc

SEQ ID NO: 491947 - DNA, 33 bp, Homo sapien
caggagccatctttgcaccctcctctcgctcct

SEQ ID NO: 491948 - DNA, 33 bp, Homo sapien
caggagccatctttgcgccctcctctcgctcct

SEQ ID NO: 491949 - DNA, 33 bp, Homo sapien
tggcttatttaagggacgaggatctagctagct

SEQ ID NO: 491950 - DNA, 33 bp, Homo sapien
tggcttatttaagggaggaggatctagctagct

SEQ ID NO: 491951 - DNA, 33 bp, Homo sapien
tacaatagtcttctcaataaaacatcaaatgtc

SEQ ID NO: 491952 - DNA, 33 bp, Homo sapien
tacaatagtcttctcagtaaaacatcaaatgtc

SEQ ID NO: 491953 - DNA, 33 bp, Homo sapien
gaagtctgtggggacacattagttctgtggact

SEQ ID NO: 491954 - DNA, 33 bp, Homo sapien
gaagtctgtggggacagattagttctgtggact

SEQ ID NO: 491955 - DNA, 33 bp, Homo sapien
gaaaaatgttgttataaactacaactggaaatc

SEQ ID NO: 491956 - DNA, 33 bp, Homo sapien
gaaaaatgttgttatagactacaactggaaatc

SEQ ID NO: 491957 - DNA, 33 bp, Homo sapien
tgtgagattctatacaactcattacaccatcta

SEQ ID NO: 491958 - DNA, 33 bp, Homo sapien
tgtgagattctatacagctcattacaccatcta

SEQ ID NO: 491959 - DNA, 33 bp, Homo sapien
actaggagactagctaagaactcttttcctccc

SEQ ID NO: 491960 - DNA, 33 bp, Homo sapien
actaggagactagctaggaactcttttcctccc

SEQ ID NO: 491961 - DNA, 33 bp, Homo sapien
actgtgtatttagatcaatctgaacccatctcc

SEQ ID NO: 491962 - DNA, 33 bp, Homo sapien
actgtgtatttagatccatctgaacccatctcc

SEQ ID NO: 491963 - DNA, 33 bp, Homo sapien
ttggtagaaaaaactgaaattcttatgccacaa

SEQ ID NO: 491964 - DNA, 33 bp, Homo sapien
ttggtagaaaaaactgcaattcttatgccacaa

SEQ ID NO: 491965 - DNA, 33 bp, Homo sapien
tatagaaaattcaagactcttccaaatatttct

SEQ ID NO: 491966 - DNA, 33 bp, Homo sapien
tatagaaaattcaagagtcttccaaatatttct

SEQ ID NO: 491967 - DNA, 33 bp, Homo sapien
ttagagaagaggtaataatgtgaagaatgcttc

SEQ ID NO: 491968 - DNA, 33 bp, Homo sapien
ttagagaagaggtaatcatgtgaagaatgcttc

SEQ ID NO: 491969 - DNA, 33 bp, Homo sapien
aattagatggtattcactataaatggcttcatt

SEQ ID NO: 491970 - DNA, 33 bp, Homo sapien
aattagatggtattcattataaatggcttcatt

SEQ ID NO: 491971 - DNA, 33 bp, Homo sapien
tgtaattgttggaaaacacttaagagctaagcc

SEQ ID NO: 491972 - DNA, 33 bp, Homo sapien
tgtaattgttggaaaagacttaagagctaagcc

SEQ ID NO: 491973 - DNA, 33 bp, Homo sapien
aataaaaattgccttacacatacagtgggtccc

SEQ ID NO: 491974 - DNA, 33 bp, Homo sapien
aataaaaattgccttatacatacagtgggtccc

SEQ ID NO: 491975 - DNA, 33 bp, Homo sapien
gaaagaaaccagtcacaatggaccatatattgt

SEQ ID NO: 491976 - DNA, 33 bp, Homo sapien
gaaagaaaccagtcacgatggaccatatattgt

SEQ ID NO: 491977 - DNA, 33 bp, Homo sapien
ccacagaaacagaaagcagactataatgatggt

SEQ ID NO: 491978 - DNA, 33 bp, Homo sapien
ccacagaaacagaaaggagactataatgatggt

SEQ ID NO: 491979 - DNA, 33 bp, Homo sapien
gaaacaagaacaatccggaacttagaagtattt

SEQ ID NO: 491980 - DNA, 33 bp, Homo sapien
gaaacaagaacaatcctgaacttagaagtattt

SEQ ID NO: 491981 - DNA, 33 bp, Homo sapien
tttgtgtgcttatacaaattaactgaccaaatt

SEQ ID NO: 491982 - DNA, 33 bp, Homo sapien
tttgtgtgcttatacacattaactgaccaaatt

SEQ ID NO: 491983 - DNA, 33 bp, Homo sapien
ggattgtctttaccaaatgctagtgagattcct

SEQ ID NO: 491984 - DNA, 33 bp, Homo sapien
ggattgtctttaccaagtgctagtgagattcct

SEQ ID NO: 491985 - DNA, 33 bp, Homo sapien
aaattctatgaagatactactgttggatattcc

SEQ ID NO: 491986 - DNA, 33 bp, Homo sapien
aaattctatgaagatattactgttggatattcc

SEQ ID NO: 491987 - DNA, 33 bp, Homo sapien
gggatatcagtgggaaagttctcaagtgtatgt

SEQ ID NO: 491988 - DNA, 33 bp, Homo sapien
gggatatcagtgggaaggttctcaagtgtatgt

SEQ ID NO: 491989 - DNA, 33 bp, Homo sapien
tcatgcatatctgctcaaactctattattaaag

SEQ ID NO: 491990 - DNA, 33 bp, Homo sapien
tcatgcatatctgctccaactctattattaaag

SEQ ID NO: 491991 - DNA, 33 bp, Homo sapien
ttgtgactacatagtacgaaaattctagtcctg

SEQ ID NO: 491992 - DNA, 33 bp, Homo sapien
ttgtgactacatagtaggaaaattctagtcctg

SEQ ID NO: 491993 - DNA, 33 bp, Homo sapien
cagcatcccaaaattaccttcccaaaatcgcac

SEQ ID NO: 491994 - DNA, 33 bp, Homo sapien
cagcatcccaaaattagcttcccaaaatcgcac

SEQ ID NO: 491995 - DNA, 33 bp, Homo sapien
gcaacatgtggaggaaatgaaagcctggagcct

SEQ ID NO: 491996 - DNA, 33 bp, Homo sapien
gcaacatgtggaggaactgaaagcctggagcct

SEQ ID NO: 491997 - DNA, 33 bp, Homo sapien
ttcaactgggattagcaccttagagcagtagta

SEQ ID NO: 491998 - DNA, 33 bp, Homo sapien
ttcaactgggattagcgccttagagcagtagta

SEQ ID NO: 491999 - DNA, 33 bp, Homo sapien
aattcttgattatacacgtgagtcatactttag

SEQ ID NO: 492000 - DNA, 33 bp, Homo sapien
aattcttgattatacatgtgagtcatactttag

SEQ ID NO: 492001 - DNA, 33 bp, Homo sapien
catgaagaactgtacaaaatgtcaaagggcaaa

SEQ ID NO: 492002 - DNA, 33 bp, Homo sapien
catgaagaactgtacacaatgtcaaagggcaaa

SEQ ID NO: 492003 - DNA, 33 bp, Homo sapien
aagaagtattcagtaacgttagtccgtatcttt

SEQ ID NO: 492004 - DNA, 33 bp, Homo sapien
aagaagtattcagtaatgttagtccgtatcttt

SEQ ID NO: 492005 - DNA, 33 bp, Homo sapien
ttcttttctttacaaacggctgccctaaaatct

SEQ ID NO: 492006 - DNA, 33 bp, Homo sapien
ttcttttctttacaaatggctgccctaaaatct

SEQ ID NO: 492007 - DNA, 33 bp, Homo sapien
aaacagaccatggccacgggtagcagctcacgc

SEQ ID NO: 492008 - DNA, 33 bp, Homo sapien
aaacagaccatggccaggggtagcagctcacgc

SEQ ID NO: 492009 - DNA, 33 bp, Homo sapien
ttgatcagtggttatcaaagtatgatctgtcaa

SEQ ID NO: 492010 - DNA, 33 bp, Homo sapien
ttgatcagtggttatccaagtatgatctgtcaa

SEQ ID NO: 492011 - DNA, 33 bp, Homo sapien
ttagtcttttgaatgtcacacatatttaactaa

SEQ ID NO: 492012 - DNA, 33 bp, Homo sapien
ttagtcttttgaatgtgacacatatttaactaa

SEQ ID NO: 492013 - DNA, 33 bp, Homo sapien
gggaggaggcaaattcaatttgaacatatactt

SEQ ID NO: 492014 - DNA, 33 bp, Homo sapien
gggaggaggcaaattcgatttgaacatatactt

SEQ ID NO: 492015 - DNA, 33 bp, Homo sapien
agccaaactaaaaacactgtctataccaaatgt

SEQ ID NO: 492016 - DNA, 33 bp, Homo sapien
agccaaactaaaaacattgtctataccaaatgt

SEQ ID NO: 492017 - DNA, 33 bp, Homo sapien
ctcaaacagtcaactacaataaaaatgccagga

SEQ ID NO: 492018 - DNA, 33 bp, Homo sapien
ctcaaacagtcaactataataaaaatgccagga

SEQ ID NO: 492019 - DNA, 33 bp, Homo sapien
aaggtctaatttttgaatatttctgaacatcaa

SEQ ID NO: 492020 - DNA, 33 bp, Homo sapien
aaggtctaatttttgagtatttctgaacatcaa

SEQ ID NO: 492021 - DNA, 33 bp, Homo sapien
caatttgtgacaaatcaccactttttctagcac

SEQ ID NO: 492022 - DNA, 33 bp, Homo sapien
caatttgtgacaaatcgccactttttctagcac

SEQ ID NO: 492023 - DNA, 33 bp, Homo sapien
tgtcgtcctggtataacacttgataatgattcc

SEQ ID NO: 492024 - DNA, 33 bp, Homo sapien
tgtcgtcctggtataatacttgataatgattcc

SEQ ID NO: 492025 - DNA, 33 bp, Homo sapien
aacaaaacaggacttacggttaccttatatgta

SEQ ID NO: 492026 - DNA, 33 bp, Homo sapien
aacaaaacaggacttatggttaccttatatgta

SEQ ID NO: 492027 - DNA, 33 bp, Homo sapien
gatggaggcaacccaacccatcagcagccaatc

SEQ ID NO: 492028 - DNA, 33 bp, Homo sapien
gatggaggcaacccaatccatcagcagccaatc

SEQ ID NO: 492029 - DNA, 33 bp, Homo sapien
gttactgcaatgttccactttgtatccttagca

SEQ ID NO: 492030 - DNA, 33 bp, Homo sapien
gttactgcaatgttccgctttgtatccttagca

SEQ ID NO: 492031 - DNA, 33 bp, Homo sapien
ttacattagtaagcaaacttacacacacacaca

SEQ ID NO: 492032 - DNA, 33 bp, Homo sapien
ttacattagtaagcaaccttacacacacacaca

SEQ ID NO: 492033 - DNA, 33 bp, Homo sapien
aagttgtaactgcaaaacattcctagtgtagat

SEQ ID NO: 492034 - DNA, 33 bp, Homo sapien
aagttgtaactgcaaagcattcctagtgtagat

SEQ ID NO: 492035 - DNA, 33 bp, Homo sapien
ttctagtatgtcctgcgctatggccaaaactgg

SEQ ID NO: 492036 - DNA, 33 bp, Homo sapien
ttctagtatgtcctgctctatggccaaaactgg

SEQ ID NO: 492037 - DNA, 33 bp, Homo sapien
catgtctggattctaactcaggatgataagtct

SEQ ID NO: 492038 - DNA, 33 bp, Homo sapien
catgtctggattctaattcaggatgataagtct

SEQ ID NO: 492039 - DNA, 33 bp, Homo sapien
gttttcacctgttaagcaacccaaactgcattt

SEQ ID NO: 492040 - DNA, 33 bp, Homo sapien
gttttcacctgttaagtaacccaaactgcattt

SEQ ID NO: 492041 - DNA, 33 bp, Homo sapien
tgcgtgccatcacaccaggcttgtttttgtttt

SEQ ID NO: 492042 - DNA, 33 bp, Homo sapien
tgcgtgccatcacaccgggcttgtttttgtttt

SEQ ID NO: 492043 - DNA, 33 bp, Homo sapien
tgctggtattaggaaacgagacctttgagggcc

SEQ ID NO: 492044 - DNA, 33 bp, Homo sapien
tgctggtattaggaaatgagacctttgagggcc

SEQ ID NO: 492045 - DNA, 33 bp, Homo sapien
atgcataaagctgctaaaaacgtttgtgtacag

SEQ ID NO: 492046 - DNA, 33 bp, Homo sapien
atgcataaagctgctataaacgtttgtgtacag

SEQ ID NO: 492047 - DNA, 33 bp, Homo sapien
accataggacacagcaatagcactcctaagcat

SEQ ID NO: 492048 - DNA, 33 bp, Homo sapien
accataggacacagcagtagcactcctaagcat

SEQ ID NO: 492049 - DNA, 33 bp, Homo sapien
tatacaatccttagtaacacacatagtatatta

SEQ ID NO: 492050 - DNA, 33 bp, Homo sapien
tatacaatccttagtaccacacatagtatatta

SEQ ID NO: 492051 - DNA, 33 bp, Homo sapien
acaattggtacagatacggtgccattttgcaga

SEQ ID NO: 492052 - DNA, 33 bp, Homo sapien
acaattggtacagatatggtgccattttgcaga

SEQ ID NO: 492053 - DNA, 33 bp, Homo sapien
tgtacaagaaggtcccagcataccgctgactca

SEQ ID NO: 492054 - DNA, 33 bp, Homo sapien
tgtacaagaaggtcccggcataccgctgactca

SEQ ID NO: 492055 - DNA, 33 bp, Homo sapien
aaagacatcaacataacgactggggggtggggg

SEQ ID NO: 492056 - DNA, 33 bp, Homo sapien
aaagacatcaacataaggactggggggtggggg

SEQ ID NO: 492057 - DNA, 33 bp, Homo sapien
cctttcaaaacttgccccattccttgtgtaatg

SEQ ID NO: 492058 - DNA, 33 bp, Homo sapien
cctttcaaaacttgccgcattccttgtgtaatg

SEQ ID NO: 492059 - DNA, 33 bp, Homo sapien
ctaacccagacactacagatgcttttatttttt

SEQ ID NO: 492060 - DNA, 33 bp, Homo sapien
ctaacccagacactacggatgcttttatttttt

SEQ ID NO: 492061 - DNA, 33 bp, Homo sapien
attttgccctgtcttcaaataaagaggttgatt

SEQ ID NO: 492062 - DNA, 33 bp, Homo sapien
attttgccctgtcttccaataaagaggttgatt

SEQ ID NO: 492063 - DNA, 33 bp, Homo sapien
aaaaagaaatgccaaacctgagccagaagtgaa

SEQ ID NO: 492064 - DNA, 33 bp, Homo sapien
aaaaagaaatgccaaatctgagccagaagtgaa

SEQ ID NO: 492065 - DNA, 33 bp, Homo sapien
attctgttatagaaaccgaaaatgaactaagac

SEQ ID NO: 492066 - DNA, 33 bp, Homo sapien
attctgttatagaaactgaaaatgaactaagac

SEQ ID NO: 492067 - DNA, 33 bp, Homo sapien
acccactctaatcaagacttccttccactgttt

SEQ ID NO: 492068 - DNA, 33 bp, Homo sapien
acccactctaatcaagtcttccttccactgttt

SEQ ID NO: 492069 - DNA, 33 bp, Homo sapien
aaataagctcttctacgatgtgtctataccacc

SEQ ID NO: 492070 - DNA, 33 bp, Homo sapien
aaataagctcttctactatgtgtctataccacc

SEQ ID NO: 492071 - DNA, 33 bp, Homo sapien
catatgaataggaacactgaatttccaacacat

SEQ ID NO: 492072 - DNA, 33 bp, Homo sapien
catatgaataggaacattgaatttccaacacat

SEQ ID NO: 492073 - DNA, 33 bp, Homo sapien
tatctagtggataacactattttggaatgcatt

SEQ ID NO: 492074 - DNA, 33 bp, Homo sapien
tatctagtggataacattattttggaatgcatt

SEQ ID NO: 492075 - DNA, 33 bp, Homo sapien
aagaaaatgctactgggaaactttaaaagaaaa

SEQ ID NO: 492076 - DNA, 33 bp, Homo sapien
aagaaaatgctactggtaaactttaaaagaaaa

SEQ ID NO: 492077 - DNA, 33 bp, Homo sapien
agacaagttaaaaccacgtaactgcacatttcc

SEQ ID NO: 492078 - DNA, 33 bp, Homo sapien
agacaagttaaaaccatgtaactgcacatttcc

SEQ ID NO: 492079 - DNA, 33 bp, Homo sapien
aataagagacagaagaatcccacagaaatccta

SEQ ID NO: 492080 - DNA, 33 bp, Homo sapien
aataagagacagaagattcccacagaaatccta

SEQ ID NO: 492081 - DNA, 33 bp, Homo sapien
tcagtcagcctttgcaacatcaaaccgttgggc

SEQ ID NO: 492082 - DNA, 33 bp, Homo sapien
tcagtcagcctttgcagcatcaaaccgttgggc

SEQ ID NO: 492083 - DNA, 33 bp, Homo sapien
ataaaaaagcactttacggtgattatgttaaat

SEQ ID NO: 492084 - DNA, 33 bp, Homo sapien
ataaaaaagcactttatggtgattatgttaaat

SEQ ID NO: 492085 - DNA, 33 bp, Homo sapien
ttagcctctggctgaaaaactaaaagcaaactc

SEQ ID NO: 492086 - DNA, 33 bp, Homo sapien
ttagcctctggctgaagaactaaaagcaaactc

SEQ ID NO: 492087 - DNA, 33 bp, Homo sapien
tagtgactgatttggacaaacggagctgatcac

SEQ ID NO: 492088 - DNA, 33 bp, Homo sapien
tagtgactgatttggataaacggagctgatcac

SEQ ID NO: 492089 - DNA, 33 bp, Homo sapien
atataaaagaattgacccaaggttgctcctagt

SEQ ID NO: 492090 - DNA, 33 bp, Homo sapien
atataaaagaattgacgcaaggttgctcctagt

SEQ ID NO: 492091 - DNA, 33 bp, Homo sapien
atgaaaatggtaaggcaaaggtataatgaatgg

SEQ ID NO: 492092 - DNA, 33 bp, Homo sapien
atgaaaatggtaaggcgaaggtataatgaatgg

SEQ ID NO: 492093 - DNA, 33 bp, Homo sapien
ttgcaggatggcccccaaatatttaatgaatga

SEQ ID NO: 492094 - DNA, 33 bp, Homo sapien
ttgcaggatggcccccgaatatttaatgaatga

SEQ ID NO: 492095 - DNA, 33 bp, Homo sapien
gggaggcagtgaaaaacgaataaataaatccga

SEQ ID NO: 492096 - DNA, 33 bp, Homo sapien
gggaggcagtgaaaaaggaataaataaatccga

SEQ ID NO: 492097 - DNA, 33 bp, Homo sapien
tacacaatcaagtacaaatatgtaggacgtcaa

SEQ ID NO: 492098 - DNA, 33 bp, Homo sapien
tacacaatcaagtacagatatgtaggacgtcaa

SEQ ID NO: 492099 - DNA, 33 bp, Homo sapien
gttcttttaaaagccacgttgcagaattaatta

SEQ ID NO: 492100 - DNA, 33 bp, Homo sapien
gttcttttaaaagccatgttgcagaattaatta

SEQ ID NO: 492101 - DNA, 33 bp, Homo sapien
atcaggaatcatgttgcatcttcaaattctgtt

SEQ ID NO: 492102 - DNA, 33 bp, Homo sapien
atcaggaatcatgttgtatcttcaaattctgtt

SEQ ID NO: 492103 - DNA, 33 bp, Homo sapien
gatattacatagataactgaaagtatgaactct

SEQ ID NO: 492104 - DNA, 33 bp, Homo sapien
gatattacatagataattgaaagtatgaactct

SEQ ID NO: 492105 - DNA, 33 bp, Homo sapien
gctatacaaaacatacccgttctgaaaaaattt

SEQ ID NO: 492106 - DNA, 33 bp, Homo sapien
gctatacaaaacatacgcgttctgaaaaaattt

SEQ ID NO: 492107 - DNA, 33 bp, Homo sapien
aaagttattcctgagacaacaaccagcctagtg

SEQ ID NO: 492108 - DNA, 33 bp, Homo sapien
aaagttattcctgagagaacaaccagcctagtg

SEQ ID NO: 492109 - DNA, 33 bp, Homo sapien
gcctatacccaggaataagcaaagatagctttg

SEQ ID NO: 492110 - DNA, 33 bp, Homo sapien
gcctatacccaggaatgagcaaagatagctttg

SEQ ID NO: 492111 - DNA, 33 bp, Homo sapien
tatctattttcatttaacattgtatctatgaaa

SEQ ID NO: 492112 - DNA, 33 bp, Homo sapien
tatctattttcatttagcattgtatctatgaaa

SEQ ID NO: 492113 - DNA, 33 bp, Homo sapien
atgtaacaatcagtagaacttgacaactgaaag

SEQ ID NO: 492114 - DNA, 33 bp, Homo sapien
atgtaacaatcagtaggacttgacaactgaaag

SEQ ID NO: 492115 - DNA, 33 bp, Homo sapien
cctctataggtctgctaaaaactcaacccaaaa

SEQ ID NO: 492116 - DNA, 33 bp, Homo sapien
cctctataggtctgctgaaaactcaacccaaaa

SEQ ID NO: 492117 - DNA, 33 bp, Homo sapien
aggtaagtaaaagcataatgaaagcatatcctg

SEQ ID NO: 492118 - DNA, 33 bp, Homo sapien
aggtaagtaaaagcatgatgaaagcatatcctg

SEQ ID NO: 492119 - DNA, 33 bp, Homo sapien
ttgaagatccacactactacagcacagacctct

SEQ ID NO: 492120 - DNA, 33 bp, Homo sapien
ttgaagatccacactagtacagcacagacctct

SEQ ID NO: 492121 - DNA, 33 bp, Homo sapien
tccaaagatcatggccacatagagtttactaat

SEQ ID NO: 492122 - DNA, 33 bp, Homo sapien
tccaaagatcatggcctcatagagtttactaat

SEQ ID NO: 492123 - DNA, 33 bp, Homo sapien
ggcctgttcagcaatactaacttttcagttact

SEQ ID NO: 492124 - DNA, 33 bp, Homo sapien
ggcctgttcagcaatattaacttttcagttact

SEQ ID NO: 492125 - DNA, 33 bp, Homo sapien
ccaacttccaaccttaaccattatcccctacta

SEQ ID NO: 492126 - DNA, 33 bp, Homo sapien
ccaacttccaaccttagccattatcccctacta

SEQ ID NO: 492127 - DNA, 33 bp, Homo sapien
ccttggcatagtcaccaaatgctaatagttgct

SEQ ID NO: 492128 - DNA, 33 bp, Homo sapien
ccttggcatagtcaccgaatgctaatagttgct

SEQ ID NO: 492129 - DNA, 33 bp, Homo sapien
cactccatgtctggctcacttgtggtgggcatg

SEQ ID NO: 492130 - DNA, 33 bp, Homo sapien
cactccatgtctggcttacttgtggtgggcatg

SEQ ID NO: 492131 - DNA, 33 bp, Homo sapien
ttatatccagagataactgagacagcataaata

SEQ ID NO: 492132 - DNA, 33 bp, Homo sapien
ttatatccagagataattgagacagcataaata

SEQ ID NO: 492133 - DNA, 33 bp, Homo sapien
cttcttcttcattaaacctttatcagaatatag

SEQ ID NO: 492134 - DNA, 33 bp, Homo sapien
cttcttcttcattaaagctttatcagaatatag

SEQ ID NO: 492135 - DNA, 33 bp, Homo sapien
attcatcagtgcttacaatgcagttaaaacatg

SEQ ID NO: 492136 - DNA, 33 bp, Homo sapien
attcatcagtgcttacgatgcagttaaaacatg

SEQ ID NO: 492137 - DNA, 33 bp, Homo sapien
tgtgcaataattctcacaaaggagttttgcttc

SEQ ID NO: 492138 - DNA, 33 bp, Homo sapien
tgtgcaataattctcataaaggagttttgcttc

SEQ ID NO: 492139 - DNA, 33 bp, Homo sapien
gctagattagaaaactgaggctcccgaatcaaa

SEQ ID NO: 492140 - DNA, 33 bp, Homo sapien
gctagattagaaaacttaggctcccgaatcaaa

SEQ ID NO: 492141 - DNA, 33 bp, Homo sapien
taccttgttacacataccccgtcccttgacact

SEQ ID NO: 492142 - DNA, 33 bp, Homo sapien
taccttgttacacatatcccgtcccttgacact

SEQ ID NO: 492143 - DNA, 33 bp, Homo sapien
tgtctctcatggcaacccaactgtatgcaacat

SEQ ID NO: 492144 - DNA, 33 bp, Homo sapien
tgtctctcatggcaactcaactgtatgcaacat

SEQ ID NO: 492145 - DNA, 33 bp, Homo sapien
tatttttattttcaagacaggccagcgcccaag

SEQ ID NO: 492146 - DNA, 33 bp, Homo sapien
tatttttattttcaaggcaggccagcgcccaag

SEQ ID NO: 492147 - DNA, 33 bp, Homo sapien
acaggcagaaagaagacaagagaagtcatgcga

SEQ ID NO: 492148 - DNA, 33 bp, Homo sapien
acaggcagaaagaagataagagaagtcatgcga

SEQ ID NO: 492149 - DNA, 33 bp, Homo sapien
cgtacgttaaggtgtgaatattgaaagggtgca

SEQ ID NO: 492150 - DNA, 33 bp, Homo sapien
cgtacgttaaggtgtggatattgaaagggtgca

SEQ ID NO: 492151 - DNA, 33 bp, Homo sapien
acaaaagagggcatccaaacaaccagtatgcat

SEQ ID NO: 492152 - DNA, 33 bp, Homo sapien
acaaaagagggcatcctaacaaccagtatgcat

SEQ ID NO: 492153 - DNA, 33 bp, Homo sapien
gcagtgatcaggcaacggtagtctagcctgggc

SEQ ID NO: 492154 - DNA, 33 bp, Homo sapien
gcagtgatcaggcaactgtagtctagcctgggc

SEQ ID NO: 492155 - DNA, 33 bp, Homo sapien
catacccttgggcaggaaatctctaagagaaag

SEQ ID NO: 492156 - DNA, 33 bp, Homo sapien
catacccttgggcaggtaatctctaagagaaag

SEQ ID NO: 492157 - DNA, 33 bp, Homo sapien
gtctcacatccaaataccctctttgtgcagccc

SEQ ID NO: 492158 - DNA, 33 bp, Homo sapien
gtctcacatccaaatatcctctttgtgcagccc

SEQ ID NO: 492159 - DNA, 33 bp, Homo sapien
tttcttgagtttcaaccatccctctttcccttt

SEQ ID NO: 492160 - DNA, 33 bp, Homo sapien
tttcttgagtttcaactatccctctttcccttt

SEQ ID NO: 492161 - DNA, 33 bp, Homo sapien
cataacaagagatctacagctaggtggtcccag

SEQ ID NO: 492162 - DNA, 33 bp, Homo sapien
cataacaagagatctatagctaggtggtcccag

SEQ ID NO: 492163 - DNA, 33 bp, Homo sapien
atcagggaacttatgcaaggggcaaacggcttc

SEQ ID NO: 492164 - DNA, 33 bp, Homo sapien
atcagggaacttatgcgaggggcaaacggcttc

SEQ ID NO: 492165 - DNA, 33 bp, Homo sapien
catttgagtgaggaagcctccagagcagccttt

SEQ ID NO: 492166 - DNA, 33 bp, Homo sapien
catttgagtgaggaagtctccagagcagccttt

SEQ ID NO: 492167 - DNA, 33 bp, Homo sapien
ggctccttgctgcttcaattattattctaatag

SEQ ID NO: 492168 - DNA, 33 bp, Homo sapien
ggctccttgctgcttctattattattctaatag

SEQ ID NO: 492169 - DNA, 33 bp, Homo sapien
tgaagcctgagtaagacaacaagacctgtcgct

SEQ ID NO: 492170 - DNA, 33 bp, Homo sapien
tgaagcctgagtaagagaacaagacctgtcgct

SEQ ID NO: 492171 - DNA, 33 bp, Homo sapien
ggtgccgtatctaccaagtggtcaagctgatgc

SEQ ID NO: 492172 - DNA, 33 bp, Homo sapien
ggtgccgtatctaccaggtggtcaagctgatgc

SEQ ID NO: 492173 - DNA, 33 bp, Homo sapien
atcttttctagaagtcactggttttccagtctc

SEQ ID NO: 492174 - DNA, 33 bp, Homo sapien
atcttttctagaagtcgctggttttccagtctc

SEQ ID NO: 492175 - DNA, 33 bp, Homo sapien
atctgggtaagcccaacgtaatcaaaagggtcc

SEQ ID NO: 492176 - DNA, 33 bp, Homo sapien
atctgggtaagcccaatgtaatcaaaagggtcc

SEQ ID NO: 492177 - DNA, 33 bp, Homo sapien
gaaacttgattaggacaggctgaggagagagtc

SEQ ID NO: 492178 - DNA, 33 bp, Homo sapien
gaaacttgattaggacgggctgaggagagagtc

SEQ ID NO: 492179 - DNA, 33 bp, Homo sapien
ttgccacatggacctcaccattgagctgcttga

SEQ ID NO: 492180 - DNA, 33 bp, Homo sapien
ttgccacatggacctcgccattgagctgcttga

SEQ ID NO: 492181 - DNA, 33 bp, Homo sapien
tgaggattacatgaaacgctggattaataactg

SEQ ID NO: 492182 - DNA, 33 bp, Homo sapien
tgaggattacatgaaatgctggattaataactg

SEQ ID NO: 492183 - DNA, 33 bp, Homo sapien
aatcttaaccttcaaaattacactcaaggcaag

SEQ ID NO: 492184 - DNA, 33 bp, Homo sapien
aatcttaaccttcaaagttacactcaaggcaag

SEQ ID NO: 492185 - DNA, 33 bp, Homo sapien
ttcctggaccagtgcccctcaactaagggcagt

SEQ ID NO: 492186 - DNA, 33 bp, Homo sapien
ttcctggaccagtgcctctcaactaagggcagt

SEQ ID NO: 492187 - DNA, 33 bp, Homo sapien
ggtgagtatctgagggaaaaaggacctacaaac

SEQ ID NO: 492188 - DNA, 33 bp, Homo sapien
ggtgagtatctgaggggaaaaggacctacaaac

SEQ ID NO: 492189 - DNA, 33 bp, Homo sapien
tactgcggctgcctgaccttcataggtgtttac

SEQ ID NO: 492190 - DNA, 33 bp, Homo sapien
tactgcggctgcctgagcttcataggtgtttac

SEQ ID NO: 492191 - DNA, 33 bp, Homo sapien
aaaaacacaaaaagatgaaccaggtgtagtgat

SEQ ID NO: 492192 - DNA, 33 bp, Homo sapien
aaaaacacaaaaagattaaccaggtgtagtgat

SEQ ID NO: 492193 - DNA, 33 bp, Homo sapien
gttcaaagatagatacaaccgtgctcatatcaa

SEQ ID NO: 492194 - DNA, 33 bp, Homo sapien
gttcaaagatagataccaccgtgctcatatcaa

SEQ ID NO: 492195 - DNA, 33 bp, Homo sapien
atcttgcatatgttagcattggtcttgtgtgac

SEQ ID NO: 492196 - DNA, 33 bp, Homo sapien
atcttgcatatgttagtattggtcttgtgtgac

SEQ ID NO: 492197 - DNA, 33 bp, Homo sapien
ccacacctgtggttcccaactctgatgaacctt

SEQ ID NO: 492198 - DNA, 33 bp, Homo sapien
ccacacctgtggttcctaactctgatgaacctt

SEQ ID NO: 492199 - DNA, 33 bp, Homo sapien
cctgctttatggacagacatcagggaggcagca

SEQ ID NO: 492200 - DNA, 33 bp, Homo sapien
cctgctttatggacaggcatcagggaggcagca

SEQ ID NO: 492201 - DNA, 33 bp, Homo sapien
tccatcatctgtaaaacgtgtgcagcagtcatt

SEQ ID NO: 492202 - DNA, 33 bp, Homo sapien
tccatcatctgtaaaatgtgtgcagcagtcatt

SEQ ID NO: 492203 - DNA, 33 bp, Homo sapien
gactgagtgttcaccacagagagaacttggaga

SEQ ID NO: 492204 - DNA, 33 bp, Homo sapien
gactgagtgttcaccatagagagaacttggaga

SEQ ID NO: 492205 - DNA, 33 bp, Homo sapien
gcctgacatgacatagaccctaattgaccccat

SEQ ID NO: 492206 - DNA, 33 bp, Homo sapien
gcctgacatgacatagtccctaattgaccccat

SEQ ID NO: 492207 - DNA, 33 bp, Homo sapien
aggtcttggagctctaagaagacacccattagt

SEQ ID NO: 492208 - DNA, 33 bp, Homo sapien
aggtcttggagctctaggaagacacccattagt

SEQ ID NO: 492209 - DNA, 33 bp, Homo sapien
ccatactactccaagcaacctatagattcaatg

SEQ ID NO: 492210 - DNA, 33 bp, Homo sapien
ccatactactccaagccacctatagattcaatg

SEQ ID NO: 492211 - DNA, 33 bp, Homo sapien
ctttggaattcgtctcaagctttgtcatttcct

SEQ ID NO: 492212 - DNA, 33 bp, Homo sapien
ctttggaattcgtctcgagctttgtcatttcct

SEQ ID NO: 492213 - DNA, 33 bp, Homo sapien
tgataacagtgatcacaatgaatttgtagtagt

SEQ ID NO: 492214 - DNA, 33 bp, Homo sapien
tgataacagtgatcacgatgaatttgtagtagt

SEQ ID NO: 492215 - DNA, 33 bp, Homo sapien
atttgtagtagtcaggcaagattgaatactaaa

SEQ ID NO: 492216 - DNA, 33 bp, Homo sapien
atttgtagtagtcaggtaagattgaatactaaa

SEQ ID NO: 492217 - DNA, 33 bp, Homo sapien
tcttttcaagtgtacccggacatttatcaaaat

SEQ ID NO: 492218 - DNA, 33 bp, Homo sapien
tcttttcaagtgtacctggacatttatcaaaat

SEQ ID NO: 492219 - DNA, 33 bp, Homo sapien
aagaaaggggagccaacaaaggagagcaaaggg

SEQ ID NO: 492220 - DNA, 33 bp, Homo sapien
aagaaaggggagccaagaaaggagagcaaaggg

SEQ ID NO: 492221 - DNA, 33 bp, Homo sapien
gttgtctggtataacaccgcggataagtatgaa

SEQ ID NO: 492222 - DNA, 33 bp, Homo sapien
gttgtctggtataacatcgcggataagtatgaa

SEQ ID NO: 492223 - DNA, 33 bp, Homo sapien
agaggaatgcaccgacaagtaccagcacgccgg

SEQ ID NO: 492224 - DNA, 33 bp, Homo sapien
agaggaatgcaccgacgagtaccagcacgccgg

SEQ ID NO: 492225 - DNA, 33 bp, Homo sapien
gttctctttttgtcaccctatctcaagggctgg

SEQ ID NO: 492226 - DNA, 33 bp, Homo sapien
gttctctttttgtcactctatctcaagggctgg

SEQ ID NO: 492227 - DNA, 33 bp, Homo sapien
aactgaactatattcaccagctgttagtgacat

SEQ ID NO: 492228 - DNA, 33 bp, Homo sapien
aactgaactatattcatcagctgttagtgacat

SEQ ID NO: 492229 - DNA, 33 bp, Homo sapien
ggagatttgactacagaagagggagtaatagat

SEQ ID NO: 492230 - DNA, 33 bp, Homo sapien
ggagatttgactacagcagagggagtaatagat

SEQ ID NO: 492231 - DNA, 33 bp, Homo sapien
tttggcaaagcttaaaaacaaatcctgaactaa

SEQ ID NO: 492232 - DNA, 33 bp, Homo sapien
tttggcaaagcttaaagacaaatcctgaactaa

SEQ ID NO: 492233 - DNA, 33 bp, Homo sapien
atataggagagaccagaactttgtagtggaaac

SEQ ID NO: 492234 - DNA, 33 bp, Homo sapien
atataggagagaccaggactttgtagtggaaac

SEQ ID NO: 492235 - DNA, 33 bp, Homo sapien
ttcagcaacgtcatctaaacaacctggaaaaag

SEQ ID NO: 492236 - DNA, 33 bp, Homo sapien
ttcagcaacgtcatctcaacaacctggaaaaag

SEQ ID NO: 492237 - DNA, 33 bp, Homo sapien
gaacaacaggtcatccaatttcactaaaattat

SEQ ID NO: 492238 - DNA, 33 bp, Homo sapien
gaacaacaggtcatccgatttcactaaaattat

SEQ ID NO: 492239 - DNA, 33 bp, Homo sapien
acctctattagacaacagcatgattgaaatttt

SEQ ID NO: 492240 - DNA, 33 bp, Homo sapien
acctctattagacaacggcatgattgaaatttt

SEQ ID NO: 492241 - DNA, 33 bp, Homo sapien
gctctctctctctctacgtctctatgaaacagc

SEQ ID NO: 492242 - DNA, 33 bp, Homo sapien
gctctctctctctctatgtctctatgaaacagc

SEQ ID NO: 492243 - DNA, 33 bp, Homo sapien
agtttagacgaatggcagatacagggggaaagc

SEQ ID NO: 492244 - DNA, 33 bp, Homo sapien
agtttagacgaatggcggatacagggggaaagc

SEQ ID NO: 492245 - DNA, 33 bp, Homo sapien
tgtggctgactcttaaaccacatctcaaatcac

SEQ ID NO: 492246 - DNA, 33 bp, Homo sapien
tgtggctgactcttaacccacatctcaaatcac

SEQ ID NO: 492247 - DNA, 33 bp, Homo sapien
agacaagcagaataggacagatacccacacaca

SEQ ID NO: 492248 - DNA, 33 bp, Homo sapien
agacaagcagaatagggcagatacccacacaca

SEQ ID NO: 492249 - DNA, 33 bp, Homo sapien
tgtaaatttaagctcaagaatagtccaaagctc

SEQ ID NO: 492250 - DNA, 33 bp, Homo sapien
tgtaaatttaagctcatgaatagtccaaagctc

SEQ ID NO: 492251 - DNA, 33 bp, Homo sapien
tataccatttggaacacgtggcctccgaggtca

SEQ ID NO: 492252 - DNA, 33 bp, Homo sapien
tataccatttggaacatgtggcctccgaggtca

SEQ ID NO: 492253 - DNA, 33 bp, Homo sapien
ataaaacatgcttctaggtagtggacactaacg

SEQ ID NO: 492254 - DNA, 33 bp, Homo sapien
ataaaacatgcttctatgtagtggacactaacg

SEQ ID NO: 492255 - DNA, 33 bp, Homo sapien
taaggggccatgcaaacgaactcaagtgtgaca

SEQ ID NO: 492256 - DNA, 33 bp, Homo sapien
taaggggccatgcaaatgaactcaagtgtgaca

SEQ ID NO: 492257 - DNA, 33 bp, Homo sapien
aattggaaaatctttgaatgtggaggactacag

SEQ ID NO: 492258 - DNA, 33 bp, Homo sapien
aattggaaaatctttgtatgtggaggactacag

SEQ ID NO: 492259 - DNA, 33 bp, Homo sapien
ggctccggacaacccacagcctgtgtacaagtg

SEQ ID NO: 492260 - DNA, 33 bp, Homo sapien
ggctccggacaacccatagcctgtgtacaagtg

SEQ ID NO: 492261 - DNA, 33 bp, Homo sapien
ccttctttttggtaagcatccccttgaaatcaa

SEQ ID NO: 492262 - DNA, 33 bp, Homo sapien
ccttctttttggtaagtatccccttgaaatcaa

SEQ ID NO: 492263 - DNA, 33 bp, Homo sapien
attttttagttagggactacacatactaggtat

SEQ ID NO: 492264 - DNA, 33 bp, Homo sapien
attttttagttagggagtacacatactaggtat

SEQ ID NO: 492265 - DNA, 33 bp, Homo sapien
acatctttgtgactggcagtagataaaatcata

SEQ ID NO: 492266 - DNA, 33 bp, Homo sapien
acatctttgtgactggtagtagataaaatcata

SEQ ID NO: 492267 - DNA, 33 bp, Homo sapien
tttcactggagaaaaaatgaaaatagtttgctt

SEQ ID NO: 492268 - DNA, 33 bp, Homo sapien
tttcactggagaaaaactgaaaatagtttgctt

SEQ ID NO: 492269 - DNA, 33 bp, Homo sapien
taaggcactccacccaacaatctggatttaata

SEQ ID NO: 492270 - DNA, 33 bp, Homo sapien
taaggcactccacccagcaatctggatttaata

SEQ ID NO: 492271 - DNA, 33 bp, Homo sapien
gtggatctcccatgtacgtcacaggaaagagcc

SEQ ID NO: 492272 - DNA, 33 bp, Homo sapien
gtggatctcccatgtatgtcacaggaaagagcc

SEQ ID NO: 492273 - DNA, 33 bp, Homo sapien
ccattggttgtcttcacaaattccaaaattaaa

SEQ ID NO: 492274 - DNA, 33 bp, Homo sapien
ccattggttgtcttcataaattccaaaattaaa

SEQ ID NO: 492275 - DNA, 33 bp, Homo sapien
tcttaggccatactaactaggggctttctctag

SEQ ID NO: 492276 - DNA, 33 bp, Homo sapien
tcttaggccatactaattaggggctttctctag

SEQ ID NO: 492277 - DNA, 33 bp, Homo sapien
cagattttccactttccaactaagtgaacaaat

SEQ ID NO: 492278 - DNA, 33 bp, Homo sapien
cagattttccactttctaactaagtgaacaaat

SEQ ID NO: 492279 - DNA, 33 bp, Homo sapien
gtcacaatcaagggaacgtagcacctaacataa

SEQ ID NO: 492280 - DNA, 33 bp, Homo sapien
gtcacaatcaagggaatgtagcacctaacataa

SEQ ID NO: 492281 - DNA, 33 bp, Homo sapien
tggatgttgtgaaatacgagctttcaaaagtgc

SEQ ID NO: 492282 - DNA, 33 bp, Homo sapien
tggatgttgtgaaatatgagctttcaaaagtgc

SEQ ID NO: 492283 - DNA, 33 bp, Homo sapien
tcccaaccaaatctaccaacctatctgcttctc

SEQ ID NO: 492284 - DNA, 33 bp, Homo sapien
tcccaaccaaatctactaacctatctgcttctc

SEQ ID NO: 492285 - DNA, 33 bp, Homo sapien
gacccagaaggaatgacgattttcaactatgtg

SEQ ID NO: 492286 - DNA, 33 bp, Homo sapien
gacccagaaggaatgatgattttcaactatgtg

SEQ ID NO: 492287 - DNA, 33 bp, Homo sapien
tacgtttccttcaaaactgttaaacatctcttg

SEQ ID NO: 492288 - DNA, 33 bp, Homo sapien
tacgtttccttcaaaattgttaaacatctcttg

SEQ ID NO: 492289 - DNA, 33 bp, Homo sapien
aggtatgtacctgagacagaataggaatgggac

SEQ ID NO: 492290 - DNA, 33 bp, Homo sapien
aggtatgtacctgagatagaataggaatgggac

SEQ ID NO: 492291 - DNA, 33 bp, Homo sapien
aaagttgatcagaagaactcctactgtaacagc

SEQ ID NO: 492292 - DNA, 33 bp, Homo sapien
aaagttgatcagaagagctcctactgtaacagc

SEQ ID NO: 492293 - DNA, 33 bp, Homo sapien
gattttgaagttacagaaaaaggattgtaaaaa

SEQ ID NO: 492294 - DNA, 33 bp, Homo sapien
gattttgaagttacaggaaaaggattgtaaaaa

SEQ ID NO: 492295 - DNA, 33 bp, Homo sapien
gactcttagctatgcacggcttttgtgtcagat

SEQ ID NO: 492296 - DNA, 33 bp, Homo sapien
gactcttagctatgcatggcttttgtgtcagat

SEQ ID NO: 492297 - DNA, 33 bp, Homo sapien
tcaacattgttatgtcccagggaacgaggaggc

SEQ ID NO: 492298 - DNA, 33 bp, Homo sapien
tcaacattgttatgtctcagggaacgaggaggc

SEQ ID NO: 492299 - DNA, 33 bp, Homo sapien
tatgaaggagcctgcagatttgttatctggtga

SEQ ID NO: 492300 - DNA, 33 bp, Homo sapien
tatgaaggagcctgcatatttgttatctggtga

SEQ ID NO: 492301 - DNA, 33 bp, Homo sapien
aattgcatctggatggcaagattctgaatgaat

SEQ ID NO: 492302 - DNA, 33 bp, Homo sapien
aattgcatctggatgggaagattctgaatgaat

SEQ ID NO: 492303 - DNA, 33 bp, Homo sapien
tatggtaaaaatcaaacctgattgacaaattgc

SEQ ID NO: 492304 - DNA, 33 bp, Homo sapien
tatggtaaaaatcaaagctgattgacaaattgc

SEQ ID NO: 492305 - DNA, 33 bp, Homo sapien
ctattctctgagttgacatatttgagttctaag

SEQ ID NO: 492306 - DNA, 33 bp, Homo sapien
ctattctctgagttgatatatttgagttctaag

SEQ ID NO: 492307 - DNA, 33 bp, Homo sapien
gttctcagcatcagtacaattctcccagagcct

SEQ ID NO: 492308 - DNA, 33 bp, Homo sapien
gttctcagcatcagtagaattctcccagagcct

SEQ ID NO: 492309 - DNA, 33 bp, Homo sapien
atgtcaggatccttgacagacagtggttttaaa

SEQ ID NO: 492310 - DNA, 33 bp, Homo sapien
atgtcaggatccttgatagacagtggttttaaa

SEQ ID NO: 492311 - DNA, 33 bp, Homo sapien
tattttaaagtcaaaccacgtatactgtacatg

SEQ ID NO: 492312 - DNA, 33 bp, Homo sapien
tattttaaagtcaaactacgtatactgtacatg

SEQ ID NO: 492313 - DNA, 33 bp, Homo sapien
gtagtagtacttagcacgaggctttttttttta

SEQ ID NO: 492314 - DNA, 33 bp, Homo sapien
gtagtagtacttagcatgaggctttttttttta

SEQ ID NO: 492315 - DNA, 33 bp, Homo sapien
atgttacttccatagacaggctttctatgaccc

SEQ ID NO: 492316 - DNA, 33 bp, Homo sapien
atgttacttccatagagaggctttctatgaccc

SEQ ID NO: 492317 - DNA, 33 bp, Homo sapien
actcagtacagttagccacttgtgagacttttg

SEQ ID NO: 492318 - DNA, 33 bp, Homo sapien
actcagtacagttagctacttgtgagacttttg

SEQ ID NO: 492319 - DNA, 33 bp, Homo sapien
agaggaccttcccatacgccctatcttatcagg

SEQ ID NO: 492320 - DNA, 33 bp, Homo sapien
agaggaccttcccatatgccctatcttatcagg

SEQ ID NO: 492321 - DNA, 33 bp, Homo sapien
gggaaaaggtgtttcacagaagataaaatgatt

SEQ ID NO: 492322 - DNA, 33 bp, Homo sapien
gggaaaaggtgtttcatagaagataaaatgatt

SEQ ID NO: 492323 - DNA, 33 bp, Homo sapien
atatagttttgcatatcagttttccataatttt

SEQ ID NO: 492324 - DNA, 33 bp, Homo sapien
atatagttttgcatattagttttccataatttt

SEQ ID NO: 492325 - DNA, 33 bp, Homo sapien
tgtccaaatgtacaaactggttttttgtatggt

SEQ ID NO: 492326 - DNA, 33 bp, Homo sapien
tgtccaaatgtacaaattggttttttgtatggt

SEQ ID NO: 492327 - DNA, 33 bp, Homo sapien; identical to SEQ ID NO: 492325

SEQ ID NO: 492328 - DNA, 33 bp, Homo sapien; identical to SEQ ID NO: 492326

SEQ ID NO: 492329 - DNA, 33 bp, Homo sapien
aaaaaatttgtggtaaagacagaaacggaagga

SEQ ID NO: 492330 - DNA, 33 bp, Homo sapien
aaaaaatttgtggtaatgacagaaacggaagga

SEQ ID NO: 492331 - DNA, 33 bp, Homo sapien
aacaaaccaaaaataccgatctattcagaatcc

SEQ ID NO: 492332 - DNA, 33 bp, Homo sapien
aacaaaccaaaaatactgatctattcagaatcc

SEQ ID NO: 492333 - DNA, 33 bp, Homo sapien
aacaaaagcctttggcgacattgactgcacctc

SEQ ID NO: 492334 - DNA, 33 bp, Homo sapien
aacaaaagcctttggctacattgactgcacctc

SEQ ID NO: 492335 - DNA, 33 bp, Homo sapien
gtcaatagaagccgaaacctcagcattaggcaa

SEQ ID NO: 492336 - DNA, 33 bp, Homo sapien
gtcaatagaagccgaatcctcagcattaggcaa

SEQ ID NO: 492337 - DNA, 33 bp, Homo sapien
gagaggattaggtcataaagtctctgccatcat

SEQ ID NO: 492338 - DNA, 33 bp, Homo sapien
gagaggattaggtcatgaagtctctgccatcat

SEQ ID NO: 492339 - DNA, 33 bp, Homo sapien
ttttgacattagtagccattctaacaggcatga

SEQ ID NO: 492340 - DNA, 33 bp, Homo sapien
ttttgacattagtagctattctaacaggcatga

SEQ ID NO: 492341 - DNA, 33 bp, Homo sapien
gctaggtacagaaagaaagatactgtatgatct

SEQ ID NO: 492342 - DNA, 33 bp, Homo sapien
gctaggtacagaaagacagatactgtatgatct

SEQ ID NO: 492343 - DNA, 33 bp, Homo sapien
gtcaaagttgccttcaacacattcaaattcatg

SEQ ID NO: 492344 - DNA, 33 bp, Homo sapien
gtcaaagttgccttcagcacattcaaattcatg

SEQ ID NO: 492345 - DNA, 33 bp, Homo sapien
cagtgatacggaattacagacaaaaagtcacaa

SEQ ID NO: 492346 - DNA, 33 bp, Homo sapien
cagtgatacggaattagagacaaaaagtcacaa

SEQ ID NO: 492347 - DNA, 33 bp, Homo sapien
tagggcttaaaatacaatagtcccctcttatta

SEQ ID NO: 492348 - DNA, 33 bp, Homo sapien
tagggcttaaaatacagtagtcccctcttatta

SEQ ID NO: 492349 - DNA, 33 bp, Homo sapien
caaagaacagatatgacaaaaaaatgaaatgac

SEQ ID NO: 492350 - DNA, 33 bp, Homo sapien
caaagaacagatatgataaaaaaatgaaatgac

SEQ ID NO: 492351 - DNA, 33 bp, Homo sapien
gtgtggtttggaagtcaatttggccacagaaat

SEQ ID NO: 492352 - DNA, 33 bp, Homo sapien
gtgtggtttggaagtcgatttggccacagaaat

SEQ ID NO: 492353 - DNA, 33 bp, Homo sapien
ggaaaagaaacgctgaagtattcaagaatatgt

SEQ ID NO: 492354 - DNA, 33 bp, Homo sapien
ggaaaagaaacgctgaggtattcaagaatatgt

SEQ ID NO: 492355 - DNA, 33 bp, Homo sapien
aaaggagactaaagaaacattacaactaaatgc

SEQ ID NO: 492356 - DNA, 33 bp, Homo sapien
aaaggagactaaagaagcattacaactaaatgc

SEQ ID NO: 492357 - DNA, 33 bp, Homo sapien
caagaataccaaggaaaggatgttgtgttctta

SEQ ID NO: 492358 - DNA, 33 bp, Homo sapien
caagaataccaaggaacggatgttgtgttctta

SEQ ID NO: 492359 - DNA, 33 bp, Homo sapien
tggataaaaagcaagaactaattatgtttggtg

SEQ ID NO: 492360 - DNA, 33 bp, Homo sapien
tggataaaaagcaagacctaattatgtttggtg

SEQ ID NO: 492361 - DNA, 33 bp, Homo sapien
ctgactgtaggagaataatagaggaaatggcat

SEQ ID NO: 492362 - DNA, 33 bp, Homo sapien
ctgactgtaggagaatgatagaggaaatggcat

SEQ ID NO: 492363 - DNA, 33 bp, Homo sapien
cgtagagactgaatggccattttcctgctgatg

SEQ ID NO: 492364 - DNA, 33 bp, Homo sapien
cgtagagactgaatgggcattttcctgctgatg

SEQ ID NO: 492365 - DNA, 33 bp, Homo sapien
tcaccccactagatgaaacccaggtatttgact

SEQ ID NO: 492366 - DNA, 33 bp, Homo sapien
tcaccccactagatgacacccaggtatttgact

SEQ ID NO: 492367 - DNA, 33 bp, Homo sapien
agtggggctaagtaaaaataccaggggcaacac

SEQ ID NO: 492368 - DNA, 33 bp, Homo sapien
agtggggctaagtaaagataccaggggcaacac

SEQ ID NO: 492369 - DNA, 33 bp, Homo sapien
ttaggggcactactaacctgggtctcttttagc

SEQ ID NO: 492370 - DNA, 33 bp, Homo sapien
ttaggggcactactaatctgggtctcttttagc

SEQ ID NO: 492371 - DNA, 33 bp, Homo sapien
acagacacttctcaaaataagacactcagccaa

SEQ ID NO: 492372 - DNA, 33 bp, Homo sapien
acagacacttctcaaagtaagacactcagccaa

SEQ ID NO: 492373 - DNA, 33 bp, Homo sapien
acataaagatatgtgaagtgtatgttcatcaca

SEQ ID NO: 492374 - DNA, 33 bp, Homo sapien
acataaagatatgtgatgtgtatgttcatcaca

SEQ ID NO: 492375 - DNA, 33 bp, Homo sapien
aggctaaaataaatgcgagatggaaatgcagat

SEQ ID NO: 492376 - DNA, 33 bp, Homo sapien
aggctaaaataaatgctagatggaaatgcagat

SEQ ID NO: 492377 - DNA, 33 bp, Homo sapien
taatttctttcaggaaggtattatagctttcag

SEQ ID NO: 492378 - DNA, 33 bp, Homo sapien
taatttctttcaggaatgtattatagctttcag

SEQ ID NO: 492379 - DNA, 33 bp, Homo sapien
ttacattgtcagggtaaaagtcaacagaactgt

SEQ ID NO: 492380 - DNA, 33 bp, Homo sapien
ttacattgtcagggtagaagtcaacagaactgt

SEQ ID NO: 492381 - DNA, 33 bp, Homo sapien
gtcatccctctgcccaactgagtgagacaaatg

SEQ ID NO: 492382 - DNA, 33 bp, Homo sapien
gtcatccctctgcccacctgagtgagacaaatg

SEQ ID NO: 492383 - DNA, 33 bp, Homo sapien
gaaagagcaatactaaggcagtctgtttctagg

SEQ ID NO: 492384 - DNA, 33 bp, Homo sapien
gaaagagcaatactaatgcagtctgtttctagg

SEQ ID NO: 492385 - DNA, 33 bp, Homo sapien
gcaaaatgactacggacattataattacatgaa

SEQ ID NO: 492386 - DNA, 33 bp, Homo sapien
gcaaaatgactacggatattataattacatgaa

SEQ ID NO: 492387 - DNA, 33 bp, Homo sapien
cagtacatggccgggaactttactttgactgca

SEQ ID NO: 492388 - DNA, 33 bp, Homo sapien
cagtacatggccgggacctttactttgactgca

SEQ ID NO: 492389 - DNA, 33 bp, Homo sapien
ctcattgagtaccgaactagtgggccatgcact

SEQ ID NO: 492390 - DNA, 33 bp, Homo sapien
ctcattgagtaccgaagtagtgggccatgcact

SEQ ID NO: 492391 - DNA, 33 bp, Homo sapien
atgtgaaatctgaaaaaaataagttgagcaaaa

SEQ ID NO: 492392 - DNA, 33 bp, Homo sapien
atgtgaaatctgaaaagaataagttgagcaaaa

SEQ ID NO: 492393 - DNA, 33 bp, Homo sapien
gcctccatgacgttcacccctttgaatcctata

SEQ ID NO: 492394 - DNA, 33 bp, Homo sapien
gcctccatgacgttcatccctttgaatcctata

SEQ ID NO: 492395 - DNA, 33 bp, Homo sapien
tatgtgtctgttgttacacgaatatcatgctgt

SEQ ID NO: 492396 - DNA, 33 bp, Homo sapien
tatgtgtctgttgttatacgaatatcatgctgt

SEQ ID NO: 492397 - DNA, 33 bp, Homo sapien
agatctctggtatcgcaataaattaaaattttg

SEQ ID NO: 492398 - DNA, 33 bp, Homo sapien
agatctctggtatcgccataaattaaaattttg

SEQ ID NO: 492399 - DNA, 33 bp, Homo sapien
aagaataaagaaagaacgcaactccagctggag

SEQ ID NO: 492400 - DNA, 33 bp, Homo sapien
aagaataaagaaagaatgcaactccagctggag

SEQ ID NO: 492401 - DNA, 33 bp, Homo sapien
atttgaaggtctctgaagcaaggtatctcagac

SEQ ID NO: 492402 - DNA, 33 bp, Homo sapien
atttgaaggtctctgaggcaaggtatctcagac

SEQ ID NO: 492403 - DNA, 33 bp, Homo sapien
ttatccttccttcaaactgatggtccgtttaac

SEQ ID NO: 492404 - DNA, 33 bp, Homo sapien
ttatccttccttcaaattgatggtccgtttaac

SEQ ID NO: 492405 - DNA, 33 bp, Homo sapien
tcttctcagttatttacagagcccctactatgt

SEQ ID NO: 492406 - DNA, 33 bp, Homo sapien
tcttctcagttatttatagagcccctactatgt

SEQ ID NO: 492407 - DNA, 33 bp, Homo sapien
catcttatcttgcctaaagcacttcaatagctt

SEQ ID NO: 492408 - DNA, 33 bp, Homo sapien
catcttatcttgcctagagcacttcaatagctt

SEQ ID NO: 492409 - DNA, 33 bp, Homo sapien
ctgaaaatgtagcccaaagagatttggaagtga

SEQ ID NO: 492410 - DNA, 33 bp, Homo sapien
ctgaaaatgtagcccagagagatttggaagtga

SEQ ID NO: 492411 - DNA, 33 bp, Homo sapien
gtttattaatagatacaaatggtgtttcacaga

SEQ ID NO: 492412 - DNA, 33 bp, Homo sapien
gtttattaatagatacgaatggtgtttcacaga

SEQ ID NO: 492413 - DNA, 33 bp, Homo sapien
ctctgaacttccttccactctgtcttaaacatc

SEQ ID NO: 492414 - DNA, 33 bp, Homo sapien
ctctgaacttccttccgctctgtcttaaacatc

SEQ ID NO: 492415 - DNA, 33 bp, Homo sapien
aaacttagttctgccaatatactggcttctcct

SEQ ID NO: 492416 - DNA, 33 bp, Homo sapien
aaacttagttctgccattatactggcttctcct

SEQ ID NO: 492417 - DNA, 33 bp, Homo sapien
aaatcatttccaaacagagatgaattgaggaaa

SEQ ID NO: 492418 - DNA, 33 bp, Homo sapien
aaatcatttccaaacatagatgaattgaggaaa

SEQ ID NO: 492419 - DNA, 33 bp, Homo sapien
tgggtgctgagactaaaatcacaactgacatcc

SEQ ID NO: 492420 - DNA, 33 bp, Homo sapien
tgggtgctgagactaagatcacaactgacatcc

SEQ ID NO: 492421 - DNA, 33 bp, Homo sapien
ttaatcatgatcattacgtagtcaagttgcttt

SEQ ID NO: 492422 - DNA, 33 bp, Homo sapien
ttaatcatgatcattatgtagtcaagttgcttt

SEQ ID NO: 492423 - DNA, 33 bp, Homo sapien
tatgttcataacatcagtactgtgtaaggaact

SEQ ID NO: 492424 - DNA, 33 bp, Homo sapien
tatgttcataacatcattactgtgtaaggaact

SEQ ID NO: 492425 - DNA, 33 bp, Homo sapien
tgctctcagaaaaatgaataaaaagtctgtccg

SEQ ID NO: 492426 - DNA, 33 bp, Homo sapien
tgctctcagaaaaatggataaaaagtctgtccg

SEQ ID NO: 492427 - DNA, 33 bp, Homo sapien
tgtggtttcaagataagtgtttgtatttacctg

SEQ ID NO: 492428 - DNA, 33 bp, Homo sapien
tgtggtttcaagataattgtttgtatttacctg

SEQ ID NO: 492429 - DNA, 33 bp, Homo sapien
tttctaccttagttgccgattgtacttcccgtt

SEQ ID NO: 492430 - DNA, 33 bp, Homo sapien
tttctaccttagttgctgattgtacttcccgtt

SEQ ID NO: 492431 - DNA, 33 bp, Homo sapien
tgtcagcaagatggagaagtaagagataacagc

SEQ ID NO: 492432 - DNA, 33 bp, Homo sapien
tgtcagcaagatggaggagtaagagataacagc

SEQ ID NO: 492433 - DNA, 33 bp, Homo sapien
ttgtatattaacattaaatctggccgggcatgg

SEQ ID NO: 492434 - DNA, 33 bp, Homo sapien
ttgtatattaacattacatctggccgggcatgg

SEQ ID NO: 492435 - DNA, 33 bp, Homo sapien
gtgctaacctgggaagaataaccagggagagac

SEQ ID NO: 492436 - DNA, 33 bp, Homo sapien
gtgctaacctgggaaggataaccagggagagac

SEQ ID NO: 492437 - DNA, 33 bp, Homo sapien
ttattaagatcaatggaaaggtccaaactgatg

SEQ ID NO: 492438 - DNA, 33 bp, Homo sapien
ttattaagatcaatggcaaggtccaaactgatg

SEQ ID NO: 492439 - DNA, 33 bp, Homo sapien; identical to SEQ ID NO: 492437

SEQ ID NO: 492440 - DNA, 33 bp, Homo sapien; identical to SEQ ID NO: 492438

SEQ ID NO: 492441 - DNA, 33 bp, Homo sapien
tgtagtattgttagtaagaggtaaaacaacata

SEQ ID NO: 492442 - DNA, 33 bp, Homo sapien
tgtagtattgttagtaggaggtaaaacaacata

SEQ ID NO: 492443 - DNA, 33 bp, Homo sapien
actagagaatcactcacagactttcaccatctc

SEQ ID NO: 492444 - DNA, 33 bp, Homo sapien
actagagaatcactcatagactttcaccatctc

SEQ ID NO: 492445 - DNA, 33 bp, Homo sapien
gtcatgtttagtgataaggaaaaaatatttgca

SEQ ID NO: 492446 - DNA, 33 bp, Homo sapien
gtcatgtttagtgatatggaaaaaatatttgca

SEQ ID NO: 492447 - DNA, 33 bp, Homo sapien
gtcagcttctacttccaacttggaattccatct

SEQ ID NO: 492448 - DNA, 33 bp, Homo sapien
gtcagcttctacttcccacttggaattccatct

SEQ ID NO: 492449 - DNA, 33 bp, Homo sapien
aaaccaagaactttgacggtcacaactttggtt

SEQ ID NO: 492450 - DNA, 33 bp, Homo sapien
aaaccaagaactttgatggtcacaactttggtt

SEQ ID NO: 492451 - DNA, 33 bp, Homo sapien
agattagagactatataacaagaaacaattctc

SEQ ID NO: 492452 - DNA, 33 bp, Homo sapien
agattagagactatatgacaagaaacaattctc

SEQ ID NO: 492453 - DNA, 33 bp, Homo sapien
ttctaggcttctttcccagcatctggtggtttg

SEQ ID NO: 492454 - DNA, 33 bp, Homo sapien
ttctaggcttctttcctagcatctggtggtttg

SEQ ID NO: 492455 - DNA, 33 bp, Homo sapien
aaggcagagattgggacgatgcatttacaggcc

SEQ ID NO: 492456 - DNA, 33 bp, Homo sapien
aaggcagagattgggatgatgcatttacaggcc

SEQ ID NO: 492457 - DNA, 33 bp, Homo sapien
atacttgtacatttatcaagcacttaggtacct

SEQ ID NO: 492458 - DNA, 33 bp, Homo sapien
atacttgtacatttatgaagcacttaggtacct

SEQ ID NO: 492459 - DNA, 33 bp, Homo sapien
ctttatacatattgaacagcaactccccatttc

SEQ ID NO: 492460 - DNA, 33 bp, Homo sapien
ctttatacatattgaagagcaactccccatttc

SEQ ID NO: 492461 - DNA, 33 bp, Homo sapien
gtttcagaagcatgtaccagggatcaggtagct

SEQ ID NO: 492462 - DNA, 33 bp, Homo sapien
gtttcagaagcatgtagcagggatcaggtagct

SEQ ID NO: 492463 - DNA, 33 bp, Homo sapien
aaactcaattcttgcaatcagcttgagtgattt

SEQ ID NO: 492464 - DNA, 33 bp, Homo sapien
aaactcaattcttgcattcagcttgagtgattt

SEQ ID NO: 492465 - DNA, 33 bp, Homo sapien
atagtattacctctgagaagttgcatttaagtg

SEQ ID NO: 492466 - DNA, 33 bp, Homo sapien
atagtattacctctgataagttgcatttaagtg

SEQ ID NO: 492467 - DNA, 33 bp, Homo sapien
cgaatctggatgcaagcatttaactaaaaagaa

SEQ ID NO: 492468 - DNA, 33 bp, Homo sapien
cgaatctggatgcaagtatttaactaaaaagaa

SEQ ID NO: 492469 - DNA, 33 bp, Homo sapien
tggagagaactgtgtgacacaagtgctagcttt

SEQ ID NO: 492470 - DNA, 33 bp, Homo sapien
tggagagaactgtgtgtcacaagtgctagcttt

SEQ ID NO: 492471 - DNA, 33 bp, Homo sapien
ggcaatatttttggataacacctgggttcactg

SEQ ID NO: 492472 - DNA, 33 bp, Homo sapien
ggcaatatttttggatgacacctgggttcactg

SEQ ID NO: 492473 - DNA, 33 bp, Homo sapien
ccactcatccattacaatgatatttcttgattt

SEQ ID NO: 492474 - DNA, 33 bp, Homo sapien
ccactcatccattacagtgatatttcttgattt

SEQ ID NO: 492475 - DNA, 33 bp, Homo sapien
aatttggagacagaaaatgaatctaagaaaatt

SEQ ID NO: 492476 - DNA, 33 bp, Homo sapien
aatttggagacagaaagtgaatctaagaaaatt

SEQ ID NO: 492477 - DNA, 33 bp, Homo sapien
gccatttctttaaatgacactaattcctttttg

SEQ ID NO: 492478 - DNA, 33 bp, Homo sapien
gccatttctttaaatgccactaattcctttttg

SEQ ID NO: 492479 - DNA, 33 bp, Homo sapien
ttgataagcacataaaatatgccacattctgtg

SEQ ID NO: 492480 - DNA, 33 bp, Homo sapien
ttgataagcacataaagtatgccacattctgtg

SEQ ID NO: 492481 - DNA, 33 bp, Homo sapien
agtgctttcaataataccttcttgtcttgctat

SEQ ID NO: 492482 - DNA, 33 bp, Homo sapien
agtgctttcaataatatcttcttgtcttgctat

SEQ ID NO: 492483 - DNA, 33 bp, Homo sapien
ttaagtaggaatagaaacagtccaattccagta

SEQ ID NO: 492484 - DNA, 33 bp, Homo sapien
ttaagtaggaatagaagcagtccaattccagta

SEQ ID NO: 492485 - DNA, 33 bp, Homo sapien
gataccatgtacaataacatcaaaaatgaagaa

SEQ ID NO: 492486 - DNA, 33 bp, Homo sapien
gataccatgtacaatagcatcaaaaatgaagaa

SEQ ID NO: 492487 - DNA, 33 bp, Homo sapien
aggcaattcattgtcagggttttggagtcaggt

SEQ ID NO: 492488 - DNA, 33 bp, Homo sapien
aggcaattcattgtcatggttttggagtcaggt

SEQ ID NO: 492489 - DNA, 33 bp, Homo sapien
cacaatttactatgtaagtcagaagtatatttt

SEQ ID NO: 492490 - DNA, 33 bp, Homo sapien
cacaatttactatgtatgtcagaagtatatttt

SEQ ID NO: 492491 - DNA, 33 bp, Homo sapien
cctttattcacattgaagcaatgctaagtcaca

SEQ ID NO: 492492 - DNA, 33 bp, Homo sapien
cctttattcacattgaggcaatgctaagtcaca

SEQ ID NO: 492493 - DNA, 33 bp, Homo sapien
gccattgaggagccctcacaaaaactggaagga

SEQ ID NO: 492494 - DNA, 33 bp, Homo sapien
gccattgaggagcccttacaaaaactggaagga

SEQ ID NO: 492495 - DNA, 33 bp, Homo sapien
aatatcatagacataacgtggagccaaagaaac

SEQ ID NO: 492496 - DNA, 33 bp, Homo sapien
aatatcatagacataatgtggagccaaagaaac

SEQ ID NO: 492497 - DNA, 33 bp, Homo sapien
aaaaaaaaccgaaaaactgatcattatcatatg

SEQ ID NO: 492498 - DNA, 33 bp, Homo sapien
aaaaaaaaccgaaaaagtgatcattatcatatg

SEQ ID NO: 492499 - DNA, 33 bp, Homo sapien
gtaagattgaagaagtaaaaaccatatagtctt

SEQ ID NO: 492500 - DNA, 33 bp, Homo sapien
gtaagattgaagaagtgaaaaccatatagtctt

SEQ ID NO: 492501 - DNA, 33 bp, Homo sapien
ataccttaactgaatgaatcaatcaattgttca

SEQ ID NO: 492502 - DNA, 33 bp, Homo sapien
ataccttaactgaatggatcaatcaattgttca

SEQ ID NO: 492503 - DNA, 33 bp, Homo sapien
agtcttaccaaaacttaaaaagatagcacagca

SEQ ID NO: 492504 - DNA, 33 bp, Homo sapien
agtcttaccaaaacttgaaaagatagcacagca

SEQ ID NO: 492505 - DNA, 33 bp, Homo sapien
ctcgaaaaactgaaaacggagctgtatgatcca

SEQ ID NO: 492506 - DNA, 33 bp, Homo sapien
ctcgaaaaactgaaaatggagctgtatgatcca

SEQ ID NO: 492507 - DNA, 33 bp, Homo sapien
tcgtatctggtggtcacaagaggcccatctgca

SEQ ID NO: 492508 - DNA, 33 bp, Homo sapien
tcgtatctggtggtcagaagaggcccatctgca

SEQ ID NO: 492509 - DNA, 33 bp, Homo sapien
gctatcggagacctgaccatatttgtaggcaaa

SEQ ID NO: 492510 - DNA, 33 bp, Homo sapien
gctatcggagacctgagcatatttgtaggcaaa

SEQ ID NO: 492511 - DNA, 33 bp, Homo sapien
cacaagaactccttaacccccagcacacatcct

SEQ ID NO: 492512 - DNA, 33 bp, Homo sapien
cacaagaactccttaatccccagcacacatcct

SEQ ID NO: 492513 - DNA, 33 bp, Homo sapien
accatatgaggacataagtagaaggcagccatc

SEQ ID NO: 492514 - DNA, 33 bp, Homo sapien
accatatgaggacataggtagaaggcagccatc

SEQ ID NO: 492515 - DNA, 33 bp, Homo sapien
ataagtctgacaaacaaaatgttgagtaaagtg

SEQ ID NO: 492516 - DNA, 33 bp, Homo sapien
ataagtctgacaaacataatgttgagtaaagtg

SEQ ID NO: 492517 - DNA, 33 bp, Homo sapien
tttaaaaagatgtatcaatggaaataatgtgtt

SEQ ID NO: 492518 - DNA, 33 bp, Homo sapien
tttaaaaagatgtatcgatggaaataatgtgtt

SEQ ID NO: 492519 - DNA, 33 bp, Homo sapien
ttcaagcttttatgcaatgagatagacactgtg

SEQ ID NO: 492520 - DNA, 33 bp, Homo sapien
ttcaagcttttatgcagtgagatagacactgtg

SEQ ID NO: 492521 - DNA, 33 bp, Homo sapien
cctacaaaaatcccaaattgcagccgggcgcag

SEQ ID NO: 492522 - DNA, 33 bp, Homo sapien
cctacaaaaatcccaagttgcagccgggcgcag

SEQ ID NO: 492523 - DNA, 33 bp, Homo sapien
ctctgtaattgttacaacccagaaagacatggg

SEQ ID NO: 492524 - DNA, 33 bp, Homo sapien
ctctgtaattgttacagcccagaaagacatggg

SEQ ID NO: 492525 - DNA, 33 bp, Homo sapien
aatttctgtctaaccaaagttttatgatgccaa

SEQ ID NO: 492526 - DNA, 33 bp, Homo sapien
aatttctgtctaaccagagttttatgatgccaa

SEQ ID NO: 492527 - DNA, 33 bp, Homo sapien
aagactgtgtttgtaactgaaagtgatagtcta

SEQ ID NO: 492528 - DNA, 33 bp, Homo sapien
aagactgtgtttgtaattgaaagtgatagtcta

SEQ ID NO: 492529 - DNA, 33 bp, Homo sapien
ccttatgctgatgtaacggagataacctttgtg

SEQ ID NO: 492530 - DNA, 33 bp, Homo sapien
ccttatgctgatgtaatggagataacctttgtg

SEQ ID NO: 492531 - DNA, 33 bp, Homo sapien
tgggagaggagaaccagtggatcagggagaaac

SEQ ID NO: 492532 - DNA, 33 bp, Homo sapien
tgggagaggagaaccattggatcagggagaaac

SEQ ID NO: 492533 - DNA, 33 bp, Homo sapien
actgttgtaaacgtaaagagactgtgttacctt

SEQ ID NO: 492534 - DNA, 33 bp, Homo sapien
actgttgtaaacgtaaggagactgtgttacctt

SEQ ID NO: 492535 - DNA, 33 bp, Homo sapien
aagagtttaattcacagtgctggctgaacagga

SEQ ID NO: 492536 - DNA, 33 bp, Homo sapien
aagagtttaattcacattgctggctgaacagga

SEQ ID NO: 492537 - DNA, 33 bp, Homo sapien
ttcctgacatcatagacctccattctggcctta

SEQ ID NO: 492538 - DNA, 33 bp, Homo sapien
ttcctgacatcatagatctccattctggcctta

SEQ ID NO: 492539 - DNA, 33 bp, Homo sapien
ttgctcatgttgctcccattttgtaggacattt

SEQ ID NO: 492540 - DNA, 33 bp, Homo sapien
ttgctcatgttgctcctattttgtaggacattt

SEQ ID NO: 492541 - DNA, 33 bp, Homo sapien
cagcaggcttaactcaacgtaatgagggaatga

SEQ ID NO: 492542 - DNA, 33 bp, Homo sapien
cagcaggcttaactcatcgtaatgagggaatga

SEQ ID NO: 492543 - DNA, 33 bp, Homo sapien
attctcccatgcttgccaaaacctgcttttaat

SEQ ID NO: 492544 - DNA, 33 bp, Homo sapien
attctcccatgcttgctaaaacctgcttttaat

SEQ ID NO: 492545 - DNA, 33 bp, Homo sapien
taaacatcattgtaaagaaagcatatatgagaa

SEQ ID NO: 492546 - DNA, 33 bp, Homo sapien
taaacatcattgtaaataaagcatatatgagaa

SEQ ID NO: 492547 - DNA, 33 bp, Homo sapien
attagatcttacgaaaccttcattttaatttgg

SEQ ID NO: 492548 - DNA, 33 bp, Homo sapien
attagatcttacgaaatcttcattttaatttgg

SEQ ID NO: 492549 - DNA, 33 bp, Homo sapien
gctcagggttgaaactcactgtatgagcttaag

SEQ ID NO: 492550 - DNA, 33 bp, Homo sapien
gctcagggttgaaacttactgtatgagcttaag

SEQ ID NO: 492551 - DNA, 33 bp, Homo sapien
aattgacaatttttcgcaatgttgtactagatg

SEQ ID NO: 492552 - DNA, 33 bp, Homo sapien
aattgacaatttttcggaatgttgtactagatg

SEQ ID NO: 492553 - DNA, 33 bp, Homo sapien
aaggtaggtaagctaactgaaagactccaatca

SEQ ID NO: 492554 - DNA, 33 bp, Homo sapien
aaggtaggtaagctaattgaaagactccaatca

SEQ ID NO: 492555 - DNA, 33 bp, Homo sapien
ctgtttatagacttcaactagaattttgtccct

SEQ ID NO: 492556 - DNA, 33 bp, Homo sapien
ctgtttatagacttcagctagaattttgtccct

SEQ ID NO: 492557 - DNA, 33 bp, Homo sapien
ctacattgatgtattacggtaaaatgtgtatgt

SEQ ID NO: 492558 - DNA, 33 bp, Homo sapien
ctacattgatgtattatggtaaaatgtgtatgt

SEQ ID NO: 492559 - DNA, 33 bp, Homo sapien
tggcttaaaatctttaccagctatagaagcttc

SEQ ID NO: 492560 - DNA, 33 bp, Homo sapien
tggcttaaaatctttatcagctatagaagcttc

SEQ ID NO: 492561 - DNA, 33 bp, Homo sapien
cgcggtagaagatcaaacgtatccatcaatttg

SEQ ID NO: 492562 - DNA, 33 bp, Homo sapien
cgcggtagaagatcaagcgtatccatcaatttg

SEQ ID NO: 492563 - DNA, 33 bp, Homo sapien
gatcactagctcataaacacacaatccaaaaat

SEQ ID NO: 492564 - DNA, 33 bp, Homo sapien
gatcactagctcataagcacacaatccaaaaat

SEQ ID NO: 492565 - DNA, 33 bp, Homo sapien
ataacaatagctcaaaagatggaaggaagaagt

SEQ ID NO: 492566 - DNA, 33 bp, Homo sapien
ataacaatagctcaaaggatggaaggaagaagt

SEQ ID NO: 492567 - DNA, 33 bp, Homo sapien
ctatgttgcaatcactaagcaaatgccaaatgc

SEQ ID NO: 492568 - DNA, 33 bp, Homo sapien
ctatgttgcaatcactgagcaaatgccaaatgc

SEQ ID NO: 492569 - DNA, 33 bp, Homo sapien
cttgacatcctcttagaaaagaccagtctttta

SEQ ID NO: 492570 - DNA, 33 bp, Homo sapien
cttgacatcctcttagcaaagaccagtctttta

SEQ ID NO: 492571 - DNA, 33 bp, Homo sapien
agtatatgttcctccaatgatctcatccattcc

SEQ ID NO: 492572 - DNA, 33 bp, Homo sapien
agtatatgttcctccagtgatctcatccattcc

SEQ ID NO: 492573 - DNA, 33 bp, Homo sapien
atgatctttctacaaaacaaatccaattatgtc

SEQ ID NO: 492574 - DNA, 33 bp, Homo sapien
atgatctttctacaaagcaaatccaattatgtc

SEQ ID NO: 492575 - DNA, 33 bp, Homo sapien
actctatgacgttcacacaatgaaaaaattgtc

SEQ ID NO: 492576 - DNA, 33 bp, Homo sapien
actctatgacgttcacgcaatgaaaaaattgtc

SEQ ID NO: 492577 - DNA, 33 bp, Homo sapien
gtacgatatcttatgcaaaacatctaataagct

SEQ ID NO: 492578 - DNA, 33 bp, Homo sapien
gtacgatatcttatgcgaaacatctaataagct

SEQ ID NO: 492579 - DNA, 33 bp, Homo sapien
tgttgatggtccagacaaaaatgtgtagataat

SEQ ID NO: 492580 - DNA, 33 bp, Homo sapien
tgttgatggtccagacgaaaatgtgtagataat

SEQ ID NO: 492581 - DNA, 33 bp, Homo sapien
atatattattcaaaagacagttattttaaaaga

SEQ ID NO: 492582 - DNA, 33 bp, Homo sapien
atatattattcaaaaggcagttattttaaaaga

SEQ ID NO: 492583 - DNA, 33 bp, Homo sapien
agggaaagacatggtaacaacttgtctcgtgtg

SEQ ID NO: 492584 - DNA, 33 bp, Homo sapien
agggaaagacatggtatcaacttgtctcgtgtg

SEQ ID NO: 492585 - DNA, 33 bp, Homo sapien
tgagagcttgttaaggaaaagttttcaaatgta

SEQ ID NO: 492586 - DNA, 33 bp, Homo sapien
tgagagcttgttaagggaaagttttcaaatgta

SEQ ID NO: 492587 - DNA, 33 bp, Homo sapien
ccaaccccacagtataaaatgcataaagaggca

SEQ ID NO: 492588 - DNA, 33 bp, Homo sapien
ccaaccccacagtatagaatgcataaagaggca

SEQ ID NO: 492589 - DNA, 33 bp, Homo sapien
tttatttttgagcaaaccagagagggagaccct

SEQ ID NO: 492590 - DNA, 33 bp, Homo sapien
tttatttttgagcaaatcagagagggagaccct

SEQ ID NO: 492591 - DNA, 33 bp, Homo sapien
aaaaaaaaacaacactaaggctgtgcatatctt

SEQ ID NO: 492592 - DNA, 33 bp, Homo sapien
aaaaaaaaacaacactgaggctgtgcatatctt

SEQ ID NO: 492593 - DNA, 33 bp, Homo sapien
gtgttgtaggaaatagaaagacaaatatgacat

SEQ ID NO: 492594 - DNA, 33 bp, Homo sapien
gtgttgtaggaaataggaagacaaatatgacat

SEQ ID NO: 492595 - DNA, 33 bp, Homo sapien
agtttattcctgtaaacactcccagtggtggca

SEQ ID NO: 492596 - DNA, 33 bp, Homo sapien
agtttattcctgtaaatactcccagtggtggca

SEQ ID NO: 492597 - DNA, 33 bp, Homo sapien
tttttatttatatccaagaattacaagtatttt

SEQ ID NO: 492598 - DNA, 33 bp, Homo sapien
tttttatttatatccatgaattacaagtatttt

SEQ ID NO: 492599 - DNA, 33 bp, Homo sapien
gacagtgatggcccagaaagtgccgatgaaggg

SEQ ID NO: 492600 - DNA, 33 bp, Homo sapien
gacagtgatggcccaggaagtgccgatgaaggg

SEQ ID NO: 492601 - DNA, 33 bp, Homo sapien
ccaaaactagcagatacgatacactggttcttg

SEQ ID NO: 492602 - DNA, 33 bp, Homo sapien
ccaaaactagcagatatgatacactggttcttg

SEQ ID NO: 492603 - DNA, 33 bp, Homo sapien
atgtgaaaacttttcccgataatgaatctctgc

SEQ ID NO: 492604 - DNA, 33 bp, Homo sapien
atgtgaaaacttttcctgataatgaatctctgc

SEQ ID NO: 492605 - DNA, 33 bp, Homo sapien
catcacagctcttcaaatatcagaagacagcca

SEQ ID NO: 492606 - DNA, 33 bp, Homo sapien
catcacagctcttcaattatcagaagacagcca

SEQ ID NO: 492607 - DNA, 33 bp, Homo sapien
ttttcaaaactggttgaattataacaggatttc

SEQ ID NO: 492608 - DNA, 33 bp, Homo sapien
ttttcaaaactggttggattataacaggatttc

SEQ ID NO: 492609 - DNA, 33 bp, Homo sapien
acggcacatgcatacaataaaattcttctagct

SEQ ID NO: 492610 - DNA, 33 bp, Homo sapien
acggcacatgcatacattaaaattcttctagct

SEQ ID NO: 492611 - DNA, 33 bp, Homo sapien
attttctagttgtacgaccttgggtaagttact

SEQ ID NO: 492612 - DNA, 33 bp, Homo sapien
attttctagttgtacggccttgggtaagttact

SEQ ID NO: 492613 - DNA, 33 bp, Homo sapien
taacaataatcactaccgctttttgagcattta

SEQ ID NO: 492614 - DNA, 33 bp, Homo sapien
taacaataatcactacggctttttgagcattta

SEQ ID NO: 492615 - DNA, 33 bp, Homo sapien
ggctgcttctgttaacaaaaaactatttattgt

SEQ ID NO: 492616 - DNA, 33 bp, Homo sapien
ggctgcttctgttaaccaaaaactatttattgt

SEQ ID NO: 492617 - DNA, 33 bp, Homo sapien
tatgcctagcacagatcacaagggtgttatgtc

SEQ ID NO: 492618 - DNA, 33 bp, Homo sapien
tatgcctagcacagatgacaagggtgttatgtc

SEQ ID NO: 492619 - DNA, 33 bp, Homo sapien
acctcagcactacactcaagggtcattttaaac

SEQ ID NO: 492620 - DNA, 33 bp, Homo sapien
acctcagcactacactgaagggtcattttaaac

SEQ ID NO: 492621 - DNA, 33 bp, Homo sapien
agtgcttccgcaatcaatcacagacatgctcaa

SEQ ID NO: 492622 - DNA, 33 bp, Homo sapien
agtgcttccgcaatcattcacagacatgctcaa

SEQ ID NO: 492623 - DNA, 33 bp, Homo sapien
ccagggaaaggaaatacgagtaattgctgtcca

SEQ ID NO: 492624 - DNA, 33 bp, Homo sapien
ccagggaaaggaaatatgagtaattgctgtcca

SEQ ID NO: 492625 - DNA, 33 bp, Homo sapien
gcagagggatctttccccagctagcaggcatta

SEQ ID NO: 492626 - DNA, 33 bp, Homo sapien
gcagagggatctttcctcagctagcaggcatta

SEQ ID NO: 492627 - DNA, 33 bp, Homo sapien
aacaagtcaacagatacacgcaaaagttcccaa

SEQ ID NO: 492628 - DNA, 33 bp, Homo sapien
aacaagtcaacagatatacgcaaaagttcccaa

SEQ ID NO: 492629 - DNA, 33 bp, Homo sapien
ctttacataaaggaaacgcaaggataagataaa

SEQ ID NO: 492630 - DNA, 33 bp, Homo sapien
ctttacataaaggaaatgcaaggataagataaa

SEQ ID NO: 492631 - DNA, 33 bp, Homo sapien
acacaacgcagaataaacctgggattcagccac

SEQ ID NO: 492632 - DNA, 33 bp, Homo sapien
acacaacgcagaataagcctgggattcagccac

SEQ ID NO: 492633 - DNA, 33 bp, Homo sapien
tcatcttcacatattcactcttattcctgcctt

SEQ ID NO: 492634 - DNA, 33 bp, Homo sapien
tcatcttcacatattctctcttattcctgcctt

SEQ ID NO: 492635 - DNA, 33 bp, Homo sapien
ctcattttttgtactaactttcaggcctgcagc

SEQ ID NO: 492636 - DNA, 33 bp, Homo sapien
ctcattttttgtactacctttcaggcctgcagc

SEQ ID NO: 492637 - DNA, 33 bp, Homo sapien
ggagtgagatgtaagcgaagatctaagacagca

SEQ ID NO: 492638 - DNA, 33 bp, Homo sapien
ggagtgagatgtaagctaagatctaagacagca

SEQ ID NO: 492639 - DNA, 33 bp, Homo sapien
tggctacagctacgtaccttcagacttttcaat

SEQ ID NO: 492640 - DNA, 33 bp, Homo sapien
tggctacagctacgtatcttcagacttttcaat

SEQ ID NO: 492641 - DNA, 33 bp, Homo sapien
tgtcttcaaccaagacaagtaggaaatcaaagc

SEQ ID NO: 492642 - DNA, 33 bp, Homo sapien
tgtcttcaaccaagacgagtaggaaatcaaagc

SEQ ID NO: 492643 - DNA, 33 bp, Homo sapien
aagaatgctatgaaaactaagtgtggaagaaat

SEQ ID NO: 492644 - DNA, 33 bp, Homo sapien
aagaatgctatgaaaattaagtgtggaagaaat

SEQ ID NO: 492645 - DNA, 33 bp, Homo sapien
ctcacaacctcttataaatgatgtgcctttaga

SEQ ID NO: 492646 - DNA, 33 bp, Homo sapien
ctcacaacctcttatagatgatgtgcctttaga

SEQ ID NO: 492647 - DNA, 33 bp, Homo sapien
ttgtctgatggtcctacgaagatatcttttttg

SEQ ID NO: 492648 - DNA, 33 bp, Homo sapien
ttgtctgatggtcctatgaagatatcttttttg

SEQ ID NO: 492649 - DNA, 33 bp, Homo sapien
ggaggaggtagacaaacaggacaagggactgca

SEQ ID NO: 492650 - DNA, 33 bp, Homo sapien
ggaggaggtagacaaagaggacaagggactgca

SEQ ID NO: 492651 - DNA, 33 bp, Homo sapien
gtgtttgcaaagaaaaagtaaatcctctgctgc

SEQ ID NO: 492652 - DNA, 33 bp, Homo sapien
gtgtttgcaaagaaaaggtaaatcctctgctgc

SEQ ID NO: 492653 - DNA, 33 bp, Homo sapien
gatttttacacaacaaaacaacagtcctggacc

SEQ ID NO: 492654 - DNA, 33 bp, Homo sapien
gatttttacacaacaagacaacagtcctggacc

SEQ ID NO: 492655 - DNA, 33 bp, Homo sapien
tcaaattcataatttcaagataagagacactgc

SEQ ID NO: 492656 - DNA, 33 bp, Homo sapien
tcaaattcataatttcgagataagagacactgc

SEQ ID NO: 492657 - DNA, 33 bp, Homo sapien
gatttatccactgtggaagacgctgtcagtgcc

SEQ ID NO: 492658 - DNA, 33 bp, Homo sapien
gatttatccactgtggcagacgctgtcagtgcc

SEQ ID NO: 492659 - DNA, 33 bp, Homo sapien
gcctagagaaaagagcaccaaaatactaagtaa

SEQ ID NO: 492660 - DNA, 33 bp, Homo sapien
gcctagagaaaagagcgccaaaatactaagtaa

SEQ ID NO: 492661 - DNA, 33 bp, Homo sapien
gccgcttccctcccaccggctcatgaggttgtt

SEQ ID NO: 492662 - DNA, 33 bp, Homo sapien
gccgcttccctcccactggctcatgaggttgtt

SEQ ID NO: 492663 - DNA, 33 bp, Homo sapien
tgggatagcatttaagaagatagatgatccgat

SEQ ID NO: 492664 - DNA, 33 bp, Homo sapien
tgggatagcatttaagcagatagatgatccgat

SEQ ID NO: 492665 - DNA, 33 bp, Homo sapien
ttgttgagattaccacagagacagcctgttcca

SEQ ID NO: 492666 - DNA, 33 bp, Homo sapien
ttgttgagattaccacggagacagcctgttcca

SEQ ID NO: 492667 - DNA, 33 bp, Homo sapien
aacaactttttagcgaaatgaatctgtgctctt

SEQ ID NO: 492668 - DNA, 33 bp, Homo sapien
aacaactttttagcgacatgaatctgtgctctt

SEQ ID NO: 492669 - DNA, 33 bp, Homo sapien
ttcctcttctatccgcaaactgcctgagatgtt

SEQ ID NO: 492670 - DNA, 33 bp, Homo sapien
ttcctcttctatccgcgaactgcctgagatgtt

SEQ ID NO: 492671 - DNA, 33 bp, Homo sapien
tcccaccctgggtctaacatagtctcggggact

SEQ ID NO: 492672 - DNA, 33 bp, Homo sapien
tcccaccctgggtctaccatagtctcggggact

SEQ ID NO: 492673 - DNA, 33 bp, Homo sapien
gttacttgcataggagaaaataatagtaataag

SEQ ID NO: 492674 - DNA, 33 bp, Homo sapien
gttacttgcataggagtaaataatagtaataag

SEQ ID NO: 492675 - DNA, 33 bp, Homo sapien
ttaatactcagcaacaaccccttccacaagata

SEQ ID NO: 492676 - DNA, 33 bp, Homo sapien
ttaatactcagcaacacccccttccacaagata

SEQ ID NO: 492677 - DNA, 33 bp, Homo sapien
tttaatggaaagaaacactcagagaaatagccc

SEQ ID NO: 492678 - DNA, 33 bp, Homo sapien
tttaatggaaagaaacgctcagagaaatagccc

SEQ ID NO: 492679 - DNA, 33 bp, Homo sapien
cacaaaacctaggaaacgtatggtcagtcaacc

SEQ ID NO: 492680 - DNA, 33 bp, Homo sapien
cacaaaacctaggaaatgtatggtcagtcaacc

SEQ ID NO: 492681 - DNA, 33 bp, Homo sapien
tgacttgaactgactacgcaccatgccagcctg

SEQ ID NO: 492682 - DNA, 33 bp, Homo sapien
tgacttgaactgactatgcaccatgccagcctg

SEQ ID NO: 492683 - DNA, 33 bp, Homo sapien
aaccctgtggaaatcacgacctactctcacctg

SEQ ID NO: 492684 - DNA, 33 bp, Homo sapien
aaccctgtggaaatcatgacctactctcacctg

SEQ ID NO: 492685 - DNA, 33 bp, Homo sapien
taaaaattcagtcaaccctcaaggctaccatgg

SEQ ID NO: 492686 - DNA, 33 bp, Homo sapien
taaaaattcagtcaacgctcaaggctaccatgg

SEQ ID NO: 492687 - DNA, 33 bp, Homo sapien
ggggtggctgtccatccgagaataagaactcaa

SEQ ID NO: 492688 - DNA, 33 bp, Homo sapien
ggggtggctgtccatctgagaataagaactcaa

SEQ ID NO: 492689 - DNA, 33 bp, Homo sapien
tctagtctatttactacgacaggaatctttgag

SEQ ID NO: 492690 - DNA, 33 bp, Homo sapien
tctagtctatttactatgacaggaatctttgag

SEQ ID NO: 492691 - DNA, 33 bp, Homo sapien
acattgggagtagccaaagcaaaagaattgcaa

SEQ ID NO: 492692 - DNA, 33 bp, Homo sapien
acattgggagtagccacagcaaaagaattgcaa

SEQ ID NO: 492693 - DNA, 33 bp, Homo sapien
ctatctgcttgactcacgcagttgtaggactaa

SEQ ID NO: 492694 - DNA, 33 bp, Homo sapien
ctatctgcttgactcatgcagttgtaggactaa

SEQ ID NO: 492695 - DNA, 33 bp, Homo sapien
atataaacgtcacacacaggatggctaggctga

SEQ ID NO: 492696 - DNA, 33 bp, Homo sapien
atataaacgtcacacagaggatggctaggctga

SEQ ID NO: 492697 - DNA, 33 bp, Homo sapien
tttcctgtcattctaactcaaatctgttaagat

SEQ ID NO: 492698 - DNA, 33 bp, Homo sapien
tttcctgtcattctaattcaaatctgttaagat

SEQ ID NO: 492699 - DNA, 33 bp, Homo sapien
tgagtcttaacagatacatacagctgggtaacc

SEQ ID NO: 492700 - DNA, 33 bp, Homo sapien
tgagtcttaacagatagatacagctgggtaacc

SEQ ID NO: 492701 - DNA, 33 bp, Homo sapien
gttttaagctgtgttcaaagtgccttgggatca

SEQ ID NO: 492702 - DNA, 33 bp, Homo sapien
gttttaagctgtgttcgaagtgccttgggatca

SEQ ID NO: 492703 - DNA, 33 bp, Homo sapien
cctagggttcctccaacaagcaaagcctgagac

SEQ ID NO: 492704 - DNA, 33 bp, Homo sapien
cctagggttcctccaagaagcaaagcctgagac

SEQ ID NO: 492705 - DNA, 33 bp, Homo sapien
ttggggacccagatccacctgtttttttgattt

SEQ ID NO: 492706 - DNA, 33 bp, Homo sapien
ttggggacccagatcctcctgtttttttgattt

SEQ ID NO: 492707 - DNA, 33 bp, Homo sapien
agagagaagccttgaacgcggagaacggggagt

SEQ ID NO: 492708 - DNA, 33 bp, Homo sapien
agagagaagccttgaatgcggagaacggggagt

SEQ ID NO: 492709 - DNA, 33 bp, Homo sapien
ctcacctttctgaaaactattttttgttttgta

SEQ ID NO: 492710 - DNA, 33 bp, Homo sapien
ctcacctttctgaaaagtattttttgttttgta

SEQ ID NO: 492711 - DNA, 33 bp, Homo sapien
gtagaagcagctctcaagtgagataactccggg

SEQ ID NO: 492712 - DNA, 33 bp, Homo sapien
gtagaagcagctctcaggtgagataactccggg

SEQ ID NO: 492713 - DNA, 33 bp, Homo sapien
ttactgatttgggccacaagtccatctttgaac

SEQ ID NO: 492714 - DNA, 33 bp, Homo sapien
ttactgatttgggccataagtccatctttgaac

SEQ ID NO: 492715 - DNA, 33 bp, Homo sapien
cctggctgaaggaaccaggagaagtgtcaattg

SEQ ID NO: 492716 - DNA, 33 bp, Homo sapien
cctggctgaaggaaccgggagaagtgtcaattg

SEQ ID NO: 492717 - DNA, 33 bp, Homo sapien
gttctaaaacgctgcaaatacataaattcattt

SEQ ID NO: 492718 - DNA, 33 bp, Homo sapien
gttctaaaacgctgcatatacataaattcattt

SEQ ID NO: 492719 - DNA, 33 bp, Homo sapien
tgcctatctcttaaaaatttggctgtttgtctt

SEQ ID NO: 492720 - DNA, 33 bp, Homo sapien
tgcctatctcttaaaactttggctgtttgtctt

SEQ ID NO: 492721 - DNA, 33 bp, Homo sapien
aataagtataaaagcaaaagtcagtatattgga

SEQ ID NO: 492722 - DNA, 33 bp, Homo sapien
aataagtataaaagcagaagtcagtatattgga

SEQ ID NO: 492723 - DNA, 33 bp, Homo sapien
caattagtctcagctcacacagatttgggagta

SEQ ID NO: 492724 - DNA, 33 bp, Homo sapien
caattagtctcagctcgcacagatttgggagta

SEQ ID NO: 492725 - DNA, 33 bp, Homo sapien
gaagttcagggtaaaggccactcctgctgtgga

SEQ ID NO: 492726 - DNA, 33 bp, Homo sapien
gaagttcagggtaaagtccactcctgctgtgga

SEQ ID NO: 492727 - DNA, 33 bp, Homo sapien
cctcagaaatgtgaacagtagagatgatttttc

SEQ ID NO: 492728 - DNA, 33 bp, Homo sapien
cctcagaaatgtgaacggtagagatgatttttc

SEQ ID NO: 492729 - DNA, 33 bp, Homo sapien
aggatgtaaatcacaactgttgcatcaaaagtc

SEQ ID NO: 492730 - DNA, 33 bp, Homo sapien
aggatgtaaatcacaattgttgcatcaaaagtc

SEQ ID NO: 492731 - DNA, 33 bp, Homo sapien
attttactggagtgatcaggttacatgatctgg

SEQ ID NO: 492732 - DNA, 33 bp, Homo sapien
attttactggagtgattaggttacatgatctgg

SEQ ID NO: 492733 - DNA, 33 bp, Homo sapien
cctttttccagaacccaaaagagcaagagaggt

SEQ ID NO: 492734 - DNA, 33 bp, Homo sapien
cctttttccagaacccgaaagagcaagagaggt

SEQ ID NO: 492735 - DNA, 33 bp, Homo sapien
tgtttttcaatcattcaatccaagctctccatt

SEQ ID NO: 492736 - DNA, 33 bp, Homo sapien
tgtttttcaatcattcgatccaagctctccatt

SEQ ID NO: 492737 - DNA, 33 bp, Homo sapien
agttgaattacttttcccatctctctataactc

SEQ ID NO: 492738 - DNA, 33 bp, Homo sapien
agttgaattacttttctcatctctctataactc

SEQ ID NO: 492739 - DNA, 33 bp, Homo sapien
tctgtggatctagaccccttcattctcctgtat

SEQ ID NO: 492740 - DNA, 33 bp, Homo sapien
tctgtggatctagacctcttcattctcctgtat

SEQ ID NO: 492741 - DNA, 33 bp, Homo sapien
caactgagagcgaacactaagtattggtagaac

SEQ ID NO: 492742 - DNA, 33 bp, Homo sapien
caactgagagcgaacagtaagtattggtagaac

SEQ ID NO: 492743 - DNA, 33 bp, Homo sapien
accattctttagcataaagggagaacctagact

SEQ ID NO: 492744 - DNA, 33 bp, Homo sapien
accattctttagcatagagggagaacctagact

SEQ ID NO: 492745 - DNA, 33 bp, Homo sapien
agaatggtatcaataacgtgcccacatattcac

SEQ ID NO: 492746 - DNA, 33 bp, Homo sapien
agaatggtatcaataatgtgcccacatattcac

SEQ ID NO: 492747 - DNA, 33 bp, Homo sapien
tttagtaaacaaataaaagcatcaaaaacaaaa

SEQ ID NO: 492748 - DNA, 33 bp, Homo sapien
tttagtaaacaaataagagcatcaaaaacaaaa

SEQ ID NO: 492749 - DNA, 33 bp, Homo sapien
aaaccacttgtttcagccaccatagtcaggttt

SEQ ID NO: 492750 - DNA, 33 bp, Homo sapien
aaaccacttgtttcagtcaccatagtcaggttt

SEQ ID NO: 492751 - DNA, 33 bp, Homo sapien
tggccaaccctggagaaccgacatccagatttc

SEQ ID NO: 492752 - DNA, 33 bp, Homo sapien
tggccaaccctggagagccgacatccagatttc

SEQ ID NO: 492753 - DNA, 33 bp, Homo sapien
aaatatgttatgctccagatacactgtctcttc

SEQ ID NO: 492754 - DNA, 33 bp, Homo sapien
aaatatgttatgctccggatacactgtctcttc

SEQ ID NO: 492755 - DNA, 33 bp, Homo sapien
ttagtgtaataaatgaacttgggtatctactct

SEQ ID NO: 492756 - DNA, 33 bp, Homo sapien
ttagtgtaataaatgagcttgggtatctactct

SEQ ID NO: 492757 - DNA, 33 bp, Homo sapien
catcacaataatgacaactcagttaaaagctcc

SEQ ID NO: 492758 - DNA, 33 bp, Homo sapien
catcacaataatgacagctcagttaaaagctcc

SEQ ID NO: 492759 - DNA, 33 bp, Homo sapien
aagaattacttcttcacgaggcacttgaaaatt

SEQ ID NO: 492760 - DNA, 33 bp, Homo sapien
aagaattacttcttcatgaggcacttgaaaatt

SEQ ID NO: 492761 - DNA, 33 bp, Homo sapien
tttgcatcagagaaaactgagttccaccttgac

SEQ ID NO: 492762 - DNA, 33 bp, Homo sapien
tttgcatcagagaaaattgagttccaccttgac

SEQ ID NO: 492763 - DNA, 33 bp, Homo sapien
accctgtgtttgctcaaccagtcaccatctttc

SEQ ID NO: 492764 - DNA, 33 bp, Homo sapien
accctgtgtttgctcatccagtcaccatctttc

SEQ ID NO: 492765 - DNA, 33 bp, Homo sapien
gcttgcattaccgcctgagatacctccagtcag

SEQ ID NO: 492766 - DNA, 33 bp, Homo sapien
gcttgcattaccgccttagatacctccagtcag

SEQ ID NO: 492767 - DNA, 33 bp, Homo sapien
aagcggttgttttccacctggccgtagcgctgg

SEQ ID NO: 492768 - DNA, 33 bp, Homo sapien
aagcggttgttttccatctggccgtagcgctgg

SEQ ID NO: 492769 - DNA, 33 bp, Homo sapien
ggtgatggacaccacgaaatcatgctccagaga

SEQ ID NO: 492770 - DNA, 33 bp, Homo sapien
ggtgatggacaccacggaatcatgctccagaga

SEQ ID NO: 492771 - DNA, 33 bp, Homo sapien
ctcatcacttgaccgaccttggaaggcccctta

SEQ ID NO: 492772 - DNA, 33 bp, Homo sapien
ctcatcacttgaccgatcttggaaggcccctta

SEQ ID NO: 492773 - DNA, 33 bp, Homo sapien
tcgctcagcttcaggacgttcgcttgctttcag

SEQ ID NO: 492774 - DNA, 33 bp, Homo sapien
tcgctcagcttcaggaggttcgcttgctttcag

SEQ ID NO: 492775 - DNA, 33 bp, Homo sapien
gcctgcaggggtctgaccagcagttgaaatgaa

SEQ ID NO: 492776 - DNA, 33 bp, Homo sapien
gcctgcaggggtctgatcagcagttgaaatgaa

SEQ ID NO: 492777 - DNA, 33 bp, Homo sapien
tcataagtaaaccccaacagtttagtggcttaa

SEQ ID NO: 492778 - DNA, 33 bp, Homo sapien
tcataagtaaaccccagcagtttagtggcttaa

SEQ ID NO: 492779 - DNA, 33 bp, Homo sapien
accatgaagtccacaaattgaaatgtcagagcc

SEQ ID NO: 492780 - DNA, 33 bp, Homo sapien
accatgaagtccacaagttgaaatgtcagagcc

SEQ ID NO: 492781 - DNA, 33 bp, Homo sapien
gtctatttctgttacacgatttgttatttcttc

SEQ ID NO: 492782 - DNA, 33 bp, Homo sapien
gtctatttctgttacaggatttgttatttcttc

SEQ ID NO: 492783 - DNA, 33 bp, Homo sapien; identical to SEQ ID NO: 492781

SEQ ID NO: 492784 - DNA, 33 bp, Homo sapien; identical to SEQ ID NO: 492782

SEQ ID NO: 492785 - DNA, 33 bp, Homo sapien
tatggtagccagataaatcatcaaacaacctgt

SEQ ID NO: 492786 - DNA, 33 bp, Homo sapien
tatggtagccagataactcatcaaacaacctgt

SEQ ID NO: 492787 - DNA, 33 bp, Homo sapien
agaagtgaaattttccactcacagcaagctgtt

SEQ ID NO: 492788 - DNA, 33 bp, Homo sapien
agaagtgaaattttccgctcacagcaagctgtt

SEQ ID NO: 492789 - DNA, 33 bp, Homo sapien
gaatatgggatattgacgttaacctgatcaaaa

SEQ ID NO: 492790 - DNA, 33 bp, Homo sapien
gaatatgggatattgatgttaacctgatcaaaa

SEQ ID NO: 492791 - DNA, 33 bp, Homo sapien
aggctgaatttcacaacatagcaggttgatagt

SEQ ID NO: 492792 - DNA, 33 bp, Homo sapien
aggctgaatttcacaagatagcaggttgatagt

SEQ ID NO: 492793 - DNA, 33 bp, Homo sapien
ccagttcacccaaaaacgtcccctggcaactga

SEQ ID NO: 492794 - DNA, 33 bp, Homo sapien
ccagttcacccaaaaatgtcccctggcaactga

SEQ ID NO: 492795 - DNA, 33 bp, Homo sapien
gactatttggccatttaaaaatagtttctcaag

SEQ ID NO: 492796 - DNA, 33 bp, Homo sapien
gactatttggccatttgaaaatagtttctcaag

SEQ ID NO: 492797 - DNA, 33 bp, Homo sapien
tgatcgttcaaattaaaaaacttggctgaaact

SEQ ID NO: 492798 - DNA, 33 bp, Homo sapien
tgatcgttcaaattaacaaacttggctgaaact

SEQ ID NO: 492799 - DNA, 33 bp, Homo sapien
gatgttcttcctctctaaaaaggctgtatatat

SEQ ID NO: 492800 - DNA, 33 bp, Homo sapien
gatgttcttcctctcttaaaaggctgtatatat

SEQ ID NO: 492801 - DNA, 33 bp, Homo sapien
atgatgtgacctttaactaaacaatctatggat

SEQ ID NO: 492802 - DNA, 33 bp, Homo sapien
atgatgtgacctttaagtaaacaatctatggat

SEQ ID NO: 492803 - DNA, 33 bp, Homo sapien
attagttgcctactttaaaagaagtgttatagc

SEQ ID NO: 492804 - DNA, 33 bp, Homo sapien
attagttgcctactttgaaagaagtgttatagc

SEQ ID NO: 492805 - DNA, 33 bp, Homo sapien
tttgtttgcttcctaaaccagtttatgcatgag

SEQ ID NO: 492806 - DNA, 33 bp, Homo sapien
tttgtttgcttcctaagccagtttatgcatgag

SEQ ID NO: 492807 - DNA, 33 bp, Homo sapien
agccaacagaaacagacagcatttggcagaatg

SEQ ID NO: 492808 - DNA, 33 bp, Homo sapien
agccaacagaaacagatagcatttggcagaatg

SEQ ID NO: 492809 - DNA, 33 bp, Homo sapien
caggcacatccgtaaaacgacacacctgtcaat

SEQ ID NO: 492810 - DNA, 33 bp, Homo sapien
caggcacatccgtaaagcgacacacctgtcaat

SEQ ID NO: 492811 - DNA, 33 bp, Homo sapien
gtggcaaccagagttcaaatgagggcaccgcca

SEQ ID NO: 492812 - DNA, 33 bp, Homo sapien
gtggcaaccagagttcgaatgagggcaccgcca

SEQ ID NO: 492813 - DNA, 33 bp, Homo sapien
ccctttattttggatacggtgttggtgtgtgtg

SEQ ID NO: 492814 - DNA, 33 bp, Homo sapien
ccctttattttggatatggtgttggtgtgtgtg

SEQ ID NO: 492815 - DNA, 33 bp, Homo sapien
gaaagaatatggtcaacggcctgaatcctagtc

SEQ ID NO: 492816 - DNA, 33 bp, Homo sapien
gaaagaatatggtcaatggcctgaatcctagtc

SEQ ID NO: 492817 - DNA, 33 bp, Homo sapien
attctttcaacttcaggagcaacagcacctgga

SEQ ID NO: 492818 - DNA, 33 bp, Homo sapien
attctttcaacttcagtagcaacagcacctgga

SEQ ID NO: 492819 - DNA, 33 bp, Homo sapien
ggcttcattcctaaacacagagctcattggaaa

SEQ ID NO: 492820 - DNA, 33 bp, Homo sapien
ggcttcattcctaaacgcagagctcattggaaa

SEQ ID NO: 492821 - DNA, 33 bp, Homo sapien
cctggaaagatgaatacggtacaggcgtcaggg

SEQ ID NO: 492822 - DNA, 33 bp, Homo sapien
cctggaaagatgaatatggtacaggcgtcaggg

SEQ ID NO: 492823 - DNA, 33 bp, Homo sapien
aatgaccacagtgactaagccgccgccactttt

SEQ ID NO: 492824 - DNA, 33 bp, Homo sapien
aatgaccacagtgactgagccgccgccactttt

SEQ ID NO: 492825 - DNA, 33 bp, Homo sapien
ttaattttaactgctaataactgcagcaaacta

SEQ ID NO: 492826 - DNA, 33 bp, Homo sapien
ttaattttaactgctattaactgcagcaaacta

SEQ ID NO: 492827 - DNA, 33 bp, Homo sapien
ctttttgcttgcaagccgagtcgtttcaggagg

SEQ ID NO: 492828 - DNA, 33 bp, Homo sapien
ctttttgcttgcaagctgagtcgtttcaggagg

SEQ ID NO: 492829 - DNA, 33 bp, Homo sapien
tgctacaccaaacgcactgcagctccttcttat

SEQ ID NO: 492830 - DNA, 33 bp, Homo sapien
tgctacaccaaacgcattgcagctccttcttat

SEQ ID NO: 492831 - DNA, 33 bp, Homo sapien
cctctgcctactgcagaacaactctactgacca

SEQ ID NO: 492832 - DNA, 33 bp, Homo sapien
cctctgcctactgcaggacaactctactgacca

SEQ ID NO: 492833 - DNA, 33 bp, Homo sapien
gtaaaagcccaacacaatgagaggagtagagca

SEQ ID NO: 492834 - DNA, 33 bp, Homo sapien
gtaaaagcccaacacactgagaggagtagagca

SEQ ID NO: 492835 - DNA, 33 bp, Homo sapien
tggctgtggataatttaaaacttggataattac

SEQ ID NO: 492836 - DNA, 33 bp, Homo sapien
tggctgtggataattttaaacttggataattac

SEQ ID NO: 492837 - DNA, 33 bp, Homo sapien
ttctagcattgttccccatctaatcaaaccatc

SEQ ID NO: 492838 - DNA, 33 bp, Homo sapien
ttctagcattgttccctatctaatcaaaccatc

SEQ ID NO: 492839 - DNA, 33 bp, Homo sapien
tgtcaatgatcatgtgaaattttaatagtttat

SEQ ID NO: 492840 - DNA, 33 bp, Homo sapien
tgtcaatgatcatgtgcaattttaatagtttat

SEQ ID NO: 492841 - DNA, 33 bp, Homo sapien
tttatgtattcaagtacaggcagtctagcctgg

SEQ ID NO: 492842 - DNA, 33 bp, Homo sapien
tttatgtattcaagtagaggcagtctagcctgg

SEQ ID NO: 492843 - DNA, 33 bp, Homo sapien
tttctctgtaacctcaccagcatctgctttttc

SEQ ID NO: 492844 - DNA, 33 bp, Homo sapien
tttctctgtaacctcagcagcatctgctttttc

SEQ ID NO: 492845 - DNA, 33 bp, Homo sapien
ctccgcctgaactgaaatgaagcagttggggtg

SEQ ID NO: 492846 - DNA, 33 bp, Homo sapien
ctccgcctgaactgaactgaagcagttggggtg

SEQ ID NO: 492847 - DNA, 33 bp, Homo sapien
cagtttcctcgtctataaacaggatgaataatg

SEQ ID NO: 492848 - DNA, 33 bp, Homo sapien
cagtttcctcgtctatgaacaggatgaataatg

SEQ ID NO: 492849 - DNA, 33 bp, Homo sapien
agtgtgtagaggagagaaatacaatgactgcta

SEQ ID NO: 492850 - DNA, 33 bp, Homo sapien
agtgtgtagaggagaggaatacaatgactgcta

SEQ ID NO: 492851 - DNA, 33 bp, Homo sapien
gccatgtttccagccaaacggagaaatgtctgc

SEQ ID NO: 492852 - DNA, 33 bp, Homo sapien
gccatgtttccagccatacggagaaatgtctgc

SEQ ID NO: 492853 - DNA, 33 bp, Homo sapien
catttttgccttttagccaacctcttttcattt

SEQ ID NO: 492854 - DNA, 33 bp, Homo sapien
catttttgccttttagtcaacctcttttcattt

SEQ ID NO: 492855 - DNA, 33 bp, Homo sapien
agttagaaaagtcataatacacttgcttactat

SEQ ID NO: 492856 - DNA, 33 bp, Homo sapien
agttagaaaagtcatagtacacttgcttactat

SEQ ID NO: 492857 - DNA, 33 bp, Homo sapien
taggctctgtgaataccgaaaatactcagattt

SEQ ID NO: 492858 - DNA, 33 bp, Homo sapien
taggctctgtgaatactgaaaatactcagattt

SEQ ID NO: 492859 - DNA, 33 bp, Homo sapien
tatctatgcagtacaaatagcattaatacagta

SEQ ID NO: 492860 - DNA, 33 bp, Homo sapien
tatctatgcagtacaagtagcattaatacagta

SEQ ID NO: 492861 - DNA, 33 bp, Homo sapien
ggaaagcaaggtaagacggaaatccagcttgac

SEQ ID NO: 492862 - DNA, 33 bp, Homo sapien
ggaaagcaaggtaagatggaaatccagcttgac

SEQ ID NO: 492863 - DNA, 33 bp, Homo sapien
tcagcttatgatctaaaatgactgctaacactg

SEQ ID NO: 492864 - DNA, 33 bp, Homo sapien
tcagcttatgatctaagatgactgctaacactg

SEQ ID NO: 492865 - DNA, 33 bp, Homo sapien
cagggctgtcagcacccccacttaccaatcaaa

SEQ ID NO: 492866 - DNA, 33 bp, Homo sapien
cagggctgtcagcaccgccacttaccaatcaaa

SEQ ID NO: 492867 - DNA, 33 bp, Homo sapien
tcgaacagtgactctccctgaacggtaggatta

SEQ ID NO: 492868 - DNA, 33 bp, Homo sapien
tcgaacagtgactctctctgaacggtaggatta

SEQ ID NO: 492869 - DNA, 33 bp, Homo sapien
cttagttatttttaaacgtgcagtgaattattg

SEQ ID NO: 492870 - DNA, 33 bp, Homo sapien
cttagttatttttaaatgtgcagtgaattattg

SEQ ID NO: 492871 - DNA, 33 bp, Homo sapien
aatacacaatgatcggaaagaattcaattttgt

SEQ ID NO: 492872 - DNA, 33 bp, Homo sapien
aatacacaatgatcgggaagaattcaattttgt

SEQ ID NO: 492873 - DNA, 33 bp, Homo sapien
caaaaccaggtcaccacgtcaacagttttgaaa

SEQ ID NO: 492874 - DNA, 33 bp, Homo sapien
caaaaccaggtcaccaggtcaacagttttgaaa

SEQ ID NO: 492875 - DNA, 33 bp, Homo sapien
tgttttgaatctttcaatctcttccagtgcaca

SEQ ID NO: 492876 - DNA, 33 bp, Homo sapien
tgttttgaatctttcagtctcttccagtgcaca

SEQ ID NO: 492877 - DNA, 33 bp, Homo sapien
ttcattcatctttaaacccattaagtaagtgtt

SEQ ID NO: 492878 - DNA, 33 bp, Homo sapien
ttcattcatctttaaatccattaagtaagtgtt

SEQ ID NO: 492879 - DNA, 33 bp, Homo sapien
ccttggccattaagtaaaaggaactaaagcttc

SEQ ID NO: 492880 - DNA, 33 bp, Homo sapien
ccttggccattaagtagaaggaactaaagcttc

SEQ ID NO: 492881 - DNA, 33 bp, Homo sapien
gtaactctacatcactaaagctcacccacctca

SEQ ID NO: 492882 - DNA, 33 bp, Homo sapien
gtaactctacatcactgaagctcacccacctca

SEQ ID NO: 492883 - DNA, 33 bp, Homo sapien
tcattatctccctatccgaaaatcctgtttctc

SEQ ID NO: 492884 - DNA, 33 bp, Homo sapien
tcattatctccctatctgaaaatcctgtttctc

SEQ ID NO: 492885 - DNA, 33 bp, Homo sapien
cttccattaaccataaacttctggaacacaggg

SEQ ID NO: 492886 - DNA, 33 bp, Homo sapien
cttccattaaccataaccttctggaacacaggg

SEQ ID NO: 492887 - DNA, 33 bp, Homo sapien
ggacaagaaaactaaacgtgtaacctcacgctt

SEQ ID NO: 492888 - DNA, 33 bp, Homo sapien
ggacaagaaaactaaatgtgtaacctcacgctt

SEQ ID NO: 492889 - DNA, 33 bp, Homo sapien
tagctactattcacaccgtatctctgttgcaaa

SEQ ID NO: 492890 - DNA, 33 bp, Homo sapien
tagctactattcacactgtatctctgttgcaaa

SEQ ID NO: 492891 - DNA, 33 bp, Homo sapien
agtgtggaaaatggaaacgactcatccaatagg

SEQ ID NO: 492892 - DNA, 33 bp, Homo sapien
agtgtggaaaatggaagcgactcatccaatagg

SEQ ID NO: 492893 - DNA, 33 bp, Homo sapien
cttattttacacagacactactcaagatggagt

SEQ ID NO: 492894 - DNA, 33 bp, Homo sapien
cttattttacacagaccctactcaagatggagt

SEQ ID NO: 492895 - DNA, 33 bp, Homo sapien
accctcactattcagcaagccatgttgggtacc

SEQ ID NO: 492896 - DNA, 33 bp, Homo sapien
accctcactattcagcgagccatgttgggtacc

SEQ ID NO: 492897 - DNA, 33 bp, Homo sapien
atggctctgacctctcagaaagggaaagggggc

SEQ ID NO: 492898 - DNA, 33 bp, Homo sapien
atggctctgacctctcggaaagggaaagggggc

SEQ ID NO: 492899 - DNA, 33 bp, Homo sapien
catgctaaaccacttcgagttttctgaacaact

SEQ ID NO: 492900 - DNA, 33 bp, Homo sapien
catgctaaaccacttctagttttctgaacaact

SEQ ID NO: 492901 - DNA, 33 bp, Homo sapien
tcaagaaataatcaagcacccctgctgacccta

SEQ ID NO: 492902 - DNA, 33 bp, Homo sapien
tcaagaaataatcaagtacccctgctgacccta

SEQ ID NO: 492903 - DNA, 33 bp, Homo sapien
ggaacttatgtaatcgccatttcttttagctat

SEQ ID NO: 492904 - DNA, 33 bp, Homo sapien
ggaacttatgtaatcgtcatttcttttagctat

SEQ ID NO: 492905 - DNA, 33 bp, Homo sapien
ggttaaccattccatcactgagagaagccccta

SEQ ID NO: 492906 - DNA, 33 bp, Homo sapien
ggttaaccattccatcgctgagagaagccccta

SEQ ID NO: 492907 - DNA, 33 bp, Homo sapien
ccacttatgttgtttccaagttaataaatggtt

SEQ ID NO: 492908 - DNA, 33 bp, Homo sapien
ccacttatgttgtttcgaagttaataaatggtt

SEQ ID NO: 492909 - DNA, 33 bp, Homo sapien
taaagaggggcagaaaaatggtataatagcaag

SEQ ID NO: 492910 - DNA, 33 bp, Homo sapien
taaagaggggcagaaacatggtataatagcaag

SEQ ID NO: 492911 - DNA, 33 bp, Homo sapien
gagtatgcagattaacactttgtttgttttgct

SEQ ID NO: 492912 - DNA, 33 bp, Homo sapien
gagtatgcagattaaccctttgtttgttttgct

SEQ ID NO: 492913 - DNA, 33 bp, Homo sapien
ttagatcttgcgatgacgataatgctcgttccc

SEQ ID NO: 492914 - DNA, 33 bp, Homo sapien
ttagatcttgcgatgatgataatgctcgttccc

SEQ ID NO: 492915 - DNA, 33 bp, Homo sapien
cagccatgaaataaaactccttcctgtcagcct

SEQ ID NO: 492916 - DNA, 33 bp, Homo sapien
cagccatgaaataaaagtccttcctgtcagcct

SEQ ID NO: 492917 - DNA, 33 bp, Homo sapien
agaatgctagctgaaccgtgaacaaagctggca

SEQ ID NO: 492918 - DNA, 33 bp, Homo sapien
agaatgctagctgaactgtgaacaaagctggca

SEQ ID NO: 492919 - DNA, 33 bp, Homo sapien
actgcctgtaatttaaatctggtttgctagggt

SEQ ID NO: 492920 - DNA, 33 bp, Homo sapien
actgcctgtaatttaagtctggtttgctagggt

SEQ ID NO: 492921 - DNA, 33 bp, Homo sapien
cccagatcacggtggcaagattggagactcaag

SEQ ID NO: 492922 - DNA, 33 bp, Homo sapien
cccagatcacggtggcgagattggagactcaag

SEQ ID NO: 492923 - DNA, 33 bp, Homo sapien
tatcttttctctattgcagaggctaaagcaact

SEQ ID NO: 492924 - DNA, 33 bp, Homo sapien
tatcttttctctattgtagaggctaaagcaact

SEQ ID NO: 492925 - DNA, 33 bp, Homo sapien
atacacattagaactcacagatgggatgtcagc

SEQ ID NO: 492926 - DNA, 33 bp, Homo sapien
atacacattagaactcgcagatgggatgtcagc

SEQ ID NO: 492927 - DNA, 33 bp, Homo sapien
gagcagctatggggtacgagagaagtagatgga

SEQ ID NO: 492928 - DNA, 33 bp, Homo sapien
gagcagctatggggtaggagagaagtagatgga

SEQ ID NO: 492929 - DNA, 33 bp, Homo sapien
ctcaaccattctatagaccccaagctgaccagg

SEQ ID NO: 492930 - DNA, 33 bp, Homo sapien
ctcaaccattctatagtccccaagctgaccagg

SEQ ID NO: 492931 - DNA, 33 bp, Homo sapien
cacatcaagttcaaagccttgattatgatataa

SEQ ID NO: 492932 - DNA, 33 bp, Homo sapien
cacatcaagttcaaagtcttgattatgatataa

SEQ ID NO: 492933 - DNA, 33 bp, Homo sapien
ccacagaggtgttacacgccaggatatcaggga

SEQ ID NO: 492934 - DNA, 33 bp, Homo sapien
ccacagaggtgttacatgccaggatatcaggga

SEQ ID NO: 492935 - DNA, 33 bp, Homo sapien
caagtctaagacgataaacgtgttggcaattct

SEQ ID NO: 492936 - DNA, 33 bp, Homo sapien
caagtctaagacgatagacgtgttggcaattct

SEQ ID NO: 492937 - DNA, 33 bp, Homo sapien
aaggaactagttgacaagtggcattcactgcag

SEQ ID NO: 492938 - DNA, 33 bp, Homo sapien
aaggaactagttgacaggtggcattcactgcag

SEQ ID NO: 492939 - DNA, 33 bp, Homo sapien
atctggcatggttagacgcgatgctgagctttt

SEQ ID NO: 492940 - DNA, 33 bp, Homo sapien
atctggcatggttagatgcgatgctgagctttt

SEQ ID NO: 492941 - DNA, 33 bp, Homo sapien
aaatgtttactctcaactcctattcagtgatga

SEQ ID NO: 492942 - DNA, 33 bp, Homo sapien
aaatgtttactctcaagtcctattcagtgatga

SEQ ID NO: 492943 - DNA, 33 bp, Homo sapien
cacactttagttcacacgagatcttttctttat

SEQ ID NO: 492944 - DNA, 33 bp, Homo sapien
cacactttagttcacatgagatcttttctttat

SEQ ID NO: 492945 - DNA, 33 bp, Homo sapien
ttgttttccacatagaagagaatttgcaaaagt

SEQ ID NO: 492946 - DNA, 33 bp, Homo sapien
ttgttttccacatagatgagaatttgcaaaagt

SEQ ID NO: 492947 - DNA, 33 bp, Homo sapien
gtgatggtggtgcaaagtctgctaattgacagg

SEQ ID NO: 492948 - DNA, 33 bp, Homo sapien
gtgatggtggtgcaaattctgctaattgacagg

SEQ ID NO: 492949 - DNA, 33 bp, Homo sapien
tcaatgtgcaccttgccgagaatttcatcttct

SEQ ID NO: 492950 - DNA, 33 bp, Homo sapien
tcaatgtgcaccttgctgagaatttcatcttct

SEQ ID NO: 492951 - DNA, 33 bp, Homo sapien
cacaagtgggactaagcagggttttgagggtct

SEQ ID NO: 492952 - DNA, 33 bp, Homo sapien
cacaagtgggactaagtagggttttgagggtct

SEQ ID NO: 492953 - DNA, 33 bp, Homo sapien
accccatcctaagtgccccgagcttctgggcaa

SEQ ID NO: 492954 - DNA, 33 bp, Homo sapien
accccatcctaagtgctccgagcttctgggcaa

SEQ ID NO: 492955 - DNA, 33 bp, Homo sapien
gaaaagtgtatttcaaaatgtataaaggctggg

SEQ ID NO: 492956 - DNA, 33 bp, Homo sapien
gaaaagtgtatttcaagatgtataaaggctggg

SEQ ID NO: 492957 - DNA, 33 bp, Homo sapien
cttactgctttgcagtcacatgaaactaattaa

SEQ ID NO: 492958 - DNA, 33 bp, Homo sapien
cttactgctttgcagtgacatgaaactaattaa

SEQ ID NO: 492959 - DNA, 33 bp, Homo sapien
ggagagatctttagaaatcatgtcaaatctcaa

SEQ ID NO: 492960 - DNA, 33 bp, Homo sapien
ggagagatctttagaagtcatgtcaaatctcaa

SEQ ID NO: 492961 - DNA, 33 bp, Homo sapien
tcactgatatccccaaatattaggacaatgatt

SEQ ID NO: 492962 - DNA, 33 bp, Homo sapien
tcactgatatccccaactattaggacaatgatt

SEQ ID NO: 492963 - DNA, 33 bp, Homo sapien
aggccactactgcatcacataggtagtcctcaa

SEQ ID NO: 492964 - DNA, 33 bp, Homo sapien
aggccactactgcatcgcataggtagtcctcaa

SEQ ID NO: 492965 - DNA, 33 bp, Homo sapien
gtgagatgtaaggggacgtctactaagttggct

SEQ ID NO: 492966 - DNA, 33 bp, Homo sapien
gtgagatgtaaggggatgtctactaagttggct

SEQ ID NO: 492967 - DNA, 33 bp, Homo sapien
ttgcccaaaatgaaacaatgaacagcatttgaa

SEQ ID NO: 492968 - DNA, 33 bp, Homo sapien
ttgcccaaaatgaaaccatgaacagcatttgaa

SEQ ID NO: 492969 - DNA, 33 bp, Homo sapien
gaagtcaaatctcttacgtagtgattgatttcc

SEQ ID NO: 492970 - DNA, 33 bp, Homo sapien
gaagtcaaatctcttatgtagtgattgatttcc

SEQ ID NO: 492971 - DNA, 33 bp, Homo sapien
tgctcatgattttataagccagaaattcagaca

SEQ ID NO: 492972 - DNA, 33 bp, Homo sapien
tgctcatgattttataggccagaaattcagaca

SEQ ID NO: 492973 - DNA, 33 bp, Homo sapien
tgcgctgctgggccacagtagatactttgaagc

SEQ ID NO: 492974 - DNA, 33 bp, Homo sapien
tgcgctgctgggccacggtagatactttgaagc

SEQ ID NO: 492975 - DNA, 33 bp, Homo sapien
tcatattatttgaataaccttggcattaactcc

SEQ ID NO: 492976 - DNA, 33 bp, Homo sapien
tcatattatttgaatagccttggcattaactcc

SEQ ID NO: 492977 - DNA, 33 bp, Homo sapien
agctggatggctaacaactggtgatgaccttgg

SEQ ID NO: 492978 - DNA, 33 bp, Homo sapien
agctggatggctaacacctggtgatgaccttgg

SEQ ID NO: 492979 - DNA, 33 bp, Homo sapien
gcaacagtggttcttaaccagggatgattttgt

SEQ ID NO: 492980 - DNA, 33 bp, Homo sapien
gcaacagtggttcttatccagggatgattttgt

SEQ ID NO: 492981 - DNA, 33 bp, Homo sapien
cctgcgttgagctctacgttgttgagttgcgca

SEQ ID NO: 492982 - DNA, 33 bp, Homo sapien
cctgcgttgagctctatgttgttgagttgcgca

SEQ ID NO: 492983 - DNA, 33 bp, Homo sapien
gtttggatagaggggaacttaactattaactac

SEQ ID NO: 492984 - DNA, 33 bp, Homo sapien
gtttggatagaggggatcttaactattaactac

SEQ ID NO: 492985 - DNA, 33 bp, Homo sapien
gtgttccacagtaggccgcatgatgggagcagg

SEQ ID NO: 492986 - DNA, 33 bp, Homo sapien
gtgttccacagtaggctgcatgatgggagcagg

SEQ ID NO: 492987 - DNA, 33 bp, Homo sapien
acatatgccacactgaatattgttctgtgtaaa

SEQ ID NO: 492988 - DNA, 33 bp, Homo sapien
acatatgccacactgagtattgttctgtgtaaa

SEQ ID NO: 492989 - DNA, 33 bp, Homo sapien
gaataactagaatccaaagaattttaaggcctg

SEQ ID NO: 492990 - DNA, 33 bp, Homo sapien
gaataactagaatccagagaattttaaggcctg

SEQ ID NO: 492991 - DNA, 33 bp, Homo sapien
agcaccttcttcccaaatgccatctctttcttt

SEQ ID NO: 492992 - DNA, 33 bp, Homo sapien
agcaccttcttcccaagtgccatctctttcttt

SEQ ID NO: 492993 - DNA, 33 bp, Homo sapien
gtgtaacaaagctcaacgtacaaggatgctgag

SEQ ID NO: 492994 - DNA, 33 bp, Homo sapien
gtgtaacaaagctcaatgtacaaggatgctgag

SEQ ID NO: 492995 - DNA, 33 bp, Homo sapien
aagattgagatgccataaggtaaagttgttctt

SEQ ID NO: 492996 - DNA, 33 bp, Homo sapien
aagattgagatgccatgaggtaaagttgttctt

SEQ ID NO: 492997 - DNA, 33 bp, Homo sapien
aaggcagataatcagaaaggaattcaacctggg

SEQ ID NO: 492998 - DNA, 33 bp, Homo sapien
aaggcagataatcagagaggaattcaacctggg

SEQ ID NO: 492999 - DNA, 33 bp, Homo sapien
tgggttccccatttagcaaagtgaaaatcacag

SEQ ID NO: 493000 - DNA, 33 bp, Homo sapien
tgggttccccatttaggaaagtgaaaatcacag

SEQ ID NO: 493001 - DNA, 33 bp, Homo sapien
cagaccacccatgtgaaataacattcttcccag

SEQ ID NO: 493002 - DNA, 33 bp, Homo sapien
cagaccacccatgtgacataacattcttcccag

SEQ ID NO: 493003 - DNA, 33 bp, Homo sapien
cataggaagaccagcaactccttttttagtacc

SEQ ID NO: 493004 - DNA, 33 bp, Homo sapien
cataggaagaccagcagctccttttttagtacc

SEQ ID NO: 493005 - DNA, 33 bp, Homo sapien
tctaccatccataatgaagcgtgaggaactaag

SEQ ID NO: 493006 - DNA, 33 bp, Homo sapien
tctaccatccataatggagcgtgaggaactaag

SEQ ID NO: 493007 - DNA, 33 bp, Homo sapien
tagcttataaattagtaaatcaggtgtcatcac

SEQ ID NO: 493008 - DNA, 33 bp, Homo sapien
tagcttataaattagtgaatcaggtgtcatcac

SEQ ID NO: 493009 - DNA, 33 bp, Homo sapien
tctccttagttttatccattaatttagcattta

SEQ ID NO: 493010 - DNA, 33 bp, Homo sapien
tctccttagttttatcgattaatttagcattta

SEQ ID NO: 493011 - DNA, 33 bp, Homo sapien
ataagcaataaaaataggcaattcatcactata

SEQ ID NO: 493012 - DNA, 33 bp, Homo sapien
ataagcaataaaaatatgcaattcatcactata

SEQ ID NO: 493013 - DNA, 33 bp, Homo sapien
ctctctgatatagataagttactaatgtagatt

SEQ ID NO: 493014 - DNA, 33 bp, Homo sapien
ctctctgatatagatacgttactaatgtagatt

SEQ ID NO: 493015 - DNA, 33 bp, Homo sapien
tggtatctacagtagaacccttcttttgccctt

SEQ ID NO: 493016 - DNA, 33 bp, Homo sapien
tggtatctacagtagatcccttcttttgccctt

SEQ ID NO: 493017 - DNA, 33 bp, Homo sapien
tcaggtgtggctcagcccttgtttgctggtgaa

SEQ ID NO: 493018 - DNA, 33 bp, Homo sapien
tcaggtgtggctcagctcttgtttgctggtgaa

SEQ ID NO: 493019 - DNA, 33 bp, Homo sapien
ttttactattccaggaaatgcttaccaatgaag

SEQ ID NO: 493020 - DNA, 33 bp, Homo sapien
ttttactattccaggagatgcttaccaatgaag

SEQ ID NO: 493021 - DNA, 33 bp, Homo sapien
aatatgcaccttaggcaaaataaagtaattaca

SEQ ID NO: 493022 - DNA, 33 bp, Homo sapien
aatatgcaccttaggcgaaataaagtaattaca

SEQ ID NO: 493023 - DNA, 33 bp, Homo sapien
agccaccgtgcctggccagtgagttgatttttt

SEQ ID NO: 493024 - DNA, 33 bp, Homo sapien
agccaccgtgcctggcgagtgagttgatttttt

SEQ ID NO: 493025 - DNA, 33 bp, Homo sapien
acaagtcagccgggacaagtctaaaatggagca

SEQ ID NO: 493026 - DNA, 33 bp, Homo sapien
acaagtcagccgggacgagtctaaaatggagca

SEQ ID NO: 493027 - DNA, 33 bp, Homo sapien
atttacgacgaaagaaagtagtttcagttttta

SEQ ID NO: 493028 - DNA, 33 bp, Homo sapien
atttacgacgaaagaaggtagtttcagttttta

SEQ ID NO: 493029 - DNA, 33 bp, Homo sapien
caaggcagagcagaaaagaggagcaaggaccgt

SEQ ID NO: 493030 - DNA, 33 bp, Homo sapien
caaggcagagcagaaaggaggagcaaggaccgt

SEQ ID NO: 493031 - DNA, 33 bp, Homo sapien
tcaagataaactgcaacgtcttgtaataaaact

SEQ ID NO: 493032 - DNA, 33 bp, Homo sapien
tcaagataaactgcaatgtcttgtaataaaact

SEQ ID NO: 493033 - DNA, 33 bp, Homo sapien
atttatctccgggttcactattctgtttcattt

SEQ ID NO: 493034 - DNA, 33 bp, Homo sapien
atttatctccgggttcgctattctgtttcattt

SEQ ID NO: 493035 - DNA, 33 bp, Homo sapien
agagactgcgtcttaacagcattatttgagtcc

SEQ ID NO: 493036 - DNA, 33 bp, Homo sapien
agagactgcgtcttaatagcattatttgagtcc

SEQ ID NO: 493037 - DNA, 33 bp, Homo sapien
ttccacttttctgtgaaagtcagaccatactca

SEQ ID NO: 493038 - DNA, 33 bp, Homo sapien
ttccacttttctgtgatagtcagaccatactca

SEQ ID NO: 493039 - DNA, 33 bp, Homo sapien; identical to SEQ ID NO: 493037

SEQ ID NO: 493040 - DNA, 33 bp, Homo sapien; identical to SEQ ID NO: 493038

SEQ ID NO: 493041 - DNA, 33 bp, Homo sapien
ttggaggatcaatttaccagaaagtttgtgaag

SEQ ID NO: 493042 - DNA, 33 bp, Homo sapien
ttggaggatcaatttatcagaaagtttgtgaag

SEQ ID NO: 493043 - DNA, 33 bp, Homo sapien; identical to SEQ ID NO: 493041

SEQ ID NO: 493044 - DNA, 33 bp, Homo sapien; identical to SEQ ID NO: 493042

SEQ ID NO: 493045 - DNA, 33 bp, Homo sapien
caacaaatcgttgacaggattaatgtgtgtgcg

SEQ ID NO: 493046 - DNA, 33 bp, Homo sapien
caacaaatcgttgacatgattaatgtgtgtgcg

SEQ ID NO: 493047 - DNA, 33 bp, Homo sapien
gcaaataatcacatcactcaaagtcttccaatt

SEQ ID NO: 493048 - DNA, 33 bp, Homo sapien
gcaaataatcacatcattcaaagtcttccaatt

SEQ ID NO: 493049 - DNA, 33 bp, Homo sapien
gtgtgttctggaaaaacgcctattgatactaga

SEQ ID NO: 493050 - DNA, 33 bp, Homo sapien
gtgtgttctggaaaaatgcctattgatactaga

SEQ ID NO: 493051 - DNA, 33 bp, Homo sapien
taattctggtatctcacggaaatgtgtcaaatg

SEQ ID NO: 493052 - DNA, 33 bp, Homo sapien
taattctggtatctcatggaaatgtgtcaaatg

SEQ ID NO: 493053 - DNA, 33 bp, Homo sapien
aaaaattaaaaagcagaaattctggattaaagt

SEQ ID NO: 493054 - DNA, 33 bp, Homo sapien
aaaaattaaaaagcaggaattctggattaaagt

SEQ ID NO: 493055 - DNA, 33 bp, Homo sapien
gagatgaatcccgcggcatctcagaggaggagg

SEQ ID NO: 493056 - DNA, 33 bp, Homo sapien
gagatgaatcccgcggtatctcagaggaggagg

SEQ ID NO: 493057 - DNA, 33 bp, Homo sapien
ctgagctacttgtggacacggttcctcagcatg

SEQ ID NO: 493058 - DNA, 33 bp, Homo sapien
ctgagctacttgtggatacggttcctcagcatg

SEQ ID NO: 493059 - DNA, 33 bp, Homo sapien
gtgttgaacattgtaagaagctctcagtactta

SEQ ID NO: 493060 - DNA, 33 bp, Homo sapien
gtgttgaacattgtaataagctctcagtactta

SEQ ID NO: 493061 - DNA, 33 bp, Homo sapien
gcaaaatgccagggacagtaatggttccacatc

SEQ ID NO: 493062 - DNA, 33 bp, Homo sapien
gcaaaatgccagggacggtaatggttccacatc

SEQ ID NO: 493063 - DNA, 33 bp, Homo sapien
atagcctgatcattgccgacccaacctgacttg

SEQ ID NO: 493064 - DNA, 33 bp, Homo sapien
atagcctgatcattgctgacccaacctgacttg

SEQ ID NO: 493065 - DNA, 33 bp, Homo sapien
gcctctcatgggtcagcctcatttctgcaaacc

SEQ ID NO: 493066 - DNA, 33 bp, Homo sapien
gcctctcatgggtcagtctcatttctgcaaacc

SEQ ID NO: 493067 - DNA, 33 bp, Homo sapien
caaaacagctaaaaaccctttcctgcgttagca

SEQ ID NO: 493068 - DNA, 33 bp, Homo sapien
caaaacagctaaaaactctttcctgcgttagca

SEQ ID NO: 493069 - DNA, 33 bp, Homo sapien
ttggctcagaagtagaaaatggattctggcggg

SEQ ID NO: 493070 - DNA, 33 bp, Homo sapien
ttggctcagaagtagagaatggattctggcggg

SEQ ID NO: 493071 - DNA, 33 bp, Homo sapien
ggattactccttactcggaaacccatctccttt

SEQ ID NO: 493072 - DNA, 33 bp, Homo sapien
ggattactccttactctgaaacccatctccttt

SEQ ID NO: 493073 - DNA, 33 bp, Homo sapien
tatctagcatttaccacgtactaagtataatcc

SEQ ID NO: 493074 - DNA, 33 bp, Homo sapien
tatctagcatttaccatgtactaagtataatcc

SEQ ID NO: 493075 - DNA, 33 bp, Homo sapien
ttttgctcataacacaactaaagaatatggtat

SEQ ID NO: 493076 - DNA, 33 bp, Homo sapien
ttttgctcataacacacctaaagaatatggtat

SEQ ID NO: 493077 - DNA, 33 bp, Homo sapien
acaatgactggggatacgaccttcatccaggaa

SEQ ID NO: 493078 - DNA, 33 bp, Homo sapien
acaatgactggggatatgaccttcatccaggaa

SEQ ID NO: 493079 - DNA, 33 bp, Homo sapien
tcagattactaaacaaaattaactctcaccaca

SEQ ID NO: 493080 - DNA, 33 bp, Homo sapien
tcagattactaaacaagattaactctcaccaca

SEQ ID NO: 493081 - DNA, 33 bp, Homo sapien
aatttaccttaatgcaacaggtagaaatggggg

SEQ ID NO: 493082 - DNA, 33 bp, Homo sapien
aatttaccttaatgcagcaggtagaaatggggg

SEQ ID NO: 493083 - DNA, 33 bp, Homo sapien
gcacctcaccaagaaaagaagcttgctgtgtgt

SEQ ID NO: 493084 - DNA, 33 bp, Homo sapien
gcacctcaccaagaaatgaagcttgctgtgtgt

SEQ ID NO: 493085 - DNA, 33 bp, Homo sapien
actttaaatgcttgagacacatcaggggtggca

SEQ ID NO: 493086 - DNA, 33 bp, Homo sapien
actttaaatgcttgaggcacatcaggggtggca

SEQ ID NO: 493087 - DNA, 33 bp, Homo sapien
actttctccacagcaaagtcctctaagagatac

SEQ ID NO: 493088 - DNA, 33 bp, Homo sapien
actttctccacagcaatgtcctctaagagatac

SEQ ID NO: 493089 - DNA, 33 bp, Homo sapien
gggcttgcatagctacaaatgggaccagtaaca

SEQ ID NO: 493090 - DNA, 33 bp, Homo sapien
gggcttgcatagctacgaatgggaccagtaaca

SEQ ID NO: 493091 - DNA, 33 bp, Homo sapien
tggtttggcaacccagaatttaaccctcccttg

SEQ ID NO: 493092 - DNA, 33 bp, Homo sapien
tggtttggcaacccaggatttaaccctcccttg

SEQ ID NO: 493093 - DNA, 33 bp, Homo sapien
gggaacacaacttgggccatgctgctttagagc

SEQ ID NO: 493094 - DNA, 33 bp, Homo sapien
gggaacacaacttgggtcatgctgctttagagc

SEQ ID NO: 493095 - DNA, 33 bp, Homo sapien
ctgctttgagaagtacagaagtgcagacccaca

SEQ ID NO: 493096 - DNA, 33 bp, Homo sapien
ctgctttgagaagtaccgaagtgcagacccaca

SEQ ID NO: 493097 - DNA, 33 bp, Homo sapien
gggcaggaattctacaatgctgaccggaacaat

SEQ ID NO: 493098 - DNA, 33 bp, Homo sapien
gggcaggaattctacattgctgaccggaacaat

SEQ ID NO: 493099 - DNA, 33 bp, Homo sapien
atgagccctcaaggtaaagatcgcgtgtctcct

SEQ ID NO: 493100 - DNA, 33 bp, Homo sapien
atgagccctcaaggtagagatcgcgtgtctcct

SEQ ID NO: 493101 - DNA, 33 bp, Homo sapien
aaggagagaagctcaagagactggttttatgag

SEQ ID NO: 493102 - DNA, 33 bp, Homo sapien
aaggagagaagctcaatagactggttttatgag

SEQ ID NO: 493103 - DNA, 33 bp, Homo sapien
atcccagtcgccagccacaggaattagtcagtt

SEQ ID NO: 493104 - DNA, 33 bp, Homo sapien
atcccagtcgccagcctcaggaattagtcagtt

SEQ ID NO: 493105 - DNA, 33 bp, Homo sapien
agatttctagctcccaatcaattcctgcctagt

SEQ ID NO: 493106 - DNA, 33 bp, Homo sapien
agatttctagctcccagtcaattcctgcctagt

SEQ ID NO: 493107 - DNA, 33 bp, Homo sapien
gagtgggatcaccagcaaggaaagaatagctcc

SEQ ID NO: 493108 - DNA, 33 bp, Homo sapien
gagtgggatcaccagcgaggaaagaatagctcc

SEQ ID NO: 493109 - DNA, 33 bp, Homo sapien
agtagagaaatctgacagatactaccttaccac

SEQ ID NO: 493110 - DNA, 33 bp, Homo sapien
agtagagaaatctgacggatactaccttaccac

SEQ ID NO: 493111 - DNA, 33 bp, Homo sapien
tactcaagagaaatgaaaagctacattcacatg

SEQ ID NO: 493112 - DNA, 33 bp, Homo sapien
tactcaagagaaatgagaagctacattcacatg

SEQ ID NO: 493113 - DNA, 33 bp, Homo sapien
atctggagtgggaaaactaagactgcaaatagt

SEQ ID NO: 493114 - DNA, 33 bp, Homo sapien
atctggagtgggaaaattaagactgcaaatagt

SEQ ID NO: 493115 - DNA, 33 bp, Homo sapien
tggtttgtatactttacccatgtcttggcttga

SEQ ID NO: 493116 - DNA, 33 bp, Homo sapien
tggtttgtatactttatccatgtcttggcttga

SEQ ID NO: 493117 - DNA, 33 bp, Homo sapien
ttttctcacagttctaaaggctacaagtcagaa

SEQ ID NO: 493118 - DNA, 33 bp, Homo sapien
ttttctcacagttctagaggctacaagtcagaa

SEQ ID NO: 493119 - DNA, 33 bp, Homo sapien
gagtcatggcagcaacacagagaaaacctcgtt

SEQ ID NO: 493120 - DNA, 33 bp, Homo sapien
gagtcatggcagcaacgcagagaaaacctcgtt

SEQ ID NO: 493121 - DNA, 33 bp, Homo sapien
gagctacagtgaaacaatattggaactatcttt

SEQ ID NO: 493122 - DNA, 33 bp, Homo sapien
gagctacagtgaaacagtattggaactatcttt

SEQ ID NO: 493123 - DNA, 33 bp, Homo sapien
aacatgggccctacccccaagaagcctgcaatc

SEQ ID NO: 493124 - DNA, 33 bp, Homo sapien
aacatgggccctaccctcaagaagcctgcaatc

SEQ ID NO: 493125 - DNA, 33 bp, Homo sapien
gctttagttgacctcccagtttgtctcactgtt

SEQ ID NO: 493126 - DNA, 33 bp, Homo sapien
gctttagttgacctccgagtttgtctcactgtt

SEQ ID NO: 493127 - DNA, 33 bp, Homo sapien
cctttatccacaggtgcacttagaaactgctgg

SEQ ID NO: 493128 - DNA, 33 bp, Homo sapien
cctttatccacaggtgtacttagaaactgctgg

SEQ ID NO: 493129 - DNA, 33 bp, Homo sapien
tcaggtatcaaagggcagcattgtgctcaggga

SEQ ID NO: 493130 - DNA, 33 bp, Homo sapien
tcaggtatcaaagggccgcattgtgctcaggga

SEQ ID NO: 493131 - DNA, 33 bp, Homo sapien
ccagtgcaaccagcccaaccaggcgctcctcat

SEQ ID NO: 493132 - DNA, 33 bp, Homo sapien
ccagtgcaaccagcccgaccaggcgctcctcat

SEQ ID NO: 493133 - DNA, 33 bp, Homo sapien
ctattgatatactcaaagacctgaatgaatctc

SEQ ID NO: 493134 - DNA, 33 bp, Homo sapien
ctattgatatactcaacgacctgaatgaatctc

SEQ ID NO: 493135 - DNA, 33 bp, Homo sapien
aatcaaagcagaaatacgtaagcctttaaagat

SEQ ID NO: 493136 - DNA, 33 bp, Homo sapien
aatcaaagcagaaatatgtaagcctttaaagat

SEQ ID NO: 493137 - DNA, 33 bp, Homo sapien
gtttccactgaggctcaagtttattaatcctgc

SEQ ID NO: 493138 - DNA, 33 bp, Homo sapien
gtttccactgaggctcgagtttattaatcctgc

SEQ ID NO: 493139 - DNA, 33 bp, Homo sapien
tgttgataaaatattcaaaagtaggaacccaat

SEQ ID NO: 493140 - DNA, 33 bp, Homo sapien
tgttgataaaatattcgaaagtaggaacccaat

SEQ ID NO: 493141 - DNA, 33 bp, Homo sapien
caaatcgtgcacttgacactggtgagttttatg

SEQ ID NO: 493142 - DNA, 33 bp, Homo sapien
caaatcgtgcacttgatactggtgagttttatg

SEQ ID NO: 493143 - DNA, 33 bp, Homo sapien
ttttgaagtattgtgcacacagatcttttacca

SEQ ID NO: 493144 - DNA, 33 bp, Homo sapien
ttttgaagtattgtgcccacagatcttttacca

SEQ ID NO: 493145 - DNA, 33 bp, Homo sapien
agaaagaaagacacaacgattccagagagagga

SEQ ID NO: 493146 - DNA, 33 bp, Homo sapien
agaaagaaagacacaaggattccagagagagga

SEQ ID NO: 493147 - DNA, 33 bp, Homo sapien
tcctacagtttggcaacactcataggacaatcc

SEQ ID NO: 493148 - DNA, 33 bp, Homo sapien
tcctacagtttggcaagactcataggacaatcc

SEQ ID NO: 493149 - DNA, 33 bp, Homo sapien
ggctccaattcccacaatgcctaaaattagtgg

SEQ ID NO: 493150 - DNA, 33 bp, Homo sapien
ggctccaattcccacagtgcctaaaattagtgg

SEQ ID NO: 493151 - DNA, 33 bp, Homo sapien
ttaactgttaagctctcacttcccacatggaat

SEQ ID NO: 493152 - DNA, 33 bp, Homo sapien
ttaactgttaagctcttacttcccacatggaat

SEQ ID NO: 493153 - DNA, 33 bp, Homo sapien
agccctgaaaaccatccataaatgactaaaagc

SEQ ID NO: 493154 - DNA, 33 bp, Homo sapien
agccctgaaaaccatcgataaatgactaaaagc

SEQ ID NO: 493155 - DNA, 33 bp, Homo sapien
tgtcttacgttcagagaagaagtccattctagc

SEQ ID NO: 493156 - DNA, 33 bp, Homo sapien
tgtcttacgttcagagtagaagtccattctagc

SEQ ID NO: 493157 - DNA, 33 bp, Homo sapien
aggtgagtgggatggacaggtcttagttgtagg

SEQ ID NO: 493158 - DNA, 33 bp, Homo sapien
aggtgagtgggatggagaggtcttagttgtagg

SEQ ID NO: 493159 - DNA, 33 bp, Homo sapien
tggatgagttcttcacacggatattaaaatctc

SEQ ID NO: 493160 - DNA, 33 bp, Homo sapien
tggatgagttcttcacgcggatattaaaatctc

SEQ ID NO: 493161 - DNA, 33 bp, Homo sapien
ggttcagcttgaaatcacaaaaggacaatatac

SEQ ID NO: 493162 - DNA, 33 bp, Homo sapien
ggttcagcttgaaatcgcaaaaggacaatatac

SEQ ID NO: 493163 - DNA, 33 bp, Homo sapien
cccaggacaccctgagaaaaagagaaatttccc

SEQ ID NO: 493164 - DNA, 33 bp, Homo sapien
cccaggacaccctgagcaaaagagaaatttccc

SEQ ID NO: 493165 - DNA, 33 bp, Homo sapien
tttatcagaaaagtcacgctgagccctttggta

SEQ ID NO: 493166 - DNA, 33 bp, Homo sapien
tttatcagaaaagtcatgctgagccctttggta

SEQ ID NO: 493167 - DNA, 33 bp, Homo sapien
acccacttctcttccacgtcttgatccatatac

SEQ ID NO: 493168 - DNA, 33 bp, Homo sapien
acccacttctcttccatgtcttgatccatatac

SEQ ID NO: 493169 - DNA, 33 bp, Homo sapien
ttacatgggtaagttacgtggtcacagataatt

SEQ ID NO: 493170 - DNA, 33 bp, Homo sapien
ttacatgggtaagttatgtggtcacagataatt

SEQ ID NO: 493171 - DNA, 33 bp, Homo sapien
agcttaatcttggacacgagaaactgaagaggc

SEQ ID NO: 493172 - DNA, 33 bp, Homo sapien
agcttaatcttggacatgagaaactgaagaggc

SEQ ID NO: 493173 - DNA, 33 bp, Homo sapien
ggtcacccaagtggtggattttcataacattga

SEQ ID NO: 493174 - DNA, 33 bp, Homo sapien
ggtcacccaagtggtgtattttcataacattga

SEQ ID NO: 493175 - DNA, 33 bp, Homo sapien
ttgatctcaatggctacgtctcttaacagtaaa

SEQ ID NO: 493176 - DNA, 33 bp, Homo sapien
ttgatctcaatggctaggtctcttaacagtaaa

SEQ ID NO: 493177 - DNA, 33 bp, Homo sapien
ctcagagggtactagacatcttttctgaaaccc

SEQ ID NO: 493178 - DNA, 33 bp, Homo sapien
ctcagagggtactagagatcttttctgaaaccc

SEQ ID NO: 493179 - DNA, 33 bp, Homo sapien
ttccttctaacaagtcaaatgtttcagttttac

SEQ ID NO: 493180 - DNA, 33 bp, Homo sapien
ttccttctaacaagtcgaatgtttcagttttac

SEQ ID NO: 493181 - DNA, 33 bp, Homo sapien
gagagtaaactttggaatatcaaataattctag

SEQ ID NO: 493182 - DNA, 33 bp, Homo sapien
gagagtaaactttggactatcaaataattctag

SEQ ID NO: 493183 - DNA, 33 bp, Homo sapien
cacagtcatttatgcaactcaggctaaaccact

SEQ ID NO: 493184 - DNA, 33 bp, Homo sapien
cacagtcatttatgcagctcaggctaaaccact

SEQ ID NO: 493185 - DNA, 33 bp, Homo sapien
ttccaatcttagaaaccgaaaagatcaactgca

SEQ ID NO: 493186 - DNA, 33 bp, Homo sapien
ttccaatcttagaaactgaaaagatcaactgca

SEQ ID NO: 493187 - DNA, 33 bp, Homo sapien
tctgtacctatggctaaaacatttgtacatata

SEQ ID NO: 493188 - DNA, 33 bp, Homo sapien
tctgtacctatggctacaacatttgtacatata

SEQ ID NO: 493189 - DNA, 33 bp, Homo sapien
ctactgagacttcctacccaagaatacagtttt

SEQ ID NO: 493190 - DNA, 33 bp, Homo sapien
ctactgagacttcctatccaagaatacagtttt

SEQ ID NO: 493191 - DNA, 33 bp, Homo sapien
atgtcaaagaccttacaatgggacatgatgatc

SEQ ID NO: 493192 - DNA, 33 bp, Homo sapien
atgtcaaagaccttacgatgggacatgatgatc

SEQ ID NO: 493193 - DNA, 33 bp, Homo sapien
gttgtaaatatcaacaatctaatatttggaatt

SEQ ID NO: 493194 - DNA, 33 bp, Homo sapien
gttgtaaatatcaacagtctaatatttggaatt

SEQ ID NO: 493195 - DNA, 33 bp, Homo sapien
agaacttctcacaataagcagcatataaaatca

SEQ ID NO: 493196 - DNA, 33 bp, Homo sapien
agaacttctcacaataggcagcatataaaatca

SEQ ID NO: 493197 - DNA, 33 bp, Homo sapien
gcccgctgcgtctcaaatccatcagaaagaaag

SEQ ID NO: 493198 - DNA, 33 bp, Homo sapien
gcccgctgcgtctcaagtccatcagaaagaaag

SEQ ID NO: 493199 - DNA, 33 bp, Homo sapien
cagcacctttgacctacggcagcggttctagag

SEQ ID NO: 493200 - DNA, 33 bp, Homo sapien
cagcacctttgacctatggcagcggttctagag

SEQ ID NO: 493201 - DNA, 33 bp, Homo sapien
gaatatgtaaaaattccattagaagcacagcca

SEQ ID NO: 493202 - DNA, 33 bp, Homo sapien
gaatatgtaaaaattcgattagaagcacagcca

SEQ ID NO: 493203 - DNA, 33 bp, Homo sapien
ctgtgcacagataactaagcatctttgccctaa

SEQ ID NO: 493204 - DNA, 33 bp, Homo sapien
ctgtgcacagataactgagcatctttgccctaa

SEQ ID NO: 493205 - DNA, 33 bp, Homo sapien
gttatggattgaattgcaagcctccccaagatt

SEQ ID NO: 493206 - DNA, 33 bp, Homo sapien
gttatggattgaattgtaagcctccccaagatt

SEQ ID NO: 493207 - DNA, 33 bp, Homo sapien
ttaaagaggtaaaaatcagtggcttatccctgc

SEQ ID NO: 493208 - DNA, 33 bp, Homo sapien
ttaaagaggtaaaaattagtggcttatccctgc

SEQ ID NO: 493209 - DNA, 33 bp, Homo sapien
aaactgtatcctccaaaactggaaatgagagaa

SEQ ID NO: 493210 - DNA, 33 bp, Homo sapien
aaactgtatcctccaatactggaaatgagagaa

SEQ ID NO: 493211 - DNA, 33 bp, Homo sapien
gatagaggactctgaacccactcaaagctgaag

SEQ ID NO: 493212 - DNA, 33 bp, Homo sapien
gatagaggactctgaatccactcaaagctgaag

SEQ ID NO: 493213 - DNA, 33 bp, Homo sapien
gcaagccttagactagaataacttcttaaactt

SEQ ID NO: 493214 - DNA, 33 bp, Homo sapien
gcaagccttagactaggataacttcttaaactt

SEQ ID NO: 493215 - DNA, 33 bp, Homo sapien
agaaacgttgaaataacgtattgccagtagatc

SEQ ID NO: 493216 - DNA, 33 bp, Homo sapien
agaaacgttgaaataatgtattgccagtagatc

SEQ ID NO: 493217 - DNA, 33 bp, Homo sapien
tttcaaagcaatagctaaaagttgaaagcctga

SEQ ID NO: 493218 - DNA, 33 bp, Homo sapien
tttcaaagcaatagctgaaagttgaaagcctga

SEQ ID NO: 493219 - DNA, 33 bp, Homo sapien
tgaccttctctttacccctggtgctcgactata

SEQ ID NO: 493220 - DNA, 33 bp, Homo sapien
tgaccttctctttacctctggtgctcgactata

SEQ ID NO: 493221 - DNA, 33 bp, Homo sapien
gcatttggattattaccggttttgcttttattt

SEQ ID NO: 493222 - DNA, 33 bp, Homo sapien
gcatttggattattactggttttgcttttattt

SEQ ID NO: 493223 - DNA, 33 bp, Homo sapien
gcagcacttgacatgacaaagacagtcacaaaa

SEQ ID NO: 493224 - DNA, 33 bp, Homo sapien
gcagcacttgacatgataaagacagtcacaaaa

SEQ ID NO: 493225 - DNA, 33 bp, Homo sapien
tcatcttccatgtagaaaataaaacatggcttc

SEQ ID NO: 493226 - DNA, 33 bp, Homo sapien
tcatcttccatgtagagaataaaacatggcttc

SEQ ID NO: 493227 - DNA, 33 bp, Homo sapien
atgtcactaggggaaaatcatttattcatttat

SEQ ID NO: 493228 - DNA, 33 bp, Homo sapien
atgtcactaggggaaactcatttattcatttat

SEQ ID NO: 493229 - DNA, 33 bp, Homo sapien
acctattgaaaaaaaggagctctccagcctaga

SEQ ID NO: 493230 - DNA, 33 bp, Homo sapien
acctattgaaaaaaagtagctctccagcctaga

SEQ ID NO: 493231 - DNA, 33 bp, Homo sapien
ttttatggcaccacgacgatctggtttactgct

SEQ ID NO: 493232 - DNA, 33 bp, Homo sapien
ttttatggcaccacgatgatctggtttactgct

SEQ ID NO: 493233 - DNA, 33 bp, Homo sapien
ataaccaccacccagaccaagatataaaacact

SEQ ID NO: 493234 - DNA, 33 bp, Homo sapien
ataaccaccacccagatcaagatataaaacact

SEQ ID NO: 493235 - DNA, 33 bp, Homo sapien
agaccaagcaaagggcaagtccttgaaaattta

SEQ ID NO: 493236 - DNA, 33 bp, Homo sapien
agaccaagcaaagggcgagtccttgaaaattta

SEQ ID NO: 493237 - DNA, 33 bp, Homo sapien
ggttgtattagcagcaagtttcattaaaaaggg

SEQ ID NO: 493238 - DNA, 33 bp, Homo sapien
ggttgtattagcagcacgtttcattaaaaaggg

SEQ ID NO: 493239 - DNA, 33 bp, Homo sapien
acagtgaccaaaatatcaaagccacgcaaacca

SEQ ID NO: 493240 - DNA, 33 bp, Homo sapien
acagtgaccaaaatatgaaagccacgcaaacca

SEQ ID NO: 493241 - DNA, 33 bp, Homo sapien
atgctgcttgtcacaggaccacattttgagtag

SEQ ID NO: 493242 - DNA, 33 bp, Homo sapien
atgctgcttgtcacagtaccacattttgagtag

SEQ ID NO: 493243 - DNA, 33 bp, Homo sapien
ttctctctcctgccgcactgggaagaggtgctt

SEQ ID NO: 493244 - DNA, 33 bp, Homo sapien
ttctctctcctgccgcgctgggaagaggtgctt

SEQ ID NO: 493245 - DNA, 33 bp, Homo sapien
tacaggcttatgcctaactgtgattcaaatgaa

SEQ ID NO: 493246 - DNA, 33 bp, Homo sapien
tacaggcttatgcctagctgtgattcaaatgaa

SEQ ID NO: 493247 - DNA, 33 bp, Homo sapien
actgcagagaacagacaattcttggaacggtgg

SEQ ID NO: 493248 - DNA, 33 bp, Homo sapien
actgcagagaacagacgattcttggaacggtgg

SEQ ID NO: 493249 - DNA, 33 bp, Homo sapien
atactttagcatttcaatcaataagaaaaccaa

SEQ ID NO: 493250 - DNA, 33 bp, Homo sapien
atactttagcatttcagtcaataagaaaaccaa

SEQ ID NO: 493251 - DNA, 33 bp, Homo sapien
tctgcatacatttcaccggctatgactagtcac

SEQ ID NO: 493252 - DNA, 33 bp, Homo sapien
tctgcatacatttcactggctatgactagtcac

SEQ ID NO: 493253 - DNA, 33 bp, Homo sapien
agactctggccattcccgattccatgctgacca

SEQ ID NO: 493254 - DNA, 33 bp, Homo sapien
agactctggccattcctgattccatgctgacca

SEQ ID NO: 493255 - DNA, 33 bp, Homo sapien
ctggaataaggaacccagatgttaatagtagat

SEQ ID NO: 493256 - DNA, 33 bp, Homo sapien
ctggaataaggaacccggatgttaatagtagat

SEQ ID NO: 493257 - DNA, 33 bp, Homo sapien
cttatgggacctaatacctaacctataaaagac

SEQ ID NO: 493258 - DNA, 33 bp, Homo sapien
cttatgggacctaatatctaacctataaaagac

SEQ ID NO: 493259 - DNA, 33 bp, Homo sapien
ttgtgaattcagcaaacctttgataccagacct

SEQ ID NO: 493260 - DNA, 33 bp, Homo sapien
ttgtgaattcagcaaatctttgataccagacct

SEQ ID NO: 493261 - DNA, 33 bp, Homo sapien
agttttcttactttccaaggagtcctcaaattc

SEQ ID NO: 493262 - DNA, 33 bp, Homo sapien
agttttcttactttccgaggagtcctcaaattc

SEQ ID NO: 493263 - DNA, 33 bp, Homo sapien
tgagacaataaaagtccctggaaaaatgtaagg

SEQ ID NO: 493264 - DNA, 33 bp, Homo sapien
tgagacaataaaagtctctggaaaaatgtaagg

SEQ ID NO: 493265 - DNA, 33 bp, Homo sapien
aagttaatctaaaaagaagcctccgtgataatt

SEQ ID NO: 493266 - DNA, 33 bp, Homo sapien
aagttaatctaaaaaggagcctccgtgataatt

SEQ ID NO: 493267 - DNA, 33 bp, Homo sapien
tcaacaatcccagaataagtaagtgagcatgca

SEQ ID NO: 493268 - DNA, 33 bp, Homo sapien
tcaacaatcccagaatgagtaagtgagcatgca

SEQ ID NO: 493269 - DNA, 33 bp, Homo sapien
ggtaggccaataaaaacaaagtcactctgaccc

SEQ ID NO: 493270 - DNA, 33 bp, Homo sapien
ggtaggccaataaaaagaaagtcactctgaccc

SEQ ID NO: 493271 - DNA, 33 bp, Homo sapien
agccagaagagaaggaaaacacaagcagaaaac

SEQ ID NO: 493272 - DNA, 33 bp, Homo sapien
agccagaagagaaggacaacacaagcagaaaac

SEQ ID NO: 493273 - DNA, 33 bp, Homo sapien
gagcacaggagggtaggacacattaaagcacca

SEQ ID NO: 493274 - DNA, 33 bp, Homo sapien
gagcacaggagggtagtacacattaaagcacca

SEQ ID NO: 493275 - DNA, 33 bp, Homo sapien
aaagcttccgttctggaagtatcggtcaagaaa

SEQ ID NO: 493276 - DNA, 33 bp, Homo sapien
aaagcttccgttctggtagtatcggtcaagaaa

SEQ ID NO: 493277 - DNA, 33 bp, Homo sapien
ttccattaacacattccattcagtcatttgaaa

SEQ ID NO: 493278 - DNA, 33 bp, Homo sapien
ttccattaacacattctattcagtcatttgaaa

SEQ ID NO: 493279 - DNA, 33 bp, Homo sapien
ttatctgaagaaacgaacttttgcttgattgtt

SEQ ID NO: 493280 - DNA, 33 bp, Homo sapien
ttatctgaagaaacgaccttttgcttgattgtt

SEQ ID NO: 493281 - DNA, 33 bp, Homo sapien
aagccaactttttcaccggatgagcaagccact

SEQ ID NO: 493282 - DNA, 33 bp, Homo sapien
aagccaactttttcactggatgagcaagccact

SEQ ID NO: 493283 - DNA, 33 bp, Homo sapien
ttacgacatatttttaccacatctatggtttat

SEQ ID NO: 493284 - DNA, 33 bp, Homo sapien
ttacgacatatttttagcacatctatggtttat

SEQ ID NO: 493285 - DNA, 33 bp, Homo sapien
agctgttgggttgagacaatgaatataaaattg

SEQ ID NO: 493286 - DNA, 33 bp, Homo sapien
agctgttgggttgagataatgaatataaaattg

SEQ ID NO: 493287 - DNA, 33 bp, Homo sapien
gccttgagaaattgcaaaatatcagtccatatg

SEQ ID NO: 493288 - DNA, 33 bp, Homo sapien
gccttgagaaattgcacaatatcagtccatatg

SEQ ID NO: 493289 - DNA, 33 bp, Homo sapien
cagttttatttggtggaacaataggaatccatc

SEQ ID NO: 493290 - DNA, 33 bp, Homo sapien
cagttttatttggtgggacaataggaatccatc

SEQ ID NO: 493291 - DNA, 33 bp, Homo sapien
agaactctagtgacaaattctgttggtctattg

SEQ ID NO: 493292 - DNA, 33 bp, Homo sapien
agaactctagtgacaagttctgttggtctattg

SEQ ID NO: 493293 - DNA, 33 bp, Homo sapien
tgcaaatatattcttccagtctgcaacttacct

SEQ ID NO: 493294 - DNA, 33 bp, Homo sapien
tgcaaatatattcttctagtctgcaacttacct

SEQ ID NO: 493295 - DNA, 33 bp, Homo sapien
attttacatccttgtgaaaatccattgatcata

SEQ ID NO: 493296 - DNA, 33 bp, Homo sapien
attttacatccttgtggaaatccattgatcata

SEQ ID NO: 493297 - DNA, 33 bp, Homo sapien
tagcaccaagacattacggttttcttcaaatgt

SEQ ID NO: 493298 - DNA, 33 bp, Homo sapien
tagcaccaagacattatggttttcttcaaatgt

SEQ ID NO: 493299 - DNA, 33 bp, Homo sapien
tggagagcaagaaaaacagtcagcagacaaaga

SEQ ID NO: 493300 - DNA, 33 bp, Homo sapien
tggagagcaagaaaaatagtcagcagacaaaga

SEQ ID NO: 493301 - DNA, 33 bp, Homo sapien
gccattaccattttccaccttgcacagtatgga

SEQ ID NO: 493302 - DNA, 33 bp, Homo sapien
gccattaccattttccgccttgcacagtatgga

SEQ ID NO: 493303 - DNA, 33 bp, Homo sapien
gaaaagtatccagtacaatcaccaagctcagtg

SEQ ID NO: 493304 - DNA, 33 bp, Homo sapien
gaaaagtatccagtacgatcaccaagctcagtg

SEQ ID NO: 493305 - DNA, 33 bp, Homo sapien
agtggtgacaggctaacgtctcccagagtgact

SEQ ID NO: 493306 - DNA, 33 bp, Homo sapien
agtggtgacaggctaatgtctcccagagtgact

SEQ ID NO: 493307 - DNA, 33 bp, Homo sapien
atgtactaggcaacaaatcaagtgtcttttgat

SEQ ID NO: 493308 - DNA, 33 bp, Homo sapien
atgtactaggcaacaagtcaagtgtcttttgat

SEQ ID NO: 493309 - DNA, 33 bp, Homo sapien
ggattttatttttcccaagaaaagatgccaatt

SEQ ID NO: 493310 - DNA, 33 bp, Homo sapien
ggattttatttttcccgagaaaagatgccaatt

SEQ ID NO: 493311 - DNA, 33 bp, Homo sapien
cttctctctgaaataaagtcttctccgttgtaa

SEQ ID NO: 493312 - DNA, 33 bp, Homo sapien
cttctctctgaaataacgtcttctccgttgtaa

SEQ ID NO: 493313 - DNA, 33 bp, Homo sapien
gcacttctatcagacaaccttgtaggcaaactt

SEQ ID NO: 493314 - DNA, 33 bp, Homo sapien
gcacttctatcagacagccttgtaggcaaactt

SEQ ID NO: 493315 - DNA, 33 bp, Homo sapien
atcaaacagactccaacggattaaccatgatag

SEQ ID NO: 493316 - DNA, 33 bp, Homo sapien
atcaaacagactccaatggattaaccatgatag

SEQ ID NO: 493317 - DNA, 33 bp, Homo sapien
atacataaaattgttgcacaaggcatatgctga

SEQ ID NO: 493318 - DNA, 33 bp, Homo sapien
atacataaaattgttgtacaaggcatatgctga

SEQ ID NO: 493319 - DNA, 33 bp, Homo sapien
cagaggctgtttctacaaaaaaacttgataaat

SEQ ID NO: 493320 - DNA, 33 bp, Homo sapien
cagaggctgtttctacgaaaaaacttgataaat

SEQ ID NO: 493321 - DNA, 33 bp, Homo sapien
cacatttcagtggaacagccagtactgcgtgtc

SEQ ID NO: 493322 - DNA, 33 bp, Homo sapien
cacatttcagtggaacggccagtactgcgtgtc

SEQ ID NO: 493323 - DNA, 33 bp, Homo sapien
gtgaaacagtttgaaaattaaaggtgaattagt

SEQ ID NO: 493324 - DNA, 33 bp, Homo sapien
gtgaaacagtttgaaagttaaaggtgaattagt

SEQ ID NO: 493325 - DNA, 33 bp, Homo sapien
tatttgtacccgcggactaatataccacagctc

SEQ ID NO: 493326 - DNA, 33 bp, Homo sapien
tatttgtacccgcggattaatataccacagctc

SEQ ID NO: 493327 - DNA, 33 bp, Homo sapien
ggtaagaccacccaccacttttggctgaggcag

SEQ ID NO: 493328 - DNA, 33 bp, Homo sapien
ggtaagaccacccaccgcttttggctgaggcag

SEQ ID NO: 493329 - DNA, 33 bp, Homo sapien
cggagagagtcagagacgctgttaaattctccc

SEQ ID NO: 493330 - DNA, 33 bp, Homo sapien
cggagagagtcagagatgctgttaaattctccc

SEQ ID NO: 493331 - DNA, 33 bp, Homo sapien
acactagcttttttgccccatgaaggacaggaa

SEQ ID NO: 493332 - DNA, 33 bp, Homo sapien
acactagcttttttgctccatgaaggacaggaa

SEQ ID NO: 493333 - DNA, 33 bp, Homo sapien
atccaatccaggataactgactgcactgagttg

SEQ ID NO: 493334 - DNA, 33 bp, Homo sapien
atccaatccaggataattgactgcactgagttg

SEQ ID NO: 493335 - DNA, 33 bp, Homo sapien
ttgttgtagatgtttgaaaatcacagtgagtag

SEQ ID NO: 493336 - DNA, 33 bp, Homo sapien
ttgttgtagatgtttggaaatcacagtgagtag

SEQ ID NO: 493337 - DNA, 33 bp, Homo sapien
ggcctcttcccattaaatgccagcggtaaccct

SEQ ID NO: 493338 - DNA, 33 bp, Homo sapien
ggcctcttcccattaagtgccagcggtaaccct

SEQ ID NO: 493339 - DNA, 33 bp, Homo sapien
gccacagtagtcattagaggcaaacatcagtat

SEQ ID NO: 493340 - DNA, 33 bp, Homo sapien
gccacagtagtcattataggcaaacatcagtat

SEQ ID NO: 493341 - DNA, 33 bp, Homo sapien
actgcatgcagccagacgttcccacaggatgac

SEQ ID NO: 493342 - DNA, 33 bp, Homo sapien
actgcatgcagccagatgttcccacaggatgac

SEQ ID NO: 493343 - DNA, 33 bp, Homo sapien
gggcagctgattttaacatgtagccaggtttga

SEQ ID NO: 493344 - DNA, 33 bp, Homo sapien
gggcagctgattttaatatgtagccaggtttga

SEQ ID NO: 493345 - DNA, 33 bp, Homo sapien
gaaaataggttgcaagaatttcaaacagtggtt

SEQ ID NO: 493346 - DNA, 33 bp, Homo sapien
gaaaataggttgcaaggatttcaaacagtggtt

SEQ ID NO: 493347 - DNA, 33 bp, Homo sapien
taccaacacagacacactataggcccctggtaa

SEQ ID NO: 493348 - DNA, 33 bp, Homo sapien
taccaacacagacacattataggcccctggtaa

SEQ ID NO: 493349 - DNA, 33 bp, Homo sapien
ggtacaagatctctggaagcacttaatggtatg

SEQ ID NO: 493350 - DNA, 33 bp, Homo sapien
ggtacaagatctctgggagcacttaatggtatg

SEQ ID NO: 493351 - DNA, 33 bp, Homo sapien
ttgtatgtgatcagaagaatacagtagtaattc

SEQ ID NO: 493352 - DNA, 33 bp, Homo sapien
ttgtatgtgatcagaataatacagtagtaattc

SEQ ID NO: 493353 - DNA, 33 bp, Homo sapien
aacttacagcatgctgaaaatccagagccttct

SEQ ID NO: 493354 - DNA, 33 bp, Homo sapien
aacttacagcatgctggaaatccagagccttct

SEQ ID NO: 493355 - DNA, 33 bp, Homo sapien
ttgttttaagcatgacaaaatgaattgatatag

SEQ ID NO: 493356 - DNA, 33 bp, Homo sapien
ttgttttaagcatgactaaatgaattgatatag

SEQ ID NO: 493357 - DNA, 33 bp, Homo sapien
agcctgaatgttgggcaaacagcatcagtgagt

SEQ ID NO: 493358 - DNA, 33 bp, Homo sapien
agcctgaatgttgggcgaacagcatcagtgagt

SEQ ID NO: 493359 - DNA, 33 bp, Homo sapien
ggaatcagaggtataccgacatctcacacaaag

SEQ ID NO: 493360 - DNA, 33 bp, Homo sapien
ggaatcagaggtatactgacatctcacacaaag

SEQ ID NO: 493361 - DNA, 33 bp, Homo sapien
tttcataatgtttgaccgaagctggccttaact

SEQ ID NO: 493362 - DNA, 33 bp, Homo sapien
tttcataatgtttgactgaagctggccttaact

SEQ ID NO: 493363 - DNA, 33 bp, Homo sapien
tgctttttgacacacacagtgctttgttgtggc

SEQ ID NO: 493364 - DNA, 33 bp, Homo sapien
tgctttttgacacacagagtgctttgttgtggc

SEQ ID NO: 493365 - DNA, 33 bp, Homo sapien
ccaccccgctcctgaacgcttagctactctgct

SEQ ID NO: 493366 - DNA, 33 bp, Homo sapien
ccaccccgctcctgaatgcttagctactctgct

SEQ ID NO: 493367 - DNA, 33 bp, Homo sapien
taccagagggagctacagaaagcctgaattctc

SEQ ID NO: 493368 - DNA, 33 bp, Homo sapien
taccagagggagctacggaaagcctgaattctc

SEQ ID NO: 493369 - DNA, 33 bp, Homo sapien
tcgctgtacattccgcaatccatggcagacatc

SEQ ID NO: 493370 - DNA, 33 bp, Homo sapien
tcgctgtacattccgcgatccatggcagacatc

SEQ ID NO: 493371 - DNA, 33 bp, Homo sapien
gttttgcacaactaaaagtgctttccagatctc

SEQ ID NO: 493372 - DNA, 33 bp, Homo sapien
gttttgcacaactaaaggtgctttccagatctc

SEQ ID NO: 493373 - DNA, 33 bp, Homo sapien
acattcaaatacagacaccgagtcgaaaatact

SEQ ID NO: 493374 - DNA, 33 bp, Homo sapien
acattcaaatacagacgccgagtcgaaaatact

SEQ ID NO: 493375 - DNA, 33 bp, Homo sapien
tatcacggcctgctgcactgcttcaaaacatct

SEQ ID NO: 493376 - DNA, 33 bp, Homo sapien
tatcacggcctgctgcgctgcttcaaaacatct

SEQ ID NO: 493377 - DNA, 33 bp, Homo sapien
taagaaagattctagtaaaagacacaagatcgc

SEQ ID NO: 493378 - DNA, 33 bp, Homo sapien
taagaaagattctagtgaaagacacaagatcgc

SEQ ID NO: 493379 - DNA, 33 bp, Homo sapien
atcttgataaagattgaagccattaaggagagc

SEQ ID NO: 493380 - DNA, 33 bp, Homo sapien
atcttgataaagattggagccattaaggagagc

SEQ ID NO: 493381 - DNA, 33 bp, Homo sapien
ggtggagcttggtgtaacttgtgctggtcagtg

SEQ ID NO: 493382 - DNA, 33 bp, Homo sapien
ggtggagcttggtgtagcttgtgctggtcagtg

SEQ ID NO: 493383 - DNA, 33 bp, Homo sapien
taggcttggtaggcaacttcttcacttttgggc

SEQ ID NO: 493384 - DNA, 33 bp, Homo sapien
taggcttggtaggcaatttcttcacttttgggc

SEQ ID NO: 493385 - DNA, 33 bp, Homo sapien
gaaaagtaattctgtacggactatggaagctga

SEQ ID NO: 493386 - DNA, 33 bp, Homo sapien
gaaaagtaattctgtatggactatggaagctga

SEQ ID NO: 493387 - DNA, 33 bp, Homo sapien
cttgaatctctgggccaattctaagctctctta

SEQ ID NO: 493388 - DNA, 33 bp, Homo sapien
cttgaatctctgggccgattctaagctctctta

SEQ ID NO: 493389 - DNA, 33 bp, Homo sapien
gtgactgggcatataaccttcatcactcttcat

SEQ ID NO: 493390 - DNA, 33 bp, Homo sapien
gtgactgggcatataagcttcatcactcttcat

SEQ ID NO: 493391 - DNA, 33 bp, Homo sapien
caaatggccatctacaagtcaccagcttatcta

SEQ ID NO: 493392 - DNA, 33 bp, Homo sapien
caaatggccatctacaggtcaccagcttatcta

SEQ ID NO: 493393 - DNA, 33 bp, Homo sapien
tgtcctcatctgtaaacggagcttatactcttc

SEQ ID NO: 493394 - DNA, 33 bp, Homo sapien
tgtcctcatctgtaaatggagcttatactcttc

SEQ ID NO: 493395 - DNA, 33 bp, Homo sapien
accatctttctggcaacgtgattgtgctgcctt

SEQ ID NO: 493396 - DNA, 33 bp, Homo sapien
accatctttctggcaatgtgattgtgctgcctt

SEQ ID NO: 493397 - DNA, 33 bp, Homo sapien
tacttctaatcccttaacttcaagctccagctt

SEQ ID NO: 493398 - DNA, 33 bp, Homo sapien
tacttctaatcccttagcttcaagctccagctt

SEQ ID NO: 493399 - DNA, 33 bp, Homo sapien
ttgcaaccaaagctgccctgactaacatagcac

SEQ ID NO: 493400 - DNA, 33 bp, Homo sapien
ttgcaaccaaagctgcgctgactaacatagcac

SEQ ID NO: 493401 - DNA, 33 bp, Homo sapien
cactgcagtatagacactattcactgagttcta

SEQ ID NO: 493402 - DNA, 33 bp, Homo sapien
cactgcagtatagacagtattcactgagttcta

SEQ ID NO: 493403 - DNA, 33 bp, Homo sapien
catttcagctgcttaccaccaagaatgttgact

SEQ ID NO: 493404 - DNA, 33 bp, Homo sapien
catttcagctgcttactaccaagaatgttgact

SEQ ID NO: 493405 - DNA, 33 bp, Homo sapien
taaatgatattagtgacggcttactgagcactg

SEQ ID NO: 493406 - DNA, 33 bp, Homo sapien
taaatgatattagtgatggcttactgagcactg

SEQ ID NO: 493407 - DNA, 33 bp, Homo sapien
aagttcttgcacagggcagatgagcagcagtga

SEQ ID NO: 493408 - DNA, 33 bp, Homo sapien
aagttcttgcacagggtagatgagcagcagtga

SEQ ID NO: 493409 - DNA, 33 bp, Homo sapien
cttgctccaatataggacacttttccccaaaca

SEQ ID NO: 493410 - DNA, 33 bp, Homo sapien
cttgctccaatatagggcacttttccccaaaca

SEQ ID NO: 493411 - DNA, 33 bp, Homo sapien
agttctgggcccattacagacatgaagaaccca

SEQ ID NO: 493412 - DNA, 33 bp, Homo sapien
agttctgggcccattatagacatgaagaaccca

SEQ ID NO: 493413 - DNA, 33 bp, Homo sapien
agcagagcttgtctccagatctcacaacctgcc

SEQ ID NO: 493414 - DNA, 33 bp, Homo sapien
agcagagcttgtctccggatctcacaacctgcc

SEQ ID NO: 493415 - DNA, 33 bp, Homo sapien
gcttcaggaagtaagacaggctgcagcaagagg

SEQ ID NO: 493416 - DNA, 33 bp, Homo sapien
gcttcaggaagtaagagaggctgcagcaagagg

SEQ ID NO: 493417 - DNA, 33 bp, Homo sapien
agtgaagtgttatttacattgcttcagtaaact

SEQ ID NO: 493418 - DNA, 33 bp, Homo sapien
agtgaagtgttatttagattgcttcagtaaact

SEQ ID NO: 493419 - DNA, 33 bp, Homo sapien
tcaatatatatcacccagaaacctactattaaa

SEQ ID NO: 493420 - DNA, 33 bp, Homo sapien
tcaatatatatcacccggaaacctactattaaa

SEQ ID NO: 493421 - DNA, 33 bp, Homo sapien
tgctggcaattatctgaaacctaatcaactggc

SEQ ID NO: 493422 - DNA, 33 bp, Homo sapien
tgctggcaattatctggaacctaatcaactggc

SEQ ID NO: 493423 - DNA, 33 bp, Homo sapien
gtttgacatctttaacacttgaaaatcatagtg

SEQ ID NO: 493424 - DNA, 33 bp, Homo sapien
gtttgacatctttaacgcttgaaaatcatagtg

SEQ ID NO: 493425 - DNA, 33 bp, Homo sapien
gcttccctttgctgatcagtgagagtatggtat

SEQ ID NO: 493426 - DNA, 33 bp, Homo sapien
gcttccctttgctgattagtgagagtatggtat

SEQ ID NO: 493427 - DNA, 33 bp, Homo sapien
ggcccatattacctggaagactctgcgttatag

SEQ ID NO: 493428 - DNA, 33 bp, Homo sapien
ggcccatattacctgggagactctgcgttatag

SEQ ID NO: 493429 - DNA, 33 bp, Homo sapien
cctatttaactcaccactcctatttccttaaaa

SEQ ID NO: 493430 - DNA, 33 bp, Homo sapien
cctatttaactcaccagtcctatttccttaaaa

SEQ ID NO: 493431 - DNA, 33 bp, Homo sapien
atgaagcccattttccagccctgatatacgttt

SEQ ID NO: 493432 - DNA, 33 bp, Homo sapien
atgaagcccattttccggccctgatatacgttt

SEQ ID NO: 493433 - DNA, 33 bp, Homo sapien
gagtttagaagagaatcactcaatctatcacag

SEQ ID NO: 493434 - DNA, 33 bp, Homo sapien
gagtttagaagagaatgactcaatctatcacag

SEQ ID NO: 493435 - DNA, 33 bp, Homo sapien
catctgatttgcattccagtaaaaagcatagtc

SEQ ID NO: 493436 - DNA, 33 bp, Homo sapien
catctgatttgcattctagtaaaaagcatagtc

SEQ ID NO: 493437 - DNA, 33 bp, Homo sapien
gatttgtaaaattacccatttttgctgtgagaa

SEQ ID NO: 493438 - DNA, 33 bp, Homo sapien
gatttgtaaaattaccgatttttgctgtgagaa

SEQ ID NO: 493439 - DNA, 33 bp, Homo sapien
gaaacaatcattccccaactccataggtctact

SEQ ID NO: 493440 - DNA, 33 bp, Homo sapien
gaaacaatcattccccgactccataggtctact

SEQ ID NO: 493441 - DNA, 33 bp, Homo sapien
ctcttagaccaggagtaaatttcagaacaccag

SEQ ID NO: 493442 - DNA, 33 bp, Homo sapien
ctcttagaccaggagttaatttcagaacaccag

SEQ ID NO: 493443 - DNA, 33 bp, Homo sapien
atctcaacagtgattccgaacacttagctttat

SEQ ID NO: 493444 - DNA, 33 bp, Homo sapien
atctcaacagtgattctgaacacttagctttat

SEQ ID NO: 493445 - DNA, 33 bp, Homo sapien
atcttaaatgcttctcacaaatatttttagctc

SEQ ID NO: 493446 - DNA, 33 bp, Homo sapien
atcttaaatgcttctcccaaatatttttagctc

SEQ ID NO: 493447 - DNA, 33 bp, Homo sapien
gacaagtaaaggaggccagttggcagtcccaca

SEQ ID NO: 493448 - DNA, 33 bp, Homo sapien
gacaagtaaaggaggctagttggcagtcccaca

SEQ ID NO: 493449 - DNA, 33 bp, Homo sapien
acaagacattttgacaagaccatttcaaaacaa

SEQ ID NO: 493450 - DNA, 33 bp, Homo sapien
acaagacattttgacatgaccatttcaaaacaa

SEQ ID NO: 493451 - DNA, 33 bp, Homo sapien
ggggaatactaggaaacagcgtcattttaaaaa

SEQ ID NO: 493452 - DNA, 33 bp, Homo sapien
ggggaatactaggaaatagcgtcattttaaaaa

SEQ ID NO: 493453 - DNA, 33 bp, Homo sapien
taggaaaatcaggaaacgtgaatgattattttc

SEQ ID NO: 493454 - DNA, 33 bp, Homo sapien
taggaaaatcaggaaaggtgaatgattattttc

SEQ ID NO: 493455 - DNA, 33 bp, Homo sapien
tataagaagaagagatcacaacacagatgcaca

SEQ ID NO: 493456 - DNA, 33 bp, Homo sapien
tataagaagaagagattacaacacagatgcaca

SEQ ID NO: 493457 - DNA, 33 bp, Homo sapien
agtctgatgagtaccaaggcttcatttttacta

SEQ ID NO: 493458 - DNA, 33 bp, Homo sapien
agtctgatgagtaccagggcttcatttttacta

SEQ ID NO: 493459 - DNA, 33 bp, Homo sapien
tttattgcaactaagccaggagatacgaacttc

SEQ ID NO: 493460 - DNA, 33 bp, Homo sapien
tttattgcaactaagctaggagatacgaacttc

SEQ ID NO: 493461 - DNA, 33 bp, Homo sapien
cctcagctgaaagctaacaagctgaatctaagg

SEQ ID NO: 493462 - DNA, 33 bp, Homo sapien
cctcagctgaaagctaccaagctgaatctaagg

SEQ ID NO: 493463 - DNA, 33 bp, Homo sapien
aatatcaattaaaatacgcacagctgaactttc

SEQ ID NO: 493464 - DNA, 33 bp, Homo sapien
aatatcaattaaaatatgcacagctgaactttc

SEQ ID NO: 493465 - DNA, 33 bp, Homo sapien
aaaaattattccaagacctcatcaggacttaag

SEQ ID NO: 493466 - DNA, 33 bp, Homo sapien
aaaaattattccaagagctcatcaggacttaag

SEQ ID NO: 493467 - DNA, 33 bp, Homo sapien
attaactgggagacaccggcaagggcaataggg

SEQ ID NO: 493468 - DNA, 33 bp, Homo sapien
attaactgggagacactggcaagggcaataggg

SEQ ID NO: 493469 - DNA, 33 bp, Homo sapien
tccctttactcttgaagtgccaaggaatctgtt

SEQ ID NO: 493470 - DNA, 33 bp, Homo sapien
tccctttactcttgaattgccaaggaatctgtt

SEQ ID NO: 493471 - DNA, 33 bp, Homo sapien
agcaggaaacaaaaccagcaaacaatagcatgt

SEQ ID NO: 493472 - DNA, 33 bp, Homo sapien
agcaggaaacaaaacccgcaaacaatagcatgt

SEQ ID NO: 493473 - DNA, 33 bp, Homo sapien
taattgaagagcataaagcataaatccattcct

SEQ ID NO: 493474 - DNA, 33 bp, Homo sapien
taattgaagagcataacgcataaatccattcct

SEQ ID NO: 493475 - DNA, 33 bp, Homo sapien
ctttatgtgtgaaagaagtgtcactgggaaagg

SEQ ID NO: 493476 - DNA, 33 bp, Homo sapien
ctttatgtgtgaaagacgtgtcactgggaaagg

SEQ ID NO: 493477 - DNA, 33 bp, Homo sapien
gtatatttgctattacaggaacagtgtttctgt

SEQ ID NO: 493478 - DNA, 33 bp, Homo sapien
gtatatttgctattacgggaacagtgtttctgt

SEQ ID NO: 493479 - DNA, 33 bp, Homo sapien
taggtgcaaagtatacagcaacgatagagaaaa

SEQ ID NO: 493480 - DNA, 33 bp, Homo sapien
taggtgcaaagtatacggcaacgatagagaaaa

SEQ ID NO: 493481 - DNA, 33 bp, Homo sapien
gcacccaatgttaagaacgcttttcatatagct

SEQ ID NO: 493482 - DNA, 33 bp, Homo sapien
gcacccaatgttaagaccgcttttcatatagct

SEQ ID NO: 493483 - DNA, 33 bp, Homo sapien
tttgtttaagctttgcagaaatcaagaacagtg

SEQ ID NO: 493484 - DNA, 33 bp, Homo sapien
tttgtttaagctttgcggaaatcaagaacagtg

SEQ ID NO: 493485 - DNA, 33 bp, Homo sapien
cagaaagtgctgaaacaaaaacagcttgaaaaa

SEQ ID NO: 493486 - DNA, 33 bp, Homo sapien
cagaaagtgctgaaacgaaaacagcttgaaaaa

SEQ ID NO: 493487 - DNA, 33 bp, Homo sapien
ctctgtgagtctaatgcatagtgaggtttgaga

SEQ ID NO: 493488 - DNA, 33 bp, Homo sapien
ctctgtgagtctaatgtatagtgaggtttgaga

SEQ ID NO: 493489 - DNA, 33 bp, Homo sapien
gtgggtgtgagaagcacgtgactgactcaaggt

SEQ ID NO: 493490 - DNA, 33 bp, Homo sapien
gtgggtgtgagaagcatgtgactgactcaaggt

SEQ ID NO: 493491 - DNA, 33 bp, Homo sapien
attgaaggatttaaaggaaaggagtaatgtggg

SEQ ID NO: 493492 - DNA, 33 bp, Homo sapien
attgaaggatttaaagtaaaggagtaatgtggg

SEQ ID NO: 493493 - DNA, 33 bp, Homo sapien
tatcaggaatggaaatgagctgaagaggctggt

SEQ ID NO: 493494 - DNA, 33 bp, Homo sapien
tatcaggaatggaaattagctgaagaggctggt

SEQ ID NO: 493495 - DNA, 33 bp, Homo sapien
tttctcatgacaaatgcagatgtgaccagcaag

SEQ ID NO: 493496 - DNA, 33 bp, Homo sapien
tttctcatgacaaatgtagatgtgaccagcaag

SEQ ID NO: 493497 - DNA, 33 bp, Homo sapien
agagtatgctgcacaacggtttgcatttcagat

SEQ ID NO: 493498 - DNA, 33 bp, Homo sapien
agagtatgctgcacaagggtttgcatttcagat

SEQ ID NO: 493499 - DNA, 33 bp, Homo sapien
gcattttgcaaagctacattttccctctggacc

SEQ ID NO: 493500 - DNA, 33 bp, Homo sapien
gcattttgcaaagctagattttccctctggacc

SEQ ID NO: 493501 - DNA, 33 bp, Homo sapien
gtatgggtgtttttaactggatcctctgaaatg

SEQ ID NO: 493502 - DNA, 33 bp, Homo sapien
gtatgggtgtttttaattggatcctctgaaatg

SEQ ID NO: 493503 - DNA, 33 bp, Homo sapien
gaaatgttctggtgaactatactacctactgag

SEQ ID NO: 493504 - DNA, 33 bp, Homo sapien
gaaatgttctggtgaattatactacctactgag

SEQ ID NO: 493505 - DNA, 33 bp, Homo sapien
cctctttcctcaggtacaaggtgatagcattag

SEQ ID NO: 493506 - DNA, 33 bp, Homo sapien
cctctttcctcaggtataaggtgatagcattag

SEQ ID NO: 493507 - DNA, 33 bp, Homo sapien
ctgccaagcacgtgccaaagctggagcacaggt

SEQ ID NO: 493508 - DNA, 33 bp, Homo sapien
ctgccaagcacgtgccgaagctggagcacaggt

SEQ ID NO: 493509 - DNA, 33 bp, Homo sapien
catctgatcaagcacaatggagtggtgagttgg

SEQ ID NO: 493510 - DNA, 33 bp, Homo sapien
catctgatcaagcacattggagtggtgagttgg

SEQ ID NO: 493511 - DNA, 33 bp, Homo sapien
atgaatgggtccagtgcataaataaatgaatga

SEQ ID NO: 493512 - DNA, 33 bp, Homo sapien
atgaatgggtccagtggataaataaatgaatga

SEQ ID NO: 493513 - DNA, 33 bp, Homo sapien
agcatcaaggctggtcaatgaatgcttaagcaa

SEQ ID NO: 493514 - DNA, 33 bp, Homo sapien
agcatcaaggctggtcgatgaatgcttaagcaa

SEQ ID NO: 493515 - DNA, 33 bp, Homo sapien
ctgtttcctcatttgcactagtcaacagtcttg

SEQ ID NO: 493516 - DNA, 33 bp, Homo sapien
ctgtttcctcatttgcgctagtcaacagtcttg

SEQ ID NO: 493517 - DNA, 33 bp, Homo sapien
ctgcttagcaaccacaataaactgcctctcttt

SEQ ID NO: 493518 - DNA, 33 bp, Homo sapien
ctgcttagcaaccacagtaaactgcctctcttt

SEQ ID NO: 493519 - DNA, 33 bp, Homo sapien
aagtgaacaaaggctacgatgactttgaatatc

SEQ ID NO: 493520 - DNA, 33 bp, Homo sapien
aagtgaacaaaggctatgatgactttgaatatc

SEQ ID NO: 493521 - DNA, 33 bp, Homo sapien
tgtaattgattaccaacgctgtaaactgtacaa

SEQ ID NO: 493522 - DNA, 33 bp, Homo sapien
tgtaattgattaccaaggctgtaaactgtacaa

SEQ ID NO: 493523 - DNA, 33 bp, Homo sapien
tagatctcacctcaacacttcttcctaacctcc

SEQ ID NO: 493524 - DNA, 33 bp, Homo sapien
tagatctcacctcaactcttcttcctaacctcc

SEQ ID NO: 493525 - DNA, 33 bp, Homo sapien
aactggaattgaacaccgcaatgcatggtgatt

SEQ ID NO: 493526 - DNA, 33 bp, Homo sapien
aactggaattgaacactgcaatgcatggtgatt

SEQ ID NO: 493527 - DNA, 33 bp, Homo sapien
agctgtggaggaaccacacaaacaaattccagc

SEQ ID NO: 493528 - DNA, 33 bp, Homo sapien
agctgtggaggaaccatacaaacaaattccagc

SEQ ID NO: 493529 - DNA, 33 bp, Homo sapien
ccaaatctatcagttcaacttttaaacgcttcc

SEQ ID NO: 493530 - DNA, 33 bp, Homo sapien
ccaaatctatcagttcgacttttaaacgcttcc

SEQ ID NO: 493531 - DNA, 33 bp, Homo sapien
ctttaagctctattaaaacgttaatggggctta

SEQ ID NO: 493532 - DNA, 33 bp, Homo sapien
ctttaagctctattaagacgttaatggggctta

SEQ ID NO: 493533 - DNA, 33 bp, Homo sapien
ccaacttgtctgtcaccgacctagaaaattttt

SEQ ID NO: 493534 - DNA, 33 bp, Homo sapien
ccaacttgtctgtcactgacctagaaaattttt

SEQ ID NO: 493535 - DNA, 33 bp, Homo sapien
tgatgaggctcgctgtaaactggagagggcact

SEQ ID NO: 493536 - DNA, 33 bp, Homo sapien
tgatgaggctcgctgtgaactggagagggcact

SEQ ID NO: 493537 - DNA, 33 bp, Homo sapien
aatgtccctatctcaacacctctttgttctgct

SEQ ID NO: 493538 - DNA, 33 bp, Homo sapien
aatgtccctatctcaatacctctttgttctgct

SEQ ID NO: 493539 - DNA, 33 bp, Homo sapien
atctgttgaatgaataaatcgaatatttccagt

SEQ ID NO: 493540 - DNA, 33 bp, Homo sapien
atctgttgaatgaatagatcgaatatttccagt

SEQ ID NO: 493541 - DNA, 33 bp, Homo sapien
ttatctcagttttgtaagcctcaaatcttttaa

SEQ ID NO: 493542 - DNA, 33 bp, Homo sapien
ttatctcagttttgtaggcctcaaatcttttaa

SEQ ID NO: 493543 - DNA, 33 bp, Homo sapien
gaagttgtagtcagtacgataaaaggaaaagaa

SEQ ID NO: 493544 - DNA, 33 bp, Homo sapien
gaagttgtagtcagtatgataaaaggaaaagaa

SEQ ID NO: 493545 - DNA, 33 bp, Homo sapien
aataaatagaaaaaaaatcccaaggtagagcat

SEQ ID NO: 493546 - DNA, 33 bp, Homo sapien
aataaatagaaaaaaattcccaaggtagagcat

SEQ ID NO: 493547 - DNA, 33 bp, Homo sapien
cctagcatgctaatcaaaaaactgcattaagca

SEQ ID NO: 493548 - DNA, 33 bp, Homo sapien
cctagcatgctaatcagaaaactgcattaagca

SEQ ID NO: 493549 - DNA, 33 bp, Homo sapien
ggaaaacagtgtataacgtatttgcaatatcca

SEQ ID NO: 493550 - DNA, 33 bp, Homo sapien
ggaaaacagtgtataatgtatttgcaatatcca

SEQ ID NO: 493551 - DNA, 33 bp, Homo sapien
ataactttagcaaccaactgtgaagcaagtttc

SEQ ID NO: 493552 - DNA, 33 bp, Homo sapien
ataactttagcaaccacctgtgaagcaagtttc

SEQ ID NO: 493553 - DNA, 33 bp, Homo sapien
gaggatttgctattgacactgaactggattaac

SEQ ID NO: 493554 - DNA, 33 bp, Homo sapien
gaggatttgctattgatactgaactggattaac

SEQ ID NO: 493555 - DNA, 33 bp, Homo sapien
attatttgtccttagaaaaatagtgaacttaaa

SEQ ID NO: 493556 - DNA, 33 bp, Homo sapien
attatttgtccttagagaaatagtgaacttaaa

SEQ ID NO: 493557 - DNA, 33 bp, Homo sapien
atgttcccccaaaaagccatcttagtgctggtt

SEQ ID NO: 493558 - DNA, 33 bp, Homo sapien
atgttcccccaaaaagtcatcttagtgctggtt

SEQ ID NO: 493559 - DNA, 33 bp, Homo sapien
aattactttccaaaaaccatgcaaatctggcca

SEQ ID NO: 493560 - DNA, 33 bp, Homo sapien
aattactttccaaaaatcatgcaaatctggcca

SEQ ID NO: 493561 - DNA, 33 bp, Homo sapien
agctgagaccaaagacacttccatgttgatttc

SEQ ID NO: 493562 - DNA, 33 bp, Homo sapien
agctgagaccaaagacgcttccatgttgatttc

SEQ ID NO: 493563 - DNA, 33 bp, Homo sapien
gtcaatgttcttaactaagccctggaaataaac

SEQ ID NO: 493564 - DNA, 33 bp, Homo sapien
gtcaatgttcttaacttagccctggaaataaac

SEQ ID NO: 493565 - DNA, 33 bp, Homo sapien
gagccttcattactaaaccctacaaaatatggt

SEQ ID NO: 493566 - DNA, 33 bp, Homo sapien
gagccttcattactaacccctacaaaatatggt

SEQ ID NO: 493567 - DNA, 33 bp, Homo sapien
aggaaccaggaacaaacgccactgagaaatggt

SEQ ID NO: 493568 - DNA, 33 bp, Homo sapien
aggaaccaggaacaaatgccactgagaaatggt

SEQ ID NO: 493569 - DNA, 33 bp, Homo sapien
gaacactagaatttcacggtggagaaatagaaa

SEQ ID NO: 493570 - DNA, 33 bp, Homo sapien
gaacactagaatttcatggtggagaaatagaaa

SEQ ID NO: 493571 - DNA, 33 bp, Homo sapien
actgacttcacctccaatcgaagaatgataaat

SEQ ID NO: 493572 - DNA, 33 bp, Homo sapien
actgacttcacctccagtcgaagaatgataaat

SEQ ID NO: 493573 - DNA, 33 bp, Homo sapien
aaagatatagaaaatcacagaaaaacatgacca

SEQ ID NO: 493574 - DNA, 33 bp, Homo sapien
aaagatatagaaaatcgcagaaaaacatgacca

SEQ ID NO: 493575 - DNA, 33 bp, Homo sapien
aaactatagcaaaacaacctagagatcttcgtc

SEQ ID NO: 493576 - DNA, 33 bp, Homo sapien
aaactatagcaaaacagcctagagatcttcgtc

SEQ ID NO: 493577 - DNA, 33 bp, Homo sapien
ggatgaattagccacaagcaagaaggacagcat

SEQ ID NO: 493578 - DNA, 33 bp, Homo sapien
ggatgaattagccacaggcaagaaggacagcat

SEQ ID NO: 493579 - DNA, 33 bp, Homo sapien
aaggccattcttaataagcagtggcagattaga

SEQ ID NO: 493580 - DNA, 33 bp, Homo sapien
aaggccattcttaatacgcagtggcagattaga

SEQ ID NO: 493581 - DNA, 33 bp, Homo sapien
acttcattctacccaactctgtgcatgtgcagg

SEQ ID NO: 493582 - DNA, 33 bp, Homo sapien
acttcattctacccaattctgtgcatgtgcagg

SEQ ID NO: 493583 - DNA, 33 bp, Homo sapien
tttgaacacaccagaacccacaagtgcttttta

SEQ ID NO: 493584 - DNA, 33 bp, Homo sapien
tttgaacacaccagaatccacaagtgcttttta

SEQ ID NO: 493585 - DNA, 33 bp, Homo sapien
tgtaccttatcctaccaagtcacctgcaccttc

SEQ ID NO: 493586 - DNA, 33 bp, Homo sapien
tgtaccttatcctaccgagtcacctgcaccttc

SEQ ID NO: 493587 - DNA, 33 bp, Homo sapien
aataattaatgtgagacagatatggctcgccaa

SEQ ID NO: 493588 - DNA, 33 bp, Homo sapien
aataattaatgtgagatagatatggctcgccaa

SEQ ID NO: 493589 - DNA, 33 bp, Homo sapien
gtaagacatagaaagcagcaatgttaagcaggt

SEQ ID NO: 493590 - DNA, 33 bp, Homo sapien
gtaagacatagaaagcggcaatgttaagcaggt

SEQ ID NO: 493591 - DNA, 33 bp, Homo sapien
atggtgatcagagcgccaagaagggactaattt

SEQ ID NO: 493592 - DNA, 33 bp, Homo sapien
atggtgatcagagcgcgaagaagggactaattt

SEQ ID NO: 493593 - DNA, 33 bp, Homo sapien
acaagtacatacttatcaggaacaaaattacag

SEQ ID NO: 493594 - DNA, 33 bp, Homo sapien
acaagtacatacttatgaggaacaaaattacag

SEQ ID NO: 493595 - DNA, 33 bp, Homo sapien
acaaggctgacgatgacgtaagagacaaatgct

SEQ ID NO: 493596 - DNA, 33 bp, Homo sapien
acaaggctgacgatgatgtaagagacaaatgct

SEQ ID NO: 493597 - DNA, 33 bp, Homo sapien
tcaacatccaaaccacggcttaacatcattgtc

SEQ ID NO: 493598 - DNA, 33 bp, Homo sapien
tcaacatccaaaccactgcttaacatcattgtc

SEQ ID NO: 493599 - DNA, 33 bp, Homo sapien
gcagactggacgaaacaatcactcctatttgta

SEQ ID NO: 493600 - DNA, 33 bp, Homo sapien
gcagactggacgaaacgatcactcctatttgta

SEQ ID NO: 493601 - DNA, 33 bp, Homo sapien
tgtttaacagacaggccagtggtacgggtcaca

SEQ ID NO: 493602 - DNA, 33 bp, Homo sapien
tgtttaacagacaggctagtggtacgggtcaca

SEQ ID NO: 493603 - DNA, 33 bp, Homo sapien
aaaaagtaatatagtcactggttttcttatttt

SEQ ID NO: 493604 - DNA, 33 bp, Homo sapien
aaaaagtaatatagtccctggttttcttatttt

SEQ ID NO: 493605 - DNA, 33 bp, Homo sapien
agactcttccatgaaaatcttccagtaatagaa

SEQ ID NO: 493606 - DNA, 33 bp, Homo sapien
agactcttccatgaaagtcttccagtaatagaa

SEQ ID NO: 493607 - DNA, 33 bp, Homo sapien
ctgtggtcatttgaaacatttctgaaggacagt

SEQ ID NO: 493608 - DNA, 33 bp, Homo sapien
ctgtggtcatttgaaagatttctgaaggacagt

SEQ ID NO: 493609 - DNA, 33 bp, Homo sapien
tgctctgacttaacatgacacattctatgcgtg

SEQ ID NO: 493610 - DNA, 33 bp, Homo sapien
tgctctgacttaacattacacattctatgcgtg

SEQ ID NO: 493611 - DNA, 33 bp, Homo sapien
tctttacaagcacctcaagaggagtatgtaggg

SEQ ID NO: 493612 - DNA, 33 bp, Homo sapien
tctttacaagcacctcgagaggagtatgtaggg

SEQ ID NO: 493613 - DNA, 33 bp, Homo sapien
ctgggacttttcttaaactttggtatgtataaa

SEQ ID NO: 493614 - DNA, 33 bp, Homo sapien
ctgggacttttcttaacctttggtatgtataaa

SEQ ID NO: 493615 - DNA, 33 bp, Homo sapien
actcctgggttcttaacctggaattcatagacc

SEQ ID NO: 493616 - DNA, 33 bp, Homo sapien
actcctgggttcttaatctggaattcatagacc

SEQ ID NO: 493617 - DNA, 33 bp, Homo sapien
gtctttggatctaaaacctgaatatatctccaa

SEQ ID NO: 493618 - DNA, 33 bp, Homo sapien
gtctttggatctaaaatctgaatatatctccaa

SEQ ID NO: 493619 - DNA, 33 bp, Homo sapien
gctgcttgttttctgcagaggttgtcaaaaatg

SEQ ID NO: 493620 - DNA, 33 bp, Homo sapien
gctgcttgttttctgcggaggttgtcaaaaatg

SEQ ID NO: 493621 - DNA, 33 bp, Homo sapien
tatacttggaacataccgaatgataaactcagc

SEQ ID NO: 493622 - DNA, 33 bp, Homo sapien
tatacttggaacatactgaatgataaactcagc

SEQ ID NO: 493623 - DNA, 33 bp, Homo sapien
gtttctctccatgaaacgttcctatcaagaata

SEQ ID NO: 493624 - DNA, 33 bp, Homo sapien
gtttctctccatgaaatgttcctatcaagaata

SEQ ID NO: 493625 - DNA, 33 bp, Homo sapien
ctgttatttcagccacagatatgatttctttaa

SEQ ID NO: 493626 - DNA, 33 bp, Homo sapien
ctgttatttcagccacggatatgatttctttaa

SEQ ID NO: 493627 - DNA, 33 bp, Homo sapien
cctgaataaaattgtcaaaatctgtgcctcatt

SEQ ID NO: 493628 - DNA, 33 bp, Homo sapien
cctgaataaaattgtcgaaatctgtgcctcatt

SEQ ID NO: 493629 - DNA, 33 bp, Homo sapien
ttggacaacaaatgaaacctaactactaatatt

SEQ ID NO: 493630 - DNA, 33 bp, Homo sapien
ttggacaacaaatgaagcctaactactaatatt

SEQ ID NO: 493631 - DNA, 33 bp, Homo sapien
aagaattacagaaggacctctacacatttctta

SEQ ID NO: 493632 - DNA, 33 bp, Homo sapien
aagaattacagaaggatctctacacatttctta

SEQ ID NO: 493633 - DNA, 33 bp, Homo sapien
aagatacctccaacacccgtttttctcctcact

SEQ ID NO: 493634 - DNA, 33 bp, Homo sapien
aagatacctccaacactcgtttttctcctcact

SEQ ID NO: 493635 - DNA, 33 bp, Homo sapien
agattgccatgaagtcacttgacacattatggc

SEQ ID NO: 493636 - DNA, 33 bp, Homo sapien
agattgccatgaagtctcttgacacattatggc

SEQ ID NO: 493637 - DNA, 33 bp, Homo sapien
gtgtttgaacatgaaactgagaaggacttctct

SEQ ID NO: 493638 - DNA, 33 bp, Homo sapien
gtgtttgaacatgaaagtgagaaggacttctct

SEQ ID NO: 493639 - DNA, 33 bp, Homo sapien
aattaccaagccatgacgttttctctgggagta

SEQ ID NO: 493640 - DNA, 33 bp, Homo sapien
aattaccaagccatgatgttttctctgggagta

SEQ ID NO: 493641 - DNA, 33 bp, Homo sapien
tcacatatttaaggtccacttgactcaaggagg

SEQ ID NO: 493642 - DNA, 33 bp, Homo sapien
tcacatatttaaggtctacttgactcaaggagg

SEQ ID NO: 493643 - DNA, 33 bp, Homo sapien
cagatggcagaggccaagaagtctccgaacaaa

SEQ ID NO: 493644 - DNA, 33 bp, Homo sapien
cagatggcagaggccaggaagtctccgaacaaa

SEQ ID NO: 493645 - DNA, 33 bp, Homo sapien
atgtttcctataataccgatccaaaagactgag

SEQ ID NO: 493646 - DNA, 33 bp, Homo sapien
atgtttcctataatacggatccaaaagactgag

SEQ ID NO: 493647 - DNA, 33 bp, Homo sapien
ttgctcttcttactaaccaggaaatatcagaat

SEQ ID NO: 493648 - DNA, 33 bp, Homo sapien
ttgctcttcttactaagcaggaaatatcagaat

SEQ ID NO: 493649 - DNA, 33 bp, Homo sapien
aatgagtgtgtccatgaagtgtaaaagataaaa

SEQ ID NO: 493650 - DNA, 33 bp, Homo sapien
aatgagtgtgtccatgtagtgtaaaagataaaa

SEQ ID NO: 493651 - DNA, 33 bp, Homo sapien
agatatcagtaaataacatttttgagtgatatt

SEQ ID NO: 493652 - DNA, 33 bp, Homo sapien
agatatcagtaaataagatttttgagtgatatt

SEQ ID NO: 493653 - DNA, 33 bp, Homo sapien
agctagcttatgtggcaaggtattgatactaga

SEQ ID NO: 493654 - DNA, 33 bp, Homo sapien
agctagcttatgtggccaggtattgatactaga

SEQ ID NO: 493655 - DNA, 33 bp, Homo sapien
gaagtttaggtctgacactccactgggacctca

SEQ ID NO: 493656 - DNA, 33 bp, Homo sapien
gaagtttaggtctgacgctccactgggacctca

SEQ ID NO: 493657 - DNA, 33 bp, Homo sapien
tgaacctgagtcgctacggtagtttttcaaatt

SEQ ID NO: 493658 - DNA, 33 bp, Homo sapien
tgaacctgagtcgctatggtagtttttcaaatt

SEQ ID NO: 493659 - DNA, 33 bp, Homo sapien
aaataagggtagtaccaagcaatataaattata

SEQ ID NO: 493660 - DNA, 33 bp, Homo sapien
aaataagggtagtaccgagcaatataaattata

SEQ ID NO: 493661 - DNA, 33 bp, Homo sapien
acacaaatcactgggaaattttagtaataacca

SEQ ID NO: 493662 - DNA, 33 bp, Homo sapien
acacaaatcactgggacattttagtaataacca

SEQ ID NO: 493663 - DNA, 33 bp, Homo sapien
agtgtgggtcaggaatgactggtataaacagat

SEQ ID NO: 493664 - DNA, 33 bp, Homo sapien
agtgtgggtcaggaattactggtataaacagat

SEQ ID NO: 493665 - DNA, 33 bp, Homo sapien
catttcccagcatcacacaaatggttttcaagt

SEQ ID NO: 493666 - DNA, 33 bp, Homo sapien
catttcccagcatcacgcaaatggttttcaagt

SEQ ID NO: 493667 - DNA, 33 bp, Homo sapien
ttgcagacaaagtgaaatggaagaagattgtga

SEQ ID NO: 493668 - DNA, 33 bp, Homo sapien
ttgcagacaaagtgaagtggaagaagattgtga

SEQ ID NO: 493669 - DNA, 33 bp, Homo sapien
atagagaatgagggataagagagtccatcctag

SEQ ID NO: 493670 - DNA, 33 bp, Homo sapien
atagagaatgagggatgagagagtccatcctag

SEQ ID NO: 493671 - DNA, 33 bp, Homo sapien
acaattctgttcatccagaccacatctttcctg

SEQ ID NO: 493672 - DNA, 33 bp, Homo sapien
acaattctgttcatccggaccacatctttcctg

SEQ ID NO: 493673 - DNA, 33 bp, Homo sapien
agtgttcagttaggtgcatcagtaacaacctaa

SEQ ID NO: 493674 - DNA, 33 bp, Homo sapien
agtgttcagttaggtgtatcagtaacaacctaa

SEQ ID NO: 493675 - DNA, 33 bp, Homo sapien
gaagaaaaatattgtacgatgggtgacattact

SEQ ID NO: 493676 - DNA, 33 bp, Homo sapien
gaagaaaaatattgtatgatgggtgacattact

SEQ ID NO: 493677 - DNA, 33 bp, Homo sapien
ttaccatttcatcaaacacattgttggcaacag

SEQ ID NO: 493678 - DNA, 33 bp, Homo sapien
ttaccatttcatcaaatacattgttggcaacag

SEQ ID NO: 493679 - DNA, 33 bp, Homo sapien
tctgcaaaaatccaaaagctctgctgtggtttc

SEQ ID NO: 493680 - DNA, 33 bp, Homo sapien
tctgcaaaaatccaaacgctctgctgtggtttc

SEQ ID NO: 493681 - DNA, 33 bp, Homo sapien
caccttgaagtgaaaaaatcatcaattaccaaa

SEQ ID NO: 493682 - DNA, 33 bp, Homo sapien
caccttgaagtgaaaacatcatcaattaccaaa

SEQ ID NO: 493683 - DNA, 33 bp, Homo sapien
taaataatatcaagcacctatagtacagctctg

SEQ ID NO: 493684 - DNA, 33 bp, Homo sapien
taaataatatcaagcatctatagtacagctctg

SEQ ID NO: 493685 - DNA, 33 bp, Homo sapien
gcaattccaggaaagacagctgaattcaattgt

SEQ ID NO: 493686 - DNA, 33 bp, Homo sapien
gcaattccaggaaagatagctgaattcaattgt

SEQ ID NO: 493687 - DNA, 33 bp, Homo sapien
atcaatgtaattgtcacagtgtaagctattcac

SEQ ID NO: 493688 - DNA, 33 bp, Homo sapien
atcaatgtaattgtcatagtgtaagctattcac

SEQ ID NO: 493689 - DNA, 33 bp, Homo sapien
aatatccagctttacaccttaatatctttgacc

SEQ ID NO: 493690 - DNA, 33 bp, Homo sapien
aatatccagctttacatcttaatatctttgacc

SEQ ID NO: 493691 - DNA, 33 bp, Homo sapien
gatgtgaagaaacaaccgaaatttgcactgaaa

SEQ ID NO: 493692 - DNA, 33 bp, Homo sapien
gatgtgaagaaacaactgaaatttgcactgaaa

SEQ ID NO: 493693 - DNA, 33 bp, Homo sapien
ggaagtctactttaaacgtaggttacacttcaa

SEQ ID NO: 493694 - DNA, 33 bp, Homo sapien
ggaagtctactttaaatgtaggttacacttcaa

SEQ ID NO: 493695 - DNA, 33 bp, Homo sapien
ccagatacttacagacacactgaaaacaagaag

SEQ ID NO: 493696 - DNA, 33 bp, Homo sapien
ccagatacttacagacccactgaaaacaagaag

SEQ ID NO: 493697 - DNA, 33 bp, Homo sapien
agggatgagggatgaaatgttttgattgcagcg

SEQ ID NO: 493698 - DNA, 33 bp, Homo sapien
agggatgagggatgaagtgttttgattgcagcg

SEQ ID NO: 493699 - DNA, 33 bp, Homo sapien
ggcagaaccttctaacagccttgtttatagatg

SEQ ID NO: 493700 - DNA, 33 bp, Homo sapien
ggcagaaccttctaacggccttgtttatagatg

SEQ ID NO: 493701 - DNA, 33 bp, Homo sapien
ctttgaagaataacaaacacaaatgtgaaaatc

SEQ ID NO: 493702 - DNA, 33 bp, Homo sapien
ctttgaagaataacaagcacaaatgtgaaaatc

SEQ ID NO: 493703 - DNA, 33 bp, Homo sapien
aagactgaaaaaattccctgtatgtgggcttta

SEQ ID NO: 493704 - DNA, 33 bp, Homo sapien
aagactgaaaaaattctctgtatgtgggcttta

SEQ ID NO: 493705 - DNA, 33 bp, Homo sapien
gttggagttttgaagagtatgtgaaaaattttg

SEQ ID NO: 493706 - DNA, 33 bp, Homo sapien
gttggagttttgaagattatgtgaaaaattttg

SEQ ID NO: 493707 - DNA, 33 bp, Homo sapien
aggcttctgaatgcccacgatttcaaaggacgt

SEQ ID NO: 493708 - DNA, 33 bp, Homo sapien
aggcttctgaatgcccgcgatttcaaaggacgt

SEQ ID NO: 493709 - DNA, 33 bp, Homo sapien
ttactcaatgggataccactttgggggaagagc

SEQ ID NO: 493710 - DNA, 33 bp, Homo sapien
ttactcaatgggatactactttgggggaagagc

SEQ ID NO: 493711 - DNA, 33 bp, Homo sapien
tgtttctgtgttgatccaatcctaactgcagga

SEQ ID NO: 493712 - DNA, 33 bp, Homo sapien
tgtttctgtgttgatctaatcctaactgcagga

SEQ ID NO: 493713 - DNA, 33 bp, Homo sapien
tgctaaacaacatgaaaaaggttggaataatgc

SEQ ID NO: 493714 - DNA, 33 bp, Homo sapien
tgctaaacaacatgaagaaggttggaataatgc

SEQ ID NO: 493715 - DNA, 33 bp, Homo sapien
gaggagaaagaatgacagggaagaaaagaacag

SEQ ID NO: 493716 - DNA, 33 bp, Homo sapien
gaggagaaagaatgacggggaagaaaagaacag

SEQ ID NO: 493717 - DNA, 33 bp, Homo sapien
caagtaaagtaattcaatccctaatgaagtgta

SEQ ID NO: 493718 - DNA, 33 bp, Homo sapien
caagtaaagtaattcactccctaatgaagtgta

SEQ ID NO: 493719 - DNA, 33 bp, Homo sapien
ggaaaagctattcctccgaacaacagtgagttc

SEQ ID NO: 493720 - DNA, 33 bp, Homo sapien
ggaaaagctattcctctgaacaacagtgagttc

SEQ ID NO: 493721 - DNA, 33 bp, Homo sapien
atctttcctgcataaaatgtttttcagcattat

SEQ ID NO: 493722 - DNA, 33 bp, Homo sapien
atctttcctgcataaagtgtttttcagcattat

SEQ ID NO: 493723 - DNA, 33 bp, Homo sapien
tcccagacggtgcttcacttggtgggagaatta

SEQ ID NO: 493724 - DNA, 33 bp, Homo sapien
tcccagacggtgcttctcttggtgggagaatta

SEQ ID NO: 493725 - DNA, 33 bp, Homo sapien
tggtttgctgctcacccgaaatgaaatttactt

SEQ ID NO: 493726 - DNA, 33 bp, Homo sapien
tggtttgctgctcacctgaaatgaaatttactt

SEQ ID NO: 493727 - DNA, 33 bp, Homo sapien
gatattggtgtcctgacaaaagactcagctgac

SEQ ID NO: 493728 - DNA, 33 bp, Homo sapien
gatattggtgtcctgataaaagactcagctgac

SEQ ID NO: 493729 - DNA, 33 bp, Homo sapien
tgtgttgcacagtcaacataactcctgttcttc

SEQ ID NO: 493730 - DNA, 33 bp, Homo sapien
tgtgttgcacagtcaatataactcctgttcttc

SEQ ID NO: 493731 - DNA, 33 bp, Homo sapien
gcacaaactcaagatgaaaaagtgagcctttat

SEQ ID NO: 493732 - DNA, 33 bp, Homo sapien
gcacaaactcaagatggaaaagtgagcctttat

SEQ ID NO: 493733 - DNA, 33 bp, Homo sapien
gttcatgtgggaaaacacttacctaccaactga

SEQ ID NO: 493734 - DNA, 33 bp, Homo sapien
gttcatgtgggaaaacccttacctaccaactga

SEQ ID NO: 493735 - DNA, 33 bp, Homo sapien
catctctctctccagcacgttactgttctcctg

SEQ ID NO: 493736 - DNA, 33 bp, Homo sapien
catctctctctccagcgcgttactgttctcctg

SEQ ID NO: 493737 - DNA, 33 bp, Homo sapien
gataatttgaaaggaaaccaactcgaaatagca

SEQ ID NO: 493738 - DNA, 33 bp, Homo sapien
gataatttgaaaggaagccaactcgaaatagca

SEQ ID NO: 493739 - DNA, 33 bp, Homo sapien
ttaagagatacaataaactaggaagaatagatc

SEQ ID NO: 493740 - DNA, 33 bp, Homo sapien
ttaagagatacaataagctaggaagaatagatc

SEQ ID NO: 493741 - DNA, 33 bp, Homo sapien
cttaagcaaaatcagaacaaattaaggctgaaa

SEQ ID NO: 493742 - DNA, 33 bp, Homo sapien
cttaagcaaaatcagatcaaattaaggctgaaa

SEQ ID NO: 493743 - DNA, 33 bp, Homo sapien
tgaaatgatctagaacaataggcaagtgttttg

SEQ ID NO: 493744 - DNA, 33 bp, Homo sapien
tgaaatgatctagaacgataggcaagtgttttg

SEQ ID NO: 493745 - DNA, 33 bp, Homo sapien
gcacccagtacctactaagcattttcaataagt

SEQ ID NO: 493746 - DNA, 33 bp, Homo sapien
gcacccagtacctactgagcattttcaataagt

SEQ ID NO: 493747 - DNA, 33 bp, Homo sapien
tcagtgctattttttccacaattcaatgaaccc

SEQ ID NO: 493748 - DNA, 33 bp, Homo sapien
tcagtgctattttttctacaattcaatgaaccc

SEQ ID NO: 493749 - DNA, 33 bp, Homo sapien
aatagacaatcctccaaagaagatatggaaatg

SEQ ID NO: 493750 - DNA, 33 bp, Homo sapien
aatagacaatcctccagagaagatatggaaatg

SEQ ID NO: 493751 - DNA, 33 bp, Homo sapien
ttagtttatattgaaacagtttgattggaatat

SEQ ID NO: 493752 - DNA, 33 bp, Homo sapien
ttagtttatattgaaagagtttgattggaatat

SEQ ID NO: 493753 - DNA, 33 bp, Homo sapien
catatctgtgatatccaacaccactaagttcaa

SEQ ID NO: 493754 - DNA, 33 bp, Homo sapien
catatctgtgatatccgacaccactaagttcaa

SEQ ID NO: 493755 - DNA, 33 bp, Homo sapien
aaaacgagtctgtaataatacagtcagagaaca

SEQ ID NO: 493756 - DNA, 33 bp, Homo sapien
aaaacgagtctgtaattatacagtcagagaaca

SEQ ID NO: 493757 - DNA, 33 bp, Homo sapien
tctatgataactagcaataaacaaccaaagaat

SEQ ID NO: 493758 - DNA, 33 bp, Homo sapien
tctatgataactagcagtaaacaaccaaagaat

SEQ ID NO: 493759 - DNA, 33 bp, Homo sapien
aagtaatgttgtagtaataagtccagtgcttct

SEQ ID NO: 493760 - DNA, 33 bp, Homo sapien
aagtaatgttgtagtagtaagtccagtgcttct

SEQ ID NO: 493761 - DNA, 33 bp, Homo sapien
tggtccataaaatgacaacaagaaatcatctgt

SEQ ID NO: 493762 - DNA, 33 bp, Homo sapien
tggtccataaaatgacgacaagaaatcatctgt

SEQ ID NO: 493763 - DNA, 33 bp, Homo sapien
ggatgttctattcacactattggcccttttgca

SEQ ID NO: 493764 - DNA, 33 bp, Homo sapien
ggatgttctattcacagtattggcccttttgca

SEQ ID NO: 493765 - DNA, 33 bp, Homo sapien
gctagccaaggagaaaggatgtttgtagagtcc

SEQ ID NO: 493766 - DNA, 33 bp, Homo sapien
gctagccaaggagaaatgatgtttgtagagtcc

SEQ ID NO: 493767 - DNA, 33 bp, Homo sapien
tttttgtccatatatacgcaatgcttagcttcc

SEQ ID NO: 493768 - DNA, 33 bp, Homo sapien
tttttgtccatatatatgcaatgcttagcttcc

SEQ ID NO: 493769 - DNA, 33 bp, Homo sapien
agtagttagtgtacaaagtgaggaagaagtgcc

SEQ ID NO: 493770 - DNA, 33 bp, Homo sapien
agtagttagtgtacaaggtgaggaagaagtgcc

SEQ ID NO: 493771 - DNA, 33 bp, Homo sapien
gtagagatgaaagctaagacttaaagagactaa

SEQ ID NO: 493772 - DNA, 33 bp, Homo sapien
gtagagatgaaagctaggacttaaagagactaa

SEQ ID NO: 493773 - DNA, 33 bp, Homo sapien
aaccatcacggcacaacgtaggggtcagcagaa

SEQ ID NO: 493774 - DNA, 33 bp, Homo sapien
aaccatcacggcacaatgtaggggtcagcagaa

SEQ ID NO: 493775 - DNA, 33 bp, Homo sapien
ttgtttttccttttcaactgcactagggctgtg

SEQ ID NO: 493776 - DNA, 33 bp, Homo sapien
ttgtttttccttttcatctgcactagggctgtg

SEQ ID NO: 493777 - DNA, 33 bp, Homo sapien
taaacccataagagtacagttgaaccgttccaa

SEQ ID NO: 493778 - DNA, 33 bp, Homo sapien
taaacccataagagtagagttgaaccgttccaa

SEQ ID NO: 493779 - DNA, 33 bp, Homo sapien
gcagcacggatactacagagcaaaatttcctct

SEQ ID NO: 493780 - DNA, 33 bp, Homo sapien
gcagcacggatactacggagcaaaatttcctct

SEQ ID NO: 493781 - DNA, 33 bp, Homo sapien
gagcacacaaatggcaacttagtgcttggattg

SEQ ID NO: 493782 - DNA, 33 bp, Homo sapien
gagcacacaaatggcaccttagtgcttggattg

SEQ ID NO: 493783 - DNA, 33 bp, Homo sapien
ccttttcatcatcaacaacactccattcctaat

SEQ ID NO: 493784 - DNA, 33 bp, Homo sapien
ccttttcatcatcaacgacactccattcctaat

SEQ ID NO: 493785 - DNA, 33 bp, Homo sapien
aagctcattttttctaccttggagcttttcttc

SEQ ID NO: 493786 - DNA, 33 bp, Homo sapien
aagctcattttttctatcttggagcttttcttc

SEQ ID NO: 493787 - DNA, 33 bp, Homo sapien
catcagccttaataacaatgtggtagaagcagg

SEQ ID NO: 493788 - DNA, 33 bp, Homo sapien
catcagccttaataacgatgtggtagaagcagg

SEQ ID NO: 493789 - DNA, 33 bp, Homo sapien
actcaggcccccaggccaccaacatgagaccta

SEQ ID NO: 493790 - DNA, 33 bp, Homo sapien
actcaggcccccaggctaccaacatgagaccta

SEQ ID NO: 493791 - DNA, 33 bp, Homo sapien
tttatcattttcactgaatatcatgtgtgtata

SEQ ID NO: 493792 - DNA, 33 bp, Homo sapien
tttatcattttcactgcatatcatgtgtgtata

SEQ ID NO: 493793 - DNA, 33 bp, Homo sapien
ccaaagcacagtcatacctagtggagaaacaca

SEQ ID NO: 493794 - DNA, 33 bp, Homo sapien
ccaaagcacagtcatatctagtggagaaacaca

SEQ ID NO: 493795 - DNA, 33 bp, Homo sapien
aggaatgagctgagaggatagtctggagtggag

SEQ ID NO: 493796 - DNA, 33 bp, Homo sapien
aggaatgagctgagagtatagtctggagtggag

SEQ ID NO: 493797 - DNA, 33 bp, Homo sapien
tggatggatggacagagagatttcatccttgct

SEQ ID NO: 493798 - DNA, 33 bp, Homo sapien
tggatggatggacagatagatttcatccttgct

SEQ ID NO: 493799 - DNA, 33 bp, Homo sapien
tcctcttcaatacaggaataacatggtgtattt

SEQ ID NO: 493800 - DNA, 33 bp, Homo sapien
tcctcttcaatacagggataacatggtgtattt

SEQ ID NO: 493801 - DNA, 33 bp, Homo sapien
gcatttgacaccatcaagtcttgaagttgcaag

SEQ ID NO: 493802 - DNA, 33 bp, Homo sapien
gcatttgacaccatcaggtcttgaagttgcaag

SEQ ID NO: 493803 - DNA, 33 bp, Homo sapien
gaaacagaaggggcaacaagtgcttgaatacag

SEQ ID NO: 493804 - DNA, 33 bp, Homo sapien
gaaacagaaggggcaagaagtgcttgaatacag

SEQ ID NO: 493805 - DNA, 33 bp, Homo sapien
ataatgtctgtatgtacgtataatcacacatag

SEQ ID NO: 493806 - DNA, 33 bp, Homo sapien
ataatgtctgtatgtaggtataatcacacatag

SEQ ID NO: 493807 - DNA, 33 bp, Homo sapien
accagaagtaggatggcatcaacactgcagtca

SEQ ID NO: 493808 - DNA, 33 bp, Homo sapien
accagaagtaggatggtatcaacactgcagtca

SEQ ID NO: 493809 - DNA, 33 bp, Homo sapien
tatttgatgattcagagaggacaagtgactttt

SEQ ID NO: 493810 - DNA, 33 bp, Homo sapien
tatttgatgattcagataggacaagtgactttt

SEQ ID NO: 493811 - DNA, 33 bp, Homo sapien
gaagagagggcttcgcaaggacataagaaaact

SEQ ID NO: 493812 - DNA, 33 bp, Homo sapien
gaagagagggcttcgccaggacataagaaaact

SEQ ID NO: 493813 - DNA, 33 bp, Homo sapien
aactagtatgagagacaataagaattctagaat

SEQ ID NO: 493814 - DNA, 33 bp, Homo sapien
aactagtatgagagacgataagaattctagaat

SEQ ID NO: 493815 - DNA, 33 bp, Homo sapien
gaccacactggctaaaagttatcactaaatcct

SEQ ID NO: 493816 - DNA, 33 bp, Homo sapien
gaccacactggctaaaggttatcactaaatcct

SEQ ID NO: 493817 - DNA, 33 bp, Homo sapien
gttgaccacatatgtcaattttcagatgagagc

SEQ ID NO: 493818 - DNA, 33 bp, Homo sapien
gttgaccacatatgtcgattttcagatgagagc

SEQ ID NO: 493819 - DNA, 33 bp, Homo sapien
ctttatactttcaccaatgagtttaagctaatc

SEQ ID NO: 493820 - DNA, 33 bp, Homo sapien
ctttatactttcaccagtgagtttaagctaatc

SEQ ID NO: 493821 - DNA, 33 bp, Homo sapien
tgaattgtgctttgtaacactcatttgggactc

SEQ ID NO: 493822 - DNA, 33 bp, Homo sapien
tgaattgtgctttgtatcactcatttgggactc

SEQ ID NO: 493823 - DNA, 33 bp, Homo sapien
aagttctatacagaaaagtctcctgtttagcct

SEQ ID NO: 493824 - DNA, 33 bp, Homo sapien
aagttctatacagaaaggtctcctgtttagcct

SEQ ID NO: 493825 - DNA, 33 bp, Homo sapien
atatgccaaaaaaaaacgagctgcagacaaaga

SEQ ID NO: 493826 - DNA, 33 bp, Homo sapien
atatgccaaaaaaaaatgagctgcagacaaaga

SEQ ID NO: 493827 - DNA, 33 bp, Homo sapien
ttcttgactctcaaaagcctggctgtagttgaa

SEQ ID NO: 493828 - DNA, 33 bp, Homo sapien
ttcttgactctcaaaatcctggctgtagttgaa

SEQ ID NO: 493829 - DNA, 33 bp, Homo sapien
accccagcattggacaatatactcatgtaacaa

SEQ ID NO: 493830 - DNA, 33 bp, Homo sapien
accccagcattggacagtatactcatgtaacaa

SEQ ID NO: 493831 - DNA, 33 bp, Homo sapien
gactttttctcttcagaaatgtggttacatcag

SEQ ID NO: 493832 - DNA, 33 bp, Homo sapien
gactttttctcttcaggaatgtggttacatcag

SEQ ID NO: 493833 - DNA, 33 bp, Homo sapien
gtagcactgacctaccacattagtcaagacagt

SEQ ID NO: 493834 - DNA, 33 bp, Homo sapien
gtagcactgacctaccgcattagtcaagacagt

SEQ ID NO: 493835 - DNA, 33 bp, Homo sapien
ttaaagtgagtagagcactgatttacattctgg

SEQ ID NO: 493836 - DNA, 33 bp, Homo sapien
ttaaagtgagtagagcgctgatttacattctgg

SEQ ID NO: 493837 - DNA, 33 bp, Homo sapien
tcccttttagttgacaatattggtattacaaag

SEQ ID NO: 493838 - DNA, 33 bp, Homo sapien
tcccttttagttgacagtattggtattacaaag

SEQ ID NO: 493839 - DNA, 33 bp, Homo sapien
tgaaatctagcggaacaagcttggattttggtg

SEQ ID NO: 493840 - DNA, 33 bp, Homo sapien
tgaaatctagcggaacgagcttggattttggtg

SEQ ID NO: 493841 - DNA, 33 bp, Homo sapien
tgttaagtaattagaactgtgtctggtatatag

SEQ ID NO: 493842 - DNA, 33 bp, Homo sapien
tgttaagtaattagaattgtgtctggtatatag

SEQ ID NO: 493843 - DNA, 33 bp, Homo sapien
acagttggtaagatacaggatgtaaacacagcc

SEQ ID NO: 493844 - DNA, 33 bp, Homo sapien
acagttggtaagatacgggatgtaaacacagcc

SEQ ID NO: 493845 - DNA, 33 bp, Homo sapien
acttttaaagcattacaaaactcttcatgtgtt

SEQ ID NO: 493846 - DNA, 33 bp, Homo sapien
acttttaaagcattacgaaactcttcatgtgtt

SEQ ID NO: 493847 - DNA, 33 bp, Homo sapien
aactgtctgaggtaaaagtttctaggtgacttg

SEQ ID NO: 493848 - DNA, 33 bp, Homo sapien
aactgtctgaggtaaacgtttctaggtgacttg

SEQ ID NO: 493849 - DNA, 33 bp, Homo sapien
tattgcaatgataaggaaagtgaagttcataga

SEQ ID NO: 493850 - DNA, 33 bp, Homo sapien
tattgcaatgataagggaagtgaagttcataga

SEQ ID NO: 493851 - DNA, 33 bp, Homo sapien
cctttgccacctggaggaatcttctcaacttgt

SEQ ID NO: 493852 - DNA, 33 bp, Homo sapien
cctttgccacctggagtaatcttctcaacttgt

SEQ ID NO: 493853 - DNA, 33 bp, Homo sapien
ctcaatacacggtctacgaaacatctgcatcag

SEQ ID NO: 493854 - DNA, 33 bp, Homo sapien
ctcaatacacggtctatgaaacatctgcatcag

SEQ ID NO: 493855 - DNA, 33 bp, Homo sapien
ttaacacaataatccacgtaaaagctgtttaaa

SEQ ID NO: 493856 - DNA, 33 bp, Homo sapien
ttaacacaataatccatgtaaaagctgtttaaa

SEQ ID NO: 493857 - DNA, 33 bp, Homo sapien
aagactacttcccagcagctgagactataggca

SEQ ID NO: 493858 - DNA, 33 bp, Homo sapien
aagactacttcccagcggctgagactataggca

SEQ ID NO: 493859 - DNA, 33 bp, Homo sapien
tcttcaccaactaacaatcttctcaggagtaag

SEQ ID NO: 493860 - DNA, 33 bp, Homo sapien
tcttcaccaactaacagtcttctcaggagtaag

SEQ ID NO: 493861 - DNA, 33 bp, Homo sapien
ctgctcctcccctaaactccgatcactccccat

SEQ ID NO: 493862 - DNA, 33 bp, Homo sapien
ctgctcctcccctaaagtccgatcactccccat

SEQ ID NO: 493863 - DNA, 33 bp, Homo sapien
tgttttggttatgaaaaactctgcatagcaaat

SEQ ID NO: 493864 - DNA, 33 bp, Homo sapien
tgttttggttatgaaagactctgcatagcaaat

SEQ ID NO: 493865 - DNA, 33 bp, Homo sapien
caggtaggtggggaaaatccaaacaaatgagga

SEQ ID NO: 493866 - DNA, 33 bp, Homo sapien
caggtaggtggggaaagtccaaacaaatgagga

SEQ ID NO: 493867 - DNA, 33 bp, Homo sapien
caaaccctggttctgacattccacgttgtggga

SEQ ID NO: 493868 - DNA, 33 bp, Homo sapien
caaaccctggttctgatattccacgttgtggga

SEQ ID NO: 493869 - DNA, 33 bp, Homo sapien
gtgcccatggaatcataatctttgccaatcaca

SEQ ID NO: 493870 - DNA, 33 bp, Homo sapien
gtgcccatggaatcatcatctttgccaatcaca

SEQ ID NO: 493871 - DNA, 33 bp, Homo sapien
ctcactctctcaaaaaaattctgctcaatctac

SEQ ID NO: 493872 - DNA, 33 bp, Homo sapien
ctcactctctcaaaaacattctgctcaatctac

SEQ ID NO: 493873 - DNA, 33 bp, Homo sapien
gggaaaattctgggacaatgattccaaagatta

SEQ ID NO: 493874 - DNA, 33 bp, Homo sapien
gggaaaattctgggacgatgattccaaagatta

SEQ ID NO: 493875 - DNA, 33 bp, Homo sapien
catactgtatctgtagcaatgaggttttatgac

SEQ ID NO: 493876 - DNA, 33 bp, Homo sapien
catactgtatctgtagtaatgaggttttatgac

SEQ ID NO: 493877 - DNA, 33 bp, Homo sapien
ctgcaaagattccctacctccaaaggcctgttt

SEQ ID NO: 493878 - DNA, 33 bp, Homo sapien
ctgcaaagattccctatctccaaaggcctgttt

SEQ ID NO: 493879 - DNA, 33 bp, Homo sapien
atgtattatttttagaagcacttttaagtatag

SEQ ID NO: 493880 - DNA, 33 bp, Homo sapien
atgtattatttttagatgcacttttaagtatag

SEQ ID NO: 493881 - DNA, 33 bp, Homo sapien
gtttgtgctacttcagacaaagcatcatactta

SEQ ID NO: 493882 - DNA, 33 bp, Homo sapien
gtttgtgctacttcagccaaagcatcatactta

SEQ ID NO: 493883 - DNA, 33 bp, Homo sapien
agatgatcactgccaccaaaggctaagatgaag

SEQ ID NO: 493884 - DNA, 33 bp, Homo sapien
agatgatcactgccacgaaaggctaagatgaag

SEQ ID NO: 493885 - DNA, 33 bp, Homo sapien
cagaggaagaagaaccaacagaggagatgggaa

SEQ ID NO: 493886 - DNA, 33 bp, Homo sapien
cagaggaagaagaaccgacagaggagatgggaa

SEQ ID NO: 493887 - DNA, 33 bp, Homo sapien
aagatacaaaattcaacggactcatcaactcaa

SEQ ID NO: 493888 - DNA, 33 bp, Homo sapien
aagatacaaaattcaatggactcatcaactcaa

SEQ ID NO: 493889 - DNA, 33 bp, Homo sapien
aacatttgtgacagcaaatgaatcctacttaac

SEQ ID NO: 493890 - DNA, 33 bp, Homo sapien
aacatttgtgacagcatatgaatcctacttaac

SEQ ID NO: 493891 - DNA, 33 bp, Homo sapien
aggacaaaaaaggaaacaaagatatacacacag

SEQ ID NO: 493892 - DNA, 33 bp, Homo sapien
aggacaaaaaaggaaagaaagatatacacacag

SEQ ID NO: 493893 - DNA, 33 bp, Homo sapien
ctattccaaggagttacagtcaacatttgaata

SEQ ID NO: 493894 - DNA, 33 bp, Homo sapien
ctattccaaggagttatagtcaacatttgaata

SEQ ID NO: 493895 - DNA, 33 bp, Homo sapien
ttcctgcttttttctacgcctggtaagttttga

SEQ ID NO: 493896 - DNA, 33 bp, Homo sapien
ttcctgcttttttctatgcctggtaagttttga

SEQ ID NO: 493897 - DNA, 33 bp, Homo sapien
ataattatctctgtaacgatcactgtcctgttt

SEQ ID NO: 493898 - DNA, 33 bp, Homo sapien
ataattatctctgtaatgatcactgtcctgttt

SEQ ID NO: 493899 - DNA, 33 bp, Homo sapien
taattatttttctctacggagacaagacctttc

SEQ ID NO: 493900 - DNA, 33 bp, Homo sapien
taattatttttctctatggagacaagacctttc

SEQ ID NO: 493901 - DNA, 33 bp, Homo sapien
tcagttgagtaatcataagcacatgtctgagga

SEQ ID NO: 493902 - DNA, 33 bp, Homo sapien
tcagttgagtaatcatcagcacatgtctgagga

SEQ ID NO: 493903 - DNA, 33 bp, Homo sapien
aaataaagggaactccagagagctgcagaggac

SEQ ID NO: 493904 - DNA, 33 bp, Homo sapien
aaataaagggaactcccgagagctgcagaggac

SEQ ID NO: 493905 - DNA, 33 bp, Homo sapien
catctggagcaataaaaaatggtcaaaataaat

SEQ ID NO: 493906 - DNA, 33 bp, Homo sapien
catctggagcaataaagaatggtcaaaataaat

SEQ ID NO: 493907 - DNA, 33 bp, Homo sapien
tataacacgaaagtaacatttttcacaaagtca

SEQ ID NO: 493908 - DNA, 33 bp, Homo sapien
tataacacgaaagtaatatttttcacaaagtca

SEQ ID NO: 493909 - DNA, 33 bp, Homo sapien
ttctgcactaatttgaaatagaaatagattatc

SEQ ID NO: 493910 - DNA, 33 bp, Homo sapien
ttctgcactaatttgagatagaaatagattatc

SEQ ID NO: 493911 - DNA, 33 bp, Homo sapien
cgatttcctgattccacgcctttgcaccagatg

SEQ ID NO: 493912 - DNA, 33 bp, Homo sapien
cgatttcctgattccatgcctttgcaccagatg

SEQ ID NO: 493913 - DNA, 33 bp, Homo sapien
ttgcttagactttggaaagaggatctaatttct

SEQ ID NO: 493914 - DNA, 33 bp, Homo sapien
ttgcttagactttggagagaggatctaatttct

SEQ ID NO: 493915 - DNA, 33 bp, Homo sapien
agggcactgatttgaccggggcaaaaagttagt

SEQ ID NO: 493916 - DNA, 33 bp, Homo sapien
agggcactgatttgactggggcaaaaagttagt

SEQ ID NO: 493917 - DNA, 33 bp, Homo sapien
tcttgctcttccaaaacatagtttgccagactg

SEQ ID NO: 493918 - DNA, 33 bp, Homo sapien
tcttgctcttccaaaatatagtttgccagactg

SEQ ID NO: 493919 - DNA, 33 bp, Homo sapien
tttgatctgttatccacatttttgattgatata

SEQ ID NO: 493920 - DNA, 33 bp, Homo sapien
tttgatctgttatccatatttttgattgatata

SEQ ID NO: 493921 - DNA, 33 bp, Homo sapien
tgtaagtgtttgatgacggcattgaatgggagt

SEQ ID NO: 493922 - DNA, 33 bp, Homo sapien
tgtaagtgtttgatgatggcattgaatgggagt

SEQ ID NO: 493923 - DNA, 33 bp, Homo sapien
ccaatactcgaacattaaaagtaggaagaaaga

SEQ ID NO: 493924 - DNA, 33 bp, Homo sapien
ccaatactcgaacattgaaagtaggaagaaaga

SEQ ID NO: 493925 - DNA, 33 bp, Homo sapien
tatgttatcaaaacaagtgccactctgagtcag

SEQ ID NO: 493926 - DNA, 33 bp, Homo sapien
tatgttatcaaaacaattgccactctgagtcag

SEQ ID NO: 493927 - DNA, 33 bp, Homo sapien
catctacccaatggaaactaacatacatggtgg

SEQ ID NO: 493928 - DNA, 33 bp, Homo sapien
catctacccaatggaagctaacatacatggtgg

SEQ ID NO: 493929 - DNA, 33 bp, Homo sapien
ggtagacattcatcagacgatatatgcacctct

SEQ ID NO: 493930 - DNA, 33 bp, Homo sapien
ggtagacattcatcaggcgatatatgcacctct

SEQ ID NO: 493931 - DNA, 33 bp, Homo sapien
gtttcacaaatcaatcagactcattatgacttt

SEQ ID NO: 493932 - DNA, 33 bp, Homo sapien
gtttcacaaatcaatcggactcattatgacttt

SEQ ID NO: 493933 - DNA, 33 bp, Homo sapien
gacctgtttggtcacacatctagaattttctga

SEQ ID NO: 493934 - DNA, 33 bp, Homo sapien
gacctgtttggtcacagatctagaattttctga

SEQ ID NO: 493935 - DNA, 33 bp, Homo sapien
gactttgattttggaacccattgtttattcctt

SEQ ID NO: 493936 - DNA, 33 bp, Homo sapien
gactttgattttggaatccattgtttattcctt

SEQ ID NO: 493937 - DNA, 33 bp, Homo sapien
ctaccttgcttgctcagatttcttcaaagcctt

SEQ ID NO: 493938 - DNA, 33 bp, Homo sapien
ctaccttgcttgctcatatttcttcaaagcctt

SEQ ID NO: 493939 - DNA, 33 bp, Homo sapien
ataaattacataggcaatatagcactttgtaag

SEQ ID NO: 493940 - DNA, 33 bp, Homo sapien
ataaattacataggcagtatagcactttgtaag

SEQ ID NO: 493941 - DNA, 33 bp, Homo sapien
tcatatatctatctccaaatctttgactttact

SEQ ID NO: 493942 - DNA, 33 bp, Homo sapien
tcatatatctatctccgaatctttgactttact

SEQ ID NO: 493943 - DNA, 33 bp, Homo sapien
ctctgtgtacaggaagccatcttcagtggggca

SEQ ID NO: 493944 - DNA, 33 bp, Homo sapien
ctctgtgtacaggaaggcatcttcagtggggca

SEQ ID NO: 493945 - DNA, 33 bp, Homo sapien
gttggtaaaatgtagcacaccacttgccgtgtt

SEQ ID NO: 493946 - DNA, 33 bp, Homo sapien
gttggtaaaatgtagcgcaccacttgccgtgtt

SEQ ID NO: 493947 - DNA, 33 bp, Homo sapien
gcctgatcttgaaaaaatattgaatgtctgggt

SEQ ID NO: 493948 - DNA, 33 bp, Homo sapien
gcctgatcttgaaaaagtattgaatgtctgggt

SEQ ID NO: 493949 - DNA, 33 bp, Homo sapien
aatatatgggaataggcccaaggactgatgatt

SEQ ID NO: 493950 - DNA, 33 bp, Homo sapien
aatatatgggaatagggccaaggactgatgatt

SEQ ID NO: 493951 - DNA, 33 bp, Homo sapien
gttacaagctgtgccacgtacaaatatggtccc

SEQ ID NO: 493952 - DNA, 33 bp, Homo sapien
gttacaagctgtgccatgtacaaatatggtccc

SEQ ID NO: 493953 - DNA, 33 bp, Homo sapien
gtatccttgaaaacaactgaaagtatgtcttac

SEQ ID NO: 493954 - DNA, 33 bp, Homo sapien
gtatccttgaaaacaattgaaagtatgtcttac

SEQ ID NO: 493955 - DNA, 33 bp, Homo sapien
tagcagttgagtatcgcagcaatttaatcatgc

SEQ ID NO: 493956 - DNA, 33 bp, Homo sapien
tagcagttgagtatcgtagcaatttaatcatgc

SEQ ID NO: 493957 - DNA, 33 bp, Homo sapien
cctactctgaaagaaaccaccacaaagaccatc

SEQ ID NO: 493958 - DNA, 33 bp, Homo sapien
cctactctgaaagaaatcaccacaaagaccatc

SEQ ID NO: 493959 - DNA, 33 bp, Homo sapien
tccaagagtgtcagcaactcaactcaaattctg

SEQ ID NO: 493960 - DNA, 33 bp, Homo sapien
tccaagagtgtcagcacctcaactcaaattctg

SEQ ID NO: 493961 - DNA, 33 bp, Homo sapien
gtcccttcctttgtgcaacaagtgaaactgtgt

SEQ ID NO: 493962 - DNA, 33 bp, Homo sapien
gtcccttcctttgtgcgacaagtgaaactgtgt

SEQ ID NO: 493963 - DNA, 33 bp, Homo sapien
ttctggatcttgtttgaagaaagctccccaaaa

SEQ ID NO: 493964 - DNA, 33 bp, Homo sapien
ttctggatcttgtttggagaaagctccccaaaa

SEQ ID NO: 493965 - DNA, 33 bp, Homo sapien
aaaatactggaaatggaaaactgtattctaatt

SEQ ID NO: 493966 - DNA, 33 bp, Homo sapien
aaaatactggaaatggcaaactgtattctaatt

SEQ ID NO: 493967 - DNA, 33 bp, Homo sapien
gcaccatcttttccaggaatcttttctggctct

SEQ ID NO: 493968 - DNA, 33 bp, Homo sapien
gcaccatcttttccagtaatcttttctggctct

SEQ ID NO: 493969 - DNA, 33 bp, Homo sapien
actagtggcagtatgcaaactgttcgttactgg

SEQ ID NO: 493970 - DNA, 33 bp, Homo sapien
actagtggcagtatgcgaactgttcgttactgg

SEQ ID NO: 493971 - DNA, 33 bp, Homo sapien
tacacatcaattcacacaacttggtttgaattt

SEQ ID NO: 493972 - DNA, 33 bp, Homo sapien
tacacatcaattcacataacttggtttgaattt

SEQ ID NO: 493973 - DNA, 33 bp, Homo sapien
gaaccaagaagcccaaatctagaaatctacaat

SEQ ID NO: 493974 - DNA, 33 bp, Homo sapien
gaaccaagaagcccaagtctagaaatctacaat

SEQ ID NO: 493975 - DNA, 33 bp, Homo sapien
atatcccatggcatcactattcctcttcttcag

SEQ ID NO: 493976 - DNA, 33 bp, Homo sapien
atatcccatggcatcattattcctcttcttcag

SEQ ID NO: 493977 - DNA, 33 bp, Homo sapien
catcctcctaagcaacactggctcactgaatgc

SEQ ID NO: 493978 - DNA, 33 bp, Homo sapien
catcctcctaagcaacgctggctcactgaatgc

SEQ ID NO: 493979 - DNA, 33 bp, Homo sapien
atatttttcatccccaagttctgagttttgctc

SEQ ID NO: 493980 - DNA, 33 bp, Homo sapien
atatttttcatccccacgttctgagttttgctc

SEQ ID NO: 493981 - DNA, 33 bp, Homo sapien
actttttgaggtataaaggacatacaaaaagct

SEQ ID NO: 493982 - DNA, 33 bp, Homo sapien
actttttgaggtataatggacatacaaaaagct

SEQ ID NO: 493983 - DNA, 33 bp, Homo sapien
atcaaaatcacagtgcaatatcctctcatacca

SEQ ID NO: 493984 - DNA, 33 bp, Homo sapien
atcaaaatcacagtgcgatatcctctcatacca

SEQ ID NO: 493985 - DNA, 33 bp, Homo sapien
ttaaaggttaagaataccattgtccagtatgtc

SEQ ID NO: 493986 - DNA, 33 bp, Homo sapien
ttaaaggttaagaatatcattgtccagtatgtc

SEQ ID NO: 493987 - DNA, 33 bp, Homo sapien
catacaaattatactcagagcatagctgcattc

SEQ ID NO: 493988 - DNA, 33 bp, Homo sapien
catacaaattatactcggagcatagctgcattc

SEQ ID NO: 493989 - DNA, 33 bp, Homo sapien
ttgtttggcaatcacaataagtgttgagataga

SEQ ID NO: 493990 - DNA, 33 bp, Homo sapien
ttgtttggcaatcacagtaagtgttgagataga

SEQ ID NO: 493991 - DNA, 33 bp, Homo sapien
catttgggaaacatcaaaaaagaggctctgact

SEQ ID NO: 493992 - DNA, 33 bp, Homo sapien
catttgggaaacatcagaaaagaggctctgact

SEQ ID NO: 493993 - DNA, 33 bp, Homo sapien
agtgagccttgccaccaagcattgaatatcttt

SEQ ID NO: 493994 - DNA, 33 bp, Homo sapien
agtgagccttgccaccgagcattgaatatcttt

SEQ ID NO: 493995 - DNA, 33 bp, Homo sapien
tctccattacccaccaaactaagtcacttagca

SEQ ID NO: 493996 - DNA, 33 bp, Homo sapien
tctccattacccaccagactaagtcacttagca

SEQ ID NO: 493997 - DNA, 33 bp, Homo sapien
atttgcctcaaatacaccttatgaattctcact

SEQ ID NO: 493998 - DNA, 33 bp, Homo sapien
atttgcctcaaatacatcttatgaattctcact

SEQ ID NO: 493999 - DNA, 33 bp, Homo sapien
aaacagatccgatgggcatatcgcctggataaa

SEQ ID NO: 494000 - DNA, 33 bp, Homo sapien
aaacagatccgatgggtatatcgcctggataaa

SEQ ID NO: 494001 - DNA, 33 bp, Homo sapien
ttcttggctatgagcaactcaggagacactatt

SEQ ID NO: 494002 - DNA, 33 bp, Homo sapien
ttcttggctatgagcagctcaggagacactatt

SEQ ID NO: 494003 - DNA, 33 bp, Homo sapien
ataataggtgtgagtacgtttcactattctctt

SEQ ID NO: 494004 - DNA, 33 bp, Homo sapien
ataataggtgtgagtatgtttcactattctctt

SEQ ID NO: 494005 - DNA, 33 bp, Homo sapien
tgctattcattggcaacagatgagatgattaat

SEQ ID NO: 494006 - DNA, 33 bp, Homo sapien
tgctattcattggcaagagatgagatgattaat

SEQ ID NO: 494007 - DNA, 33 bp, Homo sapien
taggtatgcaatgttaaaaggataaatgactta

SEQ ID NO: 494008 - DNA, 33 bp, Homo sapien
taggtatgcaatgttagaaggataaatgactta

SEQ ID NO: 494009 - DNA, 33 bp, Homo sapien
aatgcaatataaatgacgagggtgtctcaatag

SEQ ID NO: 494010 - DNA, 33 bp, Homo sapien
aatgcaatataaatgatgagggtgtctcaatag

SEQ ID NO: 494011 - DNA, 33 bp, Homo sapien
ggctcagtgctcacaactggggctctttcaaga

SEQ ID NO: 494012 - DNA, 33 bp, Homo sapien
ggctcagtgctcacaattggggctctttcaaga

SEQ ID NO: 494013 - DNA, 33 bp, Homo sapien
tactacatgaaagacaatctttgacacaatcag

SEQ ID NO: 494014 - DNA, 33 bp, Homo sapien
tactacatgaaagacagtctttgacacaatcag

SEQ ID NO: 494015 - DNA, 33 bp, Homo sapien
cgtcagtctttttttcaagccatttaatgggta

SEQ ID NO: 494016 - DNA, 33 bp, Homo sapien
cgtcagtctttttttctagccatttaatgggta

SEQ ID NO: 494017 - DNA, 33 bp, Homo sapien
attaaggtctcagtggaacttaccagaggctct

SEQ ID NO: 494018 - DNA, 33 bp, Homo sapien
attaaggtctcagtgggacttaccagaggctct

SEQ ID NO: 494019 - DNA, 33 bp, Homo sapien
gatgatagccagctaggcaatgaagatgttagt

SEQ ID NO: 494020 - DNA, 33 bp, Homo sapien
gatgatagccagctagtcaatgaagatgttagt

SEQ ID NO: 494021 - DNA, 33 bp, Homo sapien
gtgttctcttttcacaggcccacttctcttcca

SEQ ID NO: 494022 - DNA, 33 bp, Homo sapien
gtgttctcttttcacatgcccacttctcttcca

SEQ ID NO: 494023 - DNA, 33 bp, Homo sapien
ccttattcctgacatacctgcaattgtattagc

SEQ ID NO: 494024 - DNA, 33 bp, Homo sapien
ccttattcctgacatagctgcaattgtattagc

SEQ ID NO: 494025 - DNA, 33 bp, Homo sapien
ttgggagatagcaataataagctacaataattg

SEQ ID NO: 494026 - DNA, 33 bp, Homo sapien
ttgggagatagcaatagtaagctacaataattg

SEQ ID NO: 494027 - DNA, 33 bp, Homo sapien
tatgattttacccagacgatttcagaaacagag

SEQ ID NO: 494028 - DNA, 33 bp, Homo sapien
tatgattttacccagatgatttcagaaacagag

SEQ ID NO: 494029 - DNA, 33 bp, Homo sapien
tctgttcattagaataccttgtgttcaaagctg

SEQ ID NO: 494030 - DNA, 33 bp, Homo sapien
tctgttcattagaatatcttgtgttcaaagctg

SEQ ID NO: 494031 - DNA, 33 bp, Homo sapien
gtaattgctagacttacataacattgctaaatg

SEQ ID NO: 494032 - DNA, 33 bp, Homo sapien
gtaattgctagacttatataacattgctaaatg

SEQ ID NO: 494033 - DNA, 33 bp, Homo sapien
aaaataacaaataatcaattcaaatggtgtcac

SEQ ID NO: 494034 - DNA, 33 bp, Homo sapien
aaaataacaaataatcgattcaaatggtgtcac

SEQ ID NO: 494035 - DNA, 33 bp, Homo sapien
gggatttctcatgacaacttccttaaaggaatc

SEQ ID NO: 494036 - DNA, 33 bp, Homo sapien
gggatttctcatgacaccttccttaaaggaatc

SEQ ID NO: 494037 - DNA, 33 bp, Homo sapien
tatttttgtgacctaacagtgggaaaggatttc

SEQ ID NO: 494038 - DNA, 33 bp, Homo sapien
tatttttgtgacctaagagtgggaaaggatttc

SEQ ID NO: 494039 - DNA, 33 bp, Homo sapien
ttatttaattcgacaccgtgatttaaaaattca

SEQ ID NO: 494040 - DNA, 33 bp, Homo sapien
ttatttaattcgacactgtgatttaaaaattca

SEQ ID NO: 494041 - DNA, 33 bp, Homo sapien
gagagataggtagatgaaaaataggtatatgtt

SEQ ID NO: 494042 - DNA, 33 bp, Homo sapien
gagagataggtagatgtaaaataggtatatgtt

SEQ ID NO: 494043 - DNA, 33 bp, Homo sapien
gtatggtttataaaggcatggctaagtttacat

SEQ ID NO: 494044 - DNA, 33 bp, Homo sapien
gtatggtttataaaggtatggctaagtttacat

SEQ ID NO: 494045 - DNA, 33 bp, Homo sapien
agaataagggacatgaaccatgcttaagtcatc

SEQ ID NO: 494046 - DNA, 33 bp, Homo sapien
agaataagggacatgagccatgcttaagtcatc

SEQ ID NO: 494047 - DNA, 33 bp, Homo sapien
tttcagtatgcttctcacagactctatttgagg

SEQ ID NO: 494048 - DNA, 33 bp, Homo sapien
tttcagtatgcttctcgcagactctatttgagg

SEQ ID NO: 494049 - DNA, 33 bp, Homo sapien
atctccacatttgccactgaggattgaggactt

SEQ ID NO: 494050 - DNA, 33 bp, Homo sapien
atctccacatttgccattgaggattgaggactt

SEQ ID NO: 494051 - DNA, 33 bp, Homo sapien
acctcacctcattctacgctagtctaattaatt

SEQ ID NO: 494052 - DNA, 33 bp, Homo sapien
acctcacctcattctatgctagtctaattaatt

SEQ ID NO: 494053 - DNA, 33 bp, Homo sapien
aagcacccaactggaaactggtaaaacaaccac

SEQ ID NO: 494054 - DNA, 33 bp, Homo sapien
aagcacccaactggaacctggtaaaacaaccac

SEQ ID NO: 494055 - DNA, 33 bp, Homo sapien
tatctttttttgaacaatgtgaatcatttttga

SEQ ID NO: 494056 - DNA, 33 bp, Homo sapien
tatctttttttgaacagtgtgaatcatttttga

SEQ ID NO: 494057 - DNA, 33 bp, Homo sapien
cccttcattgcttatcaaaaccttttaggtaat

SEQ ID NO: 494058 - DNA, 33 bp, Homo sapien
cccttcattgcttatcgaaaccttttaggtaat

SEQ ID NO: 494059 - DNA, 33 bp, Homo sapien
attcatttcttatcaaaagctacccatatctag

SEQ ID NO: 494060 - DNA, 33 bp, Homo sapien
attcatttcttatcaagagctacccatatctag

SEQ ID NO: 494061 - DNA, 33 bp, Homo sapien
ttatagaatttttgagaatggtaagcaagtatt

SEQ ID NO: 494062 - DNA, 33 bp, Homo sapien
ttatagaatttttgaggatggtaagcaagtatt

SEQ ID NO: 494063 - DNA, 33 bp, Homo sapien
ttgcccctagtcttcaaacacacaagcaaacca

SEQ ID NO: 494064 - DNA, 33 bp, Homo sapien
ttgcccctagtcttcatacacacaagcaaacca

SEQ ID NO: 494065 - DNA, 33 bp, Homo sapien
gcaagtgaataaggtcccgaatgtcagcttttc

SEQ ID NO: 494066 - DNA, 33 bp, Homo sapien
gcaagtgaataaggtcgcgaatgtcagcttttc

SEQ ID NO: 494067 - DNA, 33 bp, Homo sapien
acttgatagatctaccacaaacactttcttaaa

SEQ ID NO: 494068 - DNA, 33 bp, Homo sapien
acttgatagatctaccgcaaacactttcttaaa

SEQ ID NO: 494069 - DNA, 33 bp, Homo sapien
ttacagccaaagctacagagagcacagactaaa

SEQ ID NO: 494070 - DNA, 33 bp, Homo sapien
ttacagccaaagctacggagagcacagactaaa

SEQ ID NO: 494071 - DNA, 33 bp, Homo sapien
gactaaataatgggaaacttatatgtgaaagca

SEQ ID NO: 494072 - DNA, 33 bp, Homo sapien
gactaaataatgggaatcttatatgtgaaagca

SEQ ID NO: 494073 - DNA, 33 bp, Homo sapien
ccaaacatgagatcatcacacttataactctct

SEQ ID NO: 494074 - DNA, 33 bp, Homo sapien
ccaaacatgagatcattacacttataactctct

SEQ ID NO: 494075 - DNA, 33 bp, Homo sapien
tttaagtccccaaataaattttcatgtcacaaa

SEQ ID NO: 494076 - DNA, 33 bp, Homo sapien
tttaagtccccaaatacattttcatgtcacaaa

SEQ ID NO: 494077 - DNA, 33 bp, Homo sapien
cttgcttcagtagtaacaagagctccgtggggg

SEQ ID NO: 494078 - DNA, 33 bp, Homo sapien
cttgcttcagtagtaagaagagctccgtggggg

SEQ ID NO: 494079 - DNA, 33 bp, Homo sapien
aaaaataatcacctatcacacgtagcacaatat

SEQ ID NO: 494080 - DNA, 33 bp, Homo sapien
aaaaataatcacctattacacgtagcacaatat

SEQ ID NO: 494081 - DNA, 33 bp, Homo sapien
ctgaagttgtgatgcaatgactacagattacct

SEQ ID NO: 494082 - DNA, 33 bp, Homo sapien
ctgaagttgtgatgcagtgactacagattacct

SEQ ID NO: 494083 - DNA, 33 bp, Homo sapien
agatatgagccctttccggtaaaaagcaagtgg

SEQ ID NO: 494084 - DNA, 33 bp, Homo sapien
agatatgagccctttctggtaaaaagcaagtgg

SEQ ID NO: 494085 - DNA, 33 bp, Homo sapien
atagcatgcactgataaaaacctagatgttcta

SEQ ID NO: 494086 - DNA, 33 bp, Homo sapien
atagcatgcactgatacaaacctagatgttcta

SEQ ID NO: 494087 - DNA, 33 bp, Homo sapien
ttcaatgtaataggtacgttagactttgtaaaa

SEQ ID NO: 494088 - DNA, 33 bp, Homo sapien
ttcaatgtaataggtatgttagactttgtaaaa

SEQ ID NO: 494089 - DNA, 33 bp, Homo sapien
ccaatacagcagtactaactataagctggcagg

SEQ ID NO: 494090 - DNA, 33 bp, Homo sapien
ccaatacagcagtactgactataagctggcagg

SEQ ID NO: 494091 - DNA, 33 bp, Homo sapien
ggactccctagacagcaatacgatcactgcttc

SEQ ID NO: 494092 - DNA, 33 bp, Homo sapien
ggactccctagacagccatacgatcactgcttc

SEQ ID NO: 494093 - DNA, 33 bp, Homo sapien
gacaccatttagctgggattatgatgtcattac

SEQ ID NO: 494094 - DNA, 33 bp, Homo sapien
gacaccatttagctggtattatgatgtcattac

SEQ ID NO: 494095 - DNA, 33 bp, Homo sapien
cacaatctcttccctgaaaaaaattgctccttt

SEQ ID NO: 494096 - DNA, 33 bp, Homo sapien
cacaatctcttccctgcaaaaaattgctccttt

SEQ ID NO: 494097 - DNA, 33 bp, Homo sapien
ggaagtctaagccaaaattcctcatgaagagct

SEQ ID NO: 494098 - DNA, 33 bp, Homo sapien
ggaagtctaagccaaagttcctcatgaagagct

SEQ ID NO: 494099 - DNA, 33 bp, Homo sapien
ccaatttccaacagtaagtcgttggcccacaaa

SEQ ID NO: 494100 - DNA, 33 bp, Homo sapien
ccaatttccaacagtatgtcgttggcccacaaa

SEQ ID NO: 494101 - DNA, 33 bp, Homo sapien
ggtgtgctcagagatacgtgattagtgcttttc

SEQ ID NO: 494102 - DNA, 33 bp, Homo sapien
ggtgtgctcagagatatgtgattagtgcttttc

SEQ ID NO: 494103 - DNA, 33 bp, Homo sapien
gaagggaaggtatataatagatggtcagattgg

SEQ ID NO: 494104 - DNA, 33 bp, Homo sapien
gaagggaaggtatatagtagatggtcagattgg

SEQ ID NO: 494105 - DNA, 33 bp, Homo sapien
atttggataaattgagaaaaactaatagccttt

SEQ ID NO: 494106 - DNA, 33 bp, Homo sapien
atttggataaattgaggaaaactaatagccttt

SEQ ID NO: 494107 - DNA, 33 bp, Homo sapien
ccatcttcctgagagacgttaaatggatttgat

SEQ ID NO: 494108 - DNA, 33 bp, Homo sapien
ccatcttcctgagagaggttaaatggatttgat

SEQ ID NO: 494109 - DNA, 33 bp, Homo sapien
ttacacttctcagacagcctaattgcaactttg

SEQ ID NO: 494110 - DNA, 33 bp, Homo sapien
ttacacttctcagacatcctaattgcaactttg

SEQ ID NO: 494111 - DNA, 33 bp, Homo sapien
tttctctggaaatctccaactaggccacttcct

SEQ ID NO: 494112 - DNA, 33 bp, Homo sapien
tttctctggaaatctctaactaggccacttcct

SEQ ID NO: 494113 - DNA, 33 bp, Homo sapien
caaaatcatggctccacctctgtgatattttga

SEQ ID NO: 494114 - DNA, 33 bp, Homo sapien
caaaatcatggctccatctctgtgatattttga

SEQ ID NO: 494115 - DNA, 33 bp, Homo sapien
gtcagtcattcttccaagcacaaataatggttc

SEQ ID NO: 494116 - DNA, 33 bp, Homo sapien
gtcagtcattcttccatgcacaaataatggttc

SEQ ID NO: 494117 - DNA, 33 bp, Homo sapien
atgactgacagacaaactaagattattcagcct

SEQ ID NO: 494118 - DNA, 33 bp, Homo sapien
atgactgacagacaaagtaagattattcagcct

SEQ ID NO: 494119 - DNA, 33 bp, Homo sapien
ttccttgcagtgtcaggctctcttcattcattt

SEQ ID NO: 494120 - DNA, 33 bp, Homo sapien
ttccttgcagtgtcagtctctcttcattcattt

SEQ ID NO: 494121 - DNA, 33 bp, Homo sapien
gtggcatctaaaactacataagtggatttttaa

SEQ ID NO: 494122 - DNA, 33 bp, Homo sapien
gtggcatctaaaactatataagtggatttttaa

SEQ ID NO: 494123 - DNA, 33 bp, Homo sapien
ttttaagacgtaataaaacagatgtcacgtaag

SEQ ID NO: 494124 - DNA, 33 bp, Homo sapien
ttttaagacgtaataagacagatgtcacgtaag

SEQ ID NO: 494125 - DNA, 33 bp, Homo sapien
ttaatcataggggtgaactattccagtttgcat

SEQ ID NO: 494126 - DNA, 33 bp, Homo sapien
ttaatcataggggtgatctattccagtttgcat

SEQ ID NO: 494127 - DNA, 33 bp, Homo sapien
cctaaagtcaatggaaaggtaagaattctaaga

SEQ ID NO: 494128 - DNA, 33 bp, Homo sapien
cctaaagtcaatggaagggtaagaattctaaga

SEQ ID NO: 494129 - DNA, 33 bp, Homo sapien
ggttccccaagtgcagacacaagtggcaatccc

SEQ ID NO: 494130 - DNA, 33 bp, Homo sapien
ggttccccaagtgcaggcacaagtggcaatccc

SEQ ID NO: 494131 - DNA, 33 bp, Homo sapien
ctcccacgtccttgacagagcagattttaaatc

SEQ ID NO: 494132 - DNA, 33 bp, Homo sapien
ctcccacgtccttgaccgagcagattttaaatc

SEQ ID NO: 494133 - DNA, 33 bp, Homo sapien
tcctgccaagtttaacgcaacatccagggacaa

SEQ ID NO: 494134 - DNA, 33 bp, Homo sapien
tcctgccaagtttaactcaacatccagggacaa

SEQ ID NO: 494135 - DNA, 33 bp, Homo sapien
agaagataggaaagcacacttaaccaggttgac

SEQ ID NO: 494136 - DNA, 33 bp, Homo sapien
agaagataggaaagcagacttaaccaggttgac

SEQ ID NO: 494137 - DNA, 33 bp, Homo sapien
gaaccaaagatacttgaaaactctgcaacttta

SEQ ID NO: 494138 - DNA, 33 bp, Homo sapien
gaaccaaagatacttggaaactctgcaacttta

SEQ ID NO: 494139 - DNA, 33 bp, Homo sapien
ttcagtccaaccagtgaatttatggtgagtaag

SEQ ID NO: 494140 - DNA, 33 bp, Homo sapien
ttcagtccaaccagtgcatttatggtgagtaag

SEQ ID NO: 494141 - DNA, 33 bp, Homo sapien
ctgaaggtttcctgaacaattaccttgattctg

SEQ ID NO: 494142 - DNA, 33 bp, Homo sapien
ctgaaggtttcctgaagaattaccttgattctg

SEQ ID NO: 494143 - DNA, 33 bp, Homo sapien
atccaaatgggcaaaccctgaagactgctatag

SEQ ID NO: 494144 - DNA, 33 bp, Homo sapien
atccaaatgggcaaactctgaagactgctatag

SEQ ID NO: 494145 - DNA, 33 bp, Homo sapien
gatctcattacctgtccctaatacagagtctga

SEQ ID NO: 494146 - DNA, 33 bp, Homo sapien
gatctcattacctgtctctaatacagagtctga

SEQ ID NO: 494147 - DNA, 33 bp, Homo sapien
attttctccagaaaatgaaaggtcttggcctga

SEQ ID NO: 494148 - DNA, 33 bp, Homo sapien
attttctccagaaaattaaaggtcttggcctga

SEQ ID NO: 494149 - DNA, 33 bp, Homo sapien
ccaccctttctctacaacagcaactgaggtgag

SEQ ID NO: 494150 - DNA, 33 bp, Homo sapien
ccaccctttctctacagcagcaactgaggtgag

SEQ ID NO: 494151 - DNA, 33 bp, Homo sapien
cctgttctcagagcaacgcagcaaacaatttaa

SEQ ID NO: 494152 - DNA, 33 bp, Homo sapien
cctgttctcagagcaatgcagcaaacaatttaa

SEQ ID NO: 494153 - DNA, 33 bp, Homo sapien
caggaggcaaaataaaagggacatcgaattgtt

SEQ ID NO: 494154 - DNA, 33 bp, Homo sapien
caggaggcaaaataaaggggacatcgaattgtt

SEQ ID NO: 494155 - DNA, 33 bp, Homo sapien
ttagaagacaacaaagaaatgggctgggaagga

SEQ ID NO: 494156 - DNA, 33 bp, Homo sapien
ttagaagacaacaaaggaatgggctgggaagga

SEQ ID NO: 494157 - DNA, 33 bp, Homo sapien
ccatttgcagaggaaactgtatttcatcctgaa

SEQ ID NO: 494158 - DNA, 33 bp, Homo sapien
ccatttgcagaggaaagtgtatttcatcctgaa

SEQ ID NO: 494159 - DNA, 33 bp, Homo sapien
ttaaggaggaagctaacgagaggaggctgtatg

SEQ ID NO: 494160 - DNA, 33 bp, Homo sapien
ttaaggaggaagctaatgagaggaggctgtatg

SEQ ID NO: 494161 - DNA, 33 bp, Homo sapien
gtgcctcaaagatcaactgaacagtgaaaaagg

SEQ ID NO: 494162 - DNA, 33 bp, Homo sapien
gtgcctcaaagatcaagtgaacagtgaaaaagg

SEQ ID NO: 494163 - DNA, 33 bp, Homo sapien
caatctcattgagaagccaaaaaatacaacaaa

SEQ ID NO: 494164 - DNA, 33 bp, Homo sapien
caatctcattgagaaggcaaaaaatacaacaaa

SEQ ID NO: 494165 - DNA, 33 bp, Homo sapien
tggtatccaggaagggaatagtataaggtaaac

SEQ ID NO: 494166 - DNA, 33 bp, Homo sapien
tggtatccaggaaggggatagtataaggtaaac

SEQ ID NO: 494167 - DNA, 33 bp, Homo sapien
ccctaaccaaaaacagaaaatagctcagaagtc

SEQ ID NO: 494168 - DNA, 33 bp, Homo sapien
ccctaaccaaaaacaggaaatagctcagaagtc

SEQ ID NO: 494169 - DNA, 33 bp, Homo sapien
agagagatgctttgtaccctttacccagtttcc

SEQ ID NO: 494170 - DNA, 33 bp, Homo sapien
agagagatgctttgtatcctttacccagtttcc

SEQ ID NO: 494171 - DNA, 33 bp, Homo sapien
tttgcctcaatttataagtcaaaaatttataaa

SEQ ID NO: 494172 - DNA, 33 bp, Homo sapien
tttgcctcaatttataggtcaaaaatttataaa

SEQ ID NO: 494173 - DNA, 33 bp, Homo sapien
tgtggaattggcaaaagaatagacaaatggatc

SEQ ID NO: 494174 - DNA, 33 bp, Homo sapien
tgtggaattggcaaaataatagacaaatggatc

SEQ ID NO: 494175 - DNA, 33 bp, Homo sapien
ataaatatctgagtgacgcactaattgaaaatg

SEQ ID NO: 494176 - DNA, 33 bp, Homo sapien
ataaatatctgagtgatgcactaattgaaaatg

SEQ ID NO: 494177 - DNA, 33 bp, Homo sapien
ccaataattatattacacggggcaagctgttga

SEQ ID NO: 494178 - DNA, 33 bp, Homo sapien
ccaataattatattacgcggggcaagctgttga

SEQ ID NO: 494179 - DNA, 33 bp, Homo sapien
ttataccaagtgttaacaatagtacctgacacg

SEQ ID NO: 494180 - DNA, 33 bp, Homo sapien
ttataccaagtgttaagaatagtacctgacacg

SEQ ID NO: 494181 - DNA, 33 bp, Homo sapien
aaaagataacaaagaaagtggagttactcatag

SEQ ID NO: 494182 - DNA, 33 bp, Homo sapien
aaaagataacaaagaatgtggagttactcatag

SEQ ID NO: 494183 - DNA, 33 bp, Homo sapien
acttgacttcagtttacgagttaactccatgta

SEQ ID NO: 494184 - DNA, 33 bp, Homo sapien
acttgacttcagtttatgagttaactccatgta

SEQ ID NO: 494185 - DNA, 33 bp, Homo sapien
tggagtgaagaagaaaaggcctgagagcattag

SEQ ID NO: 494186 - DNA, 33 bp, Homo sapien
tggagtgaagaagaaagggcctgagagcattag

SEQ ID NO: 494187 - DNA, 33 bp, Homo sapien
cagcattgaatatctccattttaaggaattctt

SEQ ID NO: 494188 - DNA, 33 bp, Homo sapien
cagcattgaatatctcgattttaaggaattctt

SEQ ID NO: 494189 - DNA, 33 bp, Homo sapien
agcccataaggagcaaaccccaaattccaaaaa

SEQ ID NO: 494190 - DNA, 33 bp, Homo sapien
agcccataaggagcaagccccaaattccaaaaa

SEQ ID NO: 494191 - DNA, 33 bp, Homo sapien
ttcatgagaccttactcagaatcccgtggtgaa

SEQ ID NO: 494192 - DNA, 33 bp, Homo sapien
ttcatgagaccttactgagaatcccgtggtgaa

SEQ ID NO: 494193 - DNA, 33 bp, Homo sapien
tggaatccgaagagtacagccatttgctctaag

SEQ ID NO: 494194 - DNA, 33 bp, Homo sapien
tggaatccgaagagtatagccatttgctctaag

SEQ ID NO: 494195 - DNA, 33 bp, Homo sapien
gctgcatccttttccaagtaccactaaccttac

SEQ ID NO: 494196 - DNA, 33 bp, Homo sapien
gctgcatccttttccaggtaccactaaccttac

SEQ ID NO: 494197 - DNA, 33 bp, Homo sapien
ctcttaaactcgcccagtggaaaaatgagaccc

SEQ ID NO: 494198 - DNA, 33 bp, Homo sapien
ctcttaaactcgcccattggaaaaatgagaccc

SEQ ID NO: 494199 - DNA, 33 bp, Homo sapien
gtagaaggctgcaaatcagaactgtttacaagt

SEQ ID NO: 494200 - DNA, 33 bp, Homo sapien
gtagaaggctgcaaattagaactgtttacaagt

SEQ ID NO: 494201 - DNA, 33 bp, Homo sapien
atacttacaacagtcccatgaagtgtgtattat

SEQ ID NO: 494202 - DNA, 33 bp, Homo sapien
atacttacaacagtcctatgaagtgtgtattat

SEQ ID NO: 494203 - DNA, 33 bp, Homo sapien
tcttgagccactgtgaataaatactttggtcct

SEQ ID NO: 494204 - DNA, 33 bp, Homo sapien
tcttgagccactgtgagtaaatactttggtcct

SEQ ID NO: 494205 - DNA, 33 bp, Homo sapien
ctgctttagtttgtgcaagataagcaactctct

SEQ ID NO: 494206 - DNA, 33 bp, Homo sapien
ctgctttagtttgtgcgagataagcaactctct

SEQ ID NO: 494207 - DNA, 33 bp, Homo sapien
ggaaggatgctctccaacatgattagaccattc

SEQ ID NO: 494208 - DNA, 33 bp, Homo sapien
ggaaggatgctctccaccatgattagaccattc

SEQ ID NO: 494209 - DNA, 33 bp, Homo sapien
cactcgcctttatgcaatcctgatgtttttgtc

SEQ ID NO: 494210 - DNA, 33 bp, Homo sapien
cactcgcctttatgcagtcctgatgtttttgtc

SEQ ID NO: 494211 - DNA, 33 bp, Homo sapien
actttttatgctaagccacactagcctgctgca

SEQ ID NO: 494212 - DNA, 33 bp, Homo sapien
actttttatgctaagcgacactagcctgctgca

SEQ ID NO: 494213 - DNA, 33 bp, Homo sapien
tatttttttccttgcactacccccaagagcagt

SEQ ID NO: 494214 - DNA, 33 bp, Homo sapien
tatttttttccttgcagtacccccaagagcagt

SEQ ID NO: 494215 - DNA, 33 bp, Homo sapien
ctgtccctggccctcacatccaatgtgtcgtga

SEQ ID NO: 494216 - DNA, 33 bp, Homo sapien
ctgtccctggccctcatatccaatgtgtcgtga

SEQ ID NO: 494217 - DNA, 33 bp, Homo sapien
tctttaatgttttcccactgtgcttgggatgaa

SEQ ID NO: 494218 - DNA, 33 bp, Homo sapien
tctttaatgttttcccgctgtgcttgggatgaa

SEQ ID NO: 494219 - DNA, 33 bp, Homo sapien
ccaaatactcaaacggaccctctgcagatttct

SEQ ID NO: 494220 - DNA, 33 bp, Homo sapien
ccaaatactcaaacgggccctctgcagatttct

SEQ ID NO: 494221 - DNA, 33 bp, Homo sapien
tcgacaaccagatagaacctctgtgctggtttg

SEQ ID NO: 494222 - DNA, 33 bp, Homo sapien
tcgacaaccagatagagcctctgtgctggtttg

SEQ ID NO: 494223 - DNA, 33 bp, Homo sapien
tatcatttccgaggtcgactataattctgtttc

SEQ ID NO: 494224 - DNA, 33 bp, Homo sapien
tatcatttccgaggtctactataattctgtttc

SEQ ID NO: 494225 - DNA, 33 bp, Homo sapien
gaagaaaataaaagacaaaatggtagaaagatc

SEQ ID NO: 494226 - DNA, 33 bp, Homo sapien
gaagaaaataaaagacgaaatggtagaaagatc

SEQ ID NO: 494227 - DNA, 33 bp, Homo sapien
aatgcaaggggctgcaaattctgattcttacac

SEQ ID NO: 494228 - DNA, 33 bp, Homo sapien
aatgcaaggggctgcagattctgattcttacac

SEQ ID NO: 494229 - DNA, 33 bp, Homo sapien
tgttcattcaaagcaaacaaaaattcagtaata

SEQ ID NO: 494230 - DNA, 33 bp, Homo sapien
tgttcattcaaagcaaccaaaaattcagtaata

SEQ ID NO: 494231 - DNA, 33 bp, Homo sapien
atgtctcaagactttcaatggccttattttata

SEQ ID NO: 494232 - DNA, 33 bp, Homo sapien
atgtctcaagactttccatggccttattttata

SEQ ID NO: 494233 - DNA, 33 bp, Homo sapien
atctcagacaccatccgaagagagggcagaggt

SEQ ID NO: 494234 - DNA, 33 bp, Homo sapien
atctcagacaccatcctaagagagggcagaggt

SEQ ID NO: 494235 - DNA, 33 bp, Homo sapien
tgcagggaagtgaggcaatctgactgctgattt

SEQ ID NO: 494236 - DNA, 33 bp, Homo sapien
tgcagggaagtgaggcgatctgactgctgattt

SEQ ID NO: 494237 - DNA, 33 bp, Homo sapien
tgacaacattaaaacaactccattgcttttatg

SEQ ID NO: 494238 - DNA, 33 bp, Homo sapien
tgacaacattaaaacatctccattgcttttatg

SEQ ID NO: 494239 - DNA, 33 bp, Homo sapien
cctaagatcttatgcagtctggactgtgatgtt

SEQ ID NO: 494240 - DNA, 33 bp, Homo sapien
cctaagatcttatgcattctggactgtgatgtt

SEQ ID NO: 494241 - DNA, 33 bp, Homo sapien
gtatgaatagctgccaaagcaacataaaactta

SEQ ID NO: 494242 - DNA, 33 bp, Homo sapien
gtatgaatagctgccagagcaacataaaactta

SEQ ID NO: 494243 - DNA, 33 bp, Homo sapien
ataaataactttaatacgaaacagactgcaaga

SEQ ID NO: 494244 - DNA, 33 bp, Homo sapien
ataaataactttaatatgaaacagactgcaaga

SEQ ID NO: 494245 - DNA, 33 bp, Homo sapien
tcactttgtcacagggccatgcaacccacagtg

SEQ ID NO: 494246 - DNA, 33 bp, Homo sapien
tcactttgtcacagggtcatgcaacccacagtg

SEQ ID NO: 494247 - DNA, 33 bp, Homo sapien
ttttgtgccatggagcagaatcttgggctcctc

SEQ ID NO: 494248 - DNA, 33 bp, Homo sapien
ttttgtgccatggagcggaatcttgggctcctc

SEQ ID NO: 494249 - DNA, 33 bp, Homo sapien
ccgcttcagttgcacacacgtaattctttctga

SEQ ID NO: 494250 - DNA, 33 bp, Homo sapien
ccgcttcagttgcacatacgtaattctttctga

SEQ ID NO: 494251 - DNA, 33 bp, Homo sapien
tcattccagttaagcaatatgggctctaatttc

SEQ ID NO: 494252 - DNA, 33 bp, Homo sapien
tcattccagttaagcagtatgggctctaatttc

SEQ ID NO: 494253 - DNA, 33 bp, Homo sapien
ttgttcccacactttgaacttagtattattatc

SEQ ID NO: 494254 - DNA, 33 bp, Homo sapien
ttgttcccacactttggacttagtattattatc

SEQ ID NO: 494255 - DNA, 33 bp, Homo sapien
aaaatggagtgaactaagagcttggggaaaagg

SEQ ID NO: 494256 - DNA, 33 bp, Homo sapien
aaaatggagtgaactaggagcttggggaaaagg

SEQ ID NO: 494257 - DNA, 33 bp, Homo sapien
tgctcccagatggttacgaaactataatgaaag

SEQ ID NO: 494258 - DNA, 33 bp, Homo sapien
tgctcccagatggttatgaaactataatgaaag

SEQ ID NO: 494259 - DNA, 33 bp, Homo sapien
ccagtaactttgtttacattcctgtgcttcctt

SEQ ID NO: 494260 - DNA, 33 bp, Homo sapien
ccagtaactttgtttatattcctgtgcttcctt

SEQ ID NO: 494261 - DNA, 33 bp, Homo sapien
tctggctaaatggacacattatacacagcagac

SEQ ID NO: 494262 - DNA, 33 bp, Homo sapien
tctggctaaatggacatattatacacagcagac

SEQ ID NO: 494263 - DNA, 33 bp, Homo sapien
atagaacacatcttaccagttagaataggaatg

SEQ ID NO: 494264 - DNA, 33 bp, Homo sapien
atagaacacatcttacgagttagaataggaatg

SEQ ID NO: 494265 - DNA, 33 bp, Homo sapien
atgagaatggtttcaaagagaaaataggagtgc

SEQ ID NO: 494266 - DNA, 33 bp, Homo sapien
atgagaatggtttcaaggagaaaataggagtgc

SEQ ID NO: 494267 - DNA, 33 bp, Homo sapien
cgtttgggaaagataccgcaaacaccctgagtc

SEQ ID NO: 494268 - DNA, 33 bp, Homo sapien
cgtttgggaaagatactgcaaacaccctgagtc

SEQ ID NO: 494269 - DNA, 33 bp, Homo sapien
atccttagcaaccagaagtcaaggaagtaaaag

SEQ ID NO: 494270 - DNA, 33 bp, Homo sapien
atccttagcaaccagaggtcaaggaagtaaaag

SEQ ID NO: 494271 - DNA, 33 bp, Homo sapien
tatctctgtggcatccaagcatagctgggaaaa

SEQ ID NO: 494272 - DNA, 33 bp, Homo sapien
tatctctgtggcatccgagcatagctgggaaaa

SEQ ID NO: 494273 - DNA, 33 bp, Homo sapien
agctgccacctttagacgccacactcatcagag

SEQ ID NO: 494274 - DNA, 33 bp, Homo sapien
agctgccacctttagatgccacactcatcagag

SEQ ID NO: 494275 - DNA, 33 bp, Homo sapien
acctcctcactagaacactggtcactactgagt

SEQ ID NO: 494276 - DNA, 33 bp, Homo sapien
acctcctcactagaactctggtcactactgagt

SEQ ID NO: 494277 - DNA, 33 bp, Homo sapien
agtctcagaacctaaacgtaaatgcaaagcaga

SEQ ID NO: 494278 - DNA, 33 bp, Homo sapien
agtctcagaacctaaatgtaaatgcaaagcaga

SEQ ID NO: 494279 - DNA, 33 bp, Homo sapien
tgagatttggtaatcagagtttacacttggagg

SEQ ID NO: 494280 - DNA, 33 bp, Homo sapien
tgagatttggtaatcatagtttacacttggagg

SEQ ID NO: 494281 - DNA, 33 bp, Homo sapien
tgttttcttcacaaaaatgcagatttaatttga

SEQ ID NO: 494282 - DNA, 33 bp, Homo sapien
tgttttcttcacaaaagtgcagatttaatttga

SEQ ID NO: 494283 - DNA, 33 bp, Homo sapien
tacagacgtgtttccaataaagcgcaagcggac

SEQ ID NO: 494284 - DNA, 33 bp, Homo sapien
tacagacgtgtttccagtaaagcgcaagcggac

SEQ ID NO: 494285 - DNA, 33 bp, Homo sapien
ggagatagagtctttacagtggtaaccaagtta

SEQ ID NO: 494286 - DNA, 33 bp, Homo sapien
ggagatagagtctttatagtggtaaccaagtta

SEQ ID NO: 494287 - DNA, 33 bp, Homo sapien
aaaatgtatttgtaaaagtccaagtaactagag

SEQ ID NO: 494288 - DNA, 33 bp, Homo sapien
aaaatgtatttgtaaaggtccaagtaactagag

SEQ ID NO: 494289 - DNA, 33 bp, Homo sapien
tcaacaatcactgttgccaaaattagtcatcca

SEQ ID NO: 494290 - DNA, 33 bp, Homo sapien
tcaacaatcactgttgtcaaaattagtcatcca

SEQ ID NO: 494291 - DNA, 33 bp, Homo sapien
cacacatcacccgctacgaaatgggttgtttgg

SEQ ID NO: 494292 - DNA, 33 bp, Homo sapien
cacacatcacccgctatgaaatgggttgtttgg

SEQ ID NO: 494293 - DNA, 33 bp, Homo sapien
gattatggcccaaaagcaggtaagctgaagttg

SEQ ID NO: 494294 - DNA, 33 bp, Homo sapien
gattatggcccaaaagtaggtaagctgaagttg

SEQ ID NO: 494295 - DNA, 33 bp, Homo sapien
accatccgaaggagccaaatgtgaaatgagcag

SEQ ID NO: 494296 - DNA, 33 bp, Homo sapien
accatccgaaggagccgaatgtgaaatgagcag

SEQ ID NO: 494297 - DNA, 33 bp, Homo sapien
ctctgaacctcaagaacggaaagcccgagtact

SEQ ID NO: 494298 - DNA, 33 bp, Homo sapien
ctctgaacctcaagaatggaaagcccgagtact

SEQ ID NO: 494299 - DNA, 33 bp, Homo sapien
taattaaacatttccaaatagagagttacccat

SEQ ID NO: 494300 - DNA, 33 bp, Homo sapien
taattaaacatttccagatagagagttacccat

SEQ ID NO: 494301 - DNA, 33 bp, Homo sapien
gttctgcacgattctgaacaagggcctgtctca

SEQ ID NO: 494302 - DNA, 33 bp, Homo sapien
gttctgcacgattctgtacaagggcctgtctca

SEQ ID NO: 494303 - DNA, 33 bp, Homo sapien
aggaagatggaaagaacctgggaccctgatgac

SEQ ID NO: 494304 - DNA, 33 bp, Homo sapien
aggaagatggaaagaagctgggaccctgatgac

SEQ ID NO: 494305 - DNA, 33 bp, Homo sapien
tactagtagccaaatgcaactattttttgcatt

SEQ ID NO: 494306 - DNA, 33 bp, Homo sapien
tactagtagccaaatgtaactattttttgcatt

SEQ ID NO: 494307 - DNA, 33 bp, Homo sapien
gaagaaaagtattccagatctgtgctaaaaatg

SEQ ID NO: 494308 - DNA, 33 bp, Homo sapien
gaagaaaagtattccatatctgtgctaaaaatg

SEQ ID NO: 494309 - DNA, 33 bp, Homo sapien
ctctggaaggaatatccacattttcagccatgt

SEQ ID NO: 494310 - DNA, 33 bp, Homo sapien
ctctggaaggaatatctacattttcagccatgt

SEQ ID NO: 494311 - DNA, 33 bp, Homo sapien
ccactgatctagaaaaatgcagtagatactgta

SEQ ID NO: 494312 - DNA, 33 bp, Homo sapien
ccactgatctagaaaagtgcagtagatactgta

SEQ ID NO: 494313 - DNA, 33 bp, Homo sapien
cttcttcctctggctacggttgagagagccagg

SEQ ID NO: 494314 - DNA, 33 bp, Homo sapien
cttcttcctctggctatggttgagagagccagg

SEQ ID NO: 494315 - DNA, 33 bp, Homo sapien
ggaggtggtcacagaacaaatgatggtatcaaa

SEQ ID NO: 494316 - DNA, 33 bp, Homo sapien
ggaggtggtcacagaataaatgatggtatcaaa

SEQ ID NO: 494317 - DNA, 33 bp, Homo sapien
ggcagaatagcactcactagataaaacgaatac

SEQ ID NO: 494318 - DNA, 33 bp, Homo sapien
ggcagaatagcactcagtagataaaacgaatac

SEQ ID NO: 494319 - DNA, 33 bp, Homo sapien
tgtttctcagattccaactgcataatccaatta

SEQ ID NO: 494320 - DNA, 33 bp, Homo sapien
tgtttctcagattccagctgcataatccaatta

SEQ ID NO: 494321 - DNA, 33 bp, Homo sapien
gacagtgggtgaaatcaaccaagatctctaaaa

SEQ ID NO: 494322 - DNA, 33 bp, Homo sapien
gacagtgggtgaaatcgaccaagatctctaaaa

SEQ ID NO: 494323 - DNA, 33 bp, Homo sapien
gaaaaatggtctttcacgtcaaaatttggctga

SEQ ID NO: 494324 - DNA, 33 bp, Homo sapien
gaaaaatggtctttcatgtcaaaatttggctga

SEQ ID NO: 494325 - DNA, 33 bp, Homo sapien
gagtctgttttattaagagaagtagccagtccc

SEQ ID NO: 494326 - DNA, 33 bp, Homo sapien
gagtctgttttattaatagaagtagccagtccc

SEQ ID NO: 494327 - DNA, 33 bp, Homo sapien
cacacttggaaaatgacaacttctcttgttata

SEQ ID NO: 494328 - DNA, 33 bp, Homo sapien
cacacttggaaaatgagaacttctcttgttata

SEQ ID NO: 494329 - DNA, 33 bp, Homo sapien
ccaagtatatccacaaccactagtctggtagaa

SEQ ID NO: 494330 - DNA, 33 bp, Homo sapien
ccaagtatatccacaatcactagtctggtagaa

SEQ ID NO: 494331 - DNA, 33 bp, Homo sapien
aaaggagaaaagacaaagtgtatacagagaaag

SEQ ID NO: 494332 - DNA, 33 bp, Homo sapien
aaaggagaaaagacaaggtgtatacagagaaag

SEQ ID NO: 494333 - DNA, 33 bp, Homo sapien
gagtatcttgtgaacacccttcaagctagtagt

SEQ ID NO: 494334 - DNA, 33 bp, Homo sapien
gagtatcttgtgaacatccttcaagctagtagt

SEQ ID NO: 494335 - DNA, 33 bp, Homo sapien
tttctgctataaaaaaagttttctggcaaatag

SEQ ID NO: 494336 - DNA, 33 bp, Homo sapien
tttctgctataaaaaatgttttctggcaaatag

SEQ ID NO: 494337 - DNA, 33 bp, Homo sapien
ttcctgggaaaagagcacattggcccaatttgg

SEQ ID NO: 494338 - DNA, 33 bp, Homo sapien
ttcctgggaaaagagcgcattggcccaatttgg

SEQ ID NO: 494339 - DNA, 33 bp, Homo sapien
gccaagagagcacacaacataattctaactcct

SEQ ID NO: 494340 - DNA, 33 bp, Homo sapien
gccaagagagcacacagcataattctaactcct

SEQ ID NO: 494341 - DNA, 33 bp, Homo sapien
ggttggtttgtcacaaatagttttcagtttacc

SEQ ID NO: 494342 - DNA, 33 bp, Homo sapien
ggttggtttgtcacaagtagttttcagtttacc

SEQ ID NO: 494343 - DNA, 33 bp, Homo sapien
ctggcaggaaaaaaaacggagagtgactgcctg

SEQ ID NO: 494344 - DNA, 33 bp, Homo sapien
ctggcaggaaaaaaaatggagagtgactgcctg

SEQ ID NO: 494345 - DNA, 33 bp, Homo sapien
aaatcgtgccctctctcaacctactgggtggta

SEQ ID NO: 494346 - DNA, 33 bp, Homo sapien
aaatcgtgccctctcttaacctactgggtggta

SEQ ID NO: 494347 - DNA, 33 bp, Homo sapien
tgtcagatcatccaaactgtccagcacttggag

SEQ ID NO: 494348 - DNA, 33 bp, Homo sapien
tgtcagatcatccaaattgtccagcacttggag

SEQ ID NO: 494349 - DNA, 33 bp, Homo sapien
tgagggagcccatgaacgggaaaggattgtcct

SEQ ID NO: 494350 - DNA, 33 bp, Homo sapien
tgagggagcccatgaaggggaaaggattgtcct

SEQ ID NO: 494351 - DNA, 33 bp, Homo sapien
tgtccatcctacctgaagacaacttggaccgtt

SEQ ID NO: 494352 - DNA, 33 bp, Homo sapien
tgtccatcctacctgaggacaacttggaccgtt

SEQ ID NO: 494353 - DNA, 33 bp, Homo sapien
atgattctgaagcaacacagggatcaacctgat

SEQ ID NO: 494354 - DNA, 33 bp, Homo sapien
atgattctgaagcaacccagggatcaacctgat

SEQ ID NO: 494355 - DNA, 33 bp, Homo sapien
tacttccagcttagaacgtttatttcagccttg

SEQ ID NO: 494356 - DNA, 33 bp, Homo sapien
tacttccagcttagaatgtttatttcagccttg

SEQ ID NO: 494357 - DNA, 33 bp, Homo sapien
ttggccacttgtttagcactttgtttgatttta

SEQ ID NO: 494358 - DNA, 33 bp, Homo sapien
ttggccacttgtttagtactttgtttgatttta

SEQ ID NO: 494359 - DNA, 33 bp, Homo sapien
tatttagctctacaaaatgacaggctgcttaat

SEQ ID NO: 494360 - DNA, 33 bp, Homo sapien
tatttagctctacaaactgacaggctgcttaat

SEQ ID NO: 494361 - DNA, 33 bp, Homo sapien
ggattgtggtaaattgaaaagattgagtctgta

SEQ ID NO: 494362 - DNA, 33 bp, Homo sapien
ggattgtggtaaattggaaagattgagtctgta

SEQ ID NO: 494363 - DNA, 33 bp, Homo sapien
caggtgtagtcagttggagccaaaaacacaaca

SEQ ID NO: 494364 - DNA, 33 bp, Homo sapien
caggtgtagtcagttgtagccaaaaacacaaca

SEQ ID NO: 494365 - DNA, 33 bp, Homo sapien
tgcatggttctatgcaactacaagagggctgga

SEQ ID NO: 494366 - DNA, 33 bp, Homo sapien
tgcatggttctatgcagctacaagagggctgga

SEQ ID NO: 494367 - DNA, 33 bp, Homo sapien
tattgttcctttcactcacagcccaatccgaaa

SEQ ID NO: 494368 - DNA, 33 bp, Homo sapien
tattgttcctttcactgacagcccaatccgaaa

SEQ ID NO: 494369 - DNA, 33 bp, Homo sapien
gactagcggtaagatcccatgtcatcttcccta

SEQ ID NO: 494370 - DNA, 33 bp, Homo sapien
gactagcggtaagatctcatgtcatcttcccta

SEQ ID NO: 494371 - DNA, 33 bp, Homo sapien
gtaaaatacaaaatcacgcagcttggatgtcct

SEQ ID NO: 494372 - DNA, 33 bp, Homo sapien
gtaaaatacaaaatcatgcagcttggatgtcct

SEQ ID NO: 494373 - DNA, 33 bp, Homo sapien
tggggtgctctaggacaaaagacccaaacccac

SEQ ID NO: 494374 - DNA, 33 bp, Homo sapien
tggggtgctctaggaccaaagacccaaacccac

SEQ ID NO: 494375 - DNA, 33 bp, Homo sapien
tgaaccttgtgagaccaacctttgtcagctctt

SEQ ID NO: 494376 - DNA, 33 bp, Homo sapien
tgaaccttgtgagaccgacctttgtcagctctt

SEQ ID NO: 494377 - DNA, 33 bp, Homo sapien
gtgttacttctgggatcaagccatttagagcca

SEQ ID NO: 494378 - DNA, 33 bp, Homo sapien
gtgttacttctgggatgaagccatttagagcca

SEQ ID NO: 494379 - DNA, 33 bp, Homo sapien
tgtggcatcagagaaaactaacttcctctcatt

SEQ ID NO: 494380 - DNA, 33 bp, Homo sapien
tgtggcatcagagaaagctaacttcctctcatt

SEQ ID NO: 494381 - DNA, 33 bp, Homo sapien
ccctttgatgcagctgaataatatggctactct

SEQ ID NO: 494382 - DNA, 33 bp, Homo sapien
ccctttgatgcagctggataatatggctactct

SEQ ID NO: 494383 - DNA, 33 bp, Homo sapien
aaagcacatctcccagaccaatagcccaatgtt

SEQ ID NO: 494384 - DNA, 33 bp, Homo sapien
aaagcacatctcccagcccaatagcccaatgtt

SEQ ID NO: 494385 - DNA, 33 bp, Homo sapien
ttttacatacactaggacccaagatattaggat

SEQ ID NO: 494386 - DNA, 33 bp, Homo sapien
ttttacatacactaggccccaagatattaggat

SEQ ID NO: 494387 - DNA, 33 bp, Homo sapien
gccctaaatagacatgaattacaagaacgtcct

SEQ ID NO: 494388 - DNA, 33 bp, Homo sapien
gccctaaatagacatgtattacaagaacgtcct

SEQ ID NO: 494389 - DNA, 33 bp, Homo sapien
ctaggccatgcatggtaaagagtgtgcactttc

SEQ ID NO: 494390 - DNA, 33 bp, Homo sapien
ctaggccatgcatggtgaagagtgtgcactttc

SEQ ID NO: 494391 - DNA, 33 bp, Homo sapien
atgtgaactgggctgcacatacactcagggctc

SEQ ID NO: 494392 - DNA, 33 bp, Homo sapien
atgtgaactgggctgcgcatacactcagggctc

SEQ ID NO: 494393 - DNA, 33 bp, Homo sapien
caggcagatgaagaaactctattttcatgcaga

SEQ ID NO: 494394 - DNA, 33 bp, Homo sapien
caggcagatgaagaaattctattttcatgcaga

SEQ ID NO: 494395 - DNA, 33 bp, Homo sapien
tacagcttgtaccttcaagagagtcaggtcaag

SEQ ID NO: 494396 - DNA, 33 bp, Homo sapien
tacagcttgtaccttcgagagagtcaggtcaag

SEQ ID NO: 494397 - DNA, 33 bp, Homo sapien
tcaaactccctggcctagtatttaaggtgttct

SEQ ID NO: 494398 - DNA, 33 bp, Homo sapien
tcaaactccctggcctggtatttaaggtgttct

SEQ ID NO: 494399 - DNA, 33 bp, Homo sapien
aacaaccaagccagagcaacgggtgatttgacc

SEQ ID NO: 494400 - DNA, 33 bp, Homo sapien
aacaaccaagccagagtaacgggtgatttgacc

SEQ ID NO: 494401 - DNA, 33 bp, Homo sapien
cgatgatgtggacagcacacttgattgaaagtt

SEQ ID NO: 494402 - DNA, 33 bp, Homo sapien
cgatgatgtggacagcgcacttgattgaaagtt

SEQ ID NO: 494403 - DNA, 33 bp, Homo sapien
tttagatataccttcaagtgtctatttactaaa

SEQ ID NO: 494404 - DNA, 33 bp, Homo sapien
tttagatataccttcatgtgtctatttactaaa

SEQ ID NO: 494405 - DNA, 33 bp, Homo sapien
ctcttattgaattccaaccagagagatcataac

SEQ ID NO: 494406 - DNA, 33 bp, Homo sapien
ctcttattgaattccatccagagagatcataac

SEQ ID NO: 494407 - DNA, 33 bp, Homo sapien
tttctgtgcttctacaactttcactagattaga

SEQ ID NO: 494408 - DNA, 33 bp, Homo sapien
tttctgtgcttctacagctttcactagattaga

SEQ ID NO: 494409 - DNA, 33 bp, Homo sapien
tcctaacaggtgagagaagggtggcaggaaagt

SEQ ID NO: 494410 - DNA, 33 bp, Homo sapien
tcctaacaggtgagaggagggtggcaggaaagt

SEQ ID NO: 494411 - DNA, 33 bp, Homo sapien
tcccctgattctcagacaagtgaattttctgct

SEQ ID NO: 494412 - DNA, 33 bp, Homo sapien
tcccctgattctcagataagtgaattttctgct

SEQ ID NO: 494413 - DNA, 33 bp, Homo sapien
atataccataaaattccagaaaaccaaccagag

SEQ ID NO: 494414 - DNA, 33 bp, Homo sapien
atataccataaaattcgagaaaaccaaccagag

SEQ ID NO: 494415 - DNA, 33 bp, Homo sapien
tgccacccccacaagacgagagcttgtttataa

SEQ ID NO: 494416 - DNA, 33 bp, Homo sapien
tgccacccccacaagatgagagcttgtttataa

SEQ ID NO: 494417 - DNA, 33 bp, Homo sapien
gtgcctgattgatcaccgggatgcaattctaat

SEQ ID NO: 494418 - DNA, 33 bp, Homo sapien
gtgcctgattgatcactgggatgcaattctaat

SEQ ID NO: 494419 - DNA, 33 bp, Homo sapien
taatcgtcaatcgacacctttggaaaggaaggg

SEQ ID NO: 494420 - DNA, 33 bp, Homo sapien
taatcgtcaatcgacagctttggaaaggaaggg

SEQ ID NO: 494421 - DNA, 33 bp, Homo sapien
tactctggttgggtcaagatttgtttgcaggtt

SEQ ID NO: 494422 - DNA, 33 bp, Homo sapien
tactctggttgggtcatgatttgtttgcaggtt

SEQ ID NO: 494423 - DNA, 33 bp, Homo sapien
tcagaaatggctccacacacttcccaagccagg

SEQ ID NO: 494424 - DNA, 33 bp, Homo sapien
tcagaaatggctccacgcacttcccaagccagg

SEQ ID NO: 494425 - DNA, 33 bp, Homo sapien
acaaatgtgagagataaagggtcctgagtatat

SEQ ID NO: 494426 - DNA, 33 bp, Homo sapien
acaaatgtgagagatacagggtcctgagtatat

SEQ ID NO: 494427 - DNA, 33 bp, Homo sapien
ttatttttttaacgtacgatgtagagtacatat

SEQ ID NO: 494428 - DNA, 33 bp, Homo sapien
ttatttttttaacgtatgatgtagagtacatat

SEQ ID NO: 494429 - DNA, 33 bp, Homo sapien
catgaaaggtagatggaccaatcttaatttcta

SEQ ID NO: 494430 - DNA, 33 bp, Homo sapien
catgaaaggtagatgggccaatcttaatttcta

SEQ ID NO: 494431 - DNA, 33 bp, Homo sapien
aaaatgtgtcttagaaatctttccatctgggta

SEQ ID NO: 494432 - DNA, 33 bp, Homo sapien
aaaatgtgtcttagaactctttccatctgggta

SEQ ID NO: 494433 - DNA, 33 bp, Homo sapien
agaaaaaggtctgactaacacaaatcaaatggt

SEQ ID NO: 494434 - DNA, 33 bp, Homo sapien
agaaaaaggtctgactgacacaaatcaaatggt

SEQ ID NO: 494435 - DNA, 33 bp, Homo sapien
acctcctgtaggtaacaatttctaaccatttga

SEQ ID NO: 494436 - DNA, 33 bp, Homo sapien
acctcctgtaggtaaccatttctaaccatttga

SEQ ID NO: 494437 - DNA, 33 bp, Homo sapien
ttgcttcctgtaaaaacttatactgtacagtta

SEQ ID NO: 494438 - DNA, 33 bp, Homo sapien
ttgcttcctgtaaaaatttatactgtacagtta

SEQ ID NO: 494439 - DNA, 33 bp, Homo sapien
taccctttttagagtcacattctggctccctta

SEQ ID NO: 494440 - DNA, 33 bp, Homo sapien
taccctttttagagtcgcattctggctccctta

SEQ ID NO: 494441 - DNA, 33 bp, Homo sapien
tatcacagaattgcatcacctgccctgcttaca

SEQ ID NO: 494442 - DNA, 33 bp, Homo sapien
tatcacagaattgcattacctgccctgcttaca

SEQ ID NO: 494443 - DNA, 33 bp, Homo sapien
acagagtggaagaagtcaaacaagggtgttatt

SEQ ID NO: 494444 - DNA, 33 bp, Homo sapien
acagagtggaagaagtgaaacaagggtgttatt

SEQ ID NO: 494445 - DNA, 33 bp, Homo sapien
tacttcttgtaaagaacgaatggcagcagatct

SEQ ID NO: 494446 - DNA, 33 bp, Homo sapien
tacttcttgtaaagaatgaatggcagcagatct

SEQ ID NO: 494447 - DNA, 33 bp, Homo sapien
gagaacatccggaaaccgggaccctcagagact

SEQ ID NO: 494448 - DNA, 33 bp, Homo sapien
gagaacatccggaaactgggaccctcagagact

SEQ ID NO: 494449 - DNA, 33 bp, Homo sapien
atgtaaaatctggaaccgaaccatagcaatggc

SEQ ID NO: 494450 - DNA, 33 bp, Homo sapien
atgtaaaatctggaactgaaccatagcaatggc

SEQ ID NO: 494451 - DNA, 33 bp, Homo sapien
gaggtcagttcccagcaatgtgggttctggtga

SEQ ID NO: 494452 - DNA, 33 bp, Homo sapien
gaggtcagttcccagcgatgtgggttctggtga

SEQ ID NO: 494453 - DNA, 33 bp, Homo sapien
atgatgacaggacaaaatttacacataacaata

SEQ ID NO: 494454 - DNA, 33 bp, Homo sapien
atgatgacaggacaaactttacacataacaata

SEQ ID NO: 494455 - DNA, 33 bp, Homo sapien
taacatctctgggccaacctttcccttagtata

SEQ ID NO: 494456 - DNA, 33 bp, Homo sapien
taacatctctgggccagcctttcccttagtata

SEQ ID NO: 494457 - DNA, 33 bp, Homo sapien
ttattactgcccaaaggagtcattcagcaccaa

SEQ ID NO: 494458 - DNA, 33 bp, Homo sapien
ttattactgcccaaagtagtcattcagcaccaa

SEQ ID NO: 494459 - DNA, 33 bp, Homo sapien
tcagaactctgtctcaagaggcgtatttttgtt

SEQ ID NO: 494460 - DNA, 33 bp, Homo sapien
tcagaactctgtctcacgaggcgtatttttgtt

SEQ ID NO: 494461 - DNA, 33 bp, Homo sapien
atcaaaatgctcataaaggttctcaattgtatt

SEQ ID NO: 494462 - DNA, 33 bp, Homo sapien
atcaaaatgctcataacggttctcaattgtatt

SEQ ID NO: 494463 - DNA, 33 bp, Homo sapien
atcagccgctacccgcgagccgtgcgcaagatc

SEQ ID NO: 494464 - DNA, 33 bp, Homo sapien
atcagccgctacccgctagccgtgcgcaagatc

SEQ ID NO: 494465 - DNA, 33 bp, Homo sapien
acattctagaaaaggaaaaattatgaagacagt

SEQ ID NO: 494466 - DNA, 33 bp, Homo sapien
acattctagaaaaggagaaattatgaagacagt

SEQ ID NO: 494467 - DNA, 33 bp, Homo sapien
cctacaaactaacctcccctgatgaaaattagg

SEQ ID NO: 494468 - DNA, 33 bp, Homo sapien
cctacaaactaacctctcctgatgaaaattagg

SEQ ID NO: 494469 - DNA, 33 bp, Homo sapien
aggactgacaaaagcagctttaaaacagctaac

SEQ ID NO: 494470 - DNA, 33 bp, Homo sapien
aggactgacaaaagcatctttaaaacagctaac

SEQ ID NO: 494471 - DNA, 33 bp, Homo sapien
cagaagaattcttgtacgcaaactatccataaa

SEQ ID NO: 494472 - DNA, 33 bp, Homo sapien
cagaagaattcttgtatgcaaactatccataaa

SEQ ID NO: 494473 - DNA, 33 bp, Homo sapien
attctaaaaactctgcaaagttgtatttgttca

SEQ ID NO: 494474 - DNA, 33 bp, Homo sapien
attctaaaaactctgccaagttgtatttgttca

SEQ ID NO: 494475 - DNA, 33 bp, Homo sapien
ctggcttaagcaacagaaatgtgtggtctcaca

SEQ ID NO: 494476 - DNA, 33 bp, Homo sapien
ctggcttaagcaacaggaatgtgtggtctcaca

SEQ ID NO: 494477 - DNA, 33 bp, Homo sapien
tttcttgtattaggcacgagatctattgttccc

SEQ ID NO: 494478 - DNA, 33 bp, Homo sapien
tttcttgtattaggcatgagatctattgttccc

SEQ ID NO: 494479 - DNA, 33 bp, Homo sapien
ttgtcttgaggtttacactccataactacattg

SEQ ID NO: 494480 - DNA, 33 bp, Homo sapien
ttgtcttgaggtttacgctccataactacattg

SEQ ID NO: 494481 - DNA, 33 bp, Homo sapien
ggcccactgattcttcaaggctatacttcagaa

SEQ ID NO: 494482 - DNA, 33 bp, Homo sapien
ggcccactgattcttcgaggctatacttcagaa

SEQ ID NO: 494483 - DNA, 33 bp, Homo sapien
attgtgcctttgccagccattcagcctgagtca

SEQ ID NO: 494484 - DNA, 33 bp, Homo sapien
attgtgcctttgccagtcattcagcctgagtca

SEQ ID NO: 494485 - DNA, 33 bp, Homo sapien
tttttaaatgagtgacacaattccagactaagg

SEQ ID NO: 494486 - DNA, 33 bp, Homo sapien
tttttaaatgagtgacgcaattccagactaagg

SEQ ID NO: 494487 - DNA, 33 bp, Homo sapien
ggctagggcattgtgacaaatccggctagaatc

SEQ ID NO: 494488 - DNA, 33 bp, Homo sapien
ggctagggcattgtgagaaatccggctagaatc

SEQ ID NO: 494489 - DNA, 33 bp, Homo sapien
actggtgtattgtttacatgattgaaaggggtg

SEQ ID NO: 494490 - DNA, 33 bp, Homo sapien
actggtgtattgtttatatgattgaaaggggtg

SEQ ID NO: 494491 - DNA, 33 bp, Homo sapien
aggggttattttggaaaactcttcagactgaag

SEQ ID NO: 494492 - DNA, 33 bp, Homo sapien
aggggttattttggaagactcttcagactgaag

SEQ ID NO: 494493 - DNA, 33 bp, Homo sapien
gcttctagccttactcggaggtcaaacttttgg

SEQ ID NO: 494494 - DNA, 33 bp, Homo sapien
gcttctagccttactctgaggtcaaacttttgg

SEQ ID NO: 494495 - DNA, 33 bp, Homo sapien
cagattggaaaattcacaacaagccctaagtgg

SEQ ID NO: 494496 - DNA, 33 bp, Homo sapien
cagattggaaaattcataacaagccctaagtgg

SEQ ID NO: 494497 - DNA, 33 bp, Homo sapien
aaaacaaaacaaaacagtggatctggtgcaaag

SEQ ID NO: 494498 - DNA, 33 bp, Homo sapien
aaaacaaaacaaaacattggatctggtgcaaag

SEQ ID NO: 494499 - DNA, 33 bp, Homo sapien
atgtactctgcccttgaacttgggataggaggt

SEQ ID NO: 494500 - DNA, 33 bp, Homo sapien
atgtactctgcccttgcacttgggataggaggt

SEQ ID NO: 494501 - DNA, 33 bp, Homo sapien
ccactttcaagatgacaaaacaggttcagagga

SEQ ID NO: 494502 - DNA, 33 bp, Homo sapien
ccactttcaagatgacgaaacaggttcagagga

SEQ ID NO: 494503 - DNA, 33 bp, Homo sapien
aacataaacaagatgagaggggcttaaaataaa

SEQ ID NO: 494504 - DNA, 33 bp, Homo sapien
aacataaacaagatgataggggcttaaaataaa

SEQ ID NO: 494505 - DNA, 33 bp, Homo sapien
aattacagctcaccaacagctagatacagattg

SEQ ID NO: 494506 - DNA, 33 bp, Homo sapien
aattacagctcaccaatagctagatacagattg

SEQ ID NO: 494507 - DNA, 33 bp, Homo sapien
ctttggcttttactcgcagtgaataggaagtca

SEQ ID NO: 494508 - DNA, 33 bp, Homo sapien
ctttggcttttactcggagtgaataggaagtca

SEQ ID NO: 494509 - DNA, 33 bp, Homo sapien
agttcagtgtcttaaaagtctcaaacccatcta

SEQ ID NO: 494510 - DNA, 33 bp, Homo sapien
agttcagtgtcttaaacgtctcaaacccatcta

SEQ ID NO: 494511 - DNA, 33 bp, Homo sapien
agttaatttgtacttgcatttttaagatcatta

SEQ ID NO: 494512 - DNA, 33 bp, Homo sapien
agttaatttgtacttggatttttaagatcatta

SEQ ID NO: 494513 - DNA, 33 bp, Homo sapien
gaagtgtgtcaaggaccgatttcaacaatctta

SEQ ID NO: 494514 - DNA, 33 bp, Homo sapien
gaagtgtgtcaaggactgatttcaacaatctta

SEQ ID NO: 494515 - DNA, 33 bp, Homo sapien
aaataatagttctcaactccagaagcccactat

SEQ ID NO: 494516 - DNA, 33 bp, Homo sapien
aaataatagttctcaagtccagaagcccactat

SEQ ID NO: 494517 - DNA, 33 bp, Homo sapien
aaagtttcatatttcacaacattttggattttg

SEQ ID NO: 494518 - DNA, 33 bp, Homo sapien
aaagtttcatatttcagaacattttggattttg

SEQ ID NO: 494519 - DNA, 33 bp, Homo sapien
agacctaccaacagcaaaacaattacaactcac

SEQ ID NO: 494520 - DNA, 33 bp, Homo sapien
agacctaccaacagcagaacaattacaactcac

SEQ ID NO: 494521 - DNA, 33 bp, Homo sapien
tagattatagtagataatagcctggctaggata

SEQ ID NO: 494522 - DNA, 33 bp, Homo sapien
tagattatagtagatagtagcctggctaggata

SEQ ID NO: 494523 - DNA, 33 bp, Homo sapien
tgaacagctatgctccacttgaaagagcttcgg

SEQ ID NO: 494524 - DNA, 33 bp, Homo sapien
tgaacagctatgctccgcttgaaagagcttcgg

SEQ ID NO: 494525 - DNA, 33 bp, Homo sapien
gccaaaaatatcctgaaacattcttgactctgt

SEQ ID NO: 494526 - DNA, 33 bp, Homo sapien
gccaaaaatatcctgatacattcttgactctgt

SEQ ID NO: 494527 - DNA, 33 bp, Homo sapien
gctggttagtgtggaacgaagaatcacaggtat

SEQ ID NO: 494528 - DNA, 33 bp, Homo sapien
gctggttagtgtggaatgaagaatcacaggtat

SEQ ID NO: 494529 - DNA, 33 bp, Homo sapien
gtaatatgcaacagtaaattttttaagagttac

SEQ ID NO: 494530 - DNA, 33 bp, Homo sapien
gtaatatgcaacagtagattttttaagagttac

SEQ ID NO: 494531 - DNA, 33 bp, Homo sapien
cactgcaaaataagtaacagagtgaacaggaat

SEQ ID NO: 494532 - DNA, 33 bp, Homo sapien
cactgcaaaataagtagcagagtgaacaggaat

SEQ ID NO: 494533 - DNA, 33 bp, Homo sapien
gccattccgactgacacaagataatatctcatt

SEQ ID NO: 494534 - DNA, 33 bp, Homo sapien
gccattccgactgacataagataatatctcatt

SEQ ID NO: 494535 - DNA, 33 bp, Homo sapien
aggggattgatggagaagaattatgtttttcac

SEQ ID NO: 494536 - DNA, 33 bp, Homo sapien
aggggattgatggagaggaattatgtttttcac

SEQ ID NO: 494537 - DNA, 33 bp, Homo sapien
ggtgtatggtgccagcacagagtttcattcttt

SEQ ID NO: 494538 - DNA, 33 bp, Homo sapien
ggtgtatggtgccagcgcagagtttcattcttt

SEQ ID NO: 494539 - DNA, 33 bp, Homo sapien
tttcaagatgattgataaccttaggtcctggag

SEQ ID NO: 494540 - DNA, 33 bp, Homo sapien
tttcaagatgattgatcaccttaggtcctggag

SEQ ID NO: 494541 - DNA, 33 bp, Homo sapien
tgatccagatagtttaaatggctggataagtga

SEQ ID NO: 494542 - DNA, 33 bp, Homo sapien
tgatccagatagtttagatggctggataagtga

SEQ ID NO: 494543 - DNA, 33 bp, Homo sapien
tcaaattcagttctacaatgaatcaacttttaa

SEQ ID NO: 494544 - DNA, 33 bp, Homo sapien
tcaaattcagttctacgatgaatcaacttttaa

SEQ ID NO: 494545 - DNA, 33 bp, Homo sapien
tgctagccctgttaaacttggctggagcaatcc

SEQ ID NO: 494546 - DNA, 33 bp, Homo sapien
tgctagccctgttaaatttggctggagcaatcc

SEQ ID NO: 494547 - DNA, 33 bp, Homo sapien
agggcatgattttcaacgcctttattaagaaat

SEQ ID NO: 494548 - DNA, 33 bp, Homo sapien
agggcatgattttcaatgcctttattaagaaat

SEQ ID NO: 494549 - DNA, 33 bp, Homo sapien
gtagatgtattgtagacaggttgttttgtacca

SEQ ID NO: 494550 - DNA, 33 bp, Homo sapien
gtagatgtattgtagataggttgttttgtacca

SEQ ID NO: 494551 - DNA, 33 bp, Homo sapien
gatcttcagataattccagaggccctggtactg

SEQ ID NO: 494552 - DNA, 33 bp, Homo sapien
gatcttcagataattctagaggccctggtactg

SEQ ID NO: 494553 - DNA, 33 bp, Homo sapien
gctaggcaatttacacgcctatcatctgtattt

SEQ ID NO: 494554 - DNA, 33 bp, Homo sapien
gctaggcaatttacactcctatcatctgtattt

SEQ ID NO: 494555 - DNA, 33 bp, Homo sapien
tgcaaggacctagaaccaaatctggatggtttc

SEQ ID NO: 494556 - DNA, 33 bp, Homo sapien
tgcaaggacctagaactaaatctggatggtttc

SEQ ID NO: 494557 - DNA, 33 bp, Homo sapien
ttgttgaattgacttacggttgtggtcttaatc

SEQ ID NO: 494558 - DNA, 33 bp, Homo sapien
ttgttgaattgacttatggttgtggtcttaatc

SEQ ID NO: 494559 - DNA, 33 bp, Homo sapien
tcaaacacatccagtcaagttgggtcttcttcc

SEQ ID NO: 494560 - DNA, 33 bp, Homo sapien
tcaaacacatccagtcgagttgggtcttcttcc

SEQ ID NO: 494561 - DNA, 33 bp, Homo sapien
gtgtattccgtggcctgagcattctgcttgatt

SEQ ID NO: 494562 - DNA, 33 bp, Homo sapien
gtgtattccgtggccttagcattctgcttgatt

SEQ ID NO: 494563 - DNA, 33 bp, Homo sapien
agaagggtaaattgagacataaagaggctaaga

SEQ ID NO: 494564 - DNA, 33 bp, Homo sapien
agaagggtaaattgaggcataaagaggctaaga

SEQ ID NO: 494565 - DNA, 33 bp, Homo sapien
ggcaaaaagcaagtcacattcatcccttaggat

SEQ ID NO: 494566 - DNA, 33 bp, Homo sapien
ggcaaaaagcaagtcagattcatcccttaggat

SEQ ID NO: 494567 - DNA, 33 bp, Homo sapien
tcactctctaaaaataaggaccaggcagccagg

SEQ ID NO: 494568 - DNA, 33 bp, Homo sapien
tcactctctaaaaatatggaccaggcagccagg

SEQ ID NO: 494569 - DNA, 33 bp, Homo sapien
cctattgtcttaacaccgatcagaagcagggcc

SEQ ID NO: 494570 - DNA, 33 bp, Homo sapien
cctattgtcttaacacggatcagaagcagggcc

SEQ ID NO: 494571 - DNA, 33 bp, Homo sapien
tggatgctgcacatacagagggttcgcatcaca

SEQ ID NO: 494572 - DNA, 33 bp, Homo sapien
tggatgctgcacatactgagggttcgcatcaca

SEQ ID NO: 494573 - DNA, 33 bp, Homo sapien
cctgccacgtgtcatcgcgcctacttagcgaca

SEQ ID NO: 494574 - DNA, 33 bp, Homo sapien
cctgccacgtgtcatctcgcctacttagcgaca

SEQ ID NO: 494575 - DNA, 33 bp, Homo sapien
tcattttttccagttacgatgatgaacatatct

SEQ ID NO: 494576 - DNA, 33 bp, Homo sapien
tcattttttccagttatgatgatgaacatatct

SEQ ID NO: 494577 - DNA, 33 bp, Homo sapien
tgtggccccagtatcacgcagagcctaaccact

SEQ ID NO: 494578 - DNA, 33 bp, Homo sapien
tgtggccccagtatcatgcagagcctaaccact

SEQ ID NO: 494579 - DNA, 33 bp, Homo sapien
ttaacaagcatgcttgaatacttctcttgttag

SEQ ID NO: 494580 - DNA, 33 bp, Homo sapien
ttaacaagcatgcttggatacttctcttgttag

SEQ ID NO: 494581 - DNA, 33 bp, Homo sapien
ctccaacagttagagacatgataccatcttggt

SEQ ID NO: 494582 - DNA, 33 bp, Homo sapien
ctccaacagttagagagatgataccatcttggt

SEQ ID NO: 494583 - DNA, 33 bp, Homo sapien
tgtggttgtatacagaaaagtgtaagatcgaaa

SEQ ID NO: 494584 - DNA, 33 bp, Homo sapien
tgtggttgtatacagagaagtgtaagatcgaaa

SEQ ID NO: 494585 - DNA, 33 bp, Homo sapien
ttatttttaatatggtcaaatctgccgttcttt

SEQ ID NO: 494586 - DNA, 33 bp, Homo sapien
ttatttttaatatggttaaatctgccgttcttt

SEQ ID NO: 494587 - DNA, 33 bp, Homo sapien
caataatggttaccgacgatgggagtatagact

SEQ ID NO: 494588 - DNA, 33 bp, Homo sapien
caataatggttaccgaggatgggagtatagact

SEQ ID NO: 494589 - DNA, 33 bp, Homo sapien
tgcaggacaatatgtaactcagctttggccagt

SEQ ID NO: 494590 - DNA, 33 bp, Homo sapien
tgcaggacaatatgtagctcagctttggccagt

SEQ ID NO: 494591 - DNA, 33 bp, Homo sapien
gcttgagcaaagagccaggagtagaaatgagaa

SEQ ID NO: 494592 - DNA, 33 bp, Homo sapien
gcttgagcaaagagccgggagtagaaatgagaa

SEQ ID NO: 494593 - DNA, 33 bp, Homo sapien
agggattaaggcatacaatgtaagttttaaatg

SEQ ID NO: 494594 - DNA, 33 bp, Homo sapien
agggattaaggcatacgatgtaagttttaaatg

SEQ ID NO: 494595 - DNA, 33 bp, Homo sapien
ttcagattgggatgtacacaggaatggaggaaa

SEQ ID NO: 494596 - DNA, 33 bp, Homo sapien
ttcagattgggatgtatacaggaatggaggaaa

SEQ ID NO: 494597 - DNA, 33 bp, Homo sapien
caagaaaaatatggccagaggagataaattgtc

SEQ ID NO: 494598 - DNA, 33 bp, Homo sapien
caagaaaaatatggccggaggagataaattgtc

SEQ ID NO: 494599 - DNA, 33 bp, Homo sapien
cagtctgtgcttagggcatgacaagaccaaaac

SEQ ID NO: 494600 - DNA, 33 bp, Homo sapien
cagtctgtgcttagggtatgacaagaccaaaac

SEQ ID NO: 494601 - DNA, 33 bp, Homo sapien
acctcttcgatttgaactgacacttccccttaa

SEQ ID NO: 494602 - DNA, 33 bp, Homo sapien
acctcttcgatttgaattgacacttccccttaa

SEQ ID NO: 494603 - DNA, 33 bp, Homo sapien
attaagtcaaatataactagatggctttgacag

SEQ ID NO: 494604 - DNA, 33 bp, Homo sapien
attaagtcaaatataagtagatggctttgacag

SEQ ID NO: 494605 - DNA, 33 bp, Homo sapien
cataaatccattcaaaaaaataaatccactgca

SEQ ID NO: 494606 - DNA, 33 bp, Homo sapien
cataaatccattcaaataaataaatccactgca

SEQ ID NO: 494607 - DNA, 33 bp, Homo sapien
aaaaaggggatatcaacagagtagagaggggaa

SEQ ID NO: 494608 - DNA, 33 bp, Homo sapien
aaaaaggggatatcaatagagtagagaggggaa

SEQ ID NO: 494609 - DNA, 33 bp, Homo sapien
aatgctgggaaaactccatcacttcacaatggc

SEQ ID NO: 494610 - DNA, 33 bp, Homo sapien
aatgctgggaaaactctatcacttcacaatggc

SEQ ID NO: 494611 - DNA, 33 bp, Homo sapien
tcacttcacaatggctgagaagaagagcagtga

SEQ ID NO: 494612 - DNA, 33 bp, Homo sapien
tcacttcacaatggcttagaagaagagcagtga

SEQ ID NO: 494613 - DNA, 33 bp, Homo sapien
gcgagtgttagaatcacggggcagatttttttt

SEQ ID NO: 494614 - DNA, 33 bp, Homo sapien
gcgagtgttagaatcatggggcagatttttttt

SEQ ID NO: 494615 - DNA, 33 bp, Homo sapien
ttaaaaatcagtgatgaagactgtccataaatc

SEQ ID NO: 494616 - DNA, 33 bp, Homo sapien
ttaaaaatcagtgatgcagactgtccataaatc

SEQ ID NO: 494617 - DNA, 33 bp, Homo sapien
aaagttaaaaactaccaataaattgcttgactc

SEQ ID NO: 494618 - DNA, 33 bp, Homo sapien
aaagttaaaaactaccgataaattgcttgactc

SEQ ID NO: 494619 - DNA, 33 bp, Homo sapien
gtgaagagctgcaacaacgcttaggggttcaga

SEQ ID NO: 494620 - DNA, 33 bp, Homo sapien
gtgaagagctgcaacatcgcttaggggttcaga

SEQ ID NO: 494621 - DNA, 33 bp, Homo sapien
gcaacctggtagagtgcattccttaaagacaag

SEQ ID NO: 494622 - DNA, 33 bp, Homo sapien
gcaacctggtagagtgtattccttaaagacaag

SEQ ID NO: 494623 - DNA, 33 bp, Homo sapien
gggtagctcccctctgcagtcaggtaaatccga

SEQ ID NO: 494624 - DNA, 33 bp, Homo sapien
gggtagctcccctctgtagtcaggtaaatccga

SEQ ID NO: 494625 - DNA, 33 bp, Homo sapien
aaaaccacaacctctcacagcattcaggataac

SEQ ID NO: 494626 - DNA, 33 bp, Homo sapien
aaaaccacaacctctcgcagcattcaggataac

SEQ ID NO: 494627 - DNA, 33 bp, Homo sapien
cgtaacccttctgccacagtgtttagtgttggt

SEQ ID NO: 494628 - DNA, 33 bp, Homo sapien
cgtaacccttctgccagagtgtttagtgttggt

SEQ ID NO: 494629 - DNA, 33 bp, Homo sapien
aggaggaggaataggaagagctgctcatgctat

SEQ ID NO: 494630 - DNA, 33 bp, Homo sapien
aggaggaggaataggaggagctgctcatgctat

SEQ ID NO: 494631 - DNA, 33 bp, Homo sapien
gagggtatagagagaacgcggaaaatgtatttg

SEQ ID NO: 494632 - DNA, 33 bp, Homo sapien
gagggtatagagagaatgcggaaaatgtatttg

SEQ ID NO: 494633 - DNA, 33 bp, Homo sapien
aataggctcttaagaactatcccatcaatttgt

SEQ ID NO: 494634 - DNA, 33 bp, Homo sapien
aataggctcttaagaattatcccatcaatttgt

SEQ ID NO: 494635 - DNA, 33 bp, Homo sapien
gaatatcacaaacttgaaaatttataaagaaca

SEQ ID NO: 494636 - DNA, 33 bp, Homo sapien
gaatatcacaaacttggaaatttataaagaaca

SEQ ID NO: 494637 - DNA, 33 bp, Homo sapien
accaaaaaattagtaacgcaatgaggtcgaagg

SEQ ID NO: 494638 - DNA, 33 bp, Homo sapien
accaaaaaattagtaatgcaatgaggtcgaagg

SEQ ID NO: 494639 - DNA, 33 bp, Homo sapien
ccagtgcctgtggggaaaaacagaaatcagaat

SEQ ID NO: 494640 - DNA, 33 bp, Homo sapien
ccagtgcctgtggggagaaacagaaatcagaat

SEQ ID NO: 494641 - DNA, 33 bp, Homo sapien
aaaatgaaggaaaagaatatctatgacaggctc

SEQ ID NO: 494642 - DNA, 33 bp, Homo sapien
aaaatgaaggaaaagagtatctatgacaggctc

SEQ ID NO: 494643 - DNA, 33 bp, Homo sapien
ttgcattaactgtccacattctaaagtagtgcc

SEQ ID NO: 494644 - DNA, 33 bp, Homo sapien
ttgcattaactgtccatattctaaagtagtgcc

SEQ ID NO: 494645 - DNA, 33 bp, Homo sapien
tgctgtggaagttaaaagtactaaatgacagca

SEQ ID NO: 494646 - DNA, 33 bp, Homo sapien
tgctgtggaagttaaaggtactaaatgacagca

SEQ ID NO: 494647 - DNA, 33 bp, Homo sapien
actgtgcctggttctacatattttggatactag

SEQ ID NO: 494648 - DNA, 33 bp, Homo sapien
actgtgcctggttctatatattttggatactag

SEQ ID NO: 494649 - DNA, 33 bp, Homo sapien
acatactcaagaaagacgtaaaaaggctcttac

SEQ ID NO: 494650 - DNA, 33 bp, Homo sapien
acatactcaagaaagatgtaaaaaggctcttac

SEQ ID NO: 494651 - DNA, 33 bp, Homo sapien
gatgccttgctaaggaagtccgagctatgctat

SEQ ID NO: 494652 - DNA, 33 bp, Homo sapien
gatgccttgctaaggaggtccgagctatgctat

SEQ ID NO: 494653 - DNA, 33 bp, Homo sapien
gaaagagatgtagaccagggaaaaaaaagtaga

SEQ ID NO: 494654 - DNA, 33 bp, Homo sapien
gaaagagatgtagaccggggaaaaaaaagtaga

SEQ ID NO: 494655 - DNA, 33 bp, Homo sapien
gattgagtatgttaacaagcataaaatgaggtc

SEQ ID NO: 494656 - DNA, 33 bp, Homo sapien
gattgagtatgttaacgagcataaaatgaggtc

SEQ ID NO: 494657 - DNA, 33 bp, Homo sapien
tgttttggtttcagaacatgaggtcactaggct

SEQ ID NO: 494658 - DNA, 33 bp, Homo sapien
tgttttggtttcagaatatgaggtcactaggct

SEQ ID NO: 494659 - DNA, 33 bp, Homo sapien
atgggccagaacaaatcatttggaaggttttat

SEQ ID NO: 494660 - DNA, 33 bp, Homo sapien
atgggccagaacaaattatttggaaggttttat

SEQ ID NO: 494661 - DNA, 33 bp, Homo sapien
tgagatactatcttgcaccagtaacaatgccta

SEQ ID NO: 494662 - DNA, 33 bp, Homo sapien
tgagatactatcttgcgccagtaacaatgccta

SEQ ID NO: 494663 - DNA, 33 bp, Homo sapien
tgaagacaccagtaagaaaataagtaggcaagc

SEQ ID NO: 494664 - DNA, 33 bp, Homo sapien
tgaagacaccagtaagtaaataagtaggcaagc

SEQ ID NO: 494665 - DNA, 33 bp, Homo sapien
ctttgtgtctaggtaaagagcttcattgaaaaa

SEQ ID NO: 494666 - DNA, 33 bp, Homo sapien
ctttgtgtctaggtaaggagcttcattgaaaaa

SEQ ID NO: 494667 - DNA, 33 bp, Homo sapien
aaggaatagccttctaacaactaaactagttgc

SEQ ID NO: 494668 - DNA, 33 bp, Homo sapien
aaggaatagccttctagcaactaaactagttgc

SEQ ID NO: 494669 - DNA, 33 bp, Homo sapien
actaatacagaaggccagcaatgctagactcca

SEQ ID NO: 494670 - DNA, 33 bp, Homo sapien
actaatacagaaggccggcaatgctagactcca

SEQ ID NO: 494671 - DNA, 33 bp, Homo sapien
tgagtttgggaataaaacaggtgattatgatgg

SEQ ID NO: 494672 - DNA, 33 bp, Homo sapien
tgagtttgggaataaagcaggtgattatgatgg

SEQ ID NO: 494673 - DNA, 33 bp, Homo sapien
gattccctgacaatccaacagcaagaacttcat

SEQ ID NO: 494674 - DNA, 33 bp, Homo sapien
gattccctgacaatcccacagcaagaacttcat

SEQ ID NO: 494675 - DNA, 33 bp, Homo sapien
tagaaggctaactttacaggctccctgcccccg

SEQ ID NO: 494676 - DNA, 33 bp, Homo sapien
tagaaggctaactttataggctccctgcccccg

SEQ ID NO: 494677 - DNA, 33 bp, Homo sapien
gtacacatgagtagaaagtgagggagaagtagg

SEQ ID NO: 494678 - DNA, 33 bp, Homo sapien
gtacacatgagtagaaggtgagggagaagtagg

SEQ ID NO: 494679 - DNA, 33 bp, Homo sapien
aaggcgacccatgagacaatagtcaggaagcca

SEQ ID NO: 494680 - DNA, 33 bp, Homo sapien
aaggcgacccatgagagaatagtcaggaagcca

SEQ ID NO: 494681 - DNA, 33 bp, Homo sapien
gaaacttaccagaagcgatcattatccttatta

SEQ ID NO: 494682 - DNA, 33 bp, Homo sapien
gaaacttaccagaagctatcattatccttatta

SEQ ID NO: 494683 - DNA, 33 bp, Homo sapien
gaaaagttaacaggccacaggctattccacaaa

SEQ ID NO: 494684 - DNA, 33 bp, Homo sapien
gaaaagttaacaggccgcaggctattccacaaa

SEQ ID NO: 494685 - DNA, 33 bp, Homo sapien
ctccctttcaagcctagattccactgtaagcct

SEQ ID NO: 494686 - DNA, 33 bp, Homo sapien
ctccctttcaagcctatattccactgtaagcct

SEQ ID NO: 494687 - DNA, 33 bp, Homo sapien
tcaagtacatcagagacaccagcggaggtaaag

SEQ ID NO: 494688 - DNA, 33 bp, Homo sapien
tcaagtacatcagagagaccagcggaggtaaag

SEQ ID NO: 494689 - DNA, 33 bp, Homo sapien
gtctacagctcagaaaagagggctgggggaagc

SEQ ID NO: 494690 - DNA, 33 bp, Homo sapien
gtctacagctcagaaaggagggctgggggaagc

SEQ ID NO: 494691 - DNA, 33 bp, Homo sapien
gtatcctttatggatacaaaacatggccaggca

SEQ ID NO: 494692 - DNA, 33 bp, Homo sapien
gtatcctttatggatataaaacatggccaggca

SEQ ID NO: 494693 - DNA, 33 bp, Homo sapien
tctagatgaactacaaattggatttaaaagtta

SEQ ID NO: 494694 - DNA, 33 bp, Homo sapien
tctagatgaactacaacttggatttaaaagtta

SEQ ID NO: 494695 - DNA, 33 bp, Homo sapien
ttacttctctcagcaaatgggacttgtaagtaa

SEQ ID NO: 494696 - DNA, 33 bp, Homo sapien
ttacttctctcagcaagtgggacttgtaagtaa

SEQ ID NO: 494697 - DNA, 33 bp, Homo sapien
taattgccctgaatgtatcagcacatctaatct

SEQ ID NO: 494698 - DNA, 33 bp, Homo sapien
taattgccctgaatgtttcagcacatctaatct

SEQ ID NO: 494699 - DNA, 33 bp, Homo sapien
acaagcaagcatctagaaacttaaaaatttttg

SEQ ID NO: 494700 - DNA, 33 bp, Homo sapien
acaagcaagcatctaggaacttaaaaatttttg

SEQ ID NO: 494701 - DNA, 33 bp, Homo sapien
taagtcagataaattacgtgcctgaggtcagag

SEQ ID NO: 494702 - DNA, 33 bp, Homo sapien
taagtcagataaattatgtgcctgaggtcagag

SEQ ID NO: 494703 - DNA, 33 bp, Homo sapien
gttcttgtctcttggacctatcttaatatcatc

SEQ ID NO: 494704 - DNA, 33 bp, Homo sapien
gttcttgtctcttggatctatcttaatatcatc

SEQ ID NO: 494705 - DNA, 33 bp, Homo sapien
actcttctggttaggaaagctgatgacctgatg

SEQ ID NO: 494706 - DNA, 33 bp, Homo sapien
actcttctggttaggagagctgatgacctgatg

SEQ ID NO: 494707 - DNA, 33 bp, Homo sapien
gcattctccactacaccgagtgtttgtacagct

SEQ ID NO: 494708 - DNA, 33 bp, Homo sapien
gcattctccactacactgagtgtttgtacagct

SEQ ID NO: 494709 - DNA, 33 bp, Homo sapien
tttaataagatgggccggaactctacccagttt

SEQ ID NO: 494710 - DNA, 33 bp, Homo sapien
tttaataagatgggcctgaactctacccagttt

SEQ ID NO: 494711 - DNA, 33 bp, Homo sapien
tcactctaatcaccaacgccgcccatttttcct

SEQ ID NO: 494712 - DNA, 33 bp, Homo sapien
tcactctaatcaccaatgccgcccatttttcct

SEQ ID NO: 494713 - DNA, 33 bp, Homo sapien
tatttgaggctggaagaaggaaaattaccttac

SEQ ID NO: 494714 - DNA, 33 bp, Homo sapien
tatttgaggctggaaggaggaaaattaccttac

SEQ ID NO: 494715 - DNA, 33 bp, Homo sapien
ggaatatggtagtgaaccttattttcccttgta

SEQ ID NO: 494716 - DNA, 33 bp, Homo sapien
ggaatatggtagtgaatcttattttcccttgta

SEQ ID NO: 494717 - DNA, 33 bp, Homo sapien
agttttcctctctggagacttgggtgggatgag

SEQ ID NO: 494718 - DNA, 33 bp, Homo sapien
agttttcctctctggatacttgggtgggatgag

SEQ ID NO: 494719 - DNA, 33 bp, Homo sapien
cctatagttttagaacagagtttggagacatcc

SEQ ID NO: 494720 - DNA, 33 bp, Homo sapien
cctatagttttagaaccgagtttggagacatcc

SEQ ID NO: 494721 - DNA, 33 bp, Homo sapien
ggcagtgatcaaagcaatcccatagaaggcaca

SEQ ID NO: 494722 - DNA, 33 bp, Homo sapien
ggcagtgatcaaagcagtcccatagaaggcaca

SEQ ID NO: 494723 - DNA, 33 bp, Homo sapien
ggaatgagtgtacacacgccgattgtgtgactg

SEQ ID NO: 494724 - DNA, 33 bp, Homo sapien
ggaatgagtgtacacatgccgattgtgtgactg

SEQ ID NO: 494725 - DNA, 33 bp, Homo sapien
gatgctgaacaaagacccaagaaccagggtgat

SEQ ID NO: 494726 - DNA, 33 bp, Homo sapien
gatgctgaacaaagacgcaagaaccagggtgat

SEQ ID NO: 494727 - DNA, 33 bp, Homo sapien
taatggaccttttacccacacataattctataa

SEQ ID NO: 494728 - DNA, 33 bp, Homo sapien
taatggaccttttacctacacataattctataa

SEQ ID NO: 494729 - DNA, 33 bp, Homo sapien
attgctactcagtaaaaggagatgctatttaaa

SEQ ID NO: 494730 - DNA, 33 bp, Homo sapien
attgctactcagtaaacggagatgctatttaaa

SEQ ID NO: 494731 - DNA, 33 bp, Homo sapien
gttaatatctttcttcacctgttaacactgttc

SEQ ID NO: 494732 - DNA, 33 bp, Homo sapien
gttaatatctttcttcgcctgttaacactgttc

SEQ ID NO: 494733 - DNA, 33 bp, Homo sapien
acagaagaaaccagcacgaaatctgttcctgag

SEQ ID NO: 494734 - DNA, 33 bp, Homo sapien
acagaagaaaccagcatgaaatctgttcctgag

SEQ ID NO: 494735 - DNA, 33 bp, Homo sapien
tgaaacagggactcaccgagatcatgaactaag

SEQ ID NO: 494736 - DNA, 33 bp, Homo sapien
tgaaacagggactcactgagatcatgaactaag

SEQ ID NO: 494737 - DNA, 33 bp, Homo sapien
gctagtgggaaatgctaacctacagaataaatt

SEQ ID NO: 494738 - DNA, 33 bp, Homo sapien
gctagtgggaaatgctgacctacagaataaatt

SEQ ID NO: 494739 - DNA, 33 bp, Homo sapien
agtagttactttccaacttcaataccatgagtg

SEQ ID NO: 494740 - DNA, 33 bp, Homo sapien
agtagttactttccaagttcaataccatgagtg

SEQ ID NO: 494741 - DNA, 33 bp, Homo sapien
gtcttatcaatgggcagccggttttcagctgac

SEQ ID NO: 494742 - DNA, 33 bp, Homo sapien
gtcttatcaatgggcatccggttttcagctgac

SEQ ID NO: 494743 - DNA, 33 bp, Homo sapien
actttgtctctgttgactatggtcatttcattc

SEQ ID NO: 494744 - DNA, 33 bp, Homo sapien
actttgtctctgttgagtatggtcatttcattc

SEQ ID NO: 494745 - DNA, 33 bp, Homo sapien
aagttaacaacctgaaacactccaagcatatat

SEQ ID NO: 494746 - DNA, 33 bp, Homo sapien
aagttaacaacctgaagcactccaagcatatat

SEQ ID NO: 494747 - DNA, 33 bp, Homo sapien
ttcctcattcgctttaccttagacctagtttaa

SEQ ID NO: 494748 - DNA, 33 bp, Homo sapien
ttcctcattcgctttagcttagacctagtttaa

SEQ ID NO: 494749 - DNA, 33 bp, Homo sapien
ctagaagctaaactaaatgactgaaaaaatggc

SEQ ID NO: 494750 - DNA, 33 bp, Homo sapien
ctagaagctaaactaagtgactgaaaaaatggc

SEQ ID NO: 494751 - DNA, 33 bp, Homo sapien
ggcctttgtgggtgaacgaatgcatgactgagt

SEQ ID NO: 494752 - DNA, 33 bp, Homo sapien
ggcctttgtgggtgaaggaatgcatgactgagt

SEQ ID NO: 494753 - DNA, 33 bp, Homo sapien
gtcctctgtaatcttccctctccttcccctaag

SEQ ID NO: 494754 - DNA, 33 bp, Homo sapien
gtcctctgtaatcttctctctccttcccctaag

SEQ ID NO: 494755 - DNA, 33 bp, Homo sapien
agagctttccccagcgcaagtaggctttgataa

SEQ ID NO: 494756 - DNA, 33 bp, Homo sapien
agagctttccccagcggaagtaggctttgataa

SEQ ID NO: 494757 - DNA, 33 bp, Homo sapien
agcttcagtgcatcacaagcagcggccttctaa

SEQ ID NO: 494758 - DNA, 33 bp, Homo sapien
agcttcagtgcatcacgagcagcggccttctaa

SEQ ID NO: 494759 - DNA, 33 bp, Homo sapien
atagaagaattgcaaaatgtacttgataggaaa

SEQ ID NO: 494760 - DNA, 33 bp, Homo sapien
atagaagaattgcaaattgtacttgataggaaa

SEQ ID NO: 494761 - DNA, 33 bp, Homo sapien
cacacataactttgcaaaaaacatctttgtgtg

SEQ ID NO: 494762 - DNA, 33 bp, Homo sapien
cacacataactttgcagaaaacatctttgtgtg

SEQ ID NO: 494763 - DNA, 33 bp, Homo sapien
tatgttaagtaaaaaaatccagacacaaaagga

SEQ ID NO: 494764 - DNA, 33 bp, Homo sapien
tatgttaagtaaaaaattccagacacaaaagga

SEQ ID NO: 494765 - DNA, 33 bp, Homo sapien
cttatttttttctctacgtgcacccaacctcaa

SEQ ID NO: 494766 - DNA, 33 bp, Homo sapien
cttatttttttctctatgtgcacccaacctcaa

SEQ ID NO: 494767 - DNA, 33 bp, Homo sapien
tgctgtgaagatgagaagagaaattaactgctt

SEQ ID NO: 494768 - DNA, 33 bp, Homo sapien
tgctgtgaagatgagaggagaaattaactgctt

SEQ ID NO: 494769 - DNA, 33 bp, Homo sapien
caggctgggccaccacagagaataggcttcctt

SEQ ID NO: 494770 - DNA, 33 bp, Homo sapien
caggctgggccaccacggagaataggcttcctt

SEQ ID NO: 494771 - DNA, 33 bp, Homo sapien
gccttgccctcaacaaatcatatgtgaccaatt

SEQ ID NO: 494772 - DNA, 33 bp, Homo sapien
gccttgccctcaacaagtcatatgtgaccaatt

SEQ ID NO: 494773 - DNA, 33 bp, Homo sapien
aatgaagggaatttcccagcctgtttcctgcct

SEQ ID NO: 494774 - DNA, 33 bp, Homo sapien
aatgaagggaatttcctagcctgtttcctgcct

SEQ ID NO: 494775 - DNA, 33 bp, Homo sapien
atacaaagtttctaaacgtggcagagcaaccag

SEQ ID NO: 494776 - DNA, 33 bp, Homo sapien
atacaaagtttctaaatgtggcagagcaaccag

SEQ ID NO: 494777 - DNA, 33 bp, Homo sapien
ttatggtaaggcatgacagtatgatcttctccc

SEQ ID NO: 494778 - DNA, 33 bp, Homo sapien
ttatggtaaggcatgatagtatgatcttctccc

SEQ ID NO: 494779 - DNA, 33 bp, Homo sapien
tttatcagaattgagaaccaaccacatacctga

SEQ ID NO: 494780 - DNA, 33 bp, Homo sapien
tttatcagaattgagatccaaccacatacctga

SEQ ID NO: 494781 - DNA, 33 bp, Homo sapien
cactctgtaaatattccctgctatttgtactat

SEQ ID NO: 494782 - DNA, 33 bp, Homo sapien
cactctgtaaatattctctgctatttgtactat

SEQ ID NO: 494783 - DNA, 33 bp, Homo sapien
ttatttatttgtcctaacatctcataacaactc

SEQ ID NO: 494784 - DNA, 33 bp, Homo sapien
ttatttatttgtcctaccatctcataacaactc

SEQ ID NO: 494785 - DNA, 33 bp, Homo sapien
ggggattattggacccggaactctacctatgta

SEQ ID NO: 494786 - DNA, 33 bp, Homo sapien
ggggattattggaccctgaactctacctatgta

SEQ ID NO: 494787 - DNA, 33 bp, Homo sapien
ggggccataagaagcaaacctcctaaatctcag

SEQ ID NO: 494788 - DNA, 33 bp, Homo sapien
ggggccataagaagcagacctcctaaatctcag

SEQ ID NO: 494789 - DNA, 33 bp, Homo sapien
aacaaaatgactttccacatcacctgattccgg

SEQ ID NO: 494790 - DNA, 33 bp, Homo sapien
aacaaaatgactttccgcatcacctgattccgg

SEQ ID NO: 494791 - DNA, 33 bp, Homo sapien
atcatgctggaacctgaaaataaagcaaaccag

SEQ ID NO: 494792 - DNA, 33 bp, Homo sapien
atcatgctggaacctggaaataaagcaaaccag

SEQ ID NO: 494793 - DNA, 33 bp, Homo sapien
agcttttcttatcagaagtcagttccacctgca

SEQ ID NO: 494794 - DNA, 33 bp, Homo sapien
agcttttcttatcagaggtcagttccacctgca

SEQ ID NO: 494795 - DNA, 33 bp, Homo sapien
ggggcagctttgaaaaattaacagttttatatt

SEQ ID NO: 494796 - DNA, 33 bp, Homo sapien
ggggcagctttgaaaagttaacagttttatatt

SEQ ID NO: 494797 - DNA, 33 bp, Homo sapien
actaaataaatgcagaaatacaccatagccttg

SEQ ID NO: 494798 - DNA, 33 bp, Homo sapien
actaaataaatgcagagatacaccatagccttg

SEQ ID NO: 494799 - DNA, 33 bp, Homo sapien
aaactgattgttggaactctgtatggcgatgaa

SEQ ID NO: 494800 - DNA, 33 bp, Homo sapien
aaactgattgttggaattctgtatggcgatgaa

SEQ ID NO: 494801 - DNA, 33 bp, Homo sapien
aagtcatttcagcaacagggttatgatgagaat

SEQ ID NO: 494802 - DNA, 33 bp, Homo sapien
aagtcatttcagcaacggggttatgatgagaat

SEQ ID NO: 494803 - DNA, 33 bp, Homo sapien
ttcagtggaaattattcaataaacagtgaaaca

SEQ ID NO: 494804 - DNA, 33 bp, Homo sapien
ttcagtggaaattattgaataaacagtgaaaca

SEQ ID NO: 494805 - DNA, 33 bp, Homo sapien
atgcctactgttgtcaactattacaaccaacaa

SEQ ID NO: 494806 - DNA, 33 bp, Homo sapien
atgcctactgttgtcagctattacaaccaacaa

SEQ ID NO: 494807 - DNA, 33 bp, Homo sapien
cttgtgctttgccccaaatagcctgacatgagg

SEQ ID NO: 494808 - DNA, 33 bp, Homo sapien
cttgtgctttgccccagatagcctgacatgagg

SEQ ID NO: 494809 - DNA, 33 bp, Homo sapien
ttaggagcaaagataacgccttccgtgggacag

SEQ ID NO: 494810 - DNA, 33 bp, Homo sapien
ttaggagcaaagataatgccttccgtgggacag

SEQ ID NO: 494811 - DNA, 33 bp, Homo sapien
tggacaagtgattgataacatggagaatgaaaa

SEQ ID NO: 494812 - DNA, 33 bp, Homo sapien
tggacaagtgattgattacatggagaatgaaaa

SEQ ID NO: 494813 - DNA, 33 bp, Homo sapien
ccaacttctttagacaccaatacagacccaaac

SEQ ID NO: 494814 - DNA, 33 bp, Homo sapien
ccaacttctttagacatcaatacagacccaaac

SEQ ID NO: 494815 - DNA, 33 bp, Homo sapien
tctctttttcctttagcagctgaggccccttgg

SEQ ID NO: 494816 - DNA, 33 bp, Homo sapien
tctctttttcctttagtagctgaggccccttgg

SEQ ID NO: 494817 - DNA, 33 bp, Homo sapien
aaaatgagagctttaaaacaaaactggaggcaa

SEQ ID NO: 494818 - DNA, 33 bp, Homo sapien
aaaatgagagctttaagacaaaactggaggcaa

SEQ ID NO: 494819 - DNA, 33 bp, Homo sapien
tttgaaatgtggaaaacaaaggtctccaagagg

SEQ ID NO: 494820 - DNA, 33 bp, Homo sapien
tttgaaatgtggaaaataaaggtctccaagagg

SEQ ID NO: 494821 - DNA, 33 bp, Homo sapien
aaagtaactgaagagtaaactagcagcaggacc

SEQ ID NO: 494822 - DNA, 33 bp, Homo sapien
aaagtaactgaagagtgaactagcagcaggacc

SEQ ID NO: 494823 - DNA, 33 bp, Homo sapien
agtaaaatgtggcaaaacctaaaatacttttgt

SEQ ID NO: 494824 - DNA, 33 bp, Homo sapien
agtaaaatgtggcaaatcctaaaatacttttgt

SEQ ID NO: 494825 - DNA, 33 bp, Homo sapien
atgggtcaaatgtgcaccaaacaacagccaaaa

SEQ ID NO: 494826 - DNA, 33 bp, Homo sapien
atgggtcaaatgtgcatcaaacaacagccaaaa

SEQ ID NO: 494827 - DNA, 33 bp, Homo sapien
ataagaaataagaccacgtgaaggaagttcaac

SEQ ID NO: 494828 - DNA, 33 bp, Homo sapien
ataagaaataagaccatgtgaaggaagttcaac

SEQ ID NO: 494829 - DNA, 33 bp, Homo sapien
tttacctactagtacactgaatgtcataaaaaa

SEQ ID NO: 494830 - DNA, 33 bp, Homo sapien
tttacctactagtacagtgaatgtcataaaaaa

SEQ ID NO: 494831 - DNA, 33 bp, Homo sapien
tcctacactttcacatgacagtggccatgagct

SEQ ID NO: 494832 - DNA, 33 bp, Homo sapien
tcctacactttcacattacagtggccatgagct

SEQ ID NO: 494833 - DNA, 33 bp, Homo sapien
atgttctcttaagcagaaaaacaccaggctttg

SEQ ID NO: 494834 - DNA, 33 bp, Homo sapien
atgttctcttaagcaggaaaacaccaggctttg

SEQ ID NO: 494835 - DNA, 33 bp, Homo sapien
cttcatacttttgctcaagggctggtgctaaat

SEQ ID NO: 494836 - DNA, 33 bp, Homo sapien
cttcatacttttgctcgagggctggtgctaaat

SEQ ID NO: 494837 - DNA, 33 bp, Homo sapien
atcctcagatcattcccattcttcctgcagccc

SEQ ID NO: 494838 - DNA, 33 bp, Homo sapien
atcctcagatcattcctattcttcctgcagccc

SEQ ID NO: 494839 - DNA, 33 bp, Homo sapien
acacctataccatcaagggataaaagagattgg

SEQ ID NO: 494840 - DNA, 33 bp, Homo sapien
acacctataccatcaatggataaaagagattgg

SEQ ID NO: 494841 - DNA, 33 bp, Homo sapien
accagaaacaacacatgacaattatttagctct

SEQ ID NO: 494842 - DNA, 33 bp, Homo sapien
accagaaacaacacattacaattatttagctct

SEQ ID NO: 494843 - DNA, 33 bp, Homo sapien
aggggctgttctagggaccaaggaaaagaagga

SEQ ID NO: 494844 - DNA, 33 bp, Homo sapien
aggggctgttctaggggccaaggaaaagaagga

SEQ ID NO: 494845 - DNA, 33 bp, Homo sapien
ttctatgcagagacaaatgagtactacactgag

SEQ ID NO: 494846 - DNA, 33 bp, Homo sapien
ttctatgcagagacaactgagtactacactgag

SEQ ID NO: 494847 - DNA, 33 bp, Homo sapien
ccccaacagtgccccaccttagtaatgacagtt

SEQ ID NO: 494848 - DNA, 33 bp, Homo sapien
ccccaacagtgccccatcttagtaatgacagtt

SEQ ID NO: 494849 - DNA, 33 bp, Homo sapien
aaggtgagttgtgagcaagggtatgggccatgt

SEQ ID NO: 494850 - DNA, 33 bp, Homo sapien
aaggtgagttgtgagcgagggtatgggccatgt

SEQ ID NO: 494851 - DNA, 33 bp, Homo sapien
aatgagaagattcaaaaccgaatgggaatggat

SEQ ID NO: 494852 - DNA, 33 bp, Homo sapien
aatgagaagattcaaagccgaatgggaatggat

SEQ ID NO: 494853 - DNA, 33 bp, Homo sapien
actagctgggcttacactgggcaagctatttca

SEQ ID NO: 494854 - DNA, 33 bp, Homo sapien
actagctgggcttacattgggcaagctatttca

SEQ ID NO: 494855 - DNA, 33 bp, Homo sapien
tagcctgagggatttgcacaaagttctgtaagt

SEQ ID NO: 494856 - DNA, 33 bp, Homo sapien
tagcctgagggatttggacaaagttctgtaagt

SEQ ID NO: 494857 - DNA, 33 bp, Homo sapien
ctgtctgccttcagccaagtaatcttctaaata

SEQ ID NO: 494858 - DNA, 33 bp, Homo sapien
ctgtctgccttcagccgagtaatcttctaaata

SEQ ID NO: 494859 - DNA, 33 bp, Homo sapien
tcccaagaaacaaacgaaagtccaagaccttac

SEQ ID NO: 494860 - DNA, 33 bp, Homo sapien
tcccaagaaacaaacgcaagtccaagaccttac

SEQ ID NO: 494861 - DNA, 33 bp, Homo sapien
tcacttcctcctctcacgcaaaggcctggagag

SEQ ID NO: 494862 - DNA, 33 bp, Homo sapien
tcacttcctcctctcatgcaaaggcctggagag

SEQ ID NO: 494863 - DNA, 33 bp, Homo sapien
atctccctcttatctccgaccgttcctttccac

SEQ ID NO: 494864 - DNA, 33 bp, Homo sapien
atctccctcttatctctgaccgttcctttccac

SEQ ID NO: 494865 - DNA, 33 bp, Homo sapien
caatattagaatagaaatagatgcacatctgca

SEQ ID NO: 494866 - DNA, 33 bp, Homo sapien
caatattagaatagaagtagatgcacatctgca

SEQ ID NO: 494867 - DNA, 33 bp, Homo sapien
tcacttgcttccttgacgaggggtgatgctcca

SEQ ID NO: 494868 - DNA, 33 bp, Homo sapien
tcacttgcttccttgatgaggggtgatgctcca

SEQ ID NO: 494869 - DNA, 33 bp, Homo sapien
ctgagaacatttttcacatttctactctgcagg

SEQ ID NO: 494870 - DNA, 33 bp, Homo sapien
ctgagaacatttttcatatttctactctgcagg

SEQ ID NO: 494871 - DNA, 33 bp, Homo sapien
taaccagaagccgaaccagtgagaccaggttgg

SEQ ID NO: 494872 - DNA, 33 bp, Homo sapien
taaccagaagccgaactagtgagaccaggttgg

SEQ ID NO: 494873 - DNA, 33 bp, Homo sapien
cagatttcacattgacacactgtaagttgggca

SEQ ID NO: 494874 - DNA, 33 bp, Homo sapien
cagatttcacattgacgcactgtaagttgggca

SEQ ID NO: 494875 - DNA, 33 bp, Homo sapien
gacaattctttgttaaatgtgtagacgattgga

SEQ ID NO: 494876 - DNA, 33 bp, Homo sapien
gacaattctttgttaagtgtgtagacgattgga

SEQ ID NO: 494877 - DNA, 33 bp, Homo sapien
taagttctgcccttcgaagcctcccagacctgg

SEQ ID NO: 494878 - DNA, 33 bp, Homo sapien
taagttctgcccttcggagcctcccagacctgg

SEQ ID NO: 494879 - DNA, 33 bp, Homo sapien
atagataagtgtatatgaagctgtcctcttacc

SEQ ID NO: 494880 - DNA, 33 bp, Homo sapien
atagataagtgtatattaagctgtcctcttacc

SEQ ID NO: 494881 - DNA, 33 bp, Homo sapien
ggtgccttaaattagacggggagatggtgggtg

SEQ ID NO: 494882 - DNA, 33 bp, Homo sapien
ggtgccttaaattagatggggagatggtgggtg

SEQ ID NO: 494883 - DNA, 33 bp, Homo sapien
cttcacttgtctgaaacggtcagctccaattta

SEQ ID NO: 494884 - DNA, 33 bp, Homo sapien
cttcacttgtctgaaatggtcagctccaattta

SEQ ID NO: 494885 - DNA, 33 bp, Homo sapien
ccagctgatggcaccaaaaaagatcatctcgag

SEQ ID NO: 494886 - DNA, 33 bp, Homo sapien
ccagctgatggcaccagaaaagatcatctcgag

SEQ ID NO: 494887 - DNA, 33 bp, Homo sapien
cccacagctgataaacagaggaactagcattta

SEQ ID NO: 494888 - DNA, 33 bp, Homo sapien
cccacagctgataaacggaggaactagcattta

SEQ ID NO: 494889 - DNA, 33 bp, Homo sapien
gctggagggacagtcaagtgtaaagagggataa

SEQ ID NO: 494890 - DNA, 33 bp, Homo sapien
gctggagggacagtcaggtgtaaagagggataa

SEQ ID NO: 494891 - DNA, 33 bp, Homo sapien
catgaacaattaagacactaacagctaggcagg

SEQ ID NO: 494892 - DNA, 33 bp, Homo sapien
catgaacaattaagacgctaacagctaggcagg

SEQ ID NO: 494893 - DNA, 33 bp, Homo sapien
taagtgcaacaatttccaaatgtatttgacacc

SEQ ID NO: 494894 - DNA, 33 bp, Homo sapien
taagtgcaacaatttctaaatgtatttgacacc

SEQ ID NO: 494895 - DNA, 33 bp, Homo sapien
ggtgagtaggctgaaacagcgtcttgggggcag

SEQ ID NO: 494896 - DNA, 33 bp, Homo sapien
ggtgagtaggctgaaatagcgtcttgggggcag

SEQ ID NO: 494897 - DNA, 33 bp, Homo sapien
tggaatctgatgatataaaaggttccttctagc

SEQ ID NO: 494898 - DNA, 33 bp, Homo sapien
tggaatctgatgatatcaaaggttccttctagc

SEQ ID NO: 494899 - DNA, 33 bp, Homo sapien
ttgacccgtgtttggcactcagaacaagtgacc

SEQ ID NO: 494900 - DNA, 33 bp, Homo sapien
ttgacccgtgtttggcgctcagaacaagtgacc

SEQ ID NO: 494901 - DNA, 33 bp, Homo sapien
acagaaataattacacaaaactgaactctcaga

SEQ ID NO: 494902 - DNA, 33 bp, Homo sapien
acagaaataattacacgaaactgaactctcaga

SEQ ID NO: 494903 - DNA, 33 bp, Homo sapien
cctcctcatccaccacaaaagggcagcttgccc

SEQ ID NO: 494904 - DNA, 33 bp, Homo sapien
cctcctcatccaccacgaaagggcagcttgccc

SEQ ID NO: 494905 - DNA, 33 bp, Homo sapien
gggtactcaactgaacaatgcagagaagaccct

SEQ ID NO: 494906 - DNA, 33 bp, Homo sapien
gggtactcaactgaacgatgcagagaagaccct

SEQ ID NO: 494907 - DNA, 33 bp, Homo sapien
ggtccttgccagagtgcaaagtcatttgtctca

SEQ ID NO: 494908 - DNA, 33 bp, Homo sapien
ggtccttgccagagtgtaaagtcatttgtctca

SEQ ID NO: 494909 - DNA, 33 bp, Homo sapien
accaaacaatcaaaggaaccaaagatggatgag

SEQ ID NO: 494910 - DNA, 33 bp, Homo sapien
accaaacaatcaaaggcaccaaagatggatgag

SEQ ID NO: 494911 - DNA, 33 bp, Homo sapien
acataaatgattgaaaatgaatgagttaaacat

SEQ ID NO: 494912 - DNA, 33 bp, Homo sapien
acataaatgattgaaagtgaatgagttaaacat

SEQ ID NO: 494913 - DNA, 33 bp, Homo sapien
tgaagctggggaatgacgttgtggactgagtga

SEQ ID NO: 494914 - DNA, 33 bp, Homo sapien
tgaagctggggaatgatgttgtggactgagtga

SEQ ID NO: 494915 - DNA, 33 bp, Homo sapien
ctctccctcaacgtggaaaccttttgtggatcc

SEQ ID NO: 494916 - DNA, 33 bp, Homo sapien
ctctccctcaacgtggtaaccttttgtggatcc

SEQ ID NO: 494917 - DNA, 33 bp, Homo sapien
agtatttttaagcagaagatgtaactaaggcat

SEQ ID NO: 494918 - DNA, 33 bp, Homo sapien
agtatttttaagcagaggatgtaactaaggcat

SEQ ID NO: 494919 - DNA, 33 bp, Homo sapien
tctccacgtcaaagacagcatcttgttgctgcg

SEQ ID NO: 494920 - DNA, 33 bp, Homo sapien
tctccacgtcaaagacggcatcttgttgctgcg

SEQ ID NO: 494921 - DNA, 33 bp, Homo sapien
atagcgtatgcaaaagaccacctggctgtcacc

SEQ ID NO: 494922 - DNA, 33 bp, Homo sapien
atagcgtatgcaaaaggccacctggctgtcacc

SEQ ID NO: 494923 - DNA, 33 bp, Homo sapien
gattccacaaggcccccattcatgtaattcttt

SEQ ID NO: 494924 - DNA, 33 bp, Homo sapien
gattccacaaggccccgattcatgtaattcttt

SEQ ID NO: 494925 - DNA, 33 bp, Homo sapien
atggtgaggttgcgcacgtgtgtgaagggccag

SEQ ID NO: 494926 - DNA, 33 bp, Homo sapien
atggtgaggttgcgcatgtgtgtgaagggccag

SEQ ID NO: 494927 - DNA, 33 bp, Homo sapien
tcattttaaaagcatcccaccatacttgctaaa

SEQ ID NO: 494928 - DNA, 33 bp, Homo sapien
tcattttaaaagcatctcaccatacttgctaaa

SEQ ID NO: 494929 - DNA, 33 bp, Homo sapien
gacacagagtattccaggagagagtatcaacgt

SEQ ID NO: 494930 - DNA, 33 bp, Homo sapien
gacacagagtattccatgagagagtatcaacgt

SEQ ID NO: 494931 - DNA, 33 bp, Homo sapien
gtacaacctcaggcaacagtgtgcgggagccac

SEQ ID NO: 494932 - DNA, 33 bp, Homo sapien
gtacaacctcaggcaagagtgtgcgggagccac

SEQ ID NO: 494933 - DNA, 33 bp, Homo sapien
aaccaatgacagatgccacactggaaagaggac

SEQ ID NO: 494934 - DNA, 33 bp, Homo sapien
aaccaatgacagatgcgacactggaaagaggac

SEQ ID NO: 494935 - DNA, 33 bp, Homo sapien; identical to SEQ ID NO: 494933

SEQ ID NO: 494936 - DNA, 33 bp, Homo sapien; identical to SEQ ID NO: 494934

SEQ ID NO: 494937 - DNA, 33 bp, Homo sapien
taaacgcttcatctaacgctaagacaatttggg

SEQ ID NO: 494938 - DNA, 33 bp, Homo sapien
taaacgcttcatctaatgctaagacaatttggg

SEQ ID NO: 494939 - DNA, 33 bp, Homo sapien
gagttaattaggttaacaggtagagggaggaac

SEQ ID NO: 494940 - DNA, 33 bp, Homo sapien
gagttaattaggttaagaggtagagggaggaac

SEQ ID NO: 494941 - DNA, 33 bp, Homo sapien
aagtcctaagtgaggcaccctaagatattatgg

SEQ ID NO: 494942 - DNA, 33 bp, Homo sapien
aagtcctaagtgaggcgccctaagatattatgg

SEQ ID NO: 494943 - DNA, 33 bp, Homo sapien
tatgcacacatccatacgcaccacacgtggaca

SEQ ID NO: 494944 - DNA, 33 bp, Homo sapien
tatgcacacatccatatgcaccacacgtggaca

SEQ ID NO: 494945 - DNA, 33 bp, Homo sapien
atatgtgtgtcatcaagtaatttcttggacaat

SEQ ID NO: 494946 - DNA, 33 bp, Homo sapien
atatgtgtgtcatcaattaatttcttggacaat

SEQ ID NO: 494947 - DNA, 33 bp, Homo sapien
gatttgggggtagagaatctatgcttatacagc

SEQ ID NO: 494948 - DNA, 33 bp, Homo sapien
gatttgggggtagagattctatgcttatacagc

SEQ ID NO: 494949 - DNA, 33 bp, Homo sapien
gcggagaaggaaccgaaaggggagagaaacgcc

SEQ ID NO: 494950 - DNA, 33 bp, Homo sapien
gcggagaaggaaccgagaggggagagaaacgcc

SEQ ID NO: 494951 - DNA, 33 bp, Homo sapien
acacatatgcaaagaaagagccatgggaaatga

SEQ ID NO: 494952 - DNA, 33 bp, Homo sapien
acacatatgcaaagaaggagccatgggaaatga

SEQ ID NO: 494953 - DNA, 33 bp, Homo sapien
ctttaggtcaaaataaccttgatgttatcctaa

SEQ ID NO: 494954 - DNA, 33 bp, Homo sapien
ctttaggtcaaaataatcttgatgttatcctaa

SEQ ID NO: 494955 - DNA, 33 bp, Homo sapien
tagataaggattagcaatatgtacggtggctaa

SEQ ID NO: 494956 - DNA, 33 bp, Homo sapien
tagataaggattagcagtatgtacggtggctaa

SEQ ID NO: 494957 - DNA, 33 bp, Homo sapien
cgagaaccttttagaaagaatgctccagggagt

SEQ ID NO: 494958 - DNA, 33 bp, Homo sapien
cgagaaccttttagaaggaatgctccagggagt

SEQ ID NO: 494959 - DNA, 33 bp, Homo sapien
gttgtcctagagaaaacggaatactccaggaag

SEQ ID NO: 494960 - DNA, 33 bp, Homo sapien
gttgtcctagagaaaatggaatactccaggaag

SEQ ID NO: 494961 - DNA, 33 bp, Homo sapien
aaaccatgtctccacaaaaaattagccagatgt

SEQ ID NO: 494962 - DNA, 33 bp, Homo sapien
aaaccatgtctccacagaaaattagccagatgt

SEQ ID NO: 494963 - DNA, 33 bp, Homo sapien
cctgcattccgggaaaagtacctctgggttgtc

SEQ ID NO: 494964 - DNA, 33 bp, Homo sapien
cctgcattccgggaaaggtacctctgggttgtc

SEQ ID NO: 494965 - DNA, 33 bp, Homo sapien
ctgaaattattttgataagaggtacataagaga

SEQ ID NO: 494966 - DNA, 33 bp, Homo sapien
ctgaaattattttgatgagaggtacataagaga

SEQ ID NO: 494967 - DNA, 33 bp, Homo sapien
atccttacagctcggcagagttctttaattaag

SEQ ID NO: 494968 - DNA, 33 bp, Homo sapien
atccttacagctcggcggagttctttaattaag

SEQ ID NO: 494969 - DNA, 33 bp, Homo sapien
tctgttctcacccaagacatttgagtaaaatat

SEQ ID NO: 494970 - DNA, 33 bp, Homo sapien
tctgttctcacccaaggcatttgagtaaaatat

SEQ ID NO: 494971 - DNA, 33 bp, Homo sapien
ctcaagagatgatgaagtgccataaaccaagag

SEQ ID NO: 494972 - DNA, 33 bp, Homo sapien
ctcaagagatgatgaattgccataaaccaagag

SEQ ID NO: 494973 - DNA, 33 bp, Homo sapien
ctcaacctggtccttgcaacatattatgagatg

SEQ ID NO: 494974 - DNA, 33 bp, Homo sapien
ctcaacctggtccttgtaacatattatgagatg

SEQ ID NO: 494975 - DNA, 33 bp, Homo sapien
aataactgcttttaagaccttgaaatattttaa

SEQ ID NO: 494976 - DNA, 33 bp, Homo sapien
aataactgcttttaagtccttgaaatattttaa

SEQ ID NO: 494977 - DNA, 33 bp, Homo sapien
ccacagaacaacataccggtgagaatatccttg

SEQ ID NO: 494978 - DNA, 33 bp, Homo sapien
ccacagaacaacatactggtgagaatatccttg

SEQ ID NO: 494979 - DNA, 33 bp, Homo sapien
tgatccaaaatatcgaataactgaaccctacca

SEQ ID NO: 494980 - DNA, 33 bp, Homo sapien
tgatccaaaatatcgagtaactgaaccctacca

SEQ ID NO: 494981 - DNA, 33 bp, Homo sapien
catgcttttcattttacagagaccactttaaca

SEQ ID NO: 494982 - DNA, 33 bp, Homo sapien
catgcttttcattttagagagaccactttaaca

SEQ ID NO: 494983 - DNA, 33 bp, Homo sapien
atttacagtagtccagccagctagctactacct

SEQ ID NO: 494984 - DNA, 33 bp, Homo sapien
atttacagtagtccaggcagctagctactacct

SEQ ID NO: 494985 - DNA, 33 bp, Homo sapien
tgtcttgtactaggctcaaacatgatatgtgca

SEQ ID NO: 494986 - DNA, 33 bp, Homo sapien
tgtcttgtactaggctgaaacatgatatgtgca

SEQ ID NO: 494987 - DNA, 33 bp, Homo sapien
aaacttttatttttcacagaagtcagacagtat

SEQ ID NO: 494988 - DNA, 33 bp, Homo sapien
aaacttttatttttcatagaagtcagacagtat

SEQ ID NO: 494989 - DNA, 33 bp, Homo sapien
gaaaaacctggttccacggagttatatagtctt

SEQ ID NO: 494990 - DNA, 33 bp, Homo sapien
gaaaaacctggttccatggagttatatagtctt

SEQ ID NO: 494991 - DNA, 33 bp, Homo sapien
ttcactggagtgaatacataattaagactatat

SEQ ID NO: 494992 - DNA, 33 bp, Homo sapien
ttcactggagtgaatagataattaagactatat

SEQ ID NO: 494993 - DNA, 33 bp, Homo sapien
ctcagggccttgggtcaatcaggttcttcttgc

SEQ ID NO: 494994 - DNA, 33 bp, Homo sapien
ctcagggccttgggtcgatcaggttcttcttgc

SEQ ID NO: 494995 - DNA, 33 bp, Homo sapien
gtgaccttcccagatccacaacaccatgatctg

SEQ ID NO: 494996 - DNA, 33 bp, Homo sapien
gtgaccttcccagatctacaacaccatgatctg

SEQ ID NO: 494997 - DNA, 33 bp, Homo sapien
gtggcaccttctcaccaaatggaaatcctgctc

SEQ ID NO: 494998 - DNA, 33 bp, Homo sapien
gtggcaccttctcaccgaatggaaatcctgctc

SEQ ID NO: 494999 - DNA, 33 bp, Homo sapien
gggaagctgcagatgcacagacaactgtaactg

SEQ ID NO: 495000 - DNA, 33 bp, Homo sapien
gggaagctgcagatgcgcagacaactgtaactg

SEQ ID NO: 495001 - DNA, 33 bp, Homo sapien
ggcatggtaaatgcctcaaagggctcagaggtg

SEQ ID NO: 495002 - DNA, 33 bp, Homo sapien
ggcatggtaaatgcctgaaagggctcagaggtg

SEQ ID NO: 495003 - DNA, 33 bp, Homo sapien
ggccatacattaaaccccttgattatcttctat

SEQ ID NO: 495004 - DNA, 33 bp, Homo sapien
ggccatacattaaacctcttgattatcttctat

SEQ ID NO: 495005 - DNA, 33 bp, Homo sapien
aatgttatatttgtcccatccccacagaattat

SEQ ID NO: 495006 - DNA, 33 bp, Homo sapien
aatgttatatttgtcctatccccacagaattat

SEQ ID NO: 495007 - DNA, 33 bp, Homo sapien
tgtgaaactactctcacgtaagtctccagtgac

SEQ ID NO: 495008 - DNA, 33 bp, Homo sapien
tgtgaaactactctcatgtaagtctccagtgac

SEQ ID NO: 495009 - DNA, 33 bp, Homo sapien
taaggatgaaccttaaaaacaatatgctaagtg

SEQ ID NO: 495010 - DNA, 33 bp, Homo sapien
taaggatgaaccttaacaacaatatgctaagtg

SEQ ID NO: 495011 - DNA, 33 bp, Homo sapien
agatcagtgttactcaaaggatcttttttcctt

SEQ ID NO: 495012 - DNA, 33 bp, Homo sapien
agatcagtgttactcagaggatcttttttcctt

SEQ ID NO: 495013 - DNA, 33 bp, Homo sapien
gaaggaaagcttgtcaaaaggctgtagtgggga

SEQ ID NO: 495014 - DNA, 33 bp, Homo sapien
gaaggaaagcttgtcagaaggctgtagtgggga

SEQ ID NO: 495015 - DNA, 33 bp, Homo sapien
actcatgcagagtagaccagcactatcaccttc

SEQ ID NO: 495016 - DNA, 33 bp, Homo sapien
actcatgcagagtagatcagcactatcaccttc

SEQ ID NO: 495017 - DNA, 33 bp, Homo sapien
atgcattctgaattaactgaccacttaaatacc

SEQ ID NO: 495018 - DNA, 33 bp, Homo sapien
atgcattctgaattaattgaccacttaaatacc

SEQ ID NO: 495019 - DNA, 33 bp, Homo sapien
caagttttggcccagacgcgtattagctgtgag

SEQ ID NO: 495020 - DNA, 33 bp, Homo sapien
caagttttggcccagaggcgtattagctgtgag

SEQ ID NO: 495021 - DNA, 33 bp, Homo sapien
cacaagtaatatctccaagttctgagaatctaa

SEQ ID NO: 495022 - DNA, 33 bp, Homo sapien
cacaagtaatatctccgagttctgagaatctaa

SEQ ID NO: 495023 - DNA, 33 bp, Homo sapien
aatgggcttcagttccaaatgtggactgtgata

SEQ ID NO: 495024 - DNA, 33 bp, Homo sapien
aatgggcttcagttccgaatgtggactgtgata

SEQ ID NO: 495025 - DNA, 33 bp, Homo sapien
ggaagaaagataagaactgtggtgatgaatgtc

SEQ ID NO: 495026 - DNA, 33 bp, Homo sapien
ggaagaaagataagaattgtggtgatgaatgtc

SEQ ID NO: 495027 - DNA, 33 bp, Homo sapien
accatatgttagtggactacattctccaaaaga

SEQ ID NO: 495028 - DNA, 33 bp, Homo sapien
accatatgttagtggattacattctccaaaaga

SEQ ID NO: 495029 - DNA, 33 bp, Homo sapien
taggtttctgtttacccggaggaatgtcttgac

SEQ ID NO: 495030 - DNA, 33 bp, Homo sapien
taggtttctgtttacctggaggaatgtcttgac

SEQ ID NO: 495031 - DNA, 33 bp, Homo sapien
ttctaggtgattcagaaaatgcaaagaaaaata

SEQ ID NO: 495032 - DNA, 33 bp, Homo sapien
ttctaggtgattcagacaatgcaaagaaaaata

SEQ ID NO: 495033 - DNA, 33 bp, Homo sapien
gtagaactggcctgtaaactaaaaatgtcaagg

SEQ ID NO: 495034 - DNA, 33 bp, Homo sapien
gtagaactggcctgtacactaaaaatgtcaagg

SEQ ID NO: 495035 - DNA, 33 bp, Homo sapien
atcattgtgcctcacacaaactaagctcactaa

SEQ ID NO: 495036 - DNA, 33 bp, Homo sapien
atcattgtgcctcacataaactaagctcactaa

SEQ ID NO: 495037 - DNA, 33 bp, Homo sapien
aaggcagaggtaagagaaggggtcatcgtatgg

SEQ ID NO: 495038 - DNA, 33 bp, Homo sapien
aaggcagaggtaagaggaggggtcatcgtatgg

SEQ ID NO: 495039 - DNA, 33 bp, Homo sapien
ggacagtatcatgaaaaccttctagattatact

SEQ ID NO: 495040 - DNA, 33 bp, Homo sapien
ggacagtatcatgaaagccttctagattatact

SEQ ID NO: 495041 - DNA, 33 bp, Homo sapien
gccaattcctaaaaaaactgagcactgaactac

SEQ ID NO: 495042 - DNA, 33 bp, Homo sapien
gccaattcctaaaaaagctgagcactgaactac

SEQ ID NO: 495043 - DNA, 33 bp, Homo sapien
attaaatggcctgtccaaaactacacagctagg

SEQ ID NO: 495044 - DNA, 33 bp, Homo sapien
attaaatggcctgtccgaaactacacagctagg

SEQ ID NO: 495045 - DNA, 33 bp, Homo sapien
ccagtcacttaagccactagcccaagatccaat

SEQ ID NO: 495046 - DNA, 33 bp, Homo sapien
ccagtcacttaagccagtagcccaagatccaat

SEQ ID NO: 495047 - DNA, 33 bp, Homo sapien
tcagtaatgattatggaaaacctgatatccaat

SEQ ID NO: 495048 - DNA, 33 bp, Homo sapien
tcagtaatgattatgggaaacctgatatccaat

SEQ ID NO: 495049 - DNA, 33 bp, Homo sapien
gggtataaacacagaaaatctgaattatttatg

SEQ ID NO: 495050 - DNA, 33 bp, Homo sapien
gggtataaacacagaacatctgaattatttatg

SEQ ID NO: 495051 - DNA, 33 bp, Homo sapien
ttgcagtgtgactatgcatgaagagtatgccag

SEQ ID NO: 495052 - DNA, 33 bp, Homo sapien
ttgcagtgtgactatgtatgaagagtatgccag

SEQ ID NO: 495053 - DNA, 33 bp, Homo sapien
gggaatagagttgaagcctgtactttaaaaaca

SEQ ID NO: 495054 - DNA, 33 bp, Homo sapien
gggaatagagttgaagtctgtactttaaaaaca

SEQ ID NO: 495055 - DNA, 33 bp, Homo sapien
ctctcggtctataacacaacctacagcaggttg

SEQ ID NO: 495056 - DNA, 33 bp, Homo sapien
ctctcggtctataacataacctacagcaggttg

SEQ ID NO: 495057 - DNA, 33 bp, Homo sapien
atacttggtcataaccactgaactactgaatac

SEQ ID NO: 495058 - DNA, 33 bp, Homo sapien
atacttggtcataaccgctgaactactgaatac

SEQ ID NO: 495059 - DNA, 33 bp, Homo sapien
gtaagaatcatgtataaaaatcagcaatagagc

SEQ ID NO: 495060 - DNA, 33 bp, Homo sapien
gtaagaatcatgtatagaaatcagcaatagagc

SEQ ID NO: 495061 - DNA, 33 bp, Homo sapien
tgtgtgaagctggaaccctcaaagagtggcacc

SEQ ID NO: 495062 - DNA, 33 bp, Homo sapien
tgtgtgaagctggaactctcaaagagtggcacc

SEQ ID NO: 495063 - DNA, 33 bp, Homo sapien
tgtttcttgaccacaaagagagtattaagcaaa

SEQ ID NO: 495064 - DNA, 33 bp, Homo sapien
tgtttcttgaccacaaggagagtattaagcaaa

SEQ ID NO: 495065 - DNA, 33 bp, Homo sapien
gcattttgttaagaacgctctagacctttctca

SEQ ID NO: 495066 - DNA, 33 bp, Homo sapien
gcattttgttaagaactctctagacctttctca

SEQ ID NO: 495067 - DNA, 33 bp, Homo sapien
actaggagaatagtggaattttgattttgtttt

SEQ ID NO: 495068 - DNA, 33 bp, Homo sapien
actaggagaatagtgggattttgattttgtttt

SEQ ID NO: 495069 - DNA, 33 bp, Homo sapien
caaaatgataggctcaaagttaaaaatatgaga

SEQ ID NO: 495070 - DNA, 33 bp, Homo sapien
caaaatgataggctcagagttaaaaatatgaga

SEQ ID NO: 495071 - DNA, 33 bp, Homo sapien
agaggcagagggtgaacgtaacagcagctgcac

SEQ ID NO: 495072 - DNA, 33 bp, Homo sapien
agaggcagagggtgaatgtaacagcagctgcac

SEQ ID NO: 495073 - DNA, 33 bp, Homo sapien
ccaagtcaaaaacgtcaagtcattttccatcct

SEQ ID NO: 495074 - DNA, 33 bp, Homo sapien
ccaagtcaaaaacgtcgagtcattttccatcct

SEQ ID NO: 495075 - DNA, 33 bp, Homo sapien
accagagaaaccaatcaagaaacaagggaagtg

SEQ ID NO: 495076 - DNA, 33 bp, Homo sapien
accagagaaaccaatcgagaaacaagggaagtg

SEQ ID NO: 495077 - DNA, 33 bp, Homo sapien
caaagttatagataaacggcataagaaatttta

SEQ ID NO: 495078 - DNA, 33 bp, Homo sapien
caaagttatagataaagggcataagaaatttta

SEQ ID NO: 495079 - DNA, 33 bp, Homo sapien
aggaaggcttctcaacaatttaccggcagaagt

SEQ ID NO: 495080 - DNA, 33 bp, Homo sapien
aggaaggcttctcaaccatttaccggcagaagt

SEQ ID NO: 495081 - DNA, 33 bp, Homo sapien
caaatcctggctgtgaagctcgtcagtgtgcaa

SEQ ID NO: 495082 - DNA, 33 bp, Homo sapien
caaatcctggctgtgacgctcgtcagtgtgcaa

SEQ ID NO: 495083 - DNA, 33 bp, Homo sapien
aagctaagccaaagcaaactgaaggaatggcat

SEQ ID NO: 495084 - DNA, 33 bp, Homo sapien
aagctaagccaaagcacactgaaggaatggcat

SEQ ID NO: 495085 - DNA, 33 bp, Homo sapien
tggcataaaattgggacagtagcagttattgca

SEQ ID NO: 495086 - DNA, 33 bp, Homo sapien
tggcataaaattgggatagtagcagttattgca

SEQ ID NO: 495087 - DNA, 33 bp, Homo sapien
atctttggcaaacacaatatttcctaagtcatg

SEQ ID NO: 495088 - DNA, 33 bp, Homo sapien
atctttggcaaacacagtatttcctaagtcatg

SEQ ID NO: 495089 - DNA, 33 bp, Homo sapien
caccttcgtatacagacaatgaaccaggcctgg

SEQ ID NO: 495090 - DNA, 33 bp, Homo sapien
caccttcgtatacagataatgaaccaggcctgg

SEQ ID NO: 495091 - DNA, 33 bp, Homo sapien
gaagccctttctacaacccataagctgcacatt

SEQ ID NO: 495092 - DNA, 33 bp, Homo sapien
gaagccctttctacaatccataagctgcacatt

SEQ ID NO: 495093 - DNA, 33 bp, Homo sapien
gtgagatagcaaagaaagtcgggcagaggctct

SEQ ID NO: 495094 - DNA, 33 bp, Homo sapien
gtgagatagcaaagaatgtcgggcagaggctct

SEQ ID NO: 495095 - DNA, 33 bp, Homo sapien
tcttcaggtggtagaaactaaagaatttttagt

SEQ ID NO: 495096 - DNA, 33 bp, Homo sapien
tcttcaggtggtagaacctaaagaatttttagt

SEQ ID NO: 495097 - DNA, 33 bp, Homo sapien
tcctttggttgcctgaacacacaagagagtgat

SEQ ID NO: 495098 - DNA, 33 bp, Homo sapien
tcctttggttgcctgagcacacaagagagtgat

SEQ ID NO: 495099 - DNA, 33 bp, Homo sapien
gctgcaggaatttttacagcccaggaaataatt

SEQ ID NO: 495100 - DNA, 33 bp, Homo sapien
gctgcaggaatttttatagcccaggaaataatt

SEQ ID NO: 495101 - DNA, 33 bp, Homo sapien
ggaacagaggagagtcaagagaatatgagacct

SEQ ID NO: 495102 - DNA, 33 bp, Homo sapien
ggaacagaggagagtcgagagaatatgagacct

SEQ ID NO: 495103 - DNA, 33 bp, Homo sapien
caaaataccacaagaagtggagcttcagaccca

SEQ ID NO: 495104 - DNA, 33 bp, Homo sapien
caaaataccacaagaattggagcttcagaccca

SEQ ID NO: 495105 - DNA, 33 bp, Homo sapien
ctgtggccagataacactaacgataatagctaa

SEQ ID NO: 495106 - DNA, 33 bp, Homo sapien
ctgtggccagataacattaacgataatagctaa

SEQ ID NO: 495107 - DNA, 33 bp, Homo sapien
gcaaaaactatattgcccataagtagttgataa

SEQ ID NO: 495108 - DNA, 33 bp, Homo sapien
gcaaaaactatattgctcataagtagttgataa

SEQ ID NO: 495109 - DNA, 33 bp, Homo sapien
ccacaactcacttttccaatgctctatgttctg

SEQ ID NO: 495110 - DNA, 33 bp, Homo sapien
ccacaactcacttttctaatgctctatgttctg

SEQ ID NO: 495111 - DNA, 33 bp, Homo sapien
atttagttcacagatcaaacgctgatttgaagc

SEQ ID NO: 495112 - DNA, 33 bp, Homo sapien
atttagttcacagatcgaacgctgatttgaagc

SEQ ID NO: 495113 - DNA, 33 bp, Homo sapien
cctctaccaccacagcaatgacagtcaggtaac

SEQ ID NO: 495114 - DNA, 33 bp, Homo sapien
cctctaccaccacagccatgacagtcaggtaac

SEQ ID NO: 495115 - DNA, 33 bp, Homo sapien
ctgaaaaaggagtacacatttgccttgccagag

SEQ ID NO: 495116 - DNA, 33 bp, Homo sapien
ctgaaaaaggagtacagatttgccttgccagag

SEQ ID NO: 495117 - DNA, 33 bp, Homo sapien
gtttccagttcctgacagcagaatgtacacatg

SEQ ID NO: 495118 - DNA, 33 bp, Homo sapien
gtttccagttcctgacggcagaatgtacacatg

SEQ ID NO: 495119 - DNA, 33 bp, Homo sapien
attgtctcttgatttcccatcataacgagtgaa

SEQ ID NO: 495120 - DNA, 33 bp, Homo sapien
attgtctcttgatttcgcatcataacgagtgaa

SEQ ID NO: 495121 - DNA, 33 bp, Homo sapien
gtctgttaccactaagacatgtgctgtttttat

SEQ ID NO: 495122 - DNA, 33 bp, Homo sapien
gtctgttaccactaaggcatgtgctgtttttat

SEQ ID NO: 495123 - DNA, 33 bp, Homo sapien
gacatcctgaattggcaaatttaacacctgtgt

SEQ ID NO: 495124 - DNA, 33 bp, Homo sapien
gacatcctgaattggcgaatttaacacctgtgt

SEQ ID NO: 495125 - DNA, 33 bp, Homo sapien
ttaaaaagagattgaaagttttatgtgctagga

SEQ ID NO: 495126 - DNA, 33 bp, Homo sapien
ttaaaaagagattgaaggttttatgtgctagga

SEQ ID NO: 495127 - DNA, 33 bp, Homo sapien
agctcaaatagcgcaacaatctgcaagtaggaa

SEQ ID NO: 495128 - DNA, 33 bp, Homo sapien
agctcaaatagcgcaataatctgcaagtaggaa

SEQ ID NO: 495129 - DNA, 33 bp, Homo sapien
cgggtgactgcggtcccattattccagcttgga

SEQ ID NO: 495130 - DNA, 33 bp, Homo sapien
cgggtgactgcggtcctattattccagcttgga

SEQ ID NO: 495131 - DNA, 33 bp, Homo sapien
aaaaccactactgtaaattaaattgctcaaatc

SEQ ID NO: 495132 - DNA, 33 bp, Homo sapien
aaaaccactactgtaagttaaattgctcaaatc

SEQ ID NO: 495133 - DNA, 33 bp, Homo sapien
gtaacctggtgagacactgaaaagctgggatgg

SEQ ID NO: 495134 - DNA, 33 bp, Homo sapien
gtaacctggtgagacattgaaaagctgggatgg

SEQ ID NO: 495135 - DNA, 33 bp, Homo sapien
tatacagtaatgagacagaaagaaaacaacagc

SEQ ID NO: 495136 - DNA, 33 bp, Homo sapien
tatacagtaatgagacggaaagaaaacaacagc

SEQ ID NO: 495137 - DNA, 33 bp, Homo sapien; identical to SEQ ID NO: 495135

SEQ ID NO: 495138 - DNA, 33 bp, Homo sapien; identical to SEQ ID NO: 495136

SEQ ID NO: 495139 - DNA, 33 bp, Homo sapien
atgaaaccacatataaatccaatttggccagtt

SEQ ID NO: 495140 - DNA, 33 bp, Homo sapien
atgaaaccacatataattccaatttggccagtt

SEQ ID NO: 495141 - DNA, 33 bp, Homo sapien
aatacattgtccaagcaaagagtaggagtagca

SEQ ID NO: 495142 - DNA, 33 bp, Homo sapien
aatacattgtccaagcgaagagtaggagtagca

SEQ ID NO: 495143 - DNA, 33 bp, Homo sapien
agtctcacagctcaacaaattgtgtgtgaatgt

SEQ ID NO: 495144 - DNA, 33 bp, Homo sapien
agtctcacagctcaactaattgtgtgtgaatgt

SEQ ID NO: 495145 - DNA, 33 bp, Homo sapien
gaaactagataactaacccttcaacaagcaaag

SEQ ID NO: 495146 - DNA, 33 bp, Homo sapien
gaaactagataactaatccttcaacaagcaaag

SEQ ID NO: 495147 - DNA, 33 bp, Homo sapien
tccaatccctgaaccaaataaaaaagcaaacag

SEQ ID NO: 495148 - DNA, 33 bp, Homo sapien
tccaatccctgaaccagataaaaaagcaaacag

SEQ ID NO: 495149 - DNA, 33 bp, Homo sapien
acaatgcaatgccttacaggtttgccctttttc

SEQ ID NO: 495150 - DNA, 33 bp, Homo sapien
acaatgcaatgccttataggtttgccctttttc

SEQ ID NO: 495151 - DNA, 33 bp, Homo sapien
gtctctctagctctgagaatccttcgctgactt

SEQ ID NO: 495152 - DNA, 33 bp, Homo sapien
gtctctctagctctgataatccttcgctgactt

SEQ ID NO: 495153 - DNA, 33 bp, Homo sapien
taaggattgagacaacacaatggtcacacaaac

SEQ ID NO: 495154 - DNA, 33 bp, Homo sapien
taaggattgagacaacccaatggtcacacaaac

SEQ ID NO: 495155 - DNA, 33 bp, Homo sapien
ttacctaatcagaaccaacagggagaaccttca

SEQ ID NO: 495156 - DNA, 33 bp, Homo sapien
ttacctaatcagaaccgacagggagaaccttca

SEQ ID NO: 495157 - DNA, 33 bp, Homo sapien
agggcctgagtgggccgctctagctccaatacc

SEQ ID NO: 495158 - DNA, 33 bp, Homo sapien
agggcctgagtgggcctctctagctccaatacc

SEQ ID NO: 495159 - DNA, 33 bp, Homo sapien
cccagaaggcggaaaaaaccattgctgtgaagc

SEQ ID NO: 495160 - DNA, 33 bp, Homo sapien
cccagaaggcggaaaacaccattgctgtgaagc

SEQ ID NO: 495161 - DNA, 33 bp, Homo sapien
taagtaaggtaaagtacgcaaacagcttttccc

SEQ ID NO: 495162 - DNA, 33 bp, Homo sapien
taagtaaggtaaagtatgcaaacagcttttccc

SEQ ID NO: 495163 - DNA, 33 bp, Homo sapien
ctgagccacctctgtacgatctggtctctctat

SEQ ID NO: 495164 - DNA, 33 bp, Homo sapien
ctgagccacctctgtatgatctggtctctctat

SEQ ID NO: 495165 - DNA, 33 bp, Homo sapien
tataaagtgtggtgacaagaaagcagggccagg

SEQ ID NO: 495166 - DNA, 33 bp, Homo sapien
tataaagtgtggtgacgagaaagcagggccagg

SEQ ID NO: 495167 - DNA, 33 bp, Homo sapien
aaaatctgtaacatccgattcaaagctagttcc

SEQ ID NO: 495168 - DNA, 33 bp, Homo sapien
aaaatctgtaacatcctattcaaagctagttcc

SEQ ID NO: 495169 - DNA, 33 bp, Homo sapien
caggcacaggccactaactcggctaattttttt

SEQ ID NO: 495170 - DNA, 33 bp, Homo sapien
caggcacaggccactacctcggctaattttttt

SEQ ID NO: 495171 - DNA, 33 bp, Homo sapien
ctcctgcaaacatccaatcatcacgcttacaag

SEQ ID NO: 495172 - DNA, 33 bp, Homo sapien
ctcctgcaaacatccagtcatcacgcttacaag

SEQ ID NO: 495173 - DNA, 33 bp, Homo sapien
actagaggtattagaacgttctaggccagggct

SEQ ID NO: 495174 - DNA, 33 bp, Homo sapien
actagaggtattagaatgttctaggccagggct

SEQ ID NO: 495175 - DNA, 33 bp, Homo sapien
aggctaaaccttcacactgatcctgcatcctcc

SEQ ID NO: 495176 - DNA, 33 bp, Homo sapien
aggctaaaccttcacattgatcctgcatcctcc

SEQ ID NO: 495177 - DNA, 33 bp, Homo sapien
atcctatacccagaagccagatgaatcttcctg

SEQ ID NO: 495178 - DNA, 33 bp, Homo sapien
atcctatacccagaaggcagatgaatcttcctg

SEQ ID NO: 495179 - DNA, 33 bp, Homo sapien
atgtgagagggagtcaacatcaaagacaaggga

SEQ ID NO: 495180 - DNA, 33 bp, Homo sapien
atgtgagagggagtcagcatcaaagacaaggga

SEQ ID NO: 495181 - DNA, 33 bp, Homo sapien
cgggcaagtcatccccactctgcttcgagaggc

SEQ ID NO: 495182 - DNA, 33 bp, Homo sapien
cgggcaagtcatccccgctctgcttcgagaggc

SEQ ID NO: 495183 - DNA, 33 bp, Homo sapien
acagaatatctgtagaagaaagttaagatcatt

SEQ ID NO: 495184 - DNA, 33 bp, Homo sapien
acagaatatctgtagatgaaagttaagatcatt

SEQ ID NO: 495185 - DNA, 33 bp, Homo sapien
gtaagtttggaaagcacccagaattacttgagg

SEQ ID NO: 495186 - DNA, 33 bp, Homo sapien
gtaagtttggaaagcatccagaattacttgagg

SEQ ID NO: 495187 - DNA, 33 bp, Homo sapien
atttaactcttttaaccctcacggaaatcctcg

SEQ ID NO: 495188 - DNA, 33 bp, Homo sapien
atttaactcttttaactctcacggaaatcctcg

SEQ ID NO: 495189 - DNA, 33 bp, Homo sapien
acagaaagtttctagaaccctcaagaagctcat

SEQ ID NO: 495190 - DNA, 33 bp, Homo sapien
acagaaagtttctagatccctcaagaagctcat

SEQ ID NO: 495191 - DNA, 33 bp, Homo sapien
aatttttaagagtgtaaaagagcatatcattgg

SEQ ID NO: 495192 - DNA, 33 bp, Homo sapien
aatttttaagagtgtagaagagcatatcattgg

SEQ ID NO: 495193 - DNA, 33 bp, Homo sapien
tctgtagctcaaataaatgttccacatatataa

SEQ ID NO: 495194 - DNA, 33 bp, Homo sapien
tctgtagctcaaataagtgttccacatatataa

SEQ ID NO: 495195 - DNA, 33 bp, Homo sapien
agcaaacccattgtaaccctgcaatttctgtat

SEQ ID NO: 495196 - DNA, 33 bp, Homo sapien
agcaaacccattgtaagcctgcaatttctgtat

SEQ ID NO: 495197 - DNA, 33 bp, Homo sapien
tagtgattggagttaacatttgcttaagaccaa

SEQ ID NO: 495198 - DNA, 33 bp, Homo sapien
tagtgattggagttaatatttgcttaagaccaa

SEQ ID NO: 495199 - DNA, 33 bp, Homo sapien
tccacagtgatttacacaaacagccagcagggg

SEQ ID NO: 495200 - DNA, 33 bp, Homo sapien
tccacagtgatttacagaaacagccagcagggg

SEQ ID NO: 495201 - DNA, 33 bp, Homo sapien
ttgttgttaagcagagaatagaaacctgagatt

SEQ ID NO: 495202 - DNA, 33 bp, Homo sapien
ttgttgttaagcagaggatagaaacctgagatt

SEQ ID NO: 495203 - DNA, 33 bp, Homo sapien
tactttgtaaatgcagcctgacaaatctgtgct

SEQ ID NO: 495204 - DNA, 33 bp, Homo sapien
tactttgtaaatgcagtctgacaaatctgtgct

SEQ ID NO: 495205 - DNA, 33 bp, Homo sapien
tgaattgattcttcccgagatccaaagacatga

SEQ ID NO: 495206 - DNA, 33 bp, Homo sapien
tgaattgattcttccctagatccaaagacatga

SEQ ID NO: 495207 - DNA, 33 bp, Homo sapien
gacagatgagttgtagaagtctcagagctagac

SEQ ID NO: 495208 - DNA, 33 bp, Homo sapien
gacagatgagttgtagtagtctcagagctagac

SEQ ID NO: 495209 - DNA, 33 bp, Homo sapien
aactgaagagtccacaaactgacctaacactct

SEQ ID NO: 495210 - DNA, 33 bp, Homo sapien
aactgaagagtccacagactgacctaacactct

SEQ ID NO: 495211 - DNA, 33 bp, Homo sapien
ctacgaagagactacaatgcctctgactttttc

SEQ ID NO: 495212 - DNA, 33 bp, Homo sapien
ctacgaagagactacagtgcctctgactttttc

SEQ ID NO: 495213 - DNA, 33 bp, Homo sapien
tatcattagactaatcaaagaaccaattttatg

SEQ ID NO: 495214 - DNA, 33 bp, Homo sapien
tatcattagactaatcgaagaaccaattttatg

SEQ ID NO: 495215 - DNA, 33 bp, Homo sapien
cagagaaagtactacacacagtggcgttgcaag

SEQ ID NO: 495216 - DNA, 33 bp, Homo sapien
cagagaaagtactacagacagtggcgttgcaag

SEQ ID NO: 495217 - DNA, 33 bp, Homo sapien
gcagcaagaagctaccacacatttgtggctccc

SEQ ID NO: 495218 - DNA, 33 bp, Homo sapien
gcagcaagaagctaccgcacatttgtggctccc

SEQ ID NO: 495219 - DNA, 33 bp, Homo sapien
aaggtggcaaagggcccatccctgaactgatta

SEQ ID NO: 495220 - DNA, 33 bp, Homo sapien
aaggtggcaaagggcctatccctgaactgatta

SEQ ID NO: 495221 - DNA, 33 bp, Homo sapien
cacaaaggaaaaccagaaaatcagaatctggga

SEQ ID NO: 495222 - DNA, 33 bp, Homo sapien
cacaaaggaaaaccaggaaatcagaatctggga

SEQ ID NO: 495223 - DNA, 33 bp, Homo sapien
ttgatacacttagtctcagaatgatcagtctgt

SEQ ID NO: 495224 - DNA, 33 bp, Homo sapien
ttgatacacttagtctgagaatgatcagtctgt

SEQ ID NO: 495225 - DNA, 33 bp, Homo sapien
ttgaaggatttctcagaatggccaaccacggtc

SEQ ID NO: 495226 - DNA, 33 bp, Homo sapien
ttgaaggatttctcaggatggccaaccacggtc

SEQ ID NO: 495227 - DNA, 33 bp, Homo sapien
agctacagaatttacacgtgagccaggcatggt

SEQ ID NO: 495228 - DNA, 33 bp, Homo sapien
agctacagaatttacatgtgagccaggcatggt

SEQ ID NO: 495229 - DNA, 33 bp, Homo sapien
accatgaatgctgagggactacaagttaggaca

SEQ ID NO: 495230 - DNA, 33 bp, Homo sapien
accatgaatgctgaggtactacaagttaggaca

SEQ ID NO: 495231 - DNA, 33 bp, Homo sapien
tgaattccagagtacacaagtggtctttgaaga

SEQ ID NO: 495232 - DNA, 33 bp, Homo sapien
tgaattccagagtacataagtggtctttgaaga

SEQ ID NO: 495233 - DNA, 33 bp, Homo sapien
caatcctgctgtgtcacgctgcaccagatgttt

SEQ ID NO: 495234 - DNA, 33 bp, Homo sapien
caatcctgctgtgtcatgctgcaccagatgttt

SEQ ID NO: 495235 - DNA, 33 bp, Homo sapien
gaagcacctggaagcacacaacaccgagaagga

SEQ ID NO: 495236 - DNA, 33 bp, Homo sapien
gaagcacctggaagcatacaacaccgagaagga

SEQ ID NO: 495237 - DNA, 33 bp, Homo sapien
tgccatcagccattcaatcaggatatggtcacc

SEQ ID NO: 495238 - DNA, 33 bp, Homo sapien
tgccatcagccattcagtcaggatatggtcacc

SEQ ID NO: 495239 - DNA, 33 bp, Homo sapien
tctaccttcatttgaaaaccataattcatattc

SEQ ID NO: 495240 - DNA, 33 bp, Homo sapien
tctaccttcatttgaagaccataattcatattc

SEQ ID NO: 495241 - DNA, 33 bp, Homo sapien
tcatgcttaagattgacgatttcgtgaaataaa

SEQ ID NO: 495242 - DNA, 33 bp, Homo sapien
tcatgcttaagattgatgatttcgtgaaataaa

SEQ ID NO: 495243 - DNA, 33 bp, Homo sapien
cacattctttgttaacacaagttgccccagaac

SEQ ID NO: 495244 - DNA, 33 bp, Homo sapien
cacattctttgttaacgcaagttgccccagaac

SEQ ID NO: 495245 - DNA, 33 bp, Homo sapien
aaagaccatcaatagcagaggttgttactcaaa

SEQ ID NO: 495246 - DNA, 33 bp, Homo sapien
aaagaccatcaatagcggaggttgttactcaaa

SEQ ID NO: 495247 - DNA, 33 bp, Homo sapien
gttagttggtactgccggagttaggagcagttc

SEQ ID NO: 495248 - DNA, 33 bp, Homo sapien
gttagttggtactgcctgagttaggagcagttc

SEQ ID NO: 495249 - DNA, 33 bp, Homo sapien
gactttggtcttctaacttacagaaccgtaaga

SEQ ID NO: 495250 - DNA, 33 bp, Homo sapien
gactttggtcttctaatttacagaaccgtaaga

SEQ ID NO: 495251 - DNA, 33 bp, Homo sapien
gactgtccaaaaacaaaagtggtcaggaaaagc

SEQ ID NO: 495252 - DNA, 33 bp, Homo sapien
gactgtccaaaaacaagagtggtcaggaaaagc

SEQ ID NO: 495253 - DNA, 33 bp, Homo sapien
ttaatcatgatctttgcacagtagatgcagaac

SEQ ID NO: 495254 - DNA, 33 bp, Homo sapien
ttaatcatgatctttgtacagtagatgcagaac

SEQ ID NO: 495255 - DNA, 33 bp, Homo sapien
ttgcttttgccaaagcaatttcagatgccctac

SEQ ID NO: 495256 - DNA, 33 bp, Homo sapien
ttgcttttgccaaagctatttcagatgccctac

SEQ ID NO: 495257 - DNA, 33 bp, Homo sapien
gctgtaaagagtgaggaagtagggcgaggtagc

SEQ ID NO: 495258 - DNA, 33 bp, Homo sapien
gctgtaaagagtgagggagtagggcgaggtagc

SEQ ID NO: 495259 - DNA, 33 bp, Homo sapien
ttccataagctgtgaaacaaaatcaatgaggtc

SEQ ID NO: 495260 - DNA, 33 bp, Homo sapien
ttccataagctgtgaatcaaaatcaatgaggtc

SEQ ID NO: 495261 - DNA, 33 bp, Homo sapien; identical to SEQ ID NO: 495259

SEQ ID NO: 495262 - DNA, 33 bp, Homo sapien; identical to SEQ ID NO: 495260

SEQ ID NO: 495263 - DNA, 33 bp, Homo sapien
ggcttgttacaggggaaagccttactgccagga

SEQ ID NO: 495264 - DNA, 33 bp, Homo sapien
ggcttgttacaggggagagccttactgccagga

SEQ ID NO: 495265 - DNA, 33 bp, Homo sapien; identical to SEQ ID NO: 495263

SEQ ID NO: 495266 - DNA, 33 bp, Homo sapien; identical to SEQ ID NO: 495264

SEQ ID NO: 495267 - DNA, 33 bp, Homo sapien; identical to SEQ ID NO: 495263

SEQ ID NO: 495268 - DNA, 33 bp, Homo sapien; identical to SEQ ID NO: 495264

SEQ ID NO: 495269 - DNA, 33 bp, Homo sapien; identical to SEQ ID NO: 495263

SEQ ID NO: 495270 - DNA, 33 bp, Homo sapien; identical to SEQ ID NO: 495264

SEQ ID NO: 495271 - DNA, 33 bp, Homo sapien
ccatgttttagcctagaagacatcattggggaa

SEQ ID NO: 495272 - DNA, 33 bp, Homo sapien
ccatgttttagcctaggagacatcattggggaa

SEQ ID NO: 495273 - DNA, 33 bp, Homo sapien
gcaggagcaggggagaagatgtgagttttggag

SEQ ID NO: 495274 - DNA, 33 bp, Homo sapien
gcaggagcaggggagaggatgtgagttttggag

SEQ ID NO: 495275 - DNA, 33 bp, Homo sapien
cctttgtgcacaggaagaataatgcttaaatgt

SEQ ID NO: 495276 - DNA, 33 bp, Homo sapien
cctttgtgcacaggaataataatgcttaaatgt

SEQ ID NO: 495277 - DNA, 33 bp, Homo sapien
atccaagtgtacaggcactatttccaaataaga

SEQ ID NO: 495278 - DNA, 33 bp, Homo sapien
atccaagtgtacaggccctatttccaaataaga

SEQ ID NO: 495279 - DNA, 33 bp, Homo sapien
aattggaatctgacaaacaaccaatgccaacct

SEQ ID NO: 495280 - DNA, 33 bp, Homo sapien
aattggaatctgacaaccaaccaatgccaacct

SEQ ID NO: 495281 - DNA, 33 bp, Homo sapien
ttgttggttgttttatcacagtggactccaatc

SEQ ID NO: 495282 - DNA, 33 bp, Homo sapien
ttgttggttgttttattacagtggactccaatc

SEQ ID NO: 495283 - DNA, 33 bp, Homo sapien
tacttcggttatgataccttttattatttgaca

SEQ ID NO: 495284 - DNA, 33 bp, Homo sapien
tacttcggttatgatatcttttattatttgaca

SEQ ID NO: 495285 - DNA, 33 bp, Homo sapien
gtctctttgccttaagcctctttgaagacagaa

SEQ ID NO: 495286 - DNA, 33 bp, Homo sapien
gtctctttgccttaagtctctttgaagacagaa

SEQ ID NO: 495287 - DNA, 33 bp, Homo sapien
cctcattgtttccaaaataacgatcctcatctg

SEQ ID NO: 495288 - DNA, 33 bp, Homo sapien
cctcattgtttccaaactaacgatcctcatctg

SEQ ID NO: 495289 - DNA, 33 bp, Homo sapien
ctagcatactcctggaaagcaaggtgacccggc

SEQ ID NO: 495290 - DNA, 33 bp, Homo sapien
ctagcatactcctggagagcaaggtgacccggc

SEQ ID NO: 495291 - DNA, 33 bp, Homo sapien
catcttctcaagtaggaactaatgcctgagctg

SEQ ID NO: 495292 - DNA, 33 bp, Homo sapien
catcttctcaagtagggactaatgcctgagctg

SEQ ID NO: 495293 - DNA, 33 bp, Homo sapien
aagtgtgtttacagagcattttgcttgaatgac

SEQ ID NO: 495294 - DNA, 33 bp, Homo sapien
aagtgtgtttacagagtattttgcttgaatgac

SEQ ID NO: 495295 - DNA, 33 bp, Homo sapien
agacaagtggaatgtactaagaatgggctggag

SEQ ID NO: 495296 - DNA, 33 bp, Homo sapien
agacaagtggaatgtagtaagaatgggctggag

SEQ ID NO: 495297 - DNA, 33 bp, Homo sapien
cacagccagtattagaacctttgcctccaaaag

SEQ ID NO: 495298 - DNA, 33 bp, Homo sapien
cacagccagtattagagcctttgcctccaaaag

SEQ ID NO: 495299 - DNA, 33 bp, Homo sapien
tatccaggagatttcacaacaacagaatgctaa

SEQ ID NO: 495300 - DNA, 33 bp, Homo sapien
tatccaggagatttcataacaacagaatgctaa

SEQ ID NO: 495301 - DNA, 33 bp, Homo sapien
tgatttgtccattttaacactattctacatctc

SEQ ID NO: 495302 - DNA, 33 bp, Homo sapien
tgatttgtccattttagcactattctacatctc

SEQ ID NO: 495303 - DNA, 33 bp, Homo sapien
caaggcccatgtcctccccttgaagtctttctt

SEQ ID NO: 495304 - DNA, 33 bp, Homo sapien
caaggcccatgtcctctccttgaagtctttctt

SEQ ID NO: 495305 - DNA, 33 bp, Homo sapien
tggcaagagatacaagaagaaccctggtggcaa

SEQ ID NO: 495306 - DNA, 33 bp, Homo sapien
tggcaagagatacaaggagaaccctggtggcaa

SEQ ID NO: 495307 - DNA, 33 bp, Homo sapien
tgctgctaaggatagacgactcacccggtcctt

SEQ ID NO: 495308 - DNA, 33 bp, Homo sapien
tgctgctaaggatagatgactcacccggtcctt

SEQ ID NO: 495309 - DNA, 33 bp, Homo sapien
taatgctaacagccacacaacagtggaatgtgc

SEQ ID NO: 495310 - DNA, 33 bp, Homo sapien
taatgctaacagccacgcaacagtggaatgtgc

SEQ ID NO: 495311 - DNA, 33 bp, Homo sapien
gagaccattcaaaacaggaggaaagccacatct

SEQ ID NO: 495312 - DNA, 33 bp, Homo sapien
gagaccattcaaaacatgaggaaagccacatct

SEQ ID NO: 495313 - DNA, 33 bp, Homo sapien
ctccctacagagaggaagaaaaccaaccctgtg

SEQ ID NO: 495314 - DNA, 33 bp, Homo sapien
ctccctacagagaggatgaaaaccaaccctgtg

SEQ ID NO: 495315 - DNA, 33 bp, Homo sapien
gactcagaaatacagcactcctttttcctaagt

SEQ ID NO: 495316 - DNA, 33 bp, Homo sapien
gactcagaaatacagcgctcctttttcctaagt

SEQ ID NO: 495317 - DNA, 33 bp, Homo sapien
aaaactaagcacccaaaacatgaagacatgtct

SEQ ID NO: 495318 - DNA, 33 bp, Homo sapien
aaaactaagcacccaacacatgaagacatgtct

SEQ ID NO: 495319 - DNA, 33 bp, Homo sapien
cttatggtcattctaaaattctatttcaataaa

SEQ ID NO: 495320 - DNA, 33 bp, Homo sapien
cttatggtcattctaagattctatttcaataaa

SEQ ID NO: 495321 - DNA, 33 bp, Homo sapien
aaaagagtggctatatcagacaaagtagacttc

SEQ ID NO: 495322 - DNA, 33 bp, Homo sapien
aaaagagtggctatatgagacaaagtagacttc

SEQ ID NO: 495323 - DNA, 33 bp, Homo sapien
catgatcaactgactccatttttcagaaacacc

SEQ ID NO: 495324 - DNA, 33 bp, Homo sapien
catgatcaactgactctatttttcagaaacacc

SEQ ID NO: 495325 - DNA, 33 bp, Homo sapien
gagatacttacattacggaatgatttatgacat

SEQ ID NO: 495326 - DNA, 33 bp, Homo sapien
gagatacttacattactgaatgatttatgacat

SEQ ID NO: 495327 - DNA, 33 bp, Homo sapien
ctcaaatttttagtgaacattggaaccacctgg

SEQ ID NO: 495328 - DNA, 33 bp, Homo sapien
ctcaaatttttagtgagcattggaaccacctgg

SEQ ID NO: 495329 - DNA, 33 bp, Homo sapien
actaaaaacaaatggaatatctatcaatagcca

SEQ ID NO: 495330 - DNA, 33 bp, Homo sapien
actaaaaacaaatggagtatctatcaatagcca

SEQ ID NO: 495331 - DNA, 33 bp, Homo sapien
catggaaaagtttcataagaggtcccatgttag

SEQ ID NO: 495332 - DNA, 33 bp, Homo sapien
catggaaaagtttcatgagaggtcccatgttag

SEQ ID NO: 495333 - DNA, 33 bp, Homo sapien
gacccagctgaagacaacattagatcaaaacat

SEQ ID NO: 495334 - DNA, 33 bp, Homo sapien
gacccagctgaagacagcattagatcaaaacat

SEQ ID NO: 495335 - DNA, 33 bp, Homo sapien
taatctgtgtgagaaactcagggataccaaata

SEQ ID NO: 495336 - DNA, 33 bp, Homo sapien
taatctgtgtgagaaagtcagggataccaaata

SEQ ID NO: 495337 - DNA, 33 bp, Homo sapien
gaaaaacatttatacccatggacgcttaatttc

SEQ ID NO: 495338 - DNA, 33 bp, Homo sapien
gaaaaacatttatacctatggacgcttaatttc

SEQ ID NO: 495339 - DNA, 33 bp, Homo sapien
tgagctaaacgaccagcctacaaagatgcacag

SEQ ID NO: 495340 - DNA, 33 bp, Homo sapien
tgagctaaacgaccaggctacaaagatgcacag

SEQ ID NO: 495341 - DNA, 33 bp, Homo sapien
gaggaacgaaaagtccagcaccgtgagatgagt

SEQ ID NO: 495342 - DNA, 33 bp, Homo sapien
gaggaacgaaaagtccggcaccgtgagatgagt

SEQ ID NO: 495343 - DNA, 33 bp, Homo sapien
ctggaataatctttgcaagttcagatttgatcc

SEQ ID NO: 495344 - DNA, 33 bp, Homo sapien
ctggaataatctttgcgagttcagatttgatcc

SEQ ID NO: 495345 - DNA, 33 bp, Homo sapien
cattggtataacctgtaaacttgttaggaatgc

SEQ ID NO: 495346 - DNA, 33 bp, Homo sapien
cattggtataacctgtgaacttgttaggaatgc

SEQ ID NO: 495347 - DNA, 33 bp, Homo sapien
actaagtacttatacaatgggaagagcttcaga

SEQ ID NO: 495348 - DNA, 33 bp, Homo sapien
actaagtacttatacactgggaagagcttcaga

SEQ ID NO: 495349 - DNA, 33 bp, Homo sapien
cacattaacacattacagaaatcaaaattaact

SEQ ID NO: 495350 - DNA, 33 bp, Homo sapien
cacattaacacattactgaaatcaaaattaact

SEQ ID NO: 495351 - DNA, 33 bp, Homo sapien
tcctctgggctcttcaaaccactggcaggaagg

SEQ ID NO: 495352 - DNA, 33 bp, Homo sapien
tcctctgggctcttcagaccactggcaggaagg

SEQ ID NO: 495353 - DNA, 33 bp, Homo sapien
ggaccgcaacctctgacctagtactttcagtgc

SEQ ID NO: 495354 - DNA, 33 bp, Homo sapien
ggaccgcaacctctgatctagtactttcagtgc

SEQ ID NO: 495355 - DNA, 33 bp, Homo sapien
atttagctttcctgacagcactcagacatccca

SEQ ID NO: 495356 - DNA, 33 bp, Homo sapien
atttagctttcctgacggcactcagacatccca

SEQ ID NO: 495357 - DNA, 33 bp, Homo sapien
ctgccagcttttgcaactggagggaaaggtgtc

SEQ ID NO: 495358 - DNA, 33 bp, Homo sapien
ctgccagcttttgcaattggagggaaaggtgtc

SEQ ID NO: 495359 - DNA, 33 bp, Homo sapien
cttgaagaagataaaaaggcaaaccacaagcca

SEQ ID NO: 495360 - DNA, 33 bp, Homo sapien
cttgaagaagataaaagggcaaaccacaagcca

SEQ ID NO: 495361 - DNA, 33 bp, Homo sapien
ccagatgggtctcaaaagtgcttcgggatgtgc

SEQ ID NO: 495362 - DNA, 33 bp, Homo sapien
ccagatgggtctcaaaggtgcttcgggatgtgc

SEQ ID NO: 495363 - DNA, 33 bp, Homo sapien
tgacctggagtcccaacgatgaggcagttaccc

SEQ ID NO: 495364 - DNA, 33 bp, Homo sapien
tgacctggagtcccaatgatgaggcagttaccc

SEQ ID NO: 495365 - DNA, 33 bp, Homo sapien
gaatctccaggagtggaacctgggaatcacatt

SEQ ID NO: 495366 - DNA, 33 bp, Homo sapien
gaatctccaggagtgggacctgggaatcacatt

SEQ ID NO: 495367 - DNA, 33 bp, Homo sapien
agcaacaggagtttaacatttagtgatggtcta

SEQ ID NO: 495368 - DNA, 33 bp, Homo sapien
agcaacaggagtttaatatttagtgatggtcta

SEQ ID NO: 495369 - DNA, 33 bp, Homo sapien
actggctaacagtagacgctggatgctgaattg

SEQ ID NO: 495370 - DNA, 33 bp, Homo sapien
actggctaacagtagatgctggatgctgaattg

SEQ ID NO: 495371 - DNA, 33 bp, Homo sapien
atctgcccgtgtaaacaatcagttctttcactt

SEQ ID NO: 495372 - DNA, 33 bp, Homo sapien
atctgcccgtgtaaaccatcagttctttcactt

SEQ ID NO: 495373 - DNA, 33 bp, Homo sapien
aaggctattcctatgaaaggcactttggtgaag

SEQ ID NO: 495374 - DNA, 33 bp, Homo sapien
aaggctattcctatgagaggcactttggtgaag

SEQ ID NO: 495375 - DNA, 33 bp, Homo sapien
cctgcctcgacttggcagatgatgtaaggaaag

SEQ ID NO: 495376 - DNA, 33 bp, Homo sapien
cctgcctcgacttggcggatgatgtaaggaaag

SEQ ID NO: 495377 - DNA, 33 bp, Homo sapien
ttaggttaaagcaggccgcctaccctgcctcga

SEQ ID NO: 495378 - DNA, 33 bp, Homo sapien
ttaggttaaagcaggctgcctaccctgcctcga

SEQ ID NO: 495379 - DNA, 33 bp, Homo sapien
catactggttcagaagcaaagacctcatagttc

SEQ ID NO: 495380 - DNA, 33 bp, Homo sapien
catactggttcagaaggaaagacctcatagttc

SEQ ID NO: 495381 - DNA, 33 bp, Homo sapien
atgtcattattgagcccatttgtttatttgggg

SEQ ID NO: 495382 - DNA, 33 bp, Homo sapien
atgtcattattgagcctatttgtttatttgggg

SEQ ID NO: 495383 - DNA, 33 bp, Homo sapien
aaatatagactatagaccaagtagaaataatct

SEQ ID NO: 495384 - DNA, 33 bp, Homo sapien
aaatatagactatagatcaagtagaaataatct

SEQ ID NO: 495385 - DNA, 33 bp, Homo sapien
tattatactattcaaacggtagaatgttccagt

SEQ ID NO: 495386 - DNA, 33 bp, Homo sapien
tattatactattcaaatggtagaatgttccagt

SEQ ID NO: 495387 - DNA, 33 bp, Homo sapien
ctccttttgagcccccactacattgtgaataga

SEQ ID NO: 495388 - DNA, 33 bp, Homo sapien
ctccttttgagcccccgctacattgtgaataga

SEQ ID NO: 495389 - DNA, 33 bp, Homo sapien
tcccatccaactgtaacaaaatgtggttgatga

SEQ ID NO: 495390 - DNA, 33 bp, Homo sapien
tcccatccaactgtaataaaatgtggttgatga

SEQ ID NO: 495391 - DNA, 33 bp, Homo sapien
tagctgccgtgtatacaaacagttgcaagtgct

SEQ ID NO: 495392 - DNA, 33 bp, Homo sapien
tagctgccgtgtataccaacagttgcaagtgct

SEQ ID NO: 495393 - DNA, 33 bp, Homo sapien
tgtttcattaaatcacacatgttcactttaatg

SEQ ID NO: 495394 - DNA, 33 bp, Homo sapien
tgtttcattaaatcacccatgttcactttaatg

SEQ ID NO: 495395 - DNA, 33 bp, Homo sapien
taatatttttatacgagtagtcctggtgaggaa

SEQ ID NO: 495396 - DNA, 33 bp, Homo sapien
taatatttttatacgattagtcctggtgaggaa

SEQ ID NO: 495397 - DNA, 33 bp, Homo sapien
agtctgcttggcaaataatgtcctcagacgctt

SEQ ID NO: 495398 - DNA, 33 bp, Homo sapien
agtctgcttggcaaatgatgtcctcagacgctt

SEQ ID NO: 495399 - DNA, 33 bp, Homo sapien
tggccggtagacaggcgcagctacataatttgt

SEQ ID NO: 495400 - DNA, 33 bp, Homo sapien
tggccggtagacaggctcagctacataatttgt

SEQ ID NO: 495401 - DNA, 33 bp, Homo sapien
ttcagactgcttttaccggaggtctggcatgga

SEQ ID NO: 495402 - DNA, 33 bp, Homo sapien
ttcagactgcttttactggaggtctggcatgga

SEQ ID NO: 495403 - DNA, 33 bp, Homo sapien
tgactttagccaaggacggtttgtggcagtgcc

SEQ ID NO: 495404 - DNA, 33 bp, Homo sapien
tgactttagccaaggatggtttgtggcagtgcc

SEQ ID NO: 495405 - DNA, 33 bp, Homo sapien
cccggtgtcatccttgaacactattatgagtca

SEQ ID NO: 495406 - DNA, 33 bp, Homo sapien
cccggtgtcatccttggacactattatgagtca

SEQ ID NO: 495407 - DNA, 33 bp, Homo sapien
tctgggttttgcttaaacagaggccaacatgga

SEQ ID NO: 495408 - DNA, 33 bp, Homo sapien
tctgggttttgcttaagcagaggccaacatgga

SEQ ID NO: 495409 - DNA, 33 bp, Homo sapien
aaagtttgcaaaaccacgatgttccacagatga

SEQ ID NO: 495410 - DNA, 33 bp, Homo sapien
aaagtttgcaaaaccatgatgttccacagatga

SEQ ID NO: 495411 - DNA, 33 bp, Homo sapien
cttaggttcaccacataatgaagacaaagcaga

SEQ ID NO: 495412 - DNA, 33 bp, Homo sapien
cttaggttcaccacatgatgaagacaaagcaga

SEQ ID NO: 495413 - DNA, 33 bp, Homo sapien
gtctgttgtttggactaacttggggtttgtgac

SEQ ID NO: 495414 - DNA, 33 bp, Homo sapien
gtctgttgtttggactcacttggggtttgtgac

SEQ ID NO: 495415 - DNA, 33 bp, Homo sapien
atttttctcatgtgtccctcgtttaatctctaa

SEQ ID NO: 495416 - DNA, 33 bp, Homo sapien
atttttctcatgtgtctctcgtttaatctctaa

SEQ ID NO: 495417 - DNA, 33 bp, Homo sapien
aactgacaccacagaaataacctagttgttaca

SEQ ID NO: 495418 - DNA, 33 bp, Homo sapien
aactgacaccacagaagtaacctagttgttaca

SEQ ID NO: 495419 - DNA, 33 bp, Homo sapien
tcccctcagctcagtcaaagccatgtgtgggca

SEQ ID NO: 495420 - DNA, 33 bp, Homo sapien
tcccctcagctcagtccaagccatgtgtgggca

SEQ ID NO: 495421 - DNA, 33 bp, Homo sapien
agataagatttactcacgtaggtctgactctca

SEQ ID NO: 495422 - DNA, 33 bp, Homo sapien
agataagatttactcatgtaggtctgactctca

SEQ ID NO: 495423 - DNA, 33 bp, Homo sapien
ctgcacctgtgggagaaagtttaacagagatag

SEQ ID NO: 495424 - DNA, 33 bp, Homo sapien
ctgcacctgtgggagagagtttaacagagatag

SEQ ID NO: 495425 - DNA, 33 bp, Homo sapien
caatttcttaaaataacacaacgatgaaatttg

SEQ ID NO: 495426 - DNA, 33 bp, Homo sapien
caatttcttaaaataagacaacgatgaaatttg

SEQ ID NO: 495427 - DNA, 33 bp, Homo sapien
gtctgtaattgcaaacaccttgtttatcagctt

SEQ ID NO: 495428 - DNA, 33 bp, Homo sapien
gtctgtaattgcaaaccccttgtttatcagctt

SEQ ID NO: 495429 - DNA, 33 bp, Homo sapien
cctcaccgcgtccagacagacccttgaacttca

SEQ ID NO: 495430 - DNA, 33 bp, Homo sapien
cctcaccgcgtccagagagacccttgaacttca

SEQ ID NO: 495431 - DNA, 33 bp, Homo sapien
tgaccacactttgtcaaacccgagcatctcttt

SEQ ID NO: 495432 - DNA, 33 bp, Homo sapien
tgaccacactttgtcacacccgagcatctcttt

SEQ ID NO: 495433 - DNA, 33 bp, Homo sapien
tcacacagccaggaaacgtcaaggtgagaattt

SEQ ID NO: 495434 - DNA, 33 bp, Homo sapien
tcacacagccaggaaatgtcaaggtgagaattt

SEQ ID NO: 495435 - DNA, 33 bp, Homo sapien
acccttgccgctttcacgtacgggaatcttgac

SEQ ID NO: 495436 - DNA, 33 bp, Homo sapien
acccttgccgctttcaggtacgggaatcttgac

SEQ ID NO: 495437 - DNA, 33 bp, Homo sapien
ttttcagcatgggtagaacaaaatcccagctca

SEQ ID NO: 495438 - DNA, 33 bp, Homo sapien
ttttcagcatgggtaggacaaaatcccagctca

SEQ ID NO: 495439 - DNA, 33 bp, Homo sapien
tccaggaagagttgtacgacctcacccgtagat

SEQ ID NO: 495440 - DNA, 33 bp, Homo sapien
tccaggaagagttgtaggacctcacccgtagat

SEQ ID NO: 495441 - DNA, 33 bp, Homo sapien
agttggatggcaatagcagttacaaggattatg

SEQ ID NO: 495442 - DNA, 33 bp, Homo sapien
agttggatggcaatagtagttacaaggattatg

SEQ ID NO: 495443 - DNA, 33 bp, Homo sapien
ttgtcaccctacttaccgccagttatggagacc

SEQ ID NO: 495444 - DNA, 33 bp, Homo sapien
ttgtcaccctacttactgccagttatggagacc

SEQ ID NO: 495445 - DNA, 33 bp, Homo sapien
tgctcttactaccaacagtcatagcctgagttc

SEQ ID NO: 495446 - DNA, 33 bp, Homo sapien
tgctcttactaccaactgtcatagcctgagttc

SEQ ID NO: 495447 - DNA, 33 bp, Homo sapien
gcaaccttcaaccaggaattgggagaaacaggg

SEQ ID NO: 495448 - DNA, 33 bp, Homo sapien
gcaaccttcaaccagggattgggagaaacaggg

SEQ ID NO: 495449 - DNA, 33 bp, Homo sapien
tcacattagaggtgaccgacggaagaggaccca

SEQ ID NO: 495450 - DNA, 33 bp, Homo sapien
tcacattagaggtgacggacggaagaggaccca

SEQ ID NO: 495451 - DNA, 33 bp, Homo sapien
caagccctgtagtgaaatccctccttggcatcc

SEQ ID NO: 495452 - DNA, 33 bp, Homo sapien
caagccctgtagtgaactccctccttggcatcc

SEQ ID NO: 495453 - DNA, 33 bp, Homo sapien
gtagtagattgctttacgtaagaaaatgcaggc

SEQ ID NO: 495454 - DNA, 33 bp, Homo sapien
gtagtagattgctttatgtaagaaaatgcaggc

SEQ ID NO: 495455 - DNA, 33 bp, Homo sapien
ggatgaatccagagaaatatgctcagtgaaaaa

SEQ ID NO: 495456 - DNA, 33 bp, Homo sapien
ggatgaatccagagaagtatgctcagtgaaaaa

SEQ ID NO: 495457 - DNA, 33 bp, Homo sapien
atgatacaggcaccaaactggatgaatccagag

SEQ ID NO: 495458 - DNA, 33 bp, Homo sapien
atgatacaggcaccaacctggatgaatccagag

SEQ ID NO: 495459 - DNA, 33 bp, Homo sapien
tgttttgtctcctaaacacagccatacattgat

SEQ ID NO: 495460 - DNA, 33 bp, Homo sapien
tgttttgtctcctaaatacagccatacattgat

SEQ ID NO: 495461 - DNA, 33 bp, Homo sapien
agaagaaatctaagaaggttatgactgcgactt

SEQ ID NO: 495462 - DNA, 33 bp, Homo sapien
agaagaaatctaagaatgttatgactgcgactt

SEQ ID NO: 495463 - DNA, 33 bp, Homo sapien
agtgtcacatgatagcagaaccagagcctaatc

SEQ ID NO: 495464 - DNA, 33 bp, Homo sapien
agtgtcacatgatagcggaaccagagcctaatc

SEQ ID NO: 495465 - DNA, 33 bp, Homo sapien
gtagcatggattcaggccccaaactgtatgaag

SEQ ID NO: 495466 - DNA, 33 bp, Homo sapien
gtagcatggattcaggtcccaaactgtatgaag

SEQ ID NO: 495467 - DNA, 33 bp, Homo sapien
ggattggacaatggaagttaagctaggtaagac

SEQ ID NO: 495468 - DNA, 33 bp, Homo sapien
ggattggacaatggaatttaagctaggtaagac

SEQ ID NO: 495469 - DNA, 33 bp, Homo sapien
gagagaagtgaaggaaatcaccaagagtacggt

SEQ ID NO: 495470 - DNA, 33 bp, Homo sapien
gagagaagtgaaggaagtcaccaagagtacggt

SEQ ID NO: 495471 - DNA, 33 bp, Homo sapien
gtgtccatcactgttgaaccatcattttaacct

SEQ ID NO: 495472 - DNA, 33 bp, Homo sapien
gtgtccatcactgttgtaccatcattttaacct

SEQ ID NO: 495473 - DNA, 33 bp, Homo sapien
aaaaccagcctagataggagaaggcaaatcttc

SEQ ID NO: 495474 - DNA, 33 bp, Homo sapien
aaaaccagcctagatatgagaaggcaaatcttc

SEQ ID NO: 495475 - DNA, 33 bp, Homo sapien
actagatcctcatctaacataacaggaagtcag

SEQ ID NO: 495476 - DNA, 33 bp, Homo sapien
actagatcctcatctagcataacaggaagtcag

SEQ ID NO: 495477 - DNA, 33 bp, Homo sapien
aaaccaatcgtgatgcccagctctttgggttat

SEQ ID NO: 495478 - DNA, 33 bp, Homo sapien
aaaccaatcgtgatgcgcagctctttgggttat

SEQ ID NO: 495479 - DNA, 33 bp, Homo sapien
agagcagttgtgttggccagaaatgatctttgt

SEQ ID NO: 495480 - DNA, 33 bp, Homo sapien
agagcagttgtgttggtcagaaatgatctttgt

SEQ ID NO: 495481 - DNA, 33 bp, Homo sapien
agttgagcagcgagcaatagatattattaatag

SEQ ID NO: 495482 - DNA, 33 bp, Homo sapien
agttgagcagcgagcactagatattattaatag

SEQ ID NO: 495483 - DNA, 33 bp, Homo sapien
tttctttgcacattcactcctttatcatttaca

SEQ ID NO: 495484 - DNA, 33 bp, Homo sapien
tttctttgcacattcattcctttatcatttaca

SEQ ID NO: 495485 - DNA, 33 bp, Homo sapien
acacagaaacaaatacagaggtacaagcagatt

SEQ ID NO: 495486 - DNA, 33 bp, Homo sapien
acacagaaacaaatacggaggtacaagcagatt

SEQ ID NO: 495487 - DNA, 33 bp, Homo sapien
ccttgaacattcccgcaatcccgacagattccc

SEQ ID NO: 495488 - DNA, 33 bp, Homo sapien
ccttgaacattcccgcgatcccgacagattccc

SEQ ID NO: 495489 - DNA, 33 bp, Homo sapien
tgagatgtcagcaggcaagagaaggaaaggcag

SEQ ID NO: 495490 - DNA, 33 bp, Homo sapien
tgagatgtcagcaggccagagaaggaaaggcag

SEQ ID NO: 495491 - DNA, 33 bp, Homo sapien
caggatttgctgacgcacttctgaacacaaggt

SEQ ID NO: 495492 - DNA, 33 bp, Homo sapien
caggatttgctgacgcgcttctgaacacaaggt

SEQ ID NO: 495493 - DNA, 33 bp, Homo sapien
gatggatcctgacctacattccaaatgcaagga

SEQ ID NO: 495494 - DNA, 33 bp, Homo sapien
gatggatcctgacctatattccaaatgcaagga

SEQ ID NO: 495495 - DNA, 33 bp, Homo sapien
ggtcactgccatgtacagcttttacttttctct

SEQ ID NO: 495496 - DNA, 33 bp, Homo sapien
ggtcactgccatgtactgcttttacttttctct

SEQ ID NO: 495497 - DNA, 33 bp, Homo sapien
aactcctttgatgaagacacaaatgggaagaga

SEQ ID NO: 495498 - DNA, 33 bp, Homo sapien
aactcctttgatgaaggcacaaatgggaagaga

SEQ ID NO: 495499 - DNA, 33 bp, Homo sapien
caaatatggcttaggccagtaaacaccagatca

SEQ ID NO: 495500 - DNA, 33 bp, Homo sapien
caaatatggcttaggctagtaaacaccagatca

SEQ ID NO: 495501 - DNA, 33 bp, Homo sapien
acttgtaatgtgcttaaagaagtgcctacaaat

SEQ ID NO: 495502 - DNA, 33 bp, Homo sapien
acttgtaatgtgcttagagaagtgcctacaaat

SEQ ID NO: 495503 - DNA, 33 bp, Homo sapien
tgattaatggaactacagtagaaatattctttg

SEQ ID NO: 495504 - DNA, 33 bp, Homo sapien
tgattaatggaactacggtagaaatattctttg

SEQ ID NO: 495505 - DNA, 33 bp, Homo sapien
tctagagacgggaataaagctggaagatgtgga

SEQ ID NO: 495506 - DNA, 33 bp, Homo sapien
tctagagacgggaatagagctggaagatgtgga

SEQ ID NO: 495507 - DNA, 33 bp, Homo sapien
ggaaagcagaccaatcagagtgttgacgtggca

SEQ ID NO: 495508 - DNA, 33 bp, Homo sapien
ggaaagcagaccaatcggagtgttgacgtggca

SEQ ID NO: 495509 - DNA, 33 bp, Homo sapien
tttagatcaacttccacaaccaatcccagggcc

SEQ ID NO: 495510 - DNA, 33 bp, Homo sapien
tttagatcaacttccataaccaatcccagggcc

SEQ ID NO: 495511 - DNA, 33 bp, Homo sapien
agagccactgaaatgcaagcaggggagtaatgc

SEQ ID NO: 495512 - DNA, 33 bp, Homo sapien
agagccactgaaatgcgagcaggggagtaatgc

SEQ ID NO: 495513 - DNA, 33 bp, Homo sapien
ttcctttcttacctctcaagtggccttggccat

SEQ ID NO: 495514 - DNA, 33 bp, Homo sapien
ttcctttcttacctcttaagtggccttggccat

SEQ ID NO: 495515 - DNA, 33 bp, Homo sapien
ggcactgaatcaaagcaagaataaacctctgag

SEQ ID NO: 495516 - DNA, 33 bp, Homo sapien
ggcactgaatcaaagcgagaataaacctctgag

SEQ ID NO: 495517 - DNA, 33 bp, Homo sapien
tcggggtacacgtttcccagagcacagggctag

SEQ ID NO: 495518 - DNA, 33 bp, Homo sapien
tcggggtacacgtttctcagagcacagggctag

SEQ ID NO: 495519 - DNA, 33 bp, Homo sapien
ccccactgagaatccaactgaacctagccctgt

SEQ ID NO: 495520 - DNA, 33 bp, Homo sapien
ccccactgagaatccatctgaacctagccctgt

SEQ ID NO: 495521 - DNA, 33 bp, Homo sapien
tgaaggggcagagcaccgatttgaaggccttgc

SEQ ID NO: 495522 - DNA, 33 bp, Homo sapien
tgaaggggcagagcacggatttgaaggccttgc

SEQ ID NO: 495523 - DNA, 33 bp, Homo sapien
taccagaactccacacactacctttgcagtctc

SEQ ID NO: 495524 - DNA, 33 bp, Homo sapien
taccagaactccacactctacctttgcagtctc

SEQ ID NO: 495525 - DNA, 33 bp, Homo sapien
gtcttcatttattctgcaaaagtagcagcagct

SEQ ID NO: 495526 - DNA, 33 bp, Homo sapien
gtcttcatttattctgtaaaagtagcagcagct

SEQ ID NO: 495527 - DNA, 33 bp, Homo sapien
aaatgaatgtgtttaacgcttgttgggaaggga

SEQ ID NO: 495528 - DNA, 33 bp, Homo sapien
aaatgaatgtgtttaatgcttgttgggaaggga

SEQ ID NO: 495529 - DNA, 33 bp, Homo sapien
tgttgtagctctcaggacactgtactgggcaga

SEQ ID NO: 495530 - DNA, 33 bp, Homo sapien
tgttgtagctctcaggtcactgtactgggcaga

SEQ ID NO: 495531 - DNA, 33 bp, Homo sapien
aaatgcccttttctaaatggtgagaggtggggt

SEQ ID NO: 495532 - DNA, 33 bp, Homo sapien
aaatgcccttttctaagtggtgagaggtggggt

SEQ ID NO: 495533 - DNA, 33 bp, Homo sapien
ataagatcacattcacaggctctgggagttagg

SEQ ID NO: 495534 - DNA, 33 bp, Homo sapien
ataagatcacattcacgggctctgggagttagg

SEQ ID NO: 495535 - DNA, 33 bp, Homo sapien
ttgtggttggagaagcaccatgacagttttgga

SEQ ID NO: 495536 - DNA, 33 bp, Homo sapien
ttgtggttggagaagcgccatgacagttttgga

SEQ ID NO: 495537 - DNA, 33 bp, Homo sapien
catcaagttcattgaaattaggaacctgggatt

SEQ ID NO: 495538 - DNA, 33 bp, Homo sapien
catcaagttcattgaagttaggaacctgggatt

SEQ ID NO: 495539 - DNA, 33 bp, Homo sapien
taaaaagctggtctaccaaatccaacacaggaa

SEQ ID NO: 495540 - DNA, 33 bp, Homo sapien
taaaaagctggtctacgaaatccaacacaggaa

SEQ ID NO: 495541 - DNA, 33 bp, Homo sapien
gtggcttctaaggaaaaaccacagttgcagttc

SEQ ID NO: 495542 - DNA, 33 bp, Homo sapien
gtggcttctaaggaaacaccacagttgcagttc

SEQ ID NO: 495543 - DNA, 33 bp, Homo sapien
ttctgagagatggagacgtcaactagagtagac

SEQ ID NO: 495544 - DNA, 33 bp, Homo sapien
ttctgagagatggagatgtcaactagagtagac

SEQ ID NO: 495545 - DNA, 33 bp, Homo sapien
gggcctatgggccaaaattagtcacacagatgc

SEQ ID NO: 495546 - DNA, 33 bp, Homo sapien
gggcctatgggccaaagttagtcacacagatgc

SEQ ID NO: 495547 - DNA, 33 bp, Homo sapien
cacacatttacacacacctgttatgtcctgtgt

SEQ ID NO: 495548 - DNA, 33 bp, Homo sapien
cacacatttacacacatctgttatgtcctgtgt

SEQ ID NO: 495549 - DNA, 33 bp, Homo sapien
gtgactgtatctgatcaactcttccaggagcac

SEQ ID NO: 495550 - DNA, 33 bp, Homo sapien
gtgactgtatctgatcgactcttccaggagcac

SEQ ID NO: 495551 - DNA, 33 bp, Homo sapien
gctgtctcatttggccacattgatgtatgaagg

SEQ ID NO: 495552 - DNA, 33 bp, Homo sapien
gctgtctcatttggccgcattgatgtatgaagg

SEQ ID NO: 495553 - DNA, 33 bp, Homo sapien
tgcttaggggaatataccaggaggatgcaggct

SEQ ID NO: 495554 - DNA, 33 bp, Homo sapien
tgcttaggggaatatatcaggaggatgcaggct

SEQ ID NO: 495555 - DNA, 33 bp, Homo sapien
aaatccctctacggaccccacagcgatggactg

SEQ ID NO: 495556 - DNA, 33 bp, Homo sapien
aaatccctctacggactccacagcgatggactg

SEQ ID NO: 495557 - DNA, 33 bp, Homo sapien
atcctcttctccatgcccacctctgacatccct

SEQ ID NO: 495558 - DNA, 33 bp, Homo sapien
atcctcttctccatgctcacctctgacatccct

SEQ ID NO: 495559 - DNA, 33 bp, Homo sapien
ctatggacgctgaccaatctatcataagatgtg

SEQ ID NO: 495560 - DNA, 33 bp, Homo sapien
ctatggacgctgaccagtctatcataagatgtg

SEQ ID NO: 495561 - DNA, 33 bp, Homo sapien
acactctttctggtgaactcttttgggccttgg

SEQ ID NO: 495562 - DNA, 33 bp, Homo sapien
acactctttctggtgagctcttttgggccttgg

SEQ ID NO: 495563 - DNA, 33 bp, Homo sapien
aaagtaaatgccttagaactgccaggtagcaca

SEQ ID NO: 495564 - DNA, 33 bp, Homo sapien
aaagtaaatgccttaggactgccaggtagcaca

SEQ ID NO: 495565 - DNA, 33 bp, Homo sapien
ccatgcatctgaaaaaccctacgctctcccata

SEQ ID NO: 495566 - DNA, 33 bp, Homo sapien
ccatgcatctgaaaaagcctacgctctcccata

SEQ ID NO: 495567 - DNA, 33 bp, Homo sapien
agatgatgatacaaaaagacagaagccttctat

SEQ ID NO: 495568 - DNA, 33 bp, Homo sapien
agatgatgatacaaaaggacagaagccttctat

SEQ ID NO: 495569 - DNA, 33 bp, Homo sapien
ccagaggcttttctggaagctgtacattttcac

SEQ ID NO: 495570 - DNA, 33 bp, Homo sapien
ccagaggcttttctgggagctgtacattttcac

SEQ ID NO: 495571 - DNA, 33 bp, Homo sapien
gtcaaagaagccaggaagtgttatgtttattga

SEQ ID NO: 495572 - DNA, 33 bp, Homo sapien
gtcaaagaagccaggacgtgttatgtttattga

SEQ ID NO: 495573 - DNA, 33 bp, Homo sapien
tttttcttcaagttgacagtttcagaaaattga

SEQ ID NO: 495574 - DNA, 33 bp, Homo sapien
tttttcttcaagttgagagtttcagaaaattga

SEQ ID NO: 495575 - DNA, 33 bp, Homo sapien
aagctctgaaatgagacggtttggctagttggg

SEQ ID NO: 495576 - DNA, 33 bp, Homo sapien
aagctctgaaatgagatggtttggctagttggg

SEQ ID NO: 495577 - DNA, 33 bp, Homo sapien
tataattttatcccaccgtatcctgggcattag

SEQ ID NO: 495578 - DNA, 33 bp, Homo sapien
tataattttatcccactgtatcctgggcattag

SEQ ID NO: 495579 - DNA, 33 bp, Homo sapien
tgctgaggcagaacagacagggcaccaaggcac

SEQ ID NO: 495580 - DNA, 33 bp, Homo sapien
tgctgaggcagaacaggcagggcaccaaggcac

SEQ ID NO: 495581 - DNA, 33 bp, Homo sapien
aattgttcttttgttcaacgtgcattgtgcaac

SEQ ID NO: 495582 - DNA, 33 bp, Homo sapien
aattgttcttttgttccacgtgcattgtgcaac

SEQ ID NO: 495583 - DNA, 33 bp, Homo sapien
tgtctcccagaattacagcttgcacaggcttcg

SEQ ID NO: 495584 - DNA, 33 bp, Homo sapien
tgtctcccagaattacggcttgcacaggcttcg

SEQ ID NO: 495585 - DNA, 33 bp, Homo sapien
ccttgagatttggagagcggtggtctcggtctc

SEQ ID NO: 495586 - DNA, 33 bp, Homo sapien
ccttgagatttggagatcggtggtctcggtctc

SEQ ID NO: 495587 - DNA, 33 bp, Homo sapien
agggagaaaagagtaactctggagtcaataaac

SEQ ID NO: 495588 - DNA, 33 bp, Homo sapien
agggagaaaagagtaattctggagtcaataaac

SEQ ID NO: 495589 - DNA, 33 bp, Homo sapien
taggatgtgatgagaacggccctttatctccat

SEQ ID NO: 495590 - DNA, 33 bp, Homo sapien
taggatgtgatgagaatggccctttatctccat

SEQ ID NO: 495591 - DNA, 33 bp, Homo sapien
tattgcaacattgaaacagggcatgtcaagcat

SEQ ID NO: 495592 - DNA, 33 bp, Homo sapien
tattgcaacattgaaagagggcatgtcaagcat

SEQ ID NO: 495593 - DNA, 33 bp, Homo sapien
tcgtatcatggaccccacagtatttcttgtgaa

SEQ ID NO: 495594 - DNA, 33 bp, Homo sapien
tcgtatcatggaccccgcagtatttcttgtgaa

SEQ ID NO: 495595 - DNA, 33 bp, Homo sapien
tccaggggcttacctcacactttggaccttgtt

SEQ ID NO: 495596 - DNA, 33 bp, Homo sapien
tccaggggcttacctcgcactttggaccttgtt

SEQ ID NO: 495597 - DNA, 33 bp, Homo sapien
tccctgctttagtcaggccaatccagtagatga

SEQ ID NO: 495598 - DNA, 33 bp, Homo sapien
tccctgctttagtcagtccaatccagtagatga

SEQ ID NO: 495599 - DNA, 33 bp, Homo sapien
ctataccaggtctttgaaatgagagaaaagtaa

SEQ ID NO: 495600 - DNA, 33 bp, Homo sapien
ctataccaggtctttggaatgagagaaaagtaa

SEQ ID NO: 495601 - DNA, 33 bp, Homo sapien
ggagaaggccaacgcacagatccagatcttaac

SEQ ID NO: 495602 - DNA, 33 bp, Homo sapien
ggagaaggccaacgcagagatccagatcttaac

SEQ ID NO: 495603 - DNA, 33 bp, Homo sapien
gacctttcagcaactgaacattggtctttacat

SEQ ID NO: 495604 - DNA, 33 bp, Homo sapien
gacctttcagcaactggacattggtctttacat

SEQ ID NO: 495605 - DNA, 33 bp, Homo sapien
gaagaaagataaaccacgcaacatcaaatgagc

SEQ ID NO: 495606 - DNA, 33 bp, Homo sapien
gaagaaagataaaccatgcaacatcaaatgagc

SEQ ID NO: 495607 - DNA, 33 bp, Homo sapien
tcacacctggcttacagagggactcctgtgatg

SEQ ID NO: 495608 - DNA, 33 bp, Homo sapien
tcacacctggcttacatagggactcctgtgatg

SEQ ID NO: 495609 - DNA, 33 bp, Homo sapien
agtgaacatagtattcaataggtagttttccaa

SEQ ID NO: 495610 - DNA, 33 bp, Homo sapien
agtgaacatagtattcgataggtagttttccaa

SEQ ID NO: 495611 - DNA, 33 bp, Homo sapien
aaattatcttgatatcactaaactaatagctgc

SEQ ID NO: 495612 - DNA, 33 bp, Homo sapien
aaattatcttgatatccctaaactaatagctgc

SEQ ID NO: 495613 - DNA, 33 bp, Homo sapien
aaacaatagcatgagcaataactgctgcagtta

SEQ ID NO: 495614 - DNA, 33 bp, Homo sapien
aaacaatagcatgagcgataactgctgcagtta

SEQ ID NO: 495615 - DNA, 33 bp, Homo sapien
gaaacctgtacaaggaagtttgttgtggctttt

SEQ ID NO: 495616 - DNA, 33 bp, Homo sapien
gaaacctgtacaaggatgtttgttgtggctttt

SEQ ID NO: 495617 - DNA, 33 bp, Homo sapien
ccagtttctgtgcagacaaaaacagaaaaacag

SEQ ID NO: 495618 - DNA, 33 bp, Homo sapien
ccagtttctgtgcagataaaaacagaaaaacag

SEQ ID NO: 495619 - DNA, 33 bp, Homo sapien
caccggtaaggagagaaggtgtctatgcatcac

SEQ ID NO: 495620 - DNA, 33 bp, Homo sapien
caccggtaaggagagagggtgtctatgcatcac

SEQ ID NO: 495621 - DNA, 33 bp, Homo sapien
ttgtatactactaagtgaaatggcaagtgtgca

SEQ ID NO: 495622 - DNA, 33 bp, Homo sapien
ttgtatactactaagttaaatggcaagtgtgca

SEQ ID NO: 495623 - DNA, 33 bp, Homo sapien
ctgtatttatcaactacgccaacgtttctgtgt

SEQ ID NO: 495624 - DNA, 33 bp, Homo sapien
ctgtatttatcaactatgccaacgtttctgtgt

SEQ ID NO: 495625 - DNA, 33 bp, Homo sapien
ctctcaagctctctcaataagaacataaattga

SEQ ID NO: 495626 - DNA, 33 bp, Homo sapien
ctctcaagctctctcagtaagaacataaattga

SEQ ID NO: 495627 - DNA, 33 bp, Homo sapien
ccttccttgagattgtaaaagaataactcagag

SEQ ID NO: 495628 - DNA, 33 bp, Homo sapien
ccttccttgagattgtcaaagaataactcagag

SEQ ID NO: 495629 - DNA, 33 bp, Homo sapien
ctgttattgaatttcaacaaggctatggcttct

SEQ ID NO: 495630 - DNA, 33 bp, Homo sapien
ctgttattgaatttcagcaaggctatggcttct

SEQ ID NO: 495631 - DNA, 33 bp, Homo sapien
gggtccaggccatgaaacgatgtgttcacccag

SEQ ID NO: 495632 - DNA, 33 bp, Homo sapien
gggtccaggccatgaagcgatgtgttcacccag

SEQ ID NO: 495633 - DNA, 33 bp, Homo sapien
aaacgtcatagaggtcacctttaacctacacac

SEQ ID NO: 495634 - DNA, 33 bp, Homo sapien
aaacgtcatagaggtcgcctttaacctacacac

SEQ ID NO: 495635 - DNA, 33 bp, Homo sapien
ctgttgtaattattagaatcctaacaccccaga

SEQ ID NO: 495636 - DNA, 33 bp, Homo sapien
ctgttgtaattattaggatcctaacaccccaga

SEQ ID NO: 495637 - DNA, 33 bp, Homo sapien
tggcttcaagttgagacaaagtgacagtgcttt

SEQ ID NO: 495638 - DNA, 33 bp, Homo sapien
tggcttcaagttgagataaagtgacagtgcttt

SEQ ID NO: 495639 - DNA, 33 bp, Homo sapien
aaagaggagggctataaacagaaggcagagagc

SEQ ID NO: 495640 - DNA, 33 bp, Homo sapien
aaagaggagggctatagacagaaggcagagagc

SEQ ID NO: 495641 - DNA, 33 bp, Homo sapien
tgggccgtgggtcatcactcggtcagccatggc

SEQ ID NO: 495642 - DNA, 33 bp, Homo sapien
tgggccgtgggtcatcgctcggtcagccatggc

SEQ ID NO: 495643 - DNA, 33 bp, Homo sapien
gggtggtactgaaaatcaatggccagactctaa

SEQ ID NO: 495644 - DNA, 33 bp, Homo sapien
gggtggtactgaaaattaatggccagactctaa

SEQ ID NO: 495645 - DNA, 33 bp, Homo sapien
gagcgatgattaaaccaatcgtgggtgcctgct

SEQ ID NO: 495646 - DNA, 33 bp, Homo sapien
gagcgatgattaaaccgatcgtgggtgcctgct

SEQ ID NO: 495647 - DNA, 33 bp, Homo sapien
aagtaaacgttctggacgagccaaagacaaaac

SEQ ID NO: 495648 - DNA, 33 bp, Homo sapien
aagtaaacgttctggatgagccaaagacaaaac

SEQ ID NO: 495649 - DNA, 33 bp, Homo sapien
tcccggtatcagagcgacctgtcaagcgtgatt

SEQ ID NO: 495650 - DNA, 33 bp, Homo sapien
tcccggtatcagagcggcctgtcaagcgtgatt

SEQ ID NO: 495651 - DNA, 33 bp, Homo sapien
ggcttggagagtgagaagtgttctagtcccaaa

SEQ ID NO: 495652 - DNA, 33 bp, Homo sapien
ggcttggagagtgagaggtgttctagtcccaaa

SEQ ID NO: 495653 - DNA, 33 bp, Homo sapien
gctccagcataagttacaggtgcacatttatgc

SEQ ID NO: 495654 - DNA, 33 bp, Homo sapien
gctccagcataagttataggtgcacatttatgc

SEQ ID NO: 495655 - DNA, 33 bp, Homo sapien
cctgcatatttaggcaactttaggcagatgcat

SEQ ID NO: 495656 - DNA, 33 bp, Homo sapien
cctgcatatttaggcacctttaggcagatgcat

SEQ ID NO: 495657 - DNA, 33 bp, Homo sapien
caataaaaaacttgtaaagccgtatctgctagt

SEQ ID NO: 495658 - DNA, 33 bp, Homo sapien
caataaaaaacttgtacagccgtatctgctagt

SEQ ID NO: 495659 - DNA, 33 bp, Homo sapien
tggtcagcatttctagcaaaggtgtcttgaaga

SEQ ID NO: 495660 - DNA, 33 bp, Homo sapien
tggtcagcatttctagtaaaggtgtcttgaaga

SEQ ID NO: 495661 - DNA, 33 bp, Homo sapien
tatgatggaggagacaacttcgacaaactcaat

SEQ ID NO: 495662 - DNA, 33 bp, Homo sapien
tatgatggaggagacagcttcgacaaactcaat

SEQ ID NO: 495663 - DNA, 33 bp, Homo sapien
tcctggcagaagcagacggactgagcacaaacc

SEQ ID NO: 495664 - DNA, 33 bp, Homo sapien
tcctggcagaagcagatggactgagcacaaacc

SEQ ID NO: 495665 - DNA, 33 bp, Homo sapien
acaaggacgcccagaccctgaggtactcctgta

SEQ ID NO: 495666 - DNA, 33 bp, Homo sapien
acaaggacgcccagactctgaggtactcctgta

SEQ ID NO: 495667 - DNA, 33 bp, Homo sapien
ccctgggtcagcgccaaaagaaaacctggaggg

SEQ ID NO: 495668 - DNA, 33 bp, Homo sapien
ccctgggtcagcgccagaagaaaacctggaggg

SEQ ID NO: 495669 - DNA, 33 bp, Homo sapien
gcagctattgtggatcaagactcctgtccttag

SEQ ID NO: 495670 - DNA, 33 bp, Homo sapien
gcagctattgtggatcgagactcctgtccttag

SEQ ID NO: 495671 - DNA, 33 bp, Homo sapien
atctgagcctgtaacaaccctgtgatgagacaa

SEQ ID NO: 495672 - DNA, 33 bp, Homo sapien
atctgagcctgtaacagccctgtgatgagacaa

SEQ ID NO: 495673 - DNA, 33 bp, Homo sapien
gtgatgagtactctaaacattaaaagtaagtac

SEQ ID NO: 495674 - DNA, 33 bp, Homo sapien
gtgatgagtactctaagcattaaaagtaagtac

SEQ ID NO: 495675 - DNA, 33 bp, Homo sapien
tcctgctccaacttcaccttctgccaagtgtaa

SEQ ID NO: 495676 - DNA, 33 bp, Homo sapien
tcctgctccaacttcatcttctgccaagtgtaa

SEQ ID NO: 495677 - DNA, 33 bp, Homo sapien
tttgtctggtttccaaaaagaatgagatcatgc

SEQ ID NO: 495678 - DNA, 33 bp, Homo sapien
tttgtctggtttccaagaagaatgagatcatgc

SEQ ID NO: 495679 - DNA, 33 bp, Homo sapien
aaatgttacataaataagctatgatttcttcat

SEQ ID NO: 495680 - DNA, 33 bp, Homo sapien
aaatgttacataaatacgctatgatttcttcat

SEQ ID NO: 495681 - DNA, 33 bp, Homo sapien
gcttggtagtgaggaaaattagtcctagactaa

SEQ ID NO: 495682 - DNA, 33 bp, Homo sapien
gcttggtagtgaggaagattagtcctagactaa

SEQ ID NO: 495683 - DNA, 33 bp, Homo sapien
atgtcaaaattatagacacttgtacttggatag

SEQ ID NO: 495684 - DNA, 33 bp, Homo sapien
atgtcaaaattatagatacttgtacttggatag

SEQ ID NO: 495685 - DNA, 33 bp, Homo sapien
agtaacagaagtagaaatagatgctagtgcaat

SEQ ID NO: 495686 - DNA, 33 bp, Homo sapien
agtaacagaagtagaagtagatgctagtgcaat

SEQ ID NO: 495687 - DNA, 33 bp, Homo sapien
ttctatcactaacttcaattttaaagctctttt

SEQ ID NO: 495688 - DNA, 33 bp, Homo sapien
ttctatcactaacttcgattttaaagctctttt

SEQ ID NO: 495689 - DNA, 33 bp, Homo sapien
tgtcacttgatgggtacgagtcctgagaaatgc

SEQ ID NO: 495690 - DNA, 33 bp, Homo sapien
tgtcacttgatgggtatgagtcctgagaaatgc

SEQ ID NO: 495691 - DNA, 33 bp, Homo sapien
acagtgtataaccttacgggacctcatgtggac

SEQ ID NO: 495692 - DNA, 33 bp, Homo sapien
acagtgtataaccttatgggacctcatgtggac

SEQ ID NO: 495693 - DNA, 33 bp, Homo sapien
atattagtatctgatgaagtctgacccttttga

SEQ ID NO: 495694 - DNA, 33 bp, Homo sapien
atattagtatctgatggagtctgacccttttga

SEQ ID NO: 495695 - DNA, 33 bp, Homo sapien
attgtgcctgagaggaacaagaagccattatcc

SEQ ID NO: 495696 - DNA, 33 bp, Homo sapien
attgtgcctgagaggagcaagaagccattatcc

SEQ ID NO: 495697 - DNA, 33 bp, Homo sapien
attggcctattttgagaatttgatataaatgga

SEQ ID NO: 495698 - DNA, 33 bp, Homo sapien
attggcctattttgagtatttgatataaatgga

SEQ ID NO: 495699 - DNA, 33 bp, Homo sapien
gtaaagcgattgcctgcatcataaagctagtta

SEQ ID NO: 495700 - DNA, 33 bp, Homo sapien
gtaaagcgattgcctgtatcataaagctagtta

SEQ ID NO: 495701 - DNA, 33 bp, Homo sapien
aaatggagtctacagacatggtgtgaaatacca

SEQ ID NO: 495702 - DNA, 33 bp, Homo sapien
aaatggagtctacagagatggtgtgaaatacca

SEQ ID NO: 495703 - DNA, 33 bp, Homo sapien
gtcaaaaatagactaccgataaatttcctcatc

SEQ ID NO: 495704 - DNA, 33 bp, Homo sapien
gtcaaaaatagactactgataaatttcctcatc

SEQ ID NO: 495705 - DNA, 33 bp, Homo sapien
ccacctgcattccaataagcgttggtaactcag

SEQ ID NO: 495706 - DNA, 33 bp, Homo sapien
ccacctgcattccaatgagcgttggtaactcag

SEQ ID NO: 495707 - DNA, 33 bp, Homo sapien
taagagttcagtttcgcacatgtaaatgtgaga

SEQ ID NO: 495708 - DNA, 33 bp, Homo sapien
taagagttcagtttcggacatgtaaatgtgaga

SEQ ID NO: 495709 - DNA, 33 bp, Homo sapien
tgaggactttagcctaacaactggcaggatgga

SEQ ID NO: 495710 - DNA, 33 bp, Homo sapien
tgaggactttagcctagcaactggcaggatgga

SEQ ID NO: 495711 - DNA, 33 bp, Homo sapien
ttatttcttctttgtaaacaaaaccttgacttc

SEQ ID NO: 495712 - DNA, 33 bp, Homo sapien
ttatttcttctttgtagacaaaaccttgacttc

SEQ ID NO: 495713 - DNA, 33 bp, Homo sapien
atgttggacacctatgaacttcatggactcttc

SEQ ID NO: 495714 - DNA, 33 bp, Homo sapien
atgttggacacctatgtacttcatggactcttc

SEQ ID NO: 495715 - DNA, 33 bp, Homo sapien
tgccatgtaatggtaaatctaagtcaaccctag

SEQ ID NO: 495716 - DNA, 33 bp, Homo sapien
tgccatgtaatggtaagtctaagtcaaccctag

SEQ ID NO: 495717 - DNA, 33 bp, Homo sapien
ctagagtgtgggatgccatttattgctcgaggg

SEQ ID NO: 495718 - DNA, 33 bp, Homo sapien
ctagagtgtgggatgctatttattgctcgaggg

SEQ ID NO: 495719 - DNA, 33 bp, Homo sapien; identical to SEQ ID NO: 495717

SEQ ID NO: 495720 - DNA, 33 bp, Homo sapien; identical to SEQ ID NO: 495718

SEQ ID NO: 495721 - DNA, 33 bp, Homo sapien
gaaaggataattggaaactagtgcctcgtttct

SEQ ID NO: 495722 - DNA, 33 bp, Homo sapien
gaaaggataattggaagctagtgcctcgtttct

SEQ ID NO: 495723 - DNA, 33 bp, Homo sapien
catcagcacattaatccatgtctctcaatactg

SEQ ID NO: 495724 - DNA, 33 bp, Homo sapien
catcagcacattaatcgatgtctctcaatactg

SEQ ID NO: 495725 - DNA, 33 bp, Homo sapien
ctgaaatgttagcagagcatggtatgggggagt

SEQ ID NO: 495726 - DNA, 33 bp, Homo sapien
ctgaaatgttagcagatcatggtatgggggagt

SEQ ID NO: 495727 - DNA, 33 bp, Homo sapien
cacctcggtggccgacctattcctggctactag

SEQ ID NO: 495728 - DNA, 33 bp, Homo sapien
cacctcggtggccgacgtattcctggctactag

SEQ ID NO: 495729 - DNA, 33 bp, Homo sapien
attccaatgcttgttccaagttctcttgtctca

SEQ ID NO: 495730 - DNA, 33 bp, Homo sapien
attccaatgcttgttctaagttctcttgtctca

SEQ ID NO: 495731 - DNA, 33 bp, Homo sapien
ccctagagtactcatcacacctacaagacattc

SEQ ID NO: 495732 - DNA, 33 bp, Homo sapien
ccctagagtactcatcccacctacaagacattc

SEQ ID NO: 495733 - DNA, 33 bp, Homo sapien
taatttttaaaatgaacacaccatccacctctt

SEQ ID NO: 495734 - DNA, 33 bp, Homo sapien
taatttttaaaatgaatacaccatccacctctt

SEQ ID NO: 495735 - DNA, 33 bp, Homo sapien
gaggcaggtctcgtgagggaataaaccagtctt

SEQ ID NO: 495736 - DNA, 33 bp, Homo sapien
gaggcaggtctcgtgatggaataaaccagtctt

SEQ ID NO: 495737 - DNA, 33 bp, Homo sapien
gtggttttgcataccaggtaccttgagttggat

SEQ ID NO: 495738 - DNA, 33 bp, Homo sapien
gtggttttgcataccatgtaccttgagttggat

SEQ ID NO: 495739 - DNA, 33 bp, Homo sapien
actattaacaatcccaaacttttagaaacaatg

SEQ ID NO: 495740 - DNA, 33 bp, Homo sapien
actattaacaatcccagacttttagaaacaatg

SEQ ID NO: 495741 - DNA, 33 bp, Homo sapien
caatagtttttctagactcatgatagatggcac

SEQ ID NO: 495742 - DNA, 33 bp, Homo sapien
caatagtttttctagattcatgatagatggcac

SEQ ID NO: 495743 - DNA, 33 bp, Homo sapien
aaaaatctgtccaaagcacatatgcttctccta

SEQ ID NO: 495744 - DNA, 33 bp, Homo sapien
aaaaatctgtccaaagtacatatgcttctccta

SEQ ID NO: 495745 - DNA, 33 bp, Homo sapien
cactcccttttctgaaactgaaactcttctcac

SEQ ID NO: 495746 - DNA, 33 bp, Homo sapien
cactcccttttctgaagctgaaactcttctcac

SEQ ID NO: 495747 - DNA, 33 bp, Homo sapien
gttcatttagcaattacagctgtcagcacagca

SEQ ID NO: 495748 - DNA, 33 bp, Homo sapien
gttcatttagcaattatagctgtcagcacagca

SEQ ID NO: 495749 - DNA, 33 bp, Homo sapien
atgtatcacttttcagaatacaagatgcaaata

SEQ ID NO: 495750 - DNA, 33 bp, Homo sapien
atgtatcacttttcaggatacaagatgcaaata

SEQ ID NO: 495751 - DNA, 33 bp, Homo sapien
tcctccccagcatatacgtgaaattaatacatg

SEQ ID NO: 495752 - DNA, 33 bp, Homo sapien
tcctccccagcatataggtgaaattaatacatg

SEQ ID NO: 495753 - DNA, 33 bp, Homo sapien
aggaatttaggtgagaccatccaaatttagaga

SEQ ID NO: 495754 - DNA, 33 bp, Homo sapien
aggaatttaggtgagatcatccaaatttagaga

SEQ ID NO: 495755 - DNA, 33 bp, Homo sapien
ataagtaatttattcacattggactactttcat

SEQ ID NO: 495756 - DNA, 33 bp, Homo sapien
ataagtaatttattcatattggactactttcat

SEQ ID NO: 495757 - DNA, 33 bp, Homo sapien
aacactcttgctgtgtaaaaaaggaatcactta

SEQ ID NO: 495758 - DNA, 33 bp, Homo sapien
aacactcttgctgtgtgaaaaaggaatcactta

SEQ ID NO: 495759 - DNA, 33 bp, Homo sapien
aaggtccaaatcaggacaaaggtgaaggaaagt

SEQ ID NO: 495760 - DNA, 33 bp, Homo sapien
aaggtccaaatcaggagaaaggtgaaggaaagt

SEQ ID NO: 495761 - DNA, 33 bp, Homo sapien
cagtagagggcatgaacaaggcatgaagcagaa

SEQ ID NO: 495762 - DNA, 33 bp, Homo sapien
cagtagagggcatgaataaggcatgaagcagaa

SEQ ID NO: 495763 - DNA, 33 bp, Homo sapien
gatgcctctatccttacgtggaaagtgtgggaa

SEQ ID NO: 495764 - DNA, 33 bp, Homo sapien
gatgcctctatccttatgtggaaagtgtgggaa

SEQ ID NO: 495765 - DNA, 33 bp, Homo sapien
ctgactaacaaatgaactgataacataagcggg

SEQ ID NO: 495766 - DNA, 33 bp, Homo sapien
ctgactaacaaatgaattgataacataagcggg

SEQ ID NO: 495767 - DNA, 33 bp, Homo sapien
cctaaaggaggaggtacaactcatcttgtgaag

SEQ ID NO: 495768 - DNA, 33 bp, Homo sapien
cctaaaggaggaggtagaactcatcttgtgaag

SEQ ID NO: 495769 - DNA, 33 bp, Homo sapien
tttgcatttcttttcaaacttgcttgttgatat

SEQ ID NO: 495770 - DNA, 33 bp, Homo sapien
tttgcatttcttttcagacttgcttgttgatat

SEQ ID NO: 495771 - DNA, 33 bp, Homo sapien
ctggtttggtagttgtcaattgtctcagcattt

SEQ ID NO: 495772 - DNA, 33 bp, Homo sapien
ctggtttggtagttgtgaattgtctcagcattt

SEQ ID NO: 495773 - DNA, 33 bp, Homo sapien
ttaggtactgtagtttaaaaaagtcatcacttt

SEQ ID NO: 495774 - DNA, 33 bp, Homo sapien
ttaggtactgtagttttaaaaagtcatcacttt

SEQ ID NO: 495775 - DNA, 33 bp, Homo sapien
aattccagttcacacactaagtaaaacacagct

SEQ ID NO: 495776 - DNA, 33 bp, Homo sapien
aattccagttcacacattaagtaaaacacagct

SEQ ID NO: 495777 - DNA, 33 bp, Homo sapien
tgatgaattgaaaagacagcgctattagatcct

SEQ ID NO: 495778 - DNA, 33 bp, Homo sapien
tgatgaattgaaaagatagcgctattagatcct

SEQ ID NO: 495779 - DNA, 33 bp, Homo sapien
agaggagtcttcaccaaatggaataagtggttc

SEQ ID NO: 495780 - DNA, 33 bp, Homo sapien
agaggagtcttcaccagatggaataagtggttc

SEQ ID NO: 495781 - DNA, 33 bp, Homo sapien
atacaaataatgaaagaaagaactgtaagccta

SEQ ID NO: 495782 - DNA, 33 bp, Homo sapien
atacaaataatgaaagtaagaactgtaagccta

SEQ ID NO: 495783 - DNA, 33 bp, Homo sapien
aatccctatcatttggccacttagtagtgaaaa

SEQ ID NO: 495784 - DNA, 33 bp, Homo sapien
aatccctatcatttggtcacttagtagtgaaaa

SEQ ID NO: 495785 - DNA, 33 bp, Homo sapien
ccataaactagagaccccctggaaatttaataa

SEQ ID NO: 495786 - DNA, 33 bp, Homo sapien
ccataaactagagacctcctggaaatttaataa

SEQ ID NO: 495787 - DNA, 33 bp, Homo sapien
taaggcttacacattccaagtaactggctttaa

SEQ ID NO: 495788 - DNA, 33 bp, Homo sapien
taaggcttacacattctaagtaactggctttaa

SEQ ID NO: 495789 - DNA, 33 bp, Homo sapien
tttatacacataaaagaagcttttcaaatcaac

SEQ ID NO: 495790 - DNA, 33 bp, Homo sapien
tttatacacataaaagcagcttttcaaatcaac

SEQ ID NO: 495791 - DNA, 33 bp, Homo sapien
atattaggaagctataataattgttgtaacaga

SEQ ID NO: 495792 - DNA, 33 bp, Homo sapien
atattaggaagctatagtaattgttgtaacaga

SEQ ID NO: 495793 - DNA, 33 bp, Homo sapien
gagaaaagccataacaagagaaaaaaatcattc

SEQ ID NO: 495794 - DNA, 33 bp, Homo sapien
gagaaaagccataacaggagaaaaaaatcattc

SEQ ID NO: 495795 - DNA, 33 bp, Homo sapien
tagaagagatcattataaaggaaccattctgta

SEQ ID NO: 495796 - DNA, 33 bp, Homo sapien
tagaagagatcattatgaaggaaccattctgta

SEQ ID NO: 495797 - DNA, 33 bp, Homo sapien
tatgcagacctttacactccatcataactaata

SEQ ID NO: 495798 - DNA, 33 bp, Homo sapien
tatgcagacctttacattccatcataactaata

SEQ ID NO: 495799 - DNA, 33 bp, Homo sapien
tgtagctactgtttaacctattgtggaataaag

SEQ ID NO: 495800 - DNA, 33 bp, Homo sapien
tgtagctactgtttaatctattgtggaataaag

SEQ ID NO: 495801 - DNA, 33 bp, Homo sapien
gagtaagtcacaaaaagtaggaacagatcatca

SEQ ID NO: 495802 - DNA, 33 bp, Homo sapien
gagtaagtcacaaaaattaggaacagatcatca

SEQ ID NO: 495803 - DNA, 33 bp, Homo sapien
ggtttcagatatatgactacaaaggtaaggtta

SEQ ID NO: 495804 - DNA, 33 bp, Homo sapien
ggtttcagatatatgattacaaaggtaaggtta

SEQ ID NO: 495805 - DNA, 33 bp, Homo sapien
caacacaaggacaccaaatataaggtcctatta

SEQ ID NO: 495806 - DNA, 33 bp, Homo sapien
caacacaaggacaccacatataaggtcctatta

SEQ ID NO: 495807 - DNA, 33 bp, Homo sapien
ctcagttgcaatgaggcagttctaagcaagctg

SEQ ID NO: 495808 - DNA, 33 bp, Homo sapien
ctcagttgcaatgaggtagttctaagcaagctg

SEQ ID NO: 495809 - DNA, 33 bp, Homo sapien
aaggaatgagagccagaaacaacaaccagaagg

SEQ ID NO: 495810 - DNA, 33 bp, Homo sapien
aaggaatgagagccaggaacaacaaccagaagg

SEQ ID NO: 495811 - DNA, 33 bp, Homo sapien
ctgagtgctgcgccaaatcggttgcctccttcc

SEQ ID NO: 495812 - DNA, 33 bp, Homo sapien
ctgagtgctgcgccaagtcggttgcctccttcc

SEQ ID NO: 495813 - DNA, 33 bp, Homo sapien
gtttctggcttccactcagcctgaaccagattt

SEQ ID NO: 495814 - DNA, 33 bp, Homo sapien
gtttctggcttccactgagcctgaaccagattt

SEQ ID NO: 495815 - DNA, 33 bp, Homo sapien
gctcactcagcctaaacgcactgctgcgcaaaa

SEQ ID NO: 495816 - DNA, 33 bp, Homo sapien
gctcactcagcctaaatgcactgctgcgcaaaa

SEQ ID NO: 495817 - DNA, 33 bp, Homo sapien
gtgcaggacagccgtgcagcagtgtgcttctag

SEQ ID NO: 495818 - DNA, 33 bp, Homo sapien
gtgcaggacagccgtgtagcagtgtgcttctag

SEQ ID NO: 495819 - DNA, 33 bp, Homo sapien
gatcaggtgccagtagcattagctgccattgct

SEQ ID NO: 495820 - DNA, 33 bp, Homo sapien
gatcaggtgccagtagtattagctgccattgct

SEQ ID NO: 495821 - DNA, 33 bp, Homo sapien
ttaagtgacaaaccgaactagctgctttttttt

SEQ ID NO: 495822 - DNA, 33 bp, Homo sapien
ttaagtgacaaaccgacctagctgctttttttt

SEQ ID NO: 495823 - DNA, 33 bp, Homo sapien
cccactgtgccccagacgatgcacggcagaagc

SEQ ID NO: 495824 - DNA, 33 bp, Homo sapien
cccactgtgccccagatgatgcacggcagaagc

SEQ ID NO: 495825 - DNA, 33 bp, Homo sapien
agcccaggctgcgcaacgaaaacaccagcacct

SEQ ID NO: 495826 - DNA, 33 bp, Homo sapien
agcccaggctgcgcaatgaaaacaccagcacct

SEQ ID NO: 495827 - DNA, 33 bp, Homo sapien
tataaagcagcatcccaccgattcctaaaatag

SEQ ID NO: 495828 - DNA, 33 bp, Homo sapien
tataaagcagcatcccgccgattcctaaaatag

SEQ ID NO: 495829 - DNA, 33 bp, Homo sapien
cctccttaaatactcacgtggtttactatggca

SEQ ID NO: 495830 - DNA, 33 bp, Homo sapien
cctccttaaatactcatgtggtttactatggca

SEQ ID NO: 495831 - DNA, 33 bp, Homo sapien
ccagtaaggaacatcacgtgcctccagatccgg

SEQ ID NO: 495832 - DNA, 33 bp, Homo sapien
ccagtaaggaacatcatgtgcctccagatccgg

SEQ ID NO: 495833 - DNA, 33 bp, Homo sapien
gtgactgtcagcaccacattagaccatgacttg

SEQ ID NO: 495834 - DNA, 33 bp, Homo sapien
gtgactgtcagcaccatattagaccatgacttg

SEQ ID NO: 495835 - DNA, 33 bp, Homo sapien
gcatggtgtgtagggacgtaaacggtgcagcca

SEQ ID NO: 495836 - DNA, 33 bp, Homo sapien
gcatggtgtgtagggatgtaaacggtgcagcca

SEQ ID NO: 495837 - DNA, 33 bp, Homo sapien
gtcaggaattctaccaagaagagagaaccctac

SEQ ID NO: 495838 - DNA, 33 bp, Homo sapien
gtcaggaattctaccaggaagagagaaccctac

SEQ ID NO: 495839 - DNA, 33 bp, Homo sapien
ggcgcgggacccgtgacgtggaggaccttgagg

SEQ ID NO: 495840 - DNA, 33 bp, Homo sapien
ggcgcgggacccgtgatgtggaggaccttgagg

SEQ ID NO: 495841 - DNA, 33 bp, Homo sapien
ctagacaaatagagctaagattttcttcctggg

SEQ ID NO: 495842 - DNA, 33 bp, Homo sapien
ctagacaaatagagctgagattttcttcctggg

SEQ ID NO: 495843 - DNA, 33 bp, Homo sapien
tggggtccactcagaccgcttgatttaacactg

SEQ ID NO: 495844 - DNA, 33 bp, Homo sapien
tggggtccactcagactgcttgatttaacactg

SEQ ID NO: 495845 - DNA, 33 bp, Homo sapien
catctttatcacggtacgtctcagcagtcaaag

SEQ ID NO: 495846 - DNA, 33 bp, Homo sapien
catctttatcacggtatgtctcagcagtcaaag

SEQ ID NO: 495847 - DNA, 33 bp, Homo sapien
aaagcactttttgtcactgaagaggccttaaac

SEQ ID NO: 495848 - DNA, 33 bp, Homo sapien
aaagcactttttgtcattgaagaggccttaaac

SEQ ID NO: 495849 - DNA, 33 bp, Homo sapien
cattgcccaccacatacgttctcaagagaagct

SEQ ID NO: 495850 - DNA, 33 bp, Homo sapien
cattgcccaccacataggttctcaagagaagct

SEQ ID NO: 495851 - DNA, 33 bp, Homo sapien
ttcttaaaaagatgtacagcacctttggtcaca

SEQ ID NO: 495852 - DNA, 33 bp, Homo sapien
ttcttaaaaagatgtatagcacctttggtcaca

SEQ ID NO: 495853 - DNA, 33 bp, Homo sapien
gcagaacatcaactacgctgagttcttgccgaa

SEQ ID NO: 495854 - DNA, 33 bp, Homo sapien
gcagaacatcaactactctgagttcttgccgaa

SEQ ID NO: 495855 - DNA, 33 bp, Homo sapien
ggatgatctggggtaacgggcaaaagagccttc

SEQ ID NO: 495856 - DNA, 33 bp, Homo sapien
ggatgatctggggtaatgggcaaaagagccttc

SEQ ID NO: 495857 - DNA, 33 bp, Homo sapien
cctggcatggtgcttcaatttttctttgaaatc

SEQ ID NO: 495858 - DNA, 33 bp, Homo sapien
cctggcatggtgcttcgatttttctttgaaatc

SEQ ID NO: 495859 - DNA, 33 bp, Homo sapien
tgccaatgatgcagacactgagaaacactgggc

SEQ ID NO: 495860 - DNA, 33 bp, Homo sapien
tgccaatgatgcagacgctgagaaacactgggc

SEQ ID NO: 495861 - DNA, 33 bp, Homo sapien
tgagaggtaacaggcacgtgagctctgtgaaac

SEQ ID NO: 495862 - DNA, 33 bp, Homo sapien
tgagaggtaacaggcatgtgagctctgtgaaac

SEQ ID NO: 495863 - DNA, 33 bp, Homo sapien
attcactggtcttcaactgctttttttcctgaa

SEQ ID NO: 495864 - DNA, 33 bp, Homo sapien
attcactggtcttcaagtgctttttttcctgaa

SEQ ID NO: 495865 - DNA, 33 bp, Homo sapien
actttaccacgtgctaaaaaccaggctttatat

SEQ ID NO: 495866 - DNA, 33 bp, Homo sapien
actttaccacgtgctagaaaccaggctttatat

SEQ ID NO: 495867 - DNA, 33 bp, Homo sapien
gatgtgaacccgaataagtagactgaataggag

SEQ ID NO: 495868 - DNA, 33 bp, Homo sapien
gatgtgaacccgaatatgtagactgaataggag

SEQ ID NO: 495869 - DNA, 33 bp, Homo sapien
tttgacattttcagtgcaatttggacttgaagt

SEQ ID NO: 495870 - DNA, 33 bp, Homo sapien
tttgacattttcagtgtaatttggacttgaagt

SEQ ID NO: 495871 - DNA, 33 bp, Homo sapien
ggactgatagactgaaatgggcttgaggatggc

SEQ ID NO: 495872 - DNA, 33 bp, Homo sapien
ggactgatagactgaagtgggcttgaggatggc

SEQ ID NO: 495873 - DNA, 33 bp, Homo sapien
aggaatgtcatcaccacggagctcgagggagcc

SEQ ID NO: 495874 - DNA, 33 bp, Homo sapien
aggaatgtcatcaccatggagctcgagggagcc

SEQ ID NO: 495875 - DNA, 33 bp, Homo sapien
ataaagccagtgttgccctgaaagatgcttcta

SEQ ID NO: 495876 - DNA, 33 bp, Homo sapien
ataaagccagtgttgctctgaaagatgcttcta

SEQ ID NO: 495877 - DNA, 33 bp, Homo sapien
tgccttactctggccactaggtctaggcatccc

SEQ ID NO: 495878 - DNA, 33 bp, Homo sapien
tgccttactctggccagtaggtctaggcatccc

SEQ ID NO: 495879 - DNA, 33 bp, Homo sapien
gtttggatggaggtaaaccctattttttcatta

SEQ ID NO: 495880 - DNA, 33 bp, Homo sapien
gtttggatggaggtaagccctattttttcatta

SEQ ID NO: 495881 - DNA, 33 bp, Homo sapien
aagtagaatgtaactcactgcctttagcaagtt

SEQ ID NO: 495882 - DNA, 33 bp, Homo sapien
aagtagaatgtaactcgctgcctttagcaagtt

SEQ ID NO: 495883 - DNA, 33 bp, Homo sapien
acccttggccaaaaaccacctctctgttgcagg

SEQ ID NO: 495884 - DNA, 33 bp, Homo sapien
acccttggccaaaaactacctctctgttgcagg

SEQ ID NO: 495885 - DNA, 33 bp, Homo sapien
ggtcaaccatcccatacaatgtttggcagtcat

SEQ ID NO: 495886 - DNA, 33 bp, Homo sapien
ggtcaaccatcccatagaatgtttggcagtcat

SEQ ID NO: 495887 - DNA, 33 bp, Homo sapien
ccatgtagtggaagtaggggtggcagtctccct

SEQ ID NO: 495888 - DNA, 33 bp, Homo sapien
ccatgtagtggaagtatgggtggcagtctccct

SEQ ID NO: 495889 - DNA, 33 bp, Homo sapien
gtggagggccaggccaatggacctgctgttgag

SEQ ID NO: 495890 - DNA, 33 bp, Homo sapien
gtggagggccaggccattggacctgctgttgag

SEQ ID NO: 495891 - DNA, 33 bp, Homo sapien
ctctgctttaagaatccgatctggacaaagaca

SEQ ID NO: 495892 - DNA, 33 bp, Homo sapien
ctctgctttaagaatctgatctggacaaagaca

SEQ ID NO: 495893 - DNA, 33 bp, Homo sapien
gtcacctcagatgatcacaatgggggaccctcc

SEQ ID NO: 495894 - DNA, 33 bp, Homo sapien
gtcacctcagatgatcgcaatgggggaccctcc

SEQ ID NO: 495895 - DNA, 33 bp, Homo sapien
caggggtctctcaagacgccgcccaggattcta

SEQ ID NO: 495896 - DNA, 33 bp, Homo sapien
caggggtctctcaagatgccgcccaggattcta

SEQ ID NO: 495897 - DNA, 33 bp, Homo sapien
gcacagtgagcataacaccaacagagctgggtc

SEQ ID NO: 495898 - DNA, 33 bp, Homo sapien
gcacagtgagcataacgccaacagagctgggtc

SEQ ID NO: 495899 - DNA, 33 bp, Homo sapien
tccttccaatccggggaaatcctccttgtatgt

SEQ ID NO: 495900 - DNA, 33 bp, Homo sapien
tccttccaatccgggggaatcctccttgtatgt

SEQ ID NO: 495901 - DNA, 33 bp, Homo sapien
acagaatttctcactcacactctctagacactg

SEQ ID NO: 495902 - DNA, 33 bp, Homo sapien
acagaatttctcactcgcactctctagacactg

SEQ ID NO: 495903 - DNA, 33 bp, Homo sapien
aaatgccttggaaaacagcatggactttatgat

SEQ ID NO: 495904 - DNA, 33 bp, Homo sapien
aaatgccttggaaaactgcatggactttatgat

SEQ ID NO: 495905 - DNA, 33 bp, Homo sapien
ggtctggaagcaatgaactagaacccgaagggg

SEQ ID NO: 495906 - DNA, 33 bp, Homo sapien
ggtctggaagcaatgagctagaacccgaagggg

SEQ ID NO: 495907 - DNA, 33 bp, Homo sapien
cagctgagggaactgccgagcatgaaaggctca

SEQ ID NO: 495908 - DNA, 33 bp, Homo sapien
cagctgagggaactgctgagcatgaaaggctca

SEQ ID NO: 495909 - DNA, 33 bp, Homo sapien
gagttcatccccgagaaagtcagacaaggaatc

SEQ ID NO: 495910 - DNA, 33 bp, Homo sapien
gagttcatccccgagacagtcagacaaggaatc

SEQ ID NO: 495911 - DNA, 33 bp, Homo sapien
attctcaacccactaaaatctgattcaggaatc

SEQ ID NO: 495912 - DNA, 33 bp, Homo sapien
attctcaacccactaacatctgattcaggaatc

SEQ ID NO: 495913 - DNA, 33 bp, Homo sapien
ggcaaagggcaaagcacgagaaggaaacctcat

SEQ ID NO: 495914 - DNA, 33 bp, Homo sapien
ggcaaagggcaaagcatgagaaggaaacctcat

SEQ ID NO: 495915 - DNA, 33 bp, Homo sapien
gctggaatgtctcagaaggcttcacgtgcacat

SEQ ID NO: 495916 - DNA, 33 bp, Homo sapien
gctggaatgtctcagatggcttcacgtgcacat

SEQ ID NO: 495917 - DNA, 33 bp, Homo sapien
ttggttaaatcaagtcacaagatcagccaagat

SEQ ID NO: 495918 - DNA, 33 bp, Homo sapien
ttggttaaatcaagtctcaagatcagccaagat

SEQ ID NO: 495919 - DNA, 33 bp, Homo sapien
cttttattctattcagaccctcaatacatcaaa

SEQ ID NO: 495920 - DNA, 33 bp, Homo sapien
cttttattctattcaggccctcaatacatcaaa

SEQ ID NO: 495921 - DNA, 33 bp, Homo sapien
agagaaattgaataaaaccatggctgtaaaaga

SEQ ID NO: 495922 - DNA, 33 bp, Homo sapien
agagaaattgaataaatccatggctgtaaaaga

SEQ ID NO: 495923 - DNA, 33 bp, Homo sapien
agagacctgtgagaaccctaaaaaggagatggt

SEQ ID NO: 495924 - DNA, 33 bp, Homo sapien
agagacctgtgagaactctaaaaaggagatggt

SEQ ID NO: 495925 - DNA, 33 bp, Homo sapien
ggacagacccagggccaaagagcaacagacagc

SEQ ID NO: 495926 - DNA, 33 bp, Homo sapien
ggacagacccagggccgaagagcaacagacagc

SEQ ID NO: 495927 - DNA, 33 bp, Homo sapien
ggacagtgaaggctaaaaccaaccgagactttt

SEQ ID NO: 495928 - DNA, 33 bp, Homo sapien
ggacagtgaaggctaagaccaaccgagactttt

SEQ ID NO: 495929 - DNA, 33 bp, Homo sapien
atgcaacaaagacctacgaacattttgtctttg

SEQ ID NO: 495930 - DNA, 33 bp, Homo sapien
atgcaacaaagacctatgaacattttgtctttg

SEQ ID NO: 495931 - DNA, 33 bp, Homo sapien
attttacaatctactacacaggtgggcaaagac

SEQ ID NO: 495932 - DNA, 33 bp, Homo sapien
attttacaatctactatacaggtgggcaaagac

SEQ ID NO: 495933 - DNA, 33 bp, Homo sapien
gagggcattcagggtacggattgtgctgaaatt

SEQ ID NO: 495934 - DNA, 33 bp, Homo sapien
gagggcattcagggtatggattgtgctgaaatt

SEQ ID NO: 495935 - DNA, 33 bp, Homo sapien
taatttttcaactgggaatttgcctttaaccag

SEQ ID NO: 495936 - DNA, 33 bp, Homo sapien
taatttttcaactggggatttgcctttaaccag

SEQ ID NO: 495937 - DNA, 33 bp, Homo sapien
aggaccagtgccttagcaacaggagcttttgca

SEQ ID NO: 495938 - DNA, 33 bp, Homo sapien
aggaccagtgccttaggaacaggagcttttgca

SEQ ID NO: 495939 - DNA, 33 bp, Homo sapien
gcaggaagacaaaagacgaagcattgaactaaa

SEQ ID NO: 495940 - DNA, 33 bp, Homo sapien
gcaggaagacaaaagatgaagcattgaactaaa

SEQ ID NO: 495941 - DNA, 33 bp, Homo sapien
tcatgtggaactaaaagagacctctcggtactt

SEQ ID NO: 495942 - DNA, 33 bp, Homo sapien
tcatgtggaactaaaatagacctctcggtactt

SEQ ID NO: 495943 - DNA, 33 bp, Homo sapien
atcttgtagccctgcagatcagaagtcaaaaat

SEQ ID NO: 495944 - DNA, 33 bp, Homo sapien
atcttgtagccctgcatatcagaagtcaaaaat

SEQ ID NO: 495945 - DNA, 33 bp, Homo sapien
ttgtaaccagtcttgccctaattggagagctca

SEQ ID NO: 495946 - DNA, 33 bp, Homo sapien
ttgtaaccagtcttgctctaattggagagctca

SEQ ID NO: 495947 - DNA, 33 bp, Homo sapien
caaacttcctgttgaaatgtgattcctaggtgg

SEQ ID NO: 495948 - DNA, 33 bp, Homo sapien
caaacttcctgttgaagtgtgattcctaggtgg

SEQ ID NO: 495949 - DNA, 33 bp, Homo sapien
atttgtgcaacagtgcagagccatgtcattttc

SEQ ID NO: 495950 - DNA, 33 bp, Homo sapien
atttgtgcaacagtgcggagccatgtcattttc

SEQ ID NO: 495951 - DNA, 33 bp, Homo sapien
aacaaaaaagaattgacctaagccattcaggtg

SEQ ID NO: 495952 - DNA, 33 bp, Homo sapien
aacaaaaaagaattgagctaagccattcaggtg

SEQ ID NO: 495953 - DNA, 33 bp, Homo sapien
tcttgattgctctacaaattctgctgcaagatc

SEQ ID NO: 495954 - DNA, 33 bp, Homo sapien
tcttgattgctctacacattctgctgcaagatc

SEQ ID NO: 495955 - DNA, 33 bp, Homo sapien
aacttccacagcttcagatttggtcactggtgc

SEQ ID NO: 495956 - DNA, 33 bp, Homo sapien
aacttccacagcttcatatttggtcactggtgc

SEQ ID NO: 495957 - DNA, 33 bp, Homo sapien
tgggattgtcagcatcaaaaaggtgacctcaag

SEQ ID NO: 495958 - DNA, 33 bp, Homo sapien
tgggattgtcagcatcgaaaaggtgacctcaag

SEQ ID NO: 495959 - DNA, 33 bp, Homo sapien
gatttcctatcacaaccaggtaagaggacccag

SEQ ID NO: 495960 - DNA, 33 bp, Homo sapien
gatttcctatcacaacgaggtaagaggacccag

SEQ ID NO: 495961 - DNA, 33 bp, Homo sapien
actcctatgaagcaaacgtggccacctccagtt

SEQ ID NO: 495962 - DNA, 33 bp, Homo sapien
actcctatgaagcaaatgtggccacctccagtt

SEQ ID NO: 495963 - DNA, 33 bp, Homo sapien
tgtggctagttctgaccagttcatcagtgaaca

SEQ ID NO: 495964 - DNA, 33 bp, Homo sapien
tgtggctagttctgacgagttcatcagtgaaca

SEQ ID NO: 495965 - DNA, 33 bp, Homo sapien
ttcttgttggggaatgacaggtaatatggtttg

SEQ ID NO: 495966 - DNA, 33 bp, Homo sapien
ttcttgttggggaatgtcaggtaatatggtttg

SEQ ID NO: 495967 - DNA, 33 bp, Homo sapien
gtccattcctcagagaccttcatcaatgccatt

SEQ ID NO: 495968 - DNA, 33 bp, Homo sapien
gtccattcctcagagatcttcatcaatgccatt

SEQ ID NO: 495969 - DNA, 33 bp, Homo sapien
agctcagcaaaacttacagcctgcagttaacag

SEQ ID NO: 495970 - DNA, 33 bp, Homo sapien
agctcagcaaaacttagagcctgcagttaacag

SEQ ID NO: 495971 - DNA, 33 bp, Homo sapien
tttctttcttcaggaaccataatgctcagctgc

SEQ ID NO: 495972 - DNA, 33 bp, Homo sapien
tttctttcttcaggaatcataatgctcagctgc

SEQ ID NO: 495973 - DNA, 33 bp, Homo sapien
gaaacaagagggtagacggatgaataataacag

SEQ ID NO: 495974 - DNA, 33 bp, Homo sapien
gaaacaagagggtagatggatgaataataacag

SEQ ID NO: 495975 - DNA, 33 bp, Homo sapien
acctctctgagctccacggttgaaggaccccca

SEQ ID NO: 495976 - DNA, 33 bp, Homo sapien
acctctctgagctccatggttgaaggaccccca

SEQ ID NO: 495977 - DNA, 33 bp, Homo sapien
tctactccatgcctaactctctacatgtgttct

SEQ ID NO: 495978 - DNA, 33 bp, Homo sapien
tctactccatgcctaattctctacatgtgttct

SEQ ID NO: 495979 - DNA, 33 bp, Homo sapien
cccttggataaatctcaatccccattctaactg

SEQ ID NO: 495980 - DNA, 33 bp, Homo sapien
cccttggataaatctcgatccccattctaactg

SEQ ID NO: 495981 - DNA, 33 bp, Homo sapien
aataagcaaacaccctcacactgcaagcacagc

SEQ ID NO: 495982 - DNA, 33 bp, Homo sapien
aataagcaaacacccttacactgcaagcacagc

SEQ ID NO: 495983 - DNA, 33 bp, Homo sapien
aggcttgagggcaacaagtttcaaaggaagtgg

SEQ ID NO: 495984 - DNA, 33 bp, Homo sapien
aggcttgagggcaacaggtttcaaaggaagtgg

SEQ ID NO: 495985 - DNA, 33 bp, Homo sapien
gaagtcagatggggaaaacacgatgctttgcct

SEQ ID NO: 495986 - DNA, 33 bp, Homo sapien
gaagtcagatggggaagacacgatgctttgcct

SEQ ID NO: 495987 - DNA, 33 bp, Homo sapien
ttgctttttgttaggacagaatggcgacttcca

SEQ ID NO: 495988 - DNA, 33 bp, Homo sapien
ttgctttttgttaggatagaatggcgacttcca

SEQ ID NO: 495989 - DNA, 33 bp, Homo sapien
tataatcaagaagtaaccataggcatagtatat

SEQ ID NO: 495990 - DNA, 33 bp, Homo sapien
tataatcaagaagtaatcataggcatagtatat

SEQ ID NO: 495991 - DNA, 33 bp, Homo sapien
aggctgacttggagggaccacactgacagctct

SEQ ID NO: 495992 - DNA, 33 bp, Homo sapien
aggctgacttggaggggccacactgacagctct

SEQ ID NO: 495993 - DNA, 33 bp, Homo sapien
gtgatttagtgtgcagaaactgtctactcagtg

SEQ ID NO: 495994 - DNA, 33 bp, Homo sapien
gtgatttagtgtgcaggaactgtctactcagtg

SEQ ID NO: 495995 - DNA, 33 bp, Homo sapien
aacatgccaacacggacaggcgtggacggtgtt

SEQ ID NO: 495996 - DNA, 33 bp, Homo sapien
aacatgccaacacggagaggcgtggacggtgtt

SEQ ID NO: 495997 - DNA, 33 bp, Homo sapien
gctaattgctttgctcaaacatgaagacttgga

SEQ ID NO: 495998 - DNA, 33 bp, Homo sapien
gctaattgctttgctcgaacatgaagacttgga

SEQ ID NO: 495999 - DNA, 33 bp, Homo sapien
gaagtacacaatcaaaataggttggcacaacgt

SEQ ID NO: 496000 - DNA, 33 bp, Homo sapien
gaagtacacaatcaaagtaggttggcacaacgt

SEQ ID NO: 496001 - DNA, 33 bp, Homo sapien
tgcacccatcactgtaaatggcaccagcaaata

SEQ ID NO: 496002 - DNA, 33 bp, Homo sapien
tgcacccatcactgtatatggcaccagcaaata

SEQ ID NO: 496003 - DNA, 33 bp, Homo sapien
agtgatgggtgcagcaatatcctttcaaggaaa

SEQ ID NO: 496004 - DNA, 33 bp, Homo sapien
agtgatgggtgcagcagtatcctttcaaggaaa

SEQ ID NO: 496005 - DNA, 33 bp, Homo sapien
tactgcagaatgatgaagatggaatgggctaca

SEQ ID NO: 496006 - DNA, 33 bp, Homo sapien
tactgcagaatgatgaggatggaatgggctaca

SEQ ID NO: 496007 - DNA, 33 bp, Homo sapien
aaacgagagtcagttaaaggctaaatcctactg

SEQ ID NO: 496008 - DNA, 33 bp, Homo sapien
aaacgagagtcagttagaggctaaatcctactg

SEQ ID NO: 496009 - DNA, 33 bp, Homo sapien
cggcaggagctggaaaatcattaggacgtttgt

SEQ ID NO: 496010 - DNA, 33 bp, Homo sapien
cggcaggagctggaaattcattaggacgtttgt

SEQ ID NO: 496011 - DNA, 33 bp, Homo sapien
caggctttctgacagaaccataaaacctctcta

SEQ ID NO: 496012 - DNA, 33 bp, Homo sapien
caggctttctgacagacccataaaacctctcta

SEQ ID NO: 496013 - DNA, 33 bp, Homo sapien
ccacactccacccttcactatgcctcagtgtct

SEQ ID NO: 496014 - DNA, 33 bp, Homo sapien
ccacactccacccttcgctatgcctcagtgtct

SEQ ID NO: 496015 - DNA, 33 bp, Homo sapien
aaccagctaacaacgcaatgacagaagaaaatc

SEQ ID NO: 496016 - DNA, 33 bp, Homo sapien
aaccagctaacaacgcgatgacagaagaaaatc

SEQ ID NO: 496017 - DNA, 33 bp, Homo sapien
ctcttcccttgctaaccgccattatgttttttc

SEQ ID NO: 496018 - DNA, 33 bp, Homo sapien
ctcttcccttgctaactgccattatgttttttc

SEQ ID NO: 496019 - DNA, 33 bp, Homo sapien
ttcagcctctgatgtcaaaagatgaagcagagg

SEQ ID NO: 496020 - DNA, 33 bp, Homo sapien
ttcagcctctgatgtcgaaagatgaagcagagg

SEQ ID NO: 496021 - DNA, 33 bp, Homo sapien
ctgccatatgacgatacagcattcaaggtgtca

SEQ ID NO: 496022 - DNA, 33 bp, Homo sapien
ctgccatatgacgatagagcattcaaggtgtca

SEQ ID NO: 496023 - DNA, 33 bp, Homo sapien
tgagtacaaaaacatcgaatactcaatgtgatg

SEQ ID NO: 496024 - DNA, 33 bp, Homo sapien
tgagtacaaaaacatctaatactcaatgtgatg

SEQ ID NO: 496025 - DNA, 33 bp, Homo sapien
catggtgctgttgccaaattgcaaggattaaat

SEQ ID NO: 496026 - DNA, 33 bp, Homo sapien
catggtgctgttgccagattgcaaggattaaat

SEQ ID NO: 496027 - DNA, 33 bp, Homo sapien
acctttcatcattcaacgtcttgagctgaggcc

SEQ ID NO: 496028 - DNA, 33 bp, Homo sapien
acctttcatcattcaatgtcttgagctgaggcc

SEQ ID NO: 496029 - DNA, 33 bp, Homo sapien
tgccttttgtgggggacgacatttagcagacat

SEQ ID NO: 496030 - DNA, 33 bp, Homo sapien
tgccttttgtgggggatgacatttagcagacat

SEQ ID NO: 496031 - DNA, 33 bp, Homo sapien
tgtgtaatgattctagaagctatggagctgaag

SEQ ID NO: 496032 - DNA, 33 bp, Homo sapien
tgtgtaatgattctagtagctatggagctgaag

SEQ ID NO: 496033 - DNA, 33 bp, Homo sapien
agaatttacagtgccaaaacaacatgtcgaccc

SEQ ID NO: 496034 - DNA, 33 bp, Homo sapien
agaatttacagtgccacaacaacatgtcgaccc

SEQ ID NO: 496035 - DNA, 33 bp, Homo sapien
ggtctgtcaagcagagccaggtgtgttcctggt

SEQ ID NO: 496036 - DNA, 33 bp, Homo sapien
ggtctgtcaagcagagtcaggtgtgttcctggt

SEQ ID NO: 496037 - DNA, 33 bp, Homo sapien
aagacaggcaaaagaaatccagcataaatgcaa

SEQ ID NO: 496038 - DNA, 33 bp, Homo sapien
aagacaggcaaaagaattccagcataaatgcaa

SEQ ID NO: 496039 - DNA, 33 bp, Homo sapien
aatgatgacgaataaacagaaaggaatcatcaa

SEQ ID NO: 496040 - DNA, 33 bp, Homo sapien
aatgatgacgaataaagagaaaggaatcatcaa

SEQ ID NO: 496041 - DNA, 33 bp, Homo sapien
atttgtccactcatacgcgtaggtgaagaaggt

SEQ ID NO: 496042 - DNA, 33 bp, Homo sapien
atttgtccactcatactcgtaggtgaagaaggt

SEQ ID NO: 496043 - DNA, 33 bp, Homo sapien
tttcagcttcatcttgaatggttagtctattca

SEQ ID NO: 496044 - DNA, 33 bp, Homo sapien
tttcagcttcatcttggatggttagtctattca

SEQ ID NO: 496045 - DNA, 33 bp, Homo sapien
aaacttgaaaaaatcaatgaagtggatagtttt

SEQ ID NO: 496046 - DNA, 33 bp, Homo sapien
aaacttgaaaaaatcagtgaagtggatagtttt

SEQ ID NO: 496047 - DNA, 33 bp, Homo sapien
gatcctaatcagcttccagactcagatcttcac

SEQ ID NO: 496048 - DNA, 33 bp, Homo sapien
gatcctaatcagcttctagactcagatcttcac

SEQ ID NO: 496049 - DNA, 33 bp, Homo sapien
ctggtgtctcagtaacaaagattcagtccaacc

SEQ ID NO: 496050 - DNA, 33 bp, Homo sapien
ctggtgtctcagtaacgaagattcagtccaacc

SEQ ID NO: 496051 - DNA, 33 bp, Homo sapien
gatcattcagcacaaacaaggcagcggagaggt

SEQ ID NO: 496052 - DNA, 33 bp, Homo sapien
gatcattcagcacaaataaggcagcggagaggt

SEQ ID NO: 496053 - DNA, 33 bp, Homo sapien
cttctgagaaaccgaaatgggagactgggagat

SEQ ID NO: 496054 - DNA, 33 bp, Homo sapien
cttctgagaaaccgaagtgggagactgggagat

SEQ ID NO: 496055 - DNA, 33 bp, Homo sapien
ggagaaaaagagtgaaattaagtcagatgtggc

SEQ ID NO: 496056 - DNA, 33 bp, Homo sapien
ggagaaaaagagtgaagttaagtcagatgtggc

SEQ ID NO: 496057 - DNA, 33 bp, Homo sapien
cggacagtaacgcacaacaggacaatgtcgttt

SEQ ID NO: 496058 - DNA, 33 bp, Homo sapien
cggacagtaacgcacagcaggacaatgtcgttt

SEQ ID NO: 496059 - DNA, 33 bp, Homo sapien
gaggtccagggcgtccaagtagtccttgccctg

SEQ ID NO: 496060 - DNA, 33 bp, Homo sapien
gaggtccagggcgtccgagtagtccttgccctg

SEQ ID NO: 496061 - DNA, 33 bp, Homo sapien
tctgtagatggagaagcagttagggtgggatgt

SEQ ID NO: 496062 - DNA, 33 bp, Homo sapien
tctgtagatggagaagtagttagggtgggatgt

SEQ ID NO: 496063 - DNA, 33 bp, Homo sapien
aacttagaagcacttcaactgaagcaaggagag

SEQ ID NO: 496064 - DNA, 33 bp, Homo sapien
aacttagaagcacttccactgaagcaaggagag

SEQ ID NO: 496065 - DNA, 33 bp, Homo sapien
aatgtgaatatgacgaataaatggacagggcct

SEQ ID NO: 496066 - DNA, 33 bp, Homo sapien
aatgtgaatatgacgagtaaatggacagggcct

SEQ ID NO: 496067 - DNA, 33 bp, Homo sapien
gtaaattggtgattttcaaaagagtaattatat

SEQ ID NO: 496068 - DNA, 33 bp, Homo sapien
gtaaattggtgattttgaaaagagtaattatat

SEQ ID NO: 496069 - DNA, 33 bp, Homo sapien
tccttaacactacatgaaatcttctctactctt

SEQ ID NO: 496070 - DNA, 33 bp, Homo sapien
tccttaacactacatggaatcttctctactctt

SEQ ID NO: 496071 - DNA, 33 bp, Homo sapien
gttcaacattgcgttccaagttgcctagcccag

SEQ ID NO: 496072 - DNA, 33 bp, Homo sapien
gttcaacattgcgttctaagttgcctagcccag

SEQ ID NO: 496073 - DNA, 33 bp, Homo sapien
taatagagtcccaaaccgaactgtcccttcagg

SEQ ID NO: 496074 - DNA, 33 bp, Homo sapien
taatagagtcccaaactgaactgtcccttcagg

SEQ ID NO: 496075 - DNA, 33 bp, Homo sapien
aattatactcttgccactagccatctttctgct

SEQ ID NO: 496076 - DNA, 33 bp, Homo sapien
aattatactcttgccagtagccatctttctgct

SEQ ID NO: 496077 - DNA, 33 bp, Homo sapien
actcctgagacttaacgcaagggctttgctatg

SEQ ID NO: 496078 - DNA, 33 bp, Homo sapien
actcctgagacttaactcaagggctttgctatg

SEQ ID NO: 496079 - DNA, 33 bp, Homo sapien
aggagttgcaggaaaacatagtgaaatgtgtaa

SEQ ID NO: 496080 - DNA, 33 bp, Homo sapien
aggagttgcaggaaaatatagtgaaatgtgtaa

SEQ ID NO: 496081 - DNA, 33 bp, Homo sapien
ggagtcagaaggaaaaaacataatccccatcct

SEQ ID NO: 496082 - DNA, 33 bp, Homo sapien
ggagtcagaaggaaaagacataatccccatcct

SEQ ID NO: 496083 - DNA, 33 bp, Homo sapien
tgttcaagcgaaaacacgcatgtaaagaaaatc

SEQ ID NO: 496084 - DNA, 33 bp, Homo sapien
tgttcaagcgaaaacatgcatgtaaagaaaatc

SEQ ID NO: 496085 - DNA, 33 bp, Homo sapien
atacagaacactaaccccagagcagcttcattt

SEQ ID NO: 496086 - DNA, 33 bp, Homo sapien
atacagaacactaaccgcagagcagcttcattt

SEQ ID NO: 496087 - DNA, 33 bp, Homo sapien
agtgccaggtagaggcccttaggtagctcattc

SEQ ID NO: 496088 - DNA, 33 bp, Homo sapien
agtgccaggtagaggctcttaggtagctcattc

SEQ ID NO: 496089 - DNA, 33 bp, Homo sapien
agttcaatgtatcactaagatgtcaatttgtcc

SEQ ID NO: 496090 - DNA, 33 bp, Homo sapien
agttcaatgtatcacttagatgtcaatttgtcc

SEQ ID NO: 496091 - DNA, 33 bp, Homo sapien
aaaaataataaagcaacactaaaatgtatagtg

SEQ ID NO: 496092 - DNA, 33 bp, Homo sapien
aaaaataataaagcaagactaaaatgtatagtg

SEQ ID NO: 496093 - DNA, 33 bp, Homo sapien
tatcagcactcttgcaactgaacccatatttcc

SEQ ID NO: 496094 - DNA, 33 bp, Homo sapien
tatcagcactcttgcatctgaacccatatttcc

SEQ ID NO: 496095 - DNA, 33 bp, Homo sapien
cctgtggtggcttcatcagtgtctacttctgca

SEQ ID NO: 496096 - DNA, 33 bp, Homo sapien
cctgtggtggcttcatgagtgtctacttctgca

SEQ ID NO: 496097 - DNA, 33 bp, Homo sapien
gatatacacatagttcaatttcccttcatatag

SEQ ID NO: 496098 - DNA, 33 bp, Homo sapien
gatatacacatagttcgatttcccttcatatag

SEQ ID NO: 496099 - DNA, 33 bp, Homo sapien
taacagcctgccagaggaggttaacaataggat

SEQ ID NO: 496100 - DNA, 33 bp, Homo sapien
taacagcctgccagagtaggttaacaataggat

SEQ ID NO: 496101 - DNA, 33 bp, Homo sapien
tttcggggaccaaggcaaaatataggtcattgt

SEQ ID NO: 496102 - DNA, 33 bp, Homo sapien
tttcggggaccaaggcgaaatataggtcattgt

SEQ ID NO: 496103 - DNA, 33 bp, Homo sapien
gtcaaataatttccaacgagatagatgcttaga

SEQ ID NO: 496104 - DNA, 33 bp, Homo sapien
gtcaaataatttccaatgagatagatgcttaga

SEQ ID NO: 496105 - DNA, 33 bp, Homo sapien
cttacagacacattcacatagttagaagcatca

SEQ ID NO: 496106 - DNA, 33 bp, Homo sapien
cttacagacacattcagatagttagaagcatca

SEQ ID NO: 496107 - DNA, 33 bp, Homo sapien
gatgatacatttggtacggagagaaaaactatg

SEQ ID NO: 496108 - DNA, 33 bp, Homo sapien
gatgatacatttggtatggagagaaaaactatg

SEQ ID NO: 496109 - DNA, 33 bp, Homo sapien
caaactctccagggaacaaccctcaaagaggtc

SEQ ID NO: 496110 - DNA, 33 bp, Homo sapien
caaactctccagggaagaaccctcaaagaggtc

SEQ ID NO: 496111 - DNA, 33 bp, Homo sapien
gtcccagcagaagtaactgtgaaaactattggc

SEQ ID NO: 496112 - DNA, 33 bp, Homo sapien
gtcccagcagaagtaattgtgaaaactattggc

SEQ ID NO: 496113 - DNA, 33 bp, Homo sapien
cccaagaatacgatacacaactctacataaatt

SEQ ID NO: 496114 - DNA, 33 bp, Homo sapien
cccaagaatacgatactcaactctacataaatt

SEQ ID NO: 496115 - DNA, 33 bp, Homo sapien
tgggttgatggatgccacaatccactatggcac

SEQ ID NO: 496116 - DNA, 33 bp, Homo sapien
tgggttgatggatgccgcaatccactatggcac

SEQ ID NO: 496117 - DNA, 33 bp, Homo sapien
tctaaatatattgctaaggggaaaactgtatag

SEQ ID NO: 496118 - DNA, 33 bp, Homo sapien
tctaaatatattgctatggggaaaactgtatag

SEQ ID NO: 496119 - DNA, 33 bp, Homo sapien
attacaccaatttacccaggatggtaggctatg

SEQ ID NO: 496120 - DNA, 33 bp, Homo sapien
attacaccaatttacctaggatggtaggctatg

SEQ ID NO: 496121 - DNA, 33 bp, Homo sapien
agagccctgactccaacagatagcgcattatcc

SEQ ID NO: 496122 - DNA, 33 bp, Homo sapien
agagccctgactccaatagatagcgcattatcc

SEQ ID NO: 496123 - DNA, 33 bp, Homo sapien
ggaaggggaaggaaatgaggcagtctactcagt

SEQ ID NO: 496124 - DNA, 33 bp, Homo sapien
ggaaggggaaggaaattaggcagtctactcagt

SEQ ID NO: 496125 - DNA, 33 bp, Homo sapien
ggagatggtataaaatcagtggttgacacagtt

SEQ ID NO: 496126 - DNA, 33 bp, Homo sapien
ggagatggtataaaatgagtggttgacacagtt

SEQ ID NO: 496127 - DNA, 33 bp, Homo sapien
gagaatcatatggtcaacaatctaaattatact

SEQ ID NO: 496128 - DNA, 33 bp, Homo sapien
gagaatcatatggtcatcaatctaaattatact

SEQ ID NO: 496129 - DNA, 33 bp, Homo sapien
caaaggcaatctacaaactgatttcagcatcca

SEQ ID NO: 496130 - DNA, 33 bp, Homo sapien
caaaggcaatctacaagctgatttcagcatcca

SEQ ID NO: 496131 - DNA, 33 bp, Homo sapien
gatgtactccctattcaatatattttctcagat

SEQ ID NO: 496132 - DNA, 33 bp, Homo sapien
gatgtactccctattcgatatattttctcagat

SEQ ID NO: 496133 - DNA, 33 bp, Homo sapien
tactcttctgtcttggaaaattacctactcgct

SEQ ID NO: 496134 - DNA, 33 bp, Homo sapien
tactcttctgtcttgggaaattacctactcgct

SEQ ID NO: 496135 - DNA, 33 bp, Homo sapien
tacctttgggaaaatacgctataaaggatattt

SEQ ID NO: 496136 - DNA, 33 bp, Homo sapien
tacctttgggaaaatatgctataaaggatattt

SEQ ID NO: 496137 - DNA, 33 bp, Homo sapien
gaatgctttcaccaggaaaaatgcacatatgtg

SEQ ID NO: 496138 - DNA, 33 bp, Homo sapien
gaatgctttcaccaggcaaaatgcacatatgtg

SEQ ID NO: 496139 - DNA, 33 bp, Homo sapien
aaataaaaattgataacagactgggcaataaga

SEQ ID NO: 496140 - DNA, 33 bp, Homo sapien
aaataaaaattgataagagactgggcaataaga

SEQ ID NO: 496141 - DNA, 33 bp, Homo sapien
ttctgtaaaaaaaatcaataataggcttctctc

SEQ ID NO: 496142 - DNA, 33 bp, Homo sapien
ttctgtaaaaaaaatcgataataggcttctctc

SEQ ID NO: 496143 - DNA, 33 bp, Homo sapien
accatgtactgtcaagaatatagagcaaatgga

SEQ ID NO: 496144 - DNA, 33 bp, Homo sapien
accatgtactgtcaaggatatagagcaaatgga

SEQ ID NO: 496145 - DNA, 33 bp, Homo sapien
aggtagaagtttataactgaggcaaatgatttc

SEQ ID NO: 496146 - DNA, 33 bp, Homo sapien
aggtagaagtttataattgaggcaaatgatttc

SEQ ID NO: 496147 - DNA, 33 bp, Homo sapien
cataaacacattcctacggacaataacatacaa

SEQ ID NO: 496148 - DNA, 33 bp, Homo sapien
cataaacacattcctatggacaataacatacaa

SEQ ID NO: 496149 - DNA, 33 bp, Homo sapien
accagcccctatctgccaagagtcatgttatta

SEQ ID NO: 496150 - DNA, 33 bp, Homo sapien
accagcccctatctgcgaagagtcatgttatta

SEQ ID NO: 496151 - DNA, 33 bp, Homo sapien
tccagagtctggcaatcaattttgtgtgagaga

SEQ ID NO: 496152 - DNA, 33 bp, Homo sapien
tccagagtctggcaatgaattttgtgtgagaga

SEQ ID NO: 496153 - DNA, 33 bp, Homo sapien
tccgagcgtgatcaacagagaagacggtgattt

SEQ ID NO: 496154 - DNA, 33 bp, Homo sapien
tccgagcgtgatcaacggagaagacggtgattt

SEQ ID NO: 496155 - DNA, 33 bp, Homo sapien
aattcaatccaatcaccctactcaacatttcta

SEQ ID NO: 496156 - DNA, 33 bp, Homo sapien
aattcaatccaatcactctactcaacatttcta

SEQ ID NO: 496157 - DNA, 33 bp, Homo sapien
aatgagattgggagtacgcttgattggtgggaa

SEQ ID NO: 496158 - DNA, 33 bp, Homo sapien
aatgagattgggagtatgcttgattggtgggaa

SEQ ID NO: 496159 - DNA, 33 bp, Homo sapien
caatttgtgtttcaagacctataaatactgctg

SEQ ID NO: 496160 - DNA, 33 bp, Homo sapien
caatttgtgtttcaaggcctataaatactgctg

SEQ ID NO: 496161 - DNA, 33 bp, Homo sapien
ctgatccacttcattaccaatgaccagagaaaa

SEQ ID NO: 496162 - DNA, 33 bp, Homo sapien
ctgatccacttcattatcaatgaccagagaaaa

SEQ ID NO: 496163 - DNA, 33 bp, Homo sapien
gatgagtaccaaccaacaagtgatatcagcaat

SEQ ID NO: 496164 - DNA, 33 bp, Homo sapien
gatgagtaccaaccaataagtgatatcagcaat

SEQ ID NO: 496165 - DNA, 33 bp, Homo sapien
tagactactggtcagcaaattttccatactatt

SEQ ID NO: 496166 - DNA, 33 bp, Homo sapien
tagactactggtcagcgaattttccatactatt

SEQ ID NO: 496167 - DNA, 33 bp, Homo sapien
gagagggaacagaatgaagagaccactaatggg

SEQ ID NO: 496168 - DNA, 33 bp, Homo sapien
gagagggaacagaatggagagaccactaatggg

SEQ ID NO: 496169 - DNA, 33 bp, Homo sapien
gtggtactggcagaaacgtgctaacaatgtgtc

SEQ ID NO: 496170 - DNA, 33 bp, Homo sapien
gtggtactggcagaaatgtgctaacaatgtgtc

SEQ ID NO: 496171 - DNA, 33 bp, Homo sapien
atggaataatataaaacgcgaccttgtgtgtct

SEQ ID NO: 496172 - DNA, 33 bp, Homo sapien
atggaataatataaaatgcgaccttgtgtgtct

SEQ ID NO: 496173 - DNA, 33 bp, Homo sapien
agtgaaaaacctcaaaattcagagttgaagccc

SEQ ID NO: 496174 - DNA, 33 bp, Homo sapien
agtgaaaaacctcaaagttcagagttgaagccc

SEQ ID NO: 496175 - DNA, 33 bp, Homo sapien
agtgcctaaaacactgaaattcatagagacaga

SEQ ID NO: 496176 - DNA, 33 bp, Homo sapien
agtgcctaaaacactgcaattcatagagacaga

SEQ ID NO: 496177 - DNA, 33 bp, Homo sapien
tgaaatgggagattagccaggattatccaggtg

SEQ ID NO: 496178 - DNA, 33 bp, Homo sapien
tgaaatgggagattagtcaggattatccaggtg

SEQ ID NO: 496179 - DNA, 33 bp, Homo sapien
ccactatctttcaaaactgtattccaacaagag

SEQ ID NO: 496180 - DNA, 33 bp, Homo sapien
ccactatctttcaaaattgtattccaacaagag

SEQ ID NO: 496181 - DNA, 33 bp, Homo sapien
tgggctcacgtactcacgctgcaaattggagaa

SEQ ID NO: 496182 - DNA, 33 bp, Homo sapien
tgggctcacgtactcatgctgcaaattggagaa

SEQ ID NO: 496183 - DNA, 33 bp, Homo sapien
ttctacgtgttatacaagatgtgttttccccaa

SEQ ID NO: 496184 - DNA, 33 bp, Homo sapien
ttctacgtgttatacaggatgtgttttccccaa

SEQ ID NO: 496185 - DNA, 33 bp, Homo sapien
aaaacatcttctttcactcttgattaaagatga

SEQ ID NO: 496186 - DNA, 33 bp, Homo sapien
aaaacatcttctttcattcttgattaaagatga

SEQ ID NO: 496187 - DNA, 33 bp, Homo sapien
ctagcatgcttacttggatttgcaatgaatatt

SEQ ID NO: 496188 - DNA, 33 bp, Homo sapien
ctagcatgcttacttgtatttgcaatgaatatt

SEQ ID NO: 496189 - DNA, 33 bp, Homo sapien
aggaggaaaattttcaatagtgcacatagtcaa

SEQ ID NO: 496190 - DNA, 33 bp, Homo sapien
aggaggaaaattttcagtagtgcacatagtcaa

SEQ ID NO: 496191 - DNA, 33 bp, Homo sapien
ctggtgaggaggcagacgtaaataaataaatta

SEQ ID NO: 496192 - DNA, 33 bp, Homo sapien
ctggtgaggaggcagatgtaaataaataaatta

SEQ ID NO: 496193 - DNA, 33 bp, Homo sapien
tgccagagtgagaggcaacacatgggtatggcc

SEQ ID NO: 496194 - DNA, 33 bp, Homo sapien
tgccagagtgagaggcgacacatgggtatggcc

SEQ ID NO: 496195 - DNA, 33 bp, Homo sapien
tctctccccacagaagacaccgacctggagtta

SEQ ID NO: 496196 - DNA, 33 bp, Homo sapien
tctctccccacagaaggcaccgacctggagtta

SEQ ID NO: 496197 - DNA, 33 bp, Homo sapien
acacaggtagctgccacctaaccctggctggga

SEQ ID NO: 496198 - DNA, 33 bp, Homo sapien
acacaggtagctgccatctaaccctggctggga

SEQ ID NO: 496199 - DNA, 33 bp, Homo sapien
catgatgtcacgggaccggatggggtgactgca

SEQ ID NO: 496200 - DNA, 33 bp, Homo sapien
catgatgtcacgggactggatggggtgactgca

SEQ ID NO: 496201 - DNA, 33 bp, Homo sapien
tttcagacttcactccaactgctgtagagagca

SEQ ID NO: 496202 - DNA, 33 bp, Homo sapien
tttcagacttcactccgactgctgtagagagca

SEQ ID NO: 496203 - DNA, 33 bp, Homo sapien
cgagatggagatgagacgatgttcagtggtgta

SEQ ID NO: 496204 - DNA, 33 bp, Homo sapien
cgagatggagatgagatgatgttcagtggtgta

SEQ ID NO: 496205 - DNA, 33 bp, Homo sapien
ggctgcttaggagccaacatccctggtgaagac

SEQ ID NO: 496206 - DNA, 33 bp, Homo sapien
ggctgcttaggagccagcatccctggtgaagac

SEQ ID NO: 496207 - DNA, 33 bp, Homo sapien
tctcaagacagaaatcagatttagacttaacct

SEQ ID NO: 496208 - DNA, 33 bp, Homo sapien
tctcaagacagaaatcggatttagacttaacct

SEQ ID NO: 496209 - DNA, 33 bp, Homo sapien
gacttgcatctaaagtaaagctttgctcctgag

SEQ ID NO: 496210 - DNA, 33 bp, Homo sapien
gacttgcatctaaagtgaagctttgctcctgag

SEQ ID NO: 496211 - DNA, 33 bp, Homo sapien
agtgctattacggaaaccagctcggaagcaact

SEQ ID NO: 496212 - DNA, 33 bp, Homo sapien
agtgctattacggaaatcagctcggaagcaact

SEQ ID NO: 496213 - DNA, 33 bp, Homo sapien
ttcattcagaaatctcacttccagaaatttatc

SEQ ID NO: 496214 - DNA, 33 bp, Homo sapien
ttcattcagaaatctcgcttccagaaatttatc

SEQ ID NO: 496215 - DNA, 33 bp, Homo sapien
ttaaatgaagcatcgcaaagtatactggggaca

SEQ ID NO: 496216 - DNA, 33 bp, Homo sapien
ttaaatgaagcatcgcgaagtatactggggaca

SEQ ID NO: 496217 - DNA, 33 bp, Homo sapien
ggaaacatgtccaagaaacgggtacatcctctc

SEQ ID NO: 496218 - DNA, 33 bp, Homo sapien
ggaaacatgtccaagagacgggtacatcctctc

SEQ ID NO: 496219 - DNA, 33 bp, Homo sapien
acccgccagggccaaaatggattgtctttgtgt

SEQ ID NO: 496220 - DNA, 33 bp, Homo sapien
acccgccagggccaaagtggattgtctttgtgt

SEQ ID NO: 496221 - DNA, 33 bp, Homo sapien
aggtagggaggaaggaacagtagcagaatctcc

SEQ ID NO: 496222 - DNA, 33 bp, Homo sapien
aggtagggaggaaggagcagtagcagaatctcc

SEQ ID NO: 496223 - DNA, 33 bp, Homo sapien
tttggagcctacagcactaggatgaggattaaa

SEQ ID NO: 496224 - DNA, 33 bp, Homo sapien
tttggagcctacagcattaggatgaggattaaa

SEQ ID NO: 496225 - DNA, 33 bp, Homo sapien
ccatccatgtgcccagaagaaacaaaagggtca

SEQ ID NO: 496226 - DNA, 33 bp, Homo sapien
ccatccatgtgcccagcagaaacaaaagggtca

SEQ ID NO: 496227 - DNA, 33 bp, Homo sapien
atgctggagaactgaactgctgtgtagagtaaa

SEQ ID NO: 496228 - DNA, 33 bp, Homo sapien
atgctggagaactgaattgctgtgtagagtaaa

SEQ ID NO: 496229 - DNA, 33 bp, Homo sapien
gccctgatgactctcaaataggtatctctagcc

SEQ ID NO: 496230 - DNA, 33 bp, Homo sapien
gccctgatgactctcatataggtatctctagcc

SEQ ID NO: 496231 - DNA, 33 bp, Homo sapien
tcacgtgcaaaccagacctaaatttttattcac

SEQ ID NO: 496232 - DNA, 33 bp, Homo sapien
tcacgtgcaaaccagatctaaatttttattcac

SEQ ID NO: 496233 - DNA, 33 bp, Homo sapien
catctgaaccacaaagcctggattggatttggc

SEQ ID NO: 496234 - DNA, 33 bp, Homo sapien
catctgaaccacaaaggctggattggatttggc

SEQ ID NO: 496235 - DNA, 33 bp, Homo sapien
tgggatctgatgaaaagctatttcttactgtga

SEQ ID NO: 496236 - DNA, 33 bp, Homo sapien
tgggatctgatgaaaatctatttcttactgtga

SEQ ID NO: 496237 - DNA, 33 bp, Homo sapien
cagaagttagataacacaagttgtctggactgg

SEQ ID NO: 496238 - DNA, 33 bp, Homo sapien
cagaagttagataacagaagttgtctggactgg

SEQ ID NO: 496239 - DNA, 33 bp, Homo sapien
ttctataaaagtcataccacgcaatttgtttta

SEQ ID NO: 496240 - DNA, 33 bp, Homo sapien
ttctataaaagtcatatcacgcaatttgtttta

SEQ ID NO: 496241 - DNA, 33 bp, Homo sapien
tcagaatgttcacagcagcattatttgcaatag

SEQ ID NO: 496242 - DNA, 33 bp, Homo sapien
tcagaatgttcacagcggcattatttgcaatag

SEQ ID NO: 496243 - DNA, 33 bp, Homo sapien
tacactgtgcctgccaaggtagaccaaaagatc

SEQ ID NO: 496244 - DNA, 33 bp, Homo sapien
tacactgtgcctgccagggtagaccaaaagatc

SEQ ID NO: 496245 - DNA, 33 bp, Homo sapien
tgtctctctagcttaacaaatgtgtgggttggg

SEQ ID NO: 496246 - DNA, 33 bp, Homo sapien
tgtctctctagcttaagaaatgtgtgggttggg

SEQ ID NO: 496247 - DNA, 33 bp, Homo sapien
atcaattaccaggaaaatcatagacaaggactt

SEQ ID NO: 496248 - DNA, 33 bp, Homo sapien
atcaattaccaggaaagtcatagacaaggactt

SEQ ID NO: 496249 - DNA, 33 bp, Homo sapien
tctacctccagagacactatcaaatttagccta

SEQ ID NO: 496250 - DNA, 33 bp, Homo sapien
tctacctccagagacattatcaaatttagccta

SEQ ID NO: 496251 - DNA, 33 bp, Homo sapien
gaggctgttactagataaacttggtaacctctg

SEQ ID NO: 496252 - DNA, 33 bp, Homo sapien
gaggctgttactagatgaacttggtaacctctg

SEQ ID NO: 496253 - DNA, 33 bp, Homo sapien
taagctgactcttgaaaagcaaaatataattgc

SEQ ID NO: 496254 - DNA, 33 bp, Homo sapien
taagctgactcttgaagagcaaaatataattgc

SEQ ID NO: 496255 - DNA, 33 bp, Homo sapien
taggagaagaaagacaatcggagcacatgaaac

SEQ ID NO: 496256 - DNA, 33 bp, Homo sapien
taggagaagaaagacattcggagcacatgaaac

SEQ ID NO: 496257 - DNA, 33 bp, Homo sapien
caacactggacagagccgagaggtagatgatca

SEQ ID NO: 496258 - DNA, 33 bp, Homo sapien
caacactggacagagctgagaggtagatgatca

SEQ ID NO: 496259 - DNA, 33 bp, Homo sapien
ctaggcctctcaccaacgactgagagcaaagag

SEQ ID NO: 496260 - DNA, 33 bp, Homo sapien
ctaggcctctcaccaatgactgagagcaaagag

SEQ ID NO: 496261 - DNA, 33 bp, Homo sapien
ggcctagcatgtttgaagcttgtattcagtgag

SEQ ID NO: 496262 - DNA, 33 bp, Homo sapien
ggcctagcatgtttgaggcttgtattcagtgag

SEQ ID NO: 496263 - DNA, 33 bp, Homo sapien
agtttccacgtctagaaaggtaaattataaaca

SEQ ID NO: 496264 - DNA, 33 bp, Homo sapien
agtttccacgtctagagaggtaaattataaaca

SEQ ID NO: 496265 - DNA, 33 bp, Homo sapien
tctccgggcattggcaagacgtctgtaaatgcc

SEQ ID NO: 496266 - DNA, 33 bp, Homo sapien
tctccgggcattggcaggacgtctgtaaatgcc

SEQ ID NO: 496267 - DNA, 33 bp, Homo sapien
ttattgtagaaaaataaaagaattcagaagaac

SEQ ID NO: 496268 - DNA, 33 bp, Homo sapien
ttattgtagaaaaatagaagaattcagaagaac

SEQ ID NO: 496269 - DNA, 33 bp, Homo sapien
tgggatattgtccaaccacaaaaacaaagtgaa

SEQ ID NO: 496270 - DNA, 33 bp, Homo sapien
tgggatattgtccaactacaaaaacaaagtgaa

SEQ ID NO: 496271 - DNA, 33 bp, Homo sapien
aattatagaaaaatgcacactaggtttagaaca

SEQ ID NO: 496272 - DNA, 33 bp, Homo sapien
aattatagaaaaatgcgcactaggtttagaaca

SEQ ID NO: 496273 - DNA, 33 bp, Homo sapien
agaaacctctaaatcaatacagccaaaaattga

SEQ ID NO: 496274 - DNA, 33 bp, Homo sapien
agaaacctctaaatcagtacagccaaaaattga

SEQ ID NO: 496275 - DNA, 33 bp, Homo sapien
ttttgcacttggtcaacgtatcctatccacagc

SEQ ID NO: 496276 - DNA, 33 bp, Homo sapien
ttttgcacttggtcaatgtatcctatccacagc

SEQ ID NO: 496277 - DNA, 33 bp, Homo sapien
aactttctttccctcaagataagcagatttctt

SEQ ID NO: 496278 - DNA, 33 bp, Homo sapien
aactttctttccctcaggataagcagatttctt

SEQ ID NO: 496279 - DNA, 33 bp, Homo sapien
tcttctaaaaattggaccttgacctacacttca

SEQ ID NO: 496280 - DNA, 33 bp, Homo sapien
tcttctaaaaattggatcttgacctacacttca

SEQ ID NO: 496281 - DNA, 33 bp, Homo sapien
tctccttctgagttaacaacaggcttcctcatg

SEQ ID NO: 496282 - DNA, 33 bp, Homo sapien
tctccttctgagttaataacaggcttcctcatg

SEQ ID NO: 496283 - DNA, 33 bp, Homo sapien
gtctctgcaaaagaaacaactgataaaggactt

SEQ ID NO: 496284 - DNA, 33 bp, Homo sapien
gtctctgcaaaagaaataactgataaaggactt

SEQ ID NO: 496285 - DNA, 33 bp, Homo sapien
gatgagatatcagaacaactgtattttcaagag

SEQ ID NO: 496286 - DNA, 33 bp, Homo sapien
gatgagatatcagaacgactgtattttcaagag

SEQ ID NO: 496287 - DNA, 33 bp, Homo sapien
aatggttcattgcctacatcacactgaaataaa

SEQ ID NO: 496288 - DNA, 33 bp, Homo sapien
aatggttcattgcctatatcacactgaaataaa

SEQ ID NO: 496289 - DNA, 33 bp, Homo sapien
gatgtctttaatttctaacctggttgccctggc

SEQ ID NO: 496290 - DNA, 33 bp, Homo sapien
gatgtctttaatttcttacctggttgccctggc

SEQ ID NO: 496291 - DNA, 33 bp, Homo sapien
aatataacaggacaaacagcacagcaagcaaaa

SEQ ID NO: 496292 - DNA, 33 bp, Homo sapien
aatataacaggacaaagagcacagcaagcaaaa

SEQ ID NO: 496293 - DNA, 33 bp, Homo sapien
ctcaataataatgtgactacatacagcttctgg

SEQ ID NO: 496294 - DNA, 33 bp, Homo sapien
ctcaataataatgtgattacatacagcttctgg

SEQ ID NO: 496295 - DNA, 33 bp, Homo sapien
atctaaataatgtctgcaatgcactagtatgaa

SEQ ID NO: 496296 - DNA, 33 bp, Homo sapien
atctaaataatgtctgtaatgcactagtatgaa

SEQ ID NO: 496297 - DNA, 33 bp, Homo sapien
ggggagagtgtccatacgttgagggtgatgagc

SEQ ID NO: 496298 - DNA, 33 bp, Homo sapien
ggggagagtgtccatatgttgagggtgatgagc

SEQ ID NO: 496299 - DNA, 33 bp, Homo sapien
tttaaggtaaactataaagtcaaggaagtatat

SEQ ID NO: 496300 - DNA, 33 bp, Homo sapien
tttaaggtaaactatacagtcaaggaagtatat

SEQ ID NO: 496301 - DNA, 33 bp, Homo sapien
tcttaatgactatacacgtgctgttggaggaag

SEQ ID NO: 496302 - DNA, 33 bp, Homo sapien
tcttaatgactatacatgtgctgttggaggaag

SEQ ID NO: 496303 - DNA, 33 bp, Homo sapien
accattaagttggggacataacatgaaacttag

SEQ ID NO: 496304 - DNA, 33 bp, Homo sapien
accattaagttggggatataacatgaaacttag

SEQ ID NO: 496305 - DNA, 33 bp, Homo sapien
tttcaaaggatacgcacgaacaaccaaatgaag

SEQ ID NO: 496306 - DNA, 33 bp, Homo sapien
tttcaaaggatacgcatgaacaaccaaatgaag

SEQ ID NO: 496307 - DNA, 33 bp, Homo sapien
gcaggaatgagctaagacacaatcataaaccct

SEQ ID NO: 496308 - DNA, 33 bp, Homo sapien
gcaggaatgagctaaggcacaatcataaaccct

SEQ ID NO: 496309 - DNA, 33 bp, Homo sapien
gccttcctccaggtcaagtagccggtcagtggc

SEQ ID NO: 496310 - DNA, 33 bp, Homo sapien
gccttcctccaggtcacgtagccggtcagtggc

SEQ ID NO: 496311 - DNA, 33 bp, Homo sapien
ttcattgagctacttcaatgtttagattaatgt

SEQ ID NO: 496312 - DNA, 33 bp, Homo sapien
ttcattgagctacttcgatgtttagattaatgt

SEQ ID NO: 496313 - DNA, 33 bp, Homo sapien
ttaattctgactgaaacatgaaggagttttatt

SEQ ID NO: 496314 - DNA, 33 bp, Homo sapien
ttaattctgactgaaatatgaaggagttttatt

SEQ ID NO: 496315 - DNA, 33 bp, Homo sapien
tatcagctttgaaaaactacagcctggaagtag

SEQ ID NO: 496316 - DNA, 33 bp, Homo sapien
tatcagctttgaaaaattacagcctggaagtag

SEQ ID NO: 496317 - DNA, 33 bp, Homo sapien
ccaagattgtgtacaacagaaagcctaacccat

SEQ ID NO: 496318 - DNA, 33 bp, Homo sapien
ccaagattgtgtacaagagaaagcctaacccat

SEQ ID NO: 496319 - DNA, 33 bp, Homo sapien
acaataaggagataagacgtgcataagaaatat

SEQ ID NO: 496320 - DNA, 33 bp, Homo sapien
acaataaggagataaggcgtgcataagaaatat

SEQ ID NO: 496321 - DNA, 33 bp, Homo sapien
aaattgtttatttgcaaggcatattagaaaaag

SEQ ID NO: 496322 - DNA, 33 bp, Homo sapien
aaattgtttatttgcatggcatattagaaaaag

SEQ ID NO: 496323 - DNA, 33 bp, Homo sapien
catcttcagagtgaaacgttgatctagcaaaaa

SEQ ID NO: 496324 - DNA, 33 bp, Homo sapien
catcttcagagtgaaaggttgatctagcaaaaa

SEQ ID NO: 496325 - DNA, 33 bp, Homo sapien
ctagttgtatggaatccaaagctaatccatatg

SEQ ID NO: 496326 - DNA, 33 bp, Homo sapien
ctagttgtatggaatctaaagctaatccatatg

SEQ ID NO: 496327 - DNA, 33 bp, Homo sapien; identical to SEQ ID NO: 496325

SEQ ID NO: 496328 - DNA, 33 bp, Homo sapien; identical to SEQ ID NO: 496326

SEQ ID NO: 496329 - DNA, 33 bp, Homo sapien
tcacatctgagtcccacgtgattgcttgtgggg

SEQ ID NO: 496330 - DNA, 33 bp, Homo sapien
tcacatctgagtcccatgtgattgcttgtgggg

SEQ ID NO: 496331 - DNA, 33 bp, Homo sapien
agggctttatagaaggcatcttattcaatcttc

SEQ ID NO: 496332 - DNA, 33 bp, Homo sapien
agggctttatagaaggtatcttattcaatcttc

SEQ ID NO: 496333 - DNA, 33 bp, Homo sapien
ttgtttgtatatttcagtcatggaagaggagat

SEQ ID NO: 496334 - DNA, 33 bp, Homo sapien
ttgtttgtatatttcattcatggaagaggagat

SEQ ID NO: 496335 - DNA, 33 bp, Homo sapien
tatgatccccttaaaacgtagcctagtcaggtt

SEQ ID NO: 496336 - DNA, 33 bp, Homo sapien
tatgatccccttaaaatgtagcctagtcaggtt

SEQ ID NO: 496337 - DNA, 33 bp, Homo sapien
tagaaaaccagtccaaatgatgcctgcaaaaga

SEQ ID NO: 496338 - DNA, 33 bp, Homo sapien
tagaaaaccagtccaagtgatgcctgcaaaaga

SEQ ID NO: 496339 - DNA, 33 bp, Homo sapien
ataggtaattcccgtaacttgagtgcatgatgc

SEQ ID NO: 496340 - DNA, 33 bp, Homo sapien
ataggtaattcccgtatcttgagtgcatgatgc

SEQ ID NO: 496341 - DNA, 33 bp, Homo sapien
cacacttttgatggaacactgaaatgggagatc

SEQ ID NO: 496342 - DNA, 33 bp, Homo sapien
cacacttttgatggaatactgaaatgggagatc

SEQ ID NO: 496343 - DNA, 33 bp, Homo sapien
tgcccagtgcacctccaaagaagggagactggg

SEQ ID NO: 496344 - DNA, 33 bp, Homo sapien
tgcccagtgcacctccgaagaagggagactggg

SEQ ID NO: 496345 - DNA, 33 bp, Homo sapien
gatgggattcaaacccagacattctttgcctca

SEQ ID NO: 496346 - DNA, 33 bp, Homo sapien
gatgggattcaaacccggacattctttgcctca

SEQ ID NO: 496347 - DNA, 33 bp, Homo sapien
cttcgcgtccgttgacaggacccaggttgggga

SEQ ID NO: 496348 - DNA, 33 bp, Homo sapien
cttcgcgtccgttgacgggacccaggttgggga

SEQ ID NO: 496349 - DNA, 33 bp, Homo sapien
tacatttccgctgctgcagatttctttggtttt

SEQ ID NO: 496350 - DNA, 33 bp, Homo sapien
tacatttccgctgctggagatttctttggtttt

SEQ ID NO: 496351 - DNA, 33 bp, Homo sapien
atatcagactgttcaacgaacttttgaatacac

SEQ ID NO: 496352 - DNA, 33 bp, Homo sapien
atatcagactgttcaatgaacttttgaatacac

SEQ ID NO: 496353 - DNA, 33 bp, Homo sapien
aaatgtgttgcatcaacggaccaagtcagtttt

SEQ ID NO: 496354 - DNA, 33 bp, Homo sapien
aaatgtgttgcatcaatggaccaagtcagtttt

SEQ ID NO: 496355 - DNA, 33 bp, Homo sapien
gagagttctactgaatcatctatcagtctctaa

SEQ ID NO: 496356 - DNA, 33 bp, Homo sapien
gagagttctactgaattatctatcagtctctaa

SEQ ID NO: 496357 - DNA, 33 bp, Homo sapien
gaaggatgaggacttacctttagaaagtttgtt

SEQ ID NO: 496358 - DNA, 33 bp, Homo sapien
gaaggatgaggacttatctttagaaagtttgtt

SEQ ID NO: 496359 - DNA, 33 bp, Homo sapien
tccctccttcctttcacagtcaagtttcttgaa

SEQ ID NO: 496360 - DNA, 33 bp, Homo sapien
tccctccttcctttcatagtcaagtttcttgaa

SEQ ID NO: 496361 - DNA, 33 bp, Homo sapien
tgacttatgttcatctaagaggaggtgtgatct

SEQ ID NO: 496362 - DNA, 33 bp, Homo sapien
tgacttatgttcatcttagaggaggtgtgatct

SEQ ID NO: 496363 - DNA, 33 bp, Homo sapien
cttaatttacctatctgaagtggcttctctttt

SEQ ID NO: 496364 - DNA, 33 bp, Homo sapien
cttaatttacctatcttaagtggcttctctttt

SEQ ID NO: 496365 - DNA, 33 bp, Homo sapien
tcaacaccaaggaacaactgatcaataaggtta

SEQ ID NO: 496366 - DNA, 33 bp, Homo sapien
tcaacaccaaggaacagctgatcaataaggtta

SEQ ID NO: 496367 - DNA, 33 bp, Homo sapien
gacaaaaatcaccaaacgcctcagggctctcag

SEQ ID NO: 496368 - DNA, 33 bp, Homo sapien
gacaaaaatcaccaaatgcctcagggctctcag

SEQ ID NO: 496369 - DNA, 33 bp, Homo sapien
taatctaaccaatgcaatgaagcaggataaaga

SEQ ID NO: 496370 - DNA, 33 bp, Homo sapien
taatctaaccaatgcagtgaagcaggataaaga

SEQ ID NO: 496371 - DNA, 33 bp, Homo sapien
atggaaagacaggcacactatcggtattctatg

SEQ ID NO: 496372 - DNA, 33 bp, Homo sapien
atggaaagacaggcactctatcggtattctatg

SEQ ID NO: 496373 - DNA, 33 bp, Homo sapien
catggttcatctggacacaaggagagagagcca

SEQ ID NO: 496374 - DNA, 33 bp, Homo sapien
catggttcatctggacccaaggagagagagcca

SEQ ID NO: 496375 - DNA, 33 bp, Homo sapien
tgcccactcaaggaaacaactcaagatgtgaac

SEQ ID NO: 496376 - DNA, 33 bp, Homo sapien
tgcccactcaaggaaataactcaagatgtgaac

SEQ ID NO: 496377 - DNA, 33 bp, Homo sapien
cgagcctgggaccaataaaagctgaagagaaat

SEQ ID NO: 496378 - DNA, 33 bp, Homo sapien
cgagcctgggaccaatgaaagctgaagagaaat

SEQ ID NO: 496379 - DNA, 33 bp, Homo sapien
atgagatttcaaacaacagttggcgacaggttt

SEQ ID NO: 496380 - DNA, 33 bp, Homo sapien
atgagatttcaaacaatagttggcgacaggttt

SEQ ID NO: 496381 - DNA, 33 bp, Homo sapien
ctagttctcttctcccccaaatcccaaggtgct

SEQ ID NO: 496382 - DNA, 33 bp, Homo sapien
ctagttctcttctcccgcaaatcccaaggtgct

SEQ ID NO: 496383 - DNA, 33 bp, Homo sapien
gcaggaccttttgctccagaagactgtgatgcc

SEQ ID NO: 496384 - DNA, 33 bp, Homo sapien
gcaggaccttttgctctagaagactgtgatgcc

SEQ ID NO: 496385 - DNA, 33 bp, Homo sapien
atgtcatctgacagtcacccattgcctgcaggt

SEQ ID NO: 496386 - DNA, 33 bp, Homo sapien
atgtcatctgacagtcccccattgcctgcaggt

SEQ ID NO: 496387 - DNA, 33 bp, Homo sapien
cacctaccttacagcactattgcatggattaaa

SEQ ID NO: 496388 - DNA, 33 bp, Homo sapien
cacctaccttacagcattattgcatggattaaa

SEQ ID NO: 496389 - DNA, 33 bp, Homo sapien
tgtttctcaaagtacaatacaaaacatcatatt

SEQ ID NO: 496390 - DNA, 33 bp, Homo sapien
tgtttctcaaagtacagtacaaaacatcatatt

SEQ ID NO: 496391 - DNA, 33 bp, Homo sapien
tggaggtgtttggcttcaaagagagaagacttg

SEQ ID NO: 496392 - DNA, 33 bp, Homo sapien
tggaggtgtttggcttgaaagagagaagacttg

SEQ ID NO: 496393 - DNA, 33 bp, Homo sapien
aagagctcacagtgcaaaaaggaagagggtgat

SEQ ID NO: 496394 - DNA, 33 bp, Homo sapien
aagagctcacagtgcagaaaggaagagggtgat

SEQ ID NO: 496395 - DNA, 33 bp, Homo sapien
tgtgtggcctgaatcgaacagtttagatgagtg

SEQ ID NO: 496396 - DNA, 33 bp, Homo sapien
tgtgtggcctgaatcgtacagtttagatgagtg

SEQ ID NO: 496397 - DNA, 33 bp, Homo sapien
ttgtccggggtccccaatcgtaagccatggggc

SEQ ID NO: 496398 - DNA, 33 bp, Homo sapien
ttgtccggggtccccagtcgtaagccatggggc

SEQ ID NO: 496399 - DNA, 33 bp, Homo sapien
gaatgccatgtaatccaggaagctccttagctg

SEQ ID NO: 496400 - DNA, 33 bp, Homo sapien
gaatgccatgtaatccgggaagctccttagctg

SEQ ID NO: 496401 - DNA, 33 bp, Homo sapien
aacctggaaattcagactatagcaatgactttt

SEQ ID NO: 496402 - DNA, 33 bp, Homo sapien
aacctggaaattcagattatagcaatgactttt

SEQ ID NO: 496403 - DNA, 33 bp, Homo sapien
agcaaaatactgtctcaaaaaaattacataaaa

SEQ ID NO: 496404 - DNA, 33 bp, Homo sapien
agcaaaatactgtctcgaaaaaattacataaaa

SEQ ID NO: 496405 - DNA, 33 bp, Homo sapien
agcctgtccccgaagcacttgaccaggagaaac

SEQ ID NO: 496406 - DNA, 33 bp, Homo sapien
agcctgtccccgaagcgcttgaccaggagaaac

SEQ ID NO: 496407 - DNA, 33 bp, Homo sapien
aaatgtgtataaagaaaacgtggagactacaga

SEQ ID NO: 496408 - DNA, 33 bp, Homo sapien
aaatgtgtataaagaagacgtggagactacaga

SEQ ID NO: 496409 - DNA, 33 bp, Homo sapien
cactccatcagggcatcataaaaccaccctgtc

SEQ ID NO: 496410 - DNA, 33 bp, Homo sapien
cactccatcagggcattataaaaccaccctgtc

SEQ ID NO: 496411 - DNA, 33 bp, Homo sapien
gaaacagatctctgccagatttgagtcaagata

SEQ ID NO: 496412 - DNA, 33 bp, Homo sapien
gaaacagatctctgccggatttgagtcaagata

SEQ ID NO: 496413 - DNA, 33 bp, Homo sapien
tgagcagggctaaaaaagaagatgaaggggtct

SEQ ID NO: 496414 - DNA, 33 bp, Homo sapien
tgagcagggctaaaaaggaagatgaaggggtct

SEQ ID NO: 496415 - DNA, 33 bp, Homo sapien
ttaacacaaagcgtctaaccttccacctctagg

SEQ ID NO: 496416 - DNA, 33 bp, Homo sapien
ttaacacaaagcgtctgaccttccacctctagg

SEQ ID NO: 496417 - DNA, 33 bp, Homo sapien
cacacagagagacagacaacagtaccaggggtc

SEQ ID NO: 496418 - DNA, 33 bp, Homo sapien
cacacagagagacagataacagtaccaggggtc

SEQ ID NO: 496419 - DNA, 33 bp, Homo sapien
actgctagttattacacagaggaaagtgtgcta

SEQ ID NO: 496420 - DNA, 33 bp, Homo sapien
actgctagttattacatagaggaaagtgtgcta

SEQ ID NO: 496421 - DNA, 33 bp, Homo sapien
ataagtcaatggaagtaaaaagaggccttaaaa

SEQ ID NO: 496422 - DNA, 33 bp, Homo sapien
ataagtcaatggaagtgaaaagaggccttaaaa

SEQ ID NO: 496423 - DNA, 33 bp, Homo sapien
aatgcgctctgctctggaaggaggcatctggaa

SEQ ID NO: 496424 - DNA, 33 bp, Homo sapien
aatgcgctctgctctgtaaggaggcatctggaa

SEQ ID NO: 496425 - DNA, 33 bp, Homo sapien
acccaaataagatgaaacccttgtactaatgtg

SEQ ID NO: 496426 - DNA, 33 bp, Homo sapien
acccaaataagatgaagcccttgtactaatgtg

SEQ ID NO: 496427 - DNA, 33 bp, Homo sapien
ccacctctgcagacagcaactccaggattatgt

SEQ ID NO: 496428 - DNA, 33 bp, Homo sapien
ccacctctgcagacaggaactccaggattatgt

SEQ ID NO: 496429 - DNA, 33 bp, Homo sapien
aggaaaatacttaggtaaaaacagcagaaacaa

SEQ ID NO: 496430 - DNA, 33 bp, Homo sapien
aggaaaatacttaggtgaaaacagcagaaacaa

SEQ ID NO: 496431 - DNA, 33 bp, Homo sapien
cccacctcttcacatgcatccttctgtaattct

SEQ ID NO: 496432 - DNA, 33 bp, Homo sapien
cccacctcttcacatgtatccttctgtaattct

SEQ ID NO: 496433 - DNA, 33 bp, Homo sapien
tagaattgttgaagatcaggtgagatgcaaggt

SEQ ID NO: 496434 - DNA, 33 bp, Homo sapien
tagaattgttgaagattaggtgagatgcaaggt

SEQ ID NO: 496435 - DNA, 33 bp, Homo sapien
cctttatgagcctcaaagtagttaaaataatgt

SEQ ID NO: 496436 - DNA, 33 bp, Homo sapien
cctttatgagcctcaacgtagttaaaataatgt

SEQ ID NO: 496437 - DNA, 33 bp, Homo sapien
gtggggccagatcccaagtgagtataatatgga

SEQ ID NO: 496438 - DNA, 33 bp, Homo sapien
gtggggccagatcccaggtgagtataatatgga

SEQ ID NO: 496439 - DNA, 33 bp, Homo sapien
ttactttgaagggtgccactaagagtctcctgt

SEQ ID NO: 496440 - DNA, 33 bp, Homo sapien
ttactttgaagggtgctactaagagtctcctgt

SEQ ID NO: 496441 - DNA, 33 bp, Homo sapien
ctggcttcttccattgaacatagtgttttcagt

SEQ ID NO: 496442 - DNA, 33 bp, Homo sapien
ctggcttcttccattgcacatagtgttttcagt

SEQ ID NO: 496443 - DNA, 33 bp, Homo sapien
aggggtttttatcaaacaaccacatcatatcgc

SEQ ID NO: 496444 - DNA, 33 bp, Homo sapien
aggggtttttatcaaagaaccacatcatatcgc

SEQ ID NO: 496445 - DNA, 33 bp, Homo sapien
gcccactactatatacaacttgtcattttttaa

SEQ ID NO: 496446 - DNA, 33 bp, Homo sapien
gcccactactatatacgacttgtcattttttaa

SEQ ID NO: 496447 - DNA, 33 bp, Homo sapien
cctgtggggccctgcgacaaagttaaaatgtgt

SEQ ID NO: 496448 - DNA, 33 bp, Homo sapien
cctgtggggccctgcggcaaagttaaaatgtgt

SEQ ID NO: 496449 - DNA, 33 bp, Homo sapien
gaaacagaactacagacgtgagaagcattaata

SEQ ID NO: 496450 - DNA, 33 bp, Homo sapien
gaaacagaactacagatgtgagaagcattaata

SEQ ID NO: 496451 - DNA, 33 bp, Homo sapien
cccttcctgggaactccaaaagaaagtttgctc

SEQ ID NO: 496452 - DNA, 33 bp, Homo sapien
cccttcctgggaactcgaaaagaaagtttgctc

SEQ ID NO: 496453 - DNA, 33 bp, Homo sapien
gagggagacttccctgaatgcctttttgtacct

SEQ ID NO: 496454 - DNA, 33 bp, Homo sapien
gagggagacttccctgtatgcctttttgtacct

SEQ ID NO: 496455 - DNA, 33 bp, Homo sapien
gggccctcaactctgcagacaggcagaaatgtc

SEQ ID NO: 496456 - DNA, 33 bp, Homo sapien
gggccctcaactctgcggacaggcagaaatgtc

SEQ ID NO: 496457 - DNA, 33 bp, Homo sapien
taggtagccacggtgagcactgagttgcctttt

SEQ ID NO: 496458 - DNA, 33 bp, Homo sapien
taggtagccacggtgatcactgagttgcctttt

SEQ ID NO: 496459 - DNA, 33 bp, Homo sapien
tatctaaacacagacactgctaaaagatacatg

SEQ ID NO: 496460 - DNA, 33 bp, Homo sapien
tatctaaacacagacagtgctaaaagatacatg

SEQ ID NO: 496461 - DNA, 33 bp, Homo sapien
ctcgtataatgctaccaatgtttactgttattg

SEQ ID NO: 496462 - DNA, 33 bp, Homo sapien
ctcgtataatgctacctatgtttactgttattg

SEQ ID NO: 496463 - DNA, 33 bp, Homo sapien
agaacctgaagaaggaatatctgtaggttgttt

SEQ ID NO: 496464 - DNA, 33 bp, Homo sapien
agaacctgaagaaggagtatctgtaggttgttt

SEQ ID NO: 496465 - DNA, 33 bp, Homo sapien
tagcttctaagctgagaagtttggccttcgctc

SEQ ID NO: 496466 - DNA, 33 bp, Homo sapien
tagcttctaagctgaggagtttggccttcgctc

SEQ ID NO: 496467 - DNA, 33 bp, Homo sapien
aactcaggcaaattaaaaactgttcgtggactc

SEQ ID NO: 496468 - DNA, 33 bp, Homo sapien
aactcaggcaaattaagaactgttcgtggactc

SEQ ID NO: 496469 - DNA, 33 bp, Homo sapien
aaagtgagaagagtcaaaaagattgatttctat

SEQ ID NO: 496470 - DNA, 33 bp, Homo sapien
aaagtgagaagagtcagaaagattgatttctat

SEQ ID NO: 496471 - DNA, 33 bp, Homo sapien
taatattgttttcaaccgtggagagaccccaat

SEQ ID NO: 496472 - DNA, 33 bp, Homo sapien
taatattgttttcaactgtggagagaccccaat

SEQ ID NO: 496473 - DNA, 33 bp, Homo sapien
tagtgttccaggattacgaatgtatttttggcc

SEQ ID NO: 496474 - DNA, 33 bp, Homo sapien
tagtgttccaggattaggaatgtatttttggcc

SEQ ID NO: 496475 - DNA, 33 bp, Homo sapien
ctgtcctacagtcttacatcacaacaggttgtg

SEQ ID NO: 496476 - DNA, 33 bp, Homo sapien
ctgtcctacagtcttatatcacaacaggttgtg

SEQ ID NO: 496477 - DNA, 33 bp, Homo sapien
ggtcatagtaggcattaaatcaacatggttggt

SEQ ID NO: 496478 - DNA, 33 bp, Homo sapien
ggtcatagtaggcatttaatcaacatggttggt

SEQ ID NO: 496479 - DNA, 33 bp, Homo sapien; identical to SEQ ID NO: 496477

SEQ ID NO: 496480 - DNA, 33 bp, Homo sapien; identical to SEQ ID NO: 496478

SEQ ID NO: 496481 - DNA, 33 bp, Homo sapien
ggcttatgggagcttcaagacggctccaaagac

SEQ ID NO: 496482 - DNA, 33 bp, Homo sapien
ggcttatgggagcttcgagacggctccaaagac

SEQ ID NO: 496483 - DNA, 33 bp, Homo sapien
tgtctgtaaaactaagaaggtaatttgctgcaa

SEQ ID NO: 496484 - DNA, 33 bp, Homo sapien
tgtctgtaaaactaaggaggtaatttgctgcaa

SEQ ID NO: 496485 - DNA, 33 bp, Homo sapien
tttagaaggatggtaagctgttgccatgacaac

SEQ ID NO: 496486 - DNA, 33 bp, Homo sapien
tttagaaggatggtaatctgttgccatgacaac

SEQ ID NO: 496487 - DNA, 33 bp, Homo sapien
tggggacaggtttcaacggctctcacctggtgg

SEQ ID NO: 496488 - DNA, 33 bp, Homo sapien
tggggacaggtttcaatggctctcacctggtgg

SEQ ID NO: 496489 - DNA, 33 bp, Homo sapien
caacagtaacaaaatcaatcaatatttaagctc

SEQ ID NO: 496490 - DNA, 33 bp, Homo sapien
caacagtaacaaaatccatcaatatttaagctc

SEQ ID NO: 496491 - DNA, 33 bp, Homo sapien
cgtggagtggtgtagactcgggccagcaccagg

SEQ ID NO: 496492 - DNA, 33 bp, Homo sapien
cgtggagtggtgtagattcgggccagcaccagg

SEQ ID NO: 496493 - DNA, 33 bp, Homo sapien
tataaaatcagagaaactaaagcatagcatgac

SEQ ID NO: 496494 - DNA, 33 bp, Homo sapien
tataaaatcagagaaattaaagcatagcatgac

SEQ ID NO: 496495 - DNA, 33 bp, Homo sapien
tttaaatatataaaaaacatgcttagctagctg

SEQ ID NO: 496496 - DNA, 33 bp, Homo sapien
tttaaatatataaaaaccatgcttagctagctg

SEQ ID NO: 496497 - DNA, 33 bp, Homo sapien
gcgcatggagccagtacaagaaggacaaggatg

SEQ ID NO: 496498 - DNA, 33 bp, Homo sapien
gcgcatggagccagtagaagaaggacaaggatg

SEQ ID NO: 496499 - DNA, 33 bp, Homo sapien
ccttgaaccacatttaacttacagaaccctgtg

SEQ ID NO: 496500 - DNA, 33 bp, Homo sapien
ccttgaaccacatttagcttacagaaccctgtg

SEQ ID NO: 496501 - DNA, 33 bp, Homo sapien
gtctctgtggaaggaacaaaagtcagctacctg

SEQ ID NO: 496502 - DNA, 33 bp, Homo sapien
gtctctgtggaaggaataaaagtcagctacctg

SEQ ID NO: 496503 - DNA, 33 bp, Homo sapien
aaaataaagtcttgtggacccatgaaaatgcat

SEQ ID NO: 496504 - DNA, 33 bp, Homo sapien
aaaataaagtcttgtgtacccatgaaaatgcat

SEQ ID NO: 496505 - DNA, 33 bp, Homo sapien
gtctgccatgatcttaccaacgtcctaagattt

SEQ ID NO: 496506 - DNA, 33 bp, Homo sapien
gtctgccatgatcttatcaacgtcctaagattt

SEQ ID NO: 496507 - DNA, 33 bp, Homo sapien
attattgagatcagtgaattaatatctaccatg

SEQ ID NO: 496508 - DNA, 33 bp, Homo sapien
attattgagatcagtggattaatatctaccatg

SEQ ID NO: 496509 - DNA, 33 bp, Homo sapien
cactctaagggcttagcatatttgggtcttcca

SEQ ID NO: 496510 - DNA, 33 bp, Homo sapien
cactctaagggcttagtatatttgggtcttcca

SEQ ID NO: 496511 - DNA, 33 bp, Homo sapien
agagagaaaaggggtaaccatatcttctctcaa

SEQ ID NO: 496512 - DNA, 33 bp, Homo sapien
agagagaaaaggggtagccatatcttctctcaa

SEQ ID NO: 496513 - DNA, 33 bp, Homo sapien
cagagagcaggcaagacgggagaacaggacttg

SEQ ID NO: 496514 - DNA, 33 bp, Homo sapien
cagagagcaggcaagaggggagaacaggacttg

SEQ ID NO: 496515 - DNA, 33 bp, Homo sapien
ttactttctgtttcacaatacctagttcagagt

SEQ ID NO: 496516 - DNA, 33 bp, Homo sapien
ttactttctgtttcacgatacctagttcagagt

SEQ ID NO: 496517 - DNA, 33 bp, Homo sapien
gctggctgttatcatcagagcattgttcacagt

SEQ ID NO: 496518 - DNA, 33 bp, Homo sapien
gctggctgttatcatccgagcattgttcacagt

SEQ ID NO: 496519 - DNA, 33 bp, Homo sapien
aagcttttctttaacacatggggctggtaggta

SEQ ID NO: 496520 - DNA, 33 bp, Homo sapien
aagcttttctttaacagatggggctggtaggta

SEQ ID NO: 496521 - DNA, 33 bp, Homo sapien
tacagcttctactttggaatgtggttctaggat

SEQ ID NO: 496522 - DNA, 33 bp, Homo sapien
tacagcttctactttgtaatgtggttctaggat

SEQ ID NO: 496523 - DNA, 33 bp, Homo sapien
taactaaattagctaaagagatcaaagaaggag

SEQ ID NO: 496524 - DNA, 33 bp, Homo sapien
taactaaattagctaaggagatcaaagaaggag

SEQ ID NO: 496525 - DNA, 33 bp, Homo sapien
gcagactctagcctcacagtgcccttctctggt

SEQ ID NO: 496526 - DNA, 33 bp, Homo sapien
gcagactctagcctcatagtgcccttctctggt

SEQ ID NO: 496527 - DNA, 33 bp, Homo sapien
aatgaaagggtagtggaaccggtggaatcaagg

SEQ ID NO: 496528 - DNA, 33 bp, Homo sapien
aatgaaagggtagtgggaccggtggaatcaagg

SEQ ID NO: 496529 - DNA, 33 bp, Homo sapien
tgcctttctttagcccaaactatggtgtggtgt

SEQ ID NO: 496530 - DNA, 33 bp, Homo sapien
tgcctttctttagccccaactatggtgtggtgt

SEQ ID NO: 496531 - DNA, 33 bp, Homo sapien
tgtcagagtctctggcaatgggtgctctaacac

SEQ ID NO: 496532 - DNA, 33 bp, Homo sapien
tgtcagagtctctggcgatgggtgctctaacac

SEQ ID NO: 496533 - DNA, 33 bp, Homo sapien
gaaagcaagtaacaaacaacaaagcagctctta

SEQ ID NO: 496534 - DNA, 33 bp, Homo sapien
gaaagcaagtaacaaataacaaagcagctctta

SEQ ID NO: 496535 - DNA, 33 bp, Homo sapien
gggcccagacctctaaaagtcaagaagaaaagc

SEQ ID NO: 496536 - DNA, 33 bp, Homo sapien
gggcccagacctctaagagtcaagaagaaaagc

SEQ ID NO: 496537 - DNA, 33 bp, Homo sapien
tatccatctcagtatccaagcactcggcgtagg

SEQ ID NO: 496538 - DNA, 33 bp, Homo sapien
tatccatctcagtatctaagcactcggcgtagg

SEQ ID NO: 496539 - DNA, 33 bp, Homo sapien
cctttcatgatgctgacaaacattttggtcttt

SEQ ID NO: 496540 - DNA, 33 bp, Homo sapien
cctttcatgatgctgagaaacattttggtcttt

SEQ ID NO: 496541 - DNA, 33 bp, Homo sapien
agctaggtgctaaggaaataacggtgctaggtt

SEQ ID NO: 496542 - DNA, 33 bp, Homo sapien
agctaggtgctaaggacataacggtgctaggtt

SEQ ID NO: 496543 - DNA, 33 bp, Homo sapien
ctgaatgattcttctaccagccttctaatactg

SEQ ID NO: 496544 - DNA, 33 bp, Homo sapien
ctgaatgattcttctatcagccttctaatactg

SEQ ID NO: 496545 - DNA, 33 bp, Homo sapien
acacactttttgtgtcacacatcagggaagccc

SEQ ID NO: 496546 - DNA, 33 bp, Homo sapien
acacactttttgtgtcgcacatcagggaagccc

SEQ ID NO: 496547 - DNA, 33 bp, Homo sapien
ctactgaccagagtagaaaggaatggcaaaaaa

SEQ ID NO: 496548 - DNA, 33 bp, Homo sapien
ctactgaccagagtaggaaggaatggcaaaaaa

SEQ ID NO: 496549 - DNA, 33 bp, Homo sapien
agtgtaaagcggaagtcaccaagttcactggtg

SEQ ID NO: 496550 - DNA, 33 bp, Homo sapien
agtgtaaagcggaagttaccaagttcactggtg

SEQ ID NO: 496551 - DNA, 33 bp, Homo sapien
tatccagccagataacgctgagacctccatccc

SEQ ID NO: 496552 - DNA, 33 bp, Homo sapien
tatccagccagataactctgagacctccatccc

SEQ ID NO: 496553 - DNA, 33 bp, Homo sapien
actaaccactaagatcccttcctctgtctctct

SEQ ID NO: 496554 - DNA, 33 bp, Homo sapien
actaaccactaagatctcttcctctgtctctct

SEQ ID NO: 496555 - DNA, 33 bp, Homo sapien
gcttatgggttaggagaaggtaatttccagtcc

SEQ ID NO: 496556 - DNA, 33 bp, Homo sapien
gcttatgggttaggagtaggtaatttccagtcc

SEQ ID NO: 496557 - DNA, 33 bp, Homo sapien
agcagcgaacttcactcaggtggatagcaccca

SEQ ID NO: 496558 - DNA, 33 bp, Homo sapien
agcagcgaacttcactgaggtggatagcaccca

SEQ ID NO: 496559 - DNA, 33 bp, Homo sapien
aaaaacaaccattacgccattgctatgcaaggt

SEQ ID NO: 496560 - DNA, 33 bp, Homo sapien
aaaaacaaccattacgtcattgctatgcaaggt

SEQ ID NO: 496561 - DNA, 33 bp, Homo sapien
tgatattgatgattcaagcaggaagtccctccc

SEQ ID NO: 496562 - DNA, 33 bp, Homo sapien
tgatattgatgattcatgcaggaagtccctccc

SEQ ID NO: 496563 - DNA, 33 bp, Homo sapien
ctcccaggtggcttcaatacattcttacagtat

SEQ ID NO: 496564 - DNA, 33 bp, Homo sapien
ctcccaggtggcttcagtacattcttacagtat

SEQ ID NO: 496565 - DNA, 33 bp, Homo sapien
aagagataattacagtcaaagactccttagtga

SEQ ID NO: 496566 - DNA, 33 bp, Homo sapien
aagagataattacagtgaaagactccttagtga

SEQ ID NO: 496567 - DNA, 33 bp, Homo sapien
gttctgtggctaggaactccagagatagatggt

SEQ ID NO: 496568 - DNA, 33 bp, Homo sapien
gttctgtggctaggaagtccagagatagatggt

SEQ ID NO: 496569 - DNA, 33 bp, Homo sapien
ttttaaaataataatgacagcataatctttatt

SEQ ID NO: 496570 - DNA, 33 bp, Homo sapien
ttttaaaataataatgccagcataatctttatt

SEQ ID NO: 496571 - DNA, 33 bp, Homo sapien
aactttctgatcctgcaaagctaaagaaccagg

SEQ ID NO: 496572 - DNA, 33 bp, Homo sapien
aactttctgatcctgcgaagctaaagaaccagg

SEQ ID NO: 496573 - DNA, 33 bp, Homo sapien
cgaaactgtcttaactcacacttactcatgtac

SEQ ID NO: 496574 - DNA, 33 bp, Homo sapien
cgaaactgtcttaacttacacttactcatgtac

SEQ ID NO: 496575 - DNA, 33 bp, Homo sapien
atgcatatatccttagaagaagtaacattgacc

SEQ ID NO: 496576 - DNA, 33 bp, Homo sapien
atgcatatatccttaggagaagtaacattgacc

SEQ ID NO: 496577 - DNA, 33 bp, Homo sapien
ttcatgcatattttcacgtctgtacttcatcgg

SEQ ID NO: 496578 - DNA, 33 bp, Homo sapien
ttcatgcatattttcatgtctgtacttcatcgg

SEQ ID NO: 496579 - DNA, 33 bp, Homo sapien; identical to SEQ ID NO: 496577

SEQ ID NO: 496580 - DNA, 33 bp, Homo sapien; identical to SEQ ID NO: 496578

SEQ ID NO: 496581 - DNA, 33 bp, Homo sapien
ctgggcaaactgcactaactctggcctctgctt

SEQ ID NO: 496582 - DNA, 33 bp, Homo sapien
ctgggcaaactgcactgactctggcctctgctt

SEQ ID NO: 496583 - DNA, 33 bp, Homo sapien
gcaaaagataaaaaaccgtaccaggcaggagaa

SEQ ID NO: 496584 - DNA, 33 bp, Homo sapien
gcaaaagataaaaaactgtaccaggcaggagaa

SEQ ID NO: 496585 - DNA, 33 bp, Homo sapien
gacaccaaaaccatacaataaaaacacaggatg

SEQ ID NO: 496586 - DNA, 33 bp, Homo sapien
gacaccaaaaccatacgataaaaacacaggatg

SEQ ID NO: 496587 - DNA, 33 bp, Homo sapien
tcatttgccatatcaaattccatgcatctttct

SEQ ID NO: 496588 - DNA, 33 bp, Homo sapien
tcatttgccatatcaagttccatgcatctttct

SEQ ID NO: 496589 - DNA, 33 bp, Homo sapien
aacaacagaaggggaacagtcataggatatacg

SEQ ID NO: 496590 - DNA, 33 bp, Homo sapien
aacaacagaaggggaatagtcataggatatacg

SEQ ID NO: 496591 - DNA, 33 bp, Homo sapien
cattgtcagctcttacaaaacgtcaagacctct

SEQ ID NO: 496592 - DNA, 33 bp, Homo sapien
cattgtcagctcttaccaaacgtcaagacctct

SEQ ID NO: 496593 - DNA, 33 bp, Homo sapien
gtgatgaacctacctacagatagagcagagtag

SEQ ID NO: 496594 - DNA, 33 bp, Homo sapien
gtgatgaacctacctatagatagagcagagtag

SEQ ID NO: 496595 - DNA, 33 bp, Homo sapien
ttttccaaaccttgcacgttatcaattatcagg

SEQ ID NO: 496596 - DNA, 33 bp, Homo sapien
ttttccaaaccttgcatgttatcaattatcagg

SEQ ID NO: 496597 - DNA, 33 bp, Homo sapien
ttggttatttgatttccaactccaaaacgtttt

SEQ ID NO: 496598 - DNA, 33 bp, Homo sapien
ttggttatttgatttctaactccaaaacgtttt

SEQ ID NO: 496599 - DNA, 33 bp, Homo sapien
ccacgttggttcctaaaatcatccctgtgttag

SEQ ID NO: 496600 - DNA, 33 bp, Homo sapien
ccacgttggttcctaagatcatccctgtgttag

SEQ ID NO: 496601 - DNA, 33 bp, Homo sapien
gaactggttgaataaacaaactatgacacaacc

SEQ ID NO: 496602 - DNA, 33 bp, Homo sapien
gaactggttgaataaataaactatgacacaacc

SEQ ID NO: 496603 - DNA, 33 bp, Homo sapien
acctgattggcatcaaaatgaagatagcaacac

SEQ ID NO: 496604 - DNA, 33 bp, Homo sapien
acctgattggcatcaagatgaagatagcaacac

SEQ ID NO: 496605 - DNA, 33 bp, Homo sapien
ttctttcatctcttgaatacatacttgggggca

SEQ ID NO: 496606 - DNA, 33 bp, Homo sapien
ttctttcatctcttgagtacatacttgggggca

SEQ ID NO: 496607 - DNA, 33 bp, Homo sapien
caaatccatatccactaagaggttccttacaaa

SEQ ID NO: 496608 - DNA, 33 bp, Homo sapien
caaatccatatccactgagaggttccttacaaa

SEQ ID NO: 496609 - DNA, 33 bp, Homo sapien
cgtggtgttcttcccactctccgcatatcttcc

SEQ ID NO: 496610 - DNA, 33 bp, Homo sapien
cgtggtgttcttcccattctccgcatatcttcc

SEQ ID NO: 496611 - DNA, 33 bp, Homo sapien
ctctgccagtgaaccagtgatcacctcaatagg

SEQ ID NO: 496612 - DNA, 33 bp, Homo sapien
ctctgccagtgaaccattgatcacctcaatagg

SEQ ID NO: 496613 - DNA, 33 bp, Homo sapien
agcaattttagctgtaccataaacatgaactga

SEQ ID NO: 496614 - DNA, 33 bp, Homo sapien
agcaattttagctgtatcataaacatgaactga

SEQ ID NO: 496615 - DNA, 33 bp, Homo sapien
tcaagctcaggctttgaactcagtaggaaccaa

SEQ ID NO: 496616 - DNA, 33 bp, Homo sapien
tcaagctcaggctttggactcagtaggaaccaa

SEQ ID NO: 496617 - DNA, 33 bp, Homo sapien
ttggattttcatgctacaaagatttggaagtag

SEQ ID NO: 496618 - DNA, 33 bp, Homo sapien
ttggattttcatgctataaagatttggaagtag

SEQ ID NO: 496619 - DNA, 33 bp, Homo sapien
tggagtaataggttcagatttgccctcttgcct

SEQ ID NO: 496620 - DNA, 33 bp, Homo sapien
tggagtaataggttcatatttgccctcttgcct

SEQ ID NO: 496621 - DNA, 33 bp, Homo sapien
gataatagaaggccacaagaaaacttttggggt

SEQ ID NO: 496622 - DNA, 33 bp, Homo sapien
gataatagaaggccacgagaaaacttttggggt

SEQ ID NO: 496623 - DNA, 33 bp, Homo sapien
actcactcctccagtaaaaaggcatcctataat

SEQ ID NO: 496624 - DNA, 33 bp, Homo sapien
actcactcctccagtagaaaggcatcctataat

SEQ ID NO: 496625 - DNA, 33 bp, Homo sapien
agcagtggttacagaacgaagcatgtgtttcta

SEQ ID NO: 496626 - DNA, 33 bp, Homo sapien
agcagtggttacagaatgaagcatgtgtttcta

SEQ ID NO: 496627 - DNA, 33 bp, Homo sapien
ggaataggagagggaacgcctcctcaggtgtcc

SEQ ID NO: 496628 - DNA, 33 bp, Homo sapien
ggaataggagagggaatgcctcctcaggtgtcc

SEQ ID NO: 496629 - DNA, 33 bp, Homo sapien
caacttctccctctgaacttggaagacctttga

SEQ ID NO: 496630 - DNA, 33 bp, Homo sapien
caacttctccctctgagcttggaagacctttga

SEQ ID NO: 496631 - DNA, 33 bp, Homo sapien
tggctggataatatgcggaaatgtccttttttt

SEQ ID NO: 496632 - DNA, 33 bp, Homo sapien
tggctggataatatgctgaaatgtccttttttt

SEQ ID NO: 496633 - DNA, 33 bp, Homo sapien
atcagagagaacccagacctttaagagaagctg

SEQ ID NO: 496634 - DNA, 33 bp, Homo sapien
atcagagagaacccagccctttaagagaagctg

SEQ ID NO: 496635 - DNA, 33 bp, Homo sapien
agaacttttgagagaaaatatggcagggacaga

SEQ ID NO: 496636 - DNA, 33 bp, Homo sapien
agaacttttgagagaatatatggcagggacaga

SEQ ID NO: 496637 - DNA, 33 bp, Homo sapien
gctgagggtcagcaaacgccttggctggggctg

SEQ ID NO: 496638 - DNA, 33 bp, Homo sapien
gctgagggtcagcaaatgccttggctggggctg

SEQ ID NO: 496639 - DNA, 33 bp, Homo sapien
catcacatttgagaaacgtaattcctgataagt

SEQ ID NO: 496640 - DNA, 33 bp, Homo sapien
catcacatttgagaaatgtaattcctgataagt

SEQ ID NO: 496641 - DNA, 33 bp, Homo sapien
tcagcatagaaaaataactattcaagactaccc

SEQ ID NO: 496642 - DNA, 33 bp, Homo sapien
tcagcatagaaaaatatctattcaagactaccc

SEQ ID NO: 496643 - DNA, 33 bp, Homo sapien
tttggagatcctatcaatatgaaaggcctaggt

SEQ ID NO: 496644 - DNA, 33 bp, Homo sapien
tttggagatcctatcagtatgaaaggcctaggt

SEQ ID NO: 496645 - DNA, 33 bp, Homo sapien
cctacttgcttcctccaactgtctaccttgtca

SEQ ID NO: 496646 - DNA, 33 bp, Homo sapien
cctacttgcttcctccgactgtctaccttgtca

SEQ ID NO: 496647 - DNA, 33 bp, Homo sapien
gctggctgaggtacccaatgaggttttcaatac

SEQ ID NO: 496648 - DNA, 33 bp, Homo sapien
gctggctgaggtacccgatgaggttttcaatac

SEQ ID NO: 496649 - DNA, 33 bp, Homo sapien
aagaaaggagaagaagactctaaatatgaaggt

SEQ ID NO: 496650 - DNA, 33 bp, Homo sapien
aagaaaggagaagaaggctctaaatatgaaggt

SEQ ID NO: 496651 - DNA, 33 bp, Homo sapien
tgcgttaggatcttcagggattgcaacattgca

SEQ ID NO: 496652 - DNA, 33 bp, Homo sapien
tgcgttaggatcttcatggattgcaacattgca

SEQ ID NO: 496653 - DNA, 33 bp, Homo sapien
gttaaaacaaaaattacgatgggcagatgccag

SEQ ID NO: 496654 - DNA, 33 bp, Homo sapien
gttaaaacaaaaattaggatgggcagatgccag

SEQ ID NO: 496655 - DNA, 33 bp, Homo sapien
atagaagagttgtcaaataaatgttggtatgtc

SEQ ID NO: 496656 - DNA, 33 bp, Homo sapien
atagaagagttgtcaagtaaatgttggtatgtc

SEQ ID NO: 496657 - DNA, 33 bp, Homo sapien
ttgggtcacactgtaaattaaaatggagctgaa

SEQ ID NO: 496658 - DNA, 33 bp, Homo sapien
ttgggtcacactgtaagttaaaatggagctgaa

SEQ ID NO: 496659 - DNA, 33 bp, Homo sapien
gcagcaacaagaaaatgaatacacttcccatct

SEQ ID NO: 496660 - DNA, 33 bp, Homo sapien
gcagcaacaagaaaattaatacacttcccatct

SEQ ID NO: 496661 - DNA, 33 bp, Homo sapien
acgagtcttctatggccaaaagcaaggtgtctg

SEQ ID NO: 496662 - DNA, 33 bp, Homo sapien
acgagtcttctatggctaaaagcaaggtgtctg

SEQ ID NO: 496663 - DNA, 33 bp, Homo sapien
gaaaaaaagcaatcaaagaacctatcatttttt

SEQ ID NO: 496664 - DNA, 33 bp, Homo sapien
gaaaaaaagcaatcaaggaacctatcatttttt

SEQ ID NO: 496665 - DNA, 33 bp, Homo sapien
ctccgcttgagttatcacaggcatttcagttta

SEQ ID NO: 496666 - DNA, 33 bp, Homo sapien
ctccgcttgagttatcgcaggcatttcagttta

SEQ ID NO: 496667 - DNA, 33 bp, Homo sapien
gctgttgtctggaacaaggattggaaaagagca

SEQ ID NO: 496668 - DNA, 33 bp, Homo sapien
gctgttgtctggaacatggattggaaaagagca

SEQ ID NO: 496669 - DNA, 33 bp, Homo sapien
gaaaattgaagagacaaatggtcatgtaattta

SEQ ID NO: 496670 - DNA, 33 bp, Homo sapien
gaaaattgaagagacagatggtcatgtaattta

SEQ ID NO: 496671 - DNA, 33 bp, Homo sapien
acaatactgattccaaacacctcccaggattac

SEQ ID NO: 496672 - DNA, 33 bp, Homo sapien
acaatactgattccaaccacctcccaggattac

SEQ ID NO: 496673 - DNA, 33 bp, Homo sapien
tactgggtgaagccaaaaatcttcccaggctaa

SEQ ID NO: 496674 - DNA, 33 bp, Homo sapien
tactgggtgaagccaagaatcttcccaggctaa

SEQ ID NO: 496675 - DNA, 33 bp, Homo sapien
aagaaggaatcgaagacgagttagggtggatgg

SEQ ID NO: 496676 - DNA, 33 bp, Homo sapien
aagaaggaatcgaagatgagttagggtggatgg

SEQ ID NO: 496677 - DNA, 33 bp, Homo sapien
agacttacagaatccacgttctgctgtgtgtct

SEQ ID NO: 496678 - DNA, 33 bp, Homo sapien
agacttacagaatccatgttctgctgtgtgtct

SEQ ID NO: 496679 - DNA, 33 bp, Homo sapien
ccaccaccaccatcaaatgtaatcactgtcctg

SEQ ID NO: 496680 - DNA, 33 bp, Homo sapien
ccaccaccaccatcaagtgtaatcactgtcctg

SEQ ID NO: 496681 - DNA, 33 bp, Homo sapien
atatattaggtcaacaatcctatttggcccctt

SEQ ID NO: 496682 - DNA, 33 bp, Homo sapien
atatattaggtcaacactcctatttggcccctt

SEQ ID NO: 496683 - DNA, 33 bp, Homo sapien
actgtgctacctgttagaggccgatgggatgaa

SEQ ID NO: 496684 - DNA, 33 bp, Homo sapien
actgtgctacctgttataggccgatgggatgaa

SEQ ID NO: 496685 - DNA, 33 bp, Homo sapien
gttagtgtcaggagaaagtctggctgcccagac

SEQ ID NO: 496686 - DNA, 33 bp, Homo sapien
gttagtgtcaggagaaggtctggctgcccagac

SEQ ID NO: 496687 - DNA, 33 bp, Homo sapien
gaaaagtattcatccacagaaaggaaaggccct

SEQ ID NO: 496688 - DNA, 33 bp, Homo sapien
gaaaagtattcatccatagaaaggaaaggccct

SEQ ID NO: 496689 - DNA, 33 bp, Homo sapien
gaaatagaggatcacagcataaatcgctctgaa

SEQ ID NO: 496690 - DNA, 33 bp, Homo sapien
gaaatagaggatcacatcataaatcgctctgaa

SEQ ID NO: 496691 - DNA, 33 bp, Homo sapien
gagaagaatccacacactgtgctagcagcacag

SEQ ID NO: 496692 - DNA, 33 bp, Homo sapien
gagaagaatccacacattgtgctagcagcacag

SEQ ID NO: 496693 - DNA, 33 bp, Homo sapien
ctggtgatacgttgcacggaagctggttaaacc

SEQ ID NO: 496694 - DNA, 33 bp, Homo sapien
ctggtgatacgttgcatggaagctggttaaacc

SEQ ID NO: 496695 - DNA, 33 bp, Homo sapien
aagctgaacatgctcaaagcttacacaatattg

SEQ ID NO: 496696 - DNA, 33 bp, Homo sapien
aagctgaacatgctcagagcttacacaatattg

SEQ ID NO: 496697 - DNA, 33 bp, Homo sapien
atactccaaatgaaacaaggaccgaaaagatac

SEQ ID NO: 496698 - DNA, 33 bp, Homo sapien
atactccaaatgaaacgaggaccgaaaagatac

SEQ ID NO: 496699 - DNA, 33 bp, Homo sapien
actcaggacacactcactaagtactaggtactc

SEQ ID NO: 496700 - DNA, 33 bp, Homo sapien
actcaggacacactcagtaagtactaggtactc

SEQ ID NO: 496701 - DNA, 33 bp, Homo sapien
atggagtggaatgaggaccaacacattgaggcc

SEQ ID NO: 496702 - DNA, 33 bp, Homo sapien
atggagtggaatgaggtccaacacattgaggcc

SEQ ID NO: 496703 - DNA, 33 bp, Homo sapien
atcgttggatgcgaaactgtcttatattgttga

SEQ ID NO: 496704 - DNA, 33 bp, Homo sapien
atcgttggatgcgaaattgtcttatattgttga

SEQ ID NO: 496705 - DNA, 33 bp, Homo sapien
caggagatcgaggcaacgggaagaaaaggcaac

SEQ ID NO: 496706 - DNA, 33 bp, Homo sapien
caggagatcgaggcaatgggaagaaaaggcaac

SEQ ID NO: 496707 - DNA, 33 bp, Homo sapien
tcctttataaatgtaaaaactttctgtggtttg

SEQ ID NO: 496708 - DNA, 33 bp, Homo sapien
tcctttataaatgtaagaactttctgtggtttg

SEQ ID NO: 496709 - DNA, 33 bp, Homo sapien
atgcccttaatctctacgctgttcgacctctct

SEQ ID NO: 496710 - DNA, 33 bp, Homo sapien
atgcccttaatctctatgctgttcgacctctct

SEQ ID NO: 496711 - DNA, 33 bp, Homo sapien
tcatggataagctacaaatcaaagacaagaagc

SEQ ID NO: 496712 - DNA, 33 bp, Homo sapien
tcatggataagctacatatcaaagacaagaagc

SEQ ID NO: 496713 - DNA, 33 bp, Homo sapien; identical to SEQ ID NO: 496711

SEQ ID NO: 496714 - DNA, 33 bp, Homo sapien; identical to SEQ ID NO: 496712

SEQ ID NO: 496715 - DNA, 33 bp, Homo sapien
ccaagggtctttatcacaacactttagactggg

SEQ ID NO: 496716 - DNA, 33 bp, Homo sapien
ccaagggtctttatcataacactttagactggg

SEQ ID NO: 496717 - DNA, 33 bp, Homo sapien
atacttggagagttaacgatgtaaggacacaag

SEQ ID NO: 496718 - DNA, 33 bp, Homo sapien
atacttggagagttaatgatgtaaggacacaag

SEQ ID NO: 496719 - DNA, 33 bp, Homo sapien
ccacagggctgctccagcaaagaggctgatggt

SEQ ID NO: 496720 - DNA, 33 bp, Homo sapien
ccacagggctgctccatcaaagaggctgatggt

SEQ ID NO: 496721 - DNA, 33 bp, Homo sapien
atatcaactatgaccacccaggattggttcacc

SEQ ID NO: 496722 - DNA, 33 bp, Homo sapien
atatcaactatgaccatccaggattggttcacc

SEQ ID NO: 496723 - DNA, 33 bp, Homo sapien
tggaggagatgcgcaacgtggaactggtggaag

SEQ ID NO: 496724 - DNA, 33 bp, Homo sapien
tggaggagatgcgcaatgtggaactggtggaag

SEQ ID NO: 496725 - DNA, 33 bp, Homo sapien; identical to SEQ ID NO: 496723

SEQ ID NO: 496726 - DNA, 33 bp, Homo sapien; identical to SEQ ID NO: 496724

SEQ ID NO: 496727 - DNA, 33 bp, Homo sapien; identical to SEQ ID NO: 496723

SEQ ID NO: 496728 - DNA, 33 bp, Homo sapien; identical to SEQ ID NO: 496724

SEQ ID NO: 496729 - DNA, 33 bp, Homo sapien
tagtgaggttaaagatgaagactcagcattctc

SEQ ID NO: 496730 - DNA, 33 bp, Homo sapien
tagtgaggttaaagattaagactcagcattctc

SEQ ID NO: 496731 - DNA, 33 bp, Homo sapien
ttccaaggcttatttcaaaatttcaagaagcaa

SEQ ID NO: 496732 - DNA, 33 bp, Homo sapien
ttccaaggcttatttcgaaatttcaagaagcaa

SEQ ID NO: 496733 - DNA, 33 bp, Homo sapien
tggtcagtgttgctgaaggttgtgaattagcat

SEQ ID NO: 496734 - DNA, 33 bp, Homo sapien
tggtcagtgttgctgagggttgtgaattagcat

SEQ ID NO: 496735 - DNA, 33 bp, Homo sapien
tgcggcctcggaagagcagtccacgcttggtga

SEQ ID NO: 496736 - DNA, 33 bp, Homo sapien
tgcggcctcggaagagtagtccacgcttggtga

SEQ ID NO: 496737 - DNA, 33 bp, Homo sapien; identical to SEQ ID NO: 496735

SEQ ID NO: 496738 - DNA, 33 bp, Homo sapien; identical to SEQ ID NO: 496736

SEQ ID NO: 496739 - DNA, 33 bp, Homo sapien; identical to SEQ ID NO: 496735

SEQ ID NO: 496740 - DNA, 33 bp, Homo sapien; identical to SEQ ID NO: 496736

SEQ ID NO: 496741 - DNA, 33 bp, Homo sapien
agggcaaatgcttgtagatgaggttaaagaggg

SEQ ID NO: 496742 - DNA, 33 bp, Homo sapien
agggcaaatgcttgtatatgaggttaaagaggg

SEQ ID NO: 496743 - DNA, 33 bp, Homo sapien
tatttaaacagtagaccgcaggactagccatag

SEQ ID NO: 496744 - DNA, 33 bp, Homo sapien
tatttaaacagtagactgcaggactagccatag

SEQ ID NO: 496745 - DNA, 33 bp, Homo sapien
ctcctgtgatatggcgcaattaggaaagtaacc

SEQ ID NO: 496746 - DNA, 33 bp, Homo sapien
ctcctgtgatatggcgtaattaggaaagtaacc

SEQ ID NO: 496747 - DNA, 33 bp, Homo sapien
aacacatgtgacccaacggatggaaaatagaag

SEQ ID NO: 496748 - DNA, 33 bp, Homo sapien
aacacatgtgacccaatggatggaaaatagaag

SEQ ID NO: 496749 - DNA, 33 bp, Homo sapien
atctgcataaggacgacccaactgggagagcac

SEQ ID NO: 496750 - DNA, 33 bp, Homo sapien
atctgcataaggacgatccaactgggagagcac

SEQ ID NO: 496751 - DNA, 33 bp, Homo sapien
aaagcaatttccaagcaacaaacaacttaggca

SEQ ID NO: 496752 - DNA, 33 bp, Homo sapien
aaagcaatttccaagccacaaacaacttaggca

SEQ ID NO: 496753 - DNA, 33 bp, Homo sapien
ggacacatatatttcacggtcagaggcctgaat

SEQ ID NO: 496754 - DNA, 33 bp, Homo sapien
ggacacatatatttcatggtcagaggcctgaat

SEQ ID NO: 496755 - DNA, 33 bp, Homo sapien
aaactcaattcggagacaggaaagggtagttat

SEQ ID NO: 496756 - DNA, 33 bp, Homo sapien
aaactcaattcggagagaggaaagggtagttat

SEQ ID NO: 496757 - DNA, 33 bp, Homo sapien
tcaaacatagacaaaacttgaaagaatagtaaa

SEQ ID NO: 496758 - DNA, 33 bp, Homo sapien
tcaaacatagacaaaagttgaaagaatagtaaa

SEQ ID NO: 496759 - DNA, 33 bp, Homo sapien
ctcttttcccataagacgccaggaccctcagaa

SEQ ID NO: 496760 - DNA, 33 bp, Homo sapien
ctcttttcccataagatgccaggaccctcagaa

SEQ ID NO: 496761 - DNA, 33 bp, Homo sapien
atagaggtagtgattacgatgccagaaaagtga

SEQ ID NO: 496762 - DNA, 33 bp, Homo sapien
atagaggtagtgattatgatgccagaaaagtga

SEQ ID NO: 496763 - DNA, 33 bp, Homo sapien
tcaactgatgcttttaactgcttgtagttcctc

SEQ ID NO: 496764 - DNA, 33 bp, Homo sapien
tcaactgatgcttttagctgcttgtagttcctc

SEQ ID NO: 496765 - DNA, 33 bp, Homo sapien
tggaatggactcctccagatgcagtaacagggt

SEQ ID NO: 496766 - DNA, 33 bp, Homo sapien
tggaatggactcctccggatgcagtaacagggt

SEQ ID NO: 496767 - DNA, 33 bp, Homo sapien
ttcctctgacctttcaccaaggctcttagcttc

SEQ ID NO: 496768 - DNA, 33 bp, Homo sapien
ttcctctgacctttcagcaaggctcttagcttc

SEQ ID NO: 496769 - DNA, 33 bp, Homo sapien
tcgctctgaggctaggaagctaaaattaggtat

SEQ ID NO: 496770 - DNA, 33 bp, Homo sapien
tcgctctgaggctaggtagctaaaattaggtat

SEQ ID NO: 496771 - DNA, 33 bp, Homo sapien
gctacttaattcttcaatctgatcagcttactc

SEQ ID NO: 496772 - DNA, 33 bp, Homo sapien
gctacttaattcttcagtctgatcagcttactc

SEQ ID NO: 496773 - DNA, 33 bp, Homo sapien
aatcaaccagagataaagcatggaagatttaat

SEQ ID NO: 496774 - DNA, 33 bp, Homo sapien
aatcaaccagagataaggcatggaagatttaat

SEQ ID NO: 496775 - DNA, 33 bp, Homo sapien
ctctctgcaaatggaaacaaaccgtatgcattc

SEQ ID NO: 496776 - DNA, 33 bp, Homo sapien
ctctctgcaaatggaaccaaaccgtatgcattc

SEQ ID NO: 496777 - DNA, 33 bp, Homo sapien
tcagggatcttagagaacatcgcagtgtagctt

SEQ ID NO: 496778 - DNA, 33 bp, Homo sapien
tcagggatcttagagaccatcgcagtgtagctt

SEQ ID NO: 496779 - DNA, 33 bp, Homo sapien
taaggcaaaaagcaagccatataagggtacata

SEQ ID NO: 496780 - DNA, 33 bp, Homo sapien
taaggcaaaaagcaagtcatataagggtacata

SEQ ID NO: 496781 - DNA, 33 bp, Homo sapien
tagaaatattttcataagctctaacatatctgc

SEQ ID NO: 496782 - DNA, 33 bp, Homo sapien
tagaaatattttcatatgctctaacatatctgc

SEQ ID NO: 496783 - DNA, 33 bp, Homo sapien
ttggcatagtgttatacaatttttaggcttcgg

SEQ ID NO: 496784 - DNA, 33 bp, Homo sapien
ttggcatagtgttatataatttttaggcttcgg

SEQ ID NO: 496785 - DNA, 33 bp, Homo sapien
ttatgttttcccattacagccttatttaattag

SEQ ID NO: 496786 - DNA, 33 bp, Homo sapien
ttatgttttcccattagagccttatttaattag

SEQ ID NO: 496787 - DNA, 33 bp, Homo sapien
aaaagaattcatcccaaaagcagctatcttagt

SEQ ID NO: 496788 - DNA, 33 bp, Homo sapien
aaaagaattcatcccagaagcagctatcttagt

SEQ ID NO: 496789 - DNA, 33 bp, Homo sapien
agggttgacttcctaacgtatgtgtggaccctg

SEQ ID NO: 496790 - DNA, 33 bp, Homo sapien
agggttgacttcctaatgtatgtgtggaccctg

SEQ ID NO: 496791 - DNA, 33 bp, Homo sapien
tttatggaaatttgccaaatcaaaactaaaatc

SEQ ID NO: 496792 - DNA, 33 bp, Homo sapien
tttatggaaatttgccgaatcaaaactaaaatc

SEQ ID NO: 496793 - DNA, 33 bp, Homo sapien
tctcacaagcaccaaagtcagcatcaaggagtt

SEQ ID NO: 496794 - DNA, 33 bp, Homo sapien
tctcacaagcaccaaattcagcatcaaggagtt

SEQ ID NO: 496795 - DNA, 33 bp, Homo sapien
tctatggatccagtacacagcgggctatgcatg

SEQ ID NO: 496796 - DNA, 33 bp, Homo sapien
tctatggatccagtacgcagcgggctatgcatg

SEQ ID NO: 496797 - DNA, 33 bp, Homo sapien
catagagcagagtgaacaaactcacaggccatg

SEQ ID NO: 496798 - DNA, 33 bp, Homo sapien
catagagcagagtgaataaactcacaggccatg

SEQ ID NO: 496799 - DNA, 33 bp, Homo sapien
ccaacggttctcaaccacaaatgtaaaagagaa

SEQ ID NO: 496800 - DNA, 33 bp, Homo sapien
ccaacggttctcaaccgcaaatgtaaaagagaa

SEQ ID NO: 496801 - DNA, 33 bp, Homo sapien
gaatttggctctaacacccagatgtgagtgaac

SEQ ID NO: 496802 - DNA, 33 bp, Homo sapien
gaatttggctctaacatccagatgtgagtgaac

SEQ ID NO: 496803 - DNA, 33 bp, Homo sapien
ttcaactgggtagatacgttaagaaaaacaaac

SEQ ID NO: 496804 - DNA, 33 bp, Homo sapien
ttcaactgggtagatatgttaagaaaaacaaac

SEQ ID NO: 496805 - DNA, 33 bp, Homo sapien
tgaattgctgagagagaacaagttagacggtct

SEQ ID NO: 496806 - DNA, 33 bp, Homo sapien
tgaattgctgagagaggacaagttagacggtct

SEQ ID NO: 496807 - DNA, 33 bp, Homo sapien
ctccggccccagatacagaaatgtgaggcaggt

SEQ ID NO: 496808 - DNA, 33 bp, Homo sapien
ctccggccccagatacggaaatgtgaggcaggt

SEQ ID NO: 496809 - DNA, 33 bp, Homo sapien
aaatctaaagtcatccgcttaaaactgtaaagg

SEQ ID NO: 496810 - DNA, 33 bp, Homo sapien
aaatctaaagtcatcctcttaaaactgtaaagg

SEQ ID NO: 496811 - DNA, 33 bp, Homo sapien
tatccctgaggaaagacacagttaagcaggagg

SEQ ID NO: 496812 - DNA, 33 bp, Homo sapien
tatccctgaggaaagagacagttaagcaggagg

SEQ ID NO: 496813 - DNA, 33 bp, Homo sapien
atcttaaacaaaactacgaaaacgtggtgtcag

SEQ ID NO: 496814 - DNA, 33 bp, Homo sapien
atcttaaacaaaactatgaaaacgtggtgtcag

SEQ ID NO: 496815 - DNA, 33 bp, Homo sapien
tgagaatcacaaactacgtagacttgacattct

SEQ ID NO: 496816 - DNA, 33 bp, Homo sapien
tgagaatcacaaactatgtagacttgacattct

SEQ ID NO: 496817 - DNA, 33 bp, Homo sapien
ggctgattacctgaagcctgaccaaaatatgaa

SEQ ID NO: 496818 - DNA, 33 bp, Homo sapien
ggctgattacctgaaggctgaccaaaatatgaa

SEQ ID NO: 496819 - DNA, 33 bp, Homo sapien
tgtggtcaaataaagacagcgaagtgttttttt

SEQ ID NO: 496820 - DNA, 33 bp, Homo sapien
tgtggtcaaataaagatagcgaagtgttttttt

SEQ ID NO: 496821 - DNA, 33 bp, Homo sapien
aaaaaatgttctacaacgaaggaactaggtgaa

SEQ ID NO: 496822 - DNA, 33 bp, Homo sapien
aaaaaatgttctacaatgaaggaactaggtgaa

SEQ ID NO: 496823 - DNA, 33 bp, Homo sapien
ctttgatcctttcccactctgggttttcagcaa

SEQ ID NO: 496824 - DNA, 33 bp, Homo sapien
ctttgatcctttcccattctgggttttcagcaa

SEQ ID NO: 496825 - DNA, 33 bp, Homo sapien
ttattaggtaagagaaagtttaggtcaagtctc

SEQ ID NO: 496826 - DNA, 33 bp, Homo sapien
ttattaggtaagagaatgtttaggtcaagtctc

SEQ ID NO: 496827 - DNA, 33 bp, Homo sapien
tcttcaagaaacaaaaagagacttccatgaaat

SEQ ID NO: 496828 - DNA, 33 bp, Homo sapien
tcttcaagaaacaaaaggagacttccatgaaat

SEQ ID NO: 496829 - DNA, 33 bp, Homo sapien
acacacactcttctaagtattatactgcctcaa

SEQ ID NO: 496830 - DNA, 33 bp, Homo sapien
acacacactcttctaattattatactgcctcaa

SEQ ID NO: 496831 - DNA, 33 bp, Homo sapien
tgtgagctgataaggacgaagaagtgagggtca

SEQ ID NO: 496832 - DNA, 33 bp, Homo sapien
tgtgagctgataaggatgaagaagtgagggtca

SEQ ID NO: 496833 - DNA, 33 bp, Homo sapien
ctaacaatttctccttcaagcccaggccaagag

SEQ ID NO: 496834 - DNA, 33 bp, Homo sapien
ctaacaatttctccttgaagcccaggccaagag

SEQ ID NO: 496835 - DNA, 33 bp, Homo sapien
tcccccttctgaatgcaatgttagtattttggc

SEQ ID NO: 496836 - DNA, 33 bp, Homo sapien
tcccccttctgaatgcgatgttagtattttggc

SEQ ID NO: 496837 - DNA, 33 bp, Homo sapien
cttgaggttcttattgcagatccaggtggagag

SEQ ID NO: 496838 - DNA, 33 bp, Homo sapien
cttgaggttcttattggagatccaggtggagag

SEQ ID NO: 496839 - DNA, 33 bp, Homo sapien
ctgtgcattgtttcagccatcagacggtgagta

SEQ ID NO: 496840 - DNA, 33 bp, Homo sapien
ctgtgcattgtttcagtcatcagacggtgagta

SEQ ID NO: 496841 - DNA, 33 bp, Homo sapien
gccataccaggcaagaagacagttagaattgtc

SEQ ID NO: 496842 - DNA, 33 bp, Homo sapien
gccataccaggcaagaggacagttagaattgtc

SEQ ID NO: 496843 - DNA, 33 bp, Homo sapien
ctcctgttctaagggtcacatagctcagataca

SEQ ID NO: 496844 - DNA, 33 bp, Homo sapien
ctcctgttctaagggttacatagctcagataca

SEQ ID NO: 496845 - DNA, 33 bp, Homo sapien
ctggaaactccgagaactcctcagtgatatgcc

SEQ ID NO: 496846 - DNA, 33 bp, Homo sapien
ctggaaactccgagaattcctcagtgatatgcc

SEQ ID NO: 496847 - DNA, 33 bp, Homo sapien
ttagggaaagtgtggtcaaaatggctctattat

SEQ ID NO: 496848 - DNA, 33 bp, Homo sapien
ttagggaaagtgtggtgaaaatggctctattat

SEQ ID NO: 496849 - DNA, 33 bp, Homo sapien
atgaaggtcaaaggcaccctaaagtattgcatg

SEQ ID NO: 496850 - DNA, 33 bp, Homo sapien
atgaaggtcaaaggcatcctaaagtattgcatg

SEQ ID NO: 496851 - DNA, 33 bp, Homo sapien
cctgatgaagtttcacactgtcccactccagcc

SEQ ID NO: 496852 - DNA, 33 bp, Homo sapien
cctgatgaagtttcacgctgtcccactccagcc

SEQ ID NO: 496853 - DNA, 33 bp, Homo sapien
aactgaaactgcagaaatggaaaccgtggataa

SEQ ID NO: 496854 - DNA, 33 bp, Homo sapien
aactgaaactgcagaagtggaaaccgtggataa

SEQ ID NO: 496855 - DNA, 33 bp, Homo sapien
tgaacacaggcttttaagaaatcaattcaggag

SEQ ID NO: 496856 - DNA, 33 bp, Homo sapien
tgaacacaggcttttaggaaatcaattcaggag

SEQ ID NO: 496857 - DNA, 33 bp, Homo sapien
accaaatatagtcttacctaattaagaggagtg

SEQ ID NO: 496858 - DNA, 33 bp, Homo sapien
accaaatatagtcttagctaattaagaggagtg

SEQ ID NO: 496859 - DNA, 33 bp, Homo sapien
gatcacagtgtcctaactggatcattgaaaacc

SEQ ID NO: 496860 - DNA, 33 bp, Homo sapien
gatcacagtgtcctaattggatcattgaaaacc

SEQ ID NO: 496861 - DNA, 33 bp, Homo sapien
ttgggcttgatatggcagacacagagttggacc

SEQ ID NO: 496862 - DNA, 33 bp, Homo sapien
ttgggcttgatatggcggacacagagttggacc

SEQ ID NO: 496863 - DNA, 33 bp, Homo sapien
aatcgactggacgaagccttcatgaatgatcca

SEQ ID NO: 496864 - DNA, 33 bp, Homo sapien
aatcgactggacgaaggcttcatgaatgatcca

SEQ ID NO: 496865 - DNA, 33 bp, Homo sapien
ttgctgtcttacattaacatggttcatggttcc

SEQ ID NO: 496866 - DNA, 33 bp, Homo sapien
ttgctgtcttacattagcatggttcatggttcc

SEQ ID NO: 496867 - DNA, 33 bp, Homo sapien
cagctgaatgggtaaacttctgagtatgttcca

SEQ ID NO: 496868 - DNA, 33 bp, Homo sapien
cagctgaatgggtaaatttctgagtatgttcca

SEQ ID NO: 496869 - DNA, 33 bp, Homo sapien
cagataaccaaaatacaggtttgttgcaggatt

SEQ ID NO: 496870 - DNA, 33 bp, Homo sapien
cagataaccaaaatacgggtttgttgcaggatt

SEQ ID NO: 496871 - DNA, 33 bp, Homo sapien
aattagtaaaatgacaatagtcccttctgtgac

SEQ ID NO: 496872 - DNA, 33 bp, Homo sapien
aattagtaaaatgacagtagtcccttctgtgac

SEQ ID NO: 496873 - DNA, 33 bp, Homo sapien
ggtccatccagtgccacagaaggaagattaaag

SEQ ID NO: 496874 - DNA, 33 bp, Homo sapien
ggtccatccagtgccatagaaggaagattaaag

SEQ ID NO: 496875 - DNA, 33 bp, Homo sapien
agtgagatagggaagacaagcactgtgccttca

SEQ ID NO: 496876 - DNA, 33 bp, Homo sapien
agtgagatagggaagataagcactgtgccttca

SEQ ID NO: 496877 - DNA, 33 bp, Homo sapien
ggagaaagaaaagtacaaagtcagaagttcatg

SEQ ID NO: 496878 - DNA, 33 bp, Homo sapien
ggagaaagaaaagtacgaagtcagaagttcatg

SEQ ID NO: 496879 - DNA, 33 bp, Homo sapien
aattgtatggcatataacgtttttcattggtgg

SEQ ID NO: 496880 - DNA, 33 bp, Homo sapien
aattgtatggcatatagcgtttttcattggtgg

SEQ ID NO: 496881 - DNA, 33 bp, Homo sapien
ttgtttaattttccaaccccaagacatgttaca

SEQ ID NO: 496882 - DNA, 33 bp, Homo sapien
ttgtttaattttccaagcccaagacatgttaca

SEQ ID NO: 496883 - DNA, 33 bp, Homo sapien
ttcaaagcggtctccaaagaaacaactcctgct

SEQ ID NO: 496884 - DNA, 33 bp, Homo sapien
ttcaaagcggtctccatagaaacaactcctgct

SEQ ID NO: 496885 - DNA, 33 bp, Homo sapien
ttaacgtgtgaagtgaactctcgttttacaatt

SEQ ID NO: 496886 - DNA, 33 bp, Homo sapien
ttaacgtgtgaagtgacctctcgttttacaatt

SEQ ID NO: 496887 - DNA, 33 bp, Homo sapien
cattgggcataaatccagaagcaggttcctgtc

SEQ ID NO: 496888 - DNA, 33 bp, Homo sapien
cattgggcataaatccggaagcaggttcctgtc

SEQ ID NO: 496889 - DNA, 33 bp, Homo sapien
tcctcagcagtggacacacacctccaataaata

SEQ ID NO: 496890 - DNA, 33 bp, Homo sapien
tcctcagcagtggacatacacctccaataaata

SEQ ID NO: 496891 - DNA, 33 bp, Homo sapien
tgatctgatatcattacggcagtcctttctgga

SEQ ID NO: 496892 - DNA, 33 bp, Homo sapien
tgatctgatatcattatggcagtcctttctgga

SEQ ID NO: 496893 - DNA, 33 bp, Homo sapien
aattctacctagagaccaatttaaccataagat

SEQ ID NO: 496894 - DNA, 33 bp, Homo sapien
aattctacctagagactaatttaaccataagat

SEQ ID NO: 496895 - DNA, 33 bp, Homo sapien
acgatggtatagtagactaatattgctttcttt

SEQ ID NO: 496896 - DNA, 33 bp, Homo sapien
acgatggtatagtagattaatattgctttcttt

SEQ ID NO: 496897 - DNA, 33 bp, Homo sapien
ctttcacgaccaattacaggggcgaatgagaca

SEQ ID NO: 496898 - DNA, 33 bp, Homo sapien
ctttcacgaccaattataggggcgaatgagaca

SEQ ID NO: 496899 - DNA, 33 bp, Homo sapien
aatccccttcgtcattaaagatgaatcttgctc

SEQ ID NO: 496900 - DNA, 33 bp, Homo sapien
aatccccttcgtcattgaagatgaatcttgctc

SEQ ID NO: 496901 - DNA, 33 bp, Homo sapien
aggggatatgtatgaacgttaccatttgcgaat

SEQ ID NO: 496902 - DNA, 33 bp, Homo sapien
aggggatatgtatgaatgttaccatttgcgaat

SEQ ID NO: 496903 - DNA, 33 bp, Homo sapien
gtgattccaataggtcacatgttctgggaggcc

SEQ ID NO: 496904 - DNA, 33 bp, Homo sapien
gtgattccaataggtcgcatgttctgggaggcc

SEQ ID NO: 496905 - DNA, 33 bp, Homo sapien
ctattggaatcactagaagagcctagacttaca

SEQ ID NO: 496906 - DNA, 33 bp, Homo sapien
ctattggaatcactaggagagcctagacttaca

SEQ ID NO: 496907 - DNA, 33 bp, Homo sapien
ttcaaaggttccaggaatcagtacatttagcag

SEQ ID NO: 496908 - DNA, 33 bp, Homo sapien
ttcaaaggttccaggagtcagtacatttagcag

SEQ ID NO: 496909 - DNA, 33 bp, Homo sapien
aaacaagaacttcacaatcagagggggcttctt

SEQ ID NO: 496910 - DNA, 33 bp, Homo sapien
aaacaagaacttcacagtcagagggggcttctt

SEQ ID NO: 496911 - DNA, 33 bp, Homo sapien
tcaataaatgtcatctaaagaccagaatatgaa

SEQ ID NO: 496912 - DNA, 33 bp, Homo sapien
tcaataaatgtcatctgaagaccagaatatgaa

SEQ ID NO: 496913 - DNA, 33 bp, Homo sapien
gccttgggttgcactacgaaacttacacaactg

SEQ ID NO: 496914 - DNA, 33 bp, Homo sapien
gccttgggttgcactatgaaacttacacaactg

SEQ ID NO: 496915 - DNA, 33 bp, Homo sapien
tgaacaaaaggcgcaaaccttaccagcaggcaa

SEQ ID NO: 496916 - DNA, 33 bp, Homo sapien
tgaacaaaaggcgcaacccttaccagcaggcaa

SEQ ID NO: 496917 - DNA, 33 bp, Homo sapien
ctattgacatctttcccgacatgagcagagggc

SEQ ID NO: 496918 - DNA, 33 bp, Homo sapien
ctattgacatctttcctgacatgagcagagggc

SEQ ID NO: 496919 - DNA, 33 bp, Homo sapien
ctctgaggtcaaatgccatggaacattcattcc

SEQ ID NO: 496920 - DNA, 33 bp, Homo sapien
ctctgaggtcaaatgctatggaacattcattcc

SEQ ID NO: 496921 - DNA, 33 bp, Homo sapien
ggaactccatgtgccaaagtgcagagctgagag

SEQ ID NO: 496922 - DNA, 33 bp, Homo sapien
ggaactccatgtgccacagtgcagagctgagag

SEQ ID NO: 496923 - DNA, 33 bp, Homo sapien
tggtactcttaagacacctcccctcacctctga

SEQ ID NO: 496924 - DNA, 33 bp, Homo sapien
tggtactcttaagacatctcccctcacctctga

SEQ ID NO: 496925 - DNA, 33 bp, Homo sapien
ctgtcaaattccaagacgaagatcatgagggtc

SEQ ID NO: 496926 - DNA, 33 bp, Homo sapien
ctgtcaaattccaagaggaagatcatgagggtc

SEQ ID NO: 496927 - DNA, 33 bp, Homo sapien
taggcatttacacttacagcactgtattagggt

SEQ ID NO: 496928 - DNA, 33 bp, Homo sapien
taggcatttacacttatagcactgtattagggt

SEQ ID NO: 496929 - DNA, 33 bp, Homo sapien
ttcaagttccagaaaaaaatagcacaatatttt

SEQ ID NO: 496930 - DNA, 33 bp, Homo sapien
ttcaagttccagaaaacaatagcacaatatttt

SEQ ID NO: 496931 - DNA, 33 bp, Homo sapien
tgttacatttgcatgacaggtctttttctaacc

SEQ ID NO: 496932 - DNA, 33 bp, Homo sapien
tgttacatttgcatgataggtctttttctaacc

SEQ ID NO: 496933 - DNA, 33 bp, Homo sapien
tacgcaaggccatctcagaatacacacattgaa

SEQ ID NO: 496934 - DNA, 33 bp, Homo sapien
tacgcaaggccatctcggaatacacacattgaa

SEQ ID NO: 496935 - DNA, 33 bp, Homo sapien
ggtgcaaaacaccagagggcagtagcatataaa

SEQ ID NO: 496936 - DNA, 33 bp, Homo sapien
ggtgcaaaacaccagatggcagtagcatataaa

SEQ ID NO: 496937 - DNA, 33 bp, Homo sapien
ctgctgttttgcctctaaatgcacgtgcttgag

SEQ ID NO: 496938 - DNA, 33 bp, Homo sapien
ctgctgttttgcctcttaatgcacgtgcttgag

SEQ ID NO: 496939 - DNA, 33 bp, Homo sapien
atctaaacctctgggaaaagcaaaagtggtgcc

SEQ ID NO: 496940 - DNA, 33 bp, Homo sapien
atctaaacctctgggataagcaaaagtggtgcc

SEQ ID NO: 496941 - DNA, 33 bp, Homo sapien
ttgtataccagtaccacgcttttttggtaacta

SEQ ID NO: 496942 - DNA, 33 bp, Homo sapien
ttgtataccagtaccatgcttttttggtaacta

SEQ ID NO: 496943 - DNA, 33 bp, Homo sapien
gatatgctggaagaaaaggaacctgtgtgctgt

SEQ ID NO: 496944 - DNA, 33 bp, Homo sapien
gatatgctggaagaaagggaacctgtgtgctgt

SEQ ID NO: 496945 - DNA, 33 bp, Homo sapien
tataactagtatccttaaaacgagaacgccata

SEQ ID NO: 496946 - DNA, 33 bp, Homo sapien
tataactagtatccttgaaacgagaacgccata

SEQ ID NO: 496947 - DNA, 33 bp, Homo sapien
cctttagaatcctagagaagtcagaaaagaccc

SEQ ID NO: 496948 - DNA, 33 bp, Homo sapien
cctttagaatcctagataagtcagaaaagaccc

SEQ ID NO: 496949 - DNA, 33 bp, Homo sapien
aggacttgctttactgaaagtagaaatgtctgt

SEQ ID NO: 496950 - DNA, 33 bp, Homo sapien
aggacttgctttactgcaagtagaaatgtctgt

SEQ ID NO: 496951 - DNA, 33 bp, Homo sapien
ctatcatagacaataaacagatgatataaatgc

SEQ ID NO: 496952 - DNA, 33 bp, Homo sapien
ctatcatagacaataaccagatgatataaatgc

SEQ ID NO: 496953 - DNA, 33 bp, Homo sapien
actatttgcttttcttaaaaacttcacatcata

SEQ ID NO: 496954 - DNA, 33 bp, Homo sapien
actatttgcttttcttcaaaacttcacatcata

SEQ ID NO: 496955 - DNA, 33 bp, Homo sapien
gtgctgattggtttgcaagtatgtgaaaaaggt

SEQ ID NO: 496956 - DNA, 33 bp, Homo sapien
gtgctgattggtttgcgagtatgtgaaaaaggt

SEQ ID NO: 496957 - DNA, 33 bp, Homo sapien
aaaataattcatgacactcactgatcagataag

SEQ ID NO: 496958 - DNA, 33 bp, Homo sapien
aaaataattcatgacattcactgatcagataag

SEQ ID NO: 496959 - DNA, 33 bp, Homo sapien
atggaactttccattcaagacgcccatactcta

SEQ ID NO: 496960 - DNA, 33 bp, Homo sapien
atggaactttccattcgagacgcccatactcta

SEQ ID NO: 496961 - DNA, 33 bp, Homo sapien
ggcctagaaaaccacaaagctgagcagattctc

SEQ ID NO: 496962 - DNA, 33 bp, Homo sapien
ggcctagaaaaccacagagctgagcagattctc

SEQ ID NO: 496963 - DNA, 33 bp, Homo sapien
tcaaggagaggctgtacagtggttctcagactt

SEQ ID NO: 496964 - DNA, 33 bp, Homo sapien
tcaaggagaggctgtatagtggttctcagactt

SEQ ID NO: 496965 - DNA, 33 bp, Homo sapien
gcctctccttaaaacagaatagtggttctggag

SEQ ID NO: 496966 - DNA, 33 bp, Homo sapien
gcctctccttaaaacataatagtggttctggag

SEQ ID NO: 496967 - DNA, 33 bp, Homo sapien
taagacctgggacttgaaactaatcccatctca

SEQ ID NO: 496968 - DNA, 33 bp, Homo sapien
taagacctgggacttgtaactaatcccatctca

SEQ ID NO: 496969 - DNA, 33 bp, Homo sapien
tctttgacttacctaaacaaaatctataagcaa

SEQ ID NO: 496970 - DNA, 33 bp, Homo sapien
tctttgacttacctaaccaaaatctataagcaa

SEQ ID NO: 496971 - DNA, 33 bp, Homo sapien
gatcaggtcataaaaaacatcacaatctgaagg

SEQ ID NO: 496972 - DNA, 33 bp, Homo sapien
gatcaggtcataaaaagcatcacaatctgaagg

SEQ ID NO: 496973 - DNA, 33 bp, Homo sapien
tgggatagagcctggggatctttattttcattt

SEQ ID NO: 496974 - DNA, 33 bp, Homo sapien
tgggatagagcctgggtatctttattttcattt

SEQ ID NO: 496975 - DNA, 33 bp, Homo sapien
acacaaatgttctgaccgctacatagtcatgca

SEQ ID NO: 496976 - DNA, 33 bp, Homo sapien
acacaaatgttctgactgctacatagtcatgca

SEQ ID NO: 496977 - DNA, 33 bp, Homo sapien
aagtcacatgactggaacagaaaagagcctgtg

SEQ ID NO: 496978 - DNA, 33 bp, Homo sapien
aagtcacatgactggagcagaaaagagcctgtg

SEQ ID NO: 496979 - DNA, 33 bp, Homo sapien
tgtctacaaaatgtagcattgtctcaaccagaa

SEQ ID NO: 496980 - DNA, 33 bp, Homo sapien
tgtctacaaaatgtagtattgtctcaaccagaa

SEQ ID NO: 496981 - DNA, 33 bp, Homo sapien
ggctagaaaattattaaggcaagagatgaagac

SEQ ID NO: 496982 - DNA, 33 bp, Homo sapien
ggctagaaaattattacggcaagagatgaagac

SEQ ID NO: 496983 - DNA, 33 bp, Homo sapien
tcattctaacaactcacatcctttaagtggaag

SEQ ID NO: 496984 - DNA, 33 bp, Homo sapien
tcattctaacaactcagatcctttaagtggaag

SEQ ID NO: 496985 - DNA, 33 bp, Homo sapien
cactgtctgtcctttccaccaggctagctgctg

SEQ ID NO: 496986 - DNA, 33 bp, Homo sapien
cactgtctgtcctttctaccaggctagctgctg

SEQ ID NO: 496987 - DNA, 33 bp, Homo sapien
gttcagaacatcaaaaagattatgtcccctgcc

SEQ ID NO: 496988 - DNA, 33 bp, Homo sapien
gttcagaacatcaaaaggattatgtcccctgcc

SEQ ID NO: 496989 - DNA, 33 bp, Homo sapien
aaataaatacaactaaatcttggttatgtctga

SEQ ID NO: 496990 - DNA, 33 bp, Homo sapien
aaataaatacaactaactcttggttatgtctga

SEQ ID NO: 496991 - DNA, 33 bp, Homo sapien
ttatctgtatgttctacactctgaacttcctct

SEQ ID NO: 496992 - DNA, 33 bp, Homo sapien
ttatctgtatgttctatactctgaacttcctct

SEQ ID NO: 496993 - DNA, 33 bp, Homo sapien
atgtataatgaattcccataggccagctgggta

SEQ ID NO: 496994 - DNA, 33 bp, Homo sapien
atgtataatgaattcctataggccagctgggta

SEQ ID NO: 496995 - DNA, 33 bp, Homo sapien
ttaaaagtagtaaaggaaaatgcttacctaaag

SEQ ID NO: 496996 - DNA, 33 bp, Homo sapien
ttaaaagtagtaaagggaaatgcttacctaaag

SEQ ID NO: 496997 - DNA, 33 bp, Homo sapien
cttggcatttctcagcccatgcaggaagctccc

SEQ ID NO: 496998 - DNA, 33 bp, Homo sapien
cttggcatttctcagctcatgcaggaagctccc

SEQ ID NO: 496999 - DNA, 33 bp, Homo sapien
tgcatagagattacctcaaagtattatttaaga

SEQ ID NO: 497000 - DNA, 33 bp, Homo sapien
tgcatagagattacctgaaagtattatttaaga

SEQ ID NO: 497001 - DNA, 33 bp, Homo sapien
tggatttcctttgggcaaggactagttttactt

SEQ ID NO: 497002 - DNA, 33 bp, Homo sapien
tggatttcctttgggcgaggactagttttactt

SEQ ID NO: 497003 - DNA, 33 bp, Homo sapien
ttctcagtaaagacacactacgtaatcaaagct

SEQ ID NO: 497004 - DNA, 33 bp, Homo sapien
ttctcagtaaagacacgctacgtaatcaaagct

SEQ ID NO: 497005 - DNA, 33 bp, Homo sapien
cgattttctttgtagcactgataagcacctggg

SEQ ID NO: 497006 - DNA, 33 bp, Homo sapien
cgattttctttgtagcgctgataagcacctggg

SEQ ID NO: 497007 - DNA, 33 bp, Homo sapien
tgagcaaatgtggtcaccgatctacctacctgc

SEQ ID NO: 497008 - DNA, 33 bp, Homo sapien
tgagcaaatgtggtcagcgatctacctacctgc

SEQ ID NO: 497009 - DNA, 33 bp, Homo sapien
aactgaaagaattcacaaaccctttgaaagcag

SEQ ID NO: 497010 - DNA, 33 bp, Homo sapien
aactgaaagaattcacgaaccctttgaaagcag

SEQ ID NO: 497011 - DNA, 33 bp, Homo sapien
tcctctgtgttctgaactgttttttccctatag

SEQ ID NO: 497012 - DNA, 33 bp, Homo sapien
tcctctgtgttctgaattgttttttccctatag

SEQ ID NO: 497013 - DNA, 33 bp, Homo sapien
attttttccaaatgagaagcacatctgagaaat

SEQ ID NO: 497014 - DNA, 33 bp, Homo sapien
attttttccaaatgagcagcacatctgagaaat

SEQ ID NO: 497015 - DNA, 33 bp, Homo sapien
gcacagtaattcaagcagcatgtgcaaaattta

SEQ ID NO: 497016 - DNA, 33 bp, Homo sapien
gcacagtaattcaagcggcatgtgcaaaattta

SEQ ID NO: 497017 - DNA, 33 bp, Homo sapien
gtccccttggctgatgcaacagatagaaaactc

SEQ ID NO: 497018 - DNA, 33 bp, Homo sapien
gtccccttggctgatggaacagatagaaaactc

SEQ ID NO: 497019 - DNA, 33 bp, Homo sapien
gtgccactctttcgcactgagtaaaagtatgtg

SEQ ID NO: 497020 - DNA, 33 bp, Homo sapien
gtgccactctttcgcattgagtaaaagtatgtg

SEQ ID NO: 497021 - DNA, 33 bp, Homo sapien
ggttttaatgttgactcactaacactatgtaac

SEQ ID NO: 497022 - DNA, 33 bp, Homo sapien
ggttttaatgttgacttactaacactatgtaac

SEQ ID NO: 497023 - DNA, 33 bp, Homo sapien
gggctcacagttattacgggatgggcattcaag

SEQ ID NO: 497024 - DNA, 33 bp, Homo sapien
gggctcacagttattatgggatgggcattcaag

SEQ ID NO: 497025 - DNA, 33 bp, Homo sapien
gtgtgctaatgtgctcacagagacagcttggtg

SEQ ID NO: 497026 - DNA, 33 bp, Homo sapien
gtgtgctaatgtgctcgcagagacagcttggtg

SEQ ID NO: 497027 - DNA, 33 bp, Homo sapien
aacctgagagtgggcgaaatgagcactggagga

SEQ ID NO: 497028 - DNA, 33 bp, Homo sapien
aacctgagagtgggcggaatgagcactggagga

SEQ ID NO: 497029 - DNA, 33 bp, Homo sapien
cattgagataaatgaccacttaaggatcctaca

SEQ ID NO: 497030 - DNA, 33 bp, Homo sapien
cattgagataaatgactacttaaggatcctaca

SEQ ID NO: 497031 - DNA, 33 bp, Homo sapien
ggacttttctctgccgaaagtgactgaaatcat

SEQ ID NO: 497032 - DNA, 33 bp, Homo sapien
ggacttttctctgccgtaagtgactgaaatcat

SEQ ID NO: 497033 - DNA, 33 bp, Homo sapien
tgctatttacaagaagccttcaaacttccagct

SEQ ID NO: 497034 - DNA, 33 bp, Homo sapien
tgctatttacaagaaggcttcaaacttccagct

SEQ ID NO: 497035 - DNA, 33 bp, Homo sapien
ttcataataactggaacgcagaatttggcaatc

SEQ ID NO: 497036 - DNA, 33 bp, Homo sapien
ttcataataactggaatgcagaatttggcaatc

SEQ ID NO: 497037 - DNA, 33 bp, Homo sapien
ccatgggcaaaatttaagaaaatccggccaggg

SEQ ID NO: 497038 - DNA, 33 bp, Homo sapien
ccatgggcaaaatttaggaaaatccggccaggg

SEQ ID NO: 497039 - DNA, 33 bp, Homo sapien
tattagtgagacttccagagtgttgagtccagg

SEQ ID NO: 497040 - DNA, 33 bp, Homo sapien
tattagtgagacttccggagtgttgagtccagg

SEQ ID NO: 497041 - DNA, 33 bp, Homo sapien
cctgtaatttattgaaggaagttgagtatttag

SEQ ID NO: 497042 - DNA, 33 bp, Homo sapien
cctgtaatttattgaatgaagttgagtatttag

SEQ ID NO: 497043 - DNA, 33 bp, Homo sapien
atgtaaatatgtatgtaaaaattcgaagggata

SEQ ID NO: 497044 - DNA, 33 bp, Homo sapien
atgtaaatatgtatgtgaaaattcgaagggata

SEQ ID NO: 497045 - DNA, 33 bp, Homo sapien
gaaggttgtggttaagaatcccacacagggagt

SEQ ID NO: 497046 - DNA, 33 bp, Homo sapien
gaaggttgtggttaagtatcccacacagggagt

SEQ ID NO: 497047 - DNA, 33 bp, Homo sapien
tcagtatgattgcttcaatttattatccttcat

SEQ ID NO: 497048 - DNA, 33 bp, Homo sapien
tcagtatgattgcttccatttattatccttcat

SEQ ID NO: 497049 - DNA, 33 bp, Homo sapien
tttagtcttgcttgagaataaagttcaaggttg

SEQ ID NO: 497050 - DNA, 33 bp, Homo sapien
tttagtcttgcttgagcataaagttcaaggttg

SEQ ID NO: 497051 - DNA, 33 bp, Homo sapien
tatagcagcttgtaccaatctccttggtggtat

SEQ ID NO: 497052 - DNA, 33 bp, Homo sapien
tatagcagcttgtacctatctccttggtggtat

SEQ ID NO: 497053 - DNA, 33 bp, Homo sapien
ctcttatacaccttaaactcatccaccttggga

SEQ ID NO: 497054 - DNA, 33 bp, Homo sapien
ctcttatacaccttaacctcatccaccttggga

SEQ ID NO: 497055 - DNA, 33 bp, Homo sapien
gataagcacagtttaacggtgtaagttgcctca

SEQ ID NO: 497056 - DNA, 33 bp, Homo sapien
gataagcacagtttaatggtgtaagttgcctca

SEQ ID NO: 497057 - DNA, 33 bp, Homo sapien
ctgtgggcattcattacgactgtggccagttgt

SEQ ID NO: 497058 - DNA, 33 bp, Homo sapien
ctgtgggcattcattaggactgtggccagttgt

SEQ ID NO: 497059 - DNA, 33 bp, Homo sapien
aaagttatcatttgtcaaaacttgaaatctcac

SEQ ID NO: 497060 - DNA, 33 bp, Homo sapien
aaagttatcatttgtcgaaacttgaaatctcac

SEQ ID NO: 497061 - DNA, 33 bp, Homo sapien
atgtttatgttggaacacagagaacttttcgaa

SEQ ID NO: 497062 - DNA, 33 bp, Homo sapien
atgtttatgttggaacgcagagaacttttcgaa

SEQ ID NO: 497063 - DNA, 33 bp, Homo sapien
attcagaatggtgtctaaaacataccaaggcca

SEQ ID NO: 497064 - DNA, 33 bp, Homo sapien
attcagaatggtgtctgaaacataccaaggcca

SEQ ID NO: 497065 - DNA, 33 bp, Homo sapien
cccctccaagactcccaagattcttcatggtcc

SEQ ID NO: 497066 - DNA, 33 bp, Homo sapien
cccctccaagactcccgagattcttcatggtcc

SEQ ID NO: 497067 - DNA, 33 bp, Homo sapien
gccatgcaaatggagccgaaggaaaaatagaga

SEQ ID NO: 497068 - DNA, 33 bp, Homo sapien
gccatgcaaatggagctgaaggaaaaatagaga

SEQ ID NO: 497069 - DNA, 33 bp, Homo sapien
agcatctccaagaatccgagtggctaccaggct

SEQ ID NO: 497070 - DNA, 33 bp, Homo sapien
agcatctccaagaatctgagtggctaccaggct

SEQ ID NO: 497071 - DNA, 33 bp, Homo sapien
ttagaatgtgaaaaaagtgcctattcaaatcag

SEQ ID NO: 497072 - DNA, 33 bp, Homo sapien
ttagaatgtgaaaaaattgcctattcaaatcag

SEQ ID NO: 497073 - DNA, 33 bp, Homo sapien
ttcctacttacattgcccagaaactacaaatgg

SEQ ID NO: 497074 - DNA, 33 bp, Homo sapien
ttcctacttacattgcgcagaaactacaaatgg

SEQ ID NO: 497075 - DNA, 33 bp, Homo sapien
cttgaaataaagaatacgtgtgtttattgcttc

SEQ ID NO: 497076 - DNA, 33 bp, Homo sapien
cttgaaataaagaataggtgtgtttattgcttc

SEQ ID NO: 497077 - DNA, 33 bp, Homo sapien
gagaatgtgaaatgcaaggatgtgagactggcc

SEQ ID NO: 497078 - DNA, 33 bp, Homo sapien
gagaatgtgaaatgcagggatgtgagactggcc

SEQ ID NO: 497079 - DNA, 33 bp, Homo sapien; identical to SEQ ID NO: 497077

SEQ ID NO: 497080 - DNA, 33 bp, Homo sapien; identical to SEQ ID NO: 497078

SEQ ID NO: 497081 - DNA, 33 bp, Homo sapien
aggaaattgaagcgtcaaaaaggtcttgattct

SEQ ID NO: 497082 - DNA, 33 bp, Homo sapien
aggaaattgaagcgtcgaaaaggtcttgattct

SEQ ID NO: 497083 - DNA, 33 bp, Homo sapien
gctacaatagaagtcaaagcatcaccagaatgg

SEQ ID NO: 497084 - DNA, 33 bp, Homo sapien
gctacaatagaagtcagagcatcaccagaatgg

SEQ ID NO: 497085 - DNA, 33 bp, Homo sapien
aataaaacatttaataagatctcagaagactcc

SEQ ID NO: 497086 - DNA, 33 bp, Homo sapien
aataaaacatttaataggatctcagaagactcc

SEQ ID NO: 497087 - DNA, 33 bp, Homo sapien
atattcccctgtgctacagttttttgaatttgc

SEQ ID NO: 497088 - DNA, 33 bp, Homo sapien
atattcccctgtgctatagttttttgaatttgc

SEQ ID NO: 497089 - DNA, 33 bp, Homo sapien
actgatggcttcttagcaaagttatgatcatac

SEQ ID NO: 497090 - DNA, 33 bp, Homo sapien
actgatggcttcttagtaaagttatgatcatac

SEQ ID NO: 497091 - DNA, 33 bp, Homo sapien
ggatattagggagatgaagagaatgctcagaac

SEQ ID NO: 497092 - DNA, 33 bp, Homo sapien
ggatattagggagatggagagaatgctcagaac

SEQ ID NO: 497093 - DNA, 33 bp, Homo sapien
cactctaaaaagttccccaatatgtcttatgtt

SEQ ID NO: 497094 - DNA, 33 bp, Homo sapien
cactctaaaaagttcctcaatatgtcttatgtt

SEQ ID NO: 497095 - DNA, 33 bp, Homo sapien
atcagatcactgaacaaagaaaagtaagctaat

SEQ ID NO: 497096 - DNA, 33 bp, Homo sapien
atcagatcactgaacagagaaaagtaagctaat

SEQ ID NO: 497097 - DNA, 33 bp, Homo sapien
cagcaaagactgcaaaactcttatttaattttt

SEQ ID NO: 497098 - DNA, 33 bp, Homo sapien
cagcaaagactgcaaatctcttatttaattttt

SEQ ID NO: 497099 - DNA, 33 bp, Homo sapien
gaggtcaagaattgcaatcatagtgtacatcag

SEQ ID NO: 497100 - DNA, 33 bp, Homo sapien
gaggtcaagaattgcagtcatagtgtacatcag

SEQ ID NO: 497101 - DNA, 33 bp, Homo sapien
tcaatacctcgttcaaaggttctcacacagcag

SEQ ID NO: 497102 - DNA, 33 bp, Homo sapien
tcaatacctcgttcaagggttctcacacagcag

SEQ ID NO: 497103 - DNA, 33 bp, Homo sapien
ctaaataacttaatcactgatgaacttcatatc

SEQ ID NO: 497104 - DNA, 33 bp, Homo sapien
ctaaataacttaatcattgatgaacttcatatc

SEQ ID NO: 497105 - DNA, 33 bp, Homo sapien
gctgttaaatgcttaccagcacactactgcttc

SEQ ID NO: 497106 - DNA, 33 bp, Homo sapien
gctgttaaatgcttactagcacactactgcttc

SEQ ID NO: 497107 - DNA, 33 bp, Homo sapien
gataaaaagccctatacgtcaccttcagtgagc

SEQ ID NO: 497108 - DNA, 33 bp, Homo sapien
gataaaaagccctatatgtcaccttcagtgagc

SEQ ID NO: 497109 - DNA, 33 bp, Homo sapien
aatcctcaatgaaagaaactcaacaagaataca

SEQ ID NO: 497110 - DNA, 33 bp, Homo sapien
aatcctcaatgaaagacactcaacaagaataca

SEQ ID NO: 497111 - DNA, 33 bp, Homo sapien
tcagatgttactgagaacctgaaactttttttt

SEQ ID NO: 497112 - DNA, 33 bp, Homo sapien
tcagatgttactgagaccctgaaactttttttt

SEQ ID NO: 497113 - DNA, 33 bp, Homo sapien
cacatatgactgggagaatttatcataataaat

SEQ ID NO: 497114 - DNA, 33 bp, Homo sapien
cacatatgactgggagtatttatcataataaat

SEQ ID NO: 497115 - DNA, 33 bp, Homo sapien
acaataataaccttgacgaaatgaagaaaagaa

SEQ ID NO: 497116 - DNA, 33 bp, Homo sapien
acaataataaccttgaggaaatgaagaaaagaa

SEQ ID NO: 497117 - DNA, 33 bp, Homo sapien
tgtctccttgaacatacgataggcctgatttaa

SEQ ID NO: 497118 - DNA, 33 bp, Homo sapien
tgtctccttgaacatatgataggcctgatttaa

SEQ ID NO: 497119 - DNA, 33 bp, Homo sapien
tggaaggaatgaagaaaggtttcaagagccagc

SEQ ID NO: 497120 - DNA, 33 bp, Homo sapien
tggaaggaatgaagaacggtttcaagagccagc

SEQ ID NO: 497121 - DNA, 33 bp, Homo sapien
gaaatgaggcaacagaaggatgcagaggccagg

SEQ ID NO: 497122 - DNA, 33 bp, Homo sapien
gaaatgaggcaacagagggatgcagaggccagg

SEQ ID NO: 497123 - DNA, 33 bp, Homo sapien
acagcatctggcataagaaaaagttagctgttg

SEQ ID NO: 497124 - DNA, 33 bp, Homo sapien
acagcatctggcataataaaaagttagctgttg

SEQ ID NO: 497125 - DNA, 33 bp, Homo sapien
ttgccagccttaatgacaaaactctatggccct

SEQ ID NO: 497126 - DNA, 33 bp, Homo sapien
ttgccagccttaatgagaaaactctatggccct

SEQ ID NO: 497127 - DNA, 33 bp, Homo sapien
aaaatgtgtgtgtatactaatggacagtgaaat

SEQ ID NO: 497128 - DNA, 33 bp, Homo sapien
aaaatgtgtgtgtatattaatggacagtgaaat

SEQ ID NO: 497129 - DNA, 33 bp, Homo sapien
actcagtaggaaattacgaaaggacgttcacat

SEQ ID NO: 497130 - DNA, 33 bp, Homo sapien
actcagtaggaaattatgaaaggacgttcacat

SEQ ID NO: 497131 - DNA, 33 bp, Homo sapien
tttttgataggaaagccataggttgtcagtggc

SEQ ID NO: 497132 - DNA, 33 bp, Homo sapien
tttttgataggaaagctataggttgtcagtggc

SEQ ID NO: 497133 - DNA, 33 bp, Homo sapien; identical to SEQ ID NO: 497131

SEQ ID NO: 497134 - DNA, 33 bp, Homo sapien; identical to SEQ ID NO: 497132

SEQ ID NO: 497135 - DNA, 33 bp, Homo sapien
ttttaagtctacattcaaatcactttgttgtat

SEQ ID NO: 497136 - DNA, 33 bp, Homo sapien
ttttaagtctacattcgaatcactttgttgtat

SEQ ID NO: 497137 - DNA, 33 bp, Homo sapien
ttttcccctgtaataactacatatggtgagttt

SEQ ID NO: 497138 - DNA, 33 bp, Homo sapien
ttttcccctgtaataattacatatggtgagttt

SEQ ID NO: 497139 - DNA, 33 bp, Homo sapien
gcttattggtactttcaaaatctcctacaagga

SEQ ID NO: 497140 - DNA, 33 bp, Homo sapien
gcttattggtactttctaaatctcctacaagga

SEQ ID NO: 497141 - DNA, 33 bp, Homo sapien
taaactcaacaagaacaacactttgacatacta

SEQ ID NO: 497142 - DNA, 33 bp, Homo sapien
taaactcaacaagaaccacactttgacatacta

SEQ ID NO: 497143 - DNA, 33 bp, Homo sapien
tgttaatctacatctaagaagctcagtgaagtg

SEQ ID NO: 497144 - DNA, 33 bp, Homo sapien
tgttaatctacatctacgaagctcagtgaagtg

SEQ ID NO: 497145 - DNA, 33 bp, Homo sapien
tgctgtagaaggcatcacagaggatcggagaga

SEQ ID NO: 497146 - DNA, 33 bp, Homo sapien
tgctgtagaaggcatcgcagaggatcggagaga

SEQ ID NO: 497147 - DNA, 33 bp, Homo sapien
aaactcattttgaaaaacactgaaagagatgat

SEQ ID NO: 497148 - DNA, 33 bp, Homo sapien
aaactcattttgaaaagcactgaaagagatgat

SEQ ID NO: 497149 - DNA, 33 bp, Homo sapien
tgcttattctatcacagacttctgaatagaaac

SEQ ID NO: 497150 - DNA, 33 bp, Homo sapien
tgcttattctatcacatacttctgaatagaaac

SEQ ID NO: 497151 - DNA, 33 bp, Homo sapien
tacatctctgaattcaaacttgctaaaatgtga

SEQ ID NO: 497152 - DNA, 33 bp, Homo sapien
tacatctctgaattcacacttgctaaaatgtga

SEQ ID NO: 497153 - DNA, 33 bp, Homo sapien
tagaggggaaataatacggaagataggttaagg

SEQ ID NO: 497154 - DNA, 33 bp, Homo sapien
tagaggggaaataatatggaagataggttaagg

SEQ ID NO: 497155 - DNA, 33 bp, Homo sapien
accaccatgcttcagacctcggatccactgaca

SEQ ID NO: 497156 - DNA, 33 bp, Homo sapien
accaccatgcttcagagctcggatccactgaca

SEQ ID NO: 497157 - DNA, 33 bp, Homo sapien
gagaaatatgggaagcaaaatctctgtatctgc

SEQ ID NO: 497158 - DNA, 33 bp, Homo sapien
gagaaatatgggaagcgaaatctctgtatctgc

SEQ ID NO: 497159 - DNA, 33 bp, Homo sapien
aaagtcatatggtacaggtatataaagtttcag

SEQ ID NO: 497160 - DNA, 33 bp, Homo sapien
aaagtcatatggtacatgtatataaagtttcag

SEQ ID NO: 497161 - DNA, 33 bp, Homo sapien
ctctagagccatgccaatgaaatctgttaagga

SEQ ID NO: 497162 - DNA, 33 bp, Homo sapien
ctctagagccatgccattgaaatctgttaagga

SEQ ID NO: 497163 - DNA, 33 bp, Homo sapien
tgacaaacccagtctgaaggtaacaaagagatt

SEQ ID NO: 497164 - DNA, 33 bp, Homo sapien
tgacaaacccagtctggaggtaacaaagagatt

SEQ ID NO: 497165 - DNA, 33 bp, Homo sapien
tctgttggaagaaatacctaagcaacgaagaat

SEQ ID NO: 497166 - DNA, 33 bp, Homo sapien
tctgttggaagaaatatctaagcaacgaagaat

SEQ ID NO: 497167 - DNA, 33 bp, Homo sapien
tgaaagagaggtattaccccaagcctggaaaaa

SEQ ID NO: 497168 - DNA, 33 bp, Homo sapien
tgaaagagaggtattatcccaagcctggaaaaa

SEQ ID NO: 497169 - DNA, 33 bp, Homo sapien
ctccaacataaaagaaacgacagcagcaataaa

SEQ ID NO: 497170 - DNA, 33 bp, Homo sapien
ctccaacataaaagaaccgacagcagcaataaa

SEQ ID NO: 497171 - DNA, 33 bp, Homo sapien
ggccttttgaagctgaaaaccaaaggatggcag

SEQ ID NO: 497172 - DNA, 33 bp, Homo sapien
ggccttttgaagctgagaaccaaaggatggcag

SEQ ID NO: 497173 - DNA, 33 bp, Homo sapien
ctactctatcaaacaaaagtctaaatgactaca

SEQ ID NO: 497174 - DNA, 33 bp, Homo sapien
ctactctatcaaacaagagtctaaatgactaca

SEQ ID NO: 497175 - DNA, 33 bp, Homo sapien
tagtagaaaggatttacgggcttagcatttggt

SEQ ID NO: 497176 - DNA, 33 bp, Homo sapien
tagtagaaaggatttatgggcttagcatttggt

SEQ ID NO: 497177 - DNA, 33 bp, Homo sapien
attcccatagataagaaaccccaattggagata

SEQ ID NO: 497178 - DNA, 33 bp, Homo sapien
attcccatagataagacaccccaattggagata

SEQ ID NO: 497179 - DNA, 33 bp, Homo sapien
gtcacctgtgacctccaagtacctatgcaggga

SEQ ID NO: 497180 - DNA, 33 bp, Homo sapien
gtcacctgtgacctccgagtacctatgcaggga

SEQ ID NO: 497181 - DNA, 33 bp, Homo sapien
ataagaggtctgcttgaaaaagagaacagtaaa

SEQ ID NO: 497182 - DNA, 33 bp, Homo sapien
ataagaggtctgcttgtaaaagagaacagtaaa

SEQ ID NO: 497183 - DNA, 33 bp, Homo sapien
attatgaagttggagacgaagtgattaggagaa

SEQ ID NO: 497184 - DNA, 33 bp, Homo sapien
attatgaagttggagatgaagtgattaggagaa

SEQ ID NO: 497185 - DNA, 33 bp, Homo sapien
actgggtcaaccaaagccatttatctcctaaga

SEQ ID NO: 497186 - DNA, 33 bp, Homo sapien
actgggtcaaccaaagtcatttatctcctaaga

SEQ ID NO: 497187 - DNA, 33 bp, Homo sapien
ttattcatacaaagtcaatcacatccagtgtat

SEQ ID NO: 497188 - DNA, 33 bp, Homo sapien
ttattcatacaaagtctatcacatccagtgtat

SEQ ID NO: 497189 - DNA, 33 bp, Homo sapien
gaagttgaatttaagaactgaatcaatgtaaaa

SEQ ID NO: 497190 - DNA, 33 bp, Homo sapien
gaagttgaatttaagagctgaatcaatgtaaaa

SEQ ID NO: 497191 - DNA, 33 bp, Homo sapien
aggcgccattggaatgaaagactctgtgctata

SEQ ID NO: 497192 - DNA, 33 bp, Homo sapien
aggcgccattggaatggaagactctgtgctata

SEQ ID NO: 497193 - DNA, 33 bp, Homo sapien
tcagggccttatttcaagaagtagcttctcagg

SEQ ID NO: 497194 - DNA, 33 bp, Homo sapien
tcagggccttatttcatgaagtagcttctcagg

SEQ ID NO: 497195 - DNA, 33 bp, Homo sapien
taggacaatgcttctaagtattttaccttgact

SEQ ID NO: 497196 - DNA, 33 bp, Homo sapien
taggacaatgcttctatgtattttaccttgact

SEQ ID NO: 497197 - DNA, 33 bp, Homo sapien
acttgggttctggtcacctgtgtttctcaccac

SEQ ID NO: 497198 - DNA, 33 bp, Homo sapien
acttgggttctggtcatctgtgtttctcaccac

SEQ ID NO: 497199 - DNA, 33 bp, Homo sapien
aacaataacagaaaaaagtggtccagttcttga

SEQ ID NO: 497200 - DNA, 33 bp, Homo sapien
aacaataacagaaaaacgtggtccagttcttga

SEQ ID NO: 497201 - DNA, 33 bp, Homo sapien
cctgctttgtgatttagaggatacaggacatga

SEQ ID NO: 497202 - DNA, 33 bp, Homo sapien
cctgctttgtgatttataggatacaggacatga

SEQ ID NO: 497203 - DNA, 33 bp, Homo sapien
aggagaaagggaaaaaagtgtggaaatggccat

SEQ ID NO: 497204 - DNA, 33 bp, Homo sapien
aggagaaagggaaaaaggtgtggaaatggccat

SEQ ID NO: 497205 - DNA, 33 bp, Homo sapien
gtgtgtgtgtatatccaaatctttctaccacaa

SEQ ID NO: 497206 - DNA, 33 bp, Homo sapien
gtgtgtgtgtatatccgaatctttctaccacaa

SEQ ID NO: 497207 - DNA, 33 bp, Homo sapien
atcaagctgaaatgcaaagaaaaaaaagtgtga

SEQ ID NO: 497208 - DNA, 33 bp, Homo sapien
atcaagctgaaatgcagagaaaaaaaagtgtga

SEQ ID NO: 497209 - DNA, 33 bp, Homo sapien
ctctggaagatcatcacaaaagatcctgtctca

SEQ ID NO: 497210 - DNA, 33 bp, Homo sapien
ctctggaagatcatcagaaaagatcctgtctca

SEQ ID NO: 497211 - DNA, 33 bp, Homo sapien
agctgaaactaaacaaaagcagtttccaaagca

SEQ ID NO: 497212 - DNA, 33 bp, Homo sapien
agctgaaactaaacaacagcagtttccaaagca

SEQ ID NO: 497213 - DNA, 33 bp, Homo sapien
attgactcgcatttccacattgctggggaggcc

SEQ ID NO: 497214 - DNA, 33 bp, Homo sapien
attgactcgcatttccgcattgctggggaggcc

SEQ ID NO: 497215 - DNA, 33 bp, Homo sapien
cattggctgaatgttacggagcatgtgagagta

SEQ ID NO: 497216 - DNA, 33 bp, Homo sapien
cattggctgaatgttatggagcatgtgagagta

SEQ ID NO: 497217 - DNA, 33 bp, Homo sapien
ccaggcagctgtcttcaagttttgtgctcgaat

SEQ ID NO: 497218 - DNA, 33 bp, Homo sapien
ccaggcagctgtcttcgagttttgtgctcgaat

SEQ ID NO: 497219 - DNA, 33 bp, Homo sapien
aaaacagaatatccaaatggacaagagacatat

SEQ ID NO: 497220 - DNA, 33 bp, Homo sapien
aaaacagaatatccaattggacaagagacatat

SEQ ID NO: 497221 - DNA, 33 bp, Homo sapien
acatatagccattgaaagatttttattcagcat

SEQ ID NO: 497222 - DNA, 33 bp, Homo sapien
acatatagccattgaaggatttttattcagcat

SEQ ID NO: 497223 - DNA, 33 bp, Homo sapien
ctctctcctcactcccagatctaggtggccacc

SEQ ID NO: 497224 - DNA, 33 bp, Homo sapien
ctctctcctcactcccggatctaggtggccacc

SEQ ID NO: 497225 - DNA, 33 bp, Homo sapien
taggaactgaagagacaaaggagaaaaggggct

SEQ ID NO: 497226 - DNA, 33 bp, Homo sapien
taggaactgaagagacgaaggagaaaaggggct

SEQ ID NO: 497227 - DNA, 33 bp, Homo sapien
gggtgatgcaatatgcactaaaaccaataccat

SEQ ID NO: 497228 - DNA, 33 bp, Homo sapien
gggtgatgcaatatgcgctaaaaccaataccat

SEQ ID NO: 497229 - DNA, 33 bp, Homo sapien
gaatgacttgtatcaaccaggaagaaacaccat

SEQ ID NO: 497230 - DNA, 33 bp, Homo sapien
gaatgacttgtatcaagcaggaagaaacaccat

SEQ ID NO: 497231 - DNA, 33 bp, Homo sapien
gctatctatgtatctaccatctttctgcttatc

SEQ ID NO: 497232 - DNA, 33 bp, Homo sapien
gctatctatgtatctatcatctttctgcttatc

SEQ ID NO: 497233 - DNA, 33 bp, Homo sapien
caaggattgaaactagaccccctgtttctctgc

SEQ ID NO: 497234 - DNA, 33 bp, Homo sapien
caaggattgaaactaggccccctgtttctctgc

SEQ ID NO: 497235 - DNA, 33 bp, Homo sapien
aaaacgaagccatatgaatggggctagtcagaa

SEQ ID NO: 497236 - DNA, 33 bp, Homo sapien
aaaacgaagccatatggatggggctagtcagaa

SEQ ID NO: 497237 - DNA, 33 bp, Homo sapien
caaattcgtattatagacattcaaatgaattgc

SEQ ID NO: 497238 - DNA, 33 bp, Homo sapien
caaattcgtattatagccattcaaatgaattgc

SEQ ID NO: 497239 - DNA, 33 bp, Homo sapien
aatagcatcaagaggaacaaaatttaacctgga

SEQ ID NO: 497240 - DNA, 33 bp, Homo sapien
aatagcatcaagaggagcaaaatttaacctgga

SEQ ID NO: 497241 - DNA, 33 bp, Homo sapien
ccttatagaattgtcacctatatccaaaagata

SEQ ID NO: 497242 - DNA, 33 bp, Homo sapien
ccttatagaattgtcagctatatccaaaagata

SEQ ID NO: 497243 - DNA, 33 bp, Homo sapien
tcatagcctcattgagaaatattgcccactcca

SEQ ID NO: 497244 - DNA, 33 bp, Homo sapien
tcatagcctcattgaggaatattgcccactcca

SEQ ID NO: 497245 - DNA, 33 bp, Homo sapien
tctattacttggctaacgttaatggtgctgcaa

SEQ ID NO: 497246 - DNA, 33 bp, Homo sapien
tctattacttggctaatgttaatggtgctgcaa

SEQ ID NO: 497247 - DNA, 33 bp, Homo sapien
ttgtgcagttaacgcaataatcacagggtcctg

SEQ ID NO: 497248 - DNA, 33 bp, Homo sapien
ttgtgcagttaacgcagtaatcacagggtcctg

SEQ ID NO: 497249 - DNA, 33 bp, Homo sapien
ctattgtcccattttacgtgaatgattgggtat

SEQ ID NO: 497250 - DNA, 33 bp, Homo sapien
ctattgtcccattttatgtgaatgattgggtat

SEQ ID NO: 497251 - DNA, 33 bp, Homo sapien
agtgcttcataaagtaaataagaggaacagcac

SEQ ID NO: 497252 - DNA, 33 bp, Homo sapien
agtgcttcataaagtagataagaggaacagcac

SEQ ID NO: 497253 - DNA, 33 bp, Homo sapien
aggtggtaggtttagacgtgcaagaaactggaa

SEQ ID NO: 497254 - DNA, 33 bp, Homo sapien
aggtggtaggtttagaggtgcaagaaactggaa

SEQ ID NO: 497255 - DNA, 33 bp, Homo sapien
tgcagtcgttttagaaagtaatcttggaagtga

SEQ ID NO: 497256 - DNA, 33 bp, Homo sapien
tgcagtcgttttagaaggtaatcttggaagtga

SEQ ID NO: 497257 - DNA, 33 bp, Homo sapien
atatcagaaccaagaactccagcctcaatacat

SEQ ID NO: 497258 - DNA, 33 bp, Homo sapien
atatcagaaccaagaagtccagcctcaatacat

SEQ ID NO: 497259 - DNA, 33 bp, Homo sapien
aggagtgaaaacttgaaaacaactgtagggcaa

SEQ ID NO: 497260 - DNA, 33 bp, Homo sapien
aggagtgaaaacttgagaacaactgtagggcaa

SEQ ID NO: 497261 - DNA, 33 bp, Homo sapien
tatgctggcctcattaaatttgtgtggaaaaca

SEQ ID NO: 497262 - DNA, 33 bp, Homo sapien
tatgctggcctcattacatttgtgtggaaaaca

SEQ ID NO: 497263 - DNA, 33 bp, Homo sapien
cagcagttgggtgaaacattttgcaagtgtcca

SEQ ID NO: 497264 - DNA, 33 bp, Homo sapien
cagcagttgggtgaaatattttgcaagtgtcca

SEQ ID NO: 497265 - DNA, 33 bp, Homo sapien
atgactacactttataccctgtttcagtaagta

SEQ ID NO: 497266 - DNA, 33 bp, Homo sapien
atgactacactttatatcctgtttcagtaagta

SEQ ID NO: 497267 - DNA, 33 bp, Homo sapien
taagtacccataatccaactgtcctgaaaatta

SEQ ID NO: 497268 - DNA, 33 bp, Homo sapien
taagtacccataatccgactgtcctgaaaatta

SEQ ID NO: 497269 - DNA, 33 bp, Homo sapien
taatgacaactttactcacattgaaagactttg

SEQ ID NO: 497270 - DNA, 33 bp, Homo sapien
taatgacaactttacttacattgaaagactttg

SEQ ID NO: 497271 - DNA, 33 bp, Homo sapien
atctatagcaagactaaggaaatccctgttttc

SEQ ID NO: 497272 - DNA, 33 bp, Homo sapien
atctatagcaagactacggaaatccctgttttc

SEQ ID NO: 497273 - DNA, 33 bp, Homo sapien
atcctatcctcactcaaaaaggcacaaacataa

SEQ ID NO: 497274 - DNA, 33 bp, Homo sapien
atcctatcctcactcagaaaggcacaaacataa

SEQ ID NO: 497275 - DNA, 33 bp, Homo sapien
tgtgacactatcatcaagtcctggccactgtga

SEQ ID NO: 497276 - DNA, 33 bp, Homo sapien
tgtgacactatcatcaggtcctggccactgtga

SEQ ID NO: 497277 - DNA, 33 bp, Homo sapien
gccttcagatgttataagtgatgttttatcaac

SEQ ID NO: 497278 - DNA, 33 bp, Homo sapien
gccttcagatgttatatgtgatgttttatcaac

SEQ ID NO: 497279 - DNA, 33 bp, Homo sapien
gctaatcattagtaccacataatcctttcaaaa

SEQ ID NO: 497280 - DNA, 33 bp, Homo sapien
gctaatcattagtaccgcataatcctttcaaaa

SEQ ID NO: 497281 - DNA, 33 bp, Homo sapien
agaacagtgcccgccactaagaaatatatgaga

SEQ ID NO: 497282 - DNA, 33 bp, Homo sapien
agaacagtgcccgccattaagaaatatatgaga

SEQ ID NO: 497283 - DNA, 33 bp, Homo sapien
ggctgcaacatatttacgctctagggttgctgt

SEQ ID NO: 497284 - DNA, 33 bp, Homo sapien
ggctgcaacatatttatgctctagggttgctgt

SEQ ID NO: 497285 - DNA, 33 bp, Homo sapien
ccagaatttacgaggacgcaacaggaggaggat

SEQ ID NO: 497286 - DNA, 33 bp, Homo sapien
ccagaatttacgaggatgcaacaggaggaggat

SEQ ID NO: 497287 - DNA, 33 bp, Homo sapien
atgagttttctgaccccatgaggatttagataa

SEQ ID NO: 497288 - DNA, 33 bp, Homo sapien
atgagttttctgaccctatgaggatttagataa

SEQ ID NO: 497289 - DNA, 33 bp, Homo sapien
cctactgctcagaaaacatttttttccaaaata

SEQ ID NO: 497290 - DNA, 33 bp, Homo sapien
cctactgctcagaaaagatttttttccaaaata

SEQ ID NO: 497291 - DNA, 33 bp, Homo sapien
gggcccattcaaggacaaacatacaaagggaat

SEQ ID NO: 497292 - DNA, 33 bp, Homo sapien
gggcccattcaaggacgaacatacaaagggaat

SEQ ID NO: 497293 - DNA, 33 bp, Homo sapien
ccaaattctgatagtaaaacagtccaagttatc

SEQ ID NO: 497294 - DNA, 33 bp, Homo sapien
ccaaattctgatagtataacagtccaagttatc

SEQ ID NO: 497295 - DNA, 33 bp, Homo sapien
tggttggatttatcacggaagttgaaaggctaa

SEQ ID NO: 497296 - DNA, 33 bp, Homo sapien
tggttggatttatcactgaagttgaaaggctaa

SEQ ID NO: 497297 - DNA, 33 bp, Homo sapien
tggattttaaaggtacagatgaactagaatctg

SEQ ID NO: 497298 - DNA, 33 bp, Homo sapien
tggattttaaaggtaccgatgaactagaatctg

SEQ ID NO: 497299 - DNA, 33 bp, Homo sapien
aatggatacacaaaaaatatgttaggtgggttg

SEQ ID NO: 497300 - DNA, 33 bp, Homo sapien
aatggatacacaaaaagtatgttaggtgggttg

SEQ ID NO: 497301 - DNA, 33 bp, Homo sapien
caacagttactatgcacgtgctaaaggcattta

SEQ ID NO: 497302 - DNA, 33 bp, Homo sapien
caacagttactatgcaggtgctaaaggcattta

SEQ ID NO: 497303 - DNA, 33 bp, Homo sapien
ttgctctgcgctcttaaccactatgaaactaat

SEQ ID NO: 497304 - DNA, 33 bp, Homo sapien
ttgctctgcgctcttagccactatgaaactaat

SEQ ID NO: 497305 - DNA, 33 bp, Homo sapien
aacaaaaagtcgacaaagaaacaatggatttaa

SEQ ID NO: 497306 - DNA, 33 bp, Homo sapien
aacaaaaagtcgacaaggaaacaatggatttaa

SEQ ID NO: 497307 - DNA, 33 bp, Homo sapien
aaagtatctatagaacaacatgagaataacaat

SEQ ID NO: 497308 - DNA, 33 bp, Homo sapien
aaagtatctatagaacgacatgagaataacaat

SEQ ID NO: 497309 - DNA, 33 bp, Homo sapien
tatcattctgattgtacgtgatttacttctgaa

SEQ ID NO: 497310 - DNA, 33 bp, Homo sapien
tatcattctgattgtatgtgatttacttctgaa

SEQ ID NO: 497311 - DNA, 33 bp, Homo sapien
aactgaactaataataaagtactgctgactgcc

SEQ ID NO: 497312 - DNA, 33 bp, Homo sapien
aactgaactaataatacagtactgctgactgcc

SEQ ID NO: 497313 - DNA, 33 bp, Homo sapien
tccagattgttagaataaatggacatatttcca

SEQ ID NO: 497314 - DNA, 33 bp, Homo sapien
tccagattgttagaattaatggacatatttcca

SEQ ID NO: 497315 - DNA, 33 bp, Homo sapien
caattctataccccctaagaatccaaaaatttt

SEQ ID NO: 497316 - DNA, 33 bp, Homo sapien
caattctataccccctgagaatccaaaaatttt

SEQ ID NO: 497317 - DNA, 33 bp, Homo sapien
taatgtatataacttacagagcctgtctatcta

SEQ ID NO: 497318 - DNA, 33 bp, Homo sapien
taatgtatataacttatagagcctgtctatcta

SEQ ID NO: 497319 - DNA, 33 bp, Homo sapien
cagcagaaacccaataataccattaagagatgc

SEQ ID NO: 497320 - DNA, 33 bp, Homo sapien
cagcagaaacccaatagtaccattaagagatgc

SEQ ID NO: 497321 - DNA, 33 bp, Homo sapien
tgttgagaggtgtctacaagctatgagatgaca

SEQ ID NO: 497322 - DNA, 33 bp, Homo sapien
tgttgagaggtgtctagaagctatgagatgaca

SEQ ID NO: 497323 - DNA, 33 bp, Homo sapien
tgctttatattttgagaccacataattaggcac

SEQ ID NO: 497324 - DNA, 33 bp, Homo sapien
tgctttatattttgaggccacataattaggcac

SEQ ID NO: 497325 - DNA, 33 bp, Homo sapien
attcaccaagaagatacagcaatcctgaatctg

SEQ ID NO: 497326 - DNA, 33 bp, Homo sapien
attcaccaagaagatatagcaatcctgaatctg

SEQ ID NO: 497327 - DNA, 33 bp, Homo sapien
tggtttggcaacatgaaggtaattggagacact

SEQ ID NO: 497328 - DNA, 33 bp, Homo sapien
tggtttggcaacatgagggtaattggagacact

SEQ ID NO: 497329 - DNA, 33 bp, Homo sapien
gaaagcactatgaagaggtaaataaataatccc

SEQ ID NO: 497330 - DNA, 33 bp, Homo sapien
gaaagcactatgaagatgtaaataaataatccc

SEQ ID NO: 497331 - DNA, 33 bp, Homo sapien
agaagtcaaaattttcaaagtggcctattagct

SEQ ID NO: 497332 - DNA, 33 bp, Homo sapien
agaagtcaaaattttctaagtggcctattagct

SEQ ID NO: 497333 - DNA, 33 bp, Homo sapien
gtcccccagctttcaacggactttgctattgtt

SEQ ID NO: 497334 - DNA, 33 bp, Homo sapien
gtcccccagctttcaatggactttgctattgtt

SEQ ID NO: 497335 - DNA, 33 bp, Homo sapien
gctgatgtcttggccgaaagcttggaggttata

SEQ ID NO: 497336 - DNA, 33 bp, Homo sapien
gctgatgtcttggccgcaagcttggaggttata

SEQ ID NO: 497337 - DNA, 33 bp, Homo sapien
gcatcattttgggaacaggaattgccaatgcct

SEQ ID NO: 497338 - DNA, 33 bp, Homo sapien
gcatcattttgggaacgggaattgccaatgcct

SEQ ID NO: 497339 - DNA, 33 bp, Homo sapien
tctgaataaagctgaacaatgtgtatgccttct

SEQ ID NO: 497340 - DNA, 33 bp, Homo sapien
tctgaataaagctgaagaatgtgtatgccttct

SEQ ID NO: 497341 - DNA, 33 bp, Homo sapien
acagagaaaattaatacaggaagaagactcagg

SEQ ID NO: 497342 - DNA, 33 bp, Homo sapien
acagagaaaattaatagaggaagaagactcagg

SEQ ID NO: 497343 - DNA, 33 bp, Homo sapien
cttactaatcaataaacgtatgcaactggatat

SEQ ID NO: 497344 - DNA, 33 bp, Homo sapien
cttactaatcaataaaggtatgcaactggatat

SEQ ID NO: 497345 - DNA, 33 bp, Homo sapien
aaagccttgtgtggaaggagcttagtgacaatg

SEQ ID NO: 497346 - DNA, 33 bp, Homo sapien
aaagccttgtgtggaatgagcttagtgacaatg

SEQ ID NO: 497347 - DNA, 33 bp, Homo sapien
tatgcaagtttaggaactgtttttctgcctgtt

SEQ ID NO: 497348 - DNA, 33 bp, Homo sapien
tatgcaagtttaggaattgtttttctgcctgtt

SEQ ID NO: 497349 - DNA, 33 bp, Homo sapien
gtcatcttgccaatgtaaaaacatcacttatgt

SEQ ID NO: 497350 - DNA, 33 bp, Homo sapien
gtcatcttgccaatgtgaaaacatcacttatgt

SEQ ID NO: 497351 - DNA, 33 bp, Homo sapien
ctgaaacctagaattcaatgaagcaaagacttc

SEQ ID NO: 497352 - DNA, 33 bp, Homo sapien
ctgaaacctagaattcgatgaagcaaagacttc

SEQ ID NO: 497353 - DNA, 33 bp, Homo sapien
tcagttttagaaccaaaaagagcatggaaaaat

SEQ ID NO: 497354 - DNA, 33 bp, Homo sapien
tcagttttagaaccaagaagagcatggaaaaat

SEQ ID NO: 497355 - DNA, 33 bp, Homo sapien
ggacattatgattccaacaggaaggatacaaac

SEQ ID NO: 497356 - DNA, 33 bp, Homo sapien
ggacattatgattccatcaggaaggatacaaac

SEQ ID NO: 497357 - DNA, 33 bp, Homo sapien
cttttgaacaagaagaacaagatcagaaggcta

SEQ ID NO: 497358 - DNA, 33 bp, Homo sapien
cttttgaacaagaagaccaagatcagaaggcta

SEQ ID NO: 497359 - DNA, 33 bp, Homo sapien
aaatctggtgtcagaaatgtgctgtatgataag

SEQ ID NO: 497360 - DNA, 33 bp, Homo sapien
aaatctggtgtcagaagtgtgctgtatgataag

SEQ ID NO: 497361 - DNA, 33 bp, Homo sapien
caaaccagatggaaagaacaaaaatataaagga

SEQ ID NO: 497362 - DNA, 33 bp, Homo sapien
caaaccagatggaaaggacaaaaatataaagga

SEQ ID NO: 497363 - DNA, 33 bp, Homo sapien
cacacacacacacctccaatcattacttgtgtt

SEQ ID NO: 497364 - DNA, 33 bp, Homo sapien
cacacacacacacctctaatcattacttgtgtt

SEQ ID NO: 497365 - DNA, 33 bp, Homo sapien
attctataataaaagcagcctatactaatattt

SEQ ID NO: 497366 - DNA, 33 bp, Homo sapien
attctataataaaagcggcctatactaatattt

SEQ ID NO: 497367 - DNA, 33 bp, Homo sapien
agaattgtcatcaaatgagaaaatgtgagtcat

SEQ ID NO: 497368 - DNA, 33 bp, Homo sapien
agaattgtcatcaaattagaaaatgtgagtcat

SEQ ID NO: 497369 - DNA, 33 bp, Homo sapien
attcaatagaatgggaaagattacattaggagt

SEQ ID NO: 497370 - DNA, 33 bp, Homo sapien
attcaatagaatgggagagattacattaggagt

SEQ ID NO: 497371 - DNA, 33 bp, Homo sapien
tgtgtgacaaaacatacaagttagctactctgc

SEQ ID NO: 497372 - DNA, 33 bp, Homo sapien
tgtgtgacaaaacatagaagttagctactctgc

SEQ ID NO: 497373 - DNA, 33 bp, Homo sapien
atggagcaggtgaagaagtggttgtccggcaat

SEQ ID NO: 497374 - DNA, 33 bp, Homo sapien
atggagcaggtgaagacgtggttgtccggcaat

SEQ ID NO: 497375 - DNA, 33 bp, Homo sapien
ttagcagtttctaagacaaaacatacagctaaa

SEQ ID NO: 497376 - DNA, 33 bp, Homo sapien
ttagcagtttctaagataaaacatacagctaaa

SEQ ID NO: 497377 - DNA, 33 bp, Homo sapien
aaactagatgaagagaacagtctcccaatcaaa

SEQ ID NO: 497378 - DNA, 33 bp, Homo sapien
aaactagatgaagagatcagtctcccaatcaaa

SEQ ID NO: 497379 - DNA, 33 bp, Homo sapien
gcattaaaatatgagcggagagttgacatcaga

SEQ ID NO: 497380 - DNA, 33 bp, Homo sapien
gcattaaaatatgagctgagagttgacatcaga

SEQ ID NO: 497381 - DNA, 33 bp, Homo sapien
tttctattcatccaaaactctgtatattactaa

SEQ ID NO: 497382 - DNA, 33 bp, Homo sapien
tttctattcatccaaagctctgtatattactaa

SEQ ID NO: 497383 - DNA, 33 bp, Homo sapien
attatgtgtaacatgaaggaattaaacaaataa

SEQ ID NO: 497384 - DNA, 33 bp, Homo sapien
attatgtgtaacatgagggaattaaacaaataa

SEQ ID NO: 497385 - DNA, 33 bp, Homo sapien
actttagcaattgtgacgttagaaaaagatgat

SEQ ID NO: 497386 - DNA, 33 bp, Homo sapien
actttagcaattgtgatgttagaaaaagatgat

SEQ ID NO: 497387 - DNA, 33 bp, Homo sapien
ttctctaaagccaaaaaaaggtcaaacaaagaa

SEQ ID NO: 497388 - DNA, 33 bp, Homo sapien
ttctctaaagccaaaagaaggtcaaacaaagaa

SEQ ID NO: 497389 - DNA, 33 bp, Homo sapien
ttcaagagacaaaaccacacaacctcagccacc

SEQ ID NO: 497390 - DNA, 33 bp, Homo sapien
ttcaagagacaaaaccgcacaacctcagccacc

SEQ ID NO: 497391 - DNA, 33 bp, Homo sapien
aattcatctttttgcactctaatttacctcaga

SEQ ID NO: 497392 - DNA, 33 bp, Homo sapien
aattcatctttttgcagtctaatttacctcaga

SEQ ID NO: 497393 - DNA, 33 bp, Homo sapien
atagggtctttgttaacatgaggtctcagagag

SEQ ID NO: 497394 - DNA, 33 bp, Homo sapien
atagggtctttgttaagatgaggtctcagagag

SEQ ID NO: 497395 - DNA, 33 bp, Homo sapien
ccagtaagacttaaaacaatctgattttgaaat

SEQ ID NO: 497396 - DNA, 33 bp, Homo sapien
ccagtaagacttaaaataatctgattttgaaat

SEQ ID NO: 497397 - DNA, 33 bp, Homo sapien
tctaagtgtgtaatcccagagacattttgacat

SEQ ID NO: 497398 - DNA, 33 bp, Homo sapien
tctaagtgtgtaatcctagagacattttgacat

SEQ ID NO: 497399 - DNA, 33 bp, Homo sapien
ttcatctctgcaaaacactgatggtcttttctt

SEQ ID NO: 497400 - DNA, 33 bp, Homo sapien
ttcatctctgcaaaacgctgatggtcttttctt

SEQ ID NO: 497401 - DNA, 33 bp, Homo sapien
aacatattattgaaaacgggagtgaacaattta

SEQ ID NO: 497402 - DNA, 33 bp, Homo sapien
aacatattattgaaaatgggagtgaacaattta

SEQ ID NO: 497403 - DNA, 33 bp, Homo sapien
cttattagctcttcaaagatacagtctccagta

SEQ ID NO: 497404 - DNA, 33 bp, Homo sapien
cttattagctcttcaaggatacagtctccagta

SEQ ID NO: 497405 - DNA, 33 bp, Homo sapien
tacaggcaattctccaagcaaatgtcatgatat

SEQ ID NO: 497406 - DNA, 33 bp, Homo sapien
tacaggcaattctccacgcaaatgtcatgatat

SEQ ID NO: 497407 - DNA, 33 bp, Homo sapien
cagagaagtgcacaaaaaaagccacaataagat

SEQ ID NO: 497408 - DNA, 33 bp, Homo sapien
cagagaagtgcacaaacaaagccacaataagat

SEQ ID NO: 497409 - DNA, 33 bp, Homo sapien
gacaagcctgtagagaaaagagaatacttatat

SEQ ID NO: 497410 - DNA, 33 bp, Homo sapien
gacaagcctgtagagagaagagaatacttatat

SEQ ID NO: 497411 - DNA, 33 bp, Homo sapien
attaattcttttgaaaattcactcaggtcaagt

SEQ ID NO: 497412 - DNA, 33 bp, Homo sapien
attaattcttttgaaagttcactcaggtcaagt

SEQ ID NO: 497413 - DNA, 33 bp, Homo sapien
cttaatcctctaaaacaaatctgtataaaatca

SEQ ID NO: 497414 - DNA, 33 bp, Homo sapien
cttaatcctctaaaactaatctgtataaaatca

SEQ ID NO: 497415 - DNA, 33 bp, Homo sapien
tttctctgttcagaagcccttaaccatgcagat

SEQ ID NO: 497416 - DNA, 33 bp, Homo sapien
tttctctgttcagaaggccttaaccatgcagat

SEQ ID NO: 497417 - DNA, 33 bp, Homo sapien
atttacacattaactacggcatgctctaaaacc

SEQ ID NO: 497418 - DNA, 33 bp, Homo sapien
atttacacattaactatggcatgctctaaaacc

SEQ ID NO: 497419 - DNA, 33 bp, Homo sapien
gattcagaacaacttacgtaatcttcctcgtgt

SEQ ID NO: 497420 - DNA, 33 bp, Homo sapien
gattcagaacaacttatgtaatcttcctcgtgt

SEQ ID NO: 497421 - DNA, 33 bp, Homo sapien
cactgtagggatcaccacatgggaataatgcaa

SEQ ID NO: 497422 - DNA, 33 bp, Homo sapien
cactgtagggatcacctcatgggaataatgcaa

SEQ ID NO: 497423 - DNA, 33 bp, Homo sapien
attggccatgctctctaacgtctccacatattt

SEQ ID NO: 497424 - DNA, 33 bp, Homo sapien
attggccatgctctcttacgtctccacatattt

SEQ ID NO: 497425 - DNA, 33 bp, Homo sapien
tatatcatataggtgagccatattgtactgtgg

SEQ ID NO: 497426 - DNA, 33 bp, Homo sapien
tatatcatataggtgatccatattgtactgtgg

SEQ ID NO: 497427 - DNA, 33 bp, Homo sapien
gataatatcgagactcactaatgggtgctatat

SEQ ID NO: 497428 - DNA, 33 bp, Homo sapien
gataatatcgagactcgctaatgggtgctatat

SEQ ID NO: 497429 - DNA, 33 bp, Homo sapien
atgaactgtaataaagaattggttgaatcagaa

SEQ ID NO: 497430 - DNA, 33 bp, Homo sapien
atgaactgtaataaaggattggttgaatcagaa

SEQ ID NO: 497431 - DNA, 33 bp, Homo sapien
agctaataagctccaccaactggaagccaacaa

SEQ ID NO: 497432 - DNA, 33 bp, Homo sapien
agctaataagctccacgaactggaagccaacaa

SEQ ID NO: 497433 - DNA, 33 bp, Homo sapien
cttataaaaacactgcccccaaactgaaggcta

SEQ ID NO: 497434 - DNA, 33 bp, Homo sapien
cttataaaaacactgctcccaaactgaaggcta

SEQ ID NO: 497435 - DNA, 33 bp, Homo sapien
aagaacattccttcaaacaatcacccaaatcct

SEQ ID NO: 497436 - DNA, 33 bp, Homo sapien
aagaacattccttcaaccaatcacccaaatcct

SEQ ID NO: 497437 - DNA, 33 bp, Homo sapien
taatgagcttagataactcagacgagcatcttt

SEQ ID NO: 497438 - DNA, 33 bp, Homo sapien
taatgagcttagataattcagacgagcatcttt

SEQ ID NO: 497439 - DNA, 33 bp, Homo sapien
gataaagagactgcaaacagggattagggagag

SEQ ID NO: 497440 - DNA, 33 bp, Homo sapien
gataaagagactgcaagcagggattagggagag

SEQ ID NO: 497441 - DNA, 33 bp, Homo sapien
agggataattctgggccagagaaagtaagagca

SEQ ID NO: 497442 - DNA, 33 bp, Homo sapien
agggataattctgggctagagaaagtaagagca

SEQ ID NO: 497443 - DNA, 33 bp, Homo sapien
ttagcagagatggtaactgcaggaagttgtttc

SEQ ID NO: 497444 - DNA, 33 bp, Homo sapien
ttagcagagatggtaattgcaggaagttgtttc

SEQ ID NO: 497445 - DNA, 33 bp, Homo sapien
ttttcatctttcatatcaggacaatggctttac

SEQ ID NO: 497446 - DNA, 33 bp, Homo sapien
ttttcatctttcatattaggacaatggctttac

SEQ ID NO: 497447 - DNA, 33 bp, Homo sapien
ggccagtggttctcacgcaaggacaatcttgcc

SEQ ID NO: 497448 - DNA, 33 bp, Homo sapien
ggccagtggttctcactcaaggacaatcttgcc

SEQ ID NO: 497449 - DNA, 33 bp, Homo sapien
cacctctgctttcaaaatatcagtctctctaca

SEQ ID NO: 497450 - DNA, 33 bp, Homo sapien
cacctctgctttcaaagtatcagtctctctaca

SEQ ID NO: 497451 - DNA, 33 bp, Homo sapien
aatctcctggaccaaacttgatttttctaacct

SEQ ID NO: 497452 - DNA, 33 bp, Homo sapien
aatctcctggaccaaagttgatttttctaacct

SEQ ID NO: 497453 - DNA, 33 bp, Homo sapien
tttctctagaataaatcagatgaactaagtata

SEQ ID NO: 497454 - DNA, 33 bp, Homo sapien
tttctctagaataaatgagatgaactaagtata

SEQ ID NO: 497455 - DNA, 33 bp, Homo sapien
cccaagactggattaaagtaagagaaattatga

SEQ ID NO: 497456 - DNA, 33 bp, Homo sapien
cccaagactggattaaggtaagagaaattatga

SEQ ID NO: 497457 - DNA, 33 bp, Homo sapien
tgcccactgaaacccaatatggttttatacttc

SEQ ID NO: 497458 - DNA, 33 bp, Homo sapien
tgcccactgaaacccagtatggttttatacttc

SEQ ID NO: 497459 - DNA, 33 bp, Homo sapien
gctaccttatgttcaacgtatgtaactgcccac

SEQ ID NO: 497460 - DNA, 33 bp, Homo sapien
gctaccttatgttcaatgtatgtaactgcccac

SEQ ID NO: 497461 - DNA, 33 bp, Homo sapien
aagaaagtcatgaatacgaagaagaagctctac

SEQ ID NO: 497462 - DNA, 33 bp, Homo sapien
aagaaagtcatgaatatgaagaagaagctctac

SEQ ID NO: 497463 - DNA, 33 bp, Homo sapien
taagtttaaatttagcaaacgttcagtggacat

SEQ ID NO: 497464 - DNA, 33 bp, Homo sapien
taagtttaaatttagcgaacgttcagtggacat

SEQ ID NO: 497465 - DNA, 33 bp, Homo sapien
actaacagttgctagaccattgtgggttactac

SEQ ID NO: 497466 - DNA, 33 bp, Homo sapien
actaacagttgctagatcattgtgggttactac

SEQ ID NO: 497467 - DNA, 33 bp, Homo sapien
agacaggccaaaatgacgaagacacagaaatta

SEQ ID NO: 497468 - DNA, 33 bp, Homo sapien
agacaggccaaaatgatgaagacacagaaatta

SEQ ID NO: 497469 - DNA, 33 bp, Homo sapien
cataaagcttgttgcacagtaaagtgtccctaa

SEQ ID NO: 497470 - DNA, 33 bp, Homo sapien
cataaagcttgttgcatagtaaagtgtccctaa

SEQ ID NO: 497471 - DNA, 33 bp, Homo sapien
tgttcctttatttaaactgagattctgagtatg

SEQ ID NO: 497472 - DNA, 33 bp, Homo sapien
tgttcctttatttaaattgagattctgagtatg

SEQ ID NO: 497473 - DNA, 33 bp, Homo sapien
ttaatttgatttcttcaaggtgtcaaaaagcaa

SEQ ID NO: 497474 - DNA, 33 bp, Homo sapien
ttaatttgatttcttccaggtgtcaaaaagcaa

SEQ ID NO: 497475 - DNA, 33 bp, Homo sapien
ctaacatatacagaaccatcatttttttttctg

SEQ ID NO: 497476 - DNA, 33 bp, Homo sapien
ctaacatatacagaacgatcatttttttttctg

SEQ ID NO: 497477 - DNA, 33 bp, Homo sapien
acatgaatgattcaaagaactggaatacagtaa

SEQ ID NO: 497478 - DNA, 33 bp, Homo sapien
acatgaatgattcaaataactggaatacagtaa

SEQ ID NO: 497479 - DNA, 33 bp, Homo sapien
ctctgaaaataattgtcaagtgtattggggcat

SEQ ID NO: 497480 - DNA, 33 bp, Homo sapien
ctctgaaaataattgtgaagtgtattggggcat

SEQ ID NO: 497481 - DNA, 33 bp, Homo sapien
aaggccctgtgaagtgcagaaaaggaatatgag

SEQ ID NO: 497482 - DNA, 33 bp, Homo sapien
aaggccctgtgaagtgtagaaaaggaatatgag

SEQ ID NO: 497483 - DNA, 33 bp, Homo sapien
atgggaatcctattaccacccgaattatagcat

SEQ ID NO: 497484 - DNA, 33 bp, Homo sapien
atgggaatcctattactacccgaattatagcat

SEQ ID NO: 497485 - DNA, 33 bp, Homo sapien
ttctgactcaaaagacagaactcagtccatttt

SEQ ID NO: 497486 - DNA, 33 bp, Homo sapien
ttctgactcaaaagacggaactcagtccatttt

SEQ ID NO: 497487 - DNA, 33 bp, Homo sapien
tatcacagtgttggccagactaagcttttgata

SEQ ID NO: 497488 - DNA, 33 bp, Homo sapien
tatcacagtgttggccggactaagcttttgata

SEQ ID NO: 497489 - DNA, 33 bp, Homo sapien
aaccaagggagcagaacgttccttctagtccta

SEQ ID NO: 497490 - DNA, 33 bp, Homo sapien
aaccaagggagcagaatgttccttctagtccta

SEQ ID NO: 497491 - DNA, 33 bp, Homo sapien
accacatggtcaatacagatgatggagatggga

SEQ ID NO: 497492 - DNA, 33 bp, Homo sapien
accacatggtcaatacggatgatggagatggga

SEQ ID NO: 497493 - DNA, 33 bp, Homo sapien
tttttaaaagatgagtaactacctgtaaaatac

SEQ ID NO: 497494 - DNA, 33 bp, Homo sapien
tttttaaaagatgagtgactacctgtaaaatac

SEQ ID NO: 497495 - DNA, 33 bp, Homo sapien
attttgtgtaaaataactgcttctatgatcaaa

SEQ ID NO: 497496 - DNA, 33 bp, Homo sapien
attttgtgtaaaataattgcttctatgatcaaa

SEQ ID NO: 497497 - DNA, 33 bp, Homo sapien
tatgactgtatgaacactgaatctagtctgcaa

SEQ ID NO: 497498 - DNA, 33 bp, Homo sapien
tatgactgtatgaacattgaatctagtctgcaa

SEQ ID NO: 497499 - DNA, 33 bp, Homo sapien
acactcacaggtccaacttactgcagcaaaatg

SEQ ID NO: 497500 - DNA, 33 bp, Homo sapien
acactcacaggtccaatttactgcagcaaaatg

SEQ ID NO: 497501 - DNA, 33 bp, Homo sapien
atgagaaagcagagaaaagaaatacatcaggaa

SEQ ID NO: 497502 - DNA, 33 bp, Homo sapien
atgagaaagcagagaagagaaatacatcaggaa

SEQ ID NO: 497503 - DNA, 33 bp, Homo sapien
ctttgtagcaactacaaaattggataaaataca

SEQ ID NO: 497504 - DNA, 33 bp, Homo sapien
ctttgtagcaactacataattggataaaataca

SEQ ID NO: 497505 - DNA, 33 bp, Homo sapien
ggaaagtgtgagcaagaacaaaacaacattggc

SEQ ID NO: 497506 - DNA, 33 bp, Homo sapien
ggaaagtgtgagcaaggacaaaacaacattggc

SEQ ID NO: 497507 - DNA, 33 bp, Homo sapien
gtttcctagctccataagctgtttactagatag

SEQ ID NO: 497508 - DNA, 33 bp, Homo sapien
gtttcctagctccatatgctgtttactagatag

SEQ ID NO: 497509 - DNA, 33 bp, Homo sapien
atttgatattcgatgaagtctaagagtcaataa

SEQ ID NO: 497510 - DNA, 33 bp, Homo sapien
atttgatattcgatgatgtctaagagtcaataa

SEQ ID NO: 497511 - DNA, 33 bp, Homo sapien
ttctaatcttcatgcaataatgcaaggttgtag

SEQ ID NO: 497512 - DNA, 33 bp, Homo sapien
ttctaatcttcatgcagtaatgcaaggttgtag

SEQ ID NO: 497513 - DNA, 33 bp, Homo sapien
aggtttgcatatactgcataaacccatgcaaaa

SEQ ID NO: 497514 - DNA, 33 bp, Homo sapien
aggtttgcatatactgtataaacccatgcaaaa

SEQ ID NO: 497515 - DNA, 33 bp, Homo sapien
atgtttaccactgtaccatgttaaaaatataca

SEQ ID NO: 497516 - DNA, 33 bp, Homo sapien
atgtttaccactgtacgatgttaaaaatataca

SEQ ID NO: 497517 - DNA, 33 bp, Homo sapien
aatgcataatttgacaacatggcatagtaggtc

SEQ ID NO: 497518 - DNA, 33 bp, Homo sapien
aatgcataatttgacagcatggcatagtaggtc

SEQ ID NO: 497519 - DNA, 33 bp, Homo sapien
actgcagtcctaacagaatggcccagatttgct

SEQ ID NO: 497520 - DNA, 33 bp, Homo sapien
actgcagtcctaacaggatggcccagatttgct

SEQ ID NO: 497521 - DNA, 33 bp, Homo sapien
agtagatggcttaccactcacttgtgctctcac

SEQ ID NO: 497522 - DNA, 33 bp, Homo sapien
agtagatggcttaccattcacttgtgctctcac

SEQ ID NO: 497523 - DNA, 33 bp, Homo sapien
taatccaggcttctaactctggccctctgattc

SEQ ID NO: 497524 - DNA, 33 bp, Homo sapien
taatccaggcttctaattctggccctctgattc

SEQ ID NO: 497525 - DNA, 33 bp, Homo sapien
tacgatgtagagttgacgtacagattactattt

SEQ ID NO: 497526 - DNA, 33 bp, Homo sapien
tacgatgtagagttgatgtacagattactattt

SEQ ID NO: 497527 - DNA, 33 bp, Homo sapien
tgtagtctcaggatcaagtgcatttaagtaaac

SEQ ID NO: 497528 - DNA, 33 bp, Homo sapien
tgtagtctcaggatcaggtgcatttaagtaaac

SEQ ID NO: 497529 - DNA, 33 bp, Homo sapien
tttaagtctcactgtacccctgttattaacact

SEQ ID NO: 497530 - DNA, 33 bp, Homo sapien
tttaagtctcactgtagccctgttattaacact

SEQ ID NO: 497531 - DNA, 33 bp, Homo sapien
cataacctactttagacagcagctgttcattag

SEQ ID NO: 497532 - DNA, 33 bp, Homo sapien
cataacctactttagatagcagctgttcattag

SEQ ID NO: 497533 - DNA, 33 bp, Homo sapien
tatagccaaattaagaaccatgagaaaagcaaa

SEQ ID NO: 497534 - DNA, 33 bp, Homo sapien
tatagccaaattaagagccatgagaaaagcaaa

SEQ ID NO: 497535 - DNA, 33 bp, Homo sapien
gatcaaggtatcctaccaaactgatacatagag

SEQ ID NO: 497536 - DNA, 33 bp, Homo sapien
gatcaaggtatcctactaaactgatacatagag

SEQ ID NO: 497537 - DNA, 33 bp, Homo sapien
gtattaaaaatggaaacttggccaaacaaaaaa

SEQ ID NO: 497538 - DNA, 33 bp, Homo sapien
gtattaaaaatggaaagttggccaaacaaaaaa

SEQ ID NO: 497539 - DNA, 33 bp, Homo sapien
ggtttccattcttccccaagtttggtaaagtcg

SEQ ID NO: 497540 - DNA, 33 bp, Homo sapien
ggtttccattcttccctaagtttggtaaagtcg

SEQ ID NO: 497541 - DNA, 33 bp, Homo sapien
acctaagcacttaaacagagagacctatataaa

SEQ ID NO: 497542 - DNA, 33 bp, Homo sapien
acctaagcacttaaacggagagacctatataaa

SEQ ID NO: 497543 - DNA, 33 bp, Homo sapien
tgtttcgtgaccagtacgttttgtttagtgtgc

SEQ ID NO: 497544 - DNA, 33 bp, Homo sapien
tgtttcgtgaccagtatgttttgtttagtgtgc

SEQ ID NO: 497545 - DNA, 33 bp, Homo sapien
ggaagtacctcttctcaaatgttgttatgactt

SEQ ID NO: 497546 - DNA, 33 bp, Homo sapien
ggaagtacctcttctccaatgttgttatgactt

SEQ ID NO: 497547 - DNA, 33 bp, Homo sapien
tattcatcataaggaaagttataattcaataga

SEQ ID NO: 497548 - DNA, 33 bp, Homo sapien
tattcatcataaggaaggttataattcaataga

SEQ ID NO: 497549 - DNA, 33 bp, Homo sapien
ttttctcactttcagcaaaactcttacctttga

SEQ ID NO: 497550 - DNA, 33 bp, Homo sapien
ttttctcactttcagcgaaactcttacctttga

SEQ ID NO: 497551 - DNA, 33 bp, Homo sapien
ttagacatatttatcaaaaaaggacatcccact

SEQ ID NO: 497552 - DNA, 33 bp, Homo sapien
ttagacatatttatcataaaaggacatcccact

SEQ ID NO: 497553 - DNA, 33 bp, Homo sapien
cattggaattctgcataagtaagtgtacacaag

SEQ ID NO: 497554 - DNA, 33 bp, Homo sapien
cattggaattctgcatgagtaagtgtacacaag

SEQ ID NO: 497555 - DNA, 33 bp, Homo sapien
tgatcaattccagaaaatgagactcctcaaacc

SEQ ID NO: 497556 - DNA, 33 bp, Homo sapien
tgatcaattccagaaactgagactcctcaaacc

SEQ ID NO: 497557 - DNA, 33 bp, Homo sapien
gtatcaccgatttgatgagctgtttgtctctaa

SEQ ID NO: 497558 - DNA, 33 bp, Homo sapien
gtatcaccgatttgattagctgtttgtctctaa

SEQ ID NO: 497559 - DNA, 33 bp, Homo sapien
tgcccaaaaaagaaaacagctgaatattggtga

SEQ ID NO: 497560 - DNA, 33 bp, Homo sapien
tgcccaaaaaagaaaagagctgaatattggtga

SEQ ID NO: 497561 - DNA, 33 bp, Homo sapien
ctcgataatttcatagcaagtctccttaagcac

SEQ ID NO: 497562 - DNA, 33 bp, Homo sapien
ctcgataatttcatagtaagtctccttaagcac

SEQ ID NO: 497563 - DNA, 33 bp, Homo sapien
agagcacacttcaaaacttaaaagttcagtttc

SEQ ID NO: 497564 - DNA, 33 bp, Homo sapien
agagcacacttcaaaatttaaaagttcagtttc

SEQ ID NO: 497565 - DNA, 33 bp, Homo sapien
ggtaaggaataattacaaatggaaagagctacc

SEQ ID NO: 497566 - DNA, 33 bp, Homo sapien
ggtaaggaataattacgaatggaaagagctacc

SEQ ID NO: 497567 - DNA, 33 bp, Homo sapien
atttctcttgaacatgaattcaaaggcagaaaa

SEQ ID NO: 497568 - DNA, 33 bp, Homo sapien
atttctcttgaacatgcattcaaaggcagaaaa

SEQ ID NO: 497569 - DNA, 33 bp, Homo sapien
ctgaaagaaatctcaacgtacgcctgatgttaa

SEQ ID NO: 497570 - DNA, 33 bp, Homo sapien
ctgaaagaaatctcaatgtacgcctgatgttaa

SEQ ID NO: 497571 - DNA, 33 bp, Homo sapien
tctctagttagactgacacaattctcaagtgaa

SEQ ID NO: 497572 - DNA, 33 bp, Homo sapien
tctctagttagactgatacaattctcaagtgaa

SEQ ID NO: 497573 - DNA, 33 bp, Homo sapien
taaaatctgaaaggtagaaaagctggagaaatt

SEQ ID NO: 497574 - DNA, 33 bp, Homo sapien
taaaatctgaaaggtataaaagctggagaaatt

SEQ ID NO: 497575 - DNA, 33 bp, Homo sapien
ttaacagcttaagtgaatcaacttttaaaatct

SEQ ID NO: 497576 - DNA, 33 bp, Homo sapien
ttaacagcttaagtgattcaacttttaaaatct

SEQ ID NO: 497577 - DNA, 33 bp, Homo sapien
tgacaaaagccccagacaatggctgatacggag

SEQ ID NO: 497578 - DNA, 33 bp, Homo sapien
tgacaaaagccccagataatggctgatacggag

SEQ ID NO: 497579 - DNA, 33 bp, Homo sapien
taatggagaagaccacacaattactaacccttt

SEQ ID NO: 497580 - DNA, 33 bp, Homo sapien
taatggagaagaccacgcaattactaacccttt

SEQ ID NO: 497581 - DNA, 33 bp, Homo sapien
agtatgcagtccctgaacacacttaatgttaaa

SEQ ID NO: 497582 - DNA, 33 bp, Homo sapien
agtatgcagtccctgagcacacttaatgttaaa

SEQ ID NO: 497583 - DNA, 33 bp, Homo sapien
ttacaataatttcgaaactaagcctttaagaaa

SEQ ID NO: 497584 - DNA, 33 bp, Homo sapien
ttacaataatttcgaacctaagcctttaagaaa

SEQ ID NO: 497585 - DNA, 33 bp, Homo sapien
ttttcttttccaccgaaccattgcaagaagact

SEQ ID NO: 497586 - DNA, 33 bp, Homo sapien
ttttcttttccaccgacccattgcaagaagact

SEQ ID NO: 497587 - DNA, 33 bp, Homo sapien
aatatttcaaatgtacagaacacaaataaggca

SEQ ID NO: 497588 - DNA, 33 bp, Homo sapien
aatatttcaaatgtacggaacacaaataaggca

SEQ ID NO: 497589 - DNA, 33 bp, Homo sapien
acacatacaggataacagtaatagaagctccca

SEQ ID NO: 497590 - DNA, 33 bp, Homo sapien
acacatacaggataactgtaatagaagctccca

SEQ ID NO: 497591 - DNA, 33 bp, Homo sapien
gttgggggtgcagagacagtatgaccatatttt

SEQ ID NO: 497592 - DNA, 33 bp, Homo sapien
gttgggggtgcagagagagtatgaccatatttt

SEQ ID NO: 497593 - DNA, 33 bp, Homo sapien
gtataatcacttatcacgtttttgcttgcatca

SEQ ID NO: 497594 - DNA, 33 bp, Homo sapien
gtataatcacttatcatgtttttgcttgcatca

SEQ ID NO: 497595 - DNA, 33 bp, Homo sapien
tttccagacatccttaaagaaacagtgtactag

SEQ ID NO: 497596 - DNA, 33 bp, Homo sapien
tttccagacatccttagagaaacagtgtactag

SEQ ID NO: 497597 - DNA, 33 bp, Homo sapien
tcccactaattatgaacgtactgatttttatca

SEQ ID NO: 497598 - DNA, 33 bp, Homo sapien
tcccactaattatgaaggtactgatttttatca

SEQ ID NO: 497599 - DNA, 33 bp, Homo sapien
ttcttagaaatggcaaagattcttattcctctt

SEQ ID NO: 497600 - DNA, 33 bp, Homo sapien
ttcttagaaatggcaaggattcttattcctctt

SEQ ID NO: 497601 - DNA, 33 bp, Homo sapien
gctactaaatacgtaccacaatggcatctaaca

SEQ ID NO: 497602 - DNA, 33 bp, Homo sapien
gctactaaatacgtactacaatggcatctaaca

SEQ ID NO: 497603 - DNA, 33 bp, Homo sapien
ataatactctagtccaggaaattgtaaaatatc

SEQ ID NO: 497604 - DNA, 33 bp, Homo sapien
ataatactctagtccatgaaattgtaaaatatc

SEQ ID NO: 497605 - DNA, 33 bp, Homo sapien
atacttctggtgaactaaatgattacagcctag

SEQ ID NO: 497606 - DNA, 33 bp, Homo sapien
atacttctggtgaactcaatgattacagcctag

SEQ ID NO: 497607 - DNA, 33 bp, Homo sapien
tctttgttggaaaaccaggatccgtgaagccca

SEQ ID NO: 497608 - DNA, 33 bp, Homo sapien
tctttgttggaaaaccgggatccgtgaagccca

SEQ ID NO: 497609 - DNA, 33 bp, Homo sapien
agaatatgctcatgcaaaacaagttagcaatca

SEQ ID NO: 497610 - DNA, 33 bp, Homo sapien
agaatatgctcatgcagaacaagttagcaatca

SEQ ID NO: 497611 - DNA, 33 bp, Homo sapien
tttgctaaagatgtctcaagatgtagtaggggt

SEQ ID NO: 497612 - DNA, 33 bp, Homo sapien
tttgctaaagatgtctgaagatgtagtaggggt

SEQ ID NO: 497613 - DNA, 33 bp, Homo sapien
ttctacttctgtaaaacggaaaagtaattttat

SEQ ID NO: 497614 - DNA, 33 bp, Homo sapien
ttctacttctgtaaaatggaaaagtaattttat

SEQ ID NO: 497615 - DNA, 33 bp, Homo sapien
ttgttctgaggagtcaataacagggcaggccag

SEQ ID NO: 497616 - DNA, 33 bp, Homo sapien
ttgttctgaggagtcagtaacagggcaggccag

SEQ ID NO: 497617 - DNA, 33 bp, Homo sapien
ctctggataaccataaaaaaatatgcatatatc

SEQ ID NO: 497618 - DNA, 33 bp, Homo sapien
ctctggataaccataacaaaatatgcatatatc

SEQ ID NO: 497619 - DNA, 33 bp, Homo sapien
ctttatgtaaatgtcaaaagtcttactgaccaa

SEQ ID NO: 497620 - DNA, 33 bp, Homo sapien
ctttatgtaaatgtcagaagtcttactgaccaa

SEQ ID NO: 497621 - DNA, 33 bp, Homo sapien
tccaggtggcacataaatgggtatcacacagaa

SEQ ID NO: 497622 - DNA, 33 bp, Homo sapien
tccaggtggcacataagtgggtatcacacagaa

SEQ ID NO: 497623 - DNA, 33 bp, Homo sapien
tttttctttccttgaccaacatcactggattta

SEQ ID NO: 497624 - DNA, 33 bp, Homo sapien
tttttctttccttgactaacatcactggattta

SEQ ID NO: 497625 - DNA, 33 bp, Homo sapien
atgttaacttgagtgactaccactgtttacttc

SEQ ID NO: 497626 - DNA, 33 bp, Homo sapien
atgttaacttgagtgattaccactgtttacttc

SEQ ID NO: 497627 - DNA, 33 bp, Homo sapien
aatttatggtgaatagaagagctttagaatatt

SEQ ID NO: 497628 - DNA, 33 bp, Homo sapien
aatttatggtgaatagcagagctttagaatatt

SEQ ID NO: 497629 - DNA, 33 bp, Homo sapien
tcatggaaatcatttgcagtgccatccaatatg

SEQ ID NO: 497630 - DNA, 33 bp, Homo sapien
tcatggaaatcatttgtagtgccatccaatatg

SEQ ID NO: 497631 - DNA, 33 bp, Homo sapien
acaggaaccaagttaaatacacacaggacaatg

SEQ ID NO: 497632 - DNA, 33 bp, Homo sapien
acaggaaccaagttaagtacacacaggacaatg

SEQ ID NO: 497633 - DNA, 33 bp, Homo sapien
tatcttaaattcagtcagagcggaaaaaacaga

SEQ ID NO: 497634 - DNA, 33 bp, Homo sapien
tatcttaaattcagtcggagcggaaaaaacaga

SEQ ID NO: 497635 - DNA, 33 bp, Homo sapien; identical to SEQ ID NO: 497633

SEQ ID NO: 497636 - DNA, 33 bp, Homo sapien; identical to SEQ ID NO: 497634

SEQ ID NO: 497637 - DNA, 33 bp, Homo sapien
ctcaatgaattcacacagataattttctagaag

SEQ ID NO: 497638 - DNA, 33 bp, Homo sapien
ctcaatgaattcacacggataattttctagaag

SEQ ID NO: 497639 - DNA, 33 bp, Homo sapien
cttccagaaattatcacatatggtctgaaaaag

SEQ ID NO: 497640 - DNA, 33 bp, Homo sapien
cttccagaaattatcatatatggtctgaaaaag

SEQ ID NO: 497641 - DNA, 33 bp, Homo sapien
caaatagacagtagcaaattatttttcatgtct

SEQ ID NO: 497642 - DNA, 33 bp, Homo sapien
caaatagacagtagcagattatttttcatgtct

SEQ ID NO: 497643 - DNA, 33 bp, Homo sapien
tttcccaaaggagttcaagtttgtccttagata

SEQ ID NO: 497644 - DNA, 33 bp, Homo sapien
tttcccaaaggagttcgagtttgtccttagata

SEQ ID NO: 497645 - DNA, 33 bp, Homo sapien
gtcatattttggtctccatccaccagatgcatg

SEQ ID NO: 497646 - DNA, 33 bp, Homo sapien
gtcatattttggtctctatccaccagatgcatg

SEQ ID NO: 497647 - DNA, 33 bp, Homo sapien
taaacctacactatcccctgagaattagtcagg

SEQ ID NO: 497648 - DNA, 33 bp, Homo sapien
taaacctacactatcctctgagaattagtcagg

SEQ ID NO: 497649 - DNA, 33 bp, Homo sapien
aatagcatcgatgacaaccttccctgtagtgtc

SEQ ID NO: 497650 - DNA, 33 bp, Homo sapien
aatagcatcgatgacatccttccctgtagtgtc

SEQ ID NO: 497651 - DNA, 33 bp, Homo sapien
acaagaaggcagacagaagtgaagatccagagc

SEQ ID NO: 497652 - DNA, 33 bp, Homo sapien
acaagaaggcagacaggagtgaagatccagagc

SEQ ID NO: 497653 - DNA, 33 bp, Homo sapien
tccacataagatcatgaactctcaagtaaaggc

SEQ ID NO: 497654 - DNA, 33 bp, Homo sapien
tccacataagatcatgtactctcaagtaaaggc

SEQ ID NO: 497655 - DNA, 33 bp, Homo sapien
agaatcacaaagcaaaagtaaaaattaggagtg

SEQ ID NO: 497656 - DNA, 33 bp, Homo sapien
agaatcacaaagcaaacgtaaaaattaggagtg

SEQ ID NO: 497657 - DNA, 33 bp, Homo sapien
aggttgagaattcccaagattggattttccata

SEQ ID NO: 497658 - DNA, 33 bp, Homo sapien
aggttgagaattcccaggattggattttccata

SEQ ID NO: 497659 - DNA, 33 bp, Homo sapien
gagtttggtgaatgacagatttgttgacttttc

SEQ ID NO: 497660 - DNA, 33 bp, Homo sapien
gagtttggtgaatgacggatttgttgacttttc

SEQ ID NO: 497661 - DNA, 33 bp, Homo sapien
aagacaatagttggcaccagaaatgtgtgaagc

SEQ ID NO: 497662 - DNA, 33 bp, Homo sapien
aagacaatagttggcatcagaaatgtgtgaagc

SEQ ID NO: 497663 - DNA, 33 bp, Homo sapien
atattctaaagcaagacccattgcaatctgctt

SEQ ID NO: 497664 - DNA, 33 bp, Homo sapien
atattctaaagcaagatccattgcaatctgctt

SEQ ID NO: 497665 - DNA, 33 bp, Homo sapien
agaatatctaagacctcagatagggaagttgct

SEQ ID NO: 497666 - DNA, 33 bp, Homo sapien
agaatatctaagacctgagatagggaagttgct

SEQ ID NO: 497667 - DNA, 33 bp, Homo sapien
attttggttgtgtcaccaagttggttagggcat

SEQ ID NO: 497668 - DNA, 33 bp, Homo sapien
attttggttgtgtcactaagttggttagggcat

SEQ ID NO: 497669 - DNA, 33 bp, Homo sapien
ggagacagaagacccacgctatacttgctgcta

SEQ ID NO: 497670 - DNA, 33 bp, Homo sapien
ggagacagaagacccatgctatacttgctgcta

SEQ ID NO: 497671 - DNA, 33 bp, Homo sapien
tggtatagtttaccaacgacaccattctagact

SEQ ID NO: 497672 - DNA, 33 bp, Homo sapien
tggtatagtttaccaatgacaccattctagact

SEQ ID NO: 497673 - DNA, 33 bp, Homo sapien
tctttaaaacatgacaatagagagacacaataa

SEQ ID NO: 497674 - DNA, 33 bp, Homo sapien
tctttaaaacatgacagtagagagacacaataa

SEQ ID NO: 497675 - DNA, 33 bp, Homo sapien
ttttgaatttgcataaacggttgagttttacat

SEQ ID NO: 497676 - DNA, 33 bp, Homo sapien
ttttgaatttgcataagcggttgagttttacat

SEQ ID NO: 497677 - DNA, 33 bp, Homo sapien
attttaaatgagaaaaggtcttagtatgtgctg

SEQ ID NO: 497678 - DNA, 33 bp, Homo sapien
attttaaatgagaaaatgtcttagtatgtgctg

SEQ ID NO: 497679 - DNA, 33 bp, Homo sapien
ggcatatattttccaactgagctccaggtccaa

SEQ ID NO: 497680 - DNA, 33 bp, Homo sapien
ggcatatattttccaattgagctccaggtccaa

SEQ ID NO: 497681 - DNA, 33 bp, Homo sapien
cgtagagggatgtagacgtataagtgctgcctt

SEQ ID NO: 497682 - DNA, 33 bp, Homo sapien
cgtagagggatgtagatgtataagtgctgcctt

SEQ ID NO: 497683 - DNA, 33 bp, Homo sapien
ttattattttctgatacgacattggaagcatat

SEQ ID NO: 497684 - DNA, 33 bp, Homo sapien
ttattattttctgatatgacattggaagcatat

SEQ ID NO: 497685 - DNA, 33 bp, Homo sapien
ttcaaaatattgcaaagggcaaactgtttttca

SEQ ID NO: 497686 - DNA, 33 bp, Homo sapien
ttcaaaatattgcaaatggcaaactgtttttca

SEQ ID NO: 497687 - DNA, 33 bp, Homo sapien
tgtctaatgaatcacaaagtttaaatacttctt

SEQ ID NO: 497688 - DNA, 33 bp, Homo sapien
tgtctaatgaatcacagagtttaaatacttctt

SEQ ID NO: 497689 - DNA, 33 bp, Homo sapien
tataaagagaagtgaaagccaagttcctgaatc

SEQ ID NO: 497690 - DNA, 33 bp, Homo sapien
tataaagagaagtgaatgccaagttcctgaatc

SEQ ID NO: 497691 - DNA, 33 bp, Homo sapien
attgttttaattcatgccagtttggtaatacat

SEQ ID NO: 497692 - DNA, 33 bp, Homo sapien
attgttttaattcatgtcagtttggtaatacat

SEQ ID NO: 497693 - DNA, 33 bp, Homo sapien
ggtgtttctttccttacgaagtttctcacatca

SEQ ID NO: 497694 - DNA, 33 bp, Homo sapien
ggtgtttctttccttatgaagtttctcacatca

SEQ ID NO: 497695 - DNA, 33 bp, Homo sapien
tagggatttcgggctgcactataggcacataaa

SEQ ID NO: 497696 - DNA, 33 bp, Homo sapien
tagggatttcgggctgtactataggcacataaa

SEQ ID NO: 497697 - DNA, 33 bp, Homo sapien
tactgtaagctcaggaaactctgttgatatcaa

SEQ ID NO: 497698 - DNA, 33 bp, Homo sapien
tactgtaagctcaggagactctgttgatatcaa

SEQ ID NO: 497699 - DNA, 33 bp, Homo sapien
tatcttcattctctacaatttctatccatcctt

SEQ ID NO: 497700 - DNA, 33 bp, Homo sapien
tatcttcattctctaccatttctatccatcctt

SEQ ID NO: 497701 - DNA, 33 bp, Homo sapien
ttttcaggcatttgacactacaagttgtttaat

SEQ ID NO: 497702 - DNA, 33 bp, Homo sapien
ttttcaggcatttgactctacaagttgtttaat

SEQ ID NO: 497703 - DNA, 33 bp, Homo sapien
gtttgctaagaataataaccgccaactcctttt

SEQ ID NO: 497704 - DNA, 33 bp, Homo sapien
gtttgctaagaataatgaccgccaactcctttt

SEQ ID NO: 497705 - DNA, 33 bp, Homo sapien
tgctcatgattgactacggattatgacatcttt

SEQ ID NO: 497706 - DNA, 33 bp, Homo sapien
tgctcatgattgactagggattatgacatcttt

SEQ ID NO: 497707 - DNA, 33 bp, Homo sapien
tgcacactaatgctacactcattaaaaagtaca

SEQ ID NO: 497708 - DNA, 33 bp, Homo sapien
tgcacactaatgctacgctcattaaaaagtaca

SEQ ID NO: 497709 - DNA, 33 bp, Homo sapien
tgactaatgaatgtgcgcttcaaaatgctttct

SEQ ID NO: 497710 - DNA, 33 bp, Homo sapien
tgactaatgaatgtgctcttcaaaatgctttct

SEQ ID NO: 497711 - DNA, 33 bp, Homo sapien
cgccttctttcttcaacggtagttcatttagat

SEQ ID NO: 497712 - DNA, 33 bp, Homo sapien
cgccttctttcttcaatggtagttcatttagat

SEQ ID NO: 497713 - DNA, 33 bp, Homo sapien
tctccaggagacattagataaagaagtgaaaga

SEQ ID NO: 497714 - DNA, 33 bp, Homo sapien
tctccaggagacattatataaagaagtgaaaga

SEQ ID NO: 497715 - DNA, 33 bp, Homo sapien
cagataaatgtagataaggatatagatgtgaat

SEQ ID NO: 497716 - DNA, 33 bp, Homo sapien
cagataaatgtagatatggatatagatgtgaat

SEQ ID NO: 497717 - DNA, 33 bp, Homo sapien
aaatatgaggaccaaaatctttagggcttaaga

SEQ ID NO: 497718 - DNA, 33 bp, Homo sapien
aaatatgaggaccaaagtctttagggcttaaga

SEQ ID NO: 497719 - DNA, 33 bp, Homo sapien
atttccactttgcacaatacctagtatggacat

SEQ ID NO: 497720 - DNA, 33 bp, Homo sapien
atttccactttgcacagtacctagtatggacat

SEQ ID NO: 497721 - DNA, 33 bp, Homo sapien
gatatcctctgctctcaaatcccataacttgtg

SEQ ID NO: 497722 - DNA, 33 bp, Homo sapien
gatatcctctgctctcgaatcccataacttgtg

SEQ ID NO: 497723 - DNA, 33 bp, Homo sapien
gtgaaaacatttaactcagaaactaatcaatca

SEQ ID NO: 497724 - DNA, 33 bp, Homo sapien
gtgaaaacatttaacttagaaactaatcaatca

SEQ ID NO: 497725 - DNA, 33 bp, Homo sapien
acaagaggtaagagcaatgaagaatcagcaaga

SEQ ID NO: 497726 - DNA, 33 bp, Homo sapien
acaagaggtaagagcagtgaagaatcagcaaga

SEQ ID NO: 497727 - DNA, 33 bp, Homo sapien
caaaggctacagattcacttggatggaacaagc

SEQ ID NO: 497728 - DNA, 33 bp, Homo sapien
caaaggctacagattcgcttggatggaacaagc

SEQ ID NO: 497729 - DNA, 33 bp, Homo sapien
tgataggattgcctctcaaaatgtagccaatga

SEQ ID NO: 497730 - DNA, 33 bp, Homo sapien
tgataggattgcctctgaaaatgtagccaatga

SEQ ID NO: 497731 - DNA, 33 bp, Homo sapien
attacgtatgaactcaatctcactctaactaat

SEQ ID NO: 497732 - DNA, 33 bp, Homo sapien
attacgtatgaactcattctcactctaactaat

SEQ ID NO: 497733 - DNA, 33 bp, Homo sapien
ttactatcataacaaagcatggctaaaatactt

SEQ ID NO: 497734 - DNA, 33 bp, Homo sapien
ttactatcataacaaatcatggctaaaatactt

SEQ ID NO: 497735 - DNA, 33 bp, Homo sapien
acaaaaaaagatcaaacagtcagtccactttgt

SEQ ID NO: 497736 - DNA, 33 bp, Homo sapien
acaaaaaaagatcaaatagtcagtccactttgt

SEQ ID NO: 497737 - DNA, 33 bp, Homo sapien
tttctttgcaccatgaacattggtccacaacta

SEQ ID NO: 497738 - DNA, 33 bp, Homo sapien
tttctttgcaccatgaccattggtccacaacta

SEQ ID NO: 497739 - DNA, 33 bp, Homo sapien
caccattcatcaggtcccaagttcttgtcgcaa

SEQ ID NO: 497740 - DNA, 33 bp, Homo sapien
caccattcatcaggtctcaagttcttgtcgcaa

SEQ ID NO: 497741 - DNA, 33 bp, Homo sapien
gaaattatcagtgatcagaaacatactcgccaa

SEQ ID NO: 497742 - DNA, 33 bp, Homo sapien
gaaattatcagtgatccgaaacatactcgccaa

SEQ ID NO: 497743 - DNA, 33 bp, Homo sapien
gtgagtgctcttaacacatggtagctattattg

SEQ ID NO: 497744 - DNA, 33 bp, Homo sapien
gtgagtgctcttaacatatggtagctattattg

SEQ ID NO: 497745 - DNA, 33 bp, Homo sapien
acaggcagactatgtaactatgtcaatctgtat

SEQ ID NO: 497746 - DNA, 33 bp, Homo sapien
acaggcagactatgtagctatgtcaatctgtat

SEQ ID NO: 497747 - DNA, 33 bp, Homo sapien
gttgagcctgaaggacggacaggttagcagaca

SEQ ID NO: 497748 - DNA, 33 bp, Homo sapien
gttgagcctgaaggactgacaggttagcagaca

SEQ ID NO: 497749 - DNA, 33 bp, Homo sapien
aggcagttcttcttcccattgacacatttctgg

SEQ ID NO: 497750 - DNA, 33 bp, Homo sapien
aggcagttcttcttcctattgacacatttctgg

SEQ ID NO: 497751 - DNA, 33 bp, Homo sapien
atctagtggagcccaacaggagataccaaagaa

SEQ ID NO: 497752 - DNA, 33 bp, Homo sapien
atctagtggagcccaataggagataccaaagaa

SEQ ID NO: 497753 - DNA, 33 bp, Homo sapien
tctcaataattgttaacagtcggccttttttct

SEQ ID NO: 497754 - DNA, 33 bp, Homo sapien
tctcaataattgttaagagtcggccttttttct

SEQ ID NO: 497755 - DNA, 33 bp, Homo sapien
taccattaaatgactacggtgatttggagcaat

SEQ ID NO: 497756 - DNA, 33 bp, Homo sapien
taccattaaatgactatggtgatttggagcaat

SEQ ID NO: 497757 - DNA, 33 bp, Homo sapien
tccaggagaatgaatcaatgtaatgcagggaga

SEQ ID NO: 497758 - DNA, 33 bp, Homo sapien
tccaggagaatgaatccatgtaatgcagggaga

SEQ ID NO: 497759 - DNA, 33 bp, Homo sapien
attgctgtggatcatcacaaatagatattttta

SEQ ID NO: 497760 - DNA, 33 bp, Homo sapien
attgctgtggatcatcgcaaatagatattttta

SEQ ID NO: 497761 - DNA, 33 bp, Homo sapien
atacattgaattactgaatcaagctgtatctga

SEQ ID NO: 497762 - DNA, 33 bp, Homo sapien
atacattgaattactggatcaagctgtatctga

SEQ ID NO: 497763 - DNA, 33 bp, Homo sapien
ggaaagtaaaatttgcacaagacaatcaaataa

SEQ ID NO: 497764 - DNA, 33 bp, Homo sapien
ggaaagtaaaatttgcgcaagacaatcaaataa

SEQ ID NO: 497765 - DNA, 33 bp, Homo sapien
gtattagtaggagattaaaacatttagacttgg

SEQ ID NO: 497766 - DNA, 33 bp, Homo sapien
gtattagtaggagattcaaacatttagacttgg

SEQ ID NO: 497767 - DNA, 33 bp, Homo sapien
gtggtaaaatacacgtaacagaatttaccattt

SEQ ID NO: 497768 - DNA, 33 bp, Homo sapien
gtggtaaaatacacgtgacagaatttaccattt

SEQ ID NO: 497769 - DNA, 33 bp, Homo sapien
gtggagaggttatcttcaaatttttctgcttat

SEQ ID NO: 497770 - DNA, 33 bp, Homo sapien
gtggagaggttatcttgaaatttttctgcttat

SEQ ID NO: 497771 - DNA, 33 bp, Homo sapien
gtaaagaactgccagaagttgggtaatttataa

SEQ ID NO: 497772 - DNA, 33 bp, Homo sapien
gtaaagaactgccagaggttgggtaatttataa

SEQ ID NO: 497773 - DNA, 33 bp, Homo sapien
atgtacacactttttacagttgtagaatgaatg

SEQ ID NO: 497774 - DNA, 33 bp, Homo sapien
atgtacacactttttatagttgtagaatgaatg

SEQ ID NO: 497775 - DNA, 33 bp, Homo sapien
acctatgcggtaaaagacatcagcaaattttaa

SEQ ID NO: 497776 - DNA, 33 bp, Homo sapien
acctatgcggtaaaaggcatcagcaaattttaa

SEQ ID NO: 497777 - DNA, 33 bp, Homo sapien
tgagtaaaatttggaaagagttcagttgggaaa

SEQ ID NO: 497778 - DNA, 33 bp, Homo sapien
tgagtaaaatttggaatgagttcagttgggaaa

SEQ ID NO: 497779 - DNA, 33 bp, Homo sapien
agcagaatgtaatacacagtgtaacagattgtc

SEQ ID NO: 497780 - DNA, 33 bp, Homo sapien
agcagaatgtaatacatagtgtaacagattgtc

SEQ ID NO: 497781 - DNA, 33 bp, Homo sapien
aactttttgttgctaacagaacttgacttgtgt

SEQ ID NO: 497782 - DNA, 33 bp, Homo sapien
aactttttgttgctaatagaacttgacttgtgt

SEQ ID NO: 497783 - DNA, 33 bp, Homo sapien
agaggacaaactgcagacctcaccgccactgca

SEQ ID NO: 497784 - DNA, 33 bp, Homo sapien
agaggacaaactgcaggcctcaccgccactgca

SEQ ID NO: 497785 - DNA, 33 bp, Homo sapien
gcactgactggtgaaacagcaaagaccctgagt

SEQ ID NO: 497786 - DNA, 33 bp, Homo sapien
gcactgactggtgaaagagcaaagaccctgagt

SEQ ID NO: 497787 - DNA, 33 bp, Homo sapien
ttgggagttcacaatacacaccatggaatacta

SEQ ID NO: 497788 - DNA, 33 bp, Homo sapien
ttgggagttcacaatatacaccatggaatacta

SEQ ID NO: 497789 - DNA, 33 bp, Homo sapien
aatggcatcaaaatagaaagacaagatgtcaaa

SEQ ID NO: 497790 - DNA, 33 bp, Homo sapien
aatggcatcaaaataggaagacaagatgtcaaa

SEQ ID NO: 497791 - DNA, 33 bp, Homo sapien
tcagtttagataatagaccccatgcagagagct

SEQ ID NO: 497792 - DNA, 33 bp, Homo sapien
tcagtttagataatagcccccatgcagagagct

SEQ ID NO: 497793 - DNA, 33 bp, Homo sapien
actagaagagtgtgtcaattgtaacacaaagaa

SEQ ID NO: 497794 - DNA, 33 bp, Homo sapien
actagaagagtgtgtcgattgtaacacaaagaa

SEQ ID NO: 497795 - DNA, 33 bp, Homo sapien
ggcatagtgtgagaacaatgtcttaccaaatag

SEQ ID NO: 497796 - DNA, 33 bp, Homo sapien
ggcatagtgtgagaacgatgtcttaccaaatag

SEQ ID NO: 497797 - DNA, 33 bp, Homo sapien
ttcgtaggtaaggaaacaatttagcagctaaga

SEQ ID NO: 497798 - DNA, 33 bp, Homo sapien
ttcgtaggtaaggaaataatttagcagctaaga

SEQ ID NO: 497799 - DNA, 33 bp, Homo sapien
atttgaaaacaatgagaaaatatgcatagtttc

SEQ ID NO: 497800 - DNA, 33 bp, Homo sapien
atttgaaaacaatgaggaaatatgcatagtttc

SEQ ID NO: 497801 - DNA, 33 bp, Homo sapien
cattctcaatgctatacggttttattaaggaaa

SEQ ID NO: 497802 - DNA, 33 bp, Homo sapien
cattctcaatgctatatggttttattaaggaaa

SEQ ID NO: 497803 - DNA, 33 bp, Homo sapien
cacacttttcgtggtgaattaacttccaaaaat

SEQ ID NO: 497804 - DNA, 33 bp, Homo sapien
cacacttttcgtggtggattaacttccaaaaat

SEQ ID NO: 497805 - DNA, 33 bp, Homo sapien
caaattgatgaagtcacggagaaatcttttgta

SEQ ID NO: 497806 - DNA, 33 bp, Homo sapien
caaattgatgaagtcatggagaaatcttttgta

SEQ ID NO: 497807 - DNA, 33 bp, Homo sapien
ttcaaggtttgataggaagttgttgggcagatg

SEQ ID NO: 497808 - DNA, 33 bp, Homo sapien
ttcaaggtttgataggtagttgttgggcagatg

SEQ ID NO: 497809 - DNA, 33 bp, Homo sapien
attataagcaacaaaaattggattaatacaatg

SEQ ID NO: 497810 - DNA, 33 bp, Homo sapien
attataagcaacaaaagttggattaatacaatg

SEQ ID NO: 497811 - DNA, 33 bp, Homo sapien
ttgtcagaggtcagaaacataactgaaagcatt

SEQ ID NO: 497812 - DNA, 33 bp, Homo sapien
ttgtcagaggtcagaagcataactgaaagcatt

SEQ ID NO: 497813 - DNA, 33 bp, Homo sapien
acatctttgaattccacaaggaaacaccaacaa

SEQ ID NO: 497814 - DNA, 33 bp, Homo sapien
acatctttgaattccataaggaaacaccaacaa

SEQ ID NO: 497815 - DNA, 33 bp, Homo sapien
cttctctgaaagaactaaacctgcatctggaaa

SEQ ID NO: 497816 - DNA, 33 bp, Homo sapien
cttctctgaaagaacttaacctgcatctggaaa

SEQ ID NO: 497817 - DNA, 33 bp, Homo sapien
tacagttatgccagcactaagaaaccttctttt

SEQ ID NO: 497818 - DNA, 33 bp, Homo sapien
tacagttatgccagcattaagaaaccttctttt

SEQ ID NO: 497819 - DNA, 33 bp, Homo sapien
aggaaaaaattaatcacaagttagattgaagag

SEQ ID NO: 497820 - DNA, 33 bp, Homo sapien
aggaaaaaattaatcagaagttagattgaagag

SEQ ID NO: 497821 - DNA, 33 bp, Homo sapien
acacagcctatatgccaaataaaactaaactat

SEQ ID NO: 497822 - DNA, 33 bp, Homo sapien
acacagcctatatgccgaataaaactaaactat

SEQ ID NO: 497823 - DNA, 33 bp, Homo sapien
cctgaaaactgtcaaacttgtgcatcttactta

SEQ ID NO: 497824 - DNA, 33 bp, Homo sapien
cctgaaaactgtcaaagttgtgcatcttactta

SEQ ID NO: 497825 - DNA, 33 bp, Homo sapien
tgggtgaatttgtccacggtattccagctggtg

SEQ ID NO: 497826 - DNA, 33 bp, Homo sapien
tgggtgaatttgtccagggtattccagctggtg

SEQ ID NO: 497827 - DNA, 33 bp, Homo sapien
aaatggcagagtttaaatggtatgtgaactttc

SEQ ID NO: 497828 - DNA, 33 bp, Homo sapien
aaatggcagagtttaactggtatgtgaactttc

SEQ ID NO: 497829 - DNA, 33 bp, Homo sapien
aaggacaatcttccaacagatagaaaacagaag

SEQ ID NO: 497830 - DNA, 33 bp, Homo sapien
aaggacaatcttccaatagatagaaaacagaag

SEQ ID NO: 497831 - DNA, 33 bp, Homo sapien
ccttatagttgcctgacattctggtgtgggctg

SEQ ID NO: 497832 - DNA, 33 bp, Homo sapien
ccttatagttgcctgatattctggtgtgggctg

SEQ ID NO: 497833 - DNA, 33 bp, Homo sapien
ttgaaattacccggcaaagtctcctgtgacaaa

SEQ ID NO: 497834 - DNA, 33 bp, Homo sapien
ttgaaattacccggcatagtctcctgtgacaaa

SEQ ID NO: 497835 - DNA, 33 bp, Homo sapien
cgtttttttatcatcaagttcactctccaataa

SEQ ID NO: 497836 - DNA, 33 bp, Homo sapien
cgtttttttatcatcaggttcactctccaataa

SEQ ID NO: 497837 - DNA, 33 bp, Homo sapien
cttatctcttgtcatacgcaaaaatcaaataaa

SEQ ID NO: 497838 - DNA, 33 bp, Homo sapien
cttatctcttgtcatatgcaaaaatcaaataaa

SEQ ID NO: 497839 - DNA, 33 bp, Homo sapien
cttggggcttggaataagggttttcaagtggca

SEQ ID NO: 497840 - DNA, 33 bp, Homo sapien
cttggggcttggaatacgggttttcaagtggca

SEQ ID NO: 497841 - DNA, 33 bp, Homo sapien
agtatgtttttgcctcaaaggagtatgattctt

SEQ ID NO: 497842 - DNA, 33 bp, Homo sapien
agtatgtttttgcctcgaaggagtatgattctt

SEQ ID NO: 497843 - DNA, 33 bp, Homo sapien
aggtaaatttttgctacgacttgtcaagataag

SEQ ID NO: 497844 - DNA, 33 bp, Homo sapien
aggtaaatttttgctaggacttgtcaagataag

SEQ ID NO: 497845 - DNA, 33 bp, Homo sapien
tgcttttctcttcaacggacttctccagaattt

SEQ ID NO: 497846 - DNA, 33 bp, Homo sapien
tgcttttctcttcaactgacttctccagaattt

SEQ ID NO: 497847 - DNA, 33 bp, Homo sapien
ttgatttatggaaatacagtcatttgtataaat

SEQ ID NO: 497848 - DNA, 33 bp, Homo sapien
ttgatttatggaaatatagtcatttgtataaat

SEQ ID NO: 497849 - DNA, 33 bp, Homo sapien
agaattaaacagagagacattcaacaaaataac

SEQ ID NO: 497850 - DNA, 33 bp, Homo sapien
agaattaaacagagagtcattcaacaaaataac

SEQ ID NO: 497851 - DNA, 33 bp, Homo sapien
ggaatataactacaacactattgcctcatattc

SEQ ID NO: 497852 - DNA, 33 bp, Homo sapien
ggaatataactacaactctattgcctcatattc

SEQ ID NO: 497853 - DNA, 33 bp, Homo sapien
acctggctgtctcacaatcatcccttcacaaca

SEQ ID NO: 497854 - DNA, 33 bp, Homo sapien
acctggctgtctcacagtcatcccttcacaaca

SEQ ID NO: 497855 - DNA, 33 bp, Homo sapien
tgctgcagacattgcaaacttcctgaggctcca

SEQ ID NO: 497856 - DNA, 33 bp, Homo sapien
tgctgcagacattgcagacttcctgaggctcca

SEQ ID NO: 497857 - DNA, 33 bp, Homo sapien
ggtggaacaggactcacgagatgtcaccagtaa

SEQ ID NO: 497858 - DNA, 33 bp, Homo sapien
ggtggaacaggactcaggagatgtcaccagtaa

SEQ ID NO: 497859 - DNA, 33 bp, Homo sapien
gctgatgtctagcttacattaaaatgacgagat

SEQ ID NO: 497860 - DNA, 33 bp, Homo sapien
gctgatgtctagcttatattaaaatgacgagat

SEQ ID NO: 497861 - DNA, 33 bp, Homo sapien
agtttacagtgtctggaaggaatggtaactaaa

SEQ ID NO: 497862 - DNA, 33 bp, Homo sapien
agtttacagtgtctgggaggaatggtaactaaa

SEQ ID NO: 497863 - DNA, 33 bp, Homo sapien
tatcattaaatcatgccgaatgaaagaagccaa

SEQ ID NO: 497864 - DNA, 33 bp, Homo sapien
tatcattaaatcatgctgaatgaaagaagccaa

SEQ ID NO: 497865 - DNA, 33 bp, Homo sapien
ggcatagataatacacagaattgaatctggcaa

SEQ ID NO: 497866 - DNA, 33 bp, Homo sapien
ggcatagataatacacggaattgaatctggcaa

SEQ ID NO: 497867 - DNA, 33 bp, Homo sapien
gatacaaacatccaaaagcatatttataaattc

SEQ ID NO: 497868 - DNA, 33 bp, Homo sapien
gatacaaacatccaaaggcatatttataaattc

SEQ ID NO: 497869 - DNA, 33 bp, Homo sapien
tttatctacacggtacgaccctcaaagattgca

SEQ ID NO: 497870 - DNA, 33 bp, Homo sapien
tttatctacacggtactaccctcaaagattgca

SEQ ID NO: 497871 - DNA, 33 bp, Homo sapien
gtagcattgacgtacaagtgcatttattagtgt

SEQ ID NO: 497872 - DNA, 33 bp, Homo sapien
gtagcattgacgtacaggtgcatttattagtgt

SEQ ID NO: 497873 - DNA, 33 bp, Homo sapien
ggatggtattagaaaccgagatgttagtgttag

SEQ ID NO: 497874 - DNA, 33 bp, Homo sapien
ggatggtattagaaactgagatgttagtgttag

SEQ ID NO: 497875 - DNA, 33 bp, Homo sapien
tatgaaaaaaactcataatcaatgatcattaga

SEQ ID NO: 497876 - DNA, 33 bp, Homo sapien
tatgaaaaaaactcatcatcaatgatcattaga

SEQ ID NO: 497877 - DNA, 33 bp, Homo sapien
tcctgtgtgattttgccgaggatgatggcttcc

SEQ ID NO: 497878 - DNA, 33 bp, Homo sapien
tcctgtgtgattttgctgaggatgatggcttcc

SEQ ID NO: 497879 - DNA, 33 bp, Homo sapien
tggcagtttaatgacaatagtcccagtaacccc

SEQ ID NO: 497880 - DNA, 33 bp, Homo sapien
tggcagtttaatgacagtagtcccagtaacccc

SEQ ID NO: 497881 - DNA, 33 bp, Homo sapien
attttggttaacacacacaatttctataggcag

SEQ ID NO: 497882 - DNA, 33 bp, Homo sapien
attttggttaacacacgcaatttctataggcag

SEQ ID NO: 497883 - DNA, 33 bp, Homo sapien
agcccatgtggagaacagtctggctccttttcc

SEQ ID NO: 497884 - DNA, 33 bp, Homo sapien
agcccatgtggagaacggtctggctccttttcc

SEQ ID NO: 497885 - DNA, 33 bp, Homo sapien
gagatgtcagcatagcaaccaggcccttttttg

SEQ ID NO: 497886 - DNA, 33 bp, Homo sapien
gagatgtcagcatagcgaccaggcccttttttg

SEQ ID NO: 497887 - DNA, 33 bp, Homo sapien
gcccctgcctggtgaacagtagagatcaagggc

SEQ ID NO: 497888 - DNA, 33 bp, Homo sapien
gcccctgcctggtgaagagtagagatcaagggc

SEQ ID NO: 497889 - DNA, 33 bp, Homo sapien
actgccatcgtttagacagaaaagaagacattc

SEQ ID NO: 497890 - DNA, 33 bp, Homo sapien
actgccatcgtttagagagaaaagaagacattc

SEQ ID NO: 497891 - DNA, 33 bp, Homo sapien
atatgtaagtggctaacgggtatataaaaaata

SEQ ID NO: 497892 - DNA, 33 bp, Homo sapien
atatgtaagtggctaatgggtatataaaaaata

SEQ ID NO: 497893 - DNA, 33 bp, Homo sapien
ttcacaacggtcttcaggattattggccttttt

SEQ ID NO: 497894 - DNA, 33 bp, Homo sapien
ttcacaacggtcttcatgattattggccttttt

SEQ ID NO: 497895 - DNA, 33 bp, Homo sapien
ttgtgattgttggcaaataatttaaacacattg

SEQ ID NO: 497896 - DNA, 33 bp, Homo sapien
ttgtgattgttggcaagtaatttaaacacattg

SEQ ID NO: 497897 - DNA, 33 bp, Homo sapien
ggaagtgtcaggattacagtacctctatcggga

SEQ ID NO: 497898 - DNA, 33 bp, Homo sapien
ggaagtgtcaggattatagtacctctatcggga

SEQ ID NO: 497899 - DNA, 33 bp, Homo sapien
ggacatcattttaagaacactgccgttatgaaa

SEQ ID NO: 497900 - DNA, 33 bp, Homo sapien
ggacatcattttaagagcactgccgttatgaaa

SEQ ID NO: 497901 - DNA, 33 bp, Homo sapien
agaagcttacagtggcacaaagcatagcagcat

SEQ ID NO: 497902 - DNA, 33 bp, Homo sapien
agaagcttacagtggcgcaaagcatagcagcat

SEQ ID NO: 497903 - DNA, 33 bp, Homo sapien
atggcttttgaactaacaacagttttcactttt

SEQ ID NO: 497904 - DNA, 33 bp, Homo sapien
atggcttttgaactaataacagttttcactttt

SEQ ID NO: 497905 - DNA, 33 bp, Homo sapien
actaacaggaatcaacaaatgtcctatgtatgg

SEQ ID NO: 497906 - DNA, 33 bp, Homo sapien
actaacaggaatcaaccaatgtcctatgtatgg

SEQ ID NO: 497907 - DNA, 33 bp, Homo sapien
aatcgggactcactcaaaaaagcaatctggcca

SEQ ID NO: 497908 - DNA, 33 bp, Homo sapien
aatcgggactcactcagaaaagcaatctggcca

SEQ ID NO: 497909 - DNA, 33 bp, Homo sapien
aaccatttgatagttgaaaggttggacagatta

SEQ ID NO: 497910 - DNA, 33 bp, Homo sapien
aaccatttgatagttgcaaggttggacagatta

SEQ ID NO: 497911 - DNA, 33 bp, Homo sapien
cttggccaaatattaccattaacagaagcttta

SEQ ID NO: 497912 - DNA, 33 bp, Homo sapien
cttggccaaatattactattaacagaagcttta

SEQ ID NO: 497913 - DNA, 33 bp, Homo sapien
ctaatcaacaaagagacattacaggccgggcgc

SEQ ID NO: 497914 - DNA, 33 bp, Homo sapien
ctaatcaacaaagagatattacaggccgggcgc

SEQ ID NO: 497915 - DNA, 33 bp, Homo sapien
aagggatattacagaaataacaggcctagagtt

SEQ ID NO: 497916 - DNA, 33 bp, Homo sapien
aagggatattacagaagtaacaggcctagagtt

SEQ ID NO: 497917 - DNA, 33 bp, Homo sapien
aagtcatggctatgaaactcttgaggttcagtt

SEQ ID NO: 497918 - DNA, 33 bp, Homo sapien
aagtcatggctatgaatctcttgaggttcagtt

SEQ ID NO: 497919 - DNA, 33 bp, Homo sapien
aattctctcataaatcaccaactctggcttttt

SEQ ID NO: 497920 - DNA, 33 bp, Homo sapien
aattctctcataaatcgccaactctggcttttt

SEQ ID NO: 497921 - DNA, 33 bp, Homo sapien
ccagtcattgggcaaaatacctatgtacatttt

SEQ ID NO: 497922 - DNA, 33 bp, Homo sapien
ccagtcattgggcaaagtacctatgtacatttt

SEQ ID NO: 497923 - DNA, 33 bp, Homo sapien
tctacagtgaagaaaaatacgcacactggttgc

SEQ ID NO: 497924 - DNA, 33 bp, Homo sapien
tctacagtgaagaaaagtacgcacactggttgc

SEQ ID NO: 497925 - DNA, 33 bp, Homo sapien
taacaagtttgggcaactccatgaagatattgt

SEQ ID NO: 497926 - DNA, 33 bp, Homo sapien
taacaagtttgggcaagtccatgaagatattgt

SEQ ID NO: 497927 - DNA, 33 bp, Homo sapien
tcttgaaggttaaatacggtcttcagggttcag

SEQ ID NO: 497928 - DNA, 33 bp, Homo sapien
tcttgaaggttaaatatggtcttcagggttcag

SEQ ID NO: 497929 - DNA, 33 bp, Homo sapien
ttaccagtggattgaactggatgatgtacctga

SEQ ID NO: 497930 - DNA, 33 bp, Homo sapien
ttaccagtggattgaattggatgatgtacctga

SEQ ID NO: 497931 - DNA, 33 bp, Homo sapien
tagtcggccaccaacaaatttagggccaagcca

SEQ ID NO: 497932 - DNA, 33 bp, Homo sapien
tagtcggccaccaacacatttagggccaagcca

SEQ ID NO: 497933 - DNA, 33 bp, Homo sapien
taatcgtgttattgaaatgaaattgaaactaac

SEQ ID NO: 497934 - DNA, 33 bp, Homo sapien
taatcgtgttattgaagtgaaattgaaactaac

SEQ ID NO: 497935 - DNA, 33 bp, Homo sapien
ttactgatgaaacataaaaggaaattaagctat

SEQ ID NO: 497936 - DNA, 33 bp, Homo sapien
ttactgatgaaacatacaaggaaattaagctat

SEQ ID NO: 497937 - DNA, 33 bp, Homo sapien
cctaggtaacaaagtaccacttagcaaattatc

SEQ ID NO: 497938 - DNA, 33 bp, Homo sapien
cctaggtaacaaagtatcacttagcaaattatc

SEQ ID NO: 497939 - DNA, 33 bp, Homo sapien
gtgttttcttctgtctaaatatcagtgtcggga

SEQ ID NO: 497940 - DNA, 33 bp, Homo sapien
gtgttttcttctgtctgaatatcagtgtcggga

SEQ ID NO: 497941 - DNA, 33 bp, Homo sapien
ggtttaggaagtttaaatctaccagaaggagta

SEQ ID NO: 497942 - DNA, 33 bp, Homo sapien
ggtttaggaagtttaagtctaccagaaggagta

SEQ ID NO: 497943 - DNA, 33 bp, Homo sapien
atttgatctgaataacaaagtccctgaaatact

SEQ ID NO: 497944 - DNA, 33 bp, Homo sapien
atttgatctgaataactaagtccctgaaatact

SEQ ID NO: 497945 - DNA, 33 bp, Homo sapien
gtgtttaggtcaagaaagttgtctccaaaaaat

SEQ ID NO: 497946 - DNA, 33 bp, Homo sapien
gtgtttaggtcaagaaggttgtctccaaaaaat

SEQ ID NO: 497947 - DNA, 33 bp, Homo sapien
gcatactataacacaacctaactgacacctaaa

SEQ ID NO: 497948 - DNA, 33 bp, Homo sapien
gcatactataacacaatctaactgacacctaaa

SEQ ID NO: 497949 - DNA, 33 bp, Homo sapien
gctccaaatgttatgacggtcagtgaaattttt

SEQ ID NO: 497950 - DNA, 33 bp, Homo sapien
gctccaaatgttatgatggtcagtgaaattttt

SEQ ID NO: 497951 - DNA, 33 bp, Homo sapien
tataaacacctgatgaacatggatataaatggt

SEQ ID NO: 497952 - DNA, 33 bp, Homo sapien
tataaacacctgatgagcatggatataaatggt

SEQ ID NO: 497953 - DNA, 33 bp, Homo sapien
aacataaagattccaaatagacaaagcattctt

SEQ ID NO: 497954 - DNA, 33 bp, Homo sapien
aacataaagattccaagtagacaaagcattctt

SEQ ID NO: 497955 - DNA, 33 bp, Homo sapien
aagaagcacataaaaaactttcaccattactaa

SEQ ID NO: 497956 - DNA, 33 bp, Homo sapien
aagaagcacataaaaatctttcaccattactaa

SEQ ID NO: 497957 - DNA, 33 bp, Homo sapien
cctttgcaattgcctacgattgaatgtgaaaaa

SEQ ID NO: 497958 - DNA, 33 bp, Homo sapien
cctttgcaattgcctatgattgaatgtgaaaaa

SEQ ID NO: 497959 - DNA, 33 bp, Homo sapien
cttattgcaaatataaagccattttaaattaca

SEQ ID NO: 497960 - DNA, 33 bp, Homo sapien
cttattgcaaatataaggccattttaaattaca

SEQ ID NO: 497961 - DNA, 33 bp, Homo sapien
taatccagagacagaaatagcagtagaatatgt

SEQ ID NO: 497962 - DNA, 33 bp, Homo sapien
taatccagagacagaactagcagtagaatatgt

SEQ ID NO: 497963 - DNA, 33 bp, Homo sapien
tgccagtattaacataagtattggcctcttgtt

SEQ ID NO: 497964 - DNA, 33 bp, Homo sapien
tgccagtattaacatatgtattggcctcttgtt

SEQ ID NO: 497965 - DNA, 33 bp, Homo sapien
cttagacctctgcttaagttggtacaacccctc

SEQ ID NO: 497966 - DNA, 33 bp, Homo sapien
cttagacctctgcttatgttggtacaacccctc

SEQ ID NO: 497967 - DNA, 33 bp, Homo sapien
aaatacatcaccaaataagaagtacaaatagta

SEQ ID NO: 497968 - DNA, 33 bp, Homo sapien
aaatacatcaccaaatgagaagtacaaatagta

SEQ ID NO: 497969 - DNA, 33 bp, Homo sapien
atgagaacattggaacaaactacccttccagtc

SEQ ID NO: 497970 - DNA, 33 bp, Homo sapien
atgagaacattggaacgaactacccttccagtc

SEQ ID NO: 497971 - DNA, 33 bp, Homo sapien
agaaaagagtcttctacggctatttttttcatt

SEQ ID NO: 497972 - DNA, 33 bp, Homo sapien
agaaaagagtcttctatggctatttttttcatt

SEQ ID NO: 497973 - DNA, 33 bp, Homo sapien
cttggttttgagtcccacaactatattggaaca

SEQ ID NO: 497974 - DNA, 33 bp, Homo sapien
cttggttttgagtcccgcaactatattggaaca

SEQ ID NO: 497975 - DNA, 33 bp, Homo sapien
taggaggtaagaagaaaggaacatatctgagaa

SEQ ID NO: 497976 - DNA, 33 bp, Homo sapien
taggaggtaagaagaagggaacatatctgagaa

SEQ ID NO: 497977 - DNA, 33 bp, Homo sapien
tcaaaaggactgaattaaaaggaagactgaaga

SEQ ID NO: 497978 - DNA, 33 bp, Homo sapien
tcaaaaggactgaattcaaaggaagactgaaga

SEQ ID NO: 497979 - DNA, 33 bp, Homo sapien
tgaccatgacaacatcaacagtggtaagtcatg

SEQ ID NO: 497980 - DNA, 33 bp, Homo sapien
tgaccatgacaacatccacagtggtaagtcatg

SEQ ID NO: 497981 - DNA, 33 bp, Homo sapien
atcccaacaggatttcaccaaaacagcaatctg

SEQ ID NO: 497982 - DNA, 33 bp, Homo sapien
atcccaacaggatttcgccaaaacagcaatctg

SEQ ID NO: 497983 - DNA, 33 bp, Homo sapien
tgcttcctagataccacagcttgtcttctgtgt

SEQ ID NO: 497984 - DNA, 33 bp, Homo sapien
tgcttcctagataccatagcttgtcttctgtgt

SEQ ID NO: 497985 - DNA, 33 bp, Homo sapien
acttagaactaccataggagccaacaattccat

SEQ ID NO: 497986 - DNA, 33 bp, Homo sapien
acttagaactaccatatgagccaacaattccat

SEQ ID NO: 497987 - DNA, 33 bp, Homo sapien
tttggactcaatacaccattcttaaacaaaaat

SEQ ID NO: 497988 - DNA, 33 bp, Homo sapien
tttggactcaatacactattcttaaacaaaaat

SEQ ID NO: 497989 - DNA, 33 bp, Homo sapien
acaggtagggagaatcccacatctctgcaatca

SEQ ID NO: 497990 - DNA, 33 bp, Homo sapien
acaggtagggagaatctcacatctctgcaatca

SEQ ID NO: 497991 - DNA, 33 bp, Homo sapien
ttgttgatgtgtaacaatacttgagatatataa

SEQ ID NO: 497992 - DNA, 33 bp, Homo sapien
ttgttgatgtgtaacagtacttgagatatataa

SEQ ID NO: 497993 - DNA, 33 bp, Homo sapien
actgggaaagataacacgattgtctacaaagaa

SEQ ID NO: 497994 - DNA, 33 bp, Homo sapien
actgggaaagataacaggattgtctacaaagaa

SEQ ID NO: 497995 - DNA, 33 bp, Homo sapien
tagttcagcttcaggaagaaagacaagagaaaa

SEQ ID NO: 497996 - DNA, 33 bp, Homo sapien
tagttcagcttcaggaggaaagacaagagaaaa

SEQ ID NO: 497997 - DNA, 33 bp, Homo sapien
caggaactttcattgcaccagtgatgaaaaaga

SEQ ID NO: 497998 - DNA, 33 bp, Homo sapien
caggaactttcattgcgccagtgatgaaaaaga

SEQ ID NO: 497999 - DNA, 33 bp, Homo sapien
tcccactccctgccacaaacattttctaaagga

SEQ ID NO: 498000 - DNA, 33 bp, Homo sapien
tcccactccctgccacgaacattttctaaagga

SEQ ID NO: 498001 - DNA, 33 bp, Homo sapien
aaattactgaactgggaatgcaattgttgtgta

SEQ ID NO: 498002 - DNA, 33 bp, Homo sapien
aaattactgaactgggtatgcaattgttgtgta

SEQ ID NO: 498003 - DNA, 33 bp, Homo sapien
aataactaaagatagcagcagtaaatttggagc

SEQ ID NO: 498004 - DNA, 33 bp, Homo sapien
aataactaaagatagccgcagtaaatttggagc

SEQ ID NO: 498005 - DNA, 33 bp, Homo sapien
acctacatgagaacaactgccttttagtttgtt

SEQ ID NO: 498006 - DNA, 33 bp, Homo sapien
acctacatgagaacaattgccttttagtttgtt

SEQ ID NO: 498007 - DNA, 33 bp, Homo sapien
aattaactcatcctcacgaaaagtcactcttta

SEQ ID NO: 498008 - DNA, 33 bp, Homo sapien
aattaactcatcctcatgaaaagtcactcttta

SEQ ID NO: 498009 - DNA, 33 bp, Homo sapien
ttttcattgttcttgacgttatcttaattcatt

SEQ ID NO: 498010 - DNA, 33 bp, Homo sapien
ttttcattgttcttgatgttatcttaattcatt

SEQ ID NO: 498011 - DNA, 33 bp, Homo sapien
tctttagttagagataaaattcgacccagaaat

SEQ ID NO: 498012 - DNA, 33 bp, Homo sapien
tctttagttagagatacaattcgacccagaaat

SEQ ID NO: 498013 - DNA, 33 bp, Homo sapien
cactattggccaacacgggaatattctaaagca

SEQ ID NO: 498014 - DNA, 33 bp, Homo sapien
cactattggccaacactggaatattctaaagca

SEQ ID NO: 498015 - DNA, 33 bp, Homo sapien
attgaaatgtcccgtacctgttcaatggaataa

SEQ ID NO: 498016 - DNA, 33 bp, Homo sapien
attgaaatgtcccgtatctgttcaatggaataa

SEQ ID NO: 498017 - DNA, 33 bp, Homo sapien
tgaagattttgattaacagaggatgtcccaaag

SEQ ID NO: 498018 - DNA, 33 bp, Homo sapien
tgaagattttgattaatagaggatgtcccaaag

SEQ ID NO: 498019 - DNA, 33 bp, Homo sapien
ggtcaaagaggactagcaagagacagggctacg

SEQ ID NO: 498020 - DNA, 33 bp, Homo sapien
ggtcaaagaggactaggaagagacagggctacg

SEQ ID NO: 498021 - DNA, 33 bp, Homo sapien
tacccctaaagacctaacgcatcactcctggga

SEQ ID NO: 498022 - DNA, 33 bp, Homo sapien
tacccctaaagacctaccgcatcactcctggga

SEQ ID NO: 498023 - DNA, 33 bp, Homo sapien
ttcccatttacacttagggtcatcacaaagcta

SEQ ID NO: 498024 - DNA, 33 bp, Homo sapien
ttcccatttacacttatggtcatcacaaagcta

SEQ ID NO: 498025 - DNA, 33 bp, Homo sapien
gcttgctattaggtgaagagtgtttcccattta

SEQ ID NO: 498026 - DNA, 33 bp, Homo sapien
gcttgctattaggtgaggagtgtttcccattta

SEQ ID NO: 498027 - DNA, 33 bp, Homo sapien
aagcaatggtttctaacacacaatttcaagttg

SEQ ID NO: 498028 - DNA, 33 bp, Homo sapien
aagcaatggtttctaatacacaatttcaagttg

SEQ ID NO: 498029 - DNA, 33 bp, Homo sapien
ataaacagttgggtagaaggacaaattccagtg

SEQ ID NO: 498030 - DNA, 33 bp, Homo sapien
ataaacagttgggtagtaggacaaattccagtg

SEQ ID NO: 498031 - DNA, 33 bp, Homo sapien
tgccctggtttaaccacatattcatgccaagac

SEQ ID NO: 498032 - DNA, 33 bp, Homo sapien
tgccctggtttaaccatatattcatgccaagac

SEQ ID NO: 498033 - DNA, 33 bp, Homo sapien
acacaacattgcagaaatcagtagttgttacaa

SEQ ID NO: 498034 - DNA, 33 bp, Homo sapien
acacaacattgcagaagtcagtagttgttacaa

SEQ ID NO: 498035 - DNA, 33 bp, Homo sapien
ctttggtaactgtgaagaagtttctgaaagtct

SEQ ID NO: 498036 - DNA, 33 bp, Homo sapien
ctttggtaactgtgaataagtttctgaaagtct

SEQ ID NO: 498037 - DNA, 33 bp, Homo sapien
ccaccagtagtacacaaactgttccctttcctc

SEQ ID NO: 498038 - DNA, 33 bp, Homo sapien
ccaccagtagtacacagactgttccctttcctc

SEQ ID NO: 498039 - DNA, 33 bp, Homo sapien
aggcttgggcaaaaaaattatcagaatataatt

SEQ ID NO: 498040 - DNA, 33 bp, Homo sapien
aggcttgggcaaaaaagttatcagaatataatt

SEQ ID NO: 498041 - DNA, 33 bp, Homo sapien
ttttcctatgatgtccgaaacaataaagcaata

SEQ ID NO: 498042 - DNA, 33 bp, Homo sapien
ttttcctatgatgtcctaaacaataaagcaata

SEQ ID NO: 498043 - DNA, 33 bp, Homo sapien
tcagcctctgtggatacgtagggtccttattcc

SEQ ID NO: 498044 - DNA, 33 bp, Homo sapien
tcagcctctgtggatatgtagggtccttattcc

SEQ ID NO: 498045 - DNA, 33 bp, Homo sapien
cctctgcagtagaaaagtccaagtttggatact

SEQ ID NO: 498046 - DNA, 33 bp, Homo sapien
cctctgcagtagaaaattccaagtttggatact

SEQ ID NO: 498047 - DNA, 33 bp, Homo sapien
taaaagtaatgatatcaaaactgagatgtgaaa

SEQ ID NO: 498048 - DNA, 33 bp, Homo sapien
taaaagtaatgatatcgaaactgagatgtgaaa

SEQ ID NO: 498049 - DNA, 33 bp, Homo sapien
gaaagagcgaaaaaaaggtgataatactgggga

SEQ ID NO: 498050 - DNA, 33 bp, Homo sapien
gaaagagcgaaaaaaatgtgataatactgggga

SEQ ID NO: 498051 - DNA, 33 bp, Homo sapien
tctgtaaatatgtggcactcaatcaaaagccat

SEQ ID NO: 498052 - DNA, 33 bp, Homo sapien
tctgtaaatatgtggcgctcaatcaaaagccat

SEQ ID NO: 498053 - DNA, 33 bp, Homo sapien
agggacaaccattgtagatgcaatccattgatg

SEQ ID NO: 498054 - DNA, 33 bp, Homo sapien
agggacaaccattgtatatgcaatccattgatg

SEQ ID NO: 498055 - DNA, 33 bp, Homo sapien
ttttgttacaaactaaagcacaagcccacacat

SEQ ID NO: 498056 - DNA, 33 bp, Homo sapien
ttttgttacaaactaaggcacaagcccacacat

SEQ ID NO: 498057 - DNA, 33 bp, Homo sapien
tcaaaagacatgagacagagagttttttcacac

SEQ ID NO: 498058 - DNA, 33 bp, Homo sapien
tcaaaagacatgagacggagagttttttcacac

SEQ ID NO: 498059 - DNA, 33 bp, Homo sapien
gccgtccgccatgatgaacccaaagtgaatggc

SEQ ID NO: 498060 - DNA, 33 bp, Homo sapien
gccgtccgccatgatggacccaaagtgaatggc

SEQ ID NO: 498061 - DNA, 33 bp, Homo sapien
tgtcactgggaagtaacatcaagcatttaaaga

SEQ ID NO: 498062 - DNA, 33 bp, Homo sapien
tgtcactgggaagtaatatcaagcatttaaaga

SEQ ID NO: 498063 - DNA, 33 bp, Homo sapien
ctctgctttccccaatcacaatcatacagcatg

SEQ ID NO: 498064 - DNA, 33 bp, Homo sapien
ctctgctttccccaatgacaatcatacagcatg

SEQ ID NO: 498065 - DNA, 33 bp, Homo sapien
cttttgtttctctacagattttaaggtggtttt

SEQ ID NO: 498066 - DNA, 33 bp, Homo sapien
cttttgtttctctacatattttaaggtggtttt

SEQ ID NO: 498067 - DNA, 33 bp, Homo sapien
tcttgcaaatgacaaaaaaatttcactaggcac

SEQ ID NO: 498068 - DNA, 33 bp, Homo sapien
tcttgcaaatgacaaacaaatttcactaggcac

SEQ ID NO: 498069 - DNA, 33 bp, Homo sapien
aagatggatccgctaagtacactagtttgatca

SEQ ID NO: 498070 - DNA, 33 bp, Homo sapien
aagatggatccgctaattacactagtttgatca

SEQ ID NO: 498071 - DNA, 33 bp, Homo sapien
tccaaatcactctcaaaatgatgtatgagttct

SEQ ID NO: 498072 - DNA, 33 bp, Homo sapien
tccaaatcactctcaagatgatgtatgagttct

SEQ ID NO: 498073 - DNA, 33 bp, Homo sapien
gtaatttcagctacaacaaaaattctctatcca

SEQ ID NO: 498074 - DNA, 33 bp, Homo sapien
gtaatttcagctacaagaaaaattctctatcca

SEQ ID NO: 498075 - DNA, 33 bp, Homo sapien
agcattgcaaaaccaccgtagtcgatctgggaa

SEQ ID NO: 498076 - DNA, 33 bp, Homo sapien
agcattgcaaaaccactgtagtcgatctgggaa

SEQ ID NO: 498077 - DNA, 33 bp, Homo sapien
aatgaggtaaatttcaagagacatttaccattc

SEQ ID NO: 498078 - DNA, 33 bp, Homo sapien
aatgaggtaaatttcaggagacatttaccattc

SEQ ID NO: 498079 - DNA, 33 bp, Homo sapien
aatttgctgataatcactacaatgtgaaaatag

SEQ ID NO: 498080 - DNA, 33 bp, Homo sapien
aatttgctgataatcagtacaatgtgaaaatag

SEQ ID NO: 498081 - DNA, 33 bp, Homo sapien
ttatgagcttactaccacaggggaaaacataac

SEQ ID NO: 498082 - DNA, 33 bp, Homo sapien
ttatgagcttactaccgcaggggaaaacataac

SEQ ID NO: 498083 - DNA, 33 bp, Homo sapien
aagcaggaactacataaaagctgttgcaaaaca

SEQ ID NO: 498084 - DNA, 33 bp, Homo sapien
aagcaggaactacatataagctgttgcaaaaca

SEQ ID NO: 498085 - DNA, 33 bp, Homo sapien
gggctgtagatagccactgaagaaatttaacga

SEQ ID NO: 498086 - DNA, 33 bp, Homo sapien
gggctgtagatagccattgaagaaatttaacga

SEQ ID NO: 498087 - DNA, 33 bp, Homo sapien
gcataaaccattaatagcctatcagtggacata

SEQ ID NO: 498088 - DNA, 33 bp, Homo sapien
gcataaaccattaatatcctatcagtggacata

SEQ ID NO: 498089 - DNA, 33 bp, Homo sapien
aaaatctgttaaatccagagttatttcatccat

SEQ ID NO: 498090 - DNA, 33 bp, Homo sapien
aaaatctgttaaatccggagttatttcatccat

SEQ ID NO: 498091 - DNA, 33 bp, Homo sapien
ggctatgaggtaaacaggattaactgtagtgcc

SEQ ID NO: 498092 - DNA, 33 bp, Homo sapien
ggctatgaggtaaacatgattaactgtagtgcc

SEQ ID NO: 498093 - DNA, 33 bp, Homo sapien
aagagagagcactaaccaagtctggatactcaa

SEQ ID NO: 498094 - DNA, 33 bp, Homo sapien
aagagagagcactaacgaagtctggatactcaa

SEQ ID NO: 498095 - DNA, 33 bp, Homo sapien
gctggaaccttacttacctctatgtgcacttgg

SEQ ID NO: 498096 - DNA, 33 bp, Homo sapien
gctggaaccttacttatctctatgtgcacttgg

SEQ ID NO: 498097 - DNA, 33 bp, Homo sapien
catgatccttttccaagcaatctctgtttcaag

SEQ ID NO: 498098 - DNA, 33 bp, Homo sapien
catgatccttttccaatcaatctctgtttcaag

SEQ ID NO: 498099 - DNA, 33 bp, Homo sapien
ttagtgtgtatttacaacgtctgtttgatttgt

SEQ ID NO: 498100 - DNA, 33 bp, Homo sapien
ttagtgtgtatttacagcgtctgtttgatttgt

SEQ ID NO: 498101 - DNA, 33 bp, Homo sapien
ggtcttttaaagctcacgtgctatgaaatattg

SEQ ID NO: 498102 - DNA, 33 bp, Homo sapien
ggtcttttaaagctcaggtgctatgaaatattg

SEQ ID NO: 498103 - DNA, 33 bp, Homo sapien
ttgtttgttaccaagaactatgattagtataag

SEQ ID NO: 498104 - DNA, 33 bp, Homo sapien
ttgtttgttaccaagatctatgattagtataag

SEQ ID NO: 498105 - DNA, 33 bp, Homo sapien
taaagacagcaaaaggaaaagaaaatgaccata

SEQ ID NO: 498106 - DNA, 33 bp, Homo sapien
taaagacagcaaaaggcaaagaaaatgaccata

SEQ ID NO: 498107 - DNA, 33 bp, Homo sapien
cacatagatgaatatcacagccactttgctcag

SEQ ID NO: 498108 - DNA, 33 bp, Homo sapien
cacatagatgaatatcgcagccactttgctcag

SEQ ID NO: 498109 - DNA, 33 bp, Homo sapien
agctgcttgtccattccgaaagacagtgaatag

SEQ ID NO: 498110 - DNA, 33 bp, Homo sapien
agctgcttgtccattctgaaagacagtgaatag

SEQ ID NO: 498111 - DNA, 33 bp, Homo sapien
ttggacaatgcagatcaagtgttcattccctaa

SEQ ID NO: 498112 - DNA, 33 bp, Homo sapien
ttggacaatgcagatcgagtgttcattccctaa

SEQ ID NO: 498113 - DNA, 33 bp, Homo sapien
tagacaatgaaataacacagaatatgacctcag

SEQ ID NO: 498114 - DNA, 33 bp, Homo sapien
tagacaatgaaataacgcagaatatgacctcag

SEQ ID NO: 498115 - DNA, 33 bp, Homo sapien
gggtgtgagcatattacaacacaaattgtattt

SEQ ID NO: 498116 - DNA, 33 bp, Homo sapien
gggtgtgagcatattataacacaaattgtattt

SEQ ID NO: 498117 - DNA, 33 bp, Homo sapien
ggtgtatatttgtgtacgattatgaattagaca

SEQ ID NO: 498118 - DNA, 33 bp, Homo sapien
ggtgtatatttgtgtaggattatgaattagaca

SEQ ID NO: 498119 - DNA, 33 bp, Homo sapien
atggatagcaacttaactgaggagtgtcaggct

SEQ ID NO: 498120 - DNA, 33 bp, Homo sapien
atggatagcaacttaattgaggagtgtcaggct

SEQ ID NO: 498121 - DNA, 33 bp, Homo sapien
tataaggtatagaccacatcaaactttcctgct

SEQ ID NO: 498122 - DNA, 33 bp, Homo sapien
tataaggtatagaccatatcaaactttcctgct

SEQ ID NO: 498123 - DNA, 33 bp, Homo sapien
ttttgcgacatgctgaggaagagactgaagtcg

SEQ ID NO: 498124 - DNA, 33 bp, Homo sapien
ttttgcgacatgctgatgaagagactgaagtcg

SEQ ID NO: 498125 - DNA, 33 bp, Homo sapien
ataactgtggtgcaagaaagcaattttgattaa

SEQ ID NO: 498126 - DNA, 33 bp, Homo sapien
ataactgtggtgcaagcaagcaattttgattaa

SEQ ID NO: 498127 - DNA, 33 bp, Homo sapien
caccacagttatacccaagttgcttaactaata

SEQ ID NO: 498128 - DNA, 33 bp, Homo sapien
caccacagttatacccgagttgcttaactaata

SEQ ID NO: 498129 - DNA, 33 bp, Homo sapien
ctgattttcatttttacaactggtagactagac

SEQ ID NO: 498130 - DNA, 33 bp, Homo sapien
ctgattttcatttttataactggtagactagac

SEQ ID NO: 498131 - DNA, 33 bp, Homo sapien
ccatcaaaataagaaacgctgggatgtgatttg

SEQ ID NO: 498132 - DNA, 33 bp, Homo sapien
ccatcaaaataagaaatgctgggatgtgatttg

SEQ ID NO: 498133 - DNA, 33 bp, Homo sapien
ctggaaaccaaaaggagacatgatctctgccca

SEQ ID NO: 498134 - DNA, 33 bp, Homo sapien
ctggaaaccaaaaggatacatgatctctgccca

SEQ ID NO: 498135 - DNA, 33 bp, Homo sapien
tgattggagctgtccacagagtagaaggtagga

SEQ ID NO: 498136 - DNA, 33 bp, Homo sapien
tgattggagctgtccatagagtagaaggtagga

SEQ ID NO: 498137 - DNA, 33 bp, Homo sapien
tactagttggtaatgacgctagtgagaggagag

SEQ ID NO: 498138 - DNA, 33 bp, Homo sapien
tactagttggtaatgatgctagtgagaggagag

SEQ ID NO: 498139 - DNA, 33 bp, Homo sapien
actgcattattccaaaatgagtttgactcctgt

SEQ ID NO: 498140 - DNA, 33 bp, Homo sapien
actgcattattccaaagtgagtttgactcctgt

SEQ ID NO: 498141 - DNA, 33 bp, Homo sapien
gtattagaaatgtagacgagctaaacttttgta

SEQ ID NO: 498142 - DNA, 33 bp, Homo sapien
gtattagaaatgtagatgagctaaacttttgta

SEQ ID NO: 498143 - DNA, 33 bp, Homo sapien
atctttagctcctacccacaaaagccaagcaat

SEQ ID NO: 498144 - DNA, 33 bp, Homo sapien
atctttagctcctaccgacaaaagccaagcaat

SEQ ID NO: 498145 - DNA, 33 bp, Homo sapien
ccagtgatgagattgccacctttccactggctt

SEQ ID NO: 498146 - DNA, 33 bp, Homo sapien
ccagtgatgagattgctacctttccactggctt

SEQ ID NO: 498147 - DNA, 33 bp, Homo sapien
gctttataccctttaaccatcatctcccccatt

SEQ ID NO: 498148 - DNA, 33 bp, Homo sapien
gctttataccctttaatcatcatctcccccatt

SEQ ID NO: 498149 - DNA, 33 bp, Homo sapien
ggcctaggagttaagacggcctctagaaaaaca

SEQ ID NO: 498150 - DNA, 33 bp, Homo sapien
ggcctaggagttaagatggcctctagaaaaaca

SEQ ID NO: 498151 - DNA, 33 bp, Homo sapien
atacagcgctctgaagccactaggaacttttga

SEQ ID NO: 498152 - DNA, 33 bp, Homo sapien
atacagcgctctgaagtcactaggaacttttga

SEQ ID NO: 498153 - DNA, 33 bp, Homo sapien
ttccggccaagtagcaaatctagttttccaccc

SEQ ID NO: 498154 - DNA, 33 bp, Homo sapien
ttccggccaagtagcacatctagttttccaccc

SEQ ID NO: 498155 - DNA, 33 bp, Homo sapien
gggtattgagcaaaaggaagtccatctggcctc

SEQ ID NO: 498156 - DNA, 33 bp, Homo sapien
gggtattgagcaaaagtaagtccatctggcctc

SEQ ID NO: 498157 - DNA, 33 bp, Homo sapien
agcttctgaatagctgcaagtttctggcacaca

SEQ ID NO: 498158 - DNA, 33 bp, Homo sapien
agcttctgaatagctggaagtttctggcacaca

SEQ ID NO: 498159 - DNA, 33 bp, Homo sapien
agaagctacaactccaaaaagattgaaatggca

SEQ ID NO: 498160 - DNA, 33 bp, Homo sapien
agaagctacaactccataaagattgaaatggca

SEQ ID NO: 498161 - DNA, 33 bp, Homo sapien
atccttgaagaaattacagaatcagacagtcta

SEQ ID NO: 498162 - DNA, 33 bp, Homo sapien
atccttgaagaaattagagaatcagacagtcta

SEQ ID NO: 498163 - DNA, 33 bp, Homo sapien
gtgttactcaaactcacctcagaagaagtctta

SEQ ID NO: 498164 - DNA, 33 bp, Homo sapien
gtgttactcaaactcatctcagaagaagtctta

SEQ ID NO: 498165 - DNA, 33 bp, Homo sapien
gataagaaatttttgacatcatctgtggccaca

SEQ ID NO: 498166 - DNA, 33 bp, Homo sapien
gataagaaatttttgatatcatctgtggccaca

SEQ ID NO: 498167 - DNA, 33 bp, Homo sapien
tttaaagactagtttggacatagacaagatata

SEQ ID NO: 498168 - DNA, 33 bp, Homo sapien
tttaaagactagtttgtacatagacaagatata

SEQ ID NO: 498169 - DNA, 33 bp, Homo sapien
taggcagctgtcatgaaatgcatatacatatgg

SEQ ID NO: 498170 - DNA, 33 bp, Homo sapien
taggcagctgtcatgagatgcatatacatatgg

SEQ ID NO: 498171 - DNA, 33 bp, Homo sapien
agcttattctttgagaccttcatcatgagctga

SEQ ID NO: 498172 - DNA, 33 bp, Homo sapien
agcttattctttgagagcttcatcatgagctga

SEQ ID NO: 498173 - DNA, 33 bp, Homo sapien
gtctgaccagccataaccactgaagtctccctg

SEQ ID NO: 498174 - DNA, 33 bp, Homo sapien
gtctgaccagccataatcactgaagtctccctg

SEQ ID NO: 498175 - DNA, 33 bp, Homo sapien
attcagaaattcatgaaagcaagaagatagacc

SEQ ID NO: 498176 - DNA, 33 bp, Homo sapien
attcagaaattcatgagagcaagaagatagacc

SEQ ID NO: 498177 - DNA, 33 bp, Homo sapien
tattcctttcaactcaatcttctgttctcatgt

SEQ ID NO: 498178 - DNA, 33 bp, Homo sapien
tattcctttcaactcagtcttctgttctcatgt

SEQ ID NO: 498179 - DNA, 33 bp, Homo sapien
gtctcccagaaattaaacaaacaggctgttact

SEQ ID NO: 498180 - DNA, 33 bp, Homo sapien
gtctcccagaaattaagcaaacaggctgttact

SEQ ID NO: 498181 - DNA, 33 bp, Homo sapien
tcgtttcaagaataacagcaggtctactcttaa

SEQ ID NO: 498182 - DNA, 33 bp, Homo sapien
tcgtttcaagaataacggcaggtctactcttaa

SEQ ID NO: 498183 - DNA, 33 bp, Homo sapien
catcttagcaaaatcagtgaatcagtcaatacc

SEQ ID NO: 498184 - DNA, 33 bp, Homo sapien
catcttagcaaaatcattgaatcagtcaatacc

SEQ ID NO: 498185 - DNA, 33 bp, Homo sapien
ccttctaccaactatcaaagatggcaatgagtg

SEQ ID NO: 498186 - DNA, 33 bp, Homo sapien
ccttctaccaactatcgaagatggcaatgagtg

SEQ ID NO: 498187 - DNA, 33 bp, Homo sapien
caaatgcatcagcttaaagcaacatccacttaa

SEQ ID NO: 498188 - DNA, 33 bp, Homo sapien
caaatgcatcagcttagagcaacatccacttaa

SEQ ID NO: 498189 - DNA, 33 bp, Homo sapien
ttacctcctacgtctcactcttttctcctaatg

SEQ ID NO: 498190 - DNA, 33 bp, Homo sapien
ttacctcctacgtctcgctcttttctcctaatg

SEQ ID NO: 498191 - DNA, 33 bp, Homo sapien
gttcacagaactgagaagagaaccaggcatgga

SEQ ID NO: 498192 - DNA, 33 bp, Homo sapien
gttcacagaactgagaggagaaccaggcatgga

SEQ ID NO: 498193 - DNA, 33 bp, Homo sapien
ttgaataatactgagcaagtgctgtttacaatc

SEQ ID NO: 498194 - DNA, 33 bp, Homo sapien
ttgaataatactgagctagtgctgtttacaatc

SEQ ID NO: 498195 - DNA, 33 bp, Homo sapien
cttattttttgcaatcacctgcatgttaggaaa

SEQ ID NO: 498196 - DNA, 33 bp, Homo sapien
cttattttttgcaatctcctgcatgttaggaaa

SEQ ID NO: 498197 - DNA, 33 bp, Homo sapien
tcaagatgagcaaataagaaacttaaaagtaaa

SEQ ID NO: 498198 - DNA, 33 bp, Homo sapien
tcaagatgagcaaataggaaacttaaaagtaaa

SEQ ID NO: 498199 - DNA, 33 bp, Homo sapien
ctttcccaaagtgcatcagatcaaggttaccaa

SEQ ID NO: 498200 - DNA, 33 bp, Homo sapien
ctttcccaaagtgcattagatcaaggttaccaa

SEQ ID NO: 498201 - DNA, 33 bp, Homo sapien
atggctttagcacaaactcgatggttgctgttt

SEQ ID NO: 498202 - DNA, 33 bp, Homo sapien
atggctttagcacaaagtcgatggttgctgttt

SEQ ID NO: 498203 - DNA, 33 bp, Homo sapien
ctcctcactccaagataagaacaagatctccca

SEQ ID NO: 498204 - DNA, 33 bp, Homo sapien
ctcctcactccaagatgagaacaagatctccca

SEQ ID NO: 498205 - DNA, 33 bp, Homo sapien
taactctgtgggaagacggctatgttaatttgt

SEQ ID NO: 498206 - DNA, 33 bp, Homo sapien
taactctgtgggaagatggctatgttaatttgt

SEQ ID NO: 498207 - DNA, 33 bp, Homo sapien
tgtttgactgtgataagcacttcgttaggtcta

SEQ ID NO: 498208 - DNA, 33 bp, Homo sapien
tgtttgactgtgataatcacttcgttaggtcta

SEQ ID NO: 498209 - DNA, 33 bp, Homo sapien
aggtttccatctctgccagggtcaggtcatcac

SEQ ID NO: 498210 - DNA, 33 bp, Homo sapien
aggtttccatctctgcgagggtcaggtcatcac

SEQ ID NO: 498211 - DNA, 33 bp, Homo sapien
acccagttgtagcccagccttgtttctgacact

SEQ ID NO: 498212 - DNA, 33 bp, Homo sapien
acccagttgtagcccatccttgtttctgacact

SEQ ID NO: 498213 - DNA, 33 bp, Homo sapien
cgaaagaggaccttggcatgaagttcacatggt

SEQ ID NO: 498214 - DNA, 33 bp, Homo sapien
cgaaagaggaccttgggatgaagttcacatggt

SEQ ID NO: 498215 - DNA, 33 bp, Homo sapien
gaggagatgagaagatcagggaaaaccagaggg

SEQ ID NO: 498216 - DNA, 33 bp, Homo sapien
gaggagatgagaagatgagggaaaaccagaggg

SEQ ID NO: 498217 - DNA, 33 bp, Homo sapien
gttttctacttattcacctttcccatagtctga

SEQ ID NO: 498218 - DNA, 33 bp, Homo sapien
gttttctacttattcatctttcccatagtctga

SEQ ID NO: 498219 - DNA, 33 bp, Homo sapien
aacccacacttcttaactcaaagccagtacttt

SEQ ID NO: 498220 - DNA, 33 bp, Homo sapien
aacccacacttcttaattcaaagccagtacttt

SEQ ID NO: 498221 - DNA, 33 bp, Homo sapien
gaaatatagtatagtacgtatcaatatgcagag

SEQ ID NO: 498222 - DNA, 33 bp, Homo sapien
gaaatatagtatagtatgtatcaatatgcagag

SEQ ID NO: 498223 - DNA, 33 bp, Homo sapien
ggcaatattttcaggaataggtagtctttgaaa

SEQ ID NO: 498224 - DNA, 33 bp, Homo sapien
ggcaatattttcaggagtaggtagtctttgaaa

SEQ ID NO: 498225 - DNA, 33 bp, Homo sapien
gtcgagcttcaagcacagggtctggatgatcaa

SEQ ID NO: 498226 - DNA, 33 bp, Homo sapien
gtcgagcttcaagcacggggtctggatgatcaa

SEQ ID NO: 498227 - DNA, 33 bp, Homo sapien
tatcacaactcttggaatagcttgcatagcagt

SEQ ID NO: 498228 - DNA, 33 bp, Homo sapien
tatcacaactcttggagtagcttgcatagcagt

SEQ ID NO: 498229 - DNA, 33 bp, Homo sapien
tccttttgtgtgcttcaatctattaaatgaaga

SEQ ID NO: 498230 - DNA, 33 bp, Homo sapien
tccttttgtgtgcttcgatctattaaatgaaga

SEQ ID NO: 498231 - DNA, 33 bp, Homo sapien
agactcacagatccaaccacactcttcatttaa

SEQ ID NO: 498232 - DNA, 33 bp, Homo sapien
agactcacagatccaatcacactcttcatttaa

SEQ ID NO: 498233 - DNA, 33 bp, Homo sapien
ggcctccggaataggcggacagtgtattgcctg

SEQ ID NO: 498234 - DNA, 33 bp, Homo sapien
ggcctccggaataggctgacagtgtattgcctg

SEQ ID NO: 498235 - DNA, 33 bp, Homo sapien
aggcaaagattgaggaacttcttggctgttgag

SEQ ID NO: 498236 - DNA, 33 bp, Homo sapien
aggcaaagattgaggagcttcttggctgttgag

SEQ ID NO: 498237 - DNA, 33 bp, Homo sapien
tctcaggtgaggttaaacttggacaatggtcag

SEQ ID NO: 498238 - DNA, 33 bp, Homo sapien
tctcaggtgaggttaagcttggacaatggtcag

SEQ ID NO: 498239 - DNA, 33 bp, Homo sapien
ttagaactgttttataacaatgcagcaaggctt

SEQ ID NO: 498240 - DNA, 33 bp, Homo sapien
ttagaactgttttatagcaatgcagcaaggctt

SEQ ID NO: 498241 - DNA, 33 bp, Homo sapien
ttatacccctatttcccgcattgatattgtatt

SEQ ID NO: 498242 - DNA, 33 bp, Homo sapien
ttatacccctatttcctgcattgatattgtatt

SEQ ID NO: 498243 - DNA, 33 bp, Homo sapien
gaaagctagagtcatacggatgttagtaatcta

SEQ ID NO: 498244 - DNA, 33 bp, Homo sapien
gaaagctagagtcatatggatgttagtaatcta

SEQ ID NO: 498245 - DNA, 33 bp, Homo sapien
ccagcccattctgatactacttttagcgggctg

SEQ ID NO: 498246 - DNA, 33 bp, Homo sapien
ccagcccattctgatattacttttagcgggctg

SEQ ID NO: 498247 - DNA, 33 bp, Homo sapien
tgatgtcaccacactcgactcatagtcactcct

SEQ ID NO: 498248 - DNA, 33 bp, Homo sapien
tgatgtcaccacactctactcatagtcactcct

SEQ ID NO: 498249 - DNA, 33 bp, Homo sapien
ttgtggactatgaaaaagtccatgcagagtgga

SEQ ID NO: 498250 - DNA, 33 bp, Homo sapien
ttgtggactatgaaaacgtccatgcagagtgga

SEQ ID NO: 498251 - DNA, 33 bp, Homo sapien
tctgctaaataattcaaacacttggagcttttc

SEQ ID NO: 498252 - DNA, 33 bp, Homo sapien
tctgctaaataattcagacacttggagcttttc

SEQ ID NO: 498253 - DNA, 33 bp, Homo sapien
agaatctgttcactaaaaaaccacgttccttca

SEQ ID NO: 498254 - DNA, 33 bp, Homo sapien
agaatctgttcactaagaaaccacgttccttca

SEQ ID NO: 498255 - DNA, 33 bp, Homo sapien
ggcataatctttttgaaccaatgccaagccctc

SEQ ID NO: 498256 - DNA, 33 bp, Homo sapien
ggcataatctttttgagccaatgccaagccctc

SEQ ID NO: 498257 - DNA, 33 bp, Homo sapien
aagggcaacctcacataatacaggagaacgcat

SEQ ID NO: 498258 - DNA, 33 bp, Homo sapien
aagggcaacctcacatgatacaggagaacgcat

SEQ ID NO: 498259 - DNA, 33 bp, Homo sapien
ctatgtcaacactgtaaccagaagtttaagtaa

SEQ ID NO: 498260 - DNA, 33 bp, Homo sapien
ctatgtcaacactgtagccagaagtttaagtaa

SEQ ID NO: 498261 - DNA, 33 bp, Homo sapien
tgttgggattcctgaacgtaaaatccatgaagg

SEQ ID NO: 498262 - DNA, 33 bp, Homo sapien
tgttgggattcctgaaggtaaaatccatgaagg

SEQ ID NO: 498263 - DNA, 33 bp, Homo sapien
accatttctaaatcagcccagagcattctcaat

SEQ ID NO: 498264 - DNA, 33 bp, Homo sapien
accatttctaaatcagtccagagcattctcaat

SEQ ID NO: 498265 - DNA, 33 bp, Homo sapien
aatttgtggtatatgacgaaagcagtgtttaga

SEQ ID NO: 498266 - DNA, 33 bp, Homo sapien
aatttgtggtatatgatgaaagcagtgtttaga

SEQ ID NO: 498267 - DNA, 33 bp, Homo sapien
aagggaagctgaaaaacggcctccctccaaaga

SEQ ID NO: 498268 - DNA, 33 bp, Homo sapien
aagggaagctgaaaaatggcctccctccaaaga

SEQ ID NO: 498269 - DNA, 33 bp, Homo sapien
tgtccttccaaaatcaacttcttttatgtcagt

SEQ ID NO: 498270 - DNA, 33 bp, Homo sapien
tgtccttccaaaatcatcttcttttatgtcagt

SEQ ID NO: 498271 - DNA, 33 bp, Homo sapien
aaaatcttgcagtgaaaaaaccagcgttaagtt

SEQ ID NO: 498272 - DNA, 33 bp, Homo sapien
aaaatcttgcagtgaagaaaccagcgttaagtt

SEQ ID NO: 498273 - DNA, 33 bp, Homo sapien
ttataaagctactgtaagtaaggcagtatggta

SEQ ID NO: 498274 - DNA, 33 bp, Homo sapien
ttataaagctactgtacgtaaggcagtatggta

SEQ ID NO: 498275 - DNA, 33 bp, Homo sapien
gacctcaaaccacaaaactactacaagaacaag

SEQ ID NO: 498276 - DNA, 33 bp, Homo sapien
gacctcaaaccacaaagctactacaagaacaag

SEQ ID NO: 498277 - DNA, 33 bp, Homo sapien
gtggggatactaaaagcagtgcttaagagtatt

SEQ ID NO: 498278 - DNA, 33 bp, Homo sapien
gtggggatactaaaaggagtgcttaagagtatt

SEQ ID NO: 498279 - DNA, 33 bp, Homo sapien
cttacatctacagaacacatcaggccgtggaag

SEQ ID NO: 498280 - DNA, 33 bp, Homo sapien
cttacatctacagaacgcatcaggccgtggaag

SEQ ID NO: 498281 - DNA, 33 bp, Homo sapien
agtcttgcacccttgaacagtcaaaaacacata

SEQ ID NO: 498282 - DNA, 33 bp, Homo sapien
agtcttgcacccttgagcagtcaaaaacacata

SEQ ID NO: 498283 - DNA, 33 bp, Homo sapien
tcaagtaattgtcataccatcctctgagtgtct

SEQ ID NO: 498284 - DNA, 33 bp, Homo sapien
tcaagtaattgtcatatcatcctctgagtgtct

SEQ ID NO: 498285 - DNA, 33 bp, Homo sapien
aactggtccagcaactaaatagtagagacaatg

SEQ ID NO: 498286 - DNA, 33 bp, Homo sapien
aactggtccagcaactgaatagtagagacaatg

SEQ ID NO: 498287 - DNA, 33 bp, Homo sapien
tggattctccctcacacgaaaagatcttctcct

SEQ ID NO: 498288 - DNA, 33 bp, Homo sapien
tggattctccctcacatgaaaagatcttctcct

SEQ ID NO: 498289 - DNA, 33 bp, Homo sapien
aaggagtagcatttaacaaactttgcaggctgg

SEQ ID NO: 498290 - DNA, 33 bp, Homo sapien
aaggagtagcatttaataaactttgcaggctgg

SEQ ID NO: 498291 - DNA, 33 bp, Homo sapien
ctctttctacagcccacgcttgggtggttgggg

SEQ ID NO: 498292 - DNA, 33 bp, Homo sapien
ctctttctacagcccatgcttgggtggttgggg

SEQ ID NO: 498293 - DNA, 33 bp, Homo sapien
acacttctcattgtaccataggattcaagaaat

SEQ ID NO: 498294 - DNA, 33 bp, Homo sapien
acacttctcattgtactataggattcaagaaat

SEQ ID NO: 498295 - DNA, 33 bp, Homo sapien
ctgaattcctgtgagcagaaaggtccactgaga

SEQ ID NO: 498296 - DNA, 33 bp, Homo sapien
ctgaattcctgtgagccgaaaggtccactgaga

SEQ ID NO: 498297 - DNA, 33 bp, Homo sapien
ttgatgtcatttgtgaacactcctaatgtgtgc

SEQ ID NO: 498298 - DNA, 33 bp, Homo sapien
ttgatgtcatttgtgaccactcctaatgtgtgc

SEQ ID NO: 498299 - DNA, 33 bp, Homo sapien
ggaagagtcaactgagcccaaatgattaagccc

SEQ ID NO: 498300 - DNA, 33 bp, Homo sapien
ggaagagtcaactgagtccaaatgattaagccc

SEQ ID NO: 498301 - DNA, 33 bp, Homo sapien
tcctttacacacgctagcatcacaatcctctgt

SEQ ID NO: 498302 - DNA, 33 bp, Homo sapien
tcctttacacacgctatcatcacaatcctctgt

SEQ ID NO: 498303 - DNA, 33 bp, Homo sapien
acaacaacaacaacatcaaatcccgacatttga

SEQ ID NO: 498304 - DNA, 33 bp, Homo sapien
acaacaacaacaacattaaatcccgacatttga

SEQ ID NO: 498305 - DNA, 33 bp, Homo sapien
attttgtacctgagaaatacatgatttttaggc

SEQ ID NO: 498306 - DNA, 33 bp, Homo sapien
attttgtacctgagaagtacatgatttttaggc

SEQ ID NO: 498307 - DNA, 33 bp, Homo sapien
tcaggaaagccatacaatcaatccctttaatat

SEQ ID NO: 498308 - DNA, 33 bp, Homo sapien
tcaggaaagccatacattcaatccctttaatat

SEQ ID NO: 498309 - DNA, 33 bp, Homo sapien
tataagtcaatgagaaaagttacaactgggaga

SEQ ID NO: 498310 - DNA, 33 bp, Homo sapien
tataagtcaatgagaagagttacaactgggaga

SEQ ID NO: 498311 - DNA, 33 bp, Homo sapien
atgtttcattgaagccaagaataatgataatag

SEQ ID NO: 498312 - DNA, 33 bp, Homo sapien
atgtttcattgaagccgagaataatgataatag

SEQ ID NO: 498313 - DNA, 33 bp, Homo sapien
agtatctatcaagcacaataaaatgacgtatac

SEQ ID NO: 498314 - DNA, 33 bp, Homo sapien
agtatctatcaagcacgataaaatgacgtatac

SEQ ID NO: 498315 - DNA, 33 bp, Homo sapien
actactttaatgaagaccatgagacctgggttt

SEQ ID NO: 498316 - DNA, 33 bp, Homo sapien
actactttaatgaagagcatgagacctgggttt

SEQ ID NO: 498317 - DNA, 33 bp, Homo sapien
ggtgctccatttactacggctattttgagataa

SEQ ID NO: 498318 - DNA, 33 bp, Homo sapien
ggtgctccatttactatggctattttgagataa

SEQ ID NO: 498319 - DNA, 33 bp, Homo sapien
tacttaccttgaaccaagatttcaaacttagac

SEQ ID NO: 498320 - DNA, 33 bp, Homo sapien
tacttaccttgaaccacgatttcaaacttagac

SEQ ID NO: 498321 - DNA, 33 bp, Homo sapien
gcatcctggaagataccccccgtgttttcttcc

SEQ ID NO: 498322 - DNA, 33 bp, Homo sapien
gcatcctggaagatactccccgtgttttcttcc

SEQ ID NO: 498323 - DNA, 33 bp, Homo sapien
tgaaatttttcccaccaatacctgaggaccttc

SEQ ID NO: 498324 - DNA, 33 bp, Homo sapien
tgaaatttttcccacctatacctgaggaccttc

SEQ ID NO: 498325 - DNA, 33 bp, Homo sapien
acagagccaaaagagacgaggaaaggtggtgtc

SEQ ID NO: 498326 - DNA, 33 bp, Homo sapien
acagagccaaaagagatgaggaaaggtggtgtc

SEQ ID NO: 498327 - DNA, 33 bp, Homo sapien
tcctttccaatcacagccataaatctggcttct

SEQ ID NO: 498328 - DNA, 33 bp, Homo sapien
tcctttccaatcacagtcataaatctggcttct

SEQ ID NO: 498329 - DNA, 33 bp, Homo sapien
aaaagataagtaaaacacagttcttgccaaaca

SEQ ID NO: 498330 - DNA, 33 bp, Homo sapien
aaaagataagtaaaacgcagttcttgccaaaca

SEQ ID NO: 498331 - DNA, 33 bp, Homo sapien
tttacagtagctcgtgcagagcctggcacatag

SEQ ID NO: 498332 - DNA, 33 bp, Homo sapien
tttacagtagctcgtgtagagcctggcacatag

SEQ ID NO: 498333 - DNA, 33 bp, Homo sapien
tttcccaacaaagtaacctgctgtcctcaagca

SEQ ID NO: 498334 - DNA, 33 bp, Homo sapien
tttcccaacaaagtaatctgctgtcctcaagca

SEQ ID NO: 498335 - DNA, 33 bp, Homo sapien
acagtaggctatatcacgtacccaaagtatgta

SEQ ID NO: 498336 - DNA, 33 bp, Homo sapien
acagtaggctatatcatgtacccaaagtatgta

SEQ ID NO: 498337 - DNA, 33 bp, Homo sapien
caaacctaggtggtacaggctactacatacttt

SEQ ID NO: 498338 - DNA, 33 bp, Homo sapien
caaacctaggtggtaccggctactacatacttt

SEQ ID NO: 498339 - DNA, 33 bp, Homo sapien
aaatgtagcttcaagaaacaaagatatttcatt

SEQ ID NO: 498340 - DNA, 33 bp, Homo sapien
aaatgtagcttcaagagacaaagatatttcatt

SEQ ID NO: 498341 - DNA, 33 bp, Homo sapien
ttcagagacaccagaggattatgtttggcagtg

SEQ ID NO: 498342 - DNA, 33 bp, Homo sapien
ttcagagacaccagagtattatgtttggcagtg

SEQ ID NO: 498343 - DNA, 33 bp, Homo sapien
acataagtaaaacccacggcacagaggctaggt

SEQ ID NO: 498344 - DNA, 33 bp, Homo sapien
acataagtaaaacccatggcacagaggctaggt

SEQ ID NO: 498345 - DNA, 33 bp, Homo sapien
aggcactcactgtttcacctctgcaaattcatt

SEQ ID NO: 498346 - DNA, 33 bp, Homo sapien
aggcactcactgtttctcctctgcaaattcatt

SEQ ID NO: 498347 - DNA, 33 bp, Homo sapien
gggttgatggataatacagtgatgcacaggtat

SEQ ID NO: 498348 - DNA, 33 bp, Homo sapien
gggttgatggataatagagtgatgcacaggtat

SEQ ID NO: 498349 - DNA, 33 bp, Homo sapien
taactagtatttacaacgttagtgagaattgaa

SEQ ID NO: 498350 - DNA, 33 bp, Homo sapien
taactagtatttacaatgttagtgagaattgaa

SEQ ID NO: 498351 - DNA, 33 bp, Homo sapien
gtccttgcatgattcccagagtagagcttcctg

SEQ ID NO: 498352 - DNA, 33 bp, Homo sapien
gtccttgcatgattcctagagtagagcttcctg

SEQ ID NO: 498353 - DNA, 33 bp, Homo sapien
ggggctaccatattgaagagtgcaggcctagaa

SEQ ID NO: 498354 - DNA, 33 bp, Homo sapien
ggggctaccatattgaggagtgcaggcctagaa

SEQ ID NO: 498355 - DNA, 33 bp, Homo sapien
aagctacatgagtcaaaccagtgctatgtatca

SEQ ID NO: 498356 - DNA, 33 bp, Homo sapien
aagctacatgagtcaatccagtgctatgtatca

SEQ ID NO: 498357 - DNA, 33 bp, Homo sapien
tcatattttttcatcaataaatccagtgtttca

SEQ ID NO: 498358 - DNA, 33 bp, Homo sapien
tcatattttttcatcagtaaatccagtgtttca

SEQ ID NO: 498359 - DNA, 33 bp, Homo sapien
gagtatataatttgatgaacgtccaggtgatgt

SEQ ID NO: 498360 - DNA, 33 bp, Homo sapien
gagtatataatttgattaacgtccaggtgatgt

SEQ ID NO: 498361 - DNA, 33 bp, Homo sapien
aatgggaactcctgaacgtatcctaagccttcc

SEQ ID NO: 498362 - DNA, 33 bp, Homo sapien
aatgggaactcctgaatgtatcctaagccttcc

SEQ ID NO: 498363 - DNA, 33 bp, Homo sapien
gtaaaatcaggttaaaaagggatgcaaagacta

SEQ ID NO: 498364 - DNA, 33 bp, Homo sapien
gtaaaatcaggttaaacagggatgcaaagacta

SEQ ID NO: 498365 - DNA, 33 bp, Homo sapien
cttgcatagtttccaacagctttcccacttaga

SEQ ID NO: 498366 - DNA, 33 bp, Homo sapien
cttgcatagtttccaatagctttcccacttaga

SEQ ID NO: 498367 - DNA, 33 bp, Homo sapien
aatgagaaatgagctccgaatacattgaaaaac

SEQ ID NO: 498368 - DNA, 33 bp, Homo sapien
aatgagaaatgagctctgaatacattgaaaaac

SEQ ID NO: 498369 - DNA, 33 bp, Homo sapien
tctttgagataatctacgagctgtcttccaaaa

SEQ ID NO: 498370 - DNA, 33 bp, Homo sapien
tctttgagataatctatgagctgtcttccaaaa

SEQ ID NO: 498371 - DNA, 33 bp, Homo sapien
cctattaccctctgtaaggcagaaagtaaattg

SEQ ID NO: 498372 - DNA, 33 bp, Homo sapien
cctattaccctctgtagggcagaaagtaaattg

SEQ ID NO: 498373 - DNA, 33 bp, Homo sapien
aatttatgggttgaagcctgaatccctgatgtg

SEQ ID NO: 498374 - DNA, 33 bp, Homo sapien
aatttatgggttgaaggctgaatccctgatgtg

SEQ ID NO: 498375 - DNA, 33 bp, Homo sapien
acatagcacactaggaagccttttaaaaccagg

SEQ ID NO: 498376 - DNA, 33 bp, Homo sapien
acatagcacactaggaggccttttaaaaccagg

SEQ ID NO: 498377 - DNA, 33 bp, Homo sapien
gaaatacatgaaaatacatgagttgcctgccct

SEQ ID NO: 498378 - DNA, 33 bp, Homo sapien
gaaatacatgaaaatatatgagttgcctgccct

SEQ ID NO: 498379 - DNA, 33 bp, Homo sapien
ggcttactacaaagaacgttacaaagaatacag

SEQ ID NO: 498380 - DNA, 33 bp, Homo sapien
ggcttactacaaagaatgttacaaagaatacag

SEQ ID NO: 498381 - DNA, 33 bp, Homo sapien
ctgtgtcccactctgaaaaaatgcacttgaggt

SEQ ID NO: 498382 - DNA, 33 bp, Homo sapien
ctgtgtcccactctgagaaaatgcacttgaggt

SEQ ID NO: 498383 - DNA, 33 bp, Homo sapien
aaaatagcttttgtgacataacagataaggaaa

SEQ ID NO: 498384 - DNA, 33 bp, Homo sapien
aaaatagcttttgtgatataacagataaggaaa

SEQ ID NO: 498385 - DNA, 33 bp, Homo sapien
cttgaatccctcacccacatcaaggataaatat

SEQ ID NO: 498386 - DNA, 33 bp, Homo sapien
cttgaatccctcacccgcatcaaggataaatat

SEQ ID NO: 498387 - DNA, 33 bp, Homo sapien
aaggcacaggatgtaaaaaatgagctgccacct

SEQ ID NO: 498388 - DNA, 33 bp, Homo sapien
aaggcacaggatgtaacaaatgagctgccacct

SEQ ID NO: 498389 - DNA, 33 bp, Homo sapien
aattccagaagggaaaaagaatagcacatcttt

SEQ ID NO: 498390 - DNA, 33 bp, Homo sapien
aattccagaagggaaagagaatagcacatcttt

SEQ ID NO: 498391 - DNA, 33 bp, Homo sapien
gagcaaatggagccgtgaaaggggaggaatcag

SEQ ID NO: 498392 - DNA, 33 bp, Homo sapien
gagcaaatggagccgttaaaggggaggaatcag

SEQ ID NO: 498393 - DNA, 33 bp, Homo sapien
cttagctatatatccacaaaataacaactatgt

SEQ ID NO: 498394 - DNA, 33 bp, Homo sapien
cttagctatatatccagaaaataacaactatgt

SEQ ID NO: 498395 - DNA, 33 bp, Homo sapien
acatgtcaagatacaagttgattgctttttgtt

SEQ ID NO: 498396 - DNA, 33 bp, Homo sapien
acatgtcaagatacaatttgattgctttttgtt

SEQ ID NO: 498397 - DNA, 33 bp, Homo sapien
ttgctgaattctaaccaacccgactcattagcc

SEQ ID NO: 498398 - DNA, 33 bp, Homo sapien
ttgctgaattctaacctacccgactcattagcc

SEQ ID NO: 498399 - DNA, 33 bp, Homo sapien
ttcagaggtttataacaattgagatgctatgtg

SEQ ID NO: 498400 - DNA, 33 bp, Homo sapien
ttcagaggtttataacgattgagatgctatgtg

SEQ ID NO: 498401 - DNA, 33 bp, Homo sapien
ttggactggtcaactaataccatttatcactgt

SEQ ID NO: 498402 - DNA, 33 bp, Homo sapien
ttggactggtcaactagtaccatttatcactgt

SEQ ID NO: 498403 - DNA, 33 bp, Homo sapien
ctctcctcatatgaccacagggagatgggcaag

SEQ ID NO: 498404 - DNA, 33 bp, Homo sapien
ctctcctcatatgaccgcagggagatgggcaag

SEQ ID NO: 498405 - DNA, 33 bp, Homo sapien
tgagaggttgtttacagtagcctccagatacca

SEQ ID NO: 498406 - DNA, 33 bp, Homo sapien
tgagaggttgtttacattagcctccagatacca

SEQ ID NO: 498407 - DNA, 33 bp, Homo sapien
gctgaactcttgcactcaaagtaggagacagcc

SEQ ID NO: 498408 - DNA, 33 bp, Homo sapien
gctgaactcttgcacttaaagtaggagacagcc

SEQ ID NO: 498409 - DNA, 33 bp, Homo sapien
acaggaacaacatgaaagtactgagggcccaaa

SEQ ID NO: 498410 - DNA, 33 bp, Homo sapien
acaggaacaacatgaatgtactgagggcccaaa

SEQ ID NO: 498411 - DNA, 33 bp, Homo sapien
ccagatgggagcccagaccaccagatccaatgc

SEQ ID NO: 498412 - DNA, 33 bp, Homo sapien
ccagatgggagcccaggccaccagatccaatgc

SEQ ID NO: 498413 - DNA, 33 bp, Homo sapien
gcagaatcctttgttacgaccataaagttgaaa

SEQ ID NO: 498414 - DNA, 33 bp, Homo sapien
gcagaatcctttgttatgaccataaagttgaaa

SEQ ID NO: 498415 - DNA, 33 bp, Homo sapien
gaataagaaaagttgaaggaattttctggaagg

SEQ ID NO: 498416 - DNA, 33 bp, Homo sapien
gaataagaaaagttgagggaattttctggaagg

SEQ ID NO: 498417 - DNA, 33 bp, Homo sapien
tcaagaatccctaaccccatctcgcaatgttaa

SEQ ID NO: 498418 - DNA, 33 bp, Homo sapien
tcaagaatccctaaccgcatctcgcaatgttaa

SEQ ID NO: 498419 - DNA, 33 bp, Homo sapien
ctggtagatagcttgccccttcacctacactct

SEQ ID NO: 498420 - DNA, 33 bp, Homo sapien
ctggtagatagcttgctccttcacctacactct

SEQ ID NO: 498421 - DNA, 33 bp, Homo sapien
atgttggggaaataagactatacaaaaattaca

SEQ ID NO: 498422 - DNA, 33 bp, Homo sapien
atgttggggaaataaggctatacaaaaattaca

SEQ ID NO: 498423 - DNA, 33 bp, Homo sapien
acagattcgtggaaaaccatcctgtaacactga

SEQ ID NO: 498424 - DNA, 33 bp, Homo sapien
acagattcgtggaaaatcatcctgtaacactga

SEQ ID NO: 498425 - DNA, 33 bp, Homo sapien
tacgggaatacatacactcaaatacagaaaaca

SEQ ID NO: 498426 - DNA, 33 bp, Homo sapien
tacgggaatacatacagtcaaatacagaaaaca

SEQ ID NO: 498427 - DNA, 33 bp, Homo sapien
aaacatgaaaacaaaagaatgatatctgccacc

SEQ ID NO: 498428 - DNA, 33 bp, Homo sapien
aaacatgaaaacaaaataatgatatctgccacc

SEQ ID NO: 498429 - DNA, 33 bp, Homo sapien
gagagaactccaacaggctagcataggacttct

SEQ ID NO: 498430 - DNA, 33 bp, Homo sapien
gagagaactccaacagtctagcataggacttct

SEQ ID NO: 498431 - DNA, 33 bp, Homo sapien
tttttaaagcgaagaaagtgctgtaaaacatct

SEQ ID NO: 498432 - DNA, 33 bp, Homo sapien
tttttaaagcgaagaaggtgctgtaaaacatct

SEQ ID NO: 498433 - DNA, 33 bp, Homo sapien
ccaagatttaggattgcagcaaaggagaactca

SEQ ID NO: 498434 - DNA, 33 bp, Homo sapien
ccaagatttaggattgtagcaaaggagaactca

SEQ ID NO: 498435 - DNA, 33 bp, Homo sapien
attgacaatcaacttagctcatttgcctagcct

SEQ ID NO: 498436 - DNA, 33 bp, Homo sapien
attgacaatcaacttatctcatttgcctagcct

SEQ ID NO: 498437 - DNA, 33 bp, Homo sapien
atttatagggttctgcaaaaatctactctttca

SEQ ID NO: 498438 - DNA, 33 bp, Homo sapien
atttatagggttctgcgaaaatctactctttca

SEQ ID NO: 498439 - DNA, 33 bp, Homo sapien
gtatcaatgccctaaacttcctttcaagccttc

SEQ ID NO: 498440 - DNA, 33 bp, Homo sapien
gtatcaatgccctaaatttcctttcaagccttc

SEQ ID NO: 498441 - DNA, 33 bp, Homo sapien
ttccagatcatcttgacaagttataccggggat

SEQ ID NO: 498442 - DNA, 33 bp, Homo sapien
ttccagatcatcttgataagttataccggggat

SEQ ID NO: 498443 - DNA, 33 bp, Homo sapien
tcaatacctccccagaatacaaagacattcaac

SEQ ID NO: 498444 - DNA, 33 bp, Homo sapien
tcaatacctccccagagtacaaagacattcaac

SEQ ID NO: 498445 - DNA, 33 bp, Homo sapien
aagcagccagcctggactcacagagatttaagt

SEQ ID NO: 498446 - DNA, 33 bp, Homo sapien
aagcagccagcctggagtcacagagatttaagt

SEQ ID NO: 498447 - DNA, 33 bp, Homo sapien
tctaccatcttctgctgaactcaagcgtccttc

SEQ ID NO: 498448 - DNA, 33 bp, Homo sapien
tctaccatcttctgcttaactcaagcgtccttc

SEQ ID NO: 498449 - DNA, 33 bp, Homo sapien
aggcagccagagttaaagtgcagcagacaccca

SEQ ID NO: 498450 - DNA, 33 bp, Homo sapien
aggcagccagagttaaggtgcagcagacaccca

SEQ ID NO: 498451 - DNA, 33 bp, Homo sapien
tactcaggagcaaatactatgtagaatggaaac

SEQ ID NO: 498452 - DNA, 33 bp, Homo sapien
tactcaggagcaaatattatgtagaatggaaac

SEQ ID NO: 498453 - DNA, 33 bp, Homo sapien
gagagatgcttgttgaacaatctattatgcctc

SEQ ID NO: 498454 - DNA, 33 bp, Homo sapien
gagagatgcttgttgagcaatctattatgcctc

SEQ ID NO: 498455 - DNA, 33 bp, Homo sapien
aactggagttgtctcactatgaaagtcttttgc

SEQ ID NO: 498456 - DNA, 33 bp, Homo sapien
aactggagttgtctcattatgaaagtcttttgc

SEQ ID NO: 498457 - DNA, 33 bp, Homo sapien
atgcttgcattgctaaacatttggtcaggatgg

SEQ ID NO: 498458 - DNA, 33 bp, Homo sapien
atgcttgcattgctaatcatttggtcaggatgg

SEQ ID NO: 498459 - DNA, 33 bp, Homo sapien
tttgaggcttggactgcaactacccccactggc

SEQ ID NO: 498460 - DNA, 33 bp, Homo sapien
tttgaggcttggactggaactacccccactggc

SEQ ID NO: 498461 - DNA, 33 bp, Homo sapien
aaaaagtaaaacatatcaagctcttgattccat

SEQ ID NO: 498462 - DNA, 33 bp, Homo sapien
aaaaagtaaaacatatgaagctcttgattccat

SEQ ID NO: 498463 - DNA, 33 bp, Homo sapien
aataacaatcttaacacaaagactagcacatag

SEQ ID NO: 498464 - DNA, 33 bp, Homo sapien
aataacaatcttaacataaagactagcacatag

SEQ ID NO: 498465 - DNA, 33 bp, Homo sapien
tctttttgttgctcaccgaagaaggagattttg

SEQ ID NO: 498466 - DNA, 33 bp, Homo sapien
tctttttgttgctcactgaagaaggagattttg

SEQ ID NO: 498467 - DNA, 33 bp, Homo sapien
agacagtgtctcattacgtttcccagacttcat

SEQ ID NO: 498468 - DNA, 33 bp, Homo sapien
agacagtgtctcattatgtttcccagacttcat

SEQ ID NO: 498469 - DNA, 33 bp, Homo sapien
actctgtaaagtatcaatgacctttcttgtaat

SEQ ID NO: 498470 - DNA, 33 bp, Homo sapien
actctgtaaagtatcattgacctttcttgtaat

SEQ ID NO: 498471 - DNA, 33 bp, Homo sapien
cagaaaaagctatacccagagccaactttattt

SEQ ID NO: 498472 - DNA, 33 bp, Homo sapien
cagaaaaagctataccgagagccaactttattt

SEQ ID NO: 498473 - DNA, 33 bp, Homo sapien
gacatcctgaacactacgttttgcacagaaaac

SEQ ID NO: 498474 - DNA, 33 bp, Homo sapien
gacatcctgaacactatgttttgcacagaaaac

SEQ ID NO: 498475 - DNA, 33 bp, Homo sapien
tcattagctttacaaaagtggttggttgagttt

SEQ ID NO: 498476 - DNA, 33 bp, Homo sapien
tcattagctttacaaaggtggttggttgagttt

SEQ ID NO: 498477 - DNA, 33 bp, Homo sapien
ttgacctttgactagccacttagactctcagca

SEQ ID NO: 498478 - DNA, 33 bp, Homo sapien
ttgacctttgactagctacttagactctcagca

SEQ ID NO: 498479 - DNA, 33 bp, Homo sapien
cttggtaagttaaacaatgaagcttgagaccag

SEQ ID NO: 498480 - DNA, 33 bp, Homo sapien
cttggtaagttaaacagtgaagcttgagaccag

SEQ ID NO: 498481 - DNA, 33 bp, Homo sapien
tgggcccaggcctaataagacttatagctttca

SEQ ID NO: 498482 - DNA, 33 bp, Homo sapien
tgggcccaggcctaatgagacttatagctttca

SEQ ID NO: 498483 - DNA, 33 bp, Homo sapien
tattgtttattaaccactaacggtgtgcccatt

SEQ ID NO: 498484 - DNA, 33 bp, Homo sapien
tattgtttattaaccattaacggtgtgcccatt

SEQ ID NO: 498485 - DNA, 33 bp, Homo sapien
agcagtggatgattcaaaggccccaaaggctat

SEQ ID NO: 498486 - DNA, 33 bp, Homo sapien
agcagtggatgattcagaggccccaaaggctat

SEQ ID NO: 498487 - DNA, 33 bp, Homo sapien
agagtattgtattctgaaaacctaacacactaa

SEQ ID NO: 498488 - DNA, 33 bp, Homo sapien
agagtattgtattctgtaaacctaacacactaa

SEQ ID NO: 498489 - DNA, 33 bp, Homo sapien
gttacaggtaacagaacgtgaaaataattgtac

SEQ ID NO: 498490 - DNA, 33 bp, Homo sapien
gttacaggtaacagaatgtgaaaataattgtac

SEQ ID NO: 498491 - DNA, 33 bp, Homo sapien
cactgctgagaaccaacttctgataggatgata

SEQ ID NO: 498492 - DNA, 33 bp, Homo sapien
cactgctgagaaccaatttctgataggatgata

SEQ ID NO: 498493 - DNA, 33 bp, Homo sapien
tcttctaatgcttcacacttggaacaaagacga

SEQ ID NO: 498494 - DNA, 33 bp, Homo sapien
tcttctaatgcttcacgcttggaacaaagacga

SEQ ID NO: 498495 - DNA, 33 bp, Homo sapien
ttggaacaaagacgagaataagcagaaagtaag

SEQ ID NO: 498496 - DNA, 33 bp, Homo sapien
ttggaacaaagacgaggataagcagaaagtaag

SEQ ID NO: 498497 - DNA, 33 bp, Homo sapien
attttcttgaggcttaagtcagaaaaccataac

SEQ ID NO: 498498 - DNA, 33 bp, Homo sapien
attttcttgaggcttaggtcagaaaaccataac

SEQ ID NO: 498499 - DNA, 33 bp, Homo sapien
ctgtcagaaacagaaaagaccctggaaagcgtg

SEQ ID NO: 498500 - DNA, 33 bp, Homo sapien
ctgtcagaaacagaaaggaccctggaaagcgtg

SEQ ID NO: 498501 - DNA, 33 bp, Homo sapien
aaagtaatatgccttacaatgaaacttaatgat

SEQ ID NO: 498502 - DNA, 33 bp, Homo sapien
aaagtaatatgccttataatgaaacttaatgat

SEQ ID NO: 498503 - DNA, 33 bp, Homo sapien
ttttatagcataaggcaaacgtcctttcagtga

SEQ ID NO: 498504 - DNA, 33 bp, Homo sapien
ttttatagcataaggctaacgtcctttcagtga

SEQ ID NO: 498505 - DNA, 33 bp, Homo sapien
ctctctaaaattctagaccatatatctagcatc

SEQ ID NO: 498506 - DNA, 33 bp, Homo sapien
ctctctaaaattctagcccatatatctagcatc

SEQ ID NO: 498507 - DNA, 33 bp, Homo sapien
gtgtatgtagtgttgacgagtctaagtctaagg

SEQ ID NO: 498508 - DNA, 33 bp, Homo sapien
gtgtatgtagtgttgaggagtctaagtctaagg

SEQ ID NO: 498509 - DNA, 33 bp, Homo sapien
gccaatgtacagtagcaaaaattttttaattaa

SEQ ID NO: 498510 - DNA, 33 bp, Homo sapien
gccaatgtacagtagccaaaattttttaattaa

SEQ ID NO: 498511 - DNA, 33 bp, Homo sapien
taagattttgcaggaacgttagagcccccaaaa

SEQ ID NO: 498512 - DNA, 33 bp, Homo sapien
taagattttgcaggaatgttagagcccccaaaa

SEQ ID NO: 498513 - DNA, 33 bp, Homo sapien
acacatataatggcagcaattcaaattccaaca

SEQ ID NO: 498514 - DNA, 33 bp, Homo sapien
acacatataatggcagtaattcaaattccaaca

SEQ ID NO: 498515 - DNA, 33 bp, Homo sapien
gtaccaccacctgaaggcagggcatgaagccaa

SEQ ID NO: 498516 - DNA, 33 bp, Homo sapien
gtaccaccacctgaagtcagggcatgaagccaa

SEQ ID NO: 498517 - DNA, 33 bp, Homo sapien
tagacttgatgacctccgaatcaccttggtggt

SEQ ID NO: 498518 - DNA, 33 bp, Homo sapien
tagacttgatgacctctgaatcaccttggtggt

SEQ ID NO: 498519 - DNA, 33 bp, Homo sapien
gtaagggtgcagccaactgacagtttgataagg

SEQ ID NO: 498520 - DNA, 33 bp, Homo sapien
gtaagggtgcagccaattgacagtttgataagg

SEQ ID NO: 498521 - DNA, 33 bp, Homo sapien
agacagaatcaagtgacattattattggaagct

SEQ ID NO: 498522 - DNA, 33 bp, Homo sapien
agacagaatcaagtgatattattattggaagct

SEQ ID NO: 498523 - DNA, 33 bp, Homo sapien
cattgtatggaactcgcaaaatgcattcaattc

SEQ ID NO: 498524 - DNA, 33 bp, Homo sapien
cattgtatggaactcggaaaatgcattcaattc

SEQ ID NO: 498525 - DNA, 33 bp, Homo sapien
aagctcagctctttagaaatacaatgtaagaat

SEQ ID NO: 498526 - DNA, 33 bp, Homo sapien
aagctcagctctttaggaatacaatgtaagaat

SEQ ID NO: 498527 - DNA, 33 bp, Homo sapien
aaatggaaggtcatcaagaattttaaagctagt

SEQ ID NO: 498528 - DNA, 33 bp, Homo sapien
aaatggaaggtcatcaggaattttaaagctagt

SEQ ID NO: 498529 - DNA, 33 bp, Homo sapien
atgttagctacaggttaaaatcacaaaactagc

SEQ ID NO: 498530 - DNA, 33 bp, Homo sapien
atgttagctacaggttgaaatcacaaaactagc

SEQ ID NO: 498531 - DNA, 33 bp, Homo sapien
gccaggaactagcccacgtttccaaatccctag

SEQ ID NO: 498532 - DNA, 33 bp, Homo sapien
gccaggaactagcccatgtttccaaatccctag

SEQ ID NO: 498533 - DNA, 33 bp, Homo sapien
attataccagcaatacaaaagttagtcttgcct

SEQ ID NO: 498534 - DNA, 33 bp, Homo sapien
attataccagcaatacgaaagttagtcttgcct

SEQ ID NO: 498535 - DNA, 33 bp, Homo sapien
tggtataccagcctaacagccttgaaagatact

SEQ ID NO: 498536 - DNA, 33 bp, Homo sapien
tggtataccagcctaatagccttgaaagatact

SEQ ID NO: 498537 - DNA, 33 bp, Homo sapien
caaactgtgtcttttacctaaataatcaacatt

SEQ ID NO: 498538 - DNA, 33 bp, Homo sapien
caaactgtgtcttttatctaaataatcaacatt

SEQ ID NO: 498539 - DNA, 33 bp, Homo sapien
atttttgtttgtgcagaatacttactttcccat

SEQ ID NO: 498540 - DNA, 33 bp, Homo sapien
atttttgtttgtgcagtatacttactttcccat

SEQ ID NO: 498541 - DNA, 33 bp, Homo sapien
taagggatcagatacaaattcatcaaggagcga

SEQ ID NO: 498542 - DNA, 33 bp, Homo sapien
taagggatcagatacagattcatcaaggagcga

SEQ ID NO: 498543 - DNA, 33 bp, Homo sapien
ttaatttggcacaaaacctctctaccaatctgc

SEQ ID NO: 498544 - DNA, 33 bp, Homo sapien
ttaatttggcacaaaatctctctaccaatctgc

SEQ ID NO: 498545 - DNA, 33 bp, Homo sapien
tatgctccaattgggcacagaatgggactctct

SEQ ID NO: 498546 - DNA, 33 bp, Homo sapien
tatgctccaattgggcgcagaatgggactctct

SEQ ID NO: 498547 - DNA, 33 bp, Homo sapien
tttattgacttatcaaattatcacagattccat

SEQ ID NO: 498548 - DNA, 33 bp, Homo sapien
tttattgacttatcaagttatcacagattccat

SEQ ID NO: 498549 - DNA, 33 bp, Homo sapien
atccaccttggctaaacggagacaaagctttac

SEQ ID NO: 498550 - DNA, 33 bp, Homo sapien
atccaccttggctaaatggagacaaagctttac

SEQ ID NO: 498551 - DNA, 33 bp, Homo sapien
atcaatacctgatggcacatgaaaccttttttt

SEQ ID NO: 498552 - DNA, 33 bp, Homo sapien
atcaatacctgatggcgcatgaaaccttttttt

SEQ ID NO: 498553 - DNA, 33 bp, Homo sapien
gtaagtgctctctataatacagtgtataaaatt

SEQ ID NO: 498554 - DNA, 33 bp, Homo sapien
gtaagtgctctctatagtacagtgtataaaatt

SEQ ID NO: 498555 - DNA, 33 bp, Homo sapien
cctgtaggaaccttgaaaatctaacagacattg

SEQ ID NO: 498556 - DNA, 33 bp, Homo sapien
cctgtaggaaccttgacaatctaacagacattg

SEQ ID NO: 498557 - DNA, 33 bp, Homo sapien
ttacttgggacatgaaagatgacaaggatttgg

SEQ ID NO: 498558 - DNA, 33 bp, Homo sapien
ttacttgggacatgaatgatgacaaggatttgg

SEQ ID NO: 498559 - DNA, 33 bp, Homo sapien
ttgcatggtaacgctaagttcaattttttgagc

SEQ ID NO: 498560 - DNA, 33 bp, Homo sapien
ttgcatggtaacgctatgttcaattttttgagc

SEQ ID NO: 498561 - DNA, 33 bp, Homo sapien
atggcatttgttataacgactttgaatgacaaa

SEQ ID NO: 498562 - DNA, 33 bp, Homo sapien
atggcatttgttataatgactttgaatgacaaa

SEQ ID NO: 498563 - DNA, 33 bp, Homo sapien
aagtacagttcagaataagagttagctataaat

SEQ ID NO: 498564 - DNA, 33 bp, Homo sapien
aagtacagttcagaatgagagttagctataaat

SEQ ID NO: 498565 - DNA, 33 bp, Homo sapien
ttctttgccttgagaaacactgaaggatatatg

SEQ ID NO: 498566 - DNA, 33 bp, Homo sapien
ttctttgccttgagaagcactgaaggatatatg

SEQ ID NO: 498567 - DNA, 33 bp, Homo sapien
cttaagacatccaaaaatttctggtaggttatt

SEQ ID NO: 498568 - DNA, 33 bp, Homo sapien
cttaagacatccaaaagtttctggtaggttatt

SEQ ID NO: 498569 - DNA, 33 bp, Homo sapien
tgcatccagtgaaaaaagtttataatccatgta

SEQ ID NO: 498570 - DNA, 33 bp, Homo sapien
tgcatccagtgaaaaatgtttataatccatgta

SEQ ID NO: 498571 - DNA, 33 bp, Homo sapien
taaattgaactacaccaagagatagtgagctcc

SEQ ID NO: 498572 - DNA, 33 bp, Homo sapien
taaattgaactacaccgagagatagtgagctcc

SEQ ID NO: 498573 - DNA, 33 bp, Homo sapien
gaaaatacactgtaaaggtagatagatacacag

SEQ ID NO: 498574 - DNA, 33 bp, Homo sapien
gaaaatacactgtaaatgtagatagatacacag

SEQ ID NO: 498575 - DNA, 33 bp, Homo sapien
acaattaaaattaaaccgattcaactgcaagtt

SEQ ID NO: 498576 - DNA, 33 bp, Homo sapien
acaattaaaattaaactgattcaactgcaagtt

SEQ ID NO: 498577 - DNA, 33 bp, Homo sapien
agaaatcagaaaaaaccgcaaacaagataatgc

SEQ ID NO: 498578 - DNA, 33 bp, Homo sapien
agaaatcagaaaaaactgcaaacaagataatgc

SEQ ID NO: 498579 - DNA, 33 bp, Homo sapien
cagttagataatttccaagttttcttaatgtgg

SEQ ID NO: 498580 - DNA, 33 bp, Homo sapien
cagttagataatttccgagttttcttaatgtgg

SEQ ID NO: 498581 - DNA, 33 bp, Homo sapien
aatttcatttacagtgcaatatttgagctttat

SEQ ID NO: 498582 - DNA, 33 bp, Homo sapien
aatttcatttacagtggaatatttgagctttat

SEQ ID NO: 498583 - DNA, 33 bp, Homo sapien
ctacagttagcaaatagctcaccttctaaattt

SEQ ID NO: 498584 - DNA, 33 bp, Homo sapien
ctacagttagcaaatatctcaccttctaaattt

SEQ ID NO: 498585 - DNA, 33 bp, Homo sapien
atggtataatggggcccgaaatagtgaagttgc

SEQ ID NO: 498586 - DNA, 33 bp, Homo sapien
atggtataatggggcctgaaatagtgaagttgc

SEQ ID NO: 498587 - DNA, 33 bp, Homo sapien
ccctctcccatctatcaagacactgagatcata

SEQ ID NO: 498588 - DNA, 33 bp, Homo sapien
ccctctcccatctatcgagacactgagatcata

SEQ ID NO: 498589 - DNA, 33 bp, Homo sapien
ctacaggtcattggccaaagtttattataatta

SEQ ID NO: 498590 - DNA, 33 bp, Homo sapien
ctacaggtcattggccgaagtttattataatta

SEQ ID NO: 498591 - DNA, 33 bp, Homo sapien
ttttgatacagaaaatcatatgtaaaaaagaga

SEQ ID NO: 498592 - DNA, 33 bp, Homo sapien
ttttgatacagaaaatgatatgtaaaaaagaga

SEQ ID NO: 498593 - DNA, 33 bp, Homo sapien
aaccaatggcagctccaaattttgaatgccttg

SEQ ID NO: 498594 - DNA, 33 bp, Homo sapien
aaccaatggcagctccgaattttgaatgccttg

SEQ ID NO: 498595 - DNA, 33 bp, Homo sapien
actggcttaggagatacgttggagtcagaacaa

SEQ ID NO: 498596 - DNA, 33 bp, Homo sapien
actggcttaggagatatgttggagtcagaacaa

SEQ ID NO: 498597 - DNA, 33 bp, Homo sapien
cttattagcctagggaaatgaaagttaagtagc

SEQ ID NO: 498598 - DNA, 33 bp, Homo sapien
cttattagcctagggagatgaaagttaagtagc

SEQ ID NO: 498599 - DNA, 33 bp, Homo sapien
tagtacattaaacacagtcatttcatagactcc

SEQ ID NO: 498600 - DNA, 33 bp, Homo sapien
tagtacattaaacacattcatttcatagactcc

SEQ ID NO: 498601 - DNA, 33 bp, Homo sapien
gaagctcctaaggaaaatgtggactgaaaatac

SEQ ID NO: 498602 - DNA, 33 bp, Homo sapien
gaagctcctaaggaaactgtggactgaaaatac

SEQ ID NO: 498603 - DNA, 33 bp, Homo sapien
aaaggaggagtaccaaacaagtcggaggcctga

SEQ ID NO: 498604 - DNA, 33 bp, Homo sapien
aaaggaggagtaccaaccaagtcggaggcctga

SEQ ID NO: 498605 - DNA, 33 bp, Homo sapien
tctctcatcatgatcaatacagtcaccaaatta

SEQ ID NO: 498606 - DNA, 33 bp, Homo sapien
tctctcatcatgatcagtacagtcaccaaatta

SEQ ID NO: 498607 - DNA, 33 bp, Homo sapien
tgatcactctggttgccgaatagagaatgtata

SEQ ID NO: 498608 - DNA, 33 bp, Homo sapien
tgatcactctggttgctgaatagagaatgtata

SEQ ID NO: 498609 - DNA, 33 bp, Homo sapien
ttagctagtagtaaaaagtaattgtatgttgca

SEQ ID NO: 498610 - DNA, 33 bp, Homo sapien
ttagctagtagtaaaatgtaattgtatgttgca

SEQ ID NO: 498611 - DNA, 33 bp, Homo sapien
ctggattactgtttagccgctaagagatggaac

SEQ ID NO: 498612 - DNA, 33 bp, Homo sapien
ctggattactgtttagtcgctaagagatggaac

SEQ ID NO: 498613 - DNA, 33 bp, Homo sapien
gcattaattctggaaactcttattcagtaacta

SEQ ID NO: 498614 - DNA, 33 bp, Homo sapien
gcattaattctggaaattcttattcagtaacta

SEQ ID NO: 498615 - DNA, 33 bp, Homo sapien
gaccccttaatataggcccagtcagacagggag

SEQ ID NO: 498616 - DNA, 33 bp, Homo sapien
gaccccttaatataggtccagtcagacagggag

SEQ ID NO: 498617 - DNA, 33 bp, Homo sapien
tgggcattcttgaaaagactcacttgcttctct

SEQ ID NO: 498618 - DNA, 33 bp, Homo sapien
tgggcattcttgaaaatactcacttgcttctct

SEQ ID NO: 498619 - DNA, 33 bp, Homo sapien
cactgtatcacagagaacttacccagaataaga

SEQ ID NO: 498620 - DNA, 33 bp, Homo sapien
cactgtatcacagagaccttacccagaataaga

SEQ ID NO: 498621 - DNA, 33 bp, Homo sapien
taattgttttggagacggcataggggagtttgg

SEQ ID NO: 498622 - DNA, 33 bp, Homo sapien
taattgttttggagactgcataggggagtttgg

SEQ ID NO: 498623 - DNA, 33 bp, Homo sapien
gtgtatagtcatttcagggcaaataaagaagca

SEQ ID NO: 498624 - DNA, 33 bp, Homo sapien
gtgtatagtcatttcatggcaaataaagaagca

SEQ ID NO: 498625 - DNA, 33 bp, Homo sapien
tctaaatctgatgaaaaccattaagccacagat

SEQ ID NO: 498626 - DNA, 33 bp, Homo sapien
tctaaatctgatgaaagccattaagccacagat

SEQ ID NO: 498627 - DNA, 33 bp, Homo sapien
gctactaaacatcctaccatgcgctggacggtt

SEQ ID NO: 498628 - DNA, 33 bp, Homo sapien
gctactaaacatcctatcatgcgctggacggtt

SEQ ID NO: 498629 - DNA, 33 bp, Homo sapien
attacagtattttgagaaagagagagcgagaaa

SEQ ID NO: 498630 - DNA, 33 bp, Homo sapien
attacagtattttgaggaagagagagcgagaaa

SEQ ID NO: 498631 - DNA, 33 bp, Homo sapien
acatttaccctcaagtaacctgttgtaggcaaa

SEQ ID NO: 498632 - DNA, 33 bp, Homo sapien
acatttaccctcaagtgacctgttgtaggcaaa

SEQ ID NO: 498633 - DNA, 33 bp, Homo sapien
gaaaaaacctttcaccaacaaagattcccactt

SEQ ID NO: 498634 - DNA, 33 bp, Homo sapien
gaaaaaacctttcaccgacaaagattcccactt

SEQ ID NO: 498635 - DNA, 33 bp, Homo sapien
gtaccatagtgcttgaagtttcactctcggaaa

SEQ ID NO: 498636 - DNA, 33 bp, Homo sapien
gtaccatagtgcttgacgtttcactctcggaaa

SEQ ID NO: 498637 - DNA, 33 bp, Homo sapien
atgttataaaacacagaatcagaactgccattt

SEQ ID NO: 498638 - DNA, 33 bp, Homo sapien
atgttataaaacacaggatcagaactgccattt

SEQ ID NO: 498639 - DNA, 33 bp, Homo sapien
caattcatccttgtcaaggtccctttgtaccat

SEQ ID NO: 498640 - DNA, 33 bp, Homo sapien
caattcatccttgtcagggtccctttgtaccat

SEQ ID NO: 498641 - DNA, 33 bp, Homo sapien
gctttcagaagggcaacttgaactactggggca

SEQ ID NO: 498642 - DNA, 33 bp, Homo sapien
gctttcagaagggcaagttgaactactggggca

SEQ ID NO: 498643 - DNA, 33 bp, Homo sapien
ataaaatgttgggtcacattcttggttcatttc

SEQ ID NO: 498644 - DNA, 33 bp, Homo sapien
ataaaatgttgggtcagattcttggttcatttc

SEQ ID NO: 498645 - DNA, 33 bp, Homo sapien
ataaatttccactgaaatccctgttcatttaaa

SEQ ID NO: 498646 - DNA, 33 bp, Homo sapien
ataaatttccactgaattccctgttcatttaaa

SEQ ID NO: 498647 - DNA, 33 bp, Homo sapien
attgggcattgagacacacatggaatgcacatt

SEQ ID NO: 498648 - DNA, 33 bp, Homo sapien
attgggcattgagacatacatggaatgcacatt

SEQ ID NO: 498649 - DNA, 33 bp, Homo sapien
tctatcacaattcagacgtcatcctgtcatgac

SEQ ID NO: 498650 - DNA, 33 bp, Homo sapien
tctatcacaattcagatgtcatcctgtcatgac

SEQ ID NO: 498651 - DNA, 33 bp, Homo sapien
aacaaaaaacattgacaaaggcatgaagacact

SEQ ID NO: 498652 - DNA, 33 bp, Homo sapien
aacaaaaaacattgacgaaggcatgaagacact

SEQ ID NO: 498653 - DNA, 33 bp, Homo sapien
tttcatcattgtaataagaagtcataggggaca

SEQ ID NO: 498654 - DNA, 33 bp, Homo sapien
tttcatcattgtaataggaagtcataggggaca

SEQ ID NO: 498655 - DNA, 33 bp, Homo sapien
ggtgtaaatataggcacagctcaagaagaataa

SEQ ID NO: 498656 - DNA, 33 bp, Homo sapien
ggtgtaaatataggcatagctcaagaagaataa

SEQ ID NO: 498657 - DNA, 33 bp, Homo sapien
gcattctccttaatgaagatttactctaacaca

SEQ ID NO: 498658 - DNA, 33 bp, Homo sapien
gcattctccttaatgaggatttactctaacaca

SEQ ID NO: 498659 - DNA, 33 bp, Homo sapien
attagtgcagggttggaagctgttttattcggc

SEQ ID NO: 498660 - DNA, 33 bp, Homo sapien
attagtgcagggttgggagctgttttattcggc

SEQ ID NO: 498661 - DNA, 33 bp, Homo sapien
ttttggtgtagtcctacgcagcattgtagttga

SEQ ID NO: 498662 - DNA, 33 bp, Homo sapien
ttttggtgtagtcctatgcagcattgtagttga

SEQ ID NO: 498663 - DNA, 33 bp, Homo sapien
agatctgatggtgctccactatggccatacact

SEQ ID NO: 498664 - DNA, 33 bp, Homo sapien
agatctgatggtgctctactatggccatacact

SEQ ID NO: 498665 - DNA, 33 bp, Homo sapien
tgaagttcacagaccacctggttcagaattccc

SEQ ID NO: 498666 - DNA, 33 bp, Homo sapien
tgaagttcacagaccatctggttcagaattccc

SEQ ID NO: 498667 - DNA, 33 bp, Homo sapien
agacaaaaagaagttccatgtgaaaatatgatg

SEQ ID NO: 498668 - DNA, 33 bp, Homo sapien
agacaaaaagaagttcgatgtgaaaatatgatg

SEQ ID NO: 498669 - DNA, 33 bp, Homo sapien
tatgccattatcttccaatgtcttgcaataaaa

SEQ ID NO: 498670 - DNA, 33 bp, Homo sapien
tatgccattatcttcccatgtcttgcaataaaa

SEQ ID NO: 498671 - DNA, 33 bp, Homo sapien
gctgacttgcaaagaacggtaaattatacatct

SEQ ID NO: 498672 - DNA, 33 bp, Homo sapien
gctgacttgcaaagaatggtaaattatacatct

SEQ ID NO: 498673 - DNA, 33 bp, Homo sapien
ataagattgttgaagacgaagctgattcactga

SEQ ID NO: 498674 - DNA, 33 bp, Homo sapien
ataagattgttgaagatgaagctgattcactga

SEQ ID NO: 498675 - DNA, 33 bp, Homo sapien
aggtaacaaacctgtgaaggcactccccaaatc

SEQ ID NO: 498676 - DNA, 33 bp, Homo sapien
aggtaacaaacctgtgcaggcactccccaaatc

SEQ ID NO: 498677 - DNA, 33 bp, Homo sapien
ttagcatttctcaagaagctacaactaagagta

SEQ ID NO: 498678 - DNA, 33 bp, Homo sapien
ttagcatttctcaagaggctacaactaagagta

SEQ ID NO: 498679 - DNA, 33 bp, Homo sapien
aaaagccgtgttcaaagtttcattatttgagga

SEQ ID NO: 498680 - DNA, 33 bp, Homo sapien
aaaagccgtgttcaaattttcattatttgagga

SEQ ID NO: 498681 - DNA, 33 bp, Homo sapien
tctaattaactagaaaactctctaagactctga

SEQ ID NO: 498682 - DNA, 33 bp, Homo sapien
tctaattaactagaaagctctctaagactctga

SEQ ID NO: 498683 - DNA, 33 bp, Homo sapien
ctagttagcagaagtgaaatctctactaggatt

SEQ ID NO: 498684 - DNA, 33 bp, Homo sapien
ctagttagcagaagtggaatctctactaggatt

SEQ ID NO: 498685 - DNA, 33 bp, Homo sapien
ctctgatccaaacaacaccatctcttaaccgga

SEQ ID NO: 498686 - DNA, 33 bp, Homo sapien
ctctgatccaaacaacgccatctcttaaccgga

SEQ ID NO: 498687 - DNA, 33 bp, Homo sapien
tcccgaggatgaaagacggttggcatcaatgaa

SEQ ID NO: 498688 - DNA, 33 bp, Homo sapien
tcccgaggatgaaagatggttggcatcaatgaa

SEQ ID NO: 498689 - DNA, 33 bp, Homo sapien
tgtatatagcaattgtaaagagcatacaaacaa

SEQ ID NO: 498690 - DNA, 33 bp, Homo sapien
tgtatatagcaattgtgaagagcatacaaacaa

SEQ ID NO: 498691 - DNA, 33 bp, Homo sapien
tatggaatatgcaagaccacccttaacaggaga

SEQ ID NO: 498692 - DNA, 33 bp, Homo sapien
tatggaatatgcaagagcacccttaacaggaga

SEQ ID NO: 498693 - DNA, 33 bp, Homo sapien
ttgaaaaacactaacaagtgcttcagtgtgatt

SEQ ID NO: 498694 - DNA, 33 bp, Homo sapien
ttgaaaaacactaacaggtgcttcagtgtgatt

SEQ ID NO: 498695 - DNA, 33 bp, Homo sapien
caaattctcaggttaccgggatgaggacatgga

SEQ ID NO: 498696 - DNA, 33 bp, Homo sapien
caaattctcaggttactgggatgaggacatgga

SEQ ID NO: 498697 - DNA, 33 bp, Homo sapien
tttaggctttccaccacgtgagtctgagctccc

SEQ ID NO: 498698 - DNA, 33 bp, Homo sapien
tttaggctttccaccatgtgagtctgagctccc

SEQ ID NO: 498699 - DNA, 33 bp, Homo sapien
taagctaaaaacttcaaaaggtatcctctatat

SEQ ID NO: 498700 - DNA, 33 bp, Homo sapien
taagctaaaaacttcagaaggtatcctctatat

SEQ ID NO: 498701 - DNA, 33 bp, Homo sapien
gcactcagatttacaaatatgtattttggactt

SEQ ID NO: 498702 - DNA, 33 bp, Homo sapien
gcactcagatttacaagtatgtattttggactt

SEQ ID NO: 498703 - DNA, 33 bp, Homo sapien
tacaggagactaagtagggaatgtatgcaaagc

SEQ ID NO: 498704 - DNA, 33 bp, Homo sapien
tacaggagactaagtatggaatgtatgcaaagc

SEQ ID NO: 498705 - DNA, 33 bp, Homo sapien
agatgaggcttgccagaaacgggaaggtcagct

SEQ ID NO: 498706 - DNA, 33 bp, Homo sapien
agatgaggcttgccaggaacgggaaggtcagct

SEQ ID NO: 498707 - DNA, 33 bp, Homo sapien
aggaagccaggaatcacaattagcgctcagggg

SEQ ID NO: 498708 - DNA, 33 bp, Homo sapien
aggaagccaggaatcataattagcgctcagggg

SEQ ID NO: 498709 - DNA, 33 bp, Homo sapien
tatccaaatattaataagccatcttcccagaag

SEQ ID NO: 498710 - DNA, 33 bp, Homo sapien
tatccaaatattaatatgccatcttcccagaag

SEQ ID NO: 498711 - DNA, 33 bp, Homo sapien
aatcaaaacatctaaacgtacaaacacaacagg

SEQ ID NO: 498712 - DNA, 33 bp, Homo sapien
aatcaaaacatctaaatgtacaaacacaacagg

SEQ ID NO: 498713 - DNA, 33 bp, Homo sapien
ccttttcttttgtatcagaatagctttttttct

SEQ ID NO: 498714 - DNA, 33 bp, Homo sapien
ccttttcttttgtatcggaatagctttttttct

SEQ ID NO: 498715 - DNA, 33 bp, Homo sapien
cttaaaattaagatgcagaaatatgtttttaat

SEQ ID NO: 498716 - DNA, 33 bp, Homo sapien
cttaaaattaagatgcggaaatatgtttttaat

SEQ ID NO: 498717 - DNA, 33 bp, Homo sapien
tagcctccagaagcacaaaacaatatatttctg

SEQ ID NO: 498718 - DNA, 33 bp, Homo sapien
tagcctccagaagcacgaaacaatatatttctg

SEQ ID NO: 498719 - DNA, 33 bp, Homo sapien
taaaacgagtaaattaaaaattgaagcccaata

SEQ ID NO: 498720 - DNA, 33 bp, Homo sapien
taaaacgagtaaattagaaattgaagcccaata

SEQ ID NO: 498721 - DNA, 33 bp, Homo sapien
aaaacgtatgcaataacgtatgagccaaatttt

SEQ ID NO: 498722 - DNA, 33 bp, Homo sapien
aaaacgtatgcaataatgtatgagccaaatttt

SEQ ID NO: 498723 - DNA, 33 bp, Homo sapien
tgagaacctgttagaaatgcaaattctcggccc

SEQ ID NO: 498724 - DNA, 33 bp, Homo sapien
tgagaacctgttagaactgcaaattctcggccc

SEQ ID NO: 498725 - DNA, 33 bp, Homo sapien
tctgtggatcacaagagaatttttactgtggct

SEQ ID NO: 498726 - DNA, 33 bp, Homo sapien
tctgtggatcacaagataatttttactgtggct

SEQ ID NO: 498727 - DNA, 33 bp, Homo sapien
ggattttgcatctgttaaaatttcatctgcatg

SEQ ID NO: 498728 - DNA, 33 bp, Homo sapien
ggattttgcatctgttcaaatttcatctgcatg

SEQ ID NO: 498729 - DNA, 33 bp, Homo sapien
agatacagcctaatgaaatcctaaagtggaagg

SEQ ID NO: 498730 - DNA, 33 bp, Homo sapien
agatacagcctaatgagatcctaaagtggaagg

SEQ ID NO: 498731 - DNA, 33 bp, Homo sapien
catgatgtaatgcatcaagatcttctgtggtga

SEQ ID NO: 498732 - DNA, 33 bp, Homo sapien
catgatgtaatgcatccagatcttctgtggtga

SEQ ID NO: 498733 - DNA, 33 bp, Homo sapien
ctgatgcacaattatggattcatcccagtgctt

SEQ ID NO: 498734 - DNA, 33 bp, Homo sapien
ctgatgcacaattatgtattcatcccagtgctt

SEQ ID NO: 498735 - DNA, 33 bp, Homo sapien
gctttactcaggaacactaaattctcacttggg

SEQ ID NO: 498736 - DNA, 33 bp, Homo sapien
gctttactcaggaacattaaattctcacttggg

SEQ ID NO: 498737 - DNA, 33 bp, Homo sapien
tatgtgtcctgctatcactcatgctaataattg

SEQ ID NO: 498738 - DNA, 33 bp, Homo sapien
tatgtgtcctgctatcgctcatgctaataattg

SEQ ID NO: 498739 - DNA, 33 bp, Homo sapien
gatgtgtatgtcagagaaaacaatcacctttct

SEQ ID NO: 498740 - DNA, 33 bp, Homo sapien
gatgtgtatgtcagaggaaacaatcacctttct

SEQ ID NO: 498741 - DNA, 33 bp, Homo sapien
ttattcacccttaaaacaatacatcttggcaca

SEQ ID NO: 498742 - DNA, 33 bp, Homo sapien
ttattcacccttaaaataatacatcttggcaca

SEQ ID NO: 498743 - DNA, 33 bp, Homo sapien
tgcctaaaaaacctgacacatggcagttccttt

SEQ ID NO: 498744 - DNA, 33 bp, Homo sapien
tgcctaaaaaacctgatacatggcagttccttt

SEQ ID NO: 498745 - DNA, 33 bp, Homo sapien
caatccaggacataaacgttatgtggcatctag

SEQ ID NO: 498746 - DNA, 33 bp, Homo sapien
caatccaggacataaatgttatgtggcatctag

SEQ ID NO: 498747 - DNA, 33 bp, Homo sapien
attagataacgctttacgtaattctcatagctt

SEQ ID NO: 498748 - DNA, 33 bp, Homo sapien
attagataacgctttatgtaattctcatagctt

SEQ ID NO: 498749 - DNA, 33 bp, Homo sapien
atttttgttgacctccaagaagtaaaatgttga

SEQ ID NO: 498750 - DNA, 33 bp, Homo sapien
atttttgttgacctccgagaagtaaaatgttga

SEQ ID NO: 498751 - DNA, 33 bp, Homo sapien
cctgctgtagattttccatcacttctgacatca

SEQ ID NO: 498752 - DNA, 33 bp, Homo sapien
cctgctgtagattttctatcacttctgacatca

SEQ ID NO: 498753 - DNA, 33 bp, Homo sapien
ataaagaatgctggaacgctcctgcttgtttcc

SEQ ID NO: 498754 - DNA, 33 bp, Homo sapien
ataaagaatgctggaatgctcctgcttgtttcc

SEQ ID NO: 498755 - DNA, 33 bp, Homo sapien
actaaacactttttgacggatgactacacactg

SEQ ID NO: 498756 - DNA, 33 bp, Homo sapien
actaaacactttttgatggatgactacacactg

SEQ ID NO: 498757 - DNA, 33 bp, Homo sapien
aagactatgttgtctacgatgatgcctaacctg

SEQ ID NO: 498758 - DNA, 33 bp, Homo sapien
aagactatgttgtctatgatgatgcctaacctg

SEQ ID NO: 498759 - DNA, 33 bp, Homo sapien
tttacttttctcttgcacatttcaatcactaaa

SEQ ID NO: 498760 - DNA, 33 bp, Homo sapien
tttacttttctcttgcgcatttcaatcactaaa

SEQ ID NO: 498761 - DNA, 33 bp, Homo sapien
aatgctagtggtatgaaaaagtcctgtgattct

SEQ ID NO: 498762 - DNA, 33 bp, Homo sapien
aatgctagtggtatgagaaagtcctgtgattct

SEQ ID NO: 498763 - DNA, 33 bp, Homo sapien
catcataaatgcatcaacagaaaggcagtagaa

SEQ ID NO: 498764 - DNA, 33 bp, Homo sapien
catcataaatgcatcagcagaaaggcagtagaa

SEQ ID NO: 498765 - DNA, 33 bp, Homo sapien
tgcactgctttctaaactgaaaagaggctttga

SEQ ID NO: 498766 - DNA, 33 bp, Homo sapien
tgcactgctttctaaattgaaaagaggctttga

SEQ ID NO: 498767 - DNA, 33 bp, Homo sapien
tacgtaataccatggaccaaaattacagaaagt

SEQ ID NO: 498768 - DNA, 33 bp, Homo sapien
tacgtaataccatggatcaaaattacagaaagt

SEQ ID NO: 498769 - DNA, 33 bp, Homo sapien
tgttcactataatttgcaactatttaaagtact

SEQ ID NO: 498770 - DNA, 33 bp, Homo sapien
tgttcactataatttggaactatttaaagtact

SEQ ID NO: 498771 - DNA, 33 bp, Homo sapien
aaggattggtaacataactgtactctggcaata

SEQ ID NO: 498772 - DNA, 33 bp, Homo sapien
aaggattggtaacatagctgtactctggcaata

SEQ ID NO: 498773 - DNA, 33 bp, Homo sapien
ttctaggtagatttcactctaactcccagagaa

SEQ ID NO: 498774 - DNA, 33 bp, Homo sapien
ttctaggtagatttcagtctaactcccagagaa

SEQ ID NO: 498775 - DNA, 33 bp, Homo sapien
gatcttagagagccaaaggatgttgtgcaggga

SEQ ID NO: 498776 - DNA, 33 bp, Homo sapien
gatcttagagagccaatggatgttgtgcaggga

SEQ ID NO: 498777 - DNA, 33 bp, Homo sapien
ctccctgtcatgattcaaccagagaagatgtcc

SEQ ID NO: 498778 - DNA, 33 bp, Homo sapien
ctccctgtcatgattctaccagagaagatgtcc

SEQ ID NO: 498779 - DNA, 33 bp, Homo sapien
ctgcacaataagtctcccattctattgcatatt

SEQ ID NO: 498780 - DNA, 33 bp, Homo sapien
ctgcacaataagtctctcattctattgcatatt

SEQ ID NO: 498781 - DNA, 33 bp, Homo sapien
cctttaatctaatcaaccaggcttcactgtgct

SEQ ID NO: 498782 - DNA, 33 bp, Homo sapien
cctttaatctaatcaagcaggcttcactgtgct

SEQ ID NO: 498783 - DNA, 33 bp, Homo sapien
gaaccagctcactgtcacctatttcattgtgta

SEQ ID NO: 498784 - DNA, 33 bp, Homo sapien
gaaccagctcactgtcgcctatttcattgtgta

SEQ ID NO: 498785 - DNA, 33 bp, Homo sapien
tgccttcattttttaccgccttatcaaatctgc

SEQ ID NO: 498786 - DNA, 33 bp, Homo sapien
tgccttcattttttactgccttatcaaatctgc

SEQ ID NO: 498787 - DNA, 33 bp, Homo sapien
aaaggaagaggacttacagttatttccatagcc

SEQ ID NO: 498788 - DNA, 33 bp, Homo sapien
aaaggaagaggacttatagttatttccatagcc

SEQ ID NO: 498789 - DNA, 33 bp, Homo sapien
ggagttgtttcttcaacaagagagtgagatccc

SEQ ID NO: 498790 - DNA, 33 bp, Homo sapien
ggagttgtttcttcaataagagagtgagatccc

SEQ ID NO: 498791 - DNA, 33 bp, Homo sapien
ataggccatgctgttgcagtctctaggtctttg

SEQ ID NO: 498792 - DNA, 33 bp, Homo sapien
ataggccatgctgttgtagtctctaggtctttg

SEQ ID NO: 498793 - DNA, 33 bp, Homo sapien
caattataaattgctacgtatttgatatggttt

SEQ ID NO: 498794 - DNA, 33 bp, Homo sapien
caattataaattgctatgtatttgatatggttt

SEQ ID NO: 498795 - DNA, 33 bp, Homo sapien
gatagctgcatttcaactgcccctgttaccgtg

SEQ ID NO: 498796 - DNA, 33 bp, Homo sapien
gatagctgcatttcaattgcccctgttaccgtg

SEQ ID NO: 498797 - DNA, 33 bp, Homo sapien
cagaactcaaatgtgaacctttaaagcatgaga

SEQ ID NO: 498798 - DNA, 33 bp, Homo sapien
cagaactcaaatgtgagcctttaaagcatgaga

SEQ ID NO: 498799 - DNA, 33 bp, Homo sapien
cacgggccagagaaacaacttatactgctcaga

SEQ ID NO: 498800 - DNA, 33 bp, Homo sapien
cacgggccagagaaacgacttatactgctcaga

SEQ ID NO: 498801 - DNA, 33 bp, Homo sapien
agtcagaaagataaaccctacttgcttgagaat

SEQ ID NO: 498802 - DNA, 33 bp, Homo sapien
agtcagaaagataaacgctacttgcttgagaat

SEQ ID NO: 498803 - DNA, 33 bp, Homo sapien
ggttgcatttcacatccaatgtcattcagtttg

SEQ ID NO: 498804 - DNA, 33 bp, Homo sapien
ggttgcatttcacatctaatgtcattcagtttg

SEQ ID NO: 498805 - DNA, 33 bp, Homo sapien
tacaaaattttaaagcacagatcccttgggaat

SEQ ID NO: 498806 - DNA, 33 bp, Homo sapien
tacaaaattttaaagcgcagatcccttgggaat

SEQ ID NO: 498807 - DNA, 33 bp, Homo sapien
tgaacagcctttgggaacagtgttatagagaaa

SEQ ID NO: 498808 - DNA, 33 bp, Homo sapien
tgaacagcctttgggagcagtgttatagagaaa

SEQ ID NO: 498809 - DNA, 33 bp, Homo sapien
ttcaagcagcctcatacccgtggagtagaaata

SEQ ID NO: 498810 - DNA, 33 bp, Homo sapien
ttcaagcagcctcatatccgtggagtagaaata

SEQ ID NO: 498811 - DNA, 33 bp, Homo sapien
gttctccagaggaccaaagaaaaagcaattgct

SEQ ID NO: 498812 - DNA, 33 bp, Homo sapien
gttctccagaggaccagagaaaaagcaattgct

SEQ ID NO: 498813 - DNA, 33 bp, Homo sapien
gagcagaacaacgaaaagtgcagcattatataa

SEQ ID NO: 498814 - DNA, 33 bp, Homo sapien
gagcagaacaacgaaaggtgcagcattatataa

SEQ ID NO: 498815 - DNA, 33 bp, Homo sapien
tgctctcgtgtgaccccaaatgttgcttctgca

SEQ ID NO: 498816 - DNA, 33 bp, Homo sapien
tgctctcgtgtgaccctaaatgttgcttctgca

SEQ ID NO: 498817 - DNA, 33 bp, Homo sapien
ttacatgttgtctttaagaagtaatttaatcca

SEQ ID NO: 498818 - DNA, 33 bp, Homo sapien
ttacatgttgtctttaggaagtaatttaatcca

SEQ ID NO: 498819 - DNA, 33 bp, Homo sapien
atccatcagacattaaccaaacaatgatccaca

SEQ ID NO: 498820 - DNA, 33 bp, Homo sapien
atccatcagacattaagcaaacaatgatccaca

SEQ ID NO: 498821 - DNA, 33 bp, Homo sapien
gtatgttggataaaacagaaacctcgagaattg

SEQ ID NO: 498822 - DNA, 33 bp, Homo sapien
gtatgttggataaaacggaaacctcgagaattg

SEQ ID NO: 498823 - DNA, 33 bp, Homo sapien
gcaaaggagggtctgaaagtagaaatgctcagg

SEQ ID NO: 498824 - DNA, 33 bp, Homo sapien
gcaaaggagggtctgagagtagaaatgctcagg

SEQ ID NO: 498825 - DNA, 33 bp, Homo sapien
atgaaagagttgtatacgcagagagggaaattg

SEQ ID NO: 498826 - DNA, 33 bp, Homo sapien
atgaaagagttgtatatgcagagagggaaattg

SEQ ID NO: 498827 - DNA, 33 bp, Homo sapien
cttctaaaccgcgttgcacctccttggccatgg

SEQ ID NO: 498828 - DNA, 33 bp, Homo sapien
cttctaaaccgcgttggacctccttggccatgg

SEQ ID NO: 498829 - DNA, 33 bp, Homo sapien
tattggccttcactgccagccacttccctcaat

SEQ ID NO: 498830 - DNA, 33 bp, Homo sapien
tattggccttcactgctagccacttccctcaat

SEQ ID NO: 498831 - DNA, 33 bp, Homo sapien
ttacatttgtaacaaccatctctgacttgttca

SEQ ID NO: 498832 - DNA, 33 bp, Homo sapien
ttacatttgtaacaacgatctctgacttgttca

SEQ ID NO: 498833 - DNA, 33 bp, Homo sapien
atgagttcctatcacaaaagtttatcatggtga

SEQ ID NO: 498834 - DNA, 33 bp, Homo sapien
atgagttcctatcacagaagtttatcatggtga

SEQ ID NO: 498835 - DNA, 33 bp, Homo sapien
tatatccactaaagaacaagtttccataatcca

SEQ ID NO: 498836 - DNA, 33 bp, Homo sapien
tatatccactaaagaataagtttccataatcca

SEQ ID NO: 498837 - DNA, 33 bp, Homo sapien
ttgcaactttttccagaatctttgctcttgttc

SEQ ID NO: 498838 - DNA, 33 bp, Homo sapien
ttgcaactttttccaggatctttgctcttgttc

SEQ ID NO: 498839 - DNA, 33 bp, Homo sapien
tattctttttcaagccaaatctcaggcagaatc

SEQ ID NO: 498840 - DNA, 33 bp, Homo sapien
tattctttttcaagccgaatctcaggcagaatc

SEQ ID NO: 498841 - DNA, 33 bp, Homo sapien
agcaagtcaaaacaaaattcatagactaaggaa

SEQ ID NO: 498842 - DNA, 33 bp, Homo sapien
agcaagtcaaaacaaagttcatagactaaggaa

SEQ ID NO: 498843 - DNA, 33 bp, Homo sapien
aaggctttgtcattagaaaaaagagcaaaatct

SEQ ID NO: 498844 - DNA, 33 bp, Homo sapien
aaggctttgtcattaggaaaaagagcaaaatct

SEQ ID NO: 498845 - DNA, 33 bp, Homo sapien
gtcatatttaaaagccacctctctacttcaagt

SEQ ID NO: 498846 - DNA, 33 bp, Homo sapien
gtcatatttaaaagccgcctctctacttcaagt

SEQ ID NO: 498847 - DNA, 33 bp, Homo sapien
ttatttgctatagttcacccagtgtatttgtac

SEQ ID NO: 498848 - DNA, 33 bp, Homo sapien
ttatttgctatagttctcccagtgtatttgtac

SEQ ID NO: 498849 - DNA, 33 bp, Homo sapien
aggctgcactgaaagacggaaaattgattgcca

SEQ ID NO: 498850 - DNA, 33 bp, Homo sapien
aggctgcactgaaagatggaaaattgattgcca

SEQ ID NO: 498851 - DNA, 33 bp, Homo sapien
ttactggagtctcccaacccatctcttaatctt

SEQ ID NO: 498852 - DNA, 33 bp, Homo sapien
ttactggagtctcccatcccatctcttaatctt

SEQ ID NO: 498853 - DNA, 33 bp, Homo sapien
attatgatttgaactcaaaaaacagaaggctat

SEQ ID NO: 498854 - DNA, 33 bp, Homo sapien
attatgatttgaactcgaaaaacagaaggctat

SEQ ID NO: 498855 - DNA, 33 bp, Homo sapien
tgttactttgtgaaaaagcctatgaggatatat

SEQ ID NO: 498856 - DNA, 33 bp, Homo sapien
tgttactttgtgaaaaggcctatgaggatatat

SEQ ID NO: 498857 - DNA, 33 bp, Homo sapien
ctggacaaggtctaggacagagattttcaacca

SEQ ID NO: 498858 - DNA, 33 bp, Homo sapien
ctggacaaggtctaggccagagattttcaacca

SEQ ID NO: 498859 - DNA, 33 bp, Homo sapien
cttgctaattttccccaattctagtcagaccca

SEQ ID NO: 498860 - DNA, 33 bp, Homo sapien
cttgctaattttccccgattctagtcagaccca

SEQ ID NO: 498861 - DNA, 33 bp, Homo sapien
taataatttttgctgcaaagtggtataccagca

SEQ ID NO: 498862 - DNA, 33 bp, Homo sapien
taataatttttgctgcgaagtggtataccagca

SEQ ID NO: 498863 - DNA, 33 bp, Homo sapien
taactcctcaggtggaaaggatttgaaacagat

SEQ ID NO: 498864 - DNA, 33 bp, Homo sapien
taactcctcaggtggagaggatttgaaacagat

SEQ ID NO: 498865 - DNA, 33 bp, Homo sapien
aagtcaaaatctacccaacattatttagttcag

SEQ ID NO: 498866 - DNA, 33 bp, Homo sapien
aagtcaaaatctacccgacattatttagttcag

SEQ ID NO: 498867 - DNA, 33 bp, Homo sapien
ggcagaacaatgataacgaaaggcgtcattagt

SEQ ID NO: 498868 - DNA, 33 bp, Homo sapien
ggcagaacaatgataatgaaaggcgtcattagt

SEQ ID NO: 498869 - DNA, 33 bp, Homo sapien
gcctctttcaaactgtaaacagtgcaaaggtgt

SEQ ID NO: 498870 - DNA, 33 bp, Homo sapien
gcctctttcaaactgtcaacagtgcaaaggtgt

SEQ ID NO: 498871 - DNA, 33 bp, Homo sapien
gaagactgggcaacaaagatttgagtactaaga

SEQ ID NO: 498872 - DNA, 33 bp, Homo sapien
gaagactgggcaacaaggatttgagtactaaga

SEQ ID NO: 498873 - DNA, 33 bp, Homo sapien
tattaccctccaaccacacatcaagtggttttc

SEQ ID NO: 498874 - DNA, 33 bp, Homo sapien
tattaccctccaaccatacatcaagtggttttc

SEQ ID NO: 498875 - DNA, 33 bp, Homo sapien
aatttgggctactcagaattccacaagacatct

SEQ ID NO: 498876 - DNA, 33 bp, Homo sapien
aatttgggctactcagcattccacaagacatct

SEQ ID NO: 498877 - DNA, 33 bp, Homo sapien
tagcactgaactatgacgaacaaaaggaacatt

SEQ ID NO: 498878 - DNA, 33 bp, Homo sapien
tagcactgaactatgatgaacaaaaggaacatt

SEQ ID NO: 498879 - DNA, 33 bp, Homo sapien
ataggaagcattatgaagacattttccaaatgg

SEQ ID NO: 498880 - DNA, 33 bp, Homo sapien
ataggaagcattatgatgacattttccaaatgg

SEQ ID NO: 498881 - DNA, 33 bp, Homo sapien
atatgatgttggtatgcaaccataataagcagc

SEQ ID NO: 498882 - DNA, 33 bp, Homo sapien
atatgatgttggtatgtaaccataataagcagc

SEQ ID NO: 498883 - DNA, 33 bp, Homo sapien
caagaacagtagcaaaactgtaaaactgttgac

SEQ ID NO: 498884 - DNA, 33 bp, Homo sapien
caagaacagtagcaaagctgtaaaactgttgac

SEQ ID NO: 498885 - DNA, 33 bp, Homo sapien
tcatgtgcagggcttgaattggaatgtgagttt

SEQ ID NO: 498886 - DNA, 33 bp, Homo sapien
tcatgtgcagggcttgcattggaatgtgagttt

SEQ ID NO: 498887 - DNA, 33 bp, Homo sapien
tgttacaaccaattcaaaaaagaagtgaaaaat

SEQ ID NO: 498888 - DNA, 33 bp, Homo sapien
tgttacaaccaattcagaaaagaagtgaaaaat

SEQ ID NO: 498889 - DNA, 33 bp, Homo sapien
aatgagtgaggacaaacaaagagtaagagacag

SEQ ID NO: 498890 - DNA, 33 bp, Homo sapien
aatgagtgaggacaaataaagagtaagagacag

SEQ ID NO: 498891 - DNA, 33 bp, Homo sapien
tagatttggaccacgaaactctcactttaactg

SEQ ID NO: 498892 - DNA, 33 bp, Homo sapien
tagatttggaccacgagactctcactttaactg

SEQ ID NO: 498893 - DNA, 33 bp, Homo sapien
gggacttcctacttcaaaaaacgatagtataaa

SEQ ID NO: 498894 - DNA, 33 bp, Homo sapien
gggacttcctacttcagaaaacgatagtataaa

SEQ ID NO: 498895 - DNA, 33 bp, Homo sapien
cagcagtgctaatgacacatcaggtgaaagaga

SEQ ID NO: 498896 - DNA, 33 bp, Homo sapien
cagcagtgctaatgacgcatcaggtgaaagaga

SEQ ID NO: 498897 - DNA, 33 bp, Homo sapien
ttgtgtagcatacttacgtaactgtaggcctag

SEQ ID NO: 498898 - DNA, 33 bp, Homo sapien
ttgtgtagcatacttatgtaactgtaggcctag

SEQ ID NO: 498899 - DNA, 33 bp, Homo sapien
atcttgggtcattgtccaataaactttcagaaa

SEQ ID NO: 498900 - DNA, 33 bp, Homo sapien
atcttgggtcattgtctaataaactttcagaaa

SEQ ID NO: 498901 - DNA, 33 bp, Homo sapien
gtgaagtcagaaagagaagcctcagaggaggta

SEQ ID NO: 498902 - DNA, 33 bp, Homo sapien
gtgaagtcagaaagaggagcctcagaggaggta

SEQ ID NO: 498903 - DNA, 33 bp, Homo sapien
gagacactaatagaggcaaacaatggcacctgc

SEQ ID NO: 498904 - DNA, 33 bp, Homo sapien
gagacactaatagagggaaacaatggcacctgc

SEQ ID NO: 498905 - DNA, 33 bp, Homo sapien
ggcttttcctggaaataataaccgcctgttttc

SEQ ID NO: 498906 - DNA, 33 bp, Homo sapien
ggcttttcctggaaatgataaccgcctgttttc

SEQ ID NO: 498907 - DNA, 33 bp, Homo sapien
gatcagtttcatattcaaaatctcatgagaggc

SEQ ID NO: 498908 - DNA, 33 bp, Homo sapien
gatcagtttcatattcgaaatctcatgagaggc

SEQ ID NO: 498909 - DNA, 33 bp, Homo sapien
ggatcctttttaataccacagcgttcgtactgt

SEQ ID NO: 498910 - DNA, 33 bp, Homo sapien
ggatcctttttaatactacagcgttcgtactgt

SEQ ID NO: 498911 - DNA, 33 bp, Homo sapien
ttcaaaaatgtgtctgcaaatataaagttacag

SEQ ID NO: 498912 - DNA, 33 bp, Homo sapien
ttcaaaaatgtgtctggaaatataaagttacag

SEQ ID NO: 498913 - DNA, 33 bp, Homo sapien
ggtatttcaagctcctcacatagtctccactaa

SEQ ID NO: 498914 - DNA, 33 bp, Homo sapien
ggtatttcaagctccttacatagtctccactaa

SEQ ID NO: 498915 - DNA, 33 bp, Homo sapien
gtactgctaagtcccgccaatctcaaataaagc

SEQ ID NO: 498916 - DNA, 33 bp, Homo sapien
gtactgctaagtcccgtcaatctcaaataaagc

SEQ ID NO: 498917 - DNA, 33 bp, Homo sapien
aaagtgcatgagactcactagcctaggtgcctt

SEQ ID NO: 498918 - DNA, 33 bp, Homo sapien
aaagtgcatgagactcgctagcctaggtgcctt

SEQ ID NO: 498919 - DNA, 33 bp, Homo sapien
tgttctaactattaaaatacacaaagcatttta

SEQ ID NO: 498920 - DNA, 33 bp, Homo sapien
tgttctaactattaaattacacaaagcatttta

SEQ ID NO: 498921 - DNA, 33 bp, Homo sapien
ttgtgttatgatacccacagcacagcagtgcca

SEQ ID NO: 498922 - DNA, 33 bp, Homo sapien
ttgtgttatgatacccgcagcacagcagtgcca

SEQ ID NO: 498923 - DNA, 33 bp, Homo sapien
acaaagcggtgagaaacggcaattggctgaggg

SEQ ID NO: 498924 - DNA, 33 bp, Homo sapien
acaaagcggtgagaaatggcaattggctgaggg

SEQ ID NO: 498925 - DNA, 33 bp, Homo sapien
taggaggtgtggtacaatagaaattccagacag

SEQ ID NO: 498926 - DNA, 33 bp, Homo sapien
taggaggtgtggtacagtagaaattccagacag

SEQ ID NO: 498927 - DNA, 33 bp, Homo sapien
gagatggtgagtgtctaaactagggcttatggc

SEQ ID NO: 498928 - DNA, 33 bp, Homo sapien
gagatggtgagtgtctgaactagggcttatggc

SEQ ID NO: 498929 - DNA, 33 bp, Homo sapien
tgcccaaggagagaaaagaagatagcaaagaat

SEQ ID NO: 498930 - DNA, 33 bp, Homo sapien
tgcccaaggagagaaaggaagatagcaaagaat

SEQ ID NO: 498931 - DNA, 33 bp, Homo sapien
gatgggtggatagatacatagataagacagata

SEQ ID NO: 498932 - DNA, 33 bp, Homo sapien
gatgggtggatagatagatagataagacagata

SEQ ID NO: 498933 - DNA, 33 bp, Homo sapien
agaatttacaaactcaataaacagataataata

SEQ ID NO: 498934 - DNA, 33 bp, Homo sapien
agaatttacaaactcagtaaacagataataata

SEQ ID NO: 498935 - DNA, 33 bp, Homo sapien
tggaaagatcaggcaaattgagttaaagttagt

SEQ ID NO: 498936 - DNA, 33 bp, Homo sapien
tggaaagatcaggcaagttgagttaaagttagt

SEQ ID NO: 498937 - DNA, 33 bp, Homo sapien
aaagctgacatataagaagttaagaagaaagaa

SEQ ID NO: 498938 - DNA, 33 bp, Homo sapien
aaagctgacatataaggagttaagaagaaagaa

SEQ ID NO: 498939 - DNA, 33 bp, Homo sapien
agcttaagaaaactcaacctgctgcatccaaat

SEQ ID NO: 498940 - DNA, 33 bp, Homo sapien
agcttaagaaaactcagcctgctgcatccaaat

SEQ ID NO: 498941 - DNA, 33 bp, Homo sapien
tactgacacactagaacggggtccatgtgatag

SEQ ID NO: 498942 - DNA, 33 bp, Homo sapien
tactgacacactagaatggggtccatgtgatag

SEQ ID NO: 498943 - DNA, 33 bp, Homo sapien
aaattttgctgaacacagatcctgaccatgtgc

SEQ ID NO: 498944 - DNA, 33 bp, Homo sapien
aaattttgctgaacacggatcctgaccatgtgc

SEQ ID NO: 498945 - DNA, 33 bp, Homo sapien
cttttgctgtttataacaagtccctttcatcct

SEQ ID NO: 498946 - DNA, 33 bp, Homo sapien
cttttgctgtttataataagtccctttcatcct

SEQ ID NO: 498947 - DNA, 33 bp, Homo sapien
gttttagagagacttacgatgttaatcaataca

SEQ ID NO: 498948 - DNA, 33 bp, Homo sapien
gttttagagagacttatgatgttaatcaataca

SEQ ID NO: 498949 - DNA, 33 bp, Homo sapien
tcagtaggaacctgggcaatggtaactgtaggt

SEQ ID NO: 498950 - DNA, 33 bp, Homo sapien
tcagtaggaacctgggtaatggtaactgtaggt

SEQ ID NO: 498951 - DNA, 33 bp, Homo sapien
tttatttatctgtcaaagagccttatgtctgtg

SEQ ID NO: 498952 - DNA, 33 bp, Homo sapien
tttatttatctgtcaaggagccttatgtctgtg

SEQ ID NO: 498953 - DNA, 33 bp, Homo sapien
ttgcaggggaaacacaaggtactagcattaaca

SEQ ID NO: 498954 - DNA, 33 bp, Homo sapien
ttgcaggggaaacacagggtactagcattaaca

SEQ ID NO: 498955 - DNA, 33 bp, Homo sapien
taagctttttatttgacggtttccacgagataa

SEQ ID NO: 498956 - DNA, 33 bp, Homo sapien
taagctttttatttgatggtttccacgagataa

SEQ ID NO: 498957 - DNA, 33 bp, Homo sapien
gggggtgcaaatagcccaaggaaatattagggc

SEQ ID NO: 498958 - DNA, 33 bp, Homo sapien
gggggtgcaaatagcctaaggaaatattagggc

SEQ ID NO: 498959 - DNA, 33 bp, Homo sapien
gcatcaaacaatatgcactctttttgttttagc

SEQ ID NO: 498960 - DNA, 33 bp, Homo sapien
gcatcaaacaatatgcgctctttttgttttagc

SEQ ID NO: 498961 - DNA, 33 bp, Homo sapien
tctgtagtcatttccacatcacacatctcaaca

SEQ ID NO: 498962 - DNA, 33 bp, Homo sapien
tctgtagtcatttccatatcacacatctcaaca

SEQ ID NO: 498963 - DNA, 33 bp, Homo sapien
tatggacaattttaaggaagtccttagtagcac

SEQ ID NO: 498964 - DNA, 33 bp, Homo sapien
tatggacaattttaagtaagtccttagtagcac

SEQ ID NO: 498965 - DNA, 33 bp, Homo sapien
gtctttaaacatgatacgtcgattttaactaaa

SEQ ID NO: 498966 - DNA, 33 bp, Homo sapien
gtctttaaacatgatatgtcgattttaactaaa

SEQ ID NO: 498967 - DNA, 33 bp, Homo sapien
aaattataaccacgtagctcaaaattaataaga

SEQ ID NO: 498968 - DNA, 33 bp, Homo sapien
aaattataaccacgtatctcaaaattaataaga

SEQ ID NO: 498969 - DNA, 33 bp, Homo sapien
tgttcctgggacataaagcaactcaagaatttt

SEQ ID NO: 498970 - DNA, 33 bp, Homo sapien
tgttcctgggacataaggcaactcaagaatttt

SEQ ID NO: 498971 - DNA, 33 bp, Homo sapien
atacaaagggttaagaaagaagtcagctgataa

SEQ ID NO: 498972 - DNA, 33 bp, Homo sapien
atacaaagggttaagagagaagtcagctgataa

SEQ ID NO: 498973 - DNA, 33 bp, Homo sapien
ggtggcaccacaatgacagtcagactctgcacg

SEQ ID NO: 498974 - DNA, 33 bp, Homo sapien
ggtggcaccacaatgatagtcagactctgcacg

SEQ ID NO: 498975 - DNA, 33 bp, Homo sapien
cactggagttagctgaaattcaattgggtattc

SEQ ID NO: 498976 - DNA, 33 bp, Homo sapien
cactggagttagctgagattcaattgggtattc

SEQ ID NO: 498977 - DNA, 33 bp, Homo sapien
aaataggtgaaggaggaaagactggggaaattc

SEQ ID NO: 498978 - DNA, 33 bp, Homo sapien
aaataggtgaaggagggaagactggggaaattc

SEQ ID NO: 498979 - DNA, 33 bp, Homo sapien
atcctctgtggacacaaataacaactgagaaga

SEQ ID NO: 498980 - DNA, 33 bp, Homo sapien
atcctctgtggacacagataacaactgagaaga

SEQ ID NO: 498981 - DNA, 33 bp, Homo sapien
ttgccacctggatgggaaactacaaatgacaat

SEQ ID NO: 498982 - DNA, 33 bp, Homo sapien
ttgccacctggatgggtaactacaaatgacaat

SEQ ID NO: 498983 - DNA, 33 bp, Homo sapien
tatgtgcaaggcattacgaaatcctagaagagg

SEQ ID NO: 498984 - DNA, 33 bp, Homo sapien
tatgtgcaaggcattatgaaatcctagaagagg

SEQ ID NO: 498985 - DNA, 33 bp, Homo sapien
atggtgacgatactgacgatagtaataacactt

SEQ ID NO: 498986 - DNA, 33 bp, Homo sapien
atggtgacgatactgatgatagtaataacactt

SEQ ID NO: 498987 - DNA, 33 bp, Homo sapien
cacctgcgaaggtgagacattctcaagaggact

SEQ ID NO: 498988 - DNA, 33 bp, Homo sapien
cacctgcgaaggtgaggcattctcaagaggact

SEQ ID NO: 498989 - DNA, 33 bp, Homo sapien
tccggggttccaggagaagaaatggccagtaca

SEQ ID NO: 498990 - DNA, 33 bp, Homo sapien
tccggggttccaggaggagaaatggccagtaca

SEQ ID NO: 498991 - DNA, 33 bp, Homo sapien
gaatgccatgggcacaatggtgaaatccaggaa

SEQ ID NO: 498992 - DNA, 33 bp, Homo sapien
gaatgccatgggcacagtggtgaaatccaggaa

SEQ ID NO: 498993 - DNA, 33 bp, Homo sapien
ccaaattgtcatcctgaaagatttcacactttt

SEQ ID NO: 498994 - DNA, 33 bp, Homo sapien
ccaaattgtcatcctggaagatttcacactttt

SEQ ID NO: 498995 - DNA, 33 bp, Homo sapien
tgaaaagtgtttgcgcactgggacttctccttt

SEQ ID NO: 498996 - DNA, 33 bp, Homo sapien
tgaaaagtgtttgcgcgctgggacttctccttt

SEQ ID NO: 498997 - DNA, 33 bp, Homo sapien
acagccaaaaattgcaaagaacacaaatgtctg

SEQ ID NO: 498998 - DNA, 33 bp, Homo sapien
acagccaaaaattgcagagaacacaaatgtctg

SEQ ID NO: 498999 - DNA, 33 bp, Homo sapien
aagccaatctgacgacactgtcaattagctctt

SEQ ID NO: 499000 - DNA, 33 bp, Homo sapien
aagccaatctgacgacgctgtcaattagctctt

SEQ ID NO: 499001 - DNA, 33 bp, Homo sapien
ttctgcttatactcctcaagttcttccattttc

SEQ ID NO: 499002 - DNA, 33 bp, Homo sapien
ttctgcttatactccttaagttcttccattttc

SEQ ID NO: 499003 - DNA, 33 bp, Homo sapien
cattaatgccatttaaaaggaaattcagctaaa

SEQ ID NO: 499004 - DNA, 33 bp, Homo sapien
cattaatgccatttaacaggaaattcagctaaa

SEQ ID NO: 499005 - DNA, 33 bp, Homo sapien
gagcagtagcatcagaataccctagaagctttt

SEQ ID NO: 499006 - DNA, 33 bp, Homo sapien
gagcagtagcatcagactaccctagaagctttt

SEQ ID NO: 499007 - DNA, 33 bp, Homo sapien
tctagaccagtcaaaagatttgcttaattgaat

SEQ ID NO: 499008 - DNA, 33 bp, Homo sapien
tctagaccagtcaaaatatttgcttaattgaat

SEQ ID NO: 499009 - DNA, 33 bp, Homo sapien
tgaaattttgtgtaagacattccaccaaccatc

SEQ ID NO: 499010 - DNA, 33 bp, Homo sapien
tgaaattttgtgtaagccattccaccaaccatc

SEQ ID NO: 499011 - DNA, 33 bp, Homo sapien
caatgtaaaggacaaacggattaacttgctgag

SEQ ID NO: 499012 - DNA, 33 bp, Homo sapien
caatgtaaaggacaaatggattaacttgctgag

SEQ ID NO: 499013 - DNA, 33 bp, Homo sapien
aatgactgttttcatgaatcgaggaatttgaga

SEQ ID NO: 499014 - DNA, 33 bp, Homo sapien
aatgactgttttcatgtatcgaggaatttgaga

SEQ ID NO: 499015 - DNA, 33 bp, Homo sapien
gcaggtgttggattcaaacatctagaagacttc

SEQ ID NO: 499016 - DNA, 33 bp, Homo sapien
gcaggtgttggattcagacatctagaagacttc

SEQ ID NO: 499017 - DNA, 33 bp, Homo sapien
acatagtcacatctaaacctcctgaacactcat

SEQ ID NO: 499018 - DNA, 33 bp, Homo sapien
acatagtcacatctaatcctcctgaacactcat

SEQ ID NO: 499019 - DNA, 33 bp, Homo sapien
ttttagttactgtttccatttcccccctctatt

SEQ ID NO: 499020 - DNA, 33 bp, Homo sapien
ttttagttactgtttctatttcccccctctatt

SEQ ID NO: 499021 - DNA, 33 bp, Homo sapien
gaggcctagcgaggagccatattaatatttttg

SEQ ID NO: 499022 - DNA, 33 bp, Homo sapien
gaggcctagcgaggagtcatattaatatttttg

SEQ ID NO: 499023 - DNA, 33 bp, Homo sapien
tcttgatatttcttgaagcctgcatactaaaga

SEQ ID NO: 499024 - DNA, 33 bp, Homo sapien
tcttgatatttcttgaggcctgcatactaaaga

SEQ ID NO: 499025 - DNA, 33 bp, Homo sapien
gaatttagatatggtgaaaaacaagcacagaaa

SEQ ID NO: 499026 - DNA, 33 bp, Homo sapien
gaatttagatatggtggaaaacaagcacagaaa

SEQ ID NO: 499027 - DNA, 33 bp, Homo sapien
tgcctgagggatttgacacactgcaacaacagc

SEQ ID NO: 499028 - DNA, 33 bp, Homo sapien
tgcctgagggatttgatacactgcaacaacagc

SEQ ID NO: 499029 - DNA, 33 bp, Homo sapien
attcggggttcacagcaatatgcctgagggatt

SEQ ID NO: 499030 - DNA, 33 bp, Homo sapien
attcggggttcacagcgatatgcctgagggatt

SEQ ID NO: 499031 - DNA, 33 bp, Homo sapien
aatgatgtccctttcaaagttcaggtttactat

SEQ ID NO: 499032 - DNA, 33 bp, Homo sapien
aatgatgtccctttcagagttcaggtttactat

SEQ ID NO: 499033 - DNA, 33 bp, Homo sapien
agatgagaagaatgagaatcaaatgggcctggg

SEQ ID NO: 499034 - DNA, 33 bp, Homo sapien
agatgagaagaatgaggatcaaatgggcctggg

SEQ ID NO: 499035 - DNA, 33 bp, Homo sapien
agctttatgcttcccgcattttgtcacggaaag

SEQ ID NO: 499036 - DNA, 33 bp, Homo sapien
agctttatgcttcccggattttgtcacggaaag

SEQ ID NO: 499037 - DNA, 33 bp, Homo sapien
ttaatggaaccaattacctctatcaggccctgt

SEQ ID NO: 499038 - DNA, 33 bp, Homo sapien
ttaatggaaccaattagctctatcaggccctgt

SEQ ID NO: 499039 - DNA, 33 bp, Homo sapien
ttatacatgagctcaccaataaccaacattatc

SEQ ID NO: 499040 - DNA, 33 bp, Homo sapien
ttatacatgagctcactaataaccaacattatc

SEQ ID NO: 499041 - DNA, 33 bp, Homo sapien
ctgaagtcacccagccaacaggaagtcctacat

SEQ ID NO: 499042 - DNA, 33 bp, Homo sapien
ctgaagtcacccagccgacaggaagtcctacat

SEQ ID NO: 499043 - DNA, 33 bp, Homo sapien
tccccttctcaaaatacgaaagtgatcagagct

SEQ ID NO: 499044 - DNA, 33 bp, Homo sapien
tccccttctcaaaatatgaaagtgatcagagct

SEQ ID NO: 499045 - DNA, 33 bp, Homo sapien
ctaaattcaataatataaaacatggcacattcc

SEQ ID NO: 499046 - DNA, 33 bp, Homo sapien
ctaaattcaataatatgaaacatggcacattcc

SEQ ID NO: 499047 - DNA, 33 bp, Homo sapien
gaaggattaattgagaagagcaatttactcaag

SEQ ID NO: 499048 - DNA, 33 bp, Homo sapien
gaaggattaattgagaggagcaatttactcaag

SEQ ID NO: 499049 - DNA, 33 bp, Homo sapien
gcaagtgtgcaatatgacagggcactatggaga

SEQ ID NO: 499050 - DNA, 33 bp, Homo sapien
gcaagtgtgcaatatgtcagggcactatggaga

SEQ ID NO: 499051 - DNA, 33 bp, Homo sapien
tacctggatagaattacgttcaagtacttgtgg

SEQ ID NO: 499052 - DNA, 33 bp, Homo sapien
tacctggatagaattatgttcaagtacttgtgg

SEQ ID NO: 499053 - DNA, 33 bp, Homo sapien
agtcacggagatcaaaaaacaatggtgttgcct

SEQ ID NO: 499054 - DNA, 33 bp, Homo sapien
agtcacggagatcaaacaacaatggtgttgcct

SEQ ID NO: 499055 - DNA, 33 bp, Homo sapien
tataaaccaatgcacaccttgaataatcaattt

SEQ ID NO: 499056 - DNA, 33 bp, Homo sapien
tataaaccaatgcacagcttgaataatcaattt

SEQ ID NO: 499057 - DNA, 33 bp, Homo sapien
agaagactttctaaccacttcttttagatagct

SEQ ID NO: 499058 - DNA, 33 bp, Homo sapien
agaagactttctaaccgcttcttttagatagct

SEQ ID NO: 499059 - DNA, 33 bp, Homo sapien
ttagaagtctagggaaagaacacttttaattga

SEQ ID NO: 499060 - DNA, 33 bp, Homo sapien
ttagaagtctagggaatgaacacttttaattga

SEQ ID NO: 499061 - DNA, 33 bp, Homo sapien
aagagatctaagaaggccccagaattagatcta

SEQ ID NO: 499062 - DNA, 33 bp, Homo sapien
aagagatctaagaaggtcccagaattagatcta

SEQ ID NO: 499063 - DNA, 33 bp, Homo sapien
agaagggcagttgtcactattacttcattcatt

SEQ ID NO: 499064 - DNA, 33 bp, Homo sapien
agaagggcagttgtcagtattacttcattcatt

SEQ ID NO: 499065 - DNA, 33 bp, Homo sapien
cacagcctagcgcacaataggtattcaatgaat

SEQ ID NO: 499066 - DNA, 33 bp, Homo sapien
cacagcctagcgcacagtaggtattcaatgaat

SEQ ID NO: 499067 - DNA, 33 bp, Homo sapien
caagcagcccatgataaggggttggtatattat

SEQ ID NO: 499068 - DNA, 33 bp, Homo sapien
caagcagcccatgatagggggttggtatattat

SEQ ID NO: 499069 - DNA, 33 bp, Homo sapien
cagaaaacaaagtgacagaagtaacatagcatc

SEQ ID NO: 499070 - DNA, 33 bp, Homo sapien
cagaaaacaaagtgacggaagtaacatagcatc

SEQ ID NO: 499071 - DNA, 33 bp, Homo sapien
atcttgttttgtttcactattcacaaaccctgt

SEQ ID NO: 499072 - DNA, 33 bp, Homo sapien
atcttgttttgtttcagtattcacaaaccctgt

SEQ ID NO: 499073 - DNA, 33 bp, Homo sapien
tttctttttcagtagaccatcctgaacatatta

SEQ ID NO: 499074 - DNA, 33 bp, Homo sapien
tttctttttcagtagatcatcctgaacatatta

SEQ ID NO: 499075 - DNA, 33 bp, Homo sapien
tgttttgtaagttgccaccaaagccttcccttc

SEQ ID NO: 499076 - DNA, 33 bp, Homo sapien
tgttttgtaagttgcctccaaagccttcccttc

SEQ ID NO: 499077 - DNA, 33 bp, Homo sapien
aacatctacattatctaacagatgagaattaaa

SEQ ID NO: 499078 - DNA, 33 bp, Homo sapien
aacatctacattatctgacagatgagaattaaa

SEQ ID NO: 499079 - DNA, 33 bp, Homo sapien
tccacttttctaacaacggtaaattaatagtcc

SEQ ID NO: 499080 - DNA, 33 bp, Homo sapien
tccacttttctaacaatggtaaattaatagtcc

SEQ ID NO: 499081 - DNA, 33 bp, Homo sapien
aacttggtctgcatgactactttactgatccag

SEQ ID NO: 499082 - DNA, 33 bp, Homo sapien
aacttggtctgcatgattactttactgatccag

SEQ ID NO: 499083 - DNA, 33 bp, Homo sapien
aggtgatgctttattgcattattttaagccact

SEQ ID NO: 499084 - DNA, 33 bp, Homo sapien
aggtgatgctttattgtattattttaagccact

SEQ ID NO: 499085 - DNA, 33 bp, Homo sapien
cctggtgactttaatggaggtaatcaccagctc

SEQ ID NO: 499086 - DNA, 33 bp, Homo sapien
cctggtgactttaatgtaggtaatcaccagctc

SEQ ID NO: 499087 - DNA, 33 bp, Homo sapien
cctaatgtgaaagaaaacttaggcagtatgaca

SEQ ID NO: 499088 - DNA, 33 bp, Homo sapien
cctaatgtgaaagaaaccttaggcagtatgaca

SEQ ID NO: 499089 - DNA, 33 bp, Homo sapien
gtttttgatgacttgtcaaagcaactattcatt

SEQ ID NO: 499090 - DNA, 33 bp, Homo sapien
gtttttgatgacttgtgaaagcaactattcatt

SEQ ID NO: 499091 - DNA, 33 bp, Homo sapien
acattttggccagacccaatacccatgcttacc

SEQ ID NO: 499092 - DNA, 33 bp, Homo sapien
acattttggccagacctaatacccatgcttacc

SEQ ID NO: 499093 - DNA, 33 bp, Homo sapien
ttgatagattcacatacaaaagtggccaattca

SEQ ID NO: 499094 - DNA, 33 bp, Homo sapien
ttgatagattcacatagaaaagtggccaattca

SEQ ID NO: 499095 - DNA, 33 bp, Homo sapien
atgaatggcataactgaataaaacagtcctagg

SEQ ID NO: 499096 - DNA, 33 bp, Homo sapien
atgaatggcataactggataaaacagtcctagg

SEQ ID NO: 499097 - DNA, 33 bp, Homo sapien
gatcagtgtgcatgccaaagggaataaaaaact

SEQ ID NO: 499098 - DNA, 33 bp, Homo sapien
gatcagtgtgcatgccgaagggaataaaaaact

SEQ ID NO: 499099 - DNA, 33 bp, Homo sapien
tcagttgtaagaagaccgagtctgaagttccaa

SEQ ID NO: 499100 - DNA, 33 bp, Homo sapien
tcagttgtaagaagactgagtctgaagttccaa

SEQ ID NO: 499101 - DNA, 33 bp, Homo sapien
aaaaattaatagtcaaactaacatcttaggttc

SEQ ID NO: 499102 - DNA, 33 bp, Homo sapien
aaaaattaatagtcaacctaacatcttaggttc

SEQ ID NO: 499103 - DNA, 33 bp, Homo sapien
tcttttcctactcacacgatattgtttttccca

SEQ ID NO: 499104 - DNA, 33 bp, Homo sapien
tcttttcctactcacatgatattgtttttccca

SEQ ID NO: 499105 - DNA, 33 bp, Homo sapien
tcctccaactcaggaaccactttgatatgctaa

SEQ ID NO: 499106 - DNA, 33 bp, Homo sapien
tcctccaactcaggaagcactttgatatgctaa

SEQ ID NO: 499107 - DNA, 33 bp, Homo sapien
tattaacttctaaagaaatgctgattaggaggg

SEQ ID NO: 499108 - DNA, 33 bp, Homo sapien
tattaacttctaaagagatgctgattaggaggg

SEQ ID NO: 499109 - DNA, 33 bp, Homo sapien
aacctcttattacccaatccactatcttcccat

SEQ ID NO: 499110 - DNA, 33 bp, Homo sapien
aacctcttattacccactccactatcttcccat

SEQ ID NO: 499111 - DNA, 33 bp, Homo sapien
aagagagggcaaggaaagatagtcagcctttta

SEQ ID NO: 499112 - DNA, 33 bp, Homo sapien
aagagagggcaaggaaggatagtcagcctttta

SEQ ID NO: 499113 - DNA, 33 bp, Homo sapien
agacaccttaagaggccacgttgattaacatat

SEQ ID NO: 499114 - DNA, 33 bp, Homo sapien
agacaccttaagaggctacgttgattaacatat

SEQ ID NO: 499115 - DNA, 33 bp, Homo sapien
cttttggagttgccctaaatacaggatgaacaa

SEQ ID NO: 499116 - DNA, 33 bp, Homo sapien
cttttggagttgccctgaatacaggatgaacaa

SEQ ID NO: 499117 - DNA, 33 bp, Homo sapien
tgtaacactatctaataatagaagcgtaatctt

SEQ ID NO: 499118 - DNA, 33 bp, Homo sapien
tgtaacactatctaatgatagaagcgtaatctt

SEQ ID NO: 499119 - DNA, 33 bp, Homo sapien
gcgggcaacaagttgaaggtttcagagcccatg

SEQ ID NO: 499120 - DNA, 33 bp, Homo sapien
gcgggcaacaagttgacggtttcagagcccatg

SEQ ID NO: 499121 - DNA, 33 bp, Homo sapien
aataggtcatcagaaaagaatagttaaggaaaa

SEQ ID NO: 499122 - DNA, 33 bp, Homo sapien
aataggtcatcagaaaggaatagttaaggaaaa

SEQ ID NO: 499123 - DNA, 33 bp, Homo sapien
ccttccaaatttattcactcacacagggagaag

SEQ ID NO: 499124 - DNA, 33 bp, Homo sapien
ccttccaaatttattcgctcacacagggagaag

SEQ ID NO: 499125 - DNA, 33 bp, Homo sapien
aagtcaaaatgatctgcacttaattcctagcag

SEQ ID NO: 499126 - DNA, 33 bp, Homo sapien
aagtcaaaatgatctggacttaattcctagcag

SEQ ID NO: 499127 - DNA, 33 bp, Homo sapien
tcaacttgtgattctgaagttccacctgagttc

SEQ ID NO: 499128 - DNA, 33 bp, Homo sapien
tcaacttgtgattctgcagttccacctgagttc

SEQ ID NO: 499129 - DNA, 33 bp, Homo sapien
tatactttaagttctacgctatgtgtgcagaat

SEQ ID NO: 499130 - DNA, 33 bp, Homo sapien
tatactttaagttctatgctatgtgtgcagaat

SEQ ID NO: 499131 - DNA, 33 bp, Homo sapien
aataaacctgacgtaaatgtttatggtataggg

SEQ ID NO: 499132 - DNA, 33 bp, Homo sapien
aataaacctgacgtaattgtttatggtataggg

SEQ ID NO: 499133 - DNA, 33 bp, Homo sapien
tctttttgattacaccagagactacagttcata

SEQ ID NO: 499134 - DNA, 33 bp, Homo sapien
tctttttgattacaccggagactacagttcata

SEQ ID NO: 499135 - DNA, 33 bp, Homo sapien
gaaaaactattcagaagggatttattcagaccg

SEQ ID NO: 499136 - DNA, 33 bp, Homo sapien
gaaaaactattcagaatggatttattcagaccg

SEQ ID NO: 499137 - DNA, 33 bp, Homo sapien
cgcaaatcttctgcaaatctacagcaacagaga

SEQ ID NO: 499138 - DNA, 33 bp, Homo sapien
cgcaaatcttctgcaagtctacagcaacagaga

SEQ ID NO: 499139 - DNA, 33 bp, Homo sapien
gttgctgtgaactaagactcactttcttctcaa

SEQ ID NO: 499140 - DNA, 33 bp, Homo sapien
gttgctgtgaactaaggctcactttcttctcaa

SEQ ID NO: 499141 - DNA, 33 bp, Homo sapien
agttgaaaatacagaaaggaataacctcaatag

SEQ ID NO: 499142 - DNA, 33 bp, Homo sapien
agttgaaaatacagaagggaataacctcaatag

SEQ ID NO: 499143 - DNA, 33 bp, Homo sapien
tgaagtacattcactccaggagaaacagactag

SEQ ID NO: 499144 - DNA, 33 bp, Homo sapien
tgaagtacattcactctaggagaaacagactag

SEQ ID NO: 499145 - DNA, 33 bp, Homo sapien
attcataaagactcagaaatctagctatggcaa

SEQ ID NO: 499146 - DNA, 33 bp, Homo sapien
attcataaagactcagcaatctagctatggcaa

SEQ ID NO: 499147 - DNA, 33 bp, Homo sapien
tgactctctattatcaatattccttaccaagtc

SEQ ID NO: 499148 - DNA, 33 bp, Homo sapien
tgactctctattatcagtattccttaccaagtc

SEQ ID NO: 499149 - DNA, 33 bp, Homo sapien
ccagcatgcaatgcataatcactgagagaaaag

SEQ ID NO: 499150 - DNA, 33 bp, Homo sapien
ccagcatgcaatgcatgatcactgagagaaaag

SEQ ID NO: 499151 - DNA, 33 bp, Homo sapien
catgaccagaagacaaatgtaagaggaacaatt

SEQ ID NO: 499152 - DNA, 33 bp, Homo sapien
catgaccagaagacaactgtaagaggaacaatt

SEQ ID NO: 499153 - DNA, 33 bp, Homo sapien
catgaggctttgaagacctatttgatgtcctta

SEQ ID NO: 499154 - DNA, 33 bp, Homo sapien
catgaggctttgaagagctatttgatgtcctta

SEQ ID NO: 499155 - DNA, 33 bp, Homo sapien
ataactttggacataccgagtttgaggtgtgta

SEQ ID NO: 499156 - DNA, 33 bp, Homo sapien
ataactttggacatactgagtttgaggtgtgta

SEQ ID NO: 499157 - DNA, 33 bp, Homo sapien
aagcttaggtgttcataactcccattgtgttat

SEQ ID NO: 499158 - DNA, 33 bp, Homo sapien
aagcttaggtgttcatgactcccattgtgttat

SEQ ID NO: 499159 - DNA, 33 bp, Homo sapien
ttgaagatgagaaagacagcttttgctacaggc

SEQ ID NO: 499160 - DNA, 33 bp, Homo sapien
ttgaagatgagaaagagagcttttgctacaggc

SEQ ID NO: 499161 - DNA, 33 bp, Homo sapien
gatatatgggccagcaatatctgcattacctca

SEQ ID NO: 499162 - DNA, 33 bp, Homo sapien
gatatatgggccagcagtatctgcattacctca

SEQ ID NO: 499163 - DNA, 33 bp, Homo sapien
agacaaggagggataaatagtatgatttgggga

SEQ ID NO: 499164 - DNA, 33 bp, Homo sapien
agacaaggagggataagtagtatgatttgggga

SEQ ID NO: 499165 - DNA, 33 bp, Homo sapien
agaattcttaatttagacctgactcacatcatg

SEQ ID NO: 499166 - DNA, 33 bp, Homo sapien
agaattcttaatttaggcctgactcacatcatg

SEQ ID NO: 499167 - DNA, 33 bp, Homo sapien
aagatggagggggtcgaatcaggaaggtgactc

SEQ ID NO: 499168 - DNA, 33 bp, Homo sapien
aagatggagggggtcggatcaggaaggtgactc

SEQ ID NO: 499169 - DNA, 33 bp, Homo sapien
cattattttgttcccaccaagcgaagggcattt

SEQ ID NO: 499170 - DNA, 33 bp, Homo sapien
cattattttgttcccatcaagcgaagggcattt

SEQ ID NO: 499171 - DNA, 33 bp, Homo sapien
gaggtcttgtgaaattgaaataacagttctaaa

SEQ ID NO: 499172 - DNA, 33 bp, Homo sapien
gaggtcttgtgaaatttaaataacagttctaaa

SEQ ID NO: 499173 - DNA, 33 bp, Homo sapien
gagaatctaataagaaagtagcaaaagccagac

SEQ ID NO: 499174 - DNA, 33 bp, Homo sapien
gagaatctaataagaaggtagcaaaagccagac

SEQ ID NO: 499175 - DNA, 33 bp, Homo sapien
agaaaatttcctgacaagattacaggatgattc

SEQ ID NO: 499176 - DNA, 33 bp, Homo sapien
agaaaatttcctgacaggattacaggatgattc

SEQ ID NO: 499177 - DNA, 33 bp, Homo sapien
taaagaattgggacaaatgttctgttcaattga

SEQ ID NO: 499178 - DNA, 33 bp, Homo sapien
taaagaattgggacaactgttctgttcaattga

SEQ ID NO: 499179 - DNA, 33 bp, Homo sapien
ttaggaagttcccataagtatagcagtgacggt

SEQ ID NO: 499180 - DNA, 33 bp, Homo sapien
ttaggaagttcccataggtatagcagtgacggt

SEQ ID NO: 499181 - DNA, 33 bp, Homo sapien
atcacagttatttgaaacattttagaaatatca

SEQ ID NO: 499182 - DNA, 33 bp, Homo sapien
atcacagttatttgaagcattttagaaatatca

SEQ ID NO: 499183 - DNA, 33 bp, Homo sapien
gttgcatttgtgtagacgagtattcagtggtgc

SEQ ID NO: 499184 - DNA, 33 bp, Homo sapien
gttgcatttgtgtagatgagtattcagtggtgc

SEQ ID NO: 499185 - DNA, 33 bp, Homo sapien
aacacttccaaatggaatagatgggcaagtaac

SEQ ID NO: 499186 - DNA, 33 bp, Homo sapien
aacacttccaaatggactagatgggcaagtaac

SEQ ID NO: 499187 - DNA, 33 bp, Homo sapien
cagcccttagtctcaacttctttagatgcaaac

SEQ ID NO: 499188 - DNA, 33 bp, Homo sapien
cagcccttagtctcaatttctttagatgcaaac

SEQ ID NO: 499189 - DNA, 33 bp, Homo sapien
gacctcaatgtacataagagccgaataatcacc

SEQ ID NO: 499190 - DNA, 33 bp, Homo sapien
gacctcaatgtacataggagccgaataatcacc

SEQ ID NO: 499191 - DNA, 33 bp, Homo sapien
ccaattcgagttttcaaattccaattgattcta

SEQ ID NO: 499192 - DNA, 33 bp, Homo sapien
ccaattcgagttttcagattccaattgattcta

SEQ ID NO: 499193 - DNA, 33 bp, Homo sapien
ggctttgggtcacttaccttcaagagtctggtg

SEQ ID NO: 499194 - DNA, 33 bp, Homo sapien
ggctttgggtcacttatcttcaagagtctggtg

SEQ ID NO: 499195 - DNA, 33 bp, Homo sapien
attaagcagtagtacaatgagttgaaataattt

SEQ ID NO: 499196 - DNA, 33 bp, Homo sapien
attaagcagtagtacagtgagttgaaataattt

SEQ ID NO: 499197 - DNA, 33 bp, Homo sapien
gtttatcttctatcccacaacctttaacgcact

SEQ ID NO: 499198 - DNA, 33 bp, Homo sapien
gtttatcttctatcccgcaacctttaacgcact

SEQ ID NO: 499199 - DNA, 33 bp, Homo sapien
taaaaactacaacataatatacatcttgaaaga

SEQ ID NO: 499200 - DNA, 33 bp, Homo sapien
taaaaactacaacatagtatacatcttgaaaga

SEQ ID NO: 499201 - DNA, 33 bp, Homo sapien
aaatgggagctagacactgagaacacataaaca

SEQ ID NO: 499202 - DNA, 33 bp, Homo sapien
aaatgggagctagacattgagaacacataaaca

SEQ ID NO: 499203 - DNA, 33 bp, Homo sapien
ctctttgcttttgcaaataatgctgcaatgtac

SEQ ID NO: 499204 - DNA, 33 bp, Homo sapien
ctctttgcttttgcaagtaatgctgcaatgtac

SEQ ID NO: 499205 - DNA, 33 bp, Homo sapien
ggctgaaaaattaagacctagagtatcacataa

SEQ ID NO: 499206 - DNA, 33 bp, Homo sapien
ggctgaaaaattaagatctagagtatcacataa

SEQ ID NO: 499207 - DNA, 33 bp, Homo sapien
ttagttatatttgtggaaactatttttacatct

SEQ ID NO: 499208 - DNA, 33 bp, Homo sapien
ttagttatatttgtgggaactatttttacatct

SEQ ID NO: 499209 - DNA, 33 bp, Homo sapien
actcctagctgcaagacgagcaattgatccagg

SEQ ID NO: 499210 - DNA, 33 bp, Homo sapien
actcctagctgcaagatgagcaattgatccagg

SEQ ID NO: 499211 - DNA, 33 bp, Homo sapien
gttgaaaatttcagaacggaacagtgtacatct

SEQ ID NO: 499212 - DNA, 33 bp, Homo sapien
gttgaaaatttcagaatggaacagtgtacatct

SEQ ID NO: 499213 - DNA, 33 bp, Homo sapien
ctccctttcagttacacctttctctcctccatt

SEQ ID NO: 499214 - DNA, 33 bp, Homo sapien
ctccctttcagttacatctttctctcctccatt

SEQ ID NO: 499215 - DNA, 33 bp, Homo sapien
ctcctcagggatataaagtgaagaaaagattac

SEQ ID NO: 499216 - DNA, 33 bp, Homo sapien
ctcctcagggatataacgtgaagaaaagattac

SEQ ID NO: 499217 - DNA, 33 bp, Homo sapien
ttgaactttacttgaactgttaacagaaaggtc

SEQ ID NO: 499218 - DNA, 33 bp, Homo sapien
ttgaactttacttgaattgttaacagaaaggtc

SEQ ID NO: 499219 - DNA, 33 bp, Homo sapien
tgacaacacagcaagagatacatgtgtgcaaac

SEQ ID NO: 499220 - DNA, 33 bp, Homo sapien
tgacaacacagcaagatatacatgtgtgcaaac

SEQ ID NO: 499221 - DNA, 33 bp, Homo sapien
catgacttgaagaacaacgataaccaagcaaag

SEQ ID NO: 499222 - DNA, 33 bp, Homo sapien
catgacttgaagaacagcgataaccaagcaaag

SEQ ID NO: 499223 - DNA, 33 bp, Homo sapien
atttggacaacattagaaaagaacataaattca

SEQ ID NO: 499224 - DNA, 33 bp, Homo sapien
atttggacaacattaggaaagaacataaattca

SEQ ID NO: 499225 - DNA, 33 bp, Homo sapien
ttattctaaatctcaaaatactttcagtgtttt

SEQ ID NO: 499226 - DNA, 33 bp, Homo sapien
ttattctaaatctcaatatactttcagtgtttt

SEQ ID NO: 499227 - DNA, 33 bp, Homo sapien
gccaagagctaagtccacagataccatatcttc

SEQ ID NO: 499228 - DNA, 33 bp, Homo sapien
gccaagagctaagtccgcagataccatatcttc

SEQ ID NO: 499229 - DNA, 33 bp, Homo sapien
ccagttatactcattaaatttaccaaacagcaa

SEQ ID NO: 499230 - DNA, 33 bp, Homo sapien
ccagttatactcattacatttaccaaacagcaa

SEQ ID NO: 499231 - DNA, 33 bp, Homo sapien
ggtaaaagaaagaagcagcagcctcagaaatta

SEQ ID NO: 499232 - DNA, 33 bp, Homo sapien
ggtaaaagaaagaagcggcagcctcagaaatta

SEQ ID NO: 499233 - DNA, 33 bp, Homo sapien
cctggtggattgagaccgggccttcagctttgt

SEQ ID NO: 499234 - DNA, 33 bp, Homo sapien
cctggtggattgagactgggccttcagctttgt

SEQ ID NO: 499235 - DNA, 33 bp, Homo sapien
gagtgatccctatgcccattatagttgaggaaa

SEQ ID NO: 499236 - DNA, 33 bp, Homo sapien
gagtgatccctatgcctattatagttgaggaaa

SEQ ID NO: 499237 - DNA, 33 bp, Homo sapien
ttgtttgcagaagacaactagtatcaatgcaca

SEQ ID NO: 499238 - DNA, 33 bp, Homo sapien
ttgtttgcagaagacatctagtatcaatgcaca

SEQ ID NO: 499239 - DNA, 33 bp, Homo sapien
aaccctgagttccaaagaactattactcccctt

SEQ ID NO: 499240 - DNA, 33 bp, Homo sapien
aaccctgagttccaaataactattactcccctt

SEQ ID NO: 499241 - DNA, 33 bp, Homo sapien
taaggcaacttggagaaagtcagtttacatatg

SEQ ID NO: 499242 - DNA, 33 bp, Homo sapien
taaggcaacttggagagagtcagtttacatatg

SEQ ID NO: 499243 - DNA, 33 bp, Homo sapien
ggagagagaataaacacggtgatcagattgtag

SEQ ID NO: 499244 - DNA, 33 bp, Homo sapien
ggagagagaataaacatggtgatcagattgtag

SEQ ID NO: 499245 - DNA, 33 bp, Homo sapien
ttattttctttacccaaatcacctgcatgggtt

SEQ ID NO: 499246 - DNA, 33 bp, Homo sapien
ttattttctttacccagatcacctgcatgggtt

SEQ ID NO: 499247 - DNA, 33 bp, Homo sapien
tgggttgtaccttgtacggacgtgcacttcagt

SEQ ID NO: 499248 - DNA, 33 bp, Homo sapien
tgggttgtaccttgtatggacgtgcacttcagt

SEQ ID NO: 499249 - DNA, 33 bp, Homo sapien
tacaacaaactactaacccaaacagtgtttgcc

SEQ ID NO: 499250 - DNA, 33 bp, Homo sapien
tacaacaaactactaatccaaacagtgtttgcc

SEQ ID NO: 499251 - DNA, 33 bp, Homo sapien
gaacagtagatcttacacattctttgtaattat

SEQ ID NO: 499252 - DNA, 33 bp, Homo sapien
gaacagtagatcttactcattctttgtaattat

SEQ ID NO: 499253 - DNA, 33 bp, Homo sapien
gaaattagaacttctaaatccaagcgtgttgct

SEQ ID NO: 499254 - DNA, 33 bp, Homo sapien
gaaattagaacttctacatccaagcgtgttgct

SEQ ID NO: 499255 - DNA, 33 bp, Homo sapien
tctgcatcaagcactacgttgagtccacgcaat

SEQ ID NO: 499256 - DNA, 33 bp, Homo sapien
tctgcatcaagcactatgttgagtccacgcaat

SEQ ID NO: 499257 - DNA, 33 bp, Homo sapien
tcatttttccaatttggatgaagactcttccaa

SEQ ID NO: 499258 - DNA, 33 bp, Homo sapien
tcatttttccaatttgtatgaagactcttccaa

SEQ ID NO: 499259 - DNA, 33 bp, Homo sapien
ggattattgagtcaaacggcaattctgttttaa

SEQ ID NO: 499260 - DNA, 33 bp, Homo sapien
ggattattgagtcaaatggcaattctgttttaa

SEQ ID NO: 499261 - DNA, 33 bp, Homo sapien
gaccagatctctaaaaaacacagaacataatgc

SEQ ID NO: 499262 - DNA, 33 bp, Homo sapien
gaccagatctctaaaacacacagaacataatgc

SEQ ID NO: 499263 - DNA, 33 bp, Homo sapien
ggaagcccaatttatcactgttgaggaagaaaa

SEQ ID NO: 499264 - DNA, 33 bp, Homo sapien
ggaagcccaatttatccctgttgaggaagaaaa

SEQ ID NO: 499265 - DNA, 33 bp, Homo sapien
gtgctacaaattgatacagtgtatgccatgata

SEQ ID NO: 499266 - DNA, 33 bp, Homo sapien
gtgctacaaattgatagagtgtatgccatgata

SEQ ID NO: 499267 - DNA, 33 bp, Homo sapien
tttcgaggctattttcaagtcagtgcctagaga

SEQ ID NO: 499268 - DNA, 33 bp, Homo sapien
tttcgaggctattttccagtcagtgcctagaga

SEQ ID NO: 499269 - DNA, 33 bp, Homo sapien
ggacctggcttgggccagaagagcccactgccc

SEQ ID NO: 499270 - DNA, 33 bp, Homo sapien
ggacctggcttgggccggaagagcccactgccc

SEQ ID NO: 499271 - DNA, 33 bp, Homo sapien
ctgggcatggcataaacctgtttctacaaaaat

SEQ ID NO: 499272 - DNA, 33 bp, Homo sapien
ctgggcatggcataaatctgtttctacaaaaat

SEQ ID NO: 499273 - DNA, 33 bp, Homo sapien
tttatctttgaagccacatgtggaatctaaaaa

SEQ ID NO: 499274 - DNA, 33 bp, Homo sapien
tttatctttgaagccatatgtggaatctaaaaa

SEQ ID NO: 499275 - DNA, 33 bp, Homo sapien
tctttatggtagtccccggagcttaggatttgc

SEQ ID NO: 499276 - DNA, 33 bp, Homo sapien
tctttatggtagtccctggagcttaggatttgc

SEQ ID NO: 499277 - DNA, 33 bp, Homo sapien
ttaggagacctttggacgtaccataactgctaa

SEQ ID NO: 499278 - DNA, 33 bp, Homo sapien
ttaggagacctttggatgtaccataactgctaa

SEQ ID NO: 499279 - DNA, 33 bp, Homo sapien
tggttaaaataagaaccgactcaactagtatcc

SEQ ID NO: 499280 - DNA, 33 bp, Homo sapien
tggttaaaataagaactgactcaactagtatcc

SEQ ID NO: 499281 - DNA, 33 bp, Homo sapien
attagtttttaaagaaagaatccatcattttca

SEQ ID NO: 499282 - DNA, 33 bp, Homo sapien
attagtttttaaagaaggaatccatcattttca

SEQ ID NO: 499283 - DNA, 33 bp, Homo sapien
catatttattgagagaccttttacaactcagaa

SEQ ID NO: 499284 - DNA, 33 bp, Homo sapien
catatttattgagagatcttttacaactcagaa

SEQ ID NO: 499285 - DNA, 33 bp, Homo sapien
gactatgattcatcaacttcataaaacataggg

SEQ ID NO: 499286 - DNA, 33 bp, Homo sapien
gactatgattcatcaatttcataaaacataggg

SEQ ID NO: 499287 - DNA, 33 bp, Homo sapien
ggcatgatctggagcaataactaagagaggaat

SEQ ID NO: 499288 - DNA, 33 bp, Homo sapien
ggcatgatctggagcagtaactaagagaggaat

SEQ ID NO: 499289 - DNA, 33 bp, Homo sapien
accagaattccaagatcaactctgctacttaca

SEQ ID NO: 499290 - DNA, 33 bp, Homo sapien
accagaattccaagattaactctgctacttaca

SEQ ID NO: 499291 - DNA, 33 bp, Homo sapien
agagaggaacaatgaacgtacaagtatgaggag

SEQ ID NO: 499292 - DNA, 33 bp, Homo sapien
agagaggaacaatgaatgtacaagtatgaggag

SEQ ID NO: 499293 - DNA, 33 bp, Homo sapien
ttctacttttactcaaatgtcttatccctttat

SEQ ID NO: 499294 - DNA, 33 bp, Homo sapien
ttctacttttactcaagtgtcttatccctttat

SEQ ID NO: 499295 - DNA, 33 bp, Homo sapien
taccatttcaaattcactattcaagccatatat

SEQ ID NO: 499296 - DNA, 33 bp, Homo sapien
taccatttcaaattcagtattcaagccatatat

SEQ ID NO: 499297 - DNA, 33 bp, Homo sapien
ccaactgaattttgcaatataacctcaagtaag

SEQ ID NO: 499298 - DNA, 33 bp, Homo sapien
ccaactgaattttgcagtataacctcaagtaag

SEQ ID NO: 499299 - DNA, 33 bp, Homo sapien
tctttgcctaggctaacatccggaagatttttc

SEQ ID NO: 499300 - DNA, 33 bp, Homo sapien
tctttgcctaggctaatatccggaagatttttc

SEQ ID NO: 499301 - DNA, 33 bp, Homo sapien
tgcttcaccaacttgcagatccctcattctctt

SEQ ID NO: 499302 - DNA, 33 bp, Homo sapien
tgcttcaccaacttgcggatccctcattctctt

SEQ ID NO: 499303 - DNA, 33 bp, Homo sapien
aaaccctatcatgaggacataacttttgggtcc

SEQ ID NO: 499304 - DNA, 33 bp, Homo sapien
aaaccctatcatgagggcataacttttgggtcc

SEQ ID NO: 499305 - DNA, 33 bp, Homo sapien
aagtagccagtctgaaacctgaagccaggcatg

SEQ ID NO: 499306 - DNA, 33 bp, Homo sapien
aagtagccagtctgaagcctgaagccaggcatg

SEQ ID NO: 499307 - DNA, 33 bp, Homo sapien
atccacataggtagtacaggcttatgtgactga

SEQ ID NO: 499308 - DNA, 33 bp, Homo sapien
atccacataggtagtataggcttatgtgactga

SEQ ID NO: 499309 - DNA, 33 bp, Homo sapien
ccttatgggtaatctccaaagttctcacagctg

SEQ ID NO: 499310 - DNA, 33 bp, Homo sapien
ccttatgggtaatctctaaagttctcacagctg

SEQ ID NO: 499311 - DNA, 33 bp, Homo sapien
aaataagcaaactatcaacaatttttttcaact

SEQ ID NO: 499312 - DNA, 33 bp, Homo sapien
aaataagcaaactatcgacaatttttttcaact

SEQ ID NO: 499313 - DNA, 33 bp, Homo sapien
aaatacacttggtaaaatattgatgtgtaggag

SEQ ID NO: 499314 - DNA, 33 bp, Homo sapien
aaatacacttggtaaattattgatgtgtaggag

SEQ ID NO: 499315 - DNA, 33 bp, Homo sapien
actggctggtgttgagccggtcgcgcactgact

SEQ ID NO: 499316 - DNA, 33 bp, Homo sapien
actggctggtgttgagtcggtcgcgcactgact

SEQ ID NO: 499317 - DNA, 33 bp, Homo sapien
attagatatgtttcgacagttttagtggaagtg

SEQ ID NO: 499318 - DNA, 33 bp, Homo sapien
attagatatgtttcgatagttttagtggaagtg

SEQ ID NO: 499319 - DNA, 33 bp, Homo sapien
tatagaggcttggaaacaaatgtatgtatattt

SEQ ID NO: 499320 - DNA, 33 bp, Homo sapien
tatagaggcttggaaataaatgtatgtatattt

SEQ ID NO: 499321 - DNA, 33 bp, Homo sapien
gccatttatttgaggacacttggtttcccataa

SEQ ID NO: 499322 - DNA, 33 bp, Homo sapien
gccatttatttgaggagacttggtttcccataa

SEQ ID NO: 499323 - DNA, 33 bp, Homo sapien
tttctatatatcagaaaggaccaaagttacaga

SEQ ID NO: 499324 - DNA, 33 bp, Homo sapien
tttctatatatcagaagggaccaaagttacaga

SEQ ID NO: 499325 - DNA, 33 bp, Homo sapien
attttgcagctggaaacgttgcaaaatagatag

SEQ ID NO: 499326 - DNA, 33 bp, Homo sapien
attttgcagctggaaatgttgcaaaatagatag

SEQ ID NO: 499327 - DNA, 33 bp, Homo sapien
attaatttcactggatcaatttaagaactaaca

SEQ ID NO: 499328 - DNA, 33 bp, Homo sapien
attaatttcactggatgaatttaagaactaaca

SEQ ID NO: 499329 - DNA, 33 bp, Homo sapien
taccaaataacagcaaatagcctggttgcttaa

SEQ ID NO: 499330 - DNA, 33 bp, Homo sapien
taccaaataacagcaagtagcctggttgcttaa

SEQ ID NO: 499331 - DNA, 33 bp, Homo sapien
ggctcagctaatcctacggagaattctaaagct

SEQ ID NO: 499332 - DNA, 33 bp, Homo sapien
ggctcagctaatcctatggagaattctaaagct

SEQ ID NO: 499333 - DNA, 33 bp, Homo sapien
tcactgattcataggaaatatgagagtcaccag

SEQ ID NO: 499334 - DNA, 33 bp, Homo sapien
tcactgattcataggagatatgagagtcaccag

SEQ ID NO: 499335 - DNA, 33 bp, Homo sapien
agccttatagaaactaacaactaacgaacattg

SEQ ID NO: 499336 - DNA, 33 bp, Homo sapien
agccttatagaaactagcaactaacgaacattg

SEQ ID NO: 499337 - DNA, 33 bp, Homo sapien
tatggatttaactttgaacagcaaacacttctc

SEQ ID NO: 499338 - DNA, 33 bp, Homo sapien
tatggatttaactttgtacagcaaacacttctc

SEQ ID NO: 499339 - DNA, 33 bp, Homo sapien
aagaagattcggatgacatatttattaaatcaa

SEQ ID NO: 499340 - DNA, 33 bp, Homo sapien
aagaagattcggatgagatatttattaaatcaa

SEQ ID NO: 499341 - DNA, 33 bp, Homo sapien
ttcttctttttttgcaatcgaagttaagttggt

SEQ ID NO: 499342 - DNA, 33 bp, Homo sapien
ttcttctttttttgcagtcgaagttaagttggt

SEQ ID NO: 499343 - DNA, 33 bp, Homo sapien
cagtgctagtaaggaaagtaaaatatatgtgaa

SEQ ID NO: 499344 - DNA, 33 bp, Homo sapien
cagtgctagtaaggaaggtaaaatatatgtgaa

SEQ ID NO: 499345 - DNA, 33 bp, Homo sapien
gaaggatgtagcattaaatagtggctttgaatg

SEQ ID NO: 499346 - DNA, 33 bp, Homo sapien
gaaggatgtagcattacatagtggctttgaatg

SEQ ID NO: 499347 - DNA, 33 bp, Homo sapien
tgtctcccttttattacctgaaggatgatcagt

SEQ ID NO: 499348 - DNA, 33 bp, Homo sapien
tgtctcccttttattatctgaaggatgatcagt

SEQ ID NO: 499349 - DNA, 33 bp, Homo sapien
ccagccctgtatccaaatgttctcattattcaa

SEQ ID NO: 499350 - DNA, 33 bp, Homo sapien
ccagccctgtatccaagtgttctcattattcaa

SEQ ID NO: 499351 - DNA, 33 bp, Homo sapien
ttcatgttgctaccagacagagaaggccttaaa

SEQ ID NO: 499352 - DNA, 33 bp, Homo sapien
ttcatgttgctaccagccagagaaggccttaaa

SEQ ID NO: 499353 - DNA, 33 bp, Homo sapien
tgggcattgtcatcacactgatttttgccttgg

SEQ ID NO: 499354 - DNA, 33 bp, Homo sapien
tgggcattgtcatcacgctgatttttgccttgg

SEQ ID NO: 499355 - DNA, 33 bp, Homo sapien
acagttgttctttctccagtaattgctatttgc

SEQ ID NO: 499356 - DNA, 33 bp, Homo sapien
acagttgttctttctctagtaattgctatttgc

SEQ ID NO: 499357 - DNA, 33 bp, Homo sapien
tgttccaagaaactcaccttactgggtcactct

SEQ ID NO: 499358 - DNA, 33 bp, Homo sapien
tgttccaagaaactcagcttactgggtcactct

SEQ ID NO: 499359 - DNA, 33 bp, Homo sapien
tggtctaatagaaaaccatttgtaagaaaaggc

SEQ ID NO: 499360 - DNA, 33 bp, Homo sapien
tggtctaatagaaaacgatttgtaagaaaaggc

SEQ ID NO: 499361 - DNA, 33 bp, Homo sapien
ctgtctgatacctcaccggcaaaaataaatgct

SEQ ID NO: 499362 - DNA, 33 bp, Homo sapien
ctgtctgatacctcactggcaaaaataaatgct

SEQ ID NO: 499363 - DNA, 33 bp, Homo sapien
acaaatggaagatagaactaaagattgagcaat

SEQ ID NO: 499364 - DNA, 33 bp, Homo sapien
acaaatggaagatagagctaaagattgagcaat

SEQ ID NO: 499365 - DNA, 33 bp, Homo sapien
tcttttttgcattcggaagatagtgcaatggga

SEQ ID NO: 499366 - DNA, 33 bp, Homo sapien
tcttttttgcattcgggagatagtgcaatggga

SEQ ID NO: 499367 - DNA, 33 bp, Homo sapien
ctaacatgactcctaaataattctctatcatgc

SEQ ID NO: 499368 - DNA, 33 bp, Homo sapien
ctaacatgactcctaagtaattctctatcatgc

SEQ ID NO: 499369 - DNA, 33 bp, Homo sapien
acaattcggctatcacaagtaggaatggtgtga

SEQ ID NO: 499370 - DNA, 33 bp, Homo sapien
acaattcggctatcacgagtaggaatggtgtga

SEQ ID NO: 499371 - DNA, 33 bp, Homo sapien
actttaacaactttcaaccattattgcaggctt

SEQ ID NO: 499372 - DNA, 33 bp, Homo sapien
actttaacaactttcagccattattgcaggctt

SEQ ID NO: 499373 - DNA, 33 bp, Homo sapien
acatttatgacatagaagctaaaatctgtgttt

SEQ ID NO: 499374 - DNA, 33 bp, Homo sapien
acatttatgacatagaggctaaaatctgtgttt

SEQ ID NO: 499375 - DNA, 33 bp, Homo sapien
atttgttgttaagtgtaaaaggtcctttcctat

SEQ ID NO: 499376 - DNA, 33 bp, Homo sapien
atttgttgttaagtgtgaaaggtcctttcctat

SEQ ID NO: 499377 - DNA, 33 bp, Homo sapien
gaggctcataacacccaaagaaagtctccaggt

SEQ ID NO: 499378 - DNA, 33 bp, Homo sapien
gaggctcataacacccgaagaaagtctccaggt

SEQ ID NO: 499379 - DNA, 33 bp, Homo sapien
tcacttgcaagagctacgatgagacaaaaataa

SEQ ID NO: 499380 - DNA, 33 bp, Homo sapien
tcacttgcaagagctatgatgagacaaaaataa

SEQ ID NO: 499381 - DNA, 33 bp, Homo sapien
agggaatgtaggctaccagtttataacctctgt

SEQ ID NO: 499382 - DNA, 33 bp, Homo sapien
agggaatgtaggctactagtttataacctctgt

SEQ ID NO: 499383 - DNA, 33 bp, Homo sapien
tggactcattgctccccattttctatcatctct

SEQ ID NO: 499384 - DNA, 33 bp, Homo sapien
tggactcattgctccctattttctatcatctct

SEQ ID NO: 499385 - DNA, 33 bp, Homo sapien
taatggaatattttcaccatcaatgtgtttgta

SEQ ID NO: 499386 - DNA, 33 bp, Homo sapien
taatggaatattttcatcatcaatgtgtttgta

SEQ ID NO: 499387 - DNA, 33 bp, Homo sapien
tcaaatggaaaagatgaaaagagcagataatat

SEQ ID NO: 499388 - DNA, 33 bp, Homo sapien
tcaaatggaaaagatggaaagagcagataatat

SEQ ID NO: 499389 - DNA, 33 bp, Homo sapien
gagacagaccatttaaataaaccttgccaatat

SEQ ID NO: 499390 - DNA, 33 bp, Homo sapien
gagacagaccatttaagtaaaccttgccaatat

SEQ ID NO: 499391 - DNA, 33 bp, Homo sapien
ctgtttatttcacaaacctctgtacaggaaaaa

SEQ ID NO: 499392 - DNA, 33 bp, Homo sapien
ctgtttatttcacaaatctctgtacaggaaaaa

SEQ ID NO: 499393 - DNA, 33 bp, Homo sapien
caattccagccagtgtcaatcttgctccttgct

SEQ ID NO: 499394 - DNA, 33 bp, Homo sapien
caattccagccagtgttaatcttgctccttgct

SEQ ID NO: 499395 - DNA, 33 bp, Homo sapien
gccctactgctaaaaaagtgtcagttgatacag

SEQ ID NO: 499396 - DNA, 33 bp, Homo sapien
gccctactgctaaaaatgtgtcagttgatacag

SEQ ID NO: 499397 - DNA, 33 bp, Homo sapien
taccactaattagggccgcaagtttttgtttgt

SEQ ID NO: 499398 - DNA, 33 bp, Homo sapien
taccactaattagggctgcaagtttttgtttgt

SEQ ID NO: 499399 - DNA, 33 bp, Homo sapien
taggtatgttaactacaggtcaaacatgaaaat

SEQ ID NO: 499400 - DNA, 33 bp, Homo sapien
taggtatgttaactacgggtcaaacatgaaaat

SEQ ID NO: 499401 - DNA, 33 bp, Homo sapien
aagagagttcagtaaagaggctgcaagtcaatg

SEQ ID NO: 499402 - DNA, 33 bp, Homo sapien
aagagagttcagtaaataggctgcaagtcaatg

SEQ ID NO: 499403 - DNA, 33 bp, Homo sapien
ttctttgcatagctcacaatctaaggaagtagc

SEQ ID NO: 499404 - DNA, 33 bp, Homo sapien
ttctttgcatagctcagaatctaaggaagtagc

SEQ ID NO: 499405 - DNA, 33 bp, Homo sapien
agttaatactaagtagaccctggattaaaccta

SEQ ID NO: 499406 - DNA, 33 bp, Homo sapien
agttaatactaagtaggccctggattaaaccta

SEQ ID NO: 499407 - DNA, 33 bp, Homo sapien
catcttcctttcatcaacacatctagagtgtga

SEQ ID NO: 499408 - DNA, 33 bp, Homo sapien
catcttcctttcatcaccacatctagagtgtga

SEQ ID NO: 499409 - DNA, 33 bp, Homo sapien
gaagaacagacttaaaactgtgcagcagtgtaa

SEQ ID NO: 499410 - DNA, 33 bp, Homo sapien
gaagaacagacttaaagctgtgcagcagtgtaa

SEQ ID NO: 499411 - DNA, 33 bp, Homo sapien
cctggcctttaataaacagagctatcatgcaaa

SEQ ID NO: 499412 - DNA, 33 bp, Homo sapien
cctggcctttaataaagagagctatcatgcaaa

SEQ ID NO: 499413 - DNA, 33 bp, Homo sapien
tgattctgttgcagaaccagtttcactagttgt

SEQ ID NO: 499414 - DNA, 33 bp, Homo sapien
tgattctgttgcagaatcagtttcactagttgt

SEQ ID NO: 499415 - DNA, 33 bp, Homo sapien
agatacggcctaaaaaagggttgagtgtcaaaa

SEQ ID NO: 499416 - DNA, 33 bp, Homo sapien
agatacggcctaaaaacgggttgagtgtcaaaa

SEQ ID NO: 499417 - DNA, 33 bp, Homo sapien
gaatggacttatgaagaaaattaatactactaa

SEQ ID NO: 499418 - DNA, 33 bp, Homo sapien
gaatggacttatgaaggaaattaatactactaa

SEQ ID NO: 499419 - DNA, 33 bp, Homo sapien
ctggttatggctgatacgcaaattacatttgtg

SEQ ID NO: 499420 - DNA, 33 bp, Homo sapien
ctggttatggctgatatgcaaattacatttgtg

SEQ ID NO: 499421 - DNA, 33 bp, Homo sapien
ctaatactcctatgcaactaagttctcacagct

SEQ ID NO: 499422 - DNA, 33 bp, Homo sapien
ctaatactcctatgcagctaagttctcacagct

SEQ ID NO: 499423 - DNA, 33 bp, Homo sapien
cctgactttggagttgcacatacccaggtttga

SEQ ID NO: 499424 - DNA, 33 bp, Homo sapien
cctgactttggagttgtacatacccaggtttga

SEQ ID NO: 499425 - DNA, 33 bp, Homo sapien
gtaaataatgaggctcacaatgtaggctgacaa

SEQ ID NO: 499426 - DNA, 33 bp, Homo sapien
gtaaataatgaggctcgcaatgtaggctgacaa

SEQ ID NO: 499427 - DNA, 33 bp, Homo sapien
tacatgagattaaaataataaggaaactcccta

SEQ ID NO: 499428 - DNA, 33 bp, Homo sapien
tacatgagattaaaatgataaggaaactcccta

SEQ ID NO: 499429 - DNA, 33 bp, Homo sapien
ggactgcatataaaaagaaaaggtgacttggag

SEQ ID NO: 499430 - DNA, 33 bp, Homo sapien
ggactgcatataaaaataaaaggtgacttggag

SEQ ID NO: 499431 - DNA, 33 bp, Homo sapien
ctatccttaaagcctgccagaaaaataaataaa

SEQ ID NO: 499432 - DNA, 33 bp, Homo sapien
ctatccttaaagcctgtcagaaaaataaataaa

SEQ ID NO: 499433 - DNA, 33 bp, Homo sapien
cctctattgtcagaccacttaactatcacctct

SEQ ID NO: 499434 - DNA, 33 bp, Homo sapien
cctctattgtcagaccgcttaactatcacctct

SEQ ID NO: 499435 - DNA, 33 bp, Homo sapien
tctgtccagactcagaactaatacttgggtata

SEQ ID NO: 499436 - DNA, 33 bp, Homo sapien
tctgtccagactcagagctaatacttgggtata

SEQ ID NO: 499437 - DNA, 33 bp, Homo sapien
taaaatggataaattaagactcagaaacaccat

SEQ ID NO: 499438 - DNA, 33 bp, Homo sapien
taaaatggataaattaggactcagaaacaccat

SEQ ID NO: 499439 - DNA, 33 bp, Homo sapien
aatattacgggtttgacgtggttagatatactg

SEQ ID NO: 499440 - DNA, 33 bp, Homo sapien
aatattacgggtttgatgtggttagatatactg

SEQ ID NO: 499441 - DNA, 33 bp, Homo sapien
agtgatattccagttccaagaatttaatgcaag

SEQ ID NO: 499442 - DNA, 33 bp, Homo sapien
agtgatattccagttctaagaatttaatgcaag

SEQ ID NO: 499443 - DNA, 33 bp, Homo sapien
ggtattagtgtaccacaagagtctgtagaaaat

SEQ ID NO: 499444 - DNA, 33 bp, Homo sapien
ggtattagtgtaccacgagagtctgtagaaaat

SEQ ID NO: 499445 - DNA, 33 bp, Homo sapien
attggtgatatcgtaccgagcttctatcagcac

SEQ ID NO: 499446 - DNA, 33 bp, Homo sapien
attggtgatatcgtactgagcttctatcagcac

SEQ ID NO: 499447 - DNA, 33 bp, Homo sapien
gaatcttcaatagtgacagacaactgcttaaaa

SEQ ID NO: 499448 - DNA, 33 bp, Homo sapien
gaatcttcaatagtgatagacaactgcttaaaa

SEQ ID NO: 499449 - DNA, 33 bp, Homo sapien
gactcagcacttcagacagtataagttatatgc

SEQ ID NO: 499450 - DNA, 33 bp, Homo sapien
gactcagcacttcagagagtataagttatatgc

SEQ ID NO: 499451 - DNA, 33 bp, Homo sapien
taacaataagtaagaaaggtagccatctagtca

SEQ ID NO: 499452 - DNA, 33 bp, Homo sapien
taacaataagtaagaagggtagccatctagtca

SEQ ID NO: 499453 - DNA, 33 bp, Homo sapien
gagccttgcttaagaccagctgaatatatagta

SEQ ID NO: 499454 - DNA, 33 bp, Homo sapien
gagccttgcttaagacgagctgaatatatagta

SEQ ID NO: 499455 - DNA, 33 bp, Homo sapien
gctagtcctggatctacgatggcttttatctaa

SEQ ID NO: 499456 - DNA, 33 bp, Homo sapien
gctagtcctggatctatgatggcttttatctaa

SEQ ID NO: 499457 - DNA, 33 bp, Homo sapien
ctctcgtaggcattacaagagaatgtatccact

SEQ ID NO: 499458 - DNA, 33 bp, Homo sapien
ctctcgtaggcattacgagagaatgtatccact

SEQ ID NO: 499459 - DNA, 33 bp, Homo sapien
cgcctgtggtgaaggaaaacaaagtattggaag

SEQ ID NO: 499460 - DNA, 33 bp, Homo sapien
cgcctgtggtgaaggagaacaaagtattggaag

SEQ ID NO: 499461 - DNA, 33 bp, Homo sapien
gttacattttgacaggcagaattgactgataaa

SEQ ID NO: 499462 - DNA, 33 bp, Homo sapien
gttacattttgacaggtagaattgactgataaa

SEQ ID NO: 499463 - DNA, 33 bp, Homo sapien
ttttctgattatgaagacctcctgatatcaatg

SEQ ID NO: 499464 - DNA, 33 bp, Homo sapien
ttttctgattatgaaggcctcctgatatcaatg

SEQ ID NO: 499465 - DNA, 33 bp, Homo sapien
caccctaatataggagcccactatccctcacag

SEQ ID NO: 499466 - DNA, 33 bp, Homo sapien
caccctaatataggagtccactatccctcacag

SEQ ID NO: 499467 - DNA, 33 bp, Homo sapien
ggagactgtattggccaaataagccacatcttt

SEQ ID NO: 499468 - DNA, 33 bp, Homo sapien
ggagactgtattggccgaataagccacatcttt

SEQ ID NO: 499469 - DNA, 33 bp, Homo sapien
cctccttatcctgtaaacactctcaaacatctg

SEQ ID NO: 499470 - DNA, 33 bp, Homo sapien
cctccttatcctgtaagcactctcaaacatctg

SEQ ID NO: 499471 - DNA, 33 bp, Homo sapien
ctaaagtgacagggaaaagtacccactggcaaa

SEQ ID NO: 499472 - DNA, 33 bp, Homo sapien
ctaaagtgacagggaatagtacccactggcaaa

SEQ ID NO: 499473 - DNA, 33 bp, Homo sapien
gtactgatatggctaaacctgatcctttagtaa

SEQ ID NO: 499474 - DNA, 33 bp, Homo sapien
gtactgatatggctaaccctgatcctttagtaa

SEQ ID NO: 499475 - DNA, 33 bp, Homo sapien
gacattgtcatgtctcaaggtgggtaagggact

SEQ ID NO: 499476 - DNA, 33 bp, Homo sapien
gacattgtcatgtctcgaggtgggtaagggact

SEQ ID NO: 499477 - DNA, 33 bp, Homo sapien
tgattacaaggtatccggcaagaaatgtaactc

SEQ ID NO: 499478 - DNA, 33 bp, Homo sapien
tgattacaaggtatcctgcaagaaatgtaactc

SEQ ID NO: 499479 - DNA, 33 bp, Homo sapien
gtttttcagggtctgacatttttcaccaactta

SEQ ID NO: 499480 - DNA, 33 bp, Homo sapien
gtttttcagggtctgatatttttcaccaactta

SEQ ID NO: 499481 - DNA, 33 bp, Homo sapien
taacattcaagtaaaacagcatgtacacacatt

SEQ ID NO: 499482 - DNA, 33 bp, Homo sapien
taacattcaagtaaaatagcatgtacacacatt

SEQ ID NO: 499483 - DNA, 33 bp, Homo sapien
cttttaattacttcatcagactgtttccctgta

SEQ ID NO: 499484 - DNA, 33 bp, Homo sapien
cttttaattacttcatgagactgtttccctgta

SEQ ID NO: 499485 - DNA, 33 bp, Homo sapien
atgctctctaaaaaaaatctcctgcaatctttt

SEQ ID NO: 499486 - DNA, 33 bp, Homo sapien
atgctctctaaaaaaattctcctgcaatctttt

SEQ ID NO: 499487 - DNA, 33 bp, Homo sapien
acattttctggacttacctctgaatatttcctc

SEQ ID NO: 499488 - DNA, 33 bp, Homo sapien
acattttctggacttatctctgaatatttcctc

SEQ ID NO: 499489 - DNA, 33 bp, Homo sapien
cttcacctaggggaaacctggagaaactacaca

SEQ ID NO: 499490 - DNA, 33 bp, Homo sapien
cttcacctaggggaaatctggagaaactacaca

SEQ ID NO: 499491 - DNA, 33 bp, Homo sapien
ctggcagagagggaaaaactgtggacatgaggg

SEQ ID NO: 499492 - DNA, 33 bp, Homo sapien
ctggcagagagggaaagactgtggacatgaggg

SEQ ID NO: 499493 - DNA, 33 bp, Homo sapien
gcacctgcccaaagtaacactgacaccaaaatt

SEQ ID NO: 499494 - DNA, 33 bp, Homo sapien
gcacctgcccaaagtaccactgacaccaaaatt

SEQ ID NO: 499495 - DNA, 33 bp, Homo sapien
tagtatgttttctgctgaagaaatctcatctcc

SEQ ID NO: 499496 - DNA, 33 bp, Homo sapien
tagtatgttttctgcttaagaaatctcatctcc

SEQ ID NO: 499497 - DNA, 33 bp, Homo sapien
tttttaaaactctcaagatctgtcagtggtcaa

SEQ ID NO: 499498 - DNA, 33 bp, Homo sapien
tttttaaaactctcaatatctgtcagtggtcaa

SEQ ID NO: 499499 - DNA, 33 bp, Homo sapien
aatgtgggtttaatcaccttggttagatatgtg

SEQ ID NO: 499500 - DNA, 33 bp, Homo sapien
aatgtgggtttaatcatcttggttagatatgtg

SEQ ID NO: 499501 - DNA, 33 bp, Homo sapien
atgtgattttgtttccagaaaattcagagtagt

SEQ ID NO: 499502 - DNA, 33 bp, Homo sapien
atgtgattttgtttccggaaaattcagagtagt

SEQ ID NO: 499503 - DNA, 33 bp, Homo sapien
ggaatatgaatattcaaagtgagagatagtcct

SEQ ID NO: 499504 - DNA, 33 bp, Homo sapien
ggaatatgaatattcagagtgagagatagtcct

SEQ ID NO: 499505 - DNA, 33 bp, Homo sapien
gtcaggggattctctaaggattaagtctcatgt

SEQ ID NO: 499506 - DNA, 33 bp, Homo sapien
gtcaggggattctctagggattaagtctcatgt

SEQ ID NO: 499507 - DNA, 33 bp, Homo sapien
catggctgagagactgcaacacagttcacatca

SEQ ID NO: 499508 - DNA, 33 bp, Homo sapien
catggctgagagactggaacacagttcacatca

SEQ ID NO: 499509 - DNA, 33 bp, Homo sapien
ccctcatcagctttccaatcttgatcgtgtcag

SEQ ID NO: 499510 - DNA, 33 bp, Homo sapien
ccctcatcagctttccgatcttgatcgtgtcag

SEQ ID NO: 499511 - DNA, 33 bp, Homo sapien
aatttgttatgatccaactaatacaaaagtcta

SEQ ID NO: 499512 - DNA, 33 bp, Homo sapien
aatttgttatgatccagctaatacaaaagtcta

SEQ ID NO: 499513 - DNA, 33 bp, Homo sapien
tttccatttgcttctacctaggccctgttgtag

SEQ ID NO: 499514 - DNA, 33 bp, Homo sapien
tttccatttgcttctatctaggccctgttgtag

SEQ ID NO: 499515 - DNA, 33 bp, Homo sapien
aaaagacagtttacaacctcttgcatttaaaga

SEQ ID NO: 499516 - DNA, 33 bp, Homo sapien
aaaagacagtttacaatctcttgcatttaaaga

SEQ ID NO: 499517 - DNA, 33 bp, Homo sapien
tgatcctctaaccatccagtagcttctgtctct

SEQ ID NO: 499518 - DNA, 33 bp, Homo sapien
tgatcctctaaccatctagtagcttctgtctct

SEQ ID NO: 499519 - DNA, 33 bp, Homo sapien
gcggttataactggaacgattaaaggctcttat

SEQ ID NO: 499520 - DNA, 33 bp, Homo sapien
gcggttataactggaatgattaaaggctcttat

SEQ ID NO: 499521 - DNA, 33 bp, Homo sapien
ttgtgtaggtaggtacaggacaatggaaaatga

SEQ ID NO: 499522 - DNA, 33 bp, Homo sapien
ttgtgtaggtaggtacgggacaatggaaaatga

SEQ ID NO: 499523 - DNA, 33 bp, Homo sapien
cacacaaatacataccaccgtcacccaatccca

SEQ ID NO: 499524 - DNA, 33 bp, Homo sapien
cacacaaatacataccgccgtcacccaatccca

SEQ ID NO: 499525 - DNA, 33 bp, Homo sapien
ggcagcttttggctcagggacactattgaaaat

SEQ ID NO: 499526 - DNA, 33 bp, Homo sapien
ggcagcttttggctcatggacactattgaaaat

SEQ ID NO: 499527 - DNA, 33 bp, Homo sapien
aactttttctcattcaaataggacttgtgtatt

SEQ ID NO: 499528 - DNA, 33 bp, Homo sapien
aactttttctcattcagataggacttgtgtatt

SEQ ID NO: 499529 - DNA, 33 bp, Homo sapien
tgacctaaccagtgaaaccaaatccaaaatcct

SEQ ID NO: 499530 - DNA, 33 bp, Homo sapien
tgacctaaccagtgaacccaaatccaaaatcct

SEQ ID NO: 499531 - DNA, 33 bp, Homo sapien
tggttgaaccagagtcaaattatacagggcttc

SEQ ID NO: 499532 - DNA, 33 bp, Homo sapien
tggttgaaccagagtctaattatacagggcttc

SEQ ID NO: 499533 - DNA, 33 bp, Homo sapien
cagtattttcccaacccattatgcacactacag

SEQ ID NO: 499534 - DNA, 33 bp, Homo sapien
cagtattttcccaacctattatgcacactacag

SEQ ID NO: 499535 - DNA, 33 bp, Homo sapien
tgctgctgtagcccaacatgtattttggagatt

SEQ ID NO: 499536 - DNA, 33 bp, Homo sapien
tgctgctgtagcccaatatgtattttggagatt

SEQ ID NO: 499537 - DNA, 33 bp, Homo sapien
tcaactcattgactccacagaatccaatgtttg

SEQ ID NO: 499538 - DNA, 33 bp, Homo sapien
tcaactcattgactccgcagaatccaatgtttg

SEQ ID NO: 499539 - DNA, 33 bp, Homo sapien
tctaaaatcttcacacacattaatcaactcatt

SEQ ID NO: 499540 - DNA, 33 bp, Homo sapien
tctaaaatcttcacacgcattaatcaactcatt

SEQ ID NO: 499541 - DNA, 33 bp, Homo sapien
caatattggtcaatccaaaagactatatatgca

SEQ ID NO: 499542 - DNA, 33 bp, Homo sapien
caatattggtcaatccgaaagactatatatgca

SEQ ID NO: 499543 - DNA, 33 bp, Homo sapien
gcaactaaacaccataacaaagaaacgtgatag

SEQ ID NO: 499544 - DNA, 33 bp, Homo sapien
gcaactaaacaccatagcaaagaaacgtgatag

SEQ ID NO: 499545 - DNA, 33 bp, Homo sapien
ggtcaaatatatcaaggctacaaaagtttcaga

SEQ ID NO: 499546 - DNA, 33 bp, Homo sapien
ggtcaaatatatcaagtctacaaaagtttcaga

SEQ ID NO: 499547 - DNA, 33 bp, Homo sapien
cccttcactttaatcaggcaaccctttatagaa

SEQ ID NO: 499548 - DNA, 33 bp, Homo sapien
cccttcactttaatcatgcaaccctttatagaa

SEQ ID NO: 499549 - DNA, 33 bp, Homo sapien
caaacctctagttacaaatcacttgttcaattc

SEQ ID NO: 499550 - DNA, 33 bp, Homo sapien
caaacctctagttacacatcacttgttcaattc

SEQ ID NO: 499551 - DNA, 33 bp, Homo sapien
gtaatcatattagtaacagcagtggaattgaac

SEQ ID NO: 499552 - DNA, 33 bp, Homo sapien
gtaatcatattagtaatagcagtggaattgaac

SEQ ID NO: 499553 - DNA, 33 bp, Homo sapien
agaatgtgatatgcaaggcttgaggaatataga

SEQ ID NO: 499554 - DNA, 33 bp, Homo sapien
agaatgtgatatgcaatgcttgaggaatataga

SEQ ID NO: 499555 - DNA, 33 bp, Homo sapien
atacattctggacacaagttcttcaatatttga

SEQ ID NO: 499556 - DNA, 33 bp, Homo sapien
atacattctggacacaggttcttcaatatttga

SEQ ID NO: 499557 - DNA, 33 bp, Homo sapien
atcagttgtaacgtcaccattatcatttctgaa

SEQ ID NO: 499558 - DNA, 33 bp, Homo sapien
atcagttgtaacgtcatcattatcatttctgaa

SEQ ID NO: 499559 - DNA, 33 bp, Homo sapien
caattccttgttctaccgacctttcctcagagc

SEQ ID NO: 499560 - DNA, 33 bp, Homo sapien
caattccttgttctacggacctttcctcagagc

SEQ ID NO: 499561 - DNA, 33 bp, Homo sapien
agtgcaagatcaagtgcatcctcttcctaaatt

SEQ ID NO: 499562 - DNA, 33 bp, Homo sapien
agtgcaagatcaagtgtatcctcttcctaaatt

SEQ ID NO: 499563 - DNA, 33 bp, Homo sapien
tgttattggcctatcaagttagtcagctgagtg

SEQ ID NO: 499564 - DNA, 33 bp, Homo sapien
tgttattggcctatcaggttagtcagctgagtg

SEQ ID NO: 499565 - DNA, 33 bp, Homo sapien
gaaggctgttgaaggaatagactgattacggag

SEQ ID NO: 499566 - DNA, 33 bp, Homo sapien
gaaggctgttgaaggagtagactgattacggag

SEQ ID NO: 499567 - DNA, 33 bp, Homo sapien
acaaggaaatttactacaacaatacctgactct

SEQ ID NO: 499568 - DNA, 33 bp, Homo sapien
acaaggaaatttactagaacaatacctgactct

SEQ ID NO: 499569 - DNA, 33 bp, Homo sapien
aaagtggtatattctgcaacggtagactggata

SEQ ID NO: 499570 - DNA, 33 bp, Homo sapien
aaagtggtatattctgtaacggtagactggata

SEQ ID NO: 499571 - DNA, 33 bp, Homo sapien
gactgtagctgtataactagtatccattcctaa

SEQ ID NO: 499572 - DNA, 33 bp, Homo sapien
gactgtagctgtataattagtatccattcctaa

SEQ ID NO: 499573 - DNA, 33 bp, Homo sapien
tttatcttaaacttggcacataaggctggtctg

SEQ ID NO: 499574 - DNA, 33 bp, Homo sapien
tttatcttaaacttggtacataaggctggtctg

SEQ ID NO: 499575 - DNA, 33 bp, Homo sapien
gaatacggtatgatgacaaaatgagcttcaact

SEQ ID NO: 499576 - DNA, 33 bp, Homo sapien
gaatacggtatgatgagaaaatgagcttcaact

SEQ ID NO: 499577 - DNA, 33 bp, Homo sapien
ccaaaacctcaagcacacattttggtactgtac

SEQ ID NO: 499578 - DNA, 33 bp, Homo sapien
ccaaaacctcaagcacgcattttggtactgtac

SEQ ID NO: 499579 - DNA, 33 bp, Homo sapien
acttatgccttcatcaaaattatagttaagggt

SEQ ID NO: 499580 - DNA, 33 bp, Homo sapien
acttatgccttcatcacaattatagttaagggt

SEQ ID NO: 499581 - DNA, 33 bp, Homo sapien
ctaaatgaatatcataggtgaaagaagccagta

SEQ ID NO: 499582 - DNA, 33 bp, Homo sapien
ctaaatgaatatcatatgtgaaagaagccagta

SEQ ID NO: 499583 - DNA, 33 bp, Homo sapien
gttttgaaacatacaaaggatgtgagattttgg

SEQ ID NO: 499584 - DNA, 33 bp, Homo sapien
gttttgaaacatacaatggatgtgagattttgg

SEQ ID NO: 499585 - DNA, 33 bp, Homo sapien
atcactttaatcaacaaggtgaggaaatgagaa

SEQ ID NO: 499586 - DNA, 33 bp, Homo sapien
atcactttaatcaacatggtgaggaaatgagaa

SEQ ID NO: 499587 - DNA, 33 bp, Homo sapien
taacatatctagactccacctagttatcaagat

SEQ ID NO: 499588 - DNA, 33 bp, Homo sapien
taacatatctagactctacctagttatcaagat

SEQ ID NO: 499589 - DNA, 33 bp, Homo sapien
tttacgcatgacattacagaggaaaattttgat

SEQ ID NO: 499590 - DNA, 33 bp, Homo sapien
tttacgcatgacattatagaggaaaattttgat

SEQ ID NO: 499591 - DNA, 33 bp, Homo sapien
ggacaactcactgagaaatcttggctgccttta

SEQ ID NO: 499592 - DNA, 33 bp, Homo sapien
ggacaactcactgagagatcttggctgccttta

SEQ ID NO: 499593 - DNA, 33 bp, Homo sapien
gcatggcactaaaaaaattcatcatgacaggtg

SEQ ID NO: 499594 - DNA, 33 bp, Homo sapien
gcatggcactaaaaaagttcatcatgacaggtg

SEQ ID NO: 499595 - DNA, 33 bp, Homo sapien
atttgcaagacagcaacgttcaagaaaattagg

SEQ ID NO: 499596 - DNA, 33 bp, Homo sapien
atttgcaagacagcaatgttcaagaaaattagg

SEQ ID NO: 499597 - DNA, 33 bp, Homo sapien
ttaccaaaatgtgataaagagaacagagtgagc

SEQ ID NO: 499598 - DNA, 33 bp, Homo sapien
ttaccaaaatgtgatacagagaacagagtgagc

SEQ ID NO: 499599 - DNA, 33 bp, Homo sapien
tgggagtaggggactaacaggttgactaaggag

SEQ ID NO: 499600 - DNA, 33 bp, Homo sapien
tgggagtaggggactaccaggttgactaaggag

SEQ ID NO: 499601 - DNA, 33 bp, Homo sapien
ttatattttatttacaaaaagtgcatagttgag

SEQ ID NO: 499602 - DNA, 33 bp, Homo sapien
ttatattttatttacagaaagtgcatagttgag

SEQ ID NO: 499603 - DNA, 33 bp, Homo sapien
tttgactctgccacaacattaggacaagtcaat

SEQ ID NO: 499604 - DNA, 33 bp, Homo sapien
tttgactctgccacaatattaggacaagtcaat

SEQ ID NO: 499605 - DNA, 33 bp, Homo sapien
tttgtcttacatttcccgatacgggttttatat

SEQ ID NO: 499606 - DNA, 33 bp, Homo sapien
tttgtcttacatttcctgatacgggttttatat

SEQ ID NO: 499607 - DNA, 33 bp, Homo sapien
catgcctgcttcttcccagtagtcctttctgaa

SEQ ID NO: 499608 - DNA, 33 bp, Homo sapien
catgcctgcttcttcctagtagtcctttctgaa

SEQ ID NO: 499609 - DNA, 33 bp, Homo sapien
ttcctacagaaattgaactcatttgttgagaaa

SEQ ID NO: 499610 - DNA, 33 bp, Homo sapien
ttcctacagaaattgacctcatttgttgagaaa

SEQ ID NO: 499611 - DNA, 33 bp, Homo sapien
ataagatgatataatacgacctggatgatttag

SEQ ID NO: 499612 - DNA, 33 bp, Homo sapien
ataagatgatataatatgacctggatgatttag

SEQ ID NO: 499613 - DNA, 33 bp, Homo sapien
ttaggagttatcaacccacattcaggggacctg

SEQ ID NO: 499614 - DNA, 33 bp, Homo sapien
ttaggagttatcaacctacattcaggggacctg

SEQ ID NO: 499615 - DNA, 33 bp, Homo sapien
gttactagttgatacaataagtcaatacttgtg

SEQ ID NO: 499616 - DNA, 33 bp, Homo sapien
gttactagttgatacagtaagtcaatacttgtg

SEQ ID NO: 499617 - DNA, 33 bp, Homo sapien
atcactttcctggcataagaatccgaaatagcc

SEQ ID NO: 499618 - DNA, 33 bp, Homo sapien
atcactttcctggcatgagaatccgaaatagcc

SEQ ID NO: 499619 - DNA, 33 bp, Homo sapien
gttttttgtatactaacgtgaggatgttgtctc

SEQ ID NO: 499620 - DNA, 33 bp, Homo sapien
gttttttgtatactaatgtgaggatgttgtctc

SEQ ID NO: 499621 - DNA, 33 bp, Homo sapien
tggaaaatttgtagtccaaccatgtagtaagaa

SEQ ID NO: 499622 - DNA, 33 bp, Homo sapien
tggaaaatttgtagtctaaccatgtagtaagaa

SEQ ID NO: 499623 - DNA, 33 bp, Homo sapien
gttttaaatactgaaagtgtgattaggtgcata

SEQ ID NO: 499624 - DNA, 33 bp, Homo sapien
gttttaaatactgaaattgtgattaggtgcata

SEQ ID NO: 499625 - DNA, 33 bp, Homo sapien
ctccagcaatcatacccccacagaaatatcagc

SEQ ID NO: 499626 - DNA, 33 bp, Homo sapien
ctccagcaatcatacctccacagaaatatcagc

SEQ ID NO: 499627 - DNA, 33 bp, Homo sapien
attgttatgctataaccgggtgctgtgagctgt

SEQ ID NO: 499628 - DNA, 33 bp, Homo sapien
attgttatgctataactgggtgctgtgagctgt

SEQ ID NO: 499629 - DNA, 33 bp, Homo sapien
atttacaggtgaagccaggaatgagaacttcat

SEQ ID NO: 499630 - DNA, 33 bp, Homo sapien
atttacaggtgaagccgggaatgagaacttcat

SEQ ID NO: 499631 - DNA, 33 bp, Homo sapien
gcacaaattacacacaaatactactttacttaa

SEQ ID NO: 499632 - DNA, 33 bp, Homo sapien
gcacaaattacacacagatactactttacttaa

SEQ ID NO: 499633 - DNA, 33 bp, Homo sapien
gcaatgaaaggaattacgtaatgataaggaata

SEQ ID NO: 499634 - DNA, 33 bp, Homo sapien
gcaatgaaaggaattatgtaatgataaggaata

SEQ ID NO: 499635 - DNA, 33 bp, Homo sapien
taattaaagaactgtaacagtatcaagcttttc

SEQ ID NO: 499636 - DNA, 33 bp, Homo sapien
taattaaagaactgtatcagtatcaagcttttc

SEQ ID NO: 499637 - DNA, 33 bp, Homo sapien
ctagctgacaccaacacctttgatgcagttttg

SEQ ID NO: 499638 - DNA, 33 bp, Homo sapien
ctagctgacaccaacatctttgatgcagttttg

SEQ ID NO: 499639 - DNA, 33 bp, Homo sapien
tcatgaccagagattaagtaagatctacatttc

SEQ ID NO: 499640 - DNA, 33 bp, Homo sapien
tcatgaccagagattaggtaagatctacatttc

SEQ ID NO: 499641 - DNA, 33 bp, Homo sapien
tcaaaacttagaatcaaagtccaaagagactat

SEQ ID NO: 499642 - DNA, 33 bp, Homo sapien
tcaaaacttagaatcagagtccaaagagactat

SEQ ID NO: 499643 - DNA, 33 bp, Homo sapien
atattcaaatccaataaagggtggatgtaatgg

SEQ ID NO: 499644 - DNA, 33 bp, Homo sapien
atattcaaatccaatagagggtggatgtaatgg

SEQ ID NO: 499645 - DNA, 33 bp, Homo sapien
tactatttatcggcaagtacagaatattataga

SEQ ID NO: 499646 - DNA, 33 bp, Homo sapien
tactatttatcggcaattacagaatattataga

SEQ ID NO: 499647 - DNA, 33 bp, Homo sapien
acagaagcaaagactacctgcctaaaacagcca

SEQ ID NO: 499648 - DNA, 33 bp, Homo sapien
acagaagcaaagactatctgcctaaaacagcca

SEQ ID NO: 499649 - DNA, 33 bp, Homo sapien
tgaactagtttcccgacaaagtcacaggccact

SEQ ID NO: 499650 - DNA, 33 bp, Homo sapien
tgaactagtttcccgataaagtcacaggccact

SEQ ID NO: 499651 - DNA, 33 bp, Homo sapien
gggtgcagcacaggtcaataaacttctaccggt

SEQ ID NO: 499652 - DNA, 33 bp, Homo sapien
gggtgcagcacaggtcgataaacttctaccggt

SEQ ID NO: 499653 - DNA, 33 bp, Homo sapien
ttggacttaatgtttccacaagccaagggttgc

SEQ ID NO: 499654 - DNA, 33 bp, Homo sapien
ttggacttaatgtttctacaagccaagggttgc

SEQ ID NO: 499655 - DNA, 33 bp, Homo sapien
tccctaaatctttgggaatgcgtcactatagaa

SEQ ID NO: 499656 - DNA, 33 bp, Homo sapien
tccctaaatctttggggatgcgtcactatagaa

SEQ ID NO: 499657 - DNA, 33 bp, Homo sapien
tgcagcactgatcagccgacttttggtaagtgg

SEQ ID NO: 499658 - DNA, 33 bp, Homo sapien
tgcagcactgatcagctgacttttggtaagtgg

SEQ ID NO: 499659 - DNA, 33 bp, Homo sapien
tttcataacttgctctcaaatccagctacttag

SEQ ID NO: 499660 - DNA, 33 bp, Homo sapien
tttcataacttgctcttaaatccagctacttag

SEQ ID NO: 499661 - DNA, 33 bp, Homo sapien
catactttagcaggaaacaatattcaggcatag

SEQ ID NO: 499662 - DNA, 33 bp, Homo sapien
catactttagcaggaagcaatattcaggcatag

SEQ ID NO: 499663 - DNA, 33 bp, Homo sapien
cagagggttttgataaacttgactaatgtagca

SEQ ID NO: 499664 - DNA, 33 bp, Homo sapien
cagagggttttgataagcttgactaatgtagca

SEQ ID NO: 499665 - DNA, 33 bp, Homo sapien
tatttaagaaatctgcaccaacttataaggtca

SEQ ID NO: 499666 - DNA, 33 bp, Homo sapien
tatttaagaaatctgcgccaacttataaggtca

SEQ ID NO: 499667 - DNA, 33 bp, Homo sapien
aagaatatgcaatggtaaaaataaatacattac

SEQ ID NO: 499668 - DNA, 33 bp, Homo sapien
aagaatatgcaatggtgaaaataaatacattac

SEQ ID NO: 499669 - DNA, 33 bp, Homo sapien
attttaaattgacaaaaattgacaaaatttaag

SEQ ID NO: 499670 - DNA, 33 bp, Homo sapien
attttaaattgacaaagattgacaaaatttaag

SEQ ID NO: 499671 - DNA, 33 bp, Homo sapien
gtgatacttgacattaagtaaagattcaagaga

SEQ ID NO: 499672 - DNA, 33 bp, Homo sapien
gtgatacttgacattacgtaaagattcaagaga

SEQ ID NO: 499673 - DNA, 33 bp, Homo sapien
gatcacttaggtattaacatttgtagtgtgctg

SEQ ID NO: 499674 - DNA, 33 bp, Homo sapien
gatcacttaggtattagcatttgtagtgtgctg

SEQ ID NO: 499675 - DNA, 33 bp, Homo sapien
cattagctgatggagcaagtgtcacagggaaac

SEQ ID NO: 499676 - DNA, 33 bp, Homo sapien
cattagctgatggagcgagtgtcacagggaaac

SEQ ID NO: 499677 - DNA, 33 bp, Homo sapien
aaatctgttagagaagccagttgaacgtagggt

SEQ ID NO: 499678 - DNA, 33 bp, Homo sapien
aaatctgttagagaagtcagttgaacgtagggt

SEQ ID NO: 499679 - DNA, 33 bp, Homo sapien
cttgaattcagactcaatcatacttaatgccaa

SEQ ID NO: 499680 - DNA, 33 bp, Homo sapien
cttgaattcagactcagtcatacttaatgccaa

SEQ ID NO: 499681 - DNA, 33 bp, Homo sapien
atcatgtatggggtaacgtagcctagaccattt

SEQ ID NO: 499682 - DNA, 33 bp, Homo sapien
atcatgtatggggtaatgtagcctagaccattt

SEQ ID NO: 499683 - DNA, 33 bp, Homo sapien
tatacctgagctagacaatgaccttagaaagtg

SEQ ID NO: 499684 - DNA, 33 bp, Homo sapien
tatacctgagctagacgatgaccttagaaagtg

SEQ ID NO: 499685 - DNA, 33 bp, Homo sapien
ctgcaattttgagaaccctttgatactcttgtc

SEQ ID NO: 499686 - DNA, 33 bp, Homo sapien
ctgcaattttgagaacgctttgatactcttgtc

SEQ ID NO: 499687 - DNA, 33 bp, Homo sapien
ctaggagtggtaataaatgagagatttacagta

SEQ ID NO: 499688 - DNA, 33 bp, Homo sapien
ctaggagtggtaataagtgagagatttacagta

SEQ ID NO: 499689 - DNA, 33 bp, Homo sapien
tacacacacagtgtataaaaaacttctgataaa

SEQ ID NO: 499690 - DNA, 33 bp, Homo sapien
tacacacacagtgtatgaaaaacttctgataaa

SEQ ID NO: 499691 - DNA, 33 bp, Homo sapien
aatgagataacttgaacatccccaacccaaaga

SEQ ID NO: 499692 - DNA, 33 bp, Homo sapien
aatgagataacttgaatatccccaacccaaaga

SEQ ID NO: 499693 - DNA, 33 bp, Homo sapien
catttttctttgccaaataaggtaacaaattca

SEQ ID NO: 499694 - DNA, 33 bp, Homo sapien
catttttctttgccaagtaaggtaacaaattca

SEQ ID NO: 499695 - DNA, 33 bp, Homo sapien
aatgagatgtacagagaaaatgcagtctccata

SEQ ID NO: 499696 - DNA, 33 bp, Homo sapien
aatgagatgtacagagcaaatgcagtctccata

SEQ ID NO: 499697 - DNA, 33 bp, Homo sapien
tcctgactgagctgagcaggaatgggtgggaag

SEQ ID NO: 499698 - DNA, 33 bp, Homo sapien
tcctgactgagctgagtaggaatgggtgggaag

SEQ ID NO: 499699 - DNA, 33 bp, Homo sapien
tggaggtctgcatgataatacttgtgacattta

SEQ ID NO: 499700 - DNA, 33 bp, Homo sapien
tggaggtctgcatgatgatacttgtgacattta

SEQ ID NO: 499701 - DNA, 33 bp, Homo sapien
aaatcctttacagtgcaccctgaagagcattaa

SEQ ID NO: 499702 - DNA, 33 bp, Homo sapien
aaatcctttacagtgcgccctgaagagcattaa

SEQ ID NO: 499703 - DNA, 33 bp, Homo sapien
gtctacccctctactacgtgtccctgagatgtg

SEQ ID NO: 499704 - DNA, 33 bp, Homo sapien
gtctacccctctactaggtgtccctgagatgtg

SEQ ID NO: 499705 - DNA, 33 bp, Homo sapien
ctcccatccttgtcaacgttcaccacgtgttac

SEQ ID NO: 499706 - DNA, 33 bp, Homo sapien
ctcccatccttgtcaatgttcaccacgtgttac

SEQ ID NO: 499707 - DNA, 33 bp, Homo sapien
atctgaaagctttaagaattttatgagtataat

SEQ ID NO: 499708 - DNA, 33 bp, Homo sapien
atctgaaagctttaaggattttatgagtataat

SEQ ID NO: 499709 - DNA, 33 bp, Homo sapien
taaagaaagattcaacaagtagttaagtcctgc

SEQ ID NO: 499710 - DNA, 33 bp, Homo sapien
taaagaaagattcaactagtagttaagtcctgc

SEQ ID NO: 499711 - DNA, 33 bp, Homo sapien
caaactcttgctaaaagatgtctctcttctaca

SEQ ID NO: 499712 - DNA, 33 bp, Homo sapien
caaactcttgctaaaatatgtctctcttctaca

SEQ ID NO: 499713 - DNA, 33 bp, Homo sapien
aaataaaacatatacaaactgagaaggaagaaa

SEQ ID NO: 499714 - DNA, 33 bp, Homo sapien
aaataaaacatatacagactgagaaggaagaaa

SEQ ID NO: 499715 - DNA, 33 bp, Homo sapien
ttaatgttttaacttacgcttttcatttgttat

SEQ ID NO: 499716 - DNA, 33 bp, Homo sapien
ttaatgttttaacttatgcttttcatttgttat

SEQ ID NO: 499717 - DNA, 33 bp, Homo sapien
attggacaactcaggaacctagccctaccttgt

SEQ ID NO: 499718 - DNA, 33 bp, Homo sapien
attggacaactcaggagcctagccctaccttgt

SEQ ID NO: 499719 - DNA, 33 bp, Homo sapien
gggggaaaagctataccgacttgcatcattccc

SEQ ID NO: 499720 - DNA, 33 bp, Homo sapien
gggggaaaagctatactgacttgcatcattccc

SEQ ID NO: 499721 - DNA, 33 bp, Homo sapien
gtggagtgcaagcgtaagatactatgtttgaga

SEQ ID NO: 499722 - DNA, 33 bp, Homo sapien
gtggagtgcaagcgtaggatactatgtttgaga

SEQ ID NO: 499723 - DNA, 33 bp, Homo sapien
ttacttgttttgtaaccaacagtgaaaggtaga

SEQ ID NO: 499724 - DNA, 33 bp, Homo sapien
ttacttgttttgtaacgaacagtgaaaggtaga

SEQ ID NO: 499725 - DNA, 33 bp, Homo sapien
aaactaaaattggaaaatcgcaaataaaattca

SEQ ID NO: 499726 - DNA, 33 bp, Homo sapien
aaactaaaattggaaactcgcaaataaaattca

SEQ ID NO: 499727 - DNA, 33 bp, Homo sapien
gtgttatgtgaaatacaaccagacaagaatgga

SEQ ID NO: 499728 - DNA, 33 bp, Homo sapien
gtgttatgtgaaatacgaccagacaagaatgga

SEQ ID NO: 499729 - DNA, 33 bp, Homo sapien
cctttcatggataccaatgattcatagacttgg

SEQ ID NO: 499730 - DNA, 33 bp, Homo sapien
cctttcatggataccagtgattcatagacttgg

SEQ ID NO: 499731 - DNA, 33 bp, Homo sapien
actccttctccaagaccacaggtgatcctattt

SEQ ID NO: 499732 - DNA, 33 bp, Homo sapien
actccttctccaagactacaggtgatcctattt

SEQ ID NO: 499733 - DNA, 33 bp, Homo sapien
ggtttttccaggaagacggtgtaatctgcccgt

SEQ ID NO: 499734 - DNA, 33 bp, Homo sapien
ggtttttccaggaagatggtgtaatctgcccgt

SEQ ID NO: 499735 - DNA, 33 bp, Homo sapien
aaataaaaatacctctaaagatcacccagattt

SEQ ID NO: 499736 - DNA, 33 bp, Homo sapien
aaataaaaatacctctgaagatcacccagattt

SEQ ID NO: 499737 - DNA, 33 bp, Homo sapien
caccaggcattacctaccttctccttgagtggt

SEQ ID NO: 499738 - DNA, 33 bp, Homo sapien
caccaggcattacctagcttctccttgagtggt

SEQ ID NO: 499739 - DNA, 33 bp, Homo sapien
tttagattcaacttacagaaaaatgcagaagaa

SEQ ID NO: 499740 - DNA, 33 bp, Homo sapien
tttagattcaacttacggaaaaatgcagaagaa

SEQ ID NO: 499741 - DNA, 33 bp, Homo sapien
ttacaggtatgtgttacgacattccattatgtt

SEQ ID NO: 499742 - DNA, 33 bp, Homo sapien
ttacaggtatgtgttatgacattccattatgtt

SEQ ID NO: 499743 - DNA, 33 bp, Homo sapien
gttgatgcacgagtgaacagttggataatgtaa

SEQ ID NO: 499744 - DNA, 33 bp, Homo sapien
gttgatgcacgagtgaccagttggataatgtaa

SEQ ID NO: 499745 - DNA, 33 bp, Homo sapien
acaataggataaaatacgcctgtgcaatttata

SEQ ID NO: 499746 - DNA, 33 bp, Homo sapien
acaataggataaaatatgcctgtgcaatttata

SEQ ID NO: 499747 - DNA, 33 bp, Homo sapien
ccctttgcagagccaaactttcttacaatgtca

SEQ ID NO: 499748 - DNA, 33 bp, Homo sapien
ccctttgcagagccaagctttcttacaatgtca

SEQ ID NO: 499749 - DNA, 33 bp, Homo sapien
ccacagggtgcttatcgataagttgcaattgta

SEQ ID NO: 499750 - DNA, 33 bp, Homo sapien
ccacagggtgcttatctataagttgcaattgta

SEQ ID NO: 499751 - DNA, 33 bp, Homo sapien
taagtaacaaggagaaaactgttaatcaccaag

SEQ ID NO: 499752 - DNA, 33 bp, Homo sapien
taagtaacaaggagaagactgttaatcaccaag

SEQ ID NO: 499753 - DNA, 33 bp, Homo sapien
tggaggtgataagcaacgaaaaacgtactgtgt

SEQ ID NO: 499754 - DNA, 33 bp, Homo sapien
tggaggtgataagcaatgaaaaacgtactgtgt

SEQ ID NO: 499755 - DNA, 33 bp, Homo sapien
gaaatcaaaggttataaacgcatttttgactca

SEQ ID NO: 499756 - DNA, 33 bp, Homo sapien
gaaatcaaaggttatacacgcatttttgactca

SEQ ID NO: 499757 - DNA, 33 bp, Homo sapien
ttaatctttgaagcgtcaatatatgagtaaaaa

SEQ ID NO: 499758 - DNA, 33 bp, Homo sapien
ttaatctttgaagcgtgaatatatgagtaaaaa

SEQ ID NO: 499759 - DNA, 33 bp, Homo sapien
gttagataatggctaaagctaaaaaatacaaaa

SEQ ID NO: 499760 - DNA, 33 bp, Homo sapien
gttagataatggctaatgctaaaaaatacaaaa

SEQ ID NO: 499761 - DNA, 33 bp, Homo sapien
caacaactgctttctagccttataattttgccc

SEQ ID NO: 499762 - DNA, 33 bp, Homo sapien
caacaactgctttctatccttataattttgccc

SEQ ID NO: 499763 - DNA, 33 bp, Homo sapien
aaataagttgtatggaacaaatctgtctataaa

SEQ ID NO: 499764 - DNA, 33 bp, Homo sapien
aaataagttgtatggagcaaatctgtctataaa

SEQ ID NO: 499765 - DNA, 33 bp, Homo sapien
aaattgctaaccaaatcagctaatgaaaatggt

SEQ ID NO: 499766 - DNA, 33 bp, Homo sapien
aaattgctaaccaaatgagctaatgaaaatggt

SEQ ID NO: 499767 - DNA, 33 bp, Homo sapien
aatttgaagctgtacgcaaattattaataaaat

SEQ ID NO: 499768 - DNA, 33 bp, Homo sapien
aatttgaagctgtacgtaaattattaataaaat

SEQ ID NO: 499769 - DNA, 33 bp, Homo sapien
gttcctgaaggaataaagggaacataaaatatt

SEQ ID NO: 499770 - DNA, 33 bp, Homo sapien
gttcctgaaggaataaggggaacataaaatatt

SEQ ID NO: 499771 - DNA, 33 bp, Homo sapien
aaactagactcctatcgcttgctgtatataaaa

SEQ ID NO: 499772 - DNA, 33 bp, Homo sapien
aaactagactcctatctcttgctgtatataaaa

SEQ ID NO: 499773 - DNA, 33 bp, Homo sapien
tgattctttcaatctccaggaacttagaattat

SEQ ID NO: 499774 - DNA, 33 bp, Homo sapien
tgattctttcaatctctaggaacttagaattat

SEQ ID NO: 499775 - DNA, 33 bp, Homo sapien
gagagtagggaaagcaaggaaagcagatcagtg

SEQ ID NO: 499776 - DNA, 33 bp, Homo sapien
gagagtagggaaagcacggaaagcagatcagtg

SEQ ID NO: 499777 - DNA, 33 bp, Homo sapien
acaagtgcttaagacaatcatattctcctctta

SEQ ID NO: 499778 - DNA, 33 bp, Homo sapien
acaagtgcttaagacagtcatattctcctctta

SEQ ID NO: 499779 - DNA, 33 bp, Homo sapien
ttagtgtaaacattccactattttcacttaaac

SEQ ID NO: 499780 - DNA, 33 bp, Homo sapien
ttagtgtaaacattccgctattttcacttaaac

SEQ ID NO: 499781 - DNA, 33 bp, Homo sapien
ataatttcacaagatcaccaaatttttctactg

SEQ ID NO: 499782 - DNA, 33 bp, Homo sapien
ataatttcacaagatcgccaaatttttctactg

SEQ ID NO: 499783 - DNA, 33 bp, Homo sapien
attgccgtgctgaaaagtgtgtgcacctagctt

SEQ ID NO: 499784 - DNA, 33 bp, Homo sapien
attgccgtgctgaaaattgtgtgcacctagctt

SEQ ID NO: 499785 - DNA, 33 bp, Homo sapien
gcatctgtgaaggataaaattttttgagatctt

SEQ ID NO: 499786 - DNA, 33 bp, Homo sapien
gcatctgtgaaggatacaattttttgagatctt

SEQ ID NO: 499787 - DNA, 33 bp, Homo sapien
ggctcaaatacgactagcatatcaatcagccac

SEQ ID NO: 499788 - DNA, 33 bp, Homo sapien
ggctcaaatacgactatcatatcaatcagccac

SEQ ID NO: 499789 - DNA, 33 bp, Homo sapien
aataatctggcttgtacgctgaaatgtcatatt

SEQ ID NO: 499790 - DNA, 33 bp, Homo sapien
aataatctggcttgtatgctgaaatgtcatatt

SEQ ID NO: 499791 - DNA, 33 bp, Homo sapien
ctgaatggcccgataacagtgacacacaagtat

SEQ ID NO: 499792 - DNA, 33 bp, Homo sapien
ctgaatggcccgataagagtgacacacaagtat

SEQ ID NO: 499793 - DNA, 33 bp, Homo sapien
aatttctaactgtttacgattcacccagaacta

SEQ ID NO: 499794 - DNA, 33 bp, Homo sapien
aatttctaactgtttatgattcacccagaacta

SEQ ID NO: 499795 - DNA, 33 bp, Homo sapien
ttacaggatagtgataaaaagacacgcagctct

SEQ ID NO: 499796 - DNA, 33 bp, Homo sapien
ttacaggatagtgatacaaagacacgcagctct

SEQ ID NO: 499797 - DNA, 33 bp, Homo sapien
cctcagctcctctaatgatatgttacagaagct

SEQ ID NO: 499798 - DNA, 33 bp, Homo sapien
cctcagctcctctaattatatgttacagaagct

SEQ ID NO: 499799 - DNA, 33 bp, Homo sapien
ttgttgatttccttcagggatgattttgtacat

SEQ ID NO: 499800 - DNA, 33 bp, Homo sapien
ttgttgatttccttcatggatgattttgtacat

SEQ ID NO: 499801 - DNA, 33 bp, Homo sapien
ggagagtctggagaaacgtgttcaatctaaact

SEQ ID NO: 499802 - DNA, 33 bp, Homo sapien
ggagagtctggagaaatgtgttcaatctaaact

SEQ ID NO: 499803 - DNA, 33 bp, Homo sapien
aacttacgtggaggagacatttttagcttaagc

SEQ ID NO: 499804 - DNA, 33 bp, Homo sapien
aacttacgtggaggaggcatttttagcttaagc

SEQ ID NO: 499805 - DNA, 33 bp, Homo sapien
ttatgataatgccacccattttgccctaagtag

SEQ ID NO: 499806 - DNA, 33 bp, Homo sapien
ttatgataatgccacctattttgccctaagtag

SEQ ID NO: 499807 - DNA, 33 bp, Homo sapien
taggttcacacctttccagtgctaagtggacag

SEQ ID NO: 499808 - DNA, 33 bp, Homo sapien
taggttcacacctttctagtgctaagtggacag

SEQ ID NO: 499809 - DNA, 33 bp, Homo sapien
tagtatctaacctctaaggctactgtgaaaatt

SEQ ID NO: 499810 - DNA, 33 bp, Homo sapien
tagtatctaacctctagggctactgtgaaaatt

SEQ ID NO: 499811 - DNA, 33 bp, Homo sapien
accccaggatatggaaagatgggcaagagggaa

SEQ ID NO: 499812 - DNA, 33 bp, Homo sapien
accccaggatatggaaggatgggcaagagggaa

SEQ ID NO: 499813 - DNA, 33 bp, Homo sapien
agcaaccaaagagacaaaaattggagtttatga

SEQ ID NO: 499814 - DNA, 33 bp, Homo sapien
agcaaccaaagagacacaaattggagtttatga

SEQ ID NO: 499815 - DNA, 33 bp, Homo sapien
actcaagtaagattaacaaatgtcaaccgggat

SEQ ID NO: 499816 - DNA, 33 bp, Homo sapien
actcaagtaagattaataaatgtcaaccgggat

SEQ ID NO: 499817 - DNA, 33 bp, Homo sapien
atgaatacagaacaacaggactgtcctacagca

SEQ ID NO: 499818 - DNA, 33 bp, Homo sapien
atgaatacagaacaacgggactgtcctacagca

SEQ ID NO: 499819 - DNA, 33 bp, Homo sapien
agtgtagaatgttcaaagggcatagtttccttc

SEQ ID NO: 499820 - DNA, 33 bp, Homo sapien
agtgtagaatgttcaaggggcatagtttccttc

SEQ ID NO: 499821 - DNA, 33 bp, Homo sapien
gttttattgctcaaccgagtattttagaataag

SEQ ID NO: 499822 - DNA, 33 bp, Homo sapien
gttttattgctcaacctagtattttagaataag

SEQ ID NO: 499823 - DNA, 33 bp, Homo sapien
aaagccacttgcatccagcaaacatgcagaagt

SEQ ID NO: 499824 - DNA, 33 bp, Homo sapien
aaagccacttgcatccggcaaacatgcagaagt

SEQ ID NO: 499825 - DNA, 33 bp, Homo sapien
attctacatatgtacacggttttctatagtcct

SEQ ID NO: 499826 - DNA, 33 bp, Homo sapien
attctacatatgtacatggttttctatagtcct

SEQ ID NO: 499827 - DNA, 33 bp, Homo sapien
gctacttctctatctacctagtaacagccaagt

SEQ ID NO: 499828 - DNA, 33 bp, Homo sapien
gctacttctctatctatctagtaacagccaagt

SEQ ID NO: 499829 - DNA, 33 bp, Homo sapien
accaagtctagggacactcagttgcattccaga

SEQ ID NO: 499830 - DNA, 33 bp, Homo sapien
accaagtctagggacattcagttgcattccaga

SEQ ID NO: 499831 - DNA, 33 bp, Homo sapien
ccaataatgtgtttccgatcagacagaacacat

SEQ ID NO: 499832 - DNA, 33 bp, Homo sapien
ccaataatgtgtttcctatcagacagaacacat

SEQ ID NO: 499833 - DNA, 33 bp, Homo sapien
aaggcagtgaaatctaccaacatgcatttgtta

SEQ ID NO: 499834 - DNA, 33 bp, Homo sapien
aaggcagtgaaatctagcaacatgcatttgtta

SEQ ID NO: 499835 - DNA, 33 bp, Homo sapien
tccagaaatggtttcaatcacatatattggcag

SEQ ID NO: 499836 - DNA, 33 bp, Homo sapien
tccagaaatggtttcattcacatatattggcag

SEQ ID NO: 499837 - DNA, 33 bp, Homo sapien
ttatttggtagatctacactgaatgctttctag

SEQ ID NO: 499838 - DNA, 33 bp, Homo sapien
ttatttggtagatctatactgaatgctttctag

SEQ ID NO: 499839 - DNA, 33 bp, Homo sapien
catgatacatctgataactttaaatatcttctc

SEQ ID NO: 499840 - DNA, 33 bp, Homo sapien
catgatacatctgatagctttaaatatcttctc

SEQ ID NO: 499841 - DNA, 33 bp, Homo sapien
accatggattcaatgacgtttagggaactgtgg

SEQ ID NO: 499842 - DNA, 33 bp, Homo sapien
accatggattcaatgatgtttagggaactgtgg

SEQ ID NO: 499843 - DNA, 33 bp, Homo sapien
aaaaataaccattttcactcttgctttatttga

SEQ ID NO: 499844 - DNA, 33 bp, Homo sapien
aaaaataaccattttcgctcttgctttatttga

SEQ ID NO: 499845 - DNA, 33 bp, Homo sapien
aaaaaatccaagagtcaattcgtaagtcaaagt

SEQ ID NO: 499846 - DNA, 33 bp, Homo sapien
aaaaaatccaagagtcgattcgtaagtcaaagt

SEQ ID NO: 499847 - DNA, 33 bp, Homo sapien
gctatcgggtagcagacgttttcttcaaaagtc

SEQ ID NO: 499848 - DNA, 33 bp, Homo sapien
gctatcgggtagcagatgttttcttcaaaagtc

SEQ ID NO: 499849 - DNA, 33 bp, Homo sapien
gtaaatttccattcagaatttaatttcagtcac

SEQ ID NO: 499850 - DNA, 33 bp, Homo sapien
gtaaatttccattcaggatttaatttcagtcac

SEQ ID NO: 499851 - DNA, 33 bp, Homo sapien
agaaaaaaaggagttcaacttcagacagtgaga

SEQ ID NO: 499852 - DNA, 33 bp, Homo sapien
agaaaaaaaggagttcgacttcagacagtgaga

SEQ ID NO: 499853 - DNA, 33 bp, Homo sapien
gaaaccatataatatccaacatggagtcaactt

SEQ ID NO: 499854 - DNA, 33 bp, Homo sapien
gaaaccatataatatctaacatggagtcaactt

SEQ ID NO: 499855 - DNA, 33 bp, Homo sapien
gttacaaatgtaagacactactctagatatttt

SEQ ID NO: 499856 - DNA, 33 bp, Homo sapien
gttacaaatgtaagacgctactctagatatttt

SEQ ID NO: 499857 - DNA, 33 bp, Homo sapien
atctctttctccagtgaaaaaaaaatacacaca

SEQ ID NO: 499858 - DNA, 33 bp, Homo sapien
atctctttctccagtggaaaaaaaatacacaca

SEQ ID NO: 499859 - DNA, 33 bp, Homo sapien
ttctttccctatgtagccccccaagaagctggg

SEQ ID NO: 499860 - DNA, 33 bp, Homo sapien
ttctttccctatgtagtcccccaagaagctggg

SEQ ID NO: 499861 - DNA, 33 bp, Homo sapien
gtgtctccttcaggtaaggtgatgttatcttta

SEQ ID NO: 499862 - DNA, 33 bp, Homo sapien
gtgtctccttcaggtagggtgatgttatcttta

SEQ ID NO: 499863 - DNA, 33 bp, Homo sapien
tcaggacagttcaaataatcttttaactctatc

SEQ ID NO: 499864 - DNA, 33 bp, Homo sapien
tcaggacagttcaaatcatcttttaactctatc

SEQ ID NO: 499865 - DNA, 33 bp, Homo sapien
ggcagatcttttagaacatgagatggaagtaac

SEQ ID NO: 499866 - DNA, 33 bp, Homo sapien
ggcagatcttttagaagatgagatggaagtaac

SEQ ID NO: 499867 - DNA, 33 bp, Homo sapien
atgttttctgtgactaaaagcaccataaactgg

SEQ ID NO: 499868 - DNA, 33 bp, Homo sapien
atgttttctgtgactagaagcaccataaactgg

SEQ ID NO: 499869 - DNA, 33 bp, Homo sapien
tcaaagcttacgttaaagtttacagtatatctg

SEQ ID NO: 499870 - DNA, 33 bp, Homo sapien
tcaaagcttacgttaatgtttacagtatatctg

SEQ ID NO: 499871 - DNA, 33 bp, Homo sapien
aaaagcctaaaaatgaagcagacataggttaga

SEQ ID NO: 499872 - DNA, 33 bp, Homo sapien
aaaagcctaaaaatgaggcagacataggttaga

SEQ ID NO: 499873 - DNA, 33 bp, Homo sapien
tattgtaaatctatcaatcagaatctccaacat

SEQ ID NO: 499874 - DNA, 33 bp, Homo sapien
tattgtaaatctatcagtcagaatctccaacat

SEQ ID NO: 499875 - DNA, 33 bp, Homo sapien
tttcactgggatccacaaactctgatgccagtt

SEQ ID NO: 499876 - DNA, 33 bp, Homo sapien
tttcactgggatccacgaactctgatgccagtt

SEQ ID NO: 499877 - DNA, 33 bp, Homo sapien
attagatcacgactcaacatttaatcagaatag

SEQ ID NO: 499878 - DNA, 33 bp, Homo sapien
attagatcacgactcatcatttaatcagaatag

SEQ ID NO: 499879 - DNA, 33 bp, Homo sapien
ggagagttctatataacggtgaattcagagatt

SEQ ID NO: 499880 - DNA, 33 bp, Homo sapien
ggagagttctatataatggtgaattcagagatt

SEQ ID NO: 499881 - DNA, 33 bp, Homo sapien
cctatgcaaaatctcacgttcaattctaatccc

SEQ ID NO: 499882 - DNA, 33 bp, Homo sapien
cctatgcaaaatctcatgttcaattctaatccc

SEQ ID NO: 499883 - DNA, 33 bp, Homo sapien
cgcttatatatttgaactggcatttccaaagat

SEQ ID NO: 499884 - DNA, 33 bp, Homo sapien
cgcttatatatttgaattggcatttccaaagat

SEQ ID NO: 499885 - DNA, 33 bp, Homo sapien
ctatgttgctaatggacagtgtttggatgcatt

SEQ ID NO: 499886 - DNA, 33 bp, Homo sapien
ctatgttgctaatggagagtgtttggatgcatt

SEQ ID NO: 499887 - DNA, 33 bp, Homo sapien
ctgattatagtgtcacagagactgcaatattct

SEQ ID NO: 499888 - DNA, 33 bp, Homo sapien
ctgattatagtgtcacggagactgcaatattct

SEQ ID NO: 499889 - DNA, 33 bp, Homo sapien
ccacatgatttgcatacactgtaagacattttc

SEQ ID NO: 499890 - DNA, 33 bp, Homo sapien
ccacatgatttgcatatactgtaagacattttc

SEQ ID NO: 499891 - DNA, 33 bp, Homo sapien
accatttgaaagtggaagttagttttggtgtta

SEQ ID NO: 499892 - DNA, 33 bp, Homo sapien
accatttgaaagtggaggttagttttggtgtta

SEQ ID NO: 499893 - DNA, 33 bp, Homo sapien
taaatcaaacaaaactcaaatcgataaatttgg

SEQ ID NO: 499894 - DNA, 33 bp, Homo sapien
taaatcaaacaaaactgaaatcgataaatttgg

SEQ ID NO: 499895 - DNA, 33 bp, Homo sapien
actagtccaaaaatgacaataaatgtacagaca

SEQ ID NO: 499896 - DNA, 33 bp, Homo sapien
actagtccaaaaatgagaataaatgtacagaca

SEQ ID NO: 499897 - DNA, 33 bp, Homo sapien
ttctcactactgttctcaagaaagtctcaaaaa

SEQ ID NO: 499898 - DNA, 33 bp, Homo sapien
ttctcactactgttcttaagaaagtctcaaaaa

SEQ ID NO: 499899 - DNA, 33 bp, Homo sapien
cttggcaataggtaacaaagttcaggggtatta

SEQ ID NO: 499900 - DNA, 33 bp, Homo sapien
cttggcaataggtaacgaagttcaggggtatta

SEQ ID NO: 499901 - DNA, 33 bp, Homo sapien
taaagttgattatatgcaagattttgtgtaaaa

SEQ ID NO: 499902 - DNA, 33 bp, Homo sapien
taaagttgattatatggaagattttgtgtaaaa

SEQ ID NO: 499903 - DNA, 33 bp, Homo sapien
tattactgtcagtcttaaaaaaacagactactt

SEQ ID NO: 499904 - DNA, 33 bp, Homo sapien
tattactgtcagtcttgaaaaaacagactactt

SEQ ID NO: 499905 - DNA, 33 bp, Homo sapien
aaaaagtcacaaagaacaggttattgttatgac

SEQ ID NO: 499906 - DNA, 33 bp, Homo sapien
aaaaagtcacaaagaataggttattgttatgac

SEQ ID NO: 499907 - DNA, 33 bp, Homo sapien
gacaccattacacatacaatactagctattaaa

SEQ ID NO: 499908 - DNA, 33 bp, Homo sapien
gacaccattacacatagaatactagctattaaa

SEQ ID NO: 499909 - DNA, 33 bp, Homo sapien
tattgactttcaagcaaaattataagattccaa

SEQ ID NO: 499910 - DNA, 33 bp, Homo sapien
tattgactttcaagcagaattataagattccaa

SEQ ID NO: 499911 - DNA, 33 bp, Homo sapien
gaccactttagtctgaatataatccataaaatc

SEQ ID NO: 499912 - DNA, 33 bp, Homo sapien
gaccactttagtctgactataatccataaaatc

SEQ ID NO: 499913 - DNA, 33 bp, Homo sapien
ccatgtctataacacaatgaatgaatcattacc

SEQ ID NO: 499914 - DNA, 33 bp, Homo sapien
ccatgtctataacacagtgaatgaatcattacc

SEQ ID NO: 499915 - DNA, 33 bp, Homo sapien
acttactgcgtggatacaacggtaaaaaggtaa

SEQ ID NO: 499916 - DNA, 33 bp, Homo sapien
acttactgcgtggatataacggtaaaaaggtaa

SEQ ID NO: 499917 - DNA, 33 bp, Homo sapien
tgtcatgacattttcccaagctcctattgtctg

SEQ ID NO: 499918 - DNA, 33 bp, Homo sapien
tgtcatgacattttcctaagctcctattgtctg

SEQ ID NO: 499919 - DNA, 33 bp, Homo sapien
cagactctgaaggtgacgctttttctacttctg

SEQ ID NO: 499920 - DNA, 33 bp, Homo sapien
cagactctgaaggtgatgctttttctacttctg

SEQ ID NO: 499921 - DNA, 33 bp, Homo sapien
cacacaggcacccacaaacattgacgggataca

SEQ ID NO: 499922 - DNA, 33 bp, Homo sapien
cacacaggcacccacacacattgacgggataca

SEQ ID NO: 499923 - DNA, 33 bp, Homo sapien
caccttaggctcagaaaacttcatggatgtcta

SEQ ID NO: 499924 - DNA, 33 bp, Homo sapien
caccttaggctcagaacacttcatggatgtcta

SEQ ID NO: 499925 - DNA, 33 bp, Homo sapien
aagtcaagtggtaacacgaaaagtatcatttgc

SEQ ID NO: 499926 - DNA, 33 bp, Homo sapien
aagtcaagtggtaacatgaaaagtatcatttgc

SEQ ID NO: 499927 - DNA, 33 bp, Homo sapien
aggctgtaatcttgaaacaaccacaatattctt

SEQ ID NO: 499928 - DNA, 33 bp, Homo sapien
aggctgtaatcttgaagcaaccacaatattctt

SEQ ID NO: 499929 - DNA, 33 bp, Homo sapien
gttttaacaaaagacaaagccctggtacctact

SEQ ID NO: 499930 - DNA, 33 bp, Homo sapien
gttttaacaaaagacatagccctggtacctact

SEQ ID NO: 499931 - DNA, 33 bp, Homo sapien
ttacgcactgattaaaatgacctgttagaaact

SEQ ID NO: 499932 - DNA, 33 bp, Homo sapien
ttacgcactgattaaagtgacctgttagaaact

SEQ ID NO: 499933 - DNA, 33 bp, Homo sapien
tgtaatagacaatagaaatcctacaatcatcta

SEQ ID NO: 499934 - DNA, 33 bp, Homo sapien
tgtaatagacaatagagatcctacaatcatcta

SEQ ID NO: 499935 - DNA, 33 bp, Homo sapien
tattcccccaatgatactaaagctttgacaagg

SEQ ID NO: 499936 - DNA, 33 bp, Homo sapien
tattcccccaatgatattaaagctttgacaagg

SEQ ID NO: 499937 - DNA, 33 bp, Homo sapien
aattgaaaatttcaaaggtctggagagtaaaca

SEQ ID NO: 499938 - DNA, 33 bp, Homo sapien
aattgaaaatttcaaatgtctggagagtaaaca

SEQ ID NO: 499939 - DNA, 33 bp, Homo sapien
acttacaaaacatcaccaggagctttggttcac

SEQ ID NO: 499940 - DNA, 33 bp, Homo sapien
acttacaaaacatcactaggagctttggttcac

SEQ ID NO: 499941 - DNA, 33 bp, Homo sapien
tttatctgctacagcaccttatttacattacga

SEQ ID NO: 499942 - DNA, 33 bp, Homo sapien
tttatctgctacagcatcttatttacattacga

SEQ ID NO: 499943 - DNA, 33 bp, Homo sapien
tcctagtaggtcttcaaatgttgatctagactt

SEQ ID NO: 499944 - DNA, 33 bp, Homo sapien
tcctagtaggtcttcagatgttgatctagactt

SEQ ID NO: 499945 - DNA, 33 bp, Homo sapien
gaggtccattgaatggccaataaatgcatgact

SEQ ID NO: 499946 - DNA, 33 bp, Homo sapien
gaggtccattgaatggtcaataaatgcatgact

SEQ ID NO: 499947 - DNA, 33 bp, Homo sapien
cctgagtctgtcattacctaataggtgtggaaa

SEQ ID NO: 499948 - DNA, 33 bp, Homo sapien
cctgagtctgtcattatctaataggtgtggaaa

SEQ ID NO: 499949 - DNA, 33 bp, Homo sapien
ctcagctatctgttcccctttagctccagctga

SEQ ID NO: 499950 - DNA, 33 bp, Homo sapien
ctcagctatctgttcctctttagctccagctga

SEQ ID NO: 499951 - DNA, 33 bp, Homo sapien
tttatatgatccttaaagtaaaagcagaattga

SEQ ID NO: 499952 - DNA, 33 bp, Homo sapien
tttatatgatccttaaggtaaaagcagaattga

SEQ ID NO: 499953 - DNA, 33 bp, Homo sapien
ttactaattgcataaactctctatcccagtttc

SEQ ID NO: 499954 - DNA, 33 bp, Homo sapien
ttactaattgcataaattctctatcccagtttc

SEQ ID NO: 499955 - DNA, 33 bp, Homo sapien
aattcaccactttgttaaaattccaaatcttca

SEQ ID NO: 499956 - DNA, 33 bp, Homo sapien
aattcaccactttgttcaaattccaaatcttca

SEQ ID NO: 499957 - DNA, 33 bp, Homo sapien
ctacataggatgctgacggcattaaaaatgagg

SEQ ID NO: 499958 - DNA, 33 bp, Homo sapien
ctacataggatgctgatggcattaaaaatgagg

SEQ ID NO: 499959 - DNA, 33 bp, Homo sapien
tctcttatccagtcaaattaagcaaaggctact

SEQ ID NO: 499960 - DNA, 33 bp, Homo sapien
tctcttatccagtcaacttaagcaaaggctact

SEQ ID NO: 499961 - DNA, 33 bp, Homo sapien
ggggaacaagagtataactttggagaggtatga

SEQ ID NO: 499962 - DNA, 33 bp, Homo sapien
ggggaacaagagtatagctttggagaggtatga

SEQ ID NO: 499963 - DNA, 33 bp, Homo sapien
aaaactagttctgatacggaaacaatctcaact

SEQ ID NO: 499964 - DNA, 33 bp, Homo sapien
aaaactagttctgatatggaaacaatctcaact

SEQ ID NO: 499965 - DNA, 33 bp, Homo sapien
aatatggtaattaaagcaaacatcgttgaaaat

SEQ ID NO: 499966 - DNA, 33 bp, Homo sapien
aatatggtaattaaaggaaacatcgttgaaaat

SEQ ID NO: 499967 - DNA, 33 bp, Homo sapien
agaatcacttgatggaagaaacaacatcgttca

SEQ ID NO: 499968 - DNA, 33 bp, Homo sapien
agaatcacttgatggatgaaacaacatcgttca

SEQ ID NO: 499969 - DNA, 33 bp, Homo sapien
cagtgtaactatcacaacttattaattaattag

SEQ ID NO: 499970 - DNA, 33 bp, Homo sapien
cagtgtaactatcacagcttattaattaattag

SEQ ID NO: 499971 - DNA, 33 bp, Homo sapien
cacttaatgctgttaccattatgacccagtaca

SEQ ID NO: 499972 - DNA, 33 bp, Homo sapien
cacttaatgctgttactattatgacccagtaca

SEQ ID NO: 499973 - DNA, 33 bp, Homo sapien
ccaactcaagtgacaacagctccatttgacccc

SEQ ID NO: 499974 - DNA, 33 bp, Homo sapien
ccaactcaagtgacaatagctccatttgacccc

SEQ ID NO: 499975 - DNA, 33 bp, Homo sapien
agaatggaactgagaaagggtaaatattgtgat

SEQ ID NO: 499976 - DNA, 33 bp, Homo sapien
agaatggaactgagaatgggtaaatattgtgat

SEQ ID NO: 499977 - DNA, 33 bp, Homo sapien
accctcatgacctaataatgtcccaaagtccaa

SEQ ID NO: 499978 - DNA, 33 bp, Homo sapien
accctcatgacctaatcatgtcccaaagtccaa

SEQ ID NO: 499979 - DNA, 33 bp, Homo sapien
aaatgtaaaactctcaaatagattgaatggaat

SEQ ID NO: 499980 - DNA, 33 bp, Homo sapien
aaatgtaaaactctcagatagattgaatggaat

SEQ ID NO: 499981 - DNA, 33 bp, Homo sapien
ttcttttagagtaggaaacattctgcctttttt

SEQ ID NO: 499982 - DNA, 33 bp, Homo sapien
ttcttttagagtaggagacattctgcctttttt

SEQ ID NO: 499983 - DNA, 33 bp, Homo sapien
taatggagtatgtctacggagattgtctctacc

SEQ ID NO: 499984 - DNA, 33 bp, Homo sapien
taatggagtatgtctatggagattgtctctacc

SEQ ID NO: 499985 - DNA, 33 bp, Homo sapien
caaattgccgagtagaactacttgaaaataact

SEQ ID NO: 499986 - DNA, 33 bp, Homo sapien
caaattgccgagtagacctacttgaaaataact

SEQ ID NO: 499987 - DNA, 33 bp, Homo sapien
agttgcttacaccatacagtatttgaaagatat

SEQ ID NO: 499988 - DNA, 33 bp, Homo sapien
agttgcttacaccatatagtatttgaaagatat

SEQ ID NO: 499989 - DNA, 33 bp, Homo sapien
aaattactttaatatcggatagcacattattac

SEQ ID NO: 499990 - DNA, 33 bp, Homo sapien
aaattactttaatatctgatagcacattattac

SEQ ID NO: 499991 - DNA, 33 bp, Homo sapien
gctgggccaggttagaaagagattagaaaaaca

SEQ ID NO: 499992 - DNA, 33 bp, Homo sapien
gctgggccaggttagagagagattagaaaaaca

SEQ ID NO: 499993 - DNA, 33 bp, Homo sapien
tggcagatgactatgacaaagactgataagggc

SEQ ID NO: 499994 - DNA, 33 bp, Homo sapien
tggcagatgactatgataaagactgataagggc

SEQ ID NO: 499995 - DNA, 33 bp, Homo sapien
tacttgcataaaaacaatacagcttaaattttc

SEQ ID NO: 499996 - DNA, 33 bp, Homo sapien
tacttgcataaaaacagtacagcttaaattttc

SEQ ID NO: 499997 - DNA, 33 bp, Homo sapien
gttgctgagcaaaatgccaaatacctttttctt

SEQ ID NO: 499998 - DNA, 33 bp, Homo sapien
gttgctgagcaaaatgtcaaatacctttttctt

SEQ ID NO: 499999 - DNA, 33 bp, Homo sapien
tgtgatttctgtctcaataggttcaagatctga

SEQ ID NO: 500000 - DNA, 33 bp, Homo sapien
tgtgatttctgtctcagtaggttcaagatctga

SEQ ID NO: 500001 - DNA, 33 bp, Homo sapien
atttagaaaacagaaaatgtaacaggaaatttg

SEQ ID NO: 500002 - DNA, 33 bp, Homo sapien
atttagaaaacagaaactgtaacaggaaatttg

SEQ ID NO: 500003 - DNA, 33 bp, Homo sapien
ttttagtaataaataactgagtttgtcacattt

SEQ ID NO: 500004 - DNA, 33 bp, Homo sapien
ttttagtaataaataattgagtttgtcacattt

SEQ ID NO: 500005 - DNA, 33 bp, Homo sapien
cattcttgcacatctaacaggtagtcaagaaaa

SEQ ID NO: 500006 - DNA, 33 bp, Homo sapien
cattcttgcacatctagcaggtagtcaagaaaa

SEQ ID NO: 500007 - DNA, 33 bp, Homo sapien
ttatacatttattgcacctctatttacaatagc

SEQ ID NO: 500008 - DNA, 33 bp, Homo sapien
ttatacatttattgcagctctatttacaatagc

SEQ ID NO: 500009 - DNA, 33 bp, Homo sapien
ctagcatctcaattgccatgtaaatgtggctta

SEQ ID NO: 500010 - DNA, 33 bp, Homo sapien
ctagcatctcaattgctatgtaaatgtggctta

SEQ ID NO: 500011 - DNA, 33 bp, Homo sapien
cagaggcctcttaaagaatcttctcataactgg

SEQ ID NO: 500012 - DNA, 33 bp, Homo sapien
cagaggcctcttaaaggatcttctcataactgg

SEQ ID NO: 500013 - DNA, 33 bp, Homo sapien
tgcttcctgaatgaccaatacagattatgactt

SEQ ID NO: 500014 - DNA, 33 bp, Homo sapien
tgcttcctgaatgacccatacagattatgactt

SEQ ID NO: 500015 - DNA, 33 bp, Homo sapien
atttgctcagacaaacccaacttttcacttgcc

SEQ ID NO: 500016 - DNA, 33 bp, Homo sapien
atttgctcagacaaacgcaacttttcacttgcc

SEQ ID NO: 500017 - DNA, 33 bp, Homo sapien
tcttttgtcactcatacgttcgatatcatatct

SEQ ID NO: 500018 - DNA, 33 bp, Homo sapien
tcttttgtcactcatatgttcgatatcatatct

SEQ ID NO: 500019 - DNA, 33 bp, Homo sapien
ataaataatgagagaaacattgctaaaattgta

SEQ ID NO: 500020 - DNA, 33 bp, Homo sapien
ataaataatgagagaaccattgctaaaattgta

SEQ ID NO: 500021 - DNA, 33 bp, Homo sapien
gctatttatttgaagacgatgaaatgcttaaga

SEQ ID NO: 500022 - DNA, 33 bp, Homo sapien
gctatttatttgaagatgatgaaatgcttaaga

SEQ ID NO: 500023 - DNA, 33 bp, Homo sapien
ccatttgtactacacaagcttttaaatgtttct

SEQ ID NO: 500024 - DNA, 33 bp, Homo sapien
ccatttgtactacacatgcttttaaatgtttct

SEQ ID NO: 500025 - DNA, 33 bp, Homo sapien
ttaaaaatcatgggaaatatcacctaatacaat

SEQ ID NO: 500026 - DNA, 33 bp, Homo sapien
ttaaaaatcatgggaactatcacctaatacaat

SEQ ID NO: 500027 - DNA, 33 bp, Homo sapien
ataatgcctagagcacactttcattatctctct

SEQ ID NO: 500028 - DNA, 33 bp, Homo sapien
ataatgcctagagcacgctttcattatctctct

SEQ ID NO: 500029 - DNA, 33 bp, Homo sapien
tgacagaatatagtgactatttacacagagttg

SEQ ID NO: 500030 - DNA, 33 bp, Homo sapien
tgacagaatatagtgattatttacacagagttg

SEQ ID NO: 500031 - DNA, 33 bp, Homo sapien
gactcttttcatcgacaatggtaattgccctgg

SEQ ID NO: 500032 - DNA, 33 bp, Homo sapien
gactcttttcatcgaccatggtaattgccctgg

SEQ ID NO: 500033 - DNA, 33 bp, Homo sapien
cctcctagcaaaggccccttggtaatgattttc

SEQ ID NO: 500034 - DNA, 33 bp, Homo sapien
cctcctagcaaaggccgcttggtaatgattttc

SEQ ID NO: 500035 - DNA, 33 bp, Homo sapien
aacctaaccccataatcacatttttggatccaa

SEQ ID NO: 500036 - DNA, 33 bp, Homo sapien
aacctaaccccataatgacatttttggatccaa

SEQ ID NO: 500037 - DNA, 33 bp, Homo sapien
ttgagactgccttcatcaactgtatgttttgtg

SEQ ID NO: 500038 - DNA, 33 bp, Homo sapien
ttgagactgccttcatgaactgtatgttttgtg

SEQ ID NO: 500039 - DNA, 33 bp, Homo sapien
ctttgtcatttcactcactatccatttattata

SEQ ID NO: 500040 - DNA, 33 bp, Homo sapien
ctttgtcatttcactcgctatccatttattata

SEQ ID NO: 500041 - DNA, 33 bp, Homo sapien
tttggccagcactcctcaatattgatgaaacac

SEQ ID NO: 500042 - DNA, 33 bp, Homo sapien
tttggccagcactcctgaatattgatgaaacac

SEQ ID NO: 500043 - DNA, 33 bp, Homo sapien
cattgatcatgctttcccggttccctacttcct

SEQ ID NO: 500044 - DNA, 33 bp, Homo sapien
cattgatcatgctttcgcggttccctacttcct

SEQ ID NO: 500045 - DNA, 33 bp, Homo sapien
tttagttctgaaacataaccattgtaaagtagc

SEQ ID NO: 500046 - DNA, 33 bp, Homo sapien
tttagttctgaaacatcaccattgtaaagtagc

SEQ ID NO: 500047 - DNA, 33 bp, Homo sapien
aatactacagcaagagaaaaagaagttggaata

SEQ ID NO: 500048 - DNA, 33 bp, Homo sapien
aatactacagcaagaggaaaagaagttggaata

SEQ ID NO: 500049 - DNA, 33 bp, Homo sapien
aatctaaatgtccagacgaaaattgtatttttg

SEQ ID NO: 500050 - DNA, 33 bp, Homo sapien
aatctaaatgtccagatgaaaattgtatttttg

SEQ ID NO: 500051 - DNA, 33 bp, Homo sapien
ttgttgacctaattaacgacgtcagtggaggtt

SEQ ID NO: 500052 - DNA, 33 bp, Homo sapien
ttgttgacctaattaatgacgtcagtggaggtt

SEQ ID NO: 500053 - DNA, 33 bp, Homo sapien
aaaataaaaagctgccaaattttgtattcacct

SEQ ID NO: 500054 - DNA, 33 bp, Homo sapien
aaaataaaaagctgccgaattttgtattcacct

SEQ ID NO: 500055 - DNA, 33 bp, Homo sapien
aattagaattgcaaaacagaaaaatagctaatg

SEQ ID NO: 500056 - DNA, 33 bp, Homo sapien
aattagaattgcaaaatagaaaaatagctaatg

SEQ ID NO: 500057 - DNA, 33 bp, Homo sapien
tttgtgaatttagtcaaggtatcaatcaatcaa

SEQ ID NO: 500058 - DNA, 33 bp, Homo sapien
tttgtgaatttagtcagggtatcaatcaatcaa

SEQ ID NO: 500059 - DNA, 33 bp, Homo sapien
catacataaatacagacagtagtaagcatcttt

SEQ ID NO: 500060 - DNA, 33 bp, Homo sapien
catacataaatacagagagtagtaagcatcttt

SEQ ID NO: 500061 - DNA, 33 bp, Homo sapien
ctaatttcacaggttacctttttatcatgacct

SEQ ID NO: 500062 - DNA, 33 bp, Homo sapien
ctaatttcacaggttagctttttatcatgacct

SEQ ID NO: 500063 - DNA, 33 bp, Homo sapien
gtatttaagaaaataacgcatttcgaatctaca

SEQ ID NO: 500064 - DNA, 33 bp, Homo sapien
gtatttaagaaaataatgcatttcgaatctaca

SEQ ID NO: 500065 - DNA, 33 bp, Homo sapien
aggccactggaaagaaaaagctggagcatggca

SEQ ID NO: 500066 - DNA, 33 bp, Homo sapien
aggccactggaaagaagaagctggagcatggca

SEQ ID NO: 500067 - DNA, 33 bp, Homo sapien
tgagaaagtccaacaactggggaaatccaagta

SEQ ID NO: 500068 - DNA, 33 bp, Homo sapien
tgagaaagtccaacaattggggaaatccaagta

SEQ ID NO: 500069 - DNA, 33 bp, Homo sapien
ctcctatcctaaccagaagataagatgataaga

SEQ ID NO: 500070 - DNA, 33 bp, Homo sapien
ctcctatcctaaccagcagataagatgataaga

SEQ ID NO: 500071 - DNA, 33 bp, Homo sapien
gttgtcagtgtgagacagaattgataaaaatcc

SEQ ID NO: 500072 - DNA, 33 bp, Homo sapien
gttgtcagtgtgagacggaattgataaaaatcc

SEQ ID NO: 500073 - DNA, 33 bp, Homo sapien
cttttgtgaaagctataaagtgagatatccatc

SEQ ID NO: 500074 - DNA, 33 bp, Homo sapien
cttttgtgaaagctatgaagtgagatatccatc

SEQ ID NO: 500075 - DNA, 33 bp, Homo sapien
cgcaacactctgacaccaattccatggtcacat

SEQ ID NO: 500076 - DNA, 33 bp, Homo sapien
cgcaacactctgacactaattccatggtcacat

SEQ ID NO: 500077 - DNA, 33 bp, Homo sapien
gtaatagggaagcataagcataaattacaatgc

SEQ ID NO: 500078 - DNA, 33 bp, Homo sapien
gtaatagggaagcataggcataaattacaatgc

SEQ ID NO: 500079 - DNA, 33 bp, Homo sapien
ggtgatggatgatcgaggacagctaactagata

SEQ ID NO: 500080 - DNA, 33 bp, Homo sapien
ggtgatggatgatcgatgacagctaactagata

SEQ ID NO: 500081 - DNA, 33 bp, Homo sapien
cagatcagaaaataaaccatattgtgtgtaaga

SEQ ID NO: 500082 - DNA, 33 bp, Homo sapien
cagatcagaaaataaatcatattgtgtgtaaga

SEQ ID NO: 500083 - DNA, 33 bp, Homo sapien
atattcttagatactaacattgaaataaacaca

SEQ ID NO: 500084 - DNA, 33 bp, Homo sapien
atattcttagatactatcattgaaataaacaca

SEQ ID NO: 500085 - DNA, 33 bp, Homo sapien
aaaggatctgctaaaaatccgcagccaggcatg

SEQ ID NO: 500086 - DNA, 33 bp, Homo sapien
aaaggatctgctaaaagtccgcagccaggcatg

SEQ ID NO: 500087 - DNA, 33 bp, Homo sapien
aacccttgcaggaagaaattctaacattatact

SEQ ID NO: 500088 - DNA, 33 bp, Homo sapien
aacccttgcaggaagagattctaacattatact

SEQ ID NO: 500089 - DNA, 33 bp, Homo sapien
atctttaaagaaagccaatttttacagagtagt

SEQ ID NO: 500090 - DNA, 33 bp, Homo sapien
atctttaaagaaagccgatttttacagagtagt

SEQ ID NO: 500091 - DNA, 33 bp, Homo sapien
agctgtatcaaatcagcattgtttgcttcctca

SEQ ID NO: 500092 - DNA, 33 bp, Homo sapien
agctgtatcaaatcaggattgtttgcttcctca

SEQ ID NO: 500093 - DNA, 33 bp, Homo sapien
taaaaccaacaaggcacgtgaagatcctcttca

SEQ ID NO: 500094 - DNA, 33 bp, Homo sapien
taaaaccaacaaggcatgtgaagatcctcttca

SEQ ID NO: 500095 - DNA, 33 bp, Homo sapien
agtagaaactcaattaataagtcagccttatgc

SEQ ID NO: 500096 - DNA, 33 bp, Homo sapien
agtagaaactcaattagtaagtcagccttatgc

SEQ ID NO: 500097 - DNA, 33 bp, Homo sapien
caactgggaaattataaaggcactgcatggata

SEQ ID NO: 500098 - DNA, 33 bp, Homo sapien
caactgggaaattatacaggcactgcatggata

SEQ ID NO: 500099 - DNA, 33 bp, Homo sapien
gttatcgtacagatcaataggtctcggaagcta

SEQ ID NO: 500100 - DNA, 33 bp, Homo sapien
gttatcgtacagatcagtaggtctcggaagcta

SEQ ID NO: 500101 - DNA, 33 bp, Homo sapien
tctctttttctgtatccatctagttcccctaaa

SEQ ID NO: 500102 - DNA, 33 bp, Homo sapien
tctctttttctgtatctatctagttcccctaaa

SEQ ID NO: 500103 - DNA, 33 bp, Homo sapien
cattttggtttacaagcccatctagaaagttgc

SEQ ID NO: 500104 - DNA, 33 bp, Homo sapien
cattttggtttacaagtccatctagaaagttgc

SEQ ID NO: 500105 - DNA, 33 bp, Homo sapien
tattctcatgatgtaactagcaccttaggacat

SEQ ID NO: 500106 - DNA, 33 bp, Homo sapien
tattctcatgatgtaattagcaccttaggacat

SEQ ID NO: 500107 - DNA, 33 bp, Homo sapien
tgaatcaatagagtcaccagcattcacagtgtc

SEQ ID NO: 500108 - DNA, 33 bp, Homo sapien
tgaatcaatagagtcatcagcattcacagtgtc

SEQ ID NO: 500109 - DNA, 33 bp, Homo sapien
ttgcaattttaatctgcagttcccagagacaaa

SEQ ID NO: 500110 - DNA, 33 bp, Homo sapien
ttgcaattttaatctgtagttcccagagacaaa

SEQ ID NO: 500111 - DNA, 33 bp, Homo sapien
tgttcattagctggtacatcataagttccttag

SEQ ID NO: 500112 - DNA, 33 bp, Homo sapien
tgttcattagctggtatatcataagttccttag

SEQ ID NO: 500113 - DNA, 33 bp, Homo sapien
atttaattttcacgaaagcatattctgtattcc

SEQ ID NO: 500114 - DNA, 33 bp, Homo sapien
atttaattttcacgaaggcatattctgtattcc

SEQ ID NO: 500115 - DNA, 33 bp, Homo sapien
gagacatataaaaaaaacaagaatgtgtgatcc

SEQ ID NO: 500116 - DNA, 33 bp, Homo sapien
gagacatataaaaaaaccaagaatgtgtgatcc

SEQ ID NO: 500117 - DNA, 33 bp, Homo sapien
tgcaaatcaaaaacaaagtgaatcactgtggac

SEQ ID NO: 500118 - DNA, 33 bp, Homo sapien
tgcaaatcaaaaacaaggtgaatcactgtggac

SEQ ID NO: 500119 - DNA, 33 bp, Homo sapien
ggatctatagattgaacgggcttagctgggcaa

SEQ ID NO: 500120 - DNA, 33 bp, Homo sapien
ggatctatagattgaatgggcttagctgggcaa

SEQ ID NO: 500121 - DNA, 33 bp, Homo sapien
cagaggaagtcatagagaaataaatttttctgc

SEQ ID NO: 500122 - DNA, 33 bp, Homo sapien
cagaggaagtcatagataaataaatttttctgc

SEQ ID NO: 500123 - DNA, 33 bp, Homo sapien
tattgagtaattaaaaagttgttagggtgattg

SEQ ID NO: 500124 - DNA, 33 bp, Homo sapien
tattgagtaattaaaatgttgttagggtgattg

SEQ ID NO: 500125 - DNA, 33 bp, Homo sapien
gtgaactaaacaaactcaagaaacatcttacat

SEQ ID NO: 500126 - DNA, 33 bp, Homo sapien
gtgaactaaacaaactgaagaaacatcttacat

SEQ ID NO: 500127 - DNA, 33 bp, Homo sapien
ccagccattagtgatgaattctctgtcccctcc

SEQ ID NO: 500128 - DNA, 33 bp, Homo sapien
ccagccattagtgatgcattctctgtcccctcc

SEQ ID NO: 500129 - DNA, 33 bp, Homo sapien
ttgcgaataagcaaaagattgggctattggtga

SEQ ID NO: 500130 - DNA, 33 bp, Homo sapien
ttgcgaataagcaaaatattgggctattggtga

SEQ ID NO: 500131 - DNA, 33 bp, Homo sapien
ccaaacgaaatctgaccgaaggaactgaaaagc

SEQ ID NO: 500132 - DNA, 33 bp, Homo sapien
ccaaacgaaatctgactgaaggaactgaaaagc

SEQ ID NO: 500133 - DNA, 33 bp, Homo sapien
gaaaaaaattgtagacgaccagatgttatggat

SEQ ID NO: 500134 - DNA, 33 bp, Homo sapien
gaaaaaaattgtagactaccagatgttatggat

SEQ ID NO: 500135 - DNA, 33 bp, Homo sapien
tttttatgagttaaaaacctgggaatgagtggt

SEQ ID NO: 500136 - DNA, 33 bp, Homo sapien
tttttatgagttaaaagcctgggaatgagtggt

SEQ ID NO: 500137 - DNA, 33 bp, Homo sapien
gtcctggggttaataaaaacatacagcttctgt

SEQ ID NO: 500138 - DNA, 33 bp, Homo sapien
gtcctggggttaataataacatacagcttctgt

SEQ ID NO: 500139 - DNA, 33 bp, Homo sapien
tataatgtgggagttacgttccaagactcagat

SEQ ID NO: 500140 - DNA, 33 bp, Homo sapien
tataatgtgggagttatgttccaagactcagat

SEQ ID NO: 500141 - DNA, 33 bp, Homo sapien
tttctgaaacaaggtccaatgaagcagcaatag

SEQ ID NO: 500142 - DNA, 33 bp, Homo sapien
tttctgaaacaaggtctaatgaagcagcaatag

SEQ ID NO: 500143 - DNA, 33 bp, Homo sapien
agtctccctctaagaaagctctcttcgtaatcc

SEQ ID NO: 500144 - DNA, 33 bp, Homo sapien
agtctccctctaagaaggctctcttcgtaatcc

SEQ ID NO: 500145 - DNA, 33 bp, Homo sapien
agaaatagactttttagccagtatcttgcctat

SEQ ID NO: 500146 - DNA, 33 bp, Homo sapien
agaaatagactttttatccagtatcttgcctat

SEQ ID NO: 500147 - DNA, 33 bp, Homo sapien
gaatttctcttagctgaaaacacttggtcccta

SEQ ID NO: 500148 - DNA, 33 bp, Homo sapien
gaatttctcttagctgcaaacacttggtcccta

SEQ ID NO: 500149 - DNA, 33 bp, Homo sapien
ggtgaacatttcaaaactcatctgagaaaataa

SEQ ID NO: 500150 - DNA, 33 bp, Homo sapien
ggtgaacatttcaaaagtcatctgagaaaataa

SEQ ID NO: 500151 - DNA, 33 bp, Homo sapien
aaatgccccactgagaatattagcctctgaatg

SEQ ID NO: 500152 - DNA, 33 bp, Homo sapien
aaatgccccactgagagtattagcctctgaatg

SEQ ID NO: 500153 - DNA, 33 bp, Homo sapien
gaaatcttgaacagtaaattctggttattttac

SEQ ID NO: 500154 - DNA, 33 bp, Homo sapien
gaaatcttgaacagtagattctggttattttac

SEQ ID NO: 500155 - DNA, 33 bp, Homo sapien
tttgccattttcaaaactgtattaagtgtaggc

SEQ ID NO: 500156 - DNA, 33 bp, Homo sapien
tttgccattttcaaaattgtattaagtgtaggc

SEQ ID NO: 500157 - DNA, 33 bp, Homo sapien
tatccttagtaaaccaatgcaggaacagaaaac

SEQ ID NO: 500158 - DNA, 33 bp, Homo sapien
tatccttagtaaaccagtgcaggaacagaaaac

SEQ ID NO: 500159 - DNA, 33 bp, Homo sapien
gaatgggtgagttgaactggcaaagagcaaccc

SEQ ID NO: 500160 - DNA, 33 bp, Homo sapien
gaatgggtgagttgaattggcaaagagcaaccc

SEQ ID NO: 500161 - DNA, 33 bp, Homo sapien
tccaaataacaagcaaccggaagatgaactctc

SEQ ID NO: 500162 - DNA, 33 bp, Homo sapien
tccaaataacaagcaatcggaagatgaactctc

SEQ ID NO: 500163 - DNA, 33 bp, Homo sapien
aggacggagctctggaataaggaccatcagaat

SEQ ID NO: 500164 - DNA, 33 bp, Homo sapien
aggacggagctctggagtaaggaccatcagaat

SEQ ID NO: 500165 - DNA, 33 bp, Homo sapien
cggagactgtattccagtagcttagtggtcagc

SEQ ID NO: 500166 - DNA, 33 bp, Homo sapien
cggagactgtattccattagcttagtggtcagc

SEQ ID NO: 500167 - DNA, 33 bp, Homo sapien
catgcagcttagccaaaaaggagaaaaatgtag

SEQ ID NO: 500168 - DNA, 33 bp, Homo sapien
catgcagcttagccaagaaggagaaaaatgtag

SEQ ID NO: 500169 - DNA, 33 bp, Homo sapien
ttgctattaatgcaaactaatgcactattggag

SEQ ID NO: 500170 - DNA, 33 bp, Homo sapien
ttgctattaatgcaaagtaatgcactattggag

SEQ ID NO: 500171 - DNA, 33 bp, Homo sapien
gcaacttcagagttcacgacaaaaggggctttc

SEQ ID NO: 500172 - DNA, 33 bp, Homo sapien
gcaacttcagagttcatgacaaaaggggctttc

SEQ ID NO: 500173 - DNA, 33 bp, Homo sapien
ttgcttctacgtaaaacatgcttaaatcataat

SEQ ID NO: 500174 - DNA, 33 bp, Homo sapien
ttgcttctacgtaaaatatgcttaaatcataat

SEQ ID NO: 500175 - DNA, 33 bp, Homo sapien
gtgtttactcatctaactgctaattgtattgag

SEQ ID NO: 500176 - DNA, 33 bp, Homo sapien
gtgtttactcatctaattgctaattgtattgag

SEQ ID NO: 500177 - DNA, 33 bp, Homo sapien
ctcacccagcgttcaccgaattggactggagta

SEQ ID NO: 500178 - DNA, 33 bp, Homo sapien
ctcacccagcgttcactgaattggactggagta

SEQ ID NO: 500179 - DNA, 33 bp, Homo sapien
gtcagggtagccaagacggttgctggtcgccat

SEQ ID NO: 500180 - DNA, 33 bp, Homo sapien
gtcagggtagccaagatggttgctggtcgccat

SEQ ID NO: 500181 - DNA, 33 bp, Homo sapien
atcagtgttgagtgaccctacccattaataaat

SEQ ID NO: 500182 - DNA, 33 bp, Homo sapien
atcagtgttgagtgactctacccattaataaat

SEQ ID NO: 500183 - DNA, 33 bp, Homo sapien
tgaaactgatgggagcaagcattgatttagtta

SEQ ID NO: 500184 - DNA, 33 bp, Homo sapien
tgaaactgatgggagcgagcattgatttagtta

SEQ ID NO: 500185 - DNA, 33 bp, Homo sapien
ggaccttttctggaccagccctcaagaaaatga

SEQ ID NO: 500186 - DNA, 33 bp, Homo sapien
ggaccttttctggaccggccctcaagaaaatga

SEQ ID NO: 500187 - DNA, 33 bp, Homo sapien
agaggtgtcgcaaaaacggtcataagtatctaa

SEQ ID NO: 500188 - DNA, 33 bp, Homo sapien
agaggtgtcgcaaaaatggtcataagtatctaa

SEQ ID NO: 500189 - DNA, 33 bp, Homo sapien
actaaaatatatgtcacgtatcaaagtataaaa

SEQ ID NO: 500190 - DNA, 33 bp, Homo sapien
actaaaatatatgtcaggtatcaaagtataaaa

SEQ ID NO: 500191 - DNA, 33 bp, Homo sapien
gaaattgcgaaaaacactctacttctaacaaca

SEQ ID NO: 500192 - DNA, 33 bp, Homo sapien
gaaattgcgaaaaacattctacttctaacaaca

SEQ ID NO: 500193 - DNA, 33 bp, Homo sapien
caacatggatatgccaaatactatgctagtaca

SEQ ID NO: 500194 - DNA, 33 bp, Homo sapien
caacatggatatgccagatactatgctagtaca

SEQ ID NO: 500195 - DNA, 33 bp, Homo sapien
ttatgttatatcaaaaatacaaagcaggccctt

SEQ ID NO: 500196 - DNA, 33 bp, Homo sapien
ttatgttatatcaaaagtacaaagcaggccctt

SEQ ID NO: 500197 - DNA, 33 bp, Homo sapien
tacctaagaatgaagcacagcattctctttaaa

SEQ ID NO: 500198 - DNA, 33 bp, Homo sapien
tacctaagaatgaagctcagcattctctttaaa

SEQ ID NO: 500199 - DNA, 33 bp, Homo sapien
taattataagcaaaggaagaactatctatcatc

SEQ ID NO: 500200 - DNA, 33 bp, Homo sapien
taattataagcaaagggagaactatctatcatc

SEQ ID NO: 500201 - DNA, 33 bp, Homo sapien
cttcaccaactcttcactccattttgtaatcca

SEQ ID NO: 500202 - DNA, 33 bp, Homo sapien
cttcaccaactcttcattccattttgtaatcca

SEQ ID NO: 500203 - DNA, 33 bp, Homo sapien
aaatagagaatactccaaacagcccataatgtt

SEQ ID NO: 500204 - DNA, 33 bp, Homo sapien
aaatagagaatactccgaacagcccataatgtt

SEQ ID NO: 500205 - DNA, 33 bp, Homo sapien
tctgaatgatacatagactaacctgtagccagc

SEQ ID NO: 500206 - DNA, 33 bp, Homo sapien
tctgaatgatacataggctaacctgtagccagc

SEQ ID NO: 500207 - DNA, 33 bp, Homo sapien
aaaagaattgaagctacctatattacgtcctat

SEQ ID NO: 500208 - DNA, 33 bp, Homo sapien
aaaagaattgaagctatctatattacgtcctat

SEQ ID NO: 500209 - DNA, 33 bp, Homo sapien
agttcacattgtcatcaaaaatttagatatttt

SEQ ID NO: 500210 - DNA, 33 bp, Homo sapien
agttcacattgtcatccaaaatttagatatttt

SEQ ID NO: 500211 - DNA, 33 bp, Homo sapien
aataaaactattttgaataagttcacattgtca

SEQ ID NO: 500212 - DNA, 33 bp, Homo sapien
aataaaactattttgagtaagttcacattgtca

SEQ ID NO: 500213 - DNA, 33 bp, Homo sapien
gtctagtctgctttcaataagctcagaacattt

SEQ ID NO: 500214 - DNA, 33 bp, Homo sapien
gtctagtctgctttcagtaagctcagaacattt

SEQ ID NO: 500215 - DNA, 33 bp, Homo sapien
cttggatcagtctgtacgcttggcagtgacaat

SEQ ID NO: 500216 - DNA, 33 bp, Homo sapien
cttggatcagtctgtatgcttggcagtgacaat

SEQ ID NO: 500217 - DNA, 33 bp, Homo sapien
agccaacaagagaaaccgaagaagaaatcaacc

SEQ ID NO: 500218 - DNA, 33 bp, Homo sapien
agccaacaagagaaactgaagaagaaatcaacc

SEQ ID NO: 500219 - DNA, 33 bp, Homo sapien
aagtataagacattgccgaaagaaattaaaacc

SEQ ID NO: 500220 - DNA, 33 bp, Homo sapien
aagtataagacattgctgaaagaaattaaaacc

SEQ ID NO: 500221 - DNA, 33 bp, Homo sapien
tggagaggacagactacagggcaagccaattta

SEQ ID NO: 500222 - DNA, 33 bp, Homo sapien
tggagaggacagactatagggcaagccaattta

SEQ ID NO: 500223 - DNA, 33 bp, Homo sapien
taaagctggcttcctaacactcaaattagagac

SEQ ID NO: 500224 - DNA, 33 bp, Homo sapien
taaagctggcttcctaccactcaaattagagac

SEQ ID NO: 500225 - DNA, 33 bp, Homo sapien
caagctgttgctcctacaaaattgaatctctgg

SEQ ID NO: 500226 - DNA, 33 bp, Homo sapien
caagctgttgctcctataaaattgaatctctgg

SEQ ID NO: 500227 - DNA, 33 bp, Homo sapien
gtgttagctgcgatgccatgcaactaatccatg

SEQ ID NO: 500228 - DNA, 33 bp, Homo sapien
gtgttagctgcgatgctatgcaactaatccatg

SEQ ID NO: 500229 - DNA, 33 bp, Homo sapien
tgctctcacttcagataagctggctgcaaattt

SEQ ID NO: 500230 - DNA, 33 bp, Homo sapien
tgctctcacttcagatcagctggctgcaaattt

SEQ ID NO: 500231 - DNA, 33 bp, Homo sapien
cctctatgctgccctgaagaaactctcacatgg

SEQ ID NO: 500232 - DNA, 33 bp, Homo sapien
cctctatgctgccctggagaaactctcacatgg

SEQ ID NO: 500233 - DNA, 33 bp, Homo sapien
agtgagcatcacagacaaaggatgtcctaaaac

SEQ ID NO: 500234 - DNA, 33 bp, Homo sapien
agtgagcatcacagacgaaggatgtcctaaaac

SEQ ID NO: 500235 - DNA, 33 bp, Homo sapien
aagattacagattccaactccataaatgtactt

SEQ ID NO: 500236 - DNA, 33 bp, Homo sapien
aagattacagattccagctccataaatgtactt

SEQ ID NO: 500237 - DNA, 33 bp, Homo sapien
tggacaaaagagagagaataggcgtgtatcata

SEQ ID NO: 500238 - DNA, 33 bp, Homo sapien
tggacaaaagagagagtataggcgtgtatcata

SEQ ID NO: 500239 - DNA, 33 bp, Homo sapien
actgcaatgcagtttcaacaaagacctcagaca

SEQ ID NO: 500240 - DNA, 33 bp, Homo sapien
actgcaatgcagtttcgacaaagacctcagaca

SEQ ID NO: 500241 - DNA, 33 bp, Homo sapien
gaagaagggctttgtaacctgaatcaacaaatc

SEQ ID NO: 500242 - DNA, 33 bp, Homo sapien
gaagaagggctttgtaccctgaatcaacaaatc

SEQ ID NO: 500243 - DNA, 33 bp, Homo sapien
tgagcttgaccttgaaacctgagaaaatttcag

SEQ ID NO: 500244 - DNA, 33 bp, Homo sapien
tgagcttgaccttgaagcctgagaaaatttcag

SEQ ID NO: 500245 - DNA, 33 bp, Homo sapien
accagagtatttaataaagcagatgggttcctg

SEQ ID NO: 500246 - DNA, 33 bp, Homo sapien
accagagtatttaatagagcagatgggttcctg

SEQ ID NO: 500247 - DNA, 33 bp, Homo sapien
ttcctttggatagatacctgtaatggaattgtt

SEQ ID NO: 500248 - DNA, 33 bp, Homo sapien
ttcctttggatagatatctgtaatggaattgtt

SEQ ID NO: 500249 - DNA, 33 bp, Homo sapien
cttttgcctcactgcaagatttttgtccctaaa

SEQ ID NO: 500250 - DNA, 33 bp, Homo sapien
cttttgcctcactgcaggatttttgtccctaaa

SEQ ID NO: 500251 - DNA, 33 bp, Homo sapien
gaaggaagagcaagaaatattaacaaaaccaac

SEQ ID NO: 500252 - DNA, 33 bp, Homo sapien
gaaggaagagcaagaagtattaacaaaaccaac

SEQ ID NO: 500253 - DNA, 33 bp, Homo sapien
atggggagagctgttacagtattgaaaacattc

SEQ ID NO: 500254 - DNA, 33 bp, Homo sapien
atggggagagctgttatagtattgaaaacattc

SEQ ID NO: 500255 - DNA, 33 bp, Homo sapien
gaatttcagaacctgacacaaaggaggagagag

SEQ ID NO: 500256 - DNA, 33 bp, Homo sapien
gaatttcagaacctgatacaaaggaggagagag

SEQ ID NO: 500257 - DNA, 33 bp, Homo sapien
atccccattttactgaagaagataccaaagcta

SEQ ID NO: 500258 - DNA, 33 bp, Homo sapien
atccccattttactgatgaagataccaaagcta

SEQ ID NO: 500259 - DNA, 33 bp, Homo sapien
tagagaacctggcaaactgaccaagcaccacta

SEQ ID NO: 500260 - DNA, 33 bp, Homo sapien
tagagaacctggcaaattgaccaagcaccacta

SEQ ID NO: 500261 - DNA, 33 bp, Homo sapien
aaatacatgaaatagcagaagtcatttgttact

SEQ ID NO: 500262 - DNA, 33 bp, Homo sapien
aaatacatgaaatagccgaagtcatttgttact

SEQ ID NO: 500263 - DNA, 33 bp, Homo sapien
ctcttttccccttagacacaatgttccagccat

SEQ ID NO: 500264 - DNA, 33 bp, Homo sapien
ctcttttccccttagatacaatgttccagccat

SEQ ID NO: 500265 - DNA, 33 bp, Homo sapien
ggagacactggatggaataggggaagccaaatt

SEQ ID NO: 500266 - DNA, 33 bp, Homo sapien
ggagacactggatggactaggggaagccaaatt

SEQ ID NO: 500267 - DNA, 33 bp, Homo sapien
gcatttgataaaacacaagaggaagctgcaaaa

SEQ ID NO: 500268 - DNA, 33 bp, Homo sapien
gcatttgataaaacacgagaggaagctgcaaaa

SEQ ID NO: 500269 - DNA, 33 bp, Homo sapien
tgtttctgaaattccaatatcctttgcatctaa

SEQ ID NO: 500270 - DNA, 33 bp, Homo sapien
tgtttctgaaattccattatcctttgcatctaa

SEQ ID NO: 500271 - DNA, 33 bp, Homo sapien
gcccagactgctatcacggagtttccccctgtt

SEQ ID NO: 500272 - DNA, 33 bp, Homo sapien
gcccagactgctatcatggagtttccccctgtt

SEQ ID NO: 500273 - DNA, 33 bp, Homo sapien
tggaagcctaaaaaaacctaaccaatatggttt

SEQ ID NO: 500274 - DNA, 33 bp, Homo sapien
tggaagcctaaaaaaatctaaccaatatggttt

SEQ ID NO: 500275 - DNA, 33 bp, Homo sapien
aattactcagtttttaacacatacctggcactg

SEQ ID NO: 500276 - DNA, 33 bp, Homo sapien
aattactcagtttttagcacatacctggcactg

SEQ ID NO: 500277 - DNA, 33 bp, Homo sapien
taaactatgaaatgagaaggcatcaaataaaac

SEQ ID NO: 500278 - DNA, 33 bp, Homo sapien
taaactatgaaatgaggaggcatcaaataaaac

SEQ ID NO: 500279 - DNA, 33 bp, Homo sapien
ggaggttaagtaatacaatcaaggtcatattgg

SEQ ID NO: 500280 - DNA, 33 bp, Homo sapien
ggaggttaagtaatactatcaaggtcatattgg

SEQ ID NO: 500281 - DNA, 33 bp, Homo sapien
aggatatacacagaaacgtacaccaaaagtatg

SEQ ID NO: 500282 - DNA, 33 bp, Homo sapien
aggatatacacagaaatgtacaccaaaagtatg

SEQ ID NO: 500283 - DNA, 33 bp, Homo sapien
atttgtgaaactgtaaaacaatatccttaatgg

SEQ ID NO: 500284 - DNA, 33 bp, Homo sapien
atttgtgaaactgtaagacaatatccttaatgg

SEQ ID NO: 500285 - DNA, 33 bp, Homo sapien
ataaatacaattctacaggaaactaaagaaaca

SEQ ID NO: 500286 - DNA, 33 bp, Homo sapien
ataaatacaattctacgggaaactaaagaaaca

SEQ ID NO: 500287 - DNA, 33 bp, Homo sapien
tcctctatacgcagaaaattggtttcaggaccc

SEQ ID NO: 500288 - DNA, 33 bp, Homo sapien
tcctctatacgcagaagattggtttcaggaccc

SEQ ID NO: 500289 - DNA, 33 bp, Homo sapien
tcctattagttacaacaaagagtcctagatcat

SEQ ID NO: 500290 - DNA, 33 bp, Homo sapien
tcctattagttacaacgaagagtcctagatcat

SEQ ID NO: 500291 - DNA, 33 bp, Homo sapien
aaacttagcatggtaacggttggtcctcaacat

SEQ ID NO: 500292 - DNA, 33 bp, Homo sapien
aaacttagcatggtaatggttggtcctcaacat

SEQ ID NO: 500293 - DNA, 33 bp, Homo sapien
actcaaatagaaaggacgtcatgaagtcatttt

SEQ ID NO: 500294 - DNA, 33 bp, Homo sapien
actcaaatagaaaggatgtcatgaagtcatttt

SEQ ID NO: 500295 - DNA, 33 bp, Homo sapien
aacacttaaaaaagaaattcataaccattagca

SEQ ID NO: 500296 - DNA, 33 bp, Homo sapien
aacacttaaaaaagaagttcataaccattagca

SEQ ID NO: 500297 - DNA, 33 bp, Homo sapien
gataaatagctttacacgacaaatgaacaggaa

SEQ ID NO: 500298 - DNA, 33 bp, Homo sapien
gataaatagctttacatgacaaatgaacaggaa

SEQ ID NO: 500299 - DNA, 33 bp, Homo sapien
tagagcagagggactgaaacagtcataggaaat

SEQ ID NO: 500300 - DNA, 33 bp, Homo sapien
tagagcagagggactggaacagtcataggaaat

SEQ ID NO: 500301 - DNA, 33 bp, Homo sapien
atgctaatggatttcacgtagactaaggaaaac

SEQ ID NO: 500302 - DNA, 33 bp, Homo sapien
atgctaatggatttcatgtagactaaggaaaac

SEQ ID NO: 500303 - DNA, 33 bp, Homo sapien
tgagacacttcatgcaaagccctccgtacagtg

SEQ ID NO: 500304 - DNA, 33 bp, Homo sapien
tgagacacttcatgcagagccctccgtacagtg

SEQ ID NO: 500305 - DNA, 33 bp, Homo sapien
ctttcgctatacacccaataattttcctttgtt

SEQ ID NO: 500306 - DNA, 33 bp, Homo sapien
ctttcgctatacacccgataattttcctttgtt

SEQ ID NO: 500307 - DNA, 33 bp, Homo sapien
taagaatttggggagacgtaaatattcagcctg

SEQ ID NO: 500308 - DNA, 33 bp, Homo sapien
taagaatttggggagatgtaaatattcagcctg

SEQ ID NO: 500309 - DNA, 33 bp, Homo sapien
atatatctgtctttaacagcaactctcatttta

SEQ ID NO: 500310 - DNA, 33 bp, Homo sapien
atatatctgtctttaagagcaactctcatttta

SEQ ID NO: 500311 - DNA, 33 bp, Homo sapien
tccccgtttgataaagacctttactatgtatta

SEQ ID NO: 500312 - DNA, 33 bp, Homo sapien
tccccgtttgataaagccctttactatgtatta

SEQ ID NO: 500313 - DNA, 33 bp, Homo sapien
ttgatgctgacttgaagaattttacatttacta

SEQ ID NO: 500314 - DNA, 33 bp, Homo sapien
ttgatgctgacttgaataattttacatttacta

SEQ ID NO: 500315 - DNA, 33 bp, Homo sapien
ttgcccagctcttgcacgacaatattccttaag

SEQ ID NO: 500316 - DNA, 33 bp, Homo sapien
ttgcccagctcttgcatgacaatattccttaag

SEQ ID NO: 500317 - DNA, 33 bp, Homo sapien
ccacagagacttgccacgaagttgctagactca

SEQ ID NO: 500318 - DNA, 33 bp, Homo sapien
ccacagagacttgccatgaagttgctagactca

SEQ ID NO: 500319 - DNA, 33 bp, Homo sapien
ttgacagtttacttccaaagtgattatcacact

SEQ ID NO: 500320 - DNA, 33 bp, Homo sapien
ttgacagtttacttccgaagtgattatcacact

SEQ ID NO: 500321 - DNA, 33 bp, Homo sapien
tgttttggtagtaaccactgcttctacagcata

SEQ ID NO: 500322 - DNA, 33 bp, Homo sapien
tgttttggtagtaaccgctgcttctacagcata

SEQ ID NO: 500323 - DNA, 33 bp, Homo sapien
aagagacttccaaatccaagataactcaattat

SEQ ID NO: 500324 - DNA, 33 bp, Homo sapien
aagagacttccaaatctaagataactcaattat

SEQ ID NO: 500325 - DNA, 33 bp, Homo sapien
tcttgtactatggttgcaatactaggagaatgc

SEQ ID NO: 500326 - DNA, 33 bp, Homo sapien
tcttgtactatggttgtaatactaggagaatgc

SEQ ID NO: 500327 - DNA, 33 bp, Homo sapien
gccccaggaactggcacggcctgtagtcaacag

SEQ ID NO: 500328 - DNA, 33 bp, Homo sapien
gccccaggaactggcatggcctgtagtcaacag

SEQ ID NO: 500329 - DNA, 33 bp, Homo sapien
gataatgagaggaatcaatgaaggatagtggga

SEQ ID NO: 500330 - DNA, 33 bp, Homo sapien
gataatgagaggaatcgatgaaggatagtggga

SEQ ID NO: 500331 - DNA, 33 bp, Homo sapien
aataatttatggatgcagattgttcagttcaga

SEQ ID NO: 500332 - DNA, 33 bp, Homo sapien
aataatttatggatgccgattgttcagttcaga

SEQ ID NO: 500333 - DNA, 33 bp, Homo sapien
cagttttttctgcccacgctactggacttggaa

SEQ ID NO: 500334 - DNA, 33 bp, Homo sapien
cagttttttctgcccatgctactggacttggaa

SEQ ID NO: 500335 - DNA, 33 bp, Homo sapien
actgacaactttcaaaaggtgaaattccatggt

SEQ ID NO: 500336 - DNA, 33 bp, Homo sapien
actgacaactttcaaagggtgaaattccatggt

SEQ ID NO: 500337 - DNA, 33 bp, Homo sapien
catttctgcctgggagcaggacttcttgtggcc

SEQ ID NO: 500338 - DNA, 33 bp, Homo sapien
catttctgcctgggagtaggacttcttgtggcc

SEQ ID NO: 500339 - DNA, 33 bp, Homo sapien
acagcaataaagcaaacagatcctccagtgctt

SEQ ID NO: 500340 - DNA, 33 bp, Homo sapien
acagcaataaagcaaagagatcctccagtgctt

SEQ ID NO: 500341 - DNA, 33 bp, Homo sapien
cacagccgccagactaagttgcaagagggaaat

SEQ ID NO: 500342 - DNA, 33 bp, Homo sapien
cacagccgccagactaggttgcaagagggaaat

SEQ ID NO: 500343 - DNA, 33 bp, Homo sapien
gtttatttccagctaacattgtttgaactcagg

SEQ ID NO: 500344 - DNA, 33 bp, Homo sapien
gtttatttccagctaatattgtttgaactcagg

SEQ ID NO: 500345 - DNA, 33 bp, Homo sapien
tccatattacaaacaaacgttacctgttctgag

SEQ ID NO: 500346 - DNA, 33 bp, Homo sapien
tccatattacaaacaagcgttacctgttctgag

SEQ ID NO: 500347 - DNA, 33 bp, Homo sapien
actagagtagtccctaaaacaggaatagacaga

SEQ ID NO: 500348 - DNA, 33 bp, Homo sapien
actagagtagtccctacaacaggaatagacaga

SEQ ID NO: 500349 - DNA, 33 bp, Homo sapien
tcttcttgaatttgaactctggtgatagtcaac

SEQ ID NO: 500350 - DNA, 33 bp, Homo sapien
tcttcttgaatttgaattctggtgatagtcaac

SEQ ID NO: 500351 - DNA, 33 bp, Homo sapien
ttctctcctcctttgaaagtaaggaaatatagt

SEQ ID NO: 500352 - DNA, 33 bp, Homo sapien
ttctctcctcctttgatagtaaggaaatatagt

SEQ ID NO: 500353 - DNA, 33 bp, Homo sapien
ctgtttttggctgttgcaaaaataaatggaaat

SEQ ID NO: 500354 - DNA, 33 bp, Homo sapien
ctgtttttggctgttgtaaaaataaatggaaat

SEQ ID NO: 500355 - DNA, 33 bp, Homo sapien
acagacaggaccaccccacataatgagtactct

SEQ ID NO: 500356 - DNA, 33 bp, Homo sapien
acagacaggaccaccctacataatgagtactct

SEQ ID NO: 500357 - DNA, 33 bp, Homo sapien
gaaaattaatcattgaaaacagttacagaaaag

SEQ ID NO: 500358 - DNA, 33 bp, Homo sapien
gaaaattaatcattgagaacagttacagaaaag

SEQ ID NO: 500359 - DNA, 33 bp, Homo sapien
cctggtgtctctggtaacctggataggctcaaa

SEQ ID NO: 500360 - DNA, 33 bp, Homo sapien
cctggtgtctctggtaccctggataggctcaaa

SEQ ID NO: 500361 - DNA, 33 bp, Homo sapien
atactatccagcagtgaaaaggaatgcactata

SEQ ID NO: 500362 - DNA, 33 bp, Homo sapien
atactatccagcagtgtaaaggaatgcactata

SEQ ID NO: 500363 - DNA, 33 bp, Homo sapien
aaacactctgaaataccctgtgttggtgaggat

SEQ ID NO: 500364 - DNA, 33 bp, Homo sapien
aaacactctgaaatacgctgtgttggtgaggat

SEQ ID NO: 500365 - DNA, 33 bp, Homo sapien
tttaaaatgtctcaaacttctttgtcaaattat

SEQ ID NO: 500366 - DNA, 33 bp, Homo sapien
tttaaaatgtctcaaatttctttgtcaaattat

SEQ ID NO: 500367 - DNA, 33 bp, Homo sapien
ggtcactggaggcaaactgtcacaactattgaa

SEQ ID NO: 500368 - DNA, 33 bp, Homo sapien
ggtcactggaggcaaattgtcacaactattgaa

SEQ ID NO: 500369 - DNA, 33 bp, Homo sapien
ccagccatcctccaaacgtgtctgaatttctcc

SEQ ID NO: 500370 - DNA, 33 bp, Homo sapien
ccagccatcctccaaatgtgtctgaatttctcc

SEQ ID NO: 500371 - DNA, 33 bp, Homo sapien
ccagctgagggaccacagatgggttgttataca

SEQ ID NO: 500372 - DNA, 33 bp, Homo sapien
ccagctgagggaccacggatgggttgttataca

SEQ ID NO: 500373 - DNA, 33 bp, Homo sapien
gcaatcagtgatttccacaagttaacacatatt

SEQ ID NO: 500374 - DNA, 33 bp, Homo sapien
gcaatcagtgatttccgcaagttaacacatatt

SEQ ID NO: 500375 - DNA, 33 bp, Homo sapien
aattctccatgctggaaaaagaaaggagtaaat

SEQ ID NO: 500376 - DNA, 33 bp, Homo sapien
aattctccatgctggacaaagaaaggagtaaat

SEQ ID NO: 500377 - DNA, 33 bp, Homo sapien
ataaaatttcagatgaagactaatatcctgtgg

SEQ ID NO: 500378 - DNA, 33 bp, Homo sapien
ataaaatttcagatgaggactaatatcctgtgg

SEQ ID NO: 500379 - DNA, 33 bp, Homo sapien
catattatgattttccacagaggtggcccacag

SEQ ID NO: 500380 - DNA, 33 bp, Homo sapien
catattatgattttccgcagaggtggcccacag

SEQ ID NO: 500381 - DNA, 33 bp, Homo sapien
ggctggtaacaaagacagcgttaggacagactc

SEQ ID NO: 500382 - DNA, 33 bp, Homo sapien
ggctggtaacaaagacggcgttaggacagactc

SEQ ID NO: 500383 - DNA, 33 bp, Homo sapien
ctccagctgtctactcacacaaaaggagccacc

SEQ ID NO: 500384 - DNA, 33 bp, Homo sapien
ctccagctgtctactctcacaaaaggagccacc

SEQ ID NO: 500385 - DNA, 33 bp, Homo sapien
ctgtatcaattagtgcacaaaaaaccaaatagc

SEQ ID NO: 500386 - DNA, 33 bp, Homo sapien
ctgtatcaattagtgcgcaaaaaaccaaatagc

SEQ ID NO: 500387 - DNA, 33 bp, Homo sapien
actcacaactgcctaacacactagaatccctgg

SEQ ID NO: 500388 - DNA, 33 bp, Homo sapien
actcacaactgcctaagacactagaatccctgg

SEQ ID NO: 500389 - DNA, 33 bp, Homo sapien
ttttttttagcttgcaaggaagaacacactcca

SEQ ID NO: 500390 - DNA, 33 bp, Homo sapien
ttttttttagcttgcatggaagaacacactcca

SEQ ID NO: 500391 - DNA, 33 bp, Homo sapien
gttttaaaccattgctcacttgaaaacaccagc

SEQ ID NO: 500392 - DNA, 33 bp, Homo sapien
gttttaaaccattgcttacttgaaaacaccagc

SEQ ID NO: 500393 - DNA, 33 bp, Homo sapien
tgggactggggactcacgtaagaaacattcaga

SEQ ID NO: 500394 - DNA, 33 bp, Homo sapien
tgggactggggactcatgtaagaaacattcaga

SEQ ID NO: 500395 - DNA, 33 bp, Homo sapien
tgcccagtgatgagaagtgaggaccagaacctg

SEQ ID NO: 500396 - DNA, 33 bp, Homo sapien
tgcccagtgatgagaattgaggaccagaacctg

SEQ ID NO: 500397 - DNA, 33 bp, Homo sapien
ttccggctgtgtgtaaataaaaccctcactgtc

SEQ ID NO: 500398 - DNA, 33 bp, Homo sapien
ttccggctgtgtgtaattaaaaccctcactgtc

SEQ ID NO: 500399 - DNA, 33 bp, Homo sapien
cctgaccagagcattacatttcatgcattccca

SEQ ID NO: 500400 - DNA, 33 bp, Homo sapien
cctgaccagagcattatatttcatgcattccca

SEQ ID NO: 500401 - DNA, 33 bp, Homo sapien
acatttggtcactgaaatattctgtgttgatca

SEQ ID NO: 500402 - DNA, 33 bp, Homo sapien
acatttggtcactgaagtattctgtgttgatca

SEQ ID NO: 500403 - DNA, 33 bp, Homo sapien
taaaggtctaaagcaccggttctcacacgttgg

SEQ ID NO: 500404 - DNA, 33 bp, Homo sapien
taaaggtctaaagcactggttctcacacgttgg

SEQ ID NO: 500405 - DNA, 33 bp, Homo sapien
tggtaatacagtaataaagtgctaatgtgtttt

SEQ ID NO: 500406 - DNA, 33 bp, Homo sapien
tggtaatacagtaatagagtgctaatgtgtttt

SEQ ID NO: 500407 - DNA, 33 bp, Homo sapien
gcctggtgaaagagggcatttgcagagcccaag

SEQ ID NO: 500408 - DNA, 33 bp, Homo sapien
gcctggtgaaagagggtatttgcagagcccaag

SEQ ID NO: 500409 - DNA, 33 bp, Homo sapien
cttctggtacaagggccactcagtaggattgag

SEQ ID NO: 500410 - DNA, 33 bp, Homo sapien
cttctggtacaagggcgactcagtaggattgag

SEQ ID NO: 500411 - DNA, 33 bp, Homo sapien
caaatgtggtaattccaaattttagattcctac

SEQ ID NO: 500412 - DNA, 33 bp, Homo sapien
caaatgtggtaattcccaattttagattcctac

SEQ ID NO: 500413 - DNA, 33 bp, Homo sapien
gcttaccatgaagccaatcaagcttaaccctca

SEQ ID NO: 500414 - DNA, 33 bp, Homo sapien
gcttaccatgaagccactcaagcttaaccctca

SEQ ID NO: 500415 - DNA, 33 bp, Homo sapien
ctcagaatctggtacacagtagatgtgaaatac

SEQ ID NO: 500416 - DNA, 33 bp, Homo sapien
ctcagaatctggtacagagtagatgtgaaatac

SEQ ID NO: 500417 - DNA, 33 bp, Homo sapien
atgtcctgaattaagacgttttcaccacattgt

SEQ ID NO: 500418 - DNA, 33 bp, Homo sapien
atgtcctgaattaagatgttttcaccacattgt

SEQ ID NO: 500419 - DNA, 33 bp, Homo sapien
cttggtgtaaacactcaataaacatgatctgct

SEQ ID NO: 500420 - DNA, 33 bp, Homo sapien
cttggtgtaaacactcgataaacatgatctgct

SEQ ID NO: 500421 - DNA, 33 bp, Homo sapien
ttattggaaaaatgacaatatagtagtgcctgc

SEQ ID NO: 500422 - DNA, 33 bp, Homo sapien
ttattggaaaaatgacgatatagtagtgcctgc

SEQ ID NO: 500423 - DNA, 33 bp, Homo sapien
tttaaaaataaaaaacggcagcctgtctgtagg

SEQ ID NO: 500424 - DNA, 33 bp, Homo sapien
tttaaaaataaaaaactgcagcctgtctgtagg

SEQ ID NO: 500425 - DNA, 33 bp, Homo sapien
gccggttctcttcttcaactccatttttcagag

SEQ ID NO: 500426 - DNA, 33 bp, Homo sapien
gccggttctcttcttccactccatttttcagag

SEQ ID NO: 500427 - DNA, 33 bp, Homo sapien
aatgtggaccttgaagaatgattagaagttttg

SEQ ID NO: 500428 - DNA, 33 bp, Homo sapien
aatgtggaccttgaaggatgattagaagttttg

SEQ ID NO: 500429 - DNA, 33 bp, Homo sapien
gttgagaggtagaggaagagtgtctcagtagga

SEQ ID NO: 500430 - DNA, 33 bp, Homo sapien
gttgagaggtagaggaggagtgtctcagtagga

SEQ ID NO: 500431 - DNA, 33 bp, Homo sapien
agagggactttaccaaatggggcctctaacccc

SEQ ID NO: 500432 - DNA, 33 bp, Homo sapien
agagggactttaccaagtggggcctctaacccc

SEQ ID NO: 500433 - DNA, 33 bp, Homo sapien
gcctaaaatcatagagaaaatgaaataatctgg

SEQ ID NO: 500434 - DNA, 33 bp, Homo sapien
gcctaaaatcatagagtaaatgaaataatctgg

SEQ ID NO: 500435 - DNA, 33 bp, Homo sapien
gttccctcttctttggaaaaaaaagttgctagc

SEQ ID NO: 500436 - DNA, 33 bp, Homo sapien
gttccctcttctttggcaaaaaaagttgctagc

SEQ ID NO: 500437 - DNA, 33 bp, Homo sapien
cttccaggcaccattccagccttccatatccag

SEQ ID NO: 500438 - DNA, 33 bp, Homo sapien
cttccaggcaccattctagccttccatatccag

SEQ ID NO: 500439 - DNA, 33 bp, Homo sapien
gattcagagaggtaaacttactcttccaaggct

SEQ ID NO: 500440 - DNA, 33 bp, Homo sapien
gattcagagaggtaaagttactcttccaaggct

SEQ ID NO: 500441 - DNA, 33 bp, Homo sapien
aactctattagtgtcaaaactggtgtgacctag

SEQ ID NO: 500442 - DNA, 33 bp, Homo sapien
aactctattagtgtcataactggtgtgacctag

SEQ ID NO: 500443 - DNA, 33 bp, Homo sapien
gtgtggaaattacacaaatacccagcactatgc

SEQ ID NO: 500444 - DNA, 33 bp, Homo sapien
gtgtggaaattacacatatacccagcactatgc

SEQ ID NO: 500445 - DNA, 33 bp, Homo sapien
accatgacagttacaaccatatgttgatatgaa

SEQ ID NO: 500446 - DNA, 33 bp, Homo sapien
accatgacagttacaatcatatgttgatatgaa

SEQ ID NO: 500447 - DNA, 33 bp, Homo sapien
ctgtaagacctgcagaaaaattctttagcctta

SEQ ID NO: 500448 - DNA, 33 bp, Homo sapien
ctgtaagacctgcagagaaattctttagcctta

SEQ ID NO: 500449 - DNA, 33 bp, Homo sapien
ctcataagataaatgcaaattaaaactgagata

SEQ ID NO: 500450 - DNA, 33 bp, Homo sapien
ctcataagataaatgcgaattaaaactgagata

SEQ ID NO: 500451 - DNA, 33 bp, Homo sapien
gtgtcttgtgacttggcatgatatgcagggaat

SEQ ID NO: 500452 - DNA, 33 bp, Homo sapien
gtgtcttgtgacttggtatgatatgcagggaat

SEQ ID NO: 500453 - DNA, 33 bp, Homo sapien
aaggggatatgatataaggtaaatttccacttt

SEQ ID NO: 500454 - DNA, 33 bp, Homo sapien
aaggggatatgatatacggtaaatttccacttt

SEQ ID NO: 500455 - DNA, 33 bp, Homo sapien
caattttatctccatgacactttatataaatgt

SEQ ID NO: 500456 - DNA, 33 bp, Homo sapien
caattttatctccatggcactttatataaatgt

SEQ ID NO: 500457 - DNA, 33 bp, Homo sapien
tattgaataatctgcaatctgttctggctgatc

SEQ ID NO: 500458 - DNA, 33 bp, Homo sapien
tattgaataatctgcagtctgttctggctgatc

SEQ ID NO: 500459 - DNA, 33 bp, Homo sapien
ttgtgaattatgcaaaactttcagacaaggaac

SEQ ID NO: 500460 - DNA, 33 bp, Homo sapien
ttgtgaattatgcaaagctttcagacaaggaac

SEQ ID NO: 500461 - DNA, 33 bp, Homo sapien
gttccacctcctaaaaacattgacaccccagta

SEQ ID NO: 500462 - DNA, 33 bp, Homo sapien
gttccacctcctaaaagcattgacaccccagta

SEQ ID NO: 500463 - DNA, 33 bp, Homo sapien
tggcacagtttgttacacttttccctgtacatc

SEQ ID NO: 500464 - DNA, 33 bp, Homo sapien
tggcacagtttgttactcttttccctgtacatc

SEQ ID NO: 500465 - DNA, 33 bp, Homo sapien
agagtgaaagctgcaacgttgaaaaaaacatcc

SEQ ID NO: 500466 - DNA, 33 bp, Homo sapien
agagtgaaagctgcaatgttgaaaaaaacatcc

SEQ ID NO: 500467 - DNA, 33 bp, Homo sapien
gctctgaatggttatacagtttctcctccacct

SEQ ID NO: 500468 - DNA, 33 bp, Homo sapien
gctctgaatggttatagagtttctcctccacct

SEQ ID NO: 500469 - DNA, 33 bp, Homo sapien
tctgagtgtatgaatcaaaattattcttactca

SEQ ID NO: 500470 - DNA, 33 bp, Homo sapien
tctgagtgtatgaatcgaaattattcttactca

SEQ ID NO: 500471 - DNA, 33 bp, Homo sapien
aacattgctgatacacggaagcaacatccccca

SEQ ID NO: 500472 - DNA, 33 bp, Homo sapien
aacattgctgatacactgaagcaacatccccca

SEQ ID NO: 500473 - DNA, 33 bp, Homo sapien
ggacctccaattataccggtcatgggtttctgg

SEQ ID NO: 500474 - DNA, 33 bp, Homo sapien
ggacctccaattatactggtcatgggtttctgg

SEQ ID NO: 500475 - DNA, 33 bp, Homo sapien
tgtgtcaatattaacccaagtgatcaataactt

SEQ ID NO: 500476 - DNA, 33 bp, Homo sapien
tgtgtcaatattaacctaagtgatcaataactt

SEQ ID NO: 500477 - DNA, 33 bp, Homo sapien
cttcatattgataatgcattgctttcttcagga

SEQ ID NO: 500478 - DNA, 33 bp, Homo sapien
cttcatattgataatgtattgctttcttcagga

SEQ ID NO: 500479 - DNA, 33 bp, Homo sapien
aattataggtttaaaaagattttctcacctgac

SEQ ID NO: 500480 - DNA, 33 bp, Homo sapien
aattataggtttaaaatgattttctcacctgac

SEQ ID NO: 500481 - DNA, 33 bp, Homo sapien
attttcataataccgacgatcaagagaaaatcc

SEQ ID NO: 500482 - DNA, 33 bp, Homo sapien
attttcataataccgaggatcaagagaaaatcc

SEQ ID NO: 500483 - DNA, 33 bp, Homo sapien
aaagaagcaataaaataaggtctcactaggctg

SEQ ID NO: 500484 - DNA, 33 bp, Homo sapien
aaagaagcaataaaatgaggtctcactaggctg

SEQ ID NO: 500485 - DNA, 33 bp, Homo sapien
gactgtttcttatctcggactaatccctttttt

SEQ ID NO: 500486 - DNA, 33 bp, Homo sapien
gactgtttcttatctctgactaatccctttttt

SEQ ID NO: 500487 - DNA, 33 bp, Homo sapien
tcttttattatttttgaatctcggcgactgaag

SEQ ID NO: 500488 - DNA, 33 bp, Homo sapien
tcttttattatttttgtatctcggcgactgaag

SEQ ID NO: 500489 - DNA, 33 bp, Homo sapien
ccccaactgtctcatagggcactggcagcttca

SEQ ID NO: 500490 - DNA, 33 bp, Homo sapien
ccccaactgtctcatatggcactggcagcttca

SEQ ID NO: 500491 - DNA, 33 bp, Homo sapien
caccatccaactttcacgatgggaacattttca

SEQ ID NO: 500492 - DNA, 33 bp, Homo sapien
caccatccaactttcatgatgggaacattttca

SEQ ID NO: 500493 - DNA, 33 bp, Homo sapien
actatgttttgtaagcagaaataccactactaa

SEQ ID NO: 500494 - DNA, 33 bp, Homo sapien
actatgttttgtaagcggaaataccactactaa

SEQ ID NO: 500495 - DNA, 33 bp, Homo sapien
cctggtcaagacgtccacgttgtcatgccaggt

SEQ ID NO: 500496 - DNA, 33 bp, Homo sapien
cctggtcaagacgtccgcgttgtcatgccaggt

SEQ ID NO: 500497 - DNA, 33 bp, Homo sapien
cagaaaagtgtgaaaaaagagtggcctagcctt

SEQ ID NO: 500498 - DNA, 33 bp, Homo sapien
cagaaaagtgtgaaaagagagtggcctagcctt

SEQ ID NO: 500499 - DNA, 33 bp, Homo sapien
tgagcaaggctatttgcagatgggccttgaagg

SEQ ID NO: 500500 - DNA, 33 bp, Homo sapien
tgagcaaggctatttggagatgggccttgaagg

SEQ ID NO: 500501 - DNA, 33 bp, Homo sapien
cacttccttggccaaaccttctctgactcacag

SEQ ID NO: 500502 - DNA, 33 bp, Homo sapien
cacttccttggccaaatcttctctgactcacag

SEQ ID NO: 500503 - DNA, 33 bp, Homo sapien
aacaagcattgcctcaacattatatccctttcc

SEQ ID NO: 500504 - DNA, 33 bp, Homo sapien
aacaagcattgcctcagcattatatccctttcc

SEQ ID NO: 500505 - DNA, 33 bp, Homo sapien
gtttttgtagtcataaacctgaatttgctttaa

SEQ ID NO: 500506 - DNA, 33 bp, Homo sapien
gtttttgtagtcataaccctgaatttgctttaa

SEQ ID NO: 500507 - DNA, 33 bp, Homo sapien
attactgtttggaggaaaaagaacttggatata

SEQ ID NO: 500508 - DNA, 33 bp, Homo sapien
attactgtttggaggagaaagaacttggatata

SEQ ID NO: 500509 - DNA, 33 bp, Homo sapien
cttaagtagaatactaagctgtggtcctcagta

SEQ ID NO: 500510 - DNA, 33 bp, Homo sapien
cttaagtagaatactaggctgtggtcctcagta

SEQ ID NO: 500511 - DNA, 33 bp, Homo sapien
attaaaggctactaaactggtatccatacatta

SEQ ID NO: 500512 - DNA, 33 bp, Homo sapien
attaaaggctactaaattggtatccatacatta

SEQ ID NO: 500513 - DNA, 33 bp, Homo sapien
tgaaatgacgcatcataaaatacacaggaaatt

SEQ ID NO: 500514 - DNA, 33 bp, Homo sapien
tgaaatgacgcatcattaaatacacaggaaatt

SEQ ID NO: 500515 - DNA, 33 bp, Homo sapien
tcttcaagagctacacaggaattttgaaggtct

SEQ ID NO: 500516 - DNA, 33 bp, Homo sapien
tcttcaagagctacactggaattttgaaggtct

SEQ ID NO: 500517 - DNA, 33 bp, Homo sapien
atgatcctgagctataaagagattgttgtacca

SEQ ID NO: 500518 - DNA, 33 bp, Homo sapien
atgatcctgagctatagagagattgttgtacca

SEQ ID NO: 500519 - DNA, 33 bp, Homo sapien
ttctggatgtgatttaagtccctttcacccgtg

SEQ ID NO: 500520 - DNA, 33 bp, Homo sapien
ttctggatgtgatttaggtccctttcacccgtg

SEQ ID NO: 500521 - DNA, 33 bp, Homo sapien
atgtgccagtggttccaactaagagcaaggact

SEQ ID NO: 500522 - DNA, 33 bp, Homo sapien
atgtgccagtggttccgactaagagcaaggact

SEQ ID NO: 500523 - DNA, 33 bp, Homo sapien
ctcatgtgtaaatgaccgggttgtcgcagtggt

SEQ ID NO: 500524 - DNA, 33 bp, Homo sapien
ctcatgtgtaaatgactgggttgtcgcagtggt

SEQ ID NO: 500525 - DNA, 33 bp, Homo sapien
tagtatgcatctctaaaatacaagataaaagat

SEQ ID NO: 500526 - DNA, 33 bp, Homo sapien
tagtatgcatctctaacatacaagataaaagat

SEQ ID NO: 500527 - DNA, 33 bp, Homo sapien
gtctacagtttctccaagtttctttggttggca

SEQ ID NO: 500528 - DNA, 33 bp, Homo sapien
gtctacagtttctccaggtttctttggttggca

SEQ ID NO: 500529 - DNA, 33 bp, Homo sapien
catcttactatcgacacgtttttgttgagtacc

SEQ ID NO: 500530 - DNA, 33 bp, Homo sapien
catcttactatcgacatgtttttgttgagtacc

SEQ ID NO: 500531 - DNA, 33 bp, Homo sapien
gatgactccaaagcaactccttgcaaaacaaat

SEQ ID NO: 500532 - DNA, 33 bp, Homo sapien
gatgactccaaagcaattccttgcaaaacaaat

SEQ ID NO: 500533 - DNA, 33 bp, Homo sapien
catttcttgaatgcaaagttccatatgtgacct

SEQ ID NO: 500534 - DNA, 33 bp, Homo sapien
catttcttgaatgcaaggttccatatgtgacct

SEQ ID NO: 500535 - DNA, 33 bp, Homo sapien
atgtgaagaagccttagaactaagacaagacta

SEQ ID NO: 500536 - DNA, 33 bp, Homo sapien
atgtgaagaagccttataactaagacaagacta

SEQ ID NO: 500537 - DNA, 33 bp, Homo sapien
atcctccttctcccaacagagcagttgattcca

SEQ ID NO: 500538 - DNA, 33 bp, Homo sapien
atcctccttctcccaatagagcagttgattcca

SEQ ID NO: 500539 - DNA, 33 bp, Homo sapien
ttcccaatttggtaaaacccagatgtatgaatg

SEQ ID NO: 500540 - DNA, 33 bp, Homo sapien
ttcccaatttggtaaaccccagatgtatgaatg

SEQ ID NO: 500541 - DNA, 33 bp, Homo sapien
tagaaacttatccccaatacagcagtgttaagc

SEQ ID NO: 500542 - DNA, 33 bp, Homo sapien
tagaaacttatccccagtacagcagtgttaagc

SEQ ID NO: 500543 - DNA, 33 bp, Homo sapien
aacaatgtttctgtaaatgttcttgacactatt

SEQ ID NO: 500544 - DNA, 33 bp, Homo sapien
aacaatgtttctgtaactgttcttgacactatt

SEQ ID NO: 500545 - DNA, 33 bp, Homo sapien
acttacatgaaaccacaaattttcctaagcgaa

SEQ ID NO: 500546 - DNA, 33 bp, Homo sapien
acttacatgaaaccacgaattttcctaagcgaa

SEQ ID NO: 500547 - DNA, 33 bp, Homo sapien
caggtctcttctcaaccgcaggtattgatttgt

SEQ ID NO: 500548 - DNA, 33 bp, Homo sapien
caggtctcttctcaactgcaggtattgatttgt

SEQ ID NO: 500549 - DNA, 33 bp, Homo sapien
gggattgcattaaatccacagaccagtctggca

SEQ ID NO: 500550 - DNA, 33 bp, Homo sapien
gggattgcattaaatctacagaccagtctggca

SEQ ID NO: 500551 - DNA, 33 bp, Homo sapien
aaatttctgggtcatcaatcaaaggcagatttt

SEQ ID NO: 500552 - DNA, 33 bp, Homo sapien
aaatttctgggtcatcgatcaaaggcagatttt

SEQ ID NO: 500553 - DNA, 33 bp, Homo sapien
caatgcctgtcaaacacactgcacaaacctcta

SEQ ID NO: 500554 - DNA, 33 bp, Homo sapien
caatgcctgtcaaacatactgcacaaacctcta

SEQ ID NO: 500555 - DNA, 33 bp, Homo sapien
atatatttaggatcatcaaatcttcttgaattg

SEQ ID NO: 500556 - DNA, 33 bp, Homo sapien
atatatttaggatcattaaatcttcttgaattg

SEQ ID NO: 500557 - DNA, 33 bp, Homo sapien
gaagcaaacagagtcaataaatataagatcaat

SEQ ID NO: 500558 - DNA, 33 bp, Homo sapien
gaagcaaacagagtcattaaatataagatcaat

SEQ ID NO: 500559 - DNA, 33 bp, Homo sapien
gtagaaggaggactggaaaaaggaaggagaagc

SEQ ID NO: 500560 - DNA, 33 bp, Homo sapien
gtagaaggaggactgggaaaaggaaggagaagc

SEQ ID NO: 500561 - DNA, 33 bp, Homo sapien
gtgcttaggtctctgaacaatttctagtgagtc

SEQ ID NO: 500562 - DNA, 33 bp, Homo sapien
gtgcttaggtctctgatcaatttctagtgagtc

SEQ ID NO: 500563 - DNA, 33 bp, Homo sapien
aaccaagatgagtccaaatcccagataactttg

SEQ ID NO: 500564 - DNA, 33 bp, Homo sapien
aaccaagatgagtccagatcccagataactttg

SEQ ID NO: 500565 - DNA, 33 bp, Homo sapien
aaggatcttaaaataacatgaggtgcagacatg

SEQ ID NO: 500566 - DNA, 33 bp, Homo sapien
aaggatcttaaaataatatgaggtgcagacatg

SEQ ID NO: 500567 - DNA, 33 bp, Homo sapien
tccagtagtctttggaccgcttggagggtaaca

SEQ ID NO: 500568 - DNA, 33 bp, Homo sapien
tccagtagtctttggatcgcttggagggtaaca

SEQ ID NO: 500569 - DNA, 33 bp, Homo sapien
catttctagacaagatgaaggctctcagagtcc

SEQ ID NO: 500570 - DNA, 33 bp, Homo sapien
catttctagacaagattaaggctctcagagtcc

SEQ ID NO: 500571 - DNA, 33 bp, Homo sapien
gaggcccaggaccataaaggacacttgccacag

SEQ ID NO: 500572 - DNA, 33 bp, Homo sapien
gaggcccaggaccatagaggacacttgccacag

SEQ ID NO: 500573 - DNA, 33 bp, Homo sapien
cagcaatgatattaacacataatcaatcctatt

SEQ ID NO: 500574 - DNA, 33 bp, Homo sapien
cagcaatgatattaacgcataatcaatcctatt

SEQ ID NO: 500575 - DNA, 33 bp, Homo sapien
agcctcagatttcagaagctaatcagaggtgac

SEQ ID NO: 500576 - DNA, 33 bp, Homo sapien
agcctcagatttcagaggctaatcagaggtgac

SEQ ID NO: 500577 - DNA, 33 bp, Homo sapien
tgttctctgaggcttaactgaaagaggcattgc

SEQ ID NO: 500578 - DNA, 33 bp, Homo sapien
tgttctctgaggcttacctgaaagaggcattgc

SEQ ID NO: 500579 - DNA, 33 bp, Homo sapien
agatggagcaaattaacggcttataaatgtaat

SEQ ID NO: 500580 - DNA, 33 bp, Homo sapien
agatggagcaaattaagggcttataaatgtaat

SEQ ID NO: 500581 - DNA, 33 bp, Homo sapien
acttttatggaaacaactaaaccatggcacttt

SEQ ID NO: 500582 - DNA, 33 bp, Homo sapien
acttttatggaaacaattaaaccatggcacttt

SEQ ID NO: 500583 - DNA, 33 bp, Homo sapien
gttttgccagcctgaaaattttaccagcctgaa

SEQ ID NO: 500584 - DNA, 33 bp, Homo sapien
gttttgccagcctgaagattttaccagcctgaa

SEQ ID NO: 500585 - DNA, 33 bp, Homo sapien
cctatgtttggagaccaagtaagtatgcaagac

SEQ ID NO: 500586 - DNA, 33 bp, Homo sapien
cctatgtttggagaccgagtaagtatgcaagac

SEQ ID NO: 500587 - DNA, 33 bp, Homo sapien
gcctgaattaggtcaactgcccgccccgatcta

SEQ ID NO: 500588 - DNA, 33 bp, Homo sapien
gcctgaattaggtcaagtgcccgccccgatcta

SEQ ID NO: 500589 - DNA, 33 bp, Homo sapien
gttctgatgtccaagggcagaagaagaaggatg

SEQ ID NO: 500590 - DNA, 33 bp, Homo sapien
gttctgatgtccaaggtcagaagaagaaggatg

SEQ ID NO: 500591 - DNA, 33 bp, Homo sapien
tgtttttttagagccacgtctgatagaagcctg

SEQ ID NO: 500592 - DNA, 33 bp, Homo sapien
tgtttttttagagccaggtctgatagaagcctg

SEQ ID NO: 500593 - DNA, 33 bp, Homo sapien
ccctctcattttctggaataccactatcatcat

SEQ ID NO: 500594 - DNA, 33 bp, Homo sapien
ccctctcattttctgggataccactatcatcat

SEQ ID NO: 500595 - DNA, 33 bp, Homo sapien
atagataacagagaaccggtgaagtaaccagat

SEQ ID NO: 500596 - DNA, 33 bp, Homo sapien
atagataacagagaactggtgaagtaaccagat

SEQ ID NO: 500597 - DNA, 33 bp, Homo sapien
gggaggcaaaaggcaccgcattaaaatcacatg

SEQ ID NO: 500598 - DNA, 33 bp, Homo sapien
gggaggcaaaaggcactgcattaaaatcacatg

SEQ ID NO: 500599 - DNA, 33 bp, Homo sapien
ttctcatctgtaaaagaaggacactaatgcctg

SEQ ID NO: 500600 - DNA, 33 bp, Homo sapien
ttctcatctgtaaaaggaggacactaatgcctg

SEQ ID NO: 500601 - DNA, 33 bp, Homo sapien
tgatttaagtgttgtgcatgactatacctagcg

SEQ ID NO: 500602 - DNA, 33 bp, Homo sapien
tgatttaagtgttgtgtatgactatacctagcg

SEQ ID NO: 500603 - DNA, 33 bp, Homo sapien
attcattcaacaaacaataagaatctacaacct

SEQ ID NO: 500604 - DNA, 33 bp, Homo sapien
attcattcaacaaacagtaagaatctacaacct

SEQ ID NO: 500605 - DNA, 33 bp, Homo sapien
attcaggaaatctttacatctgtctagcaagga

SEQ ID NO: 500606 - DNA, 33 bp, Homo sapien
attcaggaaatctttatatctgtctagcaagga

SEQ ID NO: 500607 - DNA, 33 bp, Homo sapien
cttgatttgagaactacattgttgtagaacata

SEQ ID NO: 500608 - DNA, 33 bp, Homo sapien
cttgatttgagaactatattgttgtagaacata

SEQ ID NO: 500609 - DNA, 33 bp, Homo sapien
atgctttaattagactcaatgagaaaaaaaaag

SEQ ID NO: 500610 - DNA, 33 bp, Homo sapien
atgctttaattagactgaatgagaaaaaaaaag

SEQ ID NO: 500611 - DNA, 33 bp, Homo sapien
tggttgattactccacgaatcctaaaatgtaaa

SEQ ID NO: 500612 - DNA, 33 bp, Homo sapien
tggttgattactccactaatcctaaaatgtaaa

SEQ ID NO: 500613 - DNA, 33 bp, Homo sapien
gctggaactgagcagaaatggggaagctgagaa

SEQ ID NO: 500614 - DNA, 33 bp, Homo sapien
gctggaactgagcagagatggggaagctgagaa

SEQ ID NO: 500615 - DNA, 33 bp, Homo sapien
aagtgaaaagacactcaactacaaatcatagtc

SEQ ID NO: 500616 - DNA, 33 bp, Homo sapien
aagtgaaaagacactcgactacaaatcatagtc

SEQ ID NO: 500617 - DNA, 33 bp, Homo sapien
cgcactagcaaaaccaataaatggcatacaaac

SEQ ID NO: 500618 - DNA, 33 bp, Homo sapien
cgcactagcaaaaccagtaaatggcatacaaac

SEQ ID NO: 500619 - DNA, 33 bp, Homo sapien
cagaatatgcatttacactttgatttagcaatc

SEQ ID NO: 500620 - DNA, 33 bp, Homo sapien
cagaatatgcatttaccctttgatttagcaatc

SEQ ID NO: 500621 - DNA, 33 bp, Homo sapien
ttccatgtgattcagtaaatgagtcagagtagt

SEQ ID NO: 500622 - DNA, 33 bp, Homo sapien
ttccatgtgattcagtcaatgagtcagagtagt

SEQ ID NO: 500623 - DNA, 33 bp, Homo sapien
cattataaaactgcagcagtgtgtcaggattgg

SEQ ID NO: 500624 - DNA, 33 bp, Homo sapien
cattataaaactgcagtagtgtgtcaggattgg

SEQ ID NO: 500625 - DNA, 33 bp, Homo sapien
ttgccaacccttggtagagatggacccaaagaa

SEQ ID NO: 500626 - DNA, 33 bp, Homo sapien
ttgccaacccttggtatagatggacccaaagaa

SEQ ID NO: 500627 - DNA, 33 bp, Homo sapien
aaattattcagaatcccggagctgtccccagaa

SEQ ID NO: 500628 - DNA, 33 bp, Homo sapien
aaattattcagaatcctggagctgtccccagaa

SEQ ID NO: 500629 - DNA, 33 bp, Homo sapien
acgataaaaataacacaaaatggctagaggcca

SEQ ID NO: 500630 - DNA, 33 bp, Homo sapien
acgataaaaataacaccaaatggctagaggcca

SEQ ID NO: 500631 - DNA, 33 bp, Homo sapien
acagatgtccttagcaactgatttgtctgtata

SEQ ID NO: 500632 - DNA, 33 bp, Homo sapien
acagatgtccttagcagctgatttgtctgtata

SEQ ID NO: 500633 - DNA, 33 bp, Homo sapien
acatggccaactgaaaactgtgaggatttgagt

SEQ ID NO: 500634 - DNA, 33 bp, Homo sapien
acatggccaactgaaagctgtgaggatttgagt

SEQ ID NO: 500635 - DNA, 33 bp, Homo sapien
catctaccaaaaattgcactgaatcacctcaat

SEQ ID NO: 500636 - DNA, 33 bp, Homo sapien
catctaccaaaaattgtactgaatcacctcaat

SEQ ID NO: 500637 - DNA, 33 bp, Homo sapien
ctactgtcacaaatcacgaaaacttggtggctt

SEQ ID NO: 500638 - DNA, 33 bp, Homo sapien
ctactgtcacaaatcatgaaaacttggtggctt

SEQ ID NO: 500639 - DNA, 33 bp, Homo sapien
tgtatatgtatgaagaagttgtctgtttttagg

SEQ ID NO: 500640 - DNA, 33 bp, Homo sapien
tgtatatgtatgaagaggttgtctgtttttagg

SEQ ID NO: 500641 - DNA, 33 bp, Homo sapien
ccttgtgaagatgacccattttccactccaaag

SEQ ID NO: 500642 - DNA, 33 bp, Homo sapien
ccttgtgaagatgacctattttccactccaaag

SEQ ID NO: 500643 - DNA, 33 bp, Homo sapien
cacagccaactcatgacgcggctgggattcagt

SEQ ID NO: 500644 - DNA, 33 bp, Homo sapien
cacagccaactcatgatgcggctgggattcagt

SEQ ID NO: 500645 - DNA, 33 bp, Homo sapien
acacatggaaagatacccgaagtgaacaatgat

SEQ ID NO: 500646 - DNA, 33 bp, Homo sapien
acacatggaaagatactcgaagtgaacaatgat

SEQ ID NO: 500647 - DNA, 33 bp, Homo sapien
taaatccttagctctacggatgctggtgtattc

SEQ ID NO: 500648 - DNA, 33 bp, Homo sapien
taaatccttagctctatggatgctggtgtattc

SEQ ID NO: 500649 - DNA, 33 bp, Homo sapien
gtaatcaaaatcatgcacccctcctccccgcag

SEQ ID NO: 500650 - DNA, 33 bp, Homo sapien
gtaatcaaaatcatgcgcccctcctccccgcag

SEQ ID NO: 500651 - DNA, 33 bp, Homo sapien
agcccagctcaggatacggaatggctccagcaa

SEQ ID NO: 500652 - DNA, 33 bp, Homo sapien
agcccagctcaggatatggaatggctccagcaa

SEQ ID NO: 500653 - DNA, 33 bp, Homo sapien
ttggaggagaatgagcagacaaggagcaaattt

SEQ ID NO: 500654 - DNA, 33 bp, Homo sapien
ttggaggagaatgagcggacaaggagcaaattt

SEQ ID NO: 500655 - DNA, 33 bp, Homo sapien
tccacagactttattcaaatgctgccagctgtc

SEQ ID NO: 500656 - DNA, 33 bp, Homo sapien
tccacagactttattcgaatgctgccagctgtc

SEQ ID NO: 500657 - DNA, 33 bp, Homo sapien
tggaagagacaataaaataaaatcccagttcta

SEQ ID NO: 500658 - DNA, 33 bp, Homo sapien
tggaagagacaataaagtaaaatcccagttcta

SEQ ID NO: 500659 - DNA, 33 bp, Homo sapien
ccagtggccatgatgaaaaatgagcacacgtgg

SEQ ID NO: 500660 - DNA, 33 bp, Homo sapien
ccagtggccatgatgagaaatgagcacacgtgg

SEQ ID NO: 500661 - DNA, 33 bp, Homo sapien
caactgtttttcagaacgtcccggtgttaaagt

SEQ ID NO: 500662 - DNA, 33 bp, Homo sapien
caactgtttttcagaaggtcccggtgttaaagt

SEQ ID NO: 500663 - DNA, 33 bp, Homo sapien
ccagttagcaattaccaaacaacttctgtggct

SEQ ID NO: 500664 - DNA, 33 bp, Homo sapien
ccagttagcaattaccgaacaacttctgtggct

SEQ ID NO: 500665 - DNA, 33 bp, Homo sapien
ctttacaatacctgcaatgagcgccaacaaagt

SEQ ID NO: 500666 - DNA, 33 bp, Homo sapien
ctttacaatacctgcagtgagcgccaacaaagt

SEQ ID NO: 500667 - DNA, 33 bp, Homo sapien
tcttttggctgcaagactattttttcaaatttc

SEQ ID NO: 500668 - DNA, 33 bp, Homo sapien
tcttttggctgcaagattattttttcaaatttc

SEQ ID NO: 500669 - DNA, 33 bp, Homo sapien
cagtacagtgtactagaaaaggctgaggtaaaa

SEQ ID NO: 500670 - DNA, 33 bp, Homo sapien
cagtacagtgtactaggaaaggctgaggtaaaa

SEQ ID NO: 500671 - DNA, 33 bp, Homo sapien
aagatgtcggtgcgtcaagatctttaagacttg

SEQ ID NO: 500672 - DNA, 33 bp, Homo sapien
aagatgtcggtgcgtcgagatctttaagacttg

SEQ ID NO: 500673 - DNA, 33 bp, Homo sapien
ccgtgtgaagtcacaacatgaatacccggccct

SEQ ID NO: 500674 - DNA, 33 bp, Homo sapien
ccgtgtgaagtcacaatatgaatacccggccct

SEQ ID NO: 500675 - DNA, 33 bp, Homo sapien
ccaccagagcaacaacacaagtagtggaactga

SEQ ID NO: 500676 - DNA, 33 bp, Homo sapien
ccaccagagcaacaacgcaagtagtggaactga

SEQ ID NO: 500677 - DNA, 33 bp, Homo sapien
gccatctccctgtcctgaaaagaaatcttcctc

SEQ ID NO: 500678 - DNA, 33 bp, Homo sapien
gccatctccctgtccttaaaagaaatcttcctc

SEQ ID NO: 500679 - DNA, 33 bp, Homo sapien
ttcacactaacatccaccccaagtctgaattaa

SEQ ID NO: 500680 - DNA, 33 bp, Homo sapien
ttcacactaacatccatcccaagtctgaattaa

SEQ ID NO: 500681 - DNA, 33 bp, Homo sapien
gtagtcactcagatacacgctgaattaaactcc

SEQ ID NO: 500682 - DNA, 33 bp, Homo sapien
gtagtcactcagatacgcgctgaattaaactcc

SEQ ID NO: 500683 - DNA, 33 bp, Homo sapien
aatggatagaatggaacatggaaaatcaaggtg

SEQ ID NO: 500684 - DNA, 33 bp, Homo sapien
aatggatagaatggaatatggaaaatcaaggtg

SEQ ID NO: 500685 - DNA, 33 bp, Homo sapien
actgacctagtagaacaccaattctaggcatag

SEQ ID NO: 500686 - DNA, 33 bp, Homo sapien
actgacctagtagaacgccaattctaggcatag

SEQ ID NO: 500687 - DNA, 33 bp, Homo sapien
tttagacaaacagctgaatttgatttttccttc

SEQ ID NO: 500688 - DNA, 33 bp, Homo sapien
tttagacaaacagctgcatttgatttttccttc

SEQ ID NO: 500689 - DNA, 33 bp, Homo sapien
tcctgtgctctaaaacaaaagcttggcttctgc

SEQ ID NO: 500690 - DNA, 33 bp, Homo sapien
tcctgtgctctaaaacgaaagcttggcttctgc

SEQ ID NO: 500691 - DNA, 33 bp, Homo sapien
gactagcattccacaacacagcgtaagaaggaa

SEQ ID NO: 500692 - DNA, 33 bp, Homo sapien
gactagcattccacaatacagcgtaagaaggaa

SEQ ID NO: 500693 - DNA, 33 bp, Homo sapien
ttttggatgctcaaaaatagaaaggaaaacacc

SEQ ID NO: 500694 - DNA, 33 bp, Homo sapien
ttttggatgctcaaaattagaaaggaaaacacc

SEQ ID NO: 500695 - DNA, 33 bp, Homo sapien
gttgggctaggcctgacgctaggaattcagaac

SEQ ID NO: 500696 - DNA, 33 bp, Homo sapien
gttgggctaggcctgatgctaggaattcagaac

SEQ ID NO: 500697 - DNA, 33 bp, Homo sapien
aagaacctactagtgacgctcaagtcccctccc

SEQ ID NO: 500698 - DNA, 33 bp, Homo sapien
aagaacctactagtgaggctcaagtcccctccc

SEQ ID NO: 500699 - DNA, 33 bp, Homo sapien
tatttacaatcactaccagcctcaccacgccct

SEQ ID NO: 500700 - DNA, 33 bp, Homo sapien
tatttacaatcactactagcctcaccacgccct

SEQ ID NO: 500701 - DNA, 33 bp, Homo sapien
caccctggttcatcacagaagcctgcctgcgat

SEQ ID NO: 500702 - DNA, 33 bp, Homo sapien
caccctggttcatcacggaagcctgcctgcgat

SEQ ID NO: 500703 - DNA, 33 bp, Homo sapien
ccaggagcatctcttaacagctttgggtttcag

SEQ ID NO: 500704 - DNA, 33 bp, Homo sapien
ccaggagcatctcttatcagctttgggtttcag

SEQ ID NO: 500705 - DNA, 33 bp, Homo sapien
agctatcagtatctctcaaaatgtcctatgaga

SEQ ID NO: 500706 - DNA, 33 bp, Homo sapien
agctatcagtatctcttaaaatgtcctatgaga

SEQ ID NO: 500707 - DNA, 33 bp, Homo sapien
actagaaaactatccacgttgctatctataatg

SEQ ID NO: 500708 - DNA, 33 bp, Homo sapien
actagaaaactatccatgttgctatctataatg

SEQ ID NO: 500709 - DNA, 33 bp, Homo sapien
aacacatgggctatcacggacattattgggaca

SEQ ID NO: 500710 - DNA, 33 bp, Homo sapien
aacacatgggctatcatggacattattgggaca

SEQ ID NO: 500711 - DNA, 33 bp, Homo sapien
agaggggctccaaaaacgctttgccttcccctg

SEQ ID NO: 500712 - DNA, 33 bp, Homo sapien
agaggggctccaaaaatgctttgccttcccctg

SEQ ID NO: 500713 - DNA, 33 bp, Homo sapien
tgaaaacacaactttcaccttagaatatttgca

SEQ ID NO: 500714 - DNA, 33 bp, Homo sapien
tgaaaacacaactttccccttagaatatttgca

SEQ ID NO: 500715 - DNA, 33 bp, Homo sapien
tggggagaaggaagagccattaagcatctccca

SEQ ID NO: 500716 - DNA, 33 bp, Homo sapien
tggggagaaggaagaggcattaagcatctccca

SEQ ID NO: 500717 - DNA, 33 bp, Homo sapien
agcacagatgtgtctaatagaaatcacccttca

SEQ ID NO: 500718 - DNA, 33 bp, Homo sapien
agcacagatgtgtctagtagaaatcacccttca

SEQ ID NO: 500719 - DNA, 33 bp, Homo sapien
tttaagtttctctttaaaaattgcactgaagaa

SEQ ID NO: 500720 - DNA, 33 bp, Homo sapien
tttaagtttctctttagaaattgcactgaagaa

SEQ ID NO: 500721 - DNA, 33 bp, Homo sapien
tagagcatgattagaaaagataaaccttcaaac

SEQ ID NO: 500722 - DNA, 33 bp, Homo sapien
tagagcatgattagaagagataaaccttcaaac

SEQ ID NO: 500723 - DNA, 33 bp, Homo sapien
tgtcctcattcactcccccaggtggtatccagt

SEQ ID NO: 500724 - DNA, 33 bp, Homo sapien
tgtcctcattcactcctccaggtggtatccagt

SEQ ID NO: 500725 - DNA, 33 bp, Homo sapien
tcaaaaattttatacccatttcctggctctttg

SEQ ID NO: 500726 - DNA, 33 bp, Homo sapien
tcaaaaattttataccgatttcctggctctttg

SEQ ID NO: 500727 - DNA, 33 bp, Homo sapien
attggttgtagctgtaagtgtctgatgttcaac

SEQ ID NO: 500728 - DNA, 33 bp, Homo sapien
attggttgtagctgtaggtgtctgatgttcaac

SEQ ID NO: 500729 - DNA, 33 bp, Homo sapien
agcagatatttaagaacgttagcagaggtcttt

SEQ ID NO: 500730 - DNA, 33 bp, Homo sapien
agcagatatttaagaatgttagcagaggtcttt

SEQ ID NO: 500731 - DNA, 33 bp, Homo sapien
agctgtgctctgatgaacttaggcacatgtcat

SEQ ID NO: 500732 - DNA, 33 bp, Homo sapien
agctgtgctctgatgaccttaggcacatgtcat

SEQ ID NO: 500733 - DNA, 33 bp, Homo sapien
catgggacaaattccacaggaaaccaggtggtg

SEQ ID NO: 500734 - DNA, 33 bp, Homo sapien
catgggacaaattccataggaaaccaggtggtg

SEQ ID NO: 500735 - DNA, 33 bp, Homo sapien
taagtggaagcaataacaatatcagctgttgcc

SEQ ID NO: 500736 - DNA, 33 bp, Homo sapien
taagtggaagcaataataatatcagctgttgcc

SEQ ID NO: 500737 - DNA, 33 bp, Homo sapien
agtagctgagacctgaaaaatttggagaatcac

SEQ ID NO: 500738 - DNA, 33 bp, Homo sapien
agtagctgagacctgagaaatttggagaatcac

SEQ ID NO: 500739 - DNA, 33 bp, Homo sapien
attattacagtacctacagtgcctaaagacgtc

SEQ ID NO: 500740 - DNA, 33 bp, Homo sapien
attattacagtacctatagtgcctaaagacgtc

SEQ ID NO: 500741 - DNA, 33 bp, Homo sapien
agtggatgtaccctggcaagaaaagtgtgttct

SEQ ID NO: 500742 - DNA, 33 bp, Homo sapien
agtggatgtaccctgggaagaaaagtgtgttct

SEQ ID NO: 500743 - DNA, 33 bp, Homo sapien
tgagggatcctagtgacgatgctgcaacgtagg

SEQ ID NO: 500744 - DNA, 33 bp, Homo sapien
tgagggatcctagtgatgatgctgcaacgtagg

SEQ ID NO: 500745 - DNA, 33 bp, Homo sapien
ctatgatgtcccagagaagactgtcaagattat

SEQ ID NO: 500746 - DNA, 33 bp, Homo sapien
ctatgatgtcccagaggagactgtcaagattat

SEQ ID NO: 500747 - DNA, 33 bp, Homo sapien
tgaatctgcgtagagacaaaagagcagaagact

SEQ ID NO: 500748 - DNA, 33 bp, Homo sapien
tgaatctgcgtagagagaaaagagcagaagact

SEQ ID NO: 500749 - DNA, 33 bp, Homo sapien
cctctctgtctgtgaccgtaggtatgatataat

SEQ ID NO: 500750 - DNA, 33 bp, Homo sapien
cctctctgtctgtgactgtaggtatgatataat

SEQ ID NO: 500751 - DNA, 33 bp, Homo sapien
gccatcacacccggccacagttgagtcttaaaa

SEQ ID NO: 500752 - DNA, 33 bp, Homo sapien
gccatcacacccggccgcagttgagtcttaaaa

SEQ ID NO: 500753 - DNA, 33 bp, Homo sapien
cctcagtggaaagatgaatgtgaaaaaatgttg

SEQ ID NO: 500754 - DNA, 33 bp, Homo sapien
cctcagtggaaagatgcatgtgaaaaaatgttg

SEQ ID NO: 500755 - DNA, 33 bp, Homo sapien
gcacactgggctacaaaggggactaacatttat

SEQ ID NO: 500756 - DNA, 33 bp, Homo sapien
gcacactgggctacaagggggactaacatttat

SEQ ID NO: 500757 - DNA, 33 bp, Homo sapien
ctgtggaggccaagacaggctggatgtgtctga

SEQ ID NO: 500758 - DNA, 33 bp, Homo sapien
ctgtggaggccaagaccggctggatgtgtctga

SEQ ID NO: 500759 - DNA, 33 bp, Homo sapien
cataaagataagctgacaatgtgcaaactttag

SEQ ID NO: 500760 - DNA, 33 bp, Homo sapien
cataaagataagctgataatgtgcaaactttag

SEQ ID NO: 500761 - DNA, 33 bp, Homo sapien
tttttggttaacttgccgaaataattcttacaa

SEQ ID NO: 500762 - DNA, 33 bp, Homo sapien
tttttggttaacttgctgaaataattcttacaa

SEQ ID NO: 500763 - DNA, 33 bp, Homo sapien
gctcaacagtgtagaaaatgctcaaacgtattc

SEQ ID NO: 500764 - DNA, 33 bp, Homo sapien
gctcaacagtgtagaagatgctcaaacgtattc

SEQ ID NO: 500765 - DNA, 33 bp, Homo sapien
attgcaaagacccatacacttgtataatacgtt

SEQ ID NO: 500766 - DNA, 33 bp, Homo sapien
attgcaaagacccatatacttgtataatacgtt

SEQ ID NO: 500767 - DNA, 33 bp, Homo sapien
gacattcagaagggaacgaacattcttgaccca

SEQ ID NO: 500768 - DNA, 33 bp, Homo sapien
gacattcagaagggaaggaacattcttgaccca

SEQ ID NO: 500769 - DNA, 33 bp, Homo sapien
atcccagtcagtgatcagaggactgccccagtg

SEQ ID NO: 500770 - DNA, 33 bp, Homo sapien
atcccagtcagtgatcggaggactgccccagtg

SEQ ID NO: 500771 - DNA, 33 bp, Homo sapien
cgcagaaggtggctcgaaaattctggtggaaga

SEQ ID NO: 500772 - DNA, 33 bp, Homo sapien
cgcagaaggtggctcggaaattctggtggaaga

SEQ ID NO: 500773 - DNA, 33 bp, Homo sapien; identical to SEQ ID NO: 500771

SEQ ID NO: 500774 - DNA, 33 bp, Homo sapien; identical to SEQ ID NO: 500772

SEQ ID NO: 500775 - DNA, 33 bp, Homo sapien
caacctgttgtcaggaagaaggggaagggttga

SEQ ID NO: 500776 - DNA, 33 bp, Homo sapien
caacctgttgtcaggaggaaggggaagggttga

SEQ ID NO: 500777 - DNA, 33 bp, Homo sapien
aagaggacaagggccacactgccttacgccaca

SEQ ID NO: 500778 - DNA, 33 bp, Homo sapien
aagaggacaagggccatactgccttacgccaca

SEQ ID NO: 500779 - DNA, 33 bp, Homo sapien
gaatggcgtctacccaatcaatgcacagctgcc

SEQ ID NO: 500780 - DNA, 33 bp, Homo sapien
gaatggcgtctacccagtcaatgcacagctgcc

SEQ ID NO: 500781 - DNA, 33 bp, Homo sapien
gccagcagcaggcgaacgaggtgacggaaatta

SEQ ID NO: 500782 - DNA, 33 bp, Homo sapien
gccagcagcaggcgaatgaggtgacggaaatta

SEQ ID NO: 500783 - DNA, 33 bp, Homo sapien
aggtgaccagagactaacgccaatgatggagat

SEQ ID NO: 500784 - DNA, 33 bp, Homo sapien
aggtgaccagagactaccgccaatgatggagat

SEQ ID NO: 500785 - DNA, 33 bp, Homo sapien
tcagcaatgcagacgccagaggcctgaaaacag

SEQ ID NO: 500786 - DNA, 33 bp, Homo sapien
tcagcaatgcagacgctagaggcctgaaaacag

SEQ ID NO: 500787 - DNA, 33 bp, Homo sapien
tgaaagtgggcttcaacacatactgcaaagcaa

SEQ ID NO: 500788 - DNA, 33 bp, Homo sapien
tgaaagtgggcttcaatacatactgcaaagcaa

SEQ ID NO: 500789 - DNA, 33 bp, Homo sapien
gattatatcctgaaaaaagctggagtcattgaa

SEQ ID NO: 500790 - DNA, 33 bp, Homo sapien
gattatatcctgaaaatagctggagtcattgaa

SEQ ID NO: 500791 - DNA, 33 bp, Homo sapien
cagctgggcatggtcactcaaacctgtaatccc

SEQ ID NO: 500792 - DNA, 33 bp, Homo sapien
cagctgggcatggtcagtcaaacctgtaatccc

SEQ ID NO: 500793 - DNA, 33 bp, Homo sapien
tgcaagtttccagaatcagtcacaatttgatgt

SEQ ID NO: 500794 - DNA, 33 bp, Homo sapien
tgcaagtttccagaattagtcacaatttgatgt

SEQ ID NO: 500795 - DNA, 33 bp, Homo sapien
agtctgataactctccaacaaaaacaggatgtg

SEQ ID NO: 500796 - DNA, 33 bp, Homo sapien
agtctgataactctccgacaaaaacaggatgtg

SEQ ID NO: 500797 - DNA, 33 bp, Homo sapien
tcaaccacagtctgacaccagagcccacttcca

SEQ ID NO: 500798 - DNA, 33 bp, Homo sapien
tcaaccacagtctgacgccagagcccacttcca

SEQ ID NO: 500799 - DNA, 33 bp, Homo sapien
ggccagttcaagccaggaaagggactagccttc

SEQ ID NO: 500800 - DNA, 33 bp, Homo sapien
ggccagttcaagccagtaaagggactagccttc

SEQ ID NO: 500801 - DNA, 33 bp, Homo sapien
gggcagagcctgctaaaggttaggagtcgcctc

SEQ ID NO: 500802 - DNA, 33 bp, Homo sapien
gggcagagcctgctaagggttaggagtcgcctc

SEQ ID NO: 500803 - DNA, 33 bp, Homo sapien
gcttgcagccctcacaatctggttctggaagta

SEQ ID NO: 500804 - DNA, 33 bp, Homo sapien
gcttgcagccctcacagtctggttctggaagta

SEQ ID NO: 500805 - DNA, 33 bp, Homo sapien
ccgagcacctgaatgacggtacggacctgagtc

SEQ ID NO: 500806 - DNA, 33 bp, Homo sapien
ccgagcacctgaatgatggtacggacctgagtc

SEQ ID NO: 500807 - DNA, 33 bp, Homo sapien
atggcagctctcgacagtcagataccaatccct

SEQ ID NO: 500808 - DNA, 33 bp, Homo sapien
atggcagctctcgacattcagataccaatccct

SEQ ID NO: 500809 - DNA, 33 bp, Homo sapien
atgtcacccattttggacacttactcaaggaat

SEQ ID NO: 500810 - DNA, 33 bp, Homo sapien
atgtcacccattttgggcacttactcaaggaat

SEQ ID NO: 500811 - DNA, 33 bp, Homo sapien
atacctgcttggacaacgtggataaagctgtga

SEQ ID NO: 500812 - DNA, 33 bp, Homo sapien
atacctgcttggacaatgtggataaagctgtga

SEQ ID NO: 500813 - DNA, 33 bp, Homo sapien
agtctgccttgaacacagaagagatcttgttct

SEQ ID NO: 500814 - DNA, 33 bp, Homo sapien
agtctgccttgaacacggaagagatcttgttct

SEQ ID NO: 500815 - DNA, 33 bp, Homo sapien
ccagattttactccacaaccacctgtgtctgaa

SEQ ID NO: 500816 - DNA, 33 bp, Homo sapien
ccagattttactccacgaccacctgtgtctgaa

SEQ ID NO: 500817 - DNA, 33 bp, Homo sapien
tctcagaccagtgggagagaccagcagggttag

SEQ ID NO: 500818 - DNA, 33 bp, Homo sapien
tctcagaccagtgggatagaccagcagggttag

SEQ ID NO: 500819 - DNA, 33 bp, Homo sapien
tcctcttgcttcttgccacaggcagccttcctt

SEQ ID NO: 500820 - DNA, 33 bp, Homo sapien
tcctcttgcttcttgcgacaggcagccttcctt

SEQ ID NO: 500821 - DNA, 33 bp, Homo sapien
gcacactcaggttttccatgttctgcttagaag

SEQ ID NO: 500822 - DNA, 33 bp, Homo sapien
gcacactcaggttttctatgttctgcttagaag

SEQ ID NO: 500823 - DNA, 33 bp, Homo sapien
tgaaatccagccccaactaagtgaatagatccc

SEQ ID NO: 500824 - DNA, 33 bp, Homo sapien
tgaaatccagccccaattaagtgaatagatccc

SEQ ID NO: 500825 - DNA, 33 bp, Homo sapien
ttgcatttccaccaacaatatttaagagtcctc

SEQ ID NO: 500826 - DNA, 33 bp, Homo sapien
ttgcatttccaccaacgatatttaagagtcctc

SEQ ID NO: 500827 - DNA, 33 bp, Homo sapien
gagagagatgaatgcaaataggagtctctctct

SEQ ID NO: 500828 - DNA, 33 bp, Homo sapien
gagagagatgaatgcagataggagtctctctct

SEQ ID NO: 500829 - DNA, 33 bp, Homo sapien
ggggccgaggaaagtagagaggaagagaagctc

SEQ ID NO: 500830 - DNA, 33 bp, Homo sapien
ggggccgaggaaagtatagaggaagagaagctc

SEQ ID NO: 500831 - DNA, 33 bp, Homo sapien
ttcagaagagggaaaaaggccgtggaggtatat

SEQ ID NO: 500832 - DNA, 33 bp, Homo sapien
ttcagaagagggaaaagggccgtggaggtatat

SEQ ID NO: 500833 - DNA, 33 bp, Homo sapien
atcccatggctggccaactaaagttcagctcct

SEQ ID NO: 500834 - DNA, 33 bp, Homo sapien
atcccatggctggccatctaaagttcagctcct

SEQ ID NO: 500835 - DNA, 33 bp, Homo sapien
tgtcaagcatcaggccaggagtgagtgggcagt

SEQ ID NO: 500836 - DNA, 33 bp, Homo sapien
tgtcaagcatcaggcccggagtgagtgggcagt

SEQ ID NO: 500837 - DNA, 33 bp, Homo sapien
gtgtttgcttcttaaacgctatttgtacaccct

SEQ ID NO: 500838 - DNA, 33 bp, Homo sapien
gtgtttgcttcttaaatgctatttgtacaccct

SEQ ID NO: 500839 - DNA, 33 bp, Homo sapien
ggggcagtgtgacaaacgctccgaagccagaga

SEQ ID NO: 500840 - DNA, 33 bp, Homo sapien
ggggcagtgtgacaaatgctccgaagccagaga

SEQ ID NO: 500841 - DNA, 33 bp, Homo sapien
gttaggctgttgacaactaggtcctgatgagca

SEQ ID NO: 500842 - DNA, 33 bp, Homo sapien
gttaggctgttgacaagtaggtcctgatgagca

SEQ ID NO: 500843 - DNA, 33 bp, Homo sapien
cctcgtgccctttacactcctgtctggagaccc

SEQ ID NO: 500844 - DNA, 33 bp, Homo sapien
cctcgtgccctttacagtcctgtctggagaccc

SEQ ID NO: 500845 - DNA, 33 bp, Homo sapien
cctcacccttcgatgaacagctccggtccccct

SEQ ID NO: 500846 - DNA, 33 bp, Homo sapien
cctcacccttcgatgaccagctccggtccccct

SEQ ID NO: 500847 - DNA, 33 bp, Homo sapien
ttgtccatttccaaggacccatttcagtcaggc

SEQ ID NO: 500848 - DNA, 33 bp, Homo sapien
ttgtccatttccaaggtcccatttcagtcaggc

SEQ ID NO: 500849 - DNA, 33 bp, Homo sapien
gacagttcaaatggccaccaatcacaccagcga

SEQ ID NO: 500850 - DNA, 33 bp, Homo sapien
gacagttcaaatggccgccaatcacaccagcga

SEQ ID NO: 500851 - DNA, 33 bp, Homo sapien
aatggctcccgacttcaccctctagaaacactt

SEQ ID NO: 500852 - DNA, 33 bp, Homo sapien
aatggctcccgacttcgccctctagaaacactt

SEQ ID NO: 500853 - DNA, 33 bp, Homo sapien
cttcctgacaagctcaggcagtagatactaata

SEQ ID NO: 500854 - DNA, 33 bp, Homo sapien
cttcctgacaagctcatgcagtagatactaata

SEQ ID NO: 500855 - DNA, 33 bp, Homo sapien
tcctttctgtatttctcaaggctgctcaccaga

SEQ ID NO: 500856 - DNA, 33 bp, Homo sapien
tcctttctgtatttcttaaggctgctcaccaga

SEQ ID NO: 500857 - DNA, 33 bp, Homo sapien
ttgtgctcaaatggccaaagctgttcacgtctg

SEQ ID NO: 500858 - DNA, 33 bp, Homo sapien
ttgtgctcaaatggccgaagctgttcacgtctg

SEQ ID NO: 500859 - DNA, 33 bp, Homo sapien
cccgctgaggtgaagcaatgtgacaaggccaca

SEQ ID NO: 500860 - DNA, 33 bp, Homo sapien
cccgctgaggtgaagcgatgtgacaaggccaca

SEQ ID NO: 500861 - DNA, 33 bp, Homo sapien
ctgatgtattggtctaaggtgttgcctggtcat

SEQ ID NO: 500862 - DNA, 33 bp, Homo sapien
ctgatgtattggtctagggtgttgcctggtcat

SEQ ID NO: 500863 - DNA, 33 bp, Homo sapien
atggcgtgggagtggaaatgtttttatttatat

SEQ ID NO: 500864 - DNA, 33 bp, Homo sapien
atggcgtgggagtggagatgtttttatttatat

SEQ ID NO: 500865 - DNA, 33 bp, Homo sapien
ctttgagatggccacactgacctttatttccta

SEQ ID NO: 500866 - DNA, 33 bp, Homo sapien
ctttgagatggccacattgacctttatttccta

SEQ ID NO: 500867 - DNA, 33 bp, Homo sapien
tcttccaggtacttaacggacgcagcctgttcc

SEQ ID NO: 500868 - DNA, 33 bp, Homo sapien
tcttccaggtacttaatggacgcagcctgttcc

SEQ ID NO: 500869 - DNA, 33 bp, Homo sapien
acaactcagacttctaagtgagaggaacatgaa

SEQ ID NO: 500870 - DNA, 33 bp, Homo sapien
acaactcagacttctatgtgagaggaacatgaa

SEQ ID NO: 500871 - DNA, 33 bp, Homo sapien
tagatctaagtctgcaaaagcaatatcacaaaa

SEQ ID NO: 500872 - DNA, 33 bp, Homo sapien
tagatctaagtctgcataagcaatatcacaaaa

SEQ ID NO: 500873 - DNA, 33 bp, Homo sapien
cagcttggctatgccacctgaggtcttgctccc

SEQ ID NO: 500874 - DNA, 33 bp, Homo sapien
cagcttggctatgccatctgaggtcttgctccc

SEQ ID NO: 500875 - DNA, 33 bp, Homo sapien
tagataggtctcagcacggcctttgttccaacc

SEQ ID NO: 500876 - DNA, 33 bp, Homo sapien
tagataggtctcagcatggcctttgttccaacc

SEQ ID NO: 500877 - DNA, 33 bp, Homo sapien
tttctttaaaatccggaaccagacaaagatgcc

SEQ ID NO: 500878 - DNA, 33 bp, Homo sapien
tttctttaaaatccgggaccagacaaagatgcc

SEQ ID NO: 500879 - DNA, 33 bp, Homo sapien
gatggatagttcacaaatatcttctcccattcc

SEQ ID NO: 500880 - DNA, 33 bp, Homo sapien
gatggatagttcacaagtatcttctcccattcc

SEQ ID NO: 500881 - DNA, 33 bp, Homo sapien
ctggcaacgtctaaagccacagcaattccttgt

SEQ ID NO: 500882 - DNA, 33 bp, Homo sapien
ctggcaacgtctaaagtcacagcaattccttgt

SEQ ID NO: 500883 - DNA, 33 bp, Homo sapien
gaagggttgtccttaaaatttcagagtggaaat

SEQ ID NO: 500884 - DNA, 33 bp, Homo sapien
gaagggttgtccttaagatttcagagtggaaat

SEQ ID NO: 500885 - DNA, 33 bp, Homo sapien
gaattaggataataccaatggaatgtggcaagc

SEQ ID NO: 500886 - DNA, 33 bp, Homo sapien
gaattaggataataccgatggaatgtggcaagc

SEQ ID NO: 500887 - DNA, 33 bp, Homo sapien
ggaacaacagacaaacagcagagtggcctctcc

SEQ ID NO: 500888 - DNA, 33 bp, Homo sapien
ggaacaacagacaaacggcagagtggcctctcc

SEQ ID NO: 500889 - DNA, 33 bp, Homo sapien
cagatttatggaggtgaaaaataaaggatgtca

SEQ ID NO: 500890 - DNA, 33 bp, Homo sapien
cagatttatggaggtgcaaaataaaggatgtca

SEQ ID NO: 500891 - DNA, 33 bp, Homo sapien
taggtccaggtgaggacgctgactgtgcatgtt

SEQ ID NO: 500892 - DNA, 33 bp, Homo sapien
taggtccaggtgaggatgctgactgtgcatgtt

SEQ ID NO: 500893 - DNA, 33 bp, Homo sapien
attgaataaatgcccaatgattatgatacttgg

SEQ ID NO: 500894 - DNA, 33 bp, Homo sapien
attgaataaatgcccattgattatgatacttgg

SEQ ID NO: 500895 - DNA, 33 bp, Homo sapien
ggaaaatagtcaactcaacagtggaagaacctg

SEQ ID NO: 500896 - DNA, 33 bp, Homo sapien
ggaaaatagtcaactcgacagtggaagaacctg

SEQ ID NO: 500897 - DNA, 33 bp, Homo sapien
taacctctgttcctcaataccctcctttataaa

SEQ ID NO: 500898 - DNA, 33 bp, Homo sapien
taacctctgttcctcagtaccctcctttataaa

SEQ ID NO: 500899 - DNA, 33 bp, Homo sapien
gacaggaggcagcttcaagttccttttcttcct

SEQ ID NO: 500900 - DNA, 33 bp, Homo sapien
gacaggaggcagcttcgagttccttttcttcct

SEQ ID NO: 500901 - DNA, 33 bp, Homo sapien
taccacctttgtgagtaaaaaccttcaagccaa

SEQ ID NO: 500902 - DNA, 33 bp, Homo sapien
taccacctttgtgagtgaaaaccttcaagccaa

SEQ ID NO: 500903 - DNA, 33 bp, Homo sapien
agacccaagactaagaaagttcctccagaattc

SEQ ID NO: 500904 - DNA, 33 bp, Homo sapien
agacccaagactaagacagttcctccagaattc

SEQ ID NO: 500905 - DNA, 33 bp, Homo sapien
tgtgagatagtttccactgactcctccttctga

SEQ ID NO: 500906 - DNA, 33 bp, Homo sapien
tgtgagatagtttccattgactcctccttctga

SEQ ID NO: 500907 - DNA, 33 bp, Homo sapien
gcgtggggggtgagccaggaaagctctgaattc

SEQ ID NO: 500908 - DNA, 33 bp, Homo sapien
gcgtggggggtgagccgggaaagctctgaattc

SEQ ID NO: 500909 - DNA, 33 bp, Homo sapien
ggtgtggaatggaaaacagagatggaggacaga

SEQ ID NO: 500910 - DNA, 33 bp, Homo sapien
ggtgtggaatggaaaatagagatggaggacaga

SEQ ID NO: 500911 - DNA, 33 bp, Homo sapien
tgaggagggcattaagaagccttagaaagacct

SEQ ID NO: 500912 - DNA, 33 bp, Homo sapien
tgaggagggcattaaggagccttagaaagacct

SEQ ID NO: 500913 - DNA, 33 bp, Homo sapien
tttgagaacaagcccacataagaccaagtatgc

SEQ ID NO: 500914 - DNA, 33 bp, Homo sapien
tttgagaacaagcccatataagaccaagtatgc

SEQ ID NO: 500915 - DNA, 33 bp, Homo sapien
aggggtttcaccctcaaactcaaaactgcctct

SEQ ID NO: 500916 - DNA, 33 bp, Homo sapien
aggggtttcaccctcagactcaaaactgcctct

SEQ ID NO: 500917 - DNA, 33 bp, Homo sapien
tcaattaacaatatcaatatatcaagattggct

SEQ ID NO: 500918 - DNA, 33 bp, Homo sapien
tcaattaacaatatcattatatcaagattggct

SEQ ID NO: 500919 - DNA, 33 bp, Homo sapien
agtttgatcatgtggccgagtcactcaatcatg

SEQ ID NO: 500920 - DNA, 33 bp, Homo sapien
agtttgatcatgtggctgagtcactcaatcatg

SEQ ID NO: 500921 - DNA, 33 bp, Homo sapien
gtactaagtttccccacgcctcagtaggtataa

SEQ ID NO: 500922 - DNA, 33 bp, Homo sapien
gtactaagtttccccatgcctcagtaggtataa

SEQ ID NO: 500923 - DNA, 33 bp, Homo sapien
ggtcaggttcagccaaagaaaggcactggaggc

SEQ ID NO: 500924 - DNA, 33 bp, Homo sapien
ggtcaggttcagccaacgaaaggcactggaggc

SEQ ID NO: 500925 - DNA, 33 bp, Homo sapien
gaagtttcagtaggaacgcatctaaaagcatcc

SEQ ID NO: 500926 - DNA, 33 bp, Homo sapien
gaagtttcagtaggaatgcatctaaaagcatcc

SEQ ID NO: 500927 - DNA, 33 bp, Homo sapien
aatgcacctgggattacctggcgtgtgatacct

SEQ ID NO: 500928 - DNA, 33 bp, Homo sapien
aatgcacctgggattatctggcgtgtgatacct

SEQ ID NO: 500929 - DNA, 33 bp, Homo sapien
acacagatagaccaaaagtaatgccagcccctg

SEQ ID NO: 500930 - DNA, 33 bp, Homo sapien
acacagatagaccaaaggtaatgccagcccctg

SEQ ID NO: 500931 - DNA, 33 bp, Homo sapien
gcttatctcccatcaacgctccttggggtgagg

SEQ ID NO: 500932 - DNA, 33 bp, Homo sapien
gcttatctcccatcaatgctccttggggtgagg

SEQ ID NO: 500933 - DNA, 33 bp, Homo sapien
gttgttggacttgagcaattattttggtcttgg

SEQ ID NO: 500934 - DNA, 33 bp, Homo sapien
gttgttggacttgagccattattttggtcttgg

SEQ ID NO: 500935 - DNA, 33 bp, Homo sapien
aagtatggtaatttcaaaacagaaatgtgggaa

SEQ ID NO: 500936 - DNA, 33 bp, Homo sapien
aagtatggtaatttcacaacagaaatgtgggaa

SEQ ID NO: 500937 - DNA, 33 bp, Homo sapien
tattttctcctctgaaaaacactgcattcacat

SEQ ID NO: 500938 - DNA, 33 bp, Homo sapien
tattttctcctctgaacaacactgcattcacat

SEQ ID NO: 500939 - DNA, 33 bp, Homo sapien
aacaagaataactacaatggagaaacttcacaa

SEQ ID NO: 500940 - DNA, 33 bp, Homo sapien
aacaagaataactacagtggagaaacttcacaa

SEQ ID NO: 500941 - DNA, 33 bp, Homo sapien
ggcaaaggtaaccaaccgtgctctttgcagagt

SEQ ID NO: 500942 - DNA, 33 bp, Homo sapien
ggcaaaggtaaccaactgtgctctttgcagagt

SEQ ID NO: 500943 - DNA, 33 bp, Homo sapien
taataggtagctggaaaaatacccaacagaaat

SEQ ID NO: 500944 - DNA, 33 bp, Homo sapien
taataggtagctggaacaatacccaacagaaat

SEQ ID NO: 500945 - DNA, 33 bp, Homo sapien
tagctcttgttcagcaaaggggaatatgagaag

SEQ ID NO: 500946 - DNA, 33 bp, Homo sapien
tagctcttgttcagcagaggggaatatgagaag

SEQ ID NO: 500947 - DNA, 33 bp, Homo sapien
cacttttcctttatacaccttagattgctcttc

SEQ ID NO: 500948 - DNA, 33 bp, Homo sapien
cacttttcctttatacgccttagattgctcttc

SEQ ID NO: 500949 - DNA, 33 bp, Homo sapien
gattattttttacagaacctttacagtctgtga

SEQ ID NO: 500950 - DNA, 33 bp, Homo sapien
gattattttttacagagcctttacagtctgtga

SEQ ID NO: 500951 - DNA, 33 bp, Homo sapien
tgactgaggcctggccaagcaaaagactcgatc

SEQ ID NO: 500952 - DNA, 33 bp, Homo sapien
tgactgaggcctggccgagcaaaagactcgatc

SEQ ID NO: 500953 - DNA, 33 bp, Homo sapien
tctccccaggttcgcactgacccaaccacatgg

SEQ ID NO: 500954 - DNA, 33 bp, Homo sapien
tctccccaggttcgcattgacccaaccacatgg

SEQ ID NO: 500955 - DNA, 33 bp, Homo sapien
gacctcacaatgaaaagagttgcatgtttttgt

SEQ ID NO: 500956 - DNA, 33 bp, Homo sapien
gacctcacaatgaaaatagttgcatgtttttgt

SEQ ID NO: 500957 - DNA, 33 bp, Homo sapien
ccaccgaaacagctcacgtcaagaccttgaagg

SEQ ID NO: 500958 - DNA, 33 bp, Homo sapien
ccaccgaaacagctcatgtcaagaccttgaagg

SEQ ID NO: 500959 - DNA, 33 bp, Homo sapien
ctatttctgccttgtgcaaaacggaaatttttt

SEQ ID NO: 500960 - DNA, 33 bp, Homo sapien
ctatttctgccttgtgtaaaacggaaatttttt

SEQ ID NO: 500961 - DNA, 33 bp, Homo sapien
taataatcacctcaacaggtagataagatcaaa

SEQ ID NO: 500962 - DNA, 33 bp, Homo sapien
taataatcacctcaactggtagataagatcaaa

SEQ ID NO: 500963 - DNA, 33 bp, Homo sapien
ccacacctatatcacccatattcaagggcaaag

SEQ ID NO: 500964 - DNA, 33 bp, Homo sapien
ccacacctatatcacctatattcaagggcaaag

SEQ ID NO: 500965 - DNA, 33 bp, Homo sapien
gctcagggcgggtaataaacatcattggaacta

SEQ ID NO: 500966 - DNA, 33 bp, Homo sapien
gctcagggcgggtaattaacatcattggaacta

SEQ ID NO: 500967 - DNA, 33 bp, Homo sapien
ttacaaagcctttgtacaagtcctctctgtctt

SEQ ID NO: 500968 - DNA, 33 bp, Homo sapien
ttacaaagcctttgtataagtcctctctgtctt

SEQ ID NO: 500969 - DNA, 33 bp, Homo sapien
caggaagcttttaagacagtcattagttccaca

SEQ ID NO: 500970 - DNA, 33 bp, Homo sapien
caggaagcttttaagagagtcattagttccaca

SEQ ID NO: 500971 - DNA, 33 bp, Homo sapien
tcatgcaaaattacgtaaaaattgtgtgagtat

SEQ ID NO: 500972 - DNA, 33 bp, Homo sapien
tcatgcaaaattacgtgaaaattgtgtgagtat

SEQ ID NO: 500973 - DNA, 33 bp, Homo sapien
aatcaggcctgaggtcccctacaagcttgtctg

SEQ ID NO: 500974 - DNA, 33 bp, Homo sapien
aatcaggcctgaggtcgcctacaagcttgtctg

SEQ ID NO: 500975 - DNA, 33 bp, Homo sapien
ttatctggagataaccagagttggctacagaag

SEQ ID NO: 500976 - DNA, 33 bp, Homo sapien
ttatctggagataaccggagttggctacagaag

SEQ ID NO: 500977 - DNA, 33 bp, Homo sapien
aaggcatccagtcttccatcattgagcatgtta

SEQ ID NO: 500978 - DNA, 33 bp, Homo sapien
aaggcatccagtcttctatcattgagcatgtta

SEQ ID NO: 500979 - DNA, 33 bp, Homo sapien
tgaagtcctcagaccaatgaccttgaatgtgct

SEQ ID NO: 500980 - DNA, 33 bp, Homo sapien
tgaagtcctcagaccagtgaccttgaatgtgct

SEQ ID NO: 500981 - DNA, 33 bp, Homo sapien
ggacttcagagcacctaaactccccacatagct

SEQ ID NO: 500982 - DNA, 33 bp, Homo sapien
ggacttcagagcacctcaactccccacatagct

SEQ ID NO: 500983 - DNA, 33 bp, Homo sapien
aatttaggaggactcaaacctttgggtgggtgg

SEQ ID NO: 500984 - DNA, 33 bp, Homo sapien
aatttaggaggactcagacctttgggtgggtgg

SEQ ID NO: 500985 - DNA, 33 bp, Homo sapien
ttatggagaaaaaaggccataaaaaacattcaa

SEQ ID NO: 500986 - DNA, 33 bp, Homo sapien
ttatggagaaaaaaggtcataaaaaacattcaa

SEQ ID NO: 500987 - DNA, 33 bp, Homo sapien
cacaccaatgcgggccaatcaggaaacaagcaa

SEQ ID NO: 500988 - DNA, 33 bp, Homo sapien
cacaccaatgcgggccgatcaggaaacaagcaa

SEQ ID NO: 500989 - DNA, 33 bp, Homo sapien
agcccggaacagcctaagtgtgaaatctcacca

SEQ ID NO: 500990 - DNA, 33 bp, Homo sapien
agcccggaacagcctaggtgtgaaatctcacca

SEQ ID NO: 500991 - DNA, 33 bp, Homo sapien
gaggaagctacaatcactacaacttaaaagaag

SEQ ID NO: 500992 - DNA, 33 bp, Homo sapien
gaggaagctacaatcattacaacttaaaagaag

SEQ ID NO: 500993 - DNA, 33 bp, Homo sapien
agtagacctgagtttgaatctgagctctgtctc

SEQ ID NO: 500994 - DNA, 33 bp, Homo sapien
agtagacctgagtttgcatctgagctctgtctc

SEQ ID NO: 500995 - DNA, 33 bp, Homo sapien
cctgtgcagggtgacccagcatgggatgtatga

SEQ ID NO: 500996 - DNA, 33 bp, Homo sapien
cctgtgcagggtgacctagcatgggatgtatga

SEQ ID NO: 500997 - DNA, 33 bp, Homo sapien
ttcgtcacggaagctaaaagctctatacacccg

SEQ ID NO: 500998 - DNA, 33 bp, Homo sapien
ttcgtcacggaagctagaagctctatacacccg

SEQ ID NO: 500999 - DNA, 33 bp, Homo sapien
ctgcagtaagaatccacaggaaagtgggtagag

SEQ ID NO: 501000 - DNA, 33 bp, Homo sapien
ctgcagtaagaatccataggaaagtgggtagag

SEQ ID NO: 501001 - DNA, 33 bp, Homo sapien
aagtttttgctttggaataaaggcccaagtaag

SEQ ID NO: 501002 - DNA, 33 bp, Homo sapien
aagtttttgctttggagtaaaggcccaagtaag

SEQ ID NO: 501003 - DNA, 33 bp, Homo sapien
cataattacaacttacagaatttttgtttatca

SEQ ID NO: 501004 - DNA, 33 bp, Homo sapien
cataattacaacttacggaatttttgtttatca

SEQ ID NO: 501005 - DNA, 33 bp, Homo sapien
gcaggtgactgagttcaattaaagcccctctaa

SEQ ID NO: 501006 - DNA, 33 bp, Homo sapien
gcaggtgactgagttcgattaaagcccctctaa

SEQ ID NO: 501007 - DNA, 33 bp, Homo sapien
taattatgttgggaaaatgtcatgaatttaaaa

SEQ ID NO: 501008 - DNA, 33 bp, Homo sapien
taattatgttgggaaagtgtcatgaatttaaaa

SEQ ID NO: 501009 - DNA, 33 bp, Homo sapien
gcacctggacacataaaaagtaaaactgacctt

SEQ ID NO: 501010 - DNA, 33 bp, Homo sapien
gcacctggacacataacaagtaaaactgacctt

SEQ ID NO: 501011 - DNA, 33 bp, Homo sapien
tctttgggtcatatcccgcaacaggtgcacaaa

SEQ ID NO: 501012 - DNA, 33 bp, Homo sapien
tctttgggtcatatcctgcaacaggtgcacaaa

SEQ ID NO: 501013 - DNA, 33 bp, Homo sapien
tgtgccagtgttgcctcacttcactaaccacag

SEQ ID NO: 501014 - DNA, 33 bp, Homo sapien
tgtgccagtgttgcctgacttcactaaccacag

SEQ ID NO: 501015 - DNA, 33 bp, Homo sapien
agctgcttatgtggacaactcgtggggtaccta

SEQ ID NO: 501016 - DNA, 33 bp, Homo sapien
agctgcttatgtggacgactcgtggggtaccta

SEQ ID NO: 501017 - DNA, 33 bp, Homo sapien
gcttccatatcctgaacgcctctaatgtgccag

SEQ ID NO: 501018 - DNA, 33 bp, Homo sapien
gcttccatatcctgaatgcctctaatgtgccag

SEQ ID NO: 501019 - DNA, 33 bp, Homo sapien
ttaatataattccaaactcttaaccagtaccca

SEQ ID NO: 501020 - DNA, 33 bp, Homo sapien
ttaatataattccaaattcttaaccagtaccca

SEQ ID NO: 501021 - DNA, 33 bp, Homo sapien
agtggccagcaaggtaagagaaaggccagaaga

SEQ ID NO: 501022 - DNA, 33 bp, Homo sapien
agtggccagcaaggtaggagaaaggccagaaga

SEQ ID NO: 501023 - DNA, 33 bp, Homo sapien
gtatatattcacaatacaaaatttgaaaggtac

SEQ ID NO: 501024 - DNA, 33 bp, Homo sapien
gtatatattcacaatagaaaatttgaaaggtac

SEQ ID NO: 501025 - DNA, 33 bp, Homo sapien
aagaaagggccatgtagaaaatgaaggtccctt

SEQ ID NO: 501026 - DNA, 33 bp, Homo sapien
aagaaagggccatgtataaaatgaaggtccctt

SEQ ID NO: 501027 - DNA, 33 bp, Homo sapien
gaagtggatagccagaaagctggttcctttctc

SEQ ID NO: 501028 - DNA, 33 bp, Homo sapien
gaagtggatagccagacagctggttcctttctc

SEQ ID NO: 501029 - DNA, 33 bp, Homo sapien
acattataaccttgacactactgaaatattatt

SEQ ID NO: 501030 - DNA, 33 bp, Homo sapien
acattataaccttgacgctactgaaatattatt

SEQ ID NO: 501031 - DNA, 33 bp, Homo sapien
gtttagattcattgatcagtggttaaaacatca

SEQ ID NO: 501032 - DNA, 33 bp, Homo sapien
gtttagattcattgattagtggttaaaacatca

SEQ ID NO: 501033 - DNA, 33 bp, Homo sapien
ttaaattgaacaaaaaataccataaacattcca

SEQ ID NO: 501034 - DNA, 33 bp, Homo sapien
ttaaattgaacaaaaagtaccataaacattcca

SEQ ID NO: 501035 - DNA, 33 bp, Homo sapien
gcatttaaagcttccaatccgtgtccttctgag

SEQ ID NO: 501036 - DNA, 33 bp, Homo sapien
gcatttaaagcttccattccgtgtccttctgag

SEQ ID NO: 501037 - DNA, 33 bp, Homo sapien
aaaactacaattatgaaggcaaagtaactttac

SEQ ID NO: 501038 - DNA, 33 bp, Homo sapien
aaaactacaattatgatggcaaagtaactttac

SEQ ID NO: 501039 - DNA, 33 bp, Homo sapien
ggacagtgttcttccacaaaaggactcaagaaa

SEQ ID NO: 501040 - DNA, 33 bp, Homo sapien
ggacagtgttcttccataaaaggactcaagaaa

SEQ ID NO: 501041 - DNA, 33 bp, Homo sapien
tagtattcttactagccgcctttcttcaaatga

SEQ ID NO: 501042 - DNA, 33 bp, Homo sapien
tagtattcttactagctgcctttcttcaaatga

SEQ ID NO: 501043 - DNA, 33 bp, Homo sapien
aaaaagctacatcccacgacctccagagacatc

SEQ ID NO: 501044 - DNA, 33 bp, Homo sapien
aaaaagctacatcccatgacctccagagacatc

SEQ ID NO: 501045 - DNA, 33 bp, Homo sapien
tttgttactctttttcaatgtgtaaatgtcccc

SEQ ID NO: 501046 - DNA, 33 bp, Homo sapien
tttgttactctttttccatgtgtaaatgtcccc

SEQ ID NO: 501047 - DNA, 33 bp, Homo sapien
gccctttgtttgaatagatcaagcctctacacc

SEQ ID NO: 501048 - DNA, 33 bp, Homo sapien
gccctttgtttgaatatatcaagcctctacacc

SEQ ID NO: 501049 - DNA, 33 bp, Homo sapien
catgctgagttattaactagaaatgttctccaa

SEQ ID NO: 501050 - DNA, 33 bp, Homo sapien
catgctgagttattaagtagaaatgttctccaa

SEQ ID NO: 501051 - DNA, 33 bp, Homo sapien
tgtttaaaactcttaccgatttctttggcaatg

SEQ ID NO: 501052 - DNA, 33 bp, Homo sapien
tgtttaaaactcttactgatttctttggcaatg

SEQ ID NO: 501053 - DNA, 33 bp, Homo sapien
aaaggtgatgtgcagacatggtggtaaacttgg

SEQ ID NO: 501054 - DNA, 33 bp, Homo sapien
aaaggtgatgtgcagatatggtggtaaacttgg

SEQ ID NO: 501055 - DNA, 33 bp, Homo sapien
tgaaaatacagaaataaagtgtttcaagcatat

SEQ ID NO: 501056 - DNA, 33 bp, Homo sapien
tgaaaatacagaaatagagtgtttcaagcatat

SEQ ID NO: 501057 - DNA, 33 bp, Homo sapien
agaaggctgaggataacatccaaaattgactgc

SEQ ID NO: 501058 - DNA, 33 bp, Homo sapien
agaaggctgaggataatatccaaaattgactgc

SEQ ID NO: 501059 - DNA, 33 bp, Homo sapien
gtatttgcagatggccggaagtatagagccaga

SEQ ID NO: 501060 - DNA, 33 bp, Homo sapien
gtatttgcagatggcctgaagtatagagccaga

SEQ ID NO: 501061 - DNA, 33 bp, Homo sapien
ctgaactcttctcacacgtttgcttaacttatt

SEQ ID NO: 501062 - DNA, 33 bp, Homo sapien
ctgaactcttctcacaggtttgcttaacttatt

SEQ ID NO: 501063 - DNA, 33 bp, Homo sapien
ttattgcaatatcgtgcaaactaacttttctat

SEQ ID NO: 501064 - DNA, 33 bp, Homo sapien
ttattgcaatatcgtggaaactaacttttctat

SEQ ID NO: 501065 - DNA, 33 bp, Homo sapien
gtgttaaaaaagttccacaggatgatgaaaatg

SEQ ID NO: 501066 - DNA, 33 bp, Homo sapien
gtgttaaaaaagttccgcaggatgatgaaaatg

SEQ ID NO: 501067 - DNA, 33 bp, Homo sapien
tctggctaaaaccacacggtgagcccttgggtc

SEQ ID NO: 501068 - DNA, 33 bp, Homo sapien
tctggctaaaaccacatggtgagcccttgggtc

SEQ ID NO: 501069 - DNA, 33 bp, Homo sapien
actgttccattactacacaaacacatattagag

SEQ ID NO: 501070 - DNA, 33 bp, Homo sapien
actgttccattactacgcaaacacatattagag

SEQ ID NO: 501071 - DNA, 33 bp, Homo sapien
tacaggccttatcagacgttttatacaagcctg

SEQ ID NO: 501072 - DNA, 33 bp, Homo sapien
tacaggccttatcagatgttttatacaagcctg

SEQ ID NO: 501073 - DNA, 33 bp, Homo sapien
tttgctcctcaggcagaaacaagaaagatgtgt

SEQ ID NO: 501074 - DNA, 33 bp, Homo sapien
tttgctcctcaggcagcaacaagaaagatgtgt

SEQ ID NO: 501075 - DNA, 33 bp, Homo sapien
ttcagcagaaagagacacctccgcatgcttcct

SEQ ID NO: 501076 - DNA, 33 bp, Homo sapien
ttcagcagaaagagacgcctccgcatgcttcct

SEQ ID NO: 501077 - DNA, 33 bp, Homo sapien
agagcaaagatgggaaaagaatgttctggcatc

SEQ ID NO: 501078 - DNA, 33 bp, Homo sapien
agagcaaagatgggaagagaatgttctggcatc

SEQ ID NO: 501079 - DNA, 33 bp, Homo sapien
cctggagcacaaggaagtatgaccctgttgtgg

SEQ ID NO: 501080 - DNA, 33 bp, Homo sapien
cctggagcacaaggaattatgaccctgttgtgg

SEQ ID NO: 501081 - DNA, 33 bp, Homo sapien
gcatcttgagaaaaggaaggaagatgcacacaa

SEQ ID NO: 501082 - DNA, 33 bp, Homo sapien
gcatcttgagaaaagggaggaagatgcacacaa

SEQ ID NO: 501083 - DNA, 33 bp, Homo sapien
gtggtgtgaggtacataagaggtcagagatgag

SEQ ID NO: 501084 - DNA, 33 bp, Homo sapien
gtggtgtgaggtacatgagaggtcagagatgag

SEQ ID NO: 501085 - DNA, 33 bp, Homo sapien
gtggatactgacacgccgagctgaaaagtgatt

SEQ ID NO: 501086 - DNA, 33 bp, Homo sapien
gtggatactgacacgctgagctgaaaagtgatt

SEQ ID NO: 501087 - DNA, 33 bp, Homo sapien
tcaagtgagatgggctaaacttcgtgctttgct

SEQ ID NO: 501088 - DNA, 33 bp, Homo sapien
tcaagtgagatgggctgaacttcgtgctttgct

SEQ ID NO: 501089 - DNA, 33 bp, Homo sapien
cacaatatctaatgcccgctactgaggacaaca

SEQ ID NO: 501090 - DNA, 33 bp, Homo sapien
cacaatatctaatgcctgctactgaggacaaca

SEQ ID NO: 501091 - DNA, 33 bp, Homo sapien
ggggcacaggtgatgaaggttaaagcagttaat

SEQ ID NO: 501092 - DNA, 33 bp, Homo sapien
ggggcacaggtgatgagggttaaagcagttaat

SEQ ID NO: 501093 - DNA, 33 bp, Homo sapien
gtgagtgagtccacccacttgctcaggtagtct

SEQ ID NO: 501094 - DNA, 33 bp, Homo sapien
gtgagtgagtccacccgcttgctcaggtagtct

SEQ ID NO: 501095 - DNA, 33 bp, Homo sapien
aaagatgaaaaaccaccgattggtccttagcct

SEQ ID NO: 501096 - DNA, 33 bp, Homo sapien
aaagatgaaaaaccactgattggtccttagcct

SEQ ID NO: 501097 - DNA, 33 bp, Homo sapien
agtttgtacatcccacactatcttcaaaagaaa

SEQ ID NO: 501098 - DNA, 33 bp, Homo sapien
agtttgtacatcccacgctatcttcaaaagaaa

SEQ ID NO: 501099 - DNA, 33 bp, Homo sapien
ttgctcgggttgttcacagcacaagatatctgg

SEQ ID NO: 501100 - DNA, 33 bp, Homo sapien
ttgctcgggttgttcatagcacaagatatctgg

SEQ ID NO: 501101 - DNA, 33 bp, Homo sapien
ttaaacaatcttgccacgaaagtgcccactaat

SEQ ID NO: 501102 - DNA, 33 bp, Homo sapien
ttaaacaatcttgccatgaaagtgcccactaat

SEQ ID NO: 501103 - DNA, 33 bp, Homo sapien
caaaggagtatacaacaaagagtctccttcccc

SEQ ID NO: 501104 - DNA, 33 bp, Homo sapien
caaaggagtatacaacgaagagtctccttcccc

SEQ ID NO: 501105 - DNA, 33 bp, Homo sapien
atggttatgatctttacctacttcagccgagct

SEQ ID NO: 501106 - DNA, 33 bp, Homo sapien
atggttatgatctttagctacttcagccgagct

SEQ ID NO: 501107 - DNA, 33 bp, Homo sapien
cagccgagctacaagggaacctctttgtgaacg

SEQ ID NO: 501108 - DNA, 33 bp, Homo sapien
cagccgagctacaaggtaacctctttgtgaacg

SEQ ID NO: 501109 - DNA, 33 bp, Homo sapien
gactcaaggaaaagaaaacaatgacgctctgtt

SEQ ID NO: 501110 - DNA, 33 bp, Homo sapien
gactcaaggaaaagaagacaatgacgctctgtt

SEQ ID NO: 501111 - DNA, 33 bp, Homo sapien
tagtaagtgctcaacaactatttctggaattga

SEQ ID NO: 501112 - DNA, 33 bp, Homo sapien
tagtaagtgctcaacatctatttctggaattga

SEQ ID NO: 501113 - DNA, 33 bp, Homo sapien
ttcatccagagtctgccgcactacctgtgcaca

SEQ ID NO: 501114 - DNA, 33 bp, Homo sapien
ttcatccagagtctgctgcactacctgtgcaca

SEQ ID NO: 501115 - DNA, 33 bp, Homo sapien
gattactttctctgatcacacttcaccatggtt

SEQ ID NO: 501116 - DNA, 33 bp, Homo sapien
gattactttctctgatgacacttcaccatggtt

SEQ ID NO: 501117 - DNA, 33 bp, Homo sapien
atccacagatgacttcaatattagaattagcag

SEQ ID NO: 501118 - DNA, 33 bp, Homo sapien
atccacagatgacttcgatattagaattagcag

SEQ ID NO: 501119 - DNA, 33 bp, Homo sapien
aaaaatgactatcagaaaaaatggaataacatc

SEQ ID NO: 501120 - DNA, 33 bp, Homo sapien
aaaaatgactatcagagaaaatggaataacatc

SEQ ID NO: 501121 - DNA, 33 bp, Homo sapien
atctgtaagtaatccactgagaaacatgtttta

SEQ ID NO: 501122 - DNA, 33 bp, Homo sapien
atctgtaagtaatccattgagaaacatgtttta

SEQ ID NO: 501123 - DNA, 33 bp, Homo sapien
tgaattgttaagtgaacggtcaccaatgcagct

SEQ ID NO: 501124 - DNA, 33 bp, Homo sapien
tgaattgttaagtgaatggtcaccaatgcagct

SEQ ID NO: 501125 - DNA, 33 bp, Homo sapien
ctgagcttttagaaaccgaaaagcaaacttgtg

SEQ ID NO: 501126 - DNA, 33 bp, Homo sapien
ctgagcttttagaaactgaaaagcaaacttgtg

SEQ ID NO: 501127 - DNA, 33 bp, Homo sapien
ccgttcagagataaccaagagaagtgtgttagt

SEQ ID NO: 501128 - DNA, 33 bp, Homo sapien
ccgttcagagataaccgagagaagtgtgttagt

SEQ ID NO: 501129 - DNA, 33 bp, Homo sapien
cactgctgttgctgaccgtagccaagtcctctg

SEQ ID NO: 501130 - DNA, 33 bp, Homo sapien
cactgctgttgctgacggtagccaagtcctctg

SEQ ID NO: 501131 - DNA, 33 bp, Homo sapien
gaggccaaagtcaaacacatgtctaactccact

SEQ ID NO: 501132 - DNA, 33 bp, Homo sapien
gaggccaaagtcaaacccatgtctaactccact

SEQ ID NO: 501133 - DNA, 33 bp, Homo sapien
acagaaaagtctgatgcaagcaggaacaaacat

SEQ ID NO: 501134 - DNA, 33 bp, Homo sapien
acagaaaagtctgatgtaagcaggaacaaacat

SEQ ID NO: 501135 - DNA, 33 bp, Homo sapien
tttccagtctgtgaaacggaaattataatcatg

SEQ ID NO: 501136 - DNA, 33 bp, Homo sapien
tttccagtctgtgaaatggaaattataatcatg

SEQ ID NO: 501137 - DNA, 33 bp, Homo sapien
gagtcagttcttaacagcccagctttgcttcat

SEQ ID NO: 501138 - DNA, 33 bp, Homo sapien
gagtcagttcttaacatcccagctttgcttcat

SEQ ID NO: 501139 - DNA, 33 bp, Homo sapien
catcaaatatgcttgcacccttttttctgtaat

SEQ ID NO: 501140 - DNA, 33 bp, Homo sapien
catcaaatatgcttgcccccttttttctgtaat

SEQ ID NO: 501141 - DNA, 33 bp, Homo sapien
ggtcattgtccaataactggtgctagcagtgtg

SEQ ID NO: 501142 - DNA, 33 bp, Homo sapien
ggtcattgtccaataattggtgctagcagtgtg

SEQ ID NO: 501143 - DNA, 33 bp, Homo sapien
ccaccttgttctccttaaagagtgccttagtgc

SEQ ID NO: 501144 - DNA, 33 bp, Homo sapien
ccaccttgttctccttcaagagtgccttagtgc

SEQ ID NO: 501145 - DNA, 33 bp, Homo sapien
ccattgccatcttcccggcataaagcactcttg

SEQ ID NO: 501146 - DNA, 33 bp, Homo sapien
ccattgccatcttccctgcataaagcactcttg

SEQ ID NO: 501147 - DNA, 33 bp, Homo sapien
cccagaatcgagaggaaaacatccttagtgccc

SEQ ID NO: 501148 - DNA, 33 bp, Homo sapien
cccagaatcgagaggagaacatccttagtgccc

SEQ ID NO: 501149 - DNA, 33 bp, Homo sapien
tctgtcttgatcatcacactgtattttctaaaa

SEQ ID NO: 501150 - DNA, 33 bp, Homo sapien
tctgtcttgatcatcagactgtattttctaaaa

SEQ ID NO: 501151 - DNA, 33 bp, Homo sapien
tgttacttccactatcaagtccaaaaggtcagg

SEQ ID NO: 501152 - DNA, 33 bp, Homo sapien
tgttacttccactatcgagtccaaaaggtcagg

SEQ ID NO: 501153 - DNA, 33 bp, Homo sapien
cacacagacctcaccccagatgactctgcgctc

SEQ ID NO: 501154 - DNA, 33 bp, Homo sapien
cacacagacctcaccctagatgactctgcgctc

SEQ ID NO: 501155 - DNA, 33 bp, Homo sapien
tgctcagtcctgtgcaatagtcaaatctaagaa

SEQ ID NO: 501156 - DNA, 33 bp, Homo sapien
tgctcagtcctgtgcagtagtcaaatctaagaa

SEQ ID NO: 501157 - DNA, 33 bp, Homo sapien
tcagagccagggaagcagaccgtgtaattctca

SEQ ID NO: 501158 - DNA, 33 bp, Homo sapien
tcagagccagggaagccgaccgtgtaattctca

SEQ ID NO: 501159 - DNA, 33 bp, Homo sapien
ttctggaaagctgttaccttctctgatgctgga

SEQ ID NO: 501160 - DNA, 33 bp, Homo sapien
ttctggaaagctgttatcttctctgatgctgga

SEQ ID NO: 501161 - DNA, 33 bp, Homo sapien
gtagctcagcccaaccaagtggaccgattacaa

SEQ ID NO: 501162 - DNA, 33 bp, Homo sapien
gtagctcagcccaaccgagtggaccgattacaa

SEQ ID NO: 501163 - DNA, 33 bp, Homo sapien
gccgcctctttaggtcacctgtaactcctattt

SEQ ID NO: 501164 - DNA, 33 bp, Homo sapien
gccgcctctttaggtcgcctgtaactcctattt

SEQ ID NO: 501165 - DNA, 33 bp, Homo sapien
ctcttagaggaatcagaatgttatattccttac

SEQ ID NO: 501166 - DNA, 33 bp, Homo sapien
ctcttagaggaatcagtatgttatattccttac

SEQ ID NO: 501167 - DNA, 33 bp, Homo sapien
aacattttcatgggtccgaaatatatgtggccc

SEQ ID NO: 501168 - DNA, 33 bp, Homo sapien
aacattttcatgggtctgaaatatatgtggccc

SEQ ID NO: 501169 - DNA, 33 bp, Homo sapien
agtattactaaattcacgttggttcctccccac

SEQ ID NO: 501170 - DNA, 33 bp, Homo sapien
agtattactaaattcatgttggttcctccccac

SEQ ID NO: 501171 - DNA, 33 bp, Homo sapien
cctgaaagcctccaccaagttcagtcaaatcct

SEQ ID NO: 501172 - DNA, 33 bp, Homo sapien
cctgaaagcctccaccgagttcagtcaaatcct

SEQ ID NO: 501173 - DNA, 33 bp, Homo sapien
aataacagatatcactaaggaaacatgaaagaa

SEQ ID NO: 501174 - DNA, 33 bp, Homo sapien
aataacagatatcactgaggaaacatgaaagaa

SEQ ID NO: 501175 - DNA, 33 bp, Homo sapien
gggacacaaatagagaaacatatgcattcttcc

SEQ ID NO: 501176 - DNA, 33 bp, Homo sapien
gggacacaaatagagagacatatgcattcttcc

SEQ ID NO: 501177 - DNA, 33 bp, Homo sapien
cagaggcagctgtgatgaaatgcagagtaggga

SEQ ID NO: 501178 - DNA, 33 bp, Homo sapien
cagaggcagctgtgattaaatgcagagtaggga

SEQ ID NO: 501179 - DNA, 33 bp, Homo sapien
atccacataaaaaaaaattcatctagacacaga

SEQ ID NO: 501180 - DNA, 33 bp, Homo sapien
atccacataaaaaaaatttcatctagacacaga

SEQ ID NO: 501181 - DNA, 33 bp, Homo sapien
ttatctgaatcaaattgaacagttctggaggcc

SEQ ID NO: 501182 - DNA, 33 bp, Homo sapien
ttatctgaatcaaatttaacagttctggaggcc

SEQ ID NO: 501183 - DNA, 33 bp, Homo sapien
caagtgaccagtagtaccagccctgcaagatgc

SEQ ID NO: 501184 - DNA, 33 bp, Homo sapien
caagtgaccagtagtatcagccctgcaagatgc

SEQ ID NO: 501185 - DNA, 33 bp, Homo sapien
atggatgtcttactcacataaagggatctgggt

SEQ ID NO: 501186 - DNA, 33 bp, Homo sapien
atggatgtcttactcatataaagggatctgggt

SEQ ID NO: 501187 - DNA, 33 bp, Homo sapien
gtctataccatgtggaatagaagaattagccag

SEQ ID NO: 501188 - DNA, 33 bp, Homo sapien
gtctataccatgtggagtagaagaattagccag

SEQ ID NO: 501189 - DNA, 33 bp, Homo sapien
gttagctggagtgatacaggttggagtgtctca

SEQ ID NO: 501190 - DNA, 33 bp, Homo sapien
gttagctggagtgatataggttggagtgtctca

SEQ ID NO: 501191 - DNA, 33 bp, Homo sapien
ataaatcagtaagaccagcactatctccctaac

SEQ ID NO: 501192 - DNA, 33 bp, Homo sapien
ataaatcagtaagaccggcactatctccctaac

SEQ ID NO: 501193 - DNA, 33 bp, Homo sapien
tcagtccttatagacactgcaagactctggttt

SEQ ID NO: 501194 - DNA, 33 bp, Homo sapien
tcagtccttatagacagtgcaagactctggttt

SEQ ID NO: 501195 - DNA, 33 bp, Homo sapien
actgaattagcctgtcaaactattcaaaggaat

SEQ ID NO: 501196 - DNA, 33 bp, Homo sapien
actgaattagcctgtccaactattcaaaggaat

SEQ ID NO: 501197 - DNA, 33 bp, Homo sapien
caggtaatcgaagaacgatgcaaaaaagatgtt

SEQ ID NO: 501198 - DNA, 33 bp, Homo sapien
caggtaatcgaagaactatgcaaaaaagatgtt

SEQ ID NO: 501199 - DNA, 33 bp, Homo sapien
aactcagactccaagccctgctaaaagaaacgt

SEQ ID NO: 501200 - DNA, 33 bp, Homo sapien
aactcagactccaagctctgctaaaagaaacgt

SEQ ID NO: 501201 - DNA, 33 bp, Homo sapien
ctcctccttttcaacaagagacaaggcacaaca

SEQ ID NO: 501202 - DNA, 33 bp, Homo sapien
ctcctccttttcaacatgagacaaggcacaaca

SEQ ID NO: 501203 - DNA, 33 bp, Homo sapien
gctgggtttccatttacaacggttgctgaaaac

SEQ ID NO: 501204 - DNA, 33 bp, Homo sapien
gctgggtttccatttataacggttgctgaaaac

SEQ ID NO: 501205 - DNA, 33 bp, Homo sapien
ctaatagacacctacactaattcacagggtaaa

SEQ ID NO: 501206 - DNA, 33 bp, Homo sapien
ctaatagacacctacagtaattcacagggtaaa

SEQ ID NO: 501207 - DNA, 33 bp, Homo sapien
aggtgcgaccttcctggaggataacttggcaga

SEQ ID NO: 501208 - DNA, 33 bp, Homo sapien
aggtgcgaccttcctgtaggataacttggcaga

SEQ ID NO: 501209 - DNA, 33 bp, Homo sapien
acagcaggtttgagtacgtacaaagaggaacca

SEQ ID NO: 501210 - DNA, 33 bp, Homo sapien
acagcaggtttgagtaggtacaaagaggaacca

SEQ ID NO: 501211 - DNA, 33 bp, Homo sapien
ccaatcccacaactgacaaatcatacagctttc

SEQ ID NO: 501212 - DNA, 33 bp, Homo sapien
ccaatcccacaactgagaaatcatacagctttc

SEQ ID NO: 501213 - DNA, 33 bp, Homo sapien
tcttggagtgccttcaggcttgctcattttaac

SEQ ID NO: 501214 - DNA, 33 bp, Homo sapien
tcttggagtgccttcatgcttgctcattttaac

SEQ ID NO: 501215 - DNA, 33 bp, Homo sapien
tctgagtctgtattcaatctaaatatctgacag

SEQ ID NO: 501216 - DNA, 33 bp, Homo sapien
tctgagtctgtattcattctaaatatctgacag

SEQ ID NO: 501217 - DNA, 33 bp, Homo sapien
ttgaacagtgttatcacgtggcctgagaattga

SEQ ID NO: 501218 - DNA, 33 bp, Homo sapien
ttgaacagtgttatcatgtggcctgagaattga

SEQ ID NO: 501219 - DNA, 33 bp, Homo sapien
agtgttgagtgttgtacaaatgcaaaatataat

SEQ ID NO: 501220 - DNA, 33 bp, Homo sapien
agtgttgagtgttgtagaaatgcaaaatataat

SEQ ID NO: 501221 - DNA, 33 bp, Homo sapien
gctgttattatcaacacgggttccttgaatagg

SEQ ID NO: 501222 - DNA, 33 bp, Homo sapien
gctgttattatcaacatgggttccttgaatagg

SEQ ID NO: 501223 - DNA, 33 bp, Homo sapien
attccccccgagtaagcatagccaatagcttga

SEQ ID NO: 501224 - DNA, 33 bp, Homo sapien
attccccccgagtaagtatagccaatagcttga

SEQ ID NO: 501225 - DNA, 33 bp, Homo sapien
aaaatcataccagatacaaacttggatttatat

SEQ ID NO: 501226 - DNA, 33 bp, Homo sapien
aaaatcataccagatagaaacttggatttatat

SEQ ID NO: 501227 - DNA, 33 bp, Homo sapien
gctaattctttaaatacggcacagctttgctac

SEQ ID NO: 501228 - DNA, 33 bp, Homo sapien
gctaattctttaaatatggcacagctttgctac

SEQ ID NO: 501229 - DNA, 33 bp, Homo sapien
tgacaatgaagttgaccgtatcaattgactctt

SEQ ID NO: 501230 - DNA, 33 bp, Homo sapien
tgacaatgaagttgactgtatcaattgactctt

SEQ ID NO: 501231 - DNA, 33 bp, Homo sapien
ctgagtggtaaacaggaagccttatggcaagag

SEQ ID NO: 501232 - DNA, 33 bp, Homo sapien
ctgagtggtaaacaggcagccttatggcaagag

SEQ ID NO: 501233 - DNA, 33 bp, Homo sapien
tttcctgtgaggttcacactctgtacttttttt

SEQ ID NO: 501234 - DNA, 33 bp, Homo sapien
tttcctgtgaggttcatactctgtacttttttt

SEQ ID NO: 501235 - DNA, 33 bp, Homo sapien
gtttactgtatcatcaaattatcattacaattc

SEQ ID NO: 501236 - DNA, 33 bp, Homo sapien
gtttactgtatcatcacattatcattacaattc

SEQ ID NO: 501237 - DNA, 33 bp, Homo sapien
aaattaggaagatcaaacaaagcaggcgcctat

SEQ ID NO: 501238 - DNA, 33 bp, Homo sapien
aaattaggaagatcaagcaaagcaggcgcctat

SEQ ID NO: 501239 - DNA, 33 bp, Homo sapien
attaactcttgtcagccaaacaggaaatatatt

SEQ ID NO: 501240 - DNA, 33 bp, Homo sapien
attaactcttgtcagcgaaacaggaaatatatt

SEQ ID NO: 501241 - DNA, 33 bp, Homo sapien
ctccagtgtgaaatgacaagagtaccagtcaag

SEQ ID NO: 501242 - DNA, 33 bp, Homo sapien
ctccagtgtgaaatgataagagtaccagtcaag

SEQ ID NO: 501243 - DNA, 33 bp, Homo sapien
ttgtcgagtgtagataagtccaggtgcaaagtt

SEQ ID NO: 501244 - DNA, 33 bp, Homo sapien
ttgtcgagtgtagatacgtccaggtgcaaagtt

SEQ ID NO: 501245 - DNA, 33 bp, Homo sapien
gcaactaactctcaaacggttcacaaaaaaaaa

SEQ ID NO: 501246 - DNA, 33 bp, Homo sapien
gcaactaactctcaaatggttcacaaaaaaaaa

SEQ ID NO: 501247 - DNA, 33 bp, Homo sapien
ttaggcacaagcctaacggctaagacttgataa

SEQ ID NO: 501248 - DNA, 33 bp, Homo sapien
ttaggcacaagcctaatggctaagacttgataa

SEQ ID NO: 501249 - DNA, 33 bp, Homo sapien
aatgcagttagggagcaaagtaaagacaataga

SEQ ID NO: 501250 - DNA, 33 bp, Homo sapien
aatgcagttagggagcgaagtaaagacaataga

SEQ ID NO: 501251 - DNA, 33 bp, Homo sapien
ggctacatctaccatcaaggtctggaaaatttc

SEQ ID NO: 501252 - DNA, 33 bp, Homo sapien
ggctacatctaccatcgaggtctggaaaatttc

SEQ ID NO: 501253 - DNA, 33 bp, Homo sapien
cctttactggttcccactgcacttaggataatc

SEQ ID NO: 501254 - DNA, 33 bp, Homo sapien
cctttactggttcccattgcacttaggataatc

SEQ ID NO: 501255 - DNA, 33 bp, Homo sapien
gaaagaatgttcagggaagagggaaggtctaga

SEQ ID NO: 501256 - DNA, 33 bp, Homo sapien
gaaagaatgttcagggcagagggaaggtctaga

SEQ ID NO: 501257 - DNA, 33 bp, Homo sapien
atacatatttatcacaatatagaacatccttat

SEQ ID NO: 501258 - DNA, 33 bp, Homo sapien
atacatatttatcacagtatagaacatccttat

SEQ ID NO: 501259 - DNA, 33 bp, Homo sapien
gggggagagtgttgtaagattttatagaactgt

SEQ ID NO: 501260 - DNA, 33 bp, Homo sapien
gggggagagtgttgtaggattttatagaactgt

SEQ ID NO: 501261 - DNA, 33 bp, Homo sapien
ctagagtttaaggtcgaaaagaggatttagtgg

SEQ ID NO: 501262 - DNA, 33 bp, Homo sapien
ctagagtttaaggtcgcaaagaggatttagtgg

SEQ ID NO: 501263 - DNA, 33 bp, Homo sapien
ctgttggtcttatgaacggctttgcccaacaga

SEQ ID NO: 501264 - DNA, 33 bp, Homo sapien
ctgttggtcttatgaatggctttgcccaacaga

SEQ ID NO: 501265 - DNA, 33 bp, Homo sapien
aaggttttataacctcaagatcccaaagaaaaa

SEQ ID NO: 501266 - DNA, 33 bp, Homo sapien
aaggttttataacctccagatcccaaagaaaaa

SEQ ID NO: 501267 - DNA, 33 bp, Homo sapien
aagtactgaactaaaagaattgtctacctagaa

SEQ ID NO: 501268 - DNA, 33 bp, Homo sapien
aagtactgaactaaaataattgtctacctagaa

SEQ ID NO: 501269 - DNA, 33 bp, Homo sapien
cttttgatcaagaagtaaaggacttatttaatg

SEQ ID NO: 501270 - DNA, 33 bp, Homo sapien
cttttgatcaagaagtgaaggacttatttaatg

SEQ ID NO: 501271 - DNA, 33 bp, Homo sapien
aaattccttcctttgggacgctataaattgcag

SEQ ID NO: 501272 - DNA, 33 bp, Homo sapien
aaattccttcctttggtacgctataaattgcag

SEQ ID NO: 501273 - DNA, 33 bp, Homo sapien
tgcagaaagcatcagcaatgatagggttgtgac

SEQ ID NO: 501274 - DNA, 33 bp, Homo sapien
tgcagaaagcatcagcgatgatagggttgtgac

SEQ ID NO: 501275 - DNA, 33 bp, Homo sapien
cccagtggtggaagcactgagggggccagagtc

SEQ ID NO: 501276 - DNA, 33 bp, Homo sapien
cccagtggtggaagcattgagggggccagagtc

SEQ ID NO: 501277 - DNA, 33 bp, Homo sapien
aattgattggtatttccaattaagataaaacaa

SEQ ID NO: 501278 - DNA, 33 bp, Homo sapien
aattgattggtatttctaattaagataaaacaa

SEQ ID NO: 501279 - DNA, 33 bp, Homo sapien
gagtgaagaaggtgacagacaagaggacagaga

SEQ ID NO: 501280 - DNA, 33 bp, Homo sapien
gagtgaagaaggtgacggacaagaggacagaga

SEQ ID NO: 501281 - DNA, 33 bp, Homo sapien
aaaccacaaacatcaactctatgggatcattgg

SEQ ID NO: 501282 - DNA, 33 bp, Homo sapien
aaaccacaaacatcaagtctatgggatcattgg

SEQ ID NO: 501283 - DNA, 33 bp, Homo sapien
gcctgcttggtctgcaaatgtttcaaggctcag

SEQ ID NO: 501284 - DNA, 33 bp, Homo sapien
gcctgcttggtctgcatatgtttcaaggctcag

SEQ ID NO: 501285 - DNA, 33 bp, Homo sapien
atcttaatcctgcctgcatagataccttactgt

SEQ ID NO: 501286 - DNA, 33 bp, Homo sapien
atcttaatcctgcctgtatagataccttactgt

SEQ ID NO: 501287 - DNA, 33 bp, Homo sapien
ccatttacctgcattacgtcaattaaccgctta

SEQ ID NO: 501288 - DNA, 33 bp, Homo sapien
ccatttacctgcattatgtcaattaaccgctta

SEQ ID NO: 501289 - DNA, 33 bp, Homo sapien
gctaccctgtaaaatcaccagcaagcctttgtc

SEQ ID NO: 501290 - DNA, 33 bp, Homo sapien
gctaccctgtaaaatcgccagcaagcctttgtc

SEQ ID NO: 501291 - DNA, 33 bp, Homo sapien
gaagaccagcctcttccaccagccattgctttc

SEQ ID NO: 501292 - DNA, 33 bp, Homo sapien
gaagaccagcctcttctaccagccattgctttc

SEQ ID NO: 501293 - DNA, 33 bp, Homo sapien
ctcctacaaagtttggcacactgattaacagag

SEQ ID NO: 501294 - DNA, 33 bp, Homo sapien
ctcctacaaagtttggtacactgattaacagag

SEQ ID NO: 501295 - DNA, 33 bp, Homo sapien
tatgataaggaaagacaaaatacgtttacaatt

SEQ ID NO: 501296 - DNA, 33 bp, Homo sapien
tatgataaggaaagacgaaatacgtttacaatt

SEQ ID NO: 501297 - DNA, 33 bp, Homo sapien
acatatactgcaaggccataattaccaaaacag

SEQ ID NO: 501298 - DNA, 33 bp, Homo sapien
acatatactgcaaggctataattaccaaaacag

SEQ ID NO: 501299 - DNA, 33 bp, Homo sapien
aaaaatcctcagcatcgagaaatagaaggggac

SEQ ID NO: 501300 - DNA, 33 bp, Homo sapien
aaaaatcctcagcatctagaaatagaaggggac

SEQ ID NO: 501301 - DNA, 33 bp, Homo sapien
agagaaggaatccaaccaagagaaattatacca

SEQ ID NO: 501302 - DNA, 33 bp, Homo sapien
agagaaggaatccaacgaagagaaattatacca

SEQ ID NO: 501303 - DNA, 33 bp, Homo sapien
tcatagtttaaacagacgatcattgtataaatc

SEQ ID NO: 501304 - DNA, 33 bp, Homo sapien
tcatagtttaaacagatgatcattgtataaatc

SEQ ID NO: 501305 - DNA, 33 bp, Homo sapien
atttgtctttactatacgctttttgtacctaaa

SEQ ID NO: 501306 - DNA, 33 bp, Homo sapien
atttgtctttactatatgctttttgtacctaaa

SEQ ID NO: 501307 - DNA, 33 bp, Homo sapien
gccctatccagccaaacgaagaacactgagaga

SEQ ID NO: 501308 - DNA, 33 bp, Homo sapien
gccctatccagccaaatgaagaacactgagaga

SEQ ID NO: 501309 - DNA, 33 bp, Homo sapien
ctgaagtaggcaaaaaccattgttttacatggt

SEQ ID NO: 501310 - DNA, 33 bp, Homo sapien
ctgaagtaggcaaaaatcattgttttacatggt

SEQ ID NO: 501311 - DNA, 33 bp, Homo sapien
tcagtttatcctcaccaagattaaggaaacaaa

SEQ ID NO: 501312 - DNA, 33 bp, Homo sapien
tcagtttatcctcaccgagattaaggaaacaaa

SEQ ID NO: 501313 - DNA, 33 bp, Homo sapien
ataaactgatgacagactcagacttcttttatt

SEQ ID NO: 501314 - DNA, 33 bp, Homo sapien
ataaactgatgacagattcagacttcttttatt

SEQ ID NO: 501315 - DNA, 33 bp, Homo sapien
ctaaacaagatcttccaaacagttaagagaaca

SEQ ID NO: 501316 - DNA, 33 bp, Homo sapien
ctaaacaagatcttccgaacagttaagagaaca

SEQ ID NO: 501317 - DNA, 33 bp, Homo sapien
atttgtaaattctatgccagcattcctattgtc

SEQ ID NO: 501318 - DNA, 33 bp, Homo sapien
atttgtaaattctatgtcagcattcctattgtc

SEQ ID NO: 501319 - DNA, 33 bp, Homo sapien
gaatgacagggaaggacaaatgagcaaggctag

SEQ ID NO: 501320 - DNA, 33 bp, Homo sapien
gaatgacagggaaggataaatgagcaaggctag

SEQ ID NO: 501321 - DNA, 33 bp, Homo sapien
tggcatttcccagtgtaaagtatccaaaaatga

SEQ ID NO: 501322 - DNA, 33 bp, Homo sapien
tggcatttcccagtgtgaagtatccaaaaatga

SEQ ID NO: 501323 - DNA, 33 bp, Homo sapien
tcttatactctaagcaatctgtacaattcctgt

SEQ ID NO: 501324 - DNA, 33 bp, Homo sapien
tcttatactctaagcagtctgtacaattcctgt

SEQ ID NO: 501325 - DNA, 33 bp, Homo sapien
aatctccagtgtgctcaccatgaggaaagcagg

SEQ ID NO: 501326 - DNA, 33 bp, Homo sapien
aatctccagtgtgctcgccatgaggaaagcagg

SEQ ID NO: 501327 - DNA, 33 bp, Homo sapien
tctagatttgaaatgaaggcatgaaacttctcc

SEQ ID NO: 501328 - DNA, 33 bp, Homo sapien
tctagatttgaaatgagggcatgaaacttctcc

SEQ ID NO: 501329 - DNA, 33 bp, Homo sapien
agcttcatccaagaaaccacgaatctccaatgg

SEQ ID NO: 501330 - DNA, 33 bp, Homo sapien
agcttcatccaagaaatcacgaatctccaatgg

SEQ ID NO: 501331 - DNA, 33 bp, Homo sapien
tgggggattcttccaaccaacactcctaagtaa

SEQ ID NO: 501332 - DNA, 33 bp, Homo sapien
tgggggattcttccaagcaacactcctaagtaa

SEQ ID NO: 501333 - DNA, 33 bp, Homo sapien
tctttgggaataacaacgacatagtcgactact

SEQ ID NO: 501334 - DNA, 33 bp, Homo sapien
tctttgggaataacaatgacatagtcgactact

SEQ ID NO: 501335 - DNA, 33 bp, Homo sapien
ctcggagggcttcacaaacataatcataaagat

SEQ ID NO: 501336 - DNA, 33 bp, Homo sapien
ctcggagggcttcacagacataatcataaagat

SEQ ID NO: 501337 - DNA, 33 bp, Homo sapien
ctgggcactgaaggaacaaaatgaccctggaga

SEQ ID NO: 501338 - DNA, 33 bp, Homo sapien
ctgggcactgaaggaagaaaatgaccctggaga

SEQ ID NO: 501339 - DNA, 33 bp, Homo sapien
tactctttacaaacaccatgaaaaaagtcatgg

SEQ ID NO: 501340 - DNA, 33 bp, Homo sapien
tactctttacaaacactatgaaaaaagtcatgg

SEQ ID NO: 501341 - DNA, 33 bp, Homo sapien
cttctagccgagatggcagccgattgaatggtg

SEQ ID NO: 501342 - DNA, 33 bp, Homo sapien
cttctagccgagatggtagccgattgaatggtg

SEQ ID NO: 501343 - DNA, 33 bp, Homo sapien
agttagcagtggagcacattttttttttggcgg

SEQ ID NO: 501344 - DNA, 33 bp, Homo sapien
agttagcagtggagcatattttttttttggcgg

SEQ ID NO: 501345 - DNA, 33 bp, Homo sapien
ttgcttggggctacaccgaatctgtaggttaat

SEQ ID NO: 501346 - DNA, 33 bp, Homo sapien
ttgcttggggctacactgaatctgtaggttaat

SEQ ID NO: 501347 - DNA, 33 bp, Homo sapien
aataaacttagtgatacatttgcctataggtaa

SEQ ID NO: 501348 - DNA, 33 bp, Homo sapien
aataaacttagtgatatatttgcctataggtaa

SEQ ID NO: 501349 - DNA, 33 bp, Homo sapien
acattatgttaatgtaaatctgaagttggcagc

SEQ ID NO: 501350 - DNA, 33 bp, Homo sapien
acattatgttaatgtagatctgaagttggcagc

SEQ ID NO: 501351 - DNA, 33 bp, Homo sapien
attaaaattctactctcactttcaaaattccga

SEQ ID NO: 501352 - DNA, 33 bp, Homo sapien
attaaaattctactctgactttcaaaattccga

SEQ ID NO: 501353 - DNA, 33 bp, Homo sapien
cctctgtcaatcaaaaacagacagctggaatgg

SEQ ID NO: 501354 - DNA, 33 bp, Homo sapien
cctctgtcaatcaaaagcagacagctggaatgg

SEQ ID NO: 501355 - DNA, 33 bp, Homo sapien
cccacctctgcaatcaagtttctcatctatggt

SEQ ID NO: 501356 - DNA, 33 bp, Homo sapien
cccacctctgcaatcacgtttctcatctatggt

SEQ ID NO: 501357 - DNA, 33 bp, Homo sapien
tctacatagcatggggccaaactgggaattcgc

SEQ ID NO: 501358 - DNA, 33 bp, Homo sapien
tctacatagcatggggtcaaactgggaattcgc

SEQ ID NO: 501359 - DNA, 33 bp, Homo sapien
tcaaagtcactaataaacactgtgaccaggaga

SEQ ID NO: 501360 - DNA, 33 bp, Homo sapien
tcaaagtcactaataaccactgtgaccaggaga

SEQ ID NO: 501361 - DNA, 33 bp, Homo sapien
gaatttaccctcacaacgaacacatgtagttga

SEQ ID NO: 501362 - DNA, 33 bp, Homo sapien
gaatttaccctcacaatgaacacatgtagttga

SEQ ID NO: 501363 - DNA, 33 bp, Homo sapien
agtattgtatgcaaaagaatatctacacactat

SEQ ID NO: 501364 - DNA, 33 bp, Homo sapien
agtattgtatgcaaaataatatctacacactat

SEQ ID NO: 501365 - DNA, 33 bp, Homo sapien
ctgtatctgggtcttacatgagtattcctcagt

SEQ ID NO: 501366 - DNA, 33 bp, Homo sapien
ctgtatctgggtcttatatgagtattcctcagt

SEQ ID NO: 501367 - DNA, 33 bp, Homo sapien
ataaaaccagacagaacgtccatgcccgtaagc

SEQ ID NO: 501368 - DNA, 33 bp, Homo sapien
ataaaaccagacagaatgtccatgcccgtaagc

SEQ ID NO: 501369 - DNA, 33 bp, Homo sapien
gacactcagaaactcccattgaccccacaaaag

SEQ ID NO: 501370 - DNA, 33 bp, Homo sapien
gacactcagaaactccgattgaccccacaaaag

SEQ ID NO: 501371 - DNA, 33 bp, Homo sapien
ttgtcaattttactcacagctgtatcctcggcc

SEQ ID NO: 501372 - DNA, 33 bp, Homo sapien
ttgtcaattttactcagagctgtatcctcggcc

SEQ ID NO: 501373 - DNA, 33 bp, Homo sapien
aacccacggtaaggtacgaagccacaaaatggg

SEQ ID NO: 501374 - DNA, 33 bp, Homo sapien
aacccacggtaaggtatgaagccacaaaatggg

SEQ ID NO: 501375 - DNA, 33 bp, Homo sapien
tgtatttgtcaatacactgatggtgcagtgggc

SEQ ID NO: 501376 - DNA, 33 bp, Homo sapien
tgtatttgtcaatacattgatggtgcagtgggc

SEQ ID NO: 501377 - DNA, 33 bp, Homo sapien
aacaatctcagtatcaaacccaactgacatccc

SEQ ID NO: 501378 - DNA, 33 bp, Homo sapien
aacaatctcagtatcagacccaactgacatccc

SEQ ID NO: 501379 - DNA, 33 bp, Homo sapien
ttccagtttttggcgactacatcctttattcgc

SEQ ID NO: 501380 - DNA, 33 bp, Homo sapien
ttccagtttttggcgattacatcctttattcgc

SEQ ID NO: 501381 - DNA, 33 bp, Homo sapien
cacacattatcactaaccctttctgctcagcgc

SEQ ID NO: 501382 - DNA, 33 bp, Homo sapien
cacacattatcactaatcctttctgctcagcgc

SEQ ID NO: 501383 - DNA, 33 bp, Homo sapien
caataaactggtgacaactttcaaaaacatcaa

SEQ ID NO: 501384 - DNA, 33 bp, Homo sapien
caataaactggtgacagctttcaaaaacatcaa

SEQ ID NO: 501385 - DNA, 33 bp, Homo sapien
tatgctgttatacaaaatgaggttcacaaaaat

SEQ ID NO: 501386 - DNA, 33 bp, Homo sapien
tatgctgttatacaaattgaggttcacaaaaat

SEQ ID NO: 501387 - DNA, 33 bp, Homo sapien
gatcagaaaaaatacccattgggtcctatgctt

SEQ ID NO: 501388 - DNA, 33 bp, Homo sapien
gatcagaaaaaatacctattgggtcctatgctt

SEQ ID NO: 501389 - DNA, 33 bp, Homo sapien
ctgtgtagtataattcaacagtgcaaaccacca

SEQ ID NO: 501390 - DNA, 33 bp, Homo sapien
ctgtgtagtataattcgacagtgcaaaccacca

SEQ ID NO: 501391 - DNA, 33 bp, Homo sapien
ggactctgactgataacgctcttgtactatttt

SEQ ID NO: 501392 - DNA, 33 bp, Homo sapien
ggactctgactgataatgctcttgtactatttt

SEQ ID NO: 501393 - DNA, 33 bp, Homo sapien
acttttcattacctaccgcagcaaatccaaaat

SEQ ID NO: 501394 - DNA, 33 bp, Homo sapien
acttttcattacctactgcagcaaatccaaaat

SEQ ID NO: 501395 - DNA, 33 bp, Homo sapien
tggcaagagaggatgaagacctgaatttgggag

SEQ ID NO: 501396 - DNA, 33 bp, Homo sapien
tggcaagagaggatgaggacctgaatttgggag

SEQ ID NO: 501397 - DNA, 33 bp, Homo sapien
atgggtgtatggcatacgtaattttggttactg

SEQ ID NO: 501398 - DNA, 33 bp, Homo sapien
atgggtgtatggcataggtaattttggttactg

SEQ ID NO: 501399 - DNA, 33 bp, Homo sapien
cagtgagcattcagcaagtattagctgtgtgtg

SEQ ID NO: 501400 - DNA, 33 bp, Homo sapien
cagtgagcattcagcaggtattagctgtgtgtg

SEQ ID NO: 501401 - DNA, 33 bp, Homo sapien
taaaattctatttgtccctgtgtttgtcatttg

SEQ ID NO: 501402 - DNA, 33 bp, Homo sapien
taaaattctatttgtctctgtgtttgtcatttg

SEQ ID NO: 501403 - DNA, 33 bp, Homo sapien
ttcagacgtctaggtccatcacagacctactga

SEQ ID NO: 501404 - DNA, 33 bp, Homo sapien
ttcagacgtctaggtcgatcacagacctactga

SEQ ID NO: 501405 - DNA, 33 bp, Homo sapien
aatattctttgttttccccacttaggatgggat

SEQ ID NO: 501406 - DNA, 33 bp, Homo sapien
aatattctttgttttctccacttaggatgggat

SEQ ID NO: 501407 - DNA, 33 bp, Homo sapien
ccatggccttagaaaccgaagacagtatctccc

SEQ ID NO: 501408 - DNA, 33 bp, Homo sapien
ccatggccttagaaactgaagacagtatctccc

SEQ ID NO: 501409 - DNA, 33 bp, Homo sapien
aaggtatagaactcctaagagatctggagagtt

SEQ ID NO: 501410 - DNA, 33 bp, Homo sapien
aaggtatagaactcctgagagatctggagagtt

SEQ ID NO: 501411 - DNA, 33 bp, Homo sapien
taagaaatgtctccaacatggaaaaagagagga

SEQ ID NO: 501412 - DNA, 33 bp, Homo sapien
taagaaatgtctccaagatggaaaaagagagga

SEQ ID NO: 501413 - DNA, 33 bp, Homo sapien
tgtattaactctgcagaattcactgctatttaa

SEQ ID NO: 501414 - DNA, 33 bp, Homo sapien
tgtattaactctgcagcattcactgctatttaa

SEQ ID NO: 501415 - DNA, 33 bp, Homo sapien
ccccttaggcctaacactggtcacacttccaca

SEQ ID NO: 501416 - DNA, 33 bp, Homo sapien
ccccttaggcctaacattggtcacacttccaca

SEQ ID NO: 501417 - DNA, 33 bp, Homo sapien
tgtgtttttggggcacaaacgcagaatacctga

SEQ ID NO: 501418 - DNA, 33 bp, Homo sapien
tgtgtttttggggcacgaacgcagaatacctga

SEQ ID NO: 501419 - DNA, 33 bp, Homo sapien
tttcatcatcatattcaaggttggtgtgtatgc

SEQ ID NO: 501420 - DNA, 33 bp, Homo sapien
tttcatcatcatattcgaggttggtgtgtatgc

SEQ ID NO: 501421 - DNA, 33 bp, Homo sapien
actcagaaggacttcaaattcacaatggagact

SEQ ID NO: 501422 - DNA, 33 bp, Homo sapien
actcagaaggacttcagattcacaatggagact

SEQ ID NO: 501423 - DNA, 33 bp, Homo sapien
gagcagaagttgatcacgtagagaggctgtccc

SEQ ID NO: 501424 - DNA, 33 bp, Homo sapien
gagcagaagttgatcatgtagagaggctgtccc

SEQ ID NO: 501425 - DNA, 33 bp, Homo sapien
acaggaaagagaattgccaacaccttacaaagc

SEQ ID NO: 501426 - DNA, 33 bp, Homo sapien
acaggaaagagaattgtcaacaccttacaaagc

SEQ ID NO: 501427 - DNA, 33 bp, Homo sapien
ataggatatcaaagaacgagtgtgaatcagcta

SEQ ID NO: 501428 - DNA, 33 bp, Homo sapien
ataggatatcaaagaatgagtgtgaatcagcta

SEQ ID NO: 501429 - DNA, 33 bp, Homo sapien
tgggagaggagtaagaaattagttaatatgcac

SEQ ID NO: 501430 - DNA, 33 bp, Homo sapien
tgggagaggagtaagacattagttaatatgcac

SEQ ID NO: 501431 - DNA, 33 bp, Homo sapien
caccccaaagtattggcatggacaattcactcg

SEQ ID NO: 501432 - DNA, 33 bp, Homo sapien
caccccaaagtattgggatggacaattcactcg

SEQ ID NO: 501433 - DNA, 33 bp, Homo sapien
gaagtgtctctgttaaagcaatggtggtataat

SEQ ID NO: 501434 - DNA, 33 bp, Homo sapien
gaagtgtctctgttaaggcaatggtggtataat

SEQ ID NO: 501435 - DNA, 33 bp, Homo sapien
atttgttcatagtcacacccagctcagctgccc

SEQ ID NO: 501436 - DNA, 33 bp, Homo sapien
atttgttcatagtcacgcccagctcagctgccc

SEQ ID NO: 501437 - DNA, 33 bp, Homo sapien
tatactgcctggggtacgataggtcgcccttac

SEQ ID NO: 501438 - DNA, 33 bp, Homo sapien
tatactgcctggggtatgataggtcgcccttac

SEQ ID NO: 501439 - DNA, 33 bp, Homo sapien
atgccctctaatgtagccagtggggcttaagct

SEQ ID NO: 501440 - DNA, 33 bp, Homo sapien
atgccctctaatgtagtcagtggggcttaagct

SEQ ID NO: 501441 - DNA, 33 bp, Homo sapien
tgtctagcttaagaaaccgaattctcatatctg

SEQ ID NO: 501442 - DNA, 33 bp, Homo sapien
tgtctagcttaagaaatcgaattctcatatctg

SEQ ID NO: 501443 - DNA, 33 bp, Homo sapien
tagcaagagaggaaaagccacttagcctttcat

SEQ ID NO: 501444 - DNA, 33 bp, Homo sapien
tagcaagagaggaaaatccacttagcctttcat

SEQ ID NO: 501445 - DNA, 33 bp, Homo sapien
gtagggaagccaaactcagaagaagtaggttaa

SEQ ID NO: 501446 - DNA, 33 bp, Homo sapien
gtagggaagccaaacttagaagaagtaggttaa

SEQ ID NO: 501447 - DNA, 33 bp, Homo sapien
gtaacacaactttggacgggtctcttgagatgc

SEQ ID NO: 501448 - DNA, 33 bp, Homo sapien
gtaacacaactttggatgggtctcttgagatgc

SEQ ID NO: 501449 - DNA, 33 bp, Homo sapien
gttagtccagcctcagaaagttgttatgttccc

SEQ ID NO: 501450 - DNA, 33 bp, Homo sapien
gttagtccagcctcaggaagttgttatgttccc

SEQ ID NO: 501451 - DNA, 33 bp, Homo sapien
ctattcaggtggatcacggtaaatggaaaccca

SEQ ID NO: 501452 - DNA, 33 bp, Homo sapien
ctattcaggtggatcatggtaaatggaaaccca

SEQ ID NO: 501453 - DNA, 33 bp, Homo sapien
ctctagctcttttccaaggaaaatctatgcaga

SEQ ID NO: 501454 - DNA, 33 bp, Homo sapien
ctctagctcttttccagggaaaatctatgcaga

SEQ ID NO: 501455 - DNA, 33 bp, Homo sapien
atgtcatggaccggaaacttcaacccaagaatc

SEQ ID NO: 501456 - DNA, 33 bp, Homo sapien
atgtcatggaccggaatcttcaacccaagaatc

SEQ ID NO: 501457 - DNA, 33 bp, Homo sapien
tatattggctataagacagtaactggtaggtca

SEQ ID NO: 501458 - DNA, 33 bp, Homo sapien
tatattggctataagatagtaactggtaggtca

SEQ ID NO: 501459 - DNA, 33 bp, Homo sapien
tcttccaacattcaaccaaggcttgtcctcctc

SEQ ID NO: 501460 - DNA, 33 bp, Homo sapien
tcttccaacattcaactaaggcttgtcctcctc

SEQ ID NO: 501461 - DNA, 33 bp, Homo sapien
atgatgaatttttccaatgaaggtaaactctac

SEQ ID NO: 501462 - DNA, 33 bp, Homo sapien
atgatgaatttttccagtgaaggtaaactctac

SEQ ID NO: 501463 - DNA, 33 bp, Homo sapien
tcattcttgaaaggtccgaatcttcagtgtctt

SEQ ID NO: 501464 - DNA, 33 bp, Homo sapien
tcattcttgaaaggtctgaatcttcagtgtctt

SEQ ID NO: 501465 - DNA, 33 bp, Homo sapien
ctcttcctgggacgttaaacgaggtttcacaga

SEQ ID NO: 501466 - DNA, 33 bp, Homo sapien
ctcttcctgggacgttgaacgaggtttcacaga

SEQ ID NO: 501467 - DNA, 33 bp, Homo sapien
attagagctaattagaactgattacaaaataac

SEQ ID NO: 501468 - DNA, 33 bp, Homo sapien
attagagctaattagacctgattacaaaataac

SEQ ID NO: 501469 - DNA, 33 bp, Homo sapien
taacaagctggcagcaaggatagcacggtgtct

SEQ ID NO: 501470 - DNA, 33 bp, Homo sapien
taacaagctggcagcagggatagcacggtgtct

SEQ ID NO: 501471 - DNA, 33 bp, Homo sapien
aaaaacacctatattacgatccagcaaattcca

SEQ ID NO: 501472 - DNA, 33 bp, Homo sapien
aaaaacacctatattatgatccagcaaattcca

SEQ ID NO: 501473 - DNA, 33 bp, Homo sapien
tatatgtcatatcagcccaggtcaattgtaaac

SEQ ID NO: 501474 - DNA, 33 bp, Homo sapien
tatatgtcatatcagctcaggtcaattgtaaac

SEQ ID NO: 501475 - DNA, 33 bp, Homo sapien
tccgcttgtcggattccatgaaaaagatgtgaa

SEQ ID NO: 501476 - DNA, 33 bp, Homo sapien
tccgcttgtcggattctatgaaaaagatgtgaa

SEQ ID NO: 501477 - DNA, 33 bp, Homo sapien
atcatgaagaattcccagaagacagaatgtaga

SEQ ID NO: 501478 - DNA, 33 bp, Homo sapien
atcatgaagaattcccggaagacagaatgtaga

SEQ ID NO: 501479 - DNA, 33 bp, Homo sapien
ctgcttatcaatcccaatgcagctagttctgtc

SEQ ID NO: 501480 - DNA, 33 bp, Homo sapien
ctgcttatcaatcccagtgcagctagttctgtc

SEQ ID NO: 501481 - DNA, 33 bp, Homo sapien
ctggtggtaagagccaaaagattgccactgaag

SEQ ID NO: 501482 - DNA, 33 bp, Homo sapien
ctggtggtaagagccagaagattgccactgaag

SEQ ID NO: 501483 - DNA, 33 bp, Homo sapien
ggtgcactgtaacagccgctgtgaatgttttct

SEQ ID NO: 501484 - DNA, 33 bp, Homo sapien
ggtgcactgtaacagctgctgtgaatgttttct

SEQ ID NO: 501485 - DNA, 33 bp, Homo sapien
gtctgtttcctctacccaagaatgccagtctgg

SEQ ID NO: 501486 - DNA, 33 bp, Homo sapien
gtctgtttcctctaccgaagaatgccagtctgg

SEQ ID NO: 501487 - DNA, 33 bp, Homo sapien
tcagtgcagcaaaaaacctactacagaaagaaa

SEQ ID NO: 501488 - DNA, 33 bp, Homo sapien
tcagtgcagcaaaaaatctactacagaaagaaa

SEQ ID NO: 501489 - DNA, 33 bp, Homo sapien
cagcatcctccgatgactcatcaattgacccag

SEQ ID NO: 501490 - DNA, 33 bp, Homo sapien
cagcatcctccgatgattcatcaattgacccag

SEQ ID NO: 501491 - DNA, 33 bp, Homo sapien
cagggaattctgccgacggcccaggcatggtgg

SEQ ID NO: 501492 - DNA, 33 bp, Homo sapien
cagggaattctgccgatggcccaggcatggtgg

SEQ ID NO: 501493 - DNA, 33 bp, Homo sapien
aaagcgtcatcaggtacaacaaatattacaagt

SEQ ID NO: 501494 - DNA, 33 bp, Homo sapien
aaagcgtcatcaggtataacaaatattacaagt

SEQ ID NO: 501495 - DNA, 33 bp, Homo sapien
ggaaaagaacagacaaagttgagagagttaaga

SEQ ID NO: 501496 - DNA, 33 bp, Homo sapien
ggaaaagaacagacaaggttgagagagttaaga

SEQ ID NO: 501497 - DNA, 33 bp, Homo sapien
caggcaaagtaaaacccggcctttcacataaag

SEQ ID NO: 501498 - DNA, 33 bp, Homo sapien
caggcaaagtaaaacctggcctttcacataaag

SEQ ID NO: 501499 - DNA, 33 bp, Homo sapien
gcggcttggttcttgacgttagtgagaccaaga

SEQ ID NO: 501500 - DNA, 33 bp, Homo sapien
gcggcttggttcttgatgttagtgagaccaaga

SEQ ID NO: 501501 - DNA, 33 bp, Homo sapien
aatgaagtacactagagcaggtttagtgtactt

SEQ ID NO: 501502 - DNA, 33 bp, Homo sapien
aatgaagtacactagatcaggtttagtgtactt

SEQ ID NO: 501503 - DNA, 33 bp, Homo sapien
tgaatcagccactgtaccactcagcttgggctg

SEQ ID NO: 501504 - DNA, 33 bp, Homo sapien
tgaatcagccactgtatcactcagcttgggctg

SEQ ID NO: 501505 - DNA, 33 bp, Homo sapien
taagacagaatcttacaagtagaattgctggta

SEQ ID NO: 501506 - DNA, 33 bp, Homo sapien
taagacagaatcttacgagtagaattgctggta

SEQ ID NO: 501507 - DNA, 33 bp, Homo sapien
aggactgaggtctaggacaggtcaaagttgaaa

SEQ ID NO: 501508 - DNA, 33 bp, Homo sapien
aggactgaggtctagggcaggtcaaagttgaaa

SEQ ID NO: 501509 - DNA, 33 bp, Homo sapien
aaatgcacctgggccacggttctttctactaac

SEQ ID NO: 501510 - DNA, 33 bp, Homo sapien
aaatgcacctgggccatggttctttctactaac

SEQ ID NO: 501511 - DNA, 33 bp, Homo sapien
tgcagcaggccttccaataacgttggattttga

SEQ ID NO: 501512 - DNA, 33 bp, Homo sapien
tgcagcaggccttccagtaacgttggattttga

SEQ ID NO: 501513 - DNA, 33 bp, Homo sapien
gcattcatggcccccaaaatacagtggcggtgg

SEQ ID NO: 501514 - DNA, 33 bp, Homo sapien
gcattcatggcccccataatacagtggcggtgg

SEQ ID NO: 501515 - DNA, 33 bp, Homo sapien
acatttttttctaccaagagatttgcagctgac

SEQ ID NO: 501516 - DNA, 33 bp, Homo sapien
acatttttttctaccaggagatttgcagctgac

SEQ ID NO: 501517 - DNA, 33 bp, Homo sapien
cagatataactgattgcacataatgagatacta

SEQ ID NO: 501518 - DNA, 33 bp, Homo sapien
cagatataactgattgtacataatgagatacta

SEQ ID NO: 501519 - DNA, 33 bp, Homo sapien
aattttaccaaagcagacaagaaaggagaaaaa

SEQ ID NO: 501520 - DNA, 33 bp, Homo sapien
aattttaccaaagcaggcaagaaaggagaaaaa

SEQ ID NO: 501521 - DNA, 33 bp, Homo sapien
gtgcaatcatagcccaatgaagcctggacttcc

SEQ ID NO: 501522 - DNA, 33 bp, Homo sapien
gtgcaatcatagcccagtgaagcctggacttcc

SEQ ID NO: 501523 - DNA, 33 bp, Homo sapien
tacctttatgctgctaccatggactgcttccaa

SEQ ID NO: 501524 - DNA, 33 bp, Homo sapien
tacctttatgctgctatcatggactgcttccaa

SEQ ID NO: 501525 - DNA, 33 bp, Homo sapien
aggcatgaagacataagaaaacatggtacgtac

SEQ ID NO: 501526 - DNA, 33 bp, Homo sapien
aggcatgaagacataataaaacatggtacgtac

SEQ ID NO: 501527 - DNA, 33 bp, Homo sapien
agttctaaaaaatcacaaattatatggagtaaa

SEQ ID NO: 501528 - DNA, 33 bp, Homo sapien
agttctaaaaaatcacgaattatatggagtaaa

SEQ ID NO: 501529 - DNA, 33 bp, Homo sapien
ccaaacgtttgttagcaataaggctaagtgtct

SEQ ID NO: 501530 - DNA, 33 bp, Homo sapien
ccaaacgtttgttagcgataaggctaagtgtct

SEQ ID NO: 501531 - DNA, 33 bp, Homo sapien
gtttgccatttataaaacacaccattgaatcta

SEQ ID NO: 501532 - DNA, 33 bp, Homo sapien
gtttgccatttataaagcacaccattgaatcta

SEQ ID NO: 501533 - DNA, 33 bp, Homo sapien
attattaaatgtgaaactgcttgtgagctagaa

SEQ ID NO: 501534 - DNA, 33 bp, Homo sapien
attattaaatgtgaaattgcttgtgagctagaa

SEQ ID NO: 501535 - DNA, 33 bp, Homo sapien
gtaaaactatgtttccaatagcctcaagtacat

SEQ ID NO: 501536 - DNA, 33 bp, Homo sapien
gtaaaactatgtttcccatagcctcaagtacat

SEQ ID NO: 501537 - DNA, 33 bp, Homo sapien
gaatcttcaggtgagactacatgggaggttctg

SEQ ID NO: 501538 - DNA, 33 bp, Homo sapien
gaatcttcaggtgagattacatgggaggttctg

SEQ ID NO: 501539 - DNA, 33 bp, Homo sapien
cagtatccttggccccaacctattagacgccag

SEQ ID NO: 501540 - DNA, 33 bp, Homo sapien
cagtatccttggccccgacctattagacgccag

SEQ ID NO: 501541 - DNA, 33 bp, Homo sapien
caagtcactggtatggaccactgttaactgccg

SEQ ID NO: 501542 - DNA, 33 bp, Homo sapien
caagtcactggtatgggccactgttaactgccg

SEQ ID NO: 501543 - DNA, 33 bp, Homo sapien
ggcaagggcgtccttcaaagttggatgaagagg

SEQ ID NO: 501544 - DNA, 33 bp, Homo sapien
ggcaagggcgtccttcgaagttggatgaagagg

SEQ ID NO: 501545 - DNA, 33 bp, Homo sapien
acacatatgacaagaaaaataaagtaaggagag

SEQ ID NO: 501546 - DNA, 33 bp, Homo sapien
acacatatgacaagaagaataaagtaaggagag

SEQ ID NO: 501547 - DNA, 33 bp, Homo sapien
tgatcacttactatacacttactatacaaactc

SEQ ID NO: 501548 - DNA, 33 bp, Homo sapien
tgatcacttactatacgcttactatacaaactc

SEQ ID NO: 501549 - DNA, 33 bp, Homo sapien
gcagtgatattttcaactccaggatgtgaagcc

SEQ ID NO: 501550 - DNA, 33 bp, Homo sapien
gcagtgatattttcaagtccaggatgtgaagcc

SEQ ID NO: 501551 - DNA, 33 bp, Homo sapien
tggtcactcacacagactaactctgggacaatg

SEQ ID NO: 501552 - DNA, 33 bp, Homo sapien
tggtcactcacacagattaactctgggacaatg

SEQ ID NO: 501553 - DNA, 33 bp, Homo sapien
aagagaaacacgaaaaatttggaccatctggag

SEQ ID NO: 501554 - DNA, 33 bp, Homo sapien
aagagaaacacgaaaattttggaccatctggag

SEQ ID NO: 501555 - DNA, 33 bp, Homo sapien
tacttttttttgaagaatcacatatgagggaaa

SEQ ID NO: 501556 - DNA, 33 bp, Homo sapien
tacttttttttgaagactcacatatgagggaaa

SEQ ID NO: 501557 - DNA, 33 bp, Homo sapien
ggaaatttcaacaacaaattagaacgagtagaa

SEQ ID NO: 501558 - DNA, 33 bp, Homo sapien
ggaaatttcaacaacagattagaacgagtagaa

SEQ ID NO: 501559 - DNA, 33 bp, Homo sapien
atatttaaggcataagacagacattttacacct

SEQ ID NO: 501560 - DNA, 33 bp, Homo sapien
atatttaaggcataaggcagacattttacacct

SEQ ID NO: 501561 - DNA, 33 bp, Homo sapien
ataattttgcaaagcacatttaatgtcatgttc

SEQ ID NO: 501562 - DNA, 33 bp, Homo sapien
ataattttgcaaagcagatttaatgtcatgttc

SEQ ID NO: 501563 - DNA, 33 bp, Homo sapien
ctgataccttgaaaagccaccatgtgtctccct

SEQ ID NO: 501564 - DNA, 33 bp, Homo sapien
ctgataccttgaaaaggcaccatgtgtctccct

SEQ ID NO: 501565 - DNA, 33 bp, Homo sapien
gaaaaggctgccgcatcatctcagcgaggagtg

SEQ ID NO: 501566 - DNA, 33 bp, Homo sapien
gaaaaggctgccgcatgatctcagcgaggagtg

SEQ ID NO: 501567 - DNA, 33 bp, Homo sapien; identical to SEQ ID NO: 501565

SEQ ID NO: 501568 - DNA, 33 bp, Homo sapien; identical to SEQ ID NO: 501566

SEQ ID NO: 501569 - DNA, 33 bp, Homo sapien
ccctggcctgttgtgaaaggtaggacagggatc

SEQ ID NO: 501570 - DNA, 33 bp, Homo sapien
ccctggcctgttgtgagaggtaggacagggatc

SEQ ID NO: 501571 - DNA, 33 bp, Homo sapien
tctactgctagtgggagagtaaactgacctaac

SEQ ID NO: 501572 - DNA, 33 bp, Homo sapien
tctactgctagtgggatagtaaactgacctaac

SEQ ID NO: 501573 - DNA, 33 bp, Homo sapien
gcctcaggatcaaagacagtacctggcacattt

SEQ ID NO: 501574 - DNA, 33 bp, Homo sapien
gcctcaggatcaaagatagtacctggcacattt

SEQ ID NO: 501575 - DNA, 33 bp, Homo sapien
ctatacatcagagtgacgtcttctgtggcttca

SEQ ID NO: 501576 - DNA, 33 bp, Homo sapien
ctatacatcagagtgaggtcttctgtggcttca

SEQ ID NO: 501577 - DNA, 33 bp, Homo sapien
aatcagtttgacagcacagattttatggccaca

SEQ ID NO: 501578 - DNA, 33 bp, Homo sapien
aatcagtttgacagcatagattttatggccaca

SEQ ID NO: 501579 - DNA, 33 bp, Homo sapien
cccacatgtgtttggaacaatcaagaaatattg

SEQ ID NO: 501580 - DNA, 33 bp, Homo sapien
cccacatgtgtttggagcaatcaagaaatattg

SEQ ID NO: 501581 - DNA, 33 bp, Homo sapien
ccactcttcgaccccaactggatatttcttcac

SEQ ID NO: 501582 - DNA, 33 bp, Homo sapien
ccactcttcgaccccagctggatatttcttcac

SEQ ID NO: 501583 - DNA, 33 bp, Homo sapien
accacagccaaataaccctggaactgtttcaag

SEQ ID NO: 501584 - DNA, 33 bp, Homo sapien
accacagccaaataactctggaactgtttcaag

SEQ ID NO: 501585 - DNA, 33 bp, Homo sapien
cttaaaaaacaacaacaacaaaatgatccccca

SEQ ID NO: 501586 - DNA, 33 bp, Homo sapien
cttaaaaaacaacaacgacaaaatgatccccca

SEQ ID NO: 501587 - DNA, 33 bp, Homo sapien
cagttccctaaattctcaccaagactggtcatc

SEQ ID NO: 501588 - DNA, 33 bp, Homo sapien
cagttccctaaattcttaccaagactggtcatc

SEQ ID NO: 501589 - DNA, 33 bp, Homo sapien
ttaaaatgggcatcaaaagataaaacctacaca

SEQ ID NO: 501590 - DNA, 33 bp, Homo sapien
ttaaaatgggcatcaagagataaaacctacaca

SEQ ID NO: 501591 - DNA, 33 bp, Homo sapien
gccacccaactgaggcgccaggattttctgcac

SEQ ID NO: 501592 - DNA, 33 bp, Homo sapien
gccacccaactgaggctccaggattttctgcac

SEQ ID NO: 501593 - DNA, 33 bp, Homo sapien
atttaagaccaggacacgctttcagttatggga

SEQ ID NO: 501594 - DNA, 33 bp, Homo sapien
atttaagaccaggacaggctttcagttatggga

SEQ ID NO: 501595 - DNA, 33 bp, Homo sapien
ctgctctctgtcacaacgtaggctgaaaaagct

SEQ ID NO: 501596 - DNA, 33 bp, Homo sapien
ctgctctctgtcacaatgtaggctgaaaaagct

SEQ ID NO: 501597 - DNA, 33 bp, Homo sapien
ggcttcctgcttcaaacgtctgtgttttttaaa

SEQ ID NO: 501598 - DNA, 33 bp, Homo sapien
ggcttcctgcttcaaatgtctgtgttttttaaa

SEQ ID NO: 501599 - DNA, 33 bp, Homo sapien
atcaaggcaaatcaaacagttttagcatttgga

SEQ ID NO: 501600 - DNA, 33 bp, Homo sapien
atcaaggcaaatcaaagagttttagcatttgga

SEQ ID NO: 501601 - DNA, 33 bp, Homo sapien
cggctctacagcaaagcaggttttatgtccagc

SEQ ID NO: 501602 - DNA, 33 bp, Homo sapien
cggctctacagcaaagtaggttttatgtccagc

SEQ ID NO: 501603 - DNA, 33 bp, Homo sapien
aggaagaccaagattgaatcccctgagtaatgc

SEQ ID NO: 501604 - DNA, 33 bp, Homo sapien
aggaagaccaagattgcatcccctgagtaatgc

SEQ ID NO: 501605 - DNA, 33 bp, Homo sapien
cgttatactgctttccacaactgctgaactaat

SEQ ID NO: 501606 - DNA, 33 bp, Homo sapien
cgttatactgctttccgcaactgctgaactaat

SEQ ID NO: 501607 - DNA, 33 bp, Homo sapien
acactcacaaacattacggtgggaaaagcagat

SEQ ID NO: 501608 - DNA, 33 bp, Homo sapien
acactcacaaacattatggtgggaaaagcagat

SEQ ID NO: 501609 - DNA, 33 bp, Homo sapien
caccgctcatgtacacagagaaatgctttgaag

SEQ ID NO: 501610 - DNA, 33 bp, Homo sapien
caccgctcatgtacacggagaaatgctttgaag

SEQ ID NO: 501611 - DNA, 33 bp, Homo sapien
agaaactgatgatgaagcttgagtcctccctct

SEQ ID NO: 501612 - DNA, 33 bp, Homo sapien
agaaactgatgatgaatcttgagtcctccctct

SEQ ID NO: 501613 - DNA, 33 bp, Homo sapien
aggaataaggaatgaacgatgtaaaatgccata

SEQ ID NO: 501614 - DNA, 33 bp, Homo sapien
aggaataaggaatgaatgatgtaaaatgccata

SEQ ID NO: 501615 - DNA, 33 bp, Homo sapien
gtatattttaggtttgcaatatgatgttgtggc

SEQ ID NO: 501616 - DNA, 33 bp, Homo sapien
gtatattttaggtttgtaatatgatgttgtggc

SEQ ID NO: 501617 - DNA, 33 bp, Homo sapien
gaacactgaaataacaaagaatgatgtgcgatt

SEQ ID NO: 501618 - DNA, 33 bp, Homo sapien
gaacactgaaataacacagaatgatgtgcgatt

SEQ ID NO: 501619 - DNA, 33 bp, Homo sapien
gctaatgccagagagagaatacaaaaaaagaaa

SEQ ID NO: 501620 - DNA, 33 bp, Homo sapien
gctaatgccagagagataatacaaaaaaagaaa

SEQ ID NO: 501621 - DNA, 33 bp, Homo sapien
aatgtcatcagggtacccgagctgctgaaagtt

SEQ ID NO: 501622 - DNA, 33 bp, Homo sapien
aatgtcatcagggtactcgagctgctgaaagtt

SEQ ID NO: 501623 - DNA, 33 bp, Homo sapien
atggaaatgtttaggaaaagaaggacaatcaca

SEQ ID NO: 501624 - DNA, 33 bp, Homo sapien
atggaaatgtttaggagaagaaggacaatcaca

SEQ ID NO: 501625 - DNA, 33 bp, Homo sapien
ctctcttggaccacagaaaaatgaatgtagaat

SEQ ID NO: 501626 - DNA, 33 bp, Homo sapien
ctctcttggaccacagcaaaatgaatgtagaat

SEQ ID NO: 501627 - DNA, 33 bp, Homo sapien
cagacttcacagagccactttggaaataggaac

SEQ ID NO: 501628 - DNA, 33 bp, Homo sapien
cagacttcacagagccgctttggaaataggaac

SEQ ID NO: 501629 - DNA, 33 bp, Homo sapien
cacggtcaagactcaccgggactcagcatctac

SEQ ID NO: 501630 - DNA, 33 bp, Homo sapien
cacggtcaagactcactgggactcagcatctac

SEQ ID NO: 501631 - DNA, 33 bp, Homo sapien
ttcctttaagccatccagcccagggaattttga

SEQ ID NO: 501632 - DNA, 33 bp, Homo sapien
ttcctttaagccatcctgcccagggaattttga

SEQ ID NO: 501633 - DNA, 33 bp, Homo sapien
tgaggatgaatttgcaccatgaattcagagaag

SEQ ID NO: 501634 - DNA, 33 bp, Homo sapien
tgaggatgaatttgcatcatgaattcagagaag

SEQ ID NO: 501635 - DNA, 33 bp, Homo sapien
caattttccctcctaacatgaaaacaaactaac

SEQ ID NO: 501636 - DNA, 33 bp, Homo sapien
caattttccctcctaatatgaaaacaaactaac

SEQ ID NO: 501637 - DNA, 33 bp, Homo sapien; identical to SEQ ID NO: 501635

SEQ ID NO: 501638 - DNA, 33 bp, Homo sapien; identical to SEQ ID NO: 501636

SEQ ID NO: 501639 - DNA, 33 bp, Homo sapien
caacctgggcctgaacaactgataaagtttgtg

SEQ ID NO: 501640 - DNA, 33 bp, Homo sapien
caacctgggcctgaacgactgataaagtttgtg

SEQ ID NO: 501641 - DNA, 33 bp, Homo sapien
atcaggatcatgtaagaccaagaatttgatgca

SEQ ID NO: 501642 - DNA, 33 bp, Homo sapien
atcaggatcatgtaaggccaagaatttgatgca

SEQ ID NO: 501643 - DNA, 33 bp, Homo sapien
acaaaagacataaacccataatctgttatacct

SEQ ID NO: 501644 - DNA, 33 bp, Homo sapien
acaaaagacataaaccgataatctgttatacct

SEQ ID NO: 501645 - DNA, 33 bp, Homo sapien
tgttggacaaagtcacacatggcttatctaaaa

SEQ ID NO: 501646 - DNA, 33 bp, Homo sapien
tgttggacaaagtcacgcatggcttatctaaaa

SEQ ID NO: 501647 - DNA, 33 bp, Homo sapien
cccatgtcagattaacaatatccagtaaagtct

SEQ ID NO: 501648 - DNA, 33 bp, Homo sapien
cccatgtcagattaactatatccagtaaagtct

SEQ ID NO: 501649 - DNA, 33 bp, Homo sapien
tacccttcactttccaaataggtgtgatcatgt

SEQ ID NO: 501650 - DNA, 33 bp, Homo sapien
tacccttcactttccacataggtgtgatcatgt

SEQ ID NO: 501651 - DNA, 33 bp, Homo sapien
aagaggagcaatttaaatctgaagtagaacgtg

SEQ ID NO: 501652 - DNA, 33 bp, Homo sapien
aagaggagcaatttaattctgaagtagaacgtg

SEQ ID NO: 501653 - DNA, 33 bp, Homo sapien
tgtgattagctccacaatgcaatgtcaggggag

SEQ ID NO: 501654 - DNA, 33 bp, Homo sapien
tgtgattagctccacagtgcaatgtcaggggag

SEQ ID NO: 501655 - DNA, 33 bp, Homo sapien
gcagtgggatatcataacggtgtgattactcag

SEQ ID NO: 501656 - DNA, 33 bp, Homo sapien
gcagtgggatatcatagcggtgtgattactcag

SEQ ID NO: 501657 - DNA, 33 bp, Homo sapien
atctaaaatatttttcaaacccagtagagctcc

SEQ ID NO: 501658 - DNA, 33 bp, Homo sapien
atctaaaatatttttcgaacccagtagagctcc

SEQ ID NO: 501659 - DNA, 33 bp, Homo sapien
ttaagtaaagcgtagaagaaaaagtgtaaataa

SEQ ID NO: 501660 - DNA, 33 bp, Homo sapien
ttaagtaaagcgtagaggaaaaagtgtaaataa

SEQ ID NO: 501661 - DNA, 33 bp, Homo sapien
agcaatggttaacaaaaggaggaagttggtgtt

SEQ ID NO: 501662 - DNA, 33 bp, Homo sapien
agcaatggttaacaaacggaggaagttggtgtt

SEQ ID NO: 501663 - DNA, 33 bp, Homo sapien; identical to SEQ ID NO: 501661

SEQ ID NO: 501664 - DNA, 33 bp, Homo sapien; identical to SEQ ID NO: 501662

SEQ ID NO: 501665 - DNA, 33 bp, Homo sapien
ttaaattagttgctgtaaatcattaatgattga

SEQ ID NO: 501666 - DNA, 33 bp, Homo sapien
ttaaattagttgctgttaatcattaatgattga

SEQ ID NO: 501667 - DNA, 33 bp, Homo sapien
gagccatgatccctgaggaaaatttgcatttag

SEQ ID NO: 501668 - DNA, 33 bp, Homo sapien
gagccatgatccctgatgaaaatttgcatttag

SEQ ID NO: 501669 - DNA, 33 bp, Homo sapien
gctgtgtagtattccacgatgcagaaggaccac

SEQ ID NO: 501670 - DNA, 33 bp, Homo sapien
gctgtgtagtattccatgatgcagaaggaccac

SEQ ID NO: 501671 - DNA, 33 bp, Homo sapien
cttttggatactgaaaataatgctgctatgaga

SEQ ID NO: 501672 - DNA, 33 bp, Homo sapien
cttttggatactgaaagtaatgctgctatgaga

SEQ ID NO: 501673 - DNA, 33 bp, Homo sapien
gctgtggagacctagccgcatattatattatat

SEQ ID NO: 501674 - DNA, 33 bp, Homo sapien
gctgtggagacctagctgcatattatattatat

SEQ ID NO: 501675 - DNA, 33 bp, Homo sapien
cccacctggagtgtcacagatttcatctgccat

SEQ ID NO: 501676 - DNA, 33 bp, Homo sapien
cccacctggagtgtcatagatttcatctgccat

SEQ ID NO: 501677 - DNA, 33 bp, Homo sapien
caccataggtctcaaaacgatgaaaatgtccac

SEQ ID NO: 501678 - DNA, 33 bp, Homo sapien
caccataggtctcaaagcgatgaaaatgtccac

SEQ ID NO: 501679 - DNA, 33 bp, Homo sapien
actattccttgacccacgaaagattttctcaca

SEQ ID NO: 501680 - DNA, 33 bp, Homo sapien
actattccttgacccatgaaagattttctcaca

SEQ ID NO: 501681 - DNA, 33 bp, Homo sapien
aggtgacttttgagcacaaacctgagatatgtg

SEQ ID NO: 501682 - DNA, 33 bp, Homo sapien
aggtgacttttgagcagaaacctgagatatgtg

SEQ ID NO: 501683 - DNA, 33 bp, Homo sapien
gcgctggcgcagcgcacgcagcaagactccacg

SEQ ID NO: 501684 - DNA, 33 bp, Homo sapien
gcgctggcgcagcgcatgcagcaagactccacg

SEQ ID NO: 501685 - DNA, 33 bp, Homo sapien
actgcaggacacgcacagctggaagtcggagct

SEQ ID NO: 501686 - DNA, 33 bp, Homo sapien
actgcaggacacgcacggctggaagtcggagct

SEQ ID NO: 501687 - DNA, 33 bp, Homo sapien
acatttgtcaaatccaaaaatttatgaaacaca

SEQ ID NO: 501688 - DNA, 33 bp, Homo sapien
acatttgtcaaatccagaaatttatgaaacaca

SEQ ID NO: 501689 - DNA, 33 bp, Homo sapien; identical to SEQ ID NO: 501687

SEQ ID NO: 501690 - DNA, 33 bp, Homo sapien; identical to SEQ ID NO: 501688

SEQ ID NO: 501691 - DNA, 33 bp, Homo sapien
ttcttggtgaatcaaactacacagattcttgag

SEQ ID NO: 501692 - DNA, 33 bp, Homo sapien
ttcttggtgaatcaaagtacacagattcttgag

SEQ ID NO: 501693 - DNA, 33 bp, Homo sapien
ttagggtgaaagtccaatcgaacccaaacctgg

SEQ ID NO: 501694 - DNA, 33 bp, Homo sapien
ttagggtgaaagtccagtcgaacccaaacctgg

SEQ ID NO: 501695 - DNA, 33 bp, Homo sapien
cgagccccttccctaccgatgcttgctgagaac

SEQ ID NO: 501696 - DNA, 33 bp, Homo sapien
cgagccccttccctactgatgcttgctgagaac

SEQ ID NO: 501697 - DNA, 33 bp, Homo sapien
tcccagaagggattcacgatagtcctggtactg

SEQ ID NO: 501698 - DNA, 33 bp, Homo sapien
tcccagaagggattcatgatagtcctggtactg

SEQ ID NO: 501699 - DNA, 33 bp, Homo sapien
gtggcccgatacaggtgaccccataaaaaatca

SEQ ID NO: 501700 - DNA, 33 bp, Homo sapien
gtggcccgatacaggttaccccataaaaaatca

SEQ ID NO: 501701 - DNA, 33 bp, Homo sapien
acacacggggggtgagaatttatcttgtaggcc

SEQ ID NO: 501702 - DNA, 33 bp, Homo sapien
acacacggggggtgaggatttatcttgtaggcc

SEQ ID NO: 501703 - DNA, 33 bp, Homo sapien
cttactgagcacctgcaatgaggtaaagactca

SEQ ID NO: 501704 - DNA, 33 bp, Homo sapien
cttactgagcacctgcgatgaggtaaagactca

SEQ ID NO: 501705 - DNA, 33 bp, Homo sapien
tctctatccttcatccacaggagtgccaatatg

SEQ ID NO: 501706 - DNA, 33 bp, Homo sapien
tctctatccttcatccgcaggagtgccaatatg

SEQ ID NO: 501707 - DNA, 33 bp, Homo sapien
aaatcattggtccagacaagtcatgaaagtctc

SEQ ID NO: 501708 - DNA, 33 bp, Homo sapien
aaatcattggtccagataagtcatgaaagtctc

SEQ ID NO: 501709 - DNA, 33 bp, Homo sapien
gatcctgaatgccagcaatccccctcagctctt

SEQ ID NO: 501710 - DNA, 33 bp, Homo sapien
gatcctgaatgccagccatccccctcagctctt

SEQ ID NO: 501711 - DNA, 33 bp, Homo sapien
ccagggaccctggcaaactgcatgagaacgggt

SEQ ID NO: 501712 - DNA, 33 bp, Homo sapien
ccagggaccctggcaagctgcatgagaacgggt

SEQ ID NO: 501713 - DNA, 33 bp, Homo sapien
cgcactgcctgacctccagctgtggcagtggca

SEQ ID NO: 501714 - DNA, 33 bp, Homo sapien
cgcactgcctgacctctagctgtggcagtggca

SEQ ID NO: 501715 - DNA, 33 bp, Homo sapien
caaagtgttctcaagtcacatcctcgctggtga

SEQ ID NO: 501716 - DNA, 33 bp, Homo sapien
caaagtgttctcaagttacatcctcgctggtga

SEQ ID NO: 501717 - DNA, 33 bp, Homo sapien
cacctagctgcccagggatttcatgaggtctcc

SEQ ID NO: 501718 - DNA, 33 bp, Homo sapien
cacctagctgcccaggtatttcatgaggtctcc

SEQ ID NO: 501719 - DNA, 33 bp, Homo sapien
ctgacaccattccccaccaacagaacatctgga

SEQ ID NO: 501720 - DNA, 33 bp, Homo sapien
ctgacaccattccccatcaacagaacatctgga

SEQ ID NO: 501721 - DNA, 33 bp, Homo sapien
tcaaaaaagagagtgacgtgtaggagggaattt

SEQ ID NO: 501722 - DNA, 33 bp, Homo sapien
tcaaaaaagagagtgaggtgtaggagggaattt

SEQ ID NO: 501723 - DNA, 33 bp, Homo sapien
actggtgtcaatacacacattcacatccatgag

SEQ ID NO: 501724 - DNA, 33 bp, Homo sapien
actggtgtcaatacacgcattcacatccatgag

SEQ ID NO: 501725 - DNA, 33 bp, Homo sapien; identical to SEQ ID NO: 501723

SEQ ID NO: 501726 - DNA, 33 bp, Homo sapien; identical to SEQ ID NO: 501724

SEQ ID NO: 501727 - DNA, 33 bp, Homo sapien
agctgggagctcagaccgaagaaaaagggcaga

SEQ ID NO: 501728 - DNA, 33 bp, Homo sapien
agctgggagctcagactgaagaaaaagggcaga

SEQ ID NO: 501729 - DNA, 33 bp, Homo sapien
ctaagtttcaaacatgacagtacagctatctct

SEQ ID NO: 501730 - DNA, 33 bp, Homo sapien
ctaagtttcaaacatggcagtacagctatctct

SEQ ID NO: 501731 - DNA, 33 bp, Homo sapien
tccccacacaaagccccgacagggaatcgaatt

SEQ ID NO: 501732 - DNA, 33 bp, Homo sapien
tccccacacaaagccctgacagggaatcgaatt

SEQ ID NO: 501733 - DNA, 33 bp, Homo sapien
ccattctcgcacatacacttgtaggtcagctca

SEQ ID NO: 501734 - DNA, 33 bp, Homo sapien
ccattctcgcacatacccttgtaggtcagctca

SEQ ID NO: 501735 - DNA, 33 bp, Homo sapien
agaatcctgagagtacgatttgtctgatttttt

SEQ ID NO: 501736 - DNA, 33 bp, Homo sapien
agaatcctgagagtactatttgtctgatttttt

SEQ ID NO: 501737 - DNA, 33 bp, Homo sapien
acagttgagtaaaagtaacagggaacagatttg

SEQ ID NO: 501738 - DNA, 33 bp, Homo sapien
acagttgagtaaaagtgacagggaacagatttg

SEQ ID NO: 501739 - DNA, 33 bp, Homo sapien
tctggatcttttaaaactcatattcatattcag

SEQ ID NO: 501740 - DNA, 33 bp, Homo sapien
tctggatcttttaaaattcatattcatattcag

SEQ ID NO: 501741 - DNA, 33 bp, Homo sapien
taataaaaataatacacgccaccctccgaaaaa

SEQ ID NO: 501742 - DNA, 33 bp, Homo sapien
taataaaaataatacatgccaccctccgaaaaa

SEQ ID NO: 501743 - DNA, 33 bp, Homo sapien
gctggaggcttatgacagaaagatggtaggatc

SEQ ID NO: 501744 - DNA, 33 bp, Homo sapien
gctggaggcttatgacggaaagatggtaggatc

SEQ ID NO: 501745 - DNA, 33 bp, Homo sapien
ggaactgctctaactcgatggctggattgactg

SEQ ID NO: 501746 - DNA, 33 bp, Homo sapien
ggaactgctctaactctatggctggattgactg

SEQ ID NO: 501747 - DNA, 33 bp, Homo sapien; identical to SEQ ID NO: 501745

SEQ ID NO: 501748 - DNA, 33 bp, Homo sapien; identical to SEQ ID NO: 501746

SEQ ID NO: 501749 - DNA, 33 bp, Homo sapien
tcacttgcttaaggtacacattgaaggttcaaa

SEQ ID NO: 501750 - DNA, 33 bp, Homo sapien
tcacttgcttaaggtatacattgaaggttcaaa

SEQ ID NO: 501751 - DNA, 33 bp, Homo sapien
gaggaatagacaggaaatcaaactgtctctgtt

SEQ ID NO: 501752 - DNA, 33 bp, Homo sapien
gaggaatagacaggaagtcaaactgtctctgtt

SEQ ID NO: 501753 - DNA, 33 bp, Homo sapien; identical to SEQ ID NO: 501751

SEQ ID NO: 501754 - DNA, 33 bp, Homo sapien; identical to SEQ ID NO: 501752

SEQ ID NO: 501755 - DNA, 33 bp, Homo sapien
tcaatacagtaccttcaactgaaacaaccaggt

SEQ ID NO: 501756 - DNA, 33 bp, Homo sapien
tcaatacagtaccttccactgaaacaaccaggt

SEQ ID NO: 501757 - DNA, 33 bp, Homo sapien
aggtgtttcctcagagcacctttgctgacctct

SEQ ID NO: 501758 - DNA, 33 bp, Homo sapien
aggtgtttcctcagagtacctttgctgacctct

SEQ ID NO: 501759 - DNA, 33 bp, Homo sapien
tgtaagagatgctgaactcatagatgtttccgt

SEQ ID NO: 501760 - DNA, 33 bp, Homo sapien
tgtaagagatgctgaattcatagatgtttccgt

SEQ ID NO: 501761 - DNA, 33 bp, Homo sapien
cagctgggcgttcagccgagatatttctacctc

SEQ ID NO: 501762 - DNA, 33 bp, Homo sapien
cagctgggcgttcagcggagatatttctacctc

SEQ ID NO: 501763 - DNA, 33 bp, Homo sapien; identical to SEQ ID NO: 501761

SEQ ID NO: 501764 - DNA, 33 bp, Homo sapien; identical to SEQ ID NO: 501762

SEQ ID NO: 501765 - DNA, 33 bp, Homo sapien
agagaacaagatcggacaccaagagacaaatcc

SEQ ID NO: 501766 - DNA, 33 bp, Homo sapien
agagaacaagatcggagaccaagagacaaatcc

SEQ ID NO: 501767 - DNA, 33 bp, Homo sapien
ctcgttccagttgacacggatatagcggtcccg

SEQ ID NO: 501768 - DNA, 33 bp, Homo sapien
ctcgttccagttgacatggatatagcggtcccg

SEQ ID NO: 501769 - DNA, 33 bp, Homo sapien
aagggatagactaagaaccagctgaaggtttgt

SEQ ID NO: 501770 - DNA, 33 bp, Homo sapien
aagggatagactaagagccagctgaaggtttgt

SEQ ID NO: 501771 - DNA, 33 bp, Homo sapien
actggttatccgcaccaggatactctgttgagt

SEQ ID NO: 501772 - DNA, 33 bp, Homo sapien
actggttatccgcaccgggatactctgttgagt

SEQ ID NO: 501773 - DNA, 33 bp, Homo sapien
aaggtcctgagcaggaagaaatgcagagactct

SEQ ID NO: 501774 - DNA, 33 bp, Homo sapien
aaggtcctgagcaggaggaaatgcagagactct

SEQ ID NO: 501775 - DNA, 33 bp, Homo sapien
ggtcttgcagctgtgaacattctgacaaccttg

SEQ ID NO: 501776 - DNA, 33 bp, Homo sapien
ggtcttgcagctgtgagcattctgacaaccttg

SEQ ID NO: 501777 - DNA, 33 bp, Homo sapien
aagagctacagaacatcagtacattgttatacc

SEQ ID NO: 501778 - DNA, 33 bp, Homo sapien
aagagctacagaacatgagtacattgttatacc

SEQ ID NO: 501779 - DNA, 33 bp, Homo sapien
gaacaaaagctatcacacatcaaatgatgagtt

SEQ ID NO: 501780 - DNA, 33 bp, Homo sapien
gaacaaaagctatcacgcatcaaatgatgagtt

SEQ ID NO: 501781 - DNA, 33 bp, Homo sapien
gcagcatccttgagcaaaacgttattgtgggat

SEQ ID NO: 501782 - DNA, 33 bp, Homo sapien
gcagcatccttgagcagaacgttattgtgggat

SEQ ID NO: 501783 - DNA, 33 bp, Homo sapien
agcccttggtacttaactatagaacgtgtattt

SEQ ID NO: 501784 - DNA, 33 bp, Homo sapien
agcccttggtacttaattatagaacgtgtattt

SEQ ID NO: 501785 - DNA, 33 bp, Homo sapien
ttaagcccccgtaacaccatttgcccactaaat

SEQ ID NO: 501786 - DNA, 33 bp, Homo sapien
ttaagcccccgtaacatcatttgcccactaaat

SEQ ID NO: 501787 - DNA, 33 bp, Homo sapien
gcactgggaggaaaccaacttggacgtgtggct

SEQ ID NO: 501788 - DNA, 33 bp, Homo sapien
gcactgggaggaaaccgacttggacgtgtggct

SEQ ID NO: 501789 - DNA, 33 bp, Homo sapien
actttgatgccaacgacgaacctgaccacaccg

SEQ ID NO: 501790 - DNA, 33 bp, Homo sapien
actttgatgccaacgatgaacctgaccacaccg

SEQ ID NO: 501791 - DNA, 33 bp, Homo sapien
ccaggtgcaccgcaagcagattccgtggttagc

SEQ ID NO: 501792 - DNA, 33 bp, Homo sapien
ccaggtgcaccgcaaggagattccgtggttagc

SEQ ID NO: 501793 - DNA, 33 bp, Homo sapien
gccgaggaagaatgagaaaaacagacaagtgga

SEQ ID NO: 501794 - DNA, 33 bp, Homo sapien
gccgaggaagaatgaggaaaacagacaagtgga

SEQ ID NO: 501795 - DNA, 33 bp, Homo sapien
tgggagctggtttgaaccaagtgggtgactgca

SEQ ID NO: 501796 - DNA, 33 bp, Homo sapien
tgggagctggtttgaatcaagtgggtgactgca

SEQ ID NO: 501797 - DNA, 33 bp, Homo sapien
ctcactgcagccagaagttcaaaaccctattcc

SEQ ID NO: 501798 - DNA, 33 bp, Homo sapien
ctcactgcagccagaatttcaaaaccctattcc

SEQ ID NO: 501799 - DNA, 33 bp, Homo sapien
ttccagctgatccagcaaatgcagggtctgcaa

SEQ ID NO: 501800 - DNA, 33 bp, Homo sapien
ttccagctgatccagcgaatgcagggtctgcaa

SEQ ID NO: 501801 - DNA, 33 bp, Homo sapien
acagatagtccaaaagccccctgctctaacagt

SEQ ID NO: 501802 - DNA, 33 bp, Homo sapien
acagatagtccaaaagtcccctgctctaacagt

SEQ ID NO: 501803 - DNA, 33 bp, Homo sapien
ggtataggacatggtgcagactggtgtaggcca

SEQ ID NO: 501804 - DNA, 33 bp, Homo sapien
ggtataggacatggtgtagactggtgtaggcca

SEQ ID NO: 501805 - DNA, 33 bp, Homo sapien
gtccttaagtcccaaccagactttttgcccttg

SEQ ID NO: 501806 - DNA, 33 bp, Homo sapien
gtccttaagtcccaactagactttttgcccttg

SEQ ID NO: 501807 - DNA, 33 bp, Homo sapien
atatttctgatattgtaaagacaggtctagcta

SEQ ID NO: 501808 - DNA, 33 bp, Homo sapien
atatttctgatattgtgaagacaggtctagcta

SEQ ID NO: 501809 - DNA, 33 bp, Homo sapien
gccctccagtaaatcaacttaattgcaagctgg

SEQ ID NO: 501810 - DNA, 33 bp, Homo sapien
gccctccagtaaatcagcttaattgcaagctgg

SEQ ID NO: 501811 - DNA, 33 bp, Homo sapien
gtagccacaaccagaaagaagtccgtatccttg

SEQ ID NO: 501812 - DNA, 33 bp, Homo sapien
gtagccacaaccagaaggaagtccgtatccttg

SEQ ID NO: 501813 - DNA, 33 bp, Homo sapien
tctttcctctgctccaactatctccccacatct

SEQ ID NO: 501814 - DNA, 33 bp, Homo sapien
tctttcctctgctccagctatctccccacatct

SEQ ID NO: 501815 - DNA, 33 bp, Homo sapien
ctcagggctacgtggactcacactggtgtcttt

SEQ ID NO: 501816 - DNA, 33 bp, Homo sapien
ctcagggctacgtggattcacactggtgtcttt

SEQ ID NO: 501817 - DNA, 33 bp, Homo sapien
tctacccatccaattaaccagactgtcaattca

SEQ ID NO: 501818 - DNA, 33 bp, Homo sapien
tctacccatccaattagccagactgtcaattca

SEQ ID NO: 501819 - DNA, 33 bp, Homo sapien
taagcctgctgtgctcagaaactgaatagtagc

SEQ ID NO: 501820 - DNA, 33 bp, Homo sapien
taagcctgctgtgctcggaaactgaatagtagc

SEQ ID NO: 501821 - DNA, 33 bp, Homo sapien
ttggaatcacaccatgaatgtagttttttatta

SEQ ID NO: 501822 - DNA, 33 bp, Homo sapien
ttggaatcacaccatgcatgtagttttttatta

SEQ ID NO: 501823 - DNA, 33 bp, Homo sapien
gctcagagaacataggcacttgccttaaaaagt

SEQ ID NO: 501824 - DNA, 33 bp, Homo sapien
gctcagagaacataggtacttgccttaaaaagt

SEQ ID NO: 501825 - DNA, 33 bp, Homo sapien
tatgagtgtatagacacatattttgctagataa

SEQ ID NO: 501826 - DNA, 33 bp, Homo sapien
tatgagtgtatagacatatattttgctagataa

SEQ ID NO: 501827 - DNA, 33 bp, Homo sapien
acaaactgaaatgggcaaattgtatggcttgtg

SEQ ID NO: 501828 - DNA, 33 bp, Homo sapien
acaaactgaaatgggcgaattgtatggcttgtg

SEQ ID NO: 501829 - DNA, 33 bp, Homo sapien
tttgaatgctacactaaggactttggattttgg

SEQ ID NO: 501830 - DNA, 33 bp, Homo sapien
tttgaatgctacactagggactttggattttgg

SEQ ID NO: 501831 - DNA, 33 bp, Homo sapien
gatcgtgggagatagacgattccacagagaaaa

SEQ ID NO: 501832 - DNA, 33 bp, Homo sapien
gatcgtgggagatagatgattccacagagaaaa

SEQ ID NO: 501833 - DNA, 33 bp, Homo sapien
taccaggcagggctgacggagaaccggtgcaaa

SEQ ID NO: 501834 - DNA, 33 bp, Homo sapien
taccaggcagggctgatggagaaccggtgcaaa

SEQ ID NO: 501835 - DNA, 33 bp, Homo sapien
cagaaatgccttcatacgttcagcaagagacat

SEQ ID NO: 501836 - DNA, 33 bp, Homo sapien
cagaaatgccttcatatgttcagcaagagacat

SEQ ID NO: 501837 - DNA, 33 bp, Homo sapien
tggaggtggctcttgactaggcagtctgacccg

SEQ ID NO: 501838 - DNA, 33 bp, Homo sapien
tggaggtggctcttgagtaggcagtctgacccg

SEQ ID NO: 501839 - DNA, 33 bp, Homo sapien
cccactgtgtcttccacgtaagggagacctttg

SEQ ID NO: 501840 - DNA, 33 bp, Homo sapien
cccactgtgtcttccatgtaagggagacctttg

SEQ ID NO: 501841 - DNA, 33 bp, Homo sapien
agtacctggcgtgcgaaagggatttaaacgtgt

SEQ ID NO: 501842 - DNA, 33 bp, Homo sapien
agtacctggcgtgcgatagggatttaaacgtgt

SEQ ID NO: 501843 - DNA, 33 bp, Homo sapien
gcttccaggacattccacatctcgggaactcct

SEQ ID NO: 501844 - DNA, 33 bp, Homo sapien
gcttccaggacattccgcatctcgggaactcct

SEQ ID NO: 501845 - DNA, 33 bp, Homo sapien
actaccactgcaatcacgataaagaagtcccat

SEQ ID NO: 501846 - DNA, 33 bp, Homo sapien
actaccactgcaatcaggataaagaagtcccat

SEQ ID NO: 501847 - DNA, 33 bp, Homo sapien; identical to SEQ ID NO: 501845

SEQ ID NO: 501848 - DNA, 33 bp, Homo sapien; identical to SEQ ID NO: 501846

SEQ ID NO: 501849 - DNA, 33 bp, Homo sapien
gattagtggttaccagcagttagggaaggtggg

SEQ ID NO: 501850 - DNA, 33 bp, Homo sapien
gattagtggttaccaggagttagggaaggtggg

SEQ ID NO: 501851 - DNA, 33 bp, Homo sapien
agttgggccctatctgccactgtccccagcact

SEQ ID NO: 501852 - DNA, 33 bp, Homo sapien
agttgggccctatctgtcactgtccccagcact

SEQ ID NO: 501853 - DNA, 33 bp, Homo sapien
ctctgttctcaacgccacgtctttgctcctgct

SEQ ID NO: 501854 - DNA, 33 bp, Homo sapien
ctctgttctcaacgccgcgtctttgctcctgct

SEQ ID NO: 501855 - DNA, 33 bp, Homo sapien
tttctttgcaagtgtacgagcaggcttgaagtg

SEQ ID NO: 501856 - DNA, 33 bp, Homo sapien
tttctttgcaagtgtatgagcaggcttgaagtg

SEQ ID NO: 501857 - DNA, 33 bp, Homo sapien
gatagaacacaccagaaaacatctggccagata

SEQ ID NO: 501858 - DNA, 33 bp, Homo sapien
gatagaacacaccagacaacatctggccagata

SEQ ID NO: 501859 - DNA, 33 bp, Homo sapien
ggtgggtgtggagcaacggctggaaggaagaga

SEQ ID NO: 501860 - DNA, 33 bp, Homo sapien
ggtgggtgtggagcaatggctggaaggaagaga

SEQ ID NO: 501861 - DNA, 33 bp, Homo sapien
tgcaaacctttatccccgatttgagccacccga

SEQ ID NO: 501862 - DNA, 33 bp, Homo sapien
tgcaaacctttatccctgatttgagccacccga

SEQ ID NO: 501863 - DNA, 33 bp, Homo sapien
tcttggaggaggaaaaactttcttgtttgtttg

SEQ ID NO: 501864 - DNA, 33 bp, Homo sapien
tcttggaggaggaaaagctttcttgtttgtttg

SEQ ID NO: 501865 - DNA, 33 bp, Homo sapien
cagagttggttatagcaaggtagggaggttgtc

SEQ ID NO: 501866 - DNA, 33 bp, Homo sapien
cagagttggttatagccaggtagggaggttgtc

SEQ ID NO: 501867 - DNA, 33 bp, Homo sapien
ttctgtggtttggcacaatgtcgctctgtcacg

SEQ ID NO: 501868 - DNA, 33 bp, Homo sapien
ttctgtggtttggcacgatgtcgctctgtcacg

SEQ ID NO: 501869 - DNA, 33 bp, Homo sapien
atcagcgagatcaaaacgctttagaaaggagta

SEQ ID NO: 501870 - DNA, 33 bp, Homo sapien
atcagcgagatcaaaatgctttagaaaggagta

SEQ ID NO: 501871 - DNA, 33 bp, Homo sapien
accagggactggcctacagaattccatgcctgg

SEQ ID NO: 501872 - DNA, 33 bp, Homo sapien
accagggactggcctagagaattccatgcctgg

SEQ ID NO: 501873 - DNA, 33 bp, Homo sapien
aagttaggaatataaacgtggtataacgaggaa

SEQ ID NO: 501874 - DNA, 33 bp, Homo sapien
aagttaggaatataaaggtggtataacgaggaa

SEQ ID NO: 501875 - DNA, 33 bp, Homo sapien
tatattgctataaaatcaagcagaacatagtta

SEQ ID NO: 501876 - DNA, 33 bp, Homo sapien
tatattgctataaaatgaagcagaacatagtta

SEQ ID NO: 501877 - DNA, 33 bp, Homo sapien
aactgcccgtcacagaaaggacccctgacagtc

SEQ ID NO: 501878 - DNA, 33 bp, Homo sapien
aactgcccgtcacagataggacccctgacagtc

SEQ ID NO: 501879 - DNA, 33 bp, Homo sapien
atggaaggtctaggagaaagagaggactcaaaa

SEQ ID NO: 501880 - DNA, 33 bp, Homo sapien
atggaaggtctaggagtaagagaggactcaaaa

SEQ ID NO: 501881 - DNA, 33 bp, Homo sapien
cctggcccacagtaggcatttgtgcattttcgc

SEQ ID NO: 501882 - DNA, 33 bp, Homo sapien
cctggcccacagtaggtatttgtgcattttcgc

SEQ ID NO: 501883 - DNA, 33 bp, Homo sapien
agaaacaccattacacactgactagaatggcaa

SEQ ID NO: 501884 - DNA, 33 bp, Homo sapien
agaaacaccattacacgctgactagaatggcaa

SEQ ID NO: 501885 - DNA, 33 bp, Homo sapien
ttccccagggtgcaaaaggtagctggtgttttc

SEQ ID NO: 501886 - DNA, 33 bp, Homo sapien
ttccccagggtgcaaagggtagctggtgttttc

SEQ ID NO: 501887 - DNA, 33 bp, Homo sapien
gaggcatacttcctaaaacagtgtcatgaatta

SEQ ID NO: 501888 - DNA, 33 bp, Homo sapien
gaggcatacttcctaatacagtgtcatgaatta

SEQ ID NO: 501889 - DNA, 33 bp, Homo sapien
cacactcaacaaataccggttgagccccggccc

SEQ ID NO: 501890 - DNA, 33 bp, Homo sapien
cacactcaacaaatactggttgagccccggccc

SEQ ID NO: 501891 - DNA, 33 bp, Homo sapien
ttcccaaacagtgacacgattttatatttcaat

SEQ ID NO: 501892 - DNA, 33 bp, Homo sapien
ttcccaaacagtgacatgattttatatttcaat

SEQ ID NO: 501893 - DNA, 33 bp, Homo sapien
ggaacaatttagaaaacaaaatgcagaacttgg

SEQ ID NO: 501894 - DNA, 33 bp, Homo sapien
ggaacaatttagaaaagaaaatgcagaacttgg

SEQ ID NO: 501895 - DNA, 33 bp, Homo sapien
gatacccagtatcagcaaaaacctctcatggga

SEQ ID NO: 501896 - DNA, 33 bp, Homo sapien
gatacccagtatcagcgaaaacctctcatggga

SEQ ID NO: 501897 - DNA, 33 bp, Homo sapien
ggcttgataggaggctcaatcccgtgaatagac

SEQ ID NO: 501898 - DNA, 33 bp, Homo sapien
ggcttgataggaggctgaatcccgtgaatagac

SEQ ID NO: 501899 - DNA, 33 bp, Homo sapien
agggctagtccccaaactgtaatgtggctcaaa

SEQ ID NO: 501900 - DNA, 33 bp, Homo sapien
agggctagtccccaaagtgtaatgtggctcaaa

SEQ ID NO: 501901 - DNA, 33 bp, Homo sapien
tgtcttatgcaaaataacgcctattctactcta

SEQ ID NO: 501902 - DNA, 33 bp, Homo sapien
tgtcttatgcaaaatagcgcctattctactcta

SEQ ID NO: 501903 - DNA, 33 bp, Homo sapien
gatctgcatgtacatacagtcactcaatttaca

SEQ ID NO: 501904 - DNA, 33 bp, Homo sapien
gatctgcatgtacatatagtcactcaatttaca

SEQ ID NO: 501905 - DNA, 33 bp, Homo sapien
tgtttcctgggctccaaaaggttcctgccaggc

SEQ ID NO: 501906 - DNA, 33 bp, Homo sapien
tgtttcctgggctccacaaggttcctgccaggc

SEQ ID NO: 501907 - DNA, 33 bp, Homo sapien; identical to SEQ ID NO: 501905

SEQ ID NO: 501908 - DNA, 33 bp, Homo sapien; identical to SEQ ID NO: 501906

SEQ ID NO: 501909 - DNA, 33 bp, Homo sapien
aagggatgaatctggacaatttgaaatattcta

SEQ ID NO: 501910 - DNA, 33 bp, Homo sapien
aagggatgaatctggagaatttgaaatattcta

SEQ ID NO: 501911 - DNA, 33 bp, Homo sapien; identical to SEQ ID NO: 501909

SEQ ID NO: 501912 - DNA, 33 bp, Homo sapien; identical to SEQ ID NO: 501910

SEQ ID NO: 501913 - DNA, 33 bp, Homo sapien
attcttaagacaaaaacatgaattctctttcct

SEQ ID NO: 501914 - DNA, 33 bp, Homo sapien
attcttaagacaaaaatatgaattctctttcct

SEQ ID NO: 501915 - DNA, 33 bp, Homo sapien; identical to SEQ ID NO: 501913

SEQ ID NO: 501916 - DNA, 33 bp, Homo sapien; identical to SEQ ID NO: 501914

SEQ ID NO: 501917 - DNA, 33 bp, Homo sapien
aaactgacactaaaaaatgacaagatagagcca

SEQ ID NO: 501918 - DNA, 33 bp, Homo sapien
aaactgacactaaaaagtgacaagatagagcca

SEQ ID NO: 501919 - DNA, 33 bp, Homo sapien; identical to SEQ ID NO: 501917

SEQ ID NO: 501920 - DNA, 33 bp, Homo sapien; identical to SEQ ID NO: 501918

SEQ ID NO: 501921 - DNA, 33 bp, Homo sapien
caagtgcaagtatattaaaatgtattctgaggc

SEQ ID NO: 501922 - DNA, 33 bp, Homo sapien
caagtgcaagtatattcaaatgtattctgaggc

SEQ ID NO: 501923 - DNA, 33 bp, Homo sapien; identical to SEQ ID NO: 501921

SEQ ID NO: 501924 - DNA, 33 bp, Homo sapien; identical to SEQ ID NO: 501922

SEQ ID NO: 501925 - DNA, 33 bp, Homo sapien
gttaattacaaaaatgaaaatgcgtcttcacaa

SEQ ID NO: 501926 - DNA, 33 bp, Homo sapien
gttaattacaaaaatggaaatgcgtcttcacaa

SEQ ID NO: 501927 - DNA, 33 bp, Homo sapien
tcttggtcctcacttgaagattcaatctgcctt

SEQ ID NO: 501928 - DNA, 33 bp, Homo sapien
tcttggtcctcacttggagattcaatctgcctt

SEQ ID NO: 501929 - DNA, 33 bp, Homo sapien
cacagctgatgatgaccaacggtgattgaatct

SEQ ID NO: 501930 - DNA, 33 bp, Homo sapien
cacagctgatgatgactaacggtgattgaatct

SEQ ID NO: 501931 - DNA, 33 bp, Homo sapien
gtcatgtgtcgaaaaccaaaataaaaccgtgtc

SEQ ID NO: 501932 - DNA, 33 bp, Homo sapien
gtcatgtgtcgaaaactaaaataaaaccgtgtc

SEQ ID NO: 501933 - DNA, 33 bp, Homo sapien
ccttagttctcctacactgtacacgggttatta

SEQ ID NO: 501934 - DNA, 33 bp, Homo sapien
ccttagttctcctacagtgtacacgggttatta

SEQ ID NO: 501935 - DNA, 33 bp, Homo sapien
ctttaatgtaatgttcaatcaaatagaagagaa

SEQ ID NO: 501936 - DNA, 33 bp, Homo sapien
ctttaatgtaatgttcgatcaaatagaagagaa

SEQ ID NO: 501937 - DNA, 33 bp, Homo sapien
gtcaaaatatgactagaaaatggattcttatat

SEQ ID NO: 501938 - DNA, 33 bp, Homo sapien
gtcaaaatatgactagcaaatggattcttatat

SEQ ID NO: 501939 - DNA, 33 bp, Homo sapien
gcctgtggtgtgtgtacgaacagaaagagttgg

SEQ ID NO: 501940 - DNA, 33 bp, Homo sapien
gcctgtggtgtgtgtatgaacagaaagagttgg

SEQ ID NO: 501941 - DNA, 33 bp, Homo sapien
agcagatgccctagaaaatcagacaagtcttcc

SEQ ID NO: 501942 - DNA, 33 bp, Homo sapien
agcagatgccctagaagatcagacaagtcttcc

SEQ ID NO: 501943 - DNA, 33 bp, Homo sapien
atgccccctcctgaacaaatcaactcctgttgg

SEQ ID NO: 501944 - DNA, 33 bp, Homo sapien
atgccccctcctgaacgaatcaactcctgttgg

SEQ ID NO: 501945 - DNA, 33 bp, Homo sapien
ccacaggacctgccaaaacccacaggattccct

SEQ ID NO: 501946 - DNA, 33 bp, Homo sapien
ccacaggacctgccaacacccacaggattccct

SEQ ID NO: 501947 - DNA, 33 bp, Homo sapien
gttgttttctcataaagaagaatcgatacttaa

SEQ ID NO: 501948 - DNA, 33 bp, Homo sapien
gttgttttctcataaataagaatcgatacttaa

SEQ ID NO: 501949 - DNA, 33 bp, Homo sapien
gaagccgaaagctgaccgagaggagaaagaagc

SEQ ID NO: 501950 - DNA, 33 bp, Homo sapien
gaagccgaaagctgacggagaggagaaagaagc

SEQ ID NO: 501951 - DNA, 33 bp, Homo sapien
ttcttgcatcacctcaatctaaccaggagcaag

SEQ ID NO: 501952 - DNA, 33 bp, Homo sapien
ttcttgcatcacctcagtctaaccaggagcaag

SEQ ID NO: 501953 - DNA, 33 bp, Homo sapien
gctagcaggcaaaggacgtgaggggtaaaccta

SEQ ID NO: 501954 - DNA, 33 bp, Homo sapien
gctagcaggcaaaggatgtgaggggtaaaccta

SEQ ID NO: 501955 - DNA, 33 bp, Homo sapien
cctcactctcatcccccacaaggtccggctgga

SEQ ID NO: 501956 - DNA, 33 bp, Homo sapien
cctcactctcatccccgacaaggtccggctgga

SEQ ID NO: 501957 - DNA, 33 bp, Homo sapien
tcaatgactgcttcaacggcttttcatgatgct

SEQ ID NO: 501958 - DNA, 33 bp, Homo sapien
tcaatgactgcttcaagggcttttcatgatgct

SEQ ID NO: 501959 - DNA, 33 bp, Homo sapien
atcgaatgtcggtgaacaggagtgaccttgggt

SEQ ID NO: 501960 - DNA, 33 bp, Homo sapien
atcgaatgtcggtgaataggagtgaccttgggt

SEQ ID NO: 501961 - DNA, 33 bp, Homo sapien
tctgcaatccctctaccgatacctgaatatttc

SEQ ID NO: 501962 - DNA, 33 bp, Homo sapien
tctgcaatccctctactgatacctgaatatttc

SEQ ID NO: 501963 - DNA, 33 bp, Homo sapien
gaacaccatcatcgccaccgtctcaggggtggc

SEQ ID NO: 501964 - DNA, 33 bp, Homo sapien
gaacaccatcatcgccgccgtctcaggggtggc

SEQ ID NO: 501965 - DNA, 33 bp, Homo sapien
ggaagcagaatcctcacgctgggaagcgtcagc

SEQ ID NO: 501966 - DNA, 33 bp, Homo sapien
ggaagcagaatcctcatgctgggaagcgtcagc

SEQ ID NO: 501967 - DNA, 33 bp, Homo sapien
acaggtgctgcagaaacgtctcactaaaaccct

SEQ ID NO: 501968 - DNA, 33 bp, Homo sapien
acaggtgctgcagaaaggtctcactaaaaccct

SEQ ID NO: 501969 - DNA, 33 bp, Homo sapien
tggtttctttcatccaacctgaggcctttgcga

SEQ ID NO: 501970 - DNA, 33 bp, Homo sapien
tggtttctttcatccagcctgaggcctttgcga

SEQ ID NO: 501971 - DNA, 33 bp, Homo sapien
gtgctacggtgctgtacgttttataaaattaga

SEQ ID NO: 501972 - DNA, 33 bp, Homo sapien
gtgctacggtgctgtatgttttataaaattaga

SEQ ID NO: 501973 - DNA, 33 bp, Homo sapien
ttggcgtgattgtgaacctgaccttttctctgc

SEQ ID NO: 501974 - DNA, 33 bp, Homo sapien
ttggcgtgattgtgaatctgaccttttctctgc

SEQ ID NO: 501975 - DNA, 33 bp, Homo sapien
gttctaacactggccaacctttaccagccttca

SEQ ID NO: 501976 - DNA, 33 bp, Homo sapien
gttctaacactggccaccctttaccagccttca

SEQ ID NO: 501977 - DNA, 33 bp, Homo sapien
aaatgcatatggtctcaactgaatgtttttaca

SEQ ID NO: 501978 - DNA, 33 bp, Homo sapien
aaatgcatatggtctcgactgaatgtttttaca

SEQ ID NO: 501979 - DNA, 33 bp, Homo sapien
aagtcaacttaagaacagtgaatgaatgtaaaa

SEQ ID NO: 501980 - DNA, 33 bp, Homo sapien
aagtcaacttaagaacggtgaatgaatgtaaaa

SEQ ID NO: 501981 - DNA, 33 bp, Homo sapien
gagctgatatgccaccaatgacatccaaatgca

SEQ ID NO: 501982 - DNA, 33 bp, Homo sapien
gagctgatatgccaccgatgacatccaaatgca

SEQ ID NO: 501983 - DNA, 33 bp, Homo sapien
atcacacttttgtgaaaaatgctagagagccac

SEQ ID NO: 501984 - DNA, 33 bp, Homo sapien
atcacacttttgtgaagaatgctagagagccac

SEQ ID NO: 501985 - DNA, 33 bp, Homo sapien
agcaagattcctcttccaactgcaatgacaagt

SEQ ID NO: 501986 - DNA, 33 bp, Homo sapien
agcaagattcctcttcgaactgcaatgacaagt

SEQ ID NO: 501987 - DNA, 33 bp, Homo sapien
tgcttaacaatactaaactcaggcctgagggct

SEQ ID NO: 501988 - DNA, 33 bp, Homo sapien
tgcttaacaatactaagctcaggcctgagggct

SEQ ID NO: 501989 - DNA, 33 bp, Homo sapien
aaatgtgaagtatagtaaacttttgccatctaa

SEQ ID NO: 501990 - DNA, 33 bp, Homo sapien
aaatgtgaagtatagtcaacttttgccatctaa

SEQ ID NO: 501991 - DNA, 33 bp, Homo sapien
caaaaatgaatcatccgcgctaatctaaccacc

SEQ ID NO: 501992 - DNA, 33 bp, Homo sapien
caaaaatgaatcatcctcgctaatctaaccacc

SEQ ID NO: 501993 - DNA, 33 bp, Homo sapien
cttctcatcatgtgaaaaggaaggatatcgttt

SEQ ID NO: 501994 - DNA, 33 bp, Homo sapien
cttctcatcatgtgaataggaaggatatcgttt

SEQ ID NO: 501995 - DNA, 33 bp, Homo sapien
actgtgtgaacttgcacgggagcacaaaagccc

SEQ ID NO: 501996 - DNA, 33 bp, Homo sapien
actgtgtgaacttgcatgggagcacaaaagccc

SEQ ID NO: 501997 - DNA, 33 bp, Homo sapien
ctgtaacatgggtctcaatttctgatataaaag

SEQ ID NO: 501998 - DNA, 33 bp, Homo sapien
ctgtaacatgggtctcgatttctgatataaaag

SEQ ID NO: 501999 - DNA, 33 bp, Homo sapien
gttggaaatatatatgcacctagcactagagca

SEQ ID NO: 502000 - DNA, 33 bp, Homo sapien
gttggaaatatatatggacctagcactagagca

SEQ ID NO: 502001 - DNA, 33 bp, Homo sapien
cccttgctttgtgagaggatcagctgtgtaact

SEQ ID NO: 502002 - DNA, 33 bp, Homo sapien
cccttgctttgtgagatgatcagctgtgtaact

SEQ ID NO: 502003 - DNA, 33 bp, Homo sapien
tatcactcacatacccactagtaatgcatgcgt

SEQ ID NO: 502004 - DNA, 33 bp, Homo sapien
tatcactcacataccctctagtaatgcatgcgt

SEQ ID NO: 502005 - DNA, 33 bp, Homo sapien
tctgcagggcttgggacgcctcagaaaactaac

SEQ ID NO: 502006 - DNA, 33 bp, Homo sapien
tctgcagggcttgggatgcctcagaaaactaac

SEQ ID NO: 502007 - DNA, 33 bp, Homo sapien
gagccgtaacctcacaccagtaacaaaaatcag

SEQ ID NO: 502008 - DNA, 33 bp, Homo sapien
gagccgtaacctcacagcagtaacaaaaatcag

SEQ ID NO: 502009 - DNA, 33 bp, Homo sapien
taatagataatgcatacagttttccaaagtggt

SEQ ID NO: 502010 - DNA, 33 bp, Homo sapien
taatagataatgcatatagttttccaaagtggt

SEQ ID NO: 502011 - DNA, 33 bp, Homo sapien
cagttttgaaaaagaaagacacaatggaggact

SEQ ID NO: 502012 - DNA, 33 bp, Homo sapien
cagttttgaaaaagaaggacacaatggaggact

SEQ ID NO: 502013 - DNA, 33 bp, Homo sapien
tacagtaaaaggtgcgccaagaaaatacttccc

SEQ ID NO: 502014 - DNA, 33 bp, Homo sapien
tacagtaaaaggtgcggcaagaaaatacttccc

SEQ ID NO: 502015 - DNA, 33 bp, Homo sapien
caagatgtttgtaggcacctactctatacccac

SEQ ID NO: 502016 - DNA, 33 bp, Homo sapien
caagatgtttgtaggcccctactctatacccac

SEQ ID NO: 502017 - DNA, 33 bp, Homo sapien
ttaattggccatggacgcctttcccacattggc

SEQ ID NO: 502018 - DNA, 33 bp, Homo sapien
ttaattggccatggactcctttcccacattggc

SEQ ID NO: 502019 - DNA, 33 bp, Homo sapien
ccagtgcttgaccctcaccaacgaccgcactct

SEQ ID NO: 502020 - DNA, 33 bp, Homo sapien
ccagtgcttgaccctcgccaacgaccgcactct

SEQ ID NO: 502021 - DNA, 33 bp, Homo sapien
tggacttcagtttagccagttacagaatggttt

SEQ ID NO: 502022 - DNA, 33 bp, Homo sapien
tggacttcagtttagctagttacagaatggttt

SEQ ID NO: 502023 - DNA, 33 bp, Homo sapien
aatggcttcaactgcacgggcttaagagcaaca

SEQ ID NO: 502024 - DNA, 33 bp, Homo sapien
aatggcttcaactgcatgggcttaagagcaaca

SEQ ID NO: 502025 - DNA, 33 bp, Homo sapien
catgcacctgaataaccaatgggtctataaata

SEQ ID NO: 502026 - DNA, 33 bp, Homo sapien
catgcacctgaataactaatgggtctataaata

SEQ ID NO: 502027 - DNA, 33 bp, Homo sapien
aaatttgtgtttccaagatttcaccttcttagc

SEQ ID NO: 502028 - DNA, 33 bp, Homo sapien
aaatttgtgtttccaatatttcaccttcttagc

SEQ ID NO: 502029 - DNA, 33 bp, Homo sapien
gctgtgataaatgtaactgtctatggcattgta

SEQ ID NO: 502030 - DNA, 33 bp, Homo sapien
gctgtgataaatgtaagtgtctatggcattgta

SEQ ID NO: 502031 - DNA, 33 bp, Homo sapien
taggcttccaggtataaaaatcttcactcttca

SEQ ID NO: 502032 - DNA, 33 bp, Homo sapien
taggcttccaggtatacaaatcttcactcttca

SEQ ID NO: 502033 - DNA, 33 bp, Homo sapien
acagcctggctgctacaatgcccttggctcact

SEQ ID NO: 502034 - DNA, 33 bp, Homo sapien
acagcctggctgctacgatgcccttggctcact

SEQ ID NO: 502035 - DNA, 33 bp, Homo sapien
tgataagggctatggaaaacagctgagatggga

SEQ ID NO: 502036 - DNA, 33 bp, Homo sapien
tgataagggctatggagaacagctgagatggga

SEQ ID NO: 502037 - DNA, 33 bp, Homo sapien
ttacatttgcattttacagtgtgccatttaaat

SEQ ID NO: 502038 - DNA, 33 bp, Homo sapien
ttacatttgcattttatagtgtgccatttaaat

SEQ ID NO: 502039 - DNA, 33 bp, Homo sapien
cagtggctacaaatgacaaagaatgcagatttt

SEQ ID NO: 502040 - DNA, 33 bp, Homo sapien
cagtggctacaaatgataaagaatgcagatttt

SEQ ID NO: 502041 - DNA, 33 bp, Homo sapien
ctcaggtaacataacacagtcttctcagtgtag

SEQ ID NO: 502042 - DNA, 33 bp, Homo sapien
ctcaggtaacataacagagtcttctcagtgtag

SEQ ID NO: 502043 - DNA, 33 bp, Homo sapien
ggttgaactaacaaagaaatgattgacggtaga

SEQ ID NO: 502044 - DNA, 33 bp, Homo sapien
ggttgaactaacaaaggaatgattgacggtaga

SEQ ID NO: 502045 - DNA, 33 bp, Homo sapien
tgtaacatccttttccactaattctatcatctg

SEQ ID NO: 502046 - DNA, 33 bp, Homo sapien
tgtaacatccttttccgctaattctatcatctg

SEQ ID NO: 502047 - DNA, 33 bp, Homo sapien
gaacaaatagtctgaaatcatagctgaggtcct

SEQ ID NO: 502048 - DNA, 33 bp, Homo sapien
gaacaaatagtctgaagtcatagctgaggtcct

SEQ ID NO: 502049 - DNA, 33 bp, Homo sapien
ggatggaagtggcttaacatgtagacttttgtt

SEQ ID NO: 502050 - DNA, 33 bp, Homo sapien
ggatggaagtggcttagcatgtagacttttgtt

SEQ ID NO: 502051 - DNA, 33 bp, Homo sapien
atgaggaccaggcgacacttgctcatgcattag

SEQ ID NO: 502052 - DNA, 33 bp, Homo sapien
atgaggaccaggcgactcttgctcatgcattag

SEQ ID NO: 502053 - DNA, 33 bp, Homo sapien
atatccagtttgatgacggactaccatctattt

SEQ ID NO: 502054 - DNA, 33 bp, Homo sapien
atatccagtttgatgagggactaccatctattt

SEQ ID NO: 502055 - DNA, 33 bp, Homo sapien
aacattattgattaacaccatgatgggtacaat

SEQ ID NO: 502056 - DNA, 33 bp, Homo sapien
aacattattgattaactccatgatgggtacaat

SEQ ID NO: 502057 - DNA, 33 bp, Homo sapien
tggcagaagctgatacactggctgaagagcact

SEQ ID NO: 502058 - DNA, 33 bp, Homo sapien
tggcagaagctgatacgctggctgaagagcact

SEQ ID NO: 502059 - DNA, 33 bp, Homo sapien
atattgatgaagtattcaagagattttctaagt

SEQ ID NO: 502060 - DNA, 33 bp, Homo sapien
atattgatgaagtatttaagagattttctaagt

SEQ ID NO: 502061 - DNA, 33 bp, Homo sapien
caaaaagaatctcctcacttttcatttgtaata

SEQ ID NO: 502062 - DNA, 33 bp, Homo sapien
caaaaagaatctcctcgcttttcatttgtaata

SEQ ID NO: 502063 - DNA, 33 bp, Homo sapien
cagctttagatttatgacagaacgggagtgtgt

SEQ ID NO: 502064 - DNA, 33 bp, Homo sapien
cagctttagatttatggcagaacgggagtgtgt

SEQ ID NO: 502065 - DNA, 33 bp, Homo sapien
cctcagttgtgccaagaaaaggctggcgctgcc

SEQ ID NO: 502066 - DNA, 33 bp, Homo sapien
cctcagttgtgccaaggaaaggctggcgctgcc

SEQ ID NO: 502067 - DNA, 33 bp, Homo sapien
gaatggcaccagattcacaaagaagaccaagat

SEQ ID NO: 502068 - DNA, 33 bp, Homo sapien
gaatggcaccagattcgcaaagaagaccaagat

SEQ ID NO: 502069 - DNA, 33 bp, Homo sapien
gaaacccattctctaaccagtgtctaccagcaa

SEQ ID NO: 502070 - DNA, 33 bp, Homo sapien
gaaacccattctctaatcagtgtctaccagcaa

SEQ ID NO: 502071 - DNA, 33 bp, Homo sapien
tgaacactgcaaacttaaaaaagtaagccttcc

SEQ ID NO: 502072 - DNA, 33 bp, Homo sapien
tgaacactgcaaactttaaaaagtaagccttcc

SEQ ID NO: 502073 - DNA, 33 bp, Homo sapien
agtcttatccaaatgcaacaatgatcaacgtgt

SEQ ID NO: 502074 - DNA, 33 bp, Homo sapien
agtcttatccaaatgctacaatgatcaacgtgt

SEQ ID NO: 502075 - DNA, 33 bp, Homo sapien
ctccttctaaatgtcccaacaacttgaggtaga

SEQ ID NO: 502076 - DNA, 33 bp, Homo sapien
ctccttctaaatgtcctaacaacttgaggtaga

SEQ ID NO: 502077 - DNA, 33 bp, Homo sapien
aaggttaaaaatcaccaataaacagtaatggca

SEQ ID NO: 502078 - DNA, 33 bp, Homo sapien
aaggttaaaaatcaccgataaacagtaatggca

SEQ ID NO: 502079 - DNA, 33 bp, Homo sapien
tatatgcctgtcatcacagtgattcttactatg

SEQ ID NO: 502080 - DNA, 33 bp, Homo sapien
tatatgcctgtcatcagagtgattcttactatg

SEQ ID NO: 502081 - DNA, 33 bp, Homo sapien
cagtcattcaaaatgcaatataacaataccatt

SEQ ID NO: 502082 - DNA, 33 bp, Homo sapien
cagtcattcaaaatgccatataacaataccatt

SEQ ID NO: 502083 - DNA, 33 bp, Homo sapien
tagtgaagtgtgctgcaaaataaacaaacacgt

SEQ ID NO: 502084 - DNA, 33 bp, Homo sapien
tagtgaagtgtgctgcgaaataaacaaacacgt

SEQ ID NO: 502085 - DNA, 33 bp, Homo sapien
aaatgtgttctgtacccagtgtagaagtatgct

SEQ ID NO: 502086 - DNA, 33 bp, Homo sapien
aaatgtgttctgtacctagtgtagaagtatgct

SEQ ID NO: 502087 - DNA, 33 bp, Homo sapien
ttgaatctgacaaggaagtgaattggattatct

SEQ ID NO: 502088 - DNA, 33 bp, Homo sapien
ttgaatctgacaaggaggtgaattggattatct

SEQ ID NO: 502089 - DNA, 33 bp, Homo sapien
atctttctggaacaaacttgtcaatattctggc

SEQ ID NO: 502090 - DNA, 33 bp, Homo sapien
atctttctggaacaaagttgtcaatattctggc

SEQ ID NO: 502091 - DNA, 33 bp, Homo sapien
aaggtcctatgtgatacactggccaattgaaga

SEQ ID NO: 502092 - DNA, 33 bp, Homo sapien
aaggtcctatgtgatatactggccaattgaaga

SEQ ID NO: 502093 - DNA, 33 bp, Homo sapien
gacggatgtttgttaacggtctgtattgtctgt

SEQ ID NO: 502094 - DNA, 33 bp, Homo sapien
gacggatgtttgttaagggtctgtattgtctgt

SEQ ID NO: 502095 - DNA, 33 bp, Homo sapien
ttccaatgctcttccccctatagttacccatca

SEQ ID NO: 502096 - DNA, 33 bp, Homo sapien
ttccaatgctcttccctctatagttacccatca

SEQ ID NO: 502097 - DNA, 33 bp, Homo sapien
gtacttttagcatataccagaagtaataaaagg

SEQ ID NO: 502098 - DNA, 33 bp, Homo sapien
gtacttttagcatatagcagaagtaataaaagg

SEQ ID NO: 502099 - DNA, 33 bp, Homo sapien
cagtcctgaaggtaaaatggatagagggcttag

SEQ ID NO: 502100 - DNA, 33 bp, Homo sapien
cagtcctgaaggtaaactggatagagggcttag

SEQ ID NO: 502101 - DNA, 33 bp, Homo sapien
ataaggcaggaaatctcaacctcattcacaatg

SEQ ID NO: 502102 - DNA, 33 bp, Homo sapien
ataaggcaggaaatcttaacctcattcacaatg

SEQ ID NO: 502103 - DNA, 33 bp, Homo sapien
ccacgtgcctcaattacgaatctccacgtgcct

SEQ ID NO: 502104 - DNA, 33 bp, Homo sapien
ccacgtgcctcaattatgaatctccacgtgcct

SEQ ID NO: 502105 - DNA, 33 bp, Homo sapien
acagaacaagccataaggtggatttcagagtga

SEQ ID NO: 502106 - DNA, 33 bp, Homo sapien
acagaacaagccataatgtggatttcagagtga

SEQ ID NO: 502107 - DNA, 33 bp, Homo sapien
ctcaccaatgagataacgaaaccacaatcagtg

SEQ ID NO: 502108 - DNA, 33 bp, Homo sapien
ctcaccaatgagataatgaaaccacaatcagtg

SEQ ID NO: 502109 - DNA, 33 bp, Homo sapien
ctttatccaggaaaacaatggttggagtaggac

SEQ ID NO: 502110 - DNA, 33 bp, Homo sapien
ctttatccaggaaaacgatggttggagtaggac

SEQ ID NO: 502111 - DNA, 33 bp, Homo sapien
gtgcccaccctcctaaactggcaaatacactgc

SEQ ID NO: 502112 - DNA, 33 bp, Homo sapien
gtgcccaccctcctaacctggcaaatacactgc

SEQ ID NO: 502113 - DNA, 33 bp, Homo sapien
tatgtggttaagtgctcaattgactcccactcc

SEQ ID NO: 502114 - DNA, 33 bp, Homo sapien
tatgtggttaagtgctgaattgactcccactcc

SEQ ID NO: 502115 - DNA, 33 bp, Homo sapien
ttgcgtggtatgtgccggagtcctttgttcaaa

SEQ ID NO: 502116 - DNA, 33 bp, Homo sapien
ttgcgtggtatgtgcctgagtcctttgttcaaa

SEQ ID NO: 502117 - DNA, 33 bp, Homo sapien
ctttattttcaaaccacctgattgaattctccc

SEQ ID NO: 502118 - DNA, 33 bp, Homo sapien
ctttattttcaaaccatctgattgaattctccc

SEQ ID NO: 502119 - DNA, 33 bp, Homo sapien
caagaggaaattactcactgatagttttcaggc

SEQ ID NO: 502120 - DNA, 33 bp, Homo sapien
caagaggaaattactcgctgatagttttcaggc

SEQ ID NO: 502121 - DNA, 33 bp, Homo sapien
gagaccctgccagagccatttcagactcatcac

SEQ ID NO: 502122 - DNA, 33 bp, Homo sapien
gagaccctgccagagctatttcagactcatcac

SEQ ID NO: 502123 - DNA, 33 bp, Homo sapien
taattatttatgaacaccttccccgactcttca

SEQ ID NO: 502124 - DNA, 33 bp, Homo sapien
taattatttatgaacatcttccccgactcttca

SEQ ID NO: 502125 - DNA, 33 bp, Homo sapien
catgtagtggcaaataagtgtggtcgcaggttc

SEQ ID NO: 502126 - DNA, 33 bp, Homo sapien
catgtagtggcaaatacgtgtggtcgcaggttc

SEQ ID NO: 502127 - DNA, 33 bp, Homo sapien
acatcgtccgcacaaacacagtgagggaggtgg

SEQ ID NO: 502128 - DNA, 33 bp, Homo sapien
acatcgtccgcacaaatacagtgagggaggtgg

SEQ ID NO: 502129 - DNA, 33 bp, Homo sapien
tatctgctgactgtccaagaagagaaactccaa

SEQ ID NO: 502130 - DNA, 33 bp, Homo sapien
tatctgctgactgtccgagaagagaaactccaa

SEQ ID NO: 502131 - DNA, 33 bp, Homo sapien
cacagcaaataagataacaaatctaaagatcca

SEQ ID NO: 502132 - DNA, 33 bp, Homo sapien
cacagcaaataagatagcaaatctaaagatcca

SEQ ID NO: 502133 - DNA, 33 bp, Homo sapien
ccctgaaactctctgcactccacctgtttatgc

SEQ ID NO: 502134 - DNA, 33 bp, Homo sapien
ccctgaaactctctgcgctccacctgtttatgc

SEQ ID NO: 502135 - DNA, 33 bp, Homo sapien
gggaatacagatgaggaaggaactgattcagcc

SEQ ID NO: 502136 - DNA, 33 bp, Homo sapien
gggaatacagatgagggaggaactgattcagcc

SEQ ID NO: 502137 - DNA, 33 bp, Homo sapien
tgttctgttcttccaaatctctgttcttcccca

SEQ ID NO: 502138 - DNA, 33 bp, Homo sapien
tgttctgttcttccaactctctgttcttcccca

SEQ ID NO: 502139 - DNA, 33 bp, Homo sapien
aaacagaaattgttgacactggcaaatccaggt

SEQ ID NO: 502140 - DNA, 33 bp, Homo sapien
aaacagaaattgttgatactggcaaatccaggt

SEQ ID NO: 502141 - DNA, 33 bp, Homo sapien
tgctggatgtgaacccaagtcagctttctcatc

SEQ ID NO: 502142 - DNA, 33 bp, Homo sapien
tgctggatgtgaacccgagtcagctttctcatc

SEQ ID NO: 502143 - DNA, 33 bp, Homo sapien
gcacaggctggaaagaagctaacaggcatccag

SEQ ID NO: 502144 - DNA, 33 bp, Homo sapien
gcacaggctggaaagaggctaacaggcatccag

SEQ ID NO: 502145 - DNA, 33 bp, Homo sapien
acagcacagcaacgacacttagtgaaattccaa

SEQ ID NO: 502146 - DNA, 33 bp, Homo sapien
acagcacagcaacgacgcttagtgaaattccaa

SEQ ID NO: 502147 - DNA, 33 bp, Homo sapien
agcgtttaaacagatggagagaccaagttaaca

SEQ ID NO: 502148 - DNA, 33 bp, Homo sapien
agcgtttaaacagatgtagagaccaagttaaca

SEQ ID NO: 502149 - DNA, 33 bp, Homo sapien
gccctggatggagatacggtgaaactctgctgg

SEQ ID NO: 502150 - DNA, 33 bp, Homo sapien
gccctggatggagatagggtgaaactctgctgg

SEQ ID NO: 502151 - DNA, 33 bp, Homo sapien
cccatgtactgagctccatgcggatgttttctg

SEQ ID NO: 502152 - DNA, 33 bp, Homo sapien
cccatgtactgagctctatgcggatgttttctg

SEQ ID NO: 502153 - DNA, 33 bp, Homo sapien
agccagcatgagagacagagaggaaatcgggct

SEQ ID NO: 502154 - DNA, 33 bp, Homo sapien
agccagcatgagagacggagaggaaatcgggct

SEQ ID NO: 502155 - DNA, 33 bp, Homo sapien
tcactctgcgcactcacgtgacccctccgacaa

SEQ ID NO: 502156 - DNA, 33 bp, Homo sapien
tcactctgcgcactcatgtgacccctccgacaa

SEQ ID NO: 502157 - DNA, 33 bp, Homo sapien
agagttcacaggtcacagaaacttttaggtcaa

SEQ ID NO: 502158 - DNA, 33 bp, Homo sapien
agagttcacaggtcacggaaacttttaggtcaa

SEQ ID NO: 502159 - DNA, 33 bp, Homo sapien
aagataattagactgaacaataagcctagttta

SEQ ID NO: 502160 - DNA, 33 bp, Homo sapien
aagataattagactgagcaataagcctagttta

SEQ ID NO: 502161 - DNA, 33 bp, Homo sapien
tcacactctgctctcaaaactagattaagcagc

SEQ ID NO: 502162 - DNA, 33 bp, Homo sapien
tcacactctgctctcagaactagattaagcagc

SEQ ID NO: 502163 - DNA, 33 bp, Homo sapien
atataattataaaatacggctttcgagattttc

SEQ ID NO: 502164 - DNA, 33 bp, Homo sapien
atataattataaaatatggctttcgagattttc

SEQ ID NO: 502165 - DNA, 33 bp, Homo sapien
agcttgtttttgaacaatgatcctgtaagcttc

SEQ ID NO: 502166 - DNA, 33 bp, Homo sapien
agcttgtttttgaacagtgatcctgtaagcttc

SEQ ID NO: 502167 - DNA, 33 bp, Homo sapien
tggatgaggtaaggtgaatgagaggaaaacagt

SEQ ID NO: 502168 - DNA, 33 bp, Homo sapien
tggatgaggtaaggtggatgagaggaaaacagt

SEQ ID NO: 502169 - DNA, 33 bp, Homo sapien
ctccaccatgccctccactgcatgccatcctca

SEQ ID NO: 502170 - DNA, 33 bp, Homo sapien
ctccaccatgccctccgctgcatgccatcctca

SEQ ID NO: 502171 - DNA, 33 bp, Homo sapien
tcgacctcttcgttaacccagatgccctgagac

SEQ ID NO: 502172 - DNA, 33 bp, Homo sapien
tcgacctcttcgttaatccagatgccctgagac

SEQ ID NO: 502173 - DNA, 33 bp, Homo sapien
atgtagcagctcaaaagttggaggtggcctaat

SEQ ID NO: 502174 - DNA, 33 bp, Homo sapien
atgtagcagctcaaaatttggaggtggcctaat

SEQ ID NO: 502175 - DNA, 33 bp, Homo sapien
ttgccacagatttacacgaaaaaattaccttgt

SEQ ID NO: 502176 - DNA, 33 bp, Homo sapien
ttgccacagatttacatgaaaaaattaccttgt

SEQ ID NO: 502177 - DNA, 33 bp, Homo sapien
ggtgacttctgttttcaatacgatcccatgagg

SEQ ID NO: 502178 - DNA, 33 bp, Homo sapien
ggtgacttctgttttcgatacgatcccatgagg

SEQ ID NO: 502179 - DNA, 33 bp, Homo sapien
atgacagtctcattatcaagaacatgtaaaata

SEQ ID NO: 502180 - DNA, 33 bp, Homo sapien
atgacagtctcattatgaagaacatgtaaaata

SEQ ID NO: 502181 - DNA, 33 bp, Homo sapien
gttactctgtagaaaaataagtgagcaagcagg

SEQ ID NO: 502182 - DNA, 33 bp, Homo sapien
gttactctgtagaaaagtaagtgagcaagcagg

SEQ ID NO: 502183 - DNA, 33 bp, Homo sapien
cactcatcaaagggaacatagcaaatgttgatc

SEQ ID NO: 502184 - DNA, 33 bp, Homo sapien
cactcatcaaagggaatatagcaaatgttgatc

SEQ ID NO: 502185 - DNA, 33 bp, Homo sapien
atatgtggccttaccaatgctcagtttggtcag

SEQ ID NO: 502186 - DNA, 33 bp, Homo sapien
atatgtggccttaccagtgctcagtttggtcag

SEQ ID NO: 502187 - DNA, 33 bp, Homo sapien
aatcagtgaaccaaacaaattgtgactcggtag

SEQ ID NO: 502188 - DNA, 33 bp, Homo sapien
aatcagtgaaccaaactaattgtgactcggtag

SEQ ID NO: 502189 - DNA, 33 bp, Homo sapien
ttggtaaagggactcacggtctgcgtctcttct

SEQ ID NO: 502190 - DNA, 33 bp, Homo sapien
ttggtaaagggactcatggtctgcgtctcttct

SEQ ID NO: 502191 - DNA, 33 bp, Homo sapien
actaaattactgcaaaaataactgagtaccaga

SEQ ID NO: 502192 - DNA, 33 bp, Homo sapien
actaaattactgcaaagataactgagtaccaga

SEQ ID NO: 502193 - DNA, 33 bp, Homo sapien
gagaagcaaatcttcaactgcattatcttcaac

SEQ ID NO: 502194 - DNA, 33 bp, Homo sapien
gagaagcaaatcttcagctgcattatcttcaac

SEQ ID NO: 502195 - DNA, 33 bp, Homo sapien
agcaatttggttgaaacgataaatttgacagag

SEQ ID NO: 502196 - DNA, 33 bp, Homo sapien
agcaatttggttgaaatgataaatttgacagag

SEQ ID NO: 502197 - DNA, 33 bp, Homo sapien
agattaaatgtataaacgtcaaatgtctacata

SEQ ID NO: 502198 - DNA, 33 bp, Homo sapien
agattaaatgtataaatgtcaaatgtctacata

SEQ ID NO: 502199 - DNA, 33 bp, Homo sapien
gtaatgtttaagtaggccatctctgtttttcct

SEQ ID NO: 502200 - DNA, 33 bp, Homo sapien
gtaatgtttaagtaggtcatctctgtttttcct

SEQ ID NO: 502201 - DNA, 33 bp, Homo sapien
aggtactacatatgcacaattactgcttgaatt

SEQ ID NO: 502202 - DNA, 33 bp, Homo sapien
aggtactacatatgcataattactgcttgaatt

SEQ ID NO: 502203 - DNA, 33 bp, Homo sapien
ctctgagatcagaatacgttatatggtttcaga

SEQ ID NO: 502204 - DNA, 33 bp, Homo sapien
ctctgagatcagaatatgttatatggtttcaga

SEQ ID NO: 502205 - DNA, 33 bp, Homo sapien
agaaaagcctgctaaccctatgcaaaggactca

SEQ ID NO: 502206 - DNA, 33 bp, Homo sapien
agaaaagcctgctaactctatgcaaaggactca

SEQ ID NO: 502207 - DNA, 33 bp, Homo sapien
tgatagcactggggtaaaaacagcacattcaga

SEQ ID NO: 502208 - DNA, 33 bp, Homo sapien
tgatagcactggggtagaaacagcacattcaga

SEQ ID NO: 502209 - DNA, 33 bp, Homo sapien
tgtgtaatgggaataccagaaggaaaggagaga

SEQ ID NO: 502210 - DNA, 33 bp, Homo sapien
tgtgtaatgggaatactagaaggaaaggagaga

SEQ ID NO: 502211 - DNA, 33 bp, Homo sapien
ttaaagtgtacaatcaatcggtttttggtatat

SEQ ID NO: 502212 - DNA, 33 bp, Homo sapien
ttaaagtgtacaatcagtcggtttttggtatat

SEQ ID NO: 502213 - DNA, 33 bp, Homo sapien
cacaattccaaaggataaatactctactcccct

SEQ ID NO: 502214 - DNA, 33 bp, Homo sapien
cacaattccaaaggatgaatactctactcccct

SEQ ID NO: 502215 - DNA, 33 bp, Homo sapien
atgacagatattctaacaaaccaaatatgcaac

SEQ ID NO: 502216 - DNA, 33 bp, Homo sapien
atgacagatattctaagaaaccaaatatgcaac

SEQ ID NO: 502217 - DNA, 33 bp, Homo sapien
cagtgccaaggtagaaacagaaacgcagaggat

SEQ ID NO: 502218 - DNA, 33 bp, Homo sapien
cagtgccaaggtagaagcagaaacgcagaggat

SEQ ID NO: 502219 - DNA, 33 bp, Homo sapien
gtaacaaagccactaacgaaatgctaaggttca

SEQ ID NO: 502220 - DNA, 33 bp, Homo sapien
gtaacaaagccactaatgaaatgctaaggttca

SEQ ID NO: 502221 - DNA, 33 bp, Homo sapien
cattataatcttttggaaccaccattgtatatg

SEQ ID NO: 502222 - DNA, 33 bp, Homo sapien
cattataatcttttgggaccaccattgtatatg

SEQ ID NO: 502223 - DNA, 33 bp, Homo sapien
agtcttttgggattgacgccatgattcccatga

SEQ ID NO: 502224 - DNA, 33 bp, Homo sapien
agtcttttgggattgatgccatgattcccatga

SEQ ID NO: 502225 - DNA, 33 bp, Homo sapien
tgtttgcactaagcacacctatgtgattgggat

SEQ ID NO: 502226 - DNA, 33 bp, Homo sapien
tgtttgcactaagcactcctatgtgattgggat

SEQ ID NO: 502227 - DNA, 33 bp, Homo sapien
cacagctaatcatgaccataatgccattaaaca

SEQ ID NO: 502228 - DNA, 33 bp, Homo sapien
cacagctaatcatgacgataatgccattaaaca

SEQ ID NO: 502229 - DNA, 33 bp, Homo sapien
gcaggctctggcttcaatcaggcagctagctct

SEQ ID NO: 502230 - DNA, 33 bp, Homo sapien
gcaggctctggcttcagtcaggcagctagctct

SEQ ID NO: 502231 - DNA, 33 bp, Homo sapien
cacacactctacacatcagctatcaagactgag

SEQ ID NO: 502232 - DNA, 33 bp, Homo sapien
cacacactctacacattagctatcaagactgag

SEQ ID NO: 502233 - DNA, 33 bp, Homo sapien
accccaccccatgatgaatatactaccatatga

SEQ ID NO: 502234 - DNA, 33 bp, Homo sapien
accccaccccatgatggatatactaccatatga

SEQ ID NO: 502235 - DNA, 33 bp, Homo sapien
aggagcctgggttgccaaaggggctgagcctca

SEQ ID NO: 502236 - DNA, 33 bp, Homo sapien
aggagcctgggttgccgaaggggctgagcctca

SEQ ID NO: 502237 - DNA, 33 bp, Homo sapien
aaactgataagggaaacgtgaaccaagagtcac

SEQ ID NO: 502238 - DNA, 33 bp, Homo sapien
aaactgataagggaaaggtgaaccaagagtcac

SEQ ID NO: 502239 - DNA, 33 bp, Homo sapien
aacataaggtaacagacgctgcagatttatcca

SEQ ID NO: 502240 - DNA, 33 bp, Homo sapien
aacataaggtaacagatgctgcagatttatcca

SEQ ID NO: 502241 - DNA, 33 bp, Homo sapien
aatcaaggcctgtgcccccgcaagtgtgagctc

SEQ ID NO: 502242 - DNA, 33 bp, Homo sapien
aatcaaggcctgtgcctccgcaagtgtgagctc

SEQ ID NO: 502243 - DNA, 33 bp, Homo sapien
tgaacgaacaaggacactggagaattctccaac

SEQ ID NO: 502244 - DNA, 33 bp, Homo sapien
tgaacgaacaaggacattggagaattctccaac

SEQ ID NO: 502245 - DNA, 33 bp, Homo sapien
ccacctgatgatgctaacttttagtcacaactc

SEQ ID NO: 502246 - DNA, 33 bp, Homo sapien
ccacctgatgatgctaccttttagtcacaactc

SEQ ID NO: 502247 - DNA, 33 bp, Homo sapien
cagcaatctcctacaccggccaaataactcagg

SEQ ID NO: 502248 - DNA, 33 bp, Homo sapien
cagcaatctcctacactggccaaataactcagg

SEQ ID NO: 502249 - DNA, 33 bp, Homo sapien
aactatccaggctgaaagagaaatactgtggac

SEQ ID NO: 502250 - DNA, 33 bp, Homo sapien
aactatccaggctgaaggagaaatactgtggac

SEQ ID NO: 502251 - DNA, 33 bp, Homo sapien
agggcctttctgggccaaagatgctcctgcaag

SEQ ID NO: 502252 - DNA, 33 bp, Homo sapien
agggcctttctgggccgaagatgctcctgcaag

SEQ ID NO: 502253 - DNA, 33 bp, Homo sapien
caacctggaagtcacacagtcacattgtgctgg

SEQ ID NO: 502254 - DNA, 33 bp, Homo sapien
caacctggaagtcacagagtcacattgtgctgg

SEQ ID NO: 502255 - DNA, 33 bp, Homo sapien
gttcatcacaatgttacatataaaggtgcagat

SEQ ID NO: 502256 - DNA, 33 bp, Homo sapien
gttcatcacaatgttatatataaaggtgcagat

SEQ ID NO: 502257 - DNA, 33 bp, Homo sapien
acagcacacttatgcaaaccggacccctctccc

SEQ ID NO: 502258 - DNA, 33 bp, Homo sapien
acagcacacttatgcacaccggacccctctccc

SEQ ID NO: 502259 - DNA, 33 bp, Homo sapien
aataatggcctgtatacatatgtgacctagtat

SEQ ID NO: 502260 - DNA, 33 bp, Homo sapien
aataatggcctgtatatatatgtgacctagtat

SEQ ID NO: 502261 - DNA, 33 bp, Homo sapien
ttcataaaccgaatgcaaatcaattatgactca

SEQ ID NO: 502262 - DNA, 33 bp, Homo sapien
ttcataaaccgaatgcgaatcaattatgactca

SEQ ID NO: 502263 - DNA, 33 bp, Homo sapien
cctcatagacaggcataagtagactgacacagt

SEQ ID NO: 502264 - DNA, 33 bp, Homo sapien
cctcatagacaggcattagtagactgacacagt

SEQ ID NO: 502265 - DNA, 33 bp, Homo sapien
ttcatatatacatagacgaagtaaaccacagag

SEQ ID NO: 502266 - DNA, 33 bp, Homo sapien
ttcatatatacatagatgaagtaaaccacagag

SEQ ID NO: 502267 - DNA, 33 bp, Homo sapien
aatgttgttaagagcacaatacattccaagttg

SEQ ID NO: 502268 - DNA, 33 bp, Homo sapien
aatgttgttaagagcataatacattccaagttg

SEQ ID NO: 502269 - DNA, 33 bp, Homo sapien
ttatgaattttaggaacagcttatgaattgctg

SEQ ID NO: 502270 - DNA, 33 bp, Homo sapien
ttatgaattttaggaagagcttatgaattgctg

SEQ ID NO: 502271 - DNA, 33 bp, Homo sapien
tattgaattatcttgacgttgttgtcaaacatt

SEQ ID NO: 502272 - DNA, 33 bp, Homo sapien
tattgaattatcttgatgttgttgtcaaacatt

SEQ ID NO: 502273 - DNA, 33 bp, Homo sapien
ttgatagacgtgacgaaggctacaattttcaaa

SEQ ID NO: 502274 - DNA, 33 bp, Homo sapien
ttgatagacgtgacgagggctacaattttcaaa

SEQ ID NO: 502275 - DNA, 33 bp, Homo sapien
ttagcagcctagagtcagaaaattcaatagtca

SEQ ID NO: 502276 - DNA, 33 bp, Homo sapien
ttagcagcctagagtcggaaaattcaatagtca

SEQ ID NO: 502277 - DNA, 33 bp, Homo sapien
acatcagtttaagagacaatgcagatgcgttaa

SEQ ID NO: 502278 - DNA, 33 bp, Homo sapien
acatcagtttaagagataatgcagatgcgttaa

SEQ ID NO: 502279 - DNA, 33 bp, Homo sapien
ttcatgtacttgatggccacaaaaagaaaagat

SEQ ID NO: 502280 - DNA, 33 bp, Homo sapien
ttcatgtacttgatggtcacaaaaagaaaagat

SEQ ID NO: 502281 - DNA, 33 bp, Homo sapien
tggattttattttgtaggaactagaccctatca

SEQ ID NO: 502282 - DNA, 33 bp, Homo sapien
tggattttattttgtatgaactagaccctatca

SEQ ID NO: 502283 - DNA, 33 bp, Homo sapien
ttgaaattttaacatacaatgcagatgaatttt

SEQ ID NO: 502284 - DNA, 33 bp, Homo sapien
ttgaaattttaacatagaatgcagatgaatttt

SEQ ID NO: 502285 - DNA, 33 bp, Homo sapien
ttttgtggtgctataacaaccaatgttttgtaa

SEQ ID NO: 502286 - DNA, 33 bp, Homo sapien
ttttgtggtgctataataaccaatgttttgtaa

SEQ ID NO: 502287 - DNA, 33 bp, Homo sapien
cctgaggagcaacatcagaggctatataccgca

SEQ ID NO: 502288 - DNA, 33 bp, Homo sapien
cctgaggagcaacatcggaggctatataccgca

SEQ ID NO: 502289 - DNA, 33 bp, Homo sapien
aagtaggagtgaattacggccaaataacttata

SEQ ID NO: 502290 - DNA, 33 bp, Homo sapien
aagtaggagtgaattatggccaaataacttata

SEQ ID NO: 502291 - DNA, 33 bp, Homo sapien
acattttcaagcaaccagatgtcataattaaca

SEQ ID NO: 502292 - DNA, 33 bp, Homo sapien
acattttcaagcaacctgatgtcataattaaca

SEQ ID NO: 502293 - DNA, 33 bp, Homo sapien
atactcatttgtctgtaacacaagcctctgcct

SEQ ID NO: 502294 - DNA, 33 bp, Homo sapien
atactcatttgtctgttacacaagcctctgcct

SEQ ID NO: 502295 - DNA, 33 bp, Homo sapien
catctagggtagcaaaaggtgaaaaactgacaa

SEQ ID NO: 502296 - DNA, 33 bp, Homo sapien
catctagggtagcaaagggtgaaaaactgacaa

SEQ ID NO: 502297 - DNA, 33 bp, Homo sapien
attgttagtcacccaaaagcattgttttacaca

SEQ ID NO: 502298 - DNA, 33 bp, Homo sapien
attgttagtcacccaagagcattgttttacaca

SEQ ID NO: 502299 - DNA, 33 bp, Homo sapien
tttaagcagtctcataaaactcaaagaagaatt

SEQ ID NO: 502300 - DNA, 33 bp, Homo sapien
tttaagcagtctcatagaactcaaagaagaatt

SEQ ID NO: 502301 - DNA, 33 bp, Homo sapien
tgcttatcagccattaagcagcaatggagaagt

SEQ ID NO: 502302 - DNA, 33 bp, Homo sapien
tgcttatcagccattaggcagcaatggagaagt

SEQ ID NO: 502303 - DNA, 33 bp, Homo sapien
cttctactttgatctaacagaaataaggcaatg

SEQ ID NO: 502304 - DNA, 33 bp, Homo sapien
cttctactttgatctagcagaaataaggcaatg

SEQ ID NO: 502305 - DNA, 33 bp, Homo sapien
aaagtttaattttgtaggctttatcacactgct

SEQ ID NO: 502306 - DNA, 33 bp, Homo sapien
aaagtttaattttgtatgctttatcacactgct

SEQ ID NO: 502307 - DNA, 33 bp, Homo sapien
tttgacaatttccatagccacagacaccatcca

SEQ ID NO: 502308 - DNA, 33 bp, Homo sapien
tttgacaatttccatatccacagacaccatcca

SEQ ID NO: 502309 - DNA, 33 bp, Homo sapien
tttagcaaagaagacaagaacgtcccatcagta

SEQ ID NO: 502310 - DNA, 33 bp, Homo sapien
tttagcaaagaagacaggaacgtcccatcagta

SEQ ID NO: 502311 - DNA, 33 bp, Homo sapien
gtagtcaaggccatccacaatgtgatccaagcc

SEQ ID NO: 502312 - DNA, 33 bp, Homo sapien
gtagtcaaggccatcctcaatgtgatccaagcc

SEQ ID NO: 502313 - DNA, 33 bp, Homo sapien
agataccgctttacacagatgtttgggatactt

SEQ ID NO: 502314 - DNA, 33 bp, Homo sapien
agataccgctttacacggatgtttgggatactt

SEQ ID NO: 502315 - DNA, 33 bp, Homo sapien
atctcacccaagtccacgaaggcggtacctcta

SEQ ID NO: 502316 - DNA, 33 bp, Homo sapien
atctcacccaagtccatgaaggcggtacctcta

SEQ ID NO: 502317 - DNA, 33 bp, Homo sapien
ggttccttgaaaggataaacatgactgatgaac

SEQ ID NO: 502318 - DNA, 33 bp, Homo sapien
ggttccttgaaaggatgaacatgactgatgaac

SEQ ID NO: 502319 - DNA, 33 bp, Homo sapien
gacacaagtgataacacgttggagtgtaaagtg

SEQ ID NO: 502320 - DNA, 33 bp, Homo sapien
gacacaagtgataacatgttggagtgtaaagtg

SEQ ID NO: 502321 - DNA, 33 bp, Homo sapien
ccagtatcctcatataggtactccaaacacctg

SEQ ID NO: 502322 - DNA, 33 bp, Homo sapien
ccagtatcctcatatatgtactccaaacacctg

SEQ ID NO: 502323 - DNA, 33 bp, Homo sapien
cctacaaacatttgacagatagtggtataaaaa

SEQ ID NO: 502324 - DNA, 33 bp, Homo sapien
cctacaaacatttgactgatagtggtataaaaa

SEQ ID NO: 502325 - DNA, 33 bp, Homo sapien
tggagagacagctgaaagagagccaaaaagatg

SEQ ID NO: 502326 - DNA, 33 bp, Homo sapien
tggagagacagctgaaggagagccaaaaagatg

SEQ ID NO: 502327 - DNA, 33 bp, Homo sapien
gggctgaaaatgaagcaagaaaacacatgggga

SEQ ID NO: 502328 - DNA, 33 bp, Homo sapien
gggctgaaaatgaagcgagaaaacacatgggga

SEQ ID NO: 502329 - DNA, 33 bp, Homo sapien
agtaaaaataaaactacctagaagcagtcaaat

SEQ ID NO: 502330 - DNA, 33 bp, Homo sapien
agtaaaaataaaactatctagaagcagtcaaat

SEQ ID NO: 502331 - DNA, 33 bp, Homo sapien
agttgcctaccccctcactatcaaatcttgact

SEQ ID NO: 502332 - DNA, 33 bp, Homo sapien
agttgcctaccccctcgctatcaaatcttgact

SEQ ID NO: 502333 - DNA, 33 bp, Homo sapien
ccaagcatggaaaataaggtagctctcctgtta

SEQ ID NO: 502334 - DNA, 33 bp, Homo sapien
ccaagcatggaaaatacggtagctctcctgtta

SEQ ID NO: 502335 - DNA, 33 bp, Homo sapien
ctgacaacacagacaacgattccattgtatgtg

SEQ ID NO: 502336 - DNA, 33 bp, Homo sapien
ctgacaacacagacaaggattccattgtatgtg

SEQ ID NO: 502337 - DNA, 33 bp, Homo sapien
gaaatttctgctattcaaagtaaaaatgcacag

SEQ ID NO: 502338 - DNA, 33 bp, Homo sapien
gaaatttctgctattccaagtaaaaatgcacag

SEQ ID NO: 502339 - DNA, 33 bp, Homo sapien
tggcaagttctttcatcacaacacaagttacat

SEQ ID NO: 502340 - DNA, 33 bp, Homo sapien
tggcaagttctttcattacaacacaagttacat

SEQ ID NO: 502341 - DNA, 33 bp, Homo sapien
accctcagaacgctataaaagacttgaacaaaa

SEQ ID NO: 502342 - DNA, 33 bp, Homo sapien
accctcagaacgctatgaaagacttgaacaaaa

SEQ ID NO: 502343 - DNA, 33 bp, Homo sapien
cccttaacttgccaaaggctcatctaccaatca

SEQ ID NO: 502344 - DNA, 33 bp, Homo sapien
cccttaacttgccaaatgctcatctaccaatca

SEQ ID NO: 502345 - DNA, 33 bp, Homo sapien
ctaaaaatgctaacgaacacctgattcttcaac

SEQ ID NO: 502346 - DNA, 33 bp, Homo sapien
ctaaaaatgctaacgagcacctgattcttcaac

SEQ ID NO: 502347 - DNA, 33 bp, Homo sapien
tgctgctagtccagaaaggaatatctaatcctt

SEQ ID NO: 502348 - DNA, 33 bp, Homo sapien
tgctgctagtccagaagggaatatctaatcctt

SEQ ID NO: 502349 - DNA, 33 bp, Homo sapien
cgtgccttgttttaagaaacgtatatacaaaca

SEQ ID NO: 502350 - DNA, 33 bp, Homo sapien
cgtgccttgttttaagcaacgtatatacaaaca

SEQ ID NO: 502351 - DNA, 33 bp, Homo sapien
tatttcttggtcctcaaaataatgcattaagta

SEQ ID NO: 502352 - DNA, 33 bp, Homo sapien
tatttcttggtcctcagaataatgcattaagta

SEQ ID NO: 502353 - DNA, 33 bp, Homo sapien
tgctcactgctaaaaaccagctttgtggccagg

SEQ ID NO: 502354 - DNA, 33 bp, Homo sapien
tgctcactgctaaaaatcagctttgtggccagg

SEQ ID NO: 502355 - DNA, 33 bp, Homo sapien
gtttctttctctaacactaaagaacctggctga

SEQ ID NO: 502356 - DNA, 33 bp, Homo sapien
gtttctttctctaacattaaagaacctggctga

SEQ ID NO: 502357 - DNA, 33 bp, Homo sapien
cctggctgatcttataaaataacagtgagaagt

SEQ ID NO: 502358 - DNA, 33 bp, Homo sapien
cctggctgatcttatagaataacagtgagaagt

SEQ ID NO: 502359 - DNA, 33 bp, Homo sapien
acttgcctgaaatccaagtaactagcaaatgat

SEQ ID NO: 502360 - DNA, 33 bp, Homo sapien
acttgcctgaaatccacgtaactagcaaatgat

SEQ ID NO: 502361 - DNA, 33 bp, Homo sapien
aagcatcactgagaggcagatctgaactaagaa

SEQ ID NO: 502362 - DNA, 33 bp, Homo sapien
aagcatcactgagaggtagatctgaactaagaa

SEQ ID NO: 502363 - DNA, 33 bp, Homo sapien
acaaatagattatcaacgcctccaccctaccca

SEQ ID NO: 502364 - DNA, 33 bp, Homo sapien
acaaatagattatcaatgcctccaccctaccca

SEQ ID NO: 502365 - DNA, 33 bp, Homo sapien
agatacacagaattacagactgttacataaagt

SEQ ID NO: 502366 - DNA, 33 bp, Homo sapien
agatacacagaattacggactgttacataaagt

SEQ ID NO: 502367 - DNA, 33 bp, Homo sapien
ctctccaaaaatgcgaagtattattattaggtg

SEQ ID NO: 502368 - DNA, 33 bp, Homo sapien
ctctccaaaaatgcgaggtattattattaggtg

SEQ ID NO: 502369 - DNA, 33 bp, Homo sapien
ttcacaatgatcccacacttcttccatctctca

SEQ ID NO: 502370 - DNA, 33 bp, Homo sapien
ttcacaatgatcccacgcttcttccatctctca

SEQ ID NO: 502371 - DNA, 33 bp, Homo sapien
gcttctgcagcttgcggagtgggataatttctc

SEQ ID NO: 502372 - DNA, 33 bp, Homo sapien
gcttctgcagcttgcgtagtgggataatttctc

SEQ ID NO: 502373 - DNA, 33 bp, Homo sapien
atttcccctctgagaacccaatcatgccttcat

SEQ ID NO: 502374 - DNA, 33 bp, Homo sapien
atttcccctctgagaatccaatcatgccttcat

SEQ ID NO: 502375 - DNA, 33 bp, Homo sapien
aggtggcatggtttgcaattttatccctatagc

SEQ ID NO: 502376 - DNA, 33 bp, Homo sapien
aggtggcatggtttgccattttatccctatagc

SEQ ID NO: 502377 - DNA, 33 bp, Homo sapien
tgaggaatttatgttacctataaagatgaattt

SEQ ID NO: 502378 - DNA, 33 bp, Homo sapien
tgaggaatttatgttagctataaagatgaattt

SEQ ID NO: 502379 - DNA, 33 bp, Homo sapien
atcaaatctcttttcaaaaacacttgtgttctt

SEQ ID NO: 502380 - DNA, 33 bp, Homo sapien
atcaaatctcttttcagaaacacttgtgttctt

SEQ ID NO: 502381 - DNA, 33 bp, Homo sapien
tatgtcacatggaaaaatcagtcacaatcagca

SEQ ID NO: 502382 - DNA, 33 bp, Homo sapien
tatgtcacatggaaaagtcagtcacaatcagca

SEQ ID NO: 502383 - DNA, 33 bp, Homo sapien
gtcactgggactcttgaacatgtagagccattt

SEQ ID NO: 502384 - DNA, 33 bp, Homo sapien
gtcactgggactcttggacatgtagagccattt

SEQ ID NO: 502385 - DNA, 33 bp, Homo sapien
gttatttttcaccgaacaggtgctcattcggta

SEQ ID NO: 502386 - DNA, 33 bp, Homo sapien
gttatttttcaccgaagaggtgctcattcggta

SEQ ID NO: 502387 - DNA, 33 bp, Homo sapien
gctgcagtgggaactcagaccagttggagggct

SEQ ID NO: 502388 - DNA, 33 bp, Homo sapien
gctgcagtgggaactcggaccagttggagggct

SEQ ID NO: 502389 - DNA, 33 bp, Homo sapien
tacggaattttatgtaagtctttctgcacatct

SEQ ID NO: 502390 - DNA, 33 bp, Homo sapien
tacggaattttatgtacgtctttctgcacatct

SEQ ID NO: 502391 - DNA, 33 bp, Homo sapien
cctatcgaatcatcacccaacccttactattgc

SEQ ID NO: 502392 - DNA, 33 bp, Homo sapien
cctatcgaatcatcacgcaacccttactattgc

SEQ ID NO: 502393 - DNA, 33 bp, Homo sapien
cttgatcttggatttgaagatttcagaattgtg

SEQ ID NO: 502394 - DNA, 33 bp, Homo sapien
cttgatcttggatttgcagatttcagaattgtg

SEQ ID NO: 502395 - DNA, 33 bp, Homo sapien
caaccatgtgaaagcacgcctgttgattctccc

SEQ ID NO: 502396 - DNA, 33 bp, Homo sapien
caaccatgtgaaagcatgcctgttgattctccc

SEQ ID NO: 502397 - DNA, 33 bp, Homo sapien
gggcggaggccgtgccacaaaagcatctgtgat

SEQ ID NO: 502398 - DNA, 33 bp, Homo sapien
gggcggaggccgtgccgcaaaagcatctgtgat

SEQ ID NO: 502399 - DNA, 33 bp, Homo sapien
tttggattgcttttgaagtcagatctggctcaa

SEQ ID NO: 502400 - DNA, 33 bp, Homo sapien
tttggattgcttttgaggtcagatctggctcaa

SEQ ID NO: 502401 - DNA, 33 bp, Homo sapien
gttcagctagaaatacaagaggctgcaaaaaat

SEQ ID NO: 502402 - DNA, 33 bp, Homo sapien
gttcagctagaaatacgagaggctgcaaaaaat

SEQ ID NO: 502403 - DNA, 33 bp, Homo sapien
catgctcctccatgaggaaccagtgtgcatggc

SEQ ID NO: 502404 - DNA, 33 bp, Homo sapien
catgctcctccatgagtaaccagtgtgcatggc

SEQ ID NO: 502405 - DNA, 33 bp, Homo sapien
aaagaaaaaagaaaacacacagagaaggtagct

SEQ ID NO: 502406 - DNA, 33 bp, Homo sapien
aaagaaaaaagaaaacgcacagagaaggtagct

SEQ ID NO: 502407 - DNA, 33 bp, Homo sapien
accaattctgaatagaaaaagtgctacagtaaa

SEQ ID NO: 502408 - DNA, 33 bp, Homo sapien
accaattctgaatagagaaagtgctacagtaaa

SEQ ID NO: 502409 - DNA, 33 bp, Homo sapien
tggtattccattgtcacaggattaccacaacag

SEQ ID NO: 502410 - DNA, 33 bp, Homo sapien
tggtattccattgtcataggattaccacaacag

SEQ ID NO: 502411 - DNA, 33 bp, Homo sapien
ctatttaatttgcagtcactctacatcattaaa

SEQ ID NO: 502412 - DNA, 33 bp, Homo sapien
ctatttaatttgcagttactctacatcattaaa

SEQ ID NO: 502413 - DNA, 33 bp, Homo sapien
ccagatctcactagaacgggcaggtcttttcta

SEQ ID NO: 502414 - DNA, 33 bp, Homo sapien
ccagatctcactagaatgggcaggtcttttcta

SEQ ID NO: 502415 - DNA, 33 bp, Homo sapien
ggcaatctgcttttaacagtacacccaaaactg

SEQ ID NO: 502416 - DNA, 33 bp, Homo sapien
ggcaatctgcttttaagagtacacccaaaactg

SEQ ID NO: 502417 - DNA, 33 bp, Homo sapien
cagtaattacgttatccaaacatattgggcagt

SEQ ID NO: 502418 - DNA, 33 bp, Homo sapien
cagtaattacgttatcgaaacatattgggcagt

SEQ ID NO: 502419 - DNA, 33 bp, Homo sapien
tagctatgaggtcacaaaagaggttactcatgt

SEQ ID NO: 502420 - DNA, 33 bp, Homo sapien
tagctatgaggtcacagaagaggttactcatgt

SEQ ID NO: 502421 - DNA, 33 bp, Homo sapien
atgaataaaaagtaatcatgctcagtataggct

SEQ ID NO: 502422 - DNA, 33 bp, Homo sapien
atgaataaaaagtaattatgctcagtataggct

SEQ ID NO: 502423 - DNA, 33 bp, Homo sapien
actgaaatgactcctacgaatgttcagaggcat

SEQ ID NO: 502424 - DNA, 33 bp, Homo sapien
actgaaatgactcctatgaatgttcagaggcat

SEQ ID NO: 502425 - DNA, 33 bp, Homo sapien
ggtgactgagttgcacagctagtttgcagccaa

SEQ ID NO: 502426 - DNA, 33 bp, Homo sapien
ggtgactgagttgcacggctagtttgcagccaa

SEQ ID NO: 502427 - DNA, 33 bp, Homo sapien
gcatttaagaaactcacgtggataaacaagttg

SEQ ID NO: 502428 - DNA, 33 bp, Homo sapien
gcatttaagaaactcatgtggataaacaagttg

SEQ ID NO: 502429 - DNA, 33 bp, Homo sapien
aaactactgtcagggacactccacgttagcacc

SEQ ID NO: 502430 - DNA, 33 bp, Homo sapien
aaactactgtcagggatactccacgttagcacc

SEQ ID NO: 502431 - DNA, 33 bp, Homo sapien
aacccagggatctctaaatcttttgaagcaatt

SEQ ID NO: 502432 - DNA, 33 bp, Homo sapien
aacccagggatctctacatcttttgaagcaatt

SEQ ID NO: 502433 - DNA, 33 bp, Homo sapien
tctttttctcctcttcacgtttatacgatctgc

SEQ ID NO: 502434 - DNA, 33 bp, Homo sapien
tctttttctcctcttcgcgtttatacgatctgc

SEQ ID NO: 502435 - DNA, 33 bp, Homo sapien
aggctggacccaaaccaggctgtgctcagtcac

SEQ ID NO: 502436 - DNA, 33 bp, Homo sapien
aggctggacccaaaccgggctgtgctcagtcac

SEQ ID NO: 502437 - DNA, 33 bp, Homo sapien
aaccctatggaggatacgttgtcttggactgag

SEQ ID NO: 502438 - DNA, 33 bp, Homo sapien
aaccctatggaggatatgttgtcttggactgag

SEQ ID NO: 502439 - DNA, 33 bp, Homo sapien
ccatgtggttttctacaaagagaagagaatcag

SEQ ID NO: 502440 - DNA, 33 bp, Homo sapien
ccatgtggttttctacgaagagaagagaatcag

SEQ ID NO: 502441 - DNA, 33 bp, Homo sapien
tcagttaagataaaaacggcaggaagataaagg

SEQ ID NO: 502442 - DNA, 33 bp, Homo sapien
tcagttaagataaaaatggcaggaagataaagg

SEQ ID NO: 502443 - DNA, 33 bp, Homo sapien
aaaccaatttgtactgcagatttaataagagat

SEQ ID NO: 502444 - DNA, 33 bp, Homo sapien
aaaccaatttgtactggagatttaataagagat

SEQ ID NO: 502445 - DNA, 33 bp, Homo sapien
tttgcccttaatgttacggtgactcctttacac

SEQ ID NO: 502446 - DNA, 33 bp, Homo sapien
tttgcccttaatgttatggtgactcctttacac

SEQ ID NO: 502447 - DNA, 33 bp, Homo sapien
tttaaaatttttcttagagacagcatttcacta

SEQ ID NO: 502448 - DNA, 33 bp, Homo sapien
tttaaaatttttcttatagacagcatttcacta

SEQ ID NO: 502449 - DNA, 33 bp, Homo sapien
cggatgcttcttctacaagacatgatgtggcac

SEQ ID NO: 502450 - DNA, 33 bp, Homo sapien
cggatgcttcttctacgagacatgatgtggcac

SEQ ID NO: 502451 - DNA, 33 bp, Homo sapien
tttcctgcctggcaaacttcattcttccttcga

SEQ ID NO: 502452 - DNA, 33 bp, Homo sapien
tttcctgcctggcaaatttcattcttccttcga

SEQ ID NO: 502453 - DNA, 33 bp, Homo sapien
atagagaaaacgttagacagttatgaagagcaa

SEQ ID NO: 502454 - DNA, 33 bp, Homo sapien
atagagaaaacgttagccagttatgaagagcaa

SEQ ID NO: 502455 - DNA, 33 bp, Homo sapien
ttttgtctttgccgatcatacattttcaaacag

SEQ ID NO: 502456 - DNA, 33 bp, Homo sapien
ttttgtctttgccgatgatacattttcaaacag

SEQ ID NO: 502457 - DNA, 33 bp, Homo sapien
agtcctgtgagaagaactgtgatagtctaagtg

SEQ ID NO: 502458 - DNA, 33 bp, Homo sapien
agtcctgtgagaagaattgtgatagtctaagtg

SEQ ID NO: 502459 - DNA, 33 bp, Homo sapien
tgcttaacccaacccaactaaggacataaatat

SEQ ID NO: 502460 - DNA, 33 bp, Homo sapien
tgcttaacccaacccagctaaggacataaatat

SEQ ID NO: 502461 - DNA, 33 bp, Homo sapien
ctacagtgatcagaacaacccatagaaaaggat

SEQ ID NO: 502462 - DNA, 33 bp, Homo sapien
ctacagtgatcagaacgacccatagaaaaggat

SEQ ID NO: 502463 - DNA, 33 bp, Homo sapien
atttttattgatacacacagtaatgcttctcat

SEQ ID NO: 502464 - DNA, 33 bp, Homo sapien
atttttattgatacacgcagtaatgcttctcat

SEQ ID NO: 502465 - DNA, 33 bp, Homo sapien
atattaaggtagatctcaacgcagccagggata

SEQ ID NO: 502466 - DNA, 33 bp, Homo sapien
atattaaggtagatcttaacgcagccagggata

SEQ ID NO: 502467 - DNA, 33 bp, Homo sapien
gtatttaccccagagaagagaaagcacaaagac

SEQ ID NO: 502468 - DNA, 33 bp, Homo sapien
gtatttaccccagagaggagaaagcacaaagac

SEQ ID NO: 502469 - DNA, 33 bp, Homo sapien
ttcctttgcaagcacaagagttcgttccctggg

SEQ ID NO: 502470 - DNA, 33 bp, Homo sapien
ttcctttgcaagcacaggagttcgttccctggg

SEQ ID NO: 502471 - DNA, 33 bp, Homo sapien
gttctagtcagtaggaaagatgaaggacatggg

SEQ ID NO: 502472 - DNA, 33 bp, Homo sapien
gttctagtcagtaggagagatgaaggacatggg

SEQ ID NO: 502473 - DNA, 33 bp, Homo sapien
ggccagatgtagtggcccaagcctgtgattgca

SEQ ID NO: 502474 - DNA, 33 bp, Homo sapien
ggccagatgtagtggctcaagcctgtgattgca

SEQ ID NO: 502475 - DNA, 33 bp, Homo sapien
ggggctgaaaaaccaccgatcggatatacccag

SEQ ID NO: 502476 - DNA, 33 bp, Homo sapien
ggggctgaaaaaccactgatcggatatacccag

SEQ ID NO: 502477 - DNA, 33 bp, Homo sapien
ttaactgttttttgaacatgagccattatttca

SEQ ID NO: 502478 - DNA, 33 bp, Homo sapien
ttaactgttttttgaatatgagccattatttca

SEQ ID NO: 502479 - DNA, 33 bp, Homo sapien
ggataaaagtggcagacacaaaaagtctgagtt

SEQ ID NO: 502480 - DNA, 33 bp, Homo sapien
ggataaaagtggcagatacaaaaagtctgagtt

SEQ ID NO: 502481 - DNA, 33 bp, Homo sapien
tgagtgttcttctccgacagtgaaatgctagtg

SEQ ID NO: 502482 - DNA, 33 bp, Homo sapien
tgagtgttcttctccggcagtgaaatgctagtg

SEQ ID NO: 502483 - DNA, 33 bp, Homo sapien
tgcagtatcagaacccactttttactgttaggg

SEQ ID NO: 502484 - DNA, 33 bp, Homo sapien
tgcagtatcagaacccgctttttactgttaggg

SEQ ID NO: 502485 - DNA, 33 bp, Homo sapien
cccttcatcttctaggcatatggttctgcaaac

SEQ ID NO: 502486 - DNA, 33 bp, Homo sapien
cccttcatcttctaggtatatggttctgcaaac

SEQ ID NO: 502487 - DNA, 33 bp, Homo sapien
cacctaagtattacagcactggaacatttaagg

SEQ ID NO: 502488 - DNA, 33 bp, Homo sapien
cacctaagtattacaggactggaacatttaagg

SEQ ID NO: 502489 - DNA, 33 bp, Homo sapien
tacctgtttatgattcagaagtgccagatcatg

SEQ ID NO: 502490 - DNA, 33 bp, Homo sapien
tacctgtttatgattcggaagtgccagatcatg

SEQ ID NO: 502491 - DNA, 33 bp, Homo sapien
atgggaaacattagggaagatcctggtttgcgg

SEQ ID NO: 502492 - DNA, 33 bp, Homo sapien
atgggaaacattaggggagatcctggtttgcgg

SEQ ID NO: 502493 - DNA, 33 bp, Homo sapien
tggagagggatccaccaggaaaaggagaagcaa

SEQ ID NO: 502494 - DNA, 33 bp, Homo sapien
tggagagggatccaccgggaaaaggagaagcaa

SEQ ID NO: 502495 - DNA, 33 bp, Homo sapien
agtggtgcatttaaaccgctaatgtgatcacat

SEQ ID NO: 502496 - DNA, 33 bp, Homo sapien
agtggtgcatttaaactgctaatgtgatcacat

SEQ ID NO: 502497 - DNA, 33 bp, Homo sapien
aacctgtaactcgctgaatttttttgttggggg

SEQ ID NO: 502498 - DNA, 33 bp, Homo sapien
aacctgtaactcgctgtatttttttgttggggg

SEQ ID NO: 502499 - DNA, 33 bp, Homo sapien
atactactactttcaaatcacaatgcctttgtt

SEQ ID NO: 502500 - DNA, 33 bp, Homo sapien
atactactactttcaagtcacaatgcctttgtt

SEQ ID NO: 502501 - DNA, 33 bp, Homo sapien
tttaggtgaaagaacaaagaaatcttaaagtat

SEQ ID NO: 502502 - DNA, 33 bp, Homo sapien
tttaggtgaaagaacacagaaatcttaaagtat

SEQ ID NO: 502503 - DNA, 33 bp, Homo sapien
atggagttttataataatagtgtgggcgtcaag

SEQ ID NO: 502504 - DNA, 33 bp, Homo sapien
atggagttttataatagtagtgtgggcgtcaag

SEQ ID NO: 502505 - DNA, 33 bp, Homo sapien
atattcagtaaacacaaacttttctccattgga

SEQ ID NO: 502506 - DNA, 33 bp, Homo sapien
atattcagtaaacacagacttttctccattgga

SEQ ID NO: 502507 - DNA, 33 bp, Homo sapien
ctagaattcttgcacaagcagattatgagctcc

SEQ ID NO: 502508 - DNA, 33 bp, Homo sapien
ctagaattcttgcacaggcagattatgagctcc

SEQ ID NO: 502509 - DNA, 33 bp, Homo sapien
atataggaatgtaacactggagctcatacacac

SEQ ID NO: 502510 - DNA, 33 bp, Homo sapien
atataggaatgtaacattggagctcatacacac

SEQ ID NO: 502511 - DNA, 33 bp, Homo sapien
tgctcagaattttgcaacttcttctcttgttca

SEQ ID NO: 502512 - DNA, 33 bp, Homo sapien
tgctcagaattttgcagcttcttctcttgttca

SEQ ID NO: 502513 - DNA, 33 bp, Homo sapien
taaccaagagcctcaaatgatgtctgatctcct

SEQ ID NO: 502514 - DNA, 33 bp, Homo sapien
taaccaagagcctcaagtgatgtctgatctcct

SEQ ID NO: 502515 - DNA, 33 bp, Homo sapien
actccaattcagtttccactcttttgccactat

SEQ ID NO: 502516 - DNA, 33 bp, Homo sapien
actccaattcagtttctactcttttgccactat

SEQ ID NO: 502517 - DNA, 33 bp, Homo sapien
atgatggtctttaataaagtgccagtgacagtc

SEQ ID NO: 502518 - DNA, 33 bp, Homo sapien
atgatggtctttaatagagtgccagtgacagtc

SEQ ID NO: 502519 - DNA, 33 bp, Homo sapien
agaccatgttcacaaaacacatgaagccaggat

SEQ ID NO: 502520 - DNA, 33 bp, Homo sapien
agaccatgttcacaaagcacatgaagccaggat

SEQ ID NO: 502521 - DNA, 33 bp, Homo sapien
aggttgctaaatagagactagacactatctaga

SEQ ID NO: 502522 - DNA, 33 bp, Homo sapien
aggttgctaaatagaggctagacactatctaga

SEQ ID NO: 502523 - DNA, 33 bp, Homo sapien
atttttcttcacaactcaaagctcacggatgac

SEQ ID NO: 502524 - DNA, 33 bp, Homo sapien
atttttcttcacaacttaaagctcacggatgac

SEQ ID NO: 502525 - DNA, 33 bp, Homo sapien
ggatgaatttgaatcacattttgaaaggcattg

SEQ ID NO: 502526 - DNA, 33 bp, Homo sapien
ggatgaatttgaatcagattttgaaaggcattg

SEQ ID NO: 502527 - DNA, 33 bp, Homo sapien
ggcttcaagtggtggacggaagaattaatttga

SEQ ID NO: 502528 - DNA, 33 bp, Homo sapien
ggcttcaagtggtggatggaagaattaatttga

SEQ ID NO: 502529 - DNA, 33 bp, Homo sapien
ctaatcatccctttcaacagtaactgcttatct

SEQ ID NO: 502530 - DNA, 33 bp, Homo sapien
ctaatcatccctttcatcagtaactgcttatct

SEQ ID NO: 502531 - DNA, 33 bp, Homo sapien
aaagtcacacttacaacggctctcacagcacat

SEQ ID NO: 502532 - DNA, 33 bp, Homo sapien
aaagtcacacttacaatggctctcacagcacat

SEQ ID NO: 502533 - DNA, 33 bp, Homo sapien
atctatgtagcacaacaaaaaagttaattggaa

SEQ ID NO: 502534 - DNA, 33 bp, Homo sapien
atctatgtagcacaacgaaaaagttaattggaa

SEQ ID NO: 502535 - DNA, 33 bp, Homo sapien
aatggttagctttatacgtcaacctagctaggt

SEQ ID NO: 502536 - DNA, 33 bp, Homo sapien
aatggttagctttatatgtcaacctagctaggt

SEQ ID NO: 502537 - DNA, 33 bp, Homo sapien
cacaggttttctgataagtgccgagtggctggg

SEQ ID NO: 502538 - DNA, 33 bp, Homo sapien
cacaggttttctgataggtgccgagtggctggg

SEQ ID NO: 502539 - DNA, 33 bp, Homo sapien
tttcctccagtgctaacatcttacaacacaatc

SEQ ID NO: 502540 - DNA, 33 bp, Homo sapien
tttcctccagtgctaatatcttacaacacaatc

SEQ ID NO: 502541 - DNA, 33 bp, Homo sapien
aagttgaaatctcagacaacaatctcaaatcct

SEQ ID NO: 502542 - DNA, 33 bp, Homo sapien
aagttgaaatctcagagaacaatctcaaatcct

SEQ ID NO: 502543 - DNA, 33 bp, Homo sapien
tctgaatgaaaagctccactatttaaactccca

SEQ ID NO: 502544 - DNA, 33 bp, Homo sapien
tctgaatgaaaagctctactatttaaactccca

SEQ ID NO: 502545 - DNA, 33 bp, Homo sapien
gctgagagatgaaatcaaaatccttatcgtctc

SEQ ID NO: 502546 - DNA, 33 bp, Homo sapien
gctgagagatgaaatcgaaatccttatcgtctc

SEQ ID NO: 502547 - DNA, 33 bp, Homo sapien
ggaaaaatggcaagcaaactgaggagcagccaa

SEQ ID NO: 502548 - DNA, 33 bp, Homo sapien
ggaaaaatggcaagcagactgaggagcagccaa

SEQ ID NO: 502549 - DNA, 33 bp, Homo sapien
tcacttgagaagagaccaggttttgcacagagc

SEQ ID NO: 502550 - DNA, 33 bp, Homo sapien
tcacttgagaagagactaggttttgcacagagc

SEQ ID NO: 502551 - DNA, 33 bp, Homo sapien
ttattatttgggtcagcattttatttcctcata

SEQ ID NO: 502552 - DNA, 33 bp, Homo sapien
ttattatttgggtcaggattttatttcctcata

SEQ ID NO: 502553 - DNA, 33 bp, Homo sapien
atgagtaagtgcagtacaatggtaaatgtcttt

SEQ ID NO: 502554 - DNA, 33 bp, Homo sapien
atgagtaagtgcagtataatggtaaatgtcttt

SEQ ID NO: 502555 - DNA, 33 bp, Homo sapien
acattaatgctagaaaccttacattcagaatag

SEQ ID NO: 502556 - DNA, 33 bp, Homo sapien
acattaatgctagaaagcttacattcagaatag

SEQ ID NO: 502557 - DNA, 33 bp, Homo sapien
aggattttgtctgaccaagagaaatccccaagc

SEQ ID NO: 502558 - DNA, 33 bp, Homo sapien
aggattttgtctgaccgagagaaatccccaagc

SEQ ID NO: 502559 - DNA, 33 bp, Homo sapien
tacagtagaaattttacccctgctttcactgta

SEQ ID NO: 502560 - DNA, 33 bp, Homo sapien
tacagtagaaattttatccctgctttcactgta

SEQ ID NO: 502561 - DNA, 33 bp, Homo sapien
ctgcttaaccgggctaccttttccaccacaatt

SEQ ID NO: 502562 - DNA, 33 bp, Homo sapien
ctgcttaaccgggctatcttttccaccacaatt

SEQ ID NO: 502563 - DNA, 33 bp, Homo sapien
tcatccatgactttacagacctgaataagagac

SEQ ID NO: 502564 - DNA, 33 bp, Homo sapien
tcatccatgactttacggacctgaataagagac

SEQ ID NO: 502565 - DNA, 33 bp, Homo sapien
ttgacagttcgacagtgaaatgaacacaaccag

SEQ ID NO: 502566 - DNA, 33 bp, Homo sapien
ttgacagttcgacagttaaatgaacacaaccag

SEQ ID NO: 502567 - DNA, 33 bp, Homo sapien
catgtctgtggagctaaaggagcaaaagaaagt

SEQ ID NO: 502568 - DNA, 33 bp, Homo sapien
catgtctgtggagctacaggagcaaaagaaagt

SEQ ID NO: 502569 - DNA, 33 bp, Homo sapien
acaaatagctccttgcaaatggtagacttacag

SEQ ID NO: 502570 - DNA, 33 bp, Homo sapien
acaaatagctccttgcgaatggtagacttacag

SEQ ID NO: 502571 - DNA, 33 bp, Homo sapien
taatttggtagatgatcaataaatgcttatttt

SEQ ID NO: 502572 - DNA, 33 bp, Homo sapien
taatttggtagatgatgaataaatgcttatttt

SEQ ID NO: 502573 - DNA, 33 bp, Homo sapien
ccttctgactgtaagcaaagtttaattatttca

SEQ ID NO: 502574 - DNA, 33 bp, Homo sapien
ccttctgactgtaagcgaagtttaattatttca

SEQ ID NO: 502575 - DNA, 33 bp, Homo sapien
ctggagtatgcccaataatcacatatattctca

SEQ ID NO: 502576 - DNA, 33 bp, Homo sapien
ctggagtatgcccaatgatcacatatattctca

SEQ ID NO: 502577 - DNA, 33 bp, Homo sapien
ttttgtatttgtaaaacggcatcgatagtgttg

SEQ ID NO: 502578 - DNA, 33 bp, Homo sapien
ttttgtatttgtaaaatggcatcgatagtgttg

SEQ ID NO: 502579 - DNA, 33 bp, Homo sapien
actccataatatgaaaattgaggatatagctcc

SEQ ID NO: 502580 - DNA, 33 bp, Homo sapien
actccataatatgaaagttgaggatatagctcc

SEQ ID NO: 502581 - DNA, 33 bp, Homo sapien
ctggaaacttcacgcaccctacctgagtttgga

SEQ ID NO: 502582 - DNA, 33 bp, Homo sapien
ctggaaacttcacgcatcctacctgagtttgga

SEQ ID NO: 502583 - DNA, 33 bp, Homo sapien
tcctctttcctgctcactacttgtctgtagcta

SEQ ID NO: 502584 - DNA, 33 bp, Homo sapien
tcctctttcctgctcattacttgtctgtagcta

SEQ ID NO: 502585 - DNA, 33 bp, Homo sapien
gagcagtgacattacagtccttacactgtagct

SEQ ID NO: 502586 - DNA, 33 bp, Homo sapien
gagcagtgacattacattccttacactgtagct

SEQ ID NO: 502587 - DNA, 33 bp, Homo sapien
ctccaagagatcaggaacaaaggctcatcctgc

SEQ ID NO: 502588 - DNA, 33 bp, Homo sapien
ctccaagagatcaggaccaaaggctcatcctgc

SEQ ID NO: 502589 - DNA, 33 bp, Homo sapien
gaggtaacacccatcacgtaggtcatgtagagc

SEQ ID NO: 502590 - DNA, 33 bp, Homo sapien
gaggtaacacccatcatgtaggtcatgtagagc

SEQ ID NO: 502591 - DNA, 33 bp, Homo sapien
agtaaatgatagaggccgaacccaaacccaggt

SEQ ID NO: 502592 - DNA, 33 bp, Homo sapien
agtaaatgatagaggctgaacccaaacccaggt

SEQ ID NO: 502593 - DNA, 33 bp, Homo sapien
actccctcacccactaacaccttagctgtccct

SEQ ID NO: 502594 - DNA, 33 bp, Homo sapien
actccctcacccactaccaccttagctgtccct

SEQ ID NO: 502595 - DNA, 33 bp, Homo sapien
aggaacaggatagcgacaaggcctcatacatgg

SEQ ID NO: 502596 - DNA, 33 bp, Homo sapien
aggaacaggatagcgataaggcctcatacatgg

SEQ ID NO: 502597 - DNA, 33 bp, Homo sapien
cattgctattgatctaaggcagggaacggcaga

SEQ ID NO: 502598 - DNA, 33 bp, Homo sapien
cattgctattgatctagggcagggaacggcaga

SEQ ID NO: 502599 - DNA, 33 bp, Homo sapien
tgtggttaatttccccactatcaggattacaat

SEQ ID NO: 502600 - DNA, 33 bp, Homo sapien
tgtggttaatttccccgctatcaggattacaat

SEQ ID NO: 502601 - DNA, 33 bp, Homo sapien
ccctcatgaagagtacaagtcatggataatgta

SEQ ID NO: 502602 - DNA, 33 bp, Homo sapien
ccctcatgaagagtaccagtcatggataatgta

SEQ ID NO: 502603 - DNA, 33 bp, Homo sapien
tgggctacaatgtggaagagcctcgaagacatt

SEQ ID NO: 502604 - DNA, 33 bp, Homo sapien
tgggctacaatgtggatgagcctcgaagacatt

SEQ ID NO: 502605 - DNA, 33 bp, Homo sapien
ggtgatagcagcttaaaacaatagccaatggaa

SEQ ID NO: 502606 - DNA, 33 bp, Homo sapien
ggtgatagcagcttaagacaatagccaatggaa

SEQ ID NO: 502607 - DNA, 33 bp, Homo sapien
tgtcacccatgtttccccctcaatctctctacc

SEQ ID NO: 502608 - DNA, 33 bp, Homo sapien
tgtcacccatgtttcctcctcaatctctctacc

SEQ ID NO: 502609 - DNA, 33 bp, Homo sapien
agagcattatgacctacgaactgcaggccaacc

SEQ ID NO: 502610 - DNA, 33 bp, Homo sapien
agagcattatgacctaggaactgcaggccaacc

SEQ ID NO: 502611 - DNA, 33 bp, Homo sapien
attacatatcagtttaaaaataggtgacagcca

SEQ ID NO: 502612 - DNA, 33 bp, Homo sapien
attacatatcagtttagaaataggtgacagcca

SEQ ID NO: 502613 - DNA, 33 bp, Homo sapien
ctctatctggggaaaaatagacaaattccttcc

SEQ ID NO: 502614 - DNA, 33 bp, Homo sapien
ctctatctggggaaaagtagacaaattccttcc

SEQ ID NO: 502615 - DNA, 33 bp, Homo sapien
tcttccttttcatcaccctttgcttcctagatt

SEQ ID NO: 502616 - DNA, 33 bp, Homo sapien
tcttccttttcatcactctttgcttcctagatt

SEQ ID NO: 502617 - DNA, 33 bp, Homo sapien
aatcacaaatactaaacctgaggctctgttctc

SEQ ID NO: 502618 - DNA, 33 bp, Homo sapien
aatcacaaatactaaatctgaggctctgttctc

SEQ ID NO: 502619 - DNA, 33 bp, Homo sapien
agaattgttcttcagcactctcatccagctaat

SEQ ID NO: 502620 - DNA, 33 bp, Homo sapien
agaattgttcttcagcgctctcatccagctaat

SEQ ID NO: 502621 - DNA, 33 bp, Homo sapien
gagcccaggcaagtcaataaggaagactttgat

SEQ ID NO: 502622 - DNA, 33 bp, Homo sapien
gagcccaggcaagtcagtaaggaagactttgat

SEQ ID NO: 502623 - DNA, 33 bp, Homo sapien
aatgaaccctaatgctaacactgggctttgggt

SEQ ID NO: 502624 - DNA, 33 bp, Homo sapien
aatgaaccctaatgcttacactgggctttgggt

SEQ ID NO: 502625 - DNA, 33 bp, Homo sapien
acctggtttgctgagacagtcgcggatgacacc

SEQ ID NO: 502626 - DNA, 33 bp, Homo sapien
acctggtttgctgagatagtcgcggatgacacc

SEQ ID NO: 502627 - DNA, 33 bp, Homo sapien
tgaggcacagttacacaatgttaattaccgata

SEQ ID NO: 502628 - DNA, 33 bp, Homo sapien
tgaggcacagttacacgatgttaattaccgata

SEQ ID NO: 502629 - DNA, 33 bp, Homo sapien
ctcaaagggactgatacggtctgagtggccaca

SEQ ID NO: 502630 - DNA, 33 bp, Homo sapien
ctcaaagggactgatatggtctgagtggccaca

SEQ ID NO: 502631 - DNA, 33 bp, Homo sapien
acagcaggtcagagaacggattaagagtctggg

SEQ ID NO: 502632 - DNA, 33 bp, Homo sapien
acagcaggtcagagaatggattaagagtctggg

SEQ ID NO: 502633 - DNA, 33 bp, Homo sapien
aaacaaccgaaatacaagaggtggcacaggctt

SEQ ID NO: 502634 - DNA, 33 bp, Homo sapien
aaacaaccgaaatacaggaggtggcacaggctt

SEQ ID NO: 502635 - DNA, 33 bp, Homo sapien
aggtgctgtccactgccgacaaagccaacactc

SEQ ID NO: 502636 - DNA, 33 bp, Homo sapien
aggtgctgtccactgctgacaaagccaacactc

SEQ ID NO: 502637 - DNA, 33 bp, Homo sapien
cttggagatgatggtacgaaagcttcttcttgc

SEQ ID NO: 502638 - DNA, 33 bp, Homo sapien
cttggagatgatggtatgaaagcttcttcttgc

SEQ ID NO: 502639 - DNA, 33 bp, Homo sapien
ggttgtcaaatctgggaaaacctctgatgaagt

SEQ ID NO: 502640 - DNA, 33 bp, Homo sapien
ggttgtcaaatctgggtaaacctctgatgaagt

SEQ ID NO: 502641 - DNA, 33 bp, Homo sapien
ctgtgcccgtggtatcaaaatgtacccacgttt

SEQ ID NO: 502642 - DNA, 33 bp, Homo sapien
ctgtgcccgtggtatcgaaatgtacccacgttt

SEQ ID NO: 502643 - DNA, 33 bp, Homo sapien
atgacagccgccaaaaagtttaaatgttgcttt

SEQ ID NO: 502644 - DNA, 33 bp, Homo sapien
atgacagccgccaaaaggtttaaatgttgcttt

SEQ ID NO: 502645 - DNA, 33 bp, Homo sapien
ccaattagaaatccaacgcttatacactaaaaa

SEQ ID NO: 502646 - DNA, 33 bp, Homo sapien
ccaattagaaatccaatgcttatacactaaaaa

SEQ ID NO: 502647 - DNA, 33 bp, Homo sapien
taaacctggaaaaaaaaaagtgtgcctcatggt

SEQ ID NO: 502648 - DNA, 33 bp, Homo sapien
taaacctggaaaaaaacaagtgtgcctcatggt

SEQ ID NO: 502649 - DNA, 33 bp, Homo sapien
actgtttcaaccaaacacggcaaatgctgggac

SEQ ID NO: 502650 - DNA, 33 bp, Homo sapien
actgtttcaaccaaacgcggcaaatgctgggac

SEQ ID NO: 502651 - DNA, 33 bp, Homo sapien
gccctagcgatgtccacgggctacctctcctga

SEQ ID NO: 502652 - DNA, 33 bp, Homo sapien
gccctagcgatgtccatgggctacctctcctga

SEQ ID NO: 502653 - DNA, 33 bp, Homo sapien
agaacacaggctaaccaaaactacgcttaggct

SEQ ID NO: 502654 - DNA, 33 bp, Homo sapien
agaacacaggctaaccgaaactacgcttaggct

SEQ ID NO: 502655 - DNA, 33 bp, Homo sapien
taagaatattgagaacaagtttatgatcggctt

SEQ ID NO: 502656 - DNA, 33 bp, Homo sapien
taagaatattgagaacgagtttatgatcggctt

SEQ ID NO: 502657 - DNA, 33 bp, Homo sapien
aaatgtgcaggatgccaataagagctgggaggg

SEQ ID NO: 502658 - DNA, 33 bp, Homo sapien
aaatgtgcaggatgccgataagagctgggaggg

SEQ ID NO: 502659 - DNA, 33 bp, Homo sapien
gaatcttcagggcgccgccagtttcaccatgct

SEQ ID NO: 502660 - DNA, 33 bp, Homo sapien
gaatcttcagggcgcctccagtttcaccatgct

SEQ ID NO: 502661 - DNA, 33 bp, Homo sapien
ccaggaggaggcgttcacctggatgaaggatga

SEQ ID NO: 502662 - DNA, 33 bp, Homo sapien
ccaggaggaggcgttcgcctggatgaaggatga

SEQ ID NO: 502663 - DNA, 33 bp, Homo sapien
agaaagaatgtaagaacgattacttatgttttg

SEQ ID NO: 502664 - DNA, 33 bp, Homo sapien
agaaagaatgtaagaatgattacttatgttttg

SEQ ID NO: 502665 - DNA, 33 bp, Homo sapien
aagctagaaaaaaacacaatgttgggaagattg

SEQ ID NO: 502666 - DNA, 33 bp, Homo sapien
aagctagaaaaaaacataatgttgggaagattg

SEQ ID NO: 502667 - DNA, 33 bp, Homo sapien
gcttgggatggctccacgtatttccaacacacc

SEQ ID NO: 502668 - DNA, 33 bp, Homo sapien
gcttgggatggctccatgtatttccaacacacc

SEQ ID NO: 502669 - DNA, 33 bp, Homo sapien
gtttgggctcctttgaagtgagagatctgaatg

SEQ ID NO: 502670 - DNA, 33 bp, Homo sapien
gtttgggctcctttgaggtgagagatctgaatg

SEQ ID NO: 502671 - DNA, 33 bp, Homo sapien
gatttcctcttctggacgtgttctaatgtaccc

SEQ ID NO: 502672 - DNA, 33 bp, Homo sapien
gatttcctcttctggatgtgttctaatgtaccc

SEQ ID NO: 502673 - DNA, 33 bp, Homo sapien
gcactatgctggtgaacctttgctgaaaattac

SEQ ID NO: 502674 - DNA, 33 bp, Homo sapien
gcactatgctggtgaagctttgctgaaaattac

SEQ ID NO: 502675 - DNA, 33 bp, Homo sapien
tttaaattcaagaataagagaaaatgctgtcac

SEQ ID NO: 502676 - DNA, 33 bp, Homo sapien
tttaaattcaagaataggagaaaatgctgtcac

SEQ ID NO: 502677 - DNA, 33 bp, Homo sapien
caacactaaacttgtcaataccctgctccctga

SEQ ID NO: 502678 - DNA, 33 bp, Homo sapien
caacactaaacttgtcgataccctgctccctga

SEQ ID NO: 502679 - DNA, 33 bp, Homo sapien
atgaggaagtaaagaccaaaaattagcttcaat

SEQ ID NO: 502680 - DNA, 33 bp, Homo sapien
atgaggaagtaaagacgaaaaattagcttcaat

SEQ ID NO: 502681 - DNA, 33 bp, Homo sapien
cgagttctgaatagtacacaggtaggaagaact

SEQ ID NO: 502682 - DNA, 33 bp, Homo sapien
cgagttctgaatagtatacaggtaggaagaact

SEQ ID NO: 502683 - DNA, 33 bp, Homo sapien
ataaaatttgaatacagcagtatcctaaaactg

SEQ ID NO: 502684 - DNA, 33 bp, Homo sapien
ataaaatttgaatacatcagtatcctaaaactg

SEQ ID NO: 502685 - DNA, 33 bp, Homo sapien
tttccttatcaaactacgccgtcacctcagctt

SEQ ID NO: 502686 - DNA, 33 bp, Homo sapien
tttccttatcaaactatgccgtcacctcagctt

SEQ ID NO: 502687 - DNA, 33 bp, Homo sapien
agtcatcctttgcccccacacaaatgcatacac

SEQ ID NO: 502688 - DNA, 33 bp, Homo sapien
agtcatcctttgcccctacacaaatgcatacac

SEQ ID NO: 502689 - DNA, 33 bp, Homo sapien
gtgacctcaattatgaatagattagcaaaaata

SEQ ID NO: 502690 - DNA, 33 bp, Homo sapien
gtgacctcaattatgagtagattagcaaaaata

SEQ ID NO: 502691 - DNA, 33 bp, Homo sapien
gtctaataatactgaactggatgctggaaattg

SEQ ID NO: 502692 - DNA, 33 bp, Homo sapien
gtctaataatactgaattggatgctggaaattg

SEQ ID NO: 502693 - DNA, 33 bp, Homo sapien
aattttgcttaatacgcagatctttcttttgcc

SEQ ID NO: 502694 - DNA, 33 bp, Homo sapien
aattttgcttaatacgtagatctttcttttgcc

SEQ ID NO: 502695 - DNA, 33 bp, Homo sapien
acctgcaggctaagccaaatgaatattcagtga

SEQ ID NO: 502696 - DNA, 33 bp, Homo sapien
acctgcaggctaagccgaatgaatattcagtga

SEQ ID NO: 502697 - DNA, 33 bp, Homo sapien
gaaattgctaatagaaaaaatctcggagcatca

SEQ ID NO: 502698 - DNA, 33 bp, Homo sapien
gaaattgctaatagaagaaatctcggagcatca

SEQ ID NO: 502699 - DNA, 33 bp, Homo sapien
tactgagagagggggacggtagtggagacaaca

SEQ ID NO: 502700 - DNA, 33 bp, Homo sapien
tactgagagagggggatggtagtggagacaaca

SEQ ID NO: 502701 - DNA, 33 bp, Homo sapien
ggcattaccccccgaccgaggcctcgtatgata

SEQ ID NO: 502702 - DNA, 33 bp, Homo sapien
ggcattaccccccgactgaggcctcgtatgata

SEQ ID NO: 502703 - DNA, 33 bp, Homo sapien
tgctgagtgtgctgcaagtttggttagtttccc

SEQ ID NO: 502704 - DNA, 33 bp, Homo sapien
tgctgagtgtgctgcaggtttggttagtttccc

SEQ ID NO: 502705 - DNA, 33 bp, Homo sapien
agaagtggtaagatacaacattccttccttgtt

SEQ ID NO: 502706 - DNA, 33 bp, Homo sapien
agaagtggtaagatacgacattccttccttgtt

SEQ ID NO: 502707 - DNA, 33 bp, Homo sapien
tgccttcaattgatgaacctttttcttttcctg

SEQ ID NO: 502708 - DNA, 33 bp, Homo sapien
tgccttcaattgatgaccctttttcttttcctg

SEQ ID NO: 502709 - DNA, 33 bp, Homo sapien
gctcacccaacacatcaagattctcaactaaat

SEQ ID NO: 502710 - DNA, 33 bp, Homo sapien
gctcacccaacacatcgagattctcaactaaat

SEQ ID NO: 502711 - DNA, 33 bp, Homo sapien
tcatatgccaagacagaaaaagaaccgcaatga

SEQ ID NO: 502712 - DNA, 33 bp, Homo sapien
tcatatgccaagacagcaaaagaaccgcaatga

SEQ ID NO: 502713 - DNA, 33 bp, Homo sapien
cctcattttcacaatcaaacttacctaccatta

SEQ ID NO: 502714 - DNA, 33 bp, Homo sapien
cctcattttcacaatcgaacttacctaccatta

SEQ ID NO: 502715 - DNA, 33 bp, Homo sapien
gtgatcgtgatgttaactgtggtggcccgtgtt

SEQ ID NO: 502716 - DNA, 33 bp, Homo sapien
gtgatcgtgatgttaattgtggtggcccgtgtt

SEQ ID NO: 502717 - DNA, 33 bp, Homo sapien
tctagactctggtctacaagtctacagcttttg

SEQ ID NO: 502718 - DNA, 33 bp, Homo sapien
tctagactctggtctagaagtctacagcttttg

SEQ ID NO: 502719 - DNA, 33 bp, Homo sapien
attttaccttttataactatgcagttctatgtt

SEQ ID NO: 502720 - DNA, 33 bp, Homo sapien
attttaccttttataagtatgcagttctatgtt

SEQ ID NO: 502721 - DNA, 33 bp, Homo sapien
tgtagaactggccttaactgtctttcctgggct

SEQ ID NO: 502722 - DNA, 33 bp, Homo sapien
tgtagaactggccttagctgtctttcctgggct

SEQ ID NO: 502723 - DNA, 33 bp, Homo sapien
aagtggccgggaacccaaaacctgtaaatagtt

SEQ ID NO: 502724 - DNA, 33 bp, Homo sapien
aagtggccgggaacccgaaacctgtaaatagtt

SEQ ID NO: 502725 - DNA, 33 bp, Homo sapien
aagtcagaactgatgcaccgggatccacagcag

SEQ ID NO: 502726 - DNA, 33 bp, Homo sapien
aagtcagaactgatgcgccgggatccacagcag

SEQ ID NO: 502727 - DNA, 33 bp, Homo sapien
gggggctgctgaaatcacagagacttttgcagc

SEQ ID NO: 502728 - DNA, 33 bp, Homo sapien
gggggctgctgaaatcgcagagacttttgcagc

SEQ ID NO: 502729 - DNA, 33 bp, Homo sapien
gcatcacacagcgttaagagccgtttccttcag

SEQ ID NO: 502730 - DNA, 33 bp, Homo sapien
gcatcacacagcgttaggagccgtttccttcag

SEQ ID NO: 502731 - DNA, 33 bp, Homo sapien
gatggctgtaaactagacgtggggagcactgct

SEQ ID NO: 502732 - DNA, 33 bp, Homo sapien
gatggctgtaaactaggcgtggggagcactgct

SEQ ID NO: 502733 - DNA, 33 bp, Homo sapien
tgaaaacattcagcacaaaacttgatacatcaa

SEQ ID NO: 502734 - DNA, 33 bp, Homo sapien
tgaaaacattcagcacgaaacttgatacatcaa

SEQ ID NO: 502735 - DNA, 33 bp, Homo sapien
tgagacccaatttggcactctttatccgtcctc

SEQ ID NO: 502736 - DNA, 33 bp, Homo sapien
tgagacccaatttggcgctctttatccgtcctc

SEQ ID NO: 502737 - DNA, 33 bp, Homo sapien
gtggccttatgccttgcagcagggcgcctctca

SEQ ID NO: 502738 - DNA, 33 bp, Homo sapien
gtggccttatgccttgtagcagggcgcctctca

SEQ ID NO: 502739 - DNA, 33 bp, Homo sapien
aaggaatgaacactgacgcttctcgcctccgcc

SEQ ID NO: 502740 - DNA, 33 bp, Homo sapien
aaggaatgaacactgatgcttctcgcctccgcc

SEQ ID NO: 502741 - DNA, 33 bp, Homo sapien
aaagcaagtgacgaaaactcggcgatggtctaa

SEQ ID NO: 502742 - DNA, 33 bp, Homo sapien
aaagcaagtgacgaaacctcggcgatggtctaa

SEQ ID NO: 502743 - DNA, 33 bp, Homo sapien
cagagcatccatttcagcagatggaccagaaac

SEQ ID NO: 502744 - DNA, 33 bp, Homo sapien
cagagcatccatttcatcagatggaccagaaac

SEQ ID NO: 502745 - DNA, 33 bp, Homo sapien
catcatgtctattcaacattctgctttcatcag

SEQ ID NO: 502746 - DNA, 33 bp, Homo sapien
catcatgtctattcaagattctgctttcatcag

SEQ ID NO: 502747 - DNA, 33 bp, Homo sapien
tatttgtcaagaagaggagatgaagtactgact

SEQ ID NO: 502748 - DNA, 33 bp, Homo sapien
tatttgtcaagaagagtagatgaagtactgact

SEQ ID NO: 502749 - DNA, 33 bp, Homo sapien
cttgttggcctcttacaactgatagcaaagaaa

SEQ ID NO: 502750 - DNA, 33 bp, Homo sapien
cttgttggcctcttacgactgatagcaaagaaa

SEQ ID NO: 502751 - DNA, 33 bp, Homo sapien
gtatgccaggtactgcacaaggttctagagagc

SEQ ID NO: 502752 - DNA, 33 bp, Homo sapien
gtatgccaggtactgcgcaaggttctagagagc

SEQ ID NO: 502753 - DNA, 33 bp, Homo sapien
tttttcacaattttagacacattacaagaaaat

SEQ ID NO: 502754 - DNA, 33 bp, Homo sapien
tttttcacaattttagtcacattacaagaaaat

SEQ ID NO: 502755 - DNA, 33 bp, Homo sapien
gaaacagggtactatcaaaacatatggtcaaat

SEQ ID NO: 502756 - DNA, 33 bp, Homo sapien
gaaacagggtactatccaaacatatggtcaaat

SEQ ID NO: 502757 - DNA, 33 bp, Homo sapien
gggacacttaccactaccttgacatcatatttg

SEQ ID NO: 502758 - DNA, 33 bp, Homo sapien
gggacacttaccactatcttgacatcatatttg

SEQ ID NO: 502759 - DNA, 33 bp, Homo sapien
ttttccagaatgcactcaggcatacatattact

SEQ ID NO: 502760 - DNA, 33 bp, Homo sapien
ttttccagaatgcactgaggcatacatattact

SEQ ID NO: 502761 - DNA, 33 bp, Homo sapien
gtcataaaatgaaaagaccaggatgcccacaga

SEQ ID NO: 502762 - DNA, 33 bp, Homo sapien
gtcataaaatgaaaaggccaggatgcccacaga

SEQ ID NO: 502763 - DNA, 33 bp, Homo sapien
gcttgggccacctccacgagtcgtttgtgacga

SEQ ID NO: 502764 - DNA, 33 bp, Homo sapien
gcttgggccacctccatgagtcgtttgtgacga

SEQ ID NO: 502765 - DNA, 33 bp, Homo sapien
tgaagtcaaaggactaaaggacctcttctttct

SEQ ID NO: 502766 - DNA, 33 bp, Homo sapien
tgaagtcaaaggactagaggacctcttctttct

SEQ ID NO: 502767 - DNA, 33 bp, Homo sapien
tgtgttgctctggtaacattccatttgagatct

SEQ ID NO: 502768 - DNA, 33 bp, Homo sapien
tgtgttgctctggtaatattccatttgagatct

SEQ ID NO: 502769 - DNA, 33 bp, Homo sapien
taatagaagagttttacgatggatcttaacttc

SEQ ID NO: 502770 - DNA, 33 bp, Homo sapien
taatagaagagttttatgatggatcttaacttc

SEQ ID NO: 502771 - DNA, 33 bp, Homo sapien
gaccctgaaataacagacactttcaattgctgg

SEQ ID NO: 502772 - DNA, 33 bp, Homo sapien
gaccctgaaataacaggcactttcaattgctgg

SEQ ID NO: 502773 - DNA, 33 bp, Homo sapien
atctctgctttcaaacaccgatgtcttcatgac

SEQ ID NO: 502774 - DNA, 33 bp, Homo sapien
atctctgctttcaaactccgatgtcttcatgac

SEQ ID NO: 502775 - DNA, 33 bp, Homo sapien
caggttttcaggttgcagattgtagagacagtg

SEQ ID NO: 502776 - DNA, 33 bp, Homo sapien
caggttttcaggttgcggattgtagagacagtg

SEQ ID NO: 502777 - DNA, 33 bp, Homo sapien
cacttctgcattgtaacgacaaagccagtcaca

SEQ ID NO: 502778 - DNA, 33 bp, Homo sapien
cacttctgcattgtaatgacaaagccagtcaca

SEQ ID NO: 502779 - DNA, 33 bp, Homo sapien
tctgatgtaaaggagaaagtagtctggaaatag

SEQ ID NO: 502780 - DNA, 33 bp, Homo sapien
tctgatgtaaaggagagagtagtctggaaatag

SEQ ID NO: 502781 - DNA, 33 bp, Homo sapien
atgagagggaactgggaacgaagatgtttcatt

SEQ ID NO: 502782 - DNA, 33 bp, Homo sapien
atgagagggaactggggacgaagatgtttcatt

SEQ ID NO: 502783 - DNA, 33 bp, Homo sapien
ttcatatagtgtgttacaaccaagttgggggaa

SEQ ID NO: 502784 - DNA, 33 bp, Homo sapien
ttcatatagtgtgttataaccaagttgggggaa

SEQ ID NO: 502785 - DNA, 33 bp, Homo sapien
agcatccagaacgtggcaaatgacagcacttaa

SEQ ID NO: 502786 - DNA, 33 bp, Homo sapien
agcatccagaacgtggtaaatgacagcacttaa

SEQ ID NO: 502787 - DNA, 33 bp, Homo sapien
aaaaactgaatactagaatacactctgcggcaa

SEQ ID NO: 502788 - DNA, 33 bp, Homo sapien
aaaaactgaatactaggatacactctgcggcaa

SEQ ID NO: 502789 - DNA, 33 bp, Homo sapien
gttcattgcctgtgaaactggtgtaagaatgga

SEQ ID NO: 502790 - DNA, 33 bp, Homo sapien
gttcattgcctgtgaatctggtgtaagaatgga

SEQ ID NO: 502791 - DNA, 33 bp, Homo sapien
gtctggtgcaaaagaggaggtggagagcatggc

SEQ ID NO: 502792 - DNA, 33 bp, Homo sapien
gtctggtgcaaaagagtaggtggagagcatggc

SEQ ID NO: 502793 - DNA, 33 bp, Homo sapien
atcactgcaagacaaccgcaaggtcatgatgtg

SEQ ID NO: 502794 - DNA, 33 bp, Homo sapien
atcactgcaagacaactgcaaggtcatgatgtg

SEQ ID NO: 502795 - DNA, 33 bp, Homo sapien
ggagtgatgctgccacaagttgagaggagcagc

SEQ ID NO: 502796 - DNA, 33 bp, Homo sapien
ggagtgatgctgccacgagttgagaggagcagc

SEQ ID NO: 502797 - DNA, 33 bp, Homo sapien
aataaatggaaataagaaaagtgatcactaaag

SEQ ID NO: 502798 - DNA, 33 bp, Homo sapien
aataaatggaaataaggaaagtgatcactaaag

SEQ ID NO: 502799 - DNA, 33 bp, Homo sapien
gcccagaaaggaaagccgagtctttggggctgg

SEQ ID NO: 502800 - DNA, 33 bp, Homo sapien
gcccagaaaggaaagctgagtctttggggctgg

SEQ ID NO: 502801 - DNA, 33 bp, Homo sapien
tgttctactcagggacaatcttctacctgtagt

SEQ ID NO: 502802 - DNA, 33 bp, Homo sapien
tgttctactcagggaccatcttctacctgtagt

SEQ ID NO: 502803 - DNA, 33 bp, Homo sapien
cacacacactaatgccacatcacagatattttg

SEQ ID NO: 502804 - DNA, 33 bp, Homo sapien
cacacacactaatgccgcatcacagatattttg

SEQ ID NO: 502805 - DNA, 33 bp, Homo sapien
gccctgctctcctgaacggcttaaagaatagag

SEQ ID NO: 502806 - DNA, 33 bp, Homo sapien
gccctgctctcctgaatggcttaaagaatagag

SEQ ID NO: 502807 - DNA, 33 bp, Homo sapien
gagggtctaaaggagacgggttcatggcccagt

SEQ ID NO: 502808 - DNA, 33 bp, Homo sapien
gagggtctaaaggagatgggttcatggcccagt

SEQ ID NO: 502809 - DNA, 33 bp, Homo sapien
tgtaaatgagtcactcacatactcaggatcaag

SEQ ID NO: 502810 - DNA, 33 bp, Homo sapien
tgtaaatgagtcactcgcatactcaggatcaag

SEQ ID NO: 502811 - DNA, 33 bp, Homo sapien
ggacccacacgaggtcgatttccctgaacgttc

SEQ ID NO: 502812 - DNA, 33 bp, Homo sapien
ggacccacacgaggtctatttccctgaacgttc

SEQ ID NO: 502813 - DNA, 33 bp, Homo sapien
tcagctctgttctaaagactaaattttcaagga

SEQ ID NO: 502814 - DNA, 33 bp, Homo sapien
tcagctctgttctaaatactaaattttcaagga

SEQ ID NO: 502815 - DNA, 33 bp, Homo sapien
aagttagaaatactgaagaggatctgagttaga

SEQ ID NO: 502816 - DNA, 33 bp, Homo sapien
aagttagaaatactgaggaggatctgagttaga

SEQ ID NO: 502817 - DNA, 33 bp, Homo sapien
ggaattgagggtaaagaaataggtgccacccag

SEQ ID NO: 502818 - DNA, 33 bp, Homo sapien
ggaattgagggtaaaggaataggtgccacccag

SEQ ID NO: 502819 - DNA, 33 bp, Homo sapien
cctgcccaaatttaataacaaatcataatccca

SEQ ID NO: 502820 - DNA, 33 bp, Homo sapien
cctgcccaaatttaatgacaaatcataatccca

SEQ ID NO: 502821 - DNA, 33 bp, Homo sapien
atatatactgtaaacaactaccgagagacactt

SEQ ID NO: 502822 - DNA, 33 bp, Homo sapien
atatatactgtaaacacctaccgagagacactt

SEQ ID NO: 502823 - DNA, 33 bp, Homo sapien
agtaatgctaagagaaaattaacacactaagtg

SEQ ID NO: 502824 - DNA, 33 bp, Homo sapien
agtaatgctaagagaagattaacacactaagtg

SEQ ID NO: 502825 - DNA, 33 bp, Homo sapien
gcagtctctttcaccaactgagccatgatggca

SEQ ID NO: 502826 - DNA, 33 bp, Homo sapien
gcagtctctttcaccagctgagccatgatggca

SEQ ID NO: 502827 - DNA, 33 bp, Homo sapien
gctcagtgttatataactgctaaagctaatgac

SEQ ID NO: 502828 - DNA, 33 bp, Homo sapien
gctcagtgttatataattgctaaagctaatgac

SEQ ID NO: 502829 - DNA, 33 bp, Homo sapien
attagttgggcaagaaattaaaccagactgaac

SEQ ID NO: 502830 - DNA, 33 bp, Homo sapien
attagttgggcaagaatttaaaccagactgaac

SEQ ID NO: 502831 - DNA, 33 bp, Homo sapien
gtgggctagcagaagacgtgtatgaaccaaatc

SEQ ID NO: 502832 - DNA, 33 bp, Homo sapien
gtgggctagcagaagatgtgtatgaaccaaatc

SEQ ID NO: 502833 - DNA, 33 bp, Homo sapien
tgtctgacatgttaaactgacacagctgacaga

SEQ ID NO: 502834 - DNA, 33 bp, Homo sapien
tgtctgacatgttaaattgacacagctgacaga

SEQ ID NO: 502835 - DNA, 33 bp, Homo sapien
atgccctccatcctaaactgaaatgaagtctat

SEQ ID NO: 502836 - DNA, 33 bp, Homo sapien
atgccctccatcctaatctgaaatgaagtctat

SEQ ID NO: 502837 - DNA, 33 bp, Homo sapien
cacaagtaaatcttggaaagatggttgtctaaa

SEQ ID NO: 502838 - DNA, 33 bp, Homo sapien
cacaagtaaatcttgggaagatggttgtctaaa

SEQ ID NO: 502839 - DNA, 33 bp, Homo sapien
aagccctcaaaaactacgaatgtcctggggctc

SEQ ID NO: 502840 - DNA, 33 bp, Homo sapien
aagccctcaaaaactaggaatgtcctggggctc

SEQ ID NO: 502841 - DNA, 33 bp, Homo sapien
ctgagccatagacttaagggacttcagatatgt

SEQ ID NO: 502842 - DNA, 33 bp, Homo sapien
ctgagccatagacttaggggacttcagatatgt

SEQ ID NO: 502843 - DNA, 33 bp, Homo sapien
ccaattcagacagtacaactgcctttgagaaaa

SEQ ID NO: 502844 - DNA, 33 bp, Homo sapien
ccaattcagacagtacgactgcctttgagaaaa

SEQ ID NO: 502845 - DNA, 33 bp, Homo sapien
aaatgttgtcagtcaagaaattgggattacagg

SEQ ID NO: 502846 - DNA, 33 bp, Homo sapien
aaatgttgtcagtcaataaattgggattacagg

SEQ ID NO: 502847 - DNA, 33 bp, Homo sapien
gatgtgtttgtcaccaatggacactcactaaag

SEQ ID NO: 502848 - DNA, 33 bp, Homo sapien
gatgtgtttgtcaccagtggacactcactaaag

SEQ ID NO: 502849 - DNA, 33 bp, Homo sapien
ttcatcaatagatgaacgtataaacacactgtg

SEQ ID NO: 502850 - DNA, 33 bp, Homo sapien
ttcatcaatagatgaatgtataaacacactgtg

SEQ ID NO: 502851 - DNA, 33 bp, Homo sapien
tgtgtggtttgatagcacatttccttttgaagc

SEQ ID NO: 502852 - DNA, 33 bp, Homo sapien
tgtgtggtttgatagcgcatttccttttgaagc

SEQ ID NO: 502853 - DNA, 33 bp, Homo sapien
gattacaattgaacatcatgggatctgggcagg

SEQ ID NO: 502854 - DNA, 33 bp, Homo sapien
gattacaattgaacattatgggatctgggcagg

SEQ ID NO: 502855 - DNA, 33 bp, Homo sapien
ggtaaatttttcctgaactttctattttgtatt

SEQ ID NO: 502856 - DNA, 33 bp, Homo sapien
ggtaaatttttcctgatctttctattttgtatt

SEQ ID NO: 502857 - DNA, 33 bp, Homo sapien
agatgaagttgatgacagtagcaatcagctctt

SEQ ID NO: 502858 - DNA, 33 bp, Homo sapien
agatgaagttgatgacggtagcaatcagctctt

SEQ ID NO: 502859 - DNA, 33 bp, Homo sapien
tgaccatgggcccaagaagatctggctacctcc

SEQ ID NO: 502860 - DNA, 33 bp, Homo sapien
tgaccatgggcccaaggagatctggctacctcc

SEQ ID NO: 502861 - DNA, 33 bp, Homo sapien
agctccctgtcttctcagaataaaacccagtgg

SEQ ID NO: 502862 - DNA, 33 bp, Homo sapien
agctccctgtcttctccgaataaaacccagtgg

SEQ ID NO: 502863 - DNA, 33 bp, Homo sapien
ttttgttgccgccatccgaaacaccagcaaatc

SEQ ID NO: 502864 - DNA, 33 bp, Homo sapien
ttttgttgccgccatctgaaacaccagcaaatc

SEQ ID NO: 502865 - DNA, 33 bp, Homo sapien
gcagacacctttggcacggaacaagagaagagt

SEQ ID NO: 502866 - DNA, 33 bp, Homo sapien
gcagacacctttggcatggaacaagagaagagt

SEQ ID NO: 502867 - DNA, 33 bp, Homo sapien
tgcacaattgcatggaacttgcttattgctcac

SEQ ID NO: 502868 - DNA, 33 bp, Homo sapien
tgcacaattgcatggagcttgcttattgctcac

SEQ ID NO: 502869 - DNA, 33 bp, Homo sapien
ggtgcctgttctcaggcatctgacaatggcaca

SEQ ID NO: 502870 - DNA, 33 bp, Homo sapien
ggtgcctgttctcaggtatctgacaatggcaca

SEQ ID NO: 502871 - DNA, 33 bp, Homo sapien
catacttactgtgttcacagattggaaaactca

SEQ ID NO: 502872 - DNA, 33 bp, Homo sapien
catacttactgtgttctcagattggaaaactca

SEQ ID NO: 502873 - DNA, 33 bp, Homo sapien
ggcaaaggagggaagacgagctggaacatttgc

SEQ ID NO: 502874 - DNA, 33 bp, Homo sapien
ggcaaaggagggaagaggagctggaacatttgc

SEQ ID NO: 502875 - DNA, 33 bp, Homo sapien
tggacagtggatagacagcatggccagtgccta

SEQ ID NO: 502876 - DNA, 33 bp, Homo sapien
tggacagtggatagaccgcatggccagtgccta

SEQ ID NO: 502877 - DNA, 33 bp, Homo sapien
aactgcttcttcctgacgtccaactgtagtctc

SEQ ID NO: 502878 - DNA, 33 bp, Homo sapien
aactgcttcttcctgatgtccaactgtagtctc

SEQ ID NO: 502879 - DNA, 33 bp, Homo sapien
tcaacatcatttgccagtagaaaaataccaatt

SEQ ID NO: 502880 - DNA, 33 bp, Homo sapien
tcaacatcatttgccattagaaaaataccaatt

SEQ ID NO: 502881 - DNA, 33 bp, Homo sapien
gccacccattaaccaccggaccttggacaagtt

SEQ ID NO: 502882 - DNA, 33 bp, Homo sapien
gccacccattaaccactggaccttggacaagtt

SEQ ID NO: 502883 - DNA, 33 bp, Homo sapien
aagtgtcctaatcgccactgaattgatcaaggc

SEQ ID NO: 502884 - DNA, 33 bp, Homo sapien
aagtgtcctaatcgccgctgaattgatcaaggc

SEQ ID NO: 502885 - DNA, 33 bp, Homo sapien
gtaaaatgagccaccacagggctttctagggaa

SEQ ID NO: 502886 - DNA, 33 bp, Homo sapien
gtaaaatgagccaccagagggctttctagggaa

SEQ ID NO: 502887 - DNA, 33 bp, Homo sapien
tcatgactgtgctgaaagggaagaaaagtgttc

SEQ ID NO: 502888 - DNA, 33 bp, Homo sapien
tcatgactgtgctgaatgggaagaaaagtgttc

SEQ ID NO: 502889 - DNA, 33 bp, Homo sapien
cgcatggtcagttagacataaaatgtgttttaa

SEQ ID NO: 502890 - DNA, 33 bp, Homo sapien
cgcatggtcagttagagataaaatgtgttttaa

SEQ ID NO: 502891 - DNA, 33 bp, Homo sapien
gtgatgagctgcttcccccacgatttcactcaa

SEQ ID NO: 502892 - DNA, 33 bp, Homo sapien
gtgatgagctgcttcctccacgatttcactcaa

SEQ ID NO: 502893 - DNA, 33 bp, Homo sapien
agctccagaaacaaccactcaaccacatccaat

SEQ ID NO: 502894 - DNA, 33 bp, Homo sapien
agctccagaaacaaccgctcaaccacatccaat

SEQ ID NO: 502895 - DNA, 33 bp, Homo sapien
ggcagatgctaagacaagaaataggtgtctctc

SEQ ID NO: 502896 - DNA, 33 bp, Homo sapien
ggcagatgctaagacaggaaataggtgtctctc

SEQ ID NO: 502897 - DNA, 33 bp, Homo sapien
gacgacaagaggcaaccctaactagaggcagag

SEQ ID NO: 502898 - DNA, 33 bp, Homo sapien
gacgacaagaggcaactctaactagaggcagag

SEQ ID NO: 502899 - DNA, 33 bp, Homo sapien
gaaaaggaaaatgatcaagacaaacagaggatt

SEQ ID NO: 502900 - DNA, 33 bp, Homo sapien
gaaaaggaaaatgatcgagacaaacagaggatt

SEQ ID NO: 502901 - DNA, 33 bp, Homo sapien
ggaggcttgacctgcagagagtctgagtgaagt

SEQ ID NO: 502902 - DNA, 33 bp, Homo sapien
ggaggcttgacctgcatagagtctgagtgaagt

SEQ ID NO: 502903 - DNA, 33 bp, Homo sapien
aaggcaaacttcaaaaactattgctagagataa

SEQ ID NO: 502904 - DNA, 33 bp, Homo sapien
aaggcaaacttcaaaacctattgctagagataa

SEQ ID NO: 502905 - DNA, 33 bp, Homo sapien
ggtcagaaaagtctagaaatttgttcaaagtca

SEQ ID NO: 502906 - DNA, 33 bp, Homo sapien
ggtcagaaaagtctagtaatttgttcaaagtca

SEQ ID NO: 502907 - DNA, 33 bp, Homo sapien
gttgcaataagcaaaacagcaaaacaaccagaa

SEQ ID NO: 502908 - DNA, 33 bp, Homo sapien
gttgcaataagcaaaatagcaaaacaaccagaa

SEQ ID NO: 502909 - DNA, 33 bp, Homo sapien
cccatcatccaatgtgcagaagcctcacaacaa

SEQ ID NO: 502910 - DNA, 33 bp, Homo sapien
cccatcatccaatgtgtagaagcctcacaacaa

SEQ ID NO: 502911 - DNA, 33 bp, Homo sapien
gatgatcccttggtacaagaagccaatatgccg

SEQ ID NO: 502912 - DNA, 33 bp, Homo sapien
gatgatcccttggtaccagaagccaatatgccg

SEQ ID NO: 502913 - DNA, 33 bp, Homo sapien
aatgcttgcattacgaaaaggaggtcttctgta

SEQ ID NO: 502914 - DNA, 33 bp, Homo sapien
aatgcttgcattacgacaaggaggtcttctgta

SEQ ID NO: 502915 - DNA, 33 bp, Homo sapien
ggttggaaagtaagccacattgtatcaggttaa

SEQ ID NO: 502916 - DNA, 33 bp, Homo sapien
ggttggaaagtaagccgcattgtatcaggttaa

SEQ ID NO: 502917 - DNA, 33 bp, Homo sapien
aggaaatgtcagatgaagagtagttcctgctga

SEQ ID NO: 502918 - DNA, 33 bp, Homo sapien
aggaaatgtcagatgaggagtagttcctgctga

SEQ ID NO: 502919 - DNA, 33 bp, Homo sapien
gctctccagttgtaccaaatcagaatctctggg

SEQ ID NO: 502920 - DNA, 33 bp, Homo sapien
gctctccagttgtaccgaatcagaatctctggg

SEQ ID NO: 502921 - DNA, 33 bp, Homo sapien
tttgtggaggtggcgacgccagcggaaggaagg

SEQ ID NO: 502922 - DNA, 33 bp, Homo sapien
tttgtggaggtggcgatgccagcggaaggaagg

SEQ ID NO: 502923 - DNA, 33 bp, Homo sapien
agctgcctgcacataactgatatttgtggaggt

SEQ ID NO: 502924 - DNA, 33 bp, Homo sapien
agctgcctgcacataagtgatatttgtggaggt

SEQ ID NO: 502925 - DNA, 33 bp, Homo sapien
tagtgtttttgtctcacgggctaatgtcaaagg

SEQ ID NO: 502926 - DNA, 33 bp, Homo sapien
tagtgtttttgtctcatgggctaatgtcaaagg

SEQ ID NO: 502927 - DNA, 33 bp, Homo sapien
cttttttttccttgcaagacctcagaaaagtgg

SEQ ID NO: 502928 - DNA, 33 bp, Homo sapien
cttttttttccttgcaggacctcagaaaagtgg

SEQ ID NO: 502929 - DNA, 33 bp, Homo sapien
ggaagtcaagatgaacgaaggttggctgtaaat

SEQ ID NO: 502930 - DNA, 33 bp, Homo sapien
ggaagtcaagatgaactaaggttggctgtaaat

SEQ ID NO: 502931 - DNA, 33 bp, Homo sapien
cttaatatgattaaacacaaaaatgctaaggac

SEQ ID NO: 502932 - DNA, 33 bp, Homo sapien
cttaatatgattaaacgcaaaaatgctaaggac

SEQ ID NO: 502933 - DNA, 33 bp, Homo sapien
gtcagagaattgccaaaacagaaaggcagggga

SEQ ID NO: 502934 - DNA, 33 bp, Homo sapien
gtcagagaattgccaagacagaaaggcagggga

SEQ ID NO: 502935 - DNA, 33 bp, Homo sapien
ccatattttcaggaagaagtctgtctctgtgaa

SEQ ID NO: 502936 - DNA, 33 bp, Homo sapien
ccatattttcaggaagcagtctgtctctgtgaa

SEQ ID NO: 502937 - DNA, 33 bp, Homo sapien
atttcttcataagcaaacacaaactctaggtaa

SEQ ID NO: 502938 - DNA, 33 bp, Homo sapien
atttcttcataagcaagcacaaactctaggtaa

SEQ ID NO: 502939 - DNA, 33 bp, Homo sapien
gagggtttctgactggaaaagtgtccaggttcg

SEQ ID NO: 502940 - DNA, 33 bp, Homo sapien
gagggtttctgactggtaaagtgtccaggttcg

SEQ ID NO: 502941 - DNA, 33 bp, Homo sapien
ctcatgcaccacactacgggggctctagttgct

SEQ ID NO: 502942 - DNA, 33 bp, Homo sapien
ctcatgcaccacactatgggggctctagttgct

SEQ ID NO: 502943 - DNA, 33 bp, Homo sapien
tctccaacaacatcccaactccattccagagca

SEQ ID NO: 502944 - DNA, 33 bp, Homo sapien
tctccaacaacatcccgactccattccagagca

SEQ ID NO: 502945 - DNA, 33 bp, Homo sapien
tcctctcttgtcattccatgttcttgaagggat

SEQ ID NO: 502946 - DNA, 33 bp, Homo sapien
tcctctcttgtcattctatgttcttgaagggat

SEQ ID NO: 502947 - DNA, 33 bp, Homo sapien
ggatctgaaggcagccaaaatatcgattaactt

SEQ ID NO: 502948 - DNA, 33 bp, Homo sapien
ggatctgaaggcagccgaaatatcgattaactt

SEQ ID NO: 502949 - DNA, 33 bp, Homo sapien
caaaggacaaagcttccaagattcgtttaaggc

SEQ ID NO: 502950 - DNA, 33 bp, Homo sapien
caaaggacaaagcttctaagattcgtttaaggc

SEQ ID NO: 502951 - DNA, 33 bp, Homo sapien
gggatggtggctttgaaggcactgagtcactga

SEQ ID NO: 502952 - DNA, 33 bp, Homo sapien
gggatggtggctttgatggcactgagtcactga

SEQ ID NO: 502953 - DNA, 33 bp, Homo sapien
gaccaagtttcaagaactgtcttcctaatgaat

SEQ ID NO: 502954 - DNA, 33 bp, Homo sapien
gaccaagtttcaagaattgtcttcctaatgaat

SEQ ID NO: 502955 - DNA, 33 bp, Homo sapien
taaatttcacttagacaataagacgatcatatt

SEQ ID NO: 502956 - DNA, 33 bp, Homo sapien
taaatttcacttagacgataagacgatcatatt

SEQ ID NO: 502957 - DNA, 33 bp, Homo sapien
aaaacactcttacaaacgtacaccgaatgtttg

SEQ ID NO: 502958 - DNA, 33 bp, Homo sapien
aaaacactcttacaaatgtacaccgaatgtttg

SEQ ID NO: 502959 - DNA, 33 bp, Homo sapien
tacaagaatagatttccaagtccttaacaggtt

SEQ ID NO: 502960 - DNA, 33 bp, Homo sapien
tacaagaatagatttctaagtccttaacaggtt

SEQ ID NO: 502961 - DNA, 33 bp, Homo sapien
aaaatcaaatccacggaactgcagagcaagtga

SEQ ID NO: 502962 - DNA, 33 bp, Homo sapien
aaaatcaaatccacgggactgcagagcaagtga

SEQ ID NO: 502963 - DNA, 33 bp, Homo sapien
acagagaggtgaaataacttagtaagtgatgga

SEQ ID NO: 502964 - DNA, 33 bp, Homo sapien
acagagaggtgaaatagcttagtaagtgatgga

SEQ ID NO: 502965 - DNA, 33 bp, Homo sapien
caatgtgacccacccaactcctatgagagaaaa

SEQ ID NO: 502966 - DNA, 33 bp, Homo sapien
caatgtgacccacccacctcctatgagagaaaa

SEQ ID NO: 502967 - DNA, 33 bp, Homo sapien
agttaatgtatgtgaaactatttattagaacag

SEQ ID NO: 502968 - DNA, 33 bp, Homo sapien
agttaatgtatgtgaagctatttattagaacag

SEQ ID NO: 502969 - DNA, 33 bp, Homo sapien
agaaacagagccagtaagatatgtatagataca

SEQ ID NO: 502970 - DNA, 33 bp, Homo sapien
agaaacagagccagtaggatatgtatagataca

SEQ ID NO: 502971 - DNA, 33 bp, Homo sapien
cagtcctaacgataacaagaagttcacgggaac

SEQ ID NO: 502972 - DNA, 33 bp, Homo sapien
cagtcctaacgataacgagaagttcacgggaac

SEQ ID NO: 502973 - DNA, 33 bp, Homo sapien
acgtactgggccatcaggttcttgatcatgctt

SEQ ID NO: 502974 - DNA, 33 bp, Homo sapien
acgtactgggccatcatgttcttgatcatgctt

SEQ ID NO: 502975 - DNA, 33 bp, Homo sapien
ctttgcaggtgtgatgaaattagggatcttgag

SEQ ID NO: 502976 - DNA, 33 bp, Homo sapien
ctttgcaggtgtgatggaattagggatcttgag

SEQ ID NO: 502977 - DNA, 33 bp, Homo sapien
actatgacaatgataagcaataacacataacac

SEQ ID NO: 502978 - DNA, 33 bp, Homo sapien
actatgacaatgataatcaataacacataacac

SEQ ID NO: 502979 - DNA, 33 bp, Homo sapien
tacctacaactaagaacccagaccaatatagtc

SEQ ID NO: 502980 - DNA, 33 bp, Homo sapien
tacctacaactaagaatccagaccaatatagtc

SEQ ID NO: 502981 - DNA, 33 bp, Homo sapien
ccatccgggatgtccaagttcagatacactcat

SEQ ID NO: 502982 - DNA, 33 bp, Homo sapien
ccatccgggatgtccaggttcagatacactcat

SEQ ID NO: 502983 - DNA, 33 bp, Homo sapien
tgtgtgcaggacttaaagccatgaggctgtgcc

SEQ ID NO: 502984 - DNA, 33 bp, Homo sapien
tgtgtgcaggacttaaggccatgaggctgtgcc

SEQ ID NO: 502985 - DNA, 33 bp, Homo sapien
atacacgtcatctccaagactaaaaaggcagaa

SEQ ID NO: 502986 - DNA, 33 bp, Homo sapien
atacacgtcatctccaggactaaaaaggcagaa

SEQ ID NO: 502987 - DNA, 33 bp, Homo sapien
ccttgggtttgctggtaaaccaaattgaatctc

SEQ ID NO: 502988 - DNA, 33 bp, Homo sapien
ccttgggtttgctggttaaccaaattgaatctc

SEQ ID NO: 502989 - DNA, 33 bp, Homo sapien
agaaaagcttcagatgaaaatatcctaggaagg

SEQ ID NO: 502990 - DNA, 33 bp, Homo sapien
agaaaagcttcagatggaaatatcctaggaagg

SEQ ID NO: 502991 - DNA, 33 bp, Homo sapien
cgatggtacatgaagacgcaaagggaaatattt

SEQ ID NO: 502992 - DNA, 33 bp, Homo sapien
cgatggtacatgaagatgcaaagggaaatattt

SEQ ID NO: 502993 - DNA, 33 bp, Homo sapien
cgctgtgaccagttcactcaaactcttgcacac

SEQ ID NO: 502994 - DNA, 33 bp, Homo sapien
cgctgtgaccagttcagtcaaactcttgcacac

SEQ ID NO: 502995 - DNA, 33 bp, Homo sapien
cagctcccacagttctaaaaggatcctattgtt

SEQ ID NO: 502996 - DNA, 33 bp, Homo sapien
cagctcccacagttcttaaaggatcctattgtt

SEQ ID NO: 502997 - DNA, 33 bp, Homo sapien
gccctgcttccagagaatccataagaatgaggc

SEQ ID NO: 502998 - DNA, 33 bp, Homo sapien
gccctgcttccagagagtccataagaatgaggc

SEQ ID NO: 502999 - DNA, 33 bp, Homo sapien
tgatccttggacctgacgatatttttaccttgc

SEQ ID NO: 503000 - DNA, 33 bp, Homo sapien
tgatccttggacctgatgatatttttaccttgc

SEQ ID NO: 503001 - DNA, 33 bp, Homo sapien
taaatcaaatccagcacctgaacctgccttctt

SEQ ID NO: 503002 - DNA, 33 bp, Homo sapien
taaatcaaatccagcatctgaacctgccttctt

SEQ ID NO: 503003 - DNA, 33 bp, Homo sapien
ttaagtgaatcactacagagatactccccagga

SEQ ID NO: 503004 - DNA, 33 bp, Homo sapien
ttaagtgaatcactacggagatactccccagga

SEQ ID NO: 503005 - DNA, 33 bp, Homo sapien
taaacggtagcagcaggaaggtagacaaagtgg

SEQ ID NO: 503006 - DNA, 33 bp, Homo sapien
taaacggtagcagcagtaaggtagacaaagtgg

SEQ ID NO: 503007 - DNA, 33 bp, Homo sapien
gggggtggtacacatcaaagtgaggtcgctagg

SEQ ID NO: 503008 - DNA, 33 bp, Homo sapien
gggggtggtacacatcgaagtgaggtcgctagg

SEQ ID NO: 503009 - DNA, 33 bp, Homo sapien
ctgtgttcacagacccagcttcctcacaaccct

SEQ ID NO: 503010 - DNA, 33 bp, Homo sapien
ctgtgttcacagacccggcttcctcacaaccct

SEQ ID NO: 503011 - DNA, 33 bp, Homo sapien
aatctggtatcatttaaaagtggatgttttcaa

SEQ ID NO: 503012 - DNA, 33 bp, Homo sapien
aatctggtatcatttagaagtggatgttttcaa

SEQ ID NO: 503013 - DNA, 33 bp, Homo sapien
ccggaccaggacttcaccttttaagtttcatca

SEQ ID NO: 503014 - DNA, 33 bp, Homo sapien
ccggaccaggacttcatcttttaagtttcatca

SEQ ID NO: 503015 - DNA, 33 bp, Homo sapien
gtgtgcttcatagaaaataatactggataacag

SEQ ID NO: 503016 - DNA, 33 bp, Homo sapien
gtgtgcttcatagaaattaatactggataacag

SEQ ID NO: 503017 - DNA, 33 bp, Homo sapien
taggatcctggtcaaaattcaccaaatgtacaa

SEQ ID NO: 503018 - DNA, 33 bp, Homo sapien
taggatcctggtcaaatttcaccaaatgtacaa

SEQ ID NO: 503019 - DNA, 33 bp, Homo sapien
ttattcctcatgtccactaatactgagcacatc

SEQ ID NO: 503020 - DNA, 33 bp, Homo sapien
ttattcctcatgtccattaatactgagcacatc

SEQ ID NO: 503021 - DNA, 33 bp, Homo sapien
aaagtgctgctgtcgacctttatttacaagaca

SEQ ID NO: 503022 - DNA, 33 bp, Homo sapien
aaagtgctgctgtcgatctttatttacaagaca

SEQ ID NO: 503023 - DNA, 33 bp, Homo sapien
attagaaggttctgtcaatcaacattttagaaa

SEQ ID NO: 503024 - DNA, 33 bp, Homo sapien
attagaaggttctgtcgatcaacattttagaaa

SEQ ID NO: 503025 - DNA, 33 bp, Homo sapien
gttttccttgcgtgcacaccctcctcctggcag

SEQ ID NO: 503026 - DNA, 33 bp, Homo sapien
gttttccttgcgtgcataccctcctcctggcag

SEQ ID NO: 503027 - DNA, 33 bp, Homo sapien
cagcaagaggggaaaacgagatttacgagtcat

SEQ ID NO: 503028 - DNA, 33 bp, Homo sapien
cagcaagaggggaaaaggagatttacgagtcat

SEQ ID NO: 503029 - DNA, 33 bp, Homo sapien
catccacatctgtgaaagggagaaaggcagtgg

SEQ ID NO: 503030 - DNA, 33 bp, Homo sapien
catccacatctgtgaaggggagaaaggcagtgg

SEQ ID NO: 503031 - DNA, 33 bp, Homo sapien
agctctaggtgagttccattcattgcacacctg

SEQ ID NO: 503032 - DNA, 33 bp, Homo sapien
agctctaggtgagttctattcattgcacacctg

SEQ ID NO: 503033 - DNA, 33 bp, Homo sapien
cactgcttgcttgtcacctgtaaatggtagtgc

SEQ ID NO: 503034 - DNA, 33 bp, Homo sapien
cactgcttgcttgtcatctgtaaatggtagtgc

SEQ ID NO: 503035 - DNA, 33 bp, Homo sapien
gaacacacaatagacactcaattaatactccct

SEQ ID NO: 503036 - DNA, 33 bp, Homo sapien
gaacacacaatagacattcaattaatactccct

SEQ ID NO: 503037 - DNA, 33 bp, Homo sapien
tgtatcctcatctgtaacatccacttgctcacc

SEQ ID NO: 503038 - DNA, 33 bp, Homo sapien
tgtatcctcatctgtagcatccacttgctcacc

SEQ ID NO: 503039 - DNA, 33 bp, Homo sapien
atgctataatattaacagtggctatctccaggt

SEQ ID NO: 503040 - DNA, 33 bp, Homo sapien
atgctataatattaaccgtggctatctccaggt

SEQ ID NO: 503041 - DNA, 33 bp, Homo sapien
aatcaaagacagttgaacaaatggagtgaaagc

SEQ ID NO: 503042 - DNA, 33 bp, Homo sapien
aatcaaagacagttgaccaaatggagtgaaagc

SEQ ID NO: 503043 - DNA, 33 bp, Homo sapien
caagacattcaactcaaatatgatgctataggt

SEQ ID NO: 503044 - DNA, 33 bp, Homo sapien
caagacattcaactcacatatgatgctataggt

SEQ ID NO: 503045 - DNA, 33 bp, Homo sapien
ggtggtgagttacacaacctctcagtgcctcgc

SEQ ID NO: 503046 - DNA, 33 bp, Homo sapien
ggtggtgagttacacagcctctcagtgcctcgc

SEQ ID NO: 503047 - DNA, 33 bp, Homo sapien
ggctgtttcctgataacatttgggcaattcttc

SEQ ID NO: 503048 - DNA, 33 bp, Homo sapien
ggctgtttcctgataatatttgggcaattcttc

SEQ ID NO: 503049 - DNA, 33 bp, Homo sapien
tgcattaaaaacagaaagtgtgcctgttggcca

SEQ ID NO: 503050 - DNA, 33 bp, Homo sapien
tgcattaaaaacagaacgtgtgcctgttggcca

SEQ ID NO: 503051 - DNA, 33 bp, Homo sapien
tagtcacagatactcacagcccagatgaggacc

SEQ ID NO: 503052 - DNA, 33 bp, Homo sapien
tagtcacagatactcatagcccagatgaggacc

SEQ ID NO: 503053 - DNA, 33 bp, Homo sapien
gaggcggaatgctcaactcagcacatagctgta

SEQ ID NO: 503054 - DNA, 33 bp, Homo sapien
gaggcggaatgctcaagtcagcacatagctgta

SEQ ID NO: 503055 - DNA, 33 bp, Homo sapien
atcttagtatcctccacgatgagctgattgttc

SEQ ID NO: 503056 - DNA, 33 bp, Homo sapien
atcttagtatcctccatgatgagctgattgttc

SEQ ID NO: 503057 - DNA, 33 bp, Homo sapien
gaggacaaacaactcaccttccaggtacctttc

SEQ ID NO: 503058 - DNA, 33 bp, Homo sapien
gaggacaaacaactcatcttccaggtacctttc

SEQ ID NO: 503059 - DNA, 33 bp, Homo sapien
ccatgtaacactccaccaactaaactgcccagc

SEQ ID NO: 503060 - DNA, 33 bp, Homo sapien
ccatgtaacactccactaactaaactgcccagc

SEQ ID NO: 503061 - DNA, 33 bp, Homo sapien
gtttttcatttgtttcaagaagtgccgagaaag

SEQ ID NO: 503062 - DNA, 33 bp, Homo sapien
gtttttcatttgtttcgagaagtgccgagaaag

SEQ ID NO: 503063 - DNA, 33 bp, Homo sapien
tctccgcaagcagaagaccacgccacgcacctg

SEQ ID NO: 503064 - DNA, 33 bp, Homo sapien
tctccgcaagcagaagtccacgccacgcacctg

SEQ ID NO: 503065 - DNA, 33 bp, Homo sapien
ggaaaggcatattgaaaagagaagttgccccgt

SEQ ID NO: 503066 - DNA, 33 bp, Homo sapien
ggaaaggcatattgaagagagaagttgccccgt

SEQ ID NO: 503067 - DNA, 33 bp, Homo sapien
cactggctggagtattcaaaccgttactgcaga

SEQ ID NO: 503068 - DNA, 33 bp, Homo sapien
cactggctggagtattgaaaccgttactgcaga

SEQ ID NO: 503069 - DNA, 33 bp, Homo sapien
taaagattgggctaaaagatcaaaggatgttga

SEQ ID NO: 503070 - DNA, 33 bp, Homo sapien
taaagattgggctaaaggatcaaaggatgttga

SEQ ID NO: 503071 - DNA, 33 bp, Homo sapien
ggagtcgtaaagaacaagaggaatgtggaaaag

SEQ ID NO: 503072 - DNA, 33 bp, Homo sapien
ggagtcgtaaagaacaggaggaatgtggaaaag

SEQ ID NO: 503073 - DNA, 33 bp, Homo sapien
gcacctgctgctgaaccgccgtctgggacgcag

SEQ ID NO: 503074 - DNA, 33 bp, Homo sapien
gcacctgctgctgaactgccgtctgggacgcag

SEQ ID NO: 503075 - DNA, 33 bp, Homo sapien
gatgttctctaaataacgtgatgtacttgttta

SEQ ID NO: 503076 - DNA, 33 bp, Homo sapien
gatgttctctaaataatgtgatgtacttgttta

SEQ ID NO: 503077 - DNA, 33 bp, Homo sapien
tttggatgtatttatacggcaccctctcatgcc

SEQ ID NO: 503078 - DNA, 33 bp, Homo sapien
tttggatgtatttatatggcaccctctcatgcc

SEQ ID NO: 503079 - DNA, 33 bp, Homo sapien
atgggttcatagcgctaactactgccattcatc

SEQ ID NO: 503080 - DNA, 33 bp, Homo sapien
atgggttcatagcgctgactactgccattcatc

SEQ ID NO: 503081 - DNA, 33 bp, Homo sapien
gcaaaagttcaccttccaatacagataacttta

SEQ ID NO: 503082 - DNA, 33 bp, Homo sapien
gcaaaagttcaccttcgaatacagataacttta

SEQ ID NO: 503083 - DNA, 33 bp, Homo sapien
aagagcattgcagagacaggaagcttggcagga

SEQ ID NO: 503084 - DNA, 33 bp, Homo sapien
aagagcattgcagagagaggaagcttggcagga

SEQ ID NO: 503085 - DNA, 33 bp, Homo sapien
aaaatggatacactgggagtgagagctaaagat

SEQ ID NO: 503086 - DNA, 33 bp, Homo sapien
aaaatggatacactggtagtgagagctaaagat

SEQ ID NO: 503087 - DNA, 33 bp, Homo sapien
tcttgacatattggcacgttcttaaaagcaaga

SEQ ID NO: 503088 - DNA, 33 bp, Homo sapien
tcttgacatattggcatgttcttaaaagcaaga

SEQ ID NO: 503089 - DNA, 33 bp, Homo sapien
atttgcactcaagtcacaatagtgcatattgtc

SEQ ID NO: 503090 - DNA, 33 bp, Homo sapien
atttgcactcaagtcataatagtgcatattgtc

SEQ ID NO: 503091 - DNA, 33 bp, Homo sapien
agcagtaccgcatagacgcccggcagtttgcac

SEQ ID NO: 503092 - DNA, 33 bp, Homo sapien
agcagtaccgcatagatgcccggcagtttgcac

SEQ ID NO: 503093 - DNA, 33 bp, Homo sapien
gtacacatcatgtttgaaagttttattgtttcc

SEQ ID NO: 503094 - DNA, 33 bp, Homo sapien
gtacacatcatgtttgcaagttttattgtttcc

SEQ ID NO: 503095 - DNA, 33 bp, Homo sapien
catcttcctccccaaacagcactgccattttaa

SEQ ID NO: 503096 - DNA, 33 bp, Homo sapien
catcttcctccccaaatagcactgccattttaa

SEQ ID NO: 503097 - DNA, 33 bp, Homo sapien
cagtatctttaccagactatacgtgacatttcc

SEQ ID NO: 503098 - DNA, 33 bp, Homo sapien
cagtatctttaccagattatacgtgacatttcc

SEQ ID NO: 503099 - DNA, 33 bp, Homo sapien
gatgagactgtaagtaaggagggaataaatgtg

SEQ ID NO: 503100 - DNA, 33 bp, Homo sapien
gatgagactgtaagtagggagggaataaatgtg

SEQ ID NO: 503101 - DNA, 33 bp, Homo sapien
gcatatttctgatgacaaagtggtaccaaaaat

SEQ ID NO: 503102 - DNA, 33 bp, Homo sapien
gcatatttctgatgacgaagtggtaccaaaaat

SEQ ID NO: 503103 - DNA, 33 bp, Homo sapien
ctctgatgacagcaagccgccagatgtttagac

SEQ ID NO: 503104 - DNA, 33 bp, Homo sapien
ctctgatgacagcaagtcgccagatgtttagac

SEQ ID NO: 503105 - DNA, 33 bp, Homo sapien
gggcttgttccatgccagagtagctgaatcatt

SEQ ID NO: 503106 - DNA, 33 bp, Homo sapien
gggcttgttccatgccggagtagctgaatcatt

SEQ ID NO: 503107 - DNA, 33 bp, Homo sapien
tgcgattgcattattacgaatcctcccatctcc

SEQ ID NO: 503108 - DNA, 33 bp, Homo sapien
tgcgattgcattattaggaatcctcccatctcc

SEQ ID NO: 503109 - DNA, 33 bp, Homo sapien
cttcaaagtacaataaagtgaaacacaatagaa

SEQ ID NO: 503110 - DNA, 33 bp, Homo sapien
cttcaaagtacaataacgtgaaacacaatagaa

SEQ ID NO: 503111 - DNA, 33 bp, Homo sapien
taagagcctggtgacaataactccataatagaa

SEQ ID NO: 503112 - DNA, 33 bp, Homo sapien
taagagcctggtgacagtaactccataatagaa

SEQ ID NO: 503113 - DNA, 33 bp, Homo sapien
ttttcctgtagattaactgaggcatgaggtgga

SEQ ID NO: 503114 - DNA, 33 bp, Homo sapien
ttttcctgtagattaattgaggcatgaggtgga

SEQ ID NO: 503115 - DNA, 33 bp, Homo sapien
tcagctgtaaaaacgaaggactttctgacaccc

SEQ ID NO: 503116 - DNA, 33 bp, Homo sapien
tcagctgtaaaaacgacggactttctgacaccc

SEQ ID NO: 503117 - DNA, 33 bp, Homo sapien
gttagacagagcaccaagtaatgcctgtgatag

SEQ ID NO: 503118 - DNA, 33 bp, Homo sapien
gttagacagagcaccaggtaatgcctgtgatag

SEQ ID NO: 503119 - DNA, 33 bp, Homo sapien
gctggaagcatttccactgaaaaccagtataag

SEQ ID NO: 503120 - DNA, 33 bp, Homo sapien
gctggaagcatttccattgaaaaccagtataag

SEQ ID NO: 503121 - DNA, 33 bp, Homo sapien
cttctacaacataacacaggagaaggcctagat

SEQ ID NO: 503122 - DNA, 33 bp, Homo sapien
cttctacaacataacataggagaaggcctagat

SEQ ID NO: 503123 - DNA, 33 bp, Homo sapien
tcatcttgaaaatgtgcaggtatattaaaaaca

SEQ ID NO: 503124 - DNA, 33 bp, Homo sapien
tcatcttgaaaatgtggaggtatattaaaaaca

SEQ ID NO: 503125 - DNA, 33 bp, Homo sapien
gcctggggagtctttaagcttttctagatagaa

SEQ ID NO: 503126 - DNA, 33 bp, Homo sapien
gcctggggagtctttaggcttttctagatagaa

SEQ ID NO: 503127 - DNA, 33 bp, Homo sapien
cagaacatgcttcccacacactggaacaaatca

SEQ ID NO: 503128 - DNA, 33 bp, Homo sapien
cagaacatgcttcccatacactggaacaaatca

SEQ ID NO: 503129 - DNA, 33 bp, Homo sapien
agctacagtcttatgagaaaggaacagccacat

SEQ ID NO: 503130 - DNA, 33 bp, Homo sapien
agctacagtcttatgataaaggaacagccacat

SEQ ID NO: 503131 - DNA, 33 bp, Homo sapien
ctaccccctaattaccaaaatctgtgtaaaact

SEQ ID NO: 503132 - DNA, 33 bp, Homo sapien
ctaccccctaattaccgaaatctgtgtaaaact

SEQ ID NO: 503133 - DNA, 33 bp, Homo sapien
agtttcttttcccacaagcataatcaggaaagt

SEQ ID NO: 503134 - DNA, 33 bp, Homo sapien
agtttcttttcccacatgcataatcaggaaagt

SEQ ID NO: 503135 - DNA, 33 bp, Homo sapien
aaaggaaaatgtgagcaaagtgatgaaaaacca

SEQ ID NO: 503136 - DNA, 33 bp, Homo sapien
aaaggaaaatgtgagcgaagtgatgaaaaacca

SEQ ID NO: 503137 - DNA, 33 bp, Homo sapien
gcaatactgttatggacgtttttatacacgttt

SEQ ID NO: 503138 - DNA, 33 bp, Homo sapien
gcaatactgttatggatgtttttatacacgttt

SEQ ID NO: 503139 - DNA, 33 bp, Homo sapien
atggggagagtgagaacgttgggccttgtgttt

SEQ ID NO: 503140 - DNA, 33 bp, Homo sapien
atggggagagtgagaatgttgggccttgtgttt

SEQ ID NO: 503141 - DNA, 33 bp, Homo sapien
cgtttcccaaactgaaagaaatgccagatgtgc

SEQ ID NO: 503142 - DNA, 33 bp, Homo sapien
cgtttcccaaactgaaggaaatgccagatgtgc

SEQ ID NO: 503143 - DNA, 33 bp, Homo sapien
gtgtttggaaatcacacgaacataaaaaaagta

SEQ ID NO: 503144 - DNA, 33 bp, Homo sapien
gtgtttggaaatcacatgaacataaaaaaagta

SEQ ID NO: 503145 - DNA, 33 bp, Homo sapien
atataccacacatttcacataaccacggttaat

SEQ ID NO: 503146 - DNA, 33 bp, Homo sapien
atataccacacatttctcataaccacggttaat

SEQ ID NO: 503147 - DNA, 33 bp, Homo sapien
aatagaccttcaggaacaggtgattgtccccat

SEQ ID NO: 503148 - DNA, 33 bp, Homo sapien
aatagaccttcaggaataggtgattgtccccat

SEQ ID NO: 503149 - DNA, 33 bp, Homo sapien
taatttaaaaaatgcaatgagtctagacaacat

SEQ ID NO: 503150 - DNA, 33 bp, Homo sapien
taatttaaaaaatgcagtgagtctagacaacat

SEQ ID NO: 503151 - DNA, 33 bp, Homo sapien
atacaaaactagcatacatacattctgtggtgc

SEQ ID NO: 503152 - DNA, 33 bp, Homo sapien
atacaaaactagcatatatacattctgtggtgc

SEQ ID NO: 503153 - DNA, 33 bp, Homo sapien
aacacgttcacatttacgtctcacttgaagcag

SEQ ID NO: 503154 - DNA, 33 bp, Homo sapien
aacacgttcacatttatgtctcacttgaagcag

SEQ ID NO: 503155 - DNA, 33 bp, Homo sapien
ttttgagtttctgtgacgaaatccagtcattta

SEQ ID NO: 503156 - DNA, 33 bp, Homo sapien
ttttgagtttctgtgatgaaatccagtcattta

SEQ ID NO: 503157 - DNA, 33 bp, Homo sapien
tcccaccctctgtgagcctatgaggtgccattt

SEQ ID NO: 503158 - DNA, 33 bp, Homo sapien
tcccaccctctgtgaggctatgaggtgccattt

SEQ ID NO: 503159 - DNA, 33 bp, Homo sapien
gttctgtcaaagaaaaaaggttagtgtgccatt

SEQ ID NO: 503160 - DNA, 33 bp, Homo sapien
gttctgtcaaagaaaagaggttagtgtgccatt

SEQ ID NO: 503161 - DNA, 33 bp, Homo sapien
ctcctggaaagacgtaacatattcttttatact

SEQ ID NO: 503162 - DNA, 33 bp, Homo sapien
ctcctggaaagacgtagcatattcttttatact

SEQ ID NO: 503163 - DNA, 33 bp, Homo sapien
agttatggttcttgtaagtatcattgaattaaa

SEQ ID NO: 503164 - DNA, 33 bp, Homo sapien
agttatggttcttgtaggtatcattgaattaaa

SEQ ID NO: 503165 - DNA, 33 bp, Homo sapien
atcacacaggtaataactggtccattgtgagcc

SEQ ID NO: 503166 - DNA, 33 bp, Homo sapien
atcacacaggtaataattggtccattgtgagcc

SEQ ID NO: 503167 - DNA, 33 bp, Homo sapien
ctagtatgtgagtgcaacaaggtctcaggacac

SEQ ID NO: 503168 - DNA, 33 bp, Homo sapien
ctagtatgtgagtgcagcaaggtctcaggacac

SEQ ID NO: 503169 - DNA, 33 bp, Homo sapien
tagtgttgaaaattcacagttttaagtttgatg

SEQ ID NO: 503170 - DNA, 33 bp, Homo sapien
tagtgttgaaaattcatagttttaagtttgatg

SEQ ID NO: 503171 - DNA, 33 bp, Homo sapien
aaagggctaaaggcacaatcggagaaaactaga

SEQ ID NO: 503172 - DNA, 33 bp, Homo sapien
aaagggctaaaggcaccatcggagaaaactaga

SEQ ID NO: 503173 - DNA, 33 bp, Homo sapien
gcattggtctgcagtaaagggagagtaacacga

SEQ ID NO: 503174 - DNA, 33 bp, Homo sapien
gcattggtctgcagtagagggagagtaacacga

SEQ ID NO: 503175 - DNA, 33 bp, Homo sapien
tagctacctacagtaacaaaaacagttgaagaa

SEQ ID NO: 503176 - DNA, 33 bp, Homo sapien
tagctacctacagtaataaaaacagttgaagaa

SEQ ID NO: 503177 - DNA, 33 bp, Homo sapien
gcagctcgcccaaagaagtcttaatccccagat

SEQ ID NO: 503178 - DNA, 33 bp, Homo sapien
gcagctcgcccaaagatgtcttaatccccagat

SEQ ID NO: 503179 - DNA, 33 bp, Homo sapien
ggagagaagcagtgagccgggagaagcctggga

SEQ ID NO: 503180 - DNA, 33 bp, Homo sapien
ggagagaagcagtgagtcgggagaagcctggga

SEQ ID NO: 503181 - DNA, 33 bp, Homo sapien
gatggacatgatattcaaacaattcaaatcaac

SEQ ID NO: 503182 - DNA, 33 bp, Homo sapien
gatggacatgatattcgaacaattcaaatcaac

SEQ ID NO: 503183 - DNA, 33 bp, Homo sapien
ctgacctggccttcaaaaataagacactaagct

SEQ ID NO: 503184 - DNA, 33 bp, Homo sapien
ctgacctggccttcaagaataagacactaagct

SEQ ID NO: 503185 - DNA, 33 bp, Homo sapien
atttcttggctgagcacaaattcatttggtcaa

SEQ ID NO: 503186 - DNA, 33 bp, Homo sapien
atttcttggctgagcataaattcatttggtcaa

SEQ ID NO: 503187 - DNA, 33 bp, Homo sapien
ggagattcaagaaagcacccatgtcttacgatg

SEQ ID NO: 503188 - DNA, 33 bp, Homo sapien
ggagattcaagaaagcgcccatgtcttacgatg

SEQ ID NO: 503189 - DNA, 33 bp, Homo sapien
ttctaccagatacctcactatattccagtggcc

SEQ ID NO: 503190 - DNA, 33 bp, Homo sapien
ttctaccagatacctcgctatattccagtggcc

SEQ ID NO: 503191 - DNA, 33 bp, Homo sapien
tccttgatgagctgagacacgaggcccagcaag

SEQ ID NO: 503192 - DNA, 33 bp, Homo sapien
tccttgatgagctgagtcacgaggcccagcaag

SEQ ID NO: 503193 - DNA, 33 bp, Homo sapien
gataaagcctcccttacggtgctttaacgagtg

SEQ ID NO: 503194 - DNA, 33 bp, Homo sapien
gataaagcctcccttatggtgctttaacgagtg

SEQ ID NO: 503195 - DNA, 33 bp, Homo sapien
acagccatctgtgaaccagtaagcagaccttcc

SEQ ID NO: 503196 - DNA, 33 bp, Homo sapien
acagccatctgtgaactagtaagcagaccttcc

SEQ ID NO: 503197 - DNA, 33 bp, Homo sapien
tcttctcaacaagtcacagttcttctggggcat

SEQ ID NO: 503198 - DNA, 33 bp, Homo sapien
tcttctcaacaagtcagagttcttctggggcat

SEQ ID NO: 503199 - DNA, 33 bp, Homo sapien
accctgcaggagattcactacagcagaaggcat

SEQ ID NO: 503200 - DNA, 33 bp, Homo sapien
accctgcaggagattcgctacagcagaaggcat

SEQ ID NO: 503201 - DNA, 33 bp, Homo sapien
tttcttgggtctgtcaaaatctcaaactgcatt

SEQ ID NO: 503202 - DNA, 33 bp, Homo sapien
tttcttgggtctgtcagaatctcaaactgcatt

SEQ ID NO: 503203 - DNA, 33 bp, Homo sapien
actttgatccttcctgaatccttgaagacactg

SEQ ID NO: 503204 - DNA, 33 bp, Homo sapien
actttgatccttcctgcatccttgaagacactg

SEQ ID NO: 503205 - DNA, 33 bp, Homo sapien
ttgctgtaatgtcccaaaatctgtggcaatggg

SEQ ID NO: 503206 - DNA, 33 bp, Homo sapien
ttgctgtaatgtcccagaatctgtggcaatggg

SEQ ID NO: 503207 - DNA, 33 bp, Homo sapien
ttttgtttcaaggataaatttgttgtcattttc

SEQ ID NO: 503208 - DNA, 33 bp, Homo sapien
ttttgtttcaaggatagatttgttgtcattttc

SEQ ID NO: 503209 - DNA, 33 bp, Homo sapien
ctgactcagaaattcagggaagaatccaagcca

SEQ ID NO: 503210 - DNA, 33 bp, Homo sapien
ctgactcagaaattcatggaagaatccaagcca

SEQ ID NO: 503211 - DNA, 33 bp, Homo sapien
ggccaaatctctctaccacaatgctcttattgg

SEQ ID NO: 503212 - DNA, 33 bp, Homo sapien
ggccaaatctctctacgacaatgctcttattgg

SEQ ID NO: 503213 - DNA, 33 bp, Homo sapien
cgacttttacgaatgccatctctattgtgttta

SEQ ID NO: 503214 - DNA, 33 bp, Homo sapien
cgacttttacgaatgcgatctctattgtgttta

SEQ ID NO: 503215 - DNA, 33 bp, Homo sapien
cttattaaaccaaacacacaatttaccacccaa

SEQ ID NO: 503216 - DNA, 33 bp, Homo sapien
cttattaaaccaaacatacaatttaccacccaa

SEQ ID NO: 503217 - DNA, 33 bp, Homo sapien
ttatattaaggctcaccgtatagccacagcaat

SEQ ID NO: 503218 - DNA, 33 bp, Homo sapien
ttatattaaggctcactgtatagccacagcaat

SEQ ID NO: 503219 - DNA, 33 bp, Homo sapien
aaggaagcctccaaagaacttgtggacaccctc

SEQ ID NO: 503220 - DNA, 33 bp, Homo sapien
aaggaagcctccaaaggacttgtggacaccctc

SEQ ID NO: 503221 - DNA, 33 bp, Homo sapien
ttctttcactctcaaacgtgttctagtttgaac

SEQ ID NO: 503222 - DNA, 33 bp, Homo sapien
ttctttcactctcaaaggtgttctagtttgaac

SEQ ID NO: 503223 - DNA, 33 bp, Homo sapien
aatcttgataccaacagatagaacctatacaaa

SEQ ID NO: 503224 - DNA, 33 bp, Homo sapien
aatcttgataccaacatatagaacctatacaaa

SEQ ID NO: 503225 - DNA, 33 bp, Homo sapien
agagtgtccacaattcccattaattcccagtgc

SEQ ID NO: 503226 - DNA, 33 bp, Homo sapien
agagtgtccacaattcgcattaattcccagtgc

SEQ ID NO: 503227 - DNA, 33 bp, Homo sapien
aaccagccactggacaacttcagacacagaaca

SEQ ID NO: 503228 - DNA, 33 bp, Homo sapien
aaccagccactggacaccttcagacacagaaca

SEQ ID NO: 503229 - DNA, 33 bp, Homo sapien
ggcaaatttccaatgaaagctgaaagttagtac

SEQ ID NO: 503230 - DNA, 33 bp, Homo sapien
ggcaaatttccaatgagagctgaaagttagtac

SEQ ID NO: 503231 - DNA, 33 bp, Homo sapien
caggatgcctttcaataacttcagttcgccatt

SEQ ID NO: 503232 - DNA, 33 bp, Homo sapien
caggatgcctttcaatgacttcagttcgccatt

SEQ ID NO: 503233 - DNA, 33 bp, Homo sapien
tttctagcttatctaagtagtctcatttcacct

SEQ ID NO: 503234 - DNA, 33 bp, Homo sapien
tttctagcttatctaattagtctcatttcacct

SEQ ID NO: 503235 - DNA, 33 bp, Homo sapien
tgggggagcaggtgagccaaagttggcaggtcc

SEQ ID NO: 503236 - DNA, 33 bp, Homo sapien
tgggggagcaggtgagtcaaagttggcaggtcc

SEQ ID NO: 503237 - DNA, 33 bp, Homo sapien
agacaccctcacttaacgtaatcaccttggcaa

SEQ ID NO: 503238 - DNA, 33 bp, Homo sapien
agacaccctcacttaatgtaatcaccttggcaa

SEQ ID NO: 503239 - DNA, 33 bp, Homo sapien
agtgcagtatgcaatgcactatgttttaatctc

SEQ ID NO: 503240 - DNA, 33 bp, Homo sapien
agtgcagtatgcaatgtactatgttttaatctc

SEQ ID NO: 503241 - DNA, 33 bp, Homo sapien
aacactgtgtgtgacaagaaaaacagaaacagc

SEQ ID NO: 503242 - DNA, 33 bp, Homo sapien
aacactgtgtgtgacaggaaaaacagaaacagc

SEQ ID NO: 503243 - DNA, 33 bp, Homo sapien
taatttggatattaacaatttcaataggatatt

SEQ ID NO: 503244 - DNA, 33 bp, Homo sapien
taatttggatattaacgatttcaataggatatt

SEQ ID NO: 503245 - DNA, 33 bp, Homo sapien
gtgccacactgcactaaacttctgacccacaga

SEQ ID NO: 503246 - DNA, 33 bp, Homo sapien
gtgccacactgcactagacttctgacccacaga

SEQ ID NO: 503247 - DNA, 33 bp, Homo sapien
gtagttggagctcttgcaacttctgcccttatc

SEQ ID NO: 503248 - DNA, 33 bp, Homo sapien
gtagttggagctcttggaacttctgcccttatc

SEQ ID NO: 503249 - DNA, 33 bp, Homo sapien
cctcagccccatcccacatgaaccacgtattac

SEQ ID NO: 503250 - DNA, 33 bp, Homo sapien
cctcagccccatcccatatgaaccacgtattac

SEQ ID NO: 503251 - DNA, 33 bp, Homo sapien
tcactgaaacaggagacaaactaggagaagagg

SEQ ID NO: 503252 - DNA, 33 bp, Homo sapien
tcactgaaacaggagagaaactaggagaagagg

SEQ ID NO: 503253 - DNA, 33 bp, Homo sapien
caaggggtggggagaactgactacaaaccagtc

SEQ ID NO: 503254 - DNA, 33 bp, Homo sapien
caaggggtggggagaattgactacaaaccagtc

SEQ ID NO: 503255 - DNA, 33 bp, Homo sapien
ttctgagtagatgcctaaacagatcctgagtgg

SEQ ID NO: 503256 - DNA, 33 bp, Homo sapien
ttctgagtagatgcctgaacagatcctgagtgg

SEQ ID NO: 503257 - DNA, 33 bp, Homo sapien
tgccagagttgtagggacagatggatgaatcct

SEQ ID NO: 503258 - DNA, 33 bp, Homo sapien
tgccagagttgtaggggcagatggatgaatcct

SEQ ID NO: 503259 - DNA, 33 bp, Homo sapien
ccagtttccatgcatccattttgtatggtagga

SEQ ID NO: 503260 - DNA, 33 bp, Homo sapien
ccagtttccatgcatcgattttgtatggtagga

SEQ ID NO: 503261 - DNA, 33 bp, Homo sapien
agattctttgtatgacaggaattggaatgtgcc

SEQ ID NO: 503262 - DNA, 33 bp, Homo sapien
agattctttgtatgactggaattggaatgtgcc

SEQ ID NO: 503263 - DNA, 33 bp, Homo sapien
ttattaaagctttgggaatacctggaggaaatt

SEQ ID NO: 503264 - DNA, 33 bp, Homo sapien
ttattaaagctttggggatacctggaggaaatt

SEQ ID NO: 503265 - DNA, 33 bp, Homo sapien
gaggctcagtgagttaagttctaggcacattta

SEQ ID NO: 503266 - DNA, 33 bp, Homo sapien
gaggctcagtgagttaggttctaggcacattta

SEQ ID NO: 503267 - DNA, 33 bp, Homo sapien
taaaagtgcagagtgaaatgtatagcaaaattt

SEQ ID NO: 503268 - DNA, 33 bp, Homo sapien
taaaagtgcagagtgagatgtatagcaaaattt

SEQ ID NO: 503269 - DNA, 33 bp, Homo sapien
tagttaggaagaaaaaaaatccagattcttccc

SEQ ID NO: 503270 - DNA, 33 bp, Homo sapien
tagttaggaagaaaaacaatccagattcttccc

SEQ ID NO: 503271 - DNA, 33 bp, Homo sapien
tttagtgcatggctacagcatttgctcctgaca

SEQ ID NO: 503272 - DNA, 33 bp, Homo sapien
tttagtgcatggctaccgcatttgctcctgaca

SEQ ID NO: 503273 - DNA, 33 bp, Homo sapien
gccatgtcaaacatacactcaacccagaggaag

SEQ ID NO: 503274 - DNA, 33 bp, Homo sapien
gccatgtcaaacatactctcaacccagaggaag

SEQ ID NO: 503275 - DNA, 33 bp, Homo sapien
ccttgggtcttcacagcagtcacggagtaagta

SEQ ID NO: 503276 - DNA, 33 bp, Homo sapien
ccttgggtcttcacagtagtcacggagtaagta

SEQ ID NO: 503277 - DNA, 33 bp, Homo sapien
acctccagctatgcgaacctgttcctaacaggc

SEQ ID NO: 503278 - DNA, 33 bp, Homo sapien
acctccagctatgcgaccctgttcctaacaggc

SEQ ID NO: 503279 - DNA, 33 bp, Homo sapien
tatctaccaatgtcaaatgttcatgtccctaga

SEQ ID NO: 503280 - DNA, 33 bp, Homo sapien
tatctaccaatgtcaagtgttcatgtccctaga

SEQ ID NO: 503281 - DNA, 33 bp, Homo sapien
aaggacctcctaagacaatagatacaaaagagg

SEQ ID NO: 503282 - DNA, 33 bp, Homo sapien
aaggacctcctaagacgatagatacaaaagagg

SEQ ID NO: 503283 - DNA, 33 bp, Homo sapien
ggtgtcatccccagtacagtggtggaaaatatg

SEQ ID NO: 503284 - DNA, 33 bp, Homo sapien
ggtgtcatccccagtagagtggtggaaaatatg

SEQ ID NO: 503285 - DNA, 33 bp, Homo sapien
tcagcagatttactgcaaatacctacatgactg

SEQ ID NO: 503286 - DNA, 33 bp, Homo sapien
tcagcagatttactgccaatacctacatgactg

SEQ ID NO: 503287 - DNA, 33 bp, Homo sapien
gtaaattgcttctccacacattcaaacatagta

SEQ ID NO: 503288 - DNA, 33 bp, Homo sapien
gtaaattgcttctccatacattcaaacatagta

SEQ ID NO: 503289 - DNA, 33 bp, Homo sapien
tgggggaaggtgaaaccgtatcttcaggggctt

SEQ ID NO: 503290 - DNA, 33 bp, Homo sapien
tgggggaaggtgaaactgtatcttcaggggctt

SEQ ID NO: 503291 - DNA, 33 bp, Homo sapien
ttcttctaagtttggaagttttcattcgaacac

SEQ ID NO: 503292 - DNA, 33 bp, Homo sapien
ttcttctaagtttggatgttttcattcgaacac

SEQ ID NO: 503293 - DNA, 33 bp, Homo sapien
cctaaataaacagaaccgcaaatagtgttccta

SEQ ID NO: 503294 - DNA, 33 bp, Homo sapien
cctaaataaacagaactgcaaatagtgttccta

SEQ ID NO: 503295 - DNA, 33 bp, Homo sapien
ttcctggaagctttcactatcttttgtcctgag

SEQ ID NO: 503296 - DNA, 33 bp, Homo sapien
ttcctggaagctttcagtatcttttgtcctgag

SEQ ID NO: 503297 - DNA, 33 bp, Homo sapien
gcctctccctccattaaagaaataattaaacag

SEQ ID NO: 503298 - DNA, 33 bp, Homo sapien
gcctctccctccattagagaaataattaaacag

SEQ ID NO: 503299 - DNA, 33 bp, Homo sapien
gctagttgtcctgacactgtatctggtttagct

SEQ ID NO: 503300 - DNA, 33 bp, Homo sapien
gctagttgtcctgacattgtatctggtttagct

SEQ ID NO: 503301 - DNA, 33 bp, Homo sapien
gcctagccttggctccccagagtttggatggca

SEQ ID NO: 503302 - DNA, 33 bp, Homo sapien
gcctagccttggctcctcagagtttggatggca

SEQ ID NO: 503303 - DNA, 33 bp, Homo sapien
gatgctacacttaaaagataacacttagagaat

SEQ ID NO: 503304 - DNA, 33 bp, Homo sapien
gatgctacacttaaaatataacacttagagaat

SEQ ID NO: 503305 - DNA, 33 bp, Homo sapien
gaaccagatgttttcactaggaggagattgtgt

SEQ ID NO: 503306 - DNA, 33 bp, Homo sapien
gaaccagatgttttcattaggaggagattgtgt

SEQ ID NO: 503307 - DNA, 33 bp, Homo sapien
cctcactatgtctacacccctccaggtagctcc

SEQ ID NO: 503308 - DNA, 33 bp, Homo sapien
cctcactatgtctacatccctccaggtagctcc

SEQ ID NO: 503309 - DNA, 33 bp, Homo sapien
cgggtaaatgggtaacaaccaagcactagcttt

SEQ ID NO: 503310 - DNA, 33 bp, Homo sapien
cgggtaaatgggtaacgaccaagcactagcttt

SEQ ID NO: 503311 - DNA, 33 bp, Homo sapien
acacactaactgaaaaagatggctgttactgac

SEQ ID NO: 503312 - DNA, 33 bp, Homo sapien
acacactaactgaaaaggatggctgttactgac

SEQ ID NO: 503313 - DNA, 33 bp, Homo sapien
atattatttgcattaccgagcttcatactgtaa

SEQ ID NO: 503314 - DNA, 33 bp, Homo sapien
atattatttgcattactgagcttcatactgtaa

SEQ ID NO: 503315 - DNA, 33 bp, Homo sapien
ttctgaatggcctattcaagtggggtaactgct

SEQ ID NO: 503316 - DNA, 33 bp, Homo sapien
ttctgaatggcctattgaagtggggtaactgct

SEQ ID NO: 503317 - DNA, 33 bp, Homo sapien
taagcatttatccagaacaaaagacaaaacaca

SEQ ID NO: 503318 - DNA, 33 bp, Homo sapien
taagcatttatccagatcaaaagacaaaacaca

SEQ ID NO: 503319 - DNA, 33 bp, Homo sapien
gccctttgactgttgaagaaagaaagcatgtgc

SEQ ID NO: 503320 - DNA, 33 bp, Homo sapien
gccctttgactgttgatgaaagaaagcatgtgc

SEQ ID NO: 503321 - DNA, 33 bp, Homo sapien
cggaccctttagttgacgattttttatttgcca

SEQ ID NO: 503322 - DNA, 33 bp, Homo sapien
cggaccctttagttgatgattttttatttgcca

SEQ ID NO: 503323 - DNA, 33 bp, Homo sapien
aagctgtgtcacaaaaacatgtcacacctctgc

SEQ ID NO: 503324 - DNA, 33 bp, Homo sapien
aagctgtgtcacaaaaccatgtcacacctctgc

SEQ ID NO: 503325 - DNA, 33 bp, Homo sapien
attcctgccgttgatacaatactggttatgtgg

SEQ ID NO: 503326 - DNA, 33 bp, Homo sapien
attcctgccgttgatataatactggttatgtgg

SEQ ID NO: 503327 - DNA, 33 bp, Homo sapien
aatacacactcttggacgaggaggtacctacca

SEQ ID NO: 503328 - DNA, 33 bp, Homo sapien
aatacacactcttggaggaggaggtacctacca

SEQ ID NO: 503329 - DNA, 33 bp, Homo sapien
agtgtgatagggaacaatgaccctggaaatagt

SEQ ID NO: 503330 - DNA, 33 bp, Homo sapien
agtgtgatagggaacagtgaccctggaaatagt

SEQ ID NO: 503331 - DNA, 33 bp, Homo sapien
cttactgcatgacacacgaactctccctgaggc

SEQ ID NO: 503332 - DNA, 33 bp, Homo sapien
cttactgcatgacacaggaactctccctgaggc

SEQ ID NO: 503333 - DNA, 33 bp, Homo sapien
gtgggaaaggaaccaccctgtacacaaatagca

SEQ ID NO: 503334 - DNA, 33 bp, Homo sapien
gtgggaaaggaaccactctgtacacaaatagca

SEQ ID NO: 503335 - DNA, 33 bp, Homo sapien
gcccatgctaccacaccgcttgtaatagagtag

SEQ ID NO: 503336 - DNA, 33 bp, Homo sapien
gcccatgctaccacactgcttgtaatagagtag

SEQ ID NO: 503337 - DNA, 33 bp, Homo sapien
gacttttagaagaaaacaggacgtacgttcccc

SEQ ID NO: 503338 - DNA, 33 bp, Homo sapien
gacttttagaagaaaataggacgtacgttcccc

SEQ ID NO: 503339 - DNA, 33 bp, Homo sapien
ttaaagcttagttggaaaagtacatatttactt

SEQ ID NO: 503340 - DNA, 33 bp, Homo sapien
ttaaagcttagttggacaagtacatatttactt

SEQ ID NO: 503341 - DNA, 33 bp, Homo sapien
ttaatgactgccactacagcattaaagatgaat

SEQ ID NO: 503342 - DNA, 33 bp, Homo sapien
ttaatgactgccactagagcattaaagatgaat

SEQ ID NO: 503343 - DNA, 33 bp, Homo sapien
ctccttttctctgtaaatatatctcacaagatg

SEQ ID NO: 503344 - DNA, 33 bp, Homo sapien
ctccttttctctgtaagtatatctcacaagatg

SEQ ID NO: 503345 - DNA, 33 bp, Homo sapien
ttgtaggccgtggaaaaagtcataggtctattt

SEQ ID NO: 503346 - DNA, 33 bp, Homo sapien
ttgtaggccgtggaaatagtcataggtctattt

SEQ ID NO: 503347 - DNA, 33 bp, Homo sapien
agaattccagccaactaaactggcagcttttat

SEQ ID NO: 503348 - DNA, 33 bp, Homo sapien
agaattccagccaactgaactggcagcttttat

SEQ ID NO: 503349 - DNA, 33 bp, Homo sapien
caggaagaatttgacaaaaggacacaggctgat

SEQ ID NO: 503350 - DNA, 33 bp, Homo sapien
caggaagaatttgacacaaggacacaggctgat

SEQ ID NO: 503351 - DNA, 33 bp, Homo sapien
tagcctgcatattagccgagattgtttctcaaa

SEQ ID NO: 503352 - DNA, 33 bp, Homo sapien
tagcctgcatattagctgagattgtttctcaaa

SEQ ID NO: 503353 - DNA, 33 bp, Homo sapien
tgtaaaatctattctccaaaatcccggtttctt

SEQ ID NO: 503354 - DNA, 33 bp, Homo sapien
tgtaaaatctattctctaaaatcccggtttctt

SEQ ID NO: 503355 - DNA, 33 bp, Homo sapien
acaaaatttgaggttcactaacattatcatcct

SEQ ID NO: 503356 - DNA, 33 bp, Homo sapien
acaaaatttgaggttcgctaacattatcatcct

SEQ ID NO: 503357 - DNA, 33 bp, Homo sapien
cttgcaccacagcagaagaaacttacaccaacc

SEQ ID NO: 503358 - DNA, 33 bp, Homo sapien
cttgcaccacagcagaggaaacttacaccaacc

SEQ ID NO: 503359 - DNA, 33 bp, Homo sapien
atccggaccaaaatccaggatgaaaagaaacag

SEQ ID NO: 503360 - DNA, 33 bp, Homo sapien
atccggaccaaaatccgggatgaaaagaaacag

SEQ ID NO: 503361 - DNA, 33 bp, Homo sapien
ggcaatggaacttcagacaagtttatgaaactt

SEQ ID NO: 503362 - DNA, 33 bp, Homo sapien
ggcaatggaacttcaggcaagtttatgaaactt

SEQ ID NO: 503363 - DNA, 33 bp, Homo sapien
caagttacatcgtgaacgctttgcagcttagaa

SEQ ID NO: 503364 - DNA, 33 bp, Homo sapien
caagttacatcgtgaatgctttgcagcttagaa

SEQ ID NO: 503365 - DNA, 33 bp, Homo sapien
tgactcaatttgtgtcactttaattttatccta

SEQ ID NO: 503366 - DNA, 33 bp, Homo sapien
tgactcaatttgtgtcgctttaattttatccta

SEQ ID NO: 503367 - DNA, 33 bp, Homo sapien
ggagagagtaggggcacggtgtgttccacaggt

SEQ ID NO: 503368 - DNA, 33 bp, Homo sapien
ggagagagtaggggcatggtgtgttccacaggt

SEQ ID NO: 503369 - DNA, 33 bp, Homo sapien
ataatcagagttgtgacagttgaagaagtcagc

SEQ ID NO: 503370 - DNA, 33 bp, Homo sapien
ataatcagagttgtgatagttgaagaagtcagc

SEQ ID NO: 503371 - DNA, 33 bp, Homo sapien
gcttactagtcaaaaacctctatctactctcta

SEQ ID NO: 503372 - DNA, 33 bp, Homo sapien
gcttactagtcaaaaagctctatctactctcta

SEQ ID NO: 503373 - DNA, 33 bp, Homo sapien
ttttctcagtgtcataatatatcctttaaagaa

SEQ ID NO: 503374 - DNA, 33 bp, Homo sapien
ttttctcagtgtcatagtatatcctttaaagaa

SEQ ID NO: 503375 - DNA, 33 bp, Homo sapien
tggcctgcattcttcaaaaacatcaaggcctag

SEQ ID NO: 503376 - DNA, 33 bp, Homo sapien
tggcctgcattcttcagaaacatcaaggcctag

SEQ ID NO: 503377 - DNA, 33 bp, Homo sapien
acaagaatttagccaacggccaagttagcagac

SEQ ID NO: 503378 - DNA, 33 bp, Homo sapien
acaagaatttagccaatggccaagttagcagac

SEQ ID NO: 503379 - DNA, 33 bp, Homo sapien
acctggagaagctaaaagagtgccccaggacac

SEQ ID NO: 503380 - DNA, 33 bp, Homo sapien
acctggagaagctaaatgagtgccccaggacac

SEQ ID NO: 503381 - DNA, 33 bp, Homo sapien
aagagggctgcggtgacagcattacgtgtgcag

SEQ ID NO: 503382 - DNA, 33 bp, Homo sapien
aagagggctgcggtgatagcattacgtgtgcag

SEQ ID NO: 503383 - DNA, 33 bp, Homo sapien
cagaagggagacagccaacagcctcagaggcca

SEQ ID NO: 503384 - DNA, 33 bp, Homo sapien
cagaagggagacagccgacagcctcagaggcca

SEQ ID NO: 503385 - DNA, 33 bp, Homo sapien
gactgattatcgtataccttgagaacatatatg

SEQ ID NO: 503386 - DNA, 33 bp, Homo sapien
gactgattatcgtatatcttgagaacatatatg

SEQ ID NO: 503387 - DNA, 33 bp, Homo sapien
gtattttcttcaatacaaaactgggttccacca

SEQ ID NO: 503388 - DNA, 33 bp, Homo sapien
gtattttcttcaataccaaactgggttccacca

SEQ ID NO: 503389 - DNA, 33 bp, Homo sapien
aggtatacccggagacaacctacaaagcagact

SEQ ID NO: 503390 - DNA, 33 bp, Homo sapien
aggtatacccggagaccacctacaaagcagact

SEQ ID NO: 503391 - DNA, 33 bp, Homo sapien
aaacagcagtgagaacaattgcaacacaaaaac

SEQ ID NO: 503392 - DNA, 33 bp, Homo sapien
aaacagcagtgagaaccattgcaacacaaaaac

SEQ ID NO: 503393 - DNA, 33 bp, Homo sapien
tgctgacatgatagtaactccgggtggccagga

SEQ ID NO: 503394 - DNA, 33 bp, Homo sapien
tgctgacatgatagtagctccgggtggccagga

SEQ ID NO: 503395 - DNA, 33 bp, Homo sapien
ctctgtcggtttggacaagatcagaaagcaatt

SEQ ID NO: 503396 - DNA, 33 bp, Homo sapien
ctctgtcggtttggaccagatcagaaagcaatt

SEQ ID NO: 503397 - DNA, 33 bp, Homo sapien
ctgtcccatcctagagaaagaggagtttgaaca

SEQ ID NO: 503398 - DNA, 33 bp, Homo sapien
ctgtcccatcctagagtaagaggagtttgaaca

SEQ ID NO: 503399 - DNA, 33 bp, Homo sapien
ggtagagcttcctcatcagtcattttggaggag

SEQ ID NO: 503400 - DNA, 33 bp, Homo sapien
ggtagagcttcctcattagtcattttggaggag

SEQ ID NO: 503401 - DNA, 33 bp, Homo sapien
tcagtgataggtgtaaagcctgatagctatgtg

SEQ ID NO: 503402 - DNA, 33 bp, Homo sapien
tcagtgataggtgtaaggcctgatagctatgtg

SEQ ID NO: 503403 - DNA, 33 bp, Homo sapien
acagctagtaagcagacgttgaaatttaaaccc

SEQ ID NO: 503404 - DNA, 33 bp, Homo sapien
acagctagtaagcagatgttgaaatttaaaccc

SEQ ID NO: 503405 - DNA, 33 bp, Homo sapien
cagaggtgtcaccaggaaccaagaaccctgcag

SEQ ID NO: 503406 - DNA, 33 bp, Homo sapien
cagaggtgtcaccagggaccaagaaccctgcag

SEQ ID NO: 503407 - DNA, 33 bp, Homo sapien
tttgtccctaacaaaaagacctacaccctgggg

SEQ ID NO: 503408 - DNA, 33 bp, Homo sapien
tttgtccctaacaaaatgacctacaccctgggg

SEQ ID NO: 503409 - DNA, 33 bp, Homo sapien
tcctactccttcttgacggatgaagttttaggc

SEQ ID NO: 503410 - DNA, 33 bp, Homo sapien
tcctactccttcttgatggatgaagttttaggc

SEQ ID NO: 503411 - DNA, 33 bp, Homo sapien
tcctagttcagaagaacgaagccaagaaacttt

SEQ ID NO: 503412 - DNA, 33 bp, Homo sapien
tcctagttcagaagaatgaagccaagaaacttt

SEQ ID NO: 503413 - DNA, 33 bp, Homo sapien
acagaagaagcagctgaagagagaggccaaaac

SEQ ID NO: 503414 - DNA, 33 bp, Homo sapien
acagaagaagcagctggagagagaggccaaaac

SEQ ID NO: 503415 - DNA, 33 bp, Homo sapien
cggtctacataagcaacatctaatgacaatatc

SEQ ID NO: 503416 - DNA, 33 bp, Homo sapien
cggtctacataagcaatatctaatgacaatatc

SEQ ID NO: 503417 - DNA, 33 bp, Homo sapien
caagatgaaggctaaaacacaccactcaagaga

SEQ ID NO: 503418 - DNA, 33 bp, Homo sapien
caagatgaaggctaaatcacaccactcaagaga

SEQ ID NO: 503419 - DNA, 33 bp, Homo sapien
agctgcccttaatagcaatatttcaaatagtca

SEQ ID NO: 503420 - DNA, 33 bp, Homo sapien
agctgcccttaatagcgatatttcaaatagtca

SEQ ID NO: 503421 - DNA, 33 bp, Homo sapien
ggcacacagttggtacagagtaaatgttgaaca

SEQ ID NO: 503422 - DNA, 33 bp, Homo sapien
ggcacacagttggtacggagtaaatgttgaaca

SEQ ID NO: 503423 - DNA, 33 bp, Homo sapien
acagcgcacagttggaagaaagttgggtgccat

SEQ ID NO: 503424 - DNA, 33 bp, Homo sapien
acagcgcacagttggaggaaagttgggtgccat

SEQ ID NO: 503425 - DNA, 33 bp, Homo sapien
ccttccttgcagaagacggaagacagccttgac

SEQ ID NO: 503426 - DNA, 33 bp, Homo sapien
ccttccttgcagaagatggaagacagccttgac

SEQ ID NO: 503427 - DNA, 33 bp, Homo sapien
cagcagtgaatcaaaaaaactagaccatgagat

SEQ ID NO: 503428 - DNA, 33 bp, Homo sapien
cagcagtgaatcaaaagaactagaccatgagat

SEQ ID NO: 503429 - DNA, 33 bp, Homo sapien
cttttgattttttttaacctgcatacatccact

SEQ ID NO: 503430 - DNA, 33 bp, Homo sapien
cttttgattttttttaccctgcatacatccact

SEQ ID NO: 503431 - DNA, 33 bp, Homo sapien
ttaataccatctctaagacagcaaaggcaaatg

SEQ ID NO: 503432 - DNA, 33 bp, Homo sapien
ttaataccatctctaatacagcaaaggcaaatg

SEQ ID NO: 503433 - DNA, 33 bp, Homo sapien
cttccgtgtgagcagacggtcagttactaacat

SEQ ID NO: 503434 - DNA, 33 bp, Homo sapien
cttccgtgtgagcagatggtcagttactaacat

SEQ ID NO: 503435 - DNA, 33 bp, Homo sapien
ctcataaaatgcttgaataagactcagaaacag

SEQ ID NO: 503436 - DNA, 33 bp, Homo sapien
ctcataaaatgcttgagtaagactcagaaacag

SEQ ID NO: 503437 - DNA, 33 bp, Homo sapien
gaacaaatagtcactccctgtgttttcaaatgt

SEQ ID NO: 503438 - DNA, 33 bp, Homo sapien
gaacaaatagtcactctctgtgttttcaaatgt

SEQ ID NO: 503439 - DNA, 33 bp, Homo sapien
aagggtgtaagggtacaatgagaggggacagag

SEQ ID NO: 503440 - DNA, 33 bp, Homo sapien
aagggtgtaagggtacgatgagaggggacagag

SEQ ID NO: 503441 - DNA, 33 bp, Homo sapien
ataacatatgtagaagaaaaatgtgcagcaata

SEQ ID NO: 503442 - DNA, 33 bp, Homo sapien
ataacatatgtagaaggaaaatgtgcagcaata

SEQ ID NO: 503443 - DNA, 33 bp, Homo sapien
cctttactctctttcactcttccaaagcatccc

SEQ ID NO: 503444 - DNA, 33 bp, Homo sapien
cctttactctctttcattcttccaaagcatccc

SEQ ID NO: 503445 - DNA, 33 bp, Homo sapien
taaaattgtgttagaacgacgtcttctgatagt

SEQ ID NO: 503446 - DNA, 33 bp, Homo sapien
taaaattgtgttagaatgacgtcttctgatagt

SEQ ID NO: 503447 - DNA, 33 bp, Homo sapien
taaaatacgtccttggaacatttacacaaacag

SEQ ID NO: 503448 - DNA, 33 bp, Homo sapien
taaaatacgtccttggcacatttacacaaacag

SEQ ID NO: 503449 - DNA, 33 bp, Homo sapien
ggtgtgtttttacttcgcgtcttttactattat

SEQ ID NO: 503450 - DNA, 33 bp, Homo sapien
ggtgtgtttttacttctcgtcttttactattat

SEQ ID NO: 503451 - DNA, 33 bp, Homo sapien
atcaatcaatgtttctcaaatgagtcaatgtaa

SEQ ID NO: 503452 - DNA, 33 bp, Homo sapien
atcaatcaatgtttcttaaatgagtcaatgtaa

SEQ ID NO: 503453 - DNA, 33 bp, Homo sapien
tccatccaaaggtgccaagagtccagttctact

SEQ ID NO: 503454 - DNA, 33 bp, Homo sapien
tccatccaaaggtgccgagagtccagttctact

SEQ ID NO: 503455 - DNA, 33 bp, Homo sapien
cctagcacagggcttaacacaggttggacatgc

SEQ ID NO: 503456 - DNA, 33 bp, Homo sapien
cctagcacagggcttagcacaggttggacatgc

SEQ ID NO: 503457 - DNA, 33 bp, Homo sapien
gaaaacatttatgggaaggtaatggcggtaaac

SEQ ID NO: 503458 - DNA, 33 bp, Homo sapien
gaaaacatttatgggagggtaatggcggtaaac

SEQ ID NO: 503459 - DNA, 33 bp, Homo sapien
tacttttgaagtgcaaaaaagaacttacattat

SEQ ID NO: 503460 - DNA, 33 bp, Homo sapien
tacttttgaagtgcaataaagaacttacattat

SEQ ID NO: 503461 - DNA, 33 bp, Homo sapien
agcaggccaaaggaagaacaatttggtttccat

SEQ ID NO: 503462 - DNA, 33 bp, Homo sapien
agcaggccaaaggaagtacaatttggtttccat

SEQ ID NO: 503463 - DNA, 33 bp, Homo sapien
tctgatggtcaactccagaagaaggagtagaaa

SEQ ID NO: 503464 - DNA, 33 bp, Homo sapien
tctgatggtcaactccggaagaaggagtagaaa

SEQ ID NO: 503465 - DNA, 33 bp, Homo sapien
ttttctctctctcaacaaagcctagcacatttt

SEQ ID NO: 503466 - DNA, 33 bp, Homo sapien
ttttctctctctcaacgaagcctagcacatttt

SEQ ID NO: 503467 - DNA, 33 bp, Homo sapien
ttttattaatgtgagcactgctttgaaatatta

SEQ ID NO: 503468 - DNA, 33 bp, Homo sapien
ttttattaatgtgagcgctgctttgaaatatta

SEQ ID NO: 503469 - DNA, 33 bp, Homo sapien
tactcccgcttgtattgaaaactcacttaggtt

SEQ ID NO: 503470 - DNA, 33 bp, Homo sapien
tactcccgcttgtatttaaaactcacttaggtt

SEQ ID NO: 503471 - DNA, 33 bp, Homo sapien
catttgccttcactgaccaagattcaagctgca

SEQ ID NO: 503472 - DNA, 33 bp, Homo sapien
catttgccttcactgagcaagattcaagctgca

SEQ ID NO: 503473 - DNA, 33 bp, Homo sapien
aataaagggaaggagaaagtcagtgaaagtggt

SEQ ID NO: 503474 - DNA, 33 bp, Homo sapien
aataaagggaaggagagagtcagtgaaagtggt

SEQ ID NO: 503475 - DNA, 33 bp, Homo sapien
attgcggtgaaactaccatagcatagtgggtgg

SEQ ID NO: 503476 - DNA, 33 bp, Homo sapien
attgcggtgaaactactatagcatagtgggtgg

SEQ ID NO: 503477 - DNA, 33 bp, Homo sapien
ctgtgtactgcctcaaagtgaataatagcttgg

SEQ ID NO: 503478 - DNA, 33 bp, Homo sapien
ctgtgtactgcctcaaggtgaataatagcttgg

SEQ ID NO: 503479 - DNA, 33 bp, Homo sapien
taatggccatcaataaaacagcctgactagttc

SEQ ID NO: 503480 - DNA, 33 bp, Homo sapien
taatggccatcaataacacagcctgactagttc

SEQ ID NO: 503481 - DNA, 33 bp, Homo sapien
acagcactggaacccaccatttcccaggtctct

SEQ ID NO: 503482 - DNA, 33 bp, Homo sapien
acagcactggaacccatcatttcccaggtctct

SEQ ID NO: 503483 - DNA, 33 bp, Homo sapien
acaacatcatgttctgaagcataaaccagaggt

SEQ ID NO: 503484 - DNA, 33 bp, Homo sapien
acaacatcatgttctggagcataaaccagaggt

SEQ ID NO: 503485 - DNA, 33 bp, Homo sapien
agaaaattaacaagaaaaatcatcctacaccta

SEQ ID NO: 503486 - DNA, 33 bp, Homo sapien
agaaaattaacaagaacaatcatcctacaccta

SEQ ID NO: 503487 - DNA, 33 bp, Homo sapien
gtccataactccatgcacctagtaactactgca

SEQ ID NO: 503488 - DNA, 33 bp, Homo sapien
gtccataactccatgcgcctagtaactactgca

SEQ ID NO: 503489 - DNA, 33 bp, Homo sapien
cacgtgggatttaacaccaaaatgtgaataact

SEQ ID NO: 503490 - DNA, 33 bp, Homo sapien
cacgtgggatttaacatcaaaatgtgaataact

SEQ ID NO: 503491 - DNA, 33 bp, Homo sapien
gtagagtcactgacccgggagcggctctcctga

SEQ ID NO: 503492 - DNA, 33 bp, Homo sapien
gtagagtcactgaccctggagcggctctcctga

SEQ ID NO: 503493 - DNA, 33 bp, Homo sapien
taataacaaaggacagcatggtcatgccaggga

SEQ ID NO: 503494 - DNA, 33 bp, Homo sapien
taataacaaaggacaggatggtcatgccaggga

SEQ ID NO: 503495 - DNA, 33 bp, Homo sapien
ggaagggtgcaggcaaaagcagagacagaggag

SEQ ID NO: 503496 - DNA, 33 bp, Homo sapien
ggaagggtgcaggcaagagcagagacagaggag

SEQ ID NO: 503497 - DNA, 33 bp, Homo sapien
tcctccagaattcaacacttggaagatggggaa

SEQ ID NO: 503498 - DNA, 33 bp, Homo sapien
tcctccagaattcaacccttggaagatggggaa

SEQ ID NO: 503499 - DNA, 33 bp, Homo sapien
ttaagttttgtataagccctctgcttttccttt

SEQ ID NO: 503500 - DNA, 33 bp, Homo sapien
ttaagttttgtataagtcctctgcttttccttt

SEQ ID NO: 503501 - DNA, 33 bp, Homo sapien
tgcttagctaattgagcccatttgttcattcaa

SEQ ID NO: 503502 - DNA, 33 bp, Homo sapien
tgcttagctaattgagtccatttgttcattcaa

SEQ ID NO: 503503 - DNA, 33 bp, Homo sapien
tccatcccttgggccaacttctgaattctccca

SEQ ID NO: 503504 - DNA, 33 bp, Homo sapien
tccatcccttgggccaccttctgaattctccca

SEQ ID NO: 503505 - DNA, 33 bp, Homo sapien
gcatcaattgcaatgaccatatggtttttagcc

SEQ ID NO: 503506 - DNA, 33 bp, Homo sapien
gcatcaattgcaatgatcatatggtttttagcc

SEQ ID NO: 503507 - DNA, 33 bp, Homo sapien
ataatcactgcagctaataatgtgctcagtctc

SEQ ID NO: 503508 - DNA, 33 bp, Homo sapien
ataatcactgcagctagtaatgtgctcagtctc

SEQ ID NO: 503509 - DNA, 33 bp, Homo sapien
tcccttggctgccctaaatgggaatactgaggt

SEQ ID NO: 503510 - DNA, 33 bp, Homo sapien
tcccttggctgccctagatgggaatactgaggt

SEQ ID NO: 503511 - DNA, 33 bp, Homo sapien
ccaccatccaaaggcaactcatactcaacgtag

SEQ ID NO: 503512 - DNA, 33 bp, Homo sapien
ccaccatccaaaggcacctcatactcaacgtag

SEQ ID NO: 503513 - DNA, 33 bp, Homo sapien
agaaggtgaaagaaaagctgttgcctagaatgg

SEQ ID NO: 503514 - DNA, 33 bp, Homo sapien
agaaggtgaaagaaaatctgttgcctagaatgg

SEQ ID NO: 503515 - DNA, 33 bp, Homo sapien
tgatggtaattatcaccctttcactttcagttg

SEQ ID NO: 503516 - DNA, 33 bp, Homo sapien
tgatggtaattatcactctttcactttcagttg

SEQ ID NO: 503517 - DNA, 33 bp, Homo sapien
atgtgctcagggtgaggagagggtgctgtgctc

SEQ ID NO: 503518 - DNA, 33 bp, Homo sapien
atgtgctcagggtgagtagagggtgctgtgctc

SEQ ID NO: 503519 - DNA, 33 bp, Homo sapien
gtataaaagaaaattccagctgattcttacaac

SEQ ID NO: 503520 - DNA, 33 bp, Homo sapien
gtataaaagaaaattctagctgattcttacaac

SEQ ID NO: 503521 - DNA, 33 bp, Homo sapien
gttctttactgaataacatagactgaagctgac

SEQ ID NO: 503522 - DNA, 33 bp, Homo sapien
gttctttactgaataatatagactgaagctgac

SEQ ID NO: 503523 - DNA, 33 bp, Homo sapien
ccatttgacttccttacgtttgttaaagacacc

SEQ ID NO: 503524 - DNA, 33 bp, Homo sapien
ccatttgacttccttatgtttgttaaagacacc

SEQ ID NO: 503525 - DNA, 33 bp, Homo sapien
gcaatgtactcatgaaacaggctagggtgtaaa

SEQ ID NO: 503526 - DNA, 33 bp, Homo sapien
gcaatgtactcatgaagcaggctagggtgtaaa

SEQ ID NO: 503527 - DNA, 33 bp, Homo sapien
tgattgtaatcaagaaagggcagcagaaccagc

SEQ ID NO: 503528 - DNA, 33 bp, Homo sapien
tgattgtaatcaagaacgggcagcagaaccagc

SEQ ID NO: 503529 - DNA, 33 bp, Homo sapien
acattgttctttggtaccgaagtgccttccatt

SEQ ID NO: 503530 - DNA, 33 bp, Homo sapien
acattgttctttggtatcgaagtgccttccatt

SEQ ID NO: 503531 - DNA, 33 bp, Homo sapien
gtttgacttctctcaaaggcactgcagattact

SEQ ID NO: 503532 - DNA, 33 bp, Homo sapien
gtttgacttctctcaacggcactgcagattact

SEQ ID NO: 503533 - DNA, 33 bp, Homo sapien
gtctattcttatttcccatgagaggcaactgta

SEQ ID NO: 503534 - DNA, 33 bp, Homo sapien
gtctattcttatttcctatgagaggcaactgta

SEQ ID NO: 503535 - DNA, 33 bp, Homo sapien
ccaatgtcaagtcgagacctccataggatgcta

SEQ ID NO: 503536 - DNA, 33 bp, Homo sapien
ccaatgtcaagtcgaggcctccataggatgcta

SEQ ID NO: 503537 - DNA, 33 bp, Homo sapien
cacatctctagaaaagactaccccaaaatgttc

SEQ ID NO: 503538 - DNA, 33 bp, Homo sapien
cacatctctagaaaagcctaccccaaaatgttc

SEQ ID NO: 503539 - DNA, 33 bp, Homo sapien
gggcagtgcacacttaaggcatgaaatccggcg

SEQ ID NO: 503540 - DNA, 33 bp, Homo sapien
gggcagtgcacacttagggcatgaaatccggcg

SEQ ID NO: 503541 - DNA, 33 bp, Homo sapien
ttaaactcttctctacacctttgtgtcccaaac

SEQ ID NO: 503542 - DNA, 33 bp, Homo sapien
ttaaactcttctctacgcctttgtgtcccaaac

SEQ ID NO: 503543 - DNA, 33 bp, Homo sapien
accttggggtttgaacggctcattgaaggtaat

SEQ ID NO: 503544 - DNA, 33 bp, Homo sapien
accttggggtttgaactgctcattgaaggtaat

SEQ ID NO: 503545 - DNA, 33 bp, Homo sapien
attcctaccattccagaaacactaacttctcaa

SEQ ID NO: 503546 - DNA, 33 bp, Homo sapien
attcctaccattccagtaacactaacttctcaa

SEQ ID NO: 503547 - DNA, 33 bp, Homo sapien
tatctgtctctgcaaacgctgtcaatacatctg

SEQ ID NO: 503548 - DNA, 33 bp, Homo sapien
tatctgtctctgcaaatgctgtcaatacatctg

SEQ ID NO: 503549 - DNA, 33 bp, Homo sapien
taagcttttatattagccatttcgatgagataa

SEQ ID NO: 503550 - DNA, 33 bp, Homo sapien
taagcttttatattagtcatttcgatgagataa

SEQ ID NO: 503551 - DNA, 33 bp, Homo sapien
agcttttacaattcacactcctagaagagacac

SEQ ID NO: 503552 - DNA, 33 bp, Homo sapien
agcttttacaattcacgctcctagaagagacac

SEQ ID NO: 503553 - DNA, 33 bp, Homo sapien
ggggaaaaggaaagataagaaagacaagtcaac

SEQ ID NO: 503554 - DNA, 33 bp, Homo sapien
ggggaaaaggaaagatcagaaagacaagtcaac

SEQ ID NO: 503555 - DNA, 33 bp, Homo sapien
tgagccctgggtagaaagggatgctatcctaat

SEQ ID NO: 503556 - DNA, 33 bp, Homo sapien
tgagccctgggtagaaggggatgctatcctaat

SEQ ID NO: 503557 - DNA, 33 bp, Homo sapien
atgtaactgagatttaaagaagacttgataact

SEQ ID NO: 503558 - DNA, 33 bp, Homo sapien
atgtaactgagatttagagaagacttgataact

SEQ ID NO: 503559 - DNA, 33 bp, Homo sapien
gggcatattctcagtaacttttgtatctctcgc

SEQ ID NO: 503560 - DNA, 33 bp, Homo sapien
gggcatattctcagtatcttttgtatctctcgc

SEQ ID NO: 503561 - DNA, 33 bp, Homo sapien
ctgaatttcagaagcaaatattcatcctactga

SEQ ID NO: 503562 - DNA, 33 bp, Homo sapien
ctgaatttcagaagcagatattcatcctactga

SEQ ID NO: 503563 - DNA, 33 bp, Homo sapien
cccatactccaaactcgaggcccactcaagcct

SEQ ID NO: 503564 - DNA, 33 bp, Homo sapien
cccatactccaaactctaggcccactcaagcct

SEQ ID NO: 503565 - DNA, 33 bp, Homo sapien
cttatcattaacatcactcaaattttatagtta

SEQ ID NO: 503566 - DNA, 33 bp, Homo sapien
cttatcattaacatcagtcaaattttatagtta

SEQ ID NO: 503567 - DNA, 33 bp, Homo sapien
aatatcctgataaaacagacttccacaagtagg

SEQ ID NO: 503568 - DNA, 33 bp, Homo sapien
aatatcctgataaaacggacttccacaagtagg

SEQ ID NO: 503569 - DNA, 33 bp, Homo sapien
aaggggagtgacaaagaaaaccataaccctgaa

SEQ ID NO: 503570 - DNA, 33 bp, Homo sapien
aaggggagtgacaaaggaaaccataaccctgaa

SEQ ID NO: 503571 - DNA, 33 bp, Homo sapien
aagtttctaccagctgaagttgctgattctggt

SEQ ID NO: 503572 - DNA, 33 bp, Homo sapien
aagtttctaccagctgcagttgctgattctggt

SEQ ID NO: 503573 - DNA, 33 bp, Homo sapien
acaataagacttttaaatgttcaggatgtttat

SEQ ID NO: 503574 - DNA, 33 bp, Homo sapien
acaataagacttttaagtgttcaggatgtttat

SEQ ID NO: 503575 - DNA, 33 bp, Homo sapien
ctcagatcactcacaacaaggagtttgcctacg

SEQ ID NO: 503576 - DNA, 33 bp, Homo sapien
ctcagatcactcacaataaggagtttgcctacg

SEQ ID NO: 503577 - DNA, 33 bp, Homo sapien
aggttgataattgaaactccacaccacccccct

SEQ ID NO: 503578 - DNA, 33 bp, Homo sapien
aggttgataattgaaagtccacaccacccccct

SEQ ID NO: 503579 - DNA, 33 bp, Homo sapien
aaaggtcagataatcaccacatccttttctttc

SEQ ID NO: 503580 - DNA, 33 bp, Homo sapien
aaaggtcagataatcagcacatccttttctttc

SEQ ID NO: 503581 - DNA, 33 bp, Homo sapien
attctcatctgagcctaaggaaaatagtcatct

SEQ ID NO: 503582 - DNA, 33 bp, Homo sapien
attctcatctgagcctgaggaaaatagtcatct

SEQ ID NO: 503583 - DNA, 33 bp, Homo sapien
gtcaggcatagaggataacttaaaaacacgcat

SEQ ID NO: 503584 - DNA, 33 bp, Homo sapien
gtcaggcatagaggatgacttaaaaacacgcat

SEQ ID NO: 503585 - DNA, 33 bp, Homo sapien
tgatctggaattggaaaacaatacagtattttt

SEQ ID NO: 503586 - DNA, 33 bp, Homo sapien
tgatctggaattggaacacaatacagtattttt

SEQ ID NO: 503587 - DNA, 33 bp, Homo sapien
tgttattccatataaactacatcagctgtcccc

SEQ ID NO: 503588 - DNA, 33 bp, Homo sapien
tgttattccatataaagtacatcagctgtcccc

SEQ ID NO: 503589 - DNA, 33 bp, Homo sapien
gtaaacagtgttcaagaataaggcacaaacaaa

SEQ ID NO: 503590 - DNA, 33 bp, Homo sapien
gtaaacagtgttcaagcataaggcacaaacaaa

SEQ ID NO: 503591 - DNA, 33 bp, Homo sapien
gatcatgacttcacccaagagcaaggaggctaa

SEQ ID NO: 503592 - DNA, 33 bp, Homo sapien
gatcatgacttcacccgagagcaaggaggctaa

SEQ ID NO: 503593 - DNA, 33 bp, Homo sapien
gagttcctgtgaatacaatatgttacatggcaa

SEQ ID NO: 503594 - DNA, 33 bp, Homo sapien
gagttcctgtgaatacgatatgttacatggcaa

SEQ ID NO: 503595 - DNA, 33 bp, Homo sapien
ggttgaaataatgagcaataggacaattcaatc

SEQ ID NO: 503596 - DNA, 33 bp, Homo sapien
ggttgaaataatgagcgataggacaattcaatc

SEQ ID NO: 503597 - DNA, 33 bp, Homo sapien
ggtttaggggacttgacaattgacagagtaaag

SEQ ID NO: 503598 - DNA, 33 bp, Homo sapien
ggtttaggggacttgagaattgacagagtaaag

SEQ ID NO: 503599 - DNA, 33 bp, Homo sapien
aacaaactgggaagacaatttcatcaaatatgg

SEQ ID NO: 503600 - DNA, 33 bp, Homo sapien
aacaaactgggaagacgatttcatcaaatatgg

SEQ ID NO: 503601 - DNA, 33 bp, Homo sapien
ctaacccaaattgctgaacagaatgctgtaagt

SEQ ID NO: 503602 - DNA, 33 bp, Homo sapien
ctaacccaaattgctggacagaatgctgtaagt

SEQ ID NO: 503603 - DNA, 33 bp, Homo sapien
aaatgatatgagtaaaacagggtgagattttct

SEQ ID NO: 503604 - DNA, 33 bp, Homo sapien
aaatgatatgagtaaaccagggtgagattttct

SEQ ID NO: 503605 - DNA, 33 bp, Homo sapien
gtaagtcaacaatcgacagtgagaaaacaaact

SEQ ID NO: 503606 - DNA, 33 bp, Homo sapien
gtaagtcaacaatcgatagtgagaaaacaaact

SEQ ID NO: 503607 - DNA, 33 bp, Homo sapien
gtgttgatattggtgacgaaatttaagtagaaa

SEQ ID NO: 503608 - DNA, 33 bp, Homo sapien
gtgttgatattggtgatgaaatttaagtagaaa

SEQ ID NO: 503609 - DNA, 33 bp, Homo sapien
ggcacttttctggggccgacaatttaggctaag

SEQ ID NO: 503610 - DNA, 33 bp, Homo sapien
ggcacttttctggggctgacaatttaggctaag

SEQ ID NO: 503611 - DNA, 33 bp, Homo sapien
tataagccattaaaaaaaaataggcattcaagt

SEQ ID NO: 503612 - DNA, 33 bp, Homo sapien
tataagccattaaaaacaaataggcattcaagt

SEQ ID NO: 503613 - DNA, 33 bp, Homo sapien
ctcctagcagatgccgaaggttctaactctctg

SEQ ID NO: 503614 - DNA, 33 bp, Homo sapien
ctcctagcagatgccggaggttctaactctctg

SEQ ID NO: 503615 - DNA, 33 bp, Homo sapien
atttgcctcaacacagaccgggggctcctagca

SEQ ID NO: 503616 - DNA, 33 bp, Homo sapien
atttgcctcaacacaggccgggggctcctagca

SEQ ID NO: 503617 - DNA, 33 bp, Homo sapien
aaaacacatgactaaaaaatgaaaatgtaaggg

SEQ ID NO: 503618 - DNA, 33 bp, Homo sapien
aaaacacatgactaaagaatgaaaatgtaaggg

SEQ ID NO: 503619 - DNA, 33 bp, Homo sapien
tgtgtttttgaaattaccaaagtcacttgagct

SEQ ID NO: 503620 - DNA, 33 bp, Homo sapien
tgtgtttttgaaattagcaaagtcacttgagct

SEQ ID NO: 503621 - DNA, 33 bp, Homo sapien
ttaccctctgacccagaaatcctatgtctaata

SEQ ID NO: 503622 - DNA, 33 bp, Homo sapien
ttaccctctgacccagcaatcctatgtctaata

SEQ ID NO: 503623 - DNA, 33 bp, Homo sapien
tttgctccatattgcccaattcatcttcatagg

SEQ ID NO: 503624 - DNA, 33 bp, Homo sapien
tttgctccatattgcctaattcatcttcatagg

SEQ ID NO: 503625 - DNA, 33 bp, Homo sapien
caatacagatatggacacatttttcactttaaa

SEQ ID NO: 503626 - DNA, 33 bp, Homo sapien
caatacagatatggactcatttttcactttaaa

SEQ ID NO: 503627 - DNA, 33 bp, Homo sapien
aaagatacacagcagaacacaggagaggagctc

SEQ ID NO: 503628 - DNA, 33 bp, Homo sapien
aaagatacacagcagaccacaggagaggagctc

SEQ ID NO: 503629 - DNA, 33 bp, Homo sapien
tatggggacacaattacccatctgtgaagagag

SEQ ID NO: 503630 - DNA, 33 bp, Homo sapien
tatggggacacaattatccatctgtgaagagag

SEQ ID NO: 503631 - DNA, 33 bp, Homo sapien
ttccctctccctgtacaaatgattgaatggatg

SEQ ID NO: 503632 - DNA, 33 bp, Homo sapien
ttccctctccctgtacgaatgattgaatggatg

SEQ ID NO: 503633 - DNA, 33 bp, Homo sapien
caggggtgtgctcttcacctccagcaccttctt

SEQ ID NO: 503634 - DNA, 33 bp, Homo sapien
caggggtgtgctcttcgcctccagcaccttctt

SEQ ID NO: 503635 - DNA, 33 bp, Homo sapien
tgagagctgacaagggacatattgcctctggac

SEQ ID NO: 503636 - DNA, 33 bp, Homo sapien
tgagagctgacaagggccatattgcctctggac

SEQ ID NO: 503637 - DNA, 33 bp, Homo sapien
ttccaagaggatgtgaaggtttgttccaagcct

SEQ ID NO: 503638 - DNA, 33 bp, Homo sapien
ttccaagaggatgtgagggtttgttccaagcct

SEQ ID NO: 503639 - DNA, 33 bp, Homo sapien
ttggtatgaaagcaaaataagtgtttacctgag

SEQ ID NO: 503640 - DNA, 33 bp, Homo sapien
ttggtatgaaagcaaagtaagtgtttacctgag

SEQ ID NO: 503641 - DNA, 33 bp, Homo sapien
caataggaacataaaaactcaagtaactttaga

SEQ ID NO: 503642 - DNA, 33 bp, Homo sapien
caataggaacataaaagctcaagtaactttaga

SEQ ID NO: 503643 - DNA, 33 bp, Homo sapien
tgaccaacctccttgacgagataaagtttgtgg

SEQ ID NO: 503644 - DNA, 33 bp, Homo sapien
tgaccaacctccttgatgagataaagtttgtgg

SEQ ID NO: 503645 - DNA, 33 bp, Homo sapien
atacagaggaaaatcaaataaactacctctttc

SEQ ID NO: 503646 - DNA, 33 bp, Homo sapien
atacagaggaaaatcagataaactacctctttc

SEQ ID NO: 503647 - DNA, 33 bp, Homo sapien
tttggcaaatatcttgaatctctctgctcttag

SEQ ID NO: 503648 - DNA, 33 bp, Homo sapien
tttggcaaatatcttggatctctctgctcttag

SEQ ID NO: 503649 - DNA, 33 bp, Homo sapien
aaatgtcaccatcaaaagcagacttaaactact

SEQ ID NO: 503650 - DNA, 33 bp, Homo sapien
aaatgtcaccatcaaaggcagacttaaactact

SEQ ID NO: 503651 - DNA, 33 bp, Homo sapien
tcctgctgggatggaacttatattctagttggg

SEQ ID NO: 503652 - DNA, 33 bp, Homo sapien
tcctgctgggatggaatttatattctagttggg

SEQ ID NO: 503653 - DNA, 33 bp, Homo sapien
ctctccaccctgaagcgctccgttatctcaccc

SEQ ID NO: 503654 - DNA, 33 bp, Homo sapien
ctctccaccctgaagctctccgttatctcaccc

SEQ ID NO: 503655 - DNA, 33 bp, Homo sapien
catgactgccttatcaagagaggggactcaagt

SEQ ID NO: 503656 - DNA, 33 bp, Homo sapien
catgactgccttatcaggagaggggactcaagt

SEQ ID NO: 503657 - DNA, 33 bp, Homo sapien
tgaataggtgaagctgacactggctgagagaat

SEQ ID NO: 503658 - DNA, 33 bp, Homo sapien
tgaataggtgaagctggcactggctgagagaat

SEQ ID NO: 503659 - DNA, 33 bp, Homo sapien
ggattggttgaaaccacgaatttgaaaccagcc

SEQ ID NO: 503660 - DNA, 33 bp, Homo sapien
ggattggttgaaaccatgaatttgaaaccagcc

SEQ ID NO: 503661 - DNA, 33 bp, Homo sapien
cttccctgactaatataaggttgaacattttgc

SEQ ID NO: 503662 - DNA, 33 bp, Homo sapien
cttccctgactaatatgaggttgaacattttgc

SEQ ID NO: 503663 - DNA, 33 bp, Homo sapien
gcaggctgtcataataaagtgcagcaagagaaa

SEQ ID NO: 503664 - DNA, 33 bp, Homo sapien
gcaggctgtcataatacagtgcagcaagagaaa

SEQ ID NO: 503665 - DNA, 33 bp, Homo sapien
gaatctggaaacctctcaaatcacaccatggaa

SEQ ID NO: 503666 - DNA, 33 bp, Homo sapien
gaatctggaaacctcttaaatcacaccatggaa

SEQ ID NO: 503667 - DNA, 33 bp, Homo sapien
agcaccactgtggagacagggccagtatgaaga

SEQ ID NO: 503668 - DNA, 33 bp, Homo sapien
agcaccactgtggagatagggccagtatgaaga

SEQ ID NO: 503669 - DNA, 33 bp, Homo sapien
gaaagaaatgtccccactggataaagtcatgcc

SEQ ID NO: 503670 - DNA, 33 bp, Homo sapien
gaaagaaatgtccccattggataaagtcatgcc

SEQ ID NO: 503671 - DNA, 33 bp, Homo sapien
agtgaccttacactgaagaaggctggagaaaca

SEQ ID NO: 503672 - DNA, 33 bp, Homo sapien
agtgaccttacactgaggaaggctggagaaaca

SEQ ID NO: 503673 - DNA, 33 bp, Homo sapien
ccttccacaaagctcactcagcactgggtcaag

SEQ ID NO: 503674 - DNA, 33 bp, Homo sapien
ccttccacaaagctcattcagcactgggtcaag

SEQ ID NO: 503675 - DNA, 33 bp, Homo sapien
cttatgtaagagaatccattgcaaggacctctc

SEQ ID NO: 503676 - DNA, 33 bp, Homo sapien
cttatgtaagagaatctattgcaaggacctctc

SEQ ID NO: 503677 - DNA, 33 bp, Homo sapien
cacagtctcaatcccactccattgtccatcaag

SEQ ID NO: 503678 - DNA, 33 bp, Homo sapien
cacagtctcaatcccattccattgtccatcaag

SEQ ID NO: 503679 - DNA, 33 bp, Homo sapien
gggaaaatggaaattaaagccacaaggagaaaa

SEQ ID NO: 503680 - DNA, 33 bp, Homo sapien
gggaaaatggaaattagagccacaaggagaaaa

SEQ ID NO: 503681 - DNA, 33 bp, Homo sapien
agccccacatctgtaaatggataattgaacagg

SEQ ID NO: 503682 - DNA, 33 bp, Homo sapien
agccccacatctgtaactggataattgaacagg

SEQ ID NO: 503683 - DNA, 33 bp, Homo sapien
ttgctagcccatgttaacgaggtggagatattt

SEQ ID NO: 503684 - DNA, 33 bp, Homo sapien
ttgctagcccatgttaccgaggtggagatattt

SEQ ID NO: 503685 - DNA, 33 bp, Homo sapien
ctggcaacaagtagaacagcgagaagtaggctc

SEQ ID NO: 503686 - DNA, 33 bp, Homo sapien
ctggcaacaagtagaagagcgagaagtaggctc

SEQ ID NO: 503687 - DNA, 33 bp, Homo sapien
caaagaacaagttccacaaatacacctaaatac

SEQ ID NO: 503688 - DNA, 33 bp, Homo sapien
caaagaacaagttccataaatacacctaaatac

SEQ ID NO: 503689 - DNA, 33 bp, Homo sapien
tgttttgaatgaccacagcttcaggtagctctg

SEQ ID NO: 503690 - DNA, 33 bp, Homo sapien
tgttttgaatgaccacggcttcaggtagctctg

SEQ ID NO: 503691 - DNA, 33 bp, Homo sapien
acgatttaaaccagatcagaaagtgtctacata

SEQ ID NO: 503692 - DNA, 33 bp, Homo sapien
acgatttaaaccagattagaaagtgtctacata

SEQ ID NO: 503693 - DNA, 33 bp, Homo sapien
agaagacaagtaataggccttcagagtgacaag

SEQ ID NO: 503694 - DNA, 33 bp, Homo sapien
agaagacaagtaatagtccttcagagtgacaag

SEQ ID NO: 503695 - DNA, 33 bp, Homo sapien
gtctcctgagctctgaactctcaccatgtttgt

SEQ ID NO: 503696 - DNA, 33 bp, Homo sapien
gtctcctgagctctgatctctcaccatgtttgt

SEQ ID NO: 503697 - DNA, 33 bp, Homo sapien
gcaccgaccacaaatcacctccggtcatggact

SEQ ID NO: 503698 - DNA, 33 bp, Homo sapien
gcaccgaccacaaatcgcctccggtcatggact

SEQ ID NO: 503699 - DNA, 33 bp, Homo sapien
catacatgaagccggacgtcaaatcatttattc

SEQ ID NO: 503700 - DNA, 33 bp, Homo sapien
catacatgaagccggatgtcaaatcatttattc

SEQ ID NO: 503701 - DNA, 33 bp, Homo sapien
tgcgggcaagcttcacaaaaagccacattgtca

SEQ ID NO: 503702 - DNA, 33 bp, Homo sapien
tgcgggcaagcttcacgaaaagccacattgtca

SEQ ID NO: 503703 - DNA, 33 bp, Homo sapien
ctttaggttgagagaaactgatatatgttgata

SEQ ID NO: 503704 - DNA, 33 bp, Homo sapien
ctttaggttgagagaagctgatatatgttgata

SEQ ID NO: 503705 - DNA, 33 bp, Homo sapien
tataaaatgatgatacacctagaacaaggacct

SEQ ID NO: 503706 - DNA, 33 bp, Homo sapien
tataaaatgatgatacgcctagaacaaggacct

SEQ ID NO: 503707 - DNA, 33 bp, Homo sapien
gagaagatggatacaaaaattagcttgacctta

SEQ ID NO: 503708 - DNA, 33 bp, Homo sapien
gagaagatggatacaagaattagcttgacctta

SEQ ID NO: 503709 - DNA, 33 bp, Homo sapien
ctgctgtgattttggccatgagatttaactagg

SEQ ID NO: 503710 - DNA, 33 bp, Homo sapien
ctgctgtgattttggctatgagatttaactagg

SEQ ID NO: 503711 - DNA, 33 bp, Homo sapien
ctgtgccaggcatccgaagtctcatttcacaac

SEQ ID NO: 503712 - DNA, 33 bp, Homo sapien
ctgtgccaggcatccggagtctcatttcacaac

SEQ ID NO: 503713 - DNA, 33 bp, Homo sapien
aaagacaacttgataacgagaggctttttcttt

SEQ ID NO: 503714 - DNA, 33 bp, Homo sapien
aaagacaacttgataatgagaggctttttcttt

SEQ ID NO: 503715 - DNA, 33 bp, Homo sapien
tagctgctcaaccccacctcctgacaaagaaaa

SEQ ID NO: 503716 - DNA, 33 bp, Homo sapien
tagctgctcaaccccatctcctgacaaagaaaa

SEQ ID NO: 503717 - DNA, 33 bp, Homo sapien
ggagaaaagcaatgtcgctttagctttttaggg

SEQ ID NO: 503718 - DNA, 33 bp, Homo sapien
ggagaaaagcaatgtctctttagctttttaggg

SEQ ID NO: 503719 - DNA, 33 bp, Homo sapien
caacctaatactatcaaccacctccaccaacac

SEQ ID NO: 503720 - DNA, 33 bp, Homo sapien
caacctaatactatcatccacctccaccaacac

SEQ ID NO: 503721 - DNA, 33 bp, Homo sapien
caggcattaccatacagtctatgaaatctaggc

SEQ ID NO: 503722 - DNA, 33 bp, Homo sapien
caggcattaccatacattctatgaaatctaggc

SEQ ID NO: 503723 - DNA, 33 bp, Homo sapien
aattgagctgtttatacccttattgagaactaa

SEQ ID NO: 503724 - DNA, 33 bp, Homo sapien
aattgagctgtttatagccttattgagaactaa

SEQ ID NO: 503725 - DNA, 33 bp, Homo sapien
tggaattgactcttcacctctgctgagccctgg

SEQ ID NO: 503726 - DNA, 33 bp, Homo sapien
tggaattgactcttcatctctgctgagccctgg

SEQ ID NO: 503727 - DNA, 33 bp, Homo sapien
gtgtagaaattgtccacaaacaaaagagcaaag

SEQ ID NO: 503728 - DNA, 33 bp, Homo sapien
gtgtagaaattgtccagaaacaaaagagcaaag

SEQ ID NO: 503729 - DNA, 33 bp, Homo sapien
gagaaagacttgcagaaatcttaaactgaattt

SEQ ID NO: 503730 - DNA, 33 bp, Homo sapien
gagaaagacttgcagagatcttaaactgaattt

SEQ ID NO: 503731 - DNA, 33 bp, Homo sapien
aaccagtagccaataaccatgtttagataaggg

SEQ ID NO: 503732 - DNA, 33 bp, Homo sapien
aaccagtagccaataagcatgtttagataaggg

SEQ ID NO: 503733 - DNA, 33 bp, Homo sapien
agcactaatttatacactcaaaacctgcatcct

SEQ ID NO: 503734 - DNA, 33 bp, Homo sapien
agcactaatttatacattcaaaacctgcatcct

SEQ ID NO: 503735 - DNA, 33 bp, Homo sapien
acaatcttttataatgaaggtgatgttataggg

SEQ ID NO: 503736 - DNA, 33 bp, Homo sapien
acaatcttttataatggaggtgatgttataggg

SEQ ID NO: 503737 - DNA, 33 bp, Homo sapien
tctccaagatgggaataatcttccttatggaga

SEQ ID NO: 503738 - DNA, 33 bp, Homo sapien
tctccaagatgggaatcatcttccttatggaga

SEQ ID NO: 503739 - DNA, 33 bp, Homo sapien
catgtggtgtatcttacctgattgcacctagac

SEQ ID NO: 503740 - DNA, 33 bp, Homo sapien
catgtggtgtatcttatctgattgcacctagac

SEQ ID NO: 503741 - DNA, 33 bp, Homo sapien
tggcgtgagtacaaaccaaggatcaagtcacat

SEQ ID NO: 503742 - DNA, 33 bp, Homo sapien
tggcgtgagtacaaactaaggatcaagtcacat

SEQ ID NO: 503743 - DNA, 33 bp, Homo sapien
gaaccacatcacatgaaccaggcatctgggaaa

SEQ ID NO: 503744 - DNA, 33 bp, Homo sapien
gaaccacatcacatgagccaggcatctgggaaa

SEQ ID NO: 503745 - DNA, 33 bp, Homo sapien
tcttctaaacttttataaaacctgattcgggtt

SEQ ID NO: 503746 - DNA, 33 bp, Homo sapien
tcttctaaacttttatgaaacctgattcgggtt

SEQ ID NO: 503747 - DNA, 33 bp, Homo sapien
gaggaggaaagcatagcaattatcacgtcaatt

SEQ ID NO: 503748 - DNA, 33 bp, Homo sapien
gaggaggaaagcatagtaattatcacgtcaatt

SEQ ID NO: 503749 - DNA, 33 bp, Homo sapien
ttaagttctcatctcagtagtgtgtttttttcc

SEQ ID NO: 503750 - DNA, 33 bp, Homo sapien
ttaagttctcatctcattagtgtgtttttttcc

SEQ ID NO: 503751 - DNA, 33 bp, Homo sapien
gcagaggatcatgaacaagcagagatacagagc

SEQ ID NO: 503752 - DNA, 33 bp, Homo sapien
gcagaggatcatgaacgagcagagatacagagc

SEQ ID NO: 503753 - DNA, 33 bp, Homo sapien
actaagttcgtcccccccaaagtggtcagttat

SEQ ID NO: 503754 - DNA, 33 bp, Homo sapien
actaagttcgtcccccgcaaagtggtcagttat

SEQ ID NO: 503755 - DNA, 33 bp, Homo sapien
gtctcttctccaataacgattccagggcccaga

SEQ ID NO: 503756 - DNA, 33 bp, Homo sapien
gtctcttctccaataatgattccagggcccaga

SEQ ID NO: 503757 - DNA, 33 bp, Homo sapien
ccagaggatacaaggaatcaaaagactttcccc

SEQ ID NO: 503758 - DNA, 33 bp, Homo sapien
ccagaggatacaaggagtcaaaagactttcccc

SEQ ID NO: 503759 - DNA, 33 bp, Homo sapien
actttctattctccaaactaagcagagagaaaa

SEQ ID NO: 503760 - DNA, 33 bp, Homo sapien
actttctattctccaagctaagcagagagaaaa

SEQ ID NO: 503761 - DNA, 33 bp, Homo sapien
tacacatctagaatgcaccgggcatcaggaaca

SEQ ID NO: 503762 - DNA, 33 bp, Homo sapien
tacacatctagaatgcgccgggcatcaggaaca

SEQ ID NO: 503763 - DNA, 33 bp, Homo sapien
tttacaccttctttacaacactatttttataca

SEQ ID NO: 503764 - DNA, 33 bp, Homo sapien
tttacaccttctttacgacactatttttataca

SEQ ID NO: 503765 - DNA, 33 bp, Homo sapien
acaatacaattgcatacggagggaaccaatatc

SEQ ID NO: 503766 - DNA, 33 bp, Homo sapien
acaatacaattgcatatggagggaaccaatatc

SEQ ID NO: 503767 - DNA, 33 bp, Homo sapien
attttacagtggactcaaagctctaggaagagg

SEQ ID NO: 503768 - DNA, 33 bp, Homo sapien
attttacagtggactccaagctctaggaagagg

SEQ ID NO: 503769 - DNA, 33 bp, Homo sapien
agtgttattgtccacaagattgttttggtgttt

SEQ ID NO: 503770 - DNA, 33 bp, Homo sapien
agtgttattgtccacaggattgttttggtgttt

SEQ ID NO: 503771 - DNA, 33 bp, Homo sapien
tgttttggtgtttctcaagagtctgtcttccta

SEQ ID NO: 503772 - DNA, 33 bp, Homo sapien
tgttttggtgtttctcgagagtctgtcttccta

SEQ ID NO: 503773 - DNA, 33 bp, Homo sapien
ttactgactaaagacacgtgttttctcctgaat

SEQ ID NO: 503774 - DNA, 33 bp, Homo sapien
ttactgactaaagacatgtgttttctcctgaat

SEQ ID NO: 503775 - DNA, 33 bp, Homo sapien
aatcagcctaaagggacagaagcacacataaaa

SEQ ID NO: 503776 - DNA, 33 bp, Homo sapien
aatcagcctaaagggatagaagcacacataaaa

SEQ ID NO: 503777 - DNA, 33 bp, Homo sapien
tttactttgtcatagcagattcccttataggcc

SEQ ID NO: 503778 - DNA, 33 bp, Homo sapien
tttactttgtcatagcggattcccttataggcc

SEQ ID NO: 503779 - DNA, 33 bp, Homo sapien
gtgacattgtttgataagaatgattacttgtgg

SEQ ID NO: 503780 - DNA, 33 bp, Homo sapien
gtgacattgtttgataggaatgattacttgtgg

SEQ ID NO: 503781 - DNA, 33 bp, Homo sapien
aataaaggatagaagcaaaattggctcttgtca

SEQ ID NO: 503782 - DNA, 33 bp, Homo sapien
aataaaggatagaagcgaaattggctcttgtca

SEQ ID NO: 503783 - DNA, 33 bp, Homo sapien
tcagctgttagaaataggctcaaaaagtaaaga

SEQ ID NO: 503784 - DNA, 33 bp, Homo sapien
tcagctgttagaaatatgctcaaaaagtaaaga

SEQ ID NO: 503785 - DNA, 33 bp, Homo sapien
actaagttatgttttaaggcacagctgacttta

SEQ ID NO: 503786 - DNA, 33 bp, Homo sapien
actaagttatgttttatggcacagctgacttta

SEQ ID NO: 503787 - DNA, 33 bp, Homo sapien
tattgtgtagttattaaattttcatatactggt

SEQ ID NO: 503788 - DNA, 33 bp, Homo sapien
tattgtgtagttattacattttcatatactggt

SEQ ID NO: 503789 - DNA, 33 bp, Homo sapien
taggggaatcacacaaatcggtgctactttcag

SEQ ID NO: 503790 - DNA, 33 bp, Homo sapien
taggggaatcacacaagtcggtgctactttcag

SEQ ID NO: 503791 - DNA, 33 bp, Homo sapien
tgataaggggaacaccagcatctgtgaaaatac

SEQ ID NO: 503792 - DNA, 33 bp, Homo sapien
tgataaggggaacaccggcatctgtgaaaatac

SEQ ID NO: 503793 - DNA, 33 bp, Homo sapien
ttggtaacatataagaagattccaaagacatga

SEQ ID NO: 503794 - DNA, 33 bp, Homo sapien
ttggtaacatataagaggattccaaagacatga

SEQ ID NO: 503795 - DNA, 33 bp, Homo sapien
agatgactttgataccaatgcacttaccagaca

SEQ ID NO: 503796 - DNA, 33 bp, Homo sapien
agatgactttgatacctatgcacttaccagaca

SEQ ID NO: 503797 - DNA, 33 bp, Homo sapien
gcctgattattttctacggccatgggtcactca

SEQ ID NO: 503798 - DNA, 33 bp, Homo sapien
gcctgattattttctatggccatgggtcactca

SEQ ID NO: 503799 - DNA, 33 bp, Homo sapien
ttatgtaaagtatcaaacatgaactatttttct

SEQ ID NO: 503800 - DNA, 33 bp, Homo sapien
ttatgtaaagtatcaagcatgaactatttttct

SEQ ID NO: 503801 - DNA, 33 bp, Homo sapien
gagagcaatagcaccactggtcttcccagcaag

SEQ ID NO: 503802 - DNA, 33 bp, Homo sapien
gagagcaatagcaccattggtcttcccagcaag

SEQ ID NO: 503803 - DNA, 33 bp, Homo sapien
ttttgacttggctgtacaataatcaatatctca

SEQ ID NO: 503804 - DNA, 33 bp, Homo sapien
ttttgacttggctgtataataatcaatatctca

SEQ ID NO: 503805 - DNA, 33 bp, Homo sapien
aactgtctttagaatacgtattgagttggatgt

SEQ ID NO: 503806 - DNA, 33 bp, Homo sapien
aactgtctttagaatatgtattgagttggatgt

SEQ ID NO: 503807 - DNA, 33 bp, Homo sapien
gtgagaaacaaaataactgtgttcatcaacagg

SEQ ID NO: 503808 - DNA, 33 bp, Homo sapien
gtgagaaacaaaataagtgtgttcatcaacagg

SEQ ID NO: 503809 - DNA, 33 bp, Homo sapien
tctctggcttccaagactagaaaaaataaagat

SEQ ID NO: 503810 - DNA, 33 bp, Homo sapien
tctctggcttccaagattagaaaaaataaagat

SEQ ID NO: 503811 - DNA, 33 bp, Homo sapien
cctagtacggcacctgcaatataagaaatattc

SEQ ID NO: 503812 - DNA, 33 bp, Homo sapien
cctagtacggcacctggaatataagaaatattc

SEQ ID NO: 503813 - DNA, 33 bp, Homo sapien
ccttgctttttaccataagtctaggtgatgggc

SEQ ID NO: 503814 - DNA, 33 bp, Homo sapien
ccttgctttttaccatgagtctaggtgatgggc

SEQ ID NO: 503815 - DNA, 33 bp, Homo sapien
ttgcttttttaactcacagcttagatgtcattt

SEQ ID NO: 503816 - DNA, 33 bp, Homo sapien
ttgcttttttaactcatagcttagatgtcattt

SEQ ID NO: 503817 - DNA, 33 bp, Homo sapien
ttcctccataaaggcacccatacttcctccaaa

SEQ ID NO: 503818 - DNA, 33 bp, Homo sapien
ttcctccataaaggcatccatacttcctccaaa

SEQ ID NO: 503819 - DNA, 33 bp, Homo sapien
ggtaggtgtttccccacgtgtggagtgagaaga

SEQ ID NO: 503820 - DNA, 33 bp, Homo sapien
ggtaggtgtttccccatgtgtggagtgagaaga

SEQ ID NO: 503821 - DNA, 33 bp, Homo sapien
aattatgagtgtctatcacaagtctaaaaaaaa

SEQ ID NO: 503822 - DNA, 33 bp, Homo sapien
aattatgagtgtctattacaagtctaaaaaaaa

SEQ ID NO: 503823 - DNA, 33 bp, Homo sapien
agcccttttctcaaaaccaaaagtatacattaa

SEQ ID NO: 503824 - DNA, 33 bp, Homo sapien
agcccttttctcaaaatcaaaagtatacattaa

SEQ ID NO: 503825 - DNA, 33 bp, Homo sapien
aaataggaggattcaacagtagaatgttttaac

SEQ ID NO: 503826 - DNA, 33 bp, Homo sapien
aaataggaggattcaagagtagaatgttttaac

SEQ ID NO: 503827 - DNA, 33 bp, Homo sapien
atatattaggaggattcaacattaaaagtagca

SEQ ID NO: 503828 - DNA, 33 bp, Homo sapien
atatattaggaggattgaacattaaaagtagca

SEQ ID NO: 503829 - DNA, 33 bp, Homo sapien
gcatgactgctctctaagaagaagtccttagat

SEQ ID NO: 503830 - DNA, 33 bp, Homo sapien
gcatgactgctctctaggaagaagtccttagat

SEQ ID NO: 503831 - DNA, 33 bp, Homo sapien
aacctatgcaatacaactaaagtaggaaaaaag

SEQ ID NO: 503832 - DNA, 33 bp, Homo sapien
aacctatgcaatacaattaaagtaggaaaaaag

SEQ ID NO: 503833 - DNA, 33 bp, Homo sapien
aacccaaaagttaggaatagtatgacctcacaa

SEQ ID NO: 503834 - DNA, 33 bp, Homo sapien
aacccaaaagttaggattagtatgacctcacaa

SEQ ID NO: 503835 - DNA, 33 bp, Homo sapien
ctttcattttccaagacaagaacctggaataaa

SEQ ID NO: 503836 - DNA, 33 bp, Homo sapien
ctttcattttccaagagaagaacctggaataaa

SEQ ID NO: 503837 - DNA, 33 bp, Homo sapien
ggaaagaatcttaaagcaaagtgctgcctaaag

SEQ ID NO: 503838 - DNA, 33 bp, Homo sapien
ggaaagaatcttaaagtaaagtgctgcctaaag

SEQ ID NO: 503839 - DNA, 33 bp, Homo sapien
gaatggtgaggagaaacgatactgaaaaattgc

SEQ ID NO: 503840 - DNA, 33 bp, Homo sapien
gaatggtgaggagaaatgatactgaaaaattgc

SEQ ID NO: 503841 - DNA, 33 bp, Homo sapien
tatattctttctgtaaaccacaccacacccact

SEQ ID NO: 503842 - DNA, 33 bp, Homo sapien
tatattctttctgtaacccacaccacacccact

SEQ ID NO: 503843 - DNA, 33 bp, Homo sapien
gtattattctcagaaagtgatcatgttacaaaa

SEQ ID NO: 503844 - DNA, 33 bp, Homo sapien
gtattattctcagaaattgatcatgttacaaaa

SEQ ID NO: 503845 - DNA, 33 bp, Homo sapien
ttttattcactgtgacactcctattacctcata

SEQ ID NO: 503846 - DNA, 33 bp, Homo sapien
ttttattcactgtgacgctcctattacctcata

SEQ ID NO: 503847 - DNA, 33 bp, Homo sapien
gtcttctcaagcagaacggcacgtgcaaaactc

SEQ ID NO: 503848 - DNA, 33 bp, Homo sapien
gtcttctcaagcagaatggcacgtgcaaaactc

SEQ ID NO: 503849 - DNA, 33 bp, Homo sapien
tgatataatcagtgacaaaagtaatggccgtta

SEQ ID NO: 503850 - DNA, 33 bp, Homo sapien
tgatataatcagtgaccaaagtaatggccgtta

SEQ ID NO: 503851 - DNA, 33 bp, Homo sapien
gtccttaaataagatactaccagtgatgtaaac

SEQ ID NO: 503852 - DNA, 33 bp, Homo sapien
gtccttaaataagatattaccagtgatgtaaac

SEQ ID NO: 503853 - DNA, 33 bp, Homo sapien
atttcctggctcatgcaaataaatacatttttg

SEQ ID NO: 503854 - DNA, 33 bp, Homo sapien
atttcctggctcatgcgaataaatacatttttg

SEQ ID NO: 503855 - DNA, 33 bp, Homo sapien
actttgatgatggaatgaaggttttccaggtgg

SEQ ID NO: 503856 - DNA, 33 bp, Homo sapien
actttgatgatggaattaaggttttccaggtgg

SEQ ID NO: 503857 - DNA, 33 bp, Homo sapien
ccagaaaacctgacaaccaagagaaacagagtt

SEQ ID NO: 503858 - DNA, 33 bp, Homo sapien
ccagaaaacctgacaatcaagagaaacagagtt

SEQ ID NO: 503859 - DNA, 33 bp, Homo sapien
cttgggtacaatgtcacgtcacagcattatcac

SEQ ID NO: 503860 - DNA, 33 bp, Homo sapien
cttgggtacaatgtcatgtcacagcattatcac

SEQ ID NO: 503861 - DNA, 33 bp, Homo sapien
agctagtctcccttccactagagaggtacaggc

SEQ ID NO: 503862 - DNA, 33 bp, Homo sapien
agctagtctcccttccgctagagaggtacaggc

SEQ ID NO: 503863 - DNA, 33 bp, Homo sapien
gaggccaggtgactcaagttgtacatggcagac

SEQ ID NO: 503864 - DNA, 33 bp, Homo sapien
gaggccaggtgactcaggttgtacatggcagac

SEQ ID NO: 503865 - DNA, 33 bp, Homo sapien
tgctgtaactcagtgaagtttcctaccagcctc

SEQ ID NO: 503866 - DNA, 33 bp, Homo sapien
tgctgtaactcagtgaggtttcctaccagcctc

SEQ ID NO: 503867 - DNA, 33 bp, Homo sapien
gatttctccaatacaaagtatcaagggcaatag

SEQ ID NO: 503868 - DNA, 33 bp, Homo sapien
gatttctccaatacaaggtatcaagggcaatag

SEQ ID NO: 503869 - DNA, 33 bp, Homo sapien
tttccaggctgttctcccagttcctattgcctg

SEQ ID NO: 503870 - DNA, 33 bp, Homo sapien
tttccaggctgttctcgcagttcctattgcctg

SEQ ID NO: 503871 - DNA, 33 bp, Homo sapien
ggcttcaaacaatgcaaatttccatcttgcact

SEQ ID NO: 503872 - DNA, 33 bp, Homo sapien
ggcttcaaacaatgcagatttccatcttgcact

SEQ ID NO: 503873 - DNA, 33 bp, Homo sapien
tctacaaaaacaaagccagcactgtggaagact

SEQ ID NO: 503874 - DNA, 33 bp, Homo sapien
tctacaaaaacaaagctagcactgtggaagact

SEQ ID NO: 503875 - DNA, 33 bp, Homo sapien
agtcattagggaggacaaaactggtggaagttc

SEQ ID NO: 503876 - DNA, 33 bp, Homo sapien
agtcattagggaggaccaaactggtggaagttc

SEQ ID NO: 503877 - DNA, 33 bp, Homo sapien
tccagctcatggcttcaaataccaattctctgc

SEQ ID NO: 503878 - DNA, 33 bp, Homo sapien
tccagctcatggcttctaataccaattctctgc

SEQ ID NO: 503879 - DNA, 33 bp, Homo sapien
actttagagatgcaaacgtagggacagtactta

SEQ ID NO: 503880 - DNA, 33 bp, Homo sapien
actttagagatgcaaatgtagggacagtactta

SEQ ID NO: 503881 - DNA, 33 bp, Homo sapien
ctcatttaatcctccaatgagtggtaggtgtta

SEQ ID NO: 503882 - DNA, 33 bp, Homo sapien
ctcatttaatcctccagtgagtggtaggtgtta

SEQ ID NO: 503883 - DNA, 33 bp, Homo sapien
tttgctgtgcaaaaaagcagctaggtatcttat

SEQ ID NO: 503884 - DNA, 33 bp, Homo sapien
tttgctgtgcaaaaaatcagctaggtatcttat

SEQ ID NO: 503885 - DNA, 33 bp, Homo sapien
aagagaaaagtaggtaaattggtcagtatgaat

SEQ ID NO: 503886 - DNA, 33 bp, Homo sapien
aagagaaaagtaggtagattggtcagtatgaat

SEQ ID NO: 503887 - DNA, 33 bp, Homo sapien
accggcagacctcagaagttcaaagaaaaagaa

SEQ ID NO: 503888 - DNA, 33 bp, Homo sapien
accggcagacctcagaggttcaaagaaaaagaa

SEQ ID NO: 503889 - DNA, 33 bp, Homo sapien
cgagtgcttcaacacactcgtcctactaatcta

SEQ ID NO: 503890 - DNA, 33 bp, Homo sapien
cgagtgcttcaacacagtcgtcctactaatcta

SEQ ID NO: 503891 - DNA, 33 bp, Homo sapien
attcctgcgagacctacggaaatcatgttctgg

SEQ ID NO: 503892 - DNA, 33 bp, Homo sapien
attcctgcgagacctatggaaatcatgttctgg

SEQ ID NO: 503893 - DNA, 33 bp, Homo sapien
actgaaactcctctaactcctaagaacggcaaa

SEQ ID NO: 503894 - DNA, 33 bp, Homo sapien
actgaaactcctctaattcctaagaacggcaaa

SEQ ID NO: 503895 - DNA, 33 bp, Homo sapien
tctccttctcggagcagccaccaatgtgtttct

SEQ ID NO: 503896 - DNA, 33 bp, Homo sapien
tctccttctcggagcatccaccaatgtgtttct

SEQ ID NO: 503897 - DNA, 33 bp, Homo sapien
ccctgagtactctctacgctgtttcataagttg

SEQ ID NO: 503898 - DNA, 33 bp, Homo sapien
ccctgagtactctctatgctgtttcataagttg

SEQ ID NO: 503899 - DNA, 33 bp, Homo sapien
tcataattggattccacagcatgccatacaaat

SEQ ID NO: 503900 - DNA, 33 bp, Homo sapien
tcataattggattccatagcatgccatacaaat

SEQ ID NO: 503901 - DNA, 33 bp, Homo sapien
tccttctggagttggcaaaagtggctaatgtcc

SEQ ID NO: 503902 - DNA, 33 bp, Homo sapien
tccttctggagttggcgaaagtggctaatgtcc

SEQ ID NO: 503903 - DNA, 33 bp, Homo sapien
gaaaatacatatttcacgcgagttctttctttc

SEQ ID NO: 503904 - DNA, 33 bp, Homo sapien
gaaaatacatatttcatgcgagttctttctttc

SEQ ID NO: 503905 - DNA, 33 bp, Homo sapien
caacactgaatttaacagatctcagaattagca

SEQ ID NO: 503906 - DNA, 33 bp, Homo sapien
caacactgaatttaacggatctcagaattagca

SEQ ID NO: 503907 - DNA, 33 bp, Homo sapien
gagtctgctactgggaagagtgtcacttcagct

SEQ ID NO: 503908 - DNA, 33 bp, Homo sapien
gagtctgctactgggatgagtgtcacttcagct

SEQ ID NO: 503909 - DNA, 33 bp, Homo sapien
attgctcaacacctaacgatgcagaacaaattt

SEQ ID NO: 503910 - DNA, 33 bp, Homo sapien
attgctcaacacctaatgatgcagaacaaattt

SEQ ID NO: 503911 - DNA, 33 bp, Homo sapien
tccagagcttaacaaggaccaagctgggccaga

SEQ ID NO: 503912 - DNA, 33 bp, Homo sapien
tccagagcttaacaagtaccaagctgggccaga

SEQ ID NO: 503913 - DNA, 33 bp, Homo sapien
accttacatgaaaacccgggaacctgtcctagc

SEQ ID NO: 503914 - DNA, 33 bp, Homo sapien
accttacatgaaaacctgggaacctgtcctagc

SEQ ID NO: 503915 - DNA, 33 bp, Homo sapien
caggtgtcctgaggaaaaagaaagtcagcttcc

SEQ ID NO: 503916 - DNA, 33 bp, Homo sapien
caggtgtcctgaggaagaagaaagtcagcttcc

SEQ ID NO: 503917 - DNA, 33 bp, Homo sapien
gctttagtactgcttgaactccagtgctgggat

SEQ ID NO: 503918 - DNA, 33 bp, Homo sapien
gctttagtactgcttggactccagtgctgggat

SEQ ID NO: 503919 - DNA, 33 bp, Homo sapien
tgatagtggattctccagatagccctgaattaa

SEQ ID NO: 503920 - DNA, 33 bp, Homo sapien
tgatagtggattctcccgatagccctgaattaa

SEQ ID NO: 503921 - DNA, 33 bp, Homo sapien
ggattccaaaccagaccagctgaatgaggaccc

SEQ ID NO: 503922 - DNA, 33 bp, Homo sapien
ggattccaaaccagacgagctgaatgaggaccc

SEQ ID NO: 503923 - DNA, 33 bp, Homo sapien
ccctgtactgcctactcacatcactttgaattt

SEQ ID NO: 503924 - DNA, 33 bp, Homo sapien
ccctgtactgcctactgacatcactttgaattt

SEQ ID NO: 503925 - DNA, 33 bp, Homo sapien
cacagagccaatgcacagtgacctctgacccat

SEQ ID NO: 503926 - DNA, 33 bp, Homo sapien
cacagagccaatgcacggtgacctctgacccat

SEQ ID NO: 503927 - DNA, 33 bp, Homo sapien
acgatccccatttacaaacagaaaattaatagg

SEQ ID NO: 503928 - DNA, 33 bp, Homo sapien
acgatccccatttacagacagaaaattaatagg

SEQ ID NO: 503929 - DNA, 33 bp, Homo sapien
caaagcaacatcaacacagcaatttctgtatgt

SEQ ID NO: 503930 - DNA, 33 bp, Homo sapien
caaagcaacatcaacagagcaatttctgtatgt

SEQ ID NO: 503931 - DNA, 33 bp, Homo sapien
agcagcattcatgaaacggtgaatttagagcag

SEQ ID NO: 503932 - DNA, 33 bp, Homo sapien
agcagcattcatgaaatggtgaatttagagcag

SEQ ID NO: 503933 - DNA, 33 bp, Homo sapien
atttctggttgttggacggcatattcagataca

SEQ ID NO: 503934 - DNA, 33 bp, Homo sapien
atttctggttgttggatggcatattcagataca

SEQ ID NO: 503935 - DNA, 33 bp, Homo sapien
tagatataaactttcaacgtacttccatatgag

SEQ ID NO: 503936 - DNA, 33 bp, Homo sapien
tagatataaactttcagcgtacttccatatgag

SEQ ID NO: 503937 - DNA, 33 bp, Homo sapien
agtacaccagaaaaagcctccattccaaagtac

SEQ ID NO: 503938 - DNA, 33 bp, Homo sapien
agtacaccagaaaaaggctccattccaaagtac

SEQ ID NO: 503939 - DNA, 33 bp, Homo sapien
agccagggttgcaaaacactttgagtccaactg

SEQ ID NO: 503940 - DNA, 33 bp, Homo sapien
agccagggttgcaaaatactttgagtccaactg

SEQ ID NO: 503941 - DNA, 33 bp, Homo sapien
tagggtgtgcctcataaatcctcttaagtgaac

SEQ ID NO: 503942 - DNA, 33 bp, Homo sapien
tagggtgtgcctcatagatcctcttaagtgaac

SEQ ID NO: 503943 - DNA, 33 bp, Homo sapien
taaaaataccatgataactcagaagaaaggtac

SEQ ID NO: 503944 - DNA, 33 bp, Homo sapien
taaaaataccatgatagctcagaagaaaggtac

SEQ ID NO: 503945 - DNA, 33 bp, Homo sapien
tgtaccgaatggaactcagattatcttctttct

SEQ ID NO: 503946 - DNA, 33 bp, Homo sapien
tgtaccgaatggaacttagattatcttctttct

SEQ ID NO: 503947 - DNA, 33 bp, Homo sapien
caggaaatgattaccactgctataagctgcagt

SEQ ID NO: 503948 - DNA, 33 bp, Homo sapien
caggaaatgattaccattgctataagctgcagt

SEQ ID NO: 503949 - DNA, 33 bp, Homo sapien
tggtctgggctcttacaaatgccagaagctttg

SEQ ID NO: 503950 - DNA, 33 bp, Homo sapien
tggtctgggctcttacgaatgccagaagctttg

SEQ ID NO: 503951 - DNA, 33 bp, Homo sapien
gaattggttttagaaactgaagatgtcattggc

SEQ ID NO: 503952 - DNA, 33 bp, Homo sapien
gaattggttttagaaagtgaagatgtcattggc

SEQ ID NO: 503953 - DNA, 33 bp, Homo sapien
tttgataaagaccacgacgggtaggctggtgag

SEQ ID NO: 503954 - DNA, 33 bp, Homo sapien
tttgataaagaccacggcgggtaggctggtgag

SEQ ID NO: 503955 - DNA, 33 bp, Homo sapien
gtttcatgcataaaaactctaccagcatctaat

SEQ ID NO: 503956 - DNA, 33 bp, Homo sapien
gtttcatgcataaaaagtctaccagcatctaat

SEQ ID NO: 503957 - DNA, 33 bp, Homo sapien
tccagggtgcaaagaaagttgaaagaaagtcag

SEQ ID NO: 503958 - DNA, 33 bp, Homo sapien
tccagggtgcaaagaacgttgaaagaaagtcag

SEQ ID NO: 503959 - DNA, 33 bp, Homo sapien
ctatatgatcaagtgacgaagagtgtctaaaaa

SEQ ID NO: 503960 - DNA, 33 bp, Homo sapien
ctatatgatcaagtgatgaagagtgtctaaaaa

SEQ ID NO: 503961 - DNA, 33 bp, Homo sapien
tttgaactgggcataaacttcaaatcagtaata

SEQ ID NO: 503962 - DNA, 33 bp, Homo sapien
tttgaactgggcataaccttcaaatcagtaata

SEQ ID NO: 503963 - DNA, 33 bp, Homo sapien
tgcaggaagataggggaacgtgcttcaggtagg

SEQ ID NO: 503964 - DNA, 33 bp, Homo sapien
tgcaggaagatagggggacgtgcttcaggtagg

SEQ ID NO: 503965 - DNA, 33 bp, Homo sapien
ttctatgacccaaatcacgagttcttcctttaa

SEQ ID NO: 503966 - DNA, 33 bp, Homo sapien
ttctatgacccaaatcgcgagttcttcctttaa

SEQ ID NO: 503967 - DNA, 33 bp, Homo sapien
aacaacagagcagagaaatttttaaggagtccc

SEQ ID NO: 503968 - DNA, 33 bp, Homo sapien
aacaacagagcagagagatttttaaggagtccc

SEQ ID NO: 503969 - DNA, 33 bp, Homo sapien
gtgcagggttatataaagtcctgctccatttac

SEQ ID NO: 503970 - DNA, 33 bp, Homo sapien
gtgcagggttatataatgtcctgctccatttac

SEQ ID NO: 503971 - DNA, 33 bp, Homo sapien
atattttcacctagacaaacaaagttatcttaa

SEQ ID NO: 503972 - DNA, 33 bp, Homo sapien
atattttcacctagacgaacaaagttatcttaa

SEQ ID NO: 503973 - DNA, 33 bp, Homo sapien
tgcctcttttctaggcacatcgccattaaccat

SEQ ID NO: 503974 - DNA, 33 bp, Homo sapien
tgcctcttttctaggcgcatcgccattaaccat

SEQ ID NO: 503975 - DNA, 33 bp, Homo sapien
tagactgtgagctcccgaaaggcatgatttttt

SEQ ID NO: 503976 - DNA, 33 bp, Homo sapien
tagactgtgagctccctaaaggcatgatttttt

SEQ ID NO: 503977 - DNA, 33 bp, Homo sapien
ctcatagctatctgccaccattgttttgcactt

SEQ ID NO: 503978 - DNA, 33 bp, Homo sapien
ctcatagctatctgcccccattgttttgcactt

SEQ ID NO: 503979 - DNA, 33 bp, Homo sapien
gaagcatactgtgagaacctctctgtggatccc

SEQ ID NO: 503980 - DNA, 33 bp, Homo sapien
gaagcatactgtgagagcctctctgtggatccc

SEQ ID NO: 503981 - DNA, 33 bp, Homo sapien
gggcatcattgctcacactggattccatagaac

SEQ ID NO: 503982 - DNA, 33 bp, Homo sapien
gggcatcattgctcacgctggattccatagaac

SEQ ID NO: 503983 - DNA, 33 bp, Homo sapien
catacagcactgatacacaaatggaaagcaata

SEQ ID NO: 503984 - DNA, 33 bp, Homo sapien
catacagcactgatacgcaaatggaaagcaata

SEQ ID NO: 503985 - DNA, 33 bp, Homo sapien
ttttggccatttgaaaacacttgcaattcccta

SEQ ID NO: 503986 - DNA, 33 bp, Homo sapien
ttttggccatttgaaaccacttgcaattcccta

SEQ ID NO: 503987 - DNA, 33 bp, Homo sapien
atggaaagatcaatcaatgaaactaagatagat

SEQ ID NO: 503988 - DNA, 33 bp, Homo sapien
atggaaagatcaatcagtgaaactaagatagat

SEQ ID NO: 503989 - DNA, 33 bp, Homo sapien
agtctatcttcctgaacgtctttcttaggttga

SEQ ID NO: 503990 - DNA, 33 bp, Homo sapien
agtctatcttcctgaatgtctttcttaggttga

SEQ ID NO: 503991 - DNA, 33 bp, Homo sapien
acatatatatgtacagactgggaaaacatattt

SEQ ID NO: 503992 - DNA, 33 bp, Homo sapien
acatatatatgtacagtctgggaaaacatattt

SEQ ID NO: 503993 - DNA, 33 bp, Homo sapien
cgtatcactgattagggatgcctccaccaccta

SEQ ID NO: 503994 - DNA, 33 bp, Homo sapien
cgtatcactgattaggtatgcctccaccaccta

SEQ ID NO: 503995 - DNA, 33 bp, Homo sapien
tgatgaatgagagaaacgagtgaagtaattaga

SEQ ID NO: 503996 - DNA, 33 bp, Homo sapien
tgatgaatgagagaaatgagtgaagtaattaga

SEQ ID NO: 503997 - DNA, 33 bp, Homo sapien
agctatctgctaactcccacagcaaaggaatct

SEQ ID NO: 503998 - DNA, 33 bp, Homo sapien
agctatctgctaactcgcacagcaaaggaatct

SEQ ID NO: 503999 - DNA, 33 bp, Homo sapien
tgatggattcttattacgtaacttcgaatttca

SEQ ID NO: 504000 - DNA, 33 bp, Homo sapien
tgatggattcttattatgtaacttcgaatttca

SEQ ID NO: 504001 - DNA, 33 bp, Homo sapien
atataagcactctaaacctatcgtctggcaaag

SEQ ID NO: 504002 - DNA, 33 bp, Homo sapien
atataagcactctaaatctatcgtctggcaaag

SEQ ID NO: 504003 - DNA, 33 bp, Homo sapien
aaatacatctctaaaaagcaaaactttatcaaa

SEQ ID NO: 504004 - DNA, 33 bp, Homo sapien
aaatacatctctaaaatgcaaaactttatcaaa

SEQ ID NO: 504005 - DNA, 33 bp, Homo sapien
aggaggaggaagtaatcatgtagatagggttgc

SEQ ID NO: 504006 - DNA, 33 bp, Homo sapien
aggaggaggaagtaatgatgtagatagggttgc

SEQ ID NO: 504007 - DNA, 33 bp, Homo sapien
acaatatcttcctacacgtgcagctttagttat

SEQ ID NO: 504008 - DNA, 33 bp, Homo sapien
acaatatcttcctacatgtgcagctttagttat

SEQ ID NO: 504009 - DNA, 33 bp, Homo sapien
ggtgtggttctctgagaaagtcagatttgagca

SEQ ID NO: 504010 - DNA, 33 bp, Homo sapien
ggtgtggttctctgaggaagtcagatttgagca

SEQ ID NO: 504011 - DNA, 33 bp, Homo sapien
cactgaactttctctaaacatttcagggaacat

SEQ ID NO: 504012 - DNA, 33 bp, Homo sapien
cactgaactttctctacacatttcagggaacat

SEQ ID NO: 504013 - DNA, 33 bp, Homo sapien
gccgtccgattacctacgtatgaattgtagcct

SEQ ID NO: 504014 - DNA, 33 bp, Homo sapien
gccgtccgattacctaggtatgaattgtagcct

SEQ ID NO: 504015 - DNA, 33 bp, Homo sapien
tggtatttttatcacccgagcagggatagtaga

SEQ ID NO: 504016 - DNA, 33 bp, Homo sapien
tggtatttttatcacctgagcagggatagtaga

SEQ ID NO: 504017 - DNA, 33 bp, Homo sapien
agtcattaatcaagttaaaaaaattggtgttat

SEQ ID NO: 504018 - DNA, 33 bp, Homo sapien
agtcattaatcaagtttaaaaaattggtgttat

SEQ ID NO: 504019 - DNA, 33 bp, Homo sapien
aataatgatgtaaagcactgagacggagcctgg

SEQ ID NO: 504020 - DNA, 33 bp, Homo sapien
aataatgatgtaaagcgctgagacggagcctgg

SEQ ID NO: 504021 - DNA, 33 bp, Homo sapien
tagaatcaccattatccagccaataaccagaaa

SEQ ID NO: 504022 - DNA, 33 bp, Homo sapien
tagaatcaccattatcgagccaataaccagaaa

SEQ ID NO: 504023 - DNA, 33 bp, Homo sapien
gtgagggatctctggaagatttaaagcaggggt

SEQ ID NO: 504024 - DNA, 33 bp, Homo sapien
gtgagggatctctggaggatttaaagcaggggt

SEQ ID NO: 504025 - DNA, 33 bp, Homo sapien
tttatgggaatggaaactgatgtttaggatgtt

SEQ ID NO: 504026 - DNA, 33 bp, Homo sapien
tttatgggaatggaaagtgatgtttaggatgtt

SEQ ID NO: 504027 - DNA, 33 bp, Homo sapien
caaactgccatgatagaccagagagaatgggga

SEQ ID NO: 504028 - DNA, 33 bp, Homo sapien
caaactgccatgatagcccagagagaatgggga

SEQ ID NO: 504029 - DNA, 33 bp, Homo sapien
ggtgactggaaggagacactgaggacaacgtgg

SEQ ID NO: 504030 - DNA, 33 bp, Homo sapien
ggtgactggaaggagagactgaggacaacgtgg

SEQ ID NO: 504031 - DNA, 33 bp, Homo sapien
cgacaaggaattcaggaaggaagaatcagttgc

SEQ ID NO: 504032 - DNA, 33 bp, Homo sapien
cgacaaggaattcagggaggaagaatcagttgc

SEQ ID NO: 504033 - DNA, 33 bp, Homo sapien
atattagttttatttacgtgtgctgttataaat

SEQ ID NO: 504034 - DNA, 33 bp, Homo sapien
atattagttttatttatgtgtgctgttataaat

SEQ ID NO: 504035 - DNA, 33 bp, Homo sapien
attattatctgtgttaggtgttctcattagatt

SEQ ID NO: 504036 - DNA, 33 bp, Homo sapien
attattatctgtgttatgtgttctcattagatt

SEQ ID NO: 504037 - DNA, 33 bp, Homo sapien
agaccatcagtgggtacgtgcacttcctcctgg

SEQ ID NO: 504038 - DNA, 33 bp, Homo sapien
agaccatcagtgggtatgtgcacttcctcctgg

SEQ ID NO: 504039 - DNA, 33 bp, Homo sapien
attctacactgatacaagatcctaaagatatat

SEQ ID NO: 504040 - DNA, 33 bp, Homo sapien
attctacactgatacatgatcctaaagatatat

SEQ ID NO: 504041 - DNA, 33 bp, Homo sapien
tccatctggaatgggccatgattagtctaggtt

SEQ ID NO: 504042 - DNA, 33 bp, Homo sapien
tccatctggaatgggctatgattagtctaggtt

SEQ ID NO: 504043 - DNA, 33 bp, Homo sapien
cacaatacaatataacaaactatagcccttctg

SEQ ID NO: 504044 - DNA, 33 bp, Homo sapien
cacaatacaatataactaactatagcccttctg

SEQ ID NO: 504045 - DNA, 33 bp, Homo sapien
gaattagcctaggcaacccatggaaagagagta

SEQ ID NO: 504046 - DNA, 33 bp, Homo sapien
gaattagcctaggcaatccatggaaagagagta

SEQ ID NO: 504047 - DNA, 33 bp, Homo sapien
atggtaaaatgtaagcaagaactacaatttcag

SEQ ID NO: 504048 - DNA, 33 bp, Homo sapien
atggtaaaatgtaagcgagaactacaatttcag

SEQ ID NO: 504049 - DNA, 33 bp, Homo sapien
ccccaatccaatgccaaactgtctcagggtatc

SEQ ID NO: 504050 - DNA, 33 bp, Homo sapien
ccccaatccaatgccagactgtctcagggtatc

SEQ ID NO: 504051 - DNA, 33 bp, Homo sapien
atatggcaaaatagcaaagatcaataaaagcca

SEQ ID NO: 504052 - DNA, 33 bp, Homo sapien
atatggcaaaatagcagagatcaataaaagcca

SEQ ID NO: 504053 - DNA, 33 bp, Homo sapien
tcttgcttgtacagagaatcgaagttagctaga

SEQ ID NO: 504054 - DNA, 33 bp, Homo sapien
tcttgcttgtacagagcatcgaagttagctaga

SEQ ID NO: 504055 - DNA, 33 bp, Homo sapien
gtcactaagcacacaacgtacacttaaaggatg

SEQ ID NO: 504056 - DNA, 33 bp, Homo sapien
gtcactaagcacacaatgtacacttaaaggatg

SEQ ID NO: 504057 - DNA, 33 bp, Homo sapien
aggtcagtgaagaataatactgtcaatggtgat

SEQ ID NO: 504058 - DNA, 33 bp, Homo sapien
aggtcagtgaagaatagtactgtcaatggtgat

SEQ ID NO: 504059 - DNA, 33 bp, Homo sapien
aatgactctgacttaaaaagaggaaaaacaatt

SEQ ID NO: 504060 - DNA, 33 bp, Homo sapien
aatgactctgacttaagaagaggaaaaacaatt

SEQ ID NO: 504061 - DNA, 33 bp, Homo sapien
tatggaaccattctacgcatttaacttgatgtg

SEQ ID NO: 504062 - DNA, 33 bp, Homo sapien
tatggaaccattctactcatttaacttgatgtg

SEQ ID NO: 504063 - DNA, 33 bp, Homo sapien
gagaatattgcctctccatacatctcagcattc

SEQ ID NO: 504064 - DNA, 33 bp, Homo sapien
gagaatattgcctctctatacatctcagcattc

SEQ ID NO: 504065 - DNA, 33 bp, Homo sapien
caatgctttactaaaacggttgtaaaatattaa

SEQ ID NO: 504066 - DNA, 33 bp, Homo sapien
caatgctttactaaaatggttgtaaaatattaa

SEQ ID NO: 504067 - DNA, 33 bp, Homo sapien
tgtttcctatattcaccgacatcagagcaaaaa

SEQ ID NO: 504068 - DNA, 33 bp, Homo sapien
tgtttcctatattcactgacatcagagcaaaaa

SEQ ID NO: 504069 - DNA, 33 bp, Homo sapien
aaccaaagatgagatacgtatgtagagagcaaa

SEQ ID NO: 504070 - DNA, 33 bp, Homo sapien
aaccaaagatgagatatgtatgtagagagcaaa

SEQ ID NO: 504071 - DNA, 33 bp, Homo sapien
tttcccattgcttttacctggatatttgatttc

SEQ ID NO: 504072 - DNA, 33 bp, Homo sapien
tttcccattgcttttatctggatatttgatttc

SEQ ID NO: 504073 - DNA, 33 bp, Homo sapien
tatttagacatcatcaaacttaaaacctgctgt

SEQ ID NO: 504074 - DNA, 33 bp, Homo sapien
tatttagacatcatcacacttaaaacctgctgt

SEQ ID NO: 504075 - DNA, 33 bp, Homo sapien
gaaaaggatgggattacgcttcctgatcacttc

SEQ ID NO: 504076 - DNA, 33 bp, Homo sapien
gaaaaggatgggattatgcttcctgatcacttc

SEQ ID NO: 504077 - DNA, 33 bp, Homo sapien
atgactctatatgtcacctactaccaaatcatg

SEQ ID NO: 504078 - DNA, 33 bp, Homo sapien
atgactctatatgtcagctactaccaaatcatg

SEQ ID NO: 504079 - DNA, 33 bp, Homo sapien
caaagtgaacattctcaagatcaaaaatggaaa

SEQ ID NO: 504080 - DNA, 33 bp, Homo sapien
caaagtgaacattctcgagatcaaaaatggaaa

SEQ ID NO: 504081 - DNA, 33 bp, Homo sapien
tagagttatagacaaacgtttacagaagtgtct

SEQ ID NO: 504082 - DNA, 33 bp, Homo sapien
tagagttatagacaaatgtttacagaagtgtct

SEQ ID NO: 504083 - DNA, 33 bp, Homo sapien
tttaatctttactcacaataccactgagaagtt

SEQ ID NO: 504084 - DNA, 33 bp, Homo sapien
tttaatctttactcacgataccactgagaagtt

SEQ ID NO: 504085 - DNA, 33 bp, Homo sapien
tgcttcatgtcagaacactagaactctgtacga

SEQ ID NO: 504086 - DNA, 33 bp, Homo sapien
tgcttcatgtcagaacgctagaactctgtacga

SEQ ID NO: 504087 - DNA, 33 bp, Homo sapien
cgtcaggttgatgaagactaatttggttcagct

SEQ ID NO: 504088 - DNA, 33 bp, Homo sapien
cgtcaggttgatgaagtctaatttggttcagct

SEQ ID NO: 504089 - DNA, 33 bp, Homo sapien
tttttaaattgcatggaaaggtgatacctatat

SEQ ID NO: 504090 - DNA, 33 bp, Homo sapien
tttttaaattgcatgggaaggtgatacctatat

SEQ ID NO: 504091 - DNA, 33 bp, Homo sapien
aattaaatagtacaaagcacctcttgttattct

SEQ ID NO: 504092 - DNA, 33 bp, Homo sapien
aattaaatagtacaaatcacctcttgttattct

SEQ ID NO: 504093 - DNA, 33 bp, Homo sapien
ttagttcaagtgaagaagaaatgtagacagtgg

SEQ ID NO: 504094 - DNA, 33 bp, Homo sapien
ttagttcaagtgaagacgaaatgtagacagtgg

SEQ ID NO: 504095 - DNA, 33 bp, Homo sapien
gtgtgaccgtaatgtcaataagcttcatttgca

SEQ ID NO: 504096 - DNA, 33 bp, Homo sapien
gtgtgaccgtaatgtcgataagcttcatttgca

SEQ ID NO: 504097 - DNA, 33 bp, Homo sapien
cttgaacaagacctcaataatctactccctaac

SEQ ID NO: 504098 - DNA, 33 bp, Homo sapien
cttgaacaagacctcattaatctactccctaac

SEQ ID NO: 504099 - DNA, 33 bp, Homo sapien
tcactgctgtacaaagccacaatacgtctcatg

SEQ ID NO: 504100 - DNA, 33 bp, Homo sapien
tcactgctgtacaaagtcacaatacgtctcatg

SEQ ID NO: 504101 - DNA, 33 bp, Homo sapien
cacctgctacatcatcgaagtatagtgcatccc

SEQ ID NO: 504102 - DNA, 33 bp, Homo sapien
cacctgctacatcatctaagtatagtgcatccc

SEQ ID NO: 504103 - DNA, 33 bp, Homo sapien
gcatacagttctataaagcataatgatcataat

SEQ ID NO: 504104 - DNA, 33 bp, Homo sapien
gcatacagttctataacgcataatgatcataat

SEQ ID NO: 504105 - DNA, 33 bp, Homo sapien
agataacttcaataaaactgagaaaatcgtcta

SEQ ID NO: 504106 - DNA, 33 bp, Homo sapien
agataacttcaataaagctgagaaaatcgtcta

SEQ ID NO: 504107 - DNA, 33 bp, Homo sapien
gctctggagttgagaacacctgaagatttagaa

SEQ ID NO: 504108 - DNA, 33 bp, Homo sapien
gctctggagttgagaatacctgaagatttagaa

SEQ ID NO: 504109 - DNA, 33 bp, Homo sapien
atcaagtaaccaatcaaaaatcacgtctctatt

SEQ ID NO: 504110 - DNA, 33 bp, Homo sapien
atcaagtaaccaatcacaaatcacgtctctatt

SEQ ID NO: 504111 - DNA, 33 bp, Homo sapien
ttatcttacaaaaataccatacttgcttttcta

SEQ ID NO: 504112 - DNA, 33 bp, Homo sapien
ttatcttacaaaaatatcatacttgcttttcta

SEQ ID NO: 504113 - DNA, 33 bp, Homo sapien
atgtgtgtatttgtagaaggatgtttcacagtt

SEQ ID NO: 504114 - DNA, 33 bp, Homo sapien
atgtgtgtatttgtaggaggatgtttcacagtt

SEQ ID NO: 504115 - DNA, 33 bp, Homo sapien
ccctgcaaagctctaactcacactgtagtcatt

SEQ ID NO: 504116 - DNA, 33 bp, Homo sapien
ccctgcaaagctctaattcacactgtagtcatt

SEQ ID NO: 504117 - DNA, 33 bp, Homo sapien
aatttttccattgatacagcctagatcagttgt

SEQ ID NO: 504118 - DNA, 33 bp, Homo sapien
aatttttccattgatagagcctagatcagttgt

SEQ ID NO: 504119 - DNA, 33 bp, Homo sapien
gctccttcattctgtacgatgtagagcaagtta

SEQ ID NO: 504120 - DNA, 33 bp, Homo sapien
gctccttcattctgtatgatgtagagcaagtta

SEQ ID NO: 504121 - DNA, 33 bp, Homo sapien
taacaattttagaataccaaatgagtgtcaatt

SEQ ID NO: 504122 - DNA, 33 bp, Homo sapien
taacaattttagaatatcaaatgagtgtcaatt

SEQ ID NO: 504123 - DNA, 33 bp, Homo sapien
ttggagtatgaattgcaaaaaccatttagaaaa

SEQ ID NO: 504124 - DNA, 33 bp, Homo sapien
ttggagtatgaattgcgaaaaccatttagaaaa

SEQ ID NO: 504125 - DNA, 33 bp, Homo sapien
tttcttataagaaacaaacacgcaattacaaca

SEQ ID NO: 504126 - DNA, 33 bp, Homo sapien
tttcttataagaaacatacacgcaattacaaca

SEQ ID NO: 504127 - DNA, 33 bp, Homo sapien
aaggtctactgtattaccgtgtcaacctgagat

SEQ ID NO: 504128 - DNA, 33 bp, Homo sapien
aaggtctactgtattagcgtgtcaacctgagat

SEQ ID NO: 504129 - DNA, 33 bp, Homo sapien
aacaagcaaaaacaaccgcaaaattatataagt

SEQ ID NO: 504130 - DNA, 33 bp, Homo sapien
aacaagcaaaaacaacggcaaaattatataagt

SEQ ID NO: 504131 - DNA, 33 bp, Homo sapien
aacaaacatttaactacgctgttggggacagaa

SEQ ID NO: 504132 - DNA, 33 bp, Homo sapien
aacaaacatttaactatgctgttggggacagaa

SEQ ID NO: 504133 - DNA, 33 bp, Homo sapien
ataattaggagttaaccggagaagtgaaagatc

SEQ ID NO: 504134 - DNA, 33 bp, Homo sapien
ataattaggagttaacgggagaagtgaaagatc

SEQ ID NO: 504135 - DNA, 33 bp, Homo sapien
tctccaggcagataagaaaaaaacatacacaat

SEQ ID NO: 504136 - DNA, 33 bp, Homo sapien
tctccaggcagataaggaaaaaacatacacaat

SEQ ID NO: 504137 - DNA, 33 bp, Homo sapien
catcaattttgatccacattagtgagataagag

SEQ ID NO: 504138 - DNA, 33 bp, Homo sapien
catcaattttgatccatattagtgagataagag

SEQ ID NO: 504139 - DNA, 33 bp, Homo sapien
tttcagttttcaagcacaatctgggccatataa

SEQ ID NO: 504140 - DNA, 33 bp, Homo sapien
tttcagttttcaagcagaatctgggccatataa

SEQ ID NO: 504141 - DNA, 33 bp, Homo sapien
ttcagcactttaaaaacgtctttatgccgtctt

SEQ ID NO: 504142 - DNA, 33 bp, Homo sapien
ttcagcactttaaaaatgtctttatgccgtctt

SEQ ID NO: 504143 - DNA, 33 bp, Homo sapien
atttcacctctctttccagttctatgttttcta

SEQ ID NO: 504144 - DNA, 33 bp, Homo sapien
atttcacctctctttctagttctatgttttcta

SEQ ID NO: 504145 - DNA, 33 bp, Homo sapien
agtgcacaccagataggcaaaaggatactaaac

SEQ ID NO: 504146 - DNA, 33 bp, Homo sapien
agtgcacaccagatagtcaaaaggatactaaac

SEQ ID NO: 504147 - DNA, 33 bp, Homo sapien
aaactgttgtgttttccaccttggctggcatta

SEQ ID NO: 504148 - DNA, 33 bp, Homo sapien
aaactgttgtgttttctaccttggctggcatta

SEQ ID NO: 504149 - DNA, 33 bp, Homo sapien
tttgagcagctgtgacagaaaccatataaccag

SEQ ID NO: 504150 - DNA, 33 bp, Homo sapien
tttgagcagctgtgacggaaaccatataaccag

SEQ ID NO: 504151 - DNA, 33 bp, Homo sapien
ttatcaatagccctaaaacactgaaagtttaga

SEQ ID NO: 504152 - DNA, 33 bp, Homo sapien
ttatcaatagccctaagacactgaaagtttaga

SEQ ID NO: 504153 - DNA, 33 bp, Homo sapien
catcctgaaggaaatgcagctcggaaatatttt

SEQ ID NO: 504154 - DNA, 33 bp, Homo sapien
catcctgaaggaaatgtagctcggaaatatttt

SEQ ID NO: 504155 - DNA, 33 bp, Homo sapien
aacacatcttgatttccactacattataatttt

SEQ ID NO: 504156 - DNA, 33 bp, Homo sapien
aacacatcttgatttctactacattataatttt

SEQ ID NO: 504157 - DNA, 33 bp, Homo sapien
gactatataaaggaaacgtcaataaatagcact

SEQ ID NO: 504158 - DNA, 33 bp, Homo sapien
gactatataaaggaaaggtcaataaatagcact

SEQ ID NO: 504159 - DNA, 33 bp, Homo sapien
aatatattgactaaaaaataagacacaaaggtg

SEQ ID NO: 504160 - DNA, 33 bp, Homo sapien
aatatattgactaaaacataagacacaaaggtg

SEQ ID NO: 504161 - DNA, 33 bp, Homo sapien
catgaataataaataaacgagtcctaacaaaga

SEQ ID NO: 504162 - DNA, 33 bp, Homo sapien
catgaataataaataagcgagtcctaacaaaga

SEQ ID NO: 504163 - DNA, 33 bp, Homo sapien
acctgaaaaatctctcaaggctggaacaatttg

SEQ ID NO: 504164 - DNA, 33 bp, Homo sapien
acctgaaaaatctctcgaggctggaacaatttg

SEQ ID NO: 504165 - DNA, 33 bp, Homo sapien
gcagggttagagactcacgtgaaaatatggtct

SEQ ID NO: 504166 - DNA, 33 bp, Homo sapien
gcagggttagagactcgcgtgaaaatatggtct

SEQ ID NO: 504167 - DNA, 33 bp, Homo sapien
atacaccatgaaatatcacgtagccctaaaaca

SEQ ID NO: 504168 - DNA, 33 bp, Homo sapien
atacaccatgaaatattacgtagccctaaaaca

SEQ ID NO: 504169 - DNA, 33 bp, Homo sapien
ttgccttcaatgaaagcagcctaataaaggatg

SEQ ID NO: 504170 - DNA, 33 bp, Homo sapien
ttgccttcaatgaaagtagcctaataaaggatg

SEQ ID NO: 504171 - DNA, 33 bp, Homo sapien
gggtacttatgaggctaagatatgatttatgtg

SEQ ID NO: 504172 - DNA, 33 bp, Homo sapien
gggtacttatgaggcttagatatgatttatgtg

SEQ ID NO: 504173 - DNA, 33 bp, Homo sapien
tgactaattgcgaccaacttgccttctttatct

SEQ ID NO: 504174 - DNA, 33 bp, Homo sapien
tgactaattgcgaccagcttgccttctttatct

SEQ ID NO: 504175 - DNA, 33 bp, Homo sapien
tggaaatacccaataaggcagagagcttaacag

SEQ ID NO: 504176 - DNA, 33 bp, Homo sapien
tggaaatacccaataatgcagagagcttaacag

SEQ ID NO: 504177 - DNA, 33 bp, Homo sapien
aaggctattagaggaccgacaacaataaaatca

SEQ ID NO: 504178 - DNA, 33 bp, Homo sapien
aaggctattagaggactgacaacaataaaatca

SEQ ID NO: 504179 - DNA, 33 bp, Homo sapien
catgtctcatgaagtaagagagaagagccacct

SEQ ID NO: 504180 - DNA, 33 bp, Homo sapien
catgtctcatgaagtaggagagaagagccacct

SEQ ID NO: 504181 - DNA, 33 bp, Homo sapien
cctcttcatgtcctctaacaaagcattttattc

SEQ ID NO: 504182 - DNA, 33 bp, Homo sapien
cctcttcatgtcctctcacaaagcattttattc

SEQ ID NO: 504183 - DNA, 33 bp, Homo sapien
gtgtgtataagattcacacttcaggattctctg

SEQ ID NO: 504184 - DNA, 33 bp, Homo sapien
gtgtgtataagattcatacttcaggattctctg

SEQ ID NO: 504185 - DNA, 33 bp, Homo sapien
ttgaatgcacattgataaccttttaccatcctc

SEQ ID NO: 504186 - DNA, 33 bp, Homo sapien
ttgaatgcacattgatgaccttttaccatcctc

SEQ ID NO: 504187 - DNA, 33 bp, Homo sapien
aaaagaacccagaaaaaatggaatctagggcag

SEQ ID NO: 504188 - DNA, 33 bp, Homo sapien
aaaagaacccagaaaagatggaatctagggcag

SEQ ID NO: 504189 - DNA, 33 bp, Homo sapien
atcatgaggaacactaagctcaggctttgaaac

SEQ ID NO: 504190 - DNA, 33 bp, Homo sapien
atcatgaggaacactaggctcaggctttgaaac

SEQ ID NO: 504191 - DNA, 33 bp, Homo sapien
aagaaggggtacatcaccttacaaatcttagat

SEQ ID NO: 504192 - DNA, 33 bp, Homo sapien
aagaaggggtacatcatcttacaaatcttagat

SEQ ID NO: 504193 - DNA, 33 bp, Homo sapien
taaaggaaatgtgggactcataaaactcctaaa

SEQ ID NO: 504194 - DNA, 33 bp, Homo sapien
taaaggaaatgtgggattcataaaactcctaaa

SEQ ID NO: 504195 - DNA, 33 bp, Homo sapien
aagcttccataaactacatgtggctgcttttga

SEQ ID NO: 504196 - DNA, 33 bp, Homo sapien
aagcttccataaactagatgtggctgcttttga

SEQ ID NO: 504197 - DNA, 33 bp, Homo sapien
aattatacatgacattaaaaagaatcacagaaa

SEQ ID NO: 504198 - DNA, 33 bp, Homo sapien
aattatacatgacattgaaaagaatcacagaaa

SEQ ID NO: 504199 - DNA, 33 bp, Homo sapien
tggaactgtggttatgaagtcatagggaagctc

SEQ ID NO: 504200 - DNA, 33 bp, Homo sapien
tggaactgtggttatggagtcatagggaagctc

SEQ ID NO: 504201 - DNA, 33 bp, Homo sapien
tccatccaagggaatactactcagcaatgtaaa

SEQ ID NO: 504202 - DNA, 33 bp, Homo sapien
tccatccaagggaatattactcagcaatgtaaa

SEQ ID NO: 504203 - DNA, 33 bp, Homo sapien
aaattactcattttacaaaaccaaaggatttcc

SEQ ID NO: 504204 - DNA, 33 bp, Homo sapien
aaattactcattttacgaaaccaaaggatttcc

SEQ ID NO: 504205 - DNA, 33 bp, Homo sapien
aaattgacatgaatgccgaacaactgcaatggg

SEQ ID NO: 504206 - DNA, 33 bp, Homo sapien
aaattgacatgaatgctgaacaactgcaatggg

SEQ ID NO: 504207 - DNA, 33 bp, Homo sapien
tagccaacagtgatgacggctttccttggatct

SEQ ID NO: 504208 - DNA, 33 bp, Homo sapien
tagccaacagtgatgagggctttccttggatct

SEQ ID NO: 504209 - DNA, 33 bp, Homo sapien
actgttggctaaagcacgggcttctcagtctgg

SEQ ID NO: 504210 - DNA, 33 bp, Homo sapien
actgttggctaaagcatgggcttctcagtctgg

SEQ ID NO: 504211 - DNA, 33 bp, Homo sapien
cagataatgcactactcaaggataaaatgtgaa

SEQ ID NO: 504212 - DNA, 33 bp, Homo sapien
cagataatgcactacttaaggataaaatgtgaa

SEQ ID NO: 504213 - DNA, 33 bp, Homo sapien
ttcagtaggtgacataactaatccatgcctcta

SEQ ID NO: 504214 - DNA, 33 bp, Homo sapien
ttcagtaggtgacatacctaatccatgcctcta

SEQ ID NO: 504215 - DNA, 33 bp, Homo sapien
gaggtaaaacagcttacagtaagagctcaaata

SEQ ID NO: 504216 - DNA, 33 bp, Homo sapien
gaggtaaaacagcttatagtaagagctcaaata

SEQ ID NO: 504217 - DNA, 33 bp, Homo sapien
cttagtcacagaaaaccaatggctttaatgaaa

SEQ ID NO: 504218 - DNA, 33 bp, Homo sapien
cttagtcacagaaaactaatggctttaatgaaa

SEQ ID NO: 504219 - DNA, 33 bp, Homo sapien
aaggctttagcattggaaagatttattggattt

SEQ ID NO: 504220 - DNA, 33 bp, Homo sapien
aaggctttagcattggcaagatttattggattt

SEQ ID NO: 504221 - DNA, 33 bp, Homo sapien
tttattgtgtacctaccaggtgcatgactcttt

SEQ ID NO: 504222 - DNA, 33 bp, Homo sapien
tttattgtgtacctactaggtgcatgactcttt

SEQ ID NO: 504223 - DNA, 33 bp, Homo sapien
cattattaagtctgtcgagtcactaagccaaat

SEQ ID NO: 504224 - DNA, 33 bp, Homo sapien
cattattaagtctgtctagtcactaagccaaat

SEQ ID NO: 504225 - DNA, 33 bp, Homo sapien
attgctttgcacaaagaagccagataaatgaca

SEQ ID NO: 504226 - DNA, 33 bp, Homo sapien
attgctttgcacaaaggagccagataaatgaca

SEQ ID NO: 504227 - DNA, 33 bp, Homo sapien
ctttcagtctagcctactaacttattctccatt

SEQ ID NO: 504228 - DNA, 33 bp, Homo sapien
ctttcagtctagcctattaacttattctccatt

SEQ ID NO: 504229 - DNA, 33 bp, Homo sapien
aatttgtttcgagtgcactacggtatagataac

SEQ ID NO: 504230 - DNA, 33 bp, Homo sapien
aatttgtttcgagtgcgctacggtatagataac

SEQ ID NO: 504231 - DNA, 33 bp, Homo sapien
atgctttaagggaagacaattaagccactagtc

SEQ ID NO: 504232 - DNA, 33 bp, Homo sapien
atgctttaagggaagataattaagccactagtc

SEQ ID NO: 504233 - DNA, 33 bp, Homo sapien
tagtggtgccatatcactgaatttatgttacta

SEQ ID NO: 504234 - DNA, 33 bp, Homo sapien
tagtggtgccatatcattgaatttatgttacta

SEQ ID NO: 504235 - DNA, 33 bp, Homo sapien
caattttcccacccaaataagtcccagctgtca

SEQ ID NO: 504236 - DNA, 33 bp, Homo sapien
caattttcccacccaagtaagtcccagctgtca

SEQ ID NO: 504237 - DNA, 33 bp, Homo sapien
atcttgctagggcacacacattattaagttgga

SEQ ID NO: 504238 - DNA, 33 bp, Homo sapien
atcttgctagggcacatacattattaagttgga

SEQ ID NO: 504239 - DNA, 33 bp, Homo sapien
gagagggattctagagaatgagcaatattacgt

SEQ ID NO: 504240 - DNA, 33 bp, Homo sapien
gagagggattctagaggatgagcaatattacgt

SEQ ID NO: 504241 - DNA, 33 bp, Homo sapien
atttttgttccttgccggaattttcttttactt

SEQ ID NO: 504242 - DNA, 33 bp, Homo sapien
atttttgttccttgcctgaattttcttttactt

SEQ ID NO: 504243 - DNA, 33 bp, Homo sapien
gccaggaagcagttaaaagcgctgtccactggc

SEQ ID NO: 504244 - DNA, 33 bp, Homo sapien
gccaggaagcagttaagagcgctgtccactggc

SEQ ID NO: 504245 - DNA, 33 bp, Homo sapien
atttagccaggataaaagttaactcttgctggg

SEQ ID NO: 504246 - DNA, 33 bp, Homo sapien
atttagccaggataaatgttaactcttgctggg

SEQ ID NO: 504247 - DNA, 33 bp, Homo sapien
ggctttatttgataaaaaattgcaccatcaatt

SEQ ID NO: 504248 - DNA, 33 bp, Homo sapien
ggctttatttgataaacaattgcaccatcaatt

SEQ ID NO: 504249 - DNA, 33 bp, Homo sapien
tcctattattgttccaactatgtctcaagtata

SEQ ID NO: 504250 - DNA, 33 bp, Homo sapien
tcctattattgttccatctatgtctcaagtata

SEQ ID NO: 504251 - DNA, 33 bp, Homo sapien
gtggttgttaagaagcagataacatcaactagc

SEQ ID NO: 504252 - DNA, 33 bp, Homo sapien
gtggttgttaagaagctgataacatcaactagc

SEQ ID NO: 504253 - DNA, 33 bp, Homo sapien
agaagacagtagatccaaaatggagtcactcca

SEQ ID NO: 504254 - DNA, 33 bp, Homo sapien
agaagacagtagatccgaaatggagtcactcca

SEQ ID NO: 504255 - DNA, 33 bp, Homo sapien
atgctcaccacattgcagacaaagaggagagaa

SEQ ID NO: 504256 - DNA, 33 bp, Homo sapien
atgctcaccacattgcggacaaagaggagagaa

SEQ ID NO: 504257 - DNA, 33 bp, Homo sapien
ataaccatgctttggcagaggacattctctttt

SEQ ID NO: 504258 - DNA, 33 bp, Homo sapien
ataaccatgctttggccgaggacattctctttt

SEQ ID NO: 504259 - DNA, 33 bp, Homo sapien
ggggcatttattcacccgccactctggacatta

SEQ ID NO: 504260 - DNA, 33 bp, Homo sapien
ggggcatttattcaccggccactctggacatta

SEQ ID NO: 504261 - DNA, 33 bp, Homo sapien
cctggctaacaaaaaacctgtacaccaaatgta

SEQ ID NO: 504262 - DNA, 33 bp, Homo sapien
cctggctaacaaaaaatctgtacaccaaatgta

SEQ ID NO: 504263 - DNA, 33 bp, Homo sapien
gatattacattgagggaaattagatgtagggta

SEQ ID NO: 504264 - DNA, 33 bp, Homo sapien
gatattacattgaggggaattagatgtagggta

SEQ ID NO: 504265 - DNA, 33 bp, Homo sapien
aactgttcagaattgtaaatgtatccatatcaa

SEQ ID NO: 504266 - DNA, 33 bp, Homo sapien
aactgttcagaattgtgaatgtatccatatcaa

SEQ ID NO: 504267 - DNA, 33 bp, Homo sapien
taaaattgaacttccaactcctgctttctcatc

SEQ ID NO: 504268 - DNA, 33 bp, Homo sapien
taaaattgaacttccagctcctgctttctcatc

SEQ ID NO: 504269 - DNA, 33 bp, Homo sapien
agaattaataaatgacactcaattctatgacca

SEQ ID NO: 504270 - DNA, 33 bp, Homo sapien
agaattaataaatgacgctcaattctatgacca

SEQ ID NO: 504271 - DNA, 33 bp, Homo sapien
taattaagtttacataccacaaatgccacctag

SEQ ID NO: 504272 - DNA, 33 bp, Homo sapien
taattaagtttacatatcacaaatgccacctag

SEQ ID NO: 504273 - DNA, 33 bp, Homo sapien
cagagtcccttctcataaaactttcattccatg

SEQ ID NO: 504274 - DNA, 33 bp, Homo sapien
cagagtcccttctcatgaaactttcattccatg

SEQ ID NO: 504275 - DNA, 33 bp, Homo sapien
cctgagtttcttgatacctttattttggtctta

SEQ ID NO: 504276 - DNA, 33 bp, Homo sapien
cctgagtttcttgatagctttattttggtctta

SEQ ID NO: 504277 - DNA, 33 bp, Homo sapien
ggaaagctcatggaaaccaatcttcagtcccct

SEQ ID NO: 504278 - DNA, 33 bp, Homo sapien
ggaaagctcatggaaagcaatcttcagtcccct

SEQ ID NO: 504279 - DNA, 33 bp, Homo sapien
aacgacaagacatctacaaacttacaagttaat

SEQ ID NO: 504280 - DNA, 33 bp, Homo sapien
aacgacaagacatctagaaacttacaagttaat

SEQ ID NO: 504281 - DNA, 33 bp, Homo sapien
tttttccatgaaaaaccagaaagtagcaaatat

SEQ ID NO: 504282 - DNA, 33 bp, Homo sapien
tttttccatgaaaaacgagaaagtagcaaatat

SEQ ID NO: 504283 - DNA, 33 bp, Homo sapien
atggagataagagaaacagtaataaagccaggc

SEQ ID NO: 504284 - DNA, 33 bp, Homo sapien
atggagataagagaaagagtaataaagccaggc

SEQ ID NO: 504285 - DNA, 33 bp, Homo sapien
gcagtgaagtgtaagcaagtccaaatgtttagc

SEQ ID NO: 504286 - DNA, 33 bp, Homo sapien
gcagtgaagtgtaagcgagtccaaatgtttagc

SEQ ID NO: 504287 - DNA, 33 bp, Homo sapien
cttaatgacgaggtaaccagtgaggcttgtttt

SEQ ID NO: 504288 - DNA, 33 bp, Homo sapien
cttaatgacgaggtaatcagtgaggcttgtttt

SEQ ID NO: 504289 - DNA, 33 bp, Homo sapien
ttccaagcaaagttaacgaccaggagcactgct

SEQ ID NO: 504290 - DNA, 33 bp, Homo sapien
ttccaagcaaagttaatgaccaggagcactgct

SEQ ID NO: 504291 - DNA, 33 bp, Homo sapien
gtgtgaaataacatgaataagacattctgcaaa

SEQ ID NO: 504292 - DNA, 33 bp, Homo sapien
gtgtgaaataacatgagtaagacattctgcaaa

SEQ ID NO: 504293 - DNA, 33 bp, Homo sapien
catcttttttttgttacatgaagaagatgtgag

SEQ ID NO: 504294 - DNA, 33 bp, Homo sapien
catcttttttttgttatatgaagaagatgtgag

SEQ ID NO: 504295 - DNA, 33 bp, Homo sapien
gttataatgacctgcacgttataatagcaacaa

SEQ ID NO: 504296 - DNA, 33 bp, Homo sapien
gttataatgacctgcatgttataatagcaacaa

SEQ ID NO: 504297 - DNA, 33 bp, Homo sapien
ttgtccataagaataacctcttacttgactata

SEQ ID NO: 504298 - DNA, 33 bp, Homo sapien
ttgtccataagaataatctcttacttgactata

SEQ ID NO: 504299 - DNA, 33 bp, Homo sapien
attcttagcttataaaagaagatgaaatatgtt

SEQ ID NO: 504300 - DNA, 33 bp, Homo sapien
attcttagcttataaaggaagatgaaatatgtt

SEQ ID NO: 504301 - DNA, 33 bp, Homo sapien
aaatttgatacacctacaagttcatcaacagat

SEQ ID NO: 504302 - DNA, 33 bp, Homo sapien
aaatttgatacacctataagttcatcaacagat

SEQ ID NO: 504303 - DNA, 33 bp, Homo sapien
tataaacaaatgggcaaggttgttgtatcagcc

SEQ ID NO: 504304 - DNA, 33 bp, Homo sapien
tataaacaaatgggcatggttgttgtatcagcc

SEQ ID NO: 504305 - DNA, 33 bp, Homo sapien
acaaacctgggtctcaaatgagctgttagaccc

SEQ ID NO: 504306 - DNA, 33 bp, Homo sapien
acaaacctgggtctcagatgagctgttagaccc

SEQ ID NO: 504307 - DNA, 33 bp, Homo sapien
gctacaataattaaaacagaatgatgctggcat

SEQ ID NO: 504308 - DNA, 33 bp, Homo sapien
gctacaataattaaaatagaatgatgctggcat

SEQ ID NO: 504309 - DNA, 33 bp, Homo sapien
caggaatgcacttaaaaagctctccctctttcc

SEQ ID NO: 504310 - DNA, 33 bp, Homo sapien
caggaatgcacttaaatagctctccctctttcc

SEQ ID NO: 504311 - DNA, 33 bp, Homo sapien
aaccaatatgaccgacaggagctcgcgcaagga

SEQ ID NO: 504312 - DNA, 33 bp, Homo sapien
aaccaatatgaccgactggagctcgcgcaagga

SEQ ID NO: 504313 - DNA, 33 bp, Homo sapien
atgttagcacaatgaggaaattgcctaacaaca

SEQ ID NO: 504314 - DNA, 33 bp, Homo sapien
atgttagcacaatgagtaaattgcctaacaaca

SEQ ID NO: 504315 - DNA, 33 bp, Homo sapien
ttatgtgctatcaaaacgcaaataaattgtgtc

SEQ ID NO: 504316 - DNA, 33 bp, Homo sapien
ttatgtgctatcaaaatgcaaataaattgtgtc

SEQ ID NO: 504317 - DNA, 33 bp, Homo sapien
taaagtatgatgctgacgttcataaacccacaa

SEQ ID NO: 504318 - DNA, 33 bp, Homo sapien
taaagtatgatgctgatgttcataaacccacaa

SEQ ID NO: 504319 - DNA, 33 bp, Homo sapien
ttgctattctattccccaataatcagtttacta

SEQ ID NO: 504320 - DNA, 33 bp, Homo sapien
ttgctattctattccctaataatcagtttacta

SEQ ID NO: 504321 - DNA, 33 bp, Homo sapien
gcttgcctggggtactaaagagtcactcatgaa

SEQ ID NO: 504322 - DNA, 33 bp, Homo sapien
gcttgcctggggtactgaagagtcactcatgaa

SEQ ID NO: 504323 - DNA, 33 bp, Homo sapien
gcaaggtttccttcataatctcagggttttaac

SEQ ID NO: 504324 - DNA, 33 bp, Homo sapien
gcaaggtttccttcatgatctcagggttttaac

SEQ ID NO: 504325 - DNA, 33 bp, Homo sapien
gagaagagggagaaaacgcaccctgcagccata

SEQ ID NO: 504326 - DNA, 33 bp, Homo sapien
gagaagagggagaaaatgcaccctgcagccata

SEQ ID NO: 504327 - DNA, 33 bp, Homo sapien
gaagataatcaaagataactccaaagtgtctac

SEQ ID NO: 504328 - DNA, 33 bp, Homo sapien
gaagataatcaaagatgactccaaagtgtctac

SEQ ID NO: 504329 - DNA, 33 bp, Homo sapien
cctcgaagtgaaaagtaaaatctctaattgtaa

SEQ ID NO: 504330 - DNA, 33 bp, Homo sapien
cctcgaagtgaaaagttaaatctctaattgtaa

SEQ ID NO: 504331 - DNA, 33 bp, Homo sapien
cttacacagtacaaaacttatctgttgtaaatc

SEQ ID NO: 504332 - DNA, 33 bp, Homo sapien
cttacacagtacaaaatttatctgttgtaaatc

SEQ ID NO: 504333 - DNA, 33 bp, Homo sapien
cagtcagttgaatcaacagtcataaagttgagt

SEQ ID NO: 504334 - DNA, 33 bp, Homo sapien
cagtcagttgaatcaatagtcataaagttgagt

SEQ ID NO: 504335 - DNA, 33 bp, Homo sapien
tcaaacttcatgtcaacttccagagagttactt

SEQ ID NO: 504336 - DNA, 33 bp, Homo sapien
tcaaacttcatgtcaatttccagagagttactt

SEQ ID NO: 504337 - DNA, 33 bp, Homo sapien
tcctctagaacagaaagaacttagaacctcttt

SEQ ID NO: 504338 - DNA, 33 bp, Homo sapien
tcctctagaacagaaataacttagaacctcttt

SEQ ID NO: 504339 - DNA, 33 bp, Homo sapien
tcagacatttcccttcacatctctaaaatgtac

SEQ ID NO: 504340 - DNA, 33 bp, Homo sapien
tcagacatttcccttcgcatctctaaaatgtac

SEQ ID NO: 504341 - DNA, 33 bp, Homo sapien
gcagtttgagaccggagattctcccagatttag

SEQ ID NO: 504342 - DNA, 33 bp, Homo sapien
gcagtttgagaccggatattctcccagatttag

SEQ ID NO: 504343 - DNA, 33 bp, Homo sapien
agggcctggatattgcagagaatgagatgctgg

SEQ ID NO: 504344 - DNA, 33 bp, Homo sapien
agggcctggatattgcggagaatgagatgctgg

SEQ ID NO: 504345 - DNA, 33 bp, Homo sapien
agtactaggttgtcatcaggttttagaacagac

SEQ ID NO: 504346 - DNA, 33 bp, Homo sapien
agtactaggttgtcattaggttttagaacagac

SEQ ID NO: 504347 - DNA, 33 bp, Homo sapien
ctagttctgggtcaacaaggcttctgtgtcatc

SEQ ID NO: 504348 - DNA, 33 bp, Homo sapien
ctagttctgggtcaacgaggcttctgtgtcatc

SEQ ID NO: 504349 - DNA, 33 bp, Homo sapien
gaacccgcaacggcgactccctggacatgtggc

SEQ ID NO: 504350 - DNA, 33 bp, Homo sapien
gaacccgcaacggcgattccctggacatgtggc

SEQ ID NO: 504351 - DNA, 33 bp, Homo sapien
ctatcatgtgatttggaaagatggactccacaa

SEQ ID NO: 504352 - DNA, 33 bp, Homo sapien
ctatcatgtgatttgggaagatggactccacaa

SEQ ID NO: 504353 - DNA, 33 bp, Homo sapien
tattaacattttaaaccactgccttgaagtcta

SEQ ID NO: 504354 - DNA, 33 bp, Homo sapien
tattaacattttaaacgactgccttgaagtcta

SEQ ID NO: 504355 - DNA, 33 bp, Homo sapien
tattacaaaggcatgagcttgaaccagttctgt

SEQ ID NO: 504356 - DNA, 33 bp, Homo sapien
tattacaaaggcatgatcttgaaccagttctgt

SEQ ID NO: 504357 - DNA, 33 bp, Homo sapien
ggtgcatcagtaaacaaggggcccgaggagcgg

SEQ ID NO: 504358 - DNA, 33 bp, Homo sapien
ggtgcatcagtaaacagggggcccgaggagcgg

SEQ ID NO: 504359 - DNA, 33 bp, Homo sapien
ccctgtgaaaagattaacaagtgctgatctgcg

SEQ ID NO: 504360 - DNA, 33 bp, Homo sapien
ccctgtgaaaagattagcaagtgctgatctgcg

SEQ ID NO: 504361 - DNA, 33 bp, Homo sapien
ttgggtaaaagcactacgatctgacaccagcca

SEQ ID NO: 504362 - DNA, 33 bp, Homo sapien
ttgggtaaaagcactatgatctgacaccagcca

SEQ ID NO: 504363 - DNA, 33 bp, Homo sapien
agaaacaaacacaagaactctgcaaagtggaca

SEQ ID NO: 504364 - DNA, 33 bp, Homo sapien
agaaacaaacacaagatctctgcaaagtggaca

SEQ ID NO: 504365 - DNA, 33 bp, Homo sapien
gtatttcctcattaaaacttgaaaaatgtctat

SEQ ID NO: 504366 - DNA, 33 bp, Homo sapien
gtatttcctcattaaagcttgaaaaatgtctat

SEQ ID NO: 504367 - DNA, 33 bp, Homo sapien
tcatagctacgaggtacgcgaataattttattt

SEQ ID NO: 504368 - DNA, 33 bp, Homo sapien
tcatagctacgaggtatgcgaataattttattt

SEQ ID NO: 504369 - DNA, 33 bp, Homo sapien
aattcatcatttgaaacgttagatttggaagtg

SEQ ID NO: 504370 - DNA, 33 bp, Homo sapien
aattcatcatttgaaatgttagatttggaagtg

SEQ ID NO: 504371 - DNA, 33 bp, Homo sapien
cacagtgagacattagcagtgtgaatatcaaga

SEQ ID NO: 504372 - DNA, 33 bp, Homo sapien
cacagtgagacattagtagtgtgaatatcaaga

SEQ ID NO: 504373 - DNA, 33 bp, Homo sapien
gactcctctctgtctcaaaacacaagtggtcaa

SEQ ID NO: 504374 - DNA, 33 bp, Homo sapien
gactcctctctgtctcgaaacacaagtggtcaa

SEQ ID NO: 504375 - DNA, 33 bp, Homo sapien
cctgattgtggactagcaggaagctgagaatat

SEQ ID NO: 504376 - DNA, 33 bp, Homo sapien
cctgattgtggactaggaggaagctgagaatat

SEQ ID NO: 504377 - DNA, 33 bp, Homo sapien
tttatacagccttaacagaaaccagacagttct

SEQ ID NO: 504378 - DNA, 33 bp, Homo sapien
tttatacagccttaacggaaaccagacagttct

SEQ ID NO: 504379 - DNA, 33 bp, Homo sapien
gtggggatgattttgcagaaggaaattcttgat

SEQ ID NO: 504380 - DNA, 33 bp, Homo sapien
gtggggatgattttgcggaaggaaattcttgat

SEQ ID NO: 504381 - DNA, 33 bp, Homo sapien
caatatttccacatggaaagcagtcagggttga

SEQ ID NO: 504382 - DNA, 33 bp, Homo sapien
caatatttccacatggtaagcagtcagggttga

SEQ ID NO: 504383 - DNA, 33 bp, Homo sapien
gtgagatagcagaaaaaccaaaattgcactggt

SEQ ID NO: 504384 - DNA, 33 bp, Homo sapien
gtgagatagcagaaaagccaaaattgcactggt

SEQ ID NO: 504385 - DNA, 33 bp, Homo sapien
ggcccatatgcgctcacatgaggccagctgaac

SEQ ID NO: 504386 - DNA, 33 bp, Homo sapien
ggcccatatgcgctcagatgaggccagctgaac

SEQ ID NO: 504387 - DNA, 33 bp, Homo sapien
aggcctcacacacagcgatgaagtaccacagct

SEQ ID NO: 504388 - DNA, 33 bp, Homo sapien
aggcctcacacacagctatgaagtaccacagct

SEQ ID NO: 504389 - DNA, 33 bp, Homo sapien
tatcatttttttggcactatgctagaataattt

SEQ ID NO: 504390 - DNA, 33 bp, Homo sapien
tatcatttttttggcattatgctagaataattt

SEQ ID NO: 504391 - DNA, 33 bp, Homo sapien
aaaaaaatgatatcacaaaaaagttcaagaata

SEQ ID NO: 504392 - DNA, 33 bp, Homo sapien
aaaaaaatgatatcactaaaaagttcaagaata

SEQ ID NO: 504393 - DNA, 33 bp, Homo sapien
cccccaggggtcaaaacggtgttgcaaagtctg

SEQ ID NO: 504394 - DNA, 33 bp, Homo sapien
cccccaggggtcaaaatggtgttgcaaagtctg

SEQ ID NO: 504395 - DNA, 33 bp, Homo sapien
tacctatccagaacctaactctctcagaacaca

SEQ ID NO: 504396 - DNA, 33 bp, Homo sapien
tacctatccagaacctcactctctcagaacaca

SEQ ID NO: 504397 - DNA, 33 bp, Homo sapien
agaggggaaaagctacaaaatgcaaattgcaat

SEQ ID NO: 504398 - DNA, 33 bp, Homo sapien
agaggggaaaagctaccaaatgcaaattgcaat

SEQ ID NO: 504399 - DNA, 33 bp, Homo sapien
accaaagttggagaacaatgagaattatctgtg

SEQ ID NO: 504400 - DNA, 33 bp, Homo sapien
accaaagttggagaacgatgagaattatctgtg

SEQ ID NO: 504401 - DNA, 33 bp, Homo sapien
agacccttgagtcatgcagctaagacagtcagg

SEQ ID NO: 504402 - DNA, 33 bp, Homo sapien
agacccttgagtcatggagctaagacagtcagg

SEQ ID NO: 504403 - DNA, 33 bp, Homo sapien
gaaatgaccattctggaaccctcatcttgtcct

SEQ ID NO: 504404 - DNA, 33 bp, Homo sapien
gaaatgaccattctggcaccctcatcttgtcct

SEQ ID NO: 504405 - DNA, 33 bp, Homo sapien
tgtaaccgataagtcacgatctcagcacttaac

SEQ ID NO: 504406 - DNA, 33 bp, Homo sapien
tgtaaccgataagtcatgatctcagcacttaac

SEQ ID NO: 504407 - DNA, 33 bp, Homo sapien
gaattggaagagaaacactattcaaaattataa

SEQ ID NO: 504408 - DNA, 33 bp, Homo sapien
gaattggaagagaaacgctattcaaaattataa

SEQ ID NO: 504409 - DNA, 33 bp, Homo sapien
tttacttgaacccataaaggtcattgtagagtt

SEQ ID NO: 504410 - DNA, 33 bp, Homo sapien
tttacttgaacccatagaggtcattgtagagtt

SEQ ID NO: 504411 - DNA, 33 bp, Homo sapien
atgcacgcctgtgtagaccacaaatttggcaga

SEQ ID NO: 504412 - DNA, 33 bp, Homo sapien
atgcacgcctgtgtaggccacaaatttggcaga

SEQ ID NO: 504413 - DNA, 33 bp, Homo sapien
gatccactgtgctccacgcagttacaccaagta

SEQ ID NO: 504414 - DNA, 33 bp, Homo sapien
gatccactgtgctccaggcagttacaccaagta

SEQ ID NO: 504415 - DNA, 33 bp, Homo sapien
agaaaacactggaaaaactttgtaacaaatata

SEQ ID NO: 504416 - DNA, 33 bp, Homo sapien
agaaaacactggaaaatctttgtaacaaatata

SEQ ID NO: 504417 - DNA, 33 bp, Homo sapien
ctccattcaaagatcaagtagatgttcataatg

SEQ ID NO: 504418 - DNA, 33 bp, Homo sapien
ctccattcaaagatcacgtagatgttcataatg

SEQ ID NO: 504419 - DNA, 33 bp, Homo sapien
ctcagaactgcaggtccatttagcagtctaggc

SEQ ID NO: 504420 - DNA, 33 bp, Homo sapien
ctcagaactgcaggtctatttagcagtctaggc

SEQ ID NO: 504421 - DNA, 33 bp, Homo sapien
gctgcctattcttccaccctgttcccatcacta

SEQ ID NO: 504422 - DNA, 33 bp, Homo sapien
gctgcctattcttccatcctgttcccatcacta

SEQ ID NO: 504423 - DNA, 33 bp, Homo sapien
ctctctccttaagacaatcggtccctatacaat

SEQ ID NO: 504424 - DNA, 33 bp, Homo sapien
ctctctccttaagacagtcggtccctatacaat

SEQ ID NO: 504425 - DNA, 33 bp, Homo sapien
tggtccagtgactcaagaattttttctaaagga

SEQ ID NO: 504426 - DNA, 33 bp, Homo sapien
tggtccagtgactcaataattttttctaaagga

SEQ ID NO: 504427 - DNA, 33 bp, Homo sapien
tagaatctttttcagcacttgatttcacggtaa

SEQ ID NO: 504428 - DNA, 33 bp, Homo sapien
tagaatctttttcagcgcttgatttcacggtaa

SEQ ID NO: 504429 - DNA, 33 bp, Homo sapien
tcactattcctttatcagagagataccttcagc

SEQ ID NO: 504430 - DNA, 33 bp, Homo sapien
tcactattcctttatcggagagataccttcagc

SEQ ID NO: 504431 - DNA, 33 bp, Homo sapien
cagcccaagataccaaaactccgaaggcagccc

SEQ ID NO: 504432 - DNA, 33 bp, Homo sapien
cagcccaagataccaacactccgaaggcagccc

SEQ ID NO: 504433 - DNA, 33 bp, Homo sapien
gtagaactgggtgagaaggcgacataacaggcc

SEQ ID NO: 504434 - DNA, 33 bp, Homo sapien
gtagaactgggtgagagggcgacataacaggcc

SEQ ID NO: 504435 - DNA, 33 bp, Homo sapien
tggtcggtcctctttacaggatttttgtgagct

SEQ ID NO: 504436 - DNA, 33 bp, Homo sapien
tggtcggtcctctttataggatttttgtgagct

SEQ ID NO: 504437 - DNA, 33 bp, Homo sapien
tccatttagtgcatcacatctaagcaattgccc

SEQ ID NO: 504438 - DNA, 33 bp, Homo sapien
tccatttagtgcatcatatctaagcaattgccc

SEQ ID NO: 504439 - DNA, 33 bp, Homo sapien
aacaactaaacattgcaaaaagtggcgcagagg

SEQ ID NO: 504440 - DNA, 33 bp, Homo sapien
aacaactaaacattgcgaaaagtggcgcagagg

SEQ ID NO: 504441 - DNA, 33 bp, Homo sapien
tccttcaactctagcccaaaatgctggctggaa

SEQ ID NO: 504442 - DNA, 33 bp, Homo sapien
tccttcaactctagcctaaaatgctggctggaa

SEQ ID NO: 504443 - DNA, 33 bp, Homo sapien
caagcggttttaacaacgtgatgattgatgatt

SEQ ID NO: 504444 - DNA, 33 bp, Homo sapien
caagcggttttaacaatgtgatgattgatgatt

SEQ ID NO: 504445 - DNA, 33 bp, Homo sapien
tctgtcactaaaaccaccactgtattctatccc

SEQ ID NO: 504446 - DNA, 33 bp, Homo sapien
tctgtcactaaaaccatcactgtattctatccc

SEQ ID NO: 504447 - DNA, 33 bp, Homo sapien
gcatgatgtaaaatcacgcgttgggatatcatt

SEQ ID NO: 504448 - DNA, 33 bp, Homo sapien
gcatgatgtaaaatcatgcgttgggatatcatt

SEQ ID NO: 504449 - DNA, 33 bp, Homo sapien
agaagaggaaaaaaaaacctaatgtgtatagtg

SEQ ID NO: 504450 - DNA, 33 bp, Homo sapien
agaagaggaaaaaaaaccctaatgtgtatagtg

SEQ ID NO: 504451 - DNA, 33 bp, Homo sapien
taaaactctgcaatagacaatcctacaaggtgg

SEQ ID NO: 504452 - DNA, 33 bp, Homo sapien
taaaactctgcaataggcaatcctacaaggtgg

SEQ ID NO: 504453 - DNA, 33 bp, Homo sapien
acaatcttggagcccaactaccacaccaacttt

SEQ ID NO: 504454 - DNA, 33 bp, Homo sapien
acaatcttggagcccagctaccacaccaacttt

SEQ ID NO: 504455 - DNA, 33 bp, Homo sapien
taaagtgctcagaacactgctgatatatgtgac

SEQ ID NO: 504456 - DNA, 33 bp, Homo sapien
taaagtgctcagaacattgctgatatatgtgac

SEQ ID NO: 504457 - DNA, 33 bp, Homo sapien
atgattgtcactaacccgatgcttcaccatcac

SEQ ID NO: 504458 - DNA, 33 bp, Homo sapien
atgattgtcactaacctgatgcttcaccatcac

SEQ ID NO: 504459 - DNA, 33 bp, Homo sapien
ctgcagatgttcaggacatgtaaggttgagaca

SEQ ID NO: 504460 - DNA, 33 bp, Homo sapien
ctgcagatgttcaggagatgtaaggttgagaca

SEQ ID NO: 504461 - DNA, 33 bp, Homo sapien
ggcatgtgtgtaaagcagaggggaggggagctg

SEQ ID NO: 504462 - DNA, 33 bp, Homo sapien
ggcatgtgtgtaaagcggaggggaggggagctg

SEQ ID NO: 504463 - DNA, 33 bp, Homo sapien
aagaagaagcaatgagaaatggaggccagacac

SEQ ID NO: 504464 - DNA, 33 bp, Homo sapien
aagaagaagcaatgagcaatggaggccagacac

SEQ ID NO: 504465 - DNA, 33 bp, Homo sapien
gatctcattttatgcaaagtccaactcaatcct

SEQ ID NO: 504466 - DNA, 33 bp, Homo sapien
gatctcattttatgcacagtccaactcaatcct

SEQ ID NO: 504467 - DNA, 33 bp, Homo sapien
tagcatcccagaacaactgaatagaaatataat

SEQ ID NO: 504468 - DNA, 33 bp, Homo sapien
tagcatcccagaacaattgaatagaaatataat

SEQ ID NO: 504469 - DNA, 33 bp, Homo sapien
aggtagcagggctccacctacagaagttatagg

SEQ ID NO: 504470 - DNA, 33 bp, Homo sapien
aggtagcagggctccagctacagaagttatagg

SEQ ID NO: 504471 - DNA, 33 bp, Homo sapien
ttgttcttttactacaaccggagtggtaaatac

SEQ ID NO: 504472 - DNA, 33 bp, Homo sapien
ttgttcttttactacagccggagtggtaaatac

SEQ ID NO: 504473 - DNA, 33 bp, Homo sapien
cattctagatgatacaactcttatttcagttca

SEQ ID NO: 504474 - DNA, 33 bp, Homo sapien
cattctagatgatacagctcttatttcagttca

SEQ ID NO: 504475 - DNA, 33 bp, Homo sapien
gtatgcaattttcccactatctcacacagcaaa

SEQ ID NO: 504476 - DNA, 33 bp, Homo sapien
gtatgcaattttcccattatctcacacagcaaa

SEQ ID NO: 504477 - DNA, 33 bp, Homo sapien
aaatagttaaattgccaagttttagaagtcctg

SEQ ID NO: 504478 - DNA, 33 bp, Homo sapien
aaatagttaaattgccgagttttagaagtcctg

SEQ ID NO: 504479 - DNA, 33 bp, Homo sapien
gtgaccaacacttgtaagaggctccacactatt

SEQ ID NO: 504480 - DNA, 33 bp, Homo sapien
gtgaccaacacttgtaggaggctccacactatt

SEQ ID NO: 504481 - DNA, 33 bp, Homo sapien
ttcctaacatagccaaaccaatcaattgagcct

SEQ ID NO: 504482 - DNA, 33 bp, Homo sapien
ttcctaacatagccaagccaatcaattgagcct

SEQ ID NO: 504483 - DNA, 33 bp, Homo sapien
ttaggaaaggtacgtgaaagatttagaaacact

SEQ ID NO: 504484 - DNA, 33 bp, Homo sapien
ttaggaaaggtacgtggaagatttagaaacact

SEQ ID NO: 504485 - DNA, 33 bp, Homo sapien
gtgtctaaaagcttacactaagttatatttgct

SEQ ID NO: 504486 - DNA, 33 bp, Homo sapien
gtgtctaaaagcttacgctaagttatatttgct

SEQ ID NO: 504487 - DNA, 33 bp, Homo sapien
ccaagtctcaaatgacgggggatgctgtggaat

SEQ ID NO: 504488 - DNA, 33 bp, Homo sapien
ccaagtctcaaatgactggggatgctgtggaat

SEQ ID NO: 504489 - DNA, 33 bp, Homo sapien
ttgatgactagtagaccagaaatggagaaggct

SEQ ID NO: 504490 - DNA, 33 bp, Homo sapien
ttgatgactagtagactagaaatggagaaggct

SEQ ID NO: 504491 - DNA, 33 bp, Homo sapien
taaatttgacattataacaataaagacttgaaa

SEQ ID NO: 504492 - DNA, 33 bp, Homo sapien
taaatttgacattatagcaataaagacttgaaa

SEQ ID NO: 504493 - DNA, 33 bp, Homo sapien
tgtatcaaaagaactgaaaattacatggtggag

SEQ ID NO: 504494 - DNA, 33 bp, Homo sapien
tgtatcaaaagaactggaaattacatggtggag

SEQ ID NO: 504495 - DNA, 33 bp, Homo sapien
attcagtttcctctctcagactcagttactatt

SEQ ID NO: 504496 - DNA, 33 bp, Homo sapien
attcagtttcctctctgagactcagttactatt

SEQ ID NO: 504497 - DNA, 33 bp, Homo sapien
acccctctctcagaacacactcttgcattcatt

SEQ ID NO: 504498 - DNA, 33 bp, Homo sapien
acccctctctcagaacgcactcttgcattcatt

SEQ ID NO: 504499 - DNA, 33 bp, Homo sapien
cactcccactgaaagccgagggaagggaactca

SEQ ID NO: 504500 - DNA, 33 bp, Homo sapien
cactcccactgaaagctgagggaagggaactca

SEQ ID NO: 504501 - DNA, 33 bp, Homo sapien
caaggattttattcccaaattcaatgctcccat

SEQ ID NO: 504502 - DNA, 33 bp, Homo sapien
caaggattttattcccgaattcaatgctcccat

SEQ ID NO: 504503 - DNA, 33 bp, Homo sapien
cttcatgccataatcaacattctagtcagatgt

SEQ ID NO: 504504 - DNA, 33 bp, Homo sapien
cttcatgccataatcaccattctagtcagatgt

SEQ ID NO: 504505 - DNA, 33 bp, Homo sapien
agtgacattaggtcaacgtatgtacttgcctgg

SEQ ID NO: 504506 - DNA, 33 bp, Homo sapien
agtgacattaggtcaatgtatgtacttgcctgg

SEQ ID NO: 504507 - DNA, 33 bp, Homo sapien
ataataaaaatcagtcgtacttagttggctgga

SEQ ID NO: 504508 - DNA, 33 bp, Homo sapien
ataataaaaatcagtcttacttagttggctgga

SEQ ID NO: 504509 - DNA, 33 bp, Homo sapien
ggaaactcctagaagacagtctaattcctattt

SEQ ID NO: 504510 - DNA, 33 bp, Homo sapien
ggaaactcctagaagatagtctaattcctattt

SEQ ID NO: 504511 - DNA, 33 bp, Homo sapien
gttgtcatattccaaagtaactcaagtcatctg

SEQ ID NO: 504512 - DNA, 33 bp, Homo sapien
gttgtcatattccaaattaactcaagtcatctg

SEQ ID NO: 504513 - DNA, 33 bp, Homo sapien
tgttgattctttcccaaaaggccatttgtgacc

SEQ ID NO: 504514 - DNA, 33 bp, Homo sapien
tgttgattctttcccagaaggccatttgtgacc

SEQ ID NO: 504515 - DNA, 33 bp, Homo sapien
gagaccccagaaaagcaaaaactgtacaagtta

SEQ ID NO: 504516 - DNA, 33 bp, Homo sapien
gagaccccagaaaagctaaaactgtacaagtta

SEQ ID NO: 504517 - DNA, 33 bp, Homo sapien
aaaacagtgattgaaagtgtgtcaagacactag

SEQ ID NO: 504518 - DNA, 33 bp, Homo sapien
aaaacagtgattgaaattgtgtcaagacactag

SEQ ID NO: 504519 - DNA, 33 bp, Homo sapien
actctgtttgtcttccagaaggatgcggcgcgt

SEQ ID NO: 504520 - DNA, 33 bp, Homo sapien
actctgtttgtcttcccgaaggatgcggcgcgt

SEQ ID NO: 504521 - DNA, 33 bp, Homo sapien
tgtttagatcattggacagacatttttttcagt

SEQ ID NO: 504522 - DNA, 33 bp, Homo sapien
tgtttagatcattggatagacatttttttcagt

SEQ ID NO: 504523 - DNA, 33 bp, Homo sapien
ttttagtacctccattcaaagcctgaaaataaa

SEQ ID NO: 504524 - DNA, 33 bp, Homo sapien
ttttagtacctccatttaaagcctgaaaataaa

SEQ ID NO: 504525 - DNA, 33 bp, Homo sapien
gttctacgagataacacggcatctttcaaagtt

SEQ ID NO: 504526 - DNA, 33 bp, Homo sapien
gttctacgagataacatggcatctttcaaagtt

SEQ ID NO: 504527 - DNA, 33 bp, Homo sapien
gtgagctcacgaaacaggtaggaaatggagcca

SEQ ID NO: 504528 - DNA, 33 bp, Homo sapien
gtgagctcacgaaacatgtaggaaatggagcca

SEQ ID NO: 504529 - DNA, 33 bp, Homo sapien
gtgacttcagcactggccacctgagtcttctga

SEQ ID NO: 504530 - DNA, 33 bp, Homo sapien
gtgacttcagcactggtcacctgagtcttctga

SEQ ID NO: 504531 - DNA, 33 bp, Homo sapien
ctcaactgaatgatagcatttggagactcctga

SEQ ID NO: 504532 - DNA, 33 bp, Homo sapien
ctcaactgaatgataggatttggagactcctga

SEQ ID NO: 504533 - DNA, 33 bp, Homo sapien
taaaggagaaggatcgacaattatttcatagtg

SEQ ID NO: 504534 - DNA, 33 bp, Homo sapien
taaaggagaaggatcggcaattatttcatagtg

SEQ ID NO: 504535 - DNA, 33 bp, Homo sapien
tcacctccttgatcaacatgtgttccatcccgg

SEQ ID NO: 504536 - DNA, 33 bp, Homo sapien
tcacctccttgatcaatatgtgttccatcccgg

SEQ ID NO: 504537 - DNA, 33 bp, Homo sapien
gatggaaagagagcacaaagaaaggaaggtgga

SEQ ID NO: 504538 - DNA, 33 bp, Homo sapien
gatggaaagagagcacgaagaaaggaaggtgga

SEQ ID NO: 504539 - DNA, 33 bp, Homo sapien
caaggcctgggaggtgaaaggacccacgtggta

SEQ ID NO: 504540 - DNA, 33 bp, Homo sapien
caaggcctgggaggtggaaggacccacgtggta

SEQ ID NO: 504541 - DNA, 33 bp, Homo sapien
gacaacaatttggtaacggccactgtttagttc

SEQ ID NO: 504542 - DNA, 33 bp, Homo sapien
gacaacaatttggtaatggccactgtttagttc

SEQ ID NO: 504543 - DNA, 33 bp, Homo sapien
tgcaaaggaaaaaaaacgtgggcactgctgtca

SEQ ID NO: 504544 - DNA, 33 bp, Homo sapien
tgcaaaggaaaaaaaatgtgggcactgctgtca

SEQ ID NO: 504545 - DNA, 33 bp, Homo sapien
taattgtgcaaaagccaagaggtattcagtaat

SEQ ID NO: 504546 - DNA, 33 bp, Homo sapien
taattgtgcaaaagccgagaggtattcagtaat

SEQ ID NO: 504547 - DNA, 33 bp, Homo sapien
cacagtttcatggtaaatatacaacactaccct

SEQ ID NO: 504548 - DNA, 33 bp, Homo sapien
cacagtttcatggtaagtatacaacactaccct

SEQ ID NO: 504549 - DNA, 33 bp, Homo sapien
gtgtatgtgggaagaaattaagaacatctaaga

SEQ ID NO: 504550 - DNA, 33 bp, Homo sapien
gtgtatgtgggaagaacttaagaacatctaaga

SEQ ID NO: 504551 - DNA, 33 bp, Homo sapien
cagattctctctcacaagcctcacgggaaatct

SEQ ID NO: 504552 - DNA, 33 bp, Homo sapien
cagattctctctcacaggcctcacgggaaatct

SEQ ID NO: 504553 - DNA, 33 bp, Homo sapien
ttaaggcacttttcataaaccactcagtgtttg

SEQ ID NO: 504554 - DNA, 33 bp, Homo sapien
ttaaggcacttttcatgaaccactcagtgtttg

SEQ ID NO: 504555 - DNA, 33 bp, Homo sapien
ctcaagaagatattgacgtaagtacagttactc

SEQ ID NO: 504556 - DNA, 33 bp, Homo sapien
ctcaagaagatattgatgtaagtacagttactc

SEQ ID NO: 504557 - DNA, 33 bp, Homo sapien
atttcccaatagtgtacgagcatttatagactc

SEQ ID NO: 504558 - DNA, 33 bp, Homo sapien
atttcccaatagtgtatgagcatttatagactc

SEQ ID NO: 504559 - DNA, 33 bp, Homo sapien
gaaacaattaaaaacacctgaagaattggcttc

SEQ ID NO: 504560 - DNA, 33 bp, Homo sapien
gaaacaattaaaaacagctgaagaattggcttc

SEQ ID NO: 504561 - DNA, 33 bp, Homo sapien
tgctttttccactcaaagttacacctctactag

SEQ ID NO: 504562 - DNA, 33 bp, Homo sapien
tgctttttccactcaatgttacacctctactag

SEQ ID NO: 504563 - DNA, 33 bp, Homo sapien
tgtatgcctgcatgaaatagggttgtttgtgtg

SEQ ID NO: 504564 - DNA, 33 bp, Homo sapien
tgtatgcctgcatgaagtagggttgtttgtgtg

SEQ ID NO: 504565 - DNA, 33 bp, Homo sapien
tagttgctattgtaaacggaaaaatcaggaaat

SEQ ID NO: 504566 - DNA, 33 bp, Homo sapien
tagttgctattgtaaatggaaaaatcaggaaat

SEQ ID NO: 504567 - DNA, 33 bp, Homo sapien
tgcatactgctttatacgagaactagttacaat

SEQ ID NO: 504568 - DNA, 33 bp, Homo sapien
tgcatactgctttatatgagaactagttacaat

SEQ ID NO: 504569 - DNA, 33 bp, Homo sapien
tttcttcatttatataggcttggaattttttaa

SEQ ID NO: 504570 - DNA, 33 bp, Homo sapien
tttcttcatttatatatgcttggaattttttaa

SEQ ID NO: 504571 - DNA, 33 bp, Homo sapien
gaagattggaatatcacgtacaaagaagtctag

SEQ ID NO: 504572 - DNA, 33 bp, Homo sapien
gaagattggaatatcatgtacaaagaagtctag

SEQ ID NO: 504573 - DNA, 33 bp, Homo sapien
ggaagctgcaaatggacatcaagtacactacag

SEQ ID NO: 504574 - DNA, 33 bp, Homo sapien
ggaagctgcaaatggatatcaagtacactacag

SEQ ID NO: 504575 - DNA, 33 bp, Homo sapien
cagcaacttggtgaaaataacttcataaaattt

SEQ ID NO: 504576 - DNA, 33 bp, Homo sapien
cagcaacttggtgaaagtaacttcataaaattt

SEQ ID NO: 504577 - DNA, 33 bp, Homo sapien
aagtgtaaataatccacgttctatgtgattaga

SEQ ID NO: 504578 - DNA, 33 bp, Homo sapien
aagtgtaaataatccatgttctatgtgattaga

SEQ ID NO: 504579 - DNA, 33 bp, Homo sapien
gctatgaacaatggtgaatgtaaggtatttgtg

SEQ ID NO: 504580 - DNA, 33 bp, Homo sapien
gctatgaacaatggtgtatgtaaggtatttgtg

SEQ ID NO: 504581 - DNA, 33 bp, Homo sapien
tcctgctccgatgaaacgaaatagataaaaacc

SEQ ID NO: 504582 - DNA, 33 bp, Homo sapien
tcctgctccgatgaaatgaaatagataaaaacc

SEQ ID NO: 504583 - DNA, 33 bp, Homo sapien
ctgcaagtttcttttcacacattgctgtttccc

SEQ ID NO: 504584 - DNA, 33 bp, Homo sapien
ctgcaagtttcttttcccacattgctgtttccc

SEQ ID NO: 504585 - DNA, 33 bp, Homo sapien
cgaagacctgaagaaacggttacacatatattt

SEQ ID NO: 504586 - DNA, 33 bp, Homo sapien
cgaagacctgaagaaatggttacacatatattt

SEQ ID NO: 504587 - DNA, 33 bp, Homo sapien
aaataatgttgtctaaatcactttgtgcatgtg

SEQ ID NO: 504588 - DNA, 33 bp, Homo sapien
aaataatgttgtctaagtcactttgtgcatgtg

SEQ ID NO: 504589 - DNA, 33 bp, Homo sapien
ccacaggacttagcaactggttagataggatgg

SEQ ID NO: 504590 - DNA, 33 bp, Homo sapien
ccacaggacttagcaagtggttagataggatgg

SEQ ID NO: 504591 - DNA, 33 bp, Homo sapien
agtgtcagagttcaaacgcaggttctgccactt

SEQ ID NO: 504592 - DNA, 33 bp, Homo sapien
agtgtcagagttcaaatgcaggttctgccactt

SEQ ID NO: 504593 - DNA, 33 bp, Homo sapien
cctgtatgaagcacaacagtgtaggagggggcc

SEQ ID NO: 504594 - DNA, 33 bp, Homo sapien
cctgtatgaagcacaatagtgtaggagggggcc

SEQ ID NO: 504595 - DNA, 33 bp, Homo sapien
caaaaatccttccgaacagcaccccggctggct

SEQ ID NO: 504596 - DNA, 33 bp, Homo sapien
caaaaatccttccgaagagcaccccggctggct

SEQ ID NO: 504597 - DNA, 33 bp, Homo sapien
tttacaaagtcagttaaaaaacatcagtcatgc

SEQ ID NO: 504598 - DNA, 33 bp, Homo sapien
tttacaaagtcagttagaaaacatcagtcatgc

SEQ ID NO: 504599 - DNA, 33 bp, Homo sapien
ttaatagtgatgtagaatatggaagtagttatt

SEQ ID NO: 504600 - DNA, 33 bp, Homo sapien
ttaatagtgatgtagattatggaagtagttatt

SEQ ID NO: 504601 - DNA, 33 bp, Homo sapien
agtaaacttggttctcaatgacagccctctgcc

SEQ ID NO: 504602 - DNA, 33 bp, Homo sapien
agtaaacttggttctcgatgacagccctctgcc

SEQ ID NO: 504603 - DNA, 33 bp, Homo sapien
tgatgggaagcgtgaaaaagctctctggggtct

SEQ ID NO: 504604 - DNA, 33 bp, Homo sapien
tgatgggaagcgtgaacaagctctctggggtct

SEQ ID NO: 504605 - DNA, 33 bp, Homo sapien
catgcaaatggcacacaggtatacaaaaaggtg

SEQ ID NO: 504606 - DNA, 33 bp, Homo sapien
catgcaaatggcacacgggtatacaaaaaggtg

SEQ ID NO: 504607 - DNA, 33 bp, Homo sapien
gtcttttccagcaacacgaacatggactagtac

SEQ ID NO: 504608 - DNA, 33 bp, Homo sapien
gtcttttccagcaacatgaacatggactagtac

SEQ ID NO: 504609 - DNA, 33 bp, Homo sapien
ttctgaaataaagtgacgttgggcagaagtgga

SEQ ID NO: 504610 - DNA, 33 bp, Homo sapien
ttctgaaataaagtgatgttgggcagaagtgga

SEQ ID NO: 504611 - DNA, 33 bp, Homo sapien
cattatggcaaataaaactcttctcctggctga

SEQ ID NO: 504612 - DNA, 33 bp, Homo sapien
cattatggcaaataaacctcttctcctggctga

SEQ ID NO: 504613 - DNA, 33 bp, Homo sapien
ccatatttattgaacacgataactgacaattga

SEQ ID NO: 504614 - DNA, 33 bp, Homo sapien
ccatatttattgaacatgataactgacaattga

SEQ ID NO: 504615 - DNA, 33 bp, Homo sapien
cagagggtcaagggaaagttttgtgttttctaa

SEQ ID NO: 504616 - DNA, 33 bp, Homo sapien
cagagggtcaagggaaggttttgtgttttctaa

SEQ ID NO: 504617 - DNA, 33 bp, Homo sapien
ataacttgagttttcagcaacctgtcggaatga

SEQ ID NO: 504618 - DNA, 33 bp, Homo sapien
ataacttgagttttcatcaacctgtcggaatga

SEQ ID NO: 504619 - DNA, 33 bp, Homo sapien
attttctgtatttggacgtagaactctgtgtgt

SEQ ID NO: 504620 - DNA, 33 bp, Homo sapien
attttctgtatttggatgtagaactctgtgtgt

SEQ ID NO: 504621 - DNA, 33 bp, Homo sapien
gataaaacaatgtaaacgtctaaagagattcca

SEQ ID NO: 504622 - DNA, 33 bp, Homo sapien
gataaaacaatgtaaatgtctaaagagattcca

SEQ ID NO: 504623 - DNA, 33 bp, Homo sapien
aaggatttggtagagacggaaaactgctcaact

SEQ ID NO: 504624 - DNA, 33 bp, Homo sapien
aaggatttggtagagatggaaaactgctcaact

SEQ ID NO: 504625 - DNA, 33 bp, Homo sapien
aaactcaaactcacaaattgtcatgataacata

SEQ ID NO: 504626 - DNA, 33 bp, Homo sapien
aaactcaaactcacaagttgtcatgataacata

SEQ ID NO: 504627 - DNA, 33 bp, Homo sapien
ttcttgtgggcctaaactccacatggctggcag

SEQ ID NO: 504628 - DNA, 33 bp, Homo sapien
ttcttgtgggcctaaattccacatggctggcag

SEQ ID NO: 504629 - DNA, 33 bp, Homo sapien
gaggcagagagcagtcgcatgctcaggaaatgg

SEQ ID NO: 504630 - DNA, 33 bp, Homo sapien
gaggcagagagcagtctcatgctcaggaaatgg

SEQ ID NO: 504631 - DNA, 33 bp, Homo sapien
tctgggttatttatgacagatggttaatctgag

SEQ ID NO: 504632 - DNA, 33 bp, Homo sapien
tctgggttatttatgatagatggttaatctgag

SEQ ID NO: 504633 - DNA, 33 bp, Homo sapien
agtttacagctatctaagaaataacatgtatag

SEQ ID NO: 504634 - DNA, 33 bp, Homo sapien
agtttacagctatctaggaaataacatgtatag

SEQ ID NO: 504635 - DNA, 33 bp, Homo sapien
aggaggaggtgtcaaaatcagagagagtaatta

SEQ ID NO: 504636 - DNA, 33 bp, Homo sapien
aggaggaggtgtcaaagtcagagagagtaatta

SEQ ID NO: 504637 - DNA, 33 bp, Homo sapien
aatgagtctgcaaataccacagcaggacacaca

SEQ ID NO: 504638 - DNA, 33 bp, Homo sapien
aatgagtctgcaaatatcacagcaggacacaca

SEQ ID NO: 504639 - DNA, 33 bp, Homo sapien
ataccgctatatgagacaaaaagcatcttttca

SEQ ID NO: 504640 - DNA, 33 bp, Homo sapien
ataccgctatatgagagaaaaagcatcttttca

SEQ ID NO: 504641 - DNA, 33 bp, Homo sapien
gagcaaaaatcagataaacagcattgaaagcct

SEQ ID NO: 504642 - DNA, 33 bp, Homo sapien
gagcaaaaatcagatacacagcattgaaagcct

SEQ ID NO: 504643 - DNA, 33 bp, Homo sapien
gagaaatcttcctaatcatgactcaaactcaag

SEQ ID NO: 504644 - DNA, 33 bp, Homo sapien
gagaaatcttcctaattatgactcaaactcaag

SEQ ID NO: 504645 - DNA, 33 bp, Homo sapien
ctcccccatcagacagcagaagacccaagaaga

SEQ ID NO: 504646 - DNA, 33 bp, Homo sapien
ctcccccatcagacagtagaagacccaagaaga

SEQ ID NO: 504647 - DNA, 33 bp, Homo sapien
ttcaagcgtgtctcccaggagcaatgtgaggag

SEQ ID NO: 504648 - DNA, 33 bp, Homo sapien
ttcaagcgtgtctcccgggagcaatgtgaggag

SEQ ID NO: 504649 - DNA, 33 bp, Homo sapien
gttgtgttcattgactaaagtgcatattcaagt

SEQ ID NO: 504650 - DNA, 33 bp, Homo sapien
gttgtgttcattgactgaagtgcatattcaagt

SEQ ID NO: 504651 - DNA, 33 bp, Homo sapien
tgcacactcgatatagaattatcctttcgttct

SEQ ID NO: 504652 - DNA, 33 bp, Homo sapien
tgcacactcgatatagcattatcctttcgttct

SEQ ID NO: 504653 - DNA, 33 bp, Homo sapien
ttcgttcttaccttgacgctgagaggtggacat

SEQ ID NO: 504654 - DNA, 33 bp, Homo sapien
ttcgttcttaccttgatgctgagaggtggacat

SEQ ID NO: 504655 - DNA, 33 bp, Homo sapien
tgccctggtagggacccgagactttccagaatt

SEQ ID NO: 504656 - DNA, 33 bp, Homo sapien
tgccctggtagggacctgagactttccagaatt

SEQ ID NO: 504657 - DNA, 33 bp, Homo sapien
gctgcattggtccagaatagagtttgtcacatg

SEQ ID NO: 504658 - DNA, 33 bp, Homo sapien
gctgcattggtccagagtagagtttgtcacatg

SEQ ID NO: 504659 - DNA, 33 bp, Homo sapien
gagacgctggaagctacagcataataagaattg

SEQ ID NO: 504660 - DNA, 33 bp, Homo sapien
gagacgctggaagctatagcataataagaattg

SEQ ID NO: 504661 - DNA, 33 bp, Homo sapien
gaagggtacttgtttacacgcctatctggaatc

SEQ ID NO: 504662 - DNA, 33 bp, Homo sapien
gaagggtacttgtttatacgcctatctggaatc

SEQ ID NO: 504663 - DNA, 33 bp, Homo sapien
aactaaaacaaaatgcacaaagagatcactaaa

SEQ ID NO: 504664 - DNA, 33 bp, Homo sapien
aactaaaacaaaatgcgcaaagagatcactaaa

SEQ ID NO: 504665 - DNA, 33 bp, Homo sapien
tatctgttttgaaagcaaagagtaacacagacc

SEQ ID NO: 504666 - DNA, 33 bp, Homo sapien
tatctgttttgaaagccaagagtaacacagacc

SEQ ID NO: 504667 - DNA, 33 bp, Homo sapien
cgtacatcaccattggcaagtaattgaacctct

SEQ ID NO: 504668 - DNA, 33 bp, Homo sapien
cgtacatcaccattgggaagtaattgaacctct

SEQ ID NO: 504669 - DNA, 33 bp, Homo sapien
aggaatgtttctgcaacggaaaaatacaaaacc

SEQ ID NO: 504670 - DNA, 33 bp, Homo sapien
aggaatgtttctgcaatggaaaaatacaaaacc

SEQ ID NO: 504671 - DNA, 33 bp, Homo sapien
cttttctgggaagagcacctactccagtcacat

SEQ ID NO: 504672 - DNA, 33 bp, Homo sapien
cttttctgggaagagcgcctactccagtcacat

SEQ ID NO: 504673 - DNA, 33 bp, Homo sapien
tcaatgtttcctattaactacaaaagctggaaa

SEQ ID NO: 504674 - DNA, 33 bp, Homo sapien
tcaatgtttcctattagctacaaaagctggaaa

SEQ ID NO: 504675 - DNA, 33 bp, Homo sapien
tatagggtgttaggagaaatttagatcatgcag

SEQ ID NO: 504676 - DNA, 33 bp, Homo sapien
tatagggtgttaggagcaatttagatcatgcag

SEQ ID NO: 504677 - DNA, 33 bp, Homo sapien
atatggagcttgtcagccaacaaggaaatagac

SEQ ID NO: 504678 - DNA, 33 bp, Homo sapien
atatggagcttgtcagtcaacaaggaaatagac

SEQ ID NO: 504679 - DNA, 33 bp, Homo sapien
acagaaagctggattcactttttctggaaacac

SEQ ID NO: 504680 - DNA, 33 bp, Homo sapien
acagaaagctggattcgctttttctggaaacac

SEQ ID NO: 504681 - DNA, 33 bp, Homo sapien
gcagcgagggctctcaaagactctctcctgcgc

SEQ ID NO: 504682 - DNA, 33 bp, Homo sapien
gcagcgagggctctcatagactctctcctgcgc

SEQ ID NO: 504683 - DNA, 33 bp, Homo sapien
tgtatgttaccatttacgcagacagaaattttt

SEQ ID NO: 504684 - DNA, 33 bp, Homo sapien
tgtatgttaccatttatgcagacagaaattttt

SEQ ID NO: 504685 - DNA, 33 bp, Homo sapien
aagcagtcacttctccccttgagaccttggcca

SEQ ID NO: 504686 - DNA, 33 bp, Homo sapien
aagcagtcacttctcctcttgagaccttggcca

SEQ ID NO: 504687 - DNA, 33 bp, Homo sapien
aaacagcatggtctatcaaaatacctttgcagt

SEQ ID NO: 504688 - DNA, 33 bp, Homo sapien
aaacagcatggtctattaaaatacctttgcagt

SEQ ID NO: 504689 - DNA, 33 bp, Homo sapien
acagatagaagctccaagaaccagcctagcaag

SEQ ID NO: 504690 - DNA, 33 bp, Homo sapien
acagatagaagctccaggaaccagcctagcaag

SEQ ID NO: 504691 - DNA, 33 bp, Homo sapien
ctttccagtgtgcttcaattcaaagcactcagc

SEQ ID NO: 504692 - DNA, 33 bp, Homo sapien
ctttccagtgtgcttcgattcaaagcactcagc

SEQ ID NO: 504693 - DNA, 33 bp, Homo sapien
agtaagacattaaggaagaatcaggagctgttg

SEQ ID NO: 504694 - DNA, 33 bp, Homo sapien
agtaagacattaaggaggaatcaggagctgttg

SEQ ID NO: 504695 - DNA, 33 bp, Homo sapien
gtgatttaatgaagaaagcaaatattgaccttg

SEQ ID NO: 504696 - DNA, 33 bp, Homo sapien
gtgatttaatgaagaaggcaaatattgaccttg

SEQ ID NO: 504697 - DNA, 33 bp, Homo sapien
aaaatggtgttggacaactaaggaaataaagag

SEQ ID NO: 504698 - DNA, 33 bp, Homo sapien
aaaatggtgttggacagctaaggaaataaagag

SEQ ID NO: 504699 - DNA, 33 bp, Homo sapien
gtgcttagataaatgcaagaaagtactactttg

SEQ ID NO: 504700 - DNA, 33 bp, Homo sapien
gtgcttagataaatgcgagaaagtactactttg

SEQ ID NO: 504701 - DNA, 33 bp, Homo sapien
actaagatgttgccacagaaagtcagaatacag

SEQ ID NO: 504702 - DNA, 33 bp, Homo sapien
actaagatgttgccacggaaagtcagaatacag

SEQ ID NO: 504703 - DNA, 33 bp, Homo sapien
agacagctggttacagaacaagcatccttctga

SEQ ID NO: 504704 - DNA, 33 bp, Homo sapien
agacagctggttacaggacaagcatccttctga

SEQ ID NO: 504705 - DNA, 33 bp, Homo sapien
actagggacccaggacgattcccaggtggcttt

SEQ ID NO: 504706 - DNA, 33 bp, Homo sapien
actagggacccaggactattcccaggtggcttt

SEQ ID NO: 504707 - DNA, 33 bp, Homo sapien
aaatgagcttttgcaacttcattaagagcttgg

SEQ ID NO: 504708 - DNA, 33 bp, Homo sapien
aaatgagcttttgcaatttcattaagagcttgg

SEQ ID NO: 504709 - DNA, 33 bp, Homo sapien
taactggtgataataacgtactgtgacatatcc

SEQ ID NO: 504710 - DNA, 33 bp, Homo sapien
taactggtgataataatgtactgtgacatatcc

SEQ ID NO: 504711 - DNA, 33 bp, Homo sapien
ctttaggtatttggccccacattgataagtgtg

SEQ ID NO: 504712 - DNA, 33 bp, Homo sapien
ctttaggtatttggcctcacattgataagtgtg

SEQ ID NO: 504713 - DNA, 33 bp, Homo sapien
gatgggcgtaagaggaagttcattatccacata

SEQ ID NO: 504714 - DNA, 33 bp, Homo sapien
gatgggcgtaagaggacgttcattatccacata

SEQ ID NO: 504715 - DNA, 33 bp, Homo sapien
ctccattaagcaaaacagaccttgagtttcttg

SEQ ID NO: 504716 - DNA, 33 bp, Homo sapien
ctccattaagcaaaacggaccttgagtttcttg

SEQ ID NO: 504717 - DNA, 33 bp, Homo sapien
agcttgaaaaaagatgaagagtttgggcatggt

SEQ ID NO: 504718 - DNA, 33 bp, Homo sapien
agcttgaaaaaagatgcagagtttgggcatggt

SEQ ID NO: 504719 - DNA, 33 bp, Homo sapien
tgtagtttcagccctaaatgatatgctgtttga

SEQ ID NO: 504720 - DNA, 33 bp, Homo sapien
tgtagtttcagccctagatgatatgctgtttga

SEQ ID NO: 504721 - DNA, 33 bp, Homo sapien
tcttgagttggtgaccaggtaatatataggaga

SEQ ID NO: 504722 - DNA, 33 bp, Homo sapien
tcttgagttggtgaccgggtaatatataggaga

SEQ ID NO: 504723 - DNA, 33 bp, Homo sapien
acatatgtgcacagaaaatattccctaaaataa

SEQ ID NO: 504724 - DNA, 33 bp, Homo sapien
acatatgtgcacagaagatattccctaaaataa

SEQ ID NO: 504725 - DNA, 33 bp, Homo sapien
taaaacaattaatggcaacaaagactaggaggc

SEQ ID NO: 504726 - DNA, 33 bp, Homo sapien
taaaacaattaatggccacaaagactaggaggc

SEQ ID NO: 504727 - DNA, 33 bp, Homo sapien
cgtgctctgttatcccagaaagcttgcaatagc

SEQ ID NO: 504728 - DNA, 33 bp, Homo sapien
cgtgctctgttatcccggaaagcttgcaatagc

SEQ ID NO: 504729 - DNA, 33 bp, Homo sapien
caaaggggaacagagaaggctcagcaattggtc

SEQ ID NO: 504730 - DNA, 33 bp, Homo sapien
caaaggggaacagagagggctcagcaattggtc

SEQ ID NO: 504731 - DNA, 33 bp, Homo sapien
aaatgttagcctgcacactctgattgctcttcc

SEQ ID NO: 504732 - DNA, 33 bp, Homo sapien
aaatgttagcctgcaccctctgattgctcttcc

SEQ ID NO: 504733 - DNA, 33 bp, Homo sapien
agaggcaagggcaacactgaaacagaccaatgc

SEQ ID NO: 504734 - DNA, 33 bp, Homo sapien
agaggcaagggcaacattgaaacagaccaatgc

SEQ ID NO: 504735 - DNA, 33 bp, Homo sapien
ataaaatgcaataaaaagaacaacttacagcta

SEQ ID NO: 504736 - DNA, 33 bp, Homo sapien
ataaaatgcaataaaaggaacaacttacagcta

SEQ ID NO: 504737 - DNA, 33 bp, Homo sapien
aaacgagggaatggaagaatgtctaataccatt

SEQ ID NO: 504738 - DNA, 33 bp, Homo sapien
aaacgagggaatggaataatgtctaataccatt

SEQ ID NO: 504739 - DNA, 33 bp, Homo sapien
ctgttccacaaagggacaaccacaatgaaatag

SEQ ID NO: 504740 - DNA, 33 bp, Homo sapien
ctgttccacaaagggataaccacaatgaaatag

SEQ ID NO: 504741 - DNA, 33 bp, Homo sapien
tctgcaggtgactgaactgggttttgaatgttt

SEQ ID NO: 504742 - DNA, 33 bp, Homo sapien
tctgcaggtgactgaagtgggttttgaatgttt

SEQ ID NO: 504743 - DNA, 33 bp, Homo sapien
gcttcccacattcaccaatcacctaggtaagta

SEQ ID NO: 504744 - DNA, 33 bp, Homo sapien
gcttcccacattcaccgatcacctaggtaagta

SEQ ID NO: 504745 - DNA, 33 bp, Homo sapien
cacccagggattccaacaacttggtttccccaa

SEQ ID NO: 504746 - DNA, 33 bp, Homo sapien
cacccagggattccaagaacttggtttccccaa

SEQ ID NO: 504747 - DNA, 33 bp, Homo sapien
tggtggcaccaacaaggctggtcagcatcagcc

SEQ ID NO: 504748 - DNA, 33 bp, Homo sapien
tggtggcaccaacaagtctggtcagcatcagcc

SEQ ID NO: 504749 - DNA, 33 bp, Homo sapien
agtccacaaaatcctacgctgacctcaacattg

SEQ ID NO: 504750 - DNA, 33 bp, Homo sapien
agtccacaaaatcctatgctgacctcaacattg

SEQ ID NO: 504751 - DNA, 33 bp, Homo sapien
gaagtagggtctatggaacgccctgaccagatc

SEQ ID NO: 504752 - DNA, 33 bp, Homo sapien
gaagtagggtctatgggacgccctgaccagatc

SEQ ID NO: 504753 - DNA, 33 bp, Homo sapien
gcagaagagagaactacgtgaaagacataggtt

SEQ ID NO: 504754 - DNA, 33 bp, Homo sapien
gcagaagagagaactaggtgaaagacataggtt

SEQ ID NO: 504755 - DNA, 33 bp, Homo sapien
cagttcaccttgaggacagactttcaaaggcaa

SEQ ID NO: 504756 - DNA, 33 bp, Homo sapien
cagttcaccttgaggagagactttcaaaggcaa

SEQ ID NO: 504757 - DNA, 33 bp, Homo sapien
tttaagtagatgtgtaggctttctaaacttcaa

SEQ ID NO: 504758 - DNA, 33 bp, Homo sapien
tttaagtagatgtgtatgctttctaaacttcaa

SEQ ID NO: 504759 - DNA, 33 bp, Homo sapien
gaggcaaaacatggacaggacttctctcaagga

SEQ ID NO: 504760 - DNA, 33 bp, Homo sapien
gaggcaaaacatggacgggacttctctcaagga

SEQ ID NO: 504761 - DNA, 33 bp, Homo sapien
aggacagtagataatggaagagttttgtttaat

SEQ ID NO: 504762 - DNA, 33 bp, Homo sapien
aggacagtagataatgtaagagttttgtttaat

SEQ ID NO: 504763 - DNA, 33 bp, Homo sapien
atcacattgtaaacctcaaatacacaccacaaa

SEQ ID NO: 504764 - DNA, 33 bp, Homo sapien
atcacattgtaaaccttaaatacacaccacaaa

SEQ ID NO: 504765 - DNA, 33 bp, Homo sapien
ggatttactgatgaagcagttgaaggtcctccc

SEQ ID NO: 504766 - DNA, 33 bp, Homo sapien
ggatttactgatgaaggagttgaaggtcctccc

SEQ ID NO: 504767 - DNA, 33 bp, Homo sapien
ggctccagagtccactcaagatatagtgcttgg

SEQ ID NO: 504768 - DNA, 33 bp, Homo sapien
ggctccagagtccactgaagatatagtgcttgg

SEQ ID NO: 504769 - DNA, 33 bp, Homo sapien
aagctacttatatttacgtttaaggtagccgaa

SEQ ID NO: 504770 - DNA, 33 bp, Homo sapien
aagctacttatatttatgtttaaggtagccgaa

SEQ ID NO: 504771 - DNA, 33 bp, Homo sapien
ttataaactctgtgaagtatgggagtttaatgg

SEQ ID NO: 504772 - DNA, 33 bp, Homo sapien
ttataaactctgtgaattatgggagtttaatgg

SEQ ID NO: 504773 - DNA, 33 bp, Homo sapien
gccgagcgagtccttaccctgaatgtcattcca

SEQ ID NO: 504774 - DNA, 33 bp, Homo sapien
gccgagcgagtccttatcctgaatgtcattcca

SEQ ID NO: 504775 - DNA, 33 bp, Homo sapien
agggcagcacgtgcaacgacacagaggtataaa

SEQ ID NO: 504776 - DNA, 33 bp, Homo sapien
agggcagcacgtgcaatgacacagaggtataaa

SEQ ID NO: 504777 - DNA, 33 bp, Homo sapien
atgggctctcaagaggcattatatgtacttgca

SEQ ID NO: 504778 - DNA, 33 bp, Homo sapien
atgggctctcaagaggtattatatgtacttgca

SEQ ID NO: 504779 - DNA, 33 bp, Homo sapien
gaagatatcatgcactcaaaccataggctatta

SEQ ID NO: 504780 - DNA, 33 bp, Homo sapien
gaagatatcatgcacttaaaccataggctatta

SEQ ID NO: 504781 - DNA, 33 bp, Homo sapien
aaatatgtcctcaacaatgttaatgaaactctc

SEQ ID NO: 504782 - DNA, 33 bp, Homo sapien
aaatatgtcctcaacagtgttaatgaaactctc

SEQ ID NO: 504783 - DNA, 33 bp, Homo sapien
cagcccatttgtgttacagcactttcagtccca

SEQ ID NO: 504784 - DNA, 33 bp, Homo sapien
cagcccatttgtgttatagcactttcagtccca

SEQ ID NO: 504785 - DNA, 33 bp, Homo sapien
attttattgagttaagaaaaactgcttcaagtc

SEQ ID NO: 504786 - DNA, 33 bp, Homo sapien
attttattgagttaaggaaaactgcttcaagtc

SEQ ID NO: 504787 - DNA, 33 bp, Homo sapien
ctgcctaagcaattctcaaacaaaagccttctg

SEQ ID NO: 504788 - DNA, 33 bp, Homo sapien
ctgcctaagcaattcttaaacaaaagccttctg

SEQ ID NO: 504789 - DNA, 33 bp, Homo sapien
tggggtccctgagctcaccaggaacacctctgt

SEQ ID NO: 504790 - DNA, 33 bp, Homo sapien
tggggtccctgagctctccaggaacacctctgt

SEQ ID NO: 504791 - DNA, 33 bp, Homo sapien
aaaggcagctgcagacaatacacaaaggaacgg

SEQ ID NO: 504792 - DNA, 33 bp, Homo sapien
aaaggcagctgcagacgatacacaaaggaacgg

SEQ ID NO: 504793 - DNA, 33 bp, Homo sapien
caagcacatcctccgacaccttgtgaaattttc

SEQ ID NO: 504794 - DNA, 33 bp, Homo sapien
caagcacatcctccgagaccttgtgaaattttc

SEQ ID NO: 504795 - DNA, 33 bp, Homo sapien
gcaatatactagcaataagtggtgactgagtca

SEQ ID NO: 504796 - DNA, 33 bp, Homo sapien
gcaatatactagcaattagtggtgactgagtca

SEQ ID NO: 504797 - DNA, 33 bp, Homo sapien
gacgaagaggagggaacgccactatagaataca

SEQ ID NO: 504798 - DNA, 33 bp, Homo sapien
gacgaagaggagggaatgccactatagaataca

SEQ ID NO: 504799 - DNA, 33 bp, Homo sapien
gcttttctccagtcaacctatgtcaatttaatt

SEQ ID NO: 504800 - DNA, 33 bp, Homo sapien
gcttttctccagtcaatctatgtcaatttaatt

SEQ ID NO: 504801 - DNA, 33 bp, Homo sapien
actatgtacttaggaaactttcaagaatggtca

SEQ ID NO: 504802 - DNA, 33 bp, Homo sapien
actatgtacttaggaacctttcaagaatggtca

SEQ ID NO: 504803 - DNA, 33 bp, Homo sapien
gactttgaaatggggaagatagagttgctacac

SEQ ID NO: 504804 - DNA, 33 bp, Homo sapien
gactttgaaatggggaggatagagttgctacac

SEQ ID NO: 504805 - DNA, 33 bp, Homo sapien
gtatttcctgcggatgacaatgatagtgagttt

SEQ ID NO: 504806 - DNA, 33 bp, Homo sapien
gtatttcctgcggatggcaatgatagtgagttt

SEQ ID NO: 504807 - DNA, 33 bp, Homo sapien
ctgaaaactttggagaggtatgaaacgctagtt

SEQ ID NO: 504808 - DNA, 33 bp, Homo sapien
ctgaaaactttggagatgtatgaaacgctagtt

SEQ ID NO: 504809 - DNA, 33 bp, Homo sapien
actaagaatgcaggaccgagataatgcatgaaa

SEQ ID NO: 504810 - DNA, 33 bp, Homo sapien
actaagaatgcaggactgagataatgcatgaaa

SEQ ID NO: 504811 - DNA, 33 bp, Homo sapien
tttatccttatttttccagaggagacccaaaaa

SEQ ID NO: 504812 - DNA, 33 bp, Homo sapien
tttatccttatttttcgagaggagacccaaaaa

SEQ ID NO: 504813 - DNA, 33 bp, Homo sapien
tgttgtgtggattcaacgagggaaacatcgaac

SEQ ID NO: 504814 - DNA, 33 bp, Homo sapien
tgttgtgtggattcaatgagggaaacatcgaac

SEQ ID NO: 504815 - DNA, 33 bp, Homo sapien
taaaaggatggatatacgattgatcccagaacc

SEQ ID NO: 504816 - DNA, 33 bp, Homo sapien
taaaaggatggatatatgattgatcccagaacc

SEQ ID NO: 504817 - DNA, 33 bp, Homo sapien
gcagacactcttgttccattagacacctcggtc

SEQ ID NO: 504818 - DNA, 33 bp, Homo sapien
gcagacactcttgttctattagacacctcggtc

SEQ ID NO: 504819 - DNA, 33 bp, Homo sapien
tcacccatagcatggaagtgtaagagttagaaa

SEQ ID NO: 504820 - DNA, 33 bp, Homo sapien
tcacccatagcatggatgtgtaagagttagaaa

SEQ ID NO: 504821 - DNA, 33 bp, Homo sapien
ctgaggaaacagcaaaatccctcctccaatttc

SEQ ID NO: 504822 - DNA, 33 bp, Homo sapien
ctgaggaaacagcaaagtccctcctccaatttc

SEQ ID NO: 504823 - DNA, 33 bp, Homo sapien
atggccatgtgcaaaccgaggattaaaatgatg

SEQ ID NO: 504824 - DNA, 33 bp, Homo sapien
atggccatgtgcaaactgaggattaaaatgatg

SEQ ID NO: 504825 - DNA, 33 bp, Homo sapien
tttatcctgaagacgaaggagaataattctaag

SEQ ID NO: 504826 - DNA, 33 bp, Homo sapien
tttatcctgaagacgatggagaataattctaag

SEQ ID NO: 504827 - DNA, 33 bp, Homo sapien
tcccatccttgcatacacagcttagaattattc

SEQ ID NO: 504828 - DNA, 33 bp, Homo sapien
tcccatccttgcatacgcagcttagaattattc

SEQ ID NO: 504829 - DNA, 33 bp, Homo sapien
gctttcagcgttttatgaactcatatatgtgaa

SEQ ID NO: 504830 - DNA, 33 bp, Homo sapien
gctttcagcgttttattaactcatatatgtgaa

SEQ ID NO: 504831 - DNA, 33 bp, Homo sapien
acttccactctcaagacgtgcaaaaacctgaga

SEQ ID NO: 504832 - DNA, 33 bp, Homo sapien
acttccactctcaagatgtgcaaaaacctgaga

SEQ ID NO: 504833 - DNA, 33 bp, Homo sapien
ctgccttacactccaactaaataggtcgcattc

SEQ ID NO: 504834 - DNA, 33 bp, Homo sapien
ctgccttacactccaattaaataggtcgcattc

SEQ ID NO: 504835 - DNA, 33 bp, Homo sapien
gatggggggcaaataccggaaagcacttgcaga

SEQ ID NO: 504836 - DNA, 33 bp, Homo sapien
gatggggggcaaatactggaaagcacttgcaga

SEQ ID NO: 504837 - DNA, 33 bp, Homo sapien
cactcggaggacaaaaatgtcactgaaaattcc

SEQ ID NO: 504838 - DNA, 33 bp, Homo sapien
cactcggaggacaaaagtgtcactgaaaattcc

SEQ ID NO: 504839 - DNA, 33 bp, Homo sapien
aagacatgagtggaaacggtatagtttgggaca

SEQ ID NO: 504840 - DNA, 33 bp, Homo sapien
aagacatgagtggaaatggtatagtttgggaca

SEQ ID NO: 504841 - DNA, 33 bp, Homo sapien
tgaggacatgaagacccggagatgaagatattc

SEQ ID NO: 504842 - DNA, 33 bp, Homo sapien
tgaggacatgaagacctggagatgaagatattc

SEQ ID NO: 504843 - DNA, 33 bp, Homo sapien
ccacaaggacaatccacgatttgcaggagggca

SEQ ID NO: 504844 - DNA, 33 bp, Homo sapien
ccacaaggacaatccatgatttgcaggagggca

SEQ ID NO: 504845 - DNA, 33 bp, Homo sapien
tgtaacctgttgaatacgtatgtttggccaccc

SEQ ID NO: 504846 - DNA, 33 bp, Homo sapien
tgtaacctgttgaatatgtatgtttggccaccc

SEQ ID NO: 504847 - DNA, 33 bp, Homo sapien
ggtgagaggagccgtccagttgggtgaaatggt

SEQ ID NO: 504848 - DNA, 33 bp, Homo sapien
ggtgagaggagccgtcgagttgggtgaaatggt

SEQ ID NO: 504849 - DNA, 33 bp, Homo sapien
tgaccgaggaaaggaaacatctcacaagctgtt

SEQ ID NO: 504850 - DNA, 33 bp, Homo sapien
tgaccgaggaaaggaagcatctcacaagctgtt

SEQ ID NO: 504851 - DNA, 33 bp, Homo sapien
cagaagacacttgagcaatgagatgttccctgt

SEQ ID NO: 504852 - DNA, 33 bp, Homo sapien
cagaagacacttgagcgatgagatgttccctgt

SEQ ID NO: 504853 - DNA, 33 bp, Homo sapien
ccacctcagaacaatcaattcagagtatctggg

SEQ ID NO: 504854 - DNA, 33 bp, Homo sapien
ccacctcagaacaatcgattcagagtatctggg

SEQ ID NO: 504855 - DNA, 33 bp, Homo sapien
ccagtagcatcatcgaacttgttacaaaggcag

SEQ ID NO: 504856 - DNA, 33 bp, Homo sapien
ccagtagcatcatcgagcttgttacaaaggcag

SEQ ID NO: 504857 - DNA, 33 bp, Homo sapien
gtctacaaaataaacaatgacttagtgcatttt

SEQ ID NO: 504858 - DNA, 33 bp, Homo sapien
gtctacaaaataaacagtgacttagtgcatttt

SEQ ID NO: 504859 - DNA, 33 bp, Homo sapien
cttgatacatatggaccggttgcttgtaagaaa

SEQ ID NO: 504860 - DNA, 33 bp, Homo sapien
cttgatacatatggactggttgcttgtaagaaa

SEQ ID NO: 504861 - DNA, 33 bp, Homo sapien
aataaaaaatatgaaaaggtctcctccaacact

SEQ ID NO: 504862 - DNA, 33 bp, Homo sapien
aataaaaaatatgaaatggtctcctccaacact

SEQ ID NO: 504863 - DNA, 33 bp, Homo sapien
atgaaaggtacattagactaactctgacagtga

SEQ ID NO: 504864 - DNA, 33 bp, Homo sapien
atgaaaggtacattaggctaactctgacagtga

SEQ ID NO: 504865 - DNA, 33 bp, Homo sapien
gcaggcggtcaggcccagggcaagtacttcctt

SEQ ID NO: 504866 - DNA, 33 bp, Homo sapien
gcaggcggtcaggcccggggcaagtacttcctt

SEQ ID NO: 504867 - DNA, 33 bp, Homo sapien
catcagcctcaaatgccagaccacaatgcgccc

SEQ ID NO: 504868 - DNA, 33 bp, Homo sapien
catcagcctcaaatgcgagaccacaatgcgccc

SEQ ID NO: 504869 - DNA, 33 bp, Homo sapien
tttgcttttccttaagaagaaggacatgcaata

SEQ ID NO: 504870 - DNA, 33 bp, Homo sapien
tttgcttttccttaaggagaaggacatgcaata

SEQ ID NO: 504871 - DNA, 33 bp, Homo sapien
atgggacaagatggtaagctatcctaccttgat

SEQ ID NO: 504872 - DNA, 33 bp, Homo sapien
atgggacaagatggtatgctatcctaccttgat

SEQ ID NO: 504873 - DNA, 33 bp, Homo sapien
acagcagtcaaattgcaaacttttagccacaag

SEQ ID NO: 504874 - DNA, 33 bp, Homo sapien
acagcagtcaaattgcgaacttttagccacaag

SEQ ID NO: 504875 - DNA, 33 bp, Homo sapien
attcttccaacttaaaacctggagtcttgtttt

SEQ ID NO: 504876 - DNA, 33 bp, Homo sapien
attcttccaacttaaaccctggagtcttgtttt

SEQ ID NO: 504877 - DNA, 33 bp, Homo sapien
gacttgtgtaaagaaagctggattttatctgag

SEQ ID NO: 504878 - DNA, 33 bp, Homo sapien
gacttgtgtaaagaaatctggattttatctgag

SEQ ID NO: 504879 - DNA, 33 bp, Homo sapien
ttacacaagtctaaccggctcatgagaaagtca

SEQ ID NO: 504880 - DNA, 33 bp, Homo sapien
ttacacaagtctaacctgctcatgagaaagtca

SEQ ID NO: 504881 - DNA, 33 bp, Homo sapien
ttaggatttggacagggattgcacttcattttt

SEQ ID NO: 504882 - DNA, 33 bp, Homo sapien
ttaggatttggacaggtattgcacttcattttt

SEQ ID NO: 504883 - DNA, 33 bp, Homo sapien
cttttggtgtcatatccaagaagttgttgccaa

SEQ ID NO: 504884 - DNA, 33 bp, Homo sapien
cttttggtgtcatatcgaagaagttgttgccaa

SEQ ID NO: 504885 - DNA, 33 bp, Homo sapien
attgcaatccttgtacactgttggaattataag

SEQ ID NO: 504886 - DNA, 33 bp, Homo sapien
attgcaatccttgtacgctgttggaattataag

SEQ ID NO: 504887 - DNA, 33 bp, Homo sapien
gtgcccatgtgtagaaacttccagaacatctgc

SEQ ID NO: 504888 - DNA, 33 bp, Homo sapien
gtgcccatgtgtagaaccttccagaacatctgc

SEQ ID NO: 504889 - DNA, 33 bp, Homo sapien
actcacagtccatagaatataccactggaacgt

SEQ ID NO: 504890 - DNA, 33 bp, Homo sapien
actcacagtccatagagtataccactggaacgt

SEQ ID NO: 504891 - DNA, 33 bp, Homo sapien
acaaagcacagcaaaaccgtgagagctcatggg

SEQ ID NO: 504892 - DNA, 33 bp, Homo sapien
acaaagcacagcaaaatcgtgagagctcatggg

SEQ ID NO: 504893 - DNA, 33 bp, Homo sapien
tccattcactcggctcaaggatcctagaaaaga

SEQ ID NO: 504894 - DNA, 33 bp, Homo sapien
tccattcactcggctcgaggatcctagaaaaga

SEQ ID NO: 504895 - DNA, 33 bp, Homo sapien
ttatcttctaaaactacgacacattccacctgc

SEQ ID NO: 504896 - DNA, 33 bp, Homo sapien
ttatcttctaaaactatgacacattccacctgc

SEQ ID NO: 504897 - DNA, 33 bp, Homo sapien
ctatgctattaaccgcagaatcttaatttgagg

SEQ ID NO: 504898 - DNA, 33 bp, Homo sapien
ctatgctattaaccgcggaatcttaatttgagg

SEQ ID NO: 504899 - DNA, 33 bp, Homo sapien
ggaggttttgtttaaccgcgtctttatgaagat

SEQ ID NO: 504900 - DNA, 33 bp, Homo sapien
ggaggttttgtttaactgcgtctttatgaagat

SEQ ID NO: 504901 - DNA, 33 bp, Homo sapien
aaatggatttttttagacactaagccactctac

SEQ ID NO: 504902 - DNA, 33 bp, Homo sapien
aaatggatttttttaggcactaagccactctac

SEQ ID NO: 504903 - DNA, 33 bp, Homo sapien
ctgaggttcaggctacaagttaggaagatcaga

SEQ ID NO: 504904 - DNA, 33 bp, Homo sapien
ctgaggttcaggctacgagttaggaagatcaga

SEQ ID NO: 504905 - DNA, 33 bp, Homo sapien
tcacattgaggacaccagcagttgtaagatgca

SEQ ID NO: 504906 - DNA, 33 bp, Homo sapien
tcacattgaggacaccggcagttgtaagatgca

SEQ ID NO: 504907 - DNA, 33 bp, Homo sapien
ttagcacctgtgggaaatcttataagaaaaaaa

SEQ ID NO: 504908 - DNA, 33 bp, Homo sapien
ttagcacctgtgggaagtcttataagaaaaaaa

SEQ ID NO: 504909 - DNA, 33 bp, Homo sapien
tgatggggctataacccgcataagcattctgta

SEQ ID NO: 504910 - DNA, 33 bp, Homo sapien
tgatggggctataacctgcataagcattctgta

SEQ ID NO: 504911 - DNA, 33 bp, Homo sapien
gtattctgcagctgccaaatgaactattctgta

SEQ ID NO: 504912 - DNA, 33 bp, Homo sapien
gtattctgcagctgccgaatgaactattctgta

SEQ ID NO: 504913 - DNA, 33 bp, Homo sapien
ttttctgaaaactgaaaataaaggatcactccc

SEQ ID NO: 504914 - DNA, 33 bp, Homo sapien
ttttctgaaaactgaagataaaggatcactccc

SEQ ID NO: 504915 - DNA, 33 bp, Homo sapien
tctttataatgcacaactgattgtgtgtgtgag

SEQ ID NO: 504916 - DNA, 33 bp, Homo sapien
tctttataatgcacaattgattgtgtgtgtgag

SEQ ID NO: 504917 - DNA, 33 bp, Homo sapien
acgttctttgcttccactgcagttttcctttta

SEQ ID NO: 504918 - DNA, 33 bp, Homo sapien
acgttctttgcttccattgcagttttcctttta

SEQ ID NO: 504919 - DNA, 33 bp, Homo sapien
tactgttgagtcacctaaatcaaattatttagg

SEQ ID NO: 504920 - DNA, 33 bp, Homo sapien
tactgttgagtcacctgaatcaaattatttagg

SEQ ID NO: 504921 - DNA, 33 bp, Homo sapien
tttggaaaaaaagactcaaaatgaatatgcctg

SEQ ID NO: 504922 - DNA, 33 bp, Homo sapien
tttggaaaaaaagactgaaaatgaatatgcctg

SEQ ID NO: 504923 - DNA, 33 bp, Homo sapien
tgacttcaaagacgaacgaagggacaagatcta

SEQ ID NO: 504924 - DNA, 33 bp, Homo sapien
tgacttcaaagacgaaggaagggacaagatcta

SEQ ID NO: 504925 - DNA, 33 bp, Homo sapien
ctgccagcattttgtaaccatccaagtcgatca

SEQ ID NO: 504926 - DNA, 33 bp, Homo sapien
ctgccagcattttgtagccatccaagtcgatca

SEQ ID NO: 504927 - DNA, 33 bp, Homo sapien
taggatgtcattttcacgattagggtacaaaac

SEQ ID NO: 504928 - DNA, 33 bp, Homo sapien
taggatgtcattttcatgattagggtacaaaac

SEQ ID NO: 504929 - DNA, 33 bp, Homo sapien
ttaagagaacattttaactggttagaactccaa

SEQ ID NO: 504930 - DNA, 33 bp, Homo sapien
ttaagagaacattttagctggttagaactccaa

SEQ ID NO: 504931 - DNA, 33 bp, Homo sapien
ccatgaagtacttgaaagattctccagagaaga

SEQ ID NO: 504932 - DNA, 33 bp, Homo sapien
ccatgaagtacttgaaggattctccagagaaga

SEQ ID NO: 504933 - DNA, 33 bp, Homo sapien
tgttttattcatcatcacagcattgcctatatt

SEQ ID NO: 504934 - DNA, 33 bp, Homo sapien
tgttttattcatcatcgcagcattgcctatatt

SEQ ID NO: 504935 - DNA, 33 bp, Homo sapien
agggccactggatttacatagagaatgacatcg

SEQ ID NO: 504936 - DNA, 33 bp, Homo sapien
agggccactggatttagatagagaatgacatcg

SEQ ID NO: 504937 - DNA, 33 bp, Homo sapien
tccttaaacacgcaaccaaaattcttaagatat

SEQ ID NO: 504938 - DNA, 33 bp, Homo sapien
tccttaaacacgcaacgaaaattcttaagatat

SEQ ID NO: 504939 - DNA, 33 bp, Homo sapien
acatccaagtaggccaagtcacgagcagtatta

SEQ ID NO: 504940 - DNA, 33 bp, Homo sapien
acatccaagtaggccacgtcacgagcagtatta

SEQ ID NO: 504941 - DNA, 33 bp, Homo sapien
tttccagaagaagaaccgcagcccctagtgtgc

SEQ ID NO: 504942 - DNA, 33 bp, Homo sapien
tttccagaagaagaactgcagcccctagtgtgc

SEQ ID NO: 504943 - DNA, 33 bp, Homo sapien
tgtccagcagaaatagaacataagctgccagtg

SEQ ID NO: 504944 - DNA, 33 bp, Homo sapien
tgtccagcagaaatagtacataagctgccagtg

SEQ ID NO: 504945 - DNA, 33 bp, Homo sapien
aagttacacatctagcacacactggcagcttat

SEQ ID NO: 504946 - DNA, 33 bp, Homo sapien
aagttacacatctagcgcacactggcagcttat

SEQ ID NO: 504947 - DNA, 33 bp, Homo sapien
tgtacttctgatcaaccggctgtaaattggggt

SEQ ID NO: 504948 - DNA, 33 bp, Homo sapien
tgtacttctgatcaactggctgtaaattggggt

SEQ ID NO: 504949 - DNA, 33 bp, Homo sapien
gatcttttgagaggtagatttatgtgtcctgat

SEQ ID NO: 504950 - DNA, 33 bp, Homo sapien
gatcttttgagaggtatatttatgtgtcctgat

SEQ ID NO: 504951 - DNA, 33 bp, Homo sapien
tcatccaggccccagacaacttgacacctcctc

SEQ ID NO: 504952 - DNA, 33 bp, Homo sapien
tcatccaggccccagagaacttgacacctcctc

SEQ ID NO: 504953 - DNA, 33 bp, Homo sapien
ctggggcctggatgacaaaatctgtgttccaca

SEQ ID NO: 504954 - DNA, 33 bp, Homo sapien
ctggggcctggatgacgaaatctgtgttccaca

SEQ ID NO: 504955 - DNA, 33 bp, Homo sapien
gccgtgtagatgtacaactgaaaaaacgctttc

SEQ ID NO: 504956 - DNA, 33 bp, Homo sapien
gccgtgtagatgtacagctgaaaaaacgctttc

SEQ ID NO: 504957 - DNA, 33 bp, Homo sapien
gattaagttcaaacaaaatcaatctgaagttaa

SEQ ID NO: 504958 - DNA, 33 bp, Homo sapien
gattaagttcaaacaagatcaatctgaagttaa

SEQ ID NO: 504959 - DNA, 33 bp, Homo sapien
gtgctttggctgcttcaagaagatgttgaaatg

SEQ ID NO: 504960 - DNA, 33 bp, Homo sapien
gtgctttggctgcttccagaagatgttgaaatg

SEQ ID NO: 504961 - DNA, 33 bp, Homo sapien
aaagcagctctttcctcaaggctagaacacaga

SEQ ID NO: 504962 - DNA, 33 bp, Homo sapien
aaagcagctctttcctgaaggctagaacacaga

SEQ ID NO: 504963 - DNA, 33 bp, Homo sapien
aacacaaaggcacctccaggaaatgggaagcta

SEQ ID NO: 504964 - DNA, 33 bp, Homo sapien
aacacaaaggcacctctaggaaatgggaagcta

SEQ ID NO: 504965 - DNA, 33 bp, Homo sapien
tcgcctctccgcagtacgaaaatttgtagacat

SEQ ID NO: 504966 - DNA, 33 bp, Homo sapien
tcgcctctccgcagtatgaaaatttgtagacat

SEQ ID NO: 504967 - DNA, 33 bp, Homo sapien
gtatcctattctgtcactatctgaggacacact

SEQ ID NO: 504968 - DNA, 33 bp, Homo sapien
gtatcctattctgtcagtatctgaggacacact

SEQ ID NO: 504969 - DNA, 33 bp, Homo sapien
gacacgaccaaaagaccgccaatacaaaatcta

SEQ ID NO: 504970 - DNA, 33 bp, Homo sapien
gacacgaccaaaagactgccaatacaaaatcta

SEQ ID NO: 504971 - DNA, 33 bp, Homo sapien
gagtagggaaaaaagaagatagagagagtagtc

SEQ ID NO: 504972 - DNA, 33 bp, Homo sapien
gagtagggaaaaaagaggatagagagagtagtc

SEQ ID NO: 504973 - DNA, 33 bp, Homo sapien
ggaataccactatatgaaagcctataaaaagct

SEQ ID NO: 504974 - DNA, 33 bp, Homo sapien
ggaataccactatatggaagcctataaaaagct

SEQ ID NO: 504975 - DNA, 33 bp, Homo sapien
tgtagcctggctgcaccgtatagtctggctctc

SEQ ID NO: 504976 - DNA, 33 bp, Homo sapien
tgtagcctggctgcactgtatagtctggctctc

SEQ ID NO: 504977 - DNA, 33 bp, Homo sapien
actgattagagtttaacgtctgtcagttctagg

SEQ ID NO: 504978 - DNA, 33 bp, Homo sapien
actgattagagtttaaggtctgtcagttctagg

SEQ ID NO: 504979 - DNA, 33 bp, Homo sapien
tctaagagaagcagtaacgttgaaaacaaactt

SEQ ID NO: 504980 - DNA, 33 bp, Homo sapien
tctaagagaagcagtaccgttgaaaacaaactt

SEQ ID NO: 504981 - DNA, 33 bp, Homo sapien
ttttttttaactgctaaaacagtcactgcaaga

SEQ ID NO: 504982 - DNA, 33 bp, Homo sapien
ttttttttaactgctacaacagtcactgcaaga

SEQ ID NO: 504983 - DNA, 33 bp, Homo sapien
ctcaggttggaagatacggttacatttagcttc

SEQ ID NO: 504984 - DNA, 33 bp, Homo sapien
ctcaggttggaagatatggttacatttagcttc

SEQ ID NO: 504985 - DNA, 33 bp, Homo sapien
agaggtcaacacagcaacatcctatttcactcc

SEQ ID NO: 504986 - DNA, 33 bp, Homo sapien
agaggtcaacacagcagcatcctatttcactcc

SEQ ID NO: 504987 - DNA, 33 bp, Homo sapien
ctcactcatcttttcaactgtacccagtggcca

SEQ ID NO: 504988 - DNA, 33 bp, Homo sapien
ctcactcatcttttcagctgtacccagtggcca

SEQ ID NO: 504989 - DNA, 33 bp, Homo sapien
ggctacccagcatgaacggtctttctagagtaa

SEQ ID NO: 504990 - DNA, 33 bp, Homo sapien
ggctacccagcatgaatggtctttctagagtaa

SEQ ID NO: 504991 - DNA, 33 bp, Homo sapien
tcttatatattcaacaccagtcctgtacgatta

SEQ ID NO: 504992 - DNA, 33 bp, Homo sapien
tcttatatattcaacagcagtcctgtacgatta

SEQ ID NO: 504993 - DNA, 33 bp, Homo sapien
tccatggcccttaccagtacttcacacacattt

SEQ ID NO: 504994 - DNA, 33 bp, Homo sapien
tccatggcccttaccattacttcacacacattt

SEQ ID NO: 504995 - DNA, 33 bp, Homo sapien
ggaggggacatttgaacggcggcttgaacaaag

SEQ ID NO: 504996 - DNA, 33 bp, Homo sapien
ggaggggacatttgaatggcggcttgaacaaag

SEQ ID NO: 504997 - DNA, 33 bp, Homo sapien
taggaaaaaatgttacaaactttcctcagtgtt

SEQ ID NO: 504998 - DNA, 33 bp, Homo sapien
taggaaaaaatgttacgaactttcctcagtgtt

SEQ ID NO: 504999 - DNA, 33 bp, Homo sapien
gttacaattaatgaacaactacccatacattaa

SEQ ID NO: 505000 - DNA, 33 bp, Homo sapien
gttacaattaatgaaccactacccatacattaa

SEQ ID NO: 505001 - DNA, 33 bp, Homo sapien
gcaaagagagaaaagaccgaagcctgtgaggat

SEQ ID NO: 505002 - DNA, 33 bp, Homo sapien
gcaaagagagaaaagagcgaagcctgtgaggat

SEQ ID NO: 505003 - DNA, 33 bp, Homo sapien
tctcaagtgcataccacgtagaactcactaacc

SEQ ID NO: 505004 - DNA, 33 bp, Homo sapien
tctcaagtgcataccatgtagaactcactaacc

SEQ ID NO: 505005 - DNA, 33 bp, Homo sapien
gaggataaagtttacaagaagctcctatcagaa

SEQ ID NO: 505006 - DNA, 33 bp, Homo sapien
gaggataaagtttacatgaagctcctatcagaa

SEQ ID NO: 505007 - DNA, 33 bp, Homo sapien
gatgcccctgctcaaaccttcaactgtttgtga

SEQ ID NO: 505008 - DNA, 33 bp, Homo sapien
gatgcccctgctcaaatcttcaactgtttgtga

SEQ ID NO: 505009 - DNA, 33 bp, Homo sapien
aggaatggttaatccaagcatgagaggcaatcc

SEQ ID NO: 505010 - DNA, 33 bp, Homo sapien
aggaatggttaatccaggcatgagaggcaatcc

SEQ ID NO: 505011 - DNA, 33 bp, Homo sapien
acgatctttaaagacaatgtatacagacgtcac

SEQ ID NO: 505012 - DNA, 33 bp, Homo sapien
acgatctttaaagacagtgtatacagacgtcac

SEQ ID NO: 505013 - DNA, 33 bp, Homo sapien
acctcaacggcaccaacagccactatcactttc

SEQ ID NO: 505014 - DNA, 33 bp, Homo sapien
acctcaacggcaccaatagccactatcactttc

SEQ ID NO: 505015 - DNA, 33 bp, Homo sapien
tgattttacttagatcaaaagacccaggttagt

SEQ ID NO: 505016 - DNA, 33 bp, Homo sapien
tgattttacttagatcgaaagacccaggttagt

SEQ ID NO: 505017 - DNA, 33 bp, Homo sapien
aattttcctgtgcactaaaagaagcagacatat

SEQ ID NO: 505018 - DNA, 33 bp, Homo sapien
aattttcctgtgcactgaaagaagcagacatat

SEQ ID NO: 505019 - DNA, 33 bp, Homo sapien
ggacaactgaagcttacactcggcttccacgag

SEQ ID NO: 505020 - DNA, 33 bp, Homo sapien
ggacaactgaagcttagactcggcttccacgag

SEQ ID NO: 505021 - DNA, 33 bp, Homo sapien
accatccaaataacacaagtaccttcaactaaa

SEQ ID NO: 505022 - DNA, 33 bp, Homo sapien
accatccaaataacacgagtaccttcaactaaa

SEQ ID NO: 505023 - DNA, 33 bp, Homo sapien
ggagggctctggtgaccgctttttagttgaagg

SEQ ID NO: 505024 - DNA, 33 bp, Homo sapien
ggagggctctggtgactgctttttagttgaagg

SEQ ID NO: 505025 - DNA, 33 bp, Homo sapien
caccaagatcctacgacgtgctgggcactcaca

SEQ ID NO: 505026 - DNA, 33 bp, Homo sapien
caccaagatcctacgatgtgctgggcactcaca

SEQ ID NO: 505027 - DNA, 33 bp, Homo sapien
gcaccaatttcccttgcacgaaatctcagccca

SEQ ID NO: 505028 - DNA, 33 bp, Homo sapien
gcaccaatttcccttgtacgaaatctcagccca

SEQ ID NO: 505029 - DNA, 33 bp, Homo sapien
ggacaggcgctgctaacgtccacttccgggaag

SEQ ID NO: 505030 - DNA, 33 bp, Homo sapien
ggacaggcgctgctaatgtccacttccgggaag

SEQ ID NO: 505031 - DNA, 33 bp, Homo sapien
actgactgctggccaaagatcatggaactgggg

SEQ ID NO: 505032 - DNA, 33 bp, Homo sapien
actgactgctggccaaggatcatggaactgggg

SEQ ID NO: 505033 - DNA, 33 bp, Homo sapien
tgcaggatggttcaaccacacaatgaaagcacc

SEQ ID NO: 505034 - DNA, 33 bp, Homo sapien
tgcaggatggttcaactacacaatgaaagcacc

SEQ ID NO: 505035 - DNA, 33 bp, Homo sapien
acagatgcaagtaaatcacggagtagcaaacat

SEQ ID NO: 505036 - DNA, 33 bp, Homo sapien
acagatgcaagtaaatgacggagtagcaaacat

SEQ ID NO: 505037 - DNA, 33 bp, Homo sapien
gggctttgagaaaagcagaaaactggtctggga

SEQ ID NO: 505038 - DNA, 33 bp, Homo sapien
gggctttgagaaaagcggaaaactggtctggga

SEQ ID NO: 505039 - DNA, 33 bp, Homo sapien
ctctcacacactctcaatactcacatactccct

SEQ ID NO: 505040 - DNA, 33 bp, Homo sapien
ctctcacacactctcagtactcacatactccct

SEQ ID NO: 505041 - DNA, 33 bp, Homo sapien
gattagtatttttatactaaggaaccggcaccc

SEQ ID NO: 505042 - DNA, 33 bp, Homo sapien
gattagtatttttatattaaggaaccggcaccc

SEQ ID NO: 505043 - DNA, 33 bp, Homo sapien
cagacagcaagggacaataaaggttagtcattc

SEQ ID NO: 505044 - DNA, 33 bp, Homo sapien
cagacagcaagggacagtaaaggttagtcattc

SEQ ID NO: 505045 - DNA, 33 bp, Homo sapien
caaagatagaacagcacgagtctttccagtgag

SEQ ID NO: 505046 - DNA, 33 bp, Homo sapien
caaagatagaacagcatgagtctttccagtgag

SEQ ID NO: 505047 - DNA, 33 bp, Homo sapien
tgtagccctggtgccacataaatactgctggtc

SEQ ID NO: 505048 - DNA, 33 bp, Homo sapien
tgtagccctggtgccatataaatactgctggtc

SEQ ID NO: 505049 - DNA, 33 bp, Homo sapien
ttatcctgaatagacaaccaggcatttggagag

SEQ ID NO: 505050 - DNA, 33 bp, Homo sapien
ttatcctgaatagacagccaggcatttggagag

SEQ ID NO: 505051 - DNA, 33 bp, Homo sapien
gagcccggcactaacaacatcagctggagcttc

SEQ ID NO: 505052 - DNA, 33 bp, Homo sapien
gagcccggcactaacaccatcagctggagcttc

SEQ ID NO: 505053 - DNA, 33 bp, Homo sapien
ggtttccagccagcacaggcctaagatggggtc

SEQ ID NO: 505054 - DNA, 33 bp, Homo sapien
ggtttccagccagcacgggcctaagatggggtc

SEQ ID NO: 505055 - DNA, 33 bp, Homo sapien
ataatgtcacaacatgaagtccacaggctggac

SEQ ID NO: 505056 - DNA, 33 bp, Homo sapien
ataatgtcacaacatggagtccacaggctggac

SEQ ID NO: 505057 - DNA, 33 bp, Homo sapien
aaggactctgagaatccgaactccaggagaagt

SEQ ID NO: 505058 - DNA, 33 bp, Homo sapien
aaggactctgagaatctgaactccaggagaagt

SEQ ID NO: 505059 - DNA, 33 bp, Homo sapien
acttctttgttatttcaaatggagtttggcaga

SEQ ID NO: 505060 - DNA, 33 bp, Homo sapien
acttctttgttatttcgaatggagtttggcaga

SEQ ID NO: 505061 - DNA, 33 bp, Homo sapien
aatctgtctcaagcaaccttaaaatacagaagt

SEQ ID NO: 505062 - DNA, 33 bp, Homo sapien
aatctgtctcaagcaatcttaaaatacagaagt

SEQ ID NO: 505063 - DNA, 33 bp, Homo sapien
ctgtgctctgcagaaaaccaataggatggagtg

SEQ ID NO: 505064 - DNA, 33 bp, Homo sapien
ctgtgctctgcagaaagccaataggatggagtg

SEQ ID NO: 505065 - DNA, 33 bp, Homo sapien
aacattaagaagtctccctctccctactcatta

SEQ ID NO: 505066 - DNA, 33 bp, Homo sapien
aacattaagaagtctctctctccctactcatta

SEQ ID NO: 505067 - DNA, 33 bp, Homo sapien
tacctctccaaacttacctccctgttcacatcc

SEQ ID NO: 505068 - DNA, 33 bp, Homo sapien
tacctctccaaacttatctccctgttcacatcc

SEQ ID NO: 505069 - DNA, 33 bp, Homo sapien
aaagccctcacctggaaagactcttcaatgacc

SEQ ID NO: 505070 - DNA, 33 bp, Homo sapien
aaagccctcacctggagagactcttcaatgacc

SEQ ID NO: 505071 - DNA, 33 bp, Homo sapien
gcagaaacaggcaaaccgactctctggggtcag

SEQ ID NO: 505072 - DNA, 33 bp, Homo sapien
gcagaaacaggcaaactgactctctggggtcag

SEQ ID NO: 505073 - DNA, 33 bp, Homo sapien
acttctcagacaggtaaccaatcctcatgttca

SEQ ID NO: 505074 - DNA, 33 bp, Homo sapien
acttctcagacaggtatccaatcctcatgttca

SEQ ID NO: 505075 - DNA, 33 bp, Homo sapien
actctctagggcttgacgatcccagtttccatt

SEQ ID NO: 505076 - DNA, 33 bp, Homo sapien
actctctagggcttgatgatcccagtttccatt

SEQ ID NO: 505077 - DNA, 33 bp, Homo sapien
ggattgatcattattaacccactttcaaggtca

SEQ ID NO: 505078 - DNA, 33 bp, Homo sapien
ggattgatcattattaccccactttcaaggtca

SEQ ID NO: 505079 - DNA, 33 bp, Homo sapien
gaagcactggtgaccaagcgggagcctcaggac

SEQ ID NO: 505080 - DNA, 33 bp, Homo sapien
gaagcactggtgaccacgcgggagcctcaggac

SEQ ID NO: 505081 - DNA, 33 bp, Homo sapien
cacattcatattcaggaaagatactgtttttac

SEQ ID NO: 505082 - DNA, 33 bp, Homo sapien
cacattcatattcagggaagatactgtttttac

SEQ ID NO: 505083 - DNA, 33 bp, Homo sapien
gaagatcaatgcaaaacgttaccaggaggaagt

SEQ ID NO: 505084 - DNA, 33 bp, Homo sapien
gaagatcaatgcaaaatgttaccaggaggaagt

SEQ ID NO: 505085 - DNA, 33 bp, Homo sapien
tacattagttccaaaacagtctccaagtatctc

SEQ ID NO: 505086 - DNA, 33 bp, Homo sapien
tacattagttccaaaagagtctccaagtatctc

SEQ ID NO: 505087 - DNA, 33 bp, Homo sapien
attgccttttctatgccagagggaagaactgga

SEQ ID NO: 505088 - DNA, 33 bp, Homo sapien
attgccttttctatgcgagagggaagaactgga

SEQ ID NO: 505089 - DNA, 33 bp, Homo sapien
actgtagtctcagtaactggaatggctgagaca

SEQ ID NO: 505090 - DNA, 33 bp, Homo sapien
actgtagtctcagtaattggaatggctgagaca

SEQ ID NO: 505091 - DNA, 33 bp, Homo sapien
acaacctagtctcagaagtaacatagcatccac

SEQ ID NO: 505092 - DNA, 33 bp, Homo sapien
acaacctagtctcagacgtaacatagcatccac

SEQ ID NO: 505093 - DNA, 33 bp, Homo sapien
tcttgaacaaggcagccgatggattgtctgcaa

SEQ ID NO: 505094 - DNA, 33 bp, Homo sapien
tcttgaacaaggcagctgatggattgtctgcaa

SEQ ID NO: 505095 - DNA, 33 bp, Homo sapien
cagagatcatgactaactgacaatttttttttt

SEQ ID NO: 505096 - DNA, 33 bp, Homo sapien
cagagatcatgactaattgacaatttttttttt

SEQ ID NO: 505097 - DNA, 33 bp, Homo sapien
aggagaaattcagcctcactgtctccagttttt

SEQ ID NO: 505098 - DNA, 33 bp, Homo sapien
aggagaaattcagccttactgtctccagttttt

SEQ ID NO: 505099 - DNA, 33 bp, Homo sapien
tgcactccttcggcgtgaatagctagggtgttg

SEQ ID NO: 505100 - DNA, 33 bp, Homo sapien
tgcactccttcggcgttaatagctagggtgttg

SEQ ID NO: 505101 - DNA, 33 bp, Homo sapien
tacaacatgagtgaaacttaaaaacatcatgct

SEQ ID NO: 505102 - DNA, 33 bp, Homo sapien
tacaacatgagtgaaatttaaaaacatcatgct

SEQ ID NO: 505103 - DNA, 33 bp, Homo sapien
attcccgtcagcagtgcatgagtgctacgattt

SEQ ID NO: 505104 - DNA, 33 bp, Homo sapien
attcccgtcagcagtgtatgagtgctacgattt

SEQ ID NO: 505105 - DNA, 33 bp, Homo sapien
tcagtacaatgttcaacagaagtagtggtggac

SEQ ID NO: 505106 - DNA, 33 bp, Homo sapien
tcagtacaatgttcaatagaagtagtggtggac

SEQ ID NO: 505107 - DNA, 33 bp, Homo sapien
atgtcatctcttaaataatgcctgatccctctg

SEQ ID NO: 505108 - DNA, 33 bp, Homo sapien
atgtcatctcttaaatgatgcctgatccctctg

SEQ ID NO: 505109 - DNA, 33 bp, Homo sapien
agacttctcactaaaactgagctgtgtaggcat

SEQ ID NO: 505110 - DNA, 33 bp, Homo sapien
agacttctcactaaaattgagctgtgtaggcat

SEQ ID NO: 505111 - DNA, 33 bp, Homo sapien
tgcagaagacttacacagagaggttagtaagac

SEQ ID NO: 505112 - DNA, 33 bp, Homo sapien
tgcagaagacttacacggagaggttagtaagac

SEQ ID NO: 505113 - DNA, 33 bp, Homo sapien
tggtcccagccagctaaaaaggactggtaagtg

SEQ ID NO: 505114 - DNA, 33 bp, Homo sapien
tggtcccagccagctacaaaggactggtaagtg

SEQ ID NO: 505115 - DNA, 33 bp, Homo sapien
tgtgtgttctatcgtgaaattaatcagcagaca

SEQ ID NO: 505116 - DNA, 33 bp, Homo sapien
tgtgtgttctatcgtggaattaatcagcagaca

SEQ ID NO: 505117 - DNA, 33 bp, Homo sapien
cacttctcttccaagcaaggcagtgtcgtttgc

SEQ ID NO: 505118 - DNA, 33 bp, Homo sapien
cacttctcttccaagcgaggcagtgtcgtttgc

SEQ ID NO: 505119 - DNA, 33 bp, Homo sapien
agaaagataccacttcaatggctgtaacaaaat

SEQ ID NO: 505120 - DNA, 33 bp, Homo sapien
agaaagataccacttcgatggctgtaacaaaat

SEQ ID NO: 505121 - DNA, 33 bp, Homo sapien
acatcttttctgcctcaacaacactcagatgac

SEQ ID NO: 505122 - DNA, 33 bp, Homo sapien
acatcttttctgcctcgacaacactcagatgac

SEQ ID NO: 505123 - DNA, 33 bp, Homo sapien
gtccgacaatggatgaccgcataaagaaaatgt

SEQ ID NO: 505124 - DNA, 33 bp, Homo sapien
gtccgacaatggatgatcgcataaagaaaatgt

SEQ ID NO: 505125 - DNA, 33 bp, Homo sapien
acatggccaccttcaacgtctgaatctctccaa

SEQ ID NO: 505126 - DNA, 33 bp, Homo sapien
acatggccaccttcaatgtctgaatctctccaa

SEQ ID NO: 505127 - DNA, 33 bp, Homo sapien
accttggtttccactagcttttgcgcctccatc

SEQ ID NO: 505128 - DNA, 33 bp, Homo sapien
accttggtttccactatcttttgcgcctccatc

SEQ ID NO: 505129 - DNA, 33 bp, Homo sapien
ttggagggttagttaccaaatcaagagcatcat

SEQ ID NO: 505130 - DNA, 33 bp, Homo sapien
ttggagggttagttactaaatcaagagcatcat

SEQ ID NO: 505131 - DNA, 33 bp, Homo sapien
aaaggtattctgagtacgctgttggtattaaaa

SEQ ID NO: 505132 - DNA, 33 bp, Homo sapien
aaaggtattctgagtaggctgttggtattaaaa

SEQ ID NO: 505133 - DNA, 33 bp, Homo sapien
cagaatcacctggagaatctaagacacagattc

SEQ ID NO: 505134 - DNA, 33 bp, Homo sapien
cagaatcacctggagagtctaagacacagattc

SEQ ID NO: 505135 - DNA, 33 bp, Homo sapien
aaacttgagctatgaaaggccagcatcagaatc

SEQ ID NO: 505136 - DNA, 33 bp, Homo sapien
aaacttgagctatgaagggccagcatcagaatc

SEQ ID NO: 505137 - DNA, 33 bp, Homo sapien
tcttgttacactcttaactggccaagttcccac

SEQ ID NO: 505138 - DNA, 33 bp, Homo sapien
tcttgttacactcttatctggccaagttcccac

SEQ ID NO: 505139 - DNA, 33 bp, Homo sapien
aagtgtatttttcagacagctgatgtttttaca

SEQ ID NO: 505140 - DNA, 33 bp, Homo sapien
aagtgtatttttcagatagctgatgtttttaca

SEQ ID NO: 505141 - DNA, 33 bp, Homo sapien
agaggagaaacataaactgtcctaggagtgggg

SEQ ID NO: 505142 - DNA, 33 bp, Homo sapien
agaggagaaacataaagtgtcctaggagtgggg

SEQ ID NO: 505143 - DNA, 33 bp, Homo sapien
acaccgcattgtcaaaagggctgactccctggt

SEQ ID NO: 505144 - DNA, 33 bp, Homo sapien
acaccgcattgtcaaatgggctgactccctggt

SEQ ID NO: 505145 - DNA, 33 bp, Homo sapien
ctacttcatcctcaccaaactctaagctctgtc

SEQ ID NO: 505146 - DNA, 33 bp, Homo sapien
ctacttcatcctcaccgaactctaagctctgtc

SEQ ID NO: 505147 - DNA, 33 bp, Homo sapien
ataaagaactagaaaactggacttaacatggga

SEQ ID NO: 505148 - DNA, 33 bp, Homo sapien
ataaagaactagaaaattggacttaacatggga

SEQ ID NO: 505149 - DNA, 33 bp, Homo sapien
taggtaggttaggacactgcttgctgttttttg

SEQ ID NO: 505150 - DNA, 33 bp, Homo sapien
taggtaggttaggacattgcttgctgttttttg

SEQ ID NO: 505151 - DNA, 33 bp, Homo sapien
aggaaatcaaaagcaacggctacagatgcagtg

SEQ ID NO: 505152 - DNA, 33 bp, Homo sapien
aggaaatcaaaagcaatggctacagatgcagtg

SEQ ID NO: 505153 - DNA, 33 bp, Homo sapien
cccttcacggaggaaactggaatgtctcatttc

SEQ ID NO: 505154 - DNA, 33 bp, Homo sapien
cccttcacggaggaaattggaatgtctcatttc

SEQ ID NO: 505155 - DNA, 33 bp, Homo sapien
gaacagtgttttcaaaatcgcgttgctgtatca

SEQ ID NO: 505156 - DNA, 33 bp, Homo sapien
gaacagtgttttcaaattcgcgttgctgtatca

SEQ ID NO: 505157 - DNA, 33 bp, Homo sapien
tgaggtcattcctctaccaaaatgtgcctcttt

SEQ ID NO: 505158 - DNA, 33 bp, Homo sapien
tgaggtcattcctctatcaaaatgtgcctcttt

SEQ ID NO: 505159 - DNA, 33 bp, Homo sapien
gggttctctggtcaaaggagatgacattattca

SEQ ID NO: 505160 - DNA, 33 bp, Homo sapien
gggttctctggtcaaatgagatgacattattca

SEQ ID NO: 505161 - DNA, 33 bp, Homo sapien
gtggtcctggcccaaacggagaagcagggaaag

SEQ ID NO: 505162 - DNA, 33 bp, Homo sapien
gtggtcctggcccaaatggagaagcagggaaag

SEQ ID NO: 505163 - DNA, 33 bp, Homo sapien
acataccattgtcacacattgtcagactgacct

SEQ ID NO: 505164 - DNA, 33 bp, Homo sapien
acataccattgtcacatattgtcagactgacct

SEQ ID NO: 505165 - DNA, 33 bp, Homo sapien
tgtgcataatgcagaaagaactggaacccaaag

SEQ ID NO: 505166 - DNA, 33 bp, Homo sapien
tgtgcataatgcagaaggaactggaacccaaag

SEQ ID NO: 505167 - DNA, 33 bp, Homo sapien
cagatgctgctgaagacgccagaaaactgttgc

SEQ ID NO: 505168 - DNA, 33 bp, Homo sapien
cagatgctgctgaagatgccagaaaactgttgc

SEQ ID NO: 505169 - DNA, 33 bp, Homo sapien
caggaatggggtaggaagataagacagtgtttg

SEQ ID NO: 505170 - DNA, 33 bp, Homo sapien
caggaatggggtaggacgataagacagtgtttg

SEQ ID NO: 505171 - DNA, 33 bp, Homo sapien
ctgttatttttctgtcactgacttctagtttga

SEQ ID NO: 505172 - DNA, 33 bp, Homo sapien
ctgttatttttctgtcgctgacttctagtttga

SEQ ID NO: 505173 - DNA, 33 bp, Homo sapien
tatcttctctttgctgaagttttctattcatgt

SEQ ID NO: 505174 - DNA, 33 bp, Homo sapien
tatcttctctttgctgcagttttctattcatgt

SEQ ID NO: 505175 - DNA, 33 bp, Homo sapien
cttcaattagcaattacaaacatggttgaaaca

SEQ ID NO: 505176 - DNA, 33 bp, Homo sapien
cttcaattagcaattataaacatggttgaaaca

SEQ ID NO: 505177 - DNA, 33 bp, Homo sapien
cctctgaaggtgattacggtagaataaggtctt

SEQ ID NO: 505178 - DNA, 33 bp, Homo sapien
cctctgaaggtgattatggtagaataaggtctt

SEQ ID NO: 505179 - DNA, 33 bp, Homo sapien
ggctgcgctcagtatccaagagggtgtagtgga

SEQ ID NO: 505180 - DNA, 33 bp, Homo sapien
ggctgcgctcagtatctaagagggtgtagtgga

SEQ ID NO: 505181 - DNA, 33 bp, Homo sapien
ttgctgtgtccttaaaacatggcaaagatgcaa

SEQ ID NO: 505182 - DNA, 33 bp, Homo sapien
ttgctgtgtccttaaatcatggcaaagatgcaa

SEQ ID NO: 505183 - DNA, 33 bp, Homo sapien
tacactcctttttcaacgtcttggttaccatta

SEQ ID NO: 505184 - DNA, 33 bp, Homo sapien
tacactcctttttcaatgtcttggttaccatta

SEQ ID NO: 505185 - DNA, 33 bp, Homo sapien
ctgacgcttgagaaacactatttgaaacctaag

SEQ ID NO: 505186 - DNA, 33 bp, Homo sapien
ctgacgcttgagaaacgctatttgaaacctaag

SEQ ID NO: 505187 - DNA, 33 bp, Homo sapien
ctctcctggttcctacacaacactctaaagttc

SEQ ID NO: 505188 - DNA, 33 bp, Homo sapien
ctctcctggttcctacgcaacactctaaagttc

SEQ ID NO: 505189 - DNA, 33 bp, Homo sapien
agatggtcctaccccccaagctgcctcctcctt

SEQ ID NO: 505190 - DNA, 33 bp, Homo sapien
agatggtcctaccccctaagctgcctcctcctt

SEQ ID NO: 505191 - DNA, 33 bp, Homo sapien
tatgtgctgtcccagcgcaggacaaaatgcacc

SEQ ID NO: 505192 - DNA, 33 bp, Homo sapien
tatgtgctgtcccagctcaggacaaaatgcacc

SEQ ID NO: 505193 - DNA, 33 bp, Homo sapien
agatgttgtgcggtaaaaggaaaccagtcagga

SEQ ID NO: 505194 - DNA, 33 bp, Homo sapien
agatgttgtgcggtaagaggaaaccagtcagga

SEQ ID NO: 505195 - DNA, 33 bp, Homo sapien
tggaaagtagacaagacggtctcagctggcaga

SEQ ID NO: 505196 - DNA, 33 bp, Homo sapien
tggaaagtagacaagatggtctcagctggcaga

SEQ ID NO: 505197 - DNA, 33 bp, Homo sapien
gctggtatcgcacctcacatcgtgctgggctcc

SEQ ID NO: 505198 - DNA, 33 bp, Homo sapien
gctggtatcgcacctcgcatcgtgctgggctcc

SEQ ID NO: 505199 - DNA, 33 bp, Homo sapien
ttgttcctgtgatgccacgcttaggagatctcc

SEQ ID NO: 505200 - DNA, 33 bp, Homo sapien
ttgttcctgtgatgccgcgcttaggagatctcc

SEQ ID NO: 505201 - DNA, 33 bp, Homo sapien
acaggtgtatcagttccatctatgtaggttctg

SEQ ID NO: 505202 - DNA, 33 bp, Homo sapien
acaggtgtatcagttctatctatgtaggttctg

SEQ ID NO: 505203 - DNA, 33 bp, Homo sapien
aagcggccactacaaacccaataattagtccac

SEQ ID NO: 505204 - DNA, 33 bp, Homo sapien
aagcggccactacaaatccaataattagtccac

SEQ ID NO: 505205 - DNA, 33 bp, Homo sapien
cctctccttaagggaaacttcttgatgcttctc

SEQ ID NO: 505206 - DNA, 33 bp, Homo sapien
cctctccttaagggaaccttcttgatgcttctc

SEQ ID NO: 505207 - DNA, 33 bp, Homo sapien
tctaatgtttgatccactgcagaacaaacgtgc

SEQ ID NO: 505208 - DNA, 33 bp, Homo sapien
tctaatgtttgatccattgcagaacaaacgtgc

SEQ ID NO: 505209 - DNA, 33 bp, Homo sapien
taattgataagatgaggaaagaaagtgaatgga

SEQ ID NO: 505210 - DNA, 33 bp, Homo sapien
taattgataagatgagtaaagaaagtgaatgga

SEQ ID NO: 505211 - DNA, 33 bp, Homo sapien
tatgcaggtcctgagacgtggagccaactaaca

SEQ ID NO: 505212 - DNA, 33 bp, Homo sapien
tatgcaggtcctgagatgtggagccaactaaca

SEQ ID NO: 505213 - DNA, 33 bp, Homo sapien
aatcaacatggctgtgaaacgttggtccaggac

SEQ ID NO: 505214 - DNA, 33 bp, Homo sapien
aatcaacatggctgtggaacgttggtccaggac

SEQ ID NO: 505215 - DNA, 33 bp, Homo sapien
attctctcagttcttacctctgacacagggttt

SEQ ID NO: 505216 - DNA, 33 bp, Homo sapien
attctctcagttcttatctctgacacagggttt

SEQ ID NO: 505217 - DNA, 33 bp, Homo sapien
gtttggccctgcttataacaagtattcaacaaa

SEQ ID NO: 505218 - DNA, 33 bp, Homo sapien
gtttggccctgcttatgacaagtattcaacaaa

SEQ ID NO: 505219 - DNA, 33 bp, Homo sapien
ggggttcagagcagaactgaggaatgtgacagt

SEQ ID NO: 505220 - DNA, 33 bp, Homo sapien
ggggttcagagcagaattgaggaatgtgacagt

SEQ ID NO: 505221 - DNA, 33 bp, Homo sapien
gatccctgtttatacacacggtggaaaagtaaa

SEQ ID NO: 505222 - DNA, 33 bp, Homo sapien
gatccctgtttatacagacggtggaaaagtaaa

SEQ ID NO: 505223 - DNA, 33 bp, Homo sapien
aacatattcataagaacacgacttgctaacaag

SEQ ID NO: 505224 - DNA, 33 bp, Homo sapien
aacatattcataagaagacgacttgctaacaag

SEQ ID NO: 505225 - DNA, 33 bp, Homo sapien
tgtgaggggtcttgacagtaactcagtaataac

SEQ ID NO: 505226 - DNA, 33 bp, Homo sapien
tgtgaggggtcttgacggtaactcagtaataac

SEQ ID NO: 505227 - DNA, 33 bp, Homo sapien
gtaactcagtaataacaaaacctagacccctgc

SEQ ID NO: 505228 - DNA, 33 bp, Homo sapien
gtaactcagtaataaccaaacctagacccctgc

SEQ ID NO: 505229 - DNA, 33 bp, Homo sapien
ctgccacaaagactccagaactgtaaagctacc

SEQ ID NO: 505230 - DNA, 33 bp, Homo sapien
ctgccacaaagactccggaactgtaaagctacc

SEQ ID NO: 505231 - DNA, 33 bp, Homo sapien
ttttctcagtcattccaatcactatttcaaact

SEQ ID NO: 505232 - DNA, 33 bp, Homo sapien
ttttctcagtcattccgatcactatttcaaact

SEQ ID NO: 505233 - DNA, 33 bp, Homo sapien
tttactgtccagaggcaacatggggtctgtgat

SEQ ID NO: 505234 - DNA, 33 bp, Homo sapien
tttactgtccagaggcgacatggggtctgtgat

SEQ ID NO: 505235 - DNA, 33 bp, Homo sapien
agtcaggctttcagcaaatatttagggagcaca

SEQ ID NO: 505236 - DNA, 33 bp, Homo sapien
agtcaggctttcagcagatatttagggagcaca

SEQ ID NO: 505237 - DNA, 33 bp, Homo sapien
gtaaaaggtgcagataccatctacaaaacccat

SEQ ID NO: 505238 - DNA, 33 bp, Homo sapien
gtaaaaggtgcagatatcatctacaaaacccat

SEQ ID NO: 505239 - DNA, 33 bp, Homo sapien
tgcacataaaatgccaacgttaagtaaaaagga

SEQ ID NO: 505240 - DNA, 33 bp, Homo sapien
tgcacataaaatgccagcgttaagtaaaaagga

SEQ ID NO: 505241 - DNA, 33 bp, Homo sapien
gttctccacctcaactaaggatttggctgcaaa

SEQ ID NO: 505242 - DNA, 33 bp, Homo sapien
gttctccacctcaacttaggatttggctgcaaa

SEQ ID NO: 505243 - DNA, 33 bp, Homo sapien
ccttaggtggagcctacatctctttaagtagaa

SEQ ID NO: 505244 - DNA, 33 bp, Homo sapien
ccttaggtggagcctatatctctttaagtagaa

SEQ ID NO: 505245 - DNA, 33 bp, Homo sapien
tgagaagccctgtttacgaggatccattattca

SEQ ID NO: 505246 - DNA, 33 bp, Homo sapien
tgagaagccctgtttaggaggatccattattca

SEQ ID NO: 505247 - DNA, 33 bp, Homo sapien
tctacaactgaaaaatcaggaagccaggtgatt

SEQ ID NO: 505248 - DNA, 33 bp, Homo sapien
tctacaactgaaaaatgaggaagccaggtgatt

SEQ ID NO: 505249 - DNA, 33 bp, Homo sapien
acatcacttgttatacagacagctgatccataa

SEQ ID NO: 505250 - DNA, 33 bp, Homo sapien
acatcacttgttatacggacagctgatccataa

SEQ ID NO: 505251 - DNA, 33 bp, Homo sapien
cctatagctacacccacagaaaagggctacctg

SEQ ID NO: 505252 - DNA, 33 bp, Homo sapien
cctatagctacacccatagaaaagggctacctg

SEQ ID NO: 505253 - DNA, 33 bp, Homo sapien
aagtttatcactccataagctgcagacattaga

SEQ ID NO: 505254 - DNA, 33 bp, Homo sapien
aagtttatcactccatcagctgcagacattaga

SEQ ID NO: 505255 - DNA, 33 bp, Homo sapien
aggggattgctttcaaatattccattatcactg

SEQ ID NO: 505256 - DNA, 33 bp, Homo sapien
aggggattgctttcaagtattccattatcactg

SEQ ID NO: 505257 - DNA, 33 bp, Homo sapien
ttctgatggacccaaagttctactaataaaatt

SEQ ID NO: 505258 - DNA, 33 bp, Homo sapien
ttctgatggacccaaatttctactaataaaatt

SEQ ID NO: 505259 - DNA, 33 bp, Homo sapien
gcacagatatctactcacagacctgtttttagt

SEQ ID NO: 505260 - DNA, 33 bp, Homo sapien
gcacagatatctactctcagacctgtttttagt

SEQ ID NO: 505261 - DNA, 33 bp, Homo sapien
ccaaccctaggcagtgcagcttatagcaataaa

SEQ ID NO: 505262 - DNA, 33 bp, Homo sapien
ccaaccctaggcagtgtagcttatagcaataaa

SEQ ID NO: 505263 - DNA, 33 bp, Homo sapien
acacacacaggaaccacaggcacaggaaaaacc

SEQ ID NO: 505264 - DNA, 33 bp, Homo sapien
acacacacaggaaccataggcacaggaaaaacc

SEQ ID NO: 505265 - DNA, 33 bp, Homo sapien
acccaagtctgtcgggaatcagggctggcacag

SEQ ID NO: 505266 - DNA, 33 bp, Homo sapien
acccaagtctgtcggggatcagggctggcacag

SEQ ID NO: 505267 - DNA, 33 bp, Homo sapien
taagagctacccacaaccctaaccaactgactg

SEQ ID NO: 505268 - DNA, 33 bp, Homo sapien
taagagctacccacaatcctaaccaactgactg

SEQ ID NO: 505269 - DNA, 33 bp, Homo sapien
atcaacctggaaattcccaaacaccctttgttt

SEQ ID NO: 505270 - DNA, 33 bp, Homo sapien
atcaacctggaaattctcaaacaccctttgttt

SEQ ID NO: 505271 - DNA, 33 bp, Homo sapien
ttctttgtcatagctacatggaattcactttta

SEQ ID NO: 505272 - DNA, 33 bp, Homo sapien
ttctttgtcatagctatatggaattcactttta

SEQ ID NO: 505273 - DNA, 33 bp, Homo sapien
tctgctccagagaacacagtagatcagtcccac

SEQ ID NO: 505274 - DNA, 33 bp, Homo sapien
tctgctccagagaacagagtagatcagtcccac

SEQ ID NO: 505275 - DNA, 33 bp, Homo sapien
cgtcttgttctctacacacagggtcttttcttg

SEQ ID NO: 505276 - DNA, 33 bp, Homo sapien
cgtcttgttctctacatacagggtcttttcttg

SEQ ID NO: 505277 - DNA, 33 bp, Homo sapien
cctatgtggccgtagagcccttggaagctcagc

SEQ ID NO: 505278 - DNA, 33 bp, Homo sapien
cctatgtggccgtagatcccttggaagctcagc

SEQ ID NO: 505279 - DNA, 33 bp, Homo sapien
actgatgctagtgccaaatcctttgaacgatca

SEQ ID NO: 505280 - DNA, 33 bp, Homo sapien
actgatgctagtgccagatcctttgaacgatca

SEQ ID NO: 505281 - DNA, 33 bp, Homo sapien
aacatataacataacacatgagaaaattgcagc

SEQ ID NO: 505282 - DNA, 33 bp, Homo sapien
aacatataacataacagatgagaaaattgcagc

SEQ ID NO: 505283 - DNA, 33 bp, Homo sapien
gaccaggtttcccagaatattgtcatgagcaaa

SEQ ID NO: 505284 - DNA, 33 bp, Homo sapien
gaccaggtttcccagagtattgtcatgagcaaa

SEQ ID NO: 505285 - DNA, 33 bp, Homo sapien
gtctataggttcaacacagtcccagtcaatctt

SEQ ID NO: 505286 - DNA, 33 bp, Homo sapien
gtctataggttcaacatagtcccagtcaatctt

SEQ ID NO: 505287 - DNA, 33 bp, Homo sapien
gagaaaagaaattgtacagattgcctccaaagg

SEQ ID NO: 505288 - DNA, 33 bp, Homo sapien
gagaaaagaaattgtatagattgcctccaaagg

SEQ ID NO: 505289 - DNA, 33 bp, Homo sapien
atttgtggaatgaagacatacactgtctatgga

SEQ ID NO: 505290 - DNA, 33 bp, Homo sapien
atttgtggaatgaagatatacactgtctatgga

SEQ ID NO: 505291 - DNA, 33 bp, Homo sapien
tcgtgggactcagagacgctttttcgtgtcttt

SEQ ID NO: 505292 - DNA, 33 bp, Homo sapien
tcgtgggactcagagaggctttttcgtgtcttt

SEQ ID NO: 505293 - DNA, 33 bp, Homo sapien
aaacttgattatggaaatgatggacttcatgga

SEQ ID NO: 505294 - DNA, 33 bp, Homo sapien
aaacttgattatggaagtgatggacttcatgga

SEQ ID NO: 505295 - DNA, 33 bp, Homo sapien
ccctactcttccaataccactgagaaatttgcc

SEQ ID NO: 505296 - DNA, 33 bp, Homo sapien
ccctactcttccaatagcactgagaaatttgcc

SEQ ID NO: 505297 - DNA, 33 bp, Homo sapien
aagcacctggttttacacgagctgggcctatta

SEQ ID NO: 505298 - DNA, 33 bp, Homo sapien
aagcacctggttttactcgagctgggcctatta

SEQ ID NO: 505299 - DNA, 33 bp, Homo sapien
aagcaggaaagcaggacgacagaggcagggcag

SEQ ID NO: 505300 - DNA, 33 bp, Homo sapien
aagcaggaaagcaggatgacagaggcagggcag

SEQ ID NO: 505301 - DNA, 33 bp, Homo sapien
aaagagacaatggagacgggtaagtttgccttt

SEQ ID NO: 505302 - DNA, 33 bp, Homo sapien
aaagagacaatggagatgggtaagtttgccttt

SEQ ID NO: 505303 - DNA, 33 bp, Homo sapien
tgatgtctaccactcacggattttcaaacatat

SEQ ID NO: 505304 - DNA, 33 bp, Homo sapien
tgatgtctaccactcatggattttcaaacatat

SEQ ID NO: 505305 - DNA, 33 bp, Homo sapien
ccgggggtgaaccgaccgcttctctcaaataca

SEQ ID NO: 505306 - DNA, 33 bp, Homo sapien
ccgggggtgaaccgactgcttctctcaaataca

SEQ ID NO: 505307 - DNA, 33 bp, Homo sapien
gaacaagactgactaccaacaagcacaaggaaa

SEQ ID NO: 505308 - DNA, 33 bp, Homo sapien
gaacaagactgactactaacaagcacaaggaaa

SEQ ID NO: 505309 - DNA, 33 bp, Homo sapien
tcttttccactttgataagtcaacaacaggatc

SEQ ID NO: 505310 - DNA, 33 bp, Homo sapien
tcttttccactttgatgagtcaacaacaggatc

SEQ ID NO: 505311 - DNA, 33 bp, Homo sapien
caggacagcacgtaaaagaacaaggcttgttcc

SEQ ID NO: 505312 - DNA, 33 bp, Homo sapien
caggacagcacgtaaaggaacaaggcttgttcc

SEQ ID NO: 505313 - DNA, 33 bp, Homo sapien
ctggcccagtgagtgcaacatcataaatagaaa

SEQ ID NO: 505314 - DNA, 33 bp, Homo sapien
ctggcccagtgagtgccacatcataaatagaaa

SEQ ID NO: 505315 - DNA, 33 bp, Homo sapien
tatgtaagtggcctaggagtcaaactcaaggat

SEQ ID NO: 505316 - DNA, 33 bp, Homo sapien
tatgtaagtggcctagtagtcaaactcaaggat

SEQ ID NO: 505317 - DNA, 33 bp, Homo sapien
ggatagtcccttttgcagaatcccagagggtca

SEQ ID NO: 505318 - DNA, 33 bp, Homo sapien
ggatagtcccttttgcggaatcccagagggtca

SEQ ID NO: 505319 - DNA, 33 bp, Homo sapien
agctgagtgtgggtaaaaagcaggctcaatgct

SEQ ID NO: 505320 - DNA, 33 bp, Homo sapien
agctgagtgtgggtaagaagcaggctcaatgct

SEQ ID NO: 505321 - DNA, 33 bp, Homo sapien
attataacaatggctacaggttctttttttcca

SEQ ID NO: 505322 - DNA, 33 bp, Homo sapien
attataacaatggctagaggttctttttttcca

SEQ ID NO: 505323 - DNA, 33 bp, Homo sapien
accaatttccatccctaagcagttaatgtagaa

SEQ ID NO: 505324 - DNA, 33 bp, Homo sapien
accaatttccatccctgagcagttaatgtagaa

SEQ ID NO: 505325 - DNA, 33 bp, Homo sapien
aaaattttgagagcaacagcagaactttaagtc

SEQ ID NO: 505326 - DNA, 33 bp, Homo sapien
aaaattttgagagcaatagcagaactttaagtc

SEQ ID NO: 505327 - DNA, 33 bp, Homo sapien
gccccaagtttctgtacaagtagacaaagccca

SEQ ID NO: 505328 - DNA, 33 bp, Homo sapien
gccccaagtttctgtagaagtagacaaagccca

SEQ ID NO: 505329 - DNA, 33 bp, Homo sapien
atcagtttacttaatcacagataacagagtctt

SEQ ID NO: 505330 - DNA, 33 bp, Homo sapien
atcagtttacttaatcgcagataacagagtctt

SEQ ID NO: 505331 - DNA, 33 bp, Homo sapien
tagaagggatgaaatacgttggtaggttctcta

SEQ ID NO: 505332 - DNA, 33 bp, Homo sapien
tagaagggatgaaatatgttggtaggttctcta

SEQ ID NO: 505333 - DNA, 33 bp, Homo sapien
tagatgcagttgatgacggccttctaactccag

SEQ ID NO: 505334 - DNA, 33 bp, Homo sapien
tagatgcagttgatgatggccttctaactccag

SEQ ID NO: 505335 - DNA, 33 bp, Homo sapien
tctccatctgtaaaacaaggacatctgactaac

SEQ ID NO: 505336 - DNA, 33 bp, Homo sapien
tctccatctgtaaaacgaggacatctgactaac

SEQ ID NO: 505337 - DNA, 33 bp, Homo sapien
ctattgtgaactgcaaacaggagggatctaggt

SEQ ID NO: 505338 - DNA, 33 bp, Homo sapien
ctattgtgaactgcaagcaggagggatctaggt

SEQ ID NO: 505339 - DNA, 33 bp, Homo sapien
ggatgattccagtgcactactttcattgtgtac

SEQ ID NO: 505340 - DNA, 33 bp, Homo sapien
ggatgattccagtgcattactttcattgtgtac

SEQ ID NO: 505341 - DNA, 33 bp, Homo sapien
caagttgttacagaaaaaaaatctaagcaccgg

SEQ ID NO: 505342 - DNA, 33 bp, Homo sapien
caagttgttacagaaagaaaatctaagcaccgg

SEQ ID NO: 505343 - DNA, 33 bp, Homo sapien
tctcagtgaaaaagaaagttaggtcatcagatg

SEQ ID NO: 505344 - DNA, 33 bp, Homo sapien
tctcagtgaaaaagaaggttaggtcatcagatg

SEQ ID NO: 505345 - DNA, 33 bp, Homo sapien
tgatcccttatttaaaattgcagccccacgccc

SEQ ID NO: 505346 - DNA, 33 bp, Homo sapien
tgatcccttatttaaagttgcagccccacgccc

SEQ ID NO: 505347 - DNA, 33 bp, Homo sapien
aacctggaagaattgaaccaagactttgctacc

SEQ ID NO: 505348 - DNA, 33 bp, Homo sapien
aacctggaagaattgagccaagactttgctacc

SEQ ID NO: 505349 - DNA, 33 bp, Homo sapien
tgtctcttttagacaccgagaggagagaaatgc

SEQ ID NO: 505350 - DNA, 33 bp, Homo sapien
tgtctcttttagacactgagaggagagaaatgc

SEQ ID NO: 505351 - DNA, 33 bp, Homo sapien
caaatctgcttctaagaccagccaaattgcaaa

SEQ ID NO: 505352 - DNA, 33 bp, Homo sapien
caaatctgcttctaagcccagccaaattgcaaa

SEQ ID NO: 505353 - DNA, 33 bp, Homo sapien
caggagctgtgtagaactgttcaatgctggtcc

SEQ ID NO: 505354 - DNA, 33 bp, Homo sapien
caggagctgtgtagaattgttcaatgctggtcc

SEQ ID NO: 505355 - DNA, 33 bp, Homo sapien
aggagttgcttggagacgcagctcacttaggac

SEQ ID NO: 505356 - DNA, 33 bp, Homo sapien
aggagttgcttggagatgcagctcacttaggac

SEQ ID NO: 505357 - DNA, 33 bp, Homo sapien
tcatgtggaaccatgacaccatcttcttaggcc

SEQ ID NO: 505358 - DNA, 33 bp, Homo sapien
tcatgtggaaccatgataccatcttcttaggcc

SEQ ID NO: 505359 - DNA, 33 bp, Homo sapien
caaaaaaatgtgaagccatgaaagaagataata

SEQ ID NO: 505360 - DNA, 33 bp, Homo sapien
caaaaaaatgtgaagcgatgaaagaagataata

SEQ ID NO: 505361 - DNA, 33 bp, Homo sapien
gggttatccactcttacagtctccaacttttaa

SEQ ID NO: 505362 - DNA, 33 bp, Homo sapien
gggttatccactcttagagtctccaacttttaa

SEQ ID NO: 505363 - DNA, 33 bp, Homo sapien
caaacgttgcagtgtacaaaagatcttatctct

SEQ ID NO: 505364 - DNA, 33 bp, Homo sapien
caaacgttgcagtgtataaaagatcttatctct

SEQ ID NO: 505365 - DNA, 33 bp, Homo sapien
tggctgcatcaaattcaataataagcgagaaaa

SEQ ID NO: 505366 - DNA, 33 bp, Homo sapien
tggctgcatcaaattcgataataagcgagaaaa

SEQ ID NO: 505367 - DNA, 33 bp, Homo sapien
tgtaaaattagaagacaaataaaacagagatca

SEQ ID NO: 505368 - DNA, 33 bp, Homo sapien
tgtaaaattagaagaccaataaaacagagatca

SEQ ID NO: 505369 - DNA, 33 bp, Homo sapien
tgggtttatactgaaagttgattccggtccaac

SEQ ID NO: 505370 - DNA, 33 bp, Homo sapien
tgggtttatactgaaatttgattccggtccaac

SEQ ID NO: 505371 - DNA, 33 bp, Homo sapien
gaactcaactaagtgacggcataaaacagtcta

SEQ ID NO: 505372 - DNA, 33 bp, Homo sapien
gaactcaactaagtgatggcataaaacagtcta

SEQ ID NO: 505373 - DNA, 33 bp, Homo sapien
cccccggcaaataccacatctgtggaaggctca

SEQ ID NO: 505374 - DNA, 33 bp, Homo sapien
cccccggcaaataccagatctgtggaaggctca

SEQ ID NO: 505375 - DNA, 33 bp, Homo sapien
tcacttgtgagctaccaaaatccatcagcagaa

SEQ ID NO: 505376 - DNA, 33 bp, Homo sapien
tcacttgtgagctacctaaatccatcagcagaa

SEQ ID NO: 505377 - DNA, 33 bp, Homo sapien
aaagctgagacatcctaagatcctggaaagtgc

SEQ ID NO: 505378 - DNA, 33 bp, Homo sapien
aaagctgagacatccttagatcctggaaagtgc

SEQ ID NO: 505379 - DNA, 33 bp, Homo sapien
taaacatagaaattgaccatcccagtctcaaag

SEQ ID NO: 505380 - DNA, 33 bp, Homo sapien
taaacatagaaattgatcatcccagtctcaaag

SEQ ID NO: 505381 - DNA, 33 bp, Homo sapien
aggacctaagccaacccggtcattgacaattct

SEQ ID NO: 505382 - DNA, 33 bp, Homo sapien
aggacctaagccaacctggtcattgacaattct

SEQ ID NO: 505383 - DNA, 33 bp, Homo sapien
ccaaacttcttcgtgacgactatacagtccaga

SEQ ID NO: 505384 - DNA, 33 bp, Homo sapien
ccaaacttcttcgtgatgactatacagtccaga

SEQ ID NO: 505385 - DNA, 33 bp, Homo sapien
ccacagatactagttcaaagaaacatcaattta

SEQ ID NO: 505386 - DNA, 33 bp, Homo sapien
ccacagatactagttccaagaaacatcaattta

SEQ ID NO: 505387 - DNA, 33 bp, Homo sapien
aggcacagtggtgtagaaaaagaaggccgtgaa

SEQ ID NO: 505388 - DNA, 33 bp, Homo sapien
aggcacagtggtgtagcaaaagaaggccgtgaa

SEQ ID NO: 505389 - DNA, 33 bp, Homo sapien
ctgctggagctaggacaccccatacagtcgaca

SEQ ID NO: 505390 - DNA, 33 bp, Homo sapien
ctgctggagctaggacgccccatacagtcgaca

SEQ ID NO: 505391 - DNA, 33 bp, Homo sapien
agggaggcttccccgacctccagtctgaagggg

SEQ ID NO: 505392 - DNA, 33 bp, Homo sapien
agggaggcttccccgatctccagtctgaagggg

SEQ ID NO: 505393 - DNA, 33 bp, Homo sapien
aggtgagagtttatcgcaagtgaaattagagac

SEQ ID NO: 505394 - DNA, 33 bp, Homo sapien
aggtgagagtttatcgtaagtgaaattagagac

SEQ ID NO: 505395 - DNA, 33 bp, Homo sapien
acaagactgcccaacaacaaaaagataatcatt

SEQ ID NO: 505396 - DNA, 33 bp, Homo sapien
acaagactgcccaacagcaaaaagataatcatt

SEQ ID NO: 505397 - DNA, 33 bp, Homo sapien
tttaaatataccaccacgttctacagtgtttct

SEQ ID NO: 505398 - DNA, 33 bp, Homo sapien
tttaaatataccaccatgttctacagtgtttct

SEQ ID NO: 505399 - DNA, 33 bp, Homo sapien
acagagattagtaacaaggttggtgccagtcct

SEQ ID NO: 505400 - DNA, 33 bp, Homo sapien
acagagattagtaacagggttggtgccagtcct

SEQ ID NO: 505401 - DNA, 33 bp, Homo sapien
aattttaaaacctatgacaaagttgaaagtatt

SEQ ID NO: 505402 - DNA, 33 bp, Homo sapien
aattttaaaacctatggcaaagttgaaagtatt

SEQ ID NO: 505403 - DNA, 33 bp, Homo sapien
cttgataaccttagtccataatcagtcctgttt

SEQ ID NO: 505404 - DNA, 33 bp, Homo sapien
cttgataaccttagtctataatcagtcctgttt

SEQ ID NO: 505405 - DNA, 33 bp, Homo sapien
acattttccaggggagaaagcaagttcagagtt

SEQ ID NO: 505406 - DNA, 33 bp, Homo sapien
acattttccaggggaggaagcaagttcagagtt

SEQ ID NO: 505407 - DNA, 33 bp, Homo sapien
accttagccttcatatgagttggatgtgaaaac

SEQ ID NO: 505408 - DNA, 33 bp, Homo sapien
accttagccttcatattagttggatgtgaaaac

SEQ ID NO: 505409 - DNA, 33 bp, Homo sapien
cgaattggtacattgcagagttccatgctgcta

SEQ ID NO: 505410 - DNA, 33 bp, Homo sapien
cgaattggtacattgcggagttccatgctgcta

SEQ ID NO: 505411 - DNA, 33 bp, Homo sapien
gagatgagctctttgaataggtagccaagttac

SEQ ID NO: 505412 - DNA, 33 bp, Homo sapien
gagatgagctctttgagtaggtagccaagttac

SEQ ID NO: 505413 - DNA, 33 bp, Homo sapien
ttccagcactttcttacgaaaatttgcaaacag

SEQ ID NO: 505414 - DNA, 33 bp, Homo sapien
ttccagcactttcttatgaaaatttgcaaacag

SEQ ID NO: 505415 - DNA, 33 bp, Homo sapien
ctttgttgagctaccacatattgaagttcagga

SEQ ID NO: 505416 - DNA, 33 bp, Homo sapien
ctttgttgagctaccatatattgaagttcagga

SEQ ID NO: 505417 - DNA, 33 bp, Homo sapien
gtgactgaattggataaggaagtgtgtgagaga

SEQ ID NO: 505418 - DNA, 33 bp, Homo sapien
gtgactgaattggatacggaagtgtgtgagaga

SEQ ID NO: 505419 - DNA, 33 bp, Homo sapien
tgcaaatagttgcccaatggacaccagtgcttg

SEQ ID NO: 505420 - DNA, 33 bp, Homo sapien
tgcaaatagttgcccagtggacaccagtgcttg

SEQ ID NO: 505421 - DNA, 33 bp, Homo sapien
ctcagacatgtgaaaccgtatgagagctctgag

SEQ ID NO: 505422 - DNA, 33 bp, Homo sapien
ctcagacatgtgaaactgtatgagagctctgag

SEQ ID NO: 505423 - DNA, 33 bp, Homo sapien
tccaatacagtgcgaaactggaaagaagagaat

SEQ ID NO: 505424 - DNA, 33 bp, Homo sapien
tccaatacagtgcgaagctggaaagaagagaat

SEQ ID NO: 505425 - DNA, 33 bp, Homo sapien
attcattgttttaatccaagtgtgatgagggcc

SEQ ID NO: 505426 - DNA, 33 bp, Homo sapien
attcattgttttaatctaagtgtgatgagggcc

SEQ ID NO: 505427 - DNA, 33 bp, Homo sapien
cagagaaaacatcataaaatgactgcaacaaag

SEQ ID NO: 505428 - DNA, 33 bp, Homo sapien
cagagaaaacatcatagaatgactgcaacaaag

SEQ ID NO: 505429 - DNA, 33 bp, Homo sapien
aagtggggggtgaacacattacagactttgaga

SEQ ID NO: 505430 - DNA, 33 bp, Homo sapien
aagtggggggtgaacagattacagactttgaga

SEQ ID NO: 505431 - DNA, 33 bp, Homo sapien
ctgaactcatttttagaaatattgtgcaagaaa

SEQ ID NO: 505432 - DNA, 33 bp, Homo sapien
ctgaactcatttttaggaatattgtgcaagaaa

SEQ ID NO: 505433 - DNA, 33 bp, Homo sapien
gactcagctgtctttaagctttcctcgaataac

SEQ ID NO: 505434 - DNA, 33 bp, Homo sapien
gactcagctgtctttaggctttcctcgaataac

SEQ ID NO: 505435 - DNA, 33 bp, Homo sapien
atctagattctccctaacttatttctccagcca

SEQ ID NO: 505436 - DNA, 33 bp, Homo sapien
atctagattctccctaccttatttctccagcca

SEQ ID NO: 505437 - DNA, 33 bp, Homo sapien
ttgaaatacaaaagaacgtctgttggtcctgag

SEQ ID NO: 505438 - DNA, 33 bp, Homo sapien
ttgaaatacaaaagaatgtctgttggtcctgag

SEQ ID NO: 505439 - DNA, 33 bp, Homo sapien
cccatttggctaataccagaagtagtcatcaag

SEQ ID NO: 505440 - DNA, 33 bp, Homo sapien
cccatttggctaatactagaagtagtcatcaag

SEQ ID NO: 505441 - DNA, 33 bp, Homo sapien
agctccatatctgctgaatagactaaccaaaca

SEQ ID NO: 505442 - DNA, 33 bp, Homo sapien
agctccatatctgctgtatagactaaccaaaca

SEQ ID NO: 505443 - DNA, 33 bp, Homo sapien
taaaaatatgtcattacgtgggcaaaatagaag

SEQ ID NO: 505444 - DNA, 33 bp, Homo sapien
taaaaatatgtcattatgtgggcaaaatagaag

SEQ ID NO: 505445 - DNA, 33 bp, Homo sapien
ttatggtaaatgctaccagacctgggattctcc

SEQ ID NO: 505446 - DNA, 33 bp, Homo sapien
ttatggtaaatgctacgagacctgggattctcc

SEQ ID NO: 505447 - DNA, 33 bp, Homo sapien
tagggcatcagtgaccaatcccacagagacaga

SEQ ID NO: 505448 - DNA, 33 bp, Homo sapien
tagggcatcagtgacctatcccacagagacaga

SEQ ID NO: 505449 - DNA, 33 bp, Homo sapien
agagggtttagaaatacaagtaatggcatggga

SEQ ID NO: 505450 - DNA, 33 bp, Homo sapien
agagggtttagaaatataagtaatggcatggga

SEQ ID NO: 505451 - DNA, 33 bp, Homo sapien
taatgctttgtgcttaagtaaaatgaggaaaag

SEQ ID NO: 505452 - DNA, 33 bp, Homo sapien
taatgctttgtgcttacgtaaaatgaggaaaag

SEQ ID NO: 505453 - DNA, 33 bp, Homo sapien
aaataaacaagtaccacggtcataattaaccag

SEQ ID NO: 505454 - DNA, 33 bp, Homo sapien
aaataaacaagtaccatggtcataattaaccag

SEQ ID NO: 505455 - DNA, 33 bp, Homo sapien
gaattaatgatgcgtacggtggttttattccca

SEQ ID NO: 505456 - DNA, 33 bp, Homo sapien
gaattaatgatgcgtatggtggttttattccca

SEQ ID NO: 505457 - DNA, 33 bp, Homo sapien
caagccactctatgaaaattagacttcacttaa

SEQ ID NO: 505458 - DNA, 33 bp, Homo sapien
caagccactctatgaatattagacttcacttaa

SEQ ID NO: 505459 - DNA, 33 bp, Homo sapien
ttgtttttcaataacacattcacagtggaagtg

SEQ ID NO: 505460 - DNA, 33 bp, Homo sapien
ttgtttttcaataacatattcacagtggaagtg

SEQ ID NO: 505461 - DNA, 33 bp, Homo sapien
atttcctatctaattcaatgctggaaagaccaa

SEQ ID NO: 505462 - DNA, 33 bp, Homo sapien
atttcctatctaattcgatgctggaaagaccaa

SEQ ID NO: 505463 - DNA, 33 bp, Homo sapien
cttgttatagagatgacgcctcataggtagtgt

SEQ ID NO: 505464 - DNA, 33 bp, Homo sapien
cttgttatagagatgatgcctcataggtagtgt

SEQ ID NO: 505465 - DNA, 33 bp, Homo sapien
tctttgaatgtacctacgacttataaacccgca

SEQ ID NO: 505466 - DNA, 33 bp, Homo sapien
tctttgaatgtacctatgacttataaacccgca

SEQ ID NO: 505467 - DNA, 33 bp, Homo sapien
atgcacacctttcatgcattgattaatgatttt

SEQ ID NO: 505468 - DNA, 33 bp, Homo sapien
atgcacacctttcatgtattgattaatgatttt

SEQ ID NO: 505469 - DNA, 33 bp, Homo sapien
ttggactacttttttccatttccattctttctc

SEQ ID NO: 505470 - DNA, 33 bp, Homo sapien
ttggactacttttttctatttccattctttctc

SEQ ID NO: 505471 - DNA, 33 bp, Homo sapien
ttacgagttgtcagataaaactatgaaatgtaa

SEQ ID NO: 505472 - DNA, 33 bp, Homo sapien
ttacgagttgtcagatgaaactatgaaatgtaa

SEQ ID NO: 505473 - DNA, 33 bp, Homo sapien
tgacactcaagaacaacgcctcgctgctgacaa

SEQ ID NO: 505474 - DNA, 33 bp, Homo sapien
tgacactcaagaacaatgcctcgctgctgacaa

SEQ ID NO: 505475 - DNA, 33 bp, Homo sapien
agaccaggctggctgccaatgctgcgacagtac

SEQ ID NO: 505476 - DNA, 33 bp, Homo sapien
agaccaggctggctgctaatgctgcgacagtac

SEQ ID NO: 505477 - DNA, 33 bp, Homo sapien
aggtagtaagcaatagcaaaattcgttacacct

SEQ ID NO: 505478 - DNA, 33 bp, Homo sapien
aggtagtaagcaatagtaaaattcgttacacct

SEQ ID NO: 505479 - DNA, 33 bp, Homo sapien
ggccctgcatttataagtcttcatggacaactg

SEQ ID NO: 505480 - DNA, 33 bp, Homo sapien
ggccctgcatttataattcttcatggacaactg

SEQ ID NO: 505481 - DNA, 33 bp, Homo sapien
ttcataaatctatgtcaaatggatggatctaag

SEQ ID NO: 505482 - DNA, 33 bp, Homo sapien
ttcataaatctatgtcgaatggatggatctaag

SEQ ID NO: 505483 - DNA, 33 bp, Homo sapien
aatcacagaaggccataagaggatttcctaaac

SEQ ID NO: 505484 - DNA, 33 bp, Homo sapien
aatcacagaaggccatgagaggatttcctaaac

SEQ ID NO: 505485 - DNA, 33 bp, Homo sapien
gtgagattccacaaaactgataattgtaagttg

SEQ ID NO: 505486 - DNA, 33 bp, Homo sapien
gtgagattccacaaaattgataattgtaagttg

SEQ ID NO: 505487 - DNA, 33 bp, Homo sapien
ttggtcttggggttacaaacacgtagcaagtag

SEQ ID NO: 505488 - DNA, 33 bp, Homo sapien
ttggtcttggggttaccaacacgtagcaagtag

SEQ ID NO: 505489 - DNA, 33 bp, Homo sapien
acgcaaaggagacaccaacggcttgaagggcaa

SEQ ID NO: 505490 - DNA, 33 bp, Homo sapien
acgcaaaggagacaccgacggcttgaagggcaa

SEQ ID NO: 505491 - DNA, 33 bp, Homo sapien
tttagccactctggtacagacaagctccctggg

SEQ ID NO: 505492 - DNA, 33 bp, Homo sapien
tttagccactctggtatagacaagctccctggg

SEQ ID NO: 505493 - DNA, 33 bp, Homo sapien
gaatcaacctaccttaaggaaacaggaatctgt

SEQ ID NO: 505494 - DNA, 33 bp, Homo sapien
gaatcaacctaccttagggaaacaggaatctgt

SEQ ID NO: 505495 - DNA, 33 bp, Homo sapien
atccaaatataagcaacacttcacaaagccata

SEQ ID NO: 505496 - DNA, 33 bp, Homo sapien
atccaaatataagcaatacttcacaaagccata

SEQ ID NO: 505497 - DNA, 33 bp, Homo sapien
tagacaatagtaaacaaatagggatggctgtgt

SEQ ID NO: 505498 - DNA, 33 bp, Homo sapien
tagacaatagtaaacacatagggatggctgtgt

SEQ ID NO: 505499 - DNA, 33 bp, Homo sapien
gaacaacaatgacaaaacagttattgccctaag

SEQ ID NO: 505500 - DNA, 33 bp, Homo sapien
gaacaacaatgacaaagcagttattgccctaag

SEQ ID NO: 505501 - DNA, 33 bp, Homo sapien
gactcctctgtaagaacgcaagaaagctgcagg

SEQ ID NO: 505502 - DNA, 33 bp, Homo sapien
gactcctctgtaagaatgcaagaaagctgcagg

SEQ ID NO: 505503 - DNA, 33 bp, Homo sapien
cgacccttctcttcaccgaccttgagcccacag

SEQ ID NO: 505504 - DNA, 33 bp, Homo sapien
cgacccttctcttcacggaccttgagcccacag

SEQ ID NO: 505505 - DNA, 33 bp, Homo sapien
tttctctcacggccagaaggaggtttgttgcag

SEQ ID NO: 505506 - DNA, 33 bp, Homo sapien
tttctctcacggccagcaggaggtttgttgcag

SEQ ID NO: 505507 - DNA, 33 bp, Homo sapien
gtaattttggcttcaaaggtaaaagttaattgg

SEQ ID NO: 505508 - DNA, 33 bp, Homo sapien
gtaattttggcttcaagggtaaaagttaattgg

SEQ ID NO: 505509 - DNA, 33 bp, Homo sapien
agaacctgtggccatccgaatctcagcaactaa

SEQ ID NO: 505510 - DNA, 33 bp, Homo sapien
agaacctgtggccatctgaatctcagcaactaa

SEQ ID NO: 505511 - DNA, 33 bp, Homo sapien
attattagttattatgaaacatttgtcacaatt

SEQ ID NO: 505512 - DNA, 33 bp, Homo sapien
attattagttattatggaacatttgtcacaatt

SEQ ID NO: 505513 - DNA, 33 bp, Homo sapien
gctctcagcaggaacaaaccaggtatcagcata

SEQ ID NO: 505514 - DNA, 33 bp, Homo sapien
gctctcagcaggaacacaccaggtatcagcata

SEQ ID NO: 505515 - DNA, 33 bp, Homo sapien
agctcacctataattacgctcagggaaatggca

SEQ ID NO: 505516 - DNA, 33 bp, Homo sapien
agctcacctataattatgctcagggaaatggca

SEQ ID NO: 505517 - DNA, 33 bp, Homo sapien
ctactggcatctagcacggagggtccagggatg

SEQ ID NO: 505518 - DNA, 33 bp, Homo sapien
ctactggcatctagcatggagggtccagggatg

SEQ ID NO: 505519 - DNA, 33 bp, Homo sapien
cagtagggttgtttacacgagtatcaccacaat

SEQ ID NO: 505520 - DNA, 33 bp, Homo sapien
cagtagggttgtttacgcgagtatcaccacaat

SEQ ID NO: 505521 - DNA, 33 bp, Homo sapien
agaaaacagctattgacgggcctcctcagattc

SEQ ID NO: 505522 - DNA, 33 bp, Homo sapien
agaaaacagctattgatgggcctcctcagattc

SEQ ID NO: 505523 - DNA, 33 bp, Homo sapien
tggcatttttcctctacattgaatgactcccaa

SEQ ID NO: 505524 - DNA, 33 bp, Homo sapien
tggcatttttcctctatattgaatgactcccaa

SEQ ID NO: 505525 - DNA, 33 bp, Homo sapien
tctaactttggacaaagtgctgaattcctctgc

SEQ ID NO: 505526 - DNA, 33 bp, Homo sapien
tctaactttggacaaattgctgaattcctctgc

SEQ ID NO: 505527 - DNA, 33 bp, Homo sapien
gaggacttgactctacaatggagttcaacactt

SEQ ID NO: 505528 - DNA, 33 bp, Homo sapien
gaggacttgactctaccatggagttcaacactt

SEQ ID NO: 505529 - DNA, 33 bp, Homo sapien
gagaaacaaatttgaccaacaatgcctttggga

SEQ ID NO: 505530 - DNA, 33 bp, Homo sapien
gagaaacaaatttgacgaacaatgcctttggga

SEQ ID NO: 505531 - DNA, 33 bp, Homo sapien
tagagctgaggtctcaactgatgtttagggttt

SEQ ID NO: 505532 - DNA, 33 bp, Homo sapien
tagagctgaggtctcatctgatgtttagggttt

SEQ ID NO: 505533 - DNA, 33 bp, Homo sapien
gattaggtttagttaacgatcctcatggataaa

SEQ ID NO: 505534 - DNA, 33 bp, Homo sapien
gattaggtttagttaatgatcctcatggataaa

SEQ ID NO: 505535 - DNA, 33 bp, Homo sapien
tttatgacccacatcaacgttgcttatagcatt

SEQ ID NO: 505536 - DNA, 33 bp, Homo sapien
tttatgacccacatcaccgttgcttatagcatt

SEQ ID NO: 505537 - DNA, 33 bp, Homo sapien
cgagtctaaaggaaaagctaccaaattcacaaa

SEQ ID NO: 505538 - DNA, 33 bp, Homo sapien
cgagtctaaaggaaaatctaccaaattcacaaa

SEQ ID NO: 505539 - DNA, 33 bp, Homo sapien
acaattgaatccagacagtattttactatatca

SEQ ID NO: 505540 - DNA, 33 bp, Homo sapien
acaattgaatccagactgtattttactatatca

SEQ ID NO: 505541 - DNA, 33 bp, Homo sapien
ctcaaaatagaactacacgttgaggcaggtttt

SEQ ID NO: 505542 - DNA, 33 bp, Homo sapien
ctcaaaatagaactactcgttgaggcaggtttt

SEQ ID NO: 505543 - DNA, 33 bp, Homo sapien
gcctgtggaaagaatggaaatttcagctattct

SEQ ID NO: 505544 - DNA, 33 bp, Homo sapien
gcctgtggaaagaatgtaaatttcagctattct

SEQ ID NO: 505545 - DNA, 33 bp, Homo sapien
agatgaacctgaatcaaaggaatgatcaaaact

SEQ ID NO: 505546 - DNA, 33 bp, Homo sapien
agatgaacctgaatcagaggaatgatcaaaact

SEQ ID NO: 505547 - DNA, 33 bp, Homo sapien
ggttctgttgggtcacaagagaccttccttgca

SEQ ID NO: 505548 - DNA, 33 bp, Homo sapien
ggttctgttgggtcacgagagaccttccttgca

SEQ ID NO: 505549 - DNA, 33 bp, Homo sapien
ttttattgatgaaaaacctcaggcctggcaaca

SEQ ID NO: 505550 - DNA, 33 bp, Homo sapien
ttttattgatgaaaaatctcaggcctggcaaca

SEQ ID NO: 505551 - DNA, 33 bp, Homo sapien
tattatctcattcctacgctccagaaacacagg

SEQ ID NO: 505552 - DNA, 33 bp, Homo sapien
tattatctcattcctatgctccagaaacacagg

SEQ ID NO: 505553 - DNA, 33 bp, Homo sapien
ttctgtacctctaaaaaagtgattctgtctcct

SEQ ID NO: 505554 - DNA, 33 bp, Homo sapien
ttctgtacctctaaaagagtgattctgtctcct

SEQ ID NO: 505555 - DNA, 33 bp, Homo sapien
tgattatcttaactgacgccaaaaaaacaatta

SEQ ID NO: 505556 - DNA, 33 bp, Homo sapien
tgattatcttaactgatgccaaaaaaacaatta

SEQ ID NO: 505557 - DNA, 33 bp, Homo sapien
cgaagaaccaatatcagtacaatggctatactg

SEQ ID NO: 505558 - DNA, 33 bp, Homo sapien
cgaagaaccaatatcattacaatggctatactg

SEQ ID NO: 505559 - DNA, 33 bp, Homo sapien
tttatttagaccttcaccatacccttctttaac

SEQ ID NO: 505560 - DNA, 33 bp, Homo sapien
tttatttagaccttcatcatacccttctttaac

SEQ ID NO: 505561 - DNA, 33 bp, Homo sapien
gtagatataaaacataaccaatgaacgtcaatc

SEQ ID NO: 505562 - DNA, 33 bp, Homo sapien
gtagatataaaacatatccaatgaacgtcaatc

SEQ ID NO: 505563 - DNA, 33 bp, Homo sapien
gacatcagtccggctacacttaacctccaagtc

SEQ ID NO: 505564 - DNA, 33 bp, Homo sapien
gacatcagtccggctatacttaacctccaagtc

SEQ ID NO: 505565 - DNA, 33 bp, Homo sapien
tttccatattcaaggcccctcaccatttggcta

SEQ ID NO: 505566 - DNA, 33 bp, Homo sapien
tttccatattcaaggctcctcaccatttggcta

SEQ ID NO: 505567 - DNA, 33 bp, Homo sapien
agtatgtcctttttgggaatatgtgaggtcagc

SEQ ID NO: 505568 - DNA, 33 bp, Homo sapien
agtatgtcctttttggtaatatgtgaggtcagc

SEQ ID NO: 505569 - DNA, 33 bp, Homo sapien
gccataggaagtctaactgttataatgtggcag

SEQ ID NO: 505570 - DNA, 33 bp, Homo sapien
gccataggaagtctaattgttataatgtggcag

SEQ ID NO: 505571 - DNA, 33 bp, Homo sapien
tatggagaagtgtactaaagaataaggcatatt

SEQ ID NO: 505572 - DNA, 33 bp, Homo sapien
tatggagaagtgtactgaagaataaggcatatt

SEQ ID NO: 505573 - DNA, 33 bp, Homo sapien
tcttggtaaatctaaccggggtggctttttgac

SEQ ID NO: 505574 - DNA, 33 bp, Homo sapien
tcttggtaaatctaactggggtggctttttgac

SEQ ID NO: 505575 - DNA, 33 bp, Homo sapien
attttgccgtgaagtcccctaattaaacttaac

SEQ ID NO: 505576 - DNA, 33 bp, Homo sapien
attttgccgtgaagtctcctaattaaacttaac

SEQ ID NO: 505577 - DNA, 33 bp, Homo sapien
tcttttacagttgttaggaggcatataaagtac

SEQ ID NO: 505578 - DNA, 33 bp, Homo sapien
tcttttacagttgttatgaggcatataaagtac

SEQ ID NO: 505579 - DNA, 33 bp, Homo sapien
ttcatagtgaagcctacgttgactctctcattt

SEQ ID NO: 505580 - DNA, 33 bp, Homo sapien
ttcatagtgaagcctatgttgactctctcattt

SEQ ID NO: 505581 - DNA, 33 bp, Homo sapien
gtgttacgtagcgaaagaaactttgtggaagta

SEQ ID NO: 505582 - DNA, 33 bp, Homo sapien
gtgttacgtagcgaaataaactttgtggaagta

SEQ ID NO: 505583 - DNA, 33 bp, Homo sapien
ttgcttacaatagttcccagataggaatgcatg

SEQ ID NO: 505584 - DNA, 33 bp, Homo sapien
ttgcttacaatagttctcagataggaatgcatg

SEQ ID NO: 505585 - DNA, 33 bp, Homo sapien
cctcttgataggaatgaacggttcttctcattg

SEQ ID NO: 505586 - DNA, 33 bp, Homo sapien
cctcttgataggaatgtacggttcttctcattg

SEQ ID NO: 505587 - DNA, 33 bp, Homo sapien
acaagccagtaggatcaatatgctgtgctattg

SEQ ID NO: 505588 - DNA, 33 bp, Homo sapien
acaagccagtaggatcgatatgctgtgctattg

SEQ ID NO: 505589 - DNA, 33 bp, Homo sapien
atagagttttcagcaacgattagtgaatgattc

SEQ ID NO: 505590 - DNA, 33 bp, Homo sapien
atagagttttcagcaatgattagtgaatgattc

SEQ ID NO: 505591 - DNA, 33 bp, Homo sapien
ctaggacaaaacacctaagaatgggtaatttat

SEQ ID NO: 505592 - DNA, 33 bp, Homo sapien
ctaggacaaaacacctgagaatgggtaatttat

SEQ ID NO: 505593 - DNA, 33 bp, Homo sapien
ccacaaacaataaaaaagatgctcagagtaatt

SEQ ID NO: 505594 - DNA, 33 bp, Homo sapien
ccacaaacaataaaaaggatgctcagagtaatt

SEQ ID NO: 505595 - DNA, 33 bp, Homo sapien
gagactaaacattagacagctttagtttaagct

SEQ ID NO: 505596 - DNA, 33 bp, Homo sapien
gagactaaacattagagagctttagtttaagct

SEQ ID NO: 505597 - DNA, 33 bp, Homo sapien
atcgacttaaattgtcacacttcactaacacga

SEQ ID NO: 505598 - DNA, 33 bp, Homo sapien
atcgacttaaattgtcgcacttcactaacacga

SEQ ID NO: 505599 - DNA, 33 bp, Homo sapien
cagttagaaaacaaccaaaggcttcgactggag

SEQ ID NO: 505600 - DNA, 33 bp, Homo sapien
cagttagaaaacaaccgaaggcttcgactggag

SEQ ID NO: 505601 - DNA, 33 bp, Homo sapien
actgtgtgtaatccaactgtagggatgtagtct

SEQ ID NO: 505602 - DNA, 33 bp, Homo sapien
actgtgtgtaatccaagtgtagggatgtagtct

SEQ ID NO: 505603 - DNA, 33 bp, Homo sapien
agctgccaggttttgaaggagtgaagcagatat

SEQ ID NO: 505604 - DNA, 33 bp, Homo sapien
agctgccaggttttgagggagtgaagcagatat

SEQ ID NO: 505605 - DNA, 33 bp, Homo sapien
ttattttgaatcagtaacttgatagatagccaa

SEQ ID NO: 505606 - DNA, 33 bp, Homo sapien
ttattttgaatcagtagcttgatagatagccaa

SEQ ID NO: 505607 - DNA, 33 bp, Homo sapien
gagggttgcctagcagaagttgtggccacaagg

SEQ ID NO: 505608 - DNA, 33 bp, Homo sapien
gagggttgcctagcaggagttgtggccacaagg

SEQ ID NO: 505609 - DNA, 33 bp, Homo sapien
agctggcaagctagagaaaagcattaaaaaagc

SEQ ID NO: 505610 - DNA, 33 bp, Homo sapien
agctggcaagctagaggaaagcattaaaaaagc

SEQ ID NO: 505611 - DNA, 33 bp, Homo sapien
tgtcacataagaagaaacttaacagtgtgaaaa

SEQ ID NO: 505612 - DNA, 33 bp, Homo sapien
tgtcacataagaagaaccttaacagtgtgaaaa

SEQ ID NO: 505613 - DNA, 33 bp, Homo sapien
ttgtataagttgcagaagctctggatgatattc

SEQ ID NO: 505614 - DNA, 33 bp, Homo sapien
ttgtataagttgcagaggctctggatgatattc

SEQ ID NO: 505615 - DNA, 33 bp, Homo sapien
tatctatctgccttccaaggacacaaaggagcc

SEQ ID NO: 505616 - DNA, 33 bp, Homo sapien
tatctatctgccttccgaggacacaaaggagcc

SEQ ID NO: 505617 - DNA, 33 bp, Homo sapien
ctccactgagtactctgacttttgatcttcaca

SEQ ID NO: 505618 - DNA, 33 bp, Homo sapien
ctccactgagtactcttacttttgatcttcaca

SEQ ID NO: 505619 - DNA, 33 bp, Homo sapien
accttttctccacccaccacatagtagtaatac

SEQ ID NO: 505620 - DNA, 33 bp, Homo sapien
accttttctccacccatcacatagtagtaatac

SEQ ID NO: 505621 - DNA, 33 bp, Homo sapien
tgagtgggttgtgaccaagtatcatgctgtggc

SEQ ID NO: 505622 - DNA, 33 bp, Homo sapien
tgagtgggttgtgaccgagtatcatgctgtggc

SEQ ID NO: 505623 - DNA, 33 bp, Homo sapien
tcctattttgctacctcagaccttcatgtgata

SEQ ID NO: 505624 - DNA, 33 bp, Homo sapien
tcctattttgctaccttagaccttcatgtgata

SEQ ID NO: 505625 - DNA, 33 bp, Homo sapien
tcctagcacaagtctacgcatttaaccttatag

SEQ ID NO: 505626 - DNA, 33 bp, Homo sapien
tcctagcacaagtctatgcatttaaccttatag

SEQ ID NO: 505627 - DNA, 33 bp, Homo sapien
gatgtgtagcaaaacagagatcccaatccaaga

SEQ ID NO: 505628 - DNA, 33 bp, Homo sapien
gatgtgtagcaaaacatagatcccaatccaaga

SEQ ID NO: 505629 - DNA, 33 bp, Homo sapien
caaagacggagccttacagcaaatctttataca

SEQ ID NO: 505630 - DNA, 33 bp, Homo sapien
caaagacggagccttatagcaaatctttataca

SEQ ID NO: 505631 - DNA, 33 bp, Homo sapien
tgacacccgttatcaacgaatctggagctttgc

SEQ ID NO: 505632 - DNA, 33 bp, Homo sapien
tgacacccgttatcaatgaatctggagctttgc

SEQ ID NO: 505633 - DNA, 33 bp, Homo sapien
agtattctcctgatccaccaaccaaacaagatt

SEQ ID NO: 505634 - DNA, 33 bp, Homo sapien
agtattctcctgatccgccaaccaaacaagatt

SEQ ID NO: 505635 - DNA, 33 bp, Homo sapien
cttttcactagaatcacgttccatactgaaaaa

SEQ ID NO: 505636 - DNA, 33 bp, Homo sapien
cttttcactagaatcatgttccatactgaaaaa

SEQ ID NO: 505637 - DNA, 33 bp, Homo sapien
agaggaatagatgaacagagaaggtgaaagcct

SEQ ID NO: 505638 - DNA, 33 bp, Homo sapien
agaggaatagatgaacggagaaggtgaaagcct

SEQ ID NO: 505639 - DNA, 33 bp, Homo sapien
tcagatggtttatgtaagcagagagaaggaaat

SEQ ID NO: 505640 - DNA, 33 bp, Homo sapien
tcagatggtttatgtaggcagagagaaggaaat

SEQ ID NO: 505641 - DNA, 33 bp, Homo sapien
gccataccacagttaccgctactgtgaatgtct

SEQ ID NO: 505642 - DNA, 33 bp, Homo sapien
gccataccacagttactgctactgtgaatgtct

SEQ ID NO: 505643 - DNA, 33 bp, Homo sapien
ctgagccaaatgatgaagtttgtcaccgacaca

SEQ ID NO: 505644 - DNA, 33 bp, Homo sapien
ctgagccaaatgatgacgtttgtcaccgacaca

SEQ ID NO: 505645 - DNA, 33 bp, Homo sapien
atggctctcaggaggacaataacaagggcttgg

SEQ ID NO: 505646 - DNA, 33 bp, Homo sapien
atggctctcaggaggataataacaagggcttgg

SEQ ID NO: 505647 - DNA, 33 bp, Homo sapien
gataaaagtccatgaactgtatttattatgata

SEQ ID NO: 505648 - DNA, 33 bp, Homo sapien
gataaaagtccatgaattgtatttattatgata

SEQ ID NO: 505649 - DNA, 33 bp, Homo sapien
aagatgccagaaaaaaaggataagattgaagtc

SEQ ID NO: 505650 - DNA, 33 bp, Homo sapien
aagatgccagaaaaaagggataagattgaagtc

SEQ ID NO: 505651 - DNA, 33 bp, Homo sapien
tgttgaacccattggcaatatgcacatagtggg

SEQ ID NO: 505652 - DNA, 33 bp, Homo sapien
tgttgaacccattggctatatgcacatagtggg

SEQ ID NO: 505653 - DNA, 33 bp, Homo sapien
acatactagaacacagaaccacagcagaagctt

SEQ ID NO: 505654 - DNA, 33 bp, Homo sapien
acatactagaacacaggaccacagcagaagctt

SEQ ID NO: 505655 - DNA, 33 bp, Homo sapien
aataggtgtatagtagcatctcaatgttgctta

SEQ ID NO: 505656 - DNA, 33 bp, Homo sapien
aataggtgtatagtagtatctcaatgttgctta

SEQ ID NO: 505657 - DNA, 33 bp, Homo sapien
gttcaaaatgtaaattcaattgtgccactgtct

SEQ ID NO: 505658 - DNA, 33 bp, Homo sapien
gttcaaaatgtaaattgaattgtgccactgtct

SEQ ID NO: 505659 - DNA, 33 bp, Homo sapien
attattttcaagcttcacaattgttaacccatt

SEQ ID NO: 505660 - DNA, 33 bp, Homo sapien
attattttcaagcttctcaattgttaacccatt

SEQ ID NO: 505661 - DNA, 33 bp, Homo sapien
cccactcgcttcgctcggaaatagcctgcacag

SEQ ID NO: 505662 - DNA, 33 bp, Homo sapien
cccactcgcttcgctctgaaatagcctgcacag

SEQ ID NO: 505663 - DNA, 33 bp, Homo sapien
taaggatgtggctggaactctcaggcactgcgg

SEQ ID NO: 505664 - DNA, 33 bp, Homo sapien
taaggatgtggctggatctctcaggcactgcgg

SEQ ID NO: 505665 - DNA, 33 bp, Homo sapien
ctttttcgaacaaaaaaaactgagcctgattaa

SEQ ID NO: 505666 - DNA, 33 bp, Homo sapien
ctttttcgaacaaaaataactgagcctgattaa

SEQ ID NO: 505667 - DNA, 33 bp, Homo sapien
ataagtgcaattgttaagaagatatgtttgaag

SEQ ID NO: 505668 - DNA, 33 bp, Homo sapien
ataagtgcaattgttaggaagatatgtttgaag

SEQ ID NO: 505669 - DNA, 33 bp, Homo sapien
cccagtgcctttttaagccaagcattcacagtc

SEQ ID NO: 505670 - DNA, 33 bp, Homo sapien
cccagtgcctttttaatccaagcattcacagtc

SEQ ID NO: 505671 - DNA, 33 bp, Homo sapien
tagatttttaacagtacgtgctcatgtgaactc

SEQ ID NO: 505672 - DNA, 33 bp, Homo sapien
tagatttttaacagtatgtgctcatgtgaactc

SEQ ID NO: 505673 - DNA, 33 bp, Homo sapien
tctgttgagccacaaacgaaatcaattgtttat

SEQ ID NO: 505674 - DNA, 33 bp, Homo sapien
tctgttgagccacaaatgaaatcaattgtttat

SEQ ID NO: 505675 - DNA, 33 bp, Homo sapien
ttttcagtatgggaaagaagaagcttggaagtc

SEQ ID NO: 505676 - DNA, 33 bp, Homo sapien
ttttcagtatgggaaataagaagcttggaagtc

SEQ ID NO: 505677 - DNA, 33 bp, Homo sapien
actttttctctggactcagaagatatctactgt

SEQ ID NO: 505678 - DNA, 33 bp, Homo sapien
actttttctctggacttagaagatatctactgt

SEQ ID NO: 505679 - DNA, 33 bp, Homo sapien
acaaacgcagacatcacataagttactctcccc

SEQ ID NO: 505680 - DNA, 33 bp, Homo sapien
acaaacgcagacatcagataagttactctcccc

SEQ ID NO: 505681 - DNA, 33 bp, Homo sapien
tatattgaaaagataccagcactactgtcttta

SEQ ID NO: 505682 - DNA, 33 bp, Homo sapien
tatattgaaaagatactagcactactgtcttta

SEQ ID NO: 505683 - DNA, 33 bp, Homo sapien
ttggttttaaagaagcacttgctctagctgaac

SEQ ID NO: 505684 - DNA, 33 bp, Homo sapien
ttggttttaaagaagcgcttgctctagctgaac

SEQ ID NO: 505685 - DNA, 33 bp, Homo sapien
gtgggtctggcacaacaaaatgcacacagccac

SEQ ID NO: 505686 - DNA, 33 bp, Homo sapien
gtgggtctggcacaaccaaatgcacacagccac

SEQ ID NO: 505687 - DNA, 33 bp, Homo sapien
attttcccactccttgaaaattcttctccattc

SEQ ID NO: 505688 - DNA, 33 bp, Homo sapien
attttcccactccttgcaaattcttctccattc

SEQ ID NO: 505689 - DNA, 33 bp, Homo sapien
gcatttctatggcaacaatcagtgtagcaccca

SEQ ID NO: 505690 - DNA, 33 bp, Homo sapien
gcatttctatggcaacgatcagtgtagcaccca

SEQ ID NO: 505691 - DNA, 33 bp, Homo sapien
aatagggacattgagaagattaatgaggatctg

SEQ ID NO: 505692 - DNA, 33 bp, Homo sapien
aatagggacattgagaggattaatgaggatctg

SEQ ID NO: 505693 - DNA, 33 bp, Homo sapien
aggttcttcacataagcagtttatttgccagca

SEQ ID NO: 505694 - DNA, 33 bp, Homo sapien
aggttcttcacataagtagtttatttgccagca

SEQ ID NO: 505695 - DNA, 33 bp, Homo sapien
aaactatgtacttcatgatattccaccaacata

SEQ ID NO: 505696 - DNA, 33 bp, Homo sapien
aaactatgtacttcattatattccaccaacata

SEQ ID NO: 505697 - DNA, 33 bp, Homo sapien
tatgctttccttgagacacgaccaataattatc

SEQ ID NO: 505698 - DNA, 33 bp, Homo sapien
tatgctttccttgagatacgaccaataattatc

SEQ ID NO: 505699 - DNA, 33 bp, Homo sapien
ctggcactttactctacagaaacagttcagata

SEQ ID NO: 505700 - DNA, 33 bp, Homo sapien
ctggcactttactctatagaaacagttcagata

SEQ ID NO: 505701 - DNA, 33 bp, Homo sapien
tatttctcttcaaaaagttcaatctttgaagtc

SEQ ID NO: 505702 - DNA, 33 bp, Homo sapien
tatttctcttcaaaaatttcaatctttgaagtc

SEQ ID NO: 505703 - DNA, 33 bp, Homo sapien
cctcaaacttgtgtttcatgaatcctctcttag

SEQ ID NO: 505704 - DNA, 33 bp, Homo sapien
cctcaaacttgtgttttatgaatcctctcttag

SEQ ID NO: 505705 - DNA, 33 bp, Homo sapien
atactgcgttataagaacacaagactagtctgg

SEQ ID NO: 505706 - DNA, 33 bp, Homo sapien
atactgcgttataagagcacaagactagtctgg

SEQ ID NO: 505707 - DNA, 33 bp, Homo sapien
ggctacgatttcaacacggcggccccttgtgca

SEQ ID NO: 505708 - DNA, 33 bp, Homo sapien
ggctacgatttcaacatggcggccccttgtgca

SEQ ID NO: 505709 - DNA, 33 bp, Homo sapien
tttcaaaatctgtaaaccctggtggatggcctt

SEQ ID NO: 505710 - DNA, 33 bp, Homo sapien
tttcaaaatctgtaaatcctggtggatggcctt

SEQ ID NO: 505711 - DNA, 33 bp, Homo sapien
ttgaaagcactaaggacattatgaggaacggtt

SEQ ID NO: 505712 - DNA, 33 bp, Homo sapien
ttgaaagcactaaggatattatgaggaacggtt

SEQ ID NO: 505713 - DNA, 33 bp, Homo sapien
agtttcaacaacctcacgtaaactgcttttttg

SEQ ID NO: 505714 - DNA, 33 bp, Homo sapien
agtttcaacaacctcaggtaaactgcttttttg

SEQ ID NO: 505715 - DNA, 33 bp, Homo sapien
tattgatagtaatgtcccccttttcacttctgc

SEQ ID NO: 505716 - DNA, 33 bp, Homo sapien
tattgatagtaatgtctcccttttcacttctgc

SEQ ID NO: 505717 - DNA, 33 bp, Homo sapien
aaaaaggtagtaatgacattatcgttgttaaaa

SEQ ID NO: 505718 - DNA, 33 bp, Homo sapien
aaaaaggtagtaatgatattatcgttgttaaaa

SEQ ID NO: 505719 - DNA, 33 bp, Homo sapien
ttccctcagctgtgtcaccaaggtagcttaaga

SEQ ID NO: 505720 - DNA, 33 bp, Homo sapien
ttccctcagctgtgtcgccaaggtagcttaaga

SEQ ID NO: 505721 - DNA, 33 bp, Homo sapien
actctggttagggtaaactgatttgtcggtcta

SEQ ID NO: 505722 - DNA, 33 bp, Homo sapien
actctggttagggtaacctgatttgtcggtcta

SEQ ID NO: 505723 - DNA, 33 bp, Homo sapien
ttgaatctctctagaactgttttgtgtctgttt

SEQ ID NO: 505724 - DNA, 33 bp, Homo sapien
ttgaatctctctagaattgttttgtgtctgttt

SEQ ID NO: 505725 - DNA, 33 bp, Homo sapien
gatcttataaaacaagcaaacacaagatagtga

SEQ ID NO: 505726 - DNA, 33 bp, Homo sapien
gatcttataaaacaaggaaacacaagatagtga

SEQ ID NO: 505727 - DNA, 33 bp, Homo sapien
taacactgaattgatacatttctttgggcaatt

SEQ ID NO: 505728 - DNA, 33 bp, Homo sapien
taacactgaattgatagatttctttgggcaatt

SEQ ID NO: 505729 - DNA, 33 bp, Homo sapien
tgaacatgtgactaaaaaaaatgagtacagcac

SEQ ID NO: 505730 - DNA, 33 bp, Homo sapien
tgaacatgtgactaaacaaaatgagtacagcac

SEQ ID NO: 505731 - DNA, 33 bp, Homo sapien
gtccacagcctagaacactccctgaactcgtgt

SEQ ID NO: 505732 - DNA, 33 bp, Homo sapien
gtccacagcctagaacgctccctgaactcgtgt

SEQ ID NO: 505733 - DNA, 33 bp, Homo sapien
gccacagccttgcagacactatatgtatttttt

SEQ ID NO: 505734 - DNA, 33 bp, Homo sapien
gccacagccttgcagagactatatgtatttttt

SEQ ID NO: 505735 - DNA, 33 bp, Homo sapien
atgtctaatctgtgagaaagtaaacaggttacc

SEQ ID NO: 505736 - DNA, 33 bp, Homo sapien
atgtctaatctgtgaggaagtaaacaggttacc

SEQ ID NO: 505737 - DNA, 33 bp, Homo sapien
atatgacaaaatggaaacatcttaaactcacat

SEQ ID NO: 505738 - DNA, 33 bp, Homo sapien
atatgacaaaatggaagcatcttaaactcacat

SEQ ID NO: 505739 - DNA, 33 bp, Homo sapien
aactgagtttctccaactgttaacatctcacat

SEQ ID NO: 505740 - DNA, 33 bp, Homo sapien
aactgagtttctccaattgttaacatctcacat

SEQ ID NO: 505741 - DNA, 33 bp, Homo sapien
tcacacaaaatcatatcacatctcctcactggg

SEQ ID NO: 505742 - DNA, 33 bp, Homo sapien
tcacacaaaatcatatgacatctcctcactggg

SEQ ID NO: 505743 - DNA, 33 bp, Homo sapien
ctcagctgagagtgagaaagaatcctattataa

SEQ ID NO: 505744 - DNA, 33 bp, Homo sapien
ctcagctgagagtgaggaagaatcctattataa

SEQ ID NO: 505745 - DNA, 33 bp, Homo sapien
gccttagaagcatcctaagcagtctcctctctt

SEQ ID NO: 505746 - DNA, 33 bp, Homo sapien
gccttagaagcatcctcagcagtctcctctctt

SEQ ID NO: 505747 - DNA, 33 bp, Homo sapien
gccagtggtattgaaacggcttggtagtttttg

SEQ ID NO: 505748 - DNA, 33 bp, Homo sapien
gccagtggtattgaaatggcttggtagtttttg

SEQ ID NO: 505749 - DNA, 33 bp, Homo sapien
gaagtattttaagatacggactatgttaggaca

SEQ ID NO: 505750 - DNA, 33 bp, Homo sapien
gaagtattttaagatatggactatgttaggaca

SEQ ID NO: 505751 - DNA, 33 bp, Homo sapien
gcccctatgttctaaagtgttacacaagtagaa

SEQ ID NO: 505752 - DNA, 33 bp, Homo sapien
gcccctatgttctaaattgttacacaagtagaa

SEQ ID NO: 505753 - DNA, 33 bp, Homo sapien
ttggtgtgtaaactaaataggaaagtaggaaat

SEQ ID NO: 505754 - DNA, 33 bp, Homo sapien
ttggtgtgtaaactaagtaggaaagtaggaaat

SEQ ID NO: 505755 - DNA, 33 bp, Homo sapien
gcttgactcccttgcaatatactctttctttac

SEQ ID NO: 505756 - DNA, 33 bp, Homo sapien
gcttgactcccttgcagtatactctttctttac

SEQ ID NO: 505757 - DNA, 33 bp, Homo sapien
aactgcttttgtagaccaataaaatatcatcag

SEQ ID NO: 505758 - DNA, 33 bp, Homo sapien
aactgcttttgtagactaataaaatatcatcag

SEQ ID NO: 505759 - DNA, 33 bp, Homo sapien
ggaagaaaaaacaaggacaccagaagaatttta

SEQ ID NO: 505760 - DNA, 33 bp, Homo sapien
ggaagaaaaaacaaggccaccagaagaatttta

SEQ ID NO: 505761 - DNA, 33 bp, Homo sapien
tctgatttgcatagggcacagagaattgcttgg

SEQ ID NO: 505762 - DNA, 33 bp, Homo sapien
tctgatttgcataggggacagagaattgcttgg

SEQ ID NO: 505763 - DNA, 33 bp, Homo sapien
gtgtgccatttatataacacgcaaagaagcctg

SEQ ID NO: 505764 - DNA, 33 bp, Homo sapien
gtgtgccatttatatagcacgcaaagaagcctg

SEQ ID NO: 505765 - DNA, 33 bp, Homo sapien
gctcttggagataaaactcaggaaagagagttt

SEQ ID NO: 505766 - DNA, 33 bp, Homo sapien
gctcttggagataaaattcaggaaagagagttt

SEQ ID NO: 505767 - DNA, 33 bp, Homo sapien
cccccacgattggagcaacaggtgattacagag

SEQ ID NO: 505768 - DNA, 33 bp, Homo sapien
cccccacgattggagcgacaggtgattacagag

SEQ ID NO: 505769 - DNA, 33 bp, Homo sapien
gagttaagtaccacaactctcaacctgtttaac

SEQ ID NO: 505770 - DNA, 33 bp, Homo sapien
gagttaagtaccacaattctcaacctgtttaac

SEQ ID NO: 505771 - DNA, 33 bp, Homo sapien
ttaggacctggaattgccaacactttgcttcag

SEQ ID NO: 505772 - DNA, 33 bp, Homo sapien
ttaggacctggaattgtcaacactttgcttcag

SEQ ID NO: 505773 - DNA, 33 bp, Homo sapien
tgcctgaactgccaggaattctaaagctgcacc

SEQ ID NO: 505774 - DNA, 33 bp, Homo sapien
tgcctgaactgccagggattctaaagctgcacc

SEQ ID NO: 505775 - DNA, 33 bp, Homo sapien
tttcacgggagactaacagcgtgcttatgagga

SEQ ID NO: 505776 - DNA, 33 bp, Homo sapien
tttcacgggagactaagagcgtgcttatgagga

SEQ ID NO: 505777 - DNA, 33 bp, Homo sapien
gtattcctttgcatacccattttgaagaagaca

SEQ ID NO: 505778 - DNA, 33 bp, Homo sapien
gtattcctttgcatacgcattttgaagaagaca

SEQ ID NO: 505779 - DNA, 33 bp, Homo sapien
ggtcaataagagcataagaaggctattgaaagg

SEQ ID NO: 505780 - DNA, 33 bp, Homo sapien
ggtcaataagagcatacgaaggctattgaaagg

SEQ ID NO: 505781 - DNA, 33 bp, Homo sapien
taggaaattcggtggcaacacttgacaatgata

SEQ ID NO: 505782 - DNA, 33 bp, Homo sapien
taggaaattcggtggccacacttgacaatgata

SEQ ID NO: 505783 - DNA, 33 bp, Homo sapien
caactagactagacgtcaaaggaagatgagacc

SEQ ID NO: 505784 - DNA, 33 bp, Homo sapien
caactagactagacgttaaaggaagatgagacc

SEQ ID NO: 505785 - DNA, 33 bp, Homo sapien
gctttgaacaacttacagcgtgataccatgacc

SEQ ID NO: 505786 - DNA, 33 bp, Homo sapien
gctttgaacaacttacggcgtgataccatgacc

SEQ ID NO: 505787 - DNA, 33 bp, Homo sapien
gaaagagggagttccacgtaccacagtgtcagc

SEQ ID NO: 505788 - DNA, 33 bp, Homo sapien
gaaagagggagttccaggtaccacagtgtcagc

SEQ ID NO: 505789 - DNA, 33 bp, Homo sapien
ggtggtgtttttcttacagtgaggagcaatttt

SEQ ID NO: 505790 - DNA, 33 bp, Homo sapien
ggtggtgtttttcttagagtgaggagcaatttt

SEQ ID NO: 505791 - DNA, 33 bp, Homo sapien
taattgatgagcttgacgagcttaattacagaa

SEQ ID NO: 505792 - DNA, 33 bp, Homo sapien
taattgatgagcttgaggagcttaattacagaa

SEQ ID NO: 505793 - DNA, 33 bp, Homo sapien
ctgcaagcttggcattcaaagcccatgaactac

SEQ ID NO: 505794 - DNA, 33 bp, Homo sapien
ctgcaagcttggcatttaaagcccatgaactac

SEQ ID NO: 505795 - DNA, 33 bp, Homo sapien
aaattttgatccagaaacttatcctggatgatc

SEQ ID NO: 505796 - DNA, 33 bp, Homo sapien
aaattttgatccagaagcttatcctggatgatc

SEQ ID NO: 505797 - DNA, 33 bp, Homo sapien
ttaccaggtgttttgacaggtatttactatatg

SEQ ID NO: 505798 - DNA, 33 bp, Homo sapien
ttaccaggtgttttgataggtatttactatatg

SEQ ID NO: 505799 - DNA, 33 bp, Homo sapien
atcttattttgcctaaatgacaggtggggtaca

SEQ ID NO: 505800 - DNA, 33 bp, Homo sapien
atcttattttgcctaactgacaggtggggtaca

SEQ ID NO: 505801 - DNA, 33 bp, Homo sapien
gttataagccttttaacctgtatcattaaaggc

SEQ ID NO: 505802 - DNA, 33 bp, Homo sapien
gttataagccttttaatctgtatcattaaaggc

SEQ ID NO: 505803 - DNA, 33 bp, Homo sapien
tgccagtccagaggtacaaagtgactgggcgtc

SEQ ID NO: 505804 - DNA, 33 bp, Homo sapien
tgccagtccagaggtataaagtgactgggcgtc

SEQ ID NO: 505805 - DNA, 33 bp, Homo sapien
agcaatgttctgccccaagtcctatccacctac

SEQ ID NO: 505806 - DNA, 33 bp, Homo sapien
agcaatgttctgcccccagtcctatccacctac

SEQ ID NO: 505807 - DNA, 33 bp, Homo sapien
taataaagtaaaaagacagaaggatcagaatat

SEQ ID NO: 505808 - DNA, 33 bp, Homo sapien
taataaagtaaaaagagagaaggatcagaatat

SEQ ID NO: 505809 - DNA, 33 bp, Homo sapien
atttccagagtcgttacagtggagatatggaag

SEQ ID NO: 505810 - DNA, 33 bp, Homo sapien
atttccagagtcgttatagtggagatatggaag

SEQ ID NO: 505811 - DNA, 33 bp, Homo sapien
aaaattttgactaaaccacagacatacacatct

SEQ ID NO: 505812 - DNA, 33 bp, Homo sapien
aaaattttgactaaactacagacatacacatct

SEQ ID NO: 505813 - DNA, 33 bp, Homo sapien
aatttaaaattctacaaaatcaaaaatctaaat

SEQ ID NO: 505814 - DNA, 33 bp, Homo sapien
aatttaaaattctacacaatcaaaaatctaaat

SEQ ID NO: 505815 - DNA, 33 bp, Homo sapien
atgaatagaagcaaaacgatatctgtcctgccc

SEQ ID NO: 505816 - DNA, 33 bp, Homo sapien
atgaatagaagcaaaatgatatctgtcctgccc

SEQ ID NO: 505817 - DNA, 33 bp, Homo sapien
tggccactaccaaaaaatgacaatgaagagaaa

SEQ ID NO: 505818 - DNA, 33 bp, Homo sapien
tggccactaccaaaaagtgacaatgaagagaaa

SEQ ID NO: 505819 - DNA, 33 bp, Homo sapien
gagtgatccttgccataatagaatgttctggtt

SEQ ID NO: 505820 - DNA, 33 bp, Homo sapien
gagtgatccttgccatgatagaatgttctggtt

SEQ ID NO: 505821 - DNA, 33 bp, Homo sapien
ttgagattactgattcacataaagttggaagaa

SEQ ID NO: 505822 - DNA, 33 bp, Homo sapien
ttgagattactgattctcataaagttggaagaa

SEQ ID NO: 505823 - DNA, 33 bp, Homo sapien
ttcccatttttaagtgcatgactcagtggcatt

SEQ ID NO: 505824 - DNA, 33 bp, Homo sapien
ttcccatttttaagtgtatgactcagtggcatt

SEQ ID NO: 505825 - DNA, 33 bp, Homo sapien
tgcaatgatgctaggacactgtttgggcttcag

SEQ ID NO: 505826 - DNA, 33 bp, Homo sapien
tgcaatgatgctaggatactgtttgggcttcag

SEQ ID NO: 505827 - DNA, 33 bp, Homo sapien
ctcaggaaagctttaacgtttgctacgggaagt

SEQ ID NO: 505828 - DNA, 33 bp, Homo sapien
ctcaggaaagctttaatgtttgctacgggaagt

SEQ ID NO: 505829 - DNA, 33 bp, Homo sapien
atttggctaattatagaccacttgttttacaca

SEQ ID NO: 505830 - DNA, 33 bp, Homo sapien
atttggctaattataggccacttgttttacaca

SEQ ID NO: 505831 - DNA, 33 bp, Homo sapien
gcttaaaatgtgcaccagcaataaacactgaga

SEQ ID NO: 505832 - DNA, 33 bp, Homo sapien
gcttaaaatgtgcaccggcaataaacactgaga

SEQ ID NO: 505833 - DNA, 33 bp, Homo sapien
gaaggcctcaaaattaacacccgtggcagacgg

SEQ ID NO: 505834 - DNA, 33 bp, Homo sapien
gaaggcctcaaaattagcacccgtggcagacgg

SEQ ID NO: 505835 - DNA, 33 bp, Homo sapien
aatatgccaatagttacacctaacagagcctca

SEQ ID NO: 505836 - DNA, 33 bp, Homo sapien
aatatgccaatagttatacctaacagagcctca

SEQ ID NO: 505837 - DNA, 33 bp, Homo sapien
cacaaaacatggcagacgataaaaacatatttt

SEQ ID NO: 505838 - DNA, 33 bp, Homo sapien
cacaaaacatggcagatgataaaaacatatttt

SEQ ID NO: 505839 - DNA, 33 bp, Homo sapien
gaaccatcgcacccagactatttataggaattt

SEQ ID NO: 505840 - DNA, 33 bp, Homo sapien
gaaccatcgcacccagcctatttataggaattt

SEQ ID NO: 505841 - DNA, 33 bp, Homo sapien
tctattaaagtgactaacacatggctacaaaaa

SEQ ID NO: 505842 - DNA, 33 bp, Homo sapien
tctattaaagtgactagcacatggctacaaaaa

SEQ ID NO: 505843 - DNA, 33 bp, Homo sapien
ttactcacagcattcaaaagggaaaaaagaata

SEQ ID NO: 505844 - DNA, 33 bp, Homo sapien
ttactcacagcattcagaagggaaaaaagaata

SEQ ID NO: 505845 - DNA, 33 bp, Homo sapien
tatatttataatcccaaccttgctaccacttag

SEQ ID NO: 505846 - DNA, 33 bp, Homo sapien
tatatttataatcccacccttgctaccacttag

SEQ ID NO: 505847 - DNA, 33 bp, Homo sapien
taactcacagtgcccaatgagaggcaaaaactt

SEQ ID NO: 505848 - DNA, 33 bp, Homo sapien
taactcacagtgcccagtgagaggcaaaaactt

SEQ ID NO: 505849 - DNA, 33 bp, Homo sapien
tgtcataaattatgcagctcgtctctatgttta

SEQ ID NO: 505850 - DNA, 33 bp, Homo sapien
tgtcataaattatgcatctcgtctctatgttta

SEQ ID NO: 505851 - DNA, 33 bp, Homo sapien
taggaaaagttcctgacgtagacttgcagtatt

SEQ ID NO: 505852 - DNA, 33 bp, Homo sapien
taggaaaagttcctgaggtagacttgcagtatt

SEQ ID NO: 505853 - DNA, 33 bp, Homo sapien
tatgtgtctagaaatacgcaatgtgtcgttatt

SEQ ID NO: 505854 - DNA, 33 bp, Homo sapien
tatgtgtctagaaatatgcaatgtgtcgttatt

SEQ ID NO: 505855 - DNA, 33 bp, Homo sapien
aaattcagctcctgatcaagttgggcaattaaa

SEQ ID NO: 505856 - DNA, 33 bp, Homo sapien
aaattcagctcctgattaagttgggcaattaaa

SEQ ID NO: 505857 - DNA, 33 bp, Homo sapien
gtttagcatgggtcaccggtttgtggactcata

SEQ ID NO: 505858 - DNA, 33 bp, Homo sapien
gtttagcatgggtcactggtttgtggactcata

SEQ ID NO: 505859 - DNA, 33 bp, Homo sapien
agactgctcactttaacgtatgactttggctga

SEQ ID NO: 505860 - DNA, 33 bp, Homo sapien
agactgctcactttaatgtatgactttggctga

SEQ ID NO: 505861 - DNA, 33 bp, Homo sapien
taaataactatatgaccatacatttgataagct

SEQ ID NO: 505862 - DNA, 33 bp, Homo sapien
taaataactatatgacgatacatttgataagct

SEQ ID NO: 505863 - DNA, 33 bp, Homo sapien
ctacaagaaacctttcccattatggcgtgactg

SEQ ID NO: 505864 - DNA, 33 bp, Homo sapien
ctacaagaaacctttcgcattatggcgtgactg

SEQ ID NO: 505865 - DNA, 33 bp, Homo sapien
tttcaatccctccccaatgatcttgatgacaag

SEQ ID NO: 505866 - DNA, 33 bp, Homo sapien
tttcaatccctccccagtgatcttgatgacaag

SEQ ID NO: 505867 - DNA, 33 bp, Homo sapien
tctcatggtggaatgcagaaagaagtgagaaag

SEQ ID NO: 505868 - DNA, 33 bp, Homo sapien
tctcatggtggaatgcggaaagaagtgagaaag

SEQ ID NO: 505869 - DNA, 33 bp, Homo sapien
ccagtctggggagaggccattcatgttctgaac

SEQ ID NO: 505870 - DNA, 33 bp, Homo sapien
ccagtctggggagaggtcattcatgttctgaac

SEQ ID NO: 505871 - DNA, 33 bp, Homo sapien
caaagcaaagaagagggagtcttagggttgaca

SEQ ID NO: 505872 - DNA, 33 bp, Homo sapien
caaagcaaagaagaggtagtcttagggttgaca

SEQ ID NO: 505873 - DNA, 33 bp, Homo sapien
taaatcacattcttcaagtaagagcattactta

SEQ ID NO: 505874 - DNA, 33 bp, Homo sapien
taaatcacattcttcaggtaagagcattactta

SEQ ID NO: 505875 - DNA, 33 bp, Homo sapien
atctatgttacagacactctgcttagcccaggt

SEQ ID NO: 505876 - DNA, 33 bp, Homo sapien
atctatgttacagacattctgcttagcccaggt

SEQ ID NO: 505877 - DNA, 33 bp, Homo sapien
actaaaggtgtaaagcagaaatctcaagttcaa

SEQ ID NO: 505878 - DNA, 33 bp, Homo sapien
actaaaggtgtaaagccgaaatctcaagttcaa

SEQ ID NO: 505879 - DNA, 33 bp, Homo sapien
ttaaaagttacagcacaggaacataaaggtcag

SEQ ID NO: 505880 - DNA, 33 bp, Homo sapien
ttaaaagttacagcaccggaacataaaggtcag

SEQ ID NO: 505881 - DNA, 33 bp, Homo sapien
tacagaataccacaggacaaaaggtgaacttta

SEQ ID NO: 505882 - DNA, 33 bp, Homo sapien
tacagaataccacagggcaaaaggtgaacttta

SEQ ID NO: 505883 - DNA, 33 bp, Homo sapien
agagaaaggggcaagaaattcattaaagaaaaa

SEQ ID NO: 505884 - DNA, 33 bp, Homo sapien
agagaaaggggcaagacattcattaaagaaaaa

SEQ ID NO: 505885 - DNA, 33 bp, Homo sapien
tgcattatgtattttgaagccaaactgctgtgt

SEQ ID NO: 505886 - DNA, 33 bp, Homo sapien
tgcattatgtattttggagccaaactgctgtgt

SEQ ID NO: 505887 - DNA, 33 bp, Homo sapien
atggacggagctgggaaaattattgaaactctc

SEQ ID NO: 505888 - DNA, 33 bp, Homo sapien
atggacggagctgggagaattattgaaactctc

SEQ ID NO: 505889 - DNA, 33 bp, Homo sapien
tacacatttggtgcaggctcctgtatcacagtt

SEQ ID NO: 505890 - DNA, 33 bp, Homo sapien
tacacatttggtgcagtctcctgtatcacagtt

SEQ ID NO: 505891 - DNA, 33 bp, Homo sapien
acattgaacaatgaagcctaagggttaaaaatg

SEQ ID NO: 505892 - DNA, 33 bp, Homo sapien
acattgaacaatgaaggctaagggttaaaaatg

SEQ ID NO: 505893 - DNA, 33 bp, Homo sapien
cttcaataattcccaccggtaatgaatgcacta

SEQ ID NO: 505894 - DNA, 33 bp, Homo sapien
cttcaataattcccactggtaatgaatgcacta

SEQ ID NO: 505895 - DNA, 33 bp, Homo sapien
acagtcatgtgtttatcagttgaaattttcaat

SEQ ID NO: 505896 - DNA, 33 bp, Homo sapien
acagtcatgtgtttatgagttgaaattttcaat

SEQ ID NO: 505897 - DNA, 33 bp, Homo sapien
tggtggctgctgaacacattaaacccaaatcct

SEQ ID NO: 505898 - DNA, 33 bp, Homo sapien
tggtggctgctgaacatattaaacccaaatcct

SEQ ID NO: 505899 - DNA, 33 bp, Homo sapien
ccctgttcatccttacaacattggtggaataaa

SEQ ID NO: 505900 - DNA, 33 bp, Homo sapien
ccctgttcatccttacgacattggtggaataaa

SEQ ID NO: 505901 - DNA, 33 bp, Homo sapien
atctcgtggtctctcaagtcggacacagaagtg

SEQ ID NO: 505902 - DNA, 33 bp, Homo sapien
atctcgtggtctctcaggtcggacacagaagtg

SEQ ID NO: 505903 - DNA, 33 bp, Homo sapien
gctgtgaattaaagagaatatggtgatcctgag

SEQ ID NO: 505904 - DNA, 33 bp, Homo sapien
gctgtgaattaaagaggatatggtgatcctgag

SEQ ID NO: 505905 - DNA, 33 bp, Homo sapien
atggaacacagcctcccaaagatttgccttttt

SEQ ID NO: 505906 - DNA, 33 bp, Homo sapien
atggaacacagcctcctaaagatttgccttttt

SEQ ID NO: 505907 - DNA, 33 bp, Homo sapien
atactcacacataaaactggaatcatactatat

SEQ ID NO: 505908 - DNA, 33 bp, Homo sapien
atactcacacataaaattggaatcatactatat

SEQ ID NO: 505909 - DNA, 33 bp, Homo sapien
gtcagatctaggaagaaacctatcaaaataaat

SEQ ID NO: 505910 - DNA, 33 bp, Homo sapien
gtcagatctaggaagagacctatcaaaataaat

SEQ ID NO: 505911 - DNA, 33 bp, Homo sapien
ctagagtgagaacctgcaaagaaatattcatgg

SEQ ID NO: 505912 - DNA, 33 bp, Homo sapien
ctagagtgagaacctgtaaagaaatattcatgg

SEQ ID NO: 505913 - DNA, 33 bp, Homo sapien
ctttccaaaatttcacactttgtctatatcttc

SEQ ID NO: 505914 - DNA, 33 bp, Homo sapien
ctttccaaaatttcacgctttgtctatatcttc

SEQ ID NO: 505915 - DNA, 33 bp, Homo sapien
aaatgcagtctgtttcaatggtcctcatattct

SEQ ID NO: 505916 - DNA, 33 bp, Homo sapien
aaatgcagtctgtttctatggtcctcatattct

SEQ ID NO: 505917 - DNA, 33 bp, Homo sapien
caacatttgtctattaaggaaggataggtagag

SEQ ID NO: 505918 - DNA, 33 bp, Homo sapien
caacatttgtctattacggaaggataggtagag

SEQ ID NO: 505919 - DNA, 33 bp, Homo sapien
gctggaaaaatttccacagtgccaaaaaatagt

SEQ ID NO: 505920 - DNA, 33 bp, Homo sapien
gctggaaaaatttccatagtgccaaaaaatagt

SEQ ID NO: 505921 - DNA, 33 bp, Homo sapien
ggtattaagcctagtacccattcattatttttc

SEQ ID NO: 505922 - DNA, 33 bp, Homo sapien
ggtattaagcctagtagccattcattatttttc

SEQ ID NO: 505923 - DNA, 33 bp, Homo sapien
gaagacatgcgataaacataaatgcctatcaat

SEQ ID NO: 505924 - DNA, 33 bp, Homo sapien
gaagacatgcgataaatataaatgcctatcaat

SEQ ID NO: 505925 - DNA, 33 bp, Homo sapien
tgggcacttcctcaacaaccaggcctttctggc

SEQ ID NO: 505926 - DNA, 33 bp, Homo sapien
tgggcacttcctcaaccaccaggcctttctggc

SEQ ID NO: 505927 - DNA, 33 bp, Homo sapien
ttattttaagattctacaagagcaaattagcaa

SEQ ID NO: 505928 - DNA, 33 bp, Homo sapien
ttattttaagattctagaagagcaaattagcaa

SEQ ID NO: 505929 - DNA, 33 bp, Homo sapien
aagatgcagatgtatcagaagtgaagggatgaa

SEQ ID NO: 505930 - DNA, 33 bp, Homo sapien
aagatgcagatgtatcggaagtgaagggatgaa

SEQ ID NO: 505931 - DNA, 33 bp, Homo sapien
tgtaatacttacgacaatctctcaaaatttaaa

SEQ ID NO: 505932 - DNA, 33 bp, Homo sapien
tgtaatacttacgacagtctctcaaaatttaaa

SEQ ID NO: 505933 - DNA, 33 bp, Homo sapien
cctttaaaatgctgtaagaggaaaatagttatt

SEQ ID NO: 505934 - DNA, 33 bp, Homo sapien
cctttaaaatgctgtacgaggaaaatagttatt

SEQ ID NO: 505935 - DNA, 33 bp, Homo sapien
aaaattttcaattcaactattgtgctttgtaga

SEQ ID NO: 505936 - DNA, 33 bp, Homo sapien
aaaattttcaattcaagtattgtgctttgtaga

SEQ ID NO: 505937 - DNA, 33 bp, Homo sapien
ctacaaatgttgttggaattttggttaaatctt

SEQ ID NO: 505938 - DNA, 33 bp, Homo sapien
ctacaaatgttgttgggattttggttaaatctt

SEQ ID NO: 505939 - DNA, 33 bp, Homo sapien
tgctttgttactggtaggaagatatatagacaa

SEQ ID NO: 505940 - DNA, 33 bp, Homo sapien
tgctttgttactggtatgaagatatatagacaa

SEQ ID NO: 505941 - DNA, 33 bp, Homo sapien
atatgttctgaaaaacacatcattagctgtagc

SEQ ID NO: 505942 - DNA, 33 bp, Homo sapien
atatgttctgaaaaacgcatcattagctgtagc

SEQ ID NO: 505943 - DNA, 33 bp, Homo sapien
agaaatgagattcaaaatcaagccaaagaggtc

SEQ ID NO: 505944 - DNA, 33 bp, Homo sapien
agaaatgagattcaaattcaagccaaagaggtc

SEQ ID NO: 505945 - DNA, 33 bp, Homo sapien
ggaaaaatctacagaaatctctattttggcagc

SEQ ID NO: 505946 - DNA, 33 bp, Homo sapien
ggaaaaatctacagaagtctctattttggcagc

SEQ ID NO: 505947 - DNA, 33 bp, Homo sapien
ggctgtcctaaacctcacaatttcagccagcat

SEQ ID NO: 505948 - DNA, 33 bp, Homo sapien
ggctgtcctaaacctcgcaatttcagccagcat

SEQ ID NO: 505949 - DNA, 33 bp, Homo sapien
ttgtttgatggaaggaaattttgttatgcctta

SEQ ID NO: 505950 - DNA, 33 bp, Homo sapien
ttgtttgatggaaggagattttgttatgcctta

SEQ ID NO: 505951 - DNA, 33 bp, Homo sapien
tctgctttggtggttcacactgaaacaaaggaa

SEQ ID NO: 505952 - DNA, 33 bp, Homo sapien
tctgctttggtggttcgcactgaaacaaaggaa

SEQ ID NO: 505953 - DNA, 33 bp, Homo sapien
cattttgtcttctgtcacaagttgctcctaaaa

SEQ ID NO: 505954 - DNA, 33 bp, Homo sapien
cattttgtcttctgtctcaagttgctcctaaaa

SEQ ID NO: 505955 - DNA, 33 bp, Homo sapien
cggcttcaatctaatacggcacatactgagcct

SEQ ID NO: 505956 - DNA, 33 bp, Homo sapien
cggcttcaatctaatatggcacatactgagcct

SEQ ID NO: 505957 - DNA, 33 bp, Homo sapien
aacagccacataagacccactttttattgatag

SEQ ID NO: 505958 - DNA, 33 bp, Homo sapien
aacagccacataagactcactttttattgatag

SEQ ID NO: 505959 - DNA, 33 bp, Homo sapien
aagataaaaatgaccacctcagtgtcttgtaca

SEQ ID NO: 505960 - DNA, 33 bp, Homo sapien
aagataaaaatgaccatctcagtgtcttgtaca

SEQ ID NO: 505961 - DNA, 33 bp, Homo sapien
cttcctaaacatccaacgctgctaggtacttat

SEQ ID NO: 505962 - DNA, 33 bp, Homo sapien
cttcctaaacatccaatgctgctaggtacttat

SEQ ID NO: 505963 - DNA, 33 bp, Homo sapien
ttgggcttttagcagcaactctaggaggaatta

SEQ ID NO: 505964 - DNA, 33 bp, Homo sapien
ttgggcttttagcagctactctaggaggaatta

SEQ ID NO: 505965 - DNA, 33 bp, Homo sapien
actaaatggagagaaacggatggagaaagatgc

SEQ ID NO: 505966 - DNA, 33 bp, Homo sapien
actaaatggagagaaatggatggagaaagatgc

SEQ ID NO: 505967 - DNA, 33 bp, Homo sapien
ggacttgaaatgctagccatctgaatgcaaaat

SEQ ID NO: 505968 - DNA, 33 bp, Homo sapien
ggacttgaaatgctagtcatctgaatgcaaaat

SEQ ID NO: 505969 - DNA, 33 bp, Homo sapien
ccaaaatgtagttattcaaaacagtgccatcta

SEQ ID NO: 505970 - DNA, 33 bp, Homo sapien
ccaaaatgtagttatttaaaacagtgccatcta

SEQ ID NO: 505971 - DNA, 33 bp, Homo sapien
acttaaaacagaagaccctacatcactctttgg

SEQ ID NO: 505972 - DNA, 33 bp, Homo sapien
acttaaaacagaagactctacatcactctttgg

SEQ ID NO: 505973 - DNA, 33 bp, Homo sapien
agaggctgatctacacaaaggacatcactaggg

SEQ ID NO: 505974 - DNA, 33 bp, Homo sapien
agaggctgatctacacgaaggacatcactaggg

SEQ ID NO: 505975 - DNA, 33 bp, Homo sapien
gctaaacaacaaatccaaaatttttgaggtagt

SEQ ID NO: 505976 - DNA, 33 bp, Homo sapien
gctaaacaacaaatcccaaatttttgaggtagt

SEQ ID NO: 505977 - DNA, 33 bp, Homo sapien
tcagtctttaaatagacgcaggttactctggga

SEQ ID NO: 505978 - DNA, 33 bp, Homo sapien
tcagtctttaaatagatgcaggttactctggga

SEQ ID NO: 505979 - DNA, 33 bp, Homo sapien
aggtccatctcagtgccgactttttgttctttt

SEQ ID NO: 505980 - DNA, 33 bp, Homo sapien
aggtccatctcagtgctgactttttgttctttt

SEQ ID NO: 505981 - DNA, 33 bp, Homo sapien
ggggatagcttgaggcagaggcttaacttcctt

SEQ ID NO: 505982 - DNA, 33 bp, Homo sapien
ggggatagcttgaggcggaggcttaacttcctt

SEQ ID NO: 505983 - DNA, 33 bp, Homo sapien
ctccctttctaactggaagctgcattccagatg

SEQ ID NO: 505984 - DNA, 33 bp, Homo sapien
ctccctttctaactggcagctgcattccagatg

SEQ ID NO: 505985 - DNA, 33 bp, Homo sapien
tcctgatattttggcaaactcctggtatttaaa

SEQ ID NO: 505986 - DNA, 33 bp, Homo sapien
tcctgatattttggcagactcctggtatttaaa

SEQ ID NO: 505987 - DNA, 33 bp, Homo sapien
acagagtctttttacagctggccaaaatgtttc

SEQ ID NO: 505988 - DNA, 33 bp, Homo sapien
acagagtctttttacatctggccaaaatgtttc

SEQ ID NO: 505989 - DNA, 33 bp, Homo sapien
gtagctgcttaataaacgtctgatgaattgaat

SEQ ID NO: 505990 - DNA, 33 bp, Homo sapien
gtagctgcttaataaatgtctgatgaattgaat

SEQ ID NO: 505991 - DNA, 33 bp, Homo sapien
ggtgacttgacattaaagggaagagattgccta

SEQ ID NO: 505992 - DNA, 33 bp, Homo sapien
ggtgacttgacattaaggggaagagattgccta

SEQ ID NO: 505993 - DNA, 33 bp, Homo sapien
tatataattctttttacgattctgctagattat

SEQ ID NO: 505994 - DNA, 33 bp, Homo sapien
tatataattctttttatgattctgctagattat

SEQ ID NO: 505995 - DNA, 33 bp, Homo sapien
tattttggatagtgaccccttatgacttgtata

SEQ ID NO: 505996 - DNA, 33 bp, Homo sapien
tattttggatagtgactccttatgacttgtata

SEQ ID NO: 505997 - DNA, 33 bp, Homo sapien
tatagacaatcttgcacgagagactgtgacttt

SEQ ID NO: 505998 - DNA, 33 bp, Homo sapien
tatagacaatcttgcatgagagactgtgacttt

SEQ ID NO: 505999 - DNA, 33 bp, Homo sapien
attgtaaacttctttaaagctagcctacactct

SEQ ID NO: 506000 - DNA, 33 bp, Homo sapien
attgtaaacttctttacagctagcctacactct

SEQ ID NO: 506001 - DNA, 33 bp, Homo sapien
cccatcccagattcccaatggcgaagattgaga

SEQ ID NO: 506002 - DNA, 33 bp, Homo sapien
cccatcccagattccccatggcgaagattgaga

SEQ ID NO: 506003 - DNA, 33 bp, Homo sapien
gcagaggaagacaggaaccaagcttcttttctt

SEQ ID NO: 506004 - DNA, 33 bp, Homo sapien
gcagaggaagacaggatccaagcttcttttctt

SEQ ID NO: 506005 - DNA, 33 bp, Homo sapien
ctatatggtgtaaagcagagatttatagtacac

SEQ ID NO: 506006 - DNA, 33 bp, Homo sapien
ctatatggtgtaaagccgagatttatagtacac

SEQ ID NO: 506007 - DNA, 33 bp, Homo sapien
tataacatcacctgacaaagttttctccaagaa

SEQ ID NO: 506008 - DNA, 33 bp, Homo sapien
tataacatcacctgaccaagttttctccaagaa

SEQ ID NO: 506009 - DNA, 33 bp, Homo sapien
ccctaccaagcagaacccagggattttagtact

SEQ ID NO: 506010 - DNA, 33 bp, Homo sapien
ccctaccaagcagaactcagggattttagtact

SEQ ID NO: 506011 - DNA, 33 bp, Homo sapien
ctatcttcacaaatacagatcttcaggagcctt

SEQ ID NO: 506012 - DNA, 33 bp, Homo sapien
ctatcttcacaaatacggatcttcaggagcctt

SEQ ID NO: 506013 - DNA, 33 bp, Homo sapien
cactcacagagttcagacctaggtacaaagttt

SEQ ID NO: 506014 - DNA, 33 bp, Homo sapien
cactcacagagttcagccctaggtacaaagttt

SEQ ID NO: 506015 - DNA, 33 bp, Homo sapien
tcttctgtcggaagccagcctggtctgcctctc

SEQ ID NO: 506016 - DNA, 33 bp, Homo sapien
tcttctgtcggaagccggcctggtctgcctctc

SEQ ID NO: 506017 - DNA, 33 bp, Homo sapien
ttccatgagatattacactgttctgtttattga

SEQ ID NO: 506018 - DNA, 33 bp, Homo sapien
ttccatgagatattactctgttctgtttattga

SEQ ID NO: 506019 - DNA, 33 bp, Homo sapien
ctggagaactgatagaaccccaaggaacaatag

SEQ ID NO: 506020 - DNA, 33 bp, Homo sapien
ctggagaactgatagacccccaaggaacaatag

SEQ ID NO: 506021 - DNA, 33 bp, Homo sapien
tccacaccttcaaccaccaaattaccctttaca

SEQ ID NO: 506022 - DNA, 33 bp, Homo sapien
tccacaccttcaaccatcaaattaccctttaca

SEQ ID NO: 506023 - DNA, 33 bp, Homo sapien
gtgctccaagggtccaaacttataagcaagtaa

SEQ ID NO: 506024 - DNA, 33 bp, Homo sapien
gtgctccaagggtccagacttataagcaagtaa

SEQ ID NO: 506025 - DNA, 33 bp, Homo sapien
attctggcacaatgctgaagattttgttccagt

SEQ ID NO: 506026 - DNA, 33 bp, Homo sapien
attctggcacaatgcttaagattttgttccagt

SEQ ID NO: 506027 - DNA, 33 bp, Homo sapien
gaactgtgtagctaacacttggcacttgtaact

SEQ ID NO: 506028 - DNA, 33 bp, Homo sapien
gaactgtgtagctaacgcttggcacttgtaact

SEQ ID NO: 506029 - DNA, 33 bp, Homo sapien
gatcaccatgtaatctaaattctgccaatgtgg

SEQ ID NO: 506030 - DNA, 33 bp, Homo sapien
gatcaccatgtaatctgaattctgccaatgtgg

SEQ ID NO: 506031 - DNA, 33 bp, Homo sapien
ggttatgacacaataaactgctccctatgttct

SEQ ID NO: 506032 - DNA, 33 bp, Homo sapien
ggttatgacacaataagctgctccctatgttct

SEQ ID NO: 506033 - DNA, 33 bp, Homo sapien
ttcctggtagacacaacgtagggatggctgggc

SEQ ID NO: 506034 - DNA, 33 bp, Homo sapien
ttcctggtagacacaatgtagggatggctgggc

SEQ ID NO: 506035 - DNA, 33 bp, Homo sapien
aaattccttaatcaaaatttaggatacaacaca

SEQ ID NO: 506036 - DNA, 33 bp, Homo sapien
aaattccttaatcaaagtttaggatacaacaca

SEQ ID NO: 506037 - DNA, 33 bp, Homo sapien
cacagtgcggccaagaacctgaggatgctggca

SEQ ID NO: 506038 - DNA, 33 bp, Homo sapien
cacagtgcggccaagagcctgaggatgctggca

SEQ ID NO: 506039 - DNA, 33 bp, Homo sapien
tggagagacaaggtaaactgccagcatcctcag

SEQ ID NO: 506040 - DNA, 33 bp, Homo sapien
tggagagacaaggtaacctgccagcatcctcag

SEQ ID NO: 506041 - DNA, 33 bp, Homo sapien
tcgtagtccttctataccatctgggagaagtag

SEQ ID NO: 506042 - DNA, 33 bp, Homo sapien
tcgtagtccttctatatcatctgggagaagtag

SEQ ID NO: 506043 - DNA, 33 bp, Homo sapien
aaggtcttagcagagcaagagaaatggcagcaa

SEQ ID NO: 506044 - DNA, 33 bp, Homo sapien
aaggtcttagcagagcgagagaaatggcagcaa

SEQ ID NO: 506045 - DNA, 33 bp, Homo sapien
actaggagaaagaaccacactatttccatatgt

SEQ ID NO: 506046 - DNA, 33 bp, Homo sapien
actaggagaaagaaccgcactatttccatatgt

SEQ ID NO: 506047 - DNA, 33 bp, Homo sapien
aatatttattttacaaactggtcttcaaagtaa

SEQ ID NO: 506048 - DNA, 33 bp, Homo sapien
aatatttattttacaagctggtcttcaaagtaa

SEQ ID NO: 506049 - DNA, 33 bp, Homo sapien
ctacttatggttgacaaatgcaatacaggatgc

SEQ ID NO: 506050 - DNA, 33 bp, Homo sapien
ctacttatggttgacagatgcaatacaggatgc

SEQ ID NO: 506051 - DNA, 33 bp, Homo sapien
tcatttgtcaaagtgcacatggctgatcatgag

SEQ ID NO: 506052 - DNA, 33 bp, Homo sapien
tcatttgtcaaagtgcgcatggctgatcatgag

SEQ ID NO: 506053 - DNA, 33 bp, Homo sapien
gaccagtagtagaatggagataaggcaatccat

SEQ ID NO: 506054 - DNA, 33 bp, Homo sapien
gaccagtagtagaatgtagataaggcaatccat

SEQ ID NO: 506055 - DNA, 33 bp, Homo sapien
tatattgatttcaagaacaagcatattaaacat

SEQ ID NO: 506056 - DNA, 33 bp, Homo sapien
tatattgatttcaagaccaagcatattaaacat

SEQ ID NO: 506057 - DNA, 33 bp, Homo sapien
gtagtgggacaccagccgaccgttgattcatat

SEQ ID NO: 506058 - DNA, 33 bp, Homo sapien
gtagtgggacaccagctgaccgttgattcatat

SEQ ID NO: 506059 - DNA, 33 bp, Homo sapien
gaaaaatgggggagacaagaaagctttgagtcc

SEQ ID NO: 506060 - DNA, 33 bp, Homo sapien
gaaaaatgggggagaccagaaagctttgagtcc

SEQ ID NO: 506061 - DNA, 33 bp, Homo sapien
actctgaccctaacaacggtgctacctgtgcca

SEQ ID NO: 506062 - DNA, 33 bp, Homo sapien
actctgaccctaacaatggtgctacctgtgcca

SEQ ID NO: 506063 - DNA, 33 bp, Homo sapien
ttcctttcagttgtaacctttctgtgattctaa

SEQ ID NO: 506064 - DNA, 33 bp, Homo sapien
ttcctttcagttgtaatctttctgtgattctaa

SEQ ID NO: 506065 - DNA, 33 bp, Homo sapien
cttatataattgtaggaatgagttaattttagt

SEQ ID NO: 506066 - DNA, 33 bp, Homo sapien
cttatataattgtagggatgagttaattttagt

SEQ ID NO: 506067 - DNA, 33 bp, Homo sapien
caaagatatgggacaaagtcttctgagaagacg

SEQ ID NO: 506068 - DNA, 33 bp, Homo sapien
caaagatatgggacaaggtcttctgagaagacg

SEQ ID NO: 506069 - DNA, 33 bp, Homo sapien
gtgtcttttgtggataacagacaatgggatcag

SEQ ID NO: 506070 - DNA, 33 bp, Homo sapien
gtgtcttttgtggataccagacaatgggatcag

SEQ ID NO: 506071 - DNA, 33 bp, Homo sapien
gctttgaatactgaaccgctcaacacagatgcc

SEQ ID NO: 506072 - DNA, 33 bp, Homo sapien
gctttgaatactgaactgctcaacacagatgcc

SEQ ID NO: 506073 - DNA, 33 bp, Homo sapien
attaaaacattttttaaaagtggagactacata

SEQ ID NO: 506074 - DNA, 33 bp, Homo sapien
attaaaacattttttagaagtggagactacata

SEQ ID NO: 506075 - DNA, 33 bp, Homo sapien
taaacccagatacaccactctaagacagcttgt

SEQ ID NO: 506076 - DNA, 33 bp, Homo sapien
taaacccagatacaccgctctaagacagcttgt

SEQ ID NO: 506077 - DNA, 33 bp, Homo sapien
aaggctgctcatttgacggatgaattactccat

SEQ ID NO: 506078 - DNA, 33 bp, Homo sapien
aaggctgctcatttgatggatgaattactccat

SEQ ID NO: 506079 - DNA, 33 bp, Homo sapien
cacacatatacacacactagagacctctgtact

SEQ ID NO: 506080 - DNA, 33 bp, Homo sapien
cacacatatacacacattagagacctctgtact

SEQ ID NO: 506081 - DNA, 33 bp, Homo sapien
aacgtttaagattcaccgtctaaaacactcatt

SEQ ID NO: 506082 - DNA, 33 bp, Homo sapien
aacgtttaagattcactgtctaaaacactcatt

SEQ ID NO: 506083 - DNA, 33 bp, Homo sapien
aaaaattaacttttgaacaaatgcaagtgttaa

SEQ ID NO: 506084 - DNA, 33 bp, Homo sapien
aaaaattaacttttgagcaaatgcaagtgttaa

SEQ ID NO: 506085 - DNA, 33 bp, Homo sapien
ctagtaaaactaaagcactgtaactaaattcat

SEQ ID NO: 506086 - DNA, 33 bp, Homo sapien
ctagtaaaactaaagcgctgtaactaaattcat

SEQ ID NO: 506087 - DNA, 33 bp, Homo sapien
gggaagtggttgggaaattaaaatatagcacaa

SEQ ID NO: 506088 - DNA, 33 bp, Homo sapien
gggaagtggttgggaacttaaaatatagcacaa

SEQ ID NO: 506089 - DNA, 33 bp, Homo sapien
tttaaaacatgtcaagcagtagaaagtagggtg

SEQ ID NO: 506090 - DNA, 33 bp, Homo sapien
tttaaaacatgtcaagtagtagaaagtagggtg

SEQ ID NO: 506091 - DNA, 33 bp, Homo sapien
ctcctctcacacagaaatatttaacctattgga

SEQ ID NO: 506092 - DNA, 33 bp, Homo sapien
ctcctctcacacagaagtatttaacctattgga

SEQ ID NO: 506093 - DNA, 33 bp, Homo sapien
ccagtagacatttagcggacagttccacgtttg

SEQ ID NO: 506094 - DNA, 33 bp, Homo sapien
ccagtagacatttagctgacagttccacgtttg

SEQ ID NO: 506095 - DNA, 33 bp, Homo sapien
aaacgtgactgtcttccatgtccctggccctat

SEQ ID NO: 506096 - DNA, 33 bp, Homo sapien
aaacgtgactgtcttcgatgtccctggccctat

SEQ ID NO: 506097 - DNA, 33 bp, Homo sapien
gacacctgacatagtaagcgataagttctaata

SEQ ID NO: 506098 - DNA, 33 bp, Homo sapien
gacacctgacatagtaggcgataagttctaata

SEQ ID NO: 506099 - DNA, 33 bp, Homo sapien
gttatttacatagttacaatgctctttcaaaca

SEQ ID NO: 506100 - DNA, 33 bp, Homo sapien
gttatttacatagttataatgctctttcaaaca

SEQ ID NO: 506101 - DNA, 33 bp, Homo sapien
aagtgttcatttcttacgtttgtggactcttaa

SEQ ID NO: 506102 - DNA, 33 bp, Homo sapien
aagtgttcatttcttatgtttgtggactcttaa

SEQ ID NO: 506103 - DNA, 33 bp, Homo sapien
ttgtcagtacgcatcaaattatctaaattattt

SEQ ID NO: 506104 - DNA, 33 bp, Homo sapien
ttgtcagtacgcatcatattatctaaattattt

SEQ ID NO: 506105 - DNA, 33 bp, Homo sapien
atttcaggaaattttgcaattgaggcacaagga

SEQ ID NO: 506106 - DNA, 33 bp, Homo sapien
atttcaggaaattttgtaattgaggcacaagga

SEQ ID NO: 506107 - DNA, 33 bp, Homo sapien
gcatgatgaattaaacacttggccactggtgat

SEQ ID NO: 506108 - DNA, 33 bp, Homo sapien
gcatgatgaattaaacgcttggccactggtgat

SEQ ID NO: 506109 - DNA, 33 bp, Homo sapien
gattgttttcacaaacggcacatgaacagtgtt

SEQ ID NO: 506110 - DNA, 33 bp, Homo sapien
gattgttttcacaaactgcacatgaacagtgtt

SEQ ID NO: 506111 - DNA, 33 bp, Homo sapien
taatcatttgaaggaagaattcacaaggagagc

SEQ ID NO: 506112 - DNA, 33 bp, Homo sapien
taatcatttgaaggaataattcacaaggagagc

SEQ ID NO: 506113 - DNA, 33 bp, Homo sapien
ggcagagcagatgtctaaatagaaccctccagc

SEQ ID NO: 506114 - DNA, 33 bp, Homo sapien
ggcagagcagatgtctgaatagaaccctccagc

SEQ ID NO: 506115 - DNA, 33 bp, Homo sapien
cttaccatagatcttaccaactccagtatatga

SEQ ID NO: 506116 - DNA, 33 bp, Homo sapien
cttaccatagatcttagcaactccagtatatga

SEQ ID NO: 506117 - DNA, 33 bp, Homo sapien; identical to SEQ ID NO: 506115

SEQ ID NO: 506118 - DNA, 33 bp, Homo sapien; identical to SEQ ID NO: 506116

SEQ ID NO: 506119 - DNA, 33 bp, Homo sapien
cacttatcacacactacggctgtaacttttgca

SEQ ID NO: 506120 - DNA, 33 bp, Homo sapien
cacttatcacacactatggctgtaacttttgca

SEQ ID NO: 506121 - DNA, 33 bp, Homo sapien
aattggctgcaattcaaatgtggagagtgagaa

SEQ ID NO: 506122 - DNA, 33 bp, Homo sapien
aattggctgcaattcagatgtggagagtgagaa

SEQ ID NO: 506123 - DNA, 33 bp, Homo sapien
cactcaagcatattcaaagtgttttaattatga

SEQ ID NO: 506124 - DNA, 33 bp, Homo sapien
cactcaagcatattcagagtgttttaattatga

SEQ ID NO: 506125 - DNA, 33 bp, Homo sapien
ttagtaagaactgatgccataataaatcttcct

SEQ ID NO: 506126 - DNA, 33 bp, Homo sapien
ttagtaagaactgatgtcataataaatcttcct

SEQ ID NO: 506127 - DNA, 33 bp, Homo sapien
aagactgacatgaaagaccttcactacttatca

SEQ ID NO: 506128 - DNA, 33 bp, Homo sapien
aagactgacatgaaaggccttcactacttatca

SEQ ID NO: 506129 - DNA, 33 bp, Homo sapien
agctacaaacacatcacgaatagtaaaacattt

SEQ ID NO: 506130 - DNA, 33 bp, Homo sapien
agctacaaacacatcatgaatagtaaaacattt

SEQ ID NO: 506131 - DNA, 33 bp, Homo sapien
atttatgtgtaaacatcaggaaatggcatctgt

SEQ ID NO: 506132 - DNA, 33 bp, Homo sapien
atttatgtgtaaacatgaggaaatggcatctgt

SEQ ID NO: 506133 - DNA, 33 bp, Homo sapien
atcttgtatattagtactaccttacctgaactg

SEQ ID NO: 506134 - DNA, 33 bp, Homo sapien
atcttgtatattagtattaccttacctgaactg

SEQ ID NO: 506135 - DNA, 33 bp, Homo sapien
tgcatcaagcttttcaaaatgggaacatattca

SEQ ID NO: 506136 - DNA, 33 bp, Homo sapien
tgcatcaagcttttcagaatgggaacatattca

SEQ ID NO: 506137 - DNA, 33 bp, Homo sapien
attctacagacagggaaattccagaagccactg

SEQ ID NO: 506138 - DNA, 33 bp, Homo sapien
attctacagacagggagattccagaagccactg

SEQ ID NO: 506139 - DNA, 33 bp, Homo sapien
ggacaaaaactcatcaaggaaagattcaaatgt

SEQ ID NO: 506140 - DNA, 33 bp, Homo sapien
ggacaaaaactcatcagggaaagattcaaatgt

SEQ ID NO: 506141 - DNA, 33 bp, Homo sapien
aacagacaaaatcaaacttaacagtagacttca

SEQ ID NO: 506142 - DNA, 33 bp, Homo sapien
aacagacaaaatcaaatttaacagtagacttca

SEQ ID NO: 506143 - DNA, 33 bp, Homo sapien
cacaagactgaaaaaacgaaaaccttgcacaaa

SEQ ID NO: 506144 - DNA, 33 bp, Homo sapien
cacaagactgaaaaaatgaaaaccttgcacaaa

SEQ ID NO: 506145 - DNA, 33 bp, Homo sapien
gtgagtctaatgtacaatgaagcccaagaacca

SEQ ID NO: 506146 - DNA, 33 bp, Homo sapien
gtgagtctaatgtacagtgaagcccaagaacca

SEQ ID NO: 506147 - DNA, 33 bp, Homo sapien
ccagctgagcctaagaagcacccgtggtagacc

SEQ ID NO: 506148 - DNA, 33 bp, Homo sapien
ccagctgagcctaagacgcacccgtggtagacc

SEQ ID NO: 506149 - DNA, 33 bp, Homo sapien
caaattcatccttctcagagaacatcaccacgt

SEQ ID NO: 506150 - DNA, 33 bp, Homo sapien
caaattcatccttctcggagaacatcaccacgt

SEQ ID NO: 506151 - DNA, 33 bp, Homo sapien
acaaagtgctaggtgacagtgaggccaaggaaa

SEQ ID NO: 506152 - DNA, 33 bp, Homo sapien
acaaagtgctaggtgatagtgaggccaaggaaa

SEQ ID NO: 506153 - DNA, 33 bp, Homo sapien
ttgttcagcacggatccctttcactacagaggg

SEQ ID NO: 506154 - DNA, 33 bp, Homo sapien
ttgttcagcacggatctctttcactacagaggg

SEQ ID NO: 506155 - DNA, 33 bp, Homo sapien
cgggtgttgtgcatccaccgtgtagccttggag

SEQ ID NO: 506156 - DNA, 33 bp, Homo sapien
cgggtgttgtgcatccgccgtgtagccttggag

SEQ ID NO: 506157 - DNA, 33 bp, Homo sapien
gtgggggtcatgtgtacgggtcaagctatgcaa

SEQ ID NO: 506158 - DNA, 33 bp, Homo sapien
gtgggggtcatgtgtatgggtcaagctatgcaa

SEQ ID NO: 506159 - DNA, 33 bp, Homo sapien
tccaataatctttcgcaaatttctacctaatgc

SEQ ID NO: 506160 - DNA, 33 bp, Homo sapien
tccaataatctttcgctaatttctacctaatgc

SEQ ID NO: 506161 - DNA, 33 bp, Homo sapien
gatgctggacaatggacggcagacaaaggctgc

SEQ ID NO: 506162 - DNA, 33 bp, Homo sapien
gatgctggacaatggatggcagacaaaggctgc

SEQ ID NO: 506163 - DNA, 33 bp, Homo sapien
aaaaaaggcttgaagacctatgagctaaaccat

SEQ ID NO: 506164 - DNA, 33 bp, Homo sapien
aaaaaaggcttgaagagctatgagctaaaccat

SEQ ID NO: 506165 - DNA, 33 bp, Homo sapien
ctcaggcaggcctgagaccctggaaagctagtt

SEQ ID NO: 506166 - DNA, 33 bp, Homo sapien
ctcaggcaggcctgagtccctggaaagctagtt

SEQ ID NO: 506167 - DNA, 33 bp, Homo sapien
caggtcaccaaaggcactgagcttcctgctgtg

SEQ ID NO: 506168 - DNA, 33 bp, Homo sapien
caggtcaccaaaggcattgagcttcctgctgtg

SEQ ID NO: 506169 - DNA, 33 bp, Homo sapien
gcctggccaggagctcaccttttttgagtgttc

SEQ ID NO: 506170 - DNA, 33 bp, Homo sapien
gcctggccaggagctcgccttttttgagtgttc

SEQ ID NO: 506171 - DNA, 33 bp, Homo sapien
accaaacttcactgcacctcaggttctaactag

SEQ ID NO: 506172 - DNA, 33 bp, Homo sapien
accaaacttcactgcatctcaggttctaactag

SEQ ID NO: 506173 - DNA, 33 bp, Homo sapien
agatagccaaattgcacggtgctgttactgagc

SEQ ID NO: 506174 - DNA, 33 bp, Homo sapien
agatagccaaattgcatggtgctgttactgagc

SEQ ID NO: 506175 - DNA, 33 bp, Homo sapien
tttgcttctcattttacgggcagacgtaaccaa

SEQ ID NO: 506176 - DNA, 33 bp, Homo sapien
tttgcttctcattttatgggcagacgtaaccaa

SEQ ID NO: 506177 - DNA, 33 bp, Homo sapien
tccataatgaagaagacaaatcagagtgtacac

SEQ ID NO: 506178 - DNA, 33 bp, Homo sapien
tccataatgaagaagataaatcagagtgtacac

SEQ ID NO: 506179 - DNA, 33 bp, Homo sapien
tcgtatctggaagatgcaggtcgattaggaggg

SEQ ID NO: 506180 - DNA, 33 bp, Homo sapien
tcgtatctggaagatggaggtcgattaggaggg

SEQ ID NO: 506181 - DNA, 33 bp, Homo sapien
ttccaaaaatctgaaaatagattatcaagactc

SEQ ID NO: 506182 - DNA, 33 bp, Homo sapien
ttccaaaaatctgaaagtagattatcaagactc

SEQ ID NO: 506183 - DNA, 33 bp, Homo sapien
tttgttttccatttccaagaaaacagaggacta

SEQ ID NO: 506184 - DNA, 33 bp, Homo sapien
tttgttttccatttccgagaaaacagaggacta

SEQ ID NO: 506185 - DNA, 33 bp, Homo sapien
ctgaggaaactgacagaaaactgtggccacaaa

SEQ ID NO: 506186 - DNA, 33 bp, Homo sapien
ctgaggaaactgacaggaaactgtggccacaaa

SEQ ID NO: 506187 - DNA, 33 bp, Homo sapien
aacaaattcatccttccaataggcaagtacata

SEQ ID NO: 506188 - DNA, 33 bp, Homo sapien
aacaaattcatccttctaataggcaagtacata

SEQ ID NO: 506189 - DNA, 33 bp, Homo sapien
actcaaaagtgtcttacaaatgcacatcctcag

SEQ ID NO: 506190 - DNA, 33 bp, Homo sapien
actcaaaagtgtcttagaaatgcacatcctcag

SEQ ID NO: 506191 - DNA, 33 bp, Homo sapien
cggctgacagcctaccagacaaggcaatgagac

SEQ ID NO: 506192 - DNA, 33 bp, Homo sapien
cggctgacagcctaccggacaaggcaatgagac

SEQ ID NO: 506193 - DNA, 33 bp, Homo sapien
cgaggtccttaaaaagaagacagcagaagcaga

SEQ ID NO: 506194 - DNA, 33 bp, Homo sapien
cgaggtccttaaaaaggagacagcagaagcaga

SEQ ID NO: 506195 - DNA, 33 bp, Homo sapien
agagccttacaccaagaaggtaggccctgctgc

SEQ ID NO: 506196 - DNA, 33 bp, Homo sapien
agagccttacaccaaggaggtaggccctgctgc

SEQ ID NO: 506197 - DNA, 33 bp, Homo sapien
atagagacaacctgaacagttccatagctgcta

SEQ ID NO: 506198 - DNA, 33 bp, Homo sapien
atagagacaacctgaatagttccatagctgcta

SEQ ID NO: 506199 - DNA, 33 bp, Homo sapien
ttattccaaaagtttaactgccctgtgaccacc

SEQ ID NO: 506200 - DNA, 33 bp, Homo sapien
ttattccaaaagtttatctgccctgtgaccacc

SEQ ID NO: 506201 - DNA, 33 bp, Homo sapien
agaccctgatagaaaccccaggaccacgtgtaa

SEQ ID NO: 506202 - DNA, 33 bp, Homo sapien
agaccctgatagaaactccaggaccacgtgtaa

SEQ ID NO: 506203 - DNA, 33 bp, Homo sapien
gtagataaagactcaaaactccacatgtttgca

SEQ ID NO: 506204 - DNA, 33 bp, Homo sapien
gtagataaagactcaagactccacatgtttgca

SEQ ID NO: 506205 - DNA, 33 bp, Homo sapien
gcaaggggctgcataagctgttagaaggtagta

SEQ ID NO: 506206 - DNA, 33 bp, Homo sapien
gcaaggggctgcataatctgttagaaggtagta

SEQ ID NO: 506207 - DNA, 33 bp, Homo sapien
actgacatcaacttctaagaaccaattatcttt

SEQ ID NO: 506208 - DNA, 33 bp, Homo sapien
actgacatcaacttctgagaaccaattatcttt

SEQ ID NO: 506209 - DNA, 33 bp, Homo sapien
accactattattcaagcagaggacaaataggtt

SEQ ID NO: 506210 - DNA, 33 bp, Homo sapien
accactattattcaagtagaggacaaataggtt

SEQ ID NO: 506211 - DNA, 33 bp, Homo sapien
tgatgtaggccctttccatcctaagatactatc

SEQ ID NO: 506212 - DNA, 33 bp, Homo sapien
tgatgtaggccctttctatcctaagatactatc

SEQ ID NO: 506213 - DNA, 33 bp, Homo sapien
gcagagatgtcaatagaaggaaaagcaaaaggg

SEQ ID NO: 506214 - DNA, 33 bp, Homo sapien
gcagagatgtcaataggaggaaaagcaaaaggg

SEQ ID NO: 506215 - DNA, 33 bp, Homo sapien
gaaaagttggagcccacacaggtagtcaactct

SEQ ID NO: 506216 - DNA, 33 bp, Homo sapien
gaaaagttggagcccagacaggtagtcaactct

SEQ ID NO: 506217 - DNA, 33 bp, Homo sapien
ctctcctgcaaggggcaagagcatcctggtaac

SEQ ID NO: 506218 - DNA, 33 bp, Homo sapien
ctctcctgcaaggggccagagcatcctggtaac

SEQ ID NO: 506219 - DNA, 33 bp, Homo sapien
gcagggaatgagttaccacagcaggtgtcagga

SEQ ID NO: 506220 - DNA, 33 bp, Homo sapien
gcagggaatgagttactacagcaggtgtcagga

SEQ ID NO: 506221 - DNA, 33 bp, Homo sapien
aatatgagtggcgtccacagtgttcatgctgtc

SEQ ID NO: 506222 - DNA, 33 bp, Homo sapien
aatatgagtggcgtccgcagtgttcatgctgtc

SEQ ID NO: 506223 - DNA, 33 bp, Homo sapien
aaataataatttgaacggccagtttgcatcagc

SEQ ID NO: 506224 - DNA, 33 bp, Homo sapien
aaataataatttgaactgccagtttgcatcagc

SEQ ID NO: 506225 - DNA, 33 bp, Homo sapien
ttctccaaactgttgccctctcataataagaga

SEQ ID NO: 506226 - DNA, 33 bp, Homo sapien
ttctccaaactgttgcgctctcataataagaga

SEQ ID NO: 506227 - DNA, 33 bp, Homo sapien
ctgcagaggttggctccacaataaattccttcc

SEQ ID NO: 506228 - DNA, 33 bp, Homo sapien
ctgcagaggttggctctacaataaattccttcc

SEQ ID NO: 506229 - DNA, 33 bp, Homo sapien
tcacaaggaagggaccaccatcatcctgtccgt

SEQ ID NO: 506230 - DNA, 33 bp, Homo sapien
tcacaaggaagggaccgccatcatcctgtccgt

SEQ ID NO: 506231 - DNA, 33 bp, Homo sapien
ttgggcggcgttatcccgactgccttcctcgcc

SEQ ID NO: 506232 - DNA, 33 bp, Homo sapien
ttgggcggcgttatcctgactgccttcctcgcc

SEQ ID NO: 506233 - DNA, 33 bp, Homo sapien
caagggtgtgtaataacaagctgtaagaagctt

SEQ ID NO: 506234 - DNA, 33 bp, Homo sapien
caagggtgtgtaataagaagctgtaagaagctt

SEQ ID NO: 506235 - DNA, 33 bp, Homo sapien
tttaggtatataggtaagtattggcatagcttg

SEQ ID NO: 506236 - DNA, 33 bp, Homo sapien
tttaggtatataggtacgtattggcatagcttg

SEQ ID NO: 506237 - DNA, 33 bp, Homo sapien
cttgaaccagggtaaaaatggctccctgcgaac

SEQ ID NO: 506238 - DNA, 33 bp, Homo sapien
cttgaaccagggtaaagatggctccctgcgaac

SEQ ID NO: 506239 - DNA, 33 bp, Homo sapien
tggccccttgtcttcacgtctcttattaccaca

SEQ ID NO: 506240 - DNA, 33 bp, Homo sapien
tggccccttgtcttcatgtctcttattaccaca

SEQ ID NO: 506241 - DNA, 33 bp, Homo sapien
acgcagatttgggatacgattataaagagttaa

SEQ ID NO: 506242 - DNA, 33 bp, Homo sapien
acgcagatttgggatatgattataaagagttaa

SEQ ID NO: 506243 - DNA, 33 bp, Homo sapien
cacaaacctgaacaaactaagccccagtggcgc

SEQ ID NO: 506244 - DNA, 33 bp, Homo sapien
cacaaacctgaacaaattaagccccagtggcgc

SEQ ID NO: 506245 - DNA, 33 bp, Homo sapien
gatttggaaagccaacactctccaaaggccacc

SEQ ID NO: 506246 - DNA, 33 bp, Homo sapien
gatttggaaagccaacgctctccaaaggccacc

SEQ ID NO: 506247 - DNA, 33 bp, Homo sapien
ttccaagatggtcatacgtattgtaacaagtgc

SEQ ID NO: 506248 - DNA, 33 bp, Homo sapien
ttccaagatggtcatatgtattgtaacaagtgc

SEQ ID NO: 506249 - DNA, 33 bp, Homo sapien
cacacagtccaaccaccagagatcgagttgcta

SEQ ID NO: 506250 - DNA, 33 bp, Homo sapien
cacacagtccaaccactagagatcgagttgcta

SEQ ID NO: 506251 - DNA, 33 bp, Homo sapien
aatagggatgctctcacgacttagatccctcaa

SEQ ID NO: 506252 - DNA, 33 bp, Homo sapien
aatagggatgctctcatgacttagatccctcaa

SEQ ID NO: 506253 - DNA, 33 bp, Homo sapien
tttagttacttaagaaccatcatttagcatgag

SEQ ID NO: 506254 - DNA, 33 bp, Homo sapien
tttagttacttaagaatcatcatttagcatgag

SEQ ID NO: 506255 - DNA, 33 bp, Homo sapien
gccatctggaatatgccgatgagtgagctgtgc

SEQ ID NO: 506256 - DNA, 33 bp, Homo sapien
gccatctggaatatgctgatgagtgagctgtgc

SEQ ID NO: 506257 - DNA, 33 bp, Homo sapien
tcctgctatgggctccagagaggtgatgctgct

SEQ ID NO: 506258 - DNA, 33 bp, Homo sapien
tcctgctatgggctccggagaggtgatgctgct

SEQ ID NO: 506259 - DNA, 33 bp, Homo sapien
gactcagtctgtgttcaatttccatgaagaaaa

SEQ ID NO: 506260 - DNA, 33 bp, Homo sapien
gactcagtctgtgttcgatttccatgaagaaaa

SEQ ID NO: 506261 - DNA, 33 bp, Homo sapien
tttatggaaaagttgaaaaaacagaacagagga

SEQ ID NO: 506262 - DNA, 33 bp, Homo sapien
tttatggaaaagttgagaaaacagaacagagga

SEQ ID NO: 506263 - DNA, 33 bp, Homo sapien
ggcccttacagccatgacaatataactacagta

SEQ ID NO: 506264 - DNA, 33 bp, Homo sapien
ggcccttacagccatggcaatataactacagta

SEQ ID NO: 506265 - DNA, 33 bp, Homo sapien
caaattaacttggcacactaatacttcagttat

SEQ ID NO: 506266 - DNA, 33 bp, Homo sapien
caaattaacttggcacgctaatacttcagttat

SEQ ID NO: 506267 - DNA, 33 bp, Homo sapien
agcatggactgtactaaacaccttaggagctgg

SEQ ID NO: 506268 - DNA, 33 bp, Homo sapien
agcatggactgtactagacaccttaggagctgg

SEQ ID NO: 506269 - DNA, 33 bp, Homo sapien
cggtggagttttcagaagcacccctgctacatg

SEQ ID NO: 506270 - DNA, 33 bp, Homo sapien
cggtggagttttcagaggcacccctgctacatg

SEQ ID NO: 506271 - DNA, 33 bp, Homo sapien
tgtggatgaagcatgcacattgtttccccctgg

SEQ ID NO: 506272 - DNA, 33 bp, Homo sapien
tgtggatgaagcatgcgcattgtttccccctgg

SEQ ID NO: 506273 - DNA, 33 bp, Homo sapien
ggaacttacgtgttcaatcgtttgacttttttt

SEQ ID NO: 506274 - DNA, 33 bp, Homo sapien
ggaacttacgtgttcagtcgtttgacttttttt

SEQ ID NO: 506275 - DNA, 33 bp, Homo sapien
aaggttgtttctgacaccaagaggaaagggagt

SEQ ID NO: 506276 - DNA, 33 bp, Homo sapien
aaggttgtttctgacatcaagaggaaagggagt

SEQ ID NO: 506277 - DNA, 33 bp, Homo sapien
attgatttataactcaccccactttcttctaaa

SEQ ID NO: 506278 - DNA, 33 bp, Homo sapien
attgatttataactcatcccactttcttctaaa

SEQ ID NO: 506279 - DNA, 33 bp, Homo sapien
caattattgggactgcccttgctgcaattccac

SEQ ID NO: 506280 - DNA, 33 bp, Homo sapien
caattattgggactgctcttgctgcaattccac

SEQ ID NO: 506281 - DNA, 33 bp, Homo sapien
aaaaataagatgcaaacgcggagctctctggca

SEQ ID NO: 506282 - DNA, 33 bp, Homo sapien
aaaaataagatgcaaatgcggagctctctggca

SEQ ID NO: 506283 - DNA, 33 bp, Homo sapien
gacagagagatccgggaaacagcctgcacacag

SEQ ID NO: 506284 - DNA, 33 bp, Homo sapien
gacagagagatccgggtaacagcctgcacacag

SEQ ID NO: 506285 - DNA, 33 bp, Homo sapien
tcaggcccaagtgttaccttgttaggcacaagt

SEQ ID NO: 506286 - DNA, 33 bp, Homo sapien
tcaggcccaagtgttagcttgttaggcacaagt

SEQ ID NO: 506287 - DNA, 33 bp, Homo sapien
caaggccatccgtctcacaacagggcagcataa

SEQ ID NO: 506288 - DNA, 33 bp, Homo sapien
caaggccatccgtctcgcaacagggcagcataa

SEQ ID NO: 506289 - DNA, 33 bp, Homo sapien
gtaaattgctaaaatcaactgtattcaggttta

SEQ ID NO: 506290 - DNA, 33 bp, Homo sapien
gtaaattgctaaaatcgactgtattcaggttta

SEQ ID NO: 506291 - DNA, 33 bp, Homo sapien
atccctgggaaaatgacgatacagggaaactgc

SEQ ID NO: 506292 - DNA, 33 bp, Homo sapien
atccctgggaaaatgatgatacagggaaactgc

SEQ ID NO: 506293 - DNA, 33 bp, Homo sapien
tttgattggtcaaagcagccatggagcccaggt

SEQ ID NO: 506294 - DNA, 33 bp, Homo sapien
tttgattggtcaaagctgccatggagcccaggt

SEQ ID NO: 506295 - DNA, 33 bp, Homo sapien
ctgtagacccacaccaactttccgtggcagcca

SEQ ID NO: 506296 - DNA, 33 bp, Homo sapien
ctgtagacccacaccagctttccgtggcagcca

SEQ ID NO: 506297 - DNA, 33 bp, Homo sapien
gacacacataaatgggcatattaaccaaaaagg

SEQ ID NO: 506298 - DNA, 33 bp, Homo sapien
gacacacataaatgggtatattaaccaaaaagg

SEQ ID NO: 506299 - DNA, 33 bp, Homo sapien
atttgccctgtgttcacgttgcacgagtttgtt

SEQ ID NO: 506300 - DNA, 33 bp, Homo sapien
atttgccctgtgttcaggttgcacgagtttgtt

SEQ ID NO: 506301 - DNA, 33 bp, Homo sapien
agagctggccagagagaaagtagttaggacctg

SEQ ID NO: 506302 - DNA, 33 bp, Homo sapien
agagctggccagagaggaagtagttaggacctg

SEQ ID NO: 506303 - DNA, 33 bp, Homo sapien
cacacactgcagcatgaatgagcctagaggaca

SEQ ID NO: 506304 - DNA, 33 bp, Homo sapien
cacacactgcagcatggatgagcctagaggaca

SEQ ID NO: 506305 - DNA, 33 bp, Homo sapien
gcacttaccatatcgtaaatgaggctacaggtc

SEQ ID NO: 506306 - DNA, 33 bp, Homo sapien
gcacttaccatatcgtgaatgaggctacaggtc

SEQ ID NO: 506307 - DNA, 33 bp, Homo sapien
gggctctggatctggtaacagccaactcctggt

SEQ ID NO: 506308 - DNA, 33 bp, Homo sapien
gggctctggatctggtgacagccaactcctggt

SEQ ID NO: 506309 - DNA, 33 bp, Homo sapien
caatgcctgaaataaccgaggaatcaaagcact

SEQ ID NO: 506310 - DNA, 33 bp, Homo sapien
caatgcctgaaataactgaggaatcaaagcact

SEQ ID NO: 506311 - DNA, 33 bp, Homo sapien
cacgtgatgctgccccaacgtggagatccggga

SEQ ID NO: 506312 - DNA, 33 bp, Homo sapien
cacgtgatgctgccccgacgtggagatccggga

SEQ ID NO: 506313 - DNA, 33 bp, Homo sapien
aaagggagcagatgcacggccccgggagaagtc

SEQ ID NO: 506314 - DNA, 33 bp, Homo sapien
aaagggagcagatgcatggccccgggagaagtc

SEQ ID NO: 506315 - DNA, 33 bp, Homo sapien
aatgcgactggagttacgaggatggtgacattg

SEQ ID NO: 506316 - DNA, 33 bp, Homo sapien
aatgcgactggagttatgaggatggtgacattg

SEQ ID NO: 506317 - DNA, 33 bp, Homo sapien
atgggtcatttccaaagtagtcatttctttctc

SEQ ID NO: 506318 - DNA, 33 bp, Homo sapien
atgggtcatttccaaattagtcatttctttctc

SEQ ID NO: 506319 - DNA, 33 bp, Homo sapien
agtcaatgatgacaagaagagagcgaaataagt

SEQ ID NO: 506320 - DNA, 33 bp, Homo sapien
agtcaatgatgacaaggagagagcgaaataagt

SEQ ID NO: 506321 - DNA, 33 bp, Homo sapien
ccttagtctccctgtaccaggcgattgtccccg

SEQ ID NO: 506322 - DNA, 33 bp, Homo sapien
ccttagtctccctgtatcaggcgattgtccccg

SEQ ID NO: 506323 - DNA, 33 bp, Homo sapien
aaacaatggattctaacccgagctggagataaa

SEQ ID NO: 506324 - DNA, 33 bp, Homo sapien
aaacaatggattctaatccgagctggagataaa

SEQ ID NO: 506325 - DNA, 33 bp, Homo sapien
gcttagctgaagttaacgagtgtagttcttggc

SEQ ID NO: 506326 - DNA, 33 bp, Homo sapien
gcttagctgaagttaaggagtgtagttcttggc

SEQ ID NO: 506327 - DNA, 33 bp, Homo sapien
caactgaaccaagttacgagaatgtttagaact

SEQ ID NO: 506328 - DNA, 33 bp, Homo sapien
caactgaaccaagttatgagaatgtttagaact

SEQ ID NO: 506329 - DNA, 33 bp, Homo sapien
cttgaaagtgaaaaacactggttatataggtat

SEQ ID NO: 506330 - DNA, 33 bp, Homo sapien
cttgaaagtgaaaaacgctggttatataggtat

SEQ ID NO: 506331 - DNA, 33 bp, Homo sapien
tctttctttcttcgggcaagctcagcacttgta

SEQ ID NO: 506332 - DNA, 33 bp, Homo sapien
tctttctttcttcgggtaagctcagcacttgta

SEQ ID NO: 506333 - DNA, 33 bp, Homo sapien
tcacatgcattcactaaacacgtgcccagtgag

SEQ ID NO: 506334 - DNA, 33 bp, Homo sapien
tcacatgcattcactacacacgtgcccagtgag

SEQ ID NO: 506335 - DNA, 33 bp, Homo sapien
agccctaaagcaagcaccaaacccagtcctacc

SEQ ID NO: 506336 - DNA, 33 bp, Homo sapien
agccctaaagcaagcatcaaacccagtcctacc

SEQ ID NO: 506337 - DNA, 33 bp, Homo sapien
ttatcacaaatataaactgaagcctggtgatct

SEQ ID NO: 506338 - DNA, 33 bp, Homo sapien
ttatcacaaatataaagtgaagcctggtgatct

SEQ ID NO: 506339 - DNA, 33 bp, Homo sapien
accctggaagaaagataacttcaaaatcaagta

SEQ ID NO: 506340 - DNA, 33 bp, Homo sapien
accctggaagaaagatcacttcaaaatcaagta

SEQ ID NO: 506341 - DNA, 33 bp, Homo sapien
ggcacagcagttcccaagatcctcttactttca

SEQ ID NO: 506342 - DNA, 33 bp, Homo sapien
ggcacagcagttcccatgatcctcttactttca

SEQ ID NO: 506343 - DNA, 33 bp, Homo sapien
tgaaaccccatatttcaatgactgctaggactg

SEQ ID NO: 506344 - DNA, 33 bp, Homo sapien
tgaaaccccatatttcgatgactgctaggactg

SEQ ID NO: 506345 - DNA, 33 bp, Homo sapien
tgatgagcagatctatcagtgtagattgttttt

SEQ ID NO: 506346 - DNA, 33 bp, Homo sapien
tgatgagcagatctattagtgtagattgttttt

SEQ ID NO: 506347 - DNA, 33 bp, Homo sapien
aaccctgtgtttgaatgatgtgtggagcagtca

SEQ ID NO: 506348 - DNA, 33 bp, Homo sapien
aaccctgtgtttgaattatgtgtggagcagtca

SEQ ID NO: 506349 - DNA, 33 bp, Homo sapien
tttaaaaaatccacaccgggctcgtctgcttcc

SEQ ID NO: 506350 - DNA, 33 bp, Homo sapien
tttaaaaaatccacactgggctcgtctgcttcc

SEQ ID NO: 506351 - DNA, 33 bp, Homo sapien
tctctcagctgcaccacagtcccgcacaaggcc

SEQ ID NO: 506352 - DNA, 33 bp, Homo sapien
tctctcagctgcaccagagtcccgcacaaggcc

SEQ ID NO: 506353 - DNA, 33 bp, Homo sapien
agaacactgcctggaacgtgcgtcctcccgcat

SEQ ID NO: 506354 - DNA, 33 bp, Homo sapien
agaacactgcctggaatgtgcgtcctcccgcat

SEQ ID NO: 506355 - DNA, 33 bp, Homo sapien
ggtccaccgactgctaacagcatgaaatcattc

SEQ ID NO: 506356 - DNA, 33 bp, Homo sapien
ggtccaccgactgctaccagcatgaaatcattc

SEQ ID NO: 506357 - DNA, 33 bp, Homo sapien
taattacctttttgcaaattggacttgtgtgta

SEQ ID NO: 506358 - DNA, 33 bp, Homo sapien
taattacctttttgcacattggacttgtgtgta

SEQ ID NO: 506359 - DNA, 33 bp, Homo sapien
atgtcacctattcagaactggttatttggttat

SEQ ID NO: 506360 - DNA, 33 bp, Homo sapien
atgtcacctattcagacctggttatttggttat

SEQ ID NO: 506361 - DNA, 33 bp, Homo sapien
caggtgttcaagcaaaagtttgtacccaaatgt

SEQ ID NO: 506362 - DNA, 33 bp, Homo sapien
caggtgttcaagcaaatgtttgtacccaaatgt

SEQ ID NO: 506363 - DNA, 33 bp, Homo sapien
tctcaagcaggcagcactaaatatacatgaccc

SEQ ID NO: 506364 - DNA, 33 bp, Homo sapien
tctcaagcaggcagcattaaatatacatgaccc

SEQ ID NO: 506365 - DNA, 33 bp, Homo sapien
aacggggctgctgccaaagctatgcctcccaga

SEQ ID NO: 506366 - DNA, 33 bp, Homo sapien
aacggggctgctgccagagctatgcctcccaga

SEQ ID NO: 506367 - DNA, 33 bp, Homo sapien
tcatggcttagaaaaacagaggagagaaaggat

SEQ ID NO: 506368 - DNA, 33 bp, Homo sapien
tcatggcttagaaaaatagaggagagaaaggat

SEQ ID NO: 506369 - DNA, 33 bp, Homo sapien
ggtggctctcggcatacgcgtttatctgagtga

SEQ ID NO: 506370 - DNA, 33 bp, Homo sapien
ggtggctctcggcatatgcgtttatctgagtga

SEQ ID NO: 506371 - DNA, 33 bp, Homo sapien
ttccagctctataacacccaatatgcacaactg

SEQ ID NO: 506372 - DNA, 33 bp, Homo sapien
ttccagctctataacagccaatatgcacaactg

SEQ ID NO: 506373 - DNA, 33 bp, Homo sapien
tactactgataatgatgagtgataagtagtatt

SEQ ID NO: 506374 - DNA, 33 bp, Homo sapien
tactactgataatgattagtgataagtagtatt

SEQ ID NO: 506375 - DNA, 33 bp, Homo sapien
aaattaagtggcaagacaataaaggaatggcgt

SEQ ID NO: 506376 - DNA, 33 bp, Homo sapien
aaattaagtggcaagataataaaggaatggcgt

SEQ ID NO: 506377 - DNA, 33 bp, Homo sapien
aggcaatataaagaggccaaatctgactgtggg

SEQ ID NO: 506378 - DNA, 33 bp, Homo sapien
aggcaatataaagaggtcaaatctgactgtggg

SEQ ID NO: 506379 - DNA, 33 bp, Homo sapien
tgggggctcagacttacgccccatctaccacta

SEQ ID NO: 506380 - DNA, 33 bp, Homo sapien
tgggggctcagacttatgccccatctaccacta

SEQ ID NO: 506381 - DNA, 33 bp, Homo sapien
cctttacaacatccctcaatatggctgctctga

SEQ ID NO: 506382 - DNA, 33 bp, Homo sapien
cctttacaacatcccttaatatggctgctctga

SEQ ID NO: 506383 - DNA, 33 bp, Homo sapien
ccagagggaaacagacagatcagcaggttgttt

SEQ ID NO: 506384 - DNA, 33 bp, Homo sapien
ccagagggaaacagacggatcagcaggttgttt

SEQ ID NO: 506385 - DNA, 33 bp, Homo sapien
gtgatcttcaaatgcacaactgtctgtgatttg

SEQ ID NO: 506386 - DNA, 33 bp, Homo sapien
gtgatcttcaaatgcagaactgtctgtgatttg

SEQ ID NO: 506387 - DNA, 33 bp, Homo sapien
atgcttctaagtgtagaaagtggtcagtggtga

SEQ ID NO: 506388 - DNA, 33 bp, Homo sapien
atgcttctaagtgtaggaagtggtcagtggtga

SEQ ID NO: 506389 - DNA, 33 bp, Homo sapien
agcatactaagaagcacggaagggcagatttga

SEQ ID NO: 506390 - DNA, 33 bp, Homo sapien
agcatactaagaagcatggaagggcagatttga

SEQ ID NO: 506391 - DNA, 33 bp, Homo sapien
agggacaaaggaactcaaaatataattatctgt

SEQ ID NO: 506392 - DNA, 33 bp, Homo sapien
agggacaaaggaactcgaaatataattatctgt

SEQ ID NO: 506393 - DNA, 33 bp, Homo sapien
ctgggctcgagtctgggactgagagcatgattc

SEQ ID NO: 506394 - DNA, 33 bp, Homo sapien
ctgggctcgagtctggtactgagagcatgattc

SEQ ID NO: 506395 - DNA, 33 bp, Homo sapien
catgtaacaagtaaagaccagggacactgccaa

SEQ ID NO: 506396 - DNA, 33 bp, Homo sapien
catgtaacaagtaaaggccagggacactgccaa

SEQ ID NO: 506397 - DNA, 33 bp, Homo sapien
gaccagggaaacaatgacaacttttcatggcta

SEQ ID NO: 506398 - DNA, 33 bp, Homo sapien
gaccagggaaacaatggcaacttttcatggcta

SEQ ID NO: 506399 - DNA, 33 bp, Homo sapien
ttgtgtttgctcttgaacttcacatcaaggaat

SEQ ID NO: 506400 - DNA, 33 bp, Homo sapien
ttgtgtttgctcttgaccttcacatcaaggaat

SEQ ID NO: 506401 - DNA, 33 bp, Homo sapien
tatgggcctataatggcagatacatgacatctc

SEQ ID NO: 506402 - DNA, 33 bp, Homo sapien
tatgggcctataatggtagatacatgacatctc

SEQ ID NO: 506403 - DNA, 33 bp, Homo sapien
tctgccagccgtgaatcagcgttcctgttgctc

SEQ ID NO: 506404 - DNA, 33 bp, Homo sapien
tctgccagccgtgaatgagcgttcctgttgctc

SEQ ID NO: 506405 - DNA, 33 bp, Homo sapien
agaacaagggccaacactacatgacttcgagac

SEQ ID NO: 506406 - DNA, 33 bp, Homo sapien
agaacaagggccaacattacatgacttcgagac

SEQ ID NO: 506407 - DNA, 33 bp, Homo sapien
atggaaagttcattacaatggccctaaacagca

SEQ ID NO: 506408 - DNA, 33 bp, Homo sapien
atggaaagttcattacgatggccctaaacagca

SEQ ID NO: 506409 - DNA, 33 bp, Homo sapien
acttggaccctgtgcaaaaagagaggggggctg

SEQ ID NO: 506410 - DNA, 33 bp, Homo sapien
acttggaccctgtgcagaaagagaggggggctg

SEQ ID NO: 506411 - DNA, 33 bp, Homo sapien
aggtctagaattcaatcagagctgtaactgttt

SEQ ID NO: 506412 - DNA, 33 bp, Homo sapien
aggtctagaattcaattagagctgtaactgttt

SEQ ID NO: 506413 - DNA, 33 bp, Homo sapien
gtcgttgctgattgccaactgttttggtaacta

SEQ ID NO: 506414 - DNA, 33 bp, Homo sapien
gtcgttgctgattgccgactgttttggtaacta

SEQ ID NO: 506415 - DNA, 33 bp, Homo sapien
ccctcacagcctgaacccctttagacaactctt

SEQ ID NO: 506416 - DNA, 33 bp, Homo sapien
ccctcacagcctgaactcctttagacaactctt

SEQ ID NO: 506417 - DNA, 33 bp, Homo sapien
ggctctaatcctcagaactccaaggatcagctg

SEQ ID NO: 506418 - DNA, 33 bp, Homo sapien
ggctctaatcctcagacctccaaggatcagctg

SEQ ID NO: 506419 - DNA, 33 bp, Homo sapien
taggctcacacactcacgcggtatgccctcggt

SEQ ID NO: 506420 - DNA, 33 bp, Homo sapien
taggctcacacactcatgcggtatgccctcggt

SEQ ID NO: 506421 - DNA, 33 bp, Homo sapien
acctgcacaggtaccaagagcagtcctcatgat

SEQ ID NO: 506422 - DNA, 33 bp, Homo sapien
acctgcacaggtaccaggagcagtcctcatgat

SEQ ID NO: 506423 - DNA, 33 bp, Homo sapien
aagctccaattagtcacgtcataaagctgggcc

SEQ ID NO: 506424 - DNA, 33 bp, Homo sapien
aagctccaattagtcatgtcataaagctgggcc

SEQ ID NO: 506425 - DNA, 33 bp, Homo sapien
cttggcaacctgagcaactgttggcgatgtgaa

SEQ ID NO: 506426 - DNA, 33 bp, Homo sapien
cttggcaacctgagcagctgttggcgatgtgaa

SEQ ID NO: 506427 - DNA, 33 bp, Homo sapien
agccaaatttgtttcaaaacacaactttcgact

SEQ ID NO: 506428 - DNA, 33 bp, Homo sapien
agccaaatttgtttcacaacacaactttcgact

SEQ ID NO: 506429 - DNA, 33 bp, Homo sapien
ttccatcatgggcacactggaagtcctgtaggc

SEQ ID NO: 506430 - DNA, 33 bp, Homo sapien
ttccatcatgggcacattggaagtcctgtaggc

SEQ ID NO: 506431 - DNA, 33 bp, Homo sapien
tgtattttcatggcaaaaagtcaggaaacttac

SEQ ID NO: 506432 - DNA, 33 bp, Homo sapien
tgtattttcatggcaagaagtcaggaaacttac

SEQ ID NO: 506433 - DNA, 33 bp, Homo sapien
caatggacacgaggagaaatcagaggctcacag

SEQ ID NO: 506434 - DNA, 33 bp, Homo sapien
caatggacacgaggagcaatcagaggctcacag

SEQ ID NO: 506435 - DNA, 33 bp, Homo sapien
ggtctgactcggtccacgtacctgcaatctgag

SEQ ID NO: 506436 - DNA, 33 bp, Homo sapien
ggtctgactcggtccatgtacctgcaatctgag

SEQ ID NO: 506437 - DNA, 33 bp, Homo sapien
cttcagctcatggatcaaggatagtttagattg

SEQ ID NO: 506438 - DNA, 33 bp, Homo sapien
cttcagctcatggatcgaggatagtttagattg

SEQ ID NO: 506439 - DNA, 33 bp, Homo sapien
tatatacatatatgcaaaggaaaaatgatatct

SEQ ID NO: 506440 - DNA, 33 bp, Homo sapien
tatatacatatatgcagaggaaaaatgatatct

SEQ ID NO: 506441 - DNA, 33 bp, Homo sapien
gtgaatgtgtatattaagcagtacctttgtttt

SEQ ID NO: 506442 - DNA, 33 bp, Homo sapien
gtgaatgtgtatattatgcagtacctttgtttt

SEQ ID NO: 506443 - DNA, 33 bp, Homo sapien
agaggacacgcctttcaccacgactatgagaaa

SEQ ID NO: 506444 - DNA, 33 bp, Homo sapien
agaggacacgcctttcgccacgactatgagaaa

SEQ ID NO: 506445 - DNA, 33 bp, Homo sapien
tccatatctatttgagaatgagcgtttgaagca

SEQ ID NO: 506446 - DNA, 33 bp, Homo sapien
tccatatctatttgaggatgagcgtttgaagca

SEQ ID NO: 506447 - DNA, 33 bp, Homo sapien
aacatcacagtgcaacacattccccttcctatg

SEQ ID NO: 506448 - DNA, 33 bp, Homo sapien
aacatcacagtgcaacgcattccccttcctatg

SEQ ID NO: 506449 - DNA, 33 bp, Homo sapien
taaccctcagacaggacgcacgaagagtgaaat

SEQ ID NO: 506450 - DNA, 33 bp, Homo sapien
taaccctcagacaggatgcacgaagagtgaaat

SEQ ID NO: 506451 - DNA, 33 bp, Homo sapien
tcggcccttatgcttacagtctgacaggcaggg

SEQ ID NO: 506452 - DNA, 33 bp, Homo sapien
tcggcccttatgcttagagtctgacaggcaggg

SEQ ID NO: 506453 - DNA, 33 bp, Homo sapien
tcctgctcttctctgcaagctacatcatcatga

SEQ ID NO: 506454 - DNA, 33 bp, Homo sapien
tcctgctcttctctgcgagctacatcatcatga

SEQ ID NO: 506455 - DNA, 33 bp, Homo sapien
gaagcaaactcatctaaaccagcgtttcttagt

SEQ ID NO: 506456 - DNA, 33 bp, Homo sapien
gaagcaaactcatctacaccagcgtttcttagt

SEQ ID NO: 506457 - DNA, 33 bp, Homo sapien
aaaggagtttgagtaacataagaaacagacgtg

SEQ ID NO: 506458 - DNA, 33 bp, Homo sapien
aaaggagtttgagtaagataagaaacagacgtg

SEQ ID NO: 506459 - DNA, 33 bp, Homo sapien
atatgagatttctgtacgaattttgcaactgtt

SEQ ID NO: 506460 - DNA, 33 bp, Homo sapien
atatgagatttctgtatgaattttgcaactgtt

SEQ ID NO: 506461 - DNA, 33 bp, Homo sapien
cagatttgatgccccacgtcaccaggtaaagtt

SEQ ID NO: 506462 - DNA, 33 bp, Homo sapien
cagatttgatgccccatgtcaccaggtaaagtt

SEQ ID NO: 506463 - DNA, 33 bp, Homo sapien
tggtttataaaccttacccggcttctagataag

SEQ ID NO: 506464 - DNA, 33 bp, Homo sapien
tggtttataaaccttagccggcttctagataag

SEQ ID NO: 506465 - DNA, 33 bp, Homo sapien
gagttcacctgagagaaataaggagcaagccct

SEQ ID NO: 506466 - DNA, 33 bp, Homo sapien
gagttcacctgagagagataaggagcaagccct

SEQ ID NO: 506467 - DNA, 33 bp, Homo sapien
ccacctctgttcatcactctatgggctctgtgt

SEQ ID NO: 506468 - DNA, 33 bp, Homo sapien
ccacctctgttcatcattctatgggctctgtgt

SEQ ID NO: 506469 - DNA, 33 bp, Homo sapien
gtgctgccttaaacaacttgctcattctcaagg

SEQ ID NO: 506470 - DNA, 33 bp, Homo sapien
gtgctgccttaaacaatttgctcattctcaagg

SEQ ID NO: 506471 - DNA, 33 bp, Homo sapien
ttctcagcctatgtaacgtgaagataatgagga

SEQ ID NO: 506472 - DNA, 33 bp, Homo sapien
ttctcagcctatgtaatgtgaagataatgagga

SEQ ID NO: 506473 - DNA, 33 bp, Homo sapien
ggtgaaacagcacacaagtatagtcactaagga

SEQ ID NO: 506474 - DNA, 33 bp, Homo sapien
ggtgaaacagcacacaggtatagtcactaagga

SEQ ID NO: 506475 - DNA, 33 bp, Homo sapien
gaccctgcagtagcaacgtttattgtgaaaaca

SEQ ID NO: 506476 - DNA, 33 bp, Homo sapien
gaccctgcagtagcaaggtttattgtgaaaaca

SEQ ID NO: 506477 - DNA, 33 bp, Homo sapien
gtattctgcagccccacgtcgaaccacttgcac

SEQ ID NO: 506478 - DNA, 33 bp, Homo sapien
gtattctgcagccccaggtcgaaccacttgcac

SEQ ID NO: 506479 - DNA, 33 bp, Homo sapien
acatctggtccttccacccccccacggacctgg

SEQ ID NO: 506480 - DNA, 33 bp, Homo sapien
acatctggtccttccatccccccacggacctgg

SEQ ID NO: 506481 - DNA, 33 bp, Homo sapien
atctaaaccttgaagtaaatgcaccttgatgtt

SEQ ID NO: 506482 - DNA, 33 bp, Homo sapien
atctaaaccttgaagtgaatgcaccttgatgtt

SEQ ID NO: 506483 - DNA, 33 bp, Homo sapien
catgtttctgagatgtaaatcctgtctccttcc

SEQ ID NO: 506484 - DNA, 33 bp, Homo sapien
catgtttctgagatgtgaatcctgtctccttcc

SEQ ID NO: 506485 - DNA, 33 bp, Homo sapien
catttggatgcgtggacaagtgctatagcggtg

SEQ ID NO: 506486 - DNA, 33 bp, Homo sapien
catttggatgcgtggataagtgctatagcggtg

SEQ ID NO: 506487 - DNA, 33 bp, Homo sapien
tctagggggagcaggcagcatttggatgcgtgg

SEQ ID NO: 506488 - DNA, 33 bp, Homo sapien
tctagggggagcaggcggcatttggatgcgtgg

SEQ ID NO: 506489 - DNA, 33 bp, Homo sapien
ttaaatgtccaaacaaagtgtggtgtcatcgct

SEQ ID NO: 506490 - DNA, 33 bp, Homo sapien
ttaaatgtccaaacaaggtgtggtgtcatcgct

SEQ ID NO: 506491 - DNA, 33 bp, Homo sapien; identical to SEQ ID NO: 506489

SEQ ID NO: 506492 - DNA, 33 bp, Homo sapien; identical to SEQ ID NO: 506490

SEQ ID NO: 506493 - DNA, 33 bp, Homo sapien
cagtatatttcagttacgcaaagtcaatcttgg

SEQ ID NO: 506494 - DNA, 33 bp, Homo sapien
cagtatatttcagttatgcaaagtcaatcttgg

SEQ ID NO: 506495 - DNA, 33 bp, Homo sapien
tgtaaaatccaaacaaataagacaacaggaaca

SEQ ID NO: 506496 - DNA, 33 bp, Homo sapien
tgtaaaatccaaacaagtaagacaacaggaaca

SEQ ID NO: 506497 - DNA, 33 bp, Homo sapien; identical to SEQ ID NO: 506495

SEQ ID NO: 506498 - DNA, 33 bp, Homo sapien; identical to SEQ ID NO: 506496

SEQ ID NO: 506499 - DNA, 33 bp, Homo sapien
aggtcaggcctaagagaagccctaatttcttct

SEQ ID NO: 506500 - DNA, 33 bp, Homo sapien
aggtcaggcctaagaggagccctaatttcttct

SEQ ID NO: 506501 - DNA, 33 bp, Homo sapien
catggtacatatgatcgcctgtaattttagata

SEQ ID NO: 506502 - DNA, 33 bp, Homo sapien
catggtacatatgatctcctgtaattttagata

SEQ ID NO: 506503 - DNA, 33 bp, Homo sapien
cgtctgctcatgctaacccttctacctgcaacg

SEQ ID NO: 506504 - DNA, 33 bp, Homo sapien
cgtctgctcatgctaagccttctacctgcaacg

SEQ ID NO: 506505 - DNA, 33 bp, Homo sapien
tccaaattctgtttcactagagaggtcctgcat

SEQ ID NO: 506506 - DNA, 33 bp, Homo sapien
tccaaattctgtttcattagagaggtcctgcat

SEQ ID NO: 506507 - DNA, 33 bp, Homo sapien
tccagtgaatttgggaacattcagcacttggag

SEQ ID NO: 506508 - DNA, 33 bp, Homo sapien
tccagtgaatttgggatcattcagcacttggag

SEQ ID NO: 506509 - DNA, 33 bp, Homo sapien
attgcgtctctgtgtacgtgaagagtttagggt

SEQ ID NO: 506510 - DNA, 33 bp, Homo sapien
attgcgtctctgtgtatgtgaagagtttagggt

SEQ ID NO: 506511 - DNA, 33 bp, Homo sapien
ttgaaaaggtaacaaactctgaacactgcaaag

SEQ ID NO: 506512 - DNA, 33 bp, Homo sapien
ttgaaaaggtaacaaagtctgaacactgcaaag

SEQ ID NO: 506513 - DNA, 33 bp, Homo sapien
tgagtgattgcaatagccctatcaggtttccat

SEQ ID NO: 506514 - DNA, 33 bp, Homo sapien
tgagtgattgcaatagtcctatcaggtttccat

SEQ ID NO: 506515 - DNA, 33 bp, Homo sapien
tgtattacaagaccaactctgcattgctgagag

SEQ ID NO: 506516 - DNA, 33 bp, Homo sapien
tgtattacaagaccaattctgcattgctgagag

SEQ ID NO: 506517 - DNA, 33 bp, Homo sapien
cttttctcacagggaacgatgcagttacattta

SEQ ID NO: 506518 - DNA, 33 bp, Homo sapien
cttttctcacagggaaggatgcagttacattta

SEQ ID NO: 506519 - DNA, 33 bp, Homo sapien
gaacctggaaacataacagatacacaaaacata

SEQ ID NO: 506520 - DNA, 33 bp, Homo sapien
gaacctggaaacataagagatacacaaaacata

SEQ ID NO: 506521 - DNA, 33 bp, Homo sapien
atctgtgtagtagatacgatgattaaccatatg

SEQ ID NO: 506522 - DNA, 33 bp, Homo sapien
atctgtgtagtagatatgatgattaaccatatg

SEQ ID NO: 506523 - DNA, 33 bp, Homo sapien
gcacgctttgtttcccacatggagtcactgccc

SEQ ID NO: 506524 - DNA, 33 bp, Homo sapien
gcacgctttgtttcccgcatggagtcactgccc

SEQ ID NO: 506525 - DNA, 33 bp, Homo sapien
tctggcaccactgggaaaagagtgacttgactc

SEQ ID NO: 506526 - DNA, 33 bp, Homo sapien
tctggcaccactgggagaagagtgacttgactc

SEQ ID NO: 506527 - DNA, 33 bp, Homo sapien
acatacagaacactgcacaactgtgaactgtac

SEQ ID NO: 506528 - DNA, 33 bp, Homo sapien
acatacagaacactgcgcaactgtgaactgtac

SEQ ID NO: 506529 - DNA, 33 bp, Homo sapien
aacccagagggagaggacaacaattatctaccc

SEQ ID NO: 506530 - DNA, 33 bp, Homo sapien
aacccagagggagagggcaacaattatctaccc

SEQ ID NO: 506531 - DNA, 33 bp, Homo sapien
ggctattgctgtaacacgatcaggcctttgtct

SEQ ID NO: 506532 - DNA, 33 bp, Homo sapien
ggctattgctgtaacatgatcaggcctttgtct

SEQ ID NO: 506533 - DNA, 33 bp, Homo sapien
ggtgtgtatctgggcaatgactgttttgttttt

SEQ ID NO: 506534 - DNA, 33 bp, Homo sapien
ggtgtgtatctgggcagtgactgttttgttttt

SEQ ID NO: 506535 - DNA, 33 bp, Homo sapien
ctgggacaggagatccaaaggtgaatcatacat

SEQ ID NO: 506536 - DNA, 33 bp, Homo sapien
ctgggacaggagatccgaaggtgaatcatacat

SEQ ID NO: 506537 - DNA, 33 bp, Homo sapien
tctctgtgtgtggctcagaatttgacacctttg

SEQ ID NO: 506538 - DNA, 33 bp, Homo sapien
tctctgtgtgtggctcggaatttgacacctttg

SEQ ID NO: 506539 - DNA, 33 bp, Homo sapien
ttgctgccctctcctacaattcctcttttgcaa

SEQ ID NO: 506540 - DNA, 33 bp, Homo sapien
ttgctgccctctcctataattcctcttttgcaa

SEQ ID NO: 506541 - DNA, 33 bp, Homo sapien
caaccaccttcctttccagggtcagctgatgtc

SEQ ID NO: 506542 - DNA, 33 bp, Homo sapien
caaccaccttcctttctagggtcagctgatgtc

SEQ ID NO: 506543 - DNA, 33 bp, Homo sapien
atctcatcagccttctcaacaagcctgtgagta

SEQ ID NO: 506544 - DNA, 33 bp, Homo sapien
atctcatcagccttcttaacaagcctgtgagta

SEQ ID NO: 506545 - DNA, 33 bp, Homo sapien
tgtgcctattgtgtgacaggaaaaattctataa

SEQ ID NO: 506546 - DNA, 33 bp, Homo sapien
tgtgcctattgtgtgataggaaaaattctataa

SEQ ID NO: 506547 - DNA, 33 bp, Homo sapien
ttacagcttgggttgacgatagccattcgctat

SEQ ID NO: 506548 - DNA, 33 bp, Homo sapien
ttacagcttgggttgatgatagccattcgctat

SEQ ID NO: 506549 - DNA, 33 bp, Homo sapien
cagtcctgtccttacaaaaactgtgctcacagc

SEQ ID NO: 506550 - DNA, 33 bp, Homo sapien
cagtcctgtccttacagaaactgtgctcacagc

SEQ ID NO: 506551 - DNA, 33 bp, Homo sapien
aaagtcacctgatttcaaaagaagtttgcctcc

SEQ ID NO: 506552 - DNA, 33 bp, Homo sapien
aaagtcacctgatttcgaaagaagtttgcctcc

SEQ ID NO: 506553 - DNA, 33 bp, Homo sapien
tgtggtgtcctgcagacgggtgctcttcccttg

SEQ ID NO: 506554 - DNA, 33 bp, Homo sapien
tgtggtgtcctgcagatgggtgctcttcccttg

SEQ ID NO: 506555 - DNA, 33 bp, Homo sapien
gacaactgaaagtgataagattgagggaaggaa

SEQ ID NO: 506556 - DNA, 33 bp, Homo sapien
gacaactgaaagtgatgagattgagggaaggaa

SEQ ID NO: 506557 - DNA, 33 bp, Homo sapien
aggttactactgactggcagctacggtggagag

SEQ ID NO: 506558 - DNA, 33 bp, Homo sapien
aggttactactgactgtcagctacggtggagag

SEQ ID NO: 506559 - DNA, 33 bp, Homo sapien
agttttgtctttgaccaactcactcatggtcac

SEQ ID NO: 506560 - DNA, 33 bp, Homo sapien
agttttgtctttgaccgactcactcatggtcac

SEQ ID NO: 506561 - DNA, 33 bp, Homo sapien
aacctactcttctctacggagccactaactaac

SEQ ID NO: 506562 - DNA, 33 bp, Homo sapien
aacctactcttctctatggagccactaactaac

SEQ ID NO: 506563 - DNA, 33 bp, Homo sapien
cctgacatttgcttcacaaggcgttgctagcca

SEQ ID NO: 506564 - DNA, 33 bp, Homo sapien
cctgacatttgcttcataaggcgttgctagcca

SEQ ID NO: 506565 - DNA, 33 bp, Homo sapien
gttccataactaaatcaaatcagctaacgccat

SEQ ID NO: 506566 - DNA, 33 bp, Homo sapien
gttccataactaaatcgaatcagctaacgccat

SEQ ID NO: 506567 - DNA, 33 bp, Homo sapien
aatactaacattttacaaagcccaggcagataa

SEQ ID NO: 506568 - DNA, 33 bp, Homo sapien
aatactaacattttacgaagcccaggcagataa

SEQ ID NO: 506569 - DNA, 33 bp, Homo sapien
acagcctgacagcctgaatacgaggctgctcag

SEQ ID NO: 506570 - DNA, 33 bp, Homo sapien
acagcctgacagcctggatacgaggctgctcag

SEQ ID NO: 506571 - DNA, 33 bp, Homo sapien
taggccacatggccgacgtcacacagctaggag

SEQ ID NO: 506572 - DNA, 33 bp, Homo sapien
taggccacatggccgatgtcacacagctaggag

SEQ ID NO: 506573 - DNA, 33 bp, Homo sapien
cctgctgactgtgacacgtggagttttggtttg

SEQ ID NO: 506574 - DNA, 33 bp, Homo sapien
cctgctgactgtgacaggtggagttttggtttg

SEQ ID NO: 506575 - DNA, 33 bp, Homo sapien
ttggtttgaatgaggtcaaagtagtgggcagaa

SEQ ID NO: 506576 - DNA, 33 bp, Homo sapien
ttggtttgaatgaggtgaaagtagtgggcagaa

SEQ ID NO: 506577 - DNA, 33 bp, Homo sapien
ctcatggcttaaatcgccccagtgttggaaaat

SEQ ID NO: 506578 - DNA, 33 bp, Homo sapien
ctcatggcttaaatcgtcccagtgttggaaaat

SEQ ID NO: 506579 - DNA, 33 bp, Homo sapien
aatgcatttaattcgaactgtatgaattgttct

SEQ ID NO: 506580 - DNA, 33 bp, Homo sapien
aatgcatttaattcgatctgtatgaattgttct

SEQ ID NO: 506581 - DNA, 33 bp, Homo sapien
ccaactgttccaggtccctttattgaaaagacc

SEQ ID NO: 506582 - DNA, 33 bp, Homo sapien
ccaactgttccaggtcgctttattgaaaagacc

SEQ ID NO: 506583 - DNA, 33 bp, Homo sapien
atgggacactggaaaccggcacaaagttgttgt

SEQ ID NO: 506584 - DNA, 33 bp, Homo sapien
atgggacactggaaactggcacaaagttgttgt

SEQ ID NO: 506585 - DNA, 33 bp, Homo sapien
gaaagaccttctgagaaagaattttactgtcca

SEQ ID NO: 506586 - DNA, 33 bp, Homo sapien
gaaagaccttctgagagagaattttactgtcca

SEQ ID NO: 506587 - DNA, 33 bp, Homo sapien
actcattcctaaacataaaatagcacttagagt

SEQ ID NO: 506588 - DNA, 33 bp, Homo sapien
actcattcctaaacatgaaatagcacttagagt

SEQ ID NO: 506589 - DNA, 33 bp, Homo sapien
taagtgatgcctgacacgtagcaggtgttcaag

SEQ ID NO: 506590 - DNA, 33 bp, Homo sapien
taagtgatgcctgacatgtagcaggtgttcaag

SEQ ID NO: 506591 - DNA, 33 bp, Homo sapien
aggtgatgagaaggtgcaaaagttatttgttga

SEQ ID NO: 506592 - DNA, 33 bp, Homo sapien
aggtgatgagaaggtggaaaagttatttgttga

SEQ ID NO: 506593 - DNA, 33 bp, Homo sapien
gcccatgggaatgacaagtaaaacacagaggat

SEQ ID NO: 506594 - DNA, 33 bp, Homo sapien
gcccatgggaatgacaggtaaaacacagaggat

SEQ ID NO: 506595 - DNA, 33 bp, Homo sapien
gacatacaaactcagaaggcaaatattttacaa

SEQ ID NO: 506596 - DNA, 33 bp, Homo sapien
gacatacaaactcagagggcaaatattttacaa

SEQ ID NO: 506597 - DNA, 33 bp, Homo sapien
cccccttctctggggcactcctagacatacaaa

SEQ ID NO: 506598 - DNA, 33 bp, Homo sapien
cccccttctctggggcgctcctagacatacaaa

SEQ ID NO: 506599 - DNA, 33 bp, Homo sapien
aaggtgctgacctctgcagataaaagctcagtt

SEQ ID NO: 506600 - DNA, 33 bp, Homo sapien
aaggtgctgacctctgtagataaaagctcagtt

SEQ ID NO: 506601 - DNA, 33 bp, Homo sapien
ctgcagtaccattgcaaccagtcaacttcaaag

SEQ ID NO: 506602 - DNA, 33 bp, Homo sapien
ctgcagtaccattgcatccagtcaacttcaaag

SEQ ID NO: 506603 - DNA, 33 bp, Homo sapien
gtgtacttatggtacacgttttattcaaagctc

SEQ ID NO: 506604 - DNA, 33 bp, Homo sapien
gtgtacttatggtacatgttttattcaaagctc

SEQ ID NO: 506605 - DNA, 33 bp, Homo sapien
ctcagtgttaactccaatcattcatttctgaat

SEQ ID NO: 506606 - DNA, 33 bp, Homo sapien
ctcagtgttaactccagtcattcatttctgaat

SEQ ID NO: 506607 - DNA, 33 bp, Homo sapien
actacctttgccccacgaagtttcatgatattt

SEQ ID NO: 506608 - DNA, 33 bp, Homo sapien
actacctttgccccactaagtttcatgatattt

SEQ ID NO: 506609 - DNA, 33 bp, Homo sapien
ggttcagatgatcaaacctctgctccaatgttt

SEQ ID NO: 506610 - DNA, 33 bp, Homo sapien
ggttcagatgatcaaagctctgctccaatgttt

SEQ ID NO: 506611 - DNA, 33 bp, Homo sapien
caattttcatatggcaaaatggtttggagcatg

SEQ ID NO: 506612 - DNA, 33 bp, Homo sapien
caattttcatatggcagaatggtttggagcatg

SEQ ID NO: 506613 - DNA, 33 bp, Homo sapien
ctgcttcagaaaatagcagagtcctccttaatg

SEQ ID NO: 506614 - DNA, 33 bp, Homo sapien
ctgcttcagaaaatagtagagtcctccttaatg

SEQ ID NO: 506615 - DNA, 33 bp, Homo sapien
agcgcagtgaagtctcaaaaaagctctgcaacc

SEQ ID NO: 506616 - DNA, 33 bp, Homo sapien
agcgcagtgaagtctcgaaaaagctctgcaacc

SEQ ID NO: 506617 - DNA, 33 bp, Homo sapien
gcagagggattgtgaaggtagacagctaagacc

SEQ ID NO: 506618 - DNA, 33 bp, Homo sapien
gcagagggattgtgaatgtagacagctaagacc

SEQ ID NO: 506619 - DNA, 33 bp, Homo sapien
catctatgttattccaatgaatagtaactctgc

SEQ ID NO: 506620 - DNA, 33 bp, Homo sapien
catctatgttattccagtgaatagtaactctgc

SEQ ID NO: 506621 - DNA, 33 bp, Homo sapien
tgagatgttatttctccaaatctactgaaagac

SEQ ID NO: 506622 - DNA, 33 bp, Homo sapien
tgagatgttatttctctaaatctactgaaagac

SEQ ID NO: 506623 - DNA, 33 bp, Homo sapien
cagtggaacttcttcaaacctgagatggaaatg

SEQ ID NO: 506624 - DNA, 33 bp, Homo sapien
cagtggaacttcttcagacctgagatggaaatg

SEQ ID NO: 506625 - DNA, 33 bp, Homo sapien
cactctctgaaagcaccattttaaaagccatat

SEQ ID NO: 506626 - DNA, 33 bp, Homo sapien
cactctctgaaagcactattttaaaagccatat

SEQ ID NO: 506627 - DNA, 33 bp, Homo sapien
tcccttcttgcctgtagcagtctctaacactgg

SEQ ID NO: 506628 - DNA, 33 bp, Homo sapien
tcccttcttgcctgtatcagtctctaacactgg

SEQ ID NO: 506629 - DNA, 33 bp, Homo sapien
ccaggtacgtattactcaggccatcatcatctg

SEQ ID NO: 506630 - DNA, 33 bp, Homo sapien
ccaggtacgtattacttaggccatcatcatctg

SEQ ID NO: 506631 - DNA, 33 bp, Homo sapien
aaaacacagtaaatgacggcctgggattcttta

SEQ ID NO: 506632 - DNA, 33 bp, Homo sapien
aaaacacagtaaatgatggcctgggattcttta

SEQ ID NO: 506633 - DNA, 33 bp, Homo sapien
acaatagtaagtggaaaaattaggaaaccaaat

SEQ ID NO: 506634 - DNA, 33 bp, Homo sapien
acaatagtaagtggaacaattaggaaaccaaat

SEQ ID NO: 506635 - DNA, 33 bp, Homo sapien
aagaaaatcacggtgaccatcattattattttg

SEQ ID NO: 506636 - DNA, 33 bp, Homo sapien
aagaaaatcacggtgagcatcattattattttg

SEQ ID NO: 506637 - DNA, 33 bp, Homo sapien
aattctttggaaacaactgctctgagttatttt

SEQ ID NO: 506638 - DNA, 33 bp, Homo sapien
aattctttggaaacaattgctctgagttatttt

SEQ ID NO: 506639 - DNA, 33 bp, Homo sapien
ttccctgtccctacccacaatgtctcagagcag

SEQ ID NO: 506640 - DNA, 33 bp, Homo sapien
ttccctgtccctaccctcaatgtctcagagcag

SEQ ID NO: 506641 - DNA, 33 bp, Homo sapien
gttctagatttctaaacttccattttcacatga

SEQ ID NO: 506642 - DNA, 33 bp, Homo sapien
gttctagatttctaaatttccattttcacatga

SEQ ID NO: 506643 - DNA, 33 bp, Homo sapien
ttgaagtgacattttccagcttaccctacacca

SEQ ID NO: 506644 - DNA, 33 bp, Homo sapien
ttgaagtgacattttctagcttaccctacacca

SEQ ID NO: 506645 - DNA, 33 bp, Homo sapien
catgcttggttctaaacgcctcctccccaataa

SEQ ID NO: 506646 - DNA, 33 bp, Homo sapien
catgcttggttctaaatgcctcctccccaataa

SEQ ID NO: 506647 - DNA, 33 bp, Homo sapien
ttccaggagtgggaaacggtacgtgtttgatct

SEQ ID NO: 506648 - DNA, 33 bp, Homo sapien
ttccaggagtgggaaatggtacgtgtttgatct

SEQ ID NO: 506649 - DNA, 33 bp, Homo sapien
cacctggtagacagaaagacgtctcggagcctg

SEQ ID NO: 506650 - DNA, 33 bp, Homo sapien
cacctggtagacagaaggacgtctcggagcctg

SEQ ID NO: 506651 - DNA, 33 bp, Homo sapien
agtggtcaaaatgaacacatcagaaggtcaaat

SEQ ID NO: 506652 - DNA, 33 bp, Homo sapien
agtggtcaaaatgaacgcatcagaaggtcaaat

SEQ ID NO: 506653 - DNA, 33 bp, Homo sapien
gtgcaaagctggctacaactgcacccctcagag

SEQ ID NO: 506654 - DNA, 33 bp, Homo sapien
gtgcaaagctggctacgactgcacccctcagag

SEQ ID NO: 506655 - DNA, 33 bp, Homo sapien
cacctggggccgcaggcacagtttggaggacaa

SEQ ID NO: 506656 - DNA, 33 bp, Homo sapien
cacctggggccgcagggacagtttggaggacaa

SEQ ID NO: 506657 - DNA, 33 bp, Homo sapien
ttttcaaacttgatcacatttctgaatgcttag

SEQ ID NO: 506658 - DNA, 33 bp, Homo sapien
ttttcaaacttgatcatatttctgaatgcttag

SEQ ID NO: 506659 - DNA, 33 bp, Homo sapien
taacctatcagagatcacaagtgccaggaggaa

SEQ ID NO: 506660 - DNA, 33 bp, Homo sapien
taacctatcagagatcgcaagtgccaggaggaa

SEQ ID NO: 506661 - DNA, 33 bp, Homo sapien
aagtaggttagtctggaaaacataacacagcag

SEQ ID NO: 506662 - DNA, 33 bp, Homo sapien
aagtaggttagtctgggaaacataacacagcag

SEQ ID NO: 506663 - DNA, 33 bp, Homo sapien
atccactgcaccaagaagctggtttacatactg

SEQ ID NO: 506664 - DNA, 33 bp, Homo sapien
atccactgcaccaagaggctggtttacatactg

SEQ ID NO: 506665 - DNA, 33 bp, Homo sapien
atgataaaatatgcacaaggcaaggaactctga

SEQ ID NO: 506666 - DNA, 33 bp, Homo sapien
atgataaaatatgcacgaggcaaggaactctga

SEQ ID NO: 506667 - DNA, 33 bp, Homo sapien
acctgggtgtctccttaaaatagcacaattgct

SEQ ID NO: 506668 - DNA, 33 bp, Homo sapien
acctgggtgtctccttcaaatagcacaattgct

SEQ ID NO: 506669 - DNA, 33 bp, Homo sapien
caaggtttatttttcacgcagcagtaggaggct

SEQ ID NO: 506670 - DNA, 33 bp, Homo sapien
caaggtttatttttcatgcagcagtaggaggct

SEQ ID NO: 506671 - DNA, 33 bp, Homo sapien
tagtgctcaggctcagcacctggatgttacgag

SEQ ID NO: 506672 - DNA, 33 bp, Homo sapien
tagtgctcaggctcaggacctggatgttacgag

SEQ ID NO: 506673 - DNA, 33 bp, Homo sapien
cccatatttctgccacaactaagaggaagctgg

SEQ ID NO: 506674 - DNA, 33 bp, Homo sapien
cccatatttctgccacgactaagaggaagctgg

SEQ ID NO: 506675 - DNA, 33 bp, Homo sapien
taaattgtcattgtcacaaagattctttctgct

SEQ ID NO: 506676 - DNA, 33 bp, Homo sapien
taaattgtcattgtcataaagattctttctgct

SEQ ID NO: 506677 - DNA, 33 bp, Homo sapien
gaaccctaagagctcaccgtctaaccatagttg

SEQ ID NO: 506678 - DNA, 33 bp, Homo sapien
gaaccctaagagctcatcgtctaaccatagttg

SEQ ID NO: 506679 - DNA, 33 bp, Homo sapien
aaggccagaatgagctaagaagaatcctctaaa

SEQ ID NO: 506680 - DNA, 33 bp, Homo sapien
aaggccagaatgagctgagaagaatcctctaaa

SEQ ID NO: 506681 - DNA, 33 bp, Homo sapien
acacaaatactctcacagggcatggaggttttc

SEQ ID NO: 506682 - DNA, 33 bp, Homo sapien
acacaaatactctcacggggcatggaggttttc

SEQ ID NO: 506683 - DNA, 33 bp, Homo sapien
caattgggccaccatcccttaattttctactct

SEQ ID NO: 506684 - DNA, 33 bp, Homo sapien
caattgggccaccatctcttaattttctactct

SEQ ID NO: 506685 - DNA, 33 bp, Homo sapien
tgctcctcagtggtataaaatacattgctgaac

SEQ ID NO: 506686 - DNA, 33 bp, Homo sapien
tgctcctcagtggtatgaaatacattgctgaac

SEQ ID NO: 506687 - DNA, 33 bp, Homo sapien
tcttagaagattctgaaaggtgaagagaaatca

SEQ ID NO: 506688 - DNA, 33 bp, Homo sapien
tcttagaagattctgagaggtgaagagaaatca

SEQ ID NO: 506689 - DNA, 33 bp, Homo sapien
ctgcaaaaagtgagaacaggtgcaggttaacta

SEQ ID NO: 506690 - DNA, 33 bp, Homo sapien
ctgcaaaaagtgagaataggtgcaggttaacta

SEQ ID NO: 506691 - DNA, 33 bp, Homo sapien
caaatttaccactggccgaaaacttgaaaaatg

SEQ ID NO: 506692 - DNA, 33 bp, Homo sapien
caaatttaccactggctgaaaacttgaaaaatg

SEQ ID NO: 506693 - DNA, 33 bp, Homo sapien
gatgacggacagggagaatgccgttttcctcac

SEQ ID NO: 506694 - DNA, 33 bp, Homo sapien
gatgacggacagggagtatgccgttttcctcac

SEQ ID NO: 506695 - DNA, 33 bp, Homo sapien
gtccacacagaaaggcagaacaggaggagagct

SEQ ID NO: 506696 - DNA, 33 bp, Homo sapien
gtccacacagaaaggcggaacaggaggagagct

SEQ ID NO: 506697 - DNA, 33 bp, Homo sapien
aagagttgcggcgtatcggagacgagtttaacg

SEQ ID NO: 506698 - DNA, 33 bp, Homo sapien
aagagttgcggcgtattggagacgagtttaacg

SEQ ID NO: 506699 - DNA, 33 bp, Homo sapien
ataatgtacaaaggcaaggactaaagtttagcc

SEQ ID NO: 506700 - DNA, 33 bp, Homo sapien
ataatgtacaaaggcacggactaaagtttagcc

SEQ ID NO: 506701 - DNA, 33 bp, Homo sapien
ttttctgaggctgaaacattttggaacagtgtg

SEQ ID NO: 506702 - DNA, 33 bp, Homo sapien
ttttctgaggctgaaagattttggaacagtgtg

SEQ ID NO: 506703 - DNA, 33 bp, Homo sapien
ggtagagatgatttcaatccaaatactcttact

SEQ ID NO: 506704 - DNA, 33 bp, Homo sapien
ggtagagatgatttcattccaaatactcttact

SEQ ID NO: 506705 - DNA, 33 bp, Homo sapien
taaatacatgaatgaaagcaagtcttttagact

SEQ ID NO: 506706 - DNA, 33 bp, Homo sapien
taaatacatgaatgaatgcaagtcttttagact

SEQ ID NO: 506707 - DNA, 33 bp, Homo sapien
tccccttcattacttcactcaactctcatcttc

SEQ ID NO: 506708 - DNA, 33 bp, Homo sapien
tccccttcattacttcgctcaactctcatcttc

SEQ ID NO: 506709 - DNA, 33 bp, Homo sapien
ataccgtgccctttacaggaatggcaaaggtgg

SEQ ID NO: 506710 - DNA, 33 bp, Homo sapien
ataccgtgccctttactggaatggcaaaggtgg

SEQ ID NO: 506711 - DNA, 33 bp, Homo sapien
acctcatgaggatggacgagcttctcaggaagg

SEQ ID NO: 506712 - DNA, 33 bp, Homo sapien
acctcatgaggatggatgagcttctcaggaagg

SEQ ID NO: 506713 - DNA, 33 bp, Homo sapien
gacagaacccaaagacaaccttgagattgcttg

SEQ ID NO: 506714 - DNA, 33 bp, Homo sapien
gacagaacccaaagaccaccttgagattgcttg

SEQ ID NO: 506715 - DNA, 33 bp, Homo sapien
aagattaagaaccacacctttgtgctgaatcag

SEQ ID NO: 506716 - DNA, 33 bp, Homo sapien
aagattaagaaccacatctttgtgctgaatcag

SEQ ID NO: 506717 - DNA, 33 bp, Homo sapien
aatttttgtcatcacactctttttaaccaaaaa

SEQ ID NO: 506718 - DNA, 33 bp, Homo sapien
aatttttgtcatcacattctttttaaccaaaaa

SEQ ID NO: 506719 - DNA, 33 bp, Homo sapien
tgtcaccagtgtcacacggaaatggaaacctac

SEQ ID NO: 506720 - DNA, 33 bp, Homo sapien
tgtcaccagtgtcacatggaaatggaaacctac

SEQ ID NO: 506721 - DNA, 33 bp, Homo sapien
acagcatattactcaaaaaggctgtggttgaga

SEQ ID NO: 506722 - DNA, 33 bp, Homo sapien
acagcatattactcaacaaggctgtggttgaga

SEQ ID NO: 506723 - DNA, 33 bp, Homo sapien
actacctggacaagaaggtatcagggtcatgaa

SEQ ID NO: 506724 - DNA, 33 bp, Homo sapien
actacctggacaagaatgtatcagggtcatgaa

SEQ ID NO: 506725 - DNA, 33 bp, Homo sapien
aaatcactgtgagaaaaagacaataattatgtc

SEQ ID NO: 506726 - DNA, 33 bp, Homo sapien
aaatcactgtgagaaagagacaataattatgtc

SEQ ID NO: 506727 - DNA, 33 bp, Homo sapien
acgaggctggtgtagacatccagagcctagcct

SEQ ID NO: 506728 - DNA, 33 bp, Homo sapien
acgaggctggtgtagatatccagagcctagcct

SEQ ID NO: 506729 - DNA, 33 bp, Homo sapien
gtgtctcttcatataccgaatggctatttgtgt

SEQ ID NO: 506730 - DNA, 33 bp, Homo sapien
gtgtctcttcatatactgaatggctatttgtgt

SEQ ID NO: 506731 - DNA, 33 bp, Homo sapien
aaacatggtaaagatgaatggcagactggcagc

SEQ ID NO: 506732 - DNA, 33 bp, Homo sapien
aaacatggtaaagatggatggcagactggcagc

SEQ ID NO: 506733 - DNA, 33 bp, Homo sapien
actttccatattgtgccgaacaagtggggaggg

SEQ ID NO: 506734 - DNA, 33 bp, Homo sapien
actttccatattgtgctgaacaagtggggaggg

SEQ ID NO: 506735 - DNA, 33 bp, Homo sapien
accagcagagacattacacttccaccgagacaa

SEQ ID NO: 506736 - DNA, 33 bp, Homo sapien
accagcagagacattatacttccaccgagacaa

SEQ ID NO: 506737 - DNA, 33 bp, Homo sapien
gcccctgaggataaaacggatataagcctgtgg

SEQ ID NO: 506738 - DNA, 33 bp, Homo sapien
gcccctgaggataaaatggatataagcctgtgg

SEQ ID NO: 506739 - DNA, 33 bp, Homo sapien
tcagtctcctatgacactagcacgtatggcctt

SEQ ID NO: 506740 - DNA, 33 bp, Homo sapien
tcagtctcctatgacattagcacgtatggcctt

SEQ ID NO: 506741 - DNA, 33 bp, Homo sapien
actgttccttgggcataagagtagacaaaacat

SEQ ID NO: 506742 - DNA, 33 bp, Homo sapien
actgttccttgggcattagagtagacaaaacat

SEQ ID NO: 506743 - DNA, 33 bp, Homo sapien; identical to SEQ ID NO: 506741

SEQ ID NO: 506744 - DNA, 33 bp, Homo sapien; identical to SEQ ID NO: 506742

SEQ ID NO: 506745 - DNA, 33 bp, Homo sapien
tctactgttcacacagcaggacggcgtgatttt

SEQ ID NO: 506746 - DNA, 33 bp, Homo sapien
tctactgttcacacaggaggacggcgtgatttt

SEQ ID NO: 506747 - DNA, 33 bp, Homo sapien
tcaggcaaaaaaattccgaacccagaaacagtg

SEQ ID NO: 506748 - DNA, 33 bp, Homo sapien
tcaggcaaaaaaattctgaacccagaaacagtg

SEQ ID NO: 506749 - DNA, 33 bp, Homo sapien; identical to SEQ ID NO: 506747

SEQ ID NO: 506750 - DNA, 33 bp, Homo sapien; identical to SEQ ID NO: 506748

SEQ ID NO: 506751 - DNA, 33 bp, Homo sapien
tgtttgaaaccaaaaacagatttgatgcacctg

SEQ ID NO: 506752 - DNA, 33 bp, Homo sapien
tgtttgaaaccaaaaatagatttgatgcacctg

SEQ ID NO: 506753 - DNA, 33 bp, Homo sapien
tgacattgttaataaaagaacaggagataattt

SEQ ID NO: 506754 - DNA, 33 bp, Homo sapien
tgacattgttaataaaggaacaggagataattt

SEQ ID NO: 506755 - DNA, 33 bp, Homo sapien
tcatataccttgagcaaatatcctgtcccagaa

SEQ ID NO: 506756 - DNA, 33 bp, Homo sapien
tcatataccttgagcacatatcctgtcccagaa

SEQ ID NO: 506757 - DNA, 33 bp, Homo sapien
ttgagttgggcaaatgaaatcacagtagccttt

SEQ ID NO: 506758 - DNA, 33 bp, Homo sapien
ttgagttgggcaaatgcaatcacagtagccttt

SEQ ID NO: 506759 - DNA, 33 bp, Homo sapien
ccgtgggttcaatccactgaaaagcagagtcct

SEQ ID NO: 506760 - DNA, 33 bp, Homo sapien
ccgtgggttcaatccattgaaaagcagagtcct

SEQ ID NO: 506761 - DNA, 33 bp, Homo sapien; identical to SEQ ID NO: 506759

SEQ ID NO: 506762 - DNA, 33 bp, Homo sapien; identical to SEQ ID NO: 506760

SEQ ID NO: 506763 - DNA, 33 bp, Homo sapien
aaactggtgggagcaaatgtccactgggtaatc

SEQ ID NO: 506764 - DNA, 33 bp, Homo sapien
aaactggtgggagcaattgtccactgggtaatc

SEQ ID NO: 506765 - DNA, 33 bp, Homo sapien
gaataaaaaagtaaaccatgccagtgattgtac

SEQ ID NO: 506766 - DNA, 33 bp, Homo sapien
gaataaaaaagtaaactatgccagtgattgtac

SEQ ID NO: 506767 - DNA, 33 bp, Homo sapien; identical to SEQ ID NO: 506765

SEQ ID NO: 506768 - DNA, 33 bp, Homo sapien; identical to SEQ ID NO: 506766

SEQ ID NO: 506769 - DNA, 33 bp, Homo sapien
ccatgtgctcagtacacaagttcctacaggtgg

SEQ ID NO: 506770 - DNA, 33 bp, Homo sapien
ccatgtgctcagtacagaagttcctacaggtgg

SEQ ID NO: 506771 - DNA, 33 bp, Homo sapien
aacaaggactttgtggaaaaccatgtttccttg

SEQ ID NO: 506772 - DNA, 33 bp, Homo sapien
aacaaggactttgtggtaaaccatgtttccttg

SEQ ID NO: 506773 - DNA, 33 bp, Homo sapien
catacacctgaggtccaatttacaaaataaaat

SEQ ID NO: 506774 - DNA, 33 bp, Homo sapien
catacacctgaggtccgatttacaaaataaaat

SEQ ID NO: 506775 - DNA, 33 bp, Homo sapien
ggcatagctgctcaaccggactgcagaaacaca

SEQ ID NO: 506776 - DNA, 33 bp, Homo sapien
ggcatagctgctcaactggactgcagaaacaca

SEQ ID NO: 506777 - DNA, 33 bp, Homo sapien
cttgattctcttgacactgaaccaaagaaaatc

SEQ ID NO: 506778 - DNA, 33 bp, Homo sapien
cttgattctcttgacattgaaccaaagaaaatc

SEQ ID NO: 506779 - DNA, 33 bp, Homo sapien; identical to SEQ ID NO: 506777

SEQ ID NO: 506780 - DNA, 33 bp, Homo sapien; identical to SEQ ID NO: 506778

SEQ ID NO: 506781 - DNA, 33 bp, Homo sapien
tcaccggtcctgtcctcaatggcctgtcccaag

SEQ ID NO: 506782 - DNA, 33 bp, Homo sapien
tcaccggtcctgtccttaatggcctgtcccaag

SEQ ID NO: 506783 - DNA, 33 bp, Homo sapien
caccatacagacataacgatgaaaaagttgaaa

SEQ ID NO: 506784 - DNA, 33 bp, Homo sapien
caccatacagacataatgatgaaaaagttgaaa

SEQ ID NO: 506785 - DNA, 33 bp, Homo sapien
aaaatagaaatggcccaaggaaacctttcatat

SEQ ID NO: 506786 - DNA, 33 bp, Homo sapien
aaaatagaaatggcccgaggaaacctttcatat

SEQ ID NO: 506787 - DNA, 33 bp, Homo sapien
gtacaaccagcatgagaacacattagcagctcc

SEQ ID NO: 506788 - DNA, 33 bp, Homo sapien
gtacaaccagcatgaggacacattagcagctcc

SEQ ID NO: 506789 - DNA, 33 bp, Homo sapien
gagatgacctcatagagccaactttttggaaga

SEQ ID NO: 506790 - DNA, 33 bp, Homo sapien
gagatgacctcatagatccaactttttggaaga

SEQ ID NO: 506791 - DNA, 33 bp, Homo sapien
ctgcaaacaatggaaaacctgaatagcagaggc

SEQ ID NO: 506792 - DNA, 33 bp, Homo sapien
ctgcaaacaatggaaagcctgaatagcagaggc

SEQ ID NO: 506793 - DNA, 33 bp, Homo sapien
agatgaacacttatggcatatttggtgccactg

SEQ ID NO: 506794 - DNA, 33 bp, Homo sapien
agatgaacacttatggtatatttggtgccactg

SEQ ID NO: 506795 - DNA, 33 bp, Homo sapien
gcatgatacagaactgcaatgcagaatgactcc

SEQ ID NO: 506796 - DNA, 33 bp, Homo sapien
gcatgatacagaactggaatgcagaatgactcc

SEQ ID NO: 506797 - DNA, 33 bp, Homo sapien
tattcacagcaagtcacgtggcacccgagggca

SEQ ID NO: 506798 - DNA, 33 bp, Homo sapien
tattcacagcaagtcatgtggcacccgagggca

SEQ ID NO: 506799 - DNA, 33 bp, Homo sapien
ggaatagacggccttacgacaacacagaggact

SEQ ID NO: 506800 - DNA, 33 bp, Homo sapien
ggaatagacggccttatgacaacacagaggact

SEQ ID NO: 506801 - DNA, 33 bp, Homo sapien
aataattcctagaacccgagtataaagatatta

SEQ ID NO: 506802 - DNA, 33 bp, Homo sapien
aataattcctagaacctgagtataaagatatta

SEQ ID NO: 506803 - DNA, 33 bp, Homo sapien
gattttattatagtacactgcagaaggtgctgt

SEQ ID NO: 506804 - DNA, 33 bp, Homo sapien
gattttattatagtacgctgcagaaggtgctgt

SEQ ID NO: 506805 - DNA, 33 bp, Homo sapien
cacaacaagcctatgaagcatagtttaccatca

SEQ ID NO: 506806 - DNA, 33 bp, Homo sapien
cacaacaagcctatgaggcatagtttaccatca

SEQ ID NO: 506807 - DNA, 33 bp, Homo sapien
tgtctctctagctcccactccttaagctttcca

SEQ ID NO: 506808 - DNA, 33 bp, Homo sapien
tgtctctctagctcccgctccttaagctttcca

SEQ ID NO: 506809 - DNA, 33 bp, Homo sapien
gtactttatatccaacagatacttctgatcaca

SEQ ID NO: 506810 - DNA, 33 bp, Homo sapien
gtactttatatccaaccgatacttctgatcaca

SEQ ID NO: 506811 - DNA, 33 bp, Homo sapien
tgggttgaaaatacacaatgagaaactcaaaat

SEQ ID NO: 506812 - DNA, 33 bp, Homo sapien
tgggttgaaaatacacgatgagaaactcaaaat

SEQ ID NO: 506813 - DNA, 33 bp, Homo sapien
tttagctgtagtatccaatgtggtcctgttgat

SEQ ID NO: 506814 - DNA, 33 bp, Homo sapien
tttagctgtagtatccgatgtggtcctgttgat

SEQ ID NO: 506815 - DNA, 33 bp, Homo sapien
ctggctgagacaggtaagaggctaaagtacctc

SEQ ID NO: 506816 - DNA, 33 bp, Homo sapien
ctggctgagacaggtaggaggctaaagtacctc

SEQ ID NO: 506817 - DNA, 33 bp, Homo sapien
tgcaactgtggtcctgaaatgagtatccacatt

SEQ ID NO: 506818 - DNA, 33 bp, Homo sapien
tgcaactgtggtcctgcaatgagtatccacatt

SEQ ID NO: 506819 - DNA, 33 bp, Homo sapien
agcgacacacagggaaaaagactatgtgaagac

SEQ ID NO: 506820 - DNA, 33 bp, Homo sapien
agcgacacacagggaagaagactatgtgaagac

SEQ ID NO: 506821 - DNA, 33 bp, Homo sapien
actgtgtaagaataaacgtctgttggtataagc

SEQ ID NO: 506822 - DNA, 33 bp, Homo sapien
actgtgtaagaataaatgtctgttggtataagc

SEQ ID NO: 506823 - DNA, 33 bp, Homo sapien
gtaccctatctgtgacacttctgacccatcatg

SEQ ID NO: 506824 - DNA, 33 bp, Homo sapien
gtaccctatctgtgacccttctgacccatcatg

SEQ ID NO: 506825 - DNA, 33 bp, Homo sapien
ctctccccgcagccatcaggagtccaccagctg

SEQ ID NO: 506826 - DNA, 33 bp, Homo sapien
ctctccccgcagccattaggagtccaccagctg

SEQ ID NO: 506827 - DNA, 33 bp, Homo sapien
tcttggtactggtaaccggcagtgcacacgttg

SEQ ID NO: 506828 - DNA, 33 bp, Homo sapien
tcttggtactggtaacgggcagtgcacacgttg

SEQ ID NO: 506829 - DNA, 33 bp, Homo sapien
gcagcatgtggacgaaagcactgcctctatttc

SEQ ID NO: 506830 - DNA, 33 bp, Homo sapien
gcagcatgtggacgaaggcactgcctctatttc

SEQ ID NO: 506831 - DNA, 33 bp, Homo sapien
actattctagaaaccaatgctatggagctccag

SEQ ID NO: 506832 - DNA, 33 bp, Homo sapien
actattctagaaaccagtgctatggagctccag

SEQ ID NO: 506833 - DNA, 33 bp, Homo sapien
agctagacttgtgacaataagtgatcaaacagg

SEQ ID NO: 506834 - DNA, 33 bp, Homo sapien
agctagacttgtgacagtaagtgatcaaacagg

SEQ ID NO: 506835 - DNA, 33 bp, Homo sapien
gttgcctgttcccaaacggtacccactaggctg

SEQ ID NO: 506836 - DNA, 33 bp, Homo sapien
gttgcctgttcccaaatggtacccactaggctg

SEQ ID NO: 506837 - DNA, 33 bp, Homo sapien
agctttttcactcttcaaaggcttcactcatga

SEQ ID NO: 506838 - DNA, 33 bp, Homo sapien
agctttttcactcttcgaaggcttcactcatga

SEQ ID NO: 506839 - DNA, 33 bp, Homo sapien
actgagaggtagagcacggtcctttgcgtccct

SEQ ID NO: 506840 - DNA, 33 bp, Homo sapien
actgagaggtagagcatggtcctttgcgtccct

SEQ ID NO: 506841 - DNA, 33 bp, Homo sapien
acagcttccaaatgccagcactgttctaggacc

SEQ ID NO: 506842 - DNA, 33 bp, Homo sapien
acagcttccaaatgccggcactgttctaggacc

SEQ ID NO: 506843 - DNA, 33 bp, Homo sapien
tcacacctggtgaaaaacgactcgcaattgaaa

SEQ ID NO: 506844 - DNA, 33 bp, Homo sapien
tcacacctggtgaaaaccgactcgcaattgaaa

SEQ ID NO: 506845 - DNA, 33 bp, Homo sapien
tcactccaatggctcccctggttcccaggcctt

SEQ ID NO: 506846 - DNA, 33 bp, Homo sapien
tcactccaatggctcctctggttcccaggcctt

SEQ ID NO: 506847 - DNA, 33 bp, Homo sapien
taaccattagatagaaatgcactggtgggggtt

SEQ ID NO: 506848 - DNA, 33 bp, Homo sapien
taaccattagatagaactgcactggtgggggtt

SEQ ID NO: 506849 - DNA, 33 bp, Homo sapien
aagcagaaaagcagtgcaatgaccctaagagtc

SEQ ID NO: 506850 - DNA, 33 bp, Homo sapien
aagcagaaaagcagtggaatgaccctaagagtc

SEQ ID NO: 506851 - DNA, 33 bp, Homo sapien
gcagaaaatcagcaagcatttagaagaacacaa

SEQ ID NO: 506852 - DNA, 33 bp, Homo sapien
gcagaaaatcagcaaggatttagaagaacacaa

SEQ ID NO: 506853 - DNA, 33 bp, Homo sapien
cattcaacccaatgacccaatcctaggcattta

SEQ ID NO: 506854 - DNA, 33 bp, Homo sapien
cattcaacccaatgactcaatcctaggcattta

SEQ ID NO: 506855 - DNA, 33 bp, Homo sapien
tataaatcttgtaaaactgggtcatggtgatgg

SEQ ID NO: 506856 - DNA, 33 bp, Homo sapien
tataaatcttgtaaaattgggtcatggtgatgg

SEQ ID NO: 506857 - DNA, 33 bp, Homo sapien
tagtaggtattaagtacgcaataaatggcagat

SEQ ID NO: 506858 - DNA, 33 bp, Homo sapien
tagtaggtattaagtatgcaataaatggcagat

SEQ ID NO: 506859 - DNA, 33 bp, Homo sapien
aagggatattctacaaactaatgcagtggcttg

SEQ ID NO: 506860 - DNA, 33 bp, Homo sapien
aagggatattctacaatctaatgcagtggcttg

SEQ ID NO: 506861 - DNA, 33 bp, Homo sapien
cataaagccatactggaaatacaaagtctagca

SEQ ID NO: 506862 - DNA, 33 bp, Homo sapien
cataaagccatactgggaatacaaagtctagca

SEQ ID NO: 506863 - DNA, 33 bp, Homo sapien
aatgaatgtattttaacgtggtccctttaacaa

SEQ ID NO: 506864 - DNA, 33 bp, Homo sapien
aatgaatgtattttaatgtggtccctttaacaa

SEQ ID NO: 506865 - DNA, 33 bp, Homo sapien
caaaaagtgcaagaacaattggtgaaacttttc

SEQ ID NO: 506866 - DNA, 33 bp, Homo sapien
caaaaagtgcaagaacgattggtgaaacttttc

SEQ ID NO: 506867 - DNA, 33 bp, Homo sapien
gttcagacagagaaaactaaggcctaggaggga

SEQ ID NO: 506868 - DNA, 33 bp, Homo sapien
gttcagacagagaaaagtaaggcctaggaggga

SEQ ID NO: 506869 - DNA, 33 bp, Homo sapien
ggggtatgtatcagaacctggccattgagggta

SEQ ID NO: 506870 - DNA, 33 bp, Homo sapien
ggggtatgtatcagaatctggccattgagggta

SEQ ID NO: 506871 - DNA, 33 bp, Homo sapien
aagaaggtgataactcaatacgaagccctatgc

SEQ ID NO: 506872 - DNA, 33 bp, Homo sapien
aagaaggtgataactcgatacgaagccctatgc

SEQ ID NO: 506873 - DNA, 33 bp, Homo sapien
tgggtggaattcacaagaaatctccaccttatc

SEQ ID NO: 506874 - DNA, 33 bp, Homo sapien
tgggtggaattcacaataaatctccaccttatc

SEQ ID NO: 506875 - DNA, 33 bp, Homo sapien
tctggtaaaaataggcacctgcattaattagca

SEQ ID NO: 506876 - DNA, 33 bp, Homo sapien
tctggtaaaaataggcgcctgcattaattagca

SEQ ID NO: 506877 - DNA, 33 bp, Homo sapien
tttcaagtcaaagggaagccactcagatttaca

SEQ ID NO: 506878 - DNA, 33 bp, Homo sapien
tttcaagtcaaagggatgccactcagatttaca

SEQ ID NO: 506879 - DNA, 33 bp, Homo sapien
aacacctgccccaaataagtactgactggcttt

SEQ ID NO: 506880 - DNA, 33 bp, Homo sapien
aacacctgccccaaatgagtactgactggcttt

SEQ ID NO: 506881 - DNA, 33 bp, Homo sapien
gcgatttgcagtaaaaatctaaatgatcctgct

SEQ ID NO: 506882 - DNA, 33 bp, Homo sapien
gcgatttgcagtaaaagtctaaatgatcctgct

SEQ ID NO: 506883 - DNA, 33 bp, Homo sapien
tattacctaatgtctcaccattcaggatctgaa

SEQ ID NO: 506884 - DNA, 33 bp, Homo sapien
tattacctaatgtctcgccattcaggatctgaa

SEQ ID NO: 506885 - DNA, 33 bp, Homo sapien
gcccagaactgcaagcccattattaacagtaat

SEQ ID NO: 506886 - DNA, 33 bp, Homo sapien
gcccagaactgcaagcgcattattaacagtaat

SEQ ID NO: 506887 - DNA, 33 bp, Homo sapien
tgaagcagctgaaagaagtcaagaatcgaagag

SEQ ID NO: 506888 - DNA, 33 bp, Homo sapien
tgaagcagctgaaagaggtcaagaatcgaagag

SEQ ID NO: 506889 - DNA, 33 bp, Homo sapien
acacacattttaccgccagcatcactgtgtgtt

SEQ ID NO: 506890 - DNA, 33 bp, Homo sapien
acacacattttaccgctagcatcactgtgtgtt

SEQ ID NO: 506891 - DNA, 33 bp, Homo sapien
gcaccctgtgtagtgaacagcaaacaagctgat

SEQ ID NO: 506892 - DNA, 33 bp, Homo sapien
gcaccctgtgtagtgagcagcaaacaagctgat

SEQ ID NO: 506893 - DNA, 33 bp, Homo sapien
ttcaagtgagtcagaacttaaagctgccacgtt

SEQ ID NO: 506894 - DNA, 33 bp, Homo sapien
ttcaagtgagtcagaatttaaagctgccacgtt

SEQ ID NO: 506895 - DNA, 33 bp, Homo sapien
tgcctctttgagagaaaggcttttgttcacaat

SEQ ID NO: 506896 - DNA, 33 bp, Homo sapien
tgcctctttgagagaagggcttttgttcacaat

SEQ ID NO: 506897 - DNA, 33 bp, Homo sapien
ggcatttgtggcactaaggatttgatgtgtggg

SEQ ID NO: 506898 - DNA, 33 bp, Homo sapien
ggcatttgtggcactatggatttgatgtgtggg

SEQ ID NO: 506899 - DNA, 33 bp, Homo sapien
accccaagtgaaccaaatgctgtgctcactcca

SEQ ID NO: 506900 - DNA, 33 bp, Homo sapien
accccaagtgaaccaagtgctgtgctcactcca

SEQ ID NO: 506901 - DNA, 33 bp, Homo sapien
gtctgttcccagtgacactgaaacttgctctcc

SEQ ID NO: 506902 - DNA, 33 bp, Homo sapien
gtctgttcccagtgaccctgaaacttgctctcc

SEQ ID NO: 506903 - DNA, 33 bp, Homo sapien
cctggtagaaattcaacgaccctgagattctgg

SEQ ID NO: 506904 - DNA, 33 bp, Homo sapien
cctggtagaaattcaatgaccctgagattctgg

SEQ ID NO: 506905 - DNA, 33 bp, Homo sapien
atcatttctttcaaagactgttgtgatcggtca

SEQ ID NO: 506906 - DNA, 33 bp, Homo sapien
atcatttctttcaaaggctgttgtgatcggtca

SEQ ID NO: 506907 - DNA, 33 bp, Homo sapien
aaactcagatctggcaaatgaaaagattctctt

SEQ ID NO: 506908 - DNA, 33 bp, Homo sapien
aaactcagatctggcacatgaaaagattctctt

SEQ ID NO: 506909 - DNA, 33 bp, Homo sapien
ccagggtgatgcgccacgctctagtctcctgct

SEQ ID NO: 506910 - DNA, 33 bp, Homo sapien
ccagggtgatgcgccatgctctagtctcctgct

SEQ ID NO: 506911 - DNA, 33 bp, Homo sapien
taacagtttgaaaaaaccaagagcgcctaactc

SEQ ID NO: 506912 - DNA, 33 bp, Homo sapien
taacagtttgaaaaaatcaagagcgcctaactc

SEQ ID NO: 506913 - DNA, 33 bp, Homo sapien
atcctgaggatggatacgctcatgacaaagaga

SEQ ID NO: 506914 - DNA, 33 bp, Homo sapien
atcctgaggatggataggctcatgacaaagaga

SEQ ID NO: 506915 - DNA, 33 bp, Homo sapien
ctgtctctacggttagcactcatgttggtgaaa

SEQ ID NO: 506916 - DNA, 33 bp, Homo sapien
ctgtctctacggttagtactcatgttggtgaaa

SEQ ID NO: 506917 - DNA, 33 bp, Homo sapien
gcaaggttgtaggatacaagatggacatacaaa

SEQ ID NO: 506918 - DNA, 33 bp, Homo sapien
gcaaggttgtaggatataagatggacatacaaa

SEQ ID NO: 506919 - DNA, 33 bp, Homo sapien
aatatgctagatgatagaggaaacaagaagaaa

SEQ ID NO: 506920 - DNA, 33 bp, Homo sapien
aatatgctagatgatataggaaacaagaagaaa

SEQ ID NO: 506921 - DNA, 33 bp, Homo sapien
gcaaagttagatataactgccacatatgtgctc

SEQ ID NO: 506922 - DNA, 33 bp, Homo sapien
gcaaagttagatataattgccacatatgtgctc

SEQ ID NO: 506923 - DNA, 33 bp, Homo sapien
acaaagagatgggtgccatgctgggagacaatc

SEQ ID NO: 506924 - DNA, 33 bp, Homo sapien
acaaagagatgggtgctatgctgggagacaatc

SEQ ID NO: 506925 - DNA, 33 bp, Homo sapien
gtattgacgtaaataacgtctgcttggttccga

SEQ ID NO: 506926 - DNA, 33 bp, Homo sapien
gtattgacgtaaataatgtctgcttggttccga

SEQ ID NO: 506927 - DNA, 33 bp, Homo sapien
actgaggcaggaagagcctaacttatgctgcta

SEQ ID NO: 506928 - DNA, 33 bp, Homo sapien
actgaggcaggaagaggctaacttatgctgcta

SEQ ID NO: 506929 - DNA, 33 bp, Homo sapien
gagggagttgatgaaacaatcagggaaaatgtt

SEQ ID NO: 506930 - DNA, 33 bp, Homo sapien
gagggagttgatgaaataatcagggaaaatgtt

SEQ ID NO: 506931 - DNA, 33 bp, Homo sapien
aaagcaaaatgtagaaatcatactggctcaaga

SEQ ID NO: 506932 - DNA, 33 bp, Homo sapien
aaagcaaaatgtagaagtcatactggctcaaga

SEQ ID NO: 506933 - DNA, 33 bp, Homo sapien
ctcatttccttgaataccttgattagatgcatt

SEQ ID NO: 506934 - DNA, 33 bp, Homo sapien
ctcatttccttgaatagcttgattagatgcatt

SEQ ID NO: 506935 - DNA, 33 bp, Homo sapien
atctcctctaattaccagacgccaagttttcta

SEQ ID NO: 506936 - DNA, 33 bp, Homo sapien
atctcctctaattaccggacgccaagttttcta

SEQ ID NO: 506937 - DNA, 33 bp, Homo sapien
cgttcacacaataatacggataacagatttatg

SEQ ID NO: 506938 - DNA, 33 bp, Homo sapien
cgttcacacaataatagggataacagatttatg

SEQ ID NO: 506939 - DNA, 33 bp, Homo sapien
gagggagccattgaaagatcttagacataatgc

SEQ ID NO: 506940 - DNA, 33 bp, Homo sapien
gagggagccattgaaatatcttagacataatgc

SEQ ID NO: 506941 - DNA, 33 bp, Homo sapien
catttatttgtatgtacgcgtctttatcaatga

SEQ ID NO: 506942 - DNA, 33 bp, Homo sapien
catttatttgtatgtatgcgtctttatcaatga

SEQ ID NO: 506943 - DNA, 33 bp, Homo sapien
ccaggcttcacagccaagtgcaggaaaagcctt

SEQ ID NO: 506944 - DNA, 33 bp, Homo sapien
ccaggcttcacagccaggtgcaggaaaagcctt

SEQ ID NO: 506945 - DNA, 33 bp, Homo sapien
cagcattctgaaaacactattgataatagcaaa

SEQ ID NO: 506946 - DNA, 33 bp, Homo sapien
cagcattctgaaaacattattgataatagcaaa

SEQ ID NO: 506947 - DNA, 33 bp, Homo sapien
cagactgggaaactgacagcttaatactgagag

SEQ ID NO: 506948 - DNA, 33 bp, Homo sapien
cagactgggaaactgagagcttaatactgagag

SEQ ID NO: 506949 - DNA, 33 bp, Homo sapien
tatataagttctgacacgatagataatatgtga

SEQ ID NO: 506950 - DNA, 33 bp, Homo sapien
tatataagttctgacaggatagataatatgtga

SEQ ID NO: 506951 - DNA, 33 bp, Homo sapien
tcatccaattcattcactacaaaaatatctatc

SEQ ID NO: 506952 - DNA, 33 bp, Homo sapien
tcatccaattcattcattacaaaaatatctatc

SEQ ID NO: 506953 - DNA, 33 bp, Homo sapien
ttcaaaggttgatgaccggctctcagacccacc

SEQ ID NO: 506954 - DNA, 33 bp, Homo sapien
ttcaaaggttgatgactggctctcagacccacc

SEQ ID NO: 506955 - DNA, 33 bp, Homo sapien
aatggcgacatactacaatgcacatcatgtgat

SEQ ID NO: 506956 - DNA, 33 bp, Homo sapien
aatggcgacatactacgatgcacatcatgtgat

SEQ ID NO: 506957 - DNA, 33 bp, Homo sapien
ctcaagcaaaggaacacgtggttacttgacaaa

SEQ ID NO: 506958 - DNA, 33 bp, Homo sapien
ctcaagcaaaggaacatgtggttacttgacaaa

SEQ ID NO: 506959 - DNA, 33 bp, Homo sapien
tccatcctagtggctcaccaagaatgcctttct

SEQ ID NO: 506960 - DNA, 33 bp, Homo sapien
tccatcctagtggctcgccaagaatgcctttct

SEQ ID NO: 506961 - DNA, 33 bp, Homo sapien
aatgcaaccactaagcagaaatggaaattcaga

SEQ ID NO: 506962 - DNA, 33 bp, Homo sapien
aatgcaaccactaagcggaaatggaaattcaga

SEQ ID NO: 506963 - DNA, 33 bp, Homo sapien
ataccattgtttattcaaccagtcactcctgat

SEQ ID NO: 506964 - DNA, 33 bp, Homo sapien
ataccattgtttattcgaccagtcactcctgat

SEQ ID NO: 506965 - DNA, 33 bp, Homo sapien
tttctgaatctgaccacgtttaatgagaaatta

SEQ ID NO: 506966 - DNA, 33 bp, Homo sapien
tttctgaatctgaccatgtttaatgagaaatta

SEQ ID NO: 506967 - DNA, 33 bp, Homo sapien
tgaatggctgatttcaaaaaaaggtgatgatga

SEQ ID NO: 506968 - DNA, 33 bp, Homo sapien
tgaatggctgatttcagaaaaaggtgatgatga

SEQ ID NO: 506969 - DNA, 33 bp, Homo sapien
agtgagtgaatgctcacaagatatggttgttta

SEQ ID NO: 506970 - DNA, 33 bp, Homo sapien
agtgagtgaatgctcataagatatggttgttta

SEQ ID NO: 506971 - DNA, 33 bp, Homo sapien
tttttcattcattctaccagttcctcccacatg

SEQ ID NO: 506972 - DNA, 33 bp, Homo sapien
tttttcattcattctagcagttcctcccacatg

SEQ ID NO: 506973 - DNA, 33 bp, Homo sapien
ccccaatacttgtgaacctttatagctatagtt

SEQ ID NO: 506974 - DNA, 33 bp, Homo sapien
ccccaatacttgtgaatctttatagctatagtt

SEQ ID NO: 506975 - DNA, 33 bp, Homo sapien
tgcttcctgctaaagaaggggtaattctagttt

SEQ ID NO: 506976 - DNA, 33 bp, Homo sapien
tgcttcctgctaaagagggggtaattctagttt

SEQ ID NO: 506977 - DNA, 33 bp, Homo sapien
ccaacatacagcaaaagataaccagacacaaat

SEQ ID NO: 506978 - DNA, 33 bp, Homo sapien
ccaacatacagcaaaatataaccagacacaaat

SEQ ID NO: 506979 - DNA, 33 bp, Homo sapien
taaccagacacaaatgaaaattagattggtagg

SEQ ID NO: 506980 - DNA, 33 bp, Homo sapien
taaccagacacaaatgcaaattagattggtagg

SEQ ID NO: 506981 - DNA, 33 bp, Homo sapien
tatcctctgtgggtcacgaatctgcgagctgct

SEQ ID NO: 506982 - DNA, 33 bp, Homo sapien
tatcctctgtgggtcatgaatctgcgagctgct

SEQ ID NO: 506983 - DNA, 33 bp, Homo sapien
cgtcagtttaaaacagcacctagtcccacaaac

SEQ ID NO: 506984 - DNA, 33 bp, Homo sapien
cgtcagtttaaaacagtacctagtcccacaaac

SEQ ID NO: 506985 - DNA, 33 bp, Homo sapien
ccaaacctcagcaaaaagagaccaccaaactat

SEQ ID NO: 506986 - DNA, 33 bp, Homo sapien
ccaaacctcagcaaaaggagaccaccaaactat

SEQ ID NO: 506987 - DNA, 33 bp, Homo sapien
tgacttaactgaactacacatatctgaatagaa

SEQ ID NO: 506988 - DNA, 33 bp, Homo sapien
tgacttaactgaactatacatatctgaatagaa

SEQ ID NO: 506989 - DNA, 33 bp, Homo sapien
aaattctgcttcccaaagtactacctatatgaa

SEQ ID NO: 506990 - DNA, 33 bp, Homo sapien
aaattctgcttcccaatgtactacctatatgaa

SEQ ID NO: 506991 - DNA, 33 bp, Homo sapien
acacaaagctctagaaccagaaagatctgtgtt

SEQ ID NO: 506992 - DNA, 33 bp, Homo sapien
acacaaagctctagaatcagaaagatctgtgtt

SEQ ID NO: 506993 - DNA, 33 bp, Homo sapien
ggtggaagcttagtaaaccccatcctcaattat

SEQ ID NO: 506994 - DNA, 33 bp, Homo sapien
ggtggaagcttagtaacccccatcctcaattat

SEQ ID NO: 506995 - DNA, 33 bp, Homo sapien
tggtgtctaagaagataacaggcaggtttttag

SEQ ID NO: 506996 - DNA, 33 bp, Homo sapien
tggtgtctaagaagatgacaggcaggtttttag

SEQ ID NO: 506997 - DNA, 33 bp, Homo sapien
gtgatcttcatcaaaacacagtgtccattgatc

SEQ ID NO: 506998 - DNA, 33 bp, Homo sapien
gtgatcttcatcaaaatacagtgtccattgatc

SEQ ID NO: 506999 - DNA, 33 bp, Homo sapien
aagcacttcatgtcgaagatctgtagatgtgca

SEQ ID NO: 507000 - DNA, 33 bp, Homo sapien
aagcacttcatgtcgacgatctgtagatgtgca

SEQ ID NO: 507001 - DNA, 33 bp, Homo sapien
cgtttgtgaggtcaagaagttaatggccaccag

SEQ ID NO: 507002 - DNA, 33 bp, Homo sapien
cgtttgtgaggtcaaggagttaatggccaccag

SEQ ID NO: 507003 - DNA, 33 bp, Homo sapien
tgcaacttgctcatcaaggcatcttctgttggc

SEQ ID NO: 507004 - DNA, 33 bp, Homo sapien
tgcaacttgctcatcagggcatcttctgttggc

SEQ ID NO: 507005 - DNA, 33 bp, Homo sapien
aatgaaggttgccagcagaatactgagagaaag

SEQ ID NO: 507006 - DNA, 33 bp, Homo sapien
aatgaaggttgccagcggaatactgagagaaag

SEQ ID NO: 507007 - DNA, 33 bp, Homo sapien
atttgtctctctcccacgattttgtatggcttg

SEQ ID NO: 507008 - DNA, 33 bp, Homo sapien
atttgtctctctcccatgattttgtatggcttg

SEQ ID NO: 507009 - DNA, 33 bp, Homo sapien
catgtaattataaaccacctagtagccacatta

SEQ ID NO: 507010 - DNA, 33 bp, Homo sapien
catgtaattataaaccgcctagtagccacatta

SEQ ID NO: 507011 - DNA, 33 bp, Homo sapien
aggcaactcgcaaagaagagatggaagaaggca

SEQ ID NO: 507012 - DNA, 33 bp, Homo sapien
aggcaactcgcaaagatgagatggaagaaggca

SEQ ID NO: 507013 - DNA, 33 bp, Homo sapien
ggaagtacaattggaacgttcatgacagaaatg

SEQ ID NO: 507014 - DNA, 33 bp, Homo sapien
ggaagtacaattggaatgttcatgacagaaatg

SEQ ID NO: 507015 - DNA, 33 bp, Homo sapien
aaagctctaagagaagcaaactgaaggataacc

SEQ ID NO: 507016 - DNA, 33 bp, Homo sapien
aaagctctaagagaaggaaactgaaggataacc

SEQ ID NO: 507017 - DNA, 33 bp, Homo sapien
gccgaatagagttcaacaatcagactggcaatc

SEQ ID NO: 507018 - DNA, 33 bp, Homo sapien
gccgaatagagttcaagaatcagactggcaatc

SEQ ID NO: 507019 - DNA, 33 bp, Homo sapien
cactggagaagaagacagaatcgctacctaact

SEQ ID NO: 507020 - DNA, 33 bp, Homo sapien
cactggagaagaagacggaatcgctacctaact

SEQ ID NO: 507021 - DNA, 33 bp, Homo sapien
tttgcgacaccaattgaatcttcctttcacaaa

SEQ ID NO: 507022 - DNA, 33 bp, Homo sapien
tttgcgacaccaattgcatcttcctttcacaaa

SEQ ID NO: 507023 - DNA, 33 bp, Homo sapien
aagagggatgatgttacagtcacaatcaggaaa

SEQ ID NO: 507024 - DNA, 33 bp, Homo sapien
aagagggatgatgttatagtcacaatcaggaaa

SEQ ID NO: 507025 - DNA, 33 bp, Homo sapien
caaaaacccaggcacaaagaaatagcttaaaat

SEQ ID NO: 507026 - DNA, 33 bp, Homo sapien
caaaaacccaggcacacagaaatagcttaaaat

SEQ ID NO: 507027 - DNA, 33 bp, Homo sapien
tactgatgacatagatgaacacatattttgtat

SEQ ID NO: 507028 - DNA, 33 bp, Homo sapien
tactgatgacatagattaacacatattttgtat

SEQ ID NO: 507029 - DNA, 33 bp, Homo sapien
agtagagagaagaaacagttattaaggaaatcg

SEQ ID NO: 507030 - DNA, 33 bp, Homo sapien
agtagagagaagaaactgttattaaggaaatcg

SEQ ID NO: 507031 - DNA, 33 bp, Homo sapien
cgccatgacgagccgggccggaagaagaggtag

SEQ ID NO: 507032 - DNA, 33 bp, Homo sapien
cgccatgacgagccggtccggaagaagaggtag

SEQ ID NO: 507033 - DNA, 33 bp, Homo sapien
acatcaacatctagtaccacctcctctgtgccc

SEQ ID NO: 507034 - DNA, 33 bp, Homo sapien
acatcaacatctagtagcacctcctctgtgccc

SEQ ID NO: 507035 - DNA, 33 bp, Homo sapien
tgttcctattgtatcactgaggttttgctgctg

SEQ ID NO: 507036 - DNA, 33 bp, Homo sapien
tgttcctattgtatcattgaggttttgctgctg

SEQ ID NO: 507037 - DNA, 33 bp, Homo sapien
taaaaacaaggcaaaaaatgattgaaaggatta

SEQ ID NO: 507038 - DNA, 33 bp, Homo sapien
taaaaacaaggcaaaagatgattgaaaggatta

SEQ ID NO: 507039 - DNA, 33 bp, Homo sapien
tctgcaattctccagacgtggtgttatttttta

SEQ ID NO: 507040 - DNA, 33 bp, Homo sapien
tctgcaattctccagatgtggtgttatttttta

SEQ ID NO: 507041 - DNA, 33 bp, Homo sapien
tttaatgttgcctaagaaaaaggatttggtcca

SEQ ID NO: 507042 - DNA, 33 bp, Homo sapien
tttaatgttgcctaaggaaaaggatttggtcca

SEQ ID NO: 507043 - DNA, 33 bp, Homo sapien
tttggatacctctcagaatttcccatcaggacc

SEQ ID NO: 507044 - DNA, 33 bp, Homo sapien
tttggatacctctcaggatttcccatcaggacc

SEQ ID NO: 507045 - DNA, 33 bp, Homo sapien
tccaacatcaggaagccaagtgaaggcgtgact

SEQ ID NO: 507046 - DNA, 33 bp, Homo sapien
tccaacatcaggaagctaagtgaaggcgtgact

SEQ ID NO: 507047 - DNA, 33 bp, Homo sapien
taggagatcagtcttcaagattggccccagttt

SEQ ID NO: 507048 - DNA, 33 bp, Homo sapien
taggagatcagtcttcgagattggccccagttt

SEQ ID NO: 507049 - DNA, 33 bp, Homo sapien
ggaaaaggcacttacaatcttgaaatttgttag

SEQ ID NO: 507050 - DNA, 33 bp, Homo sapien
ggaaaaggcacttacagtcttgaaatttgttag

SEQ ID NO: 507051 - DNA, 33 bp, Homo sapien
gggaaaatacctcatccgagatttattgagagc

SEQ ID NO: 507052 - DNA, 33 bp, Homo sapien
gggaaaatacctcatctgagatttattgagagc

SEQ ID NO: 507053 - DNA, 33 bp, Homo sapien
attcattaaattttagcagtagctgagaagggg

SEQ ID NO: 507054 - DNA, 33 bp, Homo sapien
attcattaaattttagtagtagctgagaagggg

SEQ ID NO: 507055 - DNA, 33 bp, Homo sapien
caaacttcagctaaagaaattgcaagatctggc

SEQ ID NO: 507056 - DNA, 33 bp, Homo sapien
caaacttcagctaaaggaattgcaagatctggc

SEQ ID NO: 507057 - DNA, 33 bp, Homo sapien
gaaataataaacaccaaattcagtcaaaaccaa

SEQ ID NO: 507058 - DNA, 33 bp, Homo sapien
gaaataataaacaccagattcagtcaaaaccaa

SEQ ID NO: 507059 - DNA, 33 bp, Homo sapien
acaatgataacattcccacaaatatggtagcag

SEQ ID NO: 507060 - DNA, 33 bp, Homo sapien
acaatgataacattcctacaaatatggtagcag

SEQ ID NO: 507061 - DNA, 33 bp, Homo sapien
tactggccaatcacaaactcttagctctacaga

SEQ ID NO: 507062 - DNA, 33 bp, Homo sapien
tactggccaatcacaagctcttagctctacaga

SEQ ID NO: 507063 - DNA, 33 bp, Homo sapien
gaggtatagacctaaacgaggaattgttggatc

SEQ ID NO: 507064 - DNA, 33 bp, Homo sapien
gaggtatagacctaaatgaggaattgttggatc

SEQ ID NO: 507065 - DNA, 33 bp, Homo sapien
aagttttggcaattataactaaatgtgctgtaa

SEQ ID NO: 507066 - DNA, 33 bp, Homo sapien
aagttttggcaattatgactaaatgtgctgtaa

SEQ ID NO: 507067 - DNA, 33 bp, Homo sapien
ttcttacatccagaaaatattaaatctagctgg

SEQ ID NO: 507068 - DNA, 33 bp, Homo sapien
ttcttacatccagaaattattaaatctagctgg

SEQ ID NO: 507069 - DNA, 33 bp, Homo sapien
gtcgatctccctggccccattacagtcacgggg

SEQ ID NO: 507070 - DNA, 33 bp, Homo sapien
gtcgatctccctggccgcattacagtcacgggg

SEQ ID NO: 507071 - DNA, 33 bp, Homo sapien
cagcaacgttcaggtacgatgaatcacttcagt

SEQ ID NO: 507072 - DNA, 33 bp, Homo sapien
cagcaacgttcaggtatgatgaatcacttcagt

SEQ ID NO: 507073 - DNA, 33 bp, Homo sapien
aaacgtgtcattagtcaatttcaccattgtgtg

SEQ ID NO: 507074 - DNA, 33 bp, Homo sapien
aaacgtgtcattagtcgatttcaccattgtgtg

SEQ ID NO: 507075 - DNA, 33 bp, Homo sapien
cacttccatagctgtaacaacccatcagggaac

SEQ ID NO: 507076 - DNA, 33 bp, Homo sapien
cacttccatagctgtagcaacccatcagggaac

SEQ ID NO: 507077 - DNA, 33 bp, Homo sapien
cagtcttgcagataacagtctgtgtcttaacag

SEQ ID NO: 507078 - DNA, 33 bp, Homo sapien
cagtcttgcagataactgtctgtgtcttaacag

SEQ ID NO: 507079 - DNA, 33 bp, Homo sapien
ttttgggggtgcagaacccaacgaggaatccag

SEQ ID NO: 507080 - DNA, 33 bp, Homo sapien
ttttgggggtgcagaatccaacgaggaatccag

SEQ ID NO: 507081 - DNA, 33 bp, Homo sapien
acatgggctggcatcacgggccatcttctactt

SEQ ID NO: 507082 - DNA, 33 bp, Homo sapien
acatgggctggcatcatgggccatcttctactt

SEQ ID NO: 507083 - DNA, 33 bp, Homo sapien
acagtgtctgaggttcaaggcaagaatattcct

SEQ ID NO: 507084 - DNA, 33 bp, Homo sapien
acagtgtctgaggttcgaggcaagaatattcct

SEQ ID NO: 507085 - DNA, 33 bp, Homo sapien
ttctagtccaagtctcaatttttccttcacaga

SEQ ID NO: 507086 - DNA, 33 bp, Homo sapien
ttctagtccaagtctcgatttttccttcacaga

SEQ ID NO: 507087 - DNA, 33 bp, Homo sapien
actagtttcagcaactaaagagtcagaagtaat

SEQ ID NO: 507088 - DNA, 33 bp, Homo sapien
actagtttcagcaactgaagagtcagaagtaat

SEQ ID NO: 507089 - DNA, 33 bp, Homo sapien
taaacccaatacgtcaacatccttaaatcaata

SEQ ID NO: 507090 - DNA, 33 bp, Homo sapien
taaacccaatacgtcagcatccttaaatcaata

SEQ ID NO: 507091 - DNA, 33 bp, Homo sapien
agccaggcgtggaaatcaagatctcaggttggt

SEQ ID NO: 507092 - DNA, 33 bp, Homo sapien
agccaggcgtggaaatgaagatctcaggttggt

SEQ ID NO: 507093 - DNA, 33 bp, Homo sapien
tcaaaaaggctttaaactgctagtacaaagaag

SEQ ID NO: 507094 - DNA, 33 bp, Homo sapien
tcaaaaaggctttaaattgctagtacaaagaag

SEQ ID NO: 507095 - DNA, 33 bp, Homo sapien
tgcctgatatcccacgcagtgctggagtattcc

SEQ ID NO: 507096 - DNA, 33 bp, Homo sapien
tgcctgatatcccacgtagtgctggagtattcc

SEQ ID NO: 507097 - DNA, 33 bp, Homo sapien
aaatttattatctataacacctcattgaactat

SEQ ID NO: 507098 - DNA, 33 bp, Homo sapien
aaatttattatctatagcacctcattgaactat

SEQ ID NO: 507099 - DNA, 33 bp, Homo sapien
tttctgacttttaaaaatgaatgtatgagtata

SEQ ID NO: 507100 - DNA, 33 bp, Homo sapien
tttctgacttttaaaagtgaatgtatgagtata

SEQ ID NO: 507101 - DNA, 33 bp, Homo sapien
gtaagacttgattcctcaatgtccttttgtttt

SEQ ID NO: 507102 - DNA, 33 bp, Homo sapien
gtaagacttgattccttaatgtccttttgtttt

SEQ ID NO: 507103 - DNA, 33 bp, Homo sapien
aaaaatatggttaagacgctgccactcatccag

SEQ ID NO: 507104 - DNA, 33 bp, Homo sapien
aaaaatatggttaagatgctgccactcatccag

SEQ ID NO: 507105 - DNA, 33 bp, Homo sapien
ttcagtcctttttctaacatcttgttctctaac

SEQ ID NO: 507106 - DNA, 33 bp, Homo sapien
ttcagtcctttttctaccatcttgttctctaac

SEQ ID NO: 507107 - DNA, 33 bp, Homo sapien
acaagtaacaccaaaccaggaagatctttatta

SEQ ID NO: 507108 - DNA, 33 bp, Homo sapien
acaagtaacaccaaactaggaagatctttatta

SEQ ID NO: 507109 - DNA, 33 bp, Homo sapien
ctgccgtccctcagtaaaacgaatcagtcctta

SEQ ID NO: 507110 - DNA, 33 bp, Homo sapien
ctgccgtccctcagtataacgaatcagtcctta

SEQ ID NO: 507111 - DNA, 33 bp, Homo sapien
ctctaacatattctggaaccttcaataaactaa

SEQ ID NO: 507112 - DNA, 33 bp, Homo sapien
ctctaacatattctgggaccttcaataaactaa

SEQ ID NO: 507113 - DNA, 33 bp, Homo sapien
tgctctctagatttcaagaaaccaaatatcaaa

SEQ ID NO: 507114 - DNA, 33 bp, Homo sapien
tgctctctagatttcaggaaaccaaatatcaaa

SEQ ID NO: 507115 - DNA, 33 bp, Homo sapien
aaatatgcctagattaacattcctctgtcatat

SEQ ID NO: 507116 - DNA, 33 bp, Homo sapien
aaatatgcctagattagcattcctctgtcatat

SEQ ID NO: 507117 - DNA, 33 bp, Homo sapien
agctaacacatagcaacgtctgagaaaccgtcc

SEQ ID NO: 507118 - DNA, 33 bp, Homo sapien
agctaacacatagcaatgtctgagaaaccgtcc

SEQ ID NO: 507119 - DNA, 33 bp, Homo sapien
gaacactggtcggtcaactgctgggcgtacctt

SEQ ID NO: 507120 - DNA, 33 bp, Homo sapien
gaacactggtcggtcagctgctgggcgtacctt

SEQ ID NO: 507121 - DNA, 33 bp, Homo sapien
taaccttggacctcacaccatagctattcacat

SEQ ID NO: 507122 - DNA, 33 bp, Homo sapien
taaccttggacctcacgccatagctattcacat

SEQ ID NO: 507123 - DNA, 33 bp, Homo sapien
tgttttaaaatgtagacgtcatatgcaggagag

SEQ ID NO: 507124 - DNA, 33 bp, Homo sapien
tgttttaaaatgtagatgtcatatgcaggagag

SEQ ID NO: 507125 - DNA, 33 bp, Homo sapien
agtatgtaaaagtaacaaagtgctgtacacatg

SEQ ID NO: 507126 - DNA, 33 bp, Homo sapien
agtatgtaaaagtaaccaagtgctgtacacatg

SEQ ID NO: 507127 - DNA, 33 bp, Homo sapien
ccatgctcttgttcacactggttcctctacctg

SEQ ID NO: 507128 - DNA, 33 bp, Homo sapien
ccatgctcttgttcacgctggttcctctacctg

SEQ ID NO: 507129 - DNA, 33 bp, Homo sapien
ctatcccacgcatcaacctttcctgtctatttg

SEQ ID NO: 507130 - DNA, 33 bp, Homo sapien
ctatcccacgcatcaatctttcctgtctatttg

SEQ ID NO: 507131 - DNA, 33 bp, Homo sapien
ccctgaggcctttgtccgaatggagacctgcat

SEQ ID NO: 507132 - DNA, 33 bp, Homo sapien
ccctgaggcctttgtctgaatggagacctgcat

SEQ ID NO: 507133 - DNA, 33 bp, Homo sapien
gccctccagagttcaacaatctctagaaaggat

SEQ ID NO: 507134 - DNA, 33 bp, Homo sapien
gccctccagagttcaataatctctagaaaggat

SEQ ID NO: 507135 - DNA, 33 bp, Homo sapien
acttctgacttagaaacagcactggcgtctaag

SEQ ID NO: 507136 - DNA, 33 bp, Homo sapien
acttctgacttagaaatagcactggcgtctaag

SEQ ID NO: 507137 - DNA, 33 bp, Homo sapien
acagcctgtgtagctcaactctgctggtttata

SEQ ID NO: 507138 - DNA, 33 bp, Homo sapien
acagcctgtgtagctcgactctgctggtttata

SEQ ID NO: 507139 - DNA, 33 bp, Homo sapien
agtatttctgatgatacgatgcccccagtcaga

SEQ ID NO: 507140 - DNA, 33 bp, Homo sapien
agtatttctgatgatatgatgcccccagtcaga

SEQ ID NO: 507141 - DNA, 33 bp, Homo sapien
atctcttaaacttcaccgaagactgtggtctca

SEQ ID NO: 507142 - DNA, 33 bp, Homo sapien
atctcttaaacttcactgaagactgtggtctca

SEQ ID NO: 507143 - DNA, 33 bp, Homo sapien
ctattttccatgccaaaggtataaacaaattcc

SEQ ID NO: 507144 - DNA, 33 bp, Homo sapien
ctattttccatgccaacggtataaacaaattcc

SEQ ID NO: 507145 - DNA, 33 bp, Homo sapien
agcttaggaaatccacaaaccctggaaatgcta

SEQ ID NO: 507146 - DNA, 33 bp, Homo sapien
agcttaggaaatccaccaaccctggaaatgcta

SEQ ID NO: 507147 - DNA, 33 bp, Homo sapien
aatctgtaggtgaggacgatccttttatctact

SEQ ID NO: 507148 - DNA, 33 bp, Homo sapien
aatctgtaggtgaggatgatccttttatctact

SEQ ID NO: 507149 - DNA, 33 bp, Homo sapien
gaggtgcattttgaagcatatgcaaccatccag

SEQ ID NO: 507150 - DNA, 33 bp, Homo sapien
gaggtgcattttgaaggatatgcaaccatccag

SEQ ID NO: 507151 - DNA, 33 bp, Homo sapien
ccgtcacacctcagtaaacaatcatttgggtca

SEQ ID NO: 507152 - DNA, 33 bp, Homo sapien
ccgtcacacctcagtagacaatcatttgggtca

SEQ ID NO: 507153 - DNA, 33 bp, Homo sapien
cccgtgatccagttcacctctattctatgtttc

SEQ ID NO: 507154 - DNA, 33 bp, Homo sapien
cccgtgatccagttcatctctattctatgtttc

SEQ ID NO: 507155 - DNA, 33 bp, Homo sapien
atcctcaatgcctctcactttcctgcaaattct

SEQ ID NO: 507156 - DNA, 33 bp, Homo sapien
atcctcaatgcctctcgctttcctgcaaattct

SEQ ID NO: 507157 - DNA, 33 bp, Homo sapien
ccccagtgaggtcagcaattaggaaactgcccc

SEQ ID NO: 507158 - DNA, 33 bp, Homo sapien
ccccagtgaggtcagcgattaggaaactgcccc

SEQ ID NO: 507159 - DNA, 33 bp, Homo sapien
tagcagtacacaagcagaagccggtctctttcc

SEQ ID NO: 507160 - DNA, 33 bp, Homo sapien
tagcagtacacaagcataagccggtctctttcc

SEQ ID NO: 507161 - DNA, 33 bp, Homo sapien
tgtcatgtaacatatacacagggtctggggatt

SEQ ID NO: 507162 - DNA, 33 bp, Homo sapien
tgtcatgtaacatatatacagggtctggggatt

SEQ ID NO: 507163 - DNA, 33 bp, Homo sapien
gactcactatatctcaccaggttggaaggggat

SEQ ID NO: 507164 - DNA, 33 bp, Homo sapien
gactcactatatctcatcaggttggaaggggat

SEQ ID NO: 507165 - DNA, 33 bp, Homo sapien
aagcatgagtgacccacgtcatagtgactcact

SEQ ID NO: 507166 - DNA, 33 bp, Homo sapien
aagcatgagtgacccatgtcatagtgactcact

SEQ ID NO: 507167 - DNA, 33 bp, Homo sapien
tgcatcaacaccttacggaagcacaaggccctg

SEQ ID NO: 507168 - DNA, 33 bp, Homo sapien
tgcatcaacaccttactgaagcacaaggccctg

SEQ ID NO: 507169 - DNA, 33 bp, Homo sapien
ttccaaatactcatcccggagtcagtctagagc

SEQ ID NO: 507170 - DNA, 33 bp, Homo sapien
ttccaaatactcatcctggagtcagtctagagc

SEQ ID NO: 507171 - DNA, 33 bp, Homo sapien
ctgactcctgctctacaggagaagagaccacag

SEQ ID NO: 507172 - DNA, 33 bp, Homo sapien
ctgactcctgctctacgggagaagagaccacag

SEQ ID NO: 507173 - DNA, 33 bp, Homo sapien
tctgttgttacagaacaaagaaggccatagaca

SEQ ID NO: 507174 - DNA, 33 bp, Homo sapien
tctgttgttacagaacgaagaaggccatagaca

SEQ ID NO: 507175 - DNA, 33 bp, Homo sapien
gaaaattcccttatggaccagaaatcaccagga

SEQ ID NO: 507176 - DNA, 33 bp, Homo sapien
gaaaattcccttatgggccagaaatcaccagga

SEQ ID NO: 507177 - DNA, 33 bp, Homo sapien
aacactgcctcctccccatacatttcattagaa

SEQ ID NO: 507178 - DNA, 33 bp, Homo sapien
aacactgcctcctccctatacatttcattagaa

SEQ ID NO: 507179 - DNA, 33 bp, Homo sapien
cctttgagaggaggcaatcattaaccaggaaat

SEQ ID NO: 507180 - DNA, 33 bp, Homo sapien
cctttgagaggaggcagtcattaaccaggaaat

SEQ ID NO: 507181 - DNA, 33 bp, Homo sapien
ctacagagttggacaacaaagccttgagttcct

SEQ ID NO: 507182 - DNA, 33 bp, Homo sapien
ctacagagttggacaataaagccttgagttcct

SEQ ID NO: 507183 - DNA, 33 bp, Homo sapien
gaaattaattctatacaatgatgtgacaaccac

SEQ ID NO: 507184 - DNA, 33 bp, Homo sapien
gaaattaattctatacgatgatgtgacaaccac

SEQ ID NO: 507185 - DNA, 33 bp, Homo sapien
ccaggaatttcttcacagagtactttaagccaa

SEQ ID NO: 507186 - DNA, 33 bp, Homo sapien
ccaggaatttcttcaccgagtactttaagccaa

SEQ ID NO: 507187 - DNA, 33 bp, Homo sapien
cgagtgaaccacttaggactgtatactccagcc

SEQ ID NO: 507188 - DNA, 33 bp, Homo sapien
cgagtgaaccacttagtactgtatactccagcc

SEQ ID NO: 507189 - DNA, 33 bp, Homo sapien
aaattcatttataacccatttttgtcactaaca

SEQ ID NO: 507190 - DNA, 33 bp, Homo sapien
aaattcatttataacctatttttgtcactaaca

SEQ ID NO: 507191 - DNA, 33 bp, Homo sapien
actaacagtatatctccaatgcctttctgtcac

SEQ ID NO: 507192 - DNA, 33 bp, Homo sapien
actaacagtatatctctaatgcctttctgtcac

SEQ ID NO: 507193 - DNA, 33 bp, Homo sapien
ttttgttattttggtacaatttgaggagtccca

SEQ ID NO: 507194 - DNA, 33 bp, Homo sapien
ttttgttattttggtataatttgaggagtccca

SEQ ID NO: 507195 - DNA, 33 bp, Homo sapien
acagaaaggcacaggacgagagtggtctgggtg

SEQ ID NO: 507196 - DNA, 33 bp, Homo sapien
acagaaaggcacaggatgagagtggtctgggtg

SEQ ID NO: 507197 - DNA, 33 bp, Homo sapien
tgggcacagtcaaaaggcacaggtagtcccaga

SEQ ID NO: 507198 - DNA, 33 bp, Homo sapien
tgggcacagtcaaaagtcacaggtagtcccaga

SEQ ID NO: 507199 - DNA, 33 bp, Homo sapien
cctcaagtgtctacaactgcaaaataagaaata

SEQ ID NO: 507200 - DNA, 33 bp, Homo sapien
cctcaagtgtctacaagtgcaaaataagaaata

SEQ ID NO: 507201 - DNA, 33 bp, Homo sapien
acagagaggacctagcagctaaggagtccagag

SEQ ID NO: 507202 - DNA, 33 bp, Homo sapien
acagagaggacctagcggctaaggagtccagag

SEQ ID NO: 507203 - DNA, 33 bp, Homo sapien
attacttaggaacaaaaggcaaagtggagagat

SEQ ID NO: 507204 - DNA, 33 bp, Homo sapien
attacttaggaacaaagggcaaagtggagagat

SEQ ID NO: 507205 - DNA, 33 bp, Homo sapien
ttaataaaagctgacacgtgttgggtacttcct

SEQ ID NO: 507206 - DNA, 33 bp, Homo sapien
ttaataaaagctgacatgtgttgggtacttcct

SEQ ID NO: 507207 - DNA, 33 bp, Homo sapien
ctccacgtcactttcaactgatgactttgtttc

SEQ ID NO: 507208 - DNA, 33 bp, Homo sapien
ctccacgtcactttcagctgatgactttgtttc

SEQ ID NO: 507209 - DNA, 33 bp, Homo sapien
cataaatgatccaaacggcaacactcctaagaa

SEQ ID NO: 507210 - DNA, 33 bp, Homo sapien
cataaatgatccaaactgcaacactcctaagaa

SEQ ID NO: 507211 - DNA, 33 bp, Homo sapien
tctgctttcctaagacagccccaatttatgcct

SEQ ID NO: 507212 - DNA, 33 bp, Homo sapien
tctgctttcctaagacggccccaatttatgcct

SEQ ID NO: 507213 - DNA, 33 bp, Homo sapien
ggattgtagggcaacacgaagtcaagtgctctg

SEQ ID NO: 507214 - DNA, 33 bp, Homo sapien
ggattgtagggcaacaggaagtcaagtgctctg

SEQ ID NO: 507215 - DNA, 33 bp, Homo sapien
ggatttgggatgcaataaattgatttgagtacc

SEQ ID NO: 507216 - DNA, 33 bp, Homo sapien
ggatttgggatgcaatgaattgatttgagtacc

SEQ ID NO: 507217 - DNA, 33 bp, Homo sapien
ccctggattcctaagacgaaggccaggtccatt

SEQ ID NO: 507218 - DNA, 33 bp, Homo sapien
ccctggattcctaagatgaaggccaggtccatt

SEQ ID NO: 507219 - DNA, 33 bp, Homo sapien
ggaacttagagaatggaaatgtcatgtcgggtt

SEQ ID NO: 507220 - DNA, 33 bp, Homo sapien
ggaacttagagaatgggaatgtcatgtcgggtt

SEQ ID NO: 507221 - DNA, 33 bp, Homo sapien
ccattgccctgttaaaaatcccctccattacac

SEQ ID NO: 507222 - DNA, 33 bp, Homo sapien
ccattgccctgttaaagatcccctccattacac

SEQ ID NO: 507223 - DNA, 33 bp, Homo sapien
agtttgaagtttgctgcatactcttaacaattg

SEQ ID NO: 507224 - DNA, 33 bp, Homo sapien
agtttgaagtttgctgtatactcttaacaattg

SEQ ID NO: 507225 - DNA, 33 bp, Homo sapien; identical to SEQ ID NO: 507223

SEQ ID NO: 507226 - DNA, 33 bp, Homo sapien; identical to SEQ ID NO: 507224

SEQ ID NO: 507227 - DNA, 33 bp, Homo sapien
tgacaggacaaagtagaaaatgtcattctcagt

SEQ ID NO: 507228 - DNA, 33 bp, Homo sapien
tgacaggacaaagtagcaaatgtcattctcagt

SEQ ID NO: 507229 - DNA, 33 bp, Homo sapien
gcatagcatggatatacgagtgaatatccaatg

SEQ ID NO: 507230 - DNA, 33 bp, Homo sapien
gcatagcatggatatatgagtgaatatccaatg

SEQ ID NO: 507231 - DNA, 33 bp, Homo sapien
tcttctacaatgaaatatctatgcaaatcagcc

SEQ ID NO: 507232 - DNA, 33 bp, Homo sapien
tcttctacaatgaaatgtctatgcaaatcagcc

SEQ ID NO: 507233 - DNA, 33 bp, Homo sapien
tccatatagtccaacaatgaattttttcatcat

SEQ ID NO: 507234 - DNA, 33 bp, Homo sapien
tccatatagtccaacagtgaattttttcatcat

SEQ ID NO: 507235 - DNA, 33 bp, Homo sapien
aactcatttgtgacaaaagctaagatgtaggtc

SEQ ID NO: 507236 - DNA, 33 bp, Homo sapien
aactcatttgtgacaacagctaagatgtaggtc

SEQ ID NO: 507237 - DNA, 33 bp, Homo sapien
tgtctcagtgaagttacatatgctggtgctggt

SEQ ID NO: 507238 - DNA, 33 bp, Homo sapien
tgtctcagtgaagttatatatgctggtgctggt

SEQ ID NO: 507239 - DNA, 33 bp, Homo sapien
atgtttttctgtatgacgataattccaggaaag

SEQ ID NO: 507240 - DNA, 33 bp, Homo sapien
atgtttttctgtatgatgataattccaggaaag

SEQ ID NO: 507241 - DNA, 33 bp, Homo sapien
ctgttccatctgtacacggacaatccctgaggt

SEQ ID NO: 507242 - DNA, 33 bp, Homo sapien
ctgttccatctgtacatggacaatccctgaggt

SEQ ID NO: 507243 - DNA, 33 bp, Homo sapien
tttggctaaaggagcacaggggctactagagaa

SEQ ID NO: 507244 - DNA, 33 bp, Homo sapien
tttggctaaaggagcataggggctactagagaa

SEQ ID NO: 507245 - DNA, 33 bp, Homo sapien
ttcttttcctgatgtacaggggttaagtcctat

SEQ ID NO: 507246 - DNA, 33 bp, Homo sapien
ttcttttcctgatgtataggggttaagtcctat

SEQ ID NO: 507247 - DNA, 33 bp, Homo sapien
gtcttctccaaactcaccatgtagtttgaaccc

SEQ ID NO: 507248 - DNA, 33 bp, Homo sapien
gtcttctccaaactcatcatgtagtttgaaccc

SEQ ID NO: 507249 - DNA, 33 bp, Homo sapien
ttctgttcaatcagtaccagaaggcacttccca

SEQ ID NO: 507250 - DNA, 33 bp, Homo sapien
ttctgttcaatcagtatcagaaggcacttccca

SEQ ID NO: 507251 - DNA, 33 bp, Homo sapien
acagtgcttataaataccagcttcccagctatt

SEQ ID NO: 507252 - DNA, 33 bp, Homo sapien
acagtgcttataaatatcagcttcccagctatt

SEQ ID NO: 507253 - DNA, 33 bp, Homo sapien
atagctaaatgtgcagaaagaatctataggaag

SEQ ID NO: 507254 - DNA, 33 bp, Homo sapien
atagctaaatgtgcaggaagaatctataggaag

SEQ ID NO: 507255 - DNA, 33 bp, Homo sapien
aattcattaggattagaaagacatgcaaacctt

SEQ ID NO: 507256 - DNA, 33 bp, Homo sapien
aattcattaggattaggaagacatgcaaacctt

SEQ ID NO: 507257 - DNA, 33 bp, Homo sapien
gttcccgtttttaacactctaatgccctgcttc

SEQ ID NO: 507258 - DNA, 33 bp, Homo sapien
gttcccgtttttaacagtctaatgccctgcttc

SEQ ID NO: 507259 - DNA, 33 bp, Homo sapien
atgagctgatcttttgcattgatgaatcacccc

SEQ ID NO: 507260 - DNA, 33 bp, Homo sapien
atgagctgatcttttggattgatgaatcacccc

SEQ ID NO: 507261 - DNA, 33 bp, Homo sapien
tccaacacatcaccacaggcaccttctagtact

SEQ ID NO: 507262 - DNA, 33 bp, Homo sapien
tccaacacatcaccacgggcaccttctagtact

SEQ ID NO: 507263 - DNA, 33 bp, Homo sapien
aagaccagtaaaggcactctcctcaactcagca

SEQ ID NO: 507264 - DNA, 33 bp, Homo sapien
aagaccagtaaaggcattctcctcaactcagca

SEQ ID NO: 507265 - DNA, 33 bp, Homo sapien
ttcccataagaggtccacaccattcctgccact

SEQ ID NO: 507266 - DNA, 33 bp, Homo sapien
ttcccataagaggtccgcaccattcctgccact

SEQ ID NO: 507267 - DNA, 33 bp, Homo sapien
cagcctgcccaccttacgaaactttcaaaaatg

SEQ ID NO: 507268 - DNA, 33 bp, Homo sapien
cagcctgcccaccttatgaaactttcaaaaatg

SEQ ID NO: 507269 - DNA, 33 bp, Homo sapien
tcatcaatgaagaccaatgctgaaattgtccag

SEQ ID NO: 507270 - DNA, 33 bp, Homo sapien
tcatcaatgaagaccactgctgaaattgtccag

SEQ ID NO: 507271 - DNA, 33 bp, Homo sapien
agcatggctttcccaacgcagagagaaaaaggc

SEQ ID NO: 507272 - DNA, 33 bp, Homo sapien
agcatggctttcccaatgcagagagaaaaaggc

SEQ ID NO: 507273 - DNA, 33 bp, Homo sapien
tattcacctatatgagaatgtaagcagagttta

SEQ ID NO: 507274 - DNA, 33 bp, Homo sapien
tattcacctatatgagtatgtaagcagagttta

SEQ ID NO: 507275 - DNA, 33 bp, Homo sapien
atctctttcctttacaaattactcagtctcagg

SEQ ID NO: 507276 - DNA, 33 bp, Homo sapien
atctctttcctttacacattactcagtctcagg

SEQ ID NO: 507277 - DNA, 33 bp, Homo sapien
agctcaagggaagcgcaactttctttcctccct

SEQ ID NO: 507278 - DNA, 33 bp, Homo sapien
agctcaagggaagcgcgactttctttcctccct

SEQ ID NO: 507279 - DNA, 33 bp, Homo sapien
ggcggagctctgagcaaggatcctggcccccgt

SEQ ID NO: 507280 - DNA, 33 bp, Homo sapien
ggcggagctctgagcagggatcctggcccccgt

SEQ ID NO: 507281 - DNA, 33 bp, Homo sapien
aaaccattaccatcagccagtctgtccacccac

SEQ ID NO: 507282 - DNA, 33 bp, Homo sapien
aaaccattaccatcagtcagtctgtccacccac

SEQ ID NO: 507283 - DNA, 33 bp, Homo sapien
tctcatcctctgttgtaaagcccagaacacggc

SEQ ID NO: 507284 - DNA, 33 bp, Homo sapien
tctcatcctctgttgttaagcccagaacacggc

SEQ ID NO: 507285 - DNA, 33 bp, Homo sapien
aataaagcacttcccacgatgtgttctatggga

SEQ ID NO: 507286 - DNA, 33 bp, Homo sapien
aataaagcacttcccatgatgtgttctatggga

SEQ ID NO: 507287 - DNA, 33 bp, Homo sapien
tgctactgctgtggaaccttgtaaaaaccatgt

SEQ ID NO: 507288 - DNA, 33 bp, Homo sapien
tgctactgctgtggaatcttgtaaaaaccatgt

SEQ ID NO: 507289 - DNA, 33 bp, Homo sapien
acagagacagaggagacgcggggaagactatgt

SEQ ID NO: 507290 - DNA, 33 bp, Homo sapien
acagagacagaggagatgcggggaagactatgt

SEQ ID NO: 507291 - DNA, 33 bp, Homo sapien
cctataaagagacttacgtggtaaaaaatgaag

SEQ ID NO: 507292 - DNA, 33 bp, Homo sapien
cctataaagagacttatgtggtaaaaaatgaag

SEQ ID NO: 507293 - DNA, 33 bp, Homo sapien
tcttgcagaaccagataactcaacaaatgctgt

SEQ ID NO: 507294 - DNA, 33 bp, Homo sapien
tcttgcagaaccagatgactcaacaaatgctgt

SEQ ID NO: 507295 - DNA, 33 bp, Homo sapien
gtattatcctgaaaaaagcaatgcacagggagc

SEQ ID NO: 507296 - DNA, 33 bp, Homo sapien
gtattatcctgaaaaaggcaatgcacagggagc

SEQ ID NO: 507297 - DNA, 33 bp, Homo sapien
aaccacacctcctggcaacataattcctttctt

SEQ ID NO: 507298 - DNA, 33 bp, Homo sapien
aaccacacctcctggcgacataattcctttctt

SEQ ID NO: 507299 - DNA, 33 bp, Homo sapien
ggaggtgaaatctacaatgggagaaagaggtgt

SEQ ID NO: 507300 - DNA, 33 bp, Homo sapien
ggaggtgaaatctacagtgggagaaagaggtgt

SEQ ID NO: 507301 - DNA, 33 bp, Homo sapien
ataaagccataggtaactggtgcaacaacacga

SEQ ID NO: 507302 - DNA, 33 bp, Homo sapien
ataaagccataggtaagtggtgcaacaacacga

SEQ ID NO: 507303 - DNA, 33 bp, Homo sapien
tctgggtttatttccacgctaaattctggactg

SEQ ID NO: 507304 - DNA, 33 bp, Homo sapien
tctgggtttatttccatgctaaattctggactg

SEQ ID NO: 507305 - DNA, 33 bp, Homo sapien
gcttggccaagactgccgaaaacagcccatcca

SEQ ID NO: 507306 - DNA, 33 bp, Homo sapien
gcttggccaagactgctgaaaacagcccatcca

SEQ ID NO: 507307 - DNA, 33 bp, Homo sapien
ttgaggtgatttgatacagctgggagtacaggg

SEQ ID NO: 507308 - DNA, 33 bp, Homo sapien
ttgaggtgatttgatatagctgggagtacaggg

SEQ ID NO: 507309 - DNA, 33 bp, Homo sapien
ggtattaggctgagataactccagcgtgttggg

SEQ ID NO: 507310 - DNA, 33 bp, Homo sapien
ggtattaggctgagatgactccagcgtgttggg

SEQ ID NO: 507311 - DNA, 33 bp, Homo sapien
ccgcaggacacacaacgcatgtcagttctaggg

SEQ ID NO: 507312 - DNA, 33 bp, Homo sapien
ccgcaggacacacaactcatgtcagttctaggg

SEQ ID NO: 507313 - DNA, 33 bp, Homo sapien
tggcgacagagatcaacgttggcgctgcctttt

SEQ ID NO: 507314 - DNA, 33 bp, Homo sapien
tggcgacagagatcaatgttggcgctgcctttt

SEQ ID NO: 507315 - DNA, 33 bp, Homo sapien
gacacatactcatttcaacatttttcccaccta

SEQ ID NO: 507316 - DNA, 33 bp, Homo sapien
gacacatactcatttcgacatttttcccaccta

SEQ ID NO: 507317 - DNA, 33 bp, Homo sapien
acactggtctcctcacaattctccaaagacaca

SEQ ID NO: 507318 - DNA, 33 bp, Homo sapien
acactggtctcctcacgattctccaaagacaca

SEQ ID NO: 507319 - DNA, 33 bp, Homo sapien
cacaaggctactgctgaagctctggagtagcat

SEQ ID NO: 507320 - DNA, 33 bp, Homo sapien
cacaaggctactgctggagctctggagtagcat

SEQ ID NO: 507321 - DNA, 33 bp, Homo sapien
gcctctggtttcctgaaagtacatttttaacat

SEQ ID NO: 507322 - DNA, 33 bp, Homo sapien
gcctctggtttcctgacagtacatttttaacat

SEQ ID NO: 507323 - DNA, 33 bp, Homo sapien
gctgatcctgatataactggttaagataatttg

SEQ ID NO: 507324 - DNA, 33 bp, Homo sapien
gctgatcctgatataagtggttaagataatttg

SEQ ID NO: 507325 - DNA, 33 bp, Homo sapien
attcctactccctgcacaccctgctggcagtag

SEQ ID NO: 507326 - DNA, 33 bp, Homo sapien
attcctactccctgcataccctgctggcagtag

SEQ ID NO: 507327 - DNA, 33 bp, Homo sapien
aaggggtaaatgtctacctactgccagcagggt

SEQ ID NO: 507328 - DNA, 33 bp, Homo sapien
aaggggtaaatgtctatctactgccagcagggt

SEQ ID NO: 507329 - DNA, 33 bp, Homo sapien
atgcaaattcataaaccgctccataagaaataa

SEQ ID NO: 507330 - DNA, 33 bp, Homo sapien
atgcaaattcataaactgctccataagaaataa

SEQ ID NO: 507331 - DNA, 33 bp, Homo sapien
ctgtaattgggcaggactcagtggggacatagg

SEQ ID NO: 507332 - DNA, 33 bp, Homo sapien
ctgtaattgggcaggattcagtggggacatagg

SEQ ID NO: 507333 - DNA, 33 bp, Homo sapien
atgcatctgtgaataacacatagtaaggaattt

SEQ ID NO: 507334 - DNA, 33 bp, Homo sapien
atgcatctgtgaataagacatagtaaggaattt

SEQ ID NO: 507335 - DNA, 33 bp, Homo sapien
actatgggaatgaagaagagcaataactaactt

SEQ ID NO: 507336 - DNA, 33 bp, Homo sapien
actatgggaatgaagaggagcaataactaactt

SEQ ID NO: 507337 - DNA, 33 bp, Homo sapien
acctctctgcttgtgcacgttcttggctgtgtc

SEQ ID NO: 507338 - DNA, 33 bp, Homo sapien
acctctctgcttgtgcgcgttcttggctgtgtc

SEQ ID NO: 507339 - DNA, 33 bp, Homo sapien
tctgaggtgtaggaacaagaaatggtctgtgta

SEQ ID NO: 507340 - DNA, 33 bp, Homo sapien
tctgaggtgtaggaaccagaaatggtctgtgta

SEQ ID NO: 507341 - DNA, 33 bp, Homo sapien
ctgtcttccaccaaaacgagaccagtgtggaat

SEQ ID NO: 507342 - DNA, 33 bp, Homo sapien
ctgtcttccaccaaaatgagaccagtgtggaat

SEQ ID NO: 507343 - DNA, 33 bp, Homo sapien
aattatacaggcattcacagtgtagtggctttt

SEQ ID NO: 507344 - DNA, 33 bp, Homo sapien
aattatacaggcattcgcagtgtagtggctttt

SEQ ID NO: 507345 - DNA, 33 bp, Homo sapien
atataggaatggccaacaaacttatggaaaaat

SEQ ID NO: 507346 - DNA, 33 bp, Homo sapien
atataggaatggccaagaaacttatggaaaaat

SEQ ID NO: 507347 - DNA, 33 bp, Homo sapien
agtactggtataaaaaccagcatatagaccaat

SEQ ID NO: 507348 - DNA, 33 bp, Homo sapien
agtactggtataaaaatcagcatatagaccaat

SEQ ID NO: 507349 - DNA, 33 bp, Homo sapien
tagcagtagcccctgacgtcataagctcctgac

SEQ ID NO: 507350 - DNA, 33 bp, Homo sapien
tagcagtagcccctgatgtcataagctcctgac

SEQ ID NO: 507351 - DNA, 33 bp, Homo sapien
aggcatcaggaatggaagagcaagatattgagg

SEQ ID NO: 507352 - DNA, 33 bp, Homo sapien
aggcatcaggaatggaggagcaagatattgagg

SEQ ID NO: 507353 - DNA, 33 bp, Homo sapien
tttctaggtttacaaaattgacatttacgaagt

SEQ ID NO: 507354 - DNA, 33 bp, Homo sapien
tttctaggtttacaaagttgacatttacgaagt

SEQ ID NO: 507355 - DNA, 33 bp, Homo sapien
gatagggcagatagcaccaggtccattttgcag

SEQ ID NO: 507356 - DNA, 33 bp, Homo sapien
gatagggcagatagcatcaggtccattttgcag

SEQ ID NO: 507357 - DNA, 33 bp, Homo sapien
taaagtagcacccgggcagtacctgggccacag

SEQ ID NO: 507358 - DNA, 33 bp, Homo sapien
taaagtagcacccgggtagtacctgggccacag

SEQ ID NO: 507359 - DNA, 33 bp, Homo sapien
cacccagaaaggagtgcaaggaaagtaagaccc

SEQ ID NO: 507360 - DNA, 33 bp, Homo sapien
cacccagaaaggagtgtaaggaaagtaagaccc

SEQ ID NO: 507361 - DNA, 33 bp, Homo sapien
acccattaagagctgacacttccactgtgctta

SEQ ID NO: 507362 - DNA, 33 bp, Homo sapien
acccattaagagctgatacttccactgtgctta

SEQ ID NO: 507363 - DNA, 33 bp, Homo sapien
cttagaaccagataccaatacattgtgaagaaa

SEQ ID NO: 507364 - DNA, 33 bp, Homo sapien
cttagaaccagataccgatacattgtgaagaaa

SEQ ID NO: 507365 - DNA, 33 bp, Homo sapien
cacattctccatctaaggccaggagtatgggag

SEQ ID NO: 507366 - DNA, 33 bp, Homo sapien
cacattctccatctaatgccaggagtatgggag

SEQ ID NO: 507367 - DNA, 33 bp, Homo sapien
gacggggtgcatactcggactggaaactggaag

SEQ ID NO: 507368 - DNA, 33 bp, Homo sapien
gacggggtgcatactctgactggaaactggaag

SEQ ID NO: 507369 - DNA, 33 bp, Homo sapien
acgaagacgaagacgacgaagaagaataagagg

SEQ ID NO: 507370 - DNA, 33 bp, Homo sapien
acgaagacgaagacgatgaagaagaataagagg

SEQ ID NO: 507371 - DNA, 33 bp, Homo sapien
ctgagtatattctccacagttctttcgaaggct

SEQ ID NO: 507372 - DNA, 33 bp, Homo sapien
ctgagtatattctccatagttctttcgaaggct

SEQ ID NO: 507373 - DNA, 33 bp, Homo sapien
aaacgtgtttcaaaaacgatggctgggctgggc

SEQ ID NO: 507374 - DNA, 33 bp, Homo sapien
aaacgtgtttcaaaaatgatggctgggctgggc

SEQ ID NO: 507375 - DNA, 33 bp, Homo sapien
gcacggaatactgttacgctattatctgtgcat

SEQ ID NO: 507376 - DNA, 33 bp, Homo sapien
gcacggaatactgttatgctattatctgtgcat

SEQ ID NO: 507377 - DNA, 33 bp, Homo sapien
ctgctctgatcagctagaagctccaggagatcc

SEQ ID NO: 507378 - DNA, 33 bp, Homo sapien
ctgctctgatcagctataagctccaggagatcc

SEQ ID NO: 507379 - DNA, 33 bp, Homo sapien
acctcagccagtgaccagattctgggtcccaat

SEQ ID NO: 507380 - DNA, 33 bp, Homo sapien
acctcagccagtgacctgattctgggtcccaat

SEQ ID NO: 507381 - DNA, 33 bp, Homo sapien
gtccttgcaagtatccagcaactagttggttgt

SEQ ID NO: 507382 - DNA, 33 bp, Homo sapien
gtccttgcaagtatccggcaactagttggttgt

SEQ ID NO: 507383 - DNA, 33 bp, Homo sapien
tgctgctgcagacagacgggcaaagtgacgtga

SEQ ID NO: 507384 - DNA, 33 bp, Homo sapien
tgctgctgcagacagaggggcaaagtgacgtga

SEQ ID NO: 507385 - DNA, 33 bp, Homo sapien
ggagggcctggctactaaagggcacatatgagg

SEQ ID NO: 507386 - DNA, 33 bp, Homo sapien
ggagggcctggctactgaagggcacatatgagg

SEQ ID NO: 507387 - DNA, 33 bp, Homo sapien
tgcctataggcactgaactctgacctagactct

SEQ ID NO: 507388 - DNA, 33 bp, Homo sapien
tgcctataggcactgacctctgacctagactct

SEQ ID NO: 507389 - DNA, 33 bp, Homo sapien
ccatattctggtccacacattaaacaagctgga

SEQ ID NO: 507390 - DNA, 33 bp, Homo sapien
ccatattctggtccacgcattaaacaagctgga

SEQ ID NO: 507391 - DNA, 33 bp, Homo sapien
aataatgaagagaccccgggtatttttctatct

SEQ ID NO: 507392 - DNA, 33 bp, Homo sapien
aataatgaagagaccctgggtatttttctatct

SEQ ID NO: 507393 - DNA, 33 bp, Homo sapien
ggttaatagaagaggaagcagcaataatgaaga

SEQ ID NO: 507394 - DNA, 33 bp, Homo sapien
ggttaatagaagaggaggcagcaataatgaaga

SEQ ID NO: 507395 - DNA, 33 bp, Homo sapien
tgcaggcgcttattataacttctgcttgcatca

SEQ ID NO: 507396 - DNA, 33 bp, Homo sapien
tgcaggcgcttattatgacttctgcttgcatca

SEQ ID NO: 507397 - DNA, 33 bp, Homo sapien
tggccaaagccagtcacgtggctaagtctagcc

SEQ ID NO: 507398 - DNA, 33 bp, Homo sapien
tggccaaagccagtcatgtggctaagtctagcc

SEQ ID NO: 507399 - DNA, 33 bp, Homo sapien
ggcttgctggatgcaaccttaacctcaatgtga

SEQ ID NO: 507400 - DNA, 33 bp, Homo sapien
ggcttgctggatgcaagcttaacctcaatgtga

SEQ ID NO: 507401 - DNA, 33 bp, Homo sapien
cttgggttgtttccagcagaggctgttgtggac

SEQ ID NO: 507402 - DNA, 33 bp, Homo sapien
cttgggttgtttccagtagaggctgttgtggac

SEQ ID NO: 507403 - DNA, 33 bp, Homo sapien
cagatacatgatgtacgaattcattctgtgatg

SEQ ID NO: 507404 - DNA, 33 bp, Homo sapien
cagatacatgatgtactaattcattctgtgatg

SEQ ID NO: 507405 - DNA, 33 bp, Homo sapien
aggggctgagatgggaaagaaaagcacagagag

SEQ ID NO: 507406 - DNA, 33 bp, Homo sapien
aggggctgagatgggagagaaaagcacagagag

SEQ ID NO: 507407 - DNA, 33 bp, Homo sapien
ccgtcacttctgggcccgatctactacaacact

SEQ ID NO: 507408 - DNA, 33 bp, Homo sapien
ccgtcacttctgggcctgatctactacaacact

SEQ ID NO: 507409 - DNA, 33 bp, Homo sapien
ctcaggtttaaagctaagaacccaatagatgag

SEQ ID NO: 507410 - DNA, 33 bp, Homo sapien
ctcaggtttaaagctatgaacccaatagatgag

SEQ ID NO: 507411 - DNA, 33 bp, Homo sapien
aatgcccttatcttaacggagcttaaaatgtag

SEQ ID NO: 507412 - DNA, 33 bp, Homo sapien
aatgcccttatcttaatggagcttaaaatgtag

SEQ ID NO: 507413 - DNA, 33 bp, Homo sapien
gcttattaattcaacaatcttattcattgagta

SEQ ID NO: 507414 - DNA, 33 bp, Homo sapien
gcttattaattcaacagtcttattcattgagta

SEQ ID NO: 507415 - DNA, 33 bp, Homo sapien
aaggactaggtcaaaaggtaggtcaatttacaa

SEQ ID NO: 507416 - DNA, 33 bp, Homo sapien
aaggactaggtcaaaatgtaggtcaatttacaa

SEQ ID NO: 507417 - DNA, 33 bp, Homo sapien
aaagacggttttgaatgacctatgtcacccctc

SEQ ID NO: 507418 - DNA, 33 bp, Homo sapien
aaagacggttttgaattacctatgtcacccctc

SEQ ID NO: 507419 - DNA, 33 bp, Homo sapien
ctgctggtaattaagacgctgggctagagaggg

SEQ ID NO: 507420 - DNA, 33 bp, Homo sapien
ctgctggtaattaagatgctgggctagagaggg

SEQ ID NO: 507421 - DNA, 33 bp, Homo sapien
gaaaaggacagacctacagcaagtgggcttatc

SEQ ID NO: 507422 - DNA, 33 bp, Homo sapien
gaaaaggacagacctatagcaagtgggcttatc

SEQ ID NO: 507423 - DNA, 33 bp, Homo sapien
agagcctgtgactatacgaaccaagggacctcc

SEQ ID NO: 507424 - DNA, 33 bp, Homo sapien
agagcctgtgactatatgaaccaagggacctcc

SEQ ID NO: 507425 - DNA, 33 bp, Homo sapien
gggatcagatggaataagtggtacactccttac

SEQ ID NO: 507426 - DNA, 33 bp, Homo sapien
gggatcagatggaatatgtggtacactccttac

SEQ ID NO: 507427 - DNA, 33 bp, Homo sapien
atgggagtctgaagccccccaggaaaagcactc

SEQ ID NO: 507428 - DNA, 33 bp, Homo sapien
atgggagtctgaagccgcccaggaaaagcactc

SEQ ID NO: 507429 - DNA, 33 bp, Homo sapien
tctcagggaattgagagattagaaaattacagc

SEQ ID NO: 507430 - DNA, 33 bp, Homo sapien
tctcagggaattgagatattagaaaattacagc

SEQ ID NO: 507431 - DNA, 33 bp, Homo sapien
gtggtgacctatgacccagtgtgaacaggcctg

SEQ ID NO: 507432 - DNA, 33 bp, Homo sapien
gtggtgacctatgacctagtgtgaacaggcctg

SEQ ID NO: 507433 - DNA, 33 bp, Homo sapien
actagttaaggcctcactaagcatgggcaggac

SEQ ID NO: 507434 - DNA, 33 bp, Homo sapien
actagttaaggcctcagtaagcatgggcaggac

SEQ ID NO: 507435 - DNA, 33 bp, Homo sapien
aacacatgaattttgacgaagagcagaaagaag

SEQ ID NO: 507436 - DNA, 33 bp, Homo sapien
aacacatgaattttgatgaagagcagaaagaag

SEQ ID NO: 507437 - DNA, 33 bp, Homo sapien
tgatgattcaagatgacaaggtctggacaaatg

SEQ ID NO: 507438 - DNA, 33 bp, Homo sapien
tgatgattcaagatgataaggtctggacaaatg

SEQ ID NO: 507439 - DNA, 33 bp, Homo sapien
gctgttgggggtaacaaaaaacagaagacataa

SEQ ID NO: 507440 - DNA, 33 bp, Homo sapien
gctgttgggggtaacagaaaacagaagacataa

SEQ ID NO: 507441 - DNA, 33 bp, Homo sapien
aaacatagctgtaggcaccttattacaatttct

SEQ ID NO: 507442 - DNA, 33 bp, Homo sapien
aaacatagctgtaggcgccttattacaatttct

SEQ ID NO: 507443 - DNA, 33 bp, Homo sapien
tgggggctgtgttataccttcttgcctttggtc

SEQ ID NO: 507444 - DNA, 33 bp, Homo sapien
tgggggctgtgttatatcttcttgcctttggtc

SEQ ID NO: 507445 - DNA, 33 bp, Homo sapien
ctaagagaagcctgaaaggagaaaacatatgtc

SEQ ID NO: 507446 - DNA, 33 bp, Homo sapien
ctaagagaagcctgaagggagaaaacatatgtc

SEQ ID NO: 507447 - DNA, 33 bp, Homo sapien
ggataaatgaatgcagaaatatttgaatgctgg

SEQ ID NO: 507448 - DNA, 33 bp, Homo sapien
ggataaatgaatgcaggaatatttgaatgctgg

SEQ ID NO: 507449 - DNA, 33 bp, Homo sapien
gtcttctcggattgtaaatcagcagtttgcctg

SEQ ID NO: 507450 - DNA, 33 bp, Homo sapien
gtcttctcggattgtacatcagcagtttgcctg

SEQ ID NO: 507451 - DNA, 33 bp, Homo sapien
gtttcagacaaacttaacctggtgattttccaa

SEQ ID NO: 507452 - DNA, 33 bp, Homo sapien
gtttcagacaaacttagcctggtgattttccaa

SEQ ID NO: 507453 - DNA, 33 bp, Homo sapien
gtaagcctttaaaatgcagaagtatgtgcagaa

SEQ ID NO: 507454 - DNA, 33 bp, Homo sapien
gtaagcctttaaaatgtagaagtatgtgcagaa

SEQ ID NO: 507455 - DNA, 33 bp, Homo sapien
tttgctcaaagaccaactctattaaacccttag

SEQ ID NO: 507456 - DNA, 33 bp, Homo sapien
tttgctcaaagaccaattctattaaacccttag

SEQ ID NO: 507457 - DNA, 33 bp, Homo sapien
tttgggacataacaaccggcacctccagtggcc

SEQ ID NO: 507458 - DNA, 33 bp, Homo sapien
tttgggacataacaactggcacctccagtggcc

SEQ ID NO: 507459 - DNA, 33 bp, Homo sapien
acgcggaccgtaaagaagtgccagggagctctg

SEQ ID NO: 507460 - DNA, 33 bp, Homo sapien
acgcggaccgtaaagaggtgccagggagctctg

SEQ ID NO: 507461 - DNA, 33 bp, Homo sapien
ctgatacgtaccaataaccattgactctcatgc

SEQ ID NO: 507462 - DNA, 33 bp, Homo sapien
ctgatacgtaccaatagccattgactctcatgc

SEQ ID NO: 507463 - DNA, 33 bp, Homo sapien
ctggcagttttcgctccaccctctcccctcaca

SEQ ID NO: 507464 - DNA, 33 bp, Homo sapien
ctggcagttttcgctctaccctctcccctcaca

SEQ ID NO: 507465 - DNA, 33 bp, Homo sapien
catgtcctcatggaacaaataaacagatcctgg

SEQ ID NO: 507466 - DNA, 33 bp, Homo sapien
catgtcctcatggaacgaataaacagatcctgg

SEQ ID NO: 507467 - DNA, 33 bp, Homo sapien; identical to SEQ ID NO: 507465

SEQ ID NO: 507468 - DNA, 33 bp, Homo sapien; identical to SEQ ID NO: 507466

SEQ ID NO: 507469 - DNA, 33 bp, Homo sapien
cagacctagaagtgtactaactggctgtctttt

SEQ ID NO: 507470 - DNA, 33 bp, Homo sapien
cagacctagaagtgtattaactggctgtctttt

SEQ ID NO: 507471 - DNA, 33 bp, Homo sapien
ggccctgtgatgaaacacattgctatcctagtg

SEQ ID NO: 507472 - DNA, 33 bp, Homo sapien
ggccctgtgatgaaacgcattgctatcctagtg

SEQ ID NO: 507473 - DNA, 33 bp, Homo sapien
ccctcacctttttggccgattatgccacttgag

SEQ ID NO: 507474 - DNA, 33 bp, Homo sapien
ccctcacctttttggctgattatgccacttgag

SEQ ID NO: 507475 - DNA, 33 bp, Homo sapien
ctctactaccctcacaacccagttactgtgcac

SEQ ID NO: 507476 - DNA, 33 bp, Homo sapien
ctctactaccctcacatcccagttactgtgcac

SEQ ID NO: 507477 - DNA, 33 bp, Homo sapien
tctcagctcttggtgaacttgtcctccctcaac

SEQ ID NO: 507478 - DNA, 33 bp, Homo sapien
tctcagctcttggtgaccttgtcctccctcaac

SEQ ID NO: 507479 - DNA, 33 bp, Homo sapien
acactcatcctcacacacagctataccacaccc

SEQ ID NO: 507480 - DNA, 33 bp, Homo sapien
acactcatcctcacacgcagctataccacaccc

SEQ ID NO: 507481 - DNA, 33 bp, Homo sapien
ggtgggaaagaaaaaactggactgtcctcagtc

SEQ ID NO: 507482 - DNA, 33 bp, Homo sapien
ggtgggaaagaaaaaattggactgtcctcagtc

SEQ ID NO: 507483 - DNA, 33 bp, Homo sapien
gtctgagtgtgtaccacgctgttcgctcccaca

SEQ ID NO: 507484 - DNA, 33 bp, Homo sapien
gtctgagtgtgtaccatgctgttcgctcccaca

SEQ ID NO: 507485 - DNA, 33 bp, Homo sapien
ttgtttctacacaaaaagtctggactcctgagc

SEQ ID NO: 507486 - DNA, 33 bp, Homo sapien
ttgtttctacacaaaaggtctggactcctgagc

SEQ ID NO: 507487 - DNA, 33 bp, Homo sapien
atatcactaaccagaaacactccagaaacatac

SEQ ID NO: 507488 - DNA, 33 bp, Homo sapien
atatcactaaccagaagcactccagaaacatac

SEQ ID NO: 507489 - DNA, 33 bp, Homo sapien
gaacatagaaggagaaagtccaggaagattctg

SEQ ID NO: 507490 - DNA, 33 bp, Homo sapien
gaacatagaaggagaaggtccaggaagattctg

SEQ ID NO: 507491 - DNA, 33 bp, Homo sapien
aagaaaggaatttcaacagaccctaagaagtcg

SEQ ID NO: 507492 - DNA, 33 bp, Homo sapien
aagaaaggaatttcaagagaccctaagaagtcg

SEQ ID NO: 507493 - DNA, 33 bp, Homo sapien
gagagtaatcattcagaccagaggagataataa

SEQ ID NO: 507494 - DNA, 33 bp, Homo sapien
gagagtaatcattcaggccagaggagataataa

SEQ ID NO: 507495 - DNA, 33 bp, Homo sapien
ggagctgactggggaaaagttctgaatttgctg

SEQ ID NO: 507496 - DNA, 33 bp, Homo sapien
ggagctgactggggaacagttctgaatttgctg

SEQ ID NO: 507497 - DNA, 33 bp, Homo sapien
aaatagtgtctacaatcaaagagcattcaaagg

SEQ ID NO: 507498 - DNA, 33 bp, Homo sapien
aaatagtgtctacaattaaagagcattcaaagg

SEQ ID NO: 507499 - DNA, 33 bp, Homo sapien
gcaaagtaggctgaaaaattccctctcctgaca

SEQ ID NO: 507500 - DNA, 33 bp, Homo sapien
gcaaagtaggctgaaagattccctctcctgaca

SEQ ID NO: 507501 - DNA, 33 bp, Homo sapien
tgagcccaagagccaaacatttgatccaagggg

SEQ ID NO: 507502 - DNA, 33 bp, Homo sapien
tgagcccaagagccaatcatttgatccaagggg

SEQ ID NO: 507503 - DNA, 33 bp, Homo sapien
tgaggataccaccatccaccccttggatcaaat

SEQ ID NO: 507504 - DNA, 33 bp, Homo sapien
tgaggataccaccatctaccccttggatcaaat

SEQ ID NO: 507505 - DNA, 33 bp, Homo sapien
ataagctttattcaccagcaccaaaggtatgct

SEQ ID NO: 507506 - DNA, 33 bp, Homo sapien
ataagctttattcaccggcaccaaaggtatgct

SEQ ID NO: 507507 - DNA, 33 bp, Homo sapien
agaagcagtgtaatacaggaagaagaaattaag

SEQ ID NO: 507508 - DNA, 33 bp, Homo sapien
agaagcagtgtaatacgggaagaagaaattaag

SEQ ID NO: 507509 - DNA, 33 bp, Homo sapien
atgacaatcattataacgaaaatcatccaaatg

SEQ ID NO: 507510 - DNA, 33 bp, Homo sapien
atgacaatcattataaggaaaatcatccaaatg

SEQ ID NO: 507511 - DNA, 33 bp, Homo sapien
tccagtatgctacttacgacaagtaactcttcc

SEQ ID NO: 507512 - DNA, 33 bp, Homo sapien
tccagtatgctacttatgacaagtaactcttcc

SEQ ID NO: 507513 - DNA, 33 bp, Homo sapien
aaactgcatttacacacgttagccactagatgg

SEQ ID NO: 507514 - DNA, 33 bp, Homo sapien
aaactgcatttacacaggttagccactagatgg

SEQ ID NO: 507515 - DNA, 33 bp, Homo sapien
aggagggtgggcattaaaagtccttccttgcgg

SEQ ID NO: 507516 - DNA, 33 bp, Homo sapien
aggagggtgggcattacaagtccttccttgcgg

SEQ ID NO: 507517 - DNA, 33 bp, Homo sapien
agtcccagtaaaaacaaagtagcagcagccctg

SEQ ID NO: 507518 - DNA, 33 bp, Homo sapien
agtcccagtaaaaacagagtagcagcagccctg

SEQ ID NO: 507519 - DNA, 33 bp, Homo sapien
gcttcaggatacaaaacaagccaacaaagatca

SEQ ID NO: 507520 - DNA, 33 bp, Homo sapien
gcttcaggatacaaaataagccaacaaagatca

SEQ ID NO: 507521 - DNA, 33 bp, Homo sapien
atgattaaacacttcccattaggctctgtctct

SEQ ID NO: 507522 - DNA, 33 bp, Homo sapien
atgattaaacacttcctattaggctctgtctct

SEQ ID NO: 507523 - DNA, 33 bp, Homo sapien
caagttctctcctttacgtgttctccagaaatc

SEQ ID NO: 507524 - DNA, 33 bp, Homo sapien
caagttctctcctttatgtgttctccagaaatc

SEQ ID NO: 507525 - DNA, 33 bp, Homo sapien
tatatatattcaagagccaatttttcagaatca

SEQ ID NO: 507526 - DNA, 33 bp, Homo sapien
tatatatattcaagaggcaatttttcagaatca

SEQ ID NO: 507527 - DNA, 33 bp, Homo sapien
ggtacactggtgggacaaagaagggacgaatca

SEQ ID NO: 507528 - DNA, 33 bp, Homo sapien
ggtacactggtgggacgaagaagggacgaatca

SEQ ID NO: 507529 - DNA, 33 bp, Homo sapien
tgctaggctgtagatacgactcataaataagat

SEQ ID NO: 507530 - DNA, 33 bp, Homo sapien
tgctaggctgtagatatgactcataaataagat

SEQ ID NO: 507531 - DNA, 33 bp, Homo sapien
tgataaattttataccgagccaagtaatccttc

SEQ ID NO: 507532 - DNA, 33 bp, Homo sapien
tgataaattttatacctagccaagtaatccttc

SEQ ID NO: 507533 - DNA, 33 bp, Homo sapien; identical to SEQ ID NO: 507531

SEQ ID NO: 507534 - DNA, 33 bp, Homo sapien; identical to SEQ ID NO: 507532

SEQ ID NO: 507535 - DNA, 33 bp, Homo sapien
aaagtttacacatgccaattttgtgaatatcaa

SEQ ID NO: 507536 - DNA, 33 bp, Homo sapien
aaagtttacacatgcccattttgtgaatatcaa

SEQ ID NO: 507537 - DNA, 33 bp, Homo sapien
gggaagtaactccaataagagaggatacaacag

SEQ ID NO: 507538 - DNA, 33 bp, Homo sapien
gggaagtaactccaattagagaggatacaacag

SEQ ID NO: 507539 - DNA, 33 bp, Homo sapien
gctgagtcctgctagccaggagtctcatcccct

SEQ ID NO: 507540 - DNA, 33 bp, Homo sapien
gctgagtcctgctagcgaggagtctcatcccct

SEQ ID NO: 507541 - DNA, 33 bp, Homo sapien
ataatattttgtaatcactaatattcatataaa

SEQ ID NO: 507542 - DNA, 33 bp, Homo sapien
ataatattttgtaatcgctaatattcatataaa

SEQ ID NO: 507543 - DNA, 33 bp, Homo sapien
tttggttgccattcataaacctgccaccaatag

SEQ ID NO: 507544 - DNA, 33 bp, Homo sapien
tttggttgccattcatgaacctgccaccaatag

SEQ ID NO: 507545 - DNA, 33 bp, Homo sapien; identical to SEQ ID NO: 507543

SEQ ID NO: 507546 - DNA, 33 bp, Homo sapien; identical to SEQ ID NO: 507544

SEQ ID NO: 507547 - DNA, 33 bp, Homo sapien; identical to SEQ ID NO: 507543

SEQ ID NO: 507548 - DNA, 33 bp, Homo sapien; identical to SEQ ID NO: 507544

SEQ ID NO: 507549 - DNA, 33 bp, Homo sapien
attttgctccttaacccgagtgcagtcagccac

SEQ ID NO: 507550 - DNA, 33 bp, Homo sapien
attttgctccttaacctgagtgcagtcagccac

SEQ ID NO: 507551 - DNA, 33 bp, Homo sapien
tgccagacacttgacagtctctaaatactaagc

SEQ ID NO: 507552 - DNA, 33 bp, Homo sapien
tgccagacacttgacattctctaaatactaagc

SEQ ID NO: 507553 - DNA, 33 bp, Homo sapien
atgaattaccaactccaacttcagcagcaccag

SEQ ID NO: 507554 - DNA, 33 bp, Homo sapien
atgaattaccaactccgacttcagcagcaccag

SEQ ID NO: 507555 - DNA, 33 bp, Homo sapien
tatactttcagctttccaaaagtggtgcatctc

SEQ ID NO: 507556 - DNA, 33 bp, Homo sapien
tatactttcagctttctaaaagtggtgcatctc

SEQ ID NO: 507557 - DNA, 33 bp, Homo sapien
ttttttttcaaacttacattggctagtctacat

SEQ ID NO: 507558 - DNA, 33 bp, Homo sapien
ttttttttcaaacttagattggctagtctacat

SEQ ID NO: 507559 - DNA, 33 bp, Homo sapien
gattttagtttatggaagtgactgaatgatgat

SEQ ID NO: 507560 - DNA, 33 bp, Homo sapien
gattttagtttatggaggtgactgaatgatgat

SEQ ID NO: 507561 - DNA, 33 bp, Homo sapien
gccatattatcttgtccagaaacttgccatggc

SEQ ID NO: 507562 - DNA, 33 bp, Homo sapien
gccatattatcttgtctagaaacttgccatggc

SEQ ID NO: 507563 - DNA, 33 bp, Homo sapien
tcagctataaagtgagaagcgaaattcagtatc

SEQ ID NO: 507564 - DNA, 33 bp, Homo sapien
tcagctataaagtgaggagcgaaattcagtatc

SEQ ID NO: 507565 - DNA, 33 bp, Homo sapien
accaagtaagtaaggcaagaagggattctgttt

SEQ ID NO: 507566 - DNA, 33 bp, Homo sapien
accaagtaagtaaggcgagaagggattctgttt

SEQ ID NO: 507567 - DNA, 33 bp, Homo sapien
taaataatgcgattaaaaatgtagatatagttg

SEQ ID NO: 507568 - DNA, 33 bp, Homo sapien
taaataatgcgattaagaatgtagatatagttg

SEQ ID NO: 507569 - DNA, 33 bp, Homo sapien
aaaacagactaatacaacaacttacatctattg

SEQ ID NO: 507570 - DNA, 33 bp, Homo sapien
aaaacagactaatacaccaacttacatctattg

SEQ ID NO: 507571 - DNA, 33 bp, Homo sapien
gtataggttttggtcgaatcattgaggtgaatg

SEQ ID NO: 507572 - DNA, 33 bp, Homo sapien
gtataggttttggtcggatcattgaggtgaatg

SEQ ID NO: 507573 - DNA, 33 bp, Homo sapien
aacagtcattaatgataagctaaagaattctga

SEQ ID NO: 507574 - DNA, 33 bp, Homo sapien
aacagtcattaatgatgagctaaagaattctga

SEQ ID NO: 507575 - DNA, 33 bp, Homo sapien
acttccaatgatgtacacataaaatatcacaga

SEQ ID NO: 507576 - DNA, 33 bp, Homo sapien
acttccaatgatgtacccataaaatatcacaga

SEQ ID NO: 507577 - DNA, 33 bp, Homo sapien
ttctgcgtgcttgcccaagaaactaattctcgt

SEQ ID NO: 507578 - DNA, 33 bp, Homo sapien
ttctgcgtgcttgcccgagaaactaattctcgt

SEQ ID NO: 507579 - DNA, 33 bp, Homo sapien
tgttatagtagtgttccgaaaagggcataagct

SEQ ID NO: 507580 - DNA, 33 bp, Homo sapien
tgttatagtagtgttctgaaaagggcataagct

SEQ ID NO: 507581 - DNA, 33 bp, Homo sapien
gctcttgtggaacttaactttgaaattatacag

SEQ ID NO: 507582 - DNA, 33 bp, Homo sapien
gctcttgtggaacttatctttgaaattatacag

SEQ ID NO: 507583 - DNA, 33 bp, Homo sapien
actcaaatgagtacaaacaaaggatatttattc

SEQ ID NO: 507584 - DNA, 33 bp, Homo sapien
actcaaatgagtacaagcaaaggatatttattc

SEQ ID NO: 507585 - DNA, 33 bp, Homo sapien
gttcataggcaagtgtaaaactggtttggcata

SEQ ID NO: 507586 - DNA, 33 bp, Homo sapien
gttcataggcaagtgtgaaactggtttggcata

SEQ ID NO: 507587 - DNA, 33 bp, Homo sapien
tcccactgcttctctaaatatatgccaaaccag

SEQ ID NO: 507588 - DNA, 33 bp, Homo sapien
tcccactgcttctctacatatatgccaaaccag

SEQ ID NO: 507589 - DNA, 33 bp, Homo sapien
taacatgttacacataccacggcctcagtcttt

SEQ ID NO: 507590 - DNA, 33 bp, Homo sapien
taacatgttacacatatcacggcctcagtcttt

SEQ ID NO: 507591 - DNA, 33 bp, Homo sapien
gactaagcacccataaaaggagttgaagagatg

SEQ ID NO: 507592 - DNA, 33 bp, Homo sapien
gactaagcacccataagaggagttgaagagatg

SEQ ID NO: 507593 - DNA, 33 bp, Homo sapien
cttcagtaaattcataaatggctacatcttgac

SEQ ID NO: 507594 - DNA, 33 bp, Homo sapien
cttcagtaaattcatacatggctacatcttgac

SEQ ID NO: 507595 - DNA, 33 bp, Homo sapien
atggatgtacctcaaaaacgttatgctaagtta

SEQ ID NO: 507596 - DNA, 33 bp, Homo sapien
atggatgtacctcaaacacgttatgctaagtta

SEQ ID NO: 507597 - DNA, 33 bp, Homo sapien
tattcacagatgtgccacacggtaaactcaagt

SEQ ID NO: 507598 - DNA, 33 bp, Homo sapien
tattcacagatgtgccgcacggtaaactcaagt

SEQ ID NO: 507599 - DNA, 33 bp, Homo sapien
ggatcacttgaggacaatataggaaaaccctgt

SEQ ID NO: 507600 - DNA, 33 bp, Homo sapien
ggatcacttgaggacagtataggaaaaccctgt

SEQ ID NO: 507601 - DNA, 33 bp, Homo sapien
cagtggcttaaagcaacgaccattttattacat

SEQ ID NO: 507602 - DNA, 33 bp, Homo sapien
cagtggcttaaagcaatgaccattttattacat

SEQ ID NO: 507603 - DNA, 33 bp, Homo sapien
acaatgtgccactctaaataatctgattcttgc

SEQ ID NO: 507604 - DNA, 33 bp, Homo sapien
acaatgtgccactctagataatctgattcttgc

SEQ ID NO: 507605 - DNA, 33 bp, Homo sapien
atgtgatgtgtttaaaggtaagccaggaacttt

SEQ ID NO: 507606 - DNA, 33 bp, Homo sapien
atgtgatgtgtttaaatgtaagccaggaacttt

SEQ ID NO: 507607 - DNA, 33 bp, Homo sapien
ggtaaacattttataccgagttagttagcaaaa

SEQ ID NO: 507608 - DNA, 33 bp, Homo sapien
ggtaaacattttatactgagttagttagcaaaa

SEQ ID NO: 507609 - DNA, 33 bp, Homo sapien
aggttgccgggagctacaatcatactactgcac

SEQ ID NO: 507610 - DNA, 33 bp, Homo sapien
aggttgccgggagctataatcatactactgcac

SEQ ID NO: 507611 - DNA, 33 bp, Homo sapien
attaatcttctgatgacagcacaattgtcatgg

SEQ ID NO: 507612 - DNA, 33 bp, Homo sapien
attaatcttctgatgatagcacaattgtcatgg

SEQ ID NO: 507613 - DNA, 33 bp, Homo sapien
gataatgatggatgaactatttaaaacataata

SEQ ID NO: 507614 - DNA, 33 bp, Homo sapien
gataatgatggatgaagtatttaaaacataata

SEQ ID NO: 507615 - DNA, 33 bp, Homo sapien
ctcccacaagtttccacaggcttaggaattttc

SEQ ID NO: 507616 - DNA, 33 bp, Homo sapien
ctcccacaagtttccataggcttaggaattttc

SEQ ID NO: 507617 - DNA, 33 bp, Homo sapien
caacagcaacaatagcaatgattccctttcttg

SEQ ID NO: 507618 - DNA, 33 bp, Homo sapien
caacagcaacaatagcgatgattccctttcttg

SEQ ID NO: 507619 - DNA, 33 bp, Homo sapien
cacttggacccggaagcctgtagggattggaag

SEQ ID NO: 507620 - DNA, 33 bp, Homo sapien
cacttggacccggaaggctgtagggattggaag

SEQ ID NO: 507621 - DNA, 33 bp, Homo sapien
gtagagatcatcagggccaatgaattacatact

SEQ ID NO: 507622 - DNA, 33 bp, Homo sapien
gtagagatcatcagggtcaatgaattacatact

SEQ ID NO: 507623 - DNA, 33 bp, Homo sapien
tgcagctccccataccgcttcttaaggacggtt

SEQ ID NO: 507624 - DNA, 33 bp, Homo sapien
tgcagctccccatacctcttcttaaggacggtt

SEQ ID NO: 507625 - DNA, 33 bp, Homo sapien
ccataaattggtaagaataatatgtacctgcct

SEQ ID NO: 507626 - DNA, 33 bp, Homo sapien
ccataaattggtaagattaatatgtacctgcct

SEQ ID NO: 507627 - DNA, 33 bp, Homo sapien
aacctgataaagattccccaactgggccaaaga

SEQ ID NO: 507628 - DNA, 33 bp, Homo sapien
aacctgataaagattctccaactgggccaaaga

SEQ ID NO: 507629 - DNA, 33 bp, Homo sapien
gacccatcttttgagacaagctttgaaaaatca

SEQ ID NO: 507630 - DNA, 33 bp, Homo sapien
gacccatcttttgagagaagctttgaaaaatca

SEQ ID NO: 507631 - DNA, 33 bp, Homo sapien
tcttccttagtaacaacgcctggattttattca

SEQ ID NO: 507632 - DNA, 33 bp, Homo sapien
tcttccttagtaacaatgcctggattttattca

SEQ ID NO: 507633 - DNA, 33 bp, Homo sapien
gtagcttaccaaacacaacatttatgaattatt

SEQ ID NO: 507634 - DNA, 33 bp, Homo sapien
gtagcttaccaaacacgacatttatgaattatt

SEQ ID NO: 507635 - DNA, 33 bp, Homo sapien
agtgttaaggttttggaaagagttgtgctagat

SEQ ID NO: 507636 - DNA, 33 bp, Homo sapien
agtgttaaggttttgggaagagttgtgctagat

SEQ ID NO: 507637 - DNA, 33 bp, Homo sapien
tataattaaatgttcacgggtcataattctaac

SEQ ID NO: 507638 - DNA, 33 bp, Homo sapien
tataattaaatgttcatgggtcataattctaac

SEQ ID NO: 507639 - DNA, 33 bp, Homo sapien
gtacttaatcttgtagccagtagagcatcattt

SEQ ID NO: 507640 - DNA, 33 bp, Homo sapien
gtacttaatcttgtaggcagtagagcatcattt

SEQ ID NO: 507641 - DNA, 33 bp, Homo sapien
ccagtaagtacatacacgatggtctaacactaa

SEQ ID NO: 507642 - DNA, 33 bp, Homo sapien
ccagtaagtacatacatgatggtctaacactaa

SEQ ID NO: 507643 - DNA, 33 bp, Homo sapien
aaactgatctggcattcaactgttactttcatt

SEQ ID NO: 507644 - DNA, 33 bp, Homo sapien
aaactgatctggcatttaactgttactttcatt

SEQ ID NO: 507645 - DNA, 33 bp, Homo sapien
attcaaatctgtaaaacggattccatacttagc

SEQ ID NO: 507646 - DNA, 33 bp, Homo sapien
attcaaatctgtaaaatggattccatacttagc

SEQ ID NO: 507647 - DNA, 33 bp, Homo sapien
catacaaaaaactcagactagcaaaagaaatat

SEQ ID NO: 507648 - DNA, 33 bp, Homo sapien
catacaaaaaactcagtctagcaaaagaaatat

SEQ ID NO: 507649 - DNA, 33 bp, Homo sapien
tatttgacctttaaaactgtgtgtatacatcct

SEQ ID NO: 507650 - DNA, 33 bp, Homo sapien
tatttgacctttaaaattgtgtgtatacatcct

SEQ ID NO: 507651 - DNA, 33 bp, Homo sapien
atgtgcatatatataactgatttttaaaaacag

SEQ ID NO: 507652 - DNA, 33 bp, Homo sapien
atgtgcatatatataagtgatttttaaaaacag

SEQ ID NO: 507653 - DNA, 33 bp, Homo sapien
accccgagcacataacacctggacctcagaaca

SEQ ID NO: 507654 - DNA, 33 bp, Homo sapien
accccgagcacataacgcctggacctcagaaca

SEQ ID NO: 507655 - DNA, 33 bp, Homo sapien
agataagacagaaaagcctcgttgtcatcctcc

SEQ ID NO: 507656 - DNA, 33 bp, Homo sapien
agataagacagaaaaggctcgttgtcatcctcc

SEQ ID NO: 507657 - DNA, 33 bp, Homo sapien
ttataaaaggcttcaactgcacagcgcctcact

SEQ ID NO: 507658 - DNA, 33 bp, Homo sapien
ttataaaaggcttcaattgcacagcgcctcact

SEQ ID NO: 507659 - DNA, 33 bp, Homo sapien
tgactaaggtagtggacgaacaaatgtaaacat

SEQ ID NO: 507660 - DNA, 33 bp, Homo sapien
tgactaaggtagtggatgaacaaatgtaaacat

SEQ ID NO: 507661 - DNA, 33 bp, Homo sapien
cagaactgaaagtgaaaataaagagtaatacat

SEQ ID NO: 507662 - DNA, 33 bp, Homo sapien
cagaactgaaagtgaagataaagagtaatacat

SEQ ID NO: 507663 - DNA, 33 bp, Homo sapien
gaaagatcatcccccacgatgtaaacggtttgt

SEQ ID NO: 507664 - DNA, 33 bp, Homo sapien
gaaagatcatcccccatgatgtaaacggtttgt

SEQ ID NO: 507665 - DNA, 33 bp, Homo sapien
actaccttttgtttgacgcatcggtgttacggg

SEQ ID NO: 507666 - DNA, 33 bp, Homo sapien
actaccttttgtttgatgcatcggtgttacggg

SEQ ID NO: 507667 - DNA, 33 bp, Homo sapien
tctagtgagcagaaaaaagctttccatacccac

SEQ ID NO: 507668 - DNA, 33 bp, Homo sapien
tctagtgagcagaaaatagctttccatacccac

SEQ ID NO: 507669 - DNA, 33 bp, Homo sapien
aacgggacaagtggcactgaactggcagccatc

SEQ ID NO: 507670 - DNA, 33 bp, Homo sapien
aacgggacaagtggcattgaactggcagccatc

SEQ ID NO: 507671 - DNA, 33 bp, Homo sapien
aggaggagccagcggaatagatctcacggtttc

SEQ ID NO: 507672 - DNA, 33 bp, Homo sapien
aggaggagccagcggagtagatctcacggtttc

SEQ ID NO: 507673 - DNA, 33 bp, Homo sapien
atagacatatgaaaggcaatttgtcagaagagg

SEQ ID NO: 507674 - DNA, 33 bp, Homo sapien
atagacatatgaaaggtaatttgtcagaagagg

SEQ ID NO: 507675 - DNA, 33 bp, Homo sapien
caccacaaatgcaatgaatgatttaacaactac

SEQ ID NO: 507676 - DNA, 33 bp, Homo sapien
caccacaaatgcaatggatgatttaacaactac

SEQ ID NO: 507677 - DNA, 33 bp, Homo sapien
agaaaatctaaagtacccatgtggcaaaactgt

SEQ ID NO: 507678 - DNA, 33 bp, Homo sapien
agaaaatctaaagtactcatgtggcaaaactgt

SEQ ID NO: 507679 - DNA, 33 bp, Homo sapien
aggtttctaaatatgaagattctggcatatttt

SEQ ID NO: 507680 - DNA, 33 bp, Homo sapien
aggtttctaaatatgacgattctggcatatttt

SEQ ID NO: 507681 - DNA, 33 bp, Homo sapien
gttggttctccctaaacgttatatagagtgtct

SEQ ID NO: 507682 - DNA, 33 bp, Homo sapien
gttggttctccctaaatgttatatagagtgtct

SEQ ID NO: 507683 - DNA, 33 bp, Homo sapien
gatggaagaaatattgcaagtcgactagaagga

SEQ ID NO: 507684 - DNA, 33 bp, Homo sapien
gatggaagaaatattggaagtcgactagaagga

SEQ ID NO: 507685 - DNA, 33 bp, Homo sapien
cactgagaacttagagactcgctgcttccctgt

SEQ ID NO: 507686 - DNA, 33 bp, Homo sapien
cactgagaacttagaggctcgctgcttccctgt

SEQ ID NO: 507687 - DNA, 33 bp, Homo sapien
gatgtatctgcgagtaaggcattgttgtcccca

SEQ ID NO: 507688 - DNA, 33 bp, Homo sapien
gatgtatctgcgagtagggcattgttgtcccca

SEQ ID NO: 507689 - DNA, 33 bp, Homo sapien
agggaagttggaatgacgaataggagggtcagg

SEQ ID NO: 507690 - DNA, 33 bp, Homo sapien
agggaagttggaatgatgaataggagggtcagg

SEQ ID NO: 507691 - DNA, 33 bp, Homo sapien
ttttgatttcctaataaaaagagacagactgtg

SEQ ID NO: 507692 - DNA, 33 bp, Homo sapien
ttttgatttcctaatagaaagagacagactgtg

SEQ ID NO: 507693 - DNA, 33 bp, Homo sapien
gctggaacaattccccaaactgtggtttccatt

SEQ ID NO: 507694 - DNA, 33 bp, Homo sapien
gctggaacaattccccgaactgtggtttccatt

SEQ ID NO: 507695 - DNA, 33 bp, Homo sapien
aatttttcaacaaataaaacatgtctgaaaatc

SEQ ID NO: 507696 - DNA, 33 bp, Homo sapien
aatttttcaacaaatacaacatgtctgaaaatc

SEQ ID NO: 507697 - DNA, 33 bp, Homo sapien
ccttccagacaacacccacttgcatggtcactg

SEQ ID NO: 507698 - DNA, 33 bp, Homo sapien
ccttccagacaacacctacttgcatggtcactg

SEQ ID NO: 507699 - DNA, 33 bp, Homo sapien
ttctttctaggccttaggtggaggagagtgctt

SEQ ID NO: 507700 - DNA, 33 bp, Homo sapien
ttctttctaggccttatgtggaggagagtgctt

SEQ ID NO: 507701 - DNA, 33 bp, Homo sapien
agatcctggacacgagaagacatgctgtgagtg

SEQ ID NO: 507702 - DNA, 33 bp, Homo sapien
agatcctggacacgaggagacatgctgtgagtg

SEQ ID NO: 507703 - DNA, 33 bp, Homo sapien
ttgattgatgttcatgcagtcaggtttctcttg

SEQ ID NO: 507704 - DNA, 33 bp, Homo sapien
ttgattgatgttcatgtagtcaggtttctcttg

SEQ ID NO: 507705 - DNA, 33 bp, Homo sapien
tcctgattttcctaccgattcctgtggggcctg

SEQ ID NO: 507706 - DNA, 33 bp, Homo sapien
tcctgattttcctacctattcctgtggggcctg

SEQ ID NO: 507707 - DNA, 33 bp, Homo sapien
accatgagataaacaccgaatggggcttctgat

SEQ ID NO: 507708 - DNA, 33 bp, Homo sapien
accatgagataaacactgaatggggcttctgat

SEQ ID NO: 507709 - DNA, 33 bp, Homo sapien
agcttgacaaaatgaaaagtggctctaccacgt

SEQ ID NO: 507710 - DNA, 33 bp, Homo sapien
agcttgacaaaatgaagagtggctctaccacgt

SEQ ID NO: 507711 - DNA, 33 bp, Homo sapien
gtttttcttgggaaaccatactgatgggacagg

SEQ ID NO: 507712 - DNA, 33 bp, Homo sapien
gtttttcttgggaaactatactgatgggacagg

SEQ ID NO: 507713 - DNA, 33 bp, Homo sapien
taattctctggaaatacaccaagtgaaaaagca

SEQ ID NO: 507714 - DNA, 33 bp, Homo sapien
taattctctggaaatataccaagtgaaaaagca

SEQ ID NO: 507715 - DNA, 33 bp, Homo sapien
gtcaagagaagtcaccagaaagaaaattagata

SEQ ID NO: 507716 - DNA, 33 bp, Homo sapien
gtcaagagaagtcaccggaaagaaaattagata

SEQ ID NO: 507717 - DNA, 33 bp, Homo sapien
tggtccttctgatgtccaggattgacagatcaa

SEQ ID NO: 507718 - DNA, 33 bp, Homo sapien
tggtccttctgatgtcgaggattgacagatcaa

SEQ ID NO: 507719 - DNA, 33 bp, Homo sapien
atcccatggctgatgacaggctgaaaaggtgta

SEQ ID NO: 507720 - DNA, 33 bp, Homo sapien
atcccatggctgatgagaggctgaaaaggtgta

SEQ ID NO: 507721 - DNA, 33 bp, Homo sapien
ttgtttcttgattacacgctaaatatggggtgg

SEQ ID NO: 507722 - DNA, 33 bp, Homo sapien
ttgtttcttgattacatgctaaatatggggtgg

SEQ ID NO: 507723 - DNA, 33 bp, Homo sapien
tgagatttaaaacccaaatatctcagaaacatt

SEQ ID NO: 507724 - DNA, 33 bp, Homo sapien
tgagatttaaaacccagatatctcagaaacatt

SEQ ID NO: 507725 - DNA, 33 bp, Homo sapien
tgattttaaaatgggcagaagatactgaacaga

SEQ ID NO: 507726 - DNA, 33 bp, Homo sapien
tgattttaaaatgggcggaagatactgaacaga

SEQ ID NO: 507727 - DNA, 33 bp, Homo sapien
agctgacatttggtaactgaaagagtgttctcc

SEQ ID NO: 507728 - DNA, 33 bp, Homo sapien
agctgacatttggtaattgaaagagtgttctcc

SEQ ID NO: 507729 - DNA, 33 bp, Homo sapien
agcaggacagactttaagaccaacgtccctact

SEQ ID NO: 507730 - DNA, 33 bp, Homo sapien
agcaggacagactttaggaccaacgtccctact

SEQ ID NO: 507731 - DNA, 33 bp, Homo sapien
aaactggtgcataaaagctctgctagaggcata

SEQ ID NO: 507732 - DNA, 33 bp, Homo sapien
aaactggtgcataaaatctctgctagaggcata

SEQ ID NO: 507733 - DNA, 33 bp, Homo sapien
tgggaaggaatgagtacagacctggaagtggga

SEQ ID NO: 507734 - DNA, 33 bp, Homo sapien
tgggaaggaatgagtatagacctggaagtggga

SEQ ID NO: 507735 - DNA, 33 bp, Homo sapien
tacaaagatggctgtcacgctgaccaaagcatc

SEQ ID NO: 507736 - DNA, 33 bp, Homo sapien
tacaaagatggctgtcgcgctgaccaaagcatc

SEQ ID NO: 507737 - DNA, 33 bp, Homo sapien
tctgtatgagtacatacgatctcctattctttg

SEQ ID NO: 507738 - DNA, 33 bp, Homo sapien
tctgtatgagtacatatgatctcctattctttg

SEQ ID NO: 507739 - DNA, 33 bp, Homo sapien
tatgtatcaaataatacaacagcattgtcaagc

SEQ ID NO: 507740 - DNA, 33 bp, Homo sapien
tatgtatcaaataatataacagcattgtcaagc

SEQ ID NO: 507741 - DNA, 33 bp, Homo sapien
aaacattgaaagtgtaactacaagtacagtgaa

SEQ ID NO: 507742 - DNA, 33 bp, Homo sapien
aaacattgaaagtgtagctacaagtacagtgaa

SEQ ID NO: 507743 - DNA, 33 bp, Homo sapien
tgtgttagaagctaggaatatattcatctgcaa

SEQ ID NO: 507744 - DNA, 33 bp, Homo sapien
tgtgttagaagctagggatatattcatctgcaa

SEQ ID NO: 507745 - DNA, 33 bp, Homo sapien
ggctttgggaatttcccccttactgtggaaacg

SEQ ID NO: 507746 - DNA, 33 bp, Homo sapien
ggctttgggaatttcctccttactgtggaaacg

SEQ ID NO: 507747 - DNA, 33 bp, Homo sapien
atgggacatgatcacacatatacttacaaacaa

SEQ ID NO: 507748 - DNA, 33 bp, Homo sapien
atgggacatgatcacagatatacttacaaacaa

SEQ ID NO: 507749 - DNA, 33 bp, Homo sapien
tttacaccatattgaacactgaagtggtgtcat

SEQ ID NO: 507750 - DNA, 33 bp, Homo sapien
tttacaccatattgaatactgaagtggtgtcat

SEQ ID NO: 507751 - DNA, 33 bp, Homo sapien
actctgtccagtctcaaattccgagagataaga

SEQ ID NO: 507752 - DNA, 33 bp, Homo sapien
actctgtccagtctcagattccgagagataaga

SEQ ID NO: 507753 - DNA, 33 bp, Homo sapien
gatctccacagcaaacaaaggggagaaatgaga

SEQ ID NO: 507754 - DNA, 33 bp, Homo sapien
gatctccacagcaaaccaaggggagaaatgaga

SEQ ID NO: 507755 - DNA, 33 bp, Homo sapien
ttcacttctatgactcaatccatctgcctttat

SEQ ID NO: 507756 - DNA, 33 bp, Homo sapien
ttcacttctatgactcgatccatctgcctttat

SEQ ID NO: 507757 - DNA, 33 bp, Homo sapien
ttgttgcaatgtcttccctttgaaatggctcct

SEQ ID NO: 507758 - DNA, 33 bp, Homo sapien
ttgttgcaatgtcttctctttgaaatggctcct

SEQ ID NO: 507759 - DNA, 33 bp, Homo sapien
gactgaacttgatctacattcttaccctttttc

SEQ ID NO: 507760 - DNA, 33 bp, Homo sapien
gactgaacttgatctagattcttaccctttttc

SEQ ID NO: 507761 - DNA, 33 bp, Homo sapien
ggaggaaagaagtagaaatttggataaatacta

SEQ ID NO: 507762 - DNA, 33 bp, Homo sapien
ggaggaaagaagtagagatttggataaatacta

SEQ ID NO: 507763 - DNA, 33 bp, Homo sapien
acattctaacaggcgacgctttccacaccatca

SEQ ID NO: 507764 - DNA, 33 bp, Homo sapien
acattctaacaggcgatgctttccacaccatca

SEQ ID NO: 507765 - DNA, 33 bp, Homo sapien
acaaaggcttacatgacaccatcccccgcaaca

SEQ ID NO: 507766 - DNA, 33 bp, Homo sapien
acaaaggcttacatgataccatcccccgcaaca

SEQ ID NO: 507767 - DNA, 33 bp, Homo sapien
gggctaaaaccaagagaaagagtccatatgtcc

SEQ ID NO: 507768 - DNA, 33 bp, Homo sapien
gggctaaaaccaagagtaagagtccatatgtcc

SEQ ID NO: 507769 - DNA, 33 bp, Homo sapien
cattttacccactcacagaattccatccttttt

SEQ ID NO: 507770 - DNA, 33 bp, Homo sapien
cattttacccactcacggaattccatccttttt

SEQ ID NO: 507771 - DNA, 33 bp, Homo sapien
gatgaggtgtacccgacgtgcatttttaaagat

SEQ ID NO: 507772 - DNA, 33 bp, Homo sapien
gatgaggtgtacccgatgtgcatttttaaagat

SEQ ID NO: 507773 - DNA, 33 bp, Homo sapien
attgccatggtaagaactggtaacttctgtgag

SEQ ID NO: 507774 - DNA, 33 bp, Homo sapien
attgccatggtaagaattggtaacttctgtgag

SEQ ID NO: 507775 - DNA, 33 bp, Homo sapien
tacaacagcatgatggaaaaggttatgcctcca

SEQ ID NO: 507776 - DNA, 33 bp, Homo sapien
tacaacagcatgatggtaaaggttatgcctcca

SEQ ID NO: 507777 - DNA, 33 bp, Homo sapien
tcttgcttgagaatcacggataaaatgctctct

SEQ ID NO: 507778 - DNA, 33 bp, Homo sapien
tcttgcttgagaatcatggataaaatgctctct

SEQ ID NO: 507779 - DNA, 33 bp, Homo sapien
aagatattgaaaagtgcagtaattaggagtggg

SEQ ID NO: 507780 - DNA, 33 bp, Homo sapien
aagatattgaaaagtgtagtaattaggagtggg

SEQ ID NO: 507781 - DNA, 33 bp, Homo sapien
ttggaaaggtaagtgcaactaagaatgaatttt

SEQ ID NO: 507782 - DNA, 33 bp, Homo sapien
ttggaaaggtaagtgccactaagaatgaatttt

SEQ ID NO: 507783 - DNA, 33 bp, Homo sapien
cagtacaggtcatgcaaatagacattatgagcc

SEQ ID NO: 507784 - DNA, 33 bp, Homo sapien
cagtacaggtcatgcagatagacattatgagcc

SEQ ID NO: 507785 - DNA, 33 bp, Homo sapien
gaggtgattcctcaatcaagagccatatattga

SEQ ID NO: 507786 - DNA, 33 bp, Homo sapien
gaggtgattcctcaatgaagagccatatattga

SEQ ID NO: 507787 - DNA, 33 bp, Homo sapien
gtcagaacctgggagacattgcaaccacttttt

SEQ ID NO: 507788 - DNA, 33 bp, Homo sapien
gtcagaacctgggagatattgcaaccacttttt

SEQ ID NO: 507789 - DNA, 33 bp, Homo sapien
tgctcatataaccaaacacataagacgtaagtc

SEQ ID NO: 507790 - DNA, 33 bp, Homo sapien
tgctcatataaccaaagacataagacgtaagtc

SEQ ID NO: 507791 - DNA, 33 bp, Homo sapien
tacgcaggattatgtacaacgagatcacatcaa

SEQ ID NO: 507792 - DNA, 33 bp, Homo sapien
tacgcaggattatgtataacgagatcacatcaa

SEQ ID NO: 507793 - DNA, 33 bp, Homo sapien
agaaatggacctaaaacaagcctgatctttgga

SEQ ID NO: 507794 - DNA, 33 bp, Homo sapien
agaaatggacctaaaagaagcctgatctttgga

SEQ ID NO: 507795 - DNA, 33 bp, Homo sapien
tttgggtttgatataaagatgcaatttctaaag

SEQ ID NO: 507796 - DNA, 33 bp, Homo sapien
tttgggtttgatataaggatgcaatttctaaag

SEQ ID NO: 507797 - DNA, 33 bp, Homo sapien
aatttaagaaccaggacgacttaggtaatagcc

SEQ ID NO: 507798 - DNA, 33 bp, Homo sapien
aatttaagaaccaggatgacttaggtaatagcc

SEQ ID NO: 507799 - DNA, 33 bp, Homo sapien
agatgactcagtggtcaaaagataactgtcttc

SEQ ID NO: 507800 - DNA, 33 bp, Homo sapien
agatgactcagtggtcgaaagataactgtcttc

SEQ ID NO: 507801 - DNA, 33 bp, Homo sapien
ggatttgataacacaccgcaactgttttcttca

SEQ ID NO: 507802 - DNA, 33 bp, Homo sapien
ggatttgataacacactgcaactgttttcttca

SEQ ID NO: 507803 - DNA, 33 bp, Homo sapien
cagaaatgcttacatacgtgtaccaggatactc

SEQ ID NO: 507804 - DNA, 33 bp, Homo sapien
cagaaatgcttacatatgtgtaccaggatactc

SEQ ID NO: 507805 - DNA, 33 bp, Homo sapien
gattaactgggaaagcaatcataaaaatctggt

SEQ ID NO: 507806 - DNA, 33 bp, Homo sapien
gattaactgggaaagcgatcataaaaatctggt

SEQ ID NO: 507807 - DNA, 33 bp, Homo sapien
ctgaagataagggcaacccaaaatgttctaact

SEQ ID NO: 507808 - DNA, 33 bp, Homo sapien
ctgaagataagggcaatccaaaatgttctaact

SEQ ID NO: 507809 - DNA, 33 bp, Homo sapien
tgactgacaaattatccctaattgcagaggaat

SEQ ID NO: 507810 - DNA, 33 bp, Homo sapien
tgactgacaaattatctctaattgcagaggaat

SEQ ID NO: 507811 - DNA, 33 bp, Homo sapien
tgagtatacgctggggaatgagtgctgtagacc

SEQ ID NO: 507812 - DNA, 33 bp, Homo sapien
tgagtatacgctgggggatgagtgctgtagacc

SEQ ID NO: 507813 - DNA, 33 bp, Homo sapien
ggattatcagctatcacgttaaaccatccccca

SEQ ID NO: 507814 - DNA, 33 bp, Homo sapien
ggattatcagctatcatgttaaaccatccccca

SEQ ID NO: 507815 - DNA, 33 bp, Homo sapien
tggtccctgaagaagaactatgggacctatatg

SEQ ID NO: 507816 - DNA, 33 bp, Homo sapien
tggtccctgaagaagagctatgggacctatatg

SEQ ID NO: 507817 - DNA, 33 bp, Homo sapien
ctgtagacgtaactaacagcagtattgaaaaaa

SEQ ID NO: 507818 - DNA, 33 bp, Homo sapien
ctgtagacgtaactaatagcagtattgaaaaaa

SEQ ID NO: 507819 - DNA, 33 bp, Homo sapien
gggaaagctacctatgaacttttctctctggtc

SEQ ID NO: 507820 - DNA, 33 bp, Homo sapien
gggaaagctacctatggacttttctctctggtc

SEQ ID NO: 507821 - DNA, 33 bp, Homo sapien
aagctgaggtcttcaaatgcagatggggtggag

SEQ ID NO: 507822 - DNA, 33 bp, Homo sapien
aagctgaggtcttcaagtgcagatggggtggag

SEQ ID NO: 507823 - DNA, 33 bp, Homo sapien
taactcccatatagacaactccagcacttttct

SEQ ID NO: 507824 - DNA, 33 bp, Homo sapien
taactcccatatagacgactccagcacttttct

SEQ ID NO: 507825 - DNA, 33 bp, Homo sapien
cttctggaaatataccactgatagattctcagt

SEQ ID NO: 507826 - DNA, 33 bp, Homo sapien
cttctggaaatatacctctgatagattctcagt

SEQ ID NO: 507827 - DNA, 33 bp, Homo sapien
gaaacactctggcaaacggtaggtaaattcatg

SEQ ID NO: 507828 - DNA, 33 bp, Homo sapien
gaaacactctggcaaatggtaggtaaattcatg

SEQ ID NO: 507829 - DNA, 33 bp, Homo sapien
gaaaagtaggtgacacaagtaaatattggatcc

SEQ ID NO: 507830 - DNA, 33 bp, Homo sapien
gaaaagtaggtgacaccagtaaatattggatcc

SEQ ID NO: 507831 - DNA, 33 bp, Homo sapien
aatctgacagacatataagttgcaccacactgt

SEQ ID NO: 507832 - DNA, 33 bp, Homo sapien
aatctgacagacatatgagttgcaccacactgt

SEQ ID NO: 507833 - DNA, 33 bp, Homo sapien
taacacaaaacgagctaaagaattgtttgcaga

SEQ ID NO: 507834 - DNA, 33 bp, Homo sapien
taacacaaaacgagctgaagaattgtttgcaga

SEQ ID NO: 507835 - DNA, 33 bp, Homo sapien
gcagaatgagtgttgaagatattgggtttgtca

SEQ ID NO: 507836 - DNA, 33 bp, Homo sapien
gcagaatgagtgttgatgatattgggtttgtca

SEQ ID NO: 507837 - DNA, 33 bp, Homo sapien
caatgttccttttgagccatctttgttgcaggg

SEQ ID NO: 507838 - DNA, 33 bp, Homo sapien
caatgttccttttgaggcatctttgttgcaggg

SEQ ID NO: 507839 - DNA, 33 bp, Homo sapien
gaaccaatgggatcagaaaagaatttgcaggct

SEQ ID NO: 507840 - DNA, 33 bp, Homo sapien
gaaccaatgggatcaggaaagaatttgcaggct

SEQ ID NO: 507841 - DNA, 33 bp, Homo sapien
tgagggagacaggtaaccaaatcctaagtaaag

SEQ ID NO: 507842 - DNA, 33 bp, Homo sapien
tgagggagacaggtaatcaaatcctaagtaaag

SEQ ID NO: 507843 - DNA, 33 bp, Homo sapien
aggtaggaaataatgaagcctcgaccatctaag

SEQ ID NO: 507844 - DNA, 33 bp, Homo sapien
aggtaggaaataatgaggcctcgaccatctaag

SEQ ID NO: 507845 - DNA, 33 bp, Homo sapien
tatccatttgcattgaccatcctggtgaagccc

SEQ ID NO: 507846 - DNA, 33 bp, Homo sapien
tatccatttgcattgatcatcctggtgaagccc

SEQ ID NO: 507847 - DNA, 33 bp, Homo sapien
tcttggaatgaaacatgatcccgtaacaccagg

SEQ ID NO: 507848 - DNA, 33 bp, Homo sapien
tcttggaatgaaacattatcccgtaacaccagg

SEQ ID NO: 507849 - DNA, 33 bp, Homo sapien
gagcaaaatctgaaccaaggtctctgagtccaa

SEQ ID NO: 507850 - DNA, 33 bp, Homo sapien
gagcaaaatctgaaccgaggtctctgagtccaa

SEQ ID NO: 507851 - DNA, 33 bp, Homo sapien
ttcctggttgtgtgaacgtagaaaagtaactta

SEQ ID NO: 507852 - DNA, 33 bp, Homo sapien
ttcctggttgtgtgaatgtagaaaagtaactta

SEQ ID NO: 507853 - DNA, 33 bp, Homo sapien
gttcatgtcctggatcaaacttgaggtatctcc

SEQ ID NO: 507854 - DNA, 33 bp, Homo sapien
gttcatgtcctggatcgaacttgaggtatctcc

SEQ ID NO: 507855 - DNA, 33 bp, Homo sapien
gatacaatttgggagaacattgaacttactgga

SEQ ID NO: 507856 - DNA, 33 bp, Homo sapien
gatacaatttgggagagcattgaacttactgga

SEQ ID NO: 507857 - DNA, 33 bp, Homo sapien
attctggaaattcaacactgtagtactgccatc

SEQ ID NO: 507858 - DNA, 33 bp, Homo sapien
attctggaaattcaacgctgtagtactgccatc

SEQ ID NO: 507859 - DNA, 33 bp, Homo sapien
tttctgaatccataaaattggtcattaaatatt

SEQ ID NO: 507860 - DNA, 33 bp, Homo sapien
tttctgaatccataaatttggtcattaaatatt

SEQ ID NO: 507861 - DNA, 33 bp, Homo sapien
tcaagaggctagttataaaagcacaacactatc

SEQ ID NO: 507862 - DNA, 33 bp, Homo sapien
tcaagaggctagttatgaaagcacaacactatc

SEQ ID NO: 507863 - DNA, 33 bp, Homo sapien
gatatttagaagataacgggtgttgttaatttt

SEQ ID NO: 507864 - DNA, 33 bp, Homo sapien
gatatttagaagataatgggtgttgttaatttt

SEQ ID NO: 507865 - DNA, 33 bp, Homo sapien
cttcttattaaaaggaagttgcagaggctcatt

SEQ ID NO: 507866 - DNA, 33 bp, Homo sapien
cttcttattaaaaggatgttgcagaggctcatt

SEQ ID NO: 507867 - DNA, 33 bp, Homo sapien
ttaatatattattcaccgagcgactctttttta

SEQ ID NO: 507868 - DNA, 33 bp, Homo sapien
ttaatatattattcactgagcgactctttttta

SEQ ID NO: 507869 - DNA, 33 bp, Homo sapien
acaatgtaggtatgaccggatttcctaatcctt

SEQ ID NO: 507870 - DNA, 33 bp, Homo sapien
acaatgtaggtatgactggatttcctaatcctt

SEQ ID NO: 507871 - DNA, 33 bp, Homo sapien
gaatagggtcagtggtaaaccataaactagaat

SEQ ID NO: 507872 - DNA, 33 bp, Homo sapien
gaatagggtcagtggtgaaccataaactagaat

SEQ ID NO: 507873 - DNA, 33 bp, Homo sapien
gatgagagttcaaacacgtcctttgttgttaaa

SEQ ID NO: 507874 - DNA, 33 bp, Homo sapien
gatgagagttcaaacatgtcctttgttgttaaa

SEQ ID NO: 507875 - DNA, 33 bp, Homo sapien
agaggagacactgaagacacagcatctgcattc

SEQ ID NO: 507876 - DNA, 33 bp, Homo sapien
agaggagacactgaagtcacagcatctgcattc

SEQ ID NO: 507877 - DNA, 33 bp, Homo sapien
tacctgggattactacaagacactaagaaaatt

SEQ ID NO: 507878 - DNA, 33 bp, Homo sapien
tacctgggattactaccagacactaagaaaatt

SEQ ID NO: 507879 - DNA, 33 bp, Homo sapien
aactataagtagattaaaacagggtagcaagaa

SEQ ID NO: 507880 - DNA, 33 bp, Homo sapien
aactataagtagattacaacagggtagcaagaa

SEQ ID NO: 507881 - DNA, 33 bp, Homo sapien
agcataaaatgtgccacgatagaaatgagaaaa

SEQ ID NO: 507882 - DNA, 33 bp, Homo sapien
agcataaaatgtgccatgatagaaatgagaaaa

SEQ ID NO: 507883 - DNA, 33 bp, Homo sapien
tatattcttgttcatcaaaacacaaaggctggg

SEQ ID NO: 507884 - DNA, 33 bp, Homo sapien
tatattcttgttcatcgaaacacaaaggctggg

SEQ ID NO: 507885 - DNA, 33 bp, Homo sapien
tatgtgaactataaccacgtacgtatcacaaat

SEQ ID NO: 507886 - DNA, 33 bp, Homo sapien
tatgtgaactataaccgcgtacgtatcacaaat

SEQ ID NO: 507887 - DNA, 33 bp, Homo sapien
aaactttaaaggtaccaaagtccagacgtctaa

SEQ ID NO: 507888 - DNA, 33 bp, Homo sapien
aaactttaaaggtaccgaagtccagacgtctaa

SEQ ID NO: 507889 - DNA, 33 bp, Homo sapien
tcttaactgcttcccccagttgctgattatata

SEQ ID NO: 507890 - DNA, 33 bp, Homo sapien
tcttaactgcttccccgagttgctgattatata

SEQ ID NO: 507891 - DNA, 33 bp, Homo sapien
taggttaggttctctcgaaacagatcctgagac

SEQ ID NO: 507892 - DNA, 33 bp, Homo sapien
taggttaggttctctctaaacagatcctgagac

SEQ ID NO: 507893 - DNA, 33 bp, Homo sapien
ccataataaaggataacaaaggaccagtcagtg

SEQ ID NO: 507894 - DNA, 33 bp, Homo sapien
ccataataaaggataataaaggaccagtcagtg

SEQ ID NO: 507895 - DNA, 33 bp, Homo sapien
agctccttgagagctacggctatgccttcctca

SEQ ID NO: 507896 - DNA, 33 bp, Homo sapien
agctccttgagagctagggctatgccttcctca

SEQ ID NO: 507897 - DNA, 33 bp, Homo sapien
tgctgtaatgaaccaacgtttggcattagggaa

SEQ ID NO: 507898 - DNA, 33 bp, Homo sapien
tgctgtaatgaaccaatgtttggcattagggaa

SEQ ID NO: 507899 - DNA, 33 bp, Homo sapien
ccttgcataagtaaacacgatcatatttagttt

SEQ ID NO: 507900 - DNA, 33 bp, Homo sapien
ccttgcataagtaaacgcgatcatatttagttt

SEQ ID NO: 507901 - DNA, 33 bp, Homo sapien
acatgaatttatttgaaggaggtcagcatttct

SEQ ID NO: 507902 - DNA, 33 bp, Homo sapien
acatgaatttatttgagggaggtcagcatttct

SEQ ID NO: 507903 - DNA, 33 bp, Homo sapien
ttgtgatctttctcaccggagttgtgaaaaagc

SEQ ID NO: 507904 - DNA, 33 bp, Homo sapien
ttgtgatctttctcactggagttgtgaaaaagc

SEQ ID NO: 507905 - DNA, 33 bp, Homo sapien
tggcttttatagaaaacataaaatgtcacttga

SEQ ID NO: 507906 - DNA, 33 bp, Homo sapien
tggcttttatagaaaagataaaatgtcacttga

SEQ ID NO: 507907 - DNA, 33 bp, Homo sapien
agccaggtgaaatccaaacatcagaatgtcttc

SEQ ID NO: 507908 - DNA, 33 bp, Homo sapien
agccaggtgaaatccagacatcagaatgtcttc

SEQ ID NO: 507909 - DNA, 33 bp, Homo sapien
gcaaagttgacaagacaaacagtggagaggtgg

SEQ ID NO: 507910 - DNA, 33 bp, Homo sapien
gcaaagttgacaagacgaacagtggagaggtgg

SEQ ID NO: 507911 - DNA, 33 bp, Homo sapien
tgcaggaactgggagacggctaagagagtggga

SEQ ID NO: 507912 - DNA, 33 bp, Homo sapien
tgcaggaactgggagatggctaagagagtggga

SEQ ID NO: 507913 - DNA, 33 bp, Homo sapien
aaaacatcagacgatgaaacttgatcgaaatct

SEQ ID NO: 507914 - DNA, 33 bp, Homo sapien
aaaacatcagacgatggaacttgatcgaaatct

SEQ ID NO: 507915 - DNA, 33 bp, Homo sapien
atctcctaacagttgcagattgttgaatttttt

SEQ ID NO: 507916 - DNA, 33 bp, Homo sapien
atctcctaacagttgcggattgttgaatttttt

SEQ ID NO: 507917 - DNA, 33 bp, Homo sapien
taggagcaaaggaataacataaaggctacaaaa

SEQ ID NO: 507918 - DNA, 33 bp, Homo sapien
taggagcaaaggaataccataaaggctacaaaa

SEQ ID NO: 507919 - DNA, 33 bp, Homo sapien
attttttcagaaaacaatcacccaagagtgcat

SEQ ID NO: 507920 - DNA, 33 bp, Homo sapien
attttttcagaaaacagtcacccaagagtgcat

SEQ ID NO: 507921 - DNA, 33 bp, Homo sapien
ttctctggagaactcaggaccaatactttataa

SEQ ID NO: 507922 - DNA, 33 bp, Homo sapien
ttctctggagaactcatgaccaatactttataa

SEQ ID NO: 507923 - DNA, 33 bp, Homo sapien
gagaacacgacatttacgagagaacataactga

SEQ ID NO: 507924 - DNA, 33 bp, Homo sapien
gagaacacgacatttatgagagaacataactga

SEQ ID NO: 507925 - DNA, 33 bp, Homo sapien
tgttctcttgtgtaagcagtaagcagcaaaaag

SEQ ID NO: 507926 - DNA, 33 bp, Homo sapien
tgttctcttgtgtaagtagtaagcagcaaaaag

SEQ ID NO: 507927 - DNA, 33 bp, Homo sapien
gttctttctaacacaaccatttactatgactaa

SEQ ID NO: 507928 - DNA, 33 bp, Homo sapien
gttctttctaacacaatcatttactatgactaa

SEQ ID NO: 507929 - DNA, 33 bp, Homo sapien
aatggcctagtacctgaactcgagtctatgccg

SEQ ID NO: 507930 - DNA, 33 bp, Homo sapien
aatggcctagtacctgcactcgagtctatgccg

SEQ ID NO: 507931 - DNA, 33 bp, Homo sapien
tgtaataaaattctgacgcagtctttcagtctt

SEQ ID NO: 507932 - DNA, 33 bp, Homo sapien
tgtaataaaattctgatgcagtctttcagtctt

SEQ ID NO: 507933 - DNA, 33 bp, Homo sapien
gattcagtcacactgaaggctctaaacggagaa

SEQ ID NO: 507934 - DNA, 33 bp, Homo sapien
gattcagtcacactgatggctctaaacggagaa

SEQ ID NO: 507935 - DNA, 33 bp, Homo sapien
ccttctctaaccaggacgaaagtggtttgcatg

SEQ ID NO: 507936 - DNA, 33 bp, Homo sapien
ccttctctaaccaggatgaaagtggtttgcatg

SEQ ID NO: 507937 - DNA, 33 bp, Homo sapien
gtaaagaaacccacaacagagtcatatcaatat

SEQ ID NO: 507938 - DNA, 33 bp, Homo sapien
gtaaagaaacccacaatagagtcatatcaatat

SEQ ID NO: 507939 - DNA, 33 bp, Homo sapien
tctaaaatgcaaattacgtgtagtcacttttct

SEQ ID NO: 507940 - DNA, 33 bp, Homo sapien
tctaaaatgcaaattatgtgtagtcacttttct

SEQ ID NO: 507941 - DNA, 33 bp, Homo sapien
tgccaaagcttggaaacgttatcagactgggtg

SEQ ID NO: 507942 - DNA, 33 bp, Homo sapien
tgccaaagcttggaaatgttatcagactgggtg

SEQ ID NO: 507943 - DNA, 33 bp, Homo sapien
ggacatggattcctcacagtagtggaagaagag

SEQ ID NO: 507944 - DNA, 33 bp, Homo sapien
ggacatggattcctcatagtagtggaagaagag

SEQ ID NO: 507945 - DNA, 33 bp, Homo sapien
agacacttattctagcactgcttttattttatt

SEQ ID NO: 507946 - DNA, 33 bp, Homo sapien
agacacttattctagccctgcttttattttatt

SEQ ID NO: 507947 - DNA, 33 bp, Homo sapien
aaggtcaggtagcaagcactagctttgtaacta

SEQ ID NO: 507948 - DNA, 33 bp, Homo sapien
aaggtcaggtagcaagtactagctttgtaacta

SEQ ID NO: 507949 - DNA, 33 bp, Homo sapien
tgtgtcagtagttaaaatagtctgagacagtgc

SEQ ID NO: 507950 - DNA, 33 bp, Homo sapien
tgtgtcagtagttaaagtagtctgagacagtgc

SEQ ID NO: 507951 - DNA, 33 bp, Homo sapien
ctccaccccagttatacaaatgtgcaagtatca

SEQ ID NO: 507952 - DNA, 33 bp, Homo sapien
ctccaccccagttatataaatgtgcaagtatca

SEQ ID NO: 507953 - DNA, 33 bp, Homo sapien
ggaagttcacagaatgacaaggagcccatgata

SEQ ID NO: 507954 - DNA, 33 bp, Homo sapien
ggaagttcacagaatgtcaaggagcccatgata

SEQ ID NO: 507955 - DNA, 33 bp, Homo sapien
aattgaactttaggaaagagagataatgcaatc

SEQ ID NO: 507956 - DNA, 33 bp, Homo sapien
aattgaactttaggaaggagagataatgcaatc

SEQ ID NO: 507957 - DNA, 33 bp, Homo sapien
aactcatgatagatgacgcttagaagaactgaa

SEQ ID NO: 507958 - DNA, 33 bp, Homo sapien
aactcatgatagatgatgcttagaagaactgaa

SEQ ID NO: 507959 - DNA, 33 bp, Homo sapien
tggaaactcgcatagaggaaaatgtaacccagg

SEQ ID NO: 507960 - DNA, 33 bp, Homo sapien
tggaaactcgcatagatgaaaatgtaacccagg

SEQ ID NO: 507961 - DNA, 33 bp, Homo sapien
cttacatttgcatacaagtcagagtcaaaaata

SEQ ID NO: 507962 - DNA, 33 bp, Homo sapien
cttacatttgcatacaggtcagagtcaaaaata

SEQ ID NO: 507963 - DNA, 33 bp, Homo sapien
accaggtataatttcaatcatgcatacagttgt

SEQ ID NO: 507964 - DNA, 33 bp, Homo sapien
accaggtataatttcagtcatgcatacagttgt

SEQ ID NO: 507965 - DNA, 33 bp, Homo sapien
aatactcaactctgacagatttttttaaactaa

SEQ ID NO: 507966 - DNA, 33 bp, Homo sapien
aatactcaactctgacggatttttttaaactaa

SEQ ID NO: 507967 - DNA, 33 bp, Homo sapien
atggagtttatgttacagagtcttcgtgaagat

SEQ ID NO: 507968 - DNA, 33 bp, Homo sapien
atggagtttatgttacggagtcttcgtgaagat

SEQ ID NO: 507969 - DNA, 33 bp, Homo sapien
aggaagcataaagccaacaatcaggtaactggg

SEQ ID NO: 507970 - DNA, 33 bp, Homo sapien
aggaagcataaagccagcaatcaggtaactggg

SEQ ID NO: 507971 - DNA, 33 bp, Homo sapien
atgttgacaacaggtaacaatgcttgtttttgt

SEQ ID NO: 507972 - DNA, 33 bp, Homo sapien
atgttgacaacaggtagcaatgcttgtttttgt

SEQ ID NO: 507973 - DNA, 33 bp, Homo sapien
gaagtaaaagtcatccaaataggaagagacgaa

SEQ ID NO: 507974 - DNA, 33 bp, Homo sapien
gaagtaaaagtcatccgaataggaagagacgaa

SEQ ID NO: 507975 - DNA, 33 bp, Homo sapien
gctcccttctgccttccacaactttggtattta

SEQ ID NO: 507976 - DNA, 33 bp, Homo sapien
gctcccttctgccttctacaactttggtattta

SEQ ID NO: 507977 - DNA, 33 bp, Homo sapien
ggaattgcttatctcgcactttctgtatggggt

SEQ ID NO: 507978 - DNA, 33 bp, Homo sapien
ggaattgcttatctcgtactttctgtatggggt

SEQ ID NO: 507979 - DNA, 33 bp, Homo sapien
ctatcctgatgaactccaaggttgtcagattta

SEQ ID NO: 507980 - DNA, 33 bp, Homo sapien
ctatcctgatgaactctaaggttgtcagattta

SEQ ID NO: 507981 - DNA, 33 bp, Homo sapien
aggttaatgcacaatcgaattttttccttcctg

SEQ ID NO: 507982 - DNA, 33 bp, Homo sapien
aggttaatgcacaatctaattttttccttcctg

SEQ ID NO: 507983 - DNA, 33 bp, Homo sapien
caatccaggtcagatacgcaggttgctgattag

SEQ ID NO: 507984 - DNA, 33 bp, Homo sapien
caatccaggtcagatatgcaggttgctgattag

SEQ ID NO: 507985 - DNA, 33 bp, Homo sapien
tactttggtttataggacatttgaagttgttcc

SEQ ID NO: 507986 - DNA, 33 bp, Homo sapien
tactttggtttatagggcatttgaagttgttcc

SEQ ID NO: 507987 - DNA, 33 bp, Homo sapien
tggtgacagcctaaggaagtattttctgtgaat

SEQ ID NO: 507988 - DNA, 33 bp, Homo sapien
tggtgacagcctaaggcagtattttctgtgaat

SEQ ID NO: 507989 - DNA, 33 bp, Homo sapien
ggacagtaaataagaaaaaaagaactggagcaa

SEQ ID NO: 507990 - DNA, 33 bp, Homo sapien
ggacagtaaataagaagaaaagaactggagcaa

SEQ ID NO: 507991 - DNA, 33 bp, Homo sapien
ggtccaaaaaatggcagcttaaggagtattcct

SEQ ID NO: 507992 - DNA, 33 bp, Homo sapien
ggtccaaaaaatggcatcttaaggagtattcct

SEQ ID NO: 507993 - DNA, 33 bp, Homo sapien
aagagatatgagacaacggaagaaaggtccaaa

SEQ ID NO: 507994 - DNA, 33 bp, Homo sapien
aagagatatgagacaatggaagaaaggtccaaa

SEQ ID NO: 507995 - DNA, 33 bp, Homo sapien
acttctcaaaactacaaatctctctcttggcat

SEQ ID NO: 507996 - DNA, 33 bp, Homo sapien
acttctcaaaactacagatctctctcttggcat

SEQ ID NO: 507997 - DNA, 33 bp, Homo sapien
aaaaatatcagtggtaagaattttcctttctag

SEQ ID NO: 507998 - DNA, 33 bp, Homo sapien
aaaaatatcagtggtaggaattttcctttctag

SEQ ID NO: 507999 - DNA, 33 bp, Homo sapien
tataaaagaggtaaacaacaacataatccactt

SEQ ID NO: 508000 - DNA, 33 bp, Homo sapien
tataaaagaggtaaacgacaacataatccactt

SEQ ID NO: 508001 - DNA, 33 bp, Homo sapien
tagtaactaaatggtaaaatgtaactattaata

SEQ ID NO: 508002 - DNA, 33 bp, Homo sapien
tagtaactaaatggtagaatgtaactattaata

SEQ ID NO: 508003 - DNA, 33 bp, Homo sapien
agctctatcatgagaaaagcactggaaggatgg

SEQ ID NO: 508004 - DNA, 33 bp, Homo sapien
agctctatcatgagaacagcactggaaggatgg

SEQ ID NO: 508005 - DNA, 33 bp, Homo sapien
tccagtagaactaaccgcagcttgctttgtcta

SEQ ID NO: 508006 - DNA, 33 bp, Homo sapien
tccagtagaactaacctcagcttgctttgtcta

SEQ ID NO: 508007 - DNA, 33 bp, Homo sapien
atcctcatgttttaaactggaaataatcaattt

SEQ ID NO: 508008 - DNA, 33 bp, Homo sapien
atcctcatgttttaaattggaaataatcaattt

SEQ ID NO: 508009 - DNA, 33 bp, Homo sapien
atagcccttttccatcacaaagaataactggaa

SEQ ID NO: 508010 - DNA, 33 bp, Homo sapien
atagcccttttccatcgcaaagaataactggaa

SEQ ID NO: 508011 - DNA, 33 bp, Homo sapien
aaagatacttcatacaaaatttatttgacatta

SEQ ID NO: 508012 - DNA, 33 bp, Homo sapien
aaagatacttcatacagaatttatttgacatta

SEQ ID NO: 508013 - DNA, 33 bp, Homo sapien
aacagcaaactatttgcatctaccattattcta

SEQ ID NO: 508014 - DNA, 33 bp, Homo sapien
aacagcaaactatttgtatctaccattattcta

SEQ ID NO: 508015 - DNA, 33 bp, Homo sapien
ttgtagtatatttcaaaatctggtagtatgatg

SEQ ID NO: 508016 - DNA, 33 bp, Homo sapien
ttgtagtatatttcaacatctggtagtatgatg

SEQ ID NO: 508017 - DNA, 33 bp, Homo sapien
gggaaatttcacgcctaaagccaaataaacatt

SEQ ID NO: 508018 - DNA, 33 bp, Homo sapien
gggaaatttcacgcctgaagccaaataaacatt

SEQ ID NO: 508019 - DNA, 33 bp, Homo sapien
tagaaattaatgaatcaatgtttatgcaactga

SEQ ID NO: 508020 - DNA, 33 bp, Homo sapien
tagaaattaatgaatcgatgtttatgcaactga

SEQ ID NO: 508021 - DNA, 33 bp, Homo sapien
gctcctgctgcttatccgacatttcatcttgga

SEQ ID NO: 508022 - DNA, 33 bp, Homo sapien
gctcctgctgcttatctgacatttcatcttgga

SEQ ID NO: 508023 - DNA, 33 bp, Homo sapien
atgcatgagcaatctcgctttagatcaactgag

SEQ ID NO: 508024 - DNA, 33 bp, Homo sapien
atgcatgagcaatctctctttagatcaactgag

SEQ ID NO: 508025 - DNA, 33 bp, Homo sapien
aaacacataataatgcactgacctcctacaact

SEQ ID NO: 508026 - DNA, 33 bp, Homo sapien
aaacacataataatgcgctgacctcctacaact

SEQ ID NO: 508027 - DNA, 33 bp, Homo sapien
atttttgtttttctcacataataccatagtaac

SEQ ID NO: 508028 - DNA, 33 bp, Homo sapien
atttttgtttttctcagataataccatagtaac

SEQ ID NO: 508029 - DNA, 33 bp, Homo sapien
ccacctaaatctaaacagtatcagcctaatggc

SEQ ID NO: 508030 - DNA, 33 bp, Homo sapien
ccacctaaatctaaacggtatcagcctaatggc

SEQ ID NO: 508031 - DNA, 33 bp, Homo sapien
gcaaggttccactgtacgacttcctctcctgtt

SEQ ID NO: 508032 - DNA, 33 bp, Homo sapien
gcaaggttccactgtatgacttcctctcctgtt

SEQ ID NO: 508033 - DNA, 33 bp, Homo sapien
cattctgttggcctgaatagctttattattatt

SEQ ID NO: 508034 - DNA, 33 bp, Homo sapien
cattctgttggcctgattagctttattattatt

SEQ ID NO: 508035 - DNA, 33 bp, Homo sapien
aggcaatttccagtaaacttcctacatacccat

SEQ ID NO: 508036 - DNA, 33 bp, Homo sapien
aggcaatttccagtaagcttcctacatacccat

SEQ ID NO: 508037 - DNA, 33 bp, Homo sapien
aactacagcccatgcactatagctagtcagaag

SEQ ID NO: 508038 - DNA, 33 bp, Homo sapien
aactacagcccatgcagtatagctagtcagaag

SEQ ID NO: 508039 - DNA, 33 bp, Homo sapien
tcaaggcagtgagctacgagtcactggaagtaa

SEQ ID NO: 508040 - DNA, 33 bp, Homo sapien
tcaaggcagtgagctatgagtcactggaagtaa

SEQ ID NO: 508041 - DNA, 33 bp, Homo sapien
agttaccgccactttggatacctaagctgccaa

SEQ ID NO: 508042 - DNA, 33 bp, Homo sapien
agttaccgccactttgtatacctaagctgccaa

SEQ ID NO: 508043 - DNA, 33 bp, Homo sapien
ttaagtaagagtctgaaaactttcaagttccca

SEQ ID NO: 508044 - DNA, 33 bp, Homo sapien
ttaagtaagagtctgacaactttcaagttccca

SEQ ID NO: 508045 - DNA, 33 bp, Homo sapien
gaaaataacaatggaggacttaatgccaaaaac

SEQ ID NO: 508046 - DNA, 33 bp, Homo sapien
gaaaataacaatggagtacttaatgccaaaaac

SEQ ID NO: 508047 - DNA, 33 bp, Homo sapien
gaaaatattagtaacaaatggcaatgtttctct

SEQ ID NO: 508048 - DNA, 33 bp, Homo sapien
gaaaatattagtaacagatggcaatgtttctct

SEQ ID NO: 508049 - DNA, 33 bp, Homo sapien
ataacaaaacagggtaaggaggatagaaaatac

SEQ ID NO: 508050 - DNA, 33 bp, Homo sapien
ataacaaaacagggtagggaggatagaaaatac

SEQ ID NO: 508051 - DNA, 33 bp, Homo sapien
gataatatagctgttacgtactctttcctactt

SEQ ID NO: 508052 - DNA, 33 bp, Homo sapien
gataatatagctgttatgtactctttcctactt

SEQ ID NO: 508053 - DNA, 33 bp, Homo sapien
gatgttataaatcaaacgcctatcttctgaatg

SEQ ID NO: 508054 - DNA, 33 bp, Homo sapien
gatgttataaatcaaatgcctatcttctgaatg

SEQ ID NO: 508055 - DNA, 33 bp, Homo sapien
ctaccatgacaccaccaaaggctttgtaccagc

SEQ ID NO: 508056 - DNA, 33 bp, Homo sapien
ctaccatgacaccaccgaaggctttgtaccagc

SEQ ID NO: 508057 - DNA, 33 bp, Homo sapien
tgatatctacacacagcatctgaaattgcaact

SEQ ID NO: 508058 - DNA, 33 bp, Homo sapien
tgatatctacacacaggatctgaaattgcaact

SEQ ID NO: 508059 - DNA, 33 bp, Homo sapien
tcgttcaagttcattacgggagacaaggaagac

SEQ ID NO: 508060 - DNA, 33 bp, Homo sapien
tcgttcaagttcattatgggagacaaggaagac

SEQ ID NO: 508061 - DNA, 33 bp, Homo sapien
caccgactgccgaactaaacaaaatgacaaaga

SEQ ID NO: 508062 - DNA, 33 bp, Homo sapien
caccgactgccgaactgaacaaaatgacaaaga

SEQ ID NO: 508063 - DNA, 33 bp, Homo sapien
ctctctctgcatagaaaaacttccacatagaaa

SEQ ID NO: 508064 - DNA, 33 bp, Homo sapien
ctctctctgcatagaagaacttccacatagaaa

SEQ ID NO: 508065 - DNA, 33 bp, Homo sapien
tcctccagcaatgtaaatctagcaattagcaca

SEQ ID NO: 508066 - DNA, 33 bp, Homo sapien
tcctccagcaatgtaagtctagcaattagcaca

SEQ ID NO: 508067 - DNA, 33 bp, Homo sapien
atagagaggaagcagacatactagttattcctt

SEQ ID NO: 508068 - DNA, 33 bp, Homo sapien
atagagaggaagcagatatactagttattcctt

SEQ ID NO: 508069 - DNA, 33 bp, Homo sapien
agcagcctgctttatgaaaagaatcaacccaat

SEQ ID NO: 508070 - DNA, 33 bp, Homo sapien
agcagcctgctttatggaaagaatcaacccaat

SEQ ID NO: 508071 - DNA, 33 bp, Homo sapien
ttgttaccgggttacaccgtgtagtggggaagc

SEQ ID NO: 508072 - DNA, 33 bp, Homo sapien
ttgttaccgggttacatcgtgtagtggggaagc

SEQ ID NO: 508073 - DNA, 33 bp, Homo sapien
gccaggctaattgccacgaaaaaatctcttcta

SEQ ID NO: 508074 - DNA, 33 bp, Homo sapien
gccaggctaattgccatgaaaaaatctcttcta

SEQ ID NO: 508075 - DNA, 33 bp, Homo sapien
aaaagtttattgtatacggcaaagggtagagga

SEQ ID NO: 508076 - DNA, 33 bp, Homo sapien
aaaagtttattgtatatggcaaagggtagagga

SEQ ID NO: 508077 - DNA, 33 bp, Homo sapien
aagactacaaatggcaaacaggtgtatgaatag

SEQ ID NO: 508078 - DNA, 33 bp, Homo sapien
aagactacaaatggcacacaggtgtatgaatag

SEQ ID NO: 508079 - DNA, 33 bp, Homo sapien
tcactttaagtccattcaaaaacagtcaatcta

SEQ ID NO: 508080 - DNA, 33 bp, Homo sapien
tcactttaagtccatttaaaaacagtcaatcta

SEQ ID NO: 508081 - DNA, 33 bp, Homo sapien
tagcatgcaaagacaacacaacaaaccaatata

SEQ ID NO: 508082 - DNA, 33 bp, Homo sapien
tagcatgcaaagacaatacaacaaaccaatata

SEQ ID NO: 508083 - DNA, 33 bp, Homo sapien
agagggaattgtgttacacagagggaataagtt

SEQ ID NO: 508084 - DNA, 33 bp, Homo sapien
agagggaattgtgttatacagagggaataagtt

SEQ ID NO: 508085 - DNA, 33 bp, Homo sapien
agatctttttcatataaactttcctggcagaca

SEQ ID NO: 508086 - DNA, 33 bp, Homo sapien
agatctttttcatatatactttcctggcagaca

SEQ ID NO: 508087 - DNA, 33 bp, Homo sapien
catacatgaagcaaaaatttcacaaataataat

SEQ ID NO: 508088 - DNA, 33 bp, Homo sapien
catacatgaagcaaaagtttcacaaataataat

SEQ ID NO: 508089 - DNA, 33 bp, Homo sapien
catgactggctcatggacatcattgatttgacc

SEQ ID NO: 508090 - DNA, 33 bp, Homo sapien
catgactggctcatgggcatcattgatttgacc

SEQ ID NO: 508091 - DNA, 33 bp, Homo sapien
tcataagaaagcttaaagtgtcaatattctaga

SEQ ID NO: 508092 - DNA, 33 bp, Homo sapien
tcataagaaagcttaaggtgtcaatattctaga

SEQ ID NO: 508093 - DNA, 33 bp, Homo sapien
tttaagccagtattcacctaaacttcataggaa

SEQ ID NO: 508094 - DNA, 33 bp, Homo sapien
tttaagccagtattcagctaaacttcataggaa

SEQ ID NO: 508095 - DNA, 33 bp, Homo sapien
taaaacaaaagcataaactgcaagaagtttacc

SEQ ID NO: 508096 - DNA, 33 bp, Homo sapien
taaaacaaaagcataatctgcaagaagtttacc

SEQ ID NO: 508097 - DNA, 33 bp, Homo sapien
aaggatagagagtgctaaatgagtttgaagaaa

SEQ ID NO: 508098 - DNA, 33 bp, Homo sapien
aaggatagagagtgcttaatgagtttgaagaaa

SEQ ID NO: 508099 - DNA, 33 bp, Homo sapien
caagtgacttatgtacaaagaaaacctgttgag

SEQ ID NO: 508100 - DNA, 33 bp, Homo sapien
caagtgacttatgtactaagaaaacctgttgag

SEQ ID NO: 508101 - DNA, 33 bp, Homo sapien
tgggcagacgtaacgacaggaacaacaggcatt

SEQ ID NO: 508102 - DNA, 33 bp, Homo sapien
tgggcagacgtaacgataggaacaacaggcatt

SEQ ID NO: 508103 - DNA, 33 bp, Homo sapien
agtcagccttgataacaatgatttacattccaa

SEQ ID NO: 508104 - DNA, 33 bp, Homo sapien
agtcagccttgataaccatgatttacattccaa

SEQ ID NO: 508105 - DNA, 33 bp, Homo sapien
ctgtatcaaataaaaacagaggcagggcgtaca

SEQ ID NO: 508106 - DNA, 33 bp, Homo sapien
ctgtatcaaataaaaagagaggcagggcgtaca

SEQ ID NO: 508107 - DNA, 33 bp, Homo sapien
aagataaaattcagtcacagtctagagggcaga

SEQ ID NO: 508108 - DNA, 33 bp, Homo sapien
aagataaaattcagtcgcagtctagagggcaga

SEQ ID NO: 508109 - DNA, 33 bp, Homo sapien
ttcataaacaagtctacatattcacaacaaagg

SEQ ID NO: 508110 - DNA, 33 bp, Homo sapien
ttcataaacaagtctatatattcacaacaaagg

SEQ ID NO: 508111 - DNA, 33 bp, Homo sapien
attgaagctttggaaacgaatgagaatgctaat

SEQ ID NO: 508112 - DNA, 33 bp, Homo sapien
attgaagctttggaaatgaatgagaatgctaat

SEQ ID NO: 508113 - DNA, 33 bp, Homo sapien
gctaatgcaagaatcaaatgttggaacaagaaa

SEQ ID NO: 508114 - DNA, 33 bp, Homo sapien
gctaatgcaagaatcagatgttggaacaagaaa

SEQ ID NO: 508115 - DNA, 33 bp, Homo sapien
ccacagctgaatttagcactctttaaagggagg

SEQ ID NO: 508116 - DNA, 33 bp, Homo sapien
ccacagctgaatttaggactctttaaagggagg

SEQ ID NO: 508117 - DNA, 33 bp, Homo sapien
ctaaaacagagttcaaaggaaatcctgctactt

SEQ ID NO: 508118 - DNA, 33 bp, Homo sapien
ctaaaacagagttcaatggaaatcctgctactt

SEQ ID NO: 508119 - DNA, 33 bp, Homo sapien
agaaaacatgtatccaaatgaaacaaggggtgg

SEQ ID NO: 508120 - DNA, 33 bp, Homo sapien
agaaaacatgtatccagatgaaacaaggggtgg

SEQ ID NO: 508121 - DNA, 33 bp, Homo sapien
cagacctgagaagaccactcaagtcaagggaca

SEQ ID NO: 508122 - DNA, 33 bp, Homo sapien
cagacctgagaagaccgctcaagtcaagggaca

SEQ ID NO: 508123 - DNA, 33 bp, Homo sapien
cagaacttaacacatactaacttttgattctta

SEQ ID NO: 508124 - DNA, 33 bp, Homo sapien
cagaacttaacacatattaacttttgattctta

SEQ ID NO: 508125 - DNA, 33 bp, Homo sapien
cggggtgacatacatacctacatcatagcactg

SEQ ID NO: 508126 - DNA, 33 bp, Homo sapien
cggggtgacatacatagctacatcatagcactg

SEQ ID NO: 508127 - DNA, 33 bp, Homo sapien
attcctgatgacttaaataagatgaatcaattt

SEQ ID NO: 508128 - DNA, 33 bp, Homo sapien
attcctgatgacttaagtaagatgaatcaattt

SEQ ID NO: 508129 - DNA, 33 bp, Homo sapien
cctcagttaaggataacgtaagtcatctacaga

SEQ ID NO: 508130 - DNA, 33 bp, Homo sapien
cctcagttaaggataatgtaagtcatctacaga

SEQ ID NO: 508131 - DNA, 33 bp, Homo sapien
tatataaaatgccaaaagtaaattattagaggt

SEQ ID NO: 508132 - DNA, 33 bp, Homo sapien
tatataaaatgccaaacgtaaattattagaggt

SEQ ID NO: 508133 - DNA, 33 bp, Homo sapien
caaatttctttagtaaatgattgctgcacaacc

SEQ ID NO: 508134 - DNA, 33 bp, Homo sapien
caaatttctttagtaagtgattgctgcacaacc

SEQ ID NO: 508135 - DNA, 33 bp, Homo sapien
accttacttgtcaacaaatgggagccaggagac

SEQ ID NO: 508136 - DNA, 33 bp, Homo sapien
accttacttgtcaacagatgggagccaggagac

SEQ ID NO: 508137 - DNA, 33 bp, Homo sapien
gttcactttcatctctcagaatacaggagaata

SEQ ID NO: 508138 - DNA, 33 bp, Homo sapien
gttcactttcatctctgagaatacaggagaata

SEQ ID NO: 508139 - DNA, 33 bp, Homo sapien
aaggttattccagatacagaaaataaattaatt

SEQ ID NO: 508140 - DNA, 33 bp, Homo sapien
aaggttattccagatagagaaaataaattaatt

SEQ ID NO: 508141 - DNA, 33 bp, Homo sapien
agaaataacagcattacgtgcaaagctagagga

SEQ ID NO: 508142 - DNA, 33 bp, Homo sapien
agaaataacagcattatgtgcaaagctagagga

SEQ ID NO: 508143 - DNA, 33 bp, Homo sapien
aggaagaagaatttcaagatgaatggcctactg

SEQ ID NO: 508144 - DNA, 33 bp, Homo sapien
aggaagaagaatttcaggatgaatggcctactg

SEQ ID NO: 508145 - DNA, 33 bp, Homo sapien
atatcttaggcactaaatagtctatatacttga

SEQ ID NO: 508146 - DNA, 33 bp, Homo sapien
atatcttaggcactaactagtctatatacttga

SEQ ID NO: 508147 - DNA, 33 bp, Homo sapien
tgtttcttaaattgcaataggacaccaagattt

SEQ ID NO: 508148 - DNA, 33 bp, Homo sapien
tgtttcttaaattgcagtaggacaccaagattt

SEQ ID NO: 508149 - DNA, 33 bp, Homo sapien
aaggatatggcactaaacaattaatgagaaacc

SEQ ID NO: 508150 - DNA, 33 bp, Homo sapien
aaggatatggcactaagcaattaatgagaaacc

SEQ ID NO: 508151 - DNA, 33 bp, Homo sapien
atactgaatgtcattccccaatgttggaagtgg

SEQ ID NO: 508152 - DNA, 33 bp, Homo sapien
atactgaatgtcattctccaatgttggaagtgg

SEQ ID NO: 508153 - DNA, 33 bp, Homo sapien
cagttaacaaatgtgacaaaccatggtagcagc

SEQ ID NO: 508154 - DNA, 33 bp, Homo sapien
cagttaacaaatgtgagaaaccatggtagcagc

SEQ ID NO: 508155 - DNA, 33 bp, Homo sapien
gcctcacttctcatcacgattaaccaaattttc

SEQ ID NO: 508156 - DNA, 33 bp, Homo sapien
gcctcacttctcatcatgattaaccaaattttc

SEQ ID NO: 508157 - DNA, 33 bp, Homo sapien
ccccctctcagtaaaacaaatctctgactacac

SEQ ID NO: 508158 - DNA, 33 bp, Homo sapien
ccccctctcagtaaaataaatctctgactacac

SEQ ID NO: 508159 - DNA, 33 bp, Homo sapien
gagtctgtgataggaaatatgtttttagtaatt

SEQ ID NO: 508160 - DNA, 33 bp, Homo sapien
gagtctgtgataggaagtatgtttttagtaatt

SEQ ID NO: 508161 - DNA, 33 bp, Homo sapien
gtcatcaggggcatgaataatatcttaccatag

SEQ ID NO: 508162 - DNA, 33 bp, Homo sapien
gtcatcaggggcatgactaatatcttaccatag

SEQ ID NO: 508163 - DNA, 33 bp, Homo sapien
ttcctttctgttgatgcagaacaaataacagat

SEQ ID NO: 508164 - DNA, 33 bp, Homo sapien
ttcctttctgttgatgtagaacaaataacagat

SEQ ID NO: 508165 - DNA, 33 bp, Homo sapien
tcaaacacaaactgaacagtaagtttcttgatt

SEQ ID NO: 508166 - DNA, 33 bp, Homo sapien
tcaaacacaaactgaatagtaagtttcttgatt

SEQ ID NO: 508167 - DNA, 33 bp, Homo sapien
ttactgaacaaaggcaccgacaattgtacctca

SEQ ID NO: 508168 - DNA, 33 bp, Homo sapien
ttactgaacaaaggcatcgacaattgtacctca

SEQ ID NO: 508169 - DNA, 33 bp, Homo sapien
aaaattcgattggccacgtagcctcacataatg

SEQ ID NO: 508170 - DNA, 33 bp, Homo sapien
aaaattcgattggccatgtagcctcacataatg

SEQ ID NO: 508171 - DNA, 33 bp, Homo sapien
atactgtcaaaacacaacattgatatgcacagc

SEQ ID NO: 508172 - DNA, 33 bp, Homo sapien
atactgtcaaaacacaccattgatatgcacagc

SEQ ID NO: 508173 - DNA, 33 bp, Homo sapien
ttttcatccaaccatacgctcaaacctggttct

SEQ ID NO: 508174 - DNA, 33 bp, Homo sapien
ttttcatccaaccatatgctcaaacctggttct

SEQ ID NO: 508175 - DNA, 33 bp, Homo sapien
aagtcttcttggatcccatgatattttccctgc

SEQ ID NO: 508176 - DNA, 33 bp, Homo sapien
aagtcttcttggatcctatgatattttccctgc

SEQ ID NO: 508177 - DNA, 33 bp, Homo sapien
aaagccaagaaagaagaaaaatcaggtttgaat

SEQ ID NO: 508178 - DNA, 33 bp, Homo sapien
aaagccaagaaagaagcaaaatcaggtttgaat

SEQ ID NO: 508179 - DNA, 33 bp, Homo sapien
taagaatcacagagagacggagtaatcagaccg

SEQ ID NO: 508180 - DNA, 33 bp, Homo sapien
taagaatcacagagaggcggagtaatcagaccg

SEQ ID NO: 508181 - DNA, 33 bp, Homo sapien
tctagtaactaccggaagacagtaatgactact

SEQ ID NO: 508182 - DNA, 33 bp, Homo sapien
tctagtaactaccggaggacagtaatgactact

SEQ ID NO: 508183 - DNA, 33 bp, Homo sapien
cacaattagagcaatacgtatggttgttgagtg

SEQ ID NO: 508184 - DNA, 33 bp, Homo sapien
cacaattagagcaatatgtatggttgttgagtg

SEQ ID NO: 508185 - DNA, 33 bp, Homo sapien
gccagcttcaaagccacctaacctcactacacc

SEQ ID NO: 508186 - DNA, 33 bp, Homo sapien
gccagcttcaaagccatctaacctcactacacc

SEQ ID NO: 508187 - DNA, 33 bp, Homo sapien
tgcagaatatgcataacgaaaaagtacatatat

SEQ ID NO: 508188 - DNA, 33 bp, Homo sapien
tgcagaatatgcataaggaaaaagtacatatat

SEQ ID NO: 508189 - DNA, 33 bp, Homo sapien
acccattgattagctacaggttttgatttctcc

SEQ ID NO: 508190 - DNA, 33 bp, Homo sapien
acccattgattagctataggttttgatttctcc

SEQ ID NO: 508191 - DNA, 33 bp, Homo sapien
atgatgaatttcaagacgctcatgttgattttt

SEQ ID NO: 508192 - DNA, 33 bp, Homo sapien
atgatgaatttcaagatgctcatgttgattttt

SEQ ID NO: 508193 - DNA, 33 bp, Homo sapien
gatttggggtagatgcactaaataaatcaaatg

SEQ ID NO: 508194 - DNA, 33 bp, Homo sapien
gatttggggtagatgctctaaataaatcaaatg

SEQ ID NO: 508195 - DNA, 33 bp, Homo sapien
caaaacagtatgtgaacatgcctactttttttg

SEQ ID NO: 508196 - DNA, 33 bp, Homo sapien
caaaacagtatgtgaatatgcctactttttttg

SEQ ID NO: 508197 - DNA, 33 bp, Homo sapien
ccatgtgacaatgtcaactaagctcctggttta

SEQ ID NO: 508198 - DNA, 33 bp, Homo sapien
ccatgtgacaatgtcagctaagctcctggttta

SEQ ID NO: 508199 - DNA, 33 bp, Homo sapien
attttcaatatgcttccattgctaacatatttc

SEQ ID NO: 508200 - DNA, 33 bp, Homo sapien
attttcaatatgcttctattgctaacatatttc

SEQ ID NO: 508201 - DNA, 33 bp, Homo sapien
ctatgacagatggaaacctaggctcctctccat

SEQ ID NO: 508202 - DNA, 33 bp, Homo sapien
ctatgacagatggaaagctaggctcctctccat

SEQ ID NO: 508203 - DNA, 33 bp, Homo sapien
ggttctctctacttcacctttagctcctgcaac

SEQ ID NO: 508204 - DNA, 33 bp, Homo sapien
ggttctctctacttcagctttagctcctgcaac

SEQ ID NO: 508205 - DNA, 33 bp, Homo sapien
gattcttctaaatgtacggtcaatcacaggaag

SEQ ID NO: 508206 - DNA, 33 bp, Homo sapien
gattcttctaaatgtatggtcaatcacaggaag

SEQ ID NO: 508207 - DNA, 33 bp, Homo sapien
gcttactctgagagagcctccattaatatcatc

SEQ ID NO: 508208 - DNA, 33 bp, Homo sapien
gcttactctgagagaggctccattaatatcatc

SEQ ID NO: 508209 - DNA, 33 bp, Homo sapien
aaagataccatacagtaaagtagcttgtccaca

SEQ ID NO: 508210 - DNA, 33 bp, Homo sapien
aaagataccatacagtcaagtagcttgtccaca

SEQ ID NO: 508211 - DNA, 33 bp, Homo sapien
tgcaaatcgttttaaaattcacttcatgttgaa

SEQ ID NO: 508212 - DNA, 33 bp, Homo sapien
tgcaaatcgttttaaacttcacttcatgttgaa

SEQ ID NO: 508213 - DNA, 33 bp, Homo sapien
ggtttgactaacctcaagccttattttttgcat

SEQ ID NO: 508214 - DNA, 33 bp, Homo sapien
ggtttgactaacctcaggccttattttttgcat

SEQ ID NO: 508215 - DNA, 33 bp, Homo sapien
ctgggccctatcacacagattttatgagaattg

SEQ ID NO: 508216 - DNA, 33 bp, Homo sapien
ctgggccctatcacacggattttatgagaattg

SEQ ID NO: 508217 - DNA, 33 bp, Homo sapien
tgtatgccatatgtgactatgaatgtgtatgaa

SEQ ID NO: 508218 - DNA, 33 bp, Homo sapien
tgtatgccatatgtgagtatgaatgtgtatgaa

SEQ ID NO: 508219 - DNA, 33 bp, Homo sapien
ttatggctgtataacaatccatgatgtattttc

SEQ ID NO: 508220 - DNA, 33 bp, Homo sapien
ttatggctgtataacattccatgatgtattttc

SEQ ID NO: 508221 - DNA, 33 bp, Homo sapien
attaacatattgcatcaaatctgagataccatc

SEQ ID NO: 508222 - DNA, 33 bp, Homo sapien
attaacatattgcatccaatctgagataccatc

SEQ ID NO: 508223 - DNA, 33 bp, Homo sapien
cagactgtagaccaaacggaatgtcattaattt

SEQ ID NO: 508224 - DNA, 33 bp, Homo sapien
cagactgtagaccaaatggaatgtcattaattt

SEQ ID NO: 508225 - DNA, 33 bp, Homo sapien
gagagttagagtggggcaaaatatagcaagata

SEQ ID NO: 508226 - DNA, 33 bp, Homo sapien
gagagttagagtggggtaaaatatagcaagata

SEQ ID NO: 508227 - DNA, 33 bp, Homo sapien
agagtccaggtaacaaatacataccgaacagtt

SEQ ID NO: 508228 - DNA, 33 bp, Homo sapien
agagtccaggtaacaattacataccgaacagtt

SEQ ID NO: 508229 - DNA, 33 bp, Homo sapien
cacctatgaggaaatgccaatcagagaaacggt

SEQ ID NO: 508230 - DNA, 33 bp, Homo sapien
cacctatgaggaaatgtcaatcagagaaacggt

SEQ ID NO: 508231 - DNA, 33 bp, Homo sapien
tcatattatttcctgacctgtatagtttccact

SEQ ID NO: 508232 - DNA, 33 bp, Homo sapien
tcatattatttcctgatctgtatagtttccact

SEQ ID NO: 508233 - DNA, 33 bp, Homo sapien
agtgttatctcacttcaacttcaccaacaaaca

SEQ ID NO: 508234 - DNA, 33 bp, Homo sapien
agtgttatctcacttcgacttcaccaacaaaca

SEQ ID NO: 508235 - DNA, 33 bp, Homo sapien
acttttaaataattacccaaatgatgatacaaa

SEQ ID NO: 508236 - DNA, 33 bp, Homo sapien
acttttaaataattactcaaatgatgatacaaa

SEQ ID NO: 508237 - DNA, 33 bp, Homo sapien
tatttacctttaataactctgattggccaaccc

SEQ ID NO: 508238 - DNA, 33 bp, Homo sapien
tatttacctttaataattctgattggccaaccc

SEQ ID NO: 508239 - DNA, 33 bp, Homo sapien
gcaaaacttcgtagtacagtcatgaagaaatag

SEQ ID NO: 508240 - DNA, 33 bp, Homo sapien
gcaaaacttcgtagtagagtcatgaagaaatag

SEQ ID NO: 508241 - DNA, 33 bp, Homo sapien
aattttttcagattaaatgttgtttattgatct

SEQ ID NO: 508242 - DNA, 33 bp, Homo sapien
aattttttcagattaactgttgtttattgatct

SEQ ID NO: 508243 - DNA, 33 bp, Homo sapien
gacaaaaccaaagttacgtaggtgcttctacaa

SEQ ID NO: 508244 - DNA, 33 bp, Homo sapien
gacaaaaccaaagttatgtaggtgcttctacaa

SEQ ID NO: 508245 - DNA, 33 bp, Homo sapien
ttgagagatgggagggacaaaaaaaggcttcag

SEQ ID NO: 508246 - DNA, 33 bp, Homo sapien
ttgagagatgggagggtcaaaaaaaggcttcag

SEQ ID NO: 508247 - DNA, 33 bp, Homo sapien
cttactaatctcactcaactgaaattctgtgtc

SEQ ID NO: 508248 - DNA, 33 bp, Homo sapien
cttactaatctcactcgactgaaattctgtgtc

SEQ ID NO: 508249 - DNA, 33 bp, Homo sapien
ttgtttagtttgcaccattgttcctgttgttgg

SEQ ID NO: 508250 - DNA, 33 bp, Homo sapien
ttgtttagtttgcaccgttgttcctgttgttgg

SEQ ID NO: 508251 - DNA, 33 bp, Homo sapien
atttcacgtaaatatacggtttattagagcagt

SEQ ID NO: 508252 - DNA, 33 bp, Homo sapien
atttcacgtaaatatatggtttattagagcagt

SEQ ID NO: 508253 - DNA, 33 bp, Homo sapien
attgttaatgagagagaattgcttgagctcggg

SEQ ID NO: 508254 - DNA, 33 bp, Homo sapien
attgttaatgagagaggattgcttgagctcggg

SEQ ID NO: 508255 - DNA, 33 bp, Homo sapien
taaaaaggaggaaagactctaaaattgatgaga

SEQ ID NO: 508256 - DNA, 33 bp, Homo sapien
taaaaaggaggaaagattctaaaattgatgaga

SEQ ID NO: 508257 - DNA, 33 bp, Homo sapien
aagtagtggtggcagacatagtgagcaagcatt

SEQ ID NO: 508258 - DNA, 33 bp, Homo sapien
aagtagtggtggcagatatagtgagcaagcatt

SEQ ID NO: 508259 - DNA, 33 bp, Homo sapien
aatttaggtcccaaaacgtgtgttgtgtcttgg

SEQ ID NO: 508260 - DNA, 33 bp, Homo sapien
aatttaggtcccaaaatgtgtgttgtgtcttgg

SEQ ID NO: 508261 - DNA, 33 bp, Homo sapien
ctggtctgaactgacaaactaaaaatggaaaaa

SEQ ID NO: 508262 - DNA, 33 bp, Homo sapien
ctggtctgaactgacacactaaaaatggaaaaa

SEQ ID NO: 508263 - DNA, 33 bp, Homo sapien
acgcgggcctggtttacggcaggtctgcaggat

SEQ ID NO: 508264 - DNA, 33 bp, Homo sapien
acgcgggcctggtttatggcaggtctgcaggat

SEQ ID NO: 508265 - DNA, 33 bp, Homo sapien
gcactagtgacttgacagatggtattcttggtt

SEQ ID NO: 508266 - DNA, 33 bp, Homo sapien
gcactagtgacttgacggatggtattcttggtt

SEQ ID NO: 508267 - DNA, 33 bp, Homo sapien
ctcaaagtaactacaccgcacaaatattttggt

SEQ ID NO: 508268 - DNA, 33 bp, Homo sapien
ctcaaagtaactacactgcacaaatattttggt

SEQ ID NO: 508269 - DNA, 33 bp, Homo sapien
actttaagtagaatcacgtagcacagcaaggga

SEQ ID NO: 508270 - DNA, 33 bp, Homo sapien
actttaagtagaatcatgtagcacagcaaggga

SEQ ID NO: 508271 - DNA, 33 bp, Homo sapien
caagttagcgttgtcaaatgccatcttttctaa

SEQ ID NO: 508272 - DNA, 33 bp, Homo sapien
caagttagcgttgtcagatgccatcttttctaa

SEQ ID NO: 508273 - DNA, 33 bp, Homo sapien
gcatagcggcactcataatagtctctgaaggct

SEQ ID NO: 508274 - DNA, 33 bp, Homo sapien
gcatagcggcactcatgatagtctctgaaggct

SEQ ID NO: 508275 - DNA, 33 bp, Homo sapien
ttctcccattggactacgctgtctatgtgtaac

SEQ ID NO: 508276 - DNA, 33 bp, Homo sapien
ttctcccattggactatgctgtctatgtgtaac

SEQ ID NO: 508277 - DNA, 33 bp, Homo sapien
ctgttgtagtaattcaaaagagaaatgatgagt

SEQ ID NO: 508278 - DNA, 33 bp, Homo sapien
ctgttgtagtaattcagaagagaaatgatgagt

SEQ ID NO: 508279 - DNA, 33 bp, Homo sapien
tattttatattggaaaacaattctatgctgaag

SEQ ID NO: 508280 - DNA, 33 bp, Homo sapien
tattttatattggaaagcaattctatgctgaag

SEQ ID NO: 508281 - DNA, 33 bp, Homo sapien
aataagagaagtcttcaaattggtttcttgtgt

SEQ ID NO: 508282 - DNA, 33 bp, Homo sapien
aataagagaagtcttccaattggtttcttgtgt

SEQ ID NO: 508283 - DNA, 33 bp, Homo sapien
attattattacttttacaatgggaagtcaattt

SEQ ID NO: 508284 - DNA, 33 bp, Homo sapien
attattattacttttagaatgggaagtcaattt

SEQ ID NO: 508285 - DNA, 33 bp, Homo sapien
gcaaaaatagtacatacaccgtctgatgtgggt

SEQ ID NO: 508286 - DNA, 33 bp, Homo sapien
gcaaaaatagtacatataccgtctgatgtgggt

SEQ ID NO: 508287 - DNA, 33 bp, Homo sapien
caataaaggaagaacacgagtgcaaatgagagc

SEQ ID NO: 508288 - DNA, 33 bp, Homo sapien
caataaaggaagaacatgagtgcaaatgagagc

SEQ ID NO: 508289 - DNA, 33 bp, Homo sapien
attttcagcactttccaattgatttaggtatgc

SEQ ID NO: 508290 - DNA, 33 bp, Homo sapien
attttcagcactttccgattgatttaggtatgc

SEQ ID NO: 508291 - DNA, 33 bp, Homo sapien
ttcaaagttactttgtaaagcaggaacagttga

SEQ ID NO: 508292 - DNA, 33 bp, Homo sapien
ttcaaagttactttgtgaagcaggaacagttga

SEQ ID NO: 508293 - DNA, 33 bp, Homo sapien
tacattttgttgtcagaattaaagcagaggaaa

SEQ ID NO: 508294 - DNA, 33 bp, Homo sapien
tacattttgttgtcaggattaaagcagaggaaa

SEQ ID NO: 508295 - DNA, 33 bp, Homo sapien
taaaagtttacaattccaacgtgatgaagcagc

SEQ ID NO: 508296 - DNA, 33 bp, Homo sapien
taaaagtttacaattctaacgtgatgaagcagc

SEQ ID NO: 508297 - DNA, 33 bp, Homo sapien
catttgcatcataaaaaactctagtggttcaaa

SEQ ID NO: 508298 - DNA, 33 bp, Homo sapien
catttgcatcataaaagactctagtggttcaaa

SEQ ID NO: 508299 - DNA, 33 bp, Homo sapien
ttgctttaccactgatcagatctgctaacaaca

SEQ ID NO: 508300 - DNA, 33 bp, Homo sapien
ttgctttaccactgattagatctgctaacaaca

SEQ ID NO: 508301 - DNA, 33 bp, Homo sapien
cttccacaatcatctaaatcaagaagaaaacaa

SEQ ID NO: 508302 - DNA, 33 bp, Homo sapien
cttccacaatcatctatatcaagaagaaaacaa

SEQ ID NO: 508303 - DNA, 33 bp, Homo sapien
gagcgtgcgtcactgaagccgagaggagattgt

SEQ ID NO: 508304 - DNA, 33 bp, Homo sapien
gagcgtgcgtcactgaggccgagaggagattgt

SEQ ID NO: 508305 - DNA, 33 bp, Homo sapien
cagctggtaggccatactatcataataaccaac

SEQ ID NO: 508306 - DNA, 33 bp, Homo sapien
cagctggtaggccatattatcataataaccaac

SEQ ID NO: 508307 - DNA, 33 bp, Homo sapien
aagcacactgggcagaagtcatgtgtgccccca

SEQ ID NO: 508308 - DNA, 33 bp, Homo sapien
aagcacactgggcagaggtcatgtgtgccccca

SEQ ID NO: 508309 - DNA, 33 bp, Homo sapien
tcctataggcaaacaaatattgtcctctagtct

SEQ ID NO: 508310 - DNA, 33 bp, Homo sapien
tcctataggcaaacaagtattgtcctctagtct

SEQ ID NO: 508311 - DNA, 33 bp, Homo sapien
tagtgacaaggagtgaaatgatggtgtcttgga

SEQ ID NO: 508312 - DNA, 33 bp, Homo sapien
tagtgacaaggagtgagatgatggtgtcttgga

SEQ ID NO: 508313 - DNA, 33 bp, Homo sapien
gcatgatatggaaaaacctttgctgatggttat

SEQ ID NO: 508314 - DNA, 33 bp, Homo sapien
gcatgatatggaaaaatctttgctgatggttat

SEQ ID NO: 508315 - DNA, 33 bp, Homo sapien
gatttctggtgcaacccctgtgatttgtagatg

SEQ ID NO: 508316 - DNA, 33 bp, Homo sapien
gatttctggtgcaacctctgtgatttgtagatg

SEQ ID NO: 508317 - DNA, 33 bp, Homo sapien
ctgtggtttaagagaaagttcctccaaacctat

SEQ ID NO: 508318 - DNA, 33 bp, Homo sapien
ctgtggtttaagagaatgttcctccaaacctat

SEQ ID NO: 508319 - DNA, 33 bp, Homo sapien
ccacaaggggtcagcaagtacaactggccacaa

SEQ ID NO: 508320 - DNA, 33 bp, Homo sapien
ccacaaggggtcagcaggtacaactggccacaa

SEQ ID NO: 508321 - DNA, 33 bp, Homo sapien
ttcaaatggttctctgaataattaggagcaggt

SEQ ID NO: 508322 - DNA, 33 bp, Homo sapien
ttcaaatggttctctggataattaggagcaggt

SEQ ID NO: 508323 - DNA, 33 bp, Homo sapien
catgtgaaatagtcaacccaaagcatttgctga

SEQ ID NO: 508324 - DNA, 33 bp, Homo sapien
catgtgaaatagtcaatccaaagcatttgctga

SEQ ID NO: 508325 - DNA, 33 bp, Homo sapien
aataatggaataagtcaccttggatatactaaa

SEQ ID NO: 508326 - DNA, 33 bp, Homo sapien
aataatggaataagtcgccttggatatactaaa

SEQ ID NO: 508327 - DNA, 33 bp, Homo sapien
tcctgcagtggtttaagtcatctacacactttg

SEQ ID NO: 508328 - DNA, 33 bp, Homo sapien
tcctgcagtggtttaattcatctacacactttg

SEQ ID NO: 508329 - DNA, 33 bp, Homo sapien
gctttgggacataggactatagtttgcaaatct

SEQ ID NO: 508330 - DNA, 33 bp, Homo sapien
gctttgggacataggattatagtttgcaaatct

SEQ ID NO: 508331 - DNA, 33 bp, Homo sapien
atacatgtaaggtatacgctggttcagcctaaa

SEQ ID NO: 508332 - DNA, 33 bp, Homo sapien
atacatgtaaggtatatgctggttcagcctaaa

SEQ ID NO: 508333 - DNA, 33 bp, Homo sapien
tgtgttttcagttgcacgcacaattgctgtatc

SEQ ID NO: 508334 - DNA, 33 bp, Homo sapien
tgtgttttcagttgcaggcacaattgctgtatc

SEQ ID NO: 508335 - DNA, 33 bp, Homo sapien
agtatctggaatctacaaggatctcaaacatat

SEQ ID NO: 508336 - DNA, 33 bp, Homo sapien
agtatctggaatctacgaggatctcaaacatat

SEQ ID NO: 508337 - DNA, 33 bp, Homo sapien
catatgtgagccaaagacctagaatacgtcatt

SEQ ID NO: 508338 - DNA, 33 bp, Homo sapien
catatgtgagccaaagtcctagaatacgtcatt

SEQ ID NO: 508339 - DNA, 33 bp, Homo sapien
acagcaaagttgacaacctgtaggcttttccta

SEQ ID NO: 508340 - DNA, 33 bp, Homo sapien
acagcaaagttgacaatctgtaggcttttccta

SEQ ID NO: 508341 - DNA, 33 bp, Homo sapien
gacatagatttaaagaagttttgcaataggaaa

SEQ ID NO: 508342 - DNA, 33 bp, Homo sapien
gacatagatttaaagacgttttgcaataggaaa

SEQ ID NO: 508343 - DNA, 33 bp, Homo sapien
atgtacaatgattacaaagatgtaagcttcaca

SEQ ID NO: 508344 - DNA, 33 bp, Homo sapien
atgtacaatgattacacagatgtaagcttcaca

SEQ ID NO: 508345 - DNA, 33 bp, Homo sapien
tggaggcgtaagaaaacagccagggcaggcatg

SEQ ID NO: 508346 - DNA, 33 bp, Homo sapien
tggaggcgtaagaaaatagccagggcaggcatg

SEQ ID NO: 508347 - DNA, 33 bp, Homo sapien
taaagtgctgagatcaaaagttttgaaactgga

SEQ ID NO: 508348 - DNA, 33 bp, Homo sapien
taaagtgctgagatcagaagttttgaaactgga

SEQ ID NO: 508349 - DNA, 33 bp, Homo sapien
gcttggctatttctacacaaatcttggtaaaat

SEQ ID NO: 508350 - DNA, 33 bp, Homo sapien
gcttggctatttctacgcaaatcttggtaaaat

SEQ ID NO: 508351 - DNA, 33 bp, Homo sapien
atgactgtctttcaacaatttactaattcaacc

SEQ ID NO: 508352 - DNA, 33 bp, Homo sapien
atgactgtctttcaaccatttactaattcaacc

SEQ ID NO: 508353 - DNA, 33 bp, Homo sapien
aggtgagctctcctgcgaagggcatgtatgggt

SEQ ID NO: 508354 - DNA, 33 bp, Homo sapien
aggtgagctctcctgctaagggcatgtatgggt

SEQ ID NO: 508355 - DNA, 33 bp, Homo sapien
agaatcatgttgactacaagagcaaggaagatt

SEQ ID NO: 508356 - DNA, 33 bp, Homo sapien
agaatcatgttgactagaagagcaaggaagatt

SEQ ID NO: 508357 - DNA, 33 bp, Homo sapien
acaaaaatcaactccacatggattagcaactta

SEQ ID NO: 508358 - DNA, 33 bp, Homo sapien
acaaaaatcaactccagatggattagcaactta

SEQ ID NO: 508359 - DNA, 33 bp, Homo sapien
aacagtatatcatgaccagtgtagatttatgtg

SEQ ID NO: 508360 - DNA, 33 bp, Homo sapien
aacagtatatcatgactagtgtagatttatgtg

SEQ ID NO: 508361 - DNA, 33 bp, Homo sapien
gattgttctgcattaacaaatcatttttcaaat

SEQ ID NO: 508362 - DNA, 33 bp, Homo sapien
gattgttctgcattaagaaatcatttttcaaat

SEQ ID NO: 508363 - DNA, 33 bp, Homo sapien
gccttttatatagcaccgagctctcaaccgtgg

SEQ ID NO: 508364 - DNA, 33 bp, Homo sapien
gccttttatatagcactgagctctcaaccgtgg

SEQ ID NO: 508365 - DNA, 33 bp, Homo sapien
aaattactaacaccaaaagtaggtatccaagaa

SEQ ID NO: 508366 - DNA, 33 bp, Homo sapien
aaattactaacaccaagagtaggtatccaagaa

SEQ ID NO: 508367 - DNA, 33 bp, Homo sapien
ttttcagttgtccagaatatcatctttacaaaa

SEQ ID NO: 508368 - DNA, 33 bp, Homo sapien
ttttcagttgtccagattatcatctttacaaaa

SEQ ID NO: 508369 - DNA, 33 bp, Homo sapien
tcaggccttggagaaaaagcttgaggtaggtat

SEQ ID NO: 508370 - DNA, 33 bp, Homo sapien
tcaggccttggagaaagagcttgaggtaggtat

SEQ ID NO: 508371 - DNA, 33 bp, Homo sapien
gtatagtgtctggagagacaatcttcaaaattc

SEQ ID NO: 508372 - DNA, 33 bp, Homo sapien
gtatagtgtctggagatacaatcttcaaaattc

SEQ ID NO: 508373 - DNA, 33 bp, Homo sapien
cgaagccgagattaagaaagaaaatgtatatga

SEQ ID NO: 508374 - DNA, 33 bp, Homo sapien
cgaagccgagattaagtaagaaaatgtatatga

SEQ ID NO: 508375 - DNA, 33 bp, Homo sapien
tgtgtgagtagcattcgcaatgaaatgtagtcc

SEQ ID NO: 508376 - DNA, 33 bp, Homo sapien
tgtgtgagtagcattctcaatgaaatgtagtcc

SEQ ID NO: 508377 - DNA, 33 bp, Homo sapien
aatattacattcaatcaacactgacatattaaa

SEQ ID NO: 508378 - DNA, 33 bp, Homo sapien
aatattacattcaatcgacactgacatattaaa

SEQ ID NO: 508379 - DNA, 33 bp, Homo sapien
ttgtgctctaacacctaacaaaacggctggggc

SEQ ID NO: 508380 - DNA, 33 bp, Homo sapien
ttgtgctctaacacctgacaaaacggctggggc

SEQ ID NO: 508381 - DNA, 33 bp, Homo sapien
caaacaaatactaagactcagggtacaaaagga

SEQ ID NO: 508382 - DNA, 33 bp, Homo sapien
caaacaaatactaagagtcagggtacaaaagga

SEQ ID NO: 508383 - DNA, 33 bp, Homo sapien
taaaacaaggattgccaataaagaggtttcccc

SEQ ID NO: 508384 - DNA, 33 bp, Homo sapien
taaaacaaggattgccgataaagaggtttcccc

SEQ ID NO: 508385 - DNA, 33 bp, Homo sapien
tgagctgaaaggactgaaggcacttgacattgt

SEQ ID NO: 508386 - DNA, 33 bp, Homo sapien
tgagctgaaaggactggaggcacttgacattgt

SEQ ID NO: 508387 - DNA, 33 bp, Homo sapien
gttttcctggctgacactgatgctagtagatgt

SEQ ID NO: 508388 - DNA, 33 bp, Homo sapien
gttttcctggctgacattgatgctagtagatgt

SEQ ID NO: 508389 - DNA, 33 bp, Homo sapien
tgggaatggcaaaccacgttcctgatcaagttt

SEQ ID NO: 508390 - DNA, 33 bp, Homo sapien
tgggaatggcaaaccatgttcctgatcaagttt

SEQ ID NO: 508391 - DNA, 33 bp, Homo sapien
ctattcccagttcttaaggcagtctgaaccctg

SEQ ID NO: 508392 - DNA, 33 bp, Homo sapien
ctattcccagttcttatggcagtctgaaccctg

SEQ ID NO: 508393 - DNA, 33 bp, Homo sapien
ttcattaccaactacccatagctacaaattcaa

SEQ ID NO: 508394 - DNA, 33 bp, Homo sapien
ttcattaccaactacctatagctacaaattcaa

SEQ ID NO: 508395 - DNA, 33 bp, Homo sapien
ctccactgacagataacggaagttgaccatttt

SEQ ID NO: 508396 - DNA, 33 bp, Homo sapien
ctccactgacagataatggaagttgaccatttt

SEQ ID NO: 508397 - DNA, 33 bp, Homo sapien
gcttaaatttgagctacgtttttcagtgcaaaa

SEQ ID NO: 508398 - DNA, 33 bp, Homo sapien
gcttaaatttgagctatgtttttcagtgcaaaa

SEQ ID NO: 508399 - DNA, 33 bp, Homo sapien
aattaacaagtggacactgaatgaggaataaga

SEQ ID NO: 508400 - DNA, 33 bp, Homo sapien
aattaacaagtggacattgaatgaggaataaga

SEQ ID NO: 508401 - DNA, 33 bp, Homo sapien
attctcactactctgcaatgaatgcctcagaat

SEQ ID NO: 508402 - DNA, 33 bp, Homo sapien
attctcactactctgcgatgaatgcctcagaat

SEQ ID NO: 508403 - DNA, 33 bp, Homo sapien
ctcacacaaaatttaaaattcgtatgttaattc

SEQ ID NO: 508404 - DNA, 33 bp, Homo sapien
ctcacacaaaatttaatattcgtatgttaattc

SEQ ID NO: 508405 - DNA, 33 bp, Homo sapien
agccagttatccttaacagggcagagatacagc

SEQ ID NO: 508406 - DNA, 33 bp, Homo sapien
agccagttatccttaatagggcagagatacagc

SEQ ID NO: 508407 - DNA, 33 bp, Homo sapien
aaatacctcaaaaaggccagaactaaggataat

SEQ ID NO: 508408 - DNA, 33 bp, Homo sapien
aaatacctcaaaaaggtcagaactaaggataat

SEQ ID NO: 508409 - DNA, 33 bp, Homo sapien
taacttagtttcacaaagacagagaccttgtct
